United States Patent Application Publication US 2026/0167953 A1 - sequence listing, part 2

SEQ ID NO: 16779 - DNA, 80 bp, synthetic construct
  source 1..80: mol_type = other DNA
cctaactttttgtcttctctttattctggtgcataactcaggcataataatatcatggccagctaaggtgataccctctc

SEQ ID NO: 16780 - DNA, 80 bp, synthetic construct
  source 1..80: mol_type = other DNA
ttcaatggctcctcctagatagctctttgtagccatgttagacaaagctactaggccattcgcacaggagctctagagga

SEQ ID NO: 16781 - DNA, 80 bp, synthetic construct
  source 1..80: mol_type = other DNA
gctctaagaacctctaagaacatttaagaggctcaccagttatgactgactgaacgatgggaaattcagtggctgatgac

SEQ ID NO: 16782 - DNA, 80 bp, synthetic construct
  source 1..80: mol_type = other DNA
aagaatggattctggttttctgcaacactgcagggtgactctggttaactataatttaccttctattccccaaaagctag

SEQ ID NO: 16783 - DNA, 80 bp, synthetic construct
  source 1..80: mol_type = other DNA
ggggtacttcccaaggatatctgctacagggaaaagttgatgagacaaggaggctatttgttcagtgacttggagaccaa

SEQ ID NO: 16784 - DNA, 80 bp, synthetic construct
  source 1..80: mol_type = other DNA
cagacaggctgtcttgcttctcctcattggttatggcttagcacggttcctccccacaagtccttactaaacaaaacact

SEQ ID NO: 16785 - DNA, 80 bp, synthetic construct
  source 1..80: mol_type = other DNA
actgaccaccccacccactgtctgtggcttctaaaactctttcaaaacttcttggggtgaggagaaatgagttgttctaa

SEQ ID NO: 16786 - DNA, 80 bp, synthetic construct
  source 1..80: mol_type = other DNA
aacaggaacctccaattcagtacgacacatcctacgatccaggtaagtgccaggtctagagggagcatatgcaagagcct

SEQ ID NO: 16787 - DNA, 80 bp, synthetic construct
  source 1..80: mol_type = other DNA
aagggagaggtaaaggagagacctgaaaaattcagcctagctgaatagaaaaaaaaaaggttttgtgggagaaaatcaaa

SEQ ID NO: 16788 - DNA, 80 bp, synthetic construct
  source 1..80: mol_type = other DNA
tggcagaggcaaacatccctcaagaaggaatctgatggactagctcagaacctagattcaattaaaagacttgtgggtga

SEQ ID NO: 16789 - DNA, 80 bp, synthetic construct
  source 1..80: mol_type = other DNA
aataaattcaggtaaaaaggggaaggctgtgaaaaaacaccttgaacgattgcatggagcatgatccattcattcgttgt

SEQ ID NO: 16790 - DNA, 80 bp, synthetic construct
  source 1..80: mol_type = other DNA
tgcttcctcacctgtgaaatgagaaaaataacaccacctactgcatagtctgtgaggagtccatgagataatcacgtcaa

SEQ ID NO: 16791 - DNA, 80 bp, synthetic construct
  source 1..80: mol_type = other DNA
gtcagctattacataatatggtaacctcacaagggtcaaaggttggtatagaaagagacactgggtggaattggggtgag

SEQ ID NO: 16792 - DNA, 80 bp, synthetic construct
  source 1..80: mol_type = other DNA
caaggaaaatatatattcctccccaggtattaattgagcacatagtatgggctcactgctgacaccaggctcttggttga

SEQ ID NO: 16793 - DNA, 80 bp, synthetic construct
  source 1..80: mol_type = other DNA
ggggcttttaaggtgctgtgaatgctccactcttaacttaggtggtaggtacagggtataggattctttaatctatacat

SEQ ID NO: 16794 - DNA, 80 bp, synthetic construct
  source 1..80: mol_type = other DNA
tgcatctctttagaccttggtttccccactatgcctgctagagaacataactgtacttaccccaaagagaagctatgagg

SEQ ID NO: 16795 - DNA, 80 bp, synthetic construct
  source 1..80: mol_type = other DNA
tctattccctggcacaggacctgcagggcaggtttgcaaaagcatgacacacattccaactcacagagtactgactgctt

SEQ ID NO: 16796 - DNA, 80 bp, synthetic construct
  source 1..80: mol_type = other DNA
tatgtcctttatcagagtgggcgaggtttgcctacccttgccttcctggctgcttacctgctttacagccagactttctg

SEQ ID NO: 16797 - DNA, 80 bp, synthetic construct
  source 1..80: mol_type = other DNA
tggagtcatgctgggcacacaagaggctcttaatcaaatctggtcaattccttatttccctctacctgcatccaaaacag

SEQ ID NO: 16798 - DNA, 80 bp, synthetic construct
  source 1..80: mol_type = other DNA
aatgttcagataacccatttctacctcagcaaatcaccctcactccctagcctgagttaaagccttctttgccaacacca

SEQ ID NO: 16799 - DNA, 80 bp, synthetic construct
  source 1..80: mol_type = other DNA
tgtaagacaataaataaggttacacaccctccactccagcagttctgagcaccatcgacagccaatcgctccttttctta

SEQ ID NO: 16800 - DNA, 80 bp, synthetic construct
  source 1..80: mol_type = other DNA
ggctccgctcgccaacctgttactgctgcagaacgccaggaagctcagcctgatcccacagattagggtaaaatatcccg

SEQ ID NO: 16801 - DNA, 80 bp, synthetic construct
  source 1..80: mol_type = other DNA
tttgattgaacttgggaatggaccatttattctgagaaacagatgaagtgcccctttagaggtcctgccagtctgatgga

SEQ ID NO: 16802 - DNA, 80 bp, synthetic construct
  source 1..80: mol_type = other DNA
ttccatcaggcttttccaacatctccaggaaaggaactgtcaattctctggtctttgtagcgcatgcattttctatattg

SEQ ID NO: 16803 - DNA, 80 bp, synthetic construct
  source 1..80: mol_type = other DNA
atggaaagattccagaggtactaggctgaggatttcgtttcattcatttcattcctgtgcatttcattccacagagtcca

SEQ ID NO: 16804 - DNA, 80 bp, synthetic construct
  source 1..80: mol_type = other DNA
cttttgggatccaccaaatttatttcacagcccattaatgggttgtgacccaaaatacagtattaaaaatcctaccctac

SEQ ID NO: 16805 - DNA, 80 bp, synthetic construct
  source 1..80: mol_type = other DNA
tcacaagtattttccaggtttggggggttcttttagcctcatgatgcctatggcatctcagaaatcttgactgctccaga

SEQ ID NO: 16806 - DNA, 80 bp, synthetic construct
  source 1..80: mol_type = other DNA
ggttgtgtttgcctcattgtcctatgtcgttaaaagtgttgccattgttaaaactgttgtttctggtgtccacctccact

SEQ ID NO: 16807 - DNA, 80 bp, synthetic construct
  source 1..80: mol_type = other DNA
ttgggcttggactgcttctgattagtcaaatgactttgggcaaattatttgatttctctgaacatcagttttgccatcag

SEQ ID NO: 16808 - DNA, 80 bp, synthetic construct
  source 1..80: mol_type = other DNA
gaactagaagataattaactggaaagaatagccaagggtgtagctactgtgtatctcaggaggtctgcaaaccctctgag

SEQ ID NO: 16809 - DNA, 80 bp, synthetic construct
  source 1..80: mol_type = other DNA
aatctgcataagctgggttccaggactctctgtgtaaggagaatgagaaataaacctgcacaaagaagaggatagcaggg

SEQ ID NO: 16810 - DNA, 80 bp, synthetic construct
  source 1..80: mol_type = other DNA
gctagagcagaaaaaattgtctagaatgtagaccaaaaagacaaagccaaggaaatatgaaaggttaaggagtacagagg

SEQ ID NO: 16811 - DNA, 80 bp, synthetic construct
  source 1..80: mol_type = other DNA
ctgacttctgacttctcaacagcaataatggggccacatgagagaaggatatagcagtatcttcaaggtgctaaaagaaa

SEQ ID NO: 16812 - DNA, 80 bp, synthetic construct
  source 1..80: mol_type = other DNA
atggggcaaagtgacagtatgataagaggagaaattcaatattatagtgagcgattttaacacacaactctagagaagtg

SEQ ID NO: 16813 - DNA, 80 bp, synthetic construct
  source 1..80: mol_type = other DNA
ccctttcataggtccaggaagggagaactggaaatactgatgaacatcacaatagtcaataataaagagtccaggaaaaa

SEQ ID NO: 16814 - DNA, 80 bp, synthetic construct
  source 1..80: mol_type = other DNA
agttcatattaatgtttttaactgtcatccagaactccaaggttcattctagccttgttttcttgcttttctgtaacctc

SEQ ID NO: 16815 - DNA, 80 bp, synthetic construct
  source 1..80: mol_type = other DNA
gatgggatcctaaaacaggaaagccaaagaaatgcaaataaaccagggacctcagaaaataatcatatagcaatatttgg

SEQ ID NO: 16816 - DNA, 80 bp, synthetic construct
  source 1..80: mol_type = other DNA
tgatctctacctagggaagtttaatgtgctcagaccttataatccagcaatttcactccgaattatgtactccagagaaa

SEQ ID NO: 16817 - DNA, 80 bp, synthetic construct
  source 1..80: mol_type = other DNA
aaggtcttttcactttttatctggttattccaggtaattgtccgcatgggcctctgtgttgtcatgctctggccttcctg

SEQ ID NO: 16818 - DNA, 80 bp, synthetic construct
  source 1..80: mol_type = other DNA
tattcgataccctttttcagtgattcctcacagtcccacattcttctgctagtcctgagggtcttcccaattgcttattt

SEQ ID NO: 16819 - DNA, 80 bp, synthetic construct
  source 1..80: mol_type = other DNA
gatttcgccccttcctacctctcaggtctcaccaaacatgcaaaagtttatttgagcttcagcacctttgcatatgccag

SEQ ID NO: 16820 - DNA, 80 bp, synthetic construct
  source 1..80: mol_type = other DNA
tgtctcaaaaaggatatgtctttgacttaaggtctttctcagtccagttgtacctagcattagacccacttgcttctgct

SEQ ID NO: 16821 - DNA, 80 bp, synthetic construct
  source 1..80: mol_type = other DNA
ccttatctgaaggagtgcgtctagccatgccttattactaaagaaagagaaggattgtattaatgggatcattgccccta

SEQ ID NO: 16822 - DNA, 80 bp, synthetic construct
  source 1..80: mol_type = other DNA
tctttacagaaatgtgacccttcaaaccagatgctctttcaggtccttatcattatgtctttgtagcctcttcctcttcc

SEQ ID NO: 16823 - DNA, 80 bp, synthetic construct
  source 1..80: mol_type = other DNA
tgaacttggaagcagattctttcccagagcctccagaaagaggctacccaggcgacacatgaattttgggcttatgagac

SEQ ID NO: 16824 - DNA, 80 bp, synthetic construct
  source 1..80: mol_type = other DNA
gaaaagtcaattgatagaggtgtaggcaaggttaagggaatgaaaatggactgtaggaatattaggaaatcattaccacc

SEQ ID NO: 16825 - DNA, 80 bp, synthetic construct
  source 1..80: mol_type = other DNA
aaaagggaaggatgtggttacgcccttctttaagagcacagcttgttatctttggggtcaagaaaattataggggattga

SEQ ID NO: 16826 - DNA, 80 bp, synthetic construct
  source 1..80: mol_type = other DNA
ttccctcttgagcccaaagaaacctctgcaatagaagtctggccccaaactttcataatcagaccctcttcattgggtct

SEQ ID NO: 16827 - DNA, 80 bp, synthetic construct
  source 1..80: mol_type = other DNA
caggagatctgggtttgtgttctaggtgcctggggaaaacctgagatccaggggggataaaaggatcctggaattaaaac

SEQ ID NO: 16828 - DNA, 80 bp, synthetic construct
  source 1..80: mol_type = other DNA
tggagtctaccagttcaatggagattgggtgatggcgatggccctaatgatactaaaaagtccccttcatcatatccttc

SEQ ID NO: 16829 - DNA, 80 bp, synthetic construct
  source 1..80: mol_type = other DNA
ggctcacttttgcttactgaactaagtggggttcagtaaccagtggggtgttgactactgaactgagtcaactcctttgt

SEQ ID NO: 16830 - DNA, 80 bp, synthetic construct
  source 1..80: mol_type = other DNA
cttacaccccaaaatcgacaagacgcacttttttaagaacacatgacgaaatatttataaaagtaaatcctaaagcactt

SEQ ID NO: 16831 - DNA, 80 bp, synthetic construct
  source 1..80: mol_type = other DNA
aagcaaaaattaaagaatcaggaaacaataatgacaaactcgaaagctgagagaattaataaacctgacaaactaaaaaa

SEQ ID NO: 16832 - DNA, 80 bp, synthetic construct
  source 1..80: mol_type = other DNA
tataataatattctcatttacttagatgacattcgcttgaacaagaaaggaaggggtagtgttatagctgccagggaggg

SEQ ID NO: 16833 - DNA, 80 bp, synthetic construct
  source 1..80: mol_type = other DNA
gaaggcaaagcccagcaacctcagaacaatcctaacaaacgtttgtaaggcactttacgatgtagaggtctttcaaatgc

SEQ ID NO: 16834 - DNA, 80 bp, synthetic construct
  source 1..80: mol_type = other DNA
caacaagaagagaagcaacaatggccttttctagcatgacctcctttttagggtcagtcacatgacaggtagctgcagaa

SEQ ID NO: 16835 - DNA, 80 bp, synthetic construct
  source 1..80: mol_type = other DNA
catgttgtggctccttcctcgtccaatctccttctaaactaaccaacactcacccacaaattcctatgttggttatgtct

SEQ ID NO: 16836 - DNA, 80 bp, synthetic construct
  source 1..80: mol_type = other DNA
aggatgagctctaaaagcgaaacctagtttaagagatttccaagcaaaggaacatgagcccagctgcatccccagagtta

SEQ ID NO: 16837 - DNA, 80 bp, synthetic construct
  source 1..80: mol_type = other DNA
ttccttgtttagggaatggcagtaataatgactactttgtggggttgttttaggatgaaatggagggtacccgactttgg

SEQ ID NO: 16838 - DNA, 80 bp, synthetic construct
  source 1..80: mol_type = other DNA
aacctaaatgaccttagcaactgggaccattcattcttttattcactgactcatccgacacatttttattgcacatctac

SEQ ID NO: 16839 - DNA, 80 bp, synthetic construct
  source 1..80: mol_type = other DNA
caccacacctggctgatttttttttttttaatagatgaggtcaagctatgttacccaggctggtctcaaagtcctggcct

SEQ ID NO: 16840 - DNA, 80 bp, synthetic construct
  source 1..80: mol_type = other DNA
cttttagagatgagaggtagagcatgctgatgggaatggtccaggagaaagcagggtggggttaggggtcaggggaagat

SEQ ID NO: 16841 - DNA, 80 bp, synthetic construct
  source 1..80: mol_type = other DNA
acacacctgcgcacccccatacacctgtgcacccctacacgcctacgcaccccctcacacctgcgcacccccatacacct

SEQ ID NO: 16842 - DNA, 80 bp, synthetic construct
  source 1..80: mol_type = other DNA
tcttggaccttccggaaactgagccacatcaggctcacgttgatagcataggtggtgatacaaacaatgcagaaatcata

SEQ ID NO: 16843 - DNA, 80 bp, synthetic construct
  source 1..80: mol_type = other DNA
cgtgccactgcactccagcctggtgacagagcgagactatgtcgcaaaaaaaaaaaaaaaaaaaaaaaaaaaattagctg

SEQ ID NO: 16844 - DNA, 80 bp, synthetic construct
  source 1..80: mol_type = other DNA
acaacaacaaacaaaaaacctggggacctaggatgtctttaagggcccttcagcctctaacagtacttaaaccaattaaa

SEQ ID NO: 16845 - DNA, 80 bp, synthetic construct
  source 1..80: mol_type = other DNA
attcttaaaatggcaaggctggtataacggttcactcggttttgcatcagagactgggagtcgggggcagattatctttg

SEQ ID NO: 16846 - DNA, 80 bp, synthetic construct
  source 1..80: mol_type = other DNA
caggcatgatgggagttgtagtcggcgcggctgcaaggcatcaagggaaatgaagtctccacagatttaaaaactgttgg

SEQ ID NO: 16847 - DNA, 80 bp, synthetic construct
  source 1..80: mol_type = other DNA
ctcccggcattatcccatctacccctccacattcaagtttttggaaagattctacactcccagtctctacttcctcactt

SEQ ID NO: 16848 - DNA, 80 bp, synthetic construct
  source 1..80: mol_type = other DNA
tttgagaattacctgattatatcctttcctatttttttttcctggaggtgatggcttcttttttttatttttagaagttg

SEQ ID NO: 16849 - DNA, 80 bp, synthetic construct
  source 1..80: mol_type = other DNA
acattttaaacatctgtaagtcagaaggatcacttttggaagaggccaattactggcaaaagtgattcattatcaagaca

SEQ ID NO: 16850 - DNA, 80 bp, synthetic construct; identical to SEQ ID NO: 8155
  source 1..80: mol_type = other DNA

SEQ ID NO: 16851 - DNA, 80 bp, synthetic construct
  source 1..80: mol_type = other DNA
ttgagagaagatatattcacaggcagtttggacaagatgactccagtcacatgaaagtttagttttattatagacacttt

SEQ ID NO: 16852 - DNA, 80 bp, synthetic construct
  source 1..80: mol_type = other DNA
tctccacttgatgatgtctctcactctgttcctttaattacgaagtctctgaagactctgaacttgactgaggaaatgtt

SEQ ID NO: 16853 - DNA, 80 bp, synthetic construct; identical to SEQ ID NO: 8156
  source 1..80: mol_type = other DNA

SEQ ID NO: 16854 - DNA, 80 bp, synthetic construct
  source 1..80: mol_type = other DNA
ttctctggctttgtccagggcttcttggacaacctattccataatcacatagattaattctcataatagttcttttccct

SEQ ID NO: 16855 - DNA, 80 bp, synthetic construct
  source 1..80: mol_type = other DNA
tagctgggcttggtggtgggtgcctgtagtcccagctagtcgggaggctgaggcaggagaatggtgtgaacccgggaggc

SEQ ID NO: 16856 - DNA, 80 bp, synthetic construct
  source 1..80: mol_type = other DNA
aggatttgtcatatcagatgactgaaccctaatttgggttagttccgaggcagcagttatctatccctaacttttttttt

SEQ ID NO: 16857 - DNA, 80 bp, synthetic construct
  source 1..80: mol_type = other DNA
tattttttgtagagacaatgtctctctgtgttacccaggctggtctcaaaaatcctgggctcaagtgatcctcccacctc

SEQ ID NO: 16858 - DNA, 80 bp, synthetic construct; identical to SEQ ID NO: 8157
  source 1..80: mol_type = other DNA

SEQ ID NO: 16859 - DNA, 80 bp, synthetic construct
  source 1..80: mol_type = other DNA
ctgccagtagaagtaggaaatatggttcctgaaagcagcttcttaggtcaacgcaaactgatctagtgatggtttgtgaa

SEQ ID NO: 16860 - DNA, 80 bp, synthetic construct
  source 1..80: mol_type = other DNA
gactgattcaagtatggatgaacccaatttaaattcttaccttttcactttctgtatccagagctgacgtggcttcatcc

SEQ ID NO: 16861 - DNA, 80 bp, synthetic construct; identical to SEQ ID NO: 8158
  source 1..80: mol_type = other DNA

SEQ ID NO: 16862 - DNA, 80 bp, synthetic construct
  source 1..80: mol_type = other DNA
aattaaggaaagaacagtaaaaaagcccaaaatggcaggtttactatctatttgaaaataaatgtttgggccttaagatg

SEQ ID NO: 16863 - DNA, 80 bp, synthetic construct
  source 1..80: mol_type = other DNA
atcttacttgtaaccagcaggtgacactctctgcatgattttaaattgaggaaagacattcttgggatatcagcctttta

SEQ ID NO: 16864 - DNA, 80 bp, synthetic construct
  source 1..80: mol_type = other DNA
gttagagtgctcccaaaattcttcccgtgttgtttcccacaatggataattgtcaccaactattcactatgatgataggg

SEQ ID NO: 16865 - DNA, 80 bp, synthetic construct
  source 1..80: mol_type = other DNA
tatttgctatatctggcaaccctagttttgtggcactcagccctgggtttccccctgtaaatagagggagaagacgccag

SEQ ID NO: 16866 - DNA, 80 bp, synthetic construct; identical to SEQ ID NO: 8159
  source 1..80: mol_type = other DNA

SEQ ID NO: 16867 - DNA, 80 bp, synthetic construct
  source 1..80: mol_type = other DNA
gataatagttactctctgtgtttgtgttttattaacccctagcccagtggttccccaatttgagcctgcaacagtattac

SEQ ID NO: 16868 - DNA, 80 bp, synthetic construct
  source 1..80: mol_type = other DNA
tgttttaaatgtttgagcctggagaagggtcaattatctagttgggctagactgtgaaaggagagtgggagacaaggcca

SEQ ID NO: 16869 - DNA, 80 bp, synthetic construct
  source 1..80: mol_type = other DNA
gcacttccttagaataaagagcataactggtgataatgggtgaggtagattacctaggttgagaagcacttcaaaatata

SEQ ID NO: 16870 - DNA, 80 bp, synthetic construct; identical to SEQ ID NO: 8160
  source 1..80: mol_type = other DNA

SEQ ID NO: 16871 - DNA, 80 bp, synthetic construct
  source 1..80: mol_type = other DNA
tgaaactttttgagcaccaacatgatgccacaagtggaaaatttcacacatgatctcatgtgacaggtcacagtcaaaac

SEQ ID NO: 16872 - DNA, 80 bp, synthetic construct
  source 1..80: mol_type = other DNA
taatacacaggacctaagagggcttgagagaggatgagaggttccatttatccaacttcctaggaggaattcagaggaca

SEQ ID NO: 16873 - DNA, 80 bp, synthetic construct; identical to SEQ ID NO: 8161
  source 1..80: mol_type = other DNA

SEQ ID NO: 16874 - DNA, 80 bp, synthetic construct
  source 1..80: mol_type = other DNA
agactctgtacttggacttaaagtgaaaggctttccagatattgtacttacccctaaggctgacaaaggtggagcctcaa

SEQ ID NO: 16875 - DNA, 80 bp, synthetic construct
  source 1..80: mol_type = other DNA
gatgcttgtatacaggtaagggtgtgatttggttgctaatttctcttcacttctgggagaccagccccttataaatcaaa

SEQ ID NO: 16876 - DNA, 80 bp, synthetic construct
  source 1..80: mol_type = other DNA
atttgaagagagacttacattaggcagtgactcgatgaaggcatgtatgttggcctcctttgctgccctcacaatctctt

SEQ ID NO: 16877 - DNA, 80 bp, synthetic construct; identical to SEQ ID NO: 8162
  source 1..80: mol_type = other DNA

SEQ ID NO: 16878 - DNA, 80 bp, synthetic construct
  source 1..80: mol_type = other DNA
tgaggaactgtcatgtttcctgtgtttcaaccatggtttctgatgtatgcatgtggtaggcagaataatgttccctctcc

SEQ ID NO: 16879 - DNA, 80 bp, synthetic construct
  source 1..80: mol_type = other DNA
aactgaagaagaaggagggagaagagtatcagcaaatgcagtgtgagaaagactcaaccagccactgctggttttgaaaa

SEQ ID NO: 16880 - DNA, 80 bp, synthetic construct
  source 1..80: mol_type = other DNA
tttgtggcaagtggttatagcagccacactaatacaacgcctaatacttctgagatgtatcctgacagccttattcttaa

SEQ ID NO: 16881 - DNA, 80 bp, synthetic construct
  source 1..80: mol_type = other DNA
aagggtgaatggagatcctcaatactgagccagatgagtaggaacagagggctgccctttctctataatctggctccctg

SEQ ID NO: 16882 - DNA, 80 bp, synthetic construct; identical to SEQ ID NO: 8163
  source 1..80: mol_type = other DNA

SEQ ID NO: 16883 - DNA, 80 bp, synthetic construct
  source 1..80: mol_type = other DNA
aggcttccttacaatgttaataaatgaaggtggaaagtagagggtggagagagacagtgaaagccaaacaaggatgtggc

SEQ ID NO: 16884 - DNA, 80 bp, synthetic construct
  source 1..80: mol_type = other DNA
tgaatgatctcagcaagttataatgagtttcttcattacactgaatacactcttgggcctcctcgtccccgcataatacc

SEQ ID NO: 16885 - DNA, 80 bp, synthetic construct; identical to SEQ ID NO: 8164
  source 1..80: mol_type = other DNA

SEQ ID NO: 16886 - DNA, 80 bp, synthetic construct
  source 1..80: mol_type = other DNA
ataattgatttttaaaaatcaagcactgacaacgttgtaggttctgtgataagcatgtctcatacagtctcttgtttaac

SEQ ID NO: 16887 - DNA, 80 bp, synthetic construct
  source 1..80: mol_type = other DNA
ctggatctaaacactctaggttgggttttggtaacactaatacctcacaactgaaagatattttgtgtccccccttgaaa

SEQ ID NO: 16888 - DNA, 80 bp, synthetic construct
  source 1..80: mol_type = other DNA
tttaacagtgacactgatgaaggttaagcttcaagagccctcaattacatgtaaattctgggaagtcgaacagttttctg

SEQ ID NO: 16889 - DNA, 80 bp, synthetic construct
  source 1..80: mol_type = other DNA
ccctacaattgtataaccttcaggtccctcaaaacttggaggatcctcccatcttcacaatttcatagcttaattattca

SEQ ID NO: 16890 - DNA, 80 bp, synthetic construct; identical to SEQ ID NO: 8165
  source 1..80: mol_type = other DNA

SEQ ID NO: 16891 - DNA, 80 bp, synthetic construct
  source 1..80: mol_type = other DNA
caaaactttgtacatttactagagtttattgtggacactttctgctgagaagtctggctgcagtgcaccatctggcagta

SEQ ID NO: 16892 - DNA, 80 bp, synthetic construct
  source 1..80: mol_type = other DNA
acatcaagggactagaaggctaaaaactatttcccagtttcccttggttctggaagtaagtcagggtctacgagggagat

SEQ ID NO: 16893 - DNA, 80 bp, synthetic construct; identical to SEQ ID NO: 8166
  source 1..80: mol_type = other DNA

SEQ ID NO: 16894 - DNA, 80 bp, synthetic construct
  source 1..80: mol_type = other DNA
gttgttttcaactccaacattttgttatcaccaagtgtttttcccactggaaagtgactatgagtacattagtggatggt

SEQ ID NO: 16895 - DNA, 80 bp, synthetic construct
  source 1..80: mol_type = other DNA
tgttcacccatatgcaaatccttatctcttaagaactagctctaggcctatctcctttaactcacaaaactatatgcccc

SEQ ID NO: 16896 - DNA, 80 bp, synthetic construct
  source 1..80: mol_type = other DNA
catttcctcctctaattgctttggctgtcagcgacgtctttatttagagtcctgtttttaagttcaccacaaaattgaag

SEQ ID NO: 16897 - DNA, 80 bp, synthetic construct
  source 1..80: mol_type = other DNA
ttatgagtaagagtgaccgctgtgaggaagtaaaaagagtcctagactaaagattgaaaactctcttttcatttgagtca

SEQ ID NO: 16898 - DNA, 80 bp, synthetic construct; identical to SEQ ID NO: 8167
  source 1..80: mol_type = other DNA

SEQ ID NO: 16899 - DNA, 80 bp, synthetic construct
  source 1..80: mol_type = other DNA
ctccatcaatgattttgtctcatccccagtcataaaaatgctcaagagttcaacccctaaacattttccctggactctgc

SEQ ID NO: 16900 - DNA, 80 bp, synthetic construct
  source 1..80: mol_type = other DNA
gaaatagcccattcattgctagattctatcatgtcttctcagtctcctccttacccaatctctctataccatctgtcatt

SEQ ID NO: 16901 - DNA, 80 bp, synthetic construct; identical to SEQ ID NO: 8168
  source 1..80: mol_type = other DNA

SEQ ID NO: 16902 - DNA, 80 bp, synthetic construct
  source 1..80: mol_type = other DNA
cagacatttggatgatgaaaacctgaactgagctaaatgtgaaagtgtgctcaccactttccctgccaaggggtcgtaga

SEQ ID NO: 16903 - DNA, 80 bp, synthetic construct
  source 1..80: mol_type = other DNA
gaatgctgcaatactgaaaataaagtgtatagctaactctctcgattaccaggtgtcagaagataattaatttgtgttac

SEQ ID NO: 16904 - DNA, 80 bp, synthetic construct; identical to SEQ ID NO: 8169
  source 1..80: mol_type = other DNA

SEQ ID NO: 16905 - DNA, 80 bp, synthetic construct
  source 1..80: mol_type = other DNA
gcaatacagctacaataactcaaatctgttcctcaggaatacagtaacttacatacaataaaatctgataaccagcctgg

SEQ ID NO: 16906 - DNA, 80 bp, synthetic construct
  source 1..80: mol_type = other DNA
gcctggatgacagagtaagactctgtctctaaaaaaaaattgtttttaaaaaatctgattaataggttttgcttataaag

SEQ ID NO: 16907 - DNA, 80 bp, synthetic construct
  source 1..80: mol_type = other DNA
actttcattcaggagtcaggagtagatcaaacagttgaaacatcaaactcaccggcattaggccttccgtgctgtagctg

SEQ ID NO: 16908 - DNA, 80 bp, synthetic construct; identical to SEQ ID NO: 8170
  source 1..80: mol_type = other DNA

SEQ ID NO: 16909 - DNA, 80 bp, synthetic construct
  source 1..80: mol_type = other DNA
agctaattgttttattttttgtagagatgggggtctccctatattgcccaggctggtctcgaactaccgggctgaagtga

SEQ ID NO: 16910 - DNA, 80 bp, synthetic construct
  source 1..80: mol_type = other DNA
gtgatagattgattgcaaaatggcccatttttttccctctgtatacctctctctgtatcctcatcttcttgcactgtgac

SEQ ID NO: 16911 - DNA, 80 bp, synthetic construct
  source 1..80: mol_type = other DNA
gctttggccaacaggatatggtggaaatcacttttgccagttccaagcctatgactcagggggccttatatgctttgtga

SEQ ID NO: 16912 - DNA, 80 bp, synthetic construct
  source 1..80: mol_type = other DNA
gagtaagtccagccgagatccactatgcctaatccagatcagtagaacttcacagctaacccataggtttgtgggcaaaa

SEQ ID NO: 16913 - DNA, 80 bp, synthetic construct; identical to SEQ ID NO: 8171
  source 1..80: mol_type = other DNA

SEQ ID NO: 16914 - DNA, 80 bp, synthetic construct
  source 1..80: mol_type = other DNA
aaatattgctaaaaactcctttgcttctttgataactcctttcactgcccttctctagacacatttattaatatgctttt

SEQ ID NO: 16915 - DNA, 80 bp, synthetic construct
  source 1..80: mol_type = other DNA
ccgatagttaatcttggacttgtgatcatttaaacctatgggacctttttctaatgcactgttcttcagacaggtcttcc

SEQ ID NO: 16916 - DNA, 80 bp, synthetic construct
  source 1..80: mol_type = other DNA
tgccagtgatacttggttttgatctctaggccataatcacaaatagcacctgcatatcatttgtccaatgtacatcttta

SEQ ID NO: 16917 - DNA, 80 bp, synthetic construct; identical to SEQ ID NO: 8172
  source 1..80: mol_type = other DNA

SEQ ID NO: 16918 - DNA, 80 bp, synthetic construct
  source 1..80: mol_type = other DNA
tttctgaattcatttggctcttaccttccaattcctctcttatcaagggaaagtaaacatatcctggaattgccaaaggc

SEQ ID NO: 16919 - DNA, 80 bp, synthetic construct
  source 1..80: mol_type = other DNA
aaatctccgaatggaatcactccactcagtcacagatttgaaaaggtcaactatgtgtgagccagcaatgaggaaagaag

SEQ ID NO: 16920 - DNA, 80 bp, synthetic construct
  source 1..80: mol_type = other DNA
gcttaactaaataatagcccaatacttacaacagaacatcctcaaagctcatgagtttatgtgccaccaagtaggctcca

SEQ ID NO: 16921 - DNA, 80 bp, synthetic construct; identical to SEQ ID NO: 8173
  source 1..80: mol_type = other DNA

SEQ ID NO: 16922 - DNA, 80 bp, synthetic construct
  source 1..80: mol_type = other DNA
ttctccccacttttggacacacagtatggaagtactctacgtaaatattcattctgcacacagttacccaacacctacaa

SEQ ID NO: 16923 - DNA, 80 bp, synthetic construct
  source 1..80: mol_type = other DNA
aaggctttaaaaaggggttgacattctagaatcatgatatggatccagctcagtgatatggaggtgtgggtgggggcagg

SEQ ID NO: 16924 - DNA, 80 bp, synthetic construct; identical to SEQ ID NO: 8174
  source 1..80: mol_type = other DNA

SEQ ID NO: 16925 - DNA, 80 bp, synthetic construct
  source 1..80: mol_type = other DNA
ccataaataactcattttcaactagagcaaattatagggtcatatcctacctggacatcagatagtcattctcagcatca

SEQ ID NO: 16926 - DNA, 80 bp, synthetic construct
  source 1..80: mol_type = other DNA
taccttcgagcactttctccacttgctccctaccttctagccaaagtaatccctctgaaaacaaatatgatgattgaaaa

SEQ ID NO: 16927 - DNA, 80 bp, synthetic construct
  source 1..80: mol_type = other DNA
tctattgcttcagtagcgatctgtaacagacagcaccgatcaccaagaggcacaagagtaaatagtggtgattaatttga

SEQ ID NO: 16928 - DNA, 80 bp, synthetic construct
  source 1..80: mol_type = other DNA
aagctaagacttaaatggattatggcattgcttaaagccacacagctttacgtggcttcgcaaaattaaccagagaactc

SEQ ID NO: 16929 - DNA, 80 bp, synthetic construct; identical to SEQ ID NO: 8175
  source 1..80: mol_type = other DNA

SEQ ID NO: 16930 - DNA, 80 bp, synthetic construct
  source 1..80: mol_type = other DNA
aatgctcatggattgcgtggtaatgagagatccaaataccaagcgctcaagggactttgggtttgtcacatatgccactg

SEQ ID NO: 16931 - DNA, 80 bp, synthetic construct
  source 1..80: mol_type = other DNA
tcacctaggagattattttgaatagtatggaaaaattgaagtgattgaaatcatgactgaccaaggcagtgataagaaaa

SEQ ID NO: 16932 - DNA, 80 bp, synthetic construct
  source 1..80: mol_type = other DNA
tgggaactttggtggtggtcgtggaggtagtttcggtgggaatgacaactttggtcgtggaggaaacttcagtggtcatt

SEQ ID NO: 16933 - DNA, 80 bp, synthetic construct; identical to SEQ ID NO: 8176
  source 1..80: mol_type = other DNA

SEQ ID NO: 16934 - DNA, 80 bp, synthetic construct
  source 1..80: mol_type = other DNA
aagaagacatgttttagacaaatactcatgtgtatgggtaaaaaactcgaggactatatttgtgactaattgtgtaacag

SEQ ID NO: 16935 - DNA, 80 bp, synthetic construct
  source 1..80: mol_type = other DNA
acatttccatattgtttttttcctaagtgcataaatatatttaaaaagattggaatgaaactctatatttagctctatat

SEQ ID NO: 16936 - DNA, 80 bp, synthetic construct
  source 1..80: mol_type = other DNA
aaacatctttgtacctaaacatttgtccatattgaattggtttattaggaaaatttcttaaggtgaaattaataagtcaa

SEQ ID NO: 16937 - DNA, 80 bp, synthetic construct; identical to SEQ ID NO: 8177
  source 1..80: mol_type = other DNA

SEQ ID NO: 16938 - DNA, 80 bp, synthetic construct
  source 1..80: mol_type = other DNA
catctctactaaaaatacaaaaattagctgggcatggtggcacatgccttaatcccatgctactgggaggcagaggaagc

SEQ ID NO: 16939 - DNA, 80 bp, synthetic construct
  source 1..80: mol_type = other DNA
tacatccttcatcacctctggagtctgagtaaagggatatggaaaaagcaaagaacaccagtgtacaagatgagatttca

SEQ ID NO: 16940 - DNA, 80 bp, synthetic construct; identical to SEQ ID NO: 8178
  source 1..80: mol_type = other DNA

SEQ ID NO: 16941 - DNA, 80 bp, synthetic construct
  source 1..80: mol_type = other DNA
gactaatatcaaaatctatcagaagtaaaaaaaaaaattagtaacattcttagaaacaaaaacttatttaaaaataaaat

SEQ ID NO: 16942 - DNA, 80 bp, synthetic construct
  source 1..80: mol_type = other DNA
agtgcagaaagcaaaaggtgaggagaaaaaattcaccttcaaattcccaaagacaatccttttgtcagacacattagaac

SEQ ID NO: 16943 - DNA, 80 bp, synthetic construct
  source 1..80: mol_type = other DNA
ggagatatacctaatgttaaatgacgagttggtgggtacagcacaccaacatggcacatgtatacatatgtaactaacct

SEQ ID NO: 16944 - DNA, 80 bp, synthetic construct
  source 1..80: mol_type = other DNA
aacaatgtctgctgaaaaacagattttactgtatatttcagtgtaatggttttaagaaatattttctgtgcaccatgttc

SEQ ID NO: 16945 - DNA, 80 bp, synthetic construct; identical to SEQ ID NO: 8179
  source 1..80: mol_type = other DNA

SEQ ID NO: 16946 - DNA, 80 bp, synthetic construct
  source 1..80: mol_type = other DNA
tttatggcttttatttctgaaaagtaaaaaagcatctacaatggagccttggacaacatgggggttagggagactgaccc

SEQ ID NO: 16947 - DNA, 80 bp, synthetic construct
  source 1..80: mol_type = other DNA
agctagagggaagaaaatgttattaagaaaatcacaaggaagagaaaatatatttactattcattaagcggaagtggatc

SEQ ID NO: 16948 - DNA, 80 bp, synthetic construct
  source 1..80: mol_type = other DNA
gggaggcgggaaaggcaggcacacctggtgtgactgacatgcattgtggtctctgtctgactttttccttttttatttct

SEQ ID NO: 16949 - DNA, 80 bp, synthetic construct; identical to SEQ ID NO: 8180
  source 1..80: mol_type = other DNA

SEQ ID NO: 16950 - DNA, 80 bp, synthetic construct
  source 1..80: mol_type = other DNA
ctggtgtgatgtttatttgctcttgaggttctccaaaatctataccttgaaagccttcacccaccacctttttttttttt

SEQ ID NO: 16951 - DNA, 80 bp, synthetic construct
  source 1..80: mol_type = other DNA
ttaacaatcctttctgtagagtaccatgtgctttgtgatgagccttaaaaatccttatgagtggcgaggcacagtggctc

SEQ ID NO: 16952 - DNA, 80 bp, synthetic construct
  source 1..80: mol_type = other DNA
agacatgtttaggaggcaagcagaccacttcaatacctttgatgttaaactcatgggttctgggtggccaggagcattgt

SEQ ID NO: 16953 - DNA, 80 bp, synthetic construct; identical to SEQ ID NO: 8181
  source 1..80: mol_type = other DNA

SEQ ID NO: 16954 - DNA, 80 bp, synthetic construct
  source 1..80: mol_type = other DNA
tcaatgattttttttaatagcatctaggaacatttctgctgcctcttgattggcagaagctccttctcctgctatcttga

SEQ ID NO: 16955 - DNA, 80 bp, synthetic construct
  source 1..80: mol_type = other DNA
tcatattagagtctataggtatgcctttctcacagcaatcctgcacccatgtgaaagctgcattttcaatatgagataaa

SEQ ID NO: 16956 - DNA, 80 bp, synthetic construct
  source 1..80: mol_type = other DNA
tttatcttgaaatggcaggcaactaactgcagctgcagacctcacatctatagtatgtatcaagcagttcaactttttcc

SEQ ID NO: 16957 - DNA, 80 bp, synthetic construct; identical to SEQ ID NO: 8182
  source 1..80: mol_type = other DNA

SEQ ID NO: 16958 - DNA, 80 bp, synthetic construct
  source 1..80: mol_type = other DNA
gcggaagatgaaggaagagcagagggacatctcacatggcagcaggcaagacagcatatgcaggggaactcccctttata

SEQ ID NO: 16959 - DNA, 80 bp, synthetic construct
  source 1..80: mol_type = other DNA
taacactgtatctttacagttgttgacatgtgtcttgactgtgaatggtgacttatatggtctgtaagtgtttgtgtgca

SEQ ID NO: 16960 - DNA, 80 bp, synthetic construct; identical to SEQ ID NO: 8183
  source 1..80: mol_type = other DNA

SEQ ID NO: 16961 - DNA, 80 bp, synthetic construct
  source 1..80: mol_type = other DNA
atacaccattaatcaataaacaaatggtacaccattaaccaataaacaaagaaataggaaagaaacatcaagggctgcga

SEQ ID NO: 16962 - DNA, 80 bp, synthetic construct
  source 1..80: mol_type = other DNA
taagagactgtgatgccagataaggccataaaggtcatcaggagttagatcatacagagtttggtaatccatgataaaag

SEQ ID NO: 16963 - DNA, 80 bp, synthetic construct
  source 1..80: mol_type = other DNA
agaggtcagaatgacttctgtaagaatgtagactatagttggataagaatggaagaagttgaagcagggagattggttag

SEQ ID NO: 16964 - DNA, 80 bp, synthetic construct; identical to SEQ ID NO: 8184
  source 1..80: mol_type = other DNA

SEQ ID NO: 16965 - DNA, 80 bp, synthetic construct
  source 1..80: mol_type = other DNA
tcatgtgtcacttcaaaggtgctaacctgtggtttgcatgaattagcttaggatcagattgtatcatcttcttcctaaaa

SEQ ID NO: 16966 - DNA, 80 bp, synthetic construct
  source 1..80: mol_type = other DNA
tttatattttgtcctagatttttccatcttctcaggggaagagtcaacaccatgggggagacccccaaagtacaatatta

SEQ ID NO: 16967 - DNA, 80 bp, synthetic construct
  source 1..80: mol_type = other DNA
acactggctggggaggtactacagctggcccaaaagattttccagagggaaccccccaaaaatgggataaagagtctgaa

SEQ ID NO: 16968 - DNA, 80 bp, synthetic construct; identical to SEQ ID NO: 8185
  source 1..80: mol_type = other DNA

SEQ ID NO: 16969 - DNA, 80 bp, synthetic construct
  source 1..80: mol_type = other DNA
tagaaaaatgagataatagaccccatatggttgctataaggaataagacatttgcctggaaacacagtaaatgccacata

SEQ ID NO: 16970 - DNA, 80 bp, synthetic construct
  source 1..80: mol_type = other DNA
catttttccatatttaatctcccccctcacatgtacaaataaaatgggcttactttcctcaataaaggaatggatttaag

SEQ ID NO: 16971 - DNA, 80 bp, synthetic construct
  source 1..80: mol_type = other DNA
gagtgaaagtgagagaaaagaaagaagaaaataactaagggaaggaggaaagtggggaggaaggaagaacagtgtgaaga

SEQ ID NO: 16972 - DNA, 80 bp, synthetic construct
  source 1..80: mol_type = other DNA
tgaggaatggttataaacacattcttagagcatagtaagcagtagggagtaacaaaataacactgattagaatactttac

SEQ ID NO: 16973 - DNA, 80 bp, synthetic construct; identical to SEQ ID NO: 8186
  source 1..80: mol_type = other DNA

SEQ ID NO: 16974 - DNA, 80 bp, synthetic construct
  source 1..80: mol_type = other DNA
taagaatttccatgacttcagaatgctgaaagtagaatatcaacaatctagagttcaattacatattcctatctctttgg

SEQ ID NO: 16975 - DNA, 80 bp, synthetic construct
  source 1..80: mol_type = other DNA
taatattcaaatatatctgggtctgtttgagatataatgtttaatttggaaaaaatacagagctgaaaattatggaattt

SEQ ID NO: 16976 - DNA, 80 bp, synthetic construct; identical to SEQ ID NO: 8187
  source 1..80: mol_type = other DNA

SEQ ID NO: 16977 - DNA, 80 bp, synthetic construct
  source 1..80: mol_type = other DNA
gtcagcacaagatacaggtcgctaagaccttgctgataaaacaagctgtggtaaagaagccagccaaatcctaccaaaat

SEQ ID NO: 16978 - DNA, 80 bp, synthetic construct
  source 1..80: mol_type = other DNA
tgagaagagcccaccccttttcctaggaaactcatgaataatccaccccttgtttagcatgtaatcaagaagtaacaata

SEQ ID NO: 16979 - DNA, 80 bp, synthetic construct
  source 1..80: mol_type = other DNA
gggacccctttctagtaacaatagaatcctttataattccctacattaatccctacaaaatcatttaacacctgtctgat

SEQ ID NO: 16980 - DNA, 80 bp, synthetic construct
  source 1..80: mol_type = other DNA
aagggatgatttgccaaatttgggataaatcagactggaatggttttcaaagccagctctctgcatttcacatctttagt

SEQ ID NO: 16981 - DNA, 80 bp, synthetic construct; identical to SEQ ID NO: 8188
  source 1..80: mol_type = other DNA

SEQ ID NO: 16982 - DNA, 80 bp, synthetic construct
  source 1..80: mol_type = other DNA
tcctttattctgaagattaacactcactgtcctacatctatttctacagagtaggagtctatagaaatatggggactaag

SEQ ID NO: 16983 - DNA, 80 bp, synthetic construct
  source 1..80: mol_type = other DNA
gctttcctaggttgacaatgtttgccaacctgctcatttcctcttccctggtctttcctttttagccactgttttaagtt

SEQ ID NO: 16984 - DNA, 80 bp, synthetic construct
  source 1..80: mol_type = other DNA
ttagagacagtgaatatggcaaagggcctcacaaacagcactatggagggaaaaagtgaccaccaattttacaaatatag

SEQ ID NO: 16985 - DNA, 80 bp, synthetic construct; identical to SEQ ID NO: 8189
  source 1..80: mol_type = other DNA

SEQ ID NO: 16986 - DNA, 80 bp, synthetic construct
  source 1..80: mol_type = other DNA
tttcagccttcttgacatctacatatggatgtctaatacagacgtcacaaacttaccatgtctcatacagaactctccat

SEQ ID NO: 16987 - DNA, 80 bp, synthetic construct
  source 1..80: mol_type = other DNA
agaccctgtctctacaaaaaatttaaaaattagctcgacatggtggtgcacacctgtggtcccagctaccaggaaggctg

SEQ ID NO: 16988 - DNA, 80 bp, synthetic construct
  source 1..80: mol_type = other DNA
tggagtcatctttaaataccctttctctcatatccatcatcttatccaaccaacacattgttggctgtacatctaaaata

SEQ ID NO: 16989 - DNA, 80 bp, synthetic construct; identical to SEQ ID NO: 8190
  source 1..80: mol_type = other DNA

SEQ ID NO: 16990 - DNA, 80 bp, synthetic construct
  source 1..80: mol_type = other DNA
cttctggatataatgctgaccttaacacacttatgactcttcttttcactcactttattccagccactctgtcttctttg

SEQ ID NO: 16991 - DNA, 80 bp, synthetic construct
  source 1..80: mol_type = other DNA
ctatacaacttgatctaaaccttgtttttattgttttgtttgctttaggcaaagaagtttgtattaaaacaacaattact

SEQ ID NO: 16992 - DNA, 80 bp, synthetic construct; identical to SEQ ID NO: 8191
  source 1..80: mol_type = other DNA

SEQ ID NO: 16993 - DNA, 80 bp, synthetic construct
  source 1..80: mol_type = other DNA
tcttgccttaattttttaatgtgcttttcatttccttcaacctatattttagaggattgtcttccctcccttctgtaacc

SEQ ID NO: 16994 - DNA, 80 bp, synthetic construct
  source 1..80: mol_type = other DNA
agttatctatatgctctacagtatataatgtttaaatagttaacatgttgctacaaaaagcatgtgatatattcgtaggt

SEQ ID NO: 16995 - DNA, 80 bp, synthetic construct
  source 1..80: mol_type = other DNA
caatgctccagtggtgtttttagggtcatcaaaccaactcacatcctgtggcacagaaaatgattttattaccttaaagc

SEQ ID NO: 16996 - DNA, 80 bp, synthetic construct; identical to SEQ ID NO: 8192
  source 1..80: mol_type = other DNA

SEQ ID NO: 16997 - DNA, 80 bp, synthetic construct
  source 1..80: mol_type = other DNA
ctaaggggacatctgaacagaggcctgaatgaaggaaaggatgagaatacctcagggaaagcagaaacagcatgtgcaaa

SEQ ID NO: 16998 - DNA, 80 bp, synthetic construct
  source 1..80: mol_type = other DNA
cctactcttgggcagtgagccactgtttatggagtagacggtgtattggaaaaaggcggttataggagatgagatttgag

SEQ ID NO: 16999 - DNA, 80 bp, synthetic construct
  source 1..80: mol_type = other DNA
aggattgggataaaaatggaggtagggagatcagttaggaagcttttgcaatgttaacagaaagagaagagtcaaagatg

SEQ ID NO: 17000 - DNA, 80 bp, synthetic construct; identical to SEQ ID NO: 8193
  source 1..80: mol_type = other DNA

SEQ ID NO: 17001 - DNA, 80 bp, synthetic construct
  source 1..80: mol_type = other DNA
ataactgtggtccctaagaagttatctaaactggttatttacattaaagaagtatctatcatttttcccaaaaatattta

SEQ ID NO: 17002 - DNA, 80 bp, synthetic construct
  source 1..80: mol_type = other DNA
gaaggcacttaataaatgcttgccctacttaacaatttatggaggagacattccacaaaccatcagctcagctgccaaag

SEQ ID NO: 17003 - DNA, 80 bp, synthetic construct
  source 1..80: mol_type = other DNA
gattcagtcctggctctgtcagtcactagctagcaattcccataaatacattttctttctaaatggtgatgggaggaatg

SEQ ID NO: 17004 - DNA, 80 bp, synthetic construct
  source 1..80: mol_type = other DNA
tttttaaaacggaaagttattaggtcacatacaaaattttcatgattgttaaaggaactttcccctttgaaccaggctgc

SEQ ID NO: 17005 - DNA, 80 bp, synthetic construct; identical to SEQ ID NO: 8194
  source 1..80: mol_type = other DNA

SEQ ID NO: 17006 - DNA, 80 bp, synthetic construct
  source 1..80: mol_type = other DNA
gtccagttccttgtgcccacccagacctgacagacagtagagcctcatctgtgcctagtgggcggttcaaccgcatctct

SEQ ID NO: 17007 - DNA, 80 bp, synthetic construct
  source 1..80: mol_type = other DNA
atcggagccgcttggtgaggatctctccagctttgccaaatgtgaaaccctgtgggcaggaacataccttgtcagggacc

SEQ ID NO: 17008 - DNA, 80 bp, synthetic construct; identical to SEQ ID NO: 8195
  source 1..80: mol_type = other DNA

SEQ ID NO: 17009 - DNA, 80 bp, synthetic construct
  source 1..80: mol_type = other DNA
gctatctctagacttctaaggtcctataactcatagactttgttctcacctgttttctaggcaagctaggttccagtccc

SEQ ID NO: 17010 - DNA, 80 bp, synthetic construct
  source 1..80: mol_type = other DNA
atagttggtatggcaatcctataagtagttagagtgtcacatttattctagtaaggtcaaattccccagtgaggctgtaa

SEQ ID NO: 17011 - DNA, 80 bp, synthetic construct
  source 1..80: mol_type = other DNA
aattaataagtgattacctactactgcctcatgcaggcctgagcacttggtcacatgatccttttaatcatcaagaggca

SEQ ID NO: 17012 - DNA, 80 bp, synthetic construct
  source 1..80: mol_type = other DNA
gtggcacgatcatggctcacagcaacctcctcctcctggcctcctgggttcctgagacatttcctgcttcagcctactga

SEQ ID NO: 17013 - DNA, 80 bp, synthetic construct; identical to SEQ ID NO: 8196
  source 1..80: mol_type = other DNA

SEQ ID NO: 17014 - DNA, 80 bp, synthetic construct
  source 1..80: mol_type = other DNA
tgttgttgcttttagaacacgggaagacatttctttgagtatttacatttactggcaatacttatatccaaacttacatc

SEQ ID NO: 17015 - DNA, 80 bp, synthetic construct
  source 1..80: mol_type = other DNA
gtcagaaaaacttggctgttagtagccatgttaatagagaagttctactaaaaggccaattacactgatgtttataaatc

SEQ ID NO: 17016 - DNA, 80 bp, synthetic construct
  source 1..80: mol_type = other DNA
gtaaaaacctgtgagaaaacatttaaaggatttttagttcaatcagtgaagaacccatcctggacctgacccatttccca

SEQ ID NO: 17017 - DNA, 80 bp, synthetic construct; identical to SEQ ID NO: 8197
  source 1..80: mol_type = other DNA

SEQ ID NO: 17018 - DNA, 80 bp, synthetic construct
  source 1..80: mol_type = other DNA
ttttttggtgaaccacagagtggtggtcattcactcagcccaggcctttcaaaaagaaaggaatttccttgagcctgcct

SEQ ID NO: 17019 - DNA, 80 bp, synthetic construct
  source 1..80: mol_type = other DNA
tatctcccttcacagtgggccaaaatcagtcttgtaagatagtaacattcctagcccaggacagacaactttatccttca

SEQ ID NO: 17020 - DNA, 80 bp, synthetic construct
  source 1..80: mol_type = other DNA
ggcaactatctccagaagtatgatttattatcatcacggttttacacagatagaaactgaagtacagagaaggtaattaa

SEQ ID NO: 17021 - DNA, 80 bp, synthetic construct; identical to SEQ ID NO: 8198
  source 1..80: mol_type = other DNA

SEQ ID NO: 17022 - DNA, 80 bp, synthetic construct
  source 1..80: mol_type = other DNA
agttttaatggaacacagtcgtgttcattcatttccacattgctgttgtgtactactaggtcagagttgagtatctgcaa

SEQ ID NO: 17023 - DNA, 80 bp, synthetic construct
  source 1..80: mol_type = other DNA
ggaattttttcaacaactagaaaaatacctggcacagagcagacacaaaaaataattctagaggccaggcatggcagctc

SEQ ID NO: 17024 - DNA, 80 bp, synthetic construct
  source 1..80: mol_type = other DNA
gcactctagcctgggcgagagtgagcgagactcaaaaaataataacaattcttgaataaatatatttaatattaagcatg

SEQ ID NO: 17025 - DNA, 80 bp, synthetic construct; identical to SEQ ID NO: 8199
  source 1..80: mol_type = other DNA

SEQ ID NO: 17026 - DNA, 80 bp, synthetic construct
  source 1..80: mol_type = other DNA
tatgttagagaacagtgcattctcaagccagcctgacaaacatttgaggaactctctttgcacattggtgaaatgaaagt

SEQ ID NO: 17027 - DNA, 80 bp, synthetic construct
  source 1..80: mol_type = other DNA
aaggaaggttcacaaagttagctctcctatcacaaaccagactgctattcttacatcttcaagccaattagtttcatatg

SEQ ID NO: 17028 - DNA, 80 bp, synthetic construct; identical to SEQ ID NO: 8200
  source 1..80: mol_type = other DNA

SEQ ID NO: 17029 - DNA, 80 bp, synthetic construct
  source 1..80: mol_type = other DNA
aatgtcatagtgattattatttagcttcaaaaaaatgttgacaaattttgctacaatactcctttattttttaaaaaata

SEQ ID NO: 17030 - DNA, 80 bp, synthetic construct
  source 1..80: mol_type = other DNA
atacttttaaattctaacctgattctaaaatgttgacattctgggggataggacaggaggattctggataacctctcttg

SEQ ID NO: 17031 - DNA, 80 bp, synthetic construct
  source 1..80: mol_type = other DNA
gcttgtgatccacggacactcctacgagttgatctttttcttattagactggatcttgaatcatttgaagacatttccaa

SEQ ID NO: 17032 - DNA, 80 bp, synthetic construct; identical to SEQ ID NO: 8201
  source 1..80: mol_type = other DNA

SEQ ID NO: 17033 - DNA, 80 bp, synthetic construct
  source 1..80: mol_type = other DNA
agtttactctggatcagtgctttcaacagaaatatggcacaagccatgctatgagccatgttattttaaattttctagaa

SEQ ID NO: 17034 - DNA, 80 bp, synthetic construct
  source 1..80: mol_type = other DNA
cagaacaagatgtgcacactctacttaaaacattccaattcagattcactaccatttaaatgctgtacagacacatgtgg

SEQ ID NO: 17035 - DNA, 80 bp, synthetic construct
  source 1..80: mol_type = other DNA
ttcaagagagaaaaaaaatcttaaacactggtctcatcctgaatcccccaggtgttgtttcctactttgtaaggtaatca

SEQ ID NO: 17036 - DNA, 80 bp, synthetic construct; identical to SEQ ID NO: 8202
  source 1..80: mol_type = other DNA

SEQ ID NO: 17037 - DNA, 80 bp, synthetic construct
  source 1..80: mol_type = other DNA
ttactgaaccaatgctgtgggcattgtaaaaccatcaaatctatataagatagcctctgacttcaataaatgtatagaca

SEQ ID NO: 17038 - DNA, 80 bp, synthetic construct
  source 1..80: mol_type = other DNA
ccagcactttgggaggccaaggtgggtggatcacaaggtcaggagatcaagaccatcctggctaacacagtgaaacccca

SEQ ID NO: 17039 - DNA, 80 bp, synthetic construct
  source 1..80: mol_type = other DNA
aaaaaataataataatcaggggcttgtacaaaccaacaaattcctacagaccaggcgttggccaatcaaaacaaacacag

SEQ ID NO: 17040 - DNA, 80 bp, synthetic construct
  source 1..80: mol_type = other DNA
acctcaatgtcacactgacctgaaataaatttatgaatttattttatccaataaaatattttatccaaggaaactgtgtg

SEQ ID NO: 17041 - DNA, 80 bp, synthetic construct; identical to SEQ ID NO: 8203
  source 1..80: mol_type = other DNA

SEQ ID NO: 17042 - DNA, 80 bp, synthetic construct
  source 1..80: mol_type = other DNA
gtagaaactagaaaatacagaagaaaatagatcaatttttgtatctttttaagaaaaaaggggtatgtggaatttcccct

SEQ ID NO: 17043 - DNA, 80 bp, synthetic construct
  source 1..80: mol_type = other DNA
gcgggaggattgcttgagcccaggagtctgagaccagtcggggcaagatagtgagacctcatctctacaaatatatcaaa

SEQ ID NO: 17044 - DNA, 80 bp, synthetic construct
  source 1..80: mol_type = other DNA
gtgcatgcctgtaatcctagctactcaggaggctgaggcaggaggcagaggttgcagtgagccaagattgtcccactgca

SEQ ID NO: 17045 - DNA, 80 bp, synthetic construct; identical to SEQ ID NO: 8204
  source 1..80: mol_type = other DNA

SEQ ID NO: 17046 - DNA, 80 bp, synthetic construct
  source 1..80: mol_type = other DNA
aagggaagggaaaggaagggaagggaagggaaagaaagggaagggaagggaaaggaaatgaaaggaagggaaggtcagga

SEQ ID NO: 17047 - DNA, 80 bp, synthetic construct
  source 1..80: mol_type = other DNA
agattaagcaaaatgaggggaaaaatagtaaccagaatcccatcggcctctattttggttcacagaatgtttagtaagct

SEQ ID NO: 17048 - DNA, 80 bp, synthetic construct
  source 1..80: mol_type = other DNA
ctgtgacatctcaacttggaacacctttggttataatgtctccatctccacattctcggtcctcacagaattatccccgt

SEQ ID NO: 17049 - DNA, 80 bp, synthetic construct; identical to SEQ ID NO: 8205
  source 1..80: mol_type = other DNA

SEQ ID NO: 17050 - DNA, 80 bp, synthetic construct
  source 1..80: mol_type = other DNA
cacatgtgtctatatttctattttttaatttaaaagattagcaagtgtcttcaaatgaaaatgtattcatcaacatttaa

SEQ ID NO: 17051 - DNA, 80 bp, synthetic construct
  source 1..80: mol_type = other DNA
gaatgttcttatgcttataaatcaggttggtttgaactaagcctcactgaccttatccagagccacctgaaccactgctt

SEQ ID NO: 17052 - DNA, 80 bp, synthetic construct; identical to SEQ ID NO: 8206
  source 1..80: mol_type = other DNA

SEQ ID NO: 17053 - DNA, 80 bp, synthetic construct
  source 1..80: mol_type = other DNA
cccttcttaggatttcccttcttccgatttatagtagtttcctaacttcctgcatagtaggcctgcattttattttttgc

SEQ ID NO: 17054 - DNA, 80 bp, synthetic construct
  source 1..80: mol_type = other DNA
ttcctgactcaccacaccaatgatttcccgtagaaaccttacatttatggtcctaatatcctgtccatcaacactgacct

SEQ ID NO: 17055 - DNA, 80 bp, synthetic construct
  source 1..80: mol_type = other DNA
ggaataaaaagtaagtgtgactttcatacatttgtaattgaaagggcaacatcagaaagatgtgcaatgtgactgctgat

SEQ ID NO: 17056 - DNA, 80 bp, synthetic construct; identical to SEQ ID NO: 8207
  source 1..80: mol_type = other DNA

SEQ ID NO: 17057 - DNA, 80 bp, synthetic construct
  source 1..80: mol_type = other DNA
agtgaacatttctgaattccaaatttcccttaatattatctggtttgtgcccactcttcgaatagctgtcaatacttggc

SEQ ID NO: 17058 - DNA, 80 bp, synthetic construct
  source 1..80: mol_type = other DNA
ggtggatagatggccaactcagacttacattatcaattatcttgaagatttcataagctgctcctcttgcatttgcaaat

SEQ ID NO: 17059 - DNA, 80 bp, synthetic construct
  source 1..80: mol_type = other DNA
atacttcttctgtctttttctaacataggtaattaaaatttaaaatggcgaggcaacatataaatactaggtgttaaaaa

SEQ ID NO: 17060 - DNA, 80 bp, synthetic construct; identical to SEQ ID NO: 8208
  source 1..80: mol_type = other DNA

SEQ ID NO: 17061 - DNA, 80 bp, synthetic construct
  source 1..80: mol_type = other DNA
ttagcttgctctgatcactccacattttgtgtgtatgtgtgtgtatacataaacatcacattgtattccgtaagtgtaat

SEQ ID NO: 17062 - DNA, 80 bp, synthetic construct
  source 1..80: mol_type = other DNA
agtagctgggactacagacaagtgccaccatatctggctaattaaaaaaaaaaattatagagatgagatctcactatgtt

SEQ ID NO: 17063 - DNA, 80 bp, synthetic construct
  source 1..80: mol_type = other DNA
atcatcagtaaggtaaagtggaaataaatgctagcagaggagtcagaagacccagttctgaatcctaaattagtaataac

SEQ ID NO: 17064 - DNA, 80 bp, synthetic construct
  source 1..80: mol_type = other DNA
acacacacctaagacactgatcctttatcaggttgtcttttttgccacaaggccgtgttctctttaggccttttgttttt

SEQ ID NO: 17065 - DNA, 80 bp, synthetic construct; identical to SEQ ID NO: 8209
  source 1..80: mol_type = other DNA

SEQ ID NO: 17066 - DNA, 80 bp, synthetic construct
  source 1..80: mol_type = other DNA
gaagtatattcatgcccagtgaacactggatttaaactgcttatctcaatcacagttaaacagaaaacatctgttatgac

SEQ ID NO: 17067 - DNA, 80 bp, synthetic construct
  source 1..80: mol_type = other DNA
tgttttaagggattctacaaaatatcatctctcattgcctcaatctatttctgcttggcctacgaaaaaggaactaagtg

SEQ ID NO: 17068 - DNA, 80 bp, synthetic construct; identical to SEQ ID NO: 8210
  source 1..80: mol_type = other DNA

SEQ ID NO: 17069 - DNA, 80 bp, synthetic construct
  source 1..80: mol_type = other DNA
aaaaacaaacaagcaaataaaagaaaaaactggttgtcggatgcatctaatttttttccacttttttttttttttttttt

SEQ ID NO: 17070 - DNA, 80 bp, synthetic construct
  source 1..80: mol_type = other DNA
ttttttgtagagacggggtttcaccatgttagccaggatggtctcgatctcctgacctcgtgatctgcctgcctcggcct

SEQ ID NO: 17071 - DNA, 80 bp, synthetic construct
  source 1..80: mol_type = other DNA
catttctcaatgtaaaccacttacagtgagtacttgtccaatagaatattcccctgagaggaccaaggtggtcccatacc

SEQ ID NO: 17072 - DNA, 80 bp, synthetic construct; identical to SEQ ID NO: 8211
  source 1..80: mol_type = other DNA

SEQ ID NO: 17073 - DNA, 80 bp, synthetic construct
  source 1..80: mol_type = other DNA
aaacttacattgtttcatacacaagacaaagtaaaagccatggaaaaaacctgtgtctttccttcaaaatctgcatgcct

SEQ ID NO: 17074 - DNA, 80 bp, synthetic construct
  source 1..80: mol_type = other DNA
cctctaggactgtcggaatgaccaactgagaggttacatgtgtgagagcattttgagagttctgaattgccatgtaatac

SEQ ID NO: 17075 - DNA, 80 bp, synthetic construct
  source 1..80: mol_type = other DNA
gcattccctctcttccttctcctttctacatattgactatgtgtccttccctctattaatgctcccaacacttgtcatgc

SEQ ID NO: 17076 - DNA, 80 bp, synthetic construct; identical to SEQ ID NO: 8212
  source 1..80: mol_type = other DNA

SEQ ID NO: 17077 - DNA, 80 bp, synthetic construct
  source 1..80: mol_type = other DNA
gtaaagttaaaggagatgatgtctataactcgaccttcatttgaaaggaacagagaagactactctgtttaagaggatag

SEQ ID NO: 17078 - DNA, 80 bp, synthetic construct
  source 1..80: mol_type = other DNA
ttaatcgcaactccctgcagaacctagagcattgccttggatagaggaggagctaataattgttgaaattcatgaactta

SEQ ID NO: 17079 - DNA, 80 bp, synthetic construct
  source 1..80: mol_type = other DNA
tttcatgactactttaactaggtacattacagagttacaaaagcatgccaagtgaaatttacatcactaccgtgttcact

SEQ ID NO: 17080 - DNA, 80 bp, synthetic construct; identical to SEQ ID NO: 8213
  source 1..80: mol_type = other DNA

SEQ ID NO: 17081 - DNA, 80 bp, synthetic construct
  source 1..80: mol_type = other DNA
catcagaaaggagaaataaaggaaagaagggggcaaagggaaatgagatataaacaatactccttttccataagctcttt

SEQ ID NO: 17082 - DNA, 80 bp, synthetic construct
  source 1..80: mol_type = other DNA
atattgtgaaaatatttatcaataatgcaagtaactactttaagaataaggaacaattttggttaagccaacagaaataa

SEQ ID NO: 17083 - DNA, 80 bp, synthetic construct
  source 1..80: mol_type = other DNA
tgaagagaaagccagattaagacctcaattactttatgtagaagcagagaagggaaggagaagaacaggaaagaaaactg

SEQ ID NO: 17084 - DNA, 80 bp, synthetic construct
  source 1..80: mol_type = other DNA
gacttctcgcatccattcatgagacccattacagacaaacaatctgaaaacataacgtggatagtcattcctctttttaa

SEQ ID NO: 17085 - DNA, 80 bp, synthetic construct; identical to SEQ ID NO: 8214
  source 1..80: mol_type = other DNA

SEQ ID NO: 17086 - DNA, 80 bp, synthetic construct
  source 1..80: mol_type = other DNA
tgccccaaccaccgtatttaaagttaacttgaccattcatcatcctcacactctttgattctttcagatcacatttttaa

SEQ ID NO: 17087 - DNA, 80 bp, synthetic construct
  source 1..80: mol_type = other DNA
tactattttgactgaagatcacaaaataacctctgtttctgattcacagctgaaaacctagagccctagctttgtttaga

SEQ ID NO: 17088 - DNA, 80 bp, synthetic construct
  source 1..80: mol_type = other DNA
cttgatctccaagcaaaattagtttcagttctctgaaggagactgccctttcaaagatacattcaagtaacttatatttt

SEQ ID NO: 17089 - DNA, 80 bp, synthetic construct; identical to SEQ ID NO: 8215
  source 1..80: mol_type = other DNA

SEQ ID NO: 17090 - DNA, 80 bp, synthetic construct
  source 1..80: mol_type = other DNA
tagaacattccatatgcagctaggactcaaagggctatacctcagtatattaagcaacacacagcagaacttgcatgtct

SEQ ID NO: 17091 - DNA, 80 bp, synthetic construct
  source 1..80: mol_type = other DNA
tgcccttggtgaatagcagaagcaaacataaatcctgcctgatagaattggacttcaatccagatccatagcaaatttaa

SEQ ID NO: 17092 - DNA, 80 bp, synthetic construct
  source 1..80: mol_type = other DNA
gcttataaaacctactggaatttctgtgtagacaatcttatcgtctgtgaataacgacagttttcttcctattttccaat

SEQ ID NO: 17093 - DNA, 80 bp, synthetic construct
  source 1..80: mol_type = other DNA
tagtatgtatttatttcattcattattttaagtgttaaaatatttttaatgtttcaccactaaatgtttcctgcgggtct

SEQ ID NO: 17094 - DNA, 80 bp, synthetic construct; identical to SEQ ID NO: 8216
  source 1..80: mol_type = other DNA

SEQ ID NO: 17095 - DNA, 80 bp, synthetic construct
  source 1..80: mol_type = other DNA
gcctacaaaattatccagacttgttttgtgatttctgcttgtgggagagaagcagtggaaaatggagatttttaactttg

SEQ ID NO: 17096 - DNA, 80 bp, synthetic construct
  source 1..80: mol_type = other DNA
gttttccctattcattctttttttgttcctgattaaacatataaaatagttatttataagtctttttaaagaattagttt

SEQ ID NO: 17097 - DNA, 80 bp, synthetic construct; identical to SEQ ID NO: 8217
  source 1..80: mol_type = other DNA

SEQ ID NO: 17098 - DNA, 80 bp, synthetic construct
  source 1..80: mol_type = other DNA
tggtccaccttttctctgaggaaaactggaaaagaattccaaactcaaaacttcattatgtctctgctcaaatatcaact

SEQ ID NO: 17099 - DNA, 80 bp, synthetic construct
  source 1..80: mol_type = other DNA
agagccggggatttatttcattgaatatttgctcagtcattaagcaggactcctcattttattagccagacatcttttaa

SEQ ID NO: 17100 - DNA, 80 bp, synthetic construct
  source 1..80: mol_type = other DNA
aaaaaattatgcaatgaatactcatgtaagtatacctgagatcaagaaacagaacactgccagaaccacagaatcccctg

SEQ ID NO: 17101 - DNA, 80 bp, synthetic construct
  source 1..80: mol_type = other DNA
tattcataagattgaagtgttatagcatcagaatattataatttatattcaattttacataaaatctgttgctgcttaga

SEQ ID NO: 17102 - DNA, 80 bp, synthetic construct; identical to SEQ ID NO: 8218
  source 1..80: mol_type = other DNA

SEQ ID NO: 17103 - DNA, 80 bp, synthetic construct
  source 1..80: mol_type = other DNA
gaattgcaacttctccaaaatattagttatgctgtaatacatccattaagctatttaagaaaacatatatatgggagaaa

SEQ ID NO: 17104 - DNA, 80 bp, synthetic construct
  source 1..80: mol_type = other DNA
tcacagttctaattgctgccaagacctcttcagctactgctccagcttttgcatacgctaagagttctttatcagtaaat

SEQ ID NO: 17105 - DNA, 80 bp, synthetic construct
  source 1..80: mol_type = other DNA
gagcaaaatctgtcttttacttgcctttggtctgtattaacagccactgaagtaaacctctccctgaaaccagccactga

SEQ ID NO: 17106 - DNA, 80 bp, synthetic construct; identical to SEQ ID NO: 8219
  source 1..80: mol_type = other DNA

SEQ ID NO: 17107 - DNA, 80 bp, synthetic construct
  source 1..80: mol_type = other DNA
ccctgttctccccacccctcccccaaaattacacaaaaccaatttattttaaaaattctgattaaatagaattatattct

SEQ ID NO: 17108 - DNA, 80 bp, synthetic construct
  source 1..80: mol_type = other DNA
ggtggatgaaggcaaatgaacattgattagttatgttctaagtgcagacattgtgctgcacgtacctagcctctttagta

SEQ ID NO: 17109 - DNA, 80 bp, synthetic construct
  source 1..80: mol_type = other DNA
catacaacatgctttaggaatgtttttctgctccttctgaaacctcatggtgccacaacaattgccacaatggagacaac

SEQ ID NO: 17110 - DNA, 80 bp, synthetic construct; identical to SEQ ID NO: 8220
  source 1..80: mol_type = other DNA

SEQ ID NO: 17111 - DNA, 80 bp, synthetic construct
  source 1..80: mol_type = other DNA
agtcatgatgcagaacaattcagtcacaaggatcccatcagagaatattatgaatgcttctgtgcacataaactagaaaa

SEQ ID NO: 17112 - DNA, 80 bp, synthetic construct
  source 1..80: mol_type = other DNA
tgaattctgccaaatgtaaaaagaagagctgataccattcctactgaaaatgttccaaaaaatttaggtggagggactcc

SEQ ID NO: 17113 - DNA, 80 bp, synthetic construct
  source 1..80: mol_type = other DNA
ttatctaccatgatcaagtaggctttatcctcaggatgcaagtttggctcaacagatgtaaatcaataaatgtgattcat

SEQ ID NO: 17114 - DNA, 80 bp, synthetic construct; identical to SEQ ID NO: 8221
  source 1..80: mol_type = other DNA

SEQ ID NO: 17115 - DNA, 80 bp, synthetic construct
  source 1..80: mol_type = other DNA
ctcacttataagtgggagctaaatgatgagaacacatggatacatagaggggaacaacacacactggggcctattagagg

SEQ ID NO: 17116 - DNA, 80 bp, synthetic construct
  source 1..80: mol_type = other DNA
aaagttaaaataaaataaacctgccttactctagccggcagttgttccattgaagtttagcatgatagtattggtctact

SEQ ID NO: 17117 - DNA, 80 bp, synthetic construct
  source 1..80: mol_type = other DNA
tttgtgagctgtggttccaggagcggtttaatattcagagtgtttgtagtattattttggtcggcttgatttatgtgaag

SEQ ID NO: 17118 - DNA, 80 bp, synthetic construct
  source 1..80: mol_type = other DNA
aagtacaaaagaggcttcctgggccaggtcacttgctgtgattgggtccctttctgctatatctatttgcttctgtgtct

SEQ ID NO: 17119 - DNA, 80 bp, synthetic construct; identical to SEQ ID NO: 8222
  source 1..80: mol_type = other DNA

SEQ ID NO: 17120 - DNA, 80 bp, synthetic construct
  source 1..80: mol_type = other DNA
gataatccccagaaacattatttgaactctatgttactctgagcaaaaaattaacagagacctgagaacttcagtttctt

SEQ ID NO: 17121 - DNA, 80 bp, synthetic construct
  source 1..80: mol_type = other DNA
tattttgtgtgatgcttggttttggttgtccattcattacttttgctacatgaatttatattgccttatctgagttgtgt

SEQ ID NO: 17122 - DNA, 80 bp, synthetic construct; identical to SEQ ID NO: 8223
  source 1..80: mol_type = other DNA

SEQ ID NO: 17123 - DNA, 80 bp, synthetic construct
  source 1..80: mol_type = other DNA
tgaatgggacatctgtagttcactaaacttgagtctctacttgccgtgtgaatggggcatcatccactagagagcatggt

SEQ ID NO: 17124 - DNA, 80 bp, synthetic construct
  source 1..80: mol_type = other DNA
aggggtagtactcagtgaggctggatatgcttatccagctgattttgaacagaaaacgtaaaagtaacaagtacagaatc

SEQ ID NO: 17125 - DNA, 80 bp, synthetic construct
  source 1..80: mol_type = other DNA
aagaacaggactgatggccaaaatcacaagggttagcttccaaccacgtgtaaatcctactataaacccagtgaaaaatg

SEQ ID NO: 17126 - DNA, 80 bp, synthetic construct
  source 1..80: mol_type = other DNA
ctcgtgaagcctgttttgagtgtagggtagtttatggctagagtattttgtgcctatgctttgttttatttagcagggta

SEQ ID NO: 17127 - DNA, 80 bp, synthetic construct; identical to SEQ ID NO: 8224
  source 1..80: mol_type = other DNA

SEQ ID NO: 17128 - DNA, 80 bp, synthetic construct
  source 1..80: mol_type = other DNA
ctaaggataagaacgacacccaagttcaacataaaactaaatacttactctgtaagtcgggtgttaagctccccaacatc

SEQ ID NO: 17129 - DNA, 80 bp, synthetic construct
  source 1..80: mol_type = other DNA
ctgaaaaacaacaagaacactgcacatgctctctgtttcctaatcaatgtaccttttccaaagagaccactcattcctat

SEQ ID NO: 17130 - DNA, 80 bp, synthetic construct; identical to SEQ ID NO: 8225
  source 1..80: mol_type = other DNA

SEQ ID NO: 17131 - DNA, 80 bp, synthetic construct
  source 1..80: mol_type = other DNA
tggggaatcacagcatcaggtaagacccaccactgtaatatttttattacatcagcatcagttgataagtgcattgggtt

SEQ ID NO: 17132 - DNA, 80 bp, synthetic construct
  source 1..80: mol_type = other DNA
tagttttatttcatttgcccaactggccatcgtgagttatcctaaaatgcttaacgaatcaaatagtggcccttccaatt

SEQ ID NO: 17133 - DNA, 80 bp, synthetic construct
  source 1..80: mol_type = other DNA
ggccgaggcagacagatcacaaggtcaggagttggagaccaccctggccaatatgatgaaaccctgtctctacaaaaaat

SEQ ID NO: 17134 - DNA, 80 bp, synthetic construct
  source 1..80: mol_type = other DNA
catctcaaaaaaaaaaaaagaaaagcaaacaattcacacctgtaatcccagcacttcgggaggccaaggtgggcggatca

SEQ ID NO: 17135 - DNA, 80 bp, synthetic construct; identical to SEQ ID NO: 8226
  source 1..80: mol_type = other DNA

SEQ ID NO: 17136 - DNA, 80 bp, synthetic construct
  source 1..80: mol_type = other DNA
catcttcaaattaaactgtgtgtttgaatcatgcagaagctataaagatggctaggtaacaagcagacagtctctgacat

SEQ ID NO: 17137 - DNA, 80 bp, synthetic construct
  source 1..80: mol_type = other DNA
tcatgatacaacaagagatagtattctatctaagtgttcattatatagcaagagatagctaatagaaaccccacatcaca

SEQ ID NO: 17138 - DNA, 80 bp, synthetic construct; identical to SEQ ID NO: 8227
  source 1..80: mol_type = other DNA

SEQ ID NO: 17139 - DNA, 80 bp, synthetic construct
  source 1..80: mol_type = other DNA
cagccacttgggaagctgagacacaagaatcgcttgaagccaggaatcgaaggtcgcagtgagccgagatcgcaccactg

SEQ ID NO: 17140 - DNA, 80 bp, synthetic construct
  source 1..80: mol_type = other DNA
ggagaataaacttcaagatatgtaaatcattaaccaaaagcttccccagtgtgagttaagaatagagagactgtattttt

SEQ ID NO: 17141 - DNA, 80 bp, synthetic construct
  source 1..80: mol_type = other DNA
ggggtgtgggggacagggtcctgctctttcccccaggctggagtgcagtgatgtgatcatagctcactgcagctttgaac

SEQ ID NO: 17142 - DNA, 80 bp, synthetic construct
  source 1..80: mol_type = other DNA
aatatgatattctacattgatcaatgcatatatgtccattttaagcttaactctaacttttgtatactttatgcagccaa

SEQ ID NO: 17143 - DNA, 80 bp, synthetic construct; identical to SEQ ID NO: 8228
  source 1..80: mol_type = other DNA

SEQ ID NO: 17144 - DNA, 80 bp, synthetic construct
  source 1..80: mol_type = other DNA
tacaccaactcagtgatgtttatttgcaagaagaaacccacatttggtaagaggtagtctgtcagcagaaatatcagtgt

SEQ ID NO: 17145 - DNA, 80 bp, synthetic construct
  source 1..80: mol_type = other DNA
acagtgtaataaacaccagtgagctcatcacccaatattagcaaatgctaacatttttggataaaaagtacattataaaa

SEQ ID NO: 17146 - DNA, 80 bp, synthetic construct
  source 1..80: mol_type = other DNA
tcatagtttacatttagtggccaaattttttcctgtcagtatatatatgtgtgtatctattttttcaatgttgcaactat

SEQ ID NO: 17147 - DNA, 80 bp, synthetic construct; identical to SEQ ID NO: 8229
  source 1..80: mol_type = other DNA

SEQ ID NO: 17148 - DNA, 80 bp, synthetic construct
  source 1..80: mol_type = other DNA
taattagaagtatgttctacgagagtttagccaccagcaatgtatacgattaactggaatgtggagagactaagggactt

SEQ ID NO: 17149 - DNA, 80 bp, synthetic construct
  source 1..80: mol_type = other DNA
agcatttggagaatgctagtgtcatggtgggaaataagaagtcagcaaaaagagctaccctggtcagaggagagattatt

SEQ ID NO: 17150 - DNA, 80 bp, synthetic construct
  source 1..80: mol_type = other DNA
ccataaggacaggccagcagatagggagaaaacagcaggccaagcacagaatcctggagaaaactccattaaagggtaag

SEQ ID NO: 17151 - DNA, 80 bp, synthetic construct; identical to SEQ ID NO: 8230
  source 1..80: mol_type = other DNA

SEQ ID NO: 17152 - DNA, 80 bp, synthetic construct
  source 1..80: mol_type = other DNA
tcaattcttaagataagaaaccaagataatttaaataaatgttcttcagcaatgatgtcttctaagtctacagtcatttc

SEQ ID NO: 17153 - DNA, 80 bp, synthetic construct
  source 1..80: mol_type = other DNA
caccaagttccttttatttgtgcttcacctttcaaagtgtaccagtcaaaataaaaattgggcattcaacaaagaagtat

SEQ ID NO: 17154 - DNA, 80 bp, synthetic construct
  source 1..80: mol_type = other DNA
gtcctttgcagggacagggagggggctggaggccattatccttagcaaactaacacaggaagagaaaaccaaataccacg

SEQ ID NO: 17155 - DNA, 80 bp, synthetic construct; identical to SEQ ID NO: 8231
  source 1..80: mol_type = other DNA

SEQ ID NO: 17156 - DNA, 80 bp, synthetic construct
  source 1..80: mol_type = other DNA
aaccatcatcctttatgcagtggactgtcattgaaggttatcaccagtttgtaggacctcattatcctggttctcctact

SEQ ID NO: 17157 - DNA, 80 bp, synthetic construct
  source 1..80: mol_type = other DNA
cccatcatttcttacctctcctgtaacaagactactgtaactaatctttctaccccagttaggtcttcatattgtcccca

SEQ ID NO: 17158 - DNA, 80 bp, synthetic construct; identical to SEQ ID NO: 8232
  source 1..80: mol_type = other DNA

SEQ ID NO: 17159 - DNA, 80 bp, synthetic construct
  source 1..80: mol_type = other DNA
tcatgagattaagctccaccctttagactgaaaaaatattttccacatgctgagaagaaaataagtagttgagaattgct

SEQ ID NO: 17160 - DNA, 80 bp, synthetic construct
  source 1..80: mol_type = other DNA
gaacagaatgacatcaaagcttctaagagaggaggacgagagagcttgacggaatgcctatgtagatgatgatgctgaac

SEQ ID NO: 17161 - DNA, 80 bp, synthetic construct
  source 1..80: mol_type = other DNA
tttttgcacacttggattctggaataatagttacatttgctacatccctttctagcgtcaactcactccactcccccatc

SEQ ID NO: 17162 - DNA, 80 bp, synthetic construct; identical to SEQ ID NO: 8233
  source 1..80: mol_type = other DNA

SEQ ID NO: 17163 - DNA, 80 bp, synthetic construct
  source 1..80: mol_type = other DNA
ccactggtgtgaggtcatagaaaactgaactatatctagtttatctttatatatccagtgcccaacctgttgtatctgct

SEQ ID NO: 17164 - DNA, 80 bp, synthetic construct
  source 1..80: mol_type = other DNA
gcaagaaaagccttttctaaacccaagcaagactttaaaggataagactgtaccatttagggattttttatttgacctaa

SEQ ID NO: 17165 - DNA, 80 bp, synthetic construct
  source 1..80: mol_type = other DNA
actgtcttccacagagacttcatgccaggcatcattccagacactgaagataaacccagaatgagagccactttctctaa

SEQ ID NO: 17166 - DNA, 80 bp, synthetic construct
  source 1..80: mol_type = other DNA
caataaactactcttcttgtgcagaaagctccatcaaccgcagggaaggggaatttggatcttttgcctaaatgataaat

SEQ ID NO: 17167 - DNA, 80 bp, synthetic construct; identical to SEQ ID NO: 8234
  source 1..80: mol_type = other DNA

SEQ ID NO: 17168 - DNA, 80 bp, synthetic construct
  source 1..80: mol_type = other DNA
taagccccttttcacctacaaaattctattattcagtcttttatttattcatccaatttcttaagcacctagaatgggtt

SEQ ID NO: 17169 - DNA, 80 bp, synthetic construct
  source 1..80: mol_type = other DNA
gtttatctttatatatccagtgcccaacctgttgtatctgctataacttaacctattcaaaaaatttgcaaatggtttca

SEQ ID NO: 17170 - DNA, 80 bp, synthetic construct; identical to SEQ ID NO: 8235
  source 1..80: mol_type = other DNA

SEQ ID NO: 17171 - DNA, 80 bp, synthetic construct
  source 1..80: mol_type = other DNA
gggtggtacatagtagatgtatatatttacagggtgtatgagatattttgacataggcatacaatggataataatcacat

SEQ ID NO: 17172 - DNA, 80 bp, synthetic construct
  source 1..80: mol_type = other DNA
taactatatatttttgtatcctttaaccatctccacttctacctctgccaccccactacacttcccggcctctggtaaat

SEQ ID NO: 17173 - DNA, 80 bp, synthetic construct
  source 1..80: mol_type = other DNA
ttccatttttgttgttgcaaatgacaggatctcatttttttaaggatgaatagtactccattgtgtgtatgtatcataat

SEQ ID NO: 17174 - DNA, 80 bp, synthetic construct; identical to SEQ ID NO: 8236
  source 1..80: mol_type = other DNA

SEQ ID NO: 17175 - DNA, 80 bp, synthetic construct
  source 1..80: mol_type = other DNA
tgcatttctctgatgatcaatgatgttgagcatattttcatatacctgtttgccatttgtatagcttcttttgagaaatg

SEQ ID NO: 17176 - DNA, 80 bp, synthetic construct
  source 1..80: mol_type = other DNA
ctgcagtccagaaggtttttaacttgatgtgatccatttgtccatttttgttttggttccctgtgcttgtaggggtatta

SEQ ID NO: 17177 - DNA, 80 bp, synthetic construct
  source 1..80: mol_type = other DNA
tggatatccagttctcccaccaccattttttgaagagacggtcttttccccaatatacattcttagaaactttgtcaaaa

SEQ ID NO: 17178 - DNA, 80 bp, synthetic construct
  source 1..80: mol_type = other DNA
aggatagctttggctattctgtttttttcgtggttccatgtaaatgttaggattcttttttctatttctgtgaagaatgt

SEQ ID NO: 17179 - DNA, 80 bp, synthetic construct; identical to SEQ ID NO: 8237
  source 1..80: mol_type = other DNA

SEQ ID NO: 17180 - DNA, 80 bp, synthetic construct
  source 1..80: mol_type = other DNA
ctaattttttgtatttttagtagagacagggtttcaccgttttagccgggatagtctcgatctcctgacctcgtgatcca

SEQ ID NO: 17181 - DNA, 80 bp, synthetic construct
  source 1..80: mol_type = other DNA
atttatcactcctaatagttatttgttggagtctttaggtttttccaaatataagattgtatcatctgccaacagggata

SEQ ID NO: 17182 - DNA, 80 bp, synthetic construct; identical to SEQ ID NO: 8238
  source 1..80: mol_type = other DNA

SEQ ID NO: 17183 - DNA, 80 bp, synthetic construct
  source 1..80: mol_type = other DNA
tattttaatgtgttttttttaatccattcagccactctatgtcttttgattagagaatttagtccatttagattcaatgt

SEQ ID NO: 17184 - DNA, 80 bp, synthetic construct
  source 1..80: mol_type = other DNA
atgttattttatttgaggttaccatcaggtgtgcaaatgatatcatataactcatttttaaactgatggcaacttaatgc

SEQ ID NO: 17185 - DNA, 80 bp, synthetic construct
  source 1..80: mol_type = other DNA
ctactcaagatatgagtaagttatacaccacaattacagtgttgtaatattctgtgtttttctgagtacttattattacc

SEQ ID NO: 17186 - DNA, 80 bp, synthetic construct
  source 1..80: mol_type = other DNA
ttgaaggatattttcattggatattctattttaggataaaaagtgtttttctttcagcactttaaatatgtcacgctact

SEQ ID NO: 17187 - DNA, 80 bp, synthetic construct; identical to SEQ ID NO: 8239
  source 1..80: mol_type = other DNA

SEQ ID NO: 17188 - DNA, 80 bp, synthetic construct
  source 1..80: mol_type = other DNA
tagcctgtcttcaagctcactaattcttccttctgcttgatcaattttgctattaagagactgtgattcattcttcagta

SEQ ID NO: 17189 - DNA, 80 bp, synthetic construct
  source 1..80: mol_type = other DNA
tgttcaatttggtgttcctgtagggatgggggagggggggatgatttctggaggcttttgtttggctatcttgttccacc

SEQ ID NO: 17190 - DNA, 80 bp, synthetic construct
  source 1..80: mol_type = other DNA
tctagtcctgttctttatgccaagatttagtgtcatttcttcaactgcctggatgtcattttacaggcaccccacctgcc

SEQ ID NO: 17191 - DNA, 80 bp, synthetic construct; identical to SEQ ID NO: 8240
  source 1..80: mol_type = other DNA

SEQ ID NO: 17192 - DNA, 80 bp, synthetic construct
  source 1..80: mol_type = other DNA
gatcctatgtttattgtaaaaacccccaggctttcaagagcctccgcaagtccaagtccccttaagcaaggactactttt

SEQ ID NO: 17193 - DNA, 80 bp, synthetic construct
  source 1..80: mol_type = other DNA
atctctgggacaagcatcaaaacctttgatgctattccctgctttccaggcagacttgagggtatctggcagtctgaatc

SEQ ID NO: 17194 - DNA, 80 bp, synthetic construct
  source 1..80: mol_type = other DNA
aatctttattttgaaatggtttcatctgttacacagaataggtacactttgtgtaggagatagatgctgaccatatttgg

SEQ ID NO: 17195 - DNA, 80 bp, synthetic construct; identical to SEQ ID NO: 8241
  source 1..80: mol_type = other DNA

SEQ ID NO: 17196 - DNA, 80 bp, synthetic construct
  source 1..80: mol_type = other DNA
ctactgtgtcattgtggcatagaagcagccataggctgcttacattcataaaatgtaaatgaataggtgtagctacattt

SEQ ID NO: 17197 - DNA, 80 bp, synthetic construct
  source 1..80: mol_type = other DNA
gcatggctggtaaccaaggaaattctacttaaagggatgattattcacatcatataataggtactgagtaactttgggta

SEQ ID NO: 17198 - DNA, 80 bp, synthetic construct
  source 1..80: mol_type = other DNA
tacttcttatgactagactttgttctgtgattcttcaatgaatgaatccacttaaatatcacaaccatcctgagaagtag

SEQ ID NO: 17199 - DNA, 80 bp, synthetic construct; identical to SEQ ID NO: 8242
  source 1..80: mol_type = other DNA

SEQ ID NO: 17200 - DNA, 80 bp, synthetic construct
  source 1..80: mol_type = other DNA
tcacaactagatcatcatctgtttgggagctcatgcatgctattaagtaagtgagtttactgtgtgtcttagtccatttg

SEQ ID NO: 17201 - DNA, 80 bp, synthetic construct
  source 1..80: mol_type = other DNA
cgccacagaatattggccaatatagcaagtataggaactaatgaattcagaaagcattgaggacttcctctggtgaatgg

SEQ ID NO: 17202 - DNA, 80 bp, synthetic construct; identical to SEQ ID NO: 8243
  source 1..80: mol_type = other DNA

SEQ ID NO: 17203 - DNA, 80 bp, synthetic construct
  source 1..80: mol_type = other DNA
tttgaccacctgagtgcaaactggattgtaagtttttgagtagctcagtttaaatcaatctaggcttgaccagaggtaac

SEQ ID NO: 17204 - DNA, 80 bp, synthetic construct
  source 1..80: mol_type = other DNA
tctatcagccaattctcctgcttcctacttcactgagaaaactaaagttatcaggagaaaaattccacagattctcacct

SEQ ID NO: 17205 - DNA, 80 bp, synthetic construct
  source 1..80: mol_type = other DNA
tttccattaacacacaaaacaagctacaagctattatttatcctatcctaaaatacccccccacacacacacacacaatt

SEQ ID NO: 17206 - DNA, 80 bp, synthetic construct; identical to SEQ ID NO: 8244
  source 1..80: mol_type = other DNA

SEQ ID NO: 17207 - DNA, 80 bp, synthetic construct
  source 1..80: mol_type = other DNA
ttataactcagactgtctgcctcctacaggactaaacacactaatgtgtatttagtaaagaatccataaacatcactcta

SEQ ID NO: 17208 - DNA, 80 bp, synthetic construct
  source 1..80: mol_type = other DNA
ggatgatggcagccaaagttcccaccaccatatacaacttgtcaagccaatttgaatagcgaaactaaaaagagagaaaa

SEQ ID NO: 17209 - DNA, 80 bp, synthetic construct
  source 1..80: mol_type = other DNA
gacatttgattcttccattgagttctggcctaattcttcatattggacttggtctgtcttcttatatgaagtctaatgag

SEQ ID NO: 17210 - DNA, 80 bp, synthetic construct; identical to SEQ ID NO: 8245
  source 1..80: mol_type = other DNA

SEQ ID NO: 17211 - DNA, 80 bp, synthetic construct
  source 1..80: mol_type = other DNA
ctctttaaatgtaggcaggtaacaggaaggaaagaaaagcttctctgaacccaaaaagttacaggaaaaggacacagtta

SEQ ID NO: 17212 - DNA, 80 bp, synthetic construct
  source 1..80: mol_type = other DNA
acatgtggatgcaaggtgtagctgtaggcaacaggtttgtaatgcagggaggaaactgggtaaaaaaatcataggcctag

SEQ ID NO: 17213 - DNA, 80 bp, synthetic construct
  source 1..80: mol_type = other DNA
catgaatcttacagtagcaactgggggatttggtactggactgccgagtggagaaataaagaatggttattaccagtaat

SEQ ID NO: 17214 - DNA, 80 bp, synthetic construct
  source 1..80: mol_type = other DNA
gtttgggttcatggcataactttccatgttatttatgggttgatgatctaaaaacatcatcatatttacagattaaaaca

SEQ ID NO: 17215 - DNA, 80 bp, synthetic construct; identical to SEQ ID NO: 8246
  source 1..80: mol_type = other DNA

SEQ ID NO: 17216 - DNA, 80 bp, synthetic construct
  source 1..80: mol_type = other DNA
tctgcatgctttgacagtacagtgtatagaatagacacaaaactgagtcaatcatcattccctcctttgtgaaaaggctt

SEQ ID NO: 17217 - DNA, 80 bp, synthetic construct
  source 1..80: mol_type = other DNA
gtcaggagatcaataccatcctggctaacacagtgaaaccccgtctctattaaaatacaaaaaaagaaattagccggatg

SEQ ID NO: 17218 - DNA, 80 bp, synthetic construct; identical to SEQ ID NO: 8247
  source 1..80: mol_type = other DNA

SEQ ID NO: 17219 - DNA, 80 bp, synthetic construct
  source 1..80: mol_type = other DNA
cttaatcttagactagaaggaaggagattaaagtgagtactaattttccaggaataaagacagaaaattgaaagagttca

SEQ ID NO: 17220 - DNA, 80 bp, synthetic construct
  source 1..80: mol_type = other DNA
ctcgttagttatttttcctgatcctctccctcctcccacactccaccctccgaaaggccccaatgtgtgttgttcccctc

SEQ ID NO: 17221 - DNA, 80 bp, synthetic construct
  source 1..80: mol_type = other DNA
gttcaatgctctatgtgtaccacattttctttatccagtctacaattgatggccatttaggttgattccatgtctttgct

SEQ ID NO: 17222 - DNA, 80 bp, synthetic construct
  source 1..80: mol_type = other DNA
taaatgttcctttttctccacaatcttgccagcatctgttatttttttactttgtaataatagccattctgactggtgtt

SEQ ID NO: 17223 - DNA, 80 bp, synthetic construct; identical to SEQ ID NO: 8248
  source 1..80: mol_type = other DNA

SEQ ID NO: 17224 - DNA, 80 bp, synthetic construct
  source 1..80: mol_type = other DNA
acacagaaaaccttacatagctgttatgagggtaaaaatgagaatacaagaaacttattgagcatacaatatgcaaatat

SEQ ID NO: 17225 - DNA, 80 bp, synthetic construct
  source 1..80: mol_type = other DNA
gaaatgcgctgggcatgatggctcacacctgtaatcccaacactttgggaggctgagggcaggaggatcacttgagccca

SEQ ID NO: 17226 - DNA, 80 bp, synthetic construct
  source 1..80: mol_type = other DNA
atcatgccactgtactccagcctgggtgacagagttaagacctaaaaaaagaaagagagagagagagaggagagagagag

SEQ ID NO: 17227 - DNA, 80 bp, synthetic construct; identical to SEQ ID NO: 8249
  source 1..80: mol_type = other DNA

SEQ ID NO: 17228 - DNA, 80 bp, synthetic construct
  source 1..80: mol_type = other DNA
ggtaacaacagtgagtaagaaaagctacctatcctcacaaagcatacactctagtgcatacactaaaagggggaatagat

SEQ ID NO: 17229 - DNA, 80 bp, synthetic construct
  source 1..80: mol_type = other DNA
tgataaatattcaggagaaaagccatacatggtatgacacagagacaggcagggtcacctggtttagattggctggtcag

SEQ ID NO: 17230 - DNA, 80 bp, synthetic construct; identical to SEQ ID NO: 8250
  source 1..80: mol_type = other DNA

SEQ ID NO: 17231 - DNA, 80 bp, synthetic construct
  source 1..80: mol_type = other DNA
taggagatgaaagagcagttgagagagtaaagtcttgaccaggtgtggtagacagaataattctccccccacagcctgtc

SEQ ID NO: 17232 - DNA, 80 bp, synthetic construct
  source 1..80: mol_type = other DNA
gtaggagatgtgatgattgaagtaagaggttggagtgatgcaaggaagggcctgtgagtctagaaatgcaagtgtcctct

SEQ ID NO: 17233 - DNA, 80 bp, synthetic construct
  source 1..80: mol_type = other DNA
ggaaatgaatacacaatgtcaaaagagggatgataaagaggcagggcagagctggaaggaatcacaggttgtggtcaaag

SEQ ID NO: 17234 - DNA, 80 bp, synthetic construct
  source 1..80: mol_type = other DNA
tgtaaggtcaccaaaatactcagaagaataacaggaacataaggtgaatgaagtagaagcaatcaaatgccaaagtcctc

SEQ ID NO: 17235 - DNA, 80 bp, synthetic construct; identical to SEQ ID NO: 8251
  source 1..80: mol_type = other DNA

SEQ ID NO: 17236 - DNA, 80 bp, synthetic construct
  source 1..80: mol_type = other DNA
attttaaaatgtccactgaatgtagagagagacaggaacaggagccaaacttcaataggttgagaactaagtcaatggcg

SEQ ID NO: 17237 - DNA, 80 bp, synthetic construct
  source 1..80: mol_type = other DNA
tgtaaggtccctgagaaggcagaggagataggagccaaagtatgaatgattagtcttaagactaaaactctgtcataact

SEQ ID NO: 17238 - DNA, 80 bp, synthetic construct
  source 1..80: mol_type = other DNA
tttgatgatgagatggtcataagatcaaaagatagcagcaataaagaactcttcaattccagagagataacagtttaacc

SEQ ID NO: 17239 - DNA, 80 bp, synthetic construct; identical to SEQ ID NO: 8252
  source 1..80: mol_type = other DNA

SEQ ID NO: 17240 - DNA, 80 bp, synthetic construct
  source 1..80: mol_type = other DNA
gagtgcagtagcacaatcttggctcactgcatctccacctcctgggttcaagtgatcctcccacctcagcctcccgagta

SEQ ID NO: 17241 - DNA, 80 bp, synthetic construct
  source 1..80: mol_type = other DNA
gcacctgaccaagagtgtataatctctaagaagttcattttgtgtagaaattacagcccagctctatgtgtcacatttcc

SEQ ID NO: 17242 - DNA, 80 bp, synthetic construct
  source 1..80: mol_type = other DNA
tttaagattgctaaaaaatctcatagtggaaataaattaacagacattgtgtgcagacaagagctaacacagcagctctg

SEQ ID NO: 17243 - DNA, 80 bp, synthetic construct; identical to SEQ ID NO: 8253
  source 1..80: mol_type = other DNA

SEQ ID NO: 17244 - DNA, 80 bp, synthetic construct
  source 1..80: mol_type = other DNA
atccttttgttgtaataaacattagccataaatcctctgggtcctcctagtctgaatcactgaagctgggcttcttggaa

SEQ ID NO: 17245 - DNA, 80 bp, synthetic construct
  source 1..80: mol_type = other DNA
aaagatgtgaggaaaatctatctaagtagtagagtacttcatcaagagacttagaatatattctctctatcctggcccca

SEQ ID NO: 17246 - DNA, 80 bp, synthetic construct
  source 1..80: mol_type = other DNA
acttaggacaatgcttggcacacagtgctttatgtgtgctattactactacctcatattaaagctccatatttttattct

SEQ ID NO: 17247 - DNA, 80 bp, synthetic construct; identical to SEQ ID NO: 8254
  source 1..80: mol_type = other DNA

SEQ ID NO: 17248 - DNA, 80 bp, synthetic construct
  source 1..80: mol_type = other DNA
tggtagcacagagaaacgaagatcacataagggaaccatagagtcctcagtgtaaaagtcacatgactgttttttcccta

SEQ ID NO: 17249 - DNA, 80 bp, synthetic construct
  source 1..80: mol_type = other DNA
taattggtttagtagtcttccaggttctaatctctggaatctttcacctaacagttcacctaaatttgtactcttagaaa

SEQ ID NO: 17250 - DNA, 80 bp, synthetic construct
  source 1..80: mol_type = other DNA
accagaaaatgaaataaagagttacaataaggttttcgaattctagattttcatctgtttaacacaggggaataatggca

SEQ ID NO: 17251 - DNA, 80 bp, synthetic construct; identical to SEQ ID NO: 8255
  source 1..80: mol_type = other DNA

SEQ ID NO: 17252 - DNA, 80 bp, synthetic construct
  source 1..80: mol_type = other DNA
ttagaagaattgaaatctaagtcaggaatggtggctgtagattagtaatatagatagcaagttatgatcagcattctcct

SEQ ID NO: 17253 - DNA, 80 bp, synthetic construct
  source 1..80: mol_type = other DNA
cactgacagttggtttcttttccttcttatctttttcactgcaaaacagcaatggaattacataaaactttaaaaagtac

SEQ ID NO: 17254 - DNA, 80 bp, synthetic construct
  source 1..80: mol_type = other DNA
gtggttatcactgagtgctggaatctctctaaaaatattttcttccttgtgcctttgatatttcctgatttgctatgatg

SEQ ID NO: 17255 - DNA, 80 bp, synthetic construct; identical to SEQ ID NO: 8256
  source 1..80: mol_type = other DNA

SEQ ID NO: 17256 - DNA, 80 bp, synthetic construct
  source 1..80: mol_type = other DNA
ttgagcccagatacaaatgaatctaactctgtagcccattttctactctgtgtaactgctacctaggatgtgaaagcaaa

SEQ ID NO: 17257 - DNA, 80 bp, synthetic construct
  source 1..80: mol_type = other DNA
ctttgttctttacactaagtgaggtcaaaagaggtgaggagacttctaaagaaaaaaatccagagtttacccatttggct

SEQ ID NO: 17258 - DNA, 80 bp, synthetic construct
  source 1..80: mol_type = other DNA
atttttttgttctctaaaacagctgctactctggagaagttataatgttccaggcactggctaagtaagcacttcccaca

SEQ ID NO: 17259 - DNA, 80 bp, synthetic construct; identical to SEQ ID NO: 8257
  source 1..80: mol_type = other DNA

SEQ ID NO: 17260 - DNA, 80 bp, synthetic construct
  source 1..80: mol_type = other DNA
tcatattccaaataggactattatcccagcattatctattaccaaagccatatgcttctttacaatcccatgttaaaata

SEQ ID NO: 17261 - DNA, 80 bp, synthetic construct
  source 1..80: mol_type = other DNA
atacaattttctttactgtttctcttcacataccctcaatatttcttagttaaatctacctaaatgtttgtatcataagt

SEQ ID NO: 17262 - DNA, 80 bp, synthetic construct
  source 1..80: mol_type = other DNA
tctaagaaaagtgattacaattctgatattggctaatatctaatgcacattcaaatctcccaagaatgttttccatagga

SEQ ID NO: 17263 - DNA, 80 bp, synthetic construct; identical to SEQ ID NO: 8258
  source 1..80: mol_type = other DNA

SEQ ID NO: 17264 - DNA, 80 bp, synthetic construct
  source 1..80: mol_type = other DNA
aaattacaaatgtggctcacatgatatatccattggacagccccagtctacaagtttaattgtatacagactaaatgttt

SEQ ID NO: 17265 - DNA, 80 bp, synthetic construct
  source 1..80: mol_type = other DNA
ccgtgagagataccaggtctgatcactcggttaaggtgctaactgcaaaatctttaattggagaagcatattctccttcc

SEQ ID NO: 17266 - DNA, 80 bp, synthetic construct
  source 1..80: mol_type = other DNA
acactttctttcagtttcccttctctcagaatattaagcattcagcagtagcattcagtatctcaaaatcagttacagtt

SEQ ID NO: 17267 - DNA, 80 bp, synthetic construct; identical to SEQ ID NO: 8259
  source 1..80: mol_type = other DNA

SEQ ID NO: 17268 - DNA, 80 bp, synthetic construct
  source 1..80: mol_type = other DNA
tgtattttttctcttacactgaaaagcttggtttcttataatattaatgtgtttactaatttatcttataatttacatta

SEQ ID NO: 17269 - DNA, 80 bp, synthetic construct
  source 1..80: mol_type = other DNA
atacagatatttattgccagttaacaacctaaatgtacttttgaccttctgtctcatcagccaggccacaaacgcgatgt

SEQ ID NO: 17270 - DNA, 80 bp, synthetic construct
  source 1..80: mol_type = other DNA
aaaaggtgaaatgaaaagaggttggtgaatgactaagaacggttggataggacaaataagttccaatgttcgatagcaga

SEQ ID NO: 17271 - DNA, 80 bp, synthetic construct; identical to SEQ ID NO: 8260
  source 1..80: mol_type = other DNA

SEQ ID NO: 17272 - DNA, 80 bp, synthetic construct
  source 1..80: mol_type = other DNA
aaatgaaacaagctagttaccttttattgttcagtttaaaaaagttcttcttctttgctcctccattgcggtccccttca

SEQ ID NO: 17273 - DNA, 80 bp, synthetic construct
  source 1..80: mol_type = other DNA
cactgcaggggctttcctgtgcgcggggtctccagcatctccacgaaggcagagttgggggtctggcagcgcgttctgga

SEQ ID NO: 17274 - DNA, 80 bp, synthetic construct
  source 1..80: mol_type = other DNA
gctccaggagctcctgagtctagatctaaccccacttggtccccatggacttgccagaggacttcacactatccacgcct

SEQ ID NO: 17275 - DNA, 80 bp, synthetic construct; identical to SEQ ID NO: 8261
  source 1..80: mol_type = other DNA

SEQ ID NO: 17276 - DNA, 80 bp, synthetic construct
  source 1..80: mol_type = other DNA
tcgagaaactgcgaaacaggttgaatttccaggaggaatgttctggcttccgttgcacctctctagaaagggcaagtaga

SEQ ID NO: 17277 - DNA, 80 bp, synthetic construct
  source 1..80: mol_type = other DNA
tccaattctgtatcacctttctgcttcctaacacctttgaaaaggctaggagaaatttttctgcagtggtctttcttcag

SEQ ID NO: 17278 - DNA, 80 bp, synthetic construct
  source 1..80: mol_type = other DNA
tcaaagtgtgtaatattttaaaacttcagacgtcagatcaatgcccgtgtttttccagggcattttaaattcttacattt

SEQ ID NO: 17279 - DNA, 80 bp, synthetic construct; identical to SEQ ID NO: 8262
  source 1..80: mol_type = other DNA

SEQ ID NO: 17280 - DNA, 80 bp, synthetic construct
  source 1..80: mol_type = other DNA
aagccataatttttttctattcttgactacaaattttccttatcttgatatattttgttcttggccttacaatacaatga

SEQ ID NO: 17281 - DNA, 80 bp, synthetic construct
  source 1..80: mol_type = other DNA
gctcccgccaccacgcccggctaattttttgtatttttcgtagagactgggtttcactgtgttagccaggatggtcttga

SEQ ID NO: 17282 - DNA, 80 bp, synthetic construct
  source 1..80: mol_type = other DNA
tatgcaagtgtacagcattgttcactgtttaaaggcttaacaacaaccctgtggtccatctggggtaaatgtaaaagctt

SEQ ID NO: 17283 - DNA, 80 bp, synthetic construct
  source 1..80: mol_type = other DNA
ccttttgaatggccttaaaccctccctaaacagtgcaggatataaatacagtgctatactgttatgttgattatactatt

SEQ ID NO: 17284 - DNA, 80 bp, synthetic construct; identical to SEQ ID NO: 8263
  source 1..80: mol_type = other DNA

SEQ ID NO: 17285 - DNA, 80 bp, synthetic construct
  source 1..80: mol_type = other DNA
tctcatgtagccatttcaccaacttgtctatactctgacaacattaaagatttgcctctctgctgcagtctgttctatat

SEQ ID NO: 17286 - DNA, 80 bp, synthetic construct
  source 1..80: mol_type = other DNA
acaataaaagacactgaggtttgcattatttgcccagtcacacagcaggtaaggtgctaaccagtagtccctctctcata

SEQ ID NO: 17287 - DNA, 80 bp, synthetic construct
  source 1..80: mol_type = other DNA
tcttagcttttaagaaccacaacacatcacttctctctaatcatcttcctcaccctcaacatgtacatgttcactccatt

SEQ ID NO: 17288 - DNA, 80 bp, synthetic construct; identical to SEQ ID NO: 8264
  source 1..80: mol_type = other DNA

SEQ ID NO: 17289 - DNA, 80 bp, synthetic construct
  source 1..80: mol_type = other DNA
tctcaatctctttttgccctccttagcattctttgcaactcatgtatgtagtcacatctatgtatccatatacgtttgac

SEQ ID NO: 17290 - DNA, 80 bp, synthetic construct
  source 1..80: mol_type = other DNA
tctctgatctctctaataatttattttctgtatttttcctagctcctctatttagcccatctgagtccagattgaaggtt

SEQ ID NO: 17291 - DNA, 80 bp, synthetic construct
  source 1..80: mol_type = other DNA
aataagggatccacacactctccaccctttcacatgtaatgatttttatgtatgaaggacatgtgatgataggggatatt

SEQ ID NO: 17292 - DNA, 80 bp, synthetic construct; identical to SEQ ID NO: 8265
  source 1..80: mol_type = other DNA

SEQ ID NO: 17293 - DNA, 80 bp, synthetic construct
  source 1..80: mol_type = other DNA
aattatactcctctttgaacacttccccatctactacagccagaaatattttctaccactccgcaatcctacttttcagt

SEQ ID NO: 17294 - DNA, 80 bp, synthetic construct
  source 1..80: mol_type = other DNA
ttaggtgctgagagtatgacatcagaggcagatttatggaaattacactagtaggctaaatgcctaagttatcattagcg

SEQ ID NO: 17295 - DNA, 80 bp, synthetic construct
  source 1..80: mol_type = other DNA
tccgcctcctgggttccagcaattctcatgcctcagcctcctgagtagctgggattatgggagtgcaccagcacaccagg

SEQ ID NO: 17296 - DNA, 80 bp, synthetic construct; identical to SEQ ID NO: 8266
  source 1..80: mol_type = other DNA

SEQ ID NO: 17297 - DNA, 80 bp, synthetic construct
  source 1..80: mol_type = other DNA
ctttgaagaaatactccactgctcaaaagacttgatttctgtgtcatttgaagaaatactccactgctcaaaaaccttga

SEQ ID NO: 17298 - DNA, 80 bp, synthetic construct
  source 1..80: mol_type = other DNA
aacatgagagtaaaagtgatgactggaaagggctagtaatggacattgaaaataaataataatatggcaataattttatt

SEQ ID NO: 17299 - DNA, 80 bp, synthetic construct
  source 1..80: mol_type = other DNA
caaaggtctaatagaaccgagcaaaagatgcaaataggcaattcatataaaaaagtatgtagtatactggtacacagaag

SEQ ID NO: 17300 - DNA, 80 bp, synthetic construct
  source 1..80: mol_type = other DNA
aagtctgtttgactcagtaattcaattttaggaaatctatcttaaagaaataattccaagtacagaaaaaaatatcagcc

SEQ ID NO: 17301 - DNA, 80 bp, synthetic construct; identical to SEQ ID NO: 8267
  source 1..80: mol_type = other DNA

SEQ ID NO: 17302 - DNA, 80 bp, synthetic construct
  source 1..80: mol_type = other DNA
gagaatgcattttcagaatcctggttattagtatctatctctcagtggagtttgctccttattaagggacactcacattg

SEQ ID NO: 17303 - DNA, 80 bp, synthetic construct
  source 1..80: mol_type = other DNA
gaggaagaagagagaaagaggtagagatagagattctccttaagtaataagaaaatacatgggaggctgaaataactgga

SEQ ID NO: 17304 - DNA, 80 bp, synthetic construct
  source 1..80: mol_type = other DNA
gaagagagaagtccaattaaggacttcagtgtcattctcctgaagaatttaagttctgtgagggtagaaatcttgtctct

SEQ ID NO: 17305 - DNA, 80 bp, synthetic construct; identical to SEQ ID NO: 8268
  source 1..80: mol_type = other DNA

SEQ ID NO: 17306 - DNA, 80 bp, synthetic construct
  source 1..80: mol_type = other DNA
gatcactatgtggcaagtactttgctagatgctgacaatatgaagatgagccgtgtaaagttcctcaagttctgtgtgta

SEQ ID NO: 17307 - DNA, 80 bp, synthetic construct
  source 1..80: mol_type = other DNA
tgcctgccaagaaatagttggaacttttttgttggatttgtcctcagagtctacaaaaatatgattttaatgtcctcaat

SEQ ID NO: 17308 - DNA, 80 bp, synthetic construct
  source 1..80: mol_type = other DNA
tacttgtaaaataagacagtgagtgtaaagcaatcagcttagtacctggatgtctatattccgaatgtttacttgtgttt

SEQ ID NO: 17309 - DNA, 80 bp, synthetic construct; identical to SEQ ID NO: 8269
  source 1..80: mol_type = other DNA

SEQ ID NO: 17310 - DNA, 80 bp, synthetic construct
  source 1..80: mol_type = other DNA
tgaacttgtttaatctcaaatgaactctctcccaggagcaaggtcaagttagttcaatgaggtaacgttcactcacttat

SEQ ID NO: 17311 - DNA, 80 bp, synthetic construct
  source 1..80: mol_type = other DNA
ttcattcactcaacagtattaatcaagtaccctgtatatgtcacatattactctaagtgcttcgtatatatccatgagca

SEQ ID NO: 17312 - DNA, 80 bp, synthetic construct
  source 1..80: mol_type = other DNA
aaagtttacaattttaagtaggatagtcagggcagacctcattaaggagataactttgagccaagacgggatagagcaga

SEQ ID NO: 17313 - DNA, 80 bp, synthetic construct; identical to SEQ ID NO: 8270
  source 1..80: mol_type = other DNA

SEQ ID NO: 17314 - DNA, 80 bp, synthetic construct
  source 1..80: mol_type = other DNA
attggctagcatgggaatccatgctaaggggacaggcgcaatcatattctctagctattttacttcacttttgcatcaat

SEQ ID NO: 17315 - DNA, 80 bp, synthetic construct
  source 1..80: mol_type = other DNA
ccaactgaggcccgaggtggattttaaggtgcaagatttgaaaaaaaaaatgtgaaggaattgctattacaagttgcact

SEQ ID NO: 17316 - DNA, 80 bp, synthetic construct
  source 1..80: mol_type = other DNA
cggtagtgtagaaacactagcagaacttaatttatcgcatgaccttttcttgagacacagatgaattctgattcatatct

SEQ ID NO: 17317 - DNA, 80 bp, synthetic construct
  source 1..80: mol_type = other DNA
gtttgaataatatgccctgaccttgtagttgtgtttcttctaattggcaacaagtcatactgcagtgttcttatgtacga

SEQ ID NO: 17318 - DNA, 80 bp, synthetic construct; identical to SEQ ID NO: 8271
  source 1..80: mol_type = other DNA

SEQ ID NO: 17319 - DNA, 80 bp, synthetic construct
  source 1..80: mol_type = other DNA
tgttaccattgcatcatgtggcaaaggcaaaccttcttactctactatagtcaagttttccttattctccatcatctttg

SEQ ID NO: 17320 - DNA, 80 bp, synthetic construct
  source 1..80: mol_type = other DNA
atttactttgcgtcagaaacctggaggaaggggagaggttattgctagcatccccttttcccttactctctatatccaat

SEQ ID NO: 17321 - DNA, 80 bp, synthetic construct
  source 1..80: mol_type = other DNA
acataggaccatatcatatccatgggtaaggcctgcaagggcttcccactgttctcaggttctattccaaaggtcctcaa

SEQ ID NO: 17322 - DNA, 80 bp, synthetic construct; identical to SEQ ID NO: 8272
  source 1..80: mol_type = other DNA

SEQ ID NO: 17323 - DNA, 80 bp, synthetic construct
  source 1..80: mol_type = other DNA
attctgtggtgtagatgtaccacattttctttatccaatccactgttaataagcacctaggttgattacatgtctttgct

SEQ ID NO: 17324 - DNA, 80 bp, synthetic construct
  source 1..80: mol_type = other DNA
tattttagattttcatagcatgctgcagatggcttctgcactccagttctaagaattttataacaactaaatttaacaaa

SEQ ID NO: 17325 - DNA, 80 bp, synthetic construct; identical to SEQ ID NO: 8273
  source 1..80: mol_type = other DNA

SEQ ID NO: 17326 - DNA, 80 bp, synthetic construct
  source 1..80: mol_type = other DNA
tgaatttgcttttagggtcttagtcataaattctttgcccaggccaatgtccagaagagtttttcctaggtttccttcta

SEQ ID NO: 17327 - DNA, 80 bp, synthetic construct
  source 1..80: mol_type = other DNA
attttgtgtgctttgtcaaagatcagttggctgtaagtatttggctttatttctggggtctctattctgttctattggtc

SEQ ID NO: 17328 - DNA, 80 bp, synthetic construct
  source 1..80: mol_type = other DNA
gttttttctaattctgtgaaaagtgatgttggtattttgataggaattgcactgaacttttagattactttgggcagtgt

SEQ ID NO: 17329 - DNA, 80 bp, synthetic construct; identical to SEQ ID NO: 8274
  source 1..80: mol_type = other DNA

SEQ ID NO: 17330 - DNA, 80 bp, synthetic construct
  source 1..80: mol_type = other DNA
cttttttttttttttttttttttttgcctgattgctctggcaaggactttcgatttctcaaaatttaaaagagaactacc

SEQ ID NO: 17331 - DNA, 80 bp, synthetic construct
  source 1..80: mol_type = other DNA
atgtgacacatatacgccatggaatactacagagccataaaaaaagaacaaaatcatgtcttttgctgcaacaaggccat

SEQ ID NO: 17332 - DNA, 80 bp, synthetic construct
  source 1..80: mol_type = other DNA
gggaactatgctcactacctgggccatgggatctttcataaccttaacctcagcattatacaatatacccatgtaacaaa

SEQ ID NO: 17333 - DNA, 80 bp, synthetic construct
  source 1..80: mol_type = other DNA
ggtttgtgttaaattatcctttagttttatgataatatttaatatcctctatttttggacaaacaattctaaatattgta

SEQ ID NO: 17334 - DNA, 80 bp, synthetic construct; identical to SEQ ID NO: 8275
  source 1..80: mol_type = other DNA

SEQ ID NO: 17335 - DNA, 80 bp, synthetic construct
  source 1..80: mol_type = other DNA
actaatatttatgtgtgatagattacagcatcttctagtttatggcatttcagttcatgaccttgcatcacaaagcatca

SEQ ID NO: 17336 - DNA, 80 bp, synthetic construct
  source 1..80: mol_type = other DNA
tttggcttttattcttgttacattgtttcctgtctctcctgctaatatccagtttaatagcatgtttaggtacttataat

SEQ ID NO: 17337 - DNA, 80 bp, synthetic construct
  source 1..80: mol_type = other DNA
ccaggttcatgccattctcctgcctcagcctcccgagtagctggactagaggtgcccgccaccatgtcctgctaaatttt

SEQ ID NO: 17338 - DNA, 80 bp, synthetic construct; identical to SEQ ID NO: 8276
  source 1..80: mol_type = other DNA

SEQ ID NO: 17339 - DNA, 80 bp, synthetic construct
  source 1..80: mol_type = other DNA
gcaggatgtgtaggctatcttgaggacttcgtcactctgagtgagagagaaaaccattgaagagtttggagcagagaagt

SEQ ID NO: 17340 - DNA, 80 bp, synthetic construct
  source 1..80: mol_type = other DNA
gagggtagcaccaacaagattgcaaaaggccttacatgccatgataatataatttgtagactttgtgatacagttgttaa

SEQ ID NO: 17341 - DNA, 80 bp, synthetic construct
  source 1..80: mol_type = other DNA
aaatattttttcctgatggggatggtgagatattcagaagactgagaaagcaagcattgaggagagcataacaagctcat

SEQ ID NO: 17342 - DNA, 80 bp, synthetic construct
  source 1..80: mol_type = other DNA
tacctgagtgttatttatatccaaaatggtattgtctattactcggaataataagatatcttaaatatcagtattctggg

SEQ ID NO: 17343 - DNA, 80 bp, synthetic construct; identical to SEQ ID NO: 8277
  source 1..80: mol_type = other DNA

SEQ ID NO: 17344 - DNA, 80 bp, synthetic construct
  source 1..80: mol_type = other DNA
atgaaaacagctaacaattctgcagcacttgctacacatcatgccctaagagtttcgtttatgatcatggtatctcccca

SEQ ID NO: 17345 - DNA, 80 bp, synthetic construct
  source 1..80: mol_type = other DNA
caaaactaagagccatttgtatatgctcttcccttgtgataagggcagctagaattggtctagagaccaactggtctctt

SEQ ID NO: 17346 - DNA, 80 bp, synthetic construct; identical to SEQ ID NO: 8278
  source 1..80: mol_type = other DNA

SEQ ID NO: 17347 - DNA, 80 bp, synthetic construct
  source 1..80: mol_type = other DNA
aaccaggcaatcttatactcagatattccctttaaacattgtcagttgtccaaaaaattcttatctgttctccaatgtac

SEQ ID NO: 17348 - DNA, 80 bp, synthetic construct
  source 1..80: mol_type = other DNA
gaggcaaaacacagcacattgttgaaaaaggagcagagtgactattgtttgtcttcttctgtagagtacaactaggctca

SEQ ID NO: 17349 - DNA, 80 bp, synthetic construct
  source 1..80: mol_type = other DNA
gtttgtacttaatgttctccaccattctccacatggcagccagaatgagcatttcaaaactcagatctgatcttgtaagc

SEQ ID NO: 17350 - DNA, 80 bp, synthetic construct
  source 1..80: mol_type = other DNA
gccacattaacttcaggcacagtgtatttcctccagccacaggccatttgtacatactcttcctctgcctggatagtttc

SEQ ID NO: 17351 - DNA, 80 bp, synthetic construct; identical to SEQ ID NO: 8279
  source 1..80: mol_type = other DNA

SEQ ID NO: 17352 - DNA, 80 bp, synthetic construct
  source 1..80: mol_type = other DNA
atatttattgaataaataaatacaacaaatgtttggggactaccagtaggctgatagtcttggagactaccaggaggtta

SEQ ID NO: 17353 - DNA, 80 bp, synthetic construct
  source 1..80: mol_type = other DNA
ggtccttatgatcttggctccctggtattactcctgtgattacattactttgcaaagcaaagggatcttgcagatgtaat

SEQ ID NO: 17354 - DNA, 80 bp, synthetic construct; identical to SEQ ID NO: 8280
  source 1..80: mol_type = other DNA

SEQ ID NO: 17355 - DNA, 80 bp, synthetic construct
  source 1..80: mol_type = other DNA
tctccagttgaggacatagcttaactgaaaccttgatttcagccttaggaacccctgagcagaaaacccacctgtgctgt

SEQ ID NO: 17356 - DNA, 80 bp, synthetic construct
  source 1..80: mol_type = other DNA
tttgtcagtaaatatttgagaagatattaacctcactatcaaggtcaattatataaaccacaatgaatgaaatgtaagct

SEQ ID NO: 17357 - DNA, 80 bp, synthetic construct
  source 1..80: mol_type = other DNA
aaaaatacaaaaattagctgggtatggtggcacatgcttgtattcccagatactcaggaggctgaggcaggagaatcact

SEQ ID NO: 17358 - DNA, 80 bp, synthetic construct; identical to SEQ ID NO: 8281
  source 1..80: mol_type = other DNA

SEQ ID NO: 17359 - DNA, 80 bp, synthetic construct
  source 1..80: mol_type = other DNA
tcaaggggcgatcattaatatcattgtcattttgttatattttaagcttgcataagcagaattcagccgtggatatagta

SEQ ID NO: 17360 - DNA, 80 bp, synthetic construct
  source 1..80: mol_type = other DNA
tagtctatccataggaaaaatcaaaacaagatttttcttgacatcatagctgaaaatcctgtttagacgtttgtgagtaa

SEQ ID NO: 17361 - DNA, 80 bp, synthetic construct
  source 1..80: mol_type = other DNA
ttcaagtaattcttctgctcaccctcctgagtagctgggactacaggcgcgtgccaccacacccagctaatttttgtatt

SEQ ID NO: 17362 - DNA, 80 bp, synthetic construct
  source 1..80: mol_type = other DNA
gatgtttagtctttgccaaaatatcttcaatagggtttttttttctaaagagtttgcatttgaatccgttgcatgagata

SEQ ID NO: 17363 - DNA, 80 bp, synthetic construct; identical to SEQ ID NO: 8282
  source 1..80: mol_type = other DNA

SEQ ID NO: 17364 - DNA, 80 bp, synthetic construct
  source 1..80: mol_type = other DNA
aactatttaggaagtgtagtggaaaaaaagaaccctactcatacaaaaaaccttactcataataccagtccgaaactcca

SEQ ID NO: 17365 - DNA, 80 bp, synthetic construct
  source 1..80: mol_type = other DNA
tgagagagatgtgtcaaaatgattcttacgtttctatggaagaacagacattccagaattacctaagaacattctgaaag

SEQ ID NO: 17366 - DNA, 80 bp, synthetic construct; identical to SEQ ID NO: 8283
  source 1..80: mol_type = other DNA

SEQ ID NO: 17367 - DNA, 80 bp, synthetic construct
  source 1..80: mol_type = other DNA
caaatcataaacaaatacaaacacatagtaacagattggtgagaaaatatattgactgtgtgtagaataaactgatttag

SEQ ID NO: 17368 - DNA, 80 bp, synthetic construct
  source 1..80: mol_type = other DNA
atattggcagtaaggcaaagatggatcatttaataaatagaattgggacagtggttaatcattggaacaatgaagttata

SEQ ID NO: 17369 - DNA, 80 bp, synthetic construct
  source 1..80: mol_type = other DNA
ttttttaaacatctctttataaataactcacaccataggtaaggcaaacaacgaactgggaaaagtatttgccatacata

SEQ ID NO: 17370 - DNA, 80 bp, synthetic construct
  source 1..80: mol_type = other DNA
atattgctctttgcttgttatgcagaaaaataaaaagaacaatagtccctagagtgagcaagagtgcaagaaaacttatg

SEQ ID NO: 17371 - DNA, 80 bp, synthetic construct; identical to SEQ ID NO: 8284
  source 1..80: mol_type = other DNA

SEQ ID NO: 17372 - DNA, 80 bp, synthetic construct
  source 1..80: mol_type = other DNA
cttgtctcagtaaaacatttttaaaaataaaaaacactaggcagctgtggtggtgcatgcctgtagtcccagctacttag

SEQ ID NO: 17373 - DNA, 80 bp, synthetic construct
  source 1..80: mol_type = other DNA
aatcctggctctgccatttactatgtgactttctatatgttacttaatgtctccaagtctctgtttccttgtttgtaaat

SEQ ID NO: 17374 - DNA, 80 bp, synthetic construct
  source 1..80: mol_type = other DNA
ttaaaaagaaaaatatcctctgttcgaactgagggtcagtatttgccctcctcaaagaaactgtaggaccaaatccactt

SEQ ID NO: 17375 - DNA, 80 bp, synthetic construct; identical to SEQ ID NO: 8285
  source 1..80: mol_type = other DNA

SEQ ID NO: 17376 - DNA, 80 bp, synthetic construct
  source 1..80: mol_type = other DNA
ctttccctcccagtagattcattgcatcagcttcaaaatatgctcaagtcacttctgtgaaaaataatgacatgatagca

SEQ ID NO: 17377 - DNA, 80 bp, synthetic construct
  source 1..80: mol_type = other DNA
atttggctttcacattcattgtgccactgaaacagtgcttattgatctgcaggagtattttatagaggaaattagctctt

SEQ ID NO: 17378 - DNA, 80 bp, synthetic construct
  source 1..80: mol_type = other DNA
acccaatccttgttatgatgtcagcatattacccatctgacgtcaaagtaaataaaaattaaaaaaacttacatcttcaa

SEQ ID NO: 17379 - DNA, 80 bp, synthetic construct; identical to SEQ ID NO: 8286
  source 1..80: mol_type = other DNA

SEQ ID NO: 17380 - DNA, 80 bp, synthetic construct
  source 1..80: mol_type = other DNA
tgccaaaagaagtccaaaaagtaacgtggactcatggagttctataatagtattatgctgtgtactgaataaattgattg

SEQ ID NO: 17381 - DNA, 80 bp, synthetic construct
  source 1..80: mol_type = other DNA
tatggcaaagtcttggtaagcaagtactaacatgtcaactaaatccttctaagagtaacatttgaaaaataacgttatgg

SEQ ID NO: 17382 - DNA, 80 bp, synthetic construct
  source 1..80: mol_type = other DNA
atacaaaaaaattagccgggcgtggtggcaggcgcctgtagtcccagcgactcgggaggctgaggcaggagaacggcatg

SEQ ID NO: 17383 - DNA, 80 bp, synthetic construct; identical to SEQ ID NO: 8287
  source 1..80: mol_type = other DNA

SEQ ID NO: 17384 - DNA, 80 bp, synthetic construct
  source 1..80: mol_type = other DNA
ataacaacatcaatttgagtagtatttgtcattgccagcgcaaatattttgctgagactgcctgcataaccagtgcatct

SEQ ID NO: 17385 - DNA, 80 bp, synthetic construct
  source 1..80: mol_type = other DNA
gtaatgttctggaagaagtgcactgactagtcacaaacatccatatatagaaatttcgcctgcttttattaacttgaaag

SEQ ID NO: 17386 - DNA, 80 bp, synthetic construct; identical to SEQ ID NO: 8288
  source 1..80: mol_type = other DNA

SEQ ID NO: 17387 - DNA, 80 bp, synthetic construct
  source 1..80: mol_type = other DNA
atgtgtcatatatgtgtcatatatatgtgtcatatatgtgtcatatatatgtgtcgtatatgtgtcatatatatgtgtcg

SEQ ID NO: 17388 - DNA, 80 bp, synthetic construct
  source 1..80: mol_type = other DNA
tcatatatgtgtcatatatatgtgtcatatatatgtgtcatatatgtgtcatatatatgtgtcatatatatgtgtcatat

SEQ ID NO: 17389 - DNA, 80 bp, synthetic construct
  source 1..80: mol_type = other DNA
gtgtcatatatatgtcatatatatgtcatatatatgtcagagagagagagagagagagagatggagtctcactctgtcgc

SEQ ID NO: 17390 - DNA, 80 bp, synthetic construct
  source 1..80: mol_type = other DNA
tgttggtcaggctggtctcgaactcctgacctcgtgatccgcccgcctcagcctcccaaagtgctgggattacaggcgtc

SEQ ID NO: 17391 - DNA, 80 bp, synthetic construct; identical to SEQ ID NO: 8289
  source 1..80: mol_type = other DNA

SEQ ID NO: 17392 - DNA, 80 bp, synthetic construct
  source 1..80: mol_type = other DNA
tctatgtacagcactgtgctaggtcccatagggagagtaagtcatttaggattgcactctaaaatctgggcatattggtg

SEQ ID NO: 17393 - DNA, 80 bp, synthetic construct
  source 1..80: mol_type = other DNA
cagctggaccgaggccgcgtcgttcctgggcttactattcccagacccggactcccgattccggagtcacggcccaggac

SEQ ID NO: 17394 - DNA, 80 bp, synthetic construct; identical to SEQ ID NO: 8290
  source 1..80: mol_type = other DNA

SEQ ID NO: 17395 - DNA, 80 bp, synthetic construct
  source 1..80: mol_type = other DNA
ggctagcctgtgtggctactggcggcagctagcgggctgcgaaagcgagcccagcgtccttgacagcagcccacgcgtcg

SEQ ID NO: 17396 - DNA, 80 bp, synthetic construct
  source 1..80: mol_type = other DNA
gggcacgagtggctgcggagtgtgggtggttgggcgtgaggggccgacgggctcgcgcgcgcgccgtctgctgaggtccc

SEQ ID NO: 17397 - DNA, 80 bp, synthetic construct
  source 1..80: mol_type = other DNA
cccgggtgcgagtccctgctgtcttccacacccttcctccctccaggctcctttcctacatccttcccgcgcccccacgg

SEQ ID NO: 17398 - DNA, 80 bp, synthetic construct
  source 1..80: mol_type = other DNA
gcgcccgcaatgctgcggtggagaggaggaacctgatcaccgtgtgcaggtacggcagcgcagggcgaggggaaccagcc

SEQ ID NO: 17399 - DNA, 80 bp, synthetic construct; identical to SEQ ID NO: 8291
  source 1..80: mol_type = other DNA

SEQ ID NO: 17400 - DNA, 80 bp, synthetic construct
  source 1..80: mol_type = other DNA
cccccaaatcagagtgcatttcgttgttttggcttgtttacattatcttcagccatttcatttcacacgttagttgagtg

SEQ ID NO: 17401 - DNA, 80 bp, synthetic construct
  source 1..80: mol_type = other DNA
gctttataactgtaaatgtagtatttccttcagaaaaatatagaaacaataaaagaataattactattgggccgggcgcg

SEQ ID NO: 17402 - DNA, 80 bp, synthetic construct
  source 1..80: mol_type = other DNA
tcgggagggtgaggcaggagaatcgattgaacctgggaggcggttgcaatgagctgagataacgtcattgcactccagcc

SEQ ID NO: 17403 - DNA, 80 bp, synthetic construct; identical to SEQ ID NO: 8292
  source 1..80: mol_type = other DNA

SEQ ID NO: 17404 - DNA, 80 bp, synthetic construct
  source 1..80: mol_type = other DNA
ttgaattattacaaatgtttatctagcaagaagaccttcttcattgactgtatttgtataatgtaattattacagcactt

SEQ ID NO: 17405 - DNA, 80 bp, synthetic construct
  source 1..80: mol_type = other DNA
accataatatacagacatcaaaaattgctttaaaaataagggtagtttcaacatatacagtgcttcttggggggtaacat

SEQ ID NO: 17406 - DNA, 80 bp, synthetic construct; identical to SEQ ID NO: 8293
  source 1..80: mol_type = other DNA

SEQ ID NO: 17407 - DNA, 80 bp, synthetic construct
  source 1..80: mol_type = other DNA
atgtgctaactttagttacagtttacacatagatttagtgtaatagctaaaataagttgtggtttctgctctggatttca

SEQ ID NO: 17408 - DNA, 80 bp, synthetic construct
  source 1..80: mol_type = other DNA
aagcagtatttatgcatttattgctagtttactttccagagtcaccaaaccctgggtatttcactcatgtctcttatgaa

SEQ ID NO: 17409 - DNA, 80 bp, synthetic construct
  source 1..80: mol_type = other DNA
cccgccaccacgcccggctaattttttgtgttttgtttagtagagacggggtttcaccgtattagccaggatggtctcga

SEQ ID NO: 17410 - DNA, 80 bp, synthetic construct; identical to SEQ ID NO: 8294
  source 1..80: mol_type = other DNA

SEQ ID NO: 17411 - DNA, 80 bp, synthetic construct
  source 1..80: mol_type = other DNA
gcatttttctctataaacaaaaatattttggactgtgcctttgattttgtaattctctgctgatgttctggaaaaaattg

SEQ ID NO: 17412 - DNA, 80 bp, synthetic construct
  source 1..80: mol_type = other DNA
tgtttaaagctttattcaagtgcaatatatagttttgagctttgaaagtgggttgtttagataggtaagataatcagata

SEQ ID NO: 17413 - DNA, 80 bp, synthetic construct
  source 1..80: mol_type = other DNA
gaagagatagtaggtcatttgaggactctaaatcttacacactcaacttcaaaatattcatacacttgactttggctctg

SEQ ID NO: 17414 - DNA, 80 bp, synthetic construct
  source 1..80: mol_type = other DNA
tcattttttctgtcctttataagcttcattgtttacagaaaaccttatatagtcctttgattttggttttggtggcagag

SEQ ID NO: 17415 - DNA, 80 bp, synthetic construct; identical to SEQ ID NO: 8295
  source 1..80: mol_type = other DNA

SEQ ID NO: 17416 - DNA, 80 bp, synthetic construct
  source 1..80: mol_type = other DNA
ttaaaatccttcatcaactgtagtgctttactcagcatttattttggagcgcaggatttgtataactgaaatttatttaa

SEQ ID NO: 17417 - DNA, 80 bp, synthetic construct
  source 1..80: mol_type = other DNA
tattgatgactttactctgaatctgcctctatgaatatgcccactgtgcagtggttgcccttggagactcttgcagcatg

SEQ ID NO: 17418 - DNA, 80 bp, synthetic construct; identical to SEQ ID NO: 8296
  source 1..80: mol_type = other DNA

SEQ ID NO: 17419 - DNA, 80 bp, synthetic construct
  source 1..80: mol_type = other DNA
ctatgcttgaacttggtgggagaaatgcagatatgtgaaatgttattgaatattaatgacagtataatctgtcttatcct

SEQ ID NO: 17420 - DNA, 80 bp, synthetic construct
  source 1..80: mol_type = other DNA
gtcaaaggggaagcaggcaggtgtgaagagagaccaaacccaaagggcattctggttttttatcaacctactcttctagg

SEQ ID NO: 17421 - DNA, 80 bp, synthetic construct
  source 1..80: mol_type = other DNA
caaatttcaacatgtcatttgatgggggcagaccaaccatatacagattgcagcataatcctttaaagaactttaaattt

SEQ ID NO: 17422 - DNA, 80 bp, synthetic construct
  source 1..80: mol_type = other DNA
actaaaaatacaaacagtcaggcgtggtggtggggggtgggggggggggcacctgtaattccagcgggaggctgagacag

SEQ ID NO: 17423 - DNA, 80 bp, synthetic construct; identical to SEQ ID NO: 8297
  source 1..80: mol_type = other DNA

SEQ ID NO: 17424 - DNA, 80 bp, synthetic construct
  source 1..80: mol_type = other DNA
gcacaatggaggtaggatgatcctcttttcaacgactagtcctagagtagacatttcagcattcacaaaaggtcattttc

SEQ ID NO: 17425 - DNA, 80 bp, synthetic construct
  source 1..80: mol_type = other DNA
cagttgagagatgatattcaagggggaatgtttgaagcttacccactcttctattccctcttacaggtttataaaatata

SEQ ID NO: 17426 - DNA, 80 bp, synthetic construct; identical to SEQ ID NO: 8298
  source 1..80: mol_type = other DNA

SEQ ID NO: 17427 - DNA, 80 bp, synthetic construct
  source 1..80: mol_type = other DNA
atgcagctgttagaaatcttagtgtcaagtctgtagtcaaccactacgagatatgtaggacattgtgataatgcttttag

SEQ ID NO: 17428 - DNA, 80 bp, synthetic construct
  source 1..80: mol_type = other DNA
tgttcaaatatcaagacctcctccttgctttcttgtagttaataccctggtttttaacaccatggtttgttttgcctttt

SEQ ID NO: 17429 - DNA, 80 bp, synthetic construct
  source 1..80: mol_type = other DNA
atatttccattctgtcactgactgtcatctgagttgtttctactttttgactactactaactaaatattcattcatattt

SEQ ID NO: 17430 - DNA, 80 bp, synthetic construct; identical to SEQ ID NO: 8299
  source 1..80: mol_type = other DNA

SEQ ID NO: 17431 - DNA, 80 bp, synthetic construct
  source 1..80: mol_type = other DNA
ttctgtatgggaatcttttgttggatacatgtaatgcaaatgtcttccatttggtggctttatttttcactctgtagtat

SEQ ID NO: 17432 - DNA, 80 bp, synthetic construct
  source 1..80: mol_type = other DNA
caatccatctgtagtttatttatgatgtgaagtacaggagtcaagattaaatatttcccttaaggaaaatcaactgacct

SEQ ID NO: 17433 - DNA, 80 bp, synthetic construct
  source 1..80: mol_type = other DNA
agtaaacatgtccttcttcacaaagtagcaggagagagaaaaatgagaacatgagaaccaagcaaagggggaagcccctt

SEQ ID NO: 17434 - DNA, 80 bp, synthetic construct; identical to SEQ ID NO: 8300
  source 1..80: mol_type = other DNA

SEQ ID NO: 17435 - DNA, 80 bp, synthetic construct
  source 1..80: mol_type = other DNA
tctgggatttttattaagcttgcactggtactataaatcagttttgggaaaactgccatctttatgatattaagacttac

SEQ ID NO: 17436 - DNA, 80 bp, synthetic construct
  source 1..80: mol_type = other DNA
acttttcattttcttgtggttgttggtatatcgatataaatttgaccttttaaaatactggtcttatatctaacagtctt

SEQ ID NO: 17437 - DNA, 80 bp, synthetic construct
  source 1..80: mol_type = other DNA
tttgtcttattgcactggctaggaccactaatgcagtgttgcagaaaacgttcaaaattttattattaaataggatgttt

SEQ ID NO: 17438 - DNA, 80 bp, synthetic construct; identical to SEQ ID NO: 8301
  source 1..80: mol_type = other DNA

SEQ ID NO: 17439 - DNA, 80 bp, synthetic construct
  source 1..80: mol_type = other DNA
gtatgtgtttgtgtgtgtgtgtgtgtgtgtgtgtgtgtgtgtgtttcctcccctgttctgtagaaaagtttgtgtaagac

SEQ ID NO: 17440 - DNA, 80 bp, synthetic construct
  source 1..80: mol_type = other DNA
cagatttcctgtgtcttctggtatgagtttcagtaggtttttcaaggaacatacctatttcatttatattgtcaattttt

SEQ ID NO: 17441 - DNA, 80 bp, synthetic construct
  source 1..80: mol_type = other DNA
agcgtttgactttgttgagtttctctgtcgactcgtgttatgactttgttaattttctctgtcgactcctcagtttattt

SEQ ID NO: 17442 - DNA, 80 bp, synthetic construct
  source 1..80: mol_type = other DNA
cccgtctctactaaaaatacaaaaaattagccaggcgtgatggcaggcgcctgtagtcccagctactccggaggctgagg

SEQ ID NO: 17443 - DNA, 80 bp, synthetic construct; identical to SEQ ID NO: 8302
  source 1..80: mol_type = other DNA

SEQ ID NO: 17444 - DNA, 80 bp, synthetic construct
  source 1..80: mol_type = other DNA
taattgccttgttcatgtcctctgtattcttacttgttttttgtatactctttagtattgagagagatgtgttaaagtct

SEQ ID NO: 17445 - DNA, 80 bp, synthetic construct
  source 1..80: mol_type = other DNA
attcattgtcatcatgaaatgtccctcattatctctaataatgctagtgccttaaagtctgttttatctgctactaatac

SEQ ID NO: 17446 - DNA, 80 bp, synthetic construct
  source 1..80: mol_type = other DNA
aattatttagcccattttaattaacgttattactattatatttggatttatagctatcttactgttcattgtatgtttgc

SEQ ID NO: 17447 - DNA, 80 bp, synthetic construct; identical to SEQ ID NO: 8303
  source 1..80: mol_type = other DNA

SEQ ID NO: 17448 - DNA, 80 bp, synthetic construct
  source 1..80: mol_type = other DNA
atcttctttttactttttatttttattttttagaggttgggtcttgctgtgttgcccaggctggagtgcagtagtgcgat

SEQ ID NO: 17449 - DNA, 80 bp, synthetic construct
  source 1..80: mol_type = other DNA
tgacaggcatgagccaccacgtgtgtctccattatctttttacactccaattacattatgttaaactttaccaggcctca

SEQ ID NO: 17450 - DNA, 80 bp, synthetic construct
  source 1..80: mol_type = other DNA
tgtttaatccattgaatgagtttttaatttcaggtagttccagaatttttatttgattttttaaaatagactctaaccct

SEQ ID NO: 17451 - DNA, 80 bp, synthetic construct
  source 1..80: mol_type = other DNA
acttttatggtctgctttttctctcttactcctttctttgtcatgtatgttctatcttttgtcacatctagaatgttatt

SEQ ID NO: 17452 - DNA, 80 bp, synthetic construct; identical to SEQ ID NO: 8304
  source 1..80: mol_type = other DNA

SEQ ID NO: 17453 - DNA, 80 bp, synthetic construct
  source 1..80: mol_type = other DNA
tttctagcacccttcctccagcaagccaaaacaacaaaatgcactgatttgggggcgacagtaaacaatcacagtaacta

SEQ ID NO: 17454 - DNA, 80 bp, synthetic construct
  source 1..80: mol_type = other DNA
gatatgatgcccacattttgttgttttagctaagtaaaatgatttattgtctgttatctccagtgatggtgattgtcttt

SEQ ID NO: 17455 - DNA, 80 bp, synthetic construct
  source 1..80: mol_type = other DNA
acaaaacatctgtatcttaacatgataagaaaatatatttaatttatacgtggacgatatgctttttgcaggaaaaatat

SEQ ID NO: 17456 - DNA, 80 bp, synthetic construct; identical to SEQ ID NO: 8305
  source 1..80: mol_type = other DNA

SEQ ID NO: 17457 - DNA, 80 bp, synthetic construct
  source 1..80: mol_type = other DNA
ggatatgtgatccaagtatataaagtgttctttattaaaataattttaattgggagttctttcatatgagattaaaccaa

SEQ ID NO: 17458 - DNA, 80 bp, synthetic construct
  source 1..80: mol_type = other DNA
cagcaaactgtcttttttattttaagagtgtgcttctaacgttattttttatgtttggcaatctgctgtcatcagtctgc

SEQ ID NO: 17459 - DNA, 80 bp, synthetic construct
  source 1..80: mol_type = other DNA
acagggtcttgctctgttacacaggctggagtgtagacgcatgaccatagcccactgtaaccttgaattcctgggctcaa

SEQ ID NO: 17460 - DNA, 80 bp, synthetic construct; identical to SEQ ID NO: 8306
  source 1..80: mol_type = other DNA

SEQ ID NO: 17461 - DNA, 80 bp, synthetic construct
  source 1..80: mol_type = other DNA
tattaggcctgtggacaacagtctgtagacccctgcttaaaggatatgtgaaaggtattttttctcattataaaatattt

SEQ ID NO: 17462 - DNA, 80 bp, synthetic construct
  source 1..80: mol_type = other DNA
ttcaagcaattttcctgcctcagcctcctgagtagctgggactgcaggtgcatgccgccatgctcagctgattttttttt

SEQ ID NO: 17463 - DNA, 80 bp, synthetic construct; identical to SEQ ID NO: 8307
  source 1..80: mol_type = other DNA

SEQ ID NO: 17464 - DNA, 80 bp, synthetic construct
  source 1..80: mol_type = other DNA
ccatgttggccaggctggtctcaaactcctgacctcaggtgatccacccgccttggcctcccaaagtgttgggattacag

SEQ ID NO: 17465 - DNA, 80 bp, synthetic construct
  source 1..80: mol_type = other DNA
gtggattgtgtcatgtctcttggaagccatctccttgttgatcattgatgctgactgttattttaatggcagaggataat

SEQ ID NO: 17466 - DNA, 80 bp, synthetic construct
  source 1..80: mol_type = other DNA
aaaacatcactcttattaatgactttaacctttgtgagcccttttaagttttgaaatgtgatgattctagatgttttcat

SEQ ID NO: 17467 - DNA, 80 bp, synthetic construct
  source 1..80: mol_type = other DNA
actacttattctctctgtgtatatatggatatatatatattaatgcagaacattaaatattaaagatgaattttcactat

SEQ ID NO: 17468 - DNA, 80 bp, synthetic construct; identical to SEQ ID NO: 8308
  source 1..80: mol_type = other DNA

SEQ ID NO: 17469 - DNA, 80 bp, synthetic construct
  source 1..80: mol_type = other DNA
ggttcaagcgattctcctacctcagcctcttgagtagctgggattacaggcatgtgccaccacaaccagctaattttttg

SEQ ID NO: 17470 - DNA, 80 bp, synthetic construct
  source 1..80: mol_type = other DNA
cctggcccattgtttctcatttctaagctaacaaaaatttccttggactttgaaggtgggaaagagaatctttttaaata

SEQ ID NO: 17471 - DNA, 80 bp, synthetic construct
  source 1..80: mol_type = other DNA
taggaaacagatgactaatattaatgtcatcattatcaggaaatagctcagcatctgtgtgatatttcttagatatatta

SEQ ID NO: 17472 - DNA, 80 bp, synthetic construct; identical to SEQ ID NO: 8309
  source 1..80: mol_type = other DNA

SEQ ID NO: 17473 - DNA, 80 bp, synthetic construct
  source 1..80: mol_type = other DNA
tgcttgaaaatcatagaaattgtgtctaaggatatgctttgggatatttggacttcgcttttgttttagtttttagttag

SEQ ID NO: 17474 - DNA, 80 bp, synthetic construct
  source 1..80: mol_type = other DNA
gaaaatatatgcactaatagccatggctttttcttcccactacattttacaaagtaaatagtttgttaagtaatctagtg

SEQ ID NO: 17475 - DNA, 80 bp, synthetic construct
  source 1..80: mol_type = other DNA
atggcataatttttacaagcagtagattattccttccttgagcagtgtggatgcagagttagctttcttattccattcta

SEQ ID NO: 17476 - DNA, 80 bp, synthetic construct; identical to SEQ ID NO: 8310
  source 1..80: mol_type = other DNA

SEQ ID NO: 17477 - DNA, 80 bp, synthetic construct
  source 1..80: mol_type = other DNA
cagttgctgttgtagataatactatgtagttgaacattaatctatctcagcattcctcaatcagggttcatctgaaccaa

SEQ ID NO: 17478 - DNA, 80 bp, synthetic construct
  source 1..80: mol_type = other DNA
gtttcataggagagttatttcattacacaacaagaatgccatagggtggcatttctgaaagtgtacttctggacccagat

SEQ ID NO: 17479 - DNA, 80 bp, synthetic construct
  source 1..80: mol_type = other DNA
aaaattcccattttctaagaagtgtatgctggagttttccagaagctacataatgtgtgctattataatagcttgaatgc

SEQ ID NO: 17480 - DNA, 80 bp, synthetic construct; identical to SEQ ID NO: 8311
  source 1..80: mol_type = other DNA

SEQ ID NO: 17481 - DNA, 80 bp, synthetic construct
  source 1..80: mol_type = other DNA
cctatgcatctgaaaatggataatcaaaaagagtaaattggccaacttgcagagatgaaagtacagaaaagaaatggaaa

SEQ ID NO: 17482 - DNA, 80 bp, synthetic construct
  source 1..80: mol_type = other DNA
atggcgtgaaccggggtggcatagcttacagtgagccaagatcacaccattgcactccagcctgggtgacagagcgagac

SEQ ID NO: 17483 - DNA, 80 bp, synthetic construct
  source 1..80: mol_type = other DNA
aacttagtggaggcaaatgttcatataaaaatgaggaaagtggttgcaacagaaaggatgaaaatgtcccagaggaagtg

SEQ ID NO: 17484 - DNA, 80 bp, synthetic construct; identical to SEQ ID NO: 8312
  source 1..80: mol_type = other DNA

SEQ ID NO: 17485 - DNA, 80 bp, synthetic construct
  source 1..80: mol_type = other DNA
cttgcagagttactgttatggtcctgtactgctgtgctaagtgaggactgcctatatttaaaatcttttagttcaatttc

SEQ ID NO: 17486 - DNA, 80 bp, synthetic construct
  source 1..80: mol_type = other DNA
tctaattctttaacagctccccttatcttcttgattccccactgtcttaggcactcatataccatcctttataggatatt

SEQ ID NO: 17487 - DNA, 80 bp, synthetic construct
  source 1..80: mol_type = other DNA
tagagcttacaaataaatcaacaggtacctactgggtacaacgttcaaagcattgtcctaggtgctgagggagatacata

SEQ ID NO: 17488 - DNA, 80 bp, synthetic construct; identical to SEQ ID NO: 8313
  source 1..80: mol_type = other DNA

SEQ ID NO: 17489 - DNA, 80 bp, synthetic construct
  source 1..80: mol_type = other DNA
tagctcccataattcctatgtgttgtgggagggactcagtggtaggtaattgaatcatggcagcgggcctttcccatgct

SEQ ID NO: 17490 - DNA, 80 bp, synthetic construct
  source 1..80: mol_type = other DNA
gtcaattaaatctctttcctttataaattactcagtcacgggtaagtctttattagcagtgtgaaaacagactaatacag

SEQ ID NO: 17491 - DNA, 80 bp, synthetic construct
  source 1..80: mol_type = other DNA
gggacaattagctatttctgagtcttagttttttcagtagatactttcttagtcctttcaggctgctttaacaaattgtc

SEQ ID NO: 17492 - DNA, 80 bp, synthetic construct; identical to SEQ ID NO: 8314
  source 1..80: mol_type = other DNA

SEQ ID NO: 17493 - DNA, 80 bp, synthetic construct
  source 1..80: mol_type = other DNA
ttcagatgttatactcttgtaaaatatttttacaactcttccccaaattgccttcctcccatttttttcatacttaggga

SEQ ID NO: 17494 - DNA, 80 bp, synthetic construct
  source 1..80: mol_type = other DNA
tgcagctattttggaacagattttaagccaccggctaaaaggtaaaagcactaatgtactatttattttcccaccagctg

SEQ ID NO: 17495 - DNA, 80 bp, synthetic construct
  source 1..80: mol_type = other DNA
aaatcttttggcctgtgtgactacgaaagagcctctgttctcagatttacacctatttctgggatgcattgaaaatgttg

SEQ ID NO: 17496 - DNA, 80 bp, synthetic construct; identical to SEQ ID NO: 8315
  source 1..80: mol_type = other DNA

SEQ ID NO: 17497 - DNA, 80 bp, synthetic construct
  source 1..80: mol_type = other DNA
cttagtaacaataagtactaactttatcacattaatcccattatctggtcttcctaaagcaaacttgatcatcagatatt

SEQ ID NO: 17498 - DNA, 80 bp, synthetic construct
  source 1..80: mol_type = other DNA
taagtgtttaaatgagttgagcagtactgtgggcccagagcaaaggattgaattgaaactacatgggagaaaaaatatga

SEQ ID NO: 17499 - DNA, 80 bp, synthetic construct
  source 1..80: mol_type = other DNA
aataaaatttttataaaagcaaaggatatggtagtattttgagatattattagatactatattgtgtgatgatcgtattt

SEQ ID NO: 17500 - DNA, 80 bp, synthetic construct; identical to SEQ ID NO: 8316
  source 1..80: mol_type = other DNA

SEQ ID NO: 17501 - DNA, 80 bp, synthetic construct
  source 1..80: mol_type = other DNA
ggataagaattctacttgtgtgactaagatatagtaagaaagctgatacagtacgaattgtgttaattttttaagctagg

SEQ ID NO: 17502 - DNA, 80 bp, synthetic construct
  source 1..80: mol_type = other DNA
aagtcatgattattttgatagtacactcttcacttatgatttagttacatagcaactaatttttccagtgttttccttta

SEQ ID NO: 17503 - DNA, 80 bp, synthetic construct
  source 1..80: mol_type = other DNA
caggcaaagtgaagagctgagacagttactttactctaaaagccccgttattgaagaaaaggaggcttttaaaatcagat

SEQ ID NO: 17504 - DNA, 80 bp, synthetic construct; identical to SEQ ID NO: 8317
  source 1..80: mol_type = other DNA

SEQ ID NO: 17505 - DNA, 80 bp, synthetic construct
  source 1..80: mol_type = other DNA
atttctaacagggggacatatagtctttgccttaacacttctgatctctgagaactaaataaagcagtccatcaagttat

SEQ ID NO: 17506 - DNA, 80 bp, synthetic construct
  source 1..80: mol_type = other DNA
tctttctcccaggtaaggtattgctagtttctttaatcttctggaaccaccacagtcttacttagtcttctggcttacca

SEQ ID NO: 17507 - DNA, 80 bp, synthetic construct
  source 1..80: mol_type = other DNA
actatagcttatattttatttctctaagttagtttgcctgagctgaagtttgatagggataaatgcagtattttttttct

SEQ ID NO: 17508 - DNA, 80 bp, synthetic construct
  source 1..80: mol_type = other DNA
agaaataaaaaagacaatcctgaaaattaatatggaaccacaaaagaccctgaccaaagcaatcttgagcaaaaagaaca

SEQ ID NO: 17509 - DNA, 80 bp, synthetic construct; identical to SEQ ID NO: 8318
  source 1..80: mol_type = other DNA

SEQ ID NO: 17510 - DNA, 80 bp, synthetic construct
  source 1..80: mol_type = other DNA
cacaggcaactaaaggaaaataaacaagtggaattacatcaaactaaattacatcatcagagtaaagagacaatttacaa

SEQ ID NO: 17511 - DNA, 80 bp, synthetic construct
  source 1..80: mol_type = other DNA
ggtgctcaaaatcactatacagcaaatagatgaaaattaaaaccatagtgagatatcccctcgttagaatgcatattatc

SEQ ID NO: 17512 - DNA, 80 bp, synthetic construct; identical to SEQ ID NO: 8319
  source 1..80: mol_type = other DNA

SEQ ID NO: 17513 - DNA, 80 bp, synthetic construct
  source 1..80: mol_type = other DNA
tgacaacatggatgacccaggagacattatgttgagtgaaataaaccagacacttaaagacaaatactgcatgacttcct

SEQ ID NO: 17514 - DNA, 80 bp, synthetic construct
  source 1..80: mol_type = other DNA
tatagttaaagtgtattggatatttgaaaattcctaaaagagtatattttcagtgttctcaccaaaaaatgataagtatg

SEQ ID NO: 17515 - DNA, 80 bp, synthetic construct
  source 1..80: mol_type = other DNA
agggagtttgtccttttttgccattttgctttctgccatttggagacacaacattccttcactctagaggatgtagtgtt

SEQ ID NO: 17516 - DNA, 80 bp, synthetic construct
  source 1..80: mol_type = other DNA
gacccagttttgggtattgttatagcaatacaaaaatggactaagaaagtgaggtaatatgtatattaatttgttaatta

SEQ ID NO: 17517 - DNA, 80 bp, synthetic construct; identical to SEQ ID NO: 8320
  source 1..80: mol_type = other DNA

SEQ ID NO: 17518 - DNA, 80 bp, synthetic construct
  source 1..80: mol_type = other DNA
agggggaggaggaaaatagaataaagaagagaaagacgttagaggatactcattttccaaaacagagttagatttagtct

SEQ ID NO: 17519 - DNA, 80 bp, synthetic construct
  source 1..80: mol_type = other DNA
cttctaaacttatttatccatcactaagctacttaaatttcaagttactcattcaaaaacataatgtaatggatcactat

SEQ ID NO: 17520 - DNA, 80 bp, synthetic construct; identical to SEQ ID NO: 8321
  source 1..80: mol_type = other DNA

SEQ ID NO: 17521 - DNA, 80 bp, synthetic construct
  source 1..80: mol_type = other DNA
cctgcaaatttcaacaggcaaagggaaaaaaacaacaacaatgaaaacctctccacaagatactattctctctagccaaa

SEQ ID NO: 17522 - DNA, 80 bp, synthetic construct
  source 1..80: mol_type = other DNA
accaccattagggttgtatcagagaaggccagagagataagatttcttccctcttggctggtcaaaaactctctctctct

SEQ ID NO: 17523 - DNA, 80 bp, synthetic construct
  source 1..80: mol_type = other DNA
aggaggccaccccaagtaccatgccagtggaaaccatgtaggaagcctggactccaagtcccacacagtagtaatgagga

SEQ ID NO: 17524 - DNA, 80 bp, synthetic construct
  source 1..80: mol_type = other DNA
acataatataaatatgtccagctttccattgaaaccatttgtcataccaagaaccaggaagatctcagattgcataataa

SEQ ID NO: 17525 - DNA, 80 bp, synthetic construct; identical to SEQ ID NO: 8322
  source 1..80: mol_type = other DNA

SEQ ID NO: 17526 - DNA, 80 bp, synthetic construct
  source 1..80: mol_type = other DNA
aggtgggactgaaaaagtactcaacagctgaaaatttcccaaagttagcaagagacataagcaaacagattcaagaaaca

SEQ ID NO: 17527 - DNA, 80 bp, synthetic construct
  source 1..80: mol_type = other DNA
tggaggccaggaggaagtggtaaaacatatttcaagtgctgaaagataactgtcaacacagcagaattattcttcagcaa

SEQ ID NO: 17528 - DNA, 80 bp, synthetic construct
  source 1..80: mol_type = other DNA
agctcagtagttcaagaccagcctgggcaacatggcaaaaccctgtctctacaaaatatacaaaaaattaatcagacatg

SEQ ID NO: 17529 - DNA, 80 bp, synthetic construct; identical to SEQ ID NO: 8323
  source 1..80: mol_type = other DNA

SEQ ID NO: 17530 - DNA, 80 bp, synthetic construct
  source 1..80: mol_type = other DNA
accagtctactggtatcattttccagtgtgaagtttaaaaatcttacctttctttatgtccctttattctaccctgtgtg

SEQ ID NO: 17531 - DNA, 80 bp, synthetic construct
  source 1..80: mol_type = other DNA
aaaagaaacccagggaacttactgctgtgtcattctctgggttctgaagtttctagccagtcttcctttttatctccacc

SEQ ID NO: 17532 - DNA, 80 bp, synthetic construct; identical to SEQ ID NO: 8324
  source 1..80: mol_type = other DNA

SEQ ID NO: 17533 - DNA, 80 bp, synthetic construct
  source 1..80: mol_type = other DNA
tggtctattaggtagcagttaccagtaaaaactctctgggtcaaatggtgagtgtgagtgagtgtatttgtgtgtgtaca

SEQ ID NO: 17534 - DNA, 80 bp, synthetic construct
  source 1..80: mol_type = other DNA
tgtgacacttaaagtagattaattcagctgaatggtttttaaaaattaaagctctctaaagagatataaagtctaaaacg

SEQ ID NO: 17535 - DNA, 80 bp, synthetic construct
  source 1..80: mol_type = other DNA
atatcttctttggctctattatgtttatgttggactcttagcagattaattttcaaatttttctccaactactgctttgg

SEQ ID NO: 17536 - DNA, 80 bp, synthetic construct
  source 1..80: mol_type = other DNA
tgagttatagtcagaatttggtttgtatggtagattttgttgaaatttgtaagacttacttaagggcctagtttatagtt

SEQ ID NO: 17537 - DNA, 80 bp, synthetic construct; identical to SEQ ID NO: 8325
  source 1..80: mol_type = other DNA

SEQ ID NO: 17538 - DNA, 80 bp, synthetic construct
  source 1..80: mol_type = other DNA
ttgtacccattaaccatccccactaactgccccccaccttcactaccctccccagcctctggtaaccattattttactct

SEQ ID NO: 17539 - DNA, 80 bp, synthetic construct
  source 1..80: mol_type = other DNA
aatagtactcccttgtgtatatttaccacattttctttattcatttgtctgtttcttccaagtcttggctattgtgaata

SEQ ID NO: 17540 - DNA, 80 bp, synthetic construct; identical to SEQ ID NO: 8326
  source 1..80: mol_type = other DNA

SEQ ID NO: 17541 - DNA, 80 bp, synthetic construct
  source 1..80: mol_type = other DNA
ttattagttttttcctgtagagttgtttgagctccttatatattctgcttattaatcccttgtcagatgagtagtctgca

SEQ ID NO: 17542 - DNA, 80 bp, synthetic construct
  source 1..80: mol_type = other DNA
cctggagactttccacaatgttttcttttaataatttcacactttcaggttttagatttcagtatttaatccattttgat

SEQ ID NO: 17543 - DNA, 80 bp, synthetic construct
  source 1..80: mol_type = other DNA
atgtctgcattctctattctgttccattggtctatgtatctctttttatgccagtaccatggtgttttgattacaatagc

SEQ ID NO: 17544 - DNA, 80 bp, synthetic construct; identical to SEQ ID NO: 8327
  source 1..80: mol_type = other DNA

SEQ ID NO: 17545 - DNA, 80 bp, synthetic construct
  source 1..80: mol_type = other DNA
taggaaagctgctgactttttgtatgttgattttgtatcctgcaactttactgaatttgtttatcagttctaatggcttt

SEQ ID NO: 17546 - DNA, 80 bp, synthetic construct
  source 1..80: mol_type = other DNA
tgatgagatctattccttgtgtttattacccattgacgctattaactaaccatctcgttgtccagttcagctgcattctt

SEQ ID NO: 17547 - DNA, 80 bp, synthetic construct
  source 1..80: mol_type = other DNA
tattaagctttccctacagttggcttttcttctaccgctactatgtattattgaattctgtgttctttgtataccttttt

SEQ ID NO: 17548 - DNA, 80 bp, synthetic construct
  source 1..80: mol_type = other DNA
gacaaggtagagtaagtccaataataacctaattctctgagtgttcttagagtactataacaaaatactacatactgaga

SEQ ID NO: 17549 - DNA, 80 bp, synthetic construct; identical to SEQ ID NO: 8328
  source 1..80: mol_type = other DNA

SEQ ID NO: 17550 - DNA, 80 bp, synthetic construct
  source 1..80: mol_type = other DNA
cattcacttttaaaataatattaaattaaaaatatacagggtagccaggcatggtggcacacttctgtagtccaagctac

SEQ ID NO: 17551 - DNA, 80 bp, synthetic construct
  source 1..80: mol_type = other DNA
actttacttacaaggaagcaggaaaatgtgatcaattctcaaaggaatacagatgcttattgtgagatgacccagatgtt

SEQ ID NO: 17552 - DNA, 80 bp, synthetic construct; identical to SEQ ID NO: 8329
  source 1..80: mol_type = other DNA

SEQ ID NO: 17553 - DNA, 80 bp, synthetic construct
  source 1..80: mol_type = other DNA
ggagaggaggaagagattaatatagaaaatacatttgacaaaataatagctataagttcctagatttggggaagataaat

SEQ ID NO: 17554 - DNA, 80 bp, synthetic construct
  source 1..80: mol_type = other DNA
aaagctctctaagatcaagaacatgacaagggaatccattcctaccacttctactcaacatcattctggatctcctagct

SEQ ID NO: 17555 - DNA, 80 bp, synthetic construct
  source 1..80: mol_type = other DNA
gttagaattaataaattcagtgaagtcgtatgatacaaaatcaacatacaaaaataagttacatttttatatactaaaaa

SEQ ID NO: 17556 - DNA, 80 bp, synthetic construct
  source 1..80: mol_type = other DNA
atatctcatgctcatgggttggaagaatttttattgttaaatgtccatactacccaaagtgacctatagattcaatgcag

SEQ ID NO: 17557 - DNA, 80 bp, synthetic construct; identical to SEQ ID NO: 8330
  source 1..80: mol_type = other DNA

SEQ ID NO: 17558 - DNA, 80 bp, synthetic construct
  source 1..80: mol_type = other DNA
agtgaacatacgtgtacatgtgtctttatggtagaatgacttatattcctctgggtatatacccggtaatgggattgctg

SEQ ID NO: 17559 - DNA, 80 bp, synthetic construct
  source 1..80: mol_type = other DNA
cattctgactggtgtgagatggtatctcattgtggttttgatttgcatttttctaatgatcagtgatactgagctttctt

SEQ ID NO: 17560 - DNA, 80 bp, synthetic construct; identical to SEQ ID NO: 8331
  source 1..80: mol_type = other DNA

SEQ ID NO: 17561 - DNA, 80 bp, synthetic construct
  source 1..80: mol_type = other DNA
atttttgtgtatagtgtaaggaaggggtccagtttcaatcttccacatatggctatccagttttcccagcaccatttatt

SEQ ID NO: 17562 - DNA, 80 bp, synthetic construct
  source 1..80: mol_type = other DNA
ggtatagtttgaagtcaggtaatgtgatgcctctacctttgctatttttgcttaggattgcttctggttatttgggttct

SEQ ID NO: 17563 - DNA, 80 bp, synthetic construct
  source 1..80: mol_type = other DNA
ccatttgtgtcttctctgatttctttgagcagggttttgtaattctcattgtagagatttttcacctccctgggtagctg

SEQ ID NO: 17564 - DNA, 80 bp, synthetic construct
  source 1..80: mol_type = other DNA
aacttttgggccaagactatgtttttttttttctagatatagaatcatgtcatctgcaaacagggatagtttaactttct

SEQ ID NO: 17565 - DNA, 80 bp, synthetic construct; identical to SEQ ID NO: 8332
  source 1..80: mol_type = other DNA

SEQ ID NO: 17566 - DNA, 80 bp, synthetic construct
  source 1..80: mol_type = other DNA
ctttttgatgtgctgccagatttggttttccagtattttgttgaggatttttgtattgatgttcatcaaggatatcagcc

SEQ ID NO: 17567 - DNA, 80 bp, synthetic construct
  source 1..80: mol_type = other DNA
tatgaatccatcaggcccttggcttttttttttttggtaggctatttattactgatttgatttcagagctcattattggt

SEQ ID NO: 17568 - DNA, 80 bp, synthetic construct
  source 1..80: mol_type = other DNA
ctttgtcatttctcattgtgtttatttggagcttttcttccttcttctttattagtctaactagtggcctattttattag

SEQ ID NO: 17569 - DNA, 80 bp, synthetic construct; identical to SEQ ID NO: 8333
  source 1..80: mol_type = other DNA

SEQ ID NO: 17570 - DNA, 80 bp, synthetic construct
  source 1..80: mol_type = other DNA
tttattgctctgtgatccaagagtgtgtttggtatgatttcagttcttttacatttgttgaggattgttttattccaatt

SEQ ID NO: 17571 - DNA, 80 bp, synthetic construct
  source 1..80: mol_type = other DNA
ttaatactgtctgtggagtgttgaagtctcccactattttttccatgggagtttgtgcctctttgtaggtctctaagaac

SEQ ID NO: 17572 - DNA, 80 bp, synthetic construct; identical to SEQ ID NO: 8334
  source 1..80: mol_type = other DNA

SEQ ID NO: 17573 - DNA, 80 bp, synthetic construct
  source 1..80: mol_type = other DNA
ttggctttttctgtgattgttttacagtgacactggtctgtgtgtttaagcatgtttttgtattagctggtattggtctt

SEQ ID NO: 17574 - DNA, 80 bp, synthetic construct
  source 1..80: mol_type = other DNA
taagaatgttgaatatgggcccccaatctcttctggcttgtagggtttcagctgagaggtccactgttagcctaatggag

SEQ ID NO: 17575 - DNA, 80 bp, synthetic construct
  source 1..80: mol_type = other DNA
tgtacctcgttggggaagttttcatggacaatttcctgaaatatgttttccaagttgttttctttctccccctccctttc

SEQ ID NO: 17576 - DNA, 80 bp, synthetic construct
  source 1..80: mol_type = other DNA
cttctgctgtcaatacttgtaattgcattgtgaaattattgtattgtgttattcagctctgtcagacccattgggttctg

SEQ ID NO: 17577 - DNA, 80 bp, synthetic construct; identical to SEQ ID NO: 8335
  source 1..80: mol_type = other DNA

SEQ ID NO: 17578 - DNA, 80 bp, synthetic construct
  source 1..80: mol_type = other DNA
cattagtgaggtatttttgatgttaaagccttggggtgtgatccagcaggtggcttaggctttttggtcagttggtagac

SEQ ID NO: 17579 - DNA, 80 bp, synthetic construct
  source 1..80: mol_type = other DNA
ttatgtttctttctcaagttggaggcagcagagaaagggatcttattagtagttgtgactgagggtcatttgcttgtttc

SEQ ID NO: 17580 - DNA, 80 bp, synthetic construct
  source 1..80: mol_type = other DNA
ttgggctgattacaactggttggaggtgtggacacgacacttagggtttttactctcttattggtccggcaagggcagat

SEQ ID NO: 17581 - DNA, 80 bp, synthetic construct; identical to SEQ ID NO: 8336
  source 1..80: mol_type = other DNA

SEQ ID NO: 17582 - DNA, 80 bp, synthetic construct
  source 1..80: mol_type = other DNA
gattgaggacccacttaaaaacgcagtcttaccatgtgttggtagagcagctgttccgtgctgtgctggaggtccacttc

SEQ ID NO: 17583 - DNA, 80 bp, synthetic construct
  source 1..80: mol_type = other DNA
gttgggaggtcctgcccagtgaggagaagtgggactggggacccacttaagcagtttggccgcattttggtagagcagct

SEQ ID NO: 17584 - DNA, 80 bp, synthetic construct; identical to SEQ ID NO: 8337
  source 1..80: mol_type = other DNA

SEQ ID NO: 17585 - DNA, 80 bp, synthetic construct
  source 1..80: mol_type = other DNA
tgggtcttatcttgtggggtgccgtggaagtggggcctgtaggttttggctgcttagccctctagattcagcctctttcc

SEQ ID NO: 17586 - DNA, 80 bp, synthetic construct
  source 1..80: mol_type = other DNA
gaatgggttcacaaggagatctcctgacccaaggtttgcaaagattcatgggagaagtgtggtttcctgaggtcacacat

SEQ ID NO: 17587 - DNA, 80 bp, synthetic construct
  source 1..80: mol_type = other DNA
ttaacttgtctttctctatgagagccatgcacactggctgcttctggtcggccatcctgactactcccctggaattcctt

SEQ ID NO: 17588 - DNA, 80 bp, synthetic construct; identical to SEQ ID NO: 8338
  source 1..80: mol_type = other DNA

SEQ ID NO: 17589 - DNA, 80 bp, synthetic construct
  source 1..80: mol_type = other DNA
tttttattcttttttctttttctgactgagctaatttcaagaaccagtcttcaagcattgagattctttcctcagtttgg

SEQ ID NO: 17590 - DNA, 80 bp, synthetic construct
  source 1..80: mol_type = other DNA
tgttgaatcttgatgatcttcattcgtatccatgttctgaattctatgtcactcatttcagccatttcagcatggttaag

SEQ ID NO: 17591 - DNA, 80 bp, synthetic construct
  source 1..80: mol_type = other DNA
tttgatgcccttgggtgtttgattgtgatataaggtaggttcagtcaattggcttcatttctggaagattttagtgggcc

SEQ ID NO: 17592 - DNA, 80 bp, synthetic construct
  source 1..80: mol_type = other DNA
cggccaaaccacttcatcgaggtggtggcagtgggattcatgctccttcatgtgtgccagcatctgcagaagtatagcga

SEQ ID NO: 17593 - DNA, 80 bp, synthetic construct; identical to SEQ ID NO: 8339
  source 1..80: mol_type = other DNA

SEQ ID NO: 17594 - DNA, 80 bp, synthetic construct
  source 1..80: mol_type = other DNA
taagctgtgggtgggctagcatgtattggcaggggctggtctgttggaactctgagatggtcaagaattgtctgccagca

SEQ ID NO: 17595 - DNA, 80 bp, synthetic construct
  source 1..80: mol_type = other DNA
aggtctgacggtcaccctaaggctaaaggctcccacaggagcatggtaagccttgggggaggggcatccttggatgtgct

SEQ ID NO: 17596 - DNA, 80 bp, synthetic construct
  source 1..80: mol_type = other DNA
ctcctcacttgttcaacttgccttttccccagaagatgctgggggctaggaacaagtccctgtgcttagcctccccatgc

SEQ ID NO: 17597 - DNA, 80 bp, synthetic construct; identical to SEQ ID NO: 8340
  source 1..80: mol_type = other DNA

SEQ ID NO: 17598 - DNA, 80 bp, synthetic construct
  source 1..80: mol_type = other DNA
aagacaccaagagtacacaatagggaaaggataatctcttcagtaaatagtgttcagaaaactgaatattcacatgcaaa

SEQ ID NO: 17599 - DNA, 80 bp, synthetic construct
  source 1..80: mol_type = other DNA
ataggggaaaagctaattgacattgttcttggcaaagatatttttggacttaacacccaaagtacaggcaacaaagaaaa

SEQ ID NO: 17600 - DNA, 80 bp, synthetic construct; identical to SEQ ID NO: 8341
  source 1..80: mol_type = other DNA

SEQ ID NO: 17601 - DNA, 80 bp, synthetic construct
  source 1..80: mol_type = other DNA
ctgcaaagcaaaggaaacaatccacaaaatgaaaaggcaacttacagaatgagagataacatgtgtaaaccatgtatcca

SEQ ID NO: 17602 - DNA, 80 bp, synthetic construct
  source 1..80: mol_type = other DNA
tcaagacaaccagcctggccaacatggtgaaaccccatctctactgaaaacacaataattagccaggtatagtggtgtat

SEQ ID NO: 17603 - DNA, 80 bp, synthetic construct
  source 1..80: mol_type = other DNA
gcctttaccatgttccattacctggatcacaactccttgccttatcttaaaatcactcatattcccttccactaaataat

SEQ ID NO: 17604 - DNA, 80 bp, synthetic construct
  source 1..80: mol_type = other DNA
tctgtctagatggccagtataaaaaacaatcaaaagataacaagtgttggcaaggatgtggagaaaagggaaccttccta

SEQ ID NO: 17605 - DNA, 80 bp, synthetic construct; identical to SEQ ID NO: 8342
  source 1..80: mol_type = other DNA

SEQ ID NO: 17606 - DNA, 80 bp, synthetic construct
  source 1..80: mol_type = other DNA
aaaaaaaaaaaaaaggaaatcctgcgatttgcagtaacagatgaacctggaggtcaataaactacatgaaatatgcaaga

SEQ ID NO: 17607 - DNA, 80 bp, synthetic construct
  source 1..80: mol_type = other DNA
gattaagtgctggagacctatattgtgtacttgaaaattgctatgatagtagatctcaagtgttctcaccatacatacac

SEQ ID NO: 17608 - DNA, 80 bp, synthetic construct; identical to SEQ ID NO: 8343
  source 1..80: mol_type = other DNA

SEQ ID NO: 17609 - DNA, 80 bp, synthetic construct
  source 1..80: mol_type = other DNA
gctaaagggagatggtatcagaagaaaacttggaacttcatgaatgaagaaagagcaacagaaactgtgaatatctaaat

SEQ ID NO: 17610 - DNA, 80 bp, synthetic construct
  source 1..80: mol_type = other DNA
aggtttccaggtttgcatgtatagtacaagtgacttttaaagcaaaggctacagagtaaagggaactatgtggttatata

SEQ ID NO: 17611 - DNA, 80 bp, synthetic construct
  source 1..80: mol_type = other DNA
ataaatggcctaagcactccaattaaaagagattttttgactgggtaaaaaaaggactcaatatatacagaaacccattt

SEQ ID NO: 17612 - DNA, 80 bp, synthetic construct; identical to SEQ ID NO: 8344
  source 1..80: mol_type = other DNA

SEQ ID NO: 17613 - DNA, 80 bp, synthetic construct
  source 1..80: mol_type = other DNA
ttttttttttttttgagacagagtcccgctctttcccccaggctggagtgcagtggcgcgatcttggctcactgcaagct

SEQ ID NO: 17614 - DNA, 80 bp, synthetic construct
  source 1..80: mol_type = other DNA
cccaccttggcctcccaaagtgctgggattacaagtgtgagccaccgtgcccggcccccaacttttttttaagacaggat

SEQ ID NO: 17615 - DNA, 80 bp, synthetic construct; identical to SEQ ID NO: 8345
  source 1..80: mol_type = other DNA

SEQ ID NO: 17616 - DNA, 80 bp, synthetic construct
  source 1..80: mol_type = other DNA
aaagaattgaaatcatataaagtatgttctctgtaatggaatgaaactagatgtcaagaacagaagatatctgaaaaatc

SEQ ID NO: 17617 - DNA, 80 bp, synthetic construct
  source 1..80: mol_type = other DNA
tgacgttccccaccctgtgtccatgtgttctcgttgttcaacttccacttatgagtgagaacatgcagtgtttggttttc

SEQ ID NO: 17618 - DNA, 80 bp, synthetic construct
  source 1..80: mol_type = other DNA
tccaagtctttgctaataactcttggatcaaagagggattctcgaggaaaattagtcttttgaactgaatgaaaaactaa

SEQ ID NO: 17619 - DNA, 80 bp, synthetic construct; identical to SEQ ID NO: 8346
  source 1..80: mol_type = other DNA

SEQ ID NO: 17620 - DNA, 80 bp, synthetic construct
  source 1..80: mol_type = other DNA
gagtgaaactccatctcaaaaaaaagaaaagaaaagaaaaaagaaaaagaaactaaataaagaagggaaaattaaaccca

SEQ ID NO: 17621 - DNA, 80 bp, synthetic construct
  source 1..80: mol_type = other DNA
ttccaatatcaggaatgaaagagggcatatgactacagaccttacattcaaaggataaaaagttaattgtggaggaaatg

SEQ ID NO: 17622 - DNA, 80 bp, synthetic construct
  source 1..80: mol_type = other DNA
aggcctagatatttttgctgttgattgcaaccagccattaaggtaataatagtaatcctattcaatccatctcagaaaat

SEQ ID NO: 17623 - DNA, 80 bp, synthetic construct
  source 1..80: mol_type = other DNA
acaaaaaatttttggtttccccagtgcgtattaaaagttgtatttacactacactgtaatctattaagtgtgtaatagca

SEQ ID NO: 17624 - DNA, 80 bp, synthetic construct; identical to SEQ ID NO: 8347
  source 1..80: mol_type = other DNA

SEQ ID NO: 17625 - DNA, 80 bp, synthetic construct
  source 1..80: mol_type = other DNA
tctacccacagtagaacttctttcaaaattggagtcaatactctcaaaccctgccactgctttatcaactaagttcattt

SEQ ID NO: 17626 - DNA, 80 bp, synthetic construct
  source 1..80: mol_type = other DNA
ttcaagttctacttctagttctcttgcgatttccatgttatctgcaatgactccttccaccaaagtcttgaacccctcta

SEQ ID NO: 17627 - DNA, 80 bp, synthetic construct; identical to SEQ ID NO: 8348
  source 1..80: mol_type = other DNA

SEQ ID NO: 17628 - DNA, 80 bp, synthetic construct
  source 1..80: mol_type = other DNA
gaatcttttttctgagtagtggatcaaaacaatgggctttgaatatttagtaagccaaactgtaaacagaggagctgtca

SEQ ID NO: 17629 - DNA, 80 bp, synthetic construct
  source 1..80: mol_type = other DNA
cgttaaagccaggcattaacttctcttcttttactatgaaaggtttagatggcatcttcttccaatataaagctgttagg

SEQ ID NO: 17630 - DNA, 80 bp, synthetic construct
  source 1..80: mol_type = other DNA
acttcatgaaccaacctctgctagcttcaaacttttcttctgcggcgtctttgcctctctcatccttcatagcattaaag

SEQ ID NO: 17631 - DNA, 80 bp, synthetic construct; identical to SEQ ID NO: 8349
  source 1..80: mol_type = other DNA

SEQ ID NO: 17632 - DNA, 80 bp, synthetic construct
  source 1..80: mol_type = other DNA
ctggagcattcagaacacacacatttatcaattaagcttgccattttatacaggtgtggttcatggcgccccaaaattat

SEQ ID NO: 17633 - DNA, 80 bp, synthetic construct
  source 1..80: mol_type = other DNA
tgactgtacataccagtacacctcatggacacagacatcagaatcttcaataaatattgacagatcaaactggaatgcaa

SEQ ID NO: 17634 - DNA, 80 bp, synthetic construct; identical to SEQ ID NO: 8350
  source 1..80: mol_type = other DNA

SEQ ID NO: 17635 - DNA, 80 bp, synthetic construct
  source 1..80: mol_type = other DNA
tttcatgaaggaagaactaagttggaaactcaaattatctgattttaagacttactgttaagatgcagtaatcagtgtgt

SEQ ID NO: 17636 - DNA, 80 bp, synthetic construct
  source 1..80: mol_type = other DNA
acgtgcctgtagccccagctacgcaggaggctgaggcaggaggattgcttgaacccaggaggcagagattgcagtgagtc

SEQ ID NO: 17637 - DNA, 80 bp, synthetic construct
  source 1..80: mol_type = other DNA
aaaagtgataacctttaagaataataggctaggattaattgaatacctgtgtgcaaaaaaaaagtgaaccttgttcctta

SEQ ID NO: 17638 - DNA, 80 bp, synthetic construct; identical to SEQ ID NO: 8351
  source 1..80: mol_type = other DNA

SEQ ID NO: 17639 - DNA, 80 bp, synthetic construct
  source 1..80: mol_type = other DNA
aaagaattgctataaaaaccttaataatatgaaaaccaatccaattttaaaatatgcaaagagctgaacagatatttcat

SEQ ID NO: 17640 - DNA, 80 bp, synthetic construct
  source 1..80: mol_type = other DNA
cctggataaactgttgtatgttcatacactggacaaactcagtaataaaaaggaaaaaaaatttccacacacaacaacat

SEQ ID NO: 17641 - DNA, 80 bp, synthetic construct
  source 1..80: mol_type = other DNA
catcatgatgaaggagtttctttgcatgatgaaactgttatgtgtctcataatcatggttacatgactccctctattttt

SEQ ID NO: 17642 - DNA, 80 bp, synthetic construct
  source 1..80: mol_type = other DNA
ggacaatttgtcacagagcccagtaaaaagaagtcccaaggaatactcctttaccatcacccctccatatttttcttggc

SEQ ID NO: 17643 - DNA, 80 bp, synthetic construct; identical to SEQ ID NO: 8352
  source 1..80: mol_type = other DNA

SEQ ID NO: 17644 - DNA, 80 bp, synthetic construct
  source 1..80: mol_type = other DNA
gtcataatagaagtatattaacgagcatggtgtaacacaaaggagtatatctgtttttcttggatgggtgagggaaggct

SEQ ID NO: 17645 - DNA, 80 bp, synthetic construct
  source 1..80: mol_type = other DNA
atttagcagtaaagtcatcagagacaacgttgtaaacttcagcttggtgacatgaggatgggatgtattagtgatttttg

SEQ ID NO: 17646 - DNA, 80 bp, synthetic construct
  source 1..80: mol_type = other DNA
aaaaaaaaaaaaaaaagaattaactgagcatgtaggtgtgcatctgtagtcccagctacttgggaggctaaggtgggagg

SEQ ID NO: 17647 - DNA, 80 bp, synthetic construct; identical to SEQ ID NO: 8353
  source 1..80: mol_type = other DNA

SEQ ID NO: 17648 - DNA, 80 bp, synthetic construct
  source 1..80: mol_type = other DNA
acagctagtttttcccccacaacttactgttctctacccttatcagtcttttgatttttcttgactatatcaggcacatt

SEQ ID NO: 17649 - DNA, 80 bp, synthetic construct
  source 1..80: mol_type = other DNA
tatattttaaataataaatcacctcccctcctttcaacctcaagcactcctgacctctttcccctgagttacattaagtc

SEQ ID NO: 17650 - DNA, 80 bp, synthetic construct
  source 1..80: mol_type = other DNA
tatccaaatctctagagcagtgcctacgatatggcagaaactcagtcattatttgttgaaaaattgatggaagagtaata

SEQ ID NO: 17651 - DNA, 80 bp, synthetic construct; identical to SEQ ID NO: 8354
  source 1..80: mol_type = other DNA

SEQ ID NO: 17652 - DNA, 80 bp, synthetic construct
  source 1..80: mol_type = other DNA
agaaattggctcttaaggtcaccagagtttggcttttagacaatgggagaggccactctgagaaacacccttttaagtta

SEQ ID NO: 17653 - DNA, 80 bp, synthetic construct
  source 1..80: mol_type = other DNA
ataatacatttaagatttgggagaaaataatcactacatagtttctaaaaacagagagctacacattttatataatgtaa

SEQ ID NO: 17654 - DNA, 80 bp, synthetic construct
  source 1..80: mol_type = other DNA
tattatgtggaactaatttttatataaacccattttgatcagtagtgaccttttttctccgttgattagtcttcatacat

SEQ ID NO: 17655 - DNA, 80 bp, synthetic construct; identical to SEQ ID NO: 8355
  source 1..80: mol_type = other DNA

SEQ ID NO: 17656 - DNA, 80 bp, synthetic construct
  source 1..80: mol_type = other DNA
tctcttcaaataaaatgattcaaaatttagatttggcttctggggaagggggattatcacaaagaagatgatactatgaa

SEQ ID NO: 17657 - DNA, 80 bp, synthetic construct; identical to SEQ ID NO: 8356
  source 1..80: mol_type = other DNA

SEQ ID NO: 17658 - DNA, 80 bp, synthetic construct
  source 1..80: mol_type = other DNA
atatttctcattttatagaagaggggaaagattacacaatttagtggactttgttcattttaggagggtatcataataat

SEQ ID NO: 17659 - DNA, 80 bp, synthetic construct
  source 1..80: mol_type = other DNA
tgttctaatatgtagcctaattaagagttgactgaagtatgttagaattttgaatgccaaatgtttatgtgtgtttgcac

SEQ ID NO: 17660 - DNA, 80 bp, synthetic construct
  source 1..80: mol_type = other DNA
cgggaatacaggtgtaagccactaagcctggggcttagatttcttggtataagaacctgagatgaccctgtagtacagat

SEQ ID NO: 17661 - DNA, 80 bp, synthetic construct; identical to SEQ ID NO: 8357
  source 1..80: mol_type = other DNA

SEQ ID NO: 17662 - DNA, 80 bp, synthetic construct
  source 1..80: mol_type = other DNA
atgaaaaatgctgtataaaagatagtctcattgttagctgaattacagtactgtagcatttttatctgttgcttcgctga

SEQ ID NO: 17663 - DNA, 80 bp, synthetic construct
  source 1..80: mol_type = other DNA
tttacaaatggtaatccatttacagaccattttatctaggagtcttttccatattccatcttggtacatttatataaagg

SEQ ID NO: 17664 - DNA, 80 bp, synthetic construct
  source 1..80: mol_type = other DNA
tgaatagaaaacaaagttggaacatggctgacatgaaaaatatagaagaataaatatcatattcatgaattagaaacata

SEQ ID NO: 17665 - DNA, 80 bp, synthetic construct
  source 1..80: mol_type = other DNA
gtatagaagcattcttctattgcatatccatctctgagttgattctgcctttgcctgaaatttcagaaacttactcctga

SEQ ID NO: 17666 - DNA, 80 bp, synthetic construct; identical to SEQ ID NO: 8358
  source 1..80: mol_type = other DNA

SEQ ID NO: 17667 - DNA, 80 bp, synthetic construct
  source 1..80: mol_type = other DNA
tacaactgactaattatcctccatcagtcaggtcctgcctatctcctaaggagtaggtcagcttgaagtgacagagaaaa

SEQ ID NO: 17668 - DNA, 80 bp, synthetic construct
  source 1..80: mol_type = other DNA
taagtgaaaaatttaagaaaattttcccatggtctttcacagccaaaatgaaaatcagggcacagaggctagcatactaa

SEQ ID NO: 17669 - DNA, 80 bp, synthetic construct; identical to SEQ ID NO: 8359
  source 1..80: mol_type = other DNA

SEQ ID NO: 17670 - DNA, 80 bp, synthetic construct
  source 1..80: mol_type = other DNA
tggttaagaagtgccataaatctggtcatgatatgcttatttggtacatttttgtagtaaaatttctttaagtcagattt

SEQ ID NO: 17671 - DNA, 80 bp, synthetic construct
  source 1..80: mol_type = other DNA
gagaaatttcatttttgtttgttgtagttatagcaagaacattatgttctaatatgagctttaactgtcgtaccaagtta

SEQ ID NO: 17672 - DNA, 80 bp, synthetic construct
  source 1..80: mol_type = other DNA
ttattggttttataaaggatctaagtgtttggaaaggtgtgggaccatgtactattggagatttcagtgtttgactatga

SEQ ID NO: 17673 - DNA, 80 bp, synthetic construct
  source 1..80: mol_type = other DNA
acagtgtttttgatagagtaggcatttagtcaacattggttaaactgaccaacattttatataatatctaagtgctgctc

SEQ ID NO: 17674 - DNA, 80 bp, synthetic construct; identical to SEQ ID NO: 8360
  source 1..80: mol_type = other DNA

SEQ ID NO: 17675 - DNA, 80 bp, synthetic construct
  source 1..80: mol_type = other DNA
cacatatttttgacttacagacaccttagcctctccaatacaataagctacaaggaactagcttcatttacttaccaagt

SEQ ID NO: 17676 - DNA, 80 bp, synthetic construct
  source 1..80: mol_type = other DNA
tttttttaaagagatttcccaaagttgcagatggctggctcatctccaaatacctcttcaaggtactctatgctggtgat

SEQ ID NO: 17677 - DNA, 80 bp, synthetic construct
  source 1..80: mol_type = other DNA
ttcgggggagggctgtatcagttaagtgatcttttttagtacattgcatgggttttgtaaagccttcttttttgtgtgtt

SEQ ID NO: 17678 - DNA, 80 bp, synthetic construct; identical to SEQ ID NO: 8361
  source 1..80: mol_type = other DNA

SEQ ID NO: 17679 - DNA, 80 bp, synthetic construct
  source 1..80: mol_type = other DNA
tatatgcaaaacactgctggacctttgtacttaatgatctagctttctgtattttttgcttagaaaagcaatatagtcat

SEQ ID NO: 17680 - DNA, 80 bp, synthetic construct
  source 1..80: mol_type = other DNA
cttaatcactactgacacacattatacttgatttcttcaggagtacgcatttatgtgtagctctctgtgtggacttcagc

SEQ ID NO: 17681 - DNA, 80 bp, synthetic construct
  source 1..80: mol_type = other DNA
gcctattaaattgattcaatattcagatttttgctgaacctgttcatcttaatctttttgttttggaaaattaagagttg

SEQ ID NO: 17682 - DNA, 80 bp, synthetic construct; identical to SEQ ID NO: 8362
  source 1..80: mol_type = other DNA

SEQ ID NO: 17683 - DNA, 80 bp, synthetic construct
  source 1..80: mol_type = other DNA
aaggaaaagtttctgaacttttacagaaatggaaattttctctgtttgataaaatagtggataatattaaactggctttt

SEQ ID NO: 17684 - DNA, 80 bp, synthetic construct
  source 1..80: mol_type = other DNA
tggtttattaaaatgtggtaggattatcttgtcttttgttgattgtctagatgaataatagctcaaaggtaatagtcttt

SEQ ID NO: 17685 - DNA, 80 bp, synthetic construct
  source 1..80: mol_type = other DNA
gtgtcagctactgcttagtagagaaccactttagaaaaattaatttctgttcttagaaggtcttattctggccatgaaat

SEQ ID NO: 17686 - DNA, 80 bp, synthetic construct; identical to SEQ ID NO: 8363
  source 1..80: mol_type = other DNA

SEQ ID NO: 17687 - DNA, 80 bp, synthetic construct
  source 1..80: mol_type = other DNA
attctgttaatgacagcatatctcatctttggaataacatttcttcaagatatagagtagtcagtttcttgctatatgat

SEQ ID NO: 17688 - DNA, 80 bp, synthetic construct
  source 1..80: mol_type = other DNA
tacataaaagtgatgttcaaataatatcgcagataactcattgaacacatctattatattgaactaaattaaacctttct

SEQ ID NO: 17689 - DNA, 80 bp, synthetic construct
  source 1..80: mol_type = other DNA
aagtgatgcacatggaaaaggaaggaagccagaatcaagccaagtcatcctcacatctaatttgtagagcagataaatgt

SEQ ID NO: 17690 - DNA, 80 bp, synthetic construct
  source 1..80: mol_type = other DNA
caaggatttagtgcccacccttctctgcttaacctaactctagttttctagtttttctgtctctgttttctctcctccaa

SEQ ID NO: 17691 - DNA, 80 bp, synthetic construct; identical to SEQ ID NO: 8364
  source 1..80: mol_type = other DNA

SEQ ID NO: 17692 - DNA, 80 bp, synthetic construct
  source 1..80: mol_type = other DNA
tttccttaagattctttccagtgtgtagtacttcatttcttgagggaagtctggcagctgtagctctcattttgaaatta

SEQ ID NO: 17693 - DNA, 80 bp, synthetic construct
  source 1..80: mol_type = other DNA
ctttgcatctcattcctacttcattttgtgatgcaaggagagcttggtccctgtaactgcttgtatgattacagtaataa

SEQ ID NO: 17694 - DNA, 80 bp, synthetic construct; identical to SEQ ID NO: 8365
  source 1..80: mol_type = other DNA

SEQ ID NO: 17695 - DNA, 80 bp, synthetic construct
  source 1..80: mol_type = other DNA
attatatcaggaaatttttagttaaaagaagagagggagcagaagaaagtgatggagagagattaagagggagaagtctg

SEQ ID NO: 17696 - DNA, 80 bp, synthetic construct
  source 1..80: mol_type = other DNA
agcctcccgagtagctgggactacaggtgcctgccaccatgcccggctaatttctttgcacttttagtagagagggggtt

SEQ ID NO: 17697 - DNA, 80 bp, synthetic construct
  source 1..80: mol_type = other DNA
atttgtttttatttatataaagaaaaatatatttgtgcaaaatatttgatgtttgtaatctatcatgcaaacactagcag

SEQ ID NO: 17698 - DNA, 80 bp, synthetic construct
  source 1..80: mol_type = other DNA
gtcaagtgttagagattgatctaaaataagacaaaattcctgccttagtgatcttaccgcctaatatgtgaaataatcaa

SEQ ID NO: 17699 - DNA, 80 bp, synthetic construct; identical to SEQ ID NO: 8366
  source 1..80: mol_type = other DNA

SEQ ID NO: 17700 - DNA, 80 bp, synthetic construct
  source 1..80: mol_type = other DNA
aaccactcagatattatctcagacattggtcctaaaatggtgcttgctgacaagaacacttcttgatgttgctgtagaga

SEQ ID NO: 17701 - DNA, 80 bp, synthetic construct
  source 1..80: mol_type = other DNA
ctctcatattccacttaaaaatactgagtgtagaaaatgtttcctgtgagactaatattcagagtcctgtatagaattct

SEQ ID NO: 17702 - DNA, 80 bp, synthetic construct
  source 1..80: mol_type = other DNA
tgtatttttagtagagatgaggtttcaccatgttggccaggctggcctcgaactcctggcctcaggtgatccacccacct

SEQ ID NO: 17703 - DNA, 80 bp, synthetic construct; identical to SEQ ID NO: 8367
  source 1..80: mol_type = other DNA

SEQ ID NO: 17704 - DNA, 80 bp, synthetic construct
  source 1..80: mol_type = other DNA
tattaatgcttaactagaagcgcaggaaggttcccgtgtgctatttaagcgactgtattagacaaataggatgttaaatg

SEQ ID NO: 17705 - DNA, 80 bp, synthetic construct
  source 1..80: mol_type = other DNA
gaataggactagatttgaggctttttgacacctagattggtggtgcccttgccattatagttcactatattacctttatt

SEQ ID NO: 17706 - DNA, 80 bp, synthetic construct; identical to SEQ ID NO: 8368
  source 1..80: mol_type = other DNA

SEQ ID NO: 17707 - DNA, 80 bp, synthetic construct
  source 1..80: mol_type = other DNA
catttcttgaattatctaaactagtggctctcaaataatgttcagcagaaccctgaagatgtccaagaccctttctttaa

SEQ ID NO: 17708 - DNA, 80 bp, synthetic construct
  source 1..80: mol_type = other DNA
cacgaattaatgcagtgacatcaaactgtgcaagcagtcttgagttcttccccaccatgcactcagtattttcttttaaa

SEQ ID NO: 17709 - DNA, 80 bp, synthetic construct
  source 1..80: mol_type = other DNA
catttctgcagcatactgaaatatgatggttgcttcaagaaaaacacttgtacaattctttgaattgtgagctgaactag

SEQ ID NO: 17710 - DNA, 80 bp, synthetic construct; identical to SEQ ID NO: 8369
  source 1..80: mol_type = other DNA

SEQ ID NO: 17711 - DNA, 80 bp, synthetic construct
  source 1..80: mol_type = other DNA
gtaggtcagtagatttaatgtactatagtatgaaaaagtcattaatatgattacagaaacttaccatttagtgagttttg

SEQ ID NO: 17712 - DNA, 80 bp, synthetic construct
  source 1..80: mol_type = other DNA
taaagacactaaagagattagaaaaaaatgtaaaacagagatactggccgggcgcggtggctcacgcctgtaatcccagc

SEQ ID NO: 17713 - DNA, 80 bp, synthetic construct
  source 1..80: mol_type = other DNA
ggcgtgaacccaggaggcggagcttgcagtgagcagagatcgcgccactgcactccagcctgggcaaaagagcgagactc

SEQ ID NO: 17714 - DNA, 80 bp, synthetic construct
  source 1..80: mol_type = other DNA
gggacagggtcttgctctgttgcccaggttggagtacagtggtactatcatagcccactgcaggctagaacccctaggct

SEQ ID NO: 17715 - DNA, 80 bp, synthetic construct; identical to SEQ ID NO: 8370
  source 1..80: mol_type = other DNA

SEQ ID NO: 17716 - DNA, 80 bp, synthetic construct
  source 1..80: mol_type = other DNA
aaaactgaaaatgtgaaatctcaaatgatctcaaaactaaaactttttgagcatcaccatgatgttcaaagaaaatgcta

SEQ ID NO: 17717 - DNA, 80 bp, synthetic construct
  source 1..80: mol_type = other DNA
ctcaggtatcagctttaatgtagtagttgtatttatttttattgaattgtcagagtagctttattattttgacatttaga

SEQ ID NO: 17718 - DNA, 80 bp, synthetic construct
  source 1..80: mol_type = other DNA
ccaagttttttgttcttgcatcctttttatttaggattttttttttcttttggaaaatttttgttcagcaaaactgatga

SEQ ID NO: 17719 - DNA, 80 bp, synthetic construct; identical to SEQ ID NO: 8371
  source 1..80: mol_type = other DNA

SEQ ID NO: 17720 - DNA, 80 bp, synthetic construct
  source 1..80: mol_type = other DNA
ttaaatcctattgttattacatattaacagatgtcttttttgtcccaactattgtcctttgacctctgtttcctcaaact

SEQ ID NO: 17721 - DNA, 80 bp, synthetic construct
  source 1..80: mol_type = other DNA
ttttgagacagtctagttctgtcgcccaggctggagtgcaaaggtacgatctcagctcactgcaacctccacctcccagg

SEQ ID NO: 17722 - DNA, 80 bp, synthetic construct; identical to SEQ ID NO: 8372
  source 1..80: mol_type = other DNA

SEQ ID NO: 17723 - DNA, 80 bp, synthetic construct
  source 1..80: mol_type = other DNA
tcccaaaatacaaaaagtaattaagaagttaacaaagtttagaaatgtagcatttggacctgggtggaccaaagaaaccc

SEQ ID NO: 17724 - DNA, 80 bp, synthetic construct
  source 1..80: mol_type = other DNA
ccacagaacaatcatgttccaaatcctgcatttatatctttgttttgctcaggcctcaaacagattccatttagtgggga

SEQ ID NO: 17725 - DNA, 80 bp, synthetic construct
  source 1..80: mol_type = other DNA
cgtctctggattgaaggattaaacaaatgcctcagatggtaggtttattgaggcttacagctgcaatcttgaatgactac

SEQ ID NO: 17726 - DNA, 80 bp, synthetic construct; identical to SEQ ID NO: 8373
  source 1..80: mol_type = other DNA

SEQ ID NO: 17727 - DNA, 80 bp, synthetic construct
  source 1..80: mol_type = other DNA
tctacttaaaatatgaaaaattagccaggagtggtagcgcatgcctgtaatcccagctacttgggaggctgaggcaggag

SEQ ID NO: 17728 - DNA, 80 bp, synthetic construct
  source 1..80: mol_type = other DNA
aaacaatgaaatgctaaccattccctttctctgctgtctgtgactagtttagccataagacttaaacatagcctaacaat

SEQ ID NO: 17729 - DNA, 80 bp, synthetic construct
  source 1..80: mol_type = other DNA
cttaggtttcacactagaatcagcactcttagaaaaatgactttatctcagcaggcactgacttatctcattcttttctg

SEQ ID NO: 17730 - DNA, 80 bp, synthetic construct
  source 1..80: mol_type = other DNA
gttcaagaaatcccttctccttcttgctttttcattttcttggccccaaaatatgagctttgtattgttcctgagttctt

SEQ ID NO: 17731 - DNA, 80 bp, synthetic construct; identical to SEQ ID NO: 8374
  source 1..80: mol_type = other DNA

SEQ ID NO: 17732 - DNA, 80 bp, synthetic construct
  source 1..80: mol_type = other DNA
tagaagcagagaatttattgagaagggtgtaattggaatctaaaacagagtcgatcccaaaggtaagaaaacaatcaggt

SEQ ID NO: 17733 - DNA, 80 bp, synthetic construct
  source 1..80: mol_type = other DNA
gctgagccgcacatccatctttgctttagcctaaagttgtttgtctattcacatcctaggtatagagactaagcagaaag

SEQ ID NO: 17734 - DNA, 80 bp, synthetic construct; identical to SEQ ID NO: 8375
  source 1..80: mol_type = other DNA

SEQ ID NO: 17735 - DNA, 80 bp, synthetic construct
  source 1..80: mol_type = other DNA
actctgactgactgccaaaagaaaaatctactctggagaaaggtagcctcagagttgctataaattttcatacagaatgt

SEQ ID NO: 17736 - DNA, 80 bp, synthetic construct
  source 1..80: mol_type = other DNA
tattactagacaactgaaatacataaaattactagattattggaatatgttaaaattcaaaggccgggtgtgatggcctt

SEQ ID NO: 17737 - DNA, 80 bp, synthetic construct
  source 1..80: mol_type = other DNA
ggtgggagggtcacttgagcttgtgaggcagaggttgcagtgagcttagatcgcaccactgcactccagcctgggtgata

SEQ ID NO: 17738 - DNA, 80 bp, synthetic construct
  source 1..80: mol_type = other DNA
tgtgtaaagtatgttctctaaccacagtggaattaagctagaatcaaaaatatggaaaaatgactagaaaatgtttatat

SEQ ID NO: 17739 - DNA, 80 bp, synthetic construct; identical to SEQ ID NO: 8376
  source 1..80: mol_type = other DNA

SEQ ID NO: 17740 - DNA, 80 bp, synthetic construct
  source 1..80: mol_type = other DNA
gaagaagaggccaagtgtgtatatctcacagacattaaaaatcctaaaagaggatattatgaataacttcacatctatta

SEQ ID NO: 17741 - DNA, 80 bp, synthetic construct
  source 1..80: mol_type = other DNA
gttttcttcttatgggtttttaagagttaattgtattttatggataagagttgtctgtcagatatttataatttaatttt

SEQ ID NO: 17742 - DNA, 80 bp, synthetic construct; identical to SEQ ID NO: 8377
  source 1..80: mol_type = other DNA

SEQ ID NO: 17743 - DNA, 80 bp, synthetic construct
  source 1..80: mol_type = other DNA
cttggcccaaacaatctttataagtctgtttgtcttctgttctattaaaagttcctttgttaaagaaaagaaaccattaa

SEQ ID NO: 17744 - DNA, 80 bp, synthetic construct
  source 1..80: mol_type = other DNA
attgtctctggagagcaactttcttgacttcattggtgaaattgtagccttttgattcaagacaccgctactagtttctg

SEQ ID NO: 17745 - DNA, 80 bp, synthetic construct
  source 1..80: mol_type = other DNA
tgttgagcttggtaggtaaattgactcgcatgctaaccatacccttatcattcattttcttcccagtagtactgctgctt

SEQ ID NO: 17746 - DNA, 80 bp, synthetic construct; identical to SEQ ID NO: 8378
  source 1..80: mol_type = other DNA

SEQ ID NO: 17747 - DNA, 80 bp, synthetic construct
  source 1..80: mol_type = other DNA
ttgtttgtttttctagtttaaatatttggtaatagcttttagaattctctggggacacccaaattcaatagctcatgatt

SEQ ID NO: 17748 - DNA, 80 bp, synthetic construct
  source 1..80: mol_type = other DNA
tgagagagaactctgtttttcatgatttatgagagggctcattttaattagtttgttgatttgcggtattgaagtagaga

SEQ ID NO: 17749 - DNA, 80 bp, synthetic construct
  source 1..80: mol_type = other DNA
tctctaacccaagtaactcagtattaacgttctgtcccttcagaggatagaaagttagtttgacatgctgtaccctacat

SEQ ID NO: 17750 - DNA, 80 bp, synthetic construct; identical to SEQ ID NO: 8379
  source 1..80: mol_type = other DNA

SEQ ID NO: 17751 - DNA, 80 bp, synthetic construct
  source 1..80: mol_type = other DNA
aatttctaaaatcctcaactgttttatttcctccttttgttactactcagataaatccactgtcttcttaggaaaatgta

SEQ ID NO: 17752 - DNA, 80 bp, synthetic construct
  source 1..80: mol_type = other DNA
ttcaatagcatcttttttcttttcacctcagtatttccttatttttttgcttgtaaagaatatacattggccgggcacgg

SEQ ID NO: 17753 - DNA, 80 bp, synthetic construct
  source 1..80: mol_type = other DNA
tcgggaggcggaggtaggagaatagtttgaacccaggaggcagaggttgtggagagccgagattgagccattgcaccgca

SEQ ID NO: 17754 - DNA, 80 bp, synthetic construct
  source 1..80: mol_type = other DNA
atgtgaaaaataggactttgttgattttttatgatggtagaaaagggtacatattaggacaacagtcattcctaattagc

SEQ ID NO: 17755 - DNA, 80 bp, synthetic construct; identical to SEQ ID NO: 8380
  source 1..80: mol_type = other DNA

SEQ ID NO: 17756 - DNA, 80 bp, synthetic construct
  source 1..80: mol_type = other DNA
caaagaaatcatatctctgagatcttaacttccatatcctaatacagggtttgacattctggattttgagaaaatctggg

SEQ ID NO: 17757 - DNA, 80 bp, synthetic construct
  source 1..80: mol_type = other DNA
ttttggctgaaagaaatatttgcataaagtaaatctgatatatacttatttaacttcttttcaagcaacatgacactcga

SEQ ID NO: 17758 - DNA, 80 bp, synthetic construct
  source 1..80: mol_type = other DNA
atcgagtagctcaaatctaaaaatcctacattaattaaatcaaaatcaagtttgcatagtaatcatttcctatgcaagta

SEQ ID NO: 17759 - DNA, 80 bp, synthetic construct; identical to SEQ ID NO: 8381
  source 1..80: mol_type = other DNA

SEQ ID NO: 17760 - DNA, 80 bp, synthetic construct
  source 1..80: mol_type = other DNA
gtgaatataatggctttggaactcttaagaaaggaagtaagtagggagttatttcaaagtttttatcttagaagttaact

SEQ ID NO: 17761 - DNA, 80 bp, synthetic construct
  source 1..80: mol_type = other DNA
ttagaaagagtatttgtaccttaccttttatctggttgcttcctgaagtgagtactcctaggagaatgagaaatgatctc

SEQ ID NO: 17762 - DNA, 80 bp, synthetic construct
  source 1..80: mol_type = other DNA
aaaaaaaagtccttaattttaaaatggttaagatggtaaattttatgttatctggttcctaccacaacaaaagcatataa

SEQ ID NO: 17763 - DNA, 80 bp, synthetic construct
  source 1..80: mol_type = other DNA
atatagagaactgtaagggacaggtatgtgaaaagcaggaattataccaagaacaggaaaaactgattaatcttcctgat

SEQ ID NO: 17764 - DNA, 80 bp, synthetic construct
  source 1..80: mol_type = other DNA
gatgaccagtgtcagggcgtctatacaccatgatgccccagctcagttaactcctgtaagtgctgaaaagtatttacttt

SEQ ID NO: 17765 - DNA, 80 bp, synthetic construct
  source 1..80: mol_type = other DNA
tataaaatgttaacattaagggaagctgagcaaagagtagacaggaactttcctcactatctttgcaacttttctgtcaa

SEQ ID NO: 17766 - DNA, 80 bp, synthetic construct; identical to SEQ ID NO: 8382
  source 1..80: mol_type = other DNA

SEQ ID NO: 17767 - DNA, 80 bp, synthetic construct
  source 1..80: mol_type = other DNA
catttccctattactgatgaaggttagaatgaagagaacataaggtatataagtaggaaagaaaacctatgtagggacag

SEQ ID NO: 17768 - DNA, 80 bp, synthetic construct
  source 1..80: mol_type = other DNA
ttggaaattaccaaatccaggagtggtcagattcctttatgaaggtagatctggagctacttaggccagatttttgtatt

SEQ ID NO: 17769 - DNA, 80 bp, synthetic construct; identical to SEQ ID NO: 8383
  source 1..80: mol_type = other DNA

SEQ ID NO: 17770 - DNA, 80 bp, synthetic construct
  source 1..80: mol_type = other DNA
tgaagggctactaacctacctattcattttaaagatgaggaaacaaatgccagagacagtaataacttgtcaggagtttc

SEQ ID NO: 17771 - DNA, 80 bp, synthetic construct
  source 1..80: mol_type = other DNA
aattgctgctgtgcaacagtgtgatggcaagggaacagaaaacaacaaaaaaacttgattgaatacttcaatcaaagtgc

SEQ ID NO: 17772 - DNA, 80 bp, synthetic construct
  source 1..80: mol_type = other DNA
cctgctttaccaaatattcttcgccagtacatctgaaattaaacagaaaaagaatataacttcattcctagcatccgtca

SEQ ID NO: 17773 - DNA, 80 bp, synthetic construct; identical to SEQ ID NO: 8384
  source 1..80: mol_type = other DNA

SEQ ID NO: 17774 - DNA, 80 bp, synthetic construct
  source 1..80: mol_type = other DNA
gaaaatatctgcttaaacagatgacacctgtgacccttactaagatgatcaaagctcttacagtactctttacgcttaca

SEQ ID NO: 17775 - DNA, 80 bp, synthetic construct
  source 1..80: mol_type = other DNA
aggtttaagccttaagtggcagctagagtagagtaggatgaactccttgccacaggttaggaaatcatcttgtactaaaa

SEQ ID NO: 17776 - DNA, 80 bp, synthetic construct
  source 1..80: mol_type = other DNA
ccaaggcaggtggatcacgaggtcaggagacgagaccatcctggctaacatggtgaaactccatctctactaaaaataca

SEQ ID NO: 17777 - DNA, 80 bp, synthetic construct; identical to SEQ ID NO: 8385
  source 1..80: mol_type = other DNA

SEQ ID NO: 17778 - DNA, 80 bp, synthetic construct
  source 1..80: mol_type = other DNA
attctacttgaacattcaggagattgaggataatatcaacattctcttttctctcattaatttatgtatcaaaatcaaac

SEQ ID NO: 17779 - DNA, 80 bp, synthetic construct
  source 1..80: mol_type = other DNA
attccaagttaatttaaaaacaacaacacatgactatgcggcctttgatttcatgatgtcttccaaatgcatgaggcagt

SEQ ID NO: 17780 - DNA, 80 bp, synthetic construct
  source 1..80: mol_type = other DNA
ggttgggctcagaagtatccgtgagttcagggacccatagatttcatataatccatacagttcaggaaccataagccctt

SEQ ID NO: 17781 - DNA, 80 bp, synthetic construct; identical to SEQ ID NO: 8386
  source 1..80: mol_type = other DNA

SEQ ID NO: 17782 - DNA, 80 bp, synthetic construct
  source 1..80: mol_type = other DNA
aaggattgtttcctgttgcattgagtcctgggcagaagttttgtcccaaaaattcattatgctgcaaagcctataacaca

SEQ ID NO: 17783 - DNA, 80 bp, synthetic construct
  source 1..80: mol_type = other DNA
gaaacctagggttgggattttggcttccaatacaaaagaagtaaagtattttgccaaagcgggagacctctggctatact

SEQ ID NO: 17784 - DNA, 80 bp, synthetic construct
  source 1..80: mol_type = other DNA
aagcttggttatactatattaagacacagatagtttactttggagttaatgagcttgcaaaagccaatatgactatgctt

SEQ ID NO: 17785 - DNA, 80 bp, synthetic construct; identical to SEQ ID NO: 8387
  source 1..80: mol_type = other DNA

SEQ ID NO: 17786 - DNA, 80 bp, synthetic construct
  source 1..80: mol_type = other DNA
ctgaagccatgacagccaagatgcaatggttgtgagattgaccaacagacctgaaaaaatctacaaaaagcaaatactaa

SEQ ID NO: 17787 - DNA, 80 bp, synthetic construct
  source 1..80: mol_type = other DNA
caagacactcactaaactcttctcctctgcatgtgcacatctctatatagctgaagtcatttacggttttaaaggaagaa

SEQ ID NO: 17788 - DNA, 80 bp, synthetic construct
  source 1..80: mol_type = other DNA
cattggaagaatctataccagataaatcctgagcgtcacatgcccactgcacctcacataagatttgttatttacaaagg

SEQ ID NO: 17789 - DNA, 80 bp, synthetic construct; identical to SEQ ID NO: 8388
  source 1..80: mol_type = other DNA

SEQ ID NO: 17790 - DNA, 80 bp, synthetic construct
  source 1..80: mol_type = other DNA
atttgctggatgacagtatgggaaatataaacaagcctatcacttcctcattaatgtttgcattggtagttttcaaatcc

SEQ ID NO: 17791 - DNA, 80 bp, synthetic construct
  source 1..80: mol_type = other DNA
aggacatgttcctgtcaagtatgatgttgaaggggaaaaaaatgtaactggtttcattcacctgttgattcctctatgtg

SEQ ID NO: 17792 - DNA, 80 bp, synthetic construct
  source 1..80: mol_type = other DNA
tacgagagggaaccaaaatagactactcaaaccatactctgttctgcttcttatgaggcttaatatgtgtcttggaaaac

SEQ ID NO: 17793 - DNA, 80 bp, synthetic construct
  source 1..80: mol_type = other DNA
tctctaatgccagcatgaaagtcgggcaaataatctgtaattctcaagagaatctgccgatcaaatgtcttctgattttt

SEQ ID NO: 17794 - DNA, 80 bp, synthetic construct; identical to SEQ ID NO: 8389
  source 1..80: mol_type = other DNA

SEQ ID NO: 17795 - DNA, 80 bp, synthetic construct
  source 1..80: mol_type = other DNA
gccaccatcataagggtaaacatcataacgaagaaggcatctgcctttggcttcaatccttagtcagaaagagaagaagt

SEQ ID NO: 17796 - DNA, 80 bp, synthetic construct
  source 1..80: mol_type = other DNA
cggtctccaatgttgtgtctgtccatgtaactgcataaagttctcttataacacttatgtgccattatgtataattacag

SEQ ID NO: 17797 - DNA, 80 bp, synthetic construct
  source 1..80: mol_type = other DNA
ttactcattgtgtgctgtaactttgtgagtgaagggactgggacgatcgggatgccatgacctcacagtggttgtagtat

SEQ ID NO: 17798 - DNA, 80 bp, synthetic construct; identical to SEQ ID NO: 8390
  source 1..80: mol_type = other DNA

SEQ ID NO: 17799 - DNA, 80 bp, synthetic construct
  source 1..80: mol_type = other DNA
accaaacaagtattttttttttaattaacaagccccaaaaggcaccgtctttctctcattaaagaagcagggatgggtaa

SEQ ID NO: 17800 - DNA, 80 bp, synthetic construct
  source 1..80: mol_type = other DNA
ctataaatatcccagcttctccagcatagtctcaaagttttataaattctttccatgtttgtgtataacacaagcatctc

SEQ ID NO: 17801 - DNA, 80 bp, synthetic construct; identical to SEQ ID NO: 8391
  source 1..80: mol_type = other DNA

SEQ ID NO: 17802 - DNA, 80 bp, synthetic construct
  source 1..80: mol_type = other DNA
aatggacaggtgtttccttatctcatggtttggtttatagttttgagaaccaaaaatatgcttgcaaggtgcaactgact

SEQ ID NO: 17803 - DNA, 80 bp, synthetic construct
  source 1..80: mol_type = other DNA
tccgctgatgtattcatgtctatagaacaaaaatacgtatcatacatccaagattagtttaagaagccacagggcaggct

SEQ ID NO: 17804 - DNA, 80 bp, synthetic construct
  source 1..80: mol_type = other DNA
acactcagtccagggaaacagattccacacatcctccctctcttcaaagaatgcttcttttccttctttgacgggggctt

SEQ ID NO: 17805 - DNA, 80 bp, synthetic construct; identical to SEQ ID NO: 8392
  source 1..80: mol_type = other DNA

SEQ ID NO: 17806 - DNA, 80 bp, synthetic construct
  source 1..80: mol_type = other DNA
ttaaaaaaaaaaaaaaaaacagccaggcgccccggtgcagtggctcacgcctgtaatcccagtgctttgggcggccaaag

SEQ ID NO: 17807 - DNA, 80 bp, synthetic construct
  source 1..80: mol_type = other DNA
gaggtagagattgcagtgagccaagattgcaccattgcactccagcctgggagacagagcgagcgagactctatgtcaaa

SEQ ID NO: 17808 - DNA, 80 bp, synthetic construct
  source 1..80: mol_type = other DNA
aaataggaaaatacaataaattaaaccaggctgctctttactgtaagaatgccttccggctcgtgccacttccctggtcc

SEQ ID NO: 17809 - DNA, 80 bp, synthetic construct; identical to SEQ ID NO: 8393
  source 1..80: mol_type = other DNA

SEQ ID NO: 17810 - DNA, 80 bp, synthetic construct
  source 1..80: mol_type = other DNA
ccccaaccccagatgtaatcagtctaaccaatagcccctgctgctggacagccccgttcccagaacaaagacctactcac

SEQ ID NO: 17811 - DNA, 80 bp, synthetic construct
  source 1..80: mol_type = other DNA
actctttccacaaatgacagtgtataaagttaagcaggaaaaaaagggaaactgttctggttggaacagggaagcgtgaa

SEQ ID NO: 17812 - DNA, 80 bp, synthetic construct
  source 1..80: mol_type = other DNA
ggaaggtaattaggttcagatgaggttacaggatagggaggtggggagagtgtaatgggaagagcgtcctaataggaaga

SEQ ID NO: 17813 - DNA, 80 bp, synthetic construct; identical to SEQ ID NO: 8394
  source 1..80: mol_type = other DNA

SEQ ID NO: 17814 - DNA, 80 bp, synthetic construct
  source 1..80: mol_type = other DNA
tgaccacgctaagacagccagccctctatgaggtttccagagtgctcagaggaaaccaagtgacacttactgataaagaa

SEQ ID NO: 17815 - DNA, 80 bp, synthetic construct
  source 1..80: mol_type = other DNA
gttcaagaccagcctaaccaacatggtgaaaccctgtctctactaaaaatacaaaaattagctgggcgtggtggcaggtg

SEQ ID NO: 17816 - DNA, 80 bp, synthetic construct
  source 1..80: mol_type = other DNA
aggaaaatgctaagttaatctacactttgatacaaatatgcattttatgaaagcatgccaacatccctgaaacaccataa

SEQ ID NO: 17817 - DNA, 80 bp, synthetic construct
  source 1..80: mol_type = other DNA
cacaattacattaaaagaaaaaaaagagtccatagatacctaaagaacaaagatctaagggaacaggctagggtcttttt

SEQ ID NO: 17818 - DNA, 80 bp, synthetic construct; identical to SEQ ID NO: 8395
  source 1..80: mol_type = other DNA

SEQ ID NO: 17819 - DNA, 80 bp, synthetic construct
  source 1..80: mol_type = other DNA
taaatactaagatgatttattttaaacacagttttttcttattaaggaagttaattcattctaattctttcaaggtggta

SEQ ID NO: 17820 - DNA, 80 bp, synthetic construct
  source 1..80: mol_type = other DNA
ccatcgtctcaaacatttattttttgtggtaaaagtatcttaaattttagcaattctgaaatttacattattatttactg

SEQ ID NO: 17821 - DNA, 80 bp, synthetic construct; identical to SEQ ID NO: 8396
  source 1..80: mol_type = other DNA

SEQ ID NO: 17822 - DNA, 80 bp, synthetic construct
  source 1..80: mol_type = other DNA
tcagacccttcgggtgattccgtatcttggctattgtgaacaatgctgcaataaatatgagggtgcagaaatttcttcaa

SEQ ID NO: 17823 - DNA, 80 bp, synthetic construct
  source 1..80: mol_type = other DNA
gatgcttatactctacatatgattaaaacccagtttctcagttacacgggttagagaaagagcagagagtgctttcctct

SEQ ID NO: 17824 - DNA, 80 bp, synthetic construct
  source 1..80: mol_type = other DNA
aggagggattaaatcatatacacaggccactttaacatagtccaaatgcttatttaaaaaatgatactggggtcaacgag

SEQ ID NO: 17825 - DNA, 80 bp, synthetic construct
  source 1..80: mol_type = other DNA
aaaaagatagcaagcttaagtcacaaatacaaattatgagcccaggagttcaaagctgcagtgagctatgactgcactac

SEQ ID NO: 17826 - DNA, 80 bp, synthetic construct; identical to SEQ ID NO: 8397
  source 1..80: mol_type = other DNA

SEQ ID NO: 17827 - DNA, 80 bp, synthetic construct
  source 1..80: mol_type = other DNA
tagcaagtctggaaataatccagatacctcagccctcagggaaagtaaaaacaacaatgacatcactctggtaaactgct

SEQ ID NO: 17828 - DNA, 80 bp, synthetic construct
  source 1..80: mol_type = other DNA
catcaaaataggctgcacataagcgtcttcaactttcctcaatagtaaaatggggatactaccatctaccccctctaaat

SEQ ID NO: 17829 - DNA, 80 bp, synthetic construct; identical to SEQ ID NO: 8398
  source 1..80: mol_type = other DNA

SEQ ID NO: 17830 - DNA, 80 bp, synthetic construct
  source 1..80: mol_type = other DNA
aaaatgtttatgcatcaaaggacactatcaatactgaaaagacaacccacagagtggggaaaaatatttgcaaattatgt

SEQ ID NO: 17831 - DNA, 80 bp, synthetic construct
  source 1..80: mol_type = other DNA
gtgttggtaaggatatggagaaactggaacccttgtgcactgctggtaagaatgtaaaatggtacggccactgtggaaga

SEQ ID NO: 17832 - DNA, 80 bp, synthetic construct
  source 1..80: mol_type = other DNA
tgcagtagtgcaatcatagctcactgcaacctagaactcctgggctcaagcaatcctcccacctcagcctcccgagtagc

SEQ ID NO: 17833 - DNA, 80 bp, synthetic construct; identical to SEQ ID NO: 8399
  source 1..80: mol_type = other DNA

SEQ ID NO: 17834 - DNA, 80 bp, synthetic construct
  source 1..80: mol_type = other DNA
aaaagaattctagagttggatggtggtgatagttgcataacaatgtaaatgtacttaatgccactgaactgtacatttaa

SEQ ID NO: 17835 - DNA, 80 bp, synthetic construct
  source 1..80: mol_type = other DNA
tggatgtctgtagtcgaggctacttgggaagctgaggcaggagaattgcttgaacccgggaggcggagattgcagtgagc

SEQ ID NO: 17836 - DNA, 80 bp, synthetic construct
  source 1..80: mol_type = other DNA
cattttctgaaaatcaagatccaaatttacttacctgttctggattccagtagaatcattttttagcccaaagtaaatgg

SEQ ID NO: 17837 - DNA, 80 bp, synthetic construct; identical to SEQ ID NO: 8400
  source 1..80: mol_type = other DNA

SEQ ID NO: 17838 - DNA, 80 bp, synthetic construct
  source 1..80: mol_type = other DNA
accacacaggatagcagagcaatgcaagtatgtagcaaagcaaagtccaagtgcctaagagttttgaccctgaactgaac

SEQ ID NO: 17839 - DNA, 80 bp, synthetic construct
  source 1..80: mol_type = other DNA
aattctaacaatggaattttgcacagtgaggaaataggggtgagatggagcctgcctatccaacctctagggagtccatg

SEQ ID NO: 17840 - DNA, 80 bp, synthetic construct
  source 1..80: mol_type = other DNA
tttgctgttctcacctatcttcaccactcaattgatttctatagctcctaaggagactggacaaacaccaatcttgtttc

SEQ ID NO: 17841 - DNA, 80 bp, synthetic construct; identical to SEQ ID NO: 8401
  source 1..80: mol_type = other DNA

SEQ ID NO: 17842 - DNA, 80 bp, synthetic construct
  source 1..80: mol_type = other DNA
tgcagcgagccaagatcataccactgcactccagcctgggcgacagagcgatactgtctcaaaaaataaattgataaata

SEQ ID NO: 17843 - DNA, 80 bp, synthetic construct
  source 1..80: mol_type = other DNA
atttaaagtaactgatcaaggacacttttggcatgaagcaaaccgaactgcaaaaacagtaccatcatctgtgataacta

SEQ ID NO: 17844 - DNA, 80 bp, synthetic construct
  source 1..80: mol_type = other DNA
tgcagatgactgtatcaacaggcatgcatgaatgtgcatacaagagtctacgttttcacacagtaaaacttttaagaata

SEQ ID NO: 17845 - DNA, 80 bp, synthetic construct
  source 1..80: mol_type = other DNA
caccaagcccagctaattttttgtacttttagtagacacagggtttcactatgttggccaggctggtctcgaactcctga

SEQ ID NO: 17846 - DNA, 80 bp, synthetic construct; identical to SEQ ID NO: 8402
  source 1..80: mol_type = other DNA

SEQ ID NO: 17847 - DNA, 80 bp, synthetic construct
  source 1..80: mol_type = other DNA
aaatacaacctttggaagatgcattatcagaggccaagtttgaatcatgtaaagaaataactagttcaagccaaagtgca

SEQ ID NO: 17848 - DNA, 80 bp, synthetic construct
  source 1..80: mol_type = other DNA
attaagctatagcccacaggtcaaatagggccagccacctatctttgttcacctatgagctaagaatggttttttacttt

SEQ ID NO: 17849 - DNA, 80 bp, synthetic construct; identical to SEQ ID NO: 8403
  source 1..80: mol_type = other DNA

SEQ ID NO: 17850 - DNA, 80 bp, synthetic construct
  source 1..80: mol_type = other DNA
ctactcgggaggctgaggcaggagaattgcttgaacccgggaggcggaggttacagtgagccgacacagcaccactgcac

SEQ ID NO: 17851 - DNA, 80 bp, synthetic construct
  source 1..80: mol_type = other DNA
ttcgtttattattggaatactgccatgttcatttattcatgttatgagcttggctgctttcacactaaaacggtagagct

SEQ ID NO: 17852 - DNA, 80 bp, synthetic construct
  source 1..80: mol_type = other DNA
acaaatcgaaacaaaacttgtcctgctaagcagatgctcagggagatacaaggtcctattcttaatctaagagactgcca

SEQ ID NO: 17853 - DNA, 80 bp, synthetic construct; identical to SEQ ID NO: 8404
  source 1..80: mol_type = other DNA

SEQ ID NO: 17854 - DNA, 80 bp, synthetic construct
  source 1..80: mol_type = other DNA
tgatagtatataaaagtgccagtgttctgacagaaacaccaaattatacgtaccaaaaacatttggagaaattagcaata

SEQ ID NO: 17855 - DNA, 80 bp, synthetic construct
  source 1..80: mol_type = other DNA
atacttaagtatagaaattatgatgcacaagtttaaacgtcagtaatattttactagagccaacaatgtgccatctttta

SEQ ID NO: 17856 - DNA, 80 bp, synthetic construct
  source 1..80: mol_type = other DNA
ccccaaaataaccagctaaattgacttctttgaagaatggaccaatgaactgggagtactaatgttttgggtgacagagg

SEQ ID NO: 17857 - DNA, 80 bp, synthetic construct
  source 1..80: mol_type = other DNA
tgtggtgcacggctgtagtcacagctactcgggaggctgaagtgtgaggatcgcttgagccaagagtttggggttgcagt

SEQ ID NO: 17858 - DNA, 80 bp, synthetic construct; identical to SEQ ID NO: 8405
  source 1..80: mol_type = other DNA

SEQ ID NO: 17859 - DNA, 80 bp, synthetic construct
  source 1..80: mol_type = other DNA
ctacttctctctcttcctcccctttctccaccccttctctgcttaaactttccccatagtttcttctaccatctaacatg

SEQ ID NO: 17860 - DNA, 80 bp, synthetic construct
  source 1..80: mol_type = other DNA
aaagtgaacagctaccagaaaaccccaaaactggctgacacttctttcacaatttcccaaaaaaaaaatttttctactca

SEQ ID NO: 17861 - DNA, 80 bp, synthetic construct
  source 1..80: mol_type = other DNA
gaccagcctgggcaacacagcgaaaccccatctctacacaaaacacaaaaattagctggacgtggtgggacacgcctgta

SEQ ID NO: 17862 - DNA, 80 bp, synthetic construct; identical to SEQ ID NO: 8406
  source 1..80: mol_type = other DNA

SEQ ID NO: 17863 - DNA, 80 bp, synthetic construct
  source 1..80: mol_type = other DNA
gtagctgatctccttgaagactgtgatcttcttcttcttctcacccccggaaagttgatgtaattcagcttttgtctctt

SEQ ID NO: 17864 - DNA, 80 bp, synthetic construct
  source 1..80: mol_type = other DNA
gataacaacaaatttagcccattttttctgtgaaccctttcttggatgcttccctaacaccttcattctaaagctttaga

SEQ ID NO: 17865 - DNA, 80 bp, synthetic construct
  source 1..80: mol_type = other DNA
ggtgcgtgcctgtaatcccagccactcaggaggctgaggcaagagaatcgcttgaaccagggaggtggaggttgcagtga

SEQ ID NO: 17866 - DNA, 80 bp, synthetic construct; identical to SEQ ID NO: 8407
  source 1..80: mol_type = other DNA

SEQ ID NO: 17867 - DNA, 80 bp, synthetic construct
  source 1..80: mol_type = other DNA
tatagttctaattcttaatataaaattctggtcgtggccaggggcggtggctcacacctgtaatcccaacactttgggag

SEQ ID NO: 17868 - DNA, 80 bp, synthetic construct
  source 1..80: mol_type = other DNA
ctgggaggcggaggggtcagtgagccgaaatagcaccattgcactccagcctgggtgacaagagctagattccttctcaa

SEQ ID NO: 17869 - DNA, 80 bp, synthetic construct
  source 1..80: mol_type = other DNA
tcaaaaacaccaacagcactcacagacaacaaaatatttgtgttgactggtatcagaagactgcatcaacagaaattcac

SEQ ID NO: 17870 - DNA, 80 bp, synthetic construct; identical to SEQ ID NO: 8408
  source 1..80: mol_type = other DNA

SEQ ID NO: 17871 - DNA, 80 bp, synthetic construct
  source 1..80: mol_type = other DNA
atatatatatatataatttatttatttattttgagacagggtctccctctgtcacccaggctggaatgtggtggggcaat

SEQ ID NO: 17872 - DNA, 80 bp, synthetic construct
  source 1..80: mol_type = other DNA
ctggcctcaagtgatccacccgcctcggcctcccaaagtgctgggattacaggcatgagctactgttcccagcctatcac

SEQ ID NO: 17873 - DNA, 80 bp, synthetic construct; identical to SEQ ID NO: 8409
  source 1..80: mol_type = other DNA

SEQ ID NO: 17874 - DNA, 80 bp, synthetic construct
  source 1..80: mol_type = other DNA
ttccagaccaacctagccaacatggcaaaaccccatctctactaaaaacacaaaaattagccaggtgcattggcttatga

SEQ ID NO: 17875 - DNA, 80 bp, synthetic construct
  source 1..80: mol_type = other DNA
caaatcaactgctgtgctgctgtaattccaaatagagaacaaatcccctgagcagtattctcgatagaacatggccagca

SEQ ID NO: 17876 - DNA, 80 bp, synthetic construct
  source 1..80: mol_type = other DNA
tcatatccaaatatatctaaaatgatgcagaccgcacaagccattaaaaaaaatcacacatttctttttttttttttttt

SEQ ID NO: 17877 - DNA, 80 bp, synthetic construct
  source 1..80: mol_type = other DNA
cgcccggctaattttttgtatttttagtagagacggggtttcaccgtgttagccaggatggtctcgatctcctgacctcg

SEQ ID NO: 17878 - DNA, 80 bp, synthetic construct; identical to SEQ ID NO: 8410
  source 1..80: mol_type = other DNA

SEQ ID NO: 17879 - DNA, 80 bp, synthetic construct
  source 1..80: mol_type = other DNA
ggcatgtgtctatagtcccagctgcttgggtgaggtgggaggatggcttgagcgcggggggttgaggctgcagtgagtca

SEQ ID NO: 17880 - DNA, 80 bp, synthetic construct
  source 1..80: mol_type = other DNA
gaccatcctcctggctaacagggtgaaaccctgtctctactaaaaaaatacaaaaaaattagccgggcatggttgtgggc

SEQ ID NO: 17881 - DNA, 80 bp, synthetic construct
  source 1..80: mol_type = other DNA
ccatgagtgctcatcaaggcagaccaacatgtgcaaggggaaaaaattttaaggcctcatctgttatatggtcaagaaga

SEQ ID NO: 17882 - DNA, 80 bp, synthetic construct
  source 1..80: mol_type = other DNA
taagaaatggtcactgtaactaggaagcagaatataggcccagtagaaatacacacatgcatgcacattgaaataagaca

SEQ ID NO: 17883 - DNA, 80 bp, synthetic construct; identical to SEQ ID NO: 8411
  source 1..80: mol_type = other DNA

SEQ ID NO: 17884 - DNA, 80 bp, synthetic construct
  source 1..80: mol_type = other DNA
atttctcagtaaaatactctattcttgcctttagattgtttgctctagttcagcctgactttgtcttactaacttttcat

SEQ ID NO: 17885 - DNA, 80 bp, synthetic construct
  source 1..80: mol_type = other DNA
agattctaggacagtcttcccagacattgaattagaatctctggcagtaggtctagggaatccatattttaagaagcaac

SEQ ID NO: 17886 - DNA, 80 bp, synthetic construct
  source 1..80: mol_type = other DNA
gacttatcatttaggtcttctggctctttaaaaattggttttcactcttctgccctaataatgcaattaacataactgag

SEQ ID NO: 17887 - DNA, 80 bp, synthetic construct; identical to SEQ ID NO: 8412
  source 1..80: mol_type = other DNA

SEQ ID NO: 17888 - DNA, 80 bp, synthetic construct
  source 1..80: mol_type = other DNA
tataaatgggagttcccctgcacaagctctcttgcctgctgccatgtacaacatgccttttcttctttgccttccacgaa

SEQ ID NO: 17889 - DNA, 80 bp, synthetic construct
  source 1..80: mol_type = other DNA
aatctggaagccactttggaactgggtaacaggcagaggctggaacagtttggagggctaagaagaagacaggaagatgt

SEQ ID NO: 17890 - DNA, 80 bp, synthetic construct
  source 1..80: mol_type = other DNA
actggtggcattttgcccctgccctagagatctgtggaactatgaacttgagagagatgatttagagcatctggtagaag

SEQ ID NO: 17891 - DNA, 80 bp, synthetic construct; identical to SEQ ID NO: 8413
  source 1..80: mol_type = other DNA

SEQ ID NO: 17892 - DNA, 80 bp, synthetic construct
  source 1..80: mol_type = other DNA
agccatggttaaaggggaccaacagagagttggcagcttccatgtggtgttaggcctgcccttcacctagatttcagagg

SEQ ID NO: 17893 - DNA, 80 bp, synthetic construct
  source 1..80: mol_type = other DNA
catcatccttaagaccccagaatggtagatccaccaacagcttgaattgtgcatctggaaaagccacagacactcaatac

SEQ ID NO: 17894 - DNA, 80 bp, synthetic construct; identical to SEQ ID NO: 8414
  source 1..80: mol_type = other DNA

SEQ ID NO: 17895 - DNA, 80 bp, synthetic construct
  source 1..80: mol_type = other DNA
catgattggttttaaaatgtgaggacatgagatttgggagggaggggccaggggcagaatgatatgtgtccccacccaaa

SEQ ID NO: 17896 - DNA, 80 bp, synthetic construct
  source 1..80: mol_type = other DNA
gtgtacacaaaaacattctgcctcaaagaggatcaggccagtaggtcaacaatttcagtacaatatgaaatagaagatgc

SEQ ID NO: 17897 - DNA, 80 bp, synthetic construct
  source 1..80: mol_type = other DNA
agaaaactacaaaatgttcagtgttatagagcagagagagggagaaaaaatgtgtatgtgtgtgtctgttggtgttgagt

SEQ ID NO: 17898 - DNA, 80 bp, synthetic construct; identical to SEQ ID NO: 8415
  source 1..80: mol_type = other DNA

SEQ ID NO: 17899 - DNA, 80 bp, synthetic construct
  source 1..80: mol_type = other DNA
gaaggatcagtgataagctccattcctatactagtcctttttctttctcctccagacacaccacggataaactgagttcc

SEQ ID NO: 17900 - DNA, 80 bp, synthetic construct
  source 1..80: mol_type = other DNA
ctcttttatcagatgagtaaacttaggttcaggtcacagctggtcagtaactaagcctgatacaaagcacctccttgggt

SEQ ID NO: 17901 - DNA, 80 bp, synthetic construct
  source 1..80: mol_type = other DNA
gtgcctacatcaccagggccctgggtttcaaacacaaaactgggtggccatttgggcagacactgagacagctgcaggag

SEQ ID NO: 17902 - DNA, 80 bp, synthetic construct; identical to SEQ ID NO: 8416
  source 1..80: mol_type = other DNA

SEQ ID NO: 17903 - DNA, 80 bp, synthetic construct
  source 1..80: mol_type = other DNA
tatatagataaaactcccacctccctgggacagagcagctgaggtaaggggaggctgtgggcacagcttcagcagactta

SEQ ID NO: 17904 - DNA, 80 bp, synthetic construct
  source 1..80: mol_type = other DNA
agagctccagctggcatctggcgggtgcccctctgggaacaaagcttccagagaaaaaaaacaggcagcaatctttgggg

SEQ ID NO: 17905 - DNA, 80 bp, synthetic construct
  source 1..80: mol_type = other DNA
tccacaccaaaaccccatccaaaggtcaccagcatcaaagaccaaaggtagataaatctatgaagatgaggaaaaacctg

SEQ ID NO: 17906 - DNA, 80 bp, synthetic construct; identical to SEQ ID NO: 8417
  source 1..80: mol_type = other DNA

SEQ ID NO: 17907 - DNA, 80 bp, synthetic construct
  source 1..80: mol_type = other DNA
ggaacaaacaaagccttcaagaaatatgggactatgtgaaaggacaaaacctacgttttattggtgtacctgaaagtgac

SEQ ID NO: 17908 - DNA, 80 bp, synthetic construct
  source 1..80: mol_type = other DNA
tgaaggttgaaatgaaggaaaaaatgttaagggcagccagagagaaaggttgtgttaccaacaaagggaagcctatcaga

SEQ ID NO: 17909 - DNA, 80 bp, synthetic construct
  source 1..80: mol_type = other DNA
tgctgagggattttgtcaccaccaggcctgcctttcaagagttcctcaaggaagcactaaatatagaacagaaaaactgg

SEQ ID NO: 17910 - DNA, 80 bp, synthetic construct; identical to SEQ ID NO: 8418
  source 1..80: mol_type = other DNA

SEQ ID NO: 17911 - DNA, 80 bp, synthetic construct
  source 1..80: mol_type = other DNA
tcaattcaacaagaagagctaactatctaaaatctatatgcacccaatacaggagcatgcagactcataaagcaagtcct

SEQ ID NO: 17912 - DNA, 80 bp, synthetic construct
  source 1..80: mol_type = other DNA
ctaccccaaagcaatagaatatacattcttctcagcaccacacagcacttattctaaaatttatcacataattggaagta

SEQ ID NO: 17913 - DNA, 80 bp, synthetic construct
  source 1..80: mol_type = other DNA
atcttgaagtcaggagatcaagaccatcctggctaacacggtgaaaccccgtctctactaaaaatacaaaaaattagctg

SEQ ID NO: 17914 - DNA, 80 bp, synthetic construct; identical to SEQ ID NO: 8419
  source 1..80: mol_type = other DNA

SEQ ID NO: 17915 - DNA, 80 bp, synthetic construct
  source 1..80: mol_type = other DNA
gtgagctgagactgcaccactgcactccagcctgggcaacagagcaagactctgtctcaaaaaaaaaaaaaaaaaaaaaa

SEQ ID NO: 17916 - DNA, 80 bp, synthetic construct
  source 1..80: mol_type = other DNA
agggaaatttatagcactaaatgcccacaggagaaagtgggaaagatgtaaaatcgacaccctaacatcacaattaaaag

SEQ ID NO: 17917 - DNA, 80 bp, synthetic construct
  source 1..80: mol_type = other DNA
cctcaagctagactaataaagaagagagaagaatcaaatagacacaataaataatgataaaggggatataatcactgatc

SEQ ID NO: 17918 - DNA, 80 bp, synthetic construct
  source 1..80: mol_type = other DNA
ttgaggcaataattaatagcctaccaaccaaaaaaggtccaggaccagacagattcacagccgaattctaccagaggtac

SEQ ID NO: 17919 - DNA, 80 bp, synthetic construct; identical to SEQ ID NO: 8420
  source 1..80: mol_type = other DNA

SEQ ID NO: 17920 - DNA, 80 bp, synthetic construct
  source 1..80: mol_type = other DNA
gctatttatgacaaacccacagccaatatcatactgaatgggcaaaagctggaagcattccctttgaaaaccggcacaag

SEQ ID NO: 17921 - DNA, 80 bp, synthetic construct
  source 1..80: mol_type = other DNA
cttgtctcagcccaaaatctctgaaggctgataagcaacttcagcaaagtctcaggatacaaaatcaatgtgcaaaaatc

SEQ ID NO: 17922 - DNA, 80 bp, synthetic construct; identical to SEQ ID NO: 8421
  source 1..80: mol_type = other DNA

SEQ ID NO: 17923 - DNA, 80 bp, synthetic construct
  source 1..80: mol_type = other DNA
tgactttaaactatactacaaggctacagtagccaaaacagcatggtactggtaccaaaacagatatatagaccaatgga

SEQ ID NO: 17924 - DNA, 80 bp, synthetic construct
  source 1..80: mol_type = other DNA
tacacctctactcaagatggattaaagacttaaatgtaagacctaaaactgtaaaaaccccagaagaaaacctaggcaat

SEQ ID NO: 17925 - DNA, 80 bp, synthetic construct
  source 1..80: mol_type = other DNA
gcaacctacagaatgggagaaaaattttgcaatctatctgacaaagggctaatatccagaaactacaaagaccttaaaca

SEQ ID NO: 17926 - DNA, 80 bp, synthetic construct
  source 1..80: mol_type = other DNA
tcatgccagttagaatagcgatgattaaaaagtcaggaaacaacagatgctggagaggatgtggagaaataagaatgctt

SEQ ID NO: 17927 - DNA, 80 bp, synthetic construct; identical to SEQ ID NO: 8422
  source 1..80: mol_type = other DNA

SEQ ID NO: 17928 - DNA, 80 bp, synthetic construct
  source 1..80: mol_type = other DNA
gagttgaacaatgagaacacatggacacagggagtggaacatcacacactggggcctgtcagggtgtcaggggctaggga

SEQ ID NO: 17929 - DNA, 80 bp, synthetic construct
  source 1..80: mol_type = other DNA
aacagtttgttcttcaccaagtcaaatatgtagtttgaagttcagaacactaaaagataggtgacatggtgaaatcacag

SEQ ID NO: 17930 - DNA, 80 bp, synthetic construct
  source 1..80: mol_type = other DNA
ttttcaattaccatgaggctccccaaattgaccccatatatacctaaggttaataactgggaaatctatgtaaatgatat

SEQ ID NO: 17931 - DNA, 80 bp, synthetic construct; identical to SEQ ID NO: 8423
  source 1..80: mol_type = other DNA

SEQ ID NO: 17932 - DNA, 80 bp, synthetic construct
  source 1..80: mol_type = other DNA
gaaagcataatatgaagtatacaccattagaacatctcattcttcattgcttctaagtaagggatatcacaggggattac

SEQ ID NO: 17933 - DNA, 80 bp, synthetic construct
  source 1..80: mol_type = other DNA
ctctcttgcccacaattgtatctctagaacctaaaagacagcttagcatacaaaagtctgtaaacatttggcagaagaaa

SEQ ID NO: 17934 - DNA, 80 bp, synthetic construct; identical to SEQ ID NO: 8424
  source 1..80: mol_type = other DNA

SEQ ID NO: 17935 - DNA, 80 bp, synthetic construct
  source 1..80: mol_type = other DNA
cctgatgatgtgtcaccgtttcccatcacccccaaatgggaccatctagttgcaggaaaacaagcttagggctcccactg

SEQ ID NO: 17936 - DNA, 80 bp, synthetic construct
  source 1..80: mol_type = other DNA
ggtggcaaaagttggggactgctgatacagagcaagaatccttggactctcatcacttatcaatcccagaaatatacctc

SEQ ID NO: 17937 - DNA, 80 bp, synthetic construct
  source 1..80: mol_type = other DNA
acaacaccacattgcctcacttcaggtgcagaattcaaccaatgtgaagattttttttccaggttaatttccacgttcat

SEQ ID NO: 17938 - DNA, 80 bp, synthetic construct; identical to SEQ ID NO: 8425
  source 1..80: mol_type = other DNA

SEQ ID NO: 17939 - DNA, 80 bp, synthetic construct
  source 1..80: mol_type = other DNA
ataactaaggtaaagttctagctaatgatgaacctgcagttctgcaaatgacagttaactccatagatgtctgcaaagcc

SEQ ID NO: 17940 - DNA, 80 bp, synthetic construct
  source 1..80: mol_type = other DNA
aaactgcttcatacaaggatttgccaaaatatctttctaagctaggggaaaagaaaggtgaaggaaaggcaaaaaaggat

SEQ ID NO: 17941 - DNA, 80 bp, synthetic construct
  source 1..80: mol_type = other DNA
aaaagctgctgtaaagaacgtcagttctaggaccatgtcacataatcaactggaagcacattgaactatcagccaaagca

SEQ ID NO: 17942 - DNA, 80 bp, synthetic construct
  source 1..80: mol_type = other DNA
ccagataatccacttggatctttccttgcagctaagacatctaataacctataagaggacatatatgttgtgggtctaat

SEQ ID NO: 17943 - DNA, 80 bp, synthetic construct; identical to SEQ ID NO: 8426
  source 1..80: mol_type = other DNA

SEQ ID NO: 17944 - DNA, 80 bp, synthetic construct
  source 1..80: mol_type = other DNA
tacatgtcaatcaccttatcaaatcctattagtaaagctaacctaataagactacctggtctttgggaaaaaaccacgca

SEQ ID NO: 17945 - DNA, 80 bp, synthetic construct
  source 1..80: mol_type = other DNA
acctgtgggtcccaggatggcgttgagaccaggtttcatgatcccactgtaaacacaaaaacagactgatttactattcc

SEQ ID NO: 17946 - DNA, 80 bp, synthetic construct
  source 1..80: mol_type = other DNA
gggagaccaaagcaggattgcctgaggccaggagtttgagaccagcctgggcaacatagggagacactgtctctacttaa

SEQ ID NO: 17947 - DNA, 80 bp, synthetic construct; identical to SEQ ID NO: 8427
  source 1..80: mol_type = other DNA

SEQ ID NO: 17948 - DNA, 80 bp, synthetic construct
  source 1..80: mol_type = other DNA
agaaatcgaggctgggataaagcacttcaggataaaaagaaaacatgaccgaaagaaaaaaaaagccttaatccatttag

SEQ ID NO: 17949 - DNA, 80 bp, synthetic construct
  source 1..80: mol_type = other DNA
caaagtggatgtctgagggtagtgaatattcagatagagaaggaaggtggaaaaaattatggcagtgttgactgtgctga

SEQ ID NO: 17950 - DNA, 80 bp, synthetic construct
  source 1..80: mol_type = other DNA
gagttctagaccagcctggccaacatggcaaaaccccgtctctactaaaaatacaaaaattagccagacacggtggtggg

SEQ ID NO: 17951 - DNA, 80 bp, synthetic construct; identical to SEQ ID NO: 8428
  source 1..80: mol_type = other DNA

SEQ ID NO: 17952 - DNA, 80 bp, synthetic construct
  source 1..80: mol_type = other DNA
ctgagcatttactgcctgttgtacttgaactatcacaattgtacaatggctggtgggtacaagagtgaaatgtagctttc

SEQ ID NO: 17953 - DNA, 80 bp, synthetic construct
  source 1..80: mol_type = other DNA
tcaaggtgcatttatctatagctcttgatgcatcttctttataaacaggtccctaataactgcctctaaaatcaccataa

SEQ ID NO: 17954 - DNA, 80 bp, synthetic construct; identical to SEQ ID NO: 8429
  source 1..80: mol_type = other DNA

SEQ ID NO: 17955 - DNA, 80 bp, synthetic construct
  source 1..80: mol_type = other DNA
acattctagtccagggatcagcagttttcttagacaaagggttgttggaacagggccgtgctcattcccttacatattac

SEQ ID NO: 17956 - DNA, 80 bp, synthetic construct
  source 1..80: mol_type = other DNA
accctccacccttctatcatccctgaaactgcattccccacccttatttattgctttacagcatttgcatgcaggtcagt

SEQ ID NO: 17957 - DNA, 80 bp, synthetic construct
  source 1..80: mol_type = other DNA
attacattttagtggataatgattaatcccttggtcttgttttgtttatggacaagagaggtcaatgctcacctccctcc

SEQ ID NO: 17958 - DNA, 80 bp, synthetic construct; identical to SEQ ID NO: 8430
  source 1..80: mol_type = other DNA

SEQ ID NO: 17959 - DNA, 80 bp, synthetic construct
  source 1..80: mol_type = other DNA
acttgctgattttcttattccataatataaacaatctcccaccctctctagccaattagagctagatttgtcactttttg

SEQ ID NO: 17960 - DNA, 80 bp, synthetic construct
  source 1..80: mol_type = other DNA
ccccagctcttctcccgcccgctttggccagatctgtatgcacctgcacgtgggaggtagttttttaaaaagttatgcat

SEQ ID NO: 17961 - DNA, 80 bp, synthetic construct
  source 1..80: mol_type = other DNA
ttttggttttgtaaatatctcctccataaaaatcaacagctgattctaggtctgaggcagggtaagtacacagtgagtct

SEQ ID NO: 17962 - DNA, 80 bp, synthetic construct; identical to SEQ ID NO: 8431
  source 1..80: mol_type = other DNA

SEQ ID NO: 17963 - DNA, 80 bp, synthetic construct
  source 1..80: mol_type = other DNA
atatgatgaaaccccgtctttactaagatacaaaaaattagctgggcatggtggtgggcacctgtagtcccagctaggag

SEQ ID NO: 17964 - DNA, 80 bp, synthetic construct
  source 1..80: mol_type = other DNA
gagatatatccaaagaatgagagacggagagagggaagaacccaccttgaaagatctcccaccaaatcaggaacaataag

SEQ ID NO: 17965 - DNA, 80 bp, synthetic construct
  source 1..80: mol_type = other DNA
aggcaggagtcatccagtggggactgaagttggtgaagtttaatgtagaatggagttctggaataatgtcagtttatctc

SEQ ID NO: 17966 - DNA, 80 bp, synthetic construct
  source 1..80: mol_type = other DNA
taccacgttgaatgagactgaagagacaggatatggtggcagtcaaatatgtgaggggcatggttgacccaaggccctga

SEQ ID NO: 17967 - DNA, 80 bp, synthetic construct; identical to SEQ ID NO: 8432
  source 1..80: mol_type = other DNA

SEQ ID NO: 17968 - DNA, 80 bp, synthetic construct
  source 1..80: mol_type = other DNA
acacacagaaaatttttaattagccaggcattgtggcatctagctactccagaggctgaggcgggagaatcacttgagcc

SEQ ID NO: 17969 - DNA, 80 bp, synthetic construct
  source 1..80: mol_type = other DNA
aaataacaggacatccacatatctatgggaatgaatttttttttccataagatcttcagcgttggtgagggaaagctcaa

SEQ ID NO: 17970 - DNA, 80 bp, synthetic construct
  source 1..80: mol_type = other DNA
gtccagaggaaaaaccaaaatcaaaattctcatcagcttttttggaatgtagatgactatctgaatggtgatgctgctat

SEQ ID NO: 17971 - DNA, 80 bp, synthetic construct; identical to SEQ ID NO: 8433
  source 1..80: mol_type = other DNA

SEQ ID NO: 17972 - DNA, 80 bp, synthetic construct
  source 1..80: mol_type = other DNA
ggccaacatggtgaaaccccatcttgactaaaaatacaaaaattagccaggcatggtggcacacacctgtaatcccagct

SEQ ID NO: 17973 - DNA, 80 bp, synthetic construct
  source 1..80: mol_type = other DNA
aaaaaaagtgtgaagccttgagcagacgagacttctagtgcatcaagttactcatctactaactttaaaagataaaataa

SEQ ID NO: 17974 - DNA, 80 bp, synthetic construct
  source 1..80: mol_type = other DNA
atcacaggtacacaccaccacgcccagctaattttttgtattttcagtagagacagggtttcactatgtcggccaggatg

SEQ ID NO: 17975 - DNA, 80 bp, synthetic construct; identical to SEQ ID NO: 8434
  source 1..80: mol_type = other DNA

SEQ ID NO: 17976 - DNA, 80 bp, synthetic construct
  source 1..80: mol_type = other DNA
gacaaggtagaaagccactcttcagttttactcgatagcagatgttatgaaaacttaacacagctccttcagtaaatgcc

SEQ ID NO: 17977 - DNA, 80 bp, synthetic construct
  source 1..80: mol_type = other DNA
actaggtgacaatacatttaaaacaagtccatttttaaatgtgcggcaatgagcagcttcatttccaatgaatggcccat

SEQ ID NO: 17978 - DNA, 80 bp, synthetic construct; identical to SEQ ID NO: 8435
  source 1..80: mol_type = other DNA

SEQ ID NO: 17979 - DNA, 80 bp, synthetic construct
  source 1..80: mol_type = other DNA
tacttgggaggctgaggcaggagaatggcttgaaccagggaggcagaggttgcggtgagcagagatcgtgccactgtact

SEQ ID NO: 17980 - DNA, 80 bp, synthetic construct
  source 1..80: mol_type = other DNA
tcaggaacaggagacatttctctgaatttatagctccagactttatgtcggaagttgttatgcaccttcaatcagcaaag

SEQ ID NO: 17981 - DNA, 80 bp, synthetic construct
  source 1..80: mol_type = other DNA
aataaaatgtgaactatttcattaaacaaattacaaaaggcctcaaaaaagatttatttgagtaagaccttaagatgagc

SEQ ID NO: 17982 - DNA, 80 bp, synthetic construct
  source 1..80: mol_type = other DNA
agtaagaagaaactgttgaagagttctgtctgataaaagcaaccaaagcggccaggacatgaggaaccaaaatcacggaa

SEQ ID NO: 17983 - DNA, 80 bp, synthetic construct; identical to SEQ ID NO: 8436
  source 1..80: mol_type = other DNA

SEQ ID NO: 17984 - DNA, 80 bp, synthetic construct
  source 1..80: mol_type = other DNA
gaatgtggacaaaccaaaaaaccagtctactcaatcatggcgatctgctcagactgctagaagaaggttaaatccactct

SEQ ID NO: 17985 - DNA, 80 bp, synthetic construct
  source 1..80: mol_type = other DNA
aaatttttaaaattgccaggcatgccaaaaaacagaacctgatgttccggaaatgagaaaatggaaacagacccacaagt

SEQ ID NO: 17986 - DNA, 80 bp, synthetic construct
  source 1..80: mol_type = other DNA
ttcaatcgatgagtttaacagcagctttcctagtttagacacaaattaggaaagagaatttagtgaactggaagactagt

SEQ ID NO: 17987 - DNA, 80 bp, synthetic construct; identical to SEQ ID NO: 8437
  source 1..80: mol_type = other DNA

SEQ ID NO: 17988 - DNA, 80 bp, synthetic construct
  source 1..80: mol_type = other DNA
acaagtctattcatttggagtctggaaaagtagaaaccatttaaagactgacacccagcaaattcaaggtacatggctgg

SEQ ID NO: 17989 - DNA, 80 bp, synthetic construct
  source 1..80: mol_type = other DNA
tacagtcagcagccctgtccttgagttctgcatctgaagattcaaccagtcgcaaatcgaaaatattaaaaaataggaca

SEQ ID NO: 17990 - DNA, 80 bp, synthetic construct
  source 1..80: mol_type = other DNA
ttcggctactcgggaggctgaggcaggaggatcacttgagcccaggaggcagagattgcagtgagccgagatcatgccac

SEQ ID NO: 17991 - DNA, 80 bp, synthetic construct
  source 1..80: mol_type = other DNA
cattgtattaggtattacaagtaatctagagatgatttaaagtatatggaacaatgcgtgtacattatatgcaaatacta

SEQ ID NO: 17992 - DNA, 80 bp, synthetic construct; identical to SEQ ID NO: 8438
  source 1..80: mol_type = other DNA

SEQ ID NO: 17993 - DNA, 80 bp, synthetic construct
  source 1..80: mol_type = other DNA
aagtacccaagaaagagtgatcacccatgcccatacaagacagagggtaacacttataaatacaatcacaatcttagaag

SEQ ID NO: 17994 - DNA, 80 bp, synthetic construct
  source 1..80: mol_type = other DNA
ataaccaaggcacaccatcaagctgaagcacgttacatcaaaaagaaaggaaaaaaaacaaactttaattctaacaccaa

SEQ ID NO: 17995 - DNA, 80 bp, synthetic construct; identical to SEQ ID NO: 8439
  source 1..80: mol_type = other DNA

SEQ ID NO: 17996 - DNA, 80 bp, synthetic construct
  source 1..80: mol_type = other DNA
cttcaaatggctttacactttacctgatcccagccgattcatgttatttggcctgattatgtatcttagccaactcaaaa

SEQ ID NO: 17997 - DNA, 80 bp, synthetic construct
  source 1..80: mol_type = other DNA
tttgagatggagtttcactcttgttgcccaggctggagtgcaatggcatgatctaggctcactgcaacctccgcctcccg

SEQ ID NO: 17998 - DNA, 80 bp, synthetic construct
  source 1..80: mol_type = other DNA
gcctccaaaagtgctgggattataggtgtgagccactgcgcccagcacatttttacttttttgagaagtttaaccatttg

SEQ ID NO: 17999 - DNA, 80 bp, synthetic construct; identical to SEQ ID NO: 8440
  source 1..80: mol_type = other DNA

SEQ ID NO: 18000 - DNA, 80 bp, synthetic construct
  source 1..80: mol_type = other DNA
tactgaggttaatctcaaaagataacaatcctgagcaatcaaatcactgtcaggcgattgctacaaacttagcagtggaa

SEQ ID NO: 18001 - DNA, 80 bp, synthetic construct
  source 1..80: mol_type = other DNA
tttgacagatttgtcctgagaggtccagtgttgattatattcaggcccaaagcctgcttgtatggtggtttcagagttaa

SEQ ID NO: 18002 - DNA, 80 bp, synthetic construct
  source 1..80: mol_type = other DNA
cactgaggccttttaatcaggaaaggctcacaaccctaatgatgtttataaaggaacactctgggccaggccaggtgcgg

SEQ ID NO: 18003 - DNA, 80 bp, synthetic construct
  source 1..80: mol_type = other DNA
ctcgggacggcaggagaatcgcttgaattcagaaggcagagattgcagtgtgctaagattgtgctgctgcactccagctt

SEQ ID NO: 18004 - DNA, 80 bp, synthetic construct; identical to SEQ ID NO: 8441
  source 1..80: mol_type = other DNA

SEQ ID NO: 18005 - DNA, 80 bp, synthetic construct
  source 1..80: mol_type = other DNA
atcgctgttaggttttcttaaatgttactttagagaagaaaaaatccttttccatctcccctgtgggttccctagctggg

SEQ ID NO: 18006 - DNA, 80 bp, synthetic construct
  source 1..80: mol_type = other DNA
aggcttttttttttcttttttcaagacagagtctcactctgttgccgaggacgtagtgcagtggtgtggatcttggctca

SEQ ID NO: 18007 - DNA, 80 bp, synthetic construct
  source 1..80: mol_type = other DNA
gtgatccacctgcctcagcctcccaaagtgctgggattacaggcatgagtcaccgtgcttggctaaaacctgttaatttt

SEQ ID NO: 18008 - DNA, 80 bp, synthetic construct; identical to SEQ ID NO: 8442
  source 1..80: mol_type = other DNA

SEQ ID NO: 18009 - DNA, 80 bp, synthetic construct
  source 1..80: mol_type = other DNA
gaaagaaagtaaaaaagaaaactaaaagaatccattgaactcttccaggcaccctcacaggcttccctatgaaagtccca

SEQ ID NO: 18010 - DNA, 80 bp, synthetic construct
  source 1..80: mol_type = other DNA
taacaattcagcattaaaacgttctgcaagcttgggtcacagagcatgaactttcttcttcttcatgctctttgcccttg

SEQ ID NO: 18011 - DNA, 80 bp, synthetic construct
  source 1..80: mol_type = other DNA
cctgcagagttcttcagactctgttctcaattattcctattaagtgaaagattaaatcaatgtgtcacactctgttgcaa

SEQ ID NO: 18012 - DNA, 80 bp, synthetic construct; identical to SEQ ID NO: 8443
  source 1..80: mol_type = other DNA

SEQ ID NO: 18013 - DNA, 80 bp, synthetic construct
  source 1..80: mol_type = other DNA
gcaagttcctagagaagacagaccaagtacagctgaatcttgaacagcacaggtttgaagtacatggtccacttatacgc

SEQ ID NO: 18014 - DNA, 80 bp, synthetic construct
  source 1..80: mol_type = other DNA
ggagaagagaaaaagctgttctagtaaaggaatgcaaaatccttaatcgaaagagatatgttgggtcatgtataccattc

SEQ ID NO: 18015 - DNA, 80 bp, synthetic construct
  source 1..80: mol_type = other DNA
cctcactcctatatatcctgatcctacaagattttcagtaaagccagcaaggtatctataggaaattaataacttacaga

SEQ ID NO: 18016 - DNA, 80 bp, synthetic construct; identical to SEQ ID NO: 8444
  source 1..80: mol_type = other DNA

SEQ ID NO: 18017 - DNA, 80 bp, synthetic construct
  source 1..80: mol_type = other DNA
attctgctcgtctgtacaaaaaataaaattgaaaaattagccgggtgtggtggcacatgcctgtagacctagctacttgt

SEQ ID NO: 18018 - DNA, 80 bp, synthetic construct
  source 1..80: mol_type = other DNA
tgtgattagaaagccaaaacttcagtctagaaaatcgtcaaatcataaatgaaattagaccaagtgcaatttacatgcgt

SEQ ID NO: 18019 - DNA, 80 bp, synthetic construct; identical to SEQ ID NO: 8445
  source 1..80: mol_type = other DNA

SEQ ID NO: 18020 - DNA, 80 bp, synthetic construct
  source 1..80: mol_type = other DNA
ctgaggcaggagaactgcttgaacctgggaggcagaggttgcggtgagctgagctcgcaccattgcactccattctgggc

SEQ ID NO: 18021 - DNA, 80 bp, synthetic construct
  source 1..80: mol_type = other DNA
ccggccctcagtgaggttacatatgaaaaatatcagtcaacagtgctacggagaaaaaaaattaaagcaaaagaggaagg

SEQ ID NO: 18022 - DNA, 80 bp, synthetic construct
  source 1..80: mol_type = other DNA
acctgtaattcctgctacttgggagactgaggcacaagaattgcttgaacccgggaggcagagattgcagtgagccaagg

SEQ ID NO: 18023 - DNA, 80 bp, synthetic construct; identical to SEQ ID NO: 8446
  source 1..80: mol_type = other DNA

SEQ ID NO: 18024 - DNA, 80 bp, synthetic construct
  source 1..80: mol_type = other DNA
gtgttgggcttcattcaaagccatcttgggccacatgcacgttggacaagcttggtttaaaggatcactctgactttggt

SEQ ID NO: 18025 - DNA, 80 bp, synthetic construct
  source 1..80: mol_type = other DNA
attccatttcctgacctcctcttacactgcccaaactgggaaaacaaggtcaaaaataaatgacagtggttcagcttcag

SEQ ID NO: 18026 - DNA, 80 bp, synthetic construct
  source 1..80: mol_type = other DNA
aggttgactccaccaaattggcactgtgggaagattagcagcagtgaggtgggtcattagaacattttgggatcctaagt

SEQ ID NO: 18027 - DNA, 80 bp, synthetic construct; identical to SEQ ID NO: 8447
  source 1..80: mol_type = other DNA

SEQ ID NO: 18028 - DNA, 80 bp, synthetic construct
  source 1..80: mol_type = other DNA
tggggaggctgaggcaggagaatggcgtgaacccgggaggtggagcttgcagtgagccgagatggcgccactgcactcca

SEQ ID NO: 18029 - DNA, 80 bp, synthetic construct
  source 1..80: mol_type = other DNA
gtgtgtgtactccaaaatcatagaagggctcattaattattgcaagggatcctctctctaatccacgggtacagttacca

SEQ ID NO: 18030 - DNA, 80 bp, synthetic construct
  source 1..80: mol_type = other DNA
tgatcctggtttcttaccagagcctaatagatagaagctcacatatgcattatttgttttggaagcactggcagggtttc

SEQ ID NO: 18031 - DNA, 80 bp, synthetic construct
  source 1..80: mol_type = other DNA
ccaccaaacaggcttcgtgtgagcaataaagctttttaatcacctggatgcaggcgggctgagtccgaaaagaaagtcag

SEQ ID NO: 18032 - DNA, 80 bp, synthetic construct; identical to SEQ ID NO: 8448
  source 1..80: mol_type = other DNA

SEQ ID NO: 18033 - DNA, 80 bp, synthetic construct
  source 1..80: mol_type = other DNA
tgtttctcagggctgcttcaagtgggattaggggcggcgtgggaacctaaagtgggagagattaagctgaaggaagattt

SEQ ID NO: 18034 - DNA, 80 bp, synthetic construct
  source 1..80: mol_type = other DNA
catccaattagagagtgcctaaggaggttcagcatagccctgccagcaaagatgatttatttactttaagagttgagagt

SEQ ID NO: 18035 - DNA, 80 bp, synthetic construct
  source 1..80: mol_type = other DNA
gcagtccaagttggtctggtgtctggaatgagactggggcctaataaaaaggagcatctatacaggagctcaaatgggct

SEQ ID NO: 18036 - DNA, 80 bp, synthetic construct; identical to SEQ ID NO: 8449
  source 1..80: mol_type = other DNA

SEQ ID NO: 18037 - DNA, 80 bp, synthetic construct
  source 1..80: mol_type = other DNA
tgagtaaagctaatttgccagtcctgggcaggagcaaaaccccgagcttgatgtgtagggaagggagggggcatgagaaa

SEQ ID NO: 18038 - DNA, 80 bp, synthetic construct
  source 1..80: mol_type = other DNA
ggctggaaggagatattttccttggtctaagaaccatttgctttgtgtgggaagagattgataggtggaagtttcagtgg

SEQ ID NO: 18039 - DNA, 80 bp, synthetic construct; identical to SEQ ID NO: 8450
  source 1..80: mol_type = other DNA

SEQ ID NO: 18040 - DNA, 80 bp, synthetic construct
  source 1..80: mol_type = other DNA
atgtggaagatactatagcatagcctgcctttgctggtgagtggcaattaggactggtggaactgccatcagtaaaccaa

SEQ ID NO: 18041 - DNA, 80 bp, synthetic construct
  source 1..80: mol_type = other DNA
aacaaagagtgagtatagctggaggagccggggagcagaaagtatatgtgtcaggtgtgaggaagaaaatagattttgga

SEQ ID NO: 18042 - DNA, 80 bp, synthetic construct
  source 1..80: mol_type = other DNA
tccttgtgtaagaattctgactgcacagccctgcacttcggctgtgtgtaatgaaaagggttgggatgagtcagggagag

SEQ ID NO: 18043 - DNA, 80 bp, synthetic construct
  source 1..80: mol_type = other DNA
ccatgcctaggaaggaaaggagttgttttgtagaaggtgttggggtttgagagatcagtcagacacgattggcagggaga

SEQ ID NO: 18044 - DNA, 80 bp, synthetic construct; identical to SEQ ID NO: 8451
  source 1..80: mol_type = other DNA

SEQ ID NO: 18045 - DNA, 80 bp, synthetic construct
  source 1..80: mol_type = other DNA
gcctggccaacatggcaaaacctcgtctttactaaaaacattaaaaattagctgggcgtggtggcacatgcctgtaatcc

SEQ ID NO: 18046 - DNA, 80 bp, synthetic construct
  source 1..80: mol_type = other DNA
agcttctaataccattctaaagcaaaataatcacagtgccttggagaaatggatcattccaaggttgggacatggaaaat

SEQ ID NO: 18047 - DNA, 80 bp, synthetic construct
  source 1..80: mol_type = other DNA
catggaaaaccccgtctctactaaaaaatacaaaaagtagccaagtgtggtgctacgtacctgtaatcccagctacttgg

SEQ ID NO: 18048 - DNA, 80 bp, synthetic construct; identical to SEQ ID NO: 8452
  source 1..80: mol_type = other DNA

SEQ ID NO: 18049 - DNA, 80 bp, synthetic construct
  source 1..80: mol_type = other DNA
agaaggaagaaaataggggttttgtttaaccattaggaaaaaaaacccgctaaacaacatgttccacaaatggatgctta

SEQ ID NO: 18050 - DNA, 80 bp, synthetic construct
  source 1..80: mol_type = other DNA
caaggcaggaggatcactagaggtcaggagttcgagaccagcctggccaacatgaaacctgtctctactaaaaatacaaa

SEQ ID NO: 18051 - DNA, 80 bp, synthetic construct
  source 1..80: mol_type = other DNA
gtattgacatcatgtacccaatatgacatactgagatggaaactttacttctgtgacatttttccccaaaatgcagaaca

SEQ ID NO: 18052 - DNA, 80 bp, synthetic construct; identical to SEQ ID NO: 8453
  source 1..80: mol_type = other DNA

SEQ ID NO: 18053 - DNA, 80 bp, synthetic construct
  source 1..80: mol_type = other DNA
aaccaacatctttcaatgtttataatggaagggtaatgttagacttaacatgccatctttgtcgttgaaacctttctcat

SEQ ID NO: 18054 - DNA, 80 bp, synthetic construct
  source 1..80: mol_type = other DNA
aaaaccaagctttaggggatatctctaggactgagaagggagtaagagcactcaactatccacagaaaattacaaaaggg

SEQ ID NO: 18055 - DNA, 80 bp, synthetic construct
  source 1..80: mol_type = other DNA
tgctcagtgggtttttatccttccaatatcaactttaatttcatacatttggagaaaggccaagagtttttaccaaccca

SEQ ID NO: 18056 - DNA, 80 bp, synthetic construct; identical to SEQ ID NO: 8454
  source 1..80: mol_type = other DNA

SEQ ID NO: 18057 - DNA, 80 bp, synthetic construct
  source 1..80: mol_type = other DNA
tgtaaatgttgggatgagtcacccggaccttccaaacaaactctaaagcagcagtttccacttaacaagaccaccaagca

SEQ ID NO: 18058 - DNA, 80 bp, synthetic construct
  source 1..80: mol_type = other DNA
cttcccccaaccacacccggcgcgcccgagcgctcccctcgcgcggcggccggcgtgggaggcgctgcggctggaggtca

SEQ ID NO: 18059 - DNA, 80 bp, synthetic construct
  source 1..80: mol_type = other DNA
gttcgcgggcgggggtgaggcgtggccccgactgccgggccgcgataagcgccctgcgacccggctgaaagcgcacacgt

SEQ ID NO: 18060 - DNA, 80 bp, synthetic construct; identical to SEQ ID NO: 8455
  source 1..80: mol_type = other DNA

SEQ ID NO: 18061 - DNA, 80 bp, synthetic construct
  source 1..80: mol_type = other DNA
tgaatgaaaatattaccatagtttaaatgttattctttacactcctgtgactgacatacttctgtgcaatattccgatgg

SEQ ID NO: 18062 - DNA, 80 bp, synthetic construct
  source 1..80: mol_type = other DNA
catttaagttgtttaaatcaacactaggaataactattaatggttcacccaatgcaggaaagttttagctaggaagccta

SEQ ID NO: 18063 - DNA, 80 bp, synthetic construct; identical to SEQ ID NO: 8456
  source 1..80: mol_type = other DNA

SEQ ID NO: 18064 - DNA, 80 bp, synthetic construct
  source 1..80: mol_type = other DNA
agaagcgcttgaacacaggaggcagaggttgcaaatgacccgagatcccaccactgcactccagcctgggccacagagtg

SEQ ID NO: 18065 - DNA, 80 bp, synthetic construct
  source 1..80: mol_type = other DNA
cagaaaaaatgaaaacatttccagcaagatctgaaggcactacaggaggagactgaacaaaaatggagaaaacacacacg

SEQ ID NO: 18066 - DNA, 80 bp, synthetic construct
  source 1..80: mol_type = other DNA
acctgatatcaggacttcaagagcagcctggccaacatggtgaaacccttctctactaaaaatacaaaaattagccgggc

SEQ ID NO: 18067 - DNA, 80 bp, synthetic construct; identical to SEQ ID NO: 8457
  source 1..80: mol_type = other DNA

SEQ ID NO: 18068 - DNA, 80 bp, synthetic construct
  source 1..80: mol_type = other DNA
tcgagacaagcctaggcaacacagggagcccctgtctctacaaacaatttttttttttaattttttttttttttattata

SEQ ID NO: 18069 - DNA, 80 bp, synthetic construct
  source 1..80: mol_type = other DNA
tgtgatattccccttcctgtgtccaagtgatctcattgttcaattcccacctatgagtgagaatatgcggtgtttggttt

SEQ ID NO: 18070 - DNA, 80 bp, synthetic construct; identical to SEQ ID NO: 14731
  source 1..80: mol_type = other DNA

SEQ ID NO: 18071 - DNA, 80 bp, synthetic construct
  source 1..80: mol_type = other DNA
agtgtaaaagtgttcctatttctccacatcctctccagcacctgttgtttcctgactttttaatgattgccattctaact

SEQ ID NO: 18072 - DNA, 80 bp, synthetic construct; identical to SEQ ID NO: 8458
  source 1..80: mol_type = other DNA

SEQ ID NO: 18073 - DNA, 80 bp, synthetic construct
  source 1..80: mol_type = other DNA
ttctgggtagtaacatggaatgtcttttatcttgtattttagtgtaattttctaaattttatgtaacaaatttagaaaat

SEQ ID NO: 18074 - DNA, 80 bp, synthetic construct
  source 1..80: mol_type = other DNA
tgtttcatatttataggtcggtttatttgctaactaaagttacattgggaggcagtggtaaatcaaataaaaattcaaaa

SEQ ID NO: 18075 - DNA, 80 bp, synthetic construct
  source 1..80: mol_type = other DNA
agagaaaaaggaccttcctcattaggtcagatgttagatgactttcctcattttacagataagtcaccagtgcaaaggag

SEQ ID NO: 18076 - DNA, 80 bp, synthetic construct; identical to SEQ ID NO: 8459
  source 1..80: mol_type = other DNA

SEQ ID NO: 18077 - DNA, 80 bp, synthetic construct
  source 1..80: mol_type = other DNA
ccacagcccagctcacagctatcagggcctttgactaatatggcaagagaaagttcagtctataatggtgcaaacagtta

SEQ ID NO: 18078 - DNA, 80 bp, synthetic construct
  source 1..80: mol_type = other DNA
ggacaagccataaagaaagaaagggttattggtagtgtcaggtcccttaggaagcataatgaaatgggatccagaggaat

SEQ ID NO: 18079 - DNA, 80 bp, synthetic construct
  source 1..80: mol_type = other DNA
agcgcattcatagagtgggcttcaagaagtgtgtccctggggcactcagagagatccggaaatttgccatgaaggagatg

SEQ ID NO: 18080 - DNA, 80 bp, synthetic construct; identical to SEQ ID NO: 8460
  source 1..80: mol_type = other DNA

SEQ ID NO: 18081 - DNA, 80 bp, synthetic construct
  source 1..80: mol_type = other DNA
tctgccttgcgggttcaagcgattctactgcctcagcctcctgagtagctgggattacaagcacttgccaccatgcctgg

SEQ ID NO: 18082 - DNA, 80 bp, synthetic construct
  source 1..80: mol_type = other DNA
ccccacgtgttgcgggagggacctggtgggaggtaatcgaatcacaggggtaattattcctatgctgctgttctgatagt

SEQ ID NO: 18083 - DNA, 80 bp, synthetic construct
  source 1..80: mol_type = other DNA
taacctctttcctttataaattacccagtctcgggtatgtctttattagcagcatgagaacagactaatacagaaacttt

SEQ ID NO: 18084 - DNA, 80 bp, synthetic construct
  source 1..80: mol_type = other DNA
tgggttcaagcaattctcctgcctcagcctcccaagtagctgggattacaggcatgcatcaccatgcctggctaactttt

SEQ ID NO: 18085 - DNA, 80 bp, synthetic construct; identical to SEQ ID NO: 8461
  source 1..80: mol_type = other DNA

SEQ ID NO: 18086 - DNA, 80 bp, synthetic construct
  source 1..80: mol_type = other DNA
cagcaggtctgtgttcctttctggaaccttttcaatcttgtagaggccacctgcattccttggctcttggcctctttctc

SEQ ID NO: 18087 - DNA, 80 bp, synthetic construct
  source 1..80: mol_type = other DNA
gtacattcatctgggcaggctcacgcctgtaatctcagcactttgggaggccgaggcgggtggattacgaggtcaggagt

SEQ ID NO: 18088 - DNA, 80 bp, synthetic construct
  source 1..80: mol_type = other DNA
tgccactgcactccagcctgggcaacagagtgagactccatctcaaaaaaaaaaaagagagagagaaaatcattagatta

SEQ ID NO: 18089 - DNA, 80 bp, synthetic construct; identical to SEQ ID NO: 8462
  source 1..80: mol_type = other DNA

SEQ ID NO: 18090 - DNA, 80 bp, synthetic construct
  source 1..80: mol_type = other DNA
aatgacgaattgcataaccgaacataatcacaaattgtcgtaccatcatttgtttccctaaaagcccatttgtctttcca

SEQ ID NO: 18091 - DNA, 80 bp, synthetic construct
  source 1..80: mol_type = other DNA
taaaccttgtctattctcctgttaatccatctattgccaattaatttacaggcccccaagcactggacctaagttggcag

SEQ ID NO: 18092 - DNA, 80 bp, synthetic construct; identical to SEQ ID NO: 8463
  source 1..80: mol_type = other DNA

SEQ ID NO: 18093 - DNA, 80 bp, synthetic construct
  source 1..80: mol_type = other DNA
tattcacattccaggttttgataaggtcccacggtttgaacacgagagtgaggttatggaaatggaagggaagtgtattt

SEQ ID NO: 18094 - DNA, 80 bp, synthetic construct
  source 1..80: mol_type = other DNA
cttagctggacactcttctctaaagaaccaagcagagtaaggttgttggcagaatccatttctttttggttccaagactg

SEQ ID NO: 18095 - DNA, 80 bp, synthetic construct
  source 1..80: mol_type = other DNA
gtggcacaatctcggctcactgcaaccttcgcctcccaggctcaagcaattatcctgcctcaacctcccgagtagctgga

SEQ ID NO: 18096 - DNA, 80 bp, synthetic construct; identical to SEQ ID NO: 8464
  source 1..80: mol_type = other DNA

SEQ ID NO: 18097 - DNA, 80 bp, synthetic construct
  source 1..80: mol_type = other DNA
cagaagctagggtgatgggatgatcatcaaaataaacagagaagttaccaagatagcaataatcttggagagacgagaaa

SEQ ID NO: 18098 - DNA, 80 bp, synthetic construct
  source 1..80: mol_type = other DNA
tgctggagccagaacaccttggttcatgtaatttgctttatacagcagacaagagaccaattaagaagtaattcatttgg

SEQ ID NO: 18099 - DNA, 80 bp, synthetic construct
  source 1..80: mol_type = other DNA
ggtggcatgcgcctgtagtcccagctactcaggaggctgaggcaggagaatcgcttgaacccaggaggcagaggttgcag

SEQ ID NO: 18100 - DNA, 80 bp, synthetic construct
  source 1..80: mol_type = other DNA
acctgcagagtcagatagtacagtagagtatataacatttgtctctgcagattaagctaaaaggttaaatgttaagaatt

SEQ ID NO: 18101 - DNA, 80 bp, synthetic construct
  source 1..80: mol_type = other DNA
caaagtgaacacacctgtatacctgtcactcagattaaaaaaaaaaaaattgtattagcaatgccacagaagcctccctc

SEQ ID NO: 18102 - DNA, 80 bp, synthetic construct; identical to SEQ ID NO: 8465
  source 1..80: mol_type = other DNA

SEQ ID NO: 18103 - DNA, 80 bp, synthetic construct
  source 1..80: mol_type = other DNA
gtctcaggttactgcagccatggcctcctgggttcaagcaattctcctgcctcagcctcctgagtagctgagattacagg

SEQ ID NO: 18104 - DNA, 80 bp, synthetic construct
  source 1..80: mol_type = other DNA
gtagttaccattttgagactgtcttcttttgttgaatattatcggcatgaaattcatatattttgcaggtcataaaggct

SEQ ID NO: 18105 - DNA, 80 bp, synthetic construct
  source 1..80: mol_type = other DNA
aaaagagttctaatggtcagttaaacccatcatccacaagtatggctaaatggaggcccaaaatgtgaaactattttctc

SEQ ID NO: 18106 - DNA, 80 bp, synthetic construct; identical to SEQ ID NO: 8466
  source 1..80: mol_type = other DNA

SEQ ID NO: 18107 - DNA, 80 bp, synthetic construct
  source 1..80: mol_type = other DNA
agtcccagctactcgggaggctgaggcagaagaattgcttgaacccgggaggcggaggttgcggtgagccgagattgtgc

SEQ ID NO: 18108 - DNA, 80 bp, synthetic construct
  source 1..80: mol_type = other DNA
gcctttgaatgtgttttaacactctattcccttccctttcccaccttatgctctcatgccttatgcacatttatttacct

SEQ ID NO: 18109 - DNA, 80 bp, synthetic construct
  source 1..80: mol_type = other DNA
gacttctaggccagggttcactcccagatagatattgactgcaagactgactgggattgatttgtaacttggatgagccc

SEQ ID NO: 18110 - DNA, 80 bp, synthetic construct; identical to SEQ ID NO: 8467
  source 1..80: mol_type = other DNA

SEQ ID NO: 18111 - DNA, 80 bp, synthetic construct
  source 1..80: mol_type = other DNA
ttatcaacctaaatgcccataattagcagatgggataaagaaaatgcactggtatatatgtatataccatgagggtgtaa

SEQ ID NO: 18112 - DNA, 80 bp, synthetic construct
  source 1..80: mol_type = other DNA
agaactcatgaacacaaagaaggaaacaacagacacgggtctacttgagggtggaggttgagaggagggagagatgcaga

SEQ ID NO: 18113 - DNA, 80 bp, synthetic construct
  source 1..80: mol_type = other DNA
gtatagaatggatggggggatgtgggaaggcagagatcagtctggaaatttaaaaaaaaaatgattgaactaaagagatg

SEQ ID NO: 18114 - DNA, 80 bp, synthetic construct
  source 1..80: mol_type = other DNA
cgttctttttcaaattggctaattatttgattgtctcctgttcttcctcatgttttcaatgccatcttcacattttaaaa

SEQ ID NO: 18115 - DNA, 80 bp, synthetic construct; identical to SEQ ID NO: 8468
  source 1..80: mol_type = other DNA

SEQ ID NO: 18116 - DNA, 80 bp, synthetic construct
  source 1..80: mol_type = other DNA
ccatctctaaaataaaataaataaggctgggtgcgttggctcatgcctgtaatcccagcacttgggaggccaaggcacat

SEQ ID NO: 18117 - DNA, 80 bp, synthetic construct
  source 1..80: mol_type = other DNA
gttgcagtgagccaagatcacaccactgcactccagcctgggcaacaagagcaaagctccgtcacaaaaaaaaaaaaaat

SEQ ID NO: 18118 - DNA, 80 bp, synthetic construct
  source 1..80: mol_type = other DNA
tcaggaggctgaagaaggagaatcacttgaaccaaggaggcagaggttgcagtgagccgagtcacgccactgcactccag

SEQ ID NO: 18119 - DNA, 80 bp, synthetic construct; identical to SEQ ID NO: 8469
  source 1..80: mol_type = other DNA

SEQ ID NO: 18120 - DNA, 80 bp, synthetic construct
  source 1..80: mol_type = other DNA
ggactttgaagggtagcttaattgcctggtctctgctcctgttccattagtgatcttagtggactcatctaaacattgaa

SEQ ID NO: 18121 - DNA, 80 bp, synthetic construct
  source 1..80: mol_type = other DNA
gtagaaagcatagtatgacaaacccctatgtatcaatcttcaactagtggccaatctttgtttcattgatacctgccttt

SEQ ID NO: 18122 - DNA, 80 bp, synthetic construct
  source 1..80: mol_type = other DNA
atctaaaaacttgagtagattcaggtccaatcacttgacaataatgcattctaggtgttgtatacttccattaggaagct

SEQ ID NO: 18123 - DNA, 80 bp, synthetic construct; identical to SEQ ID NO: 8470
  source 1..80: mol_type = other DNA

SEQ ID NO: 18124 - DNA, 80 bp, synthetic construct
  source 1..80: mol_type = other DNA
aatgtccgtattacttttggccgatgtgtctcagacttgtttagttaaaggatcccactcacactctcttatttccccct

SEQ ID NO: 18125 - DNA, 80 bp, synthetic construct
  source 1..80: mol_type = other DNA
tttttttttttctttttattttactttaagttctggggtatctgtgcagaatgtgcaggtttgttacataggtatacaca

SEQ ID NO: 18126 - DNA, 80 bp, synthetic construct
  source 1..80: mol_type = other DNA
aactctcacctatgagtgaaaacatgcagtgtttggttttctgttcctgtgttactttgctgagaatgacggcttccagc

SEQ ID NO: 18127 - DNA, 80 bp, synthetic construct; identical to SEQ ID NO: 8471
  source 1..80: mol_type = other DNA

SEQ ID NO: 18128 - DNA, 80 bp, synthetic construct
  source 1..80: mol_type = other DNA
tttaagtctttaatctatcttgagttaatttttgtataaggtgtaaggaaggagtccagtttcagttttctgcatatggc

SEQ ID NO: 18129 - DNA, 80 bp, synthetic construct
  source 1..80: mol_type = other DNA
ttatggcagcccagcaaactactacacaattgatttacttaagaaacagattgttatgttctacatgattgcgtcttaat

SEQ ID NO: 18130 - DNA, 80 bp, synthetic construct
  source 1..80: mol_type = other DNA
cgttaggaagctccaaatacctgattttctctcttcttttgatgattattactagacccattaagtatttcattaggggt

SEQ ID NO: 18131 - DNA, 80 bp, synthetic construct; identical to SEQ ID NO: 8472
  source 1..80: mol_type = other DNA

SEQ ID NO: 18132 - DNA, 80 bp, synthetic construct
  source 1..80: mol_type = other DNA
tcaagttagtagtctccgcgtgcattcttgctttctagcataacaacatgttccaggctcatttttcatttcctgcctca

SEQ ID NO: 18133 - DNA, 80 bp, synthetic construct
  source 1..80: mol_type = other DNA
cggcattaggttatgaatggataatggttgtggggatactacagacatttgctatgttattcatcctttgtgtatgccat

SEQ ID NO: 18134 - DNA, 80 bp, synthetic construct
  source 1..80: mol_type = other DNA
tattcttgttttttttttctttttttgtggagacagggtcttgccatgttgcccaggcttgtcttgaactcctggaatca

SEQ ID NO: 18135 - DNA, 80 bp, synthetic construct; identical to SEQ ID NO: 8473
  source 1..80: mol_type = other DNA

SEQ ID NO: 18136 - DNA, 80 bp, synthetic construct
  source 1..80: mol_type = other DNA
gccagcacacctggctaatttttttttttttttttttttttttttgtaaatacagggtctcaatatgttccccagactgg

SEQ ID NO: 18137 - DNA, 80 bp, synthetic construct
  source 1..80: mol_type = other DNA
ttcctgaagtgatagtatttctctatgagccatatatggtgtcaagttatagcaagtattctccaccattaaagaagtca

SEQ ID NO: 18138 - DNA, 80 bp, synthetic construct; identical to SEQ ID NO: 8474
  source 1..80: mol_type = other DNA

SEQ ID NO: 18139 - DNA, 80 bp, synthetic construct
  source 1..80: mol_type = other DNA
ccagcatggtggcaggcgcctgtggtcccagctactcgggagggtgaggcaggagaatggcgggaacccaggaggcggag

SEQ ID NO: 18140 - DNA, 80 bp, synthetic construct
  source 1..80: mol_type = other DNA
ttttatgtaataaaaactaagcgggagagacaggaggtggaacaagatcactgaattggagcctccatcaattgtcctcc

SEQ ID NO: 18141 - DNA, 80 bp, synthetic construct
  source 1..80: mol_type = other DNA
ccccaatctctctcggcagtggccacataccatggagagagaaatctgtgtgttgggggagggagagcacagcgattatg

SEQ ID NO: 18142 - DNA, 80 bp, synthetic construct; identical to SEQ ID NO: 8475
  source 1..80: mol_type = other DNA

SEQ ID NO: 18143 - DNA, 80 bp, synthetic construct
  source 1..80: mol_type = other DNA
agctcaaccacagtagaatagggaaccagtcagagttgtgaggccctagctcttggatagcatttctagaaacaccctga

SEQ ID NO: 18144 - DNA, 80 bp, synthetic construct
  source 1..80: mol_type = other DNA
tgtgactcagcacattcctagctgtggtggctatggggaggggctacttctgcttaagaaaaggagtactctcaagtgta

SEQ ID NO: 18145 - DNA, 80 bp, synthetic construct
  source 1..80: mol_type = other DNA
aacctagcagcattcaatacaagctgactgaagaaccctggggcaggcagtacttgccacaggcctgagacagtactggg

SEQ ID NO: 18146 - DNA, 80 bp, synthetic construct; identical to SEQ ID NO: 8476
  source 1..80: mol_type = other DNA

SEQ ID NO: 18147 - DNA, 80 bp, synthetic construct
  source 1..80: mol_type = other DNA
agcacagagagagggagagactccatttgtttgggagaaagtaaaggaagagaacaagagtctctgcctggtaattcaga

SEQ ID NO: 18148 - DNA, 80 bp, synthetic construct
  source 1..80: mol_type = other DNA
cttcccaagaaggacaggtacaaacaggcccagactacaataaatacttatcttcaatgctcagatgctgatgaacatcc

SEQ ID NO: 18149 - DNA, 80 bp, synthetic construct
  source 1..80: mol_type = other DNA
aagaaggaatttacaatcctatttatgggaatcagagtcctaaaaatgtaacaaaacaattgaaataactaaaaggaatc

SEQ ID NO: 18150 - DNA, 80 bp, synthetic construct; identical to SEQ ID NO: 8477
  source 1..80: mol_type = other DNA

SEQ ID NO: 18151 - DNA, 80 bp, synthetic construct
  source 1..80: mol_type = other DNA
aagataaaggatcctaaaagcagcaagagaaaggaaataagtaacatataatggagctctaatattcctggcagcagact

SEQ ID NO: 18152 - DNA, 80 bp, synthetic construct
  source 1..80: mol_type = other DNA
aacaccaggcctatcttacaagaaatgataaagggagtactgcaatctgaaagaaaaaaacgttggccaggtacagtggc

SEQ ID NO: 18153 - DNA, 80 bp, synthetic construct
  source 1..80: mol_type = other DNA
agcagctagctactcaggaggctgaggtgggggggctcactttagcccagaaagtataggttgcagtgagctgagatcat

SEQ ID NO: 18154 - DNA, 80 bp, synthetic construct; identical to SEQ ID NO: 8478
  source 1..80: mol_type = other DNA

SEQ ID NO: 18155 - DNA, 80 bp, synthetic construct
  source 1..80: mol_type = other DNA
aagaatgggctagccggtgcggtggctcacgcctgtaatcccagcactttgggaggctgaggtggacggatcatgaagtc

SEQ ID NO: 18156 - DNA, 80 bp, synthetic construct
  source 1..80: mol_type = other DNA
agaccgtgccactgcactccagcctggtgacagagcaagactccatctcaaaaaaaaaaaaaaaaaaaaaaaaagaatgg

SEQ ID NO: 18157 - DNA, 80 bp, synthetic construct
  source 1..80: mol_type = other DNA
gcgtggtggtgcacatctgtgctcccagctaatcagaaggctgaggtaagaaggtcacttcagcccaggaggttggggtt

SEQ ID NO: 18158 - DNA, 80 bp, synthetic construct; identical to SEQ ID NO: 8479
  source 1..80: mol_type = other DNA

SEQ ID NO: 18159 - DNA, 80 bp, synthetic construct
  source 1..80: mol_type = other DNA
aaagaaatggaaaaagacactccataccaatagaaacctaaaaagagaagatgtagctatatatatgtaagacaaaaaat

SEQ ID NO: 18160 - DNA, 80 bp, synthetic construct
  source 1..80: mol_type = other DNA
ttcaacaccccactctcagcattggacagatcttccagacagaaaatcaacaaagaaaaattgaacttaatctgcacaat

SEQ ID NO: 18161 - DNA, 80 bp, synthetic construct
  source 1..80: mol_type = other DNA
atcttctctgaccacaatggaataaaactagaaatcaacaacaagaggaattttggaaactatacaaacacatggaaatt

SEQ ID NO: 18162 - DNA, 80 bp, synthetic construct; identical to SEQ ID NO: 8480
  source 1..80: mol_type = other DNA

SEQ ID NO: 18163 - DNA, 80 bp, synthetic construct
  source 1..80: mol_type = other DNA
agccgagatcgcaccactgcactccagcctgggcgacagagtgagactccgtctcataaaaaaaaaaaaaaaaaaaaaaa

SEQ ID NO: 18164 - DNA, 80 bp, synthetic construct
  source 1..80: mol_type = other DNA
atgaaactgaaagttggttttttgaaaagttaaacaaaattgacaaacctttagccagactaatgaagaaaaaaagagaa

SEQ ID NO: 18165 - DNA, 80 bp, synthetic construct
  source 1..80: mol_type = other DNA
aaccataatgaaatccaaaatgtgaacagactaataacaagtaacaagattgaagccataataaaaagtctcctagcaaa

SEQ ID NO: 18166 - DNA, 80 bp, synthetic construct
  source 1..80: mol_type = other DNA
tatgaggccagtgttaccttgatgccaaaaccagacaaagacacatcaaaaaaaaaaaactacaagccaatatccttgat

SEQ ID NO: 18167 - DNA, 80 bp, synthetic construct; identical to SEQ ID NO: 8481
  source 1..80: mol_type = other DNA

SEQ ID NO: 18168 - DNA, 80 bp, synthetic construct
  source 1..80: mol_type = other DNA
gtactggaagtcctatttagagcaatcagataagagaaaaaaataaagggcatccaaactgaaaagaaggaagtcaaatt

SEQ ID NO: 18169 - DNA, 80 bp, synthetic construct
  source 1..80: mol_type = other DNA
caagaaagtaatcccatttacaatagctacaaataaaataaaatacctaggaattaacttaatcaaaggagtaaaatatc

SEQ ID NO: 18170 - DNA, 80 bp, synthetic construct
  source 1..80: mol_type = other DNA
tggcattcatcataagaatagaaaaacaaattctaaactttatatggaacctcaaaagacccacaataggcaaagccatc

SEQ ID NO: 18171 - DNA, 80 bp, synthetic construct; identical to SEQ ID NO: 8482
  source 1..80: mol_type = other DNA

SEQ ID NO: 18172 - DNA, 80 bp, synthetic construct
  source 1..80: mol_type = other DNA
gtcgggaatttgataccagcctggccaacatgatgaaaccctatctctgctaaaaatacaaaacattagctgggcgtggt

SEQ ID NO: 18173 - DNA, 80 bp, synthetic construct
  source 1..80: mol_type = other DNA
tctactaaaagaacacattgaggaagatctccaggatatggaactggacaacagtttttttgagtaataccccatgagca

SEQ ID NO: 18174 - DNA, 80 bp, synthetic construct
  source 1..80: mol_type = other DNA
aatgtataaggaactgaaaaaaactctataaaaaactaataatccaatttaaaaatggccaaaatatctgaacagacatt

SEQ ID NO: 18175 - DNA, 80 bp, synthetic construct; identical to SEQ ID NO: 8483
  source 1..80: mol_type = other DNA

SEQ ID NO: 18176 - DNA, 80 bp, synthetic construct
  source 1..80: mol_type = other DNA
ctaagtgtccatcagcagatgaatggataaagaaaatatgctacttatacacaacagaatactattcagccacaaaaaaa

SEQ ID NO: 18177 - DNA, 80 bp, synthetic construct
  source 1..80: mol_type = other DNA
taggggccaggcgcagtggcttatgtctgtaactcccaacactttgggaagttgatgtgggagaatctcttgagtctgtc

SEQ ID NO: 18178 - DNA, 80 bp, synthetic construct
  source 1..80: mol_type = other DNA
acatggtgaaatcctgtctctactaaaaatacaaaaatttagccgggcggccgggcgcggtggctcacgcctgtaatccc

SEQ ID NO: 18179 - DNA, 80 bp, synthetic construct
  source 1..80: mol_type = other DNA
aatggcgtgaacccgggaggcagagcttgcagtgagccgagatcccgccactgcactccagcctgggcgacagagcgaga

SEQ ID NO: 18180 - DNA, 80 bp, synthetic construct; identical to SEQ ID NO: 8484
  source 1..80: mol_type = other DNA

SEQ ID NO: 18181 - DNA, 80 bp, synthetic construct
  source 1..80: mol_type = other DNA
cacaaagaaaggataaatgttgaccaggtgcggtggctcatgcctataatcccagcactttgggaggccgaggtgggcgg

SEQ ID NO: 18182 - DNA, 80 bp, synthetic construct
  source 1..80: mol_type = other DNA
ttgcggcaagccaagatcatgccattgcactccagcctgggcaatagagcaagactccctctcaaaaaataaataaataa

SEQ ID NO: 18183 - DNA, 80 bp, synthetic construct
  source 1..80: mol_type = other DNA
atttgtactaagaagagtgaatagagaagacaccctaccaaatggggcagtttcttaccaatctctgaaaatatgctatt

SEQ ID NO: 18184 - DNA, 80 bp, synthetic construct; identical to SEQ ID NO: 8485
  source 1..80: mol_type = other DNA

SEQ ID NO: 18185 - DNA, 80 bp, synthetic construct
  source 1..80: mol_type = other DNA
tatgcggctatccagttttcccagcctcatatgttgaaacatctatcctttcccgactgaattagtcttggcacatttgt

SEQ ID NO: 18186 - DNA, 80 bp, synthetic construct
  source 1..80: mol_type = other DNA
ttttttttaatttaatagagatgaggtctcactgtgttgcccaaactggttacaaactcctgatccttccactttggcct

SEQ ID NO: 18187 - DNA, 80 bp, synthetic construct; identical to SEQ ID NO: 8486
  source 1..80: mol_type = other DNA

SEQ ID NO: 18188 - DNA, 80 bp, synthetic construct
  source 1..80: mol_type = other DNA
atggcaaaaccagtctctacaaaatatacaaaaattagctggtcttggtggtgcacgcctgtaatcccagctactcagga

SEQ ID NO: 18189 - DNA, 80 bp, synthetic construct
  source 1..80: mol_type = other DNA
tgcatattcgtttacattttcttcagtctctttccgcaatgttttgaagtttgcagtacacaaatcttgcagctccttgg

SEQ ID NO: 18190 - DNA, 80 bp, synthetic construct
  source 1..80: mol_type = other DNA
ttgagaccagtctgggcaaaatagtaacacaccttctccacaaaaaattaaaaaatgagctgagcatggtggcacatgct

SEQ ID NO: 18191 - DNA, 80 bp, synthetic construct
  source 1..80: mol_type = other DNA
taaataagaaataaaatgcaactgatttttctgtgttgattttgtatgcctctattttgctgaatttatttagtggctct

SEQ ID NO: 18192 - DNA, 80 bp, synthetic construct; identical to SEQ ID NO: 8487
  source 1..80: mol_type = other DNA

SEQ ID NO: 18193 - DNA, 80 bp, synthetic construct
  source 1..80: mol_type = other DNA
atgtacatgagtcataaatgcaaagaaggcatggggtgatttgaggtaaatatgcaaagtcaccccttatatactgaaca

SEQ ID NO: 18194 - DNA, 80 bp, synthetic construct
  source 1..80: mol_type = other DNA
ttctctttgatgcctaatctcctttatcttcagccagcaaataaatctctagtgctatcaggaaatactgattttctcac

SEQ ID NO: 18195 - DNA, 80 bp, synthetic construct; identical to SEQ ID NO: 8488
  source 1..80: mol_type = other DNA

SEQ ID NO: 18196 - DNA, 80 bp, synthetic construct
  source 1..80: mol_type = other DNA
tgataagccaaggttactaagtagaggatttagggactccaagacttttgtggaaatattgtttctaaaatatattttaa

SEQ ID NO: 18197 - DNA, 80 bp, synthetic construct
  source 1..80: mol_type = other DNA
taaatattgcacgtgcccttttctaaacgttcaggatagaggaccaatttttatccagattatataaagaaccattacaa

SEQ ID NO: 18198 - DNA, 80 bp, synthetic construct
  source 1..80: mol_type = other DNA
actaaaaatacacacacaaaaaaaaattagccaggcattgtggagggtgcctgtagtcccagctattcgggaggctgagg

SEQ ID NO: 18199 - DNA, 80 bp, synthetic construct
  source 1..80: mol_type = other DNA
aagatgcttggcatcattagccattaggtaaatacaaattcaaaccataatgagataccacttcatacccactaaaatag

SEQ ID NO: 18200 - DNA, 80 bp, synthetic construct; identical to SEQ ID NO: 8489
  source 1..80: mol_type = other DNA

SEQ ID NO: 18201 - DNA, 80 bp, synthetic construct
  source 1..80: mol_type = other DNA
atgctaagtataataaaagtacaaagcaattataggattccatttaatgaaacacgcagaaaggcaaatctttatagcta

SEQ ID NO: 18202 - DNA, 80 bp, synthetic construct
  source 1..80: mol_type = other DNA
ggcatggtggcgcatgcctgtagccccagctacccaggaagctgaggagactgagacatgagaatcacttgaactcggga

SEQ ID NO: 18203 - DNA, 80 bp, synthetic construct; identical to SEQ ID NO: 8490
  source 1..80: mol_type = other DNA

SEQ ID NO: 18204 - DNA, 80 bp, synthetic construct
  source 1..80: mol_type = other DNA
agtgcagtggcgcaatctcggctcactacaagctccaccttccaggttcaagtgattctcctgcctcagcctcccgagta

SEQ ID NO: 18205 - DNA, 80 bp, synthetic construct
  source 1..80: mol_type = other DNA
ctgtctcccaatgtgctgggattacaggcatgagccactatgcctggccttttttttttttaaacggagtcttgctctgt

SEQ ID NO: 18206 - DNA, 80 bp, synthetic construct
  source 1..80: mol_type = other DNA
gccatgttggccaggctggtctcaaactcctgacctcaggtgatccacccgcctcagcctcccaaagtgctgggattaca

SEQ ID NO: 18207 - DNA, 80 bp, synthetic construct
  source 1..80: mol_type = other DNA
aagtttaacatattgggaacatatatgttaacttgtgctatttttattggtatctcagaataaatcttcctttgccatgt

SEQ ID NO: 18208 - DNA, 80 bp, synthetic construct; identical to SEQ ID NO: 8491
  source 1..80: mol_type = other DNA

SEQ ID NO: 18209 - DNA, 80 bp, synthetic construct
  source 1..80: mol_type = other DNA
gctagtaggctgattagaaacaaatttagttgaaaagaataccttaatatcctggaaggctgccatgaatgtagatggga

SEQ ID NO: 18210 - DNA, 80 bp, synthetic construct
  source 1..80: mol_type = other DNA
cacttcctggattcaagcgattctcatgcctcagcctcccgagtagctgggactacaggcatctgccaccacacctggct

SEQ ID NO: 18211 - DNA, 80 bp, synthetic construct; identical to SEQ ID NO: 8492
  source 1..80: mol_type = other DNA

SEQ ID NO: 18212 - DNA, 80 bp, synthetic construct
  source 1..80: mol_type = other DNA
agctaccctggactgtgaaatgactttgagaatggaagtcgcatatggcaaagcaacaagacagaaggagtgtgggtgcg

SEQ ID NO: 18213 - DNA, 80 bp, synthetic construct
  source 1..80: mol_type = other DNA
gtcccagctactcgggaggctgaggcaggagaatggcgtgaacctgggaggcggagcttgcagtgagccgagatctggcc

SEQ ID NO: 18214 - DNA, 80 bp, synthetic construct
  source 1..80: mol_type = other DNA
ctatttttttcttccactgtcttacagctaaacttgatcctgagataggagtggttcagacagagctgtaggcacgaagg

SEQ ID NO: 18215 - DNA, 80 bp, synthetic construct; identical to SEQ ID NO: 8493
  source 1..80: mol_type = other DNA

SEQ ID NO: 18216 - DNA, 80 bp, synthetic construct
  source 1..80: mol_type = other DNA
tataatcccagtgccttaggaggctaaggtgggaggatcgcttgaggccaggagttcaaggctgcagtgagctgtgatgg

SEQ ID NO: 18217 - DNA, 80 bp, synthetic construct
  source 1..80: mol_type = other DNA
gaataaagaatgtgttaacttagaagggtttgttccgggctatccagaaaacagatagggtccatataatatgtggtcgg

SEQ ID NO: 18218 - DNA, 80 bp, synthetic construct
  source 1..80: mol_type = other DNA
cagcataaggcagagtgagagagcaagacaacttttagagcaggagtaaaagtttatcaaaaagctttagggcagtaatg

SEQ ID NO: 18219 - DNA, 80 bp, synthetic construct
  source 1..80: mol_type = other DNA
agtggcctgtcagcacttgggtggggccacatgcacagtgtgtttactgaagttgtatgcatgctcaactgaggtgtttt

SEQ ID NO: 18220 - DNA, 80 bp, synthetic construct; identical to SEQ ID NO: 8494
  source 1..80: mol_type = other DNA

SEQ ID NO: 18221 - DNA, 80 bp, synthetic construct
  source 1..80: mol_type = other DNA
ctctgcattggagcttgcctctgggttttactaacttggagggtgactttgactaaatcagtcatttaaccttcctaatc

SEQ ID NO: 18222 - DNA, 80 bp, synthetic construct
  source 1..80: mol_type = other DNA
actgaatcagggcaatataaaatttgcaggcataaggaagtttttctgttatgagtggagacagcttcacacaaggattt

SEQ ID NO: 18223 - DNA, 80 bp, synthetic construct; identical to SEQ ID NO: 8495
  source 1..80: mol_type = other DNA

SEQ ID NO: 18224 - DNA, 80 bp, synthetic construct
  source 1..80: mol_type = other DNA
ccttaacaagacctgcctttaagataaactatcttatcagaggctaacctattgaggttttatgggcacttaaatgacct

SEQ ID NO: 18225 - DNA, 80 bp, synthetic construct
  source 1..80: mol_type = other DNA
aaaaccaagacctaatcataggactgtagaatattaccccctacccaccccacctcaccaccacatcaggaaaggcctac

SEQ ID NO: 18226 - DNA, 80 bp, synthetic construct
  source 1..80: mol_type = other DNA
aaataactatgattaatatgataaaagctctaatggggccaggcatagtagctcccaccatattgggagagtgaggtgga

SEQ ID NO: 18227 - DNA, 80 bp, synthetic construct; identical to SEQ ID NO: 8496
  source 1..80: mol_type = other DNA

SEQ ID NO: 18228 - DNA, 80 bp, synthetic construct
  source 1..80: mol_type = other DNA
aagaccctgtctcaaaaaataaataagaggccaggagttcaagaccagcctggccagcatggtgaaaccgtctctactaa

SEQ ID NO: 18229 - DNA, 80 bp, synthetic construct
  source 1..80: mol_type = other DNA
aaaaaaaaaaaaaaaaatcgtttgtttccagctgggcatggtggctcatgcctgcactttgggaggccgaggtgggtgga

SEQ ID NO: 18230 - DNA, 80 bp, synthetic construct
  source 1..80: mol_type = other DNA
ttgcagtgagttgagattgtgccactgcacttcagcctgggtgacagagcaagactccatctccaaaaataaaaataaat

SEQ ID NO: 18231 - DNA, 80 bp, synthetic construct
  source 1..80: mol_type = other DNA
gtagtcccaagtgctcagaaagctgaggcaggaggatcacttgagcccaggagtttgaggctgcagtgagctatgatcat

SEQ ID NO: 18232 - DNA, 80 bp, synthetic construct; identical to SEQ ID NO: 8497
  source 1..80: mol_type = other DNA

SEQ ID NO: 18233 - DNA, 80 bp, synthetic construct
  source 1..80: mol_type = other DNA
tgaaaagcaaagagaaaaaagacccaaaaaagggggagcaaaatattcaagaactgtggggcaattataaaaaatacaga

SEQ ID NO: 18234 - DNA, 80 bp, synthetic construct
  source 1..80: mol_type = other DNA
gtgattctcctgcctcagccaccctagtagctgggattacaggctcctgccaccacacccaactaatttttgcattttta

SEQ ID NO: 18235 - DNA, 80 bp, synthetic construct
  source 1..80: mol_type = other DNA
caaattaatgttagataccaaactacagattcaggaaactcgaagaataccaggaagaataaatcctaagtaaattacac

SEQ ID NO: 18236 - DNA, 80 bp, synthetic construct; identical to SEQ ID NO: 8498
  source 1..80: mol_type = other DNA

SEQ ID NO: 18237 - DNA, 80 bp, synthetic construct
  source 1..80: mol_type = other DNA
gaaatcgagactatcctggcgaacacagtgaaaccccgtctctactaaaaatacaaaaaagattagccgggcgtggtcgt

SEQ ID NO: 18238 - DNA, 80 bp, synthetic construct
  source 1..80: mol_type = other DNA
tttttaaatagaaggcccggcatggtggctcatgcctgtaatcccagcaatttgggaggctgaagtgggcagatcacttg

SEQ ID NO: 18239 - DNA, 80 bp, synthetic construct
  source 1..80: mol_type = other DNA
gtgagccctgatcatgcctgtgcactccaacctgggcaacagactgagactctgtctcaaaaaacaaacaaacaaaaaaa

SEQ ID NO: 18240 - DNA, 80 bp, synthetic construct; identical to SEQ ID NO: 8499
  source 1..80: mol_type = other DNA

SEQ ID NO: 18241 - DNA, 80 bp, synthetic construct
  source 1..80: mol_type = other DNA
gatccacctgcctcagcctcccaaagtgctaggattacaggtgtgagccaccgtgcccagcctatttttcttattcttaa

SEQ ID NO: 18242 - DNA, 80 bp, synthetic construct
  source 1..80: mol_type = other DNA
tagaaaaaaaagacaaatccaaaatcaataatgtgtactaccaccttggaaaactagaaatagaagagtaaattaaagac

SEQ ID NO: 18243 - DNA, 80 bp, synthetic construct; identical to SEQ ID NO: 8500
  source 1..80: mol_type = other DNA

SEQ ID NO: 18244 - DNA, 80 bp, synthetic construct
  source 1..80: mol_type = other DNA
acagaaagtccctagccccagatagattcactggcaaattatatcaaacattgaaagaagcagctgtacagttctttgta

SEQ ID NO: 18245 - DNA, 80 bp, synthetic construct
  source 1..80: mol_type = other DNA
agattagcacggcgccctacacaaagataatacacaaatttgtgaagtgttccctatttaataaaaacatattttttaaa

SEQ ID NO: 18246 - DNA, 80 bp, synthetic construct
  source 1..80: mol_type = other DNA
aatgcagaatcttgtgcctcagcataagcctacactcaaaacctgcaagttcatcaagatccacaagtcattcatatgta

SEQ ID NO: 18247 - DNA, 80 bp, synthetic construct; identical to SEQ ID NO: 8501
  source 1..80: mol_type = other DNA

SEQ ID NO: 18248 - DNA, 80 bp, synthetic construct
  source 1..80: mol_type = other DNA
agaccaaccagtgcaacataggaggaccccatctctacaattatttatatatatatatatatatatatgtatattttaat

SEQ ID NO: 18249 - DNA, 80 bp, synthetic construct
  source 1..80: mol_type = other DNA
agaaaggggaaacagagactctaagcaaagtgagagttctgctagctggtctctcacctcacagattgaatcacaggtta

SEQ ID NO: 18250 - DNA, 80 bp, synthetic construct
  source 1..80: mol_type = other DNA
cttggctgtctcagtagtacacacctgtaatcctagctactcaggaggctaaagcaggaggatcactggagcccaggagt

SEQ ID NO: 18251 - DNA, 80 bp, synthetic construct
  source 1..80: mol_type = other DNA
aatatttgtttcagtagtttagtagcacagaactttctgtactttaccttttctctttcccttccacccaaattctttac

SEQ ID NO: 18252 - DNA, 80 bp, synthetic construct; identical to SEQ ID NO: 8502
  source 1..80: mol_type = other DNA

SEQ ID NO: 18253 - DNA, 80 bp, synthetic construct
  source 1..80: mol_type = other DNA
ccccagcaaactgacagtcatggctggtttccatagttaacaacatgtagaactatttcttcaaagaggtttaattagaa

SEQ ID NO: 18254 - DNA, 80 bp, synthetic construct
  source 1..80: mol_type = other DNA
ctaaaaatacaaaaattagctgggcgtggtggtgggcgcctgtaatcccagctacttgggaggctgaggcaggagaatcg

SEQ ID NO: 18255 - DNA, 80 bp, synthetic construct
  source 1..80: mol_type = other DNA
ctacatttttctgatattatcggaataaaattattccagtggcacaatattttttttttacagattaccctgaaatactt

SEQ ID NO: 18256 - DNA, 80 bp, synthetic construct; identical to SEQ ID NO: 8503
  source 1..80: mol_type = other DNA

SEQ ID NO: 18257 - DNA, 80 bp, synthetic construct
  source 1..80: mol_type = other DNA
actcgggaggctgaggcaggagagtcgcttgaacctgggaggtacaggttgcagtgagccgagatcgtgccactgcactc

SEQ ID NO: 18258 - DNA, 80 bp, synthetic construct
  source 1..80: mol_type = other DNA
atataaccaagagcataggcataaaatactcactcacagttgccaataattccaagtgtatgcacaagttttgcacatct

SEQ ID NO: 18259 - DNA, 80 bp, synthetic construct
  source 1..80: mol_type = other DNA
ataagaagactggttgcttttggcagaagggaatttgtcattctctccatcagagaaggattaattgtattgttttggag

SEQ ID NO: 18260 - DNA, 80 bp, synthetic construct; identical to SEQ ID NO: 8504
  source 1..80: mol_type = other DNA

SEQ ID NO: 18261 - DNA, 80 bp, synthetic construct
  source 1..80: mol_type = other DNA
ctgtagttttatttccttcaaattccactggcagagaacttcacagtgtggtgaaatcactaaagatgttagtacttggg

SEQ ID NO: 18262 - DNA, 80 bp, synthetic construct
  source 1..80: mol_type = other DNA
tctgaaaaagtagggatctaaacttttcttttcacactacctttctatatacacacagactccaactaacttggcattaa

SEQ ID NO: 18263 - DNA, 80 bp, synthetic construct; identical to SEQ ID NO: 8505
  source 1..80: mol_type = other DNA

SEQ ID NO: 18264 - DNA, 80 bp, synthetic construct
  source 1..80: mol_type = other DNA
acgccaccacacccgactaatttttgtatttttagtagagatggggtttccccatgttggccaggatggtctcgatctct

SEQ ID NO: 18265 - DNA, 80 bp, synthetic construct
  source 1..80: mol_type = other DNA
ccctgtctccagtataatctttattctagaactatcaaactctttcttcatattgttgcctgttgaaaatctgctagttc

SEQ ID NO: 18266 - DNA, 80 bp, synthetic construct
  source 1..80: mol_type = other DNA
aaactcctgacccttagaagcacggccaccacatcctgatactacacagcctttttccactctttttcttctttttttaa

SEQ ID NO: 18267 - DNA, 80 bp, synthetic construct; identical to SEQ ID NO: 8506
  source 1..80: mol_type = other DNA

SEQ ID NO: 18268 - DNA, 80 bp, synthetic construct
  source 1..80: mol_type = other DNA
aaatccaatgtattaattttaatacctagatccaggcccaccttctccatgaagtgtttcttcactaccactctagccca

SEQ ID NO: 18269 - DNA, 80 bp, synthetic construct
  source 1..80: mol_type = other DNA
tacaatcctttagctaacagaaaagttccccaagtccccacccgacccagaagcccagccagcttcatctctcaccacca

SEQ ID NO: 18270 - DNA, 80 bp, synthetic construct
  source 1..80: mol_type = other DNA
tttatgcataacaagtatttactgctttacttgagacccctgccacactcttcataatccaatggagaaatctctagaac

SEQ ID NO: 18271 - DNA, 80 bp, synthetic construct; identical to SEQ ID NO: 8507
  source 1..80: mol_type = other DNA

SEQ ID NO: 18272 - DNA, 80 bp, synthetic construct
  source 1..80: mol_type = other DNA
gctggagtgcagtggcataatctcagctcactgcagcctcgaactcctgcattcaagcagtcctcctgcctcagcctctc

SEQ ID NO: 18273 - DNA, 80 bp, synthetic construct
  source 1..80: mol_type = other DNA
caccgcacccaacctcattttgtttttttcaatatccctgtcagggcacaatgaaggatatttttgttggctgaaaagtc

SEQ ID NO: 18274 - DNA, 80 bp, synthetic construct
  source 1..80: mol_type = other DNA
ggtgtagcaaatttcagtattcacttccaaggaatctctcaataatggtttggtccaatttacaatcttagttcattaaa

SEQ ID NO: 18275 - DNA, 80 bp, synthetic construct; identical to SEQ ID NO: 8508
  source 1..80: mol_type = other DNA

SEQ ID NO: 18276 - DNA, 80 bp, synthetic construct
  source 1..80: mol_type = other DNA
aaaccaaaattacagagtctcagaaggaaagaaagcaagtgtgtgacccacccttatcagttaactgataactggggaca

SEQ ID NO: 18277 - DNA, 80 bp, synthetic construct
  source 1..80: mol_type = other DNA
aacccagacaaagcaaataaattgaatccataaatatggccaacctaacttatttcaagtgtcccactattttctccaaa

SEQ ID NO: 18278 - DNA, 80 bp, synthetic construct
  source 1..80: mol_type = other DNA
agactgtctcaaaaaaaacaaaacaaaacagttcataccttggccaggtgcagtggtttaagcctataatctcagcacct

SEQ ID NO: 18279 - DNA, 80 bp, synthetic construct
  source 1..80: mol_type = other DNA
aaccagggaggcagagcttgcagtgagcagagatggcaccactgcactccagcctgggcgacagagcgagactccatctc

SEQ ID NO: 18280 - DNA, 80 bp, synthetic construct; identical to SEQ ID NO: 8509
  source 1..80: mol_type = other DNA

SEQ ID NO: 18281 - DNA, 80 bp, synthetic construct
  source 1..80: mol_type = other DNA
tctataagtaaaaaataaaaattttaagtgaaagaaaatttttcagtttgattagcaggggttgtgttggtgttggcaat

SEQ ID NO: 18282 - DNA, 80 bp, synthetic construct
  source 1..80: mol_type = other DNA
ctgctattcaccattttccccagttgtcagttatttttgactgaatacgttttttgcttttgtaccctagtggtagatca

SEQ ID NO: 18283 - DNA, 80 bp, synthetic construct
  source 1..80: mol_type = other DNA
attaggttaaagatgtcagtaatgtaagtaatcctacacacacacacacacacacacacacacacacacacatatacata

SEQ ID NO: 18284 - DNA, 80 bp, synthetic construct; identical to SEQ ID NO: 8510
  source 1..80: mol_type = other DNA

SEQ ID NO: 18285 - DNA, 80 bp, synthetic construct
  source 1..80: mol_type = other DNA
ttgcccaggctggagtgcagtggtacaatcatagctcactgcagcctcaaactcctaggttcaagcaattctcccacctc

SEQ ID NO: 18286 - DNA, 80 bp, synthetic construct
  source 1..80: mol_type = other DNA
catttttttcaaggaataacagaagccagagttgattttatttgcatttgttaagaagaggcgcagatgccatgttctgc

SEQ ID NO: 18287 - DNA, 80 bp, synthetic construct
  source 1..80: mol_type = other DNA
aaatatatatatatatgtaaaagaagaagagagagtagtttggctaattaaggagaggatgtgctaaacaggggacttaa

SEQ ID NO: 18288 - DNA, 80 bp, synthetic construct; identical to SEQ ID NO: 8511
  source 1..80: mol_type = other DNA

SEQ ID NO: 18289 - DNA, 80 bp, synthetic construct
  source 1..80: mol_type = other DNA
tgtattttaagtagagacggggtttcactgtgttagccaggatgggctcgatctcctgaccacgtgatccgcttaccttt

SEQ ID NO: 18290 - DNA, 80 bp, synthetic construct
  source 1..80: mol_type = other DNA
aaatagaactagagatgtgggccagaggggaaagtctttctcaagcctctcttccagataaaatcaagtttggccatttt

SEQ ID NO: 18291 - DNA, 80 bp, synthetic construct
  source 1..80: mol_type = other DNA
ctatgtcccaatttacacataccgcccccaaataattattagtagtggcctcttcctctctcaaaagtatgattgcccta

SEQ ID NO: 18292 - DNA, 80 bp, synthetic construct; identical to SEQ ID NO: 8512
  source 1..80: mol_type = other DNA

SEQ ID NO: 18293 - DNA, 80 bp, synthetic construct
  source 1..80: mol_type = other DNA
ctgcgttacctatgtacttgcaggtcatgccatagaacttgtaagcatagtctatctttccacctaaacccctctaataa

SEQ ID NO: 18294 - DNA, 80 bp, synthetic construct
  source 1..80: mol_type = other DNA
catgatcattataattacatccttgcaaatgccctcagctcctctgctccccttttgctttgtcactcgcttggcaaaac

SEQ ID NO: 18295 - DNA, 80 bp, synthetic construct
  source 1..80: mol_type = other DNA
gagtgcagtggcgagatcttagcccacttcagcctttgaactctggggcccaaatgatcttcccacctcagcctcctgag

SEQ ID NO: 18296 - DNA, 80 bp, synthetic construct; identical to SEQ ID NO: 8513
  source 1..80: mol_type = other DNA

SEQ ID NO: 18297 - DNA, 80 bp, synthetic construct
  source 1..80: mol_type = other DNA
atttcaacaccgaaacattttcatctttcccctcccatagtcattctcagatgataaccttatgtcctacttgactgaga

SEQ ID NO: 18298 - DNA, 80 bp, synthetic construct
  source 1..80: mol_type = other DNA
taaggcaatgtctctactttgcatgaagtctcatcccctttttcctaactcaataacagcacttttcccctttctcttct

SEQ ID NO: 18299 - DNA, 80 bp, synthetic construct
  source 1..80: mol_type = other DNA
ttggctcacttcaacctccgcctcccggattcaagcgattcccctgcctcagcctccggagtagctgggactataggcac

SEQ ID NO: 18300 - DNA, 80 bp, synthetic construct; identical to SEQ ID NO: 8514
  source 1..80: mol_type = other DNA

SEQ ID NO: 18301 - DNA, 80 bp, synthetic construct
  source 1..80: mol_type = other DNA
gcccactgttatctatttcccccatcctcaaaaatattcctcttgattccacatcttccaactactgctctatcgttttg

SEQ ID NO: 18302 - DNA, 80 bp, synthetic construct
  source 1..80: mol_type = other DNA
gttttagagtggtttgttaggtagggatagataactggaacaatatgccagagagagcagtgcaggtcttctctaggaga

SEQ ID NO: 18303 - DNA, 80 bp, synthetic construct; identical to SEQ ID NO: 8515
  source 1..80: mol_type = other DNA

SEQ ID NO: 18304 - DNA, 80 bp, synthetic construct
  source 1..80: mol_type = other DNA
tgcaacatggtgcacacctgtagtcccagctatatgggaggctgaggcaggaggatcacttgagcccaggacgttgaggt

SEQ ID NO: 18305 - DNA, 80 bp, synthetic construct
  source 1..80: mol_type = other DNA
tggggataaagtataatattcaagccaaattaattgacctgagtgtactcccccaggatttagaatatagcatgttggct

SEQ ID NO: 18306 - DNA, 80 bp, synthetic construct
  source 1..80: mol_type = other DNA
gagttacaaaattcaaggaaataggactcggtccattatgttcaatcttctcagccatttactaacttgactcttttggg

SEQ ID NO: 18307 - DNA, 80 bp, synthetic construct
  source 1..80: mol_type = other DNA
gtcaaaggccaagtagtaacttcactgttagggacaacatggtgcaactaccacagtaaaccacagagatggaatagtaa

SEQ ID NO: 18308 - DNA, 80 bp, synthetic construct; identical to SEQ ID NO: 8516
  source 1..80: mol_type = other DNA

SEQ ID NO: 18309 - DNA, 80 bp, synthetic construct
  source 1..80: mol_type = other DNA
gaaagctcttccatccactgatgaatatcatgaatcttccttcaaaccagtgtttctctcaaccttggccccactgacat

SEQ ID NO: 18310 - DNA, 80 bp, synthetic construct
  source 1..80: mol_type = other DNA
tggacagaaccttgagcgatatatctggctgtttacttcatgcttaaggcacaaagatctctagtgacttatgagccgtg

SEQ ID NO: 18311 - DNA, 80 bp, synthetic construct
  source 1..80: mol_type = other DNA
tcaaaaatcaaatgatcaagatgatctattttgtgaatgtcagtaagcctctttctccaggtatcccagtgcttgttcag

SEQ ID NO: 18312 - DNA, 80 bp, synthetic construct; identical to SEQ ID NO: 8517
  source 1..80: mol_type = other DNA

SEQ ID NO: 18313 - DNA, 80 bp, synthetic construct
  source 1..80: mol_type = other DNA
gaccagcctgaccaaaatggcgaaacccccctctctactaaaaatacaaaaattagctgggcgtggtggtgggcacctgt

SEQ ID NO: 18314 - DNA, 80 bp, synthetic construct
  source 1..80: mol_type = other DNA
cctgcagagcttctactaataccactgttatgaagttacagaatgccttatctgttgccttagtattccatataatatcg

SEQ ID NO: 18315 - DNA, 80 bp, synthetic construct
  source 1..80: mol_type = other DNA
ttgtcctacaggaaggggaagataccttaaaccagcagtcaatatttgcacataacaagaatgcatggaggccaggcgcg

SEQ ID NO: 18316 - DNA, 80 bp, synthetic construct
  source 1..80: mol_type = other DNA
tactcaggaggctcaggagggagaattgcttgaacccagtaggtggaggttgcagtgagccaagatcacgccacagcact

SEQ ID NO: 18317 - DNA, 80 bp, synthetic construct; identical to SEQ ID NO: 8518
  source 1..80: mol_type = other DNA

SEQ ID NO: 18318 - DNA, 80 bp, synthetic construct
  source 1..80: mol_type = other DNA
tagacatgttcctgcctccgttccctctacctgaaatactttcctcccagatgatatcttcattccctctcagtctttct

SEQ ID NO: 18319 - DNA, 80 bp, synthetic construct
  source 1..80: mol_type = other DNA
attatttgtcctcctccgtctagaaagtgagcttcataacagcaggtatttctatttcattcactgttctatccctagtg

SEQ ID NO: 18320 - DNA, 80 bp, synthetic construct; identical to SEQ ID NO: 8519
  source 1..80: mol_type = other DNA

SEQ ID NO: 18321 - DNA, 80 bp, synthetic construct
  source 1..80: mol_type = other DNA
catttcttgattgacttgaatgactatcatgaaagttctcagagaagagtagacaatatctctagtctattatctttacc

SEQ ID NO: 18322 - DNA, 80 bp, synthetic construct
  source 1..80: mol_type = other DNA
gaaatacgggaactgctgaggtcctgggaattgggaacctaagcagggagttgatgtgaaaagggaaatattttacacag

SEQ ID NO: 18323 - DNA, 80 bp, synthetic construct
  source 1..80: mol_type = other DNA
tttttctcagtacactgttccgcaagtattcactgaatagctaccatgtgacaaaaacgaagtgttaggatacagctttg

SEQ ID NO: 18324 - DNA, 80 bp, synthetic construct; identical to SEQ ID NO: 8520
  source 1..80: mol_type = other DNA

SEQ ID NO: 18325 - DNA, 80 bp, synthetic construct
  source 1..80: mol_type = other DNA
cagctgggactacaggcgcacagtgccacgcctggctatttttttttttttttgtatttttagtagagatggggtttcac

SEQ ID NO: 18326 - DNA, 80 bp, synthetic construct
  source 1..80: mol_type = other DNA
acttctttcatcttccaaactgaaacttcttgcccattaaacaactcttcactccaccctgtcctcagtggcaaccattc

SEQ ID NO: 18327 - DNA, 80 bp, synthetic construct; identical to SEQ ID NO: 8521
  source 1..80: mol_type = other DNA

SEQ ID NO: 18328 - DNA, 80 bp, synthetic construct
  source 1..80: mol_type = other DNA
aaaatatctaaaatgtgtttattggggtggcttcccatttatcttgattcaaagtgcttttactgctgcttcctcctgaa

SEQ ID NO: 18329 - DNA, 80 bp, synthetic construct
  source 1..80: mol_type = other DNA
tcatgcgggtggttaccctcatgctgttcttgtgatggtaagttctcatgagatctgatggttttataaggcactttccc

SEQ ID NO: 18330 - DNA, 80 bp, synthetic construct
  source 1..80: mol_type = other DNA
tgggtacagtggctcaagcctgtaatccaagcactttgggaggccaaggtgggcggatcacttgaggtcaggagttcaag

SEQ ID NO: 18331 - DNA, 80 bp, synthetic construct
  source 1..80: mol_type = other DNA
ctgcactccggcctaggcaagaatgaaactgtgtctcaaaataaatacataaataaaataaaaataaactactcagtctc

SEQ ID NO: 18332 - DNA, 80 bp, synthetic construct; identical to SEQ ID NO: 8522
  source 1..80: mol_type = other DNA

SEQ ID NO: 18333 - DNA, 80 bp, synthetic construct
  source 1..80: mol_type = other DNA
agagatctgtggaactttgaacttgagagggatgatttagggtatctggtggaagaaatttttaagcagcaaagcattca

SEQ ID NO: 18334 - DNA, 80 bp, synthetic construct
  source 1..80: mol_type = other DNA
ggacatgtcggagaccttcacagcagcccaacccatcacagtccctgaagactaggagggaaaagtggtttcctgggcta

SEQ ID NO: 18335 - DNA, 80 bp, synthetic construct
  source 1..80: mol_type = other DNA
gtgtgcagaagtcaagaattgagtctgggaacctccgcctacattttggaggaaatgtatggaagtatggaaatgcctgg

SEQ ID NO: 18336 - DNA, 80 bp, synthetic construct; identical to SEQ ID NO: 8523
  source 1..80: mol_type = other DNA

SEQ ID NO: 18337 - DNA, 80 bp, synthetic construct
  source 1..80: mol_type = other DNA
tacaggcagcatggaagggaaatgtggggttggagcccccacacagagtccccagtggggcaccgcctagtggagctatg

SEQ ID NO: 18338 - DNA, 80 bp, synthetic construct
  source 1..80: mol_type = other DNA
tgggaacctacctcttccatcagggtgacttggatatgagacatgaagtcaaaggagatcattttggaatgttaaggttt

SEQ ID NO: 18339 - DNA, 80 bp, synthetic construct
  source 1..80: mol_type = other DNA
agggacttgccttttctcagataagacttaggacttggacttttgggttaatgctggaatgagttaagactttgggggac

SEQ ID NO: 18340 - DNA, 80 bp, synthetic construct; identical to SEQ ID NO: 8524
  source 1..80: mol_type = other DNA

SEQ ID NO: 18341 - DNA, 80 bp, synthetic construct
  source 1..80: mol_type = other DNA
gaacacacaccactactgtgtgtgcatgattaatgatcatgatgattacagcatcctgggcatttcacatccctgaagta

SEQ ID NO: 18342 - DNA, 80 bp, synthetic construct
  source 1..80: mol_type = other DNA
gcattttttttttttttcaaataatggccatccttattggggtaaagtggtatctcattatgggttgacctgtatttccc

SEQ ID NO: 18343 - DNA, 80 bp, synthetic construct; identical to SEQ ID NO: 8525
  source 1..80: mol_type = other DNA

SEQ ID NO: 18344 - DNA, 80 bp, synthetic construct
  source 1..80: mol_type = other DNA
atcacctgagctggggaagttgaggctgaaatgagccgagatggtgtcactgcaccccagcctgggcaatgggagtaaga

SEQ ID NO: 18345 - DNA, 80 bp, synthetic construct
  source 1..80: mol_type = other DNA
caagcaatcctcctgcttcagcctctagaatagctgggactataggtgcgcaccaccacactgggccaaaagtgtcctcc

SEQ ID NO: 18346 - DNA, 80 bp, synthetic construct
  source 1..80: mol_type = other DNA
ttttagctctttgtgtctttgataatttttgtatagggtgtaaggtaagggtccaatgttattcttttgcatgtggctat

SEQ ID NO: 18347 - DNA, 80 bp, synthetic construct
  source 1..80: mol_type = other DNA
tgttttgattactgtaacttcattgagggtagagttttaaatcagaggtcacagcaagttcaaagagttacagcaggggt

SEQ ID NO: 18348 - DNA, 80 bp, synthetic construct; identical to SEQ ID NO: 8526
  source 1..80: mol_type = other DNA

SEQ ID NO: 18349 - DNA, 80 bp, synthetic construct
  source 1..80: mol_type = other DNA
attttcaaaggcttggaggaaggcaatgtgataagaacaatggtgagagtgaagcatgatgaggttggagaaaggggcaa

SEQ ID NO: 18350 - DNA, 80 bp, synthetic construct
  source 1..80: mol_type = other DNA
agcataagctgagcattttaatatggtatcatatgagtcatgacaggctcctgatgggatctctgctcagtgcttttccc

SEQ ID NO: 18351 - DNA, 80 bp, synthetic construct
  source 1..80: mol_type = other DNA
tacatggtgacagggaagacagaaaatgagaggcaagtgaaaggggtttccccttataaaaccatcagatcttgtgagac

SEQ ID NO: 18352 - DNA, 80 bp, synthetic construct; identical to SEQ ID NO: 8527
  source 1..80: mol_type = other DNA

SEQ ID NO: 18353 - DNA, 80 bp, synthetic construct
  source 1..80: mol_type = other DNA
gactaaacctggggcaacacctacaaccgaaaagaacatttgctattggtgtgaatcttgttgttggtgtttctattgta

SEQ ID NO: 18354 - DNA, 80 bp, synthetic construct
  source 1..80: mol_type = other DNA
ctaactttcccaggatctcatagcttgcacatgtgatagcattaatattcaaaccaaggaattctggcatgataatctat

SEQ ID NO: 18355 - DNA, 80 bp, synthetic construct
  source 1..80: mol_type = other DNA
aaagaaaagccatggctcaagcctgtaatcccagcactctgggagactgaggtgggagaatcatttgagcccaggagttt

SEQ ID NO: 18356 - DNA, 80 bp, synthetic construct; identical to SEQ ID NO: 8528
  source 1..80: mol_type = other DNA

SEQ ID NO: 18357 - DNA, 80 bp, synthetic construct
  source 1..80: mol_type = other DNA
ctactaaaaatacaaaaataatccaggcctggtggcaggcacctgtaattccagtactagggaggctaagacaggagaac

SEQ ID NO: 18358 - DNA, 80 bp, synthetic construct
  source 1..80: mol_type = other DNA
tgtattcttttaaaatattgactggagctgtgacttttgtttgaaggtgtgatctctgagtggtggcactaaaatcacct

SEQ ID NO: 18359 - DNA, 80 bp, synthetic construct
  source 1..80: mol_type = other DNA
gggcgtaaagaccttaatggagacaaagcttaagacaaacacatgagtaattttgaccaaaacaaagtagaaataggatt

SEQ ID NO: 18360 - DNA, 80 bp, synthetic construct; identical to SEQ ID NO: 8529
  source 1..80: mol_type = other DNA

SEQ ID NO: 18361 - DNA, 80 bp, synthetic construct
  source 1..80: mol_type = other DNA
atgatatatgcactttcccttctcctgttcaggaagcagatgggattttgagtcttgtagttccctaggggaactctatt

SEQ ID NO: 18362 - DNA, 80 bp, synthetic construct
  source 1..80: mol_type = other DNA
accagaatgtatgtctctaaagtcatctgcagccttacaatctacccccaaaaagtctaattcagacccgggatagctta

SEQ ID NO: 18363 - DNA, 80 bp, synthetic construct; identical to SEQ ID NO: 8530
  source 1..80: mol_type = other DNA

SEQ ID NO: 18364 - DNA, 80 bp, synthetic construct
  source 1..80: mol_type = other DNA
caatcagcactctgtgtctagctaaaggattgtaaacgcaccaatcagcgctctgtgtctagctaaaggattgtaaatgc

SEQ ID NO: 18365 - DNA, 80 bp, synthetic construct
  source 1..80: mol_type = other DNA
ccacccaagcaagcagtggcaaccgcttgggtccccttccacactgtgaaagctttgttctttcgctcttcataataaat

SEQ ID NO: 18366 - DNA, 80 bp, synthetic construct
  source 1..80: mol_type = other DNA
cctgcacactcctctgactatcacttgtatagcccttccttgatttatgacaaatggcttcagcatcttcactagaacaa

SEQ ID NO: 18367 - DNA, 80 bp, synthetic construct; identical to SEQ ID NO: 8531
  source 1..80: mol_type = other DNA

SEQ ID NO: 18368 - DNA, 80 bp, synthetic construct
  source 1..80: mol_type = other DNA
ggggacacaataggtatatttcctcgccattctcttttttcctcttggcttgtttcttttgggttaaatgcaactttcag

SEQ ID NO: 18369 - DNA, 80 bp, synthetic construct
  source 1..80: mol_type = other DNA
attcatatgccttataatcttcaattctgaatgataggagaaagaaatcagctattttttctggcatgcattattattat

SEQ ID NO: 18370 - DNA, 80 bp, synthetic construct
  source 1..80: mol_type = other DNA
gcccagctaattgttgtatttttagtaaagacagggtttcaccatgttggccaggcttgtctcgaactcctgacctcaga

SEQ ID NO: 18371 - DNA, 80 bp, synthetic construct
  source 1..80: mol_type = other DNA
tttcaatttaagctgaaatgttcaaagtgaccaccagccacaccagatgaggcatgatataggcagttaatacaaaaatt

SEQ ID NO: 18372 - DNA, 80 bp, synthetic construct; identical to SEQ ID NO: 8532
  source 1..80: mol_type = other DNA

SEQ ID NO: 18373 - DNA, 80 bp, synthetic construct
  source 1..80: mol_type = other DNA
tctgcagagcctgcgtttcagcaagatctccaggtgatacatatgcaagttagtgtatgagaagtaccaatttaagtgac

SEQ ID NO: 18374 - DNA, 80 bp, synthetic construct
  source 1..80: mol_type = other DNA
ccaaatctcagtgcagagacagtggtaatacgaagaagatttctacacttaggagttttcctagacagacttcaaccagg

SEQ ID NO: 18375 - DNA, 80 bp, synthetic construct; identical to SEQ ID NO: 8533
  source 1..80: mol_type = other DNA

SEQ ID NO: 18376 - DNA, 80 bp, synthetic construct
  source 1..80: mol_type = other DNA
acagcatctccaacacaaacagcaactttattttcgaaatggaaggataaaaaccaattctagcaaatggctttgctctg

SEQ ID NO: 18377 - DNA, 80 bp, synthetic construct
  source 1..80: mol_type = other DNA
gcctggcctcgttgtggagcggctcgtaatccatcatggcggccgcggggtttggtgtctgtgcctgagcagcgctggag

SEQ ID NO: 18378 - DNA, 80 bp, synthetic construct
  source 1..80: mol_type = other DNA
gtggtgtcagcgtccggggccgggggagggggtgtctcgggcagagacccccgggcttggggcagctgaggcggccgggc

SEQ ID NO: 18379 - DNA, 80 bp, synthetic construct
  source 1..80: mol_type = other DNA
ttttctgaggcgtggaagagcgtcgccccggagtaagctgcccgtgccgcgccccgacagcttccctcagccccaagccg

SEQ ID NO: 18380 - DNA, 80 bp, synthetic construct; identical to SEQ ID NO: 8534
  source 1..80: mol_type = other DNA

SEQ ID NO: 18381 - DNA, 80 bp, synthetic construct
  source 1..80: mol_type = other DNA
caggaaaagttctggaggagtagccaaagaccatcagcgtttcctttatgtgtgagaattgaaatgactagcattattga

SEQ ID NO: 18382 - DNA, 80 bp, synthetic construct
  source 1..80: mol_type = other DNA
gtcaacctaaaaaaagtgcttccttttgttatggaagatgtctttctgtgattgacttcaattgctgacttgtggagatg

SEQ ID NO: 18383 - DNA, 80 bp, synthetic construct
  source 1..80: mol_type = other DNA
cctgcattttatcaaaggagcagggaagaaggaatcatcgaggcatgggggtccacactgcaatgtttttgtggaacatg

SEQ ID NO: 18384 - DNA, 80 bp, synthetic construct
  source 1..80: mol_type = other DNA
aaagttacttcgtgacttcggctttattcaaaatctatttgagttgcttatttcttgcctgattcctctgctaattcact

SEQ ID NO: 18385 - DNA, 80 bp, synthetic construct; identical to SEQ ID NO: 8535
  source 1..80: mol_type = other DNA

SEQ ID NO: 18386 - DNA, 80 bp, synthetic construct
  source 1..80: mol_type = other DNA
ttgtgaattttagatagacagcttctgtcttaccttccataaggagtaatctcttcctcgttgatgaagctttcatcctg

SEQ ID NO: 18387 - DNA, 80 bp, synthetic construct
  source 1..80: mol_type = other DNA
tgcgaagttaaagctaagggtcggcttacactgatgtctataaccagttaattagggttactgtttgtactgttgcagcc

SEQ ID NO: 18388 - DNA, 80 bp, synthetic construct
  source 1..80: mol_type = other DNA
acttgcatttgacagctgaagttttactttcttacgggaaaatattcacttcatctaaataaatccgggtgcttggattt

SEQ ID NO: 18389 - DNA, 80 bp, synthetic construct; identical to SEQ ID NO: 8536
  source 1..80: mol_type = other DNA

SEQ ID NO: 18390 - DNA, 80 bp, synthetic construct
  source 1..80: mol_type = other DNA
atgattcagggttgtggcacctaactatacttgtagtcattgcattcttcatgacgtgcactcacagttaaacaaactaa

SEQ ID NO: 18391 - DNA, 80 bp, synthetic construct
  source 1..80: mol_type = other DNA
tcccaagtaggtgggactacaggcacgcgtcactgacgcccggctaatttttgtattttttagtagagacggggtttcgc

SEQ ID NO: 18392 - DNA, 80 bp, synthetic construct; identical to SEQ ID NO: 8537
  source 1..80: mol_type = other DNA

SEQ ID NO: 18393 - DNA, 80 bp, synthetic construct
  source 1..80: mol_type = other DNA
tgttgccaatgatgaaattttagctttccagtgaaaattaggattttggagaattttttttttttcctcttcggggtaga

SEQ ID NO: 18394 - DNA, 80 bp, synthetic construct
  source 1..80: mol_type = other DNA
gtgcaccaccatgcctggctaatggagaatttttatctgcctctgtgatatagagattggtggtaatatttacagatgcc

SEQ ID NO: 18395 - DNA, 80 bp, synthetic construct
  source 1..80: mol_type = other DNA
aggtttaagcaattctcgtgcctcagcctcctgagtagctgggattacaggcatgcaccaccacaagtgaataatttttg

SEQ ID NO: 18396 - DNA, 80 bp, synthetic construct
  source 1..80: mol_type = other DNA
cccagccaaaccattattttctaaatgatcaatgcatgatataaaatcatgcacaggttaaagatccattcaaagtgcaa

SEQ ID NO: 18397 - DNA, 80 bp, synthetic construct; identical to SEQ ID NO: 8538
  source 1..80: mol_type = other DNA

SEQ ID NO: 18398 - DNA, 80 bp, synthetic construct
  source 1..80: mol_type = other DNA
gtaaaaaattagccgggcgtggtggcacatgcctctaatcccagctactcaggaggctgaggcaggagaattgcttgaac

SEQ ID NO: 18399 - DNA, 80 bp, synthetic construct
  source 1..80: mol_type = other DNA
tcacttgaggtcagtagttcgaaactggcctggccaacgtgatgaaaccccgtctgtactaaaaatacaaaaattagatg

SEQ ID NO: 18400 - DNA, 80 bp, synthetic construct
  source 1..80: mol_type = other DNA
aagaaactaccatttaccatgttttgatgtagcatcaaagaacaatatctacggttatctagaaagtctgttttgggggg

SEQ ID NO: 18401 - DNA, 80 bp, synthetic construct; identical to SEQ ID NO: 8539
  source 1..80: mol_type = other DNA

SEQ ID NO: 18402 - DNA, 80 bp, synthetic construct
  source 1..80: mol_type = other DNA
cataagaagaccctgtctctacaacaagaacaaaagaaattagccagacgtgttatcacacctgtgttcccagctacttg

SEQ ID NO: 18403 - DNA, 80 bp, synthetic construct
  source 1..80: mol_type = other DNA
gaactgttgctatggaaagtctatcaagaaggcacatagggatgtttgttgctgaagtactaacactgaatgatgtctgt

SEQ ID NO: 18404 - DNA, 80 bp, synthetic construct; identical to SEQ ID NO: 8540
  source 1..80: mol_type = other DNA

SEQ ID NO: 18405 - DNA, 80 bp, synthetic construct
  source 1..80: mol_type = other DNA
aaaattagctgggcgtggttgcaggtgcctgtagtcccagctactcgggaggctgagacaggagagttgcttagacccag

SEQ ID NO: 18406 - DNA, 80 bp, synthetic construct
  source 1..80: mol_type = other DNA
tttgcttaagttgtgtctgaagacaaaccaatttctttggaccctgggtattctttttctaagggaataccatgttattt

SEQ ID NO: 18407 - DNA, 80 bp, synthetic construct
  source 1..80: mol_type = other DNA
aatctgaaagagtgggcagatggcaactttttgccagaatcattcagggtcaaagggctagtcatatttacaagggaaaa

SEQ ID NO: 18408 - DNA, 80 bp, synthetic construct
  source 1..80: mol_type = other DNA
tattttattgagcacagactatgacaggtcgtgttgtagtcactgatgatatatttgtaaacaaaacaatccctgccctc

SEQ ID NO: 18409 - DNA, 80 bp, synthetic construct; identical to SEQ ID NO: 8541
  source 1..80: mol_type = other DNA

SEQ ID NO: 18410 - DNA, 80 bp, synthetic construct
  source 1..80: mol_type = other DNA
ggcccatttcaaggattttgactttgattcatatgatgtgggaaggccttggagaattttccgaggggactatactatct

SEQ ID NO: 18411 - DNA, 80 bp, synthetic construct
  source 1..80: mol_type = other DNA
agatttgctctcggattagatgtgggatatgggggtgtgagaggggccaagtgtgactctcaggttttcgaactgaataa

SEQ ID NO: 18412 - DNA, 80 bp, synthetic construct; identical to SEQ ID NO: 8542
  source 1..80: mol_type = other DNA

SEQ ID NO: 18413 - DNA, 80 bp, synthetic construct
  source 1..80: mol_type = other DNA
tagtcccacctacatgggaggctgaggcagagggatcacgtgaacctgggaagcagaggttgcagtgagccaagatcatg

SEQ ID NO: 18414 - DNA, 80 bp, synthetic construct
  source 1..80: mol_type = other DNA
cccaggaattcaagaccagcctgggcaacatggcgaaaccccatctctactaacagtacaaaaaattagctgggcgtggt

SEQ ID NO: 18415 - DNA, 80 bp, synthetic construct
  source 1..80: mol_type = other DNA
aagtatctgtatacattagaaggtgggaggaagtgcaattattggatcctataggcattaaagttaaatttgtcaggttt

SEQ ID NO: 18416 - DNA, 80 bp, synthetic construct; identical to SEQ ID NO: 8543
  source 1..80: mol_type = other DNA

SEQ ID NO: 18417 - DNA, 80 bp, synthetic construct
  source 1..80: mol_type = other DNA
tgaagtcaggagttcgagaccagcctgaccaacatggtgaaaccccatctctactaaaaatacaaaaattagcagggcat

SEQ ID NO: 18418 - DNA, 80 bp, synthetic construct
  source 1..80: mol_type = other DNA
ggaaagattatatccatctacttaatgctagggattggattgtggcacgtggactgtgaaaatgcaaaattggaggtatg

SEQ ID NO: 18419 - DNA, 80 bp, synthetic construct
  source 1..80: mol_type = other DNA
aagcaatgggatcgtacaggtgagccattgcacctggccatgtatgtacattttttataagcattcagttgtttccaata

SEQ ID NO: 18420 - DNA, 80 bp, synthetic construct
  source 1..80: mol_type = other DNA
aagcatgttgtcaaagaaaatgaaagtgggaaaaaatgtgaaatcattttgtatcagttcaggacagaaccgtgcttgtg

SEQ ID NO: 18421 - DNA, 80 bp, synthetic construct; identical to SEQ ID NO: 8544
  source 1..80: mol_type = other DNA

SEQ ID NO: 18422 - DNA, 80 bp, synthetic construct
  source 1..80: mol_type = other DNA
cactttgggaacccaaggtgggacggtcctctgagaccaggagtttgagagagtggcctggacaacatagcaacacccta

SEQ ID NO: 18423 - DNA, 80 bp, synthetic construct
  source 1..80: mol_type = other DNA
aacaaacctgcttaacctttcaacactctcttccagtcccccctcccttctgaaaccatattttacatctctggtcctca

SEQ ID NO: 18424 - DNA, 80 bp, synthetic construct
  source 1..80: mol_type = other DNA
taacttttttttttgagatggagtctcgctctgtcacccaggctggagtgcagtggcgcgatcttggctcactgcaagtt

SEQ ID NO: 18425 - DNA, 80 bp, synthetic construct; identical to SEQ ID NO: 8545
  source 1..80: mol_type = other DNA

SEQ ID NO: 18426 - DNA, 80 bp, synthetic construct
  source 1..80: mol_type = other DNA
cttgataagaatgatattaaatggactaaatgagaaattaaactttttattcacttacaaggaatgaaagttctcaaata

SEQ ID NO: 18427 - DNA, 80 bp, synthetic construct
  source 1..80: mol_type = other DNA
tcggtggctcatgcctgtaatcccagcactttaggaggccaagatgggcggatcacttgagctcaggagtttgagaccag

SEQ ID NO: 18428 - DNA, 80 bp, synthetic construct
  source 1..80: mol_type = other DNA
taaattcttgagatgaactggatgctgcaacagctgcccttttgggtttaggtgttgttcctttatggaaatccacgccg

SEQ ID NO: 18429 - DNA, 80 bp, synthetic construct; identical to SEQ ID NO: 8546
  source 1..80: mol_type = other DNA

SEQ ID NO: 18430 - DNA, 80 bp, synthetic construct
  source 1..80: mol_type = other DNA
acccattaaaaaataatatcccatttccctctttccccacttcttggtaaccacttttatgctttttctctctatgaatt

SEQ ID NO: 18431 - DNA, 80 bp, synthetic construct
  source 1..80: mol_type = other DNA
ctgcaacctctgcctcccaggttcaagcagttcttctgcctcaccctcccaagtagctgggattacaggcatgtgccacc

SEQ ID NO: 18432 - DNA, 80 bp, synthetic construct
  source 1..80: mol_type = other DNA
aaaggtgcatctgttgttacgtgtatcagaatttcttcttttttaaggctgaataatatcccattgtgtgtgtatatata

SEQ ID NO: 18433 - DNA, 80 bp, synthetic construct
  source 1..80: mol_type = other DNA
cctcccgggctcaggcagtcctcccacctcagcctctcgagtagctgggaccacaggtgtgcactaccacacctggctaa

SEQ ID NO: 18434 - DNA, 80 bp, synthetic construct; identical to SEQ ID NO: 8547
  source 1..80: mol_type = other DNA

SEQ ID NO: 18435 - DNA, 80 bp, synthetic construct
  source 1..80: mol_type = other DNA
cctcctcctcagagataactactgtcttacgttttagcaccatcgattagtttcccttgtttttgtttttaatattccct

SEQ ID NO: 18436 - DNA, 80 bp, synthetic construct
  source 1..80: mol_type = other DNA
gttaactttctcaattgttttccattttattgatttctgctctttattttctttcttttacttaaaaaaatttttttttg

SEQ ID NO: 18437 - DNA, 80 bp, synthetic construct; identical to SEQ ID NO: 8548
  source 1..80: mol_type = other DNA

SEQ ID NO: 18438 - DNA, 80 bp, synthetic construct
  source 1..80: mol_type = other DNA
gactaattttatggcccagcatataacctgtcttagtgaatgttccatttgtagttgaaaaaagtttgtgttgttgcatg

SEQ ID NO: 18439 - DNA, 80 bp, synthetic construct
  source 1..80: mol_type = other DNA
agctcaagcaatctgccctcctgggcctcccaaagtgctgggattacaggtgtgagccactgtgcctggcggtatctctc

SEQ ID NO: 18440 - DNA, 80 bp, synthetic construct
  source 1..80: mol_type = other DNA
gtggatcacaagttcaggcgttcaagaccagcctggccaagatggtgaaaccctgtctcttactaaaaatacaaaaatta

SEQ ID NO: 18441 - DNA, 80 bp, synthetic construct; identical to SEQ ID NO: 8549
  source 1..80: mol_type = other DNA

SEQ ID NO: 18442 - DNA, 80 bp, synthetic construct
  source 1..80: mol_type = other DNA
atttagaatgaaaatataactataaatactctcagtttttgcctctttttttgtttgtttgttttttggagacaagatct

SEQ ID NO: 18443 - DNA, 80 bp, synthetic construct
  source 1..80: mol_type = other DNA
cggggtttcatcatgttacccaggctggtcttgaactcctgagctcaagcaatctgccctcctacgcctcccaaagtgct

SEQ ID NO: 18444 - DNA, 80 bp, synthetic construct
  source 1..80: mol_type = other DNA
ctgcctcagcctcctgagtagctgggactacaggcgcctgccaccacgcccggctaatttttttgtatgtttttttagaa

SEQ ID NO: 18445 - DNA, 80 bp, synthetic construct; identical to SEQ ID NO: 8550
  source 1..80: mol_type = other DNA

SEQ ID NO: 18446 - DNA, 80 bp, synthetic construct
  source 1..80: mol_type = other DNA
ttttcattttgttttgacaagtagttaggttactgtagttacttaaattactgtaagtgactggtcgttaagttagtttg

SEQ ID NO: 18447 - DNA, 80 bp, synthetic construct
  source 1..80: mol_type = other DNA
aaataacagaggtgctcagcaaagtctctccaccctggatgaactggtacttgaatgtcttccagcactgtgaaacctct

SEQ ID NO: 18448 - DNA, 80 bp, synthetic construct
  source 1..80: mol_type = other DNA
aaattctacctgcctcagcatcctcaaatccaagtctttgcttcctcagttcacagagatggctgctgtcagtttaggtt

SEQ ID NO: 18449 - DNA, 80 bp, synthetic construct; identical to SEQ ID NO: 8551
  source 1..80: mol_type = other DNA

SEQ ID NO: 18450 - DNA, 80 bp, synthetic construct
  source 1..80: mol_type = other DNA
aggctatttttttttttttttgcatttttggtagatagggtttcatcatgttggccaggctggtcccgaactcctgacct

SEQ ID NO: 18451 - DNA, 80 bp, synthetic construct
  source 1..80: mol_type = other DNA
tgggttcaagtgattcccctgcctcagcctcccgagtagctggaatatggacatgtgccaccaaacccagctaattttgt

SEQ ID NO: 18452 - DNA, 80 bp, synthetic construct
  source 1..80: mol_type = other DNA
ctagcctccggccagacttttaaatgttagccttgcaggtagttgtgcagtagtatctcccagccttaatttgctcttct

SEQ ID NO: 18453 - DNA, 80 bp, synthetic construct
  source 1..80: mol_type = other DNA
ttttttctttgtttgaggcagagtcttattctgttgcccaggctggagtccagtggcacagtctcggctcactccaacct

SEQ ID NO: 18454 - DNA, 80 bp, synthetic construct; identical to SEQ ID NO: 8552
  source 1..80: mol_type = other DNA

SEQ ID NO: 18455 - DNA, 80 bp, synthetic construct
  source 1..80: mol_type = other DNA
agctgggattacaggcgcccaccaccatgcccagctagtttttgtgtttttaatagagaaggggtttcaccatgttggcc

SEQ ID NO: 18456 - DNA, 80 bp, synthetic construct
  source 1..80: mol_type = other DNA
ggttagtactttttttgtggtctgtgtaagaaatctttgtgtctaccctaaggtcacaaagaagtttcactctcttacat

SEQ ID NO: 18457 - DNA, 80 bp, synthetic construct; identical to SEQ ID NO: 8553
  source 1..80: mol_type = other DNA

SEQ ID NO: 18458 - DNA, 80 bp, synthetic construct
  source 1..80: mol_type = other DNA
cttccatacccaaacagaaatacccttaaggattttcttctctgattgcactaaatctataggtttctttgatcctagaa

SEQ ID NO: 18459 - DNA, 80 bp, synthetic construct
  source 1..80: mol_type = other DNA
ggctaaatgattcctgtcaattgtttcaaattttcaactttcaaaatacctgctgcttctttccaattcacctttctcta

SEQ ID NO: 18460 - DNA, 80 bp, synthetic construct
  source 1..80: mol_type = other DNA
ttagtgaatacgcagttgaatctacttgtttggcaggttcaggcattgaacaagtactaagtgcctgttctgtatcaggt

SEQ ID NO: 18461 - DNA, 80 bp, synthetic construct
  source 1..80: mol_type = other DNA
gaataaacagtgtggaatgggtccagggaaccggctgaggaaaggggacatttactcaacctgatcttctttgttaagca

SEQ ID NO: 18462 - DNA, 80 bp, synthetic construct; identical to SEQ ID NO: 8554
  source 1..80: mol_type = other DNA

SEQ ID NO: 18463 - DNA, 80 bp, synthetic construct
  source 1..80: mol_type = other DNA
tgtttttttttttttcactgtgtccgtctgttcttcagaggagcaaaggctagcatgacctttaagtcctcctttaagag

SEQ ID NO: 18464 - DNA, 80 bp, synthetic construct
  source 1..80: mol_type = other DNA
aaggggagtgtttttaatagagatatttgtatgagaataagaggatggagccataatctgaggatgcctgtcttgtttgc

SEQ ID NO: 18465 - DNA, 80 bp, synthetic construct; identical to SEQ ID NO: 8555
  source 1..80: mol_type = other DNA

SEQ ID NO: 18466 - DNA, 80 bp, synthetic construct
  source 1..80: mol_type = other DNA
ggctcaggtgattctcctgcctccgcctctcaggtagctgtgagtacaggcgtgcaccactgcgcctggctgtaaagcac

SEQ ID NO: 18467 - DNA, 80 bp, synthetic construct
  source 1..80: mol_type = other DNA
gcctgccaccacgcccggctaactttttgtatttttagtagagatggggtttcaccatgttagccaggatggtctcgatc

SEQ ID NO: 18468 - DNA, 80 bp, synthetic construct
  source 1..80: mol_type = other DNA
gctttgggtagtcgtgtttttagggttacattgctgattagttttagagctgtggttgaaatcaagtgtctcttgacagc

SEQ ID NO: 18469 - DNA, 80 bp, synthetic construct
  source 1..80: mol_type = other DNA
ttctttttttttttttgagatggagtctcgctctgtcacccaggctggagtgcagtggcgcgatctcggctcactgccag

SEQ ID NO: 18470 - DNA, 80 bp, synthetic construct; identical to SEQ ID NO: 8556
  source 1..80: mol_type = other DNA

SEQ ID NO: 18471 - DNA, 80 bp, synthetic construct
  source 1..80: mol_type = other DNA
atttttagtagagacagagtttagccatattggctaggttggtcttgaattcctggcctcaagtgatctacccgcctcag

SEQ ID NO: 18472 - DNA, 80 bp, synthetic construct
  source 1..80: mol_type = other DNA
taattataaaattatttataatttaaaaaatttatacattgtcctacaagctttgtggcagttttacgatttattttaaa

SEQ ID NO: 18473 - DNA, 80 bp, synthetic construct
  source 1..80: mol_type = other DNA
tctcctgcctcagccttttgagtaactgggattacaggcacctgccaccacatctggctaatttttgtatttttagtagc

SEQ ID NO: 18474 - DNA, 80 bp, synthetic construct; identical to SEQ ID NO: 8557
  source 1..80: mol_type = other DNA

SEQ ID NO: 18475 - DNA, 80 bp, synthetic construct
  source 1..80: mol_type = other DNA
ttcttttttgtttttcccttaatagatcctcaggatctccccatattggaatatgtatatcttccttctttttatggctg

SEQ ID NO: 18476 - DNA, 80 bp, synthetic construct
  source 1..80: mol_type = other DNA
gtacatgcgtttgtcatttctgttagtagatggattctacttggtagatagctaccattttgcgtatgtctgtgtgtata

SEQ ID NO: 18477 - DNA, 80 bp, synthetic construct; identical to SEQ ID NO: 8558
  source 1..80: mol_type = other DNA

SEQ ID NO: 18478 - DNA, 80 bp, synthetic construct
  source 1..80: mol_type = other DNA
cattttcttccgtagacatcattctagtttacagtcccatcgctggtaatacagaggttgccttcatccccaaagcctag

SEQ ID NO: 18479 - DNA, 80 bp, synthetic construct
  source 1..80: mol_type = other DNA
gctggagtgcagtagtgtgatctcggccccaccgcaacctccgcctcctaggttcaagcaattcttctgcctcagcctcc

SEQ ID NO: 18480 - DNA, 80 bp, synthetic construct
  source 1..80: mol_type = other DNA
ccactgtgcccggccggttgaacgtttttaacatgtttaggggagatacatacttatctttctgtgaaccatctcatcag

SEQ ID NO: 18481 - DNA, 80 bp, synthetic construct; identical to SEQ ID NO: 8559
  source 1..80: mol_type = other DNA

SEQ ID NO: 18482 - DNA, 80 bp, synthetic construct
  source 1..80: mol_type = other DNA
atagggaggacactctgaccataaggaggtgtgcaggcatcttctttttcaaaaaatgttttcagttttaaaatttaaaa

SEQ ID NO: 18483 - DNA, 80 bp, synthetic construct
  source 1..80: mol_type = other DNA
cactaccacacccagctaatttttgtatcttttgtagagatgggggtttcaccatgttggccaggctggtctcgaactcc

SEQ ID NO: 18484 - DNA, 80 bp, synthetic construct
  source 1..80: mol_type = other DNA
gagtttaaagcctgctgagcaccgagctggttcttggtgctaacagggctgagactagtgaaaaagtcatgttgaggcat

SEQ ID NO: 18485 - DNA, 80 bp, synthetic construct
  source 1..80: mol_type = other DNA
tctcggctcactgcaacctccacctcccaggttcaagatattctcctgcctcagcctaccaactagctgggattacagat

SEQ ID NO: 18486 - DNA, 80 bp, synthetic construct; identical to SEQ ID NO: 8560
  source 1..80: mol_type = other DNA

SEQ ID NO: 18487 - DNA, 80 bp, synthetic construct
  source 1..80: mol_type = other DNA
aataaggaagaaatgaaaactaagaacttactagcaatccggagtttatatttcttgaaaagctcattacaggtagttgc

SEQ ID NO: 18488 - DNA, 80 bp, synthetic construct
  source 1..80: mol_type = other DNA
catgttgatgagaaaaaaaaatcaattccctgctggagctactgtctatttggaatttacacattctccagtgtcctcgt

SEQ ID NO: 18489 - DNA, 80 bp, synthetic construct; identical to SEQ ID NO: 8561
  source 1..80: mol_type = other DNA

SEQ ID NO: 18490 - DNA, 80 bp, synthetic construct
  source 1..80: mol_type = other DNA
aatttttgtattttttttagtagagacgtggtttcactatgttggccaggctggtcttgcactcctgacctcaagtgatc

SEQ ID NO: 18491 - DNA, 80 bp, synthetic construct
  source 1..80: mol_type = other DNA
agctctgtgttaccttgagtgagacatgatgtgatgtttagttcgtagcatcctcagcactgtcttattcacaatcattg

SEQ ID NO: 18492 - DNA, 80 bp, synthetic construct
  source 1..80: mol_type = other DNA
gtaaattattcaatcaaggaaaattgattcagaaagctatttgaaattcaatcagcatgatcaatgatactttaacccct

SEQ ID NO: 18493 - DNA, 80 bp, synthetic construct; identical to SEQ ID NO: 8562
  source 1..80: mol_type = other DNA

SEQ ID NO: 18494 - DNA, 80 bp, synthetic construct
  source 1..80: mol_type = other DNA
aatgttaaagtgaatcagaagagttgctaagttatgatcctttaattgaatcaaagttttttgtttaaattggcttgctg

SEQ ID NO: 18495 - DNA, 80 bp, synthetic construct
  source 1..80: mol_type = other DNA
tgattcagtggccaattagcaatgctcagattcgccatttattgagagattcacacacacacaatcaatcaaacattcac

SEQ ID NO: 18496 - DNA, 80 bp, synthetic construct
  source 1..80: mol_type = other DNA
tcatgctaggaggaggcctcagagttctcatgggcaaagattccaaaggcgccccagacatcatcagctccttgctgtgt

SEQ ID NO: 18497 - DNA, 80 bp, synthetic construct
  source 1..80: mol_type = other DNA
gacgtatgtttatcacttcgaagaaaaacaattttactatgatctcagttgccaggctagtacacatgtgcttatcattc

SEQ ID NO: 18498 - DNA, 80 bp, synthetic construct; identical to SEQ ID NO: 8563
  source 1..80: mol_type = other DNA

SEQ ID NO: 18499 - DNA, 80 bp, synthetic construct
  source 1..80: mol_type = other DNA
catgttcagacagtaggatcacaaatgattattatatagcaatgaatggccacaggtacatagactaaggagccacatcc

SEQ ID NO: 18500 - DNA, 80 bp, synthetic construct
  source 1..80: mol_type = other DNA
acccatggtcgagggagaggagcaggaataccagttaccatgccggagtaacagttacggcactgatgcaccagttacca

SEQ ID NO: 18501 - DNA, 80 bp, synthetic construct
  source 1..80: mol_type = other DNA
tgccagagtaacaattatagcactggtataccagctaccatgccagagtaacagttaccacactgatatactagttacca

SEQ ID NO: 18502 - DNA, 80 bp, synthetic construct; identical to SEQ ID NO: 8564
  source 1..80: mol_type = other DNA

SEQ ID NO: 18503 - DNA, 80 bp, synthetic construct
  source 1..80: mol_type = other DNA
acctagtgtagagaaaaacaggagcaagataagaacaacgtactgaaaaggaaattggatgagggcctggaaaaaggggt

SEQ ID NO: 18504 - DNA, 80 bp, synthetic construct
  source 1..80: mol_type = other DNA
tttgctccacagacctagtcctttgttgtggtgcgaggctcagtcgtcagcccaccgagtcatgtatgttctctggttgc

SEQ ID NO: 18505 - DNA, 80 bp, synthetic construct
  source 1..80: mol_type = other DNA
aatgcccttacccacatacttctgagatgtactgatgatgactacatttaaagctttttctccattggctagaagttgag

SEQ ID NO: 18506 - DNA, 80 bp, synthetic construct; identical to SEQ ID NO: 8565
  source 1..80: mol_type = other DNA

SEQ ID NO: 18507 - DNA, 80 bp, synthetic construct
  source 1..80: mol_type = other DNA
ttagaattttgtgagcaaacaaatatgtgtgtatcgtatgtatgtttatatgtatatcagatgtacgcacattagtatgt

SEQ ID NO: 18508 - DNA, 80 bp, synthetic construct
  source 1..80: mol_type = other DNA
attattaatgagcaatgggactgaatttgcttcaccgtttttttaaaatcttgatttaacatttgtcatacagctatttt

SEQ ID NO: 18509 - DNA, 80 bp, synthetic construct
  source 1..80: mol_type = other DNA
gcttgcgccaccatgcccggctaatttttgtattgttagtagagatggggttttgccgtgttagccaggctggacttgaa

SEQ ID NO: 18510 - DNA, 80 bp, synthetic construct; identical to SEQ ID NO: 8566
  source 1..80: mol_type = other DNA

SEQ ID NO: 18511 - DNA, 80 bp, synthetic construct
  source 1..80: mol_type = other DNA
cctagggctattatgttaccgaagccaatagttctaattgatgggtttaaagggagcaggcacaagctttgtgggggtca

SEQ ID NO: 18512 - DNA, 80 bp, synthetic construct
  source 1..80: mol_type = other DNA
cacattgagggattggaagcgggtgtgtttctatgctcccttaaggatatttttggaaacaacatgcttgctgcatacaa

SEQ ID NO: 18513 - DNA, 80 bp, synthetic construct; identical to SEQ ID NO: 8567
  source 1..80: mol_type = other DNA

SEQ ID NO: 18514 - DNA, 80 bp, synthetic construct
  source 1..80: mol_type = other DNA
agcttgtcacatgatgaatgctttttaccctgggggagaccaagactttgagtaatagtttgcttttataagccagaatt

SEQ ID NO: 18515 - DNA, 80 bp, synthetic construct
  source 1..80: mol_type = other DNA
caaaaaaaaaaattagccgagcgtagtggtgggcgcctgtagttccagctactggggaggctgaggcaggagaatggcgt

SEQ ID NO: 18516 - DNA, 80 bp, synthetic construct
  source 1..80: mol_type = other DNA
attggtggcctaatgatgtaagtgccaaagtttcattcgaggttttggggtagaatgtttttcaactgtttgcttttatc

SEQ ID NO: 18517 - DNA, 80 bp, synthetic construct
  source 1..80: mol_type = other DNA
ctgggttcaagcgattctcctgcttcagcctccctagtagctgggattacaggcatgcgccgccacacctggctaatttt

SEQ ID NO: 18518 - DNA, 80 bp, synthetic construct; identical to SEQ ID NO: 8568
  source 1..80: mol_type = other DNA

SEQ ID NO: 18519 - DNA, 80 bp, synthetic construct
  source 1..80: mol_type = other DNA
gttcttttaataacagacctcagctctagttctttgaaatgcatgtgggaaaatgtttatcagtgttgaaatctgacatt

SEQ ID NO: 18520 - DNA, 80 bp, synthetic construct
  source 1..80: mol_type = other DNA
aaaccagcccttcccagctgtgggctttgtacttaacggactcagaacgtgaatggaagtacagactctggaacatgtag

SEQ ID NO: 18521 - DNA, 80 bp, synthetic construct
  source 1..80: mol_type = other DNA
cttatttccaagcctttccaaggtcttctggtcagggcagattcttctttcttgttcctaaatttaaagtttcaagaatt

SEQ ID NO: 18522 - DNA, 80 bp, synthetic construct; identical to SEQ ID NO: 8569
  source 1..80: mol_type = other DNA

SEQ ID NO: 18523 - DNA, 80 bp, synthetic construct
  source 1..80: mol_type = other DNA
cctggcaaccactgatctgttctcatcactattgttttgtccttttgagactgtcacagaaatggaagcatctagtatgt

SEQ ID NO: 18524 - DNA, 80 bp, synthetic construct
  source 1..80: mol_type = other DNA
ggttgttgcttggtggggcattggtgattacgaatagagttttaagcatttctgtactgtttttatatgaacataatttt

SEQ ID NO: 18525 - DNA, 80 bp, synthetic construct; identical to SEQ ID NO: 8570
  source 1..80: mol_type = other DNA

SEQ ID NO: 18526 - DNA, 80 bp, synthetic construct
  source 1..80: mol_type = other DNA
tagtcccagctacatgggaggttgaggtgggaggatcacttaagcctgggaggtggcggttgcagtgagccaagattgca

SEQ ID NO: 18527 - DNA, 80 bp, synthetic construct
  source 1..80: mol_type = other DNA
ctctgcctcctgggttcaagtgattctcctgcctcagtctcccaagtagctgagattacaagcatgcgccacaacaccct

SEQ ID NO: 18528 - DNA, 80 bp, synthetic construct
  source 1..80: mol_type = other DNA
cttgtgattacatttatgcccactaggatgacggaggataatgcccccatctcaagattgttaatcacatctccaaagac

SEQ ID NO: 18529 - DNA, 80 bp, synthetic construct
  source 1..80: mol_type = other DNA
actgttttacagagtggcagtcatttcacgttcctaccagcacccttgaacgccagaattcctggtatcctcggctgaac

SEQ ID NO: 18530 - DNA, 80 bp, synthetic construct; identical to SEQ ID NO: 8571
  source 1..80: mol_type = other DNA

SEQ ID NO: 18531 - DNA, 80 bp, synthetic construct
  source 1..80: mol_type = other DNA
aagctggagtgcagtggttccatcttggcttactgcagtctccacctcctgggctcaagtgatcctcccacctcatcctc

SEQ ID NO: 18532 - DNA, 80 bp, synthetic construct
  source 1..80: mol_type = other DNA
ctcccaagtagctgggattacaggcatgcgccactgctgcccggctaatttttgtatttttagtggagacggggtttcgc

SEQ ID NO: 18533 - DNA, 80 bp, synthetic construct
  source 1..80: mol_type = other DNA
aatctttttaaatgaaaaatttgttatccctcccagccctcagccatgacccgaagtatgaaataggcatatctttttgc

SEQ ID NO: 18534 - DNA, 80 bp, synthetic construct; identical to SEQ ID NO: 8572
  source 1..80: mol_type = other DNA

SEQ ID NO: 18535 - DNA, 80 bp, synthetic construct
  source 1..80: mol_type = other DNA
tgtaaagcccgttatttaacctaaaaacgttaatggctcagaaaacagaattacatggcatttccttgctaacctcccag

SEQ ID NO: 18536 - DNA, 80 bp, synthetic construct
  source 1..80: mol_type = other DNA
agctcatatcctgacacttaaagccacgtgatcttgtagaagtcacttagctgatgaggtaaaactgagtctgtttctcc

SEQ ID NO: 18537 - DNA, 80 bp, synthetic construct
  source 1..80: mol_type = other DNA
atttgagatacaagatctccattccattgctaatgcttatggaagattttgtcactttcttaaaaaatattgccaaggcc

SEQ ID NO: 18538 - DNA, 80 bp, synthetic construct; identical to SEQ ID NO: 8573
  source 1..80: mol_type = other DNA

SEQ ID NO: 18539 - DNA, 80 bp, synthetic construct
  source 1..80: mol_type = other DNA
tagaggtgggctggtaaaggctttttcattatggatttttcagtttatttcttctaagttttgtcagttgaacagtaggg

SEQ ID NO: 18540 - DNA, 80 bp, synthetic construct
  source 1..80: mol_type = other DNA
ggctagagtgcagtggcgtgatcttggcttactgcaacctccccatcctgggttcaaatgattctcaggccttggcctcc

SEQ ID NO: 18541 - DNA, 80 bp, synthetic construct
  source 1..80: mol_type = other DNA
tcctgggttcaagtgattcttctgcctcagcctcccgagtagctgggattacaggtgctcgccaccatgcctggctaatt

SEQ ID NO: 18542 - DNA, 80 bp, synthetic construct; identical to SEQ ID NO: 8574
  source 1..80: mol_type = other DNA

SEQ ID NO: 18543 - DNA, 80 bp, synthetic construct
  source 1..80: mol_type = other DNA
actgcaacctctgcctccccggttcaagtgattcttctgcctcaacctcccgagtagctgggactacaggcacgtgccac

SEQ ID NO: 18544 - DNA, 80 bp, synthetic construct
  source 1..80: mol_type = other DNA
ttaatgggaaggggtttattatagatattatatagctaacagttatggggagggctgaaaaagcaggttcttggttgggc

SEQ ID NO: 18545 - DNA, 80 bp, synthetic construct
  source 1..80: mol_type = other DNA
gtgtcagctgtagaatctgccacaatcaaagccttactgctcctggctccagagccaggtatggtcagccagcaaaattg

SEQ ID NO: 18546 - DNA, 80 bp, synthetic construct; identical to SEQ ID NO: 8575
  source 1..80: mol_type = other DNA

SEQ ID NO: 18547 - DNA, 80 bp, synthetic construct
  source 1..80: mol_type = other DNA
gggaatgtgcaccagaacatttttctttcattagattctcaaaggggacgatgacccgacagaggctaagcaccattaac

SEQ ID NO: 18548 - DNA, 80 bp, synthetic construct
  source 1..80: mol_type = other DNA
tatggaggtttcatggtaccagcatcctactgggaactgtaactcctgctgcctaccaaatatctataatatctttggct

SEQ ID NO: 18549 - DNA, 80 bp, synthetic construct; identical to SEQ ID NO: 8576
  source 1..80: mol_type = other DNA

SEQ ID NO: 18550 - DNA, 80 bp, synthetic construct
  source 1..80: mol_type = other DNA
gaacgtggtggcgaacacctgtaatcccagctactagggaggctgagactggagaatcacttgaacccgcgaggcggagg

SEQ ID NO: 18551 - DNA, 80 bp, synthetic construct
  source 1..80: mol_type = other DNA
accatcctggctaacacggtgaaaccccgtctctaccaaaaatacaaaaaaattagctgggcatggtggctggcacctgt

SEQ ID NO: 18552 - DNA, 80 bp, synthetic construct
  source 1..80: mol_type = other DNA
tgctgtgctattgctgtgctgtttatcacagtggtgtttactgtcttatacttgcctctctctcatctcttctttttttt

SEQ ID NO: 18553 - DNA, 80 bp, synthetic construct
  source 1..80: mol_type = other DNA
ccaccacaaccggccaatttttgtatttttagtagagacgggtttttaccatgttggccaggctggtctcgaattcctga

SEQ ID NO: 18554 - DNA, 80 bp, synthetic construct; identical to SEQ ID NO: 8577
  source 1..80: mol_type = other DNA

SEQ ID NO: 18555 - DNA, 80 bp, synthetic construct
  source 1..80: mol_type = other DNA
aattagctgggggtagtggcgttgcctataatctcagctacttgggaggctgaggcaggagaatcgcttgaacccaggag

SEQ ID NO: 18556 - DNA, 80 bp, synthetic construct
  source 1..80: mol_type = other DNA
caggagatcgagaccatcctggctaacatggtgaaaccccgtctctactaaaaatacaaaaaattagccaggcgtggtgg

SEQ ID NO: 18557 - DNA, 80 bp, synthetic construct; identical to SEQ ID NO: 8578
  source 1..80: mol_type = other DNA

SEQ ID NO: 18558 - DNA, 80 bp, synthetic construct
  source 1..80: mol_type = other DNA
cagcactcttccttttctgagtgcttttaacaagcggactagggaatagatagggcctctgctctcagggagattattgt

SEQ ID NO: 18559 - DNA, 80 bp, synthetic construct
  source 1..80: mol_type = other DNA
aagatgaccttgagtaccaagccaaagattttggagatatttggtggacattgggcattatacatacccagtaagatatt

SEQ ID NO: 18560 - DNA, 80 bp, synthetic construct
  source 1..80: mol_type = other DNA
aaattattctgtaatctgaatttaggttgggagtggaaaggagtacccttaagtaggacatgagaagagcctgaagaaag

SEQ ID NO: 18561 - DNA, 80 bp, synthetic construct
  source 1..80: mol_type = other DNA
cttgtcgacctgcttcagtagtagcattgacagaacagtctctgtgtactctgtcccctcagtgctttctgcatatgtgt

SEQ ID NO: 18562 - DNA, 80 bp, synthetic construct; identical to SEQ ID NO: 8579
  source 1..80: mol_type = other DNA

SEQ ID NO: 18563 - DNA, 80 bp, synthetic construct
  source 1..80: mol_type = other DNA
ctcagggcctgtccttcaagggcttccgtgtgcagcagcagcactctgtaatatcatagatgaatttttgtcaaaacaca

SEQ ID NO: 18564 - DNA, 80 bp, synthetic construct
  source 1..80: mol_type = other DNA
aaagatcaacaaatccaaatgctgtggtatttatactgatttagaaaggcagttgactttgggaggctttgttttctcat

SEQ ID NO: 18565 - DNA, 80 bp, synthetic construct
  source 1..80: mol_type = other DNA
atttcccacacactgttgcagcaatctttagatttcaaattggctaattcagtgggtcacttaattcttaacttttacaa

SEQ ID NO: 18566 - DNA, 80 bp, synthetic construct; identical to SEQ ID NO: 8580
  source 1..80: mol_type = other DNA

SEQ ID NO: 18567 - DNA, 80 bp, synthetic construct
  source 1..80: mol_type = other DNA
aaacaaagctcctttttgccttgagctcatggtttggaatttgggcatttggaatccttcaagccctcctcctgggcaga

SEQ ID NO: 18568 - DNA, 80 bp, synthetic construct
  source 1..80: mol_type = other DNA
ataagtgaagaacctgaggccggctgtgttcatattctcagaacttggtgagaatgaggtactttaagataggctctaag

SEQ ID NO: 18569 - DNA, 80 bp, synthetic construct; identical to SEQ ID NO: 8581
  source 1..80: mol_type = other DNA

SEQ ID NO: 18570 - DNA, 80 bp, synthetic construct
  source 1..80: mol_type = other DNA
tcacccaggctggagtgtagtggtgcgatctcagctcactgcaacctccgcctcctgggttcaagtgattcttctgcctc

SEQ ID NO: 18571 - DNA, 80 bp, synthetic construct
  source 1..80: mol_type = other DNA
caggcatgagccactgcgcccggccaggcattttttttatgtgtgtctcaaataaaaagaaagaaaaccaaaattttacc

SEQ ID NO: 18572 - DNA, 80 bp, synthetic construct
  source 1..80: mol_type = other DNA
tagatgatttgctaacttatatcaagcacttactctgacccaggtatcggactgggtgcttgacatatattatctctatt

SEQ ID NO: 18573 - DNA, 80 bp, synthetic construct; identical to SEQ ID NO: 8582
  source 1..80: mol_type = other DNA

SEQ ID NO: 18574 - DNA, 80 bp, synthetic construct
  source 1..80: mol_type = other DNA
aattctcctgcctcagcctcccaagtagctgagattacaggcgtgcgccaccaagcccagataattttcatatttttagt

SEQ ID NO: 18575 - DNA, 80 bp, synthetic construct
  source 1..80: mol_type = other DNA
ttgggtgttgtcatggagaagaattgggcccttcctgttgaccagtgccggctgcaggcattgcagttttcggtgcatct

SEQ ID NO: 18576 - DNA, 80 bp, synthetic construct
  source 1..80: mol_type = other DNA
cactgagctggtcattgctgtttgtcgtataaaatccactttttgtcgcacatcacaatctgatcaagaaatggtttgtt

SEQ ID NO: 18577 - DNA, 80 bp, synthetic construct; identical to SEQ ID NO: 8583
  source 1..80: mol_type = other DNA

SEQ ID NO: 18578 - DNA, 80 bp, synthetic construct
  source 1..80: mol_type = other DNA
tcattttcacagtctaaagtaaacataaacagcaaggaataagtcattagcaaaaaaatgtaaagtgagaaatgcccatt

SEQ ID NO: 18579 - DNA, 80 bp, synthetic construct
  source 1..80: mol_type = other DNA
ccggtataggaggcttcacatttcttcccctaggacacgctgtcattgtttaggtttcttgttttgttttttcctgaaac

SEQ ID NO: 18580 - DNA, 80 bp, synthetic construct
  source 1..80: mol_type = other DNA
gcttgtgccacacatttaggtaatttaattttttttttttttttttttttttttggagacggggtcccactacgttgtcc

SEQ ID NO: 18581 - DNA, 80 bp, synthetic construct
  source 1..80: mol_type = other DNA
ttgaaatgtggctagtccccttatgcttgggtcacagaccaatttgggttaactttgccattgccttgcctgcagatcat

SEQ ID NO: 18582 - DNA, 80 bp, synthetic construct; identical to SEQ ID NO: 8584
  source 1..80: mol_type = other DNA

SEQ ID NO: 18583 - DNA, 80 bp, synthetic construct
  source 1..80: mol_type = other DNA
gaaaatattgggagatgacttttctgcttaaatgttaggaaactaaattctcagtatactgcttctctagttgttaagga

SEQ ID NO: 18584 - DNA, 80 bp, synthetic construct
  source 1..80: mol_type = other DNA
cctcagcctcccgagtagctgggactacaggcacgggccacaacacccagctaatttttgcattattttttggtagagac

SEQ ID NO: 18585 - DNA, 80 bp, synthetic construct
  source 1..80: mol_type = other DNA
cggctcactgcaagctccgcctcccaggttcacaccattctcctgcctcagcctcccgagtagctgggactacaggcgcc

SEQ ID NO: 18586 - DNA, 80 bp, synthetic construct; identical to SEQ ID NO: 8585
  source 1..80: mol_type = other DNA

SEQ ID NO: 18587 - DNA, 80 bp, synthetic construct
  source 1..80: mol_type = other DNA
atcaagacatgctgaaaaacccctgttttaatcaactccccttttaattttttcaaaagtcattattaggcatcgaaagc

SEQ ID NO: 18588 - DNA, 80 bp, synthetic construct
  source 1..80: mol_type = other DNA
ttttgttttttagtatacaggaaagttacaggttttttttctcttttatttgacaaatgaaagtgattttatattcatca

SEQ ID NO: 18589 - DNA, 80 bp, synthetic construct
  source 1..80: mol_type = other DNA
tctactaaaaatacaaaattagctgggcttgctggcgcgtgcctgtaatcccagctacttgggaggctgaggcaggagaa

SEQ ID NO: 18590 - DNA, 80 bp, synthetic construct; identical to SEQ ID NO: 8586
  source 1..80: mol_type = other DNA

SEQ ID NO: 18591 - DNA, 80 bp, synthetic construct
  source 1..80: mol_type = other DNA
aattaacagttgttgggtgtgttgaatgtgcagggttttgctgaacactttacaggggtgtctgatcgagtccatcactt

SEQ ID NO: 18592 - DNA, 80 bp, synthetic construct
  source 1..80: mol_type = other DNA
agtcaggagatcgagaccatcctggctaacacggtgaaaccccttctctactaaaaatacaaaaaattggccgggtgtgg

SEQ ID NO: 18593 - DNA, 80 bp, synthetic construct
  source 1..80: mol_type = other DNA
acctgaatagtctttcaggaatgcaaatgagatcatgttgctcctctgcttaaaacctaatagcttctccttccatgtca

SEQ ID NO: 18594 - DNA, 80 bp, synthetic construct
  source 1..80: mol_type = other DNA
ttctttctggttcccctgccctgggacatttggataattgctttttttttttttcatttcaggttctagttcaaattgaa

SEQ ID NO: 18595 - DNA, 80 bp, synthetic construct; identical to SEQ ID NO: 8587
  source 1..80: mol_type = other DNA

SEQ ID NO: 18596 - DNA, 80 bp, synthetic construct
  source 1..80: mol_type = other DNA
ctgttagatcaggaattcagaagtgggttagctgagtggttctagcttgtggtctctcatgagattgtagacaagatttc

SEQ ID NO: 18597 - DNA, 80 bp, synthetic construct
  source 1..80: mol_type = other DNA
catgtcagcagctttccccagagcaagtaatccaagagatcacaaggcagaagtgacatgtctttataatcacagatgct

SEQ ID NO: 18598 - DNA, 80 bp, synthetic construct
  source 1..80: mol_type = other DNA
caccccctgccagcacaaggggaacatgaacctaacataatgggggcagggaacgggcagaagaggcttcccagaggaga

SEQ ID NO: 18599 - DNA, 80 bp, synthetic construct; identical to SEQ ID NO: 8588
  source 1..80: mol_type = other DNA

SEQ ID NO: 18600 - DNA, 80 bp, synthetic construct
  source 1..80: mol_type = other DNA
catgttcaaagttcccgcttccattgggggactgtgctttgtgcttcttcttgtaacaatgtgtttagcttatttagcag

SEQ ID NO: 18601 - DNA, 80 bp, synthetic construct
  source 1..80: mol_type = other DNA
gacacctgtgcagatttctttttcgtggtggcactgtgttttcttttgcttgttatgcgtaaggtcagatatgttgtgtt

SEQ ID NO: 18602 - DNA, 80 bp, synthetic construct
  source 1..80: mol_type = other DNA
tcacgaggtcaggagttcgagatcagcctggctaacatggtgaaaccctgtctctactaaaaatacaaaaattagctggg

SEQ ID NO: 18603 - DNA, 80 bp, synthetic construct; identical to SEQ ID NO: 8589
  source 1..80: mol_type = other DNA

SEQ ID NO: 18604 - DNA, 80 bp, synthetic construct
  source 1..80: mol_type = other DNA
atgtttggttattggtttttgggtttgctatttttgggcgaggaggtccatatccttcatcagcttctcaaggggttttt

SEQ ID NO: 18605 - DNA, 80 bp, synthetic construct
  source 1..80: mol_type = other DNA
ctacatggaaatccttgtggtgttggataggccatgattcatttccctaagcctcaaatgcttctattgtttgtagtttt

SEQ ID NO: 18606 - DNA, 80 bp, synthetic construct
  source 1..80: mol_type = other DNA
aaagaatagaaacttttaaaggtttttgatacatattgccagttgcccttctggaaggtctactgggtacgtcagtgtac

SEQ ID NO: 18607 - DNA, 80 bp, synthetic construct; identical to SEQ ID NO: 8590
  source 1..80: mol_type = other DNA

SEQ ID NO: 18608 - DNA, 80 bp, synthetic construct
  source 1..80: mol_type = other DNA
ttccctgaggaaagaaaagataaagggaagaattgggtgaattcatcagactgtatttggcagatggagatgaagtgggt

SEQ ID NO: 18609 - DNA, 80 bp, synthetic construct
  source 1..80: mol_type = other DNA
cccccgccagcctgctcaggggcatgcggatgactggagcctggaaggcgggtcttgctgggcaggacagatgccttact

SEQ ID NO: 18610 - DNA, 80 bp, synthetic construct; identical to SEQ ID NO: 8591
  source 1..80: mol_type = other DNA

SEQ ID NO: 18611 - DNA, 80 bp, synthetic construct
  source 1..80: mol_type = other DNA
atacagtcacaagtgcctagaataaacctcacaccacccactgctctgctgtcagggctaccaccccggccccaccctgc

SEQ ID NO: 18612 - DNA, 80 bp, synthetic construct
  source 1..80: mol_type = other DNA
tgttcagcttctctccacagcctgcgtggtctgggcctggtttccctctcgaatttccctcctgtcactccctttgttta

SEQ ID NO: 18613 - DNA, 80 bp, synthetic construct
  source 1..80: mol_type = other DNA
tctttgtcctcttccccttttcatttctttgcagctcatgccatctgaaactacctcattcaattattgatagatctgtt

SEQ ID NO: 18614 - DNA, 80 bp, synthetic construct
  source 1..80: mol_type = other DNA
tccgcctcccgggttcaagcgattcttgtgcctcagcctcccgagtagctggaattacaggtgcctgccaccacgtctgg

SEQ ID NO: 18615 - DNA, 80 bp, synthetic construct; identical to SEQ ID NO: 8592
  source 1..80: mol_type = other DNA

SEQ ID NO: 18616 - DNA, 80 bp, synthetic construct
  source 1..80: mol_type = other DNA
gactggtgggaattctgcacaacaaatgacttggtttaattaacatggaaattgcgaggaaaaaaatgaagtggaaccta

SEQ ID NO: 18617 - DNA, 80 bp, synthetic construct
  source 1..80: mol_type = other DNA
tttttttaaaacaatatattttacttccaaaaccctgcgttttcacatggtagctatctgctggagctgagtagccgctg

SEQ ID NO: 18618 - DNA, 80 bp, synthetic construct; identical to SEQ ID NO: 8593
  source 1..80: mol_type = other DNA

SEQ ID NO: 18619 - DNA, 80 bp, synthetic construct
  source 1..80: mol_type = other DNA
gtgtatcctcagtctgatggcggtggaagtgaggcagcaccaaggagcagaaacaggaagtttccactgatgaccaccct

SEQ ID NO: 18620 - DNA, 80 bp, synthetic construct
  source 1..80: mol_type = other DNA
acagaatagtctttgttgaaggaacgaattagtgcatccttccaagccttggaggacctgtctataataggcccactcta

SEQ ID NO: 18621 - DNA, 80 bp, synthetic construct
  source 1..80: mol_type = other DNA
aacactctgtggctgttaaagagctagaggtagttttatgtggattgatgtgttcaatgtgttcaatggaaaagcaaggg

SEQ ID NO: 18622 - DNA, 80 bp, synthetic construct; identical to SEQ ID NO: 8594
  source 1..80: mol_type = other DNA

SEQ ID NO: 18623 - DNA, 80 bp, synthetic construct
  source 1..80: mol_type = other DNA
tcagttgttgtttaacttttatggaatgcaacttctttagctttaatttggagagccaaactatggccctagtctttttt

SEQ ID NO: 18624 - DNA, 80 bp, synthetic construct
  source 1..80: mol_type = other DNA
taattttgtatatatatattttaagtacaaatggggtttcaccgtgttggccaggctggtctcaaactcctgacctcagg

SEQ ID NO: 18625 - DNA, 80 bp, synthetic construct
  source 1..80: mol_type = other DNA
ctatggactttgacaaatacatacacttgtgaaattgccaccccttttgagatacagaacagttctatcaccccctagaa

SEQ ID NO: 18626 - DNA, 80 bp, synthetic construct; identical to SEQ ID NO: 8595
  source 1..80: mol_type = other DNA

SEQ ID NO: 18627 - DNA, 80 bp, synthetic construct
  source 1..80: mol_type = other DNA
gatttataagactgggtatggtggctcatgccagtaatcccaatgctttgagaggccaaggcgggaggatcacttgaagc

SEQ ID NO: 18628 - DNA, 80 bp, synthetic construct
  source 1..80: mol_type = other DNA
gcacttgtctccaaaaatgtttaaaagattgacaatacagtcttcttcagagtctccataggaaaggagcggcacgaaat

SEQ ID NO: 18629 - DNA, 80 bp, synthetic construct
  source 1..80: mol_type = other DNA
tacttggcacatatagtgcttactgtgtgcaggcactgttctaaatattgctttcaaatatttaaaagtgcttagaacag

SEQ ID NO: 18630 - DNA, 80 bp, synthetic construct; identical to SEQ ID NO: 8596
  source 1..80: mol_type = other DNA

SEQ ID NO: 18631 - DNA, 80 bp, synthetic construct
  source 1..80: mol_type = other DNA
tgggatctgtattaaaagtgtactaaaaacattcaccacatggtggtgctcccttcaaaagccaaactgaaaattgtagg

SEQ ID NO: 18632 - DNA, 80 bp, synthetic construct
  source 1..80: mol_type = other DNA
cagccttctaagtagagtgccagtttatattctacatttgtgctttaagttttttttagggaagtagggtcctgtcattt

SEQ ID NO: 18633 - DNA, 80 bp, synthetic construct; identical to SEQ ID NO: 8597
  source 1..80: mol_type = other DNA

SEQ ID NO: 18634 - DNA, 80 bp, synthetic construct
  source 1..80: mol_type = other DNA
ggcacgtgccaccacgcccagctaagttttgtattttcagtagagatggggtttcgccatgttgaccaggctggtctcaa

SEQ ID NO: 18635 - DNA, 80 bp, synthetic construct
  source 1..80: mol_type = other DNA
agcacagtatttccctgccttttagatttgaaatggatacttctaagcagttgtgactggctggatttcagtcatttaca

SEQ ID NO: 18636 - DNA, 80 bp, synthetic construct
  source 1..80: mol_type = other DNA
actgtagactcacagatggtcatgattttcaggaattgaatagagaagatgaaacactgagacactggattcaaatgcta

SEQ ID NO: 18637 - DNA, 80 bp, synthetic construct
  source 1..80: mol_type = other DNA
ggggtactgaggtggaatttcaccacaccccaaatctgttgaaaagaggaaagtgtacaggcaggagacacagaatctgg

SEQ ID NO: 18638 - DNA, 80 bp, synthetic construct; identical to SEQ ID NO: 8598
  source 1..80: mol_type = other DNA

SEQ ID NO: 18639 - DNA, 80 bp, synthetic construct
  source 1..80: mol_type = other DNA
ggatcacctgaggtcaggagttcaagaccagcctgaccagcatggagaaaccccatctctactgaaaatacaaaattagc

SEQ ID NO: 18640 - DNA, 80 bp, synthetic construct
  source 1..80: mol_type = other DNA
gaaagacaagccaaaactgtaaacgtcttggcattgtttgctaatttcagtaatcaagatgcttttttcccccaatgttt

SEQ ID NO: 18641 - DNA, 80 bp, synthetic construct; identical to SEQ ID NO: 8599
  source 1..80: mol_type = other DNA

SEQ ID NO: 18642 - DNA, 80 bp, synthetic construct
  source 1..80: mol_type = other DNA
tatgtatatgcccacaaaacgatcaccacaattaagatagtgaaaagcccatcatcctcagaagtttccttatgattctt

SEQ ID NO: 18643 - DNA, 80 bp, synthetic construct
  source 1..80: mol_type = other DNA
tttgcctgacataattatcttgagattcatccatgtttttggatcaataatttgttcctttttattgctgagtactattc

SEQ ID NO: 18644 - DNA, 80 bp, synthetic construct
  source 1..80: mol_type = other DNA
ttttgcctttttcctgcagtatgagcaaagctttgtgtggacatttgctttcttttcctttgggtaaataggagcaggat

SEQ ID NO: 18645 - DNA, 80 bp, synthetic construct; identical to SEQ ID NO: 8600
  source 1..80: mol_type = other DNA

SEQ ID NO: 18646 - DNA, 80 bp, synthetic construct
  source 1..80: mol_type = other DNA
attagccaggcatggtggcgtgcatctatagtcccagctacttgaggggctgaggctgaagtatctcttgaacccaggag

SEQ ID NO: 18647 - DNA, 80 bp, synthetic construct
  source 1..80: mol_type = other DNA
acttgtctgatttggtctgcactttgagtgagaggaaacaaaaacctcccgagataacttttattctaagcatgccttct

SEQ ID NO: 18648 - DNA, 80 bp, synthetic construct
  source 1..80: mol_type = other DNA
gcagaagtcaatgcatatcctcttggactatatctatctttttctcagtcttaacaccagattcccaaagataaagcttc

SEQ ID NO: 18649 - DNA, 80 bp, synthetic construct
  source 1..80: mol_type = other DNA
gaaataaaatgtgaaatagaaaacaagtaaggactaaaatcctatgaagaaaaatcaaataattgaaaaagaactaaaaa

SEQ ID NO: 18650 - DNA, 80 bp, synthetic construct; identical to SEQ ID NO: 8601
  source 1..80: mol_type = other DNA

SEQ ID NO: 18651 - DNA, 80 bp, synthetic construct
  source 1..80: mol_type = other DNA
caatcagagagaaactgattacctcccaaggaaccctattaaactcaaaggagacttctctacagcaacgatggaaacca

SEQ ID NO: 18652 - DNA, 80 bp, synthetic construct
  source 1..80: mol_type = other DNA
taaacaaaaactgatgtctccagcacggtctcacaaaggaacttttatactttcaaaaaagagaaaatgatccaaaaagg

SEQ ID NO: 18653 - DNA, 80 bp, synthetic construct
  source 1..80: mol_type = other DNA
aacagagctaaactttagagtcctgagtcctgttaatactcaatcctctgtgaaattcaattaagtgagcttcaagttaa

SEQ ID NO: 18654 - DNA, 80 bp, synthetic construct
  source 1..80: mol_type = other DNA
cgtggtggctacttgggaggctgaggcaggagaatcacctgaacctgggaggcggaggttgcagtgaccagagatcgtgc

SEQ ID NO: 18655 - DNA, 80 bp, synthetic construct; identical to SEQ ID NO: 8602
  source 1..80: mol_type = other DNA

SEQ ID NO: 18656 - DNA, 80 bp, synthetic construct
  source 1..80: mol_type = other DNA
tactcttattaatttaatgctggttttcctagatctttgtctttttttctggattttgggagatttctttccttgagtat

SEQ ID NO: 18657 - DNA, 80 bp, synthetic construct
  source 1..80: mol_type = other DNA
ttggattatctccagtttcctgaattatctgtttccttcaggataatctgttcatcttggtctttttctgtgatgctcta

SEQ ID NO: 18658 - DNA, 80 bp, synthetic construct
  source 1..80: mol_type = other DNA
ttgtgttgggacgctgacacactgcattagtaccttctagactatgagcaggggaatcgaggaacctctcagggctttgt

SEQ ID NO: 18659 - DNA, 80 bp, synthetic construct
  source 1..80: mol_type = other DNA
gctgacacactgcattagtactttgtagactgtgagcaggggaatcgaggaacctctcagggctttgtgttgggacgctg

SEQ ID NO: 18660 - DNA, 80 bp, synthetic construct
  source 1..80: mol_type = other DNA
cattagtactttctagactgtgagcaggggaatcgaggaacctctcagggctttgtgttgggacactgactcactgcatt

SEQ ID NO: 18661 - DNA, 80 bp, synthetic construct; identical to SEQ ID NO: 8603
  source 1..80: mol_type = other DNA

SEQ ID NO: 18662 - DNA, 80 bp, synthetic construct
  source 1..80: mol_type = other DNA
caggggaattgaggaacctctcagggctttgtgttgggacactgacacactgcattaatactttccaaactttatgttct

SEQ ID NO: 18663 - DNA, 80 bp, synthetic construct; identical to SEQ ID NO: 8604
  source 1..80: mol_type = other DNA

SEQ ID NO: 18664 - DNA, 80 bp, synthetic construct
  source 1..80: mol_type = other DNA
tggattcctacgggtaggaaaaacacagcccattcaaccaaatatactttaacccctagagatttagctttaacttgttt

SEQ ID NO: 18665 - DNA, 80 bp, synthetic construct
  source 1..80: mol_type = other DNA
aaagaatgtcgtcttagaatcagtttctaattacttgtgtgcagaagagtcctgcagctgtgaggtgatcacagtctttg

SEQ ID NO: 18666 - DNA, 80 bp, synthetic construct
  source 1..80: mol_type = other DNA
cagtttaataacagtcatcgttcatgatggcaaggttgtttactataaaaattccatccttcttgcctctgtgctgcccc

SEQ ID NO: 18667 - DNA, 80 bp, synthetic construct
  source 1..80: mol_type = other DNA
ttatgcttggggagggggaggttataaatttctagagggaactggattggcaatggtatgtttgatggtgaaatgccttg

SEQ ID NO: 18668 - DNA, 80 bp, synthetic construct; identical to SEQ ID NO: 8605
  source 1..80: mol_type = other DNA

SEQ ID NO: 18669 - DNA, 80 bp, synthetic construct
  source 1..80: mol_type = other DNA
tggctggatcacgaggtcaggagttcaagaccagcctggccaagatggtgaaaccccttctctactaaaaactacaaaaa

SEQ ID NO: 18670 - DNA, 80 bp, synthetic construct
  source 1..80: mol_type = other DNA
attgaacagcccattttgtgaaccacttcaaaaaaaagcaaacacattttcctctggcttttggctgttttaggaagaag

SEQ ID NO: 18671 - DNA, 80 bp, synthetic construct; identical to SEQ ID NO: 8606
  source 1..80: mol_type = other DNA

SEQ ID NO: 18672 - DNA, 80 bp, synthetic construct
  source 1..80: mol_type = other DNA
tttccattcttttcttaccatatgaccaagtaagtccaagaaagtagataggattctgagtgggcagtgaaggtggaaat

SEQ ID NO: 18673 - DNA, 80 bp, synthetic construct
  source 1..80: mol_type = other DNA
ttggtctgttggctctgaagccagcctttgctggatatattcagcctgttttgaagttgtgcagagaacctcacttgcgt

SEQ ID NO: 18674 - DNA, 80 bp, synthetic construct
  source 1..80: mol_type = other DNA
agtggcgtaccttaaacacatgtagaatgatttttttctttgcttttcccatttagccttttgaaacaggatacacagta

SEQ ID NO: 18675 - DNA, 80 bp, synthetic construct; identical to SEQ ID NO: 8607
  source 1..80: mol_type = other DNA

SEQ ID NO: 18676 - DNA, 80 bp, synthetic construct
  source 1..80: mol_type = other DNA
tagtgtgtactaaaagtatattattttggcttattttgagattagataattcccagtggaattctccccttaaccatcta

SEQ ID NO: 18677 - DNA, 80 bp, synthetic construct
  source 1..80: mol_type = other DNA
atgaggaatacatattcagttatgacttagcattcacatatgcacacatacatgtacgtatatacatcacattcacacat

SEQ ID NO: 18678 - DNA, 80 bp, synthetic construct
  source 1..80: mol_type = other DNA
gcaacctccaccttccaggttcaagcagttctcctgtctcagcctcccaagtagctgggactacaggcatgcgccaccat

SEQ ID NO: 18679 - DNA, 80 bp, synthetic construct
  source 1..80: mol_type = other DNA
atttcattttgaaaaagataggctgtgactcattagtagtggatctcatgactaagaatggatcctgacccaagtttgaa

SEQ ID NO: 18680 - DNA, 80 bp, synthetic construct; identical to SEQ ID NO: 8608
  source 1..80: mol_type = other DNA

SEQ ID NO: 18681 - DNA, 80 bp, synthetic construct
  source 1..80: mol_type = other DNA
agttgtggaattctgttccctgaggatgttgggaaggacagattgtacttaccaagagcatttattgttgtttttatttt

SEQ ID NO: 18682 - DNA, 80 bp, synthetic construct
  source 1..80: mol_type = other DNA
cacttggaaattggctatatactcacgatagccaagaacaagaacactctcttacaccatcacatcattgccacacttaa

SEQ ID NO: 18683 - DNA, 80 bp, synthetic construct
  source 1..80: mol_type = other DNA
gtggagttattcatggagctgaagacttctgtgaagtaaaaaataaccacccagtgttaagtgtaactctcgtgtggaat

SEQ ID NO: 18684 - DNA, 80 bp, synthetic construct
  source 1..80: mol_type = other DNA
agagctttagggagtgcatcctttgctagttcataaagatgtattctgataacgggggaccaaaaggatatatcctgaat

SEQ ID NO: 18685 - DNA, 80 bp, synthetic construct; identical to SEQ ID NO: 8609
  source 1..80: mol_type = other DNA

SEQ ID NO: 18686 - DNA, 80 bp, synthetic construct
  source 1..80: mol_type = other DNA
ctcccgagtagctgggatgacaggcgggcatcaccacgcccagctaatttttgtatttttagtagagacggggtttcacc

SEQ ID NO: 18687 - DNA, 80 bp, synthetic construct
  source 1..80: mol_type = other DNA
agacgcttgataaacagtaagtcccatcttgctagtttcttctgtatttctccagggccactttaattgattctaaaatg

SEQ ID NO: 18688 - DNA, 80 bp, synthetic construct
  source 1..80: mol_type = other DNA
tatacaaatttctgtgtttttttgtccccccaacccctgcccttttaaagacatatagtaatatagtggggttataggtt

SEQ ID NO: 18689 - DNA, 80 bp, synthetic construct; identical to SEQ ID NO: 8610
  source 1..80: mol_type = other DNA

SEQ ID NO: 18690 - DNA, 80 bp, synthetic construct
  source 1..80: mol_type = other DNA
ttccttttggtacattcaccctgcagcagatgtcatggcttccaagtggaacttcactctctttcttactagttaagcta

SEQ ID NO: 18691 - DNA, 80 bp, synthetic construct
  source 1..80: mol_type = other DNA
ccacctgtgctagttatcaatttcttgcttgttatctccaaatccattctgctttgccatgtttcgtgacatgggaactg

SEQ ID NO: 18692 - DNA, 80 bp, synthetic construct; identical to SEQ ID NO: 8611
  source 1..80: mol_type = other DNA

SEQ ID NO: 18693 - DNA, 80 bp, synthetic construct
  source 1..80: mol_type = other DNA
ttcttagttcctccctcttcactctacctgccctttttaagacacatagtaatatagtgggctctaagtagtagacactt

SEQ ID NO: 18694 - DNA, 80 bp, synthetic construct
  source 1..80: mol_type = other DNA
aacatggtgaaaccccgtctctactaaaaatacaaaaattagctgggcatggtggtgcatgcctgtaatcccacctactc

SEQ ID NO: 18695 - DNA, 80 bp, synthetic construct
  source 1..80: mol_type = other DNA
tgtggaggttattgagtgatggcacagaaaggccaatcccaataaaagaaaatggaaaatgtttattacttccatttcca

SEQ ID NO: 18696 - DNA, 80 bp, synthetic construct; identical to SEQ ID NO: 8612
  source 1..80: mol_type = other DNA

SEQ ID NO: 18697 - DNA, 80 bp, synthetic construct
  source 1..80: mol_type = other DNA
attaaattttccctattgaaatgactggtgtggtttctgtctcctgactggtacatcacctcttcctcggaatttgcggg

SEQ ID NO: 18698 - DNA, 80 bp, synthetic construct
  source 1..80: mol_type = other DNA
gaagggcatttaagtgactttgccaacacaaacagtactgcaatgaagatatgccacactttgcaattagttattcactt

SEQ ID NO: 18699 - DNA, 80 bp, synthetic construct
  source 1..80: mol_type = other DNA
atttctgtgatttctttttgtatttttgaagctcttttcttaggtcagggccaccatggctttttgttgcattgatctct

SEQ ID NO: 18700 - DNA, 80 bp, synthetic construct; identical to SEQ ID NO: 8613
  source 1..80: mol_type = other DNA

SEQ ID NO: 18701 - DNA, 80 bp, synthetic construct
  source 1..80: mol_type = other DNA
ccccacccgaagctgacttttgcattgtatcagtgcagaatccagcagacgatcatatttgctggtacctcacccccagg

SEQ ID NO: 18702 - DNA, 80 bp, synthetic construct
  source 1..80: mol_type = other DNA
ggaaaagggtttgcaagtgagttcagacaggaattctagtgttacaccagcccatgctcagctccataagaattcattaa

SEQ ID NO: 18703 - DNA, 80 bp, synthetic construct
  source 1..80: mol_type = other DNA
aattcagttcacctgatggccttgtggcctcagctctctgattagctcaagaaaagttaggattttgttgattatctggc

SEQ ID NO: 18704 - DNA, 80 bp, synthetic construct; identical to SEQ ID NO: 8614
  source 1..80: mol_type = other DNA

SEQ ID NO: 18705 - DNA, 80 bp, synthetic construct
  source 1..80: mol_type = other DNA
tctatatgtgtatgggtataaaatttgtttttcggaatcatttgggagtaggtcacaacattttgtccttttatccctta

SEQ ID NO: 18706 - DNA, 80 bp, synthetic construct
  source 1..80: mol_type = other DNA
acccccttgggtgtaggatccagtcctggatcatggattgcattaatttgtcatgatctttaatatcctgtaagctggaa

SEQ ID NO: 18707 - DNA, 80 bp, synthetic construct
  source 1..80: mol_type = other DNA
atattacagaagtaatgctgtatctttctcatggtgttacatccatttgcataccttgtctttctgcctgtcgttaatga

SEQ ID NO: 18708 - DNA, 80 bp, synthetic construct; identical to SEQ ID NO: 8615
  source 1..80: mol_type = other DNA

SEQ ID NO: 18709 - DNA, 80 bp, synthetic construct
  source 1..80: mol_type = other DNA
gggagaagcacattacacagtatcaatcagaaaggaatatttctgtctgagctttcactttgagtggagggcaaagaaaa

SEQ ID NO: 18710 - DNA, 80 bp, synthetic construct
  source 1..80: mol_type = other DNA
tttaagtcttccctaactcagagtttccatagatcattgcagccaatatgaacacaccaaaaaaggacatacacacacac

SEQ ID NO: 18711 - DNA, 80 bp, synthetic construct
  source 1..80: mol_type = other DNA
ggggaagcaaaagaaggaattgaaaatatgaggaaagagagagatacatcaaaaacaaccaggcagttttatttttaaaa

SEQ ID NO: 18712 - DNA, 80 bp, synthetic construct
  source 1..80: mol_type = other DNA
agaaataacacagactgaagctaatagaaacaaagggatgtaaaccacgagaggctcagagatatagtgagaaggtccaa

SEQ ID NO: 18713 - DNA, 80 bp, synthetic construct; identical to SEQ ID NO: 8616
  source 1..80: mol_type = other DNA

SEQ ID NO: 18714 - DNA, 80 bp, synthetic construct
  source 1..80: mol_type = other DNA
gtctttcttcccgcagctttatccatgctgtgaggggcctcatgcacacatgtgtacatacttcagcctgcatatctaag

SEQ ID NO: 18715 - DNA, 80 bp, synthetic construct
  source 1..80: mol_type = other DNA
tgcagtggtctgatcatagctcattacagccttgaacttctggactcatgcagtcctcctgagtagttgggactacatta

SEQ ID NO: 18716 - DNA, 80 bp, synthetic construct
  source 1..80: mol_type = other DNA
cattccactttgataatagacctgtggaaaaggcccatgcaagtcctgaatgtgggcatggattcaattaagtagggaat

SEQ ID NO: 18717 - DNA, 80 bp, synthetic construct; identical to SEQ ID NO: 8617
  source 1..80: mol_type = other DNA

SEQ ID NO: 18718 - DNA, 80 bp, synthetic construct
  source 1..80: mol_type = other DNA
ctataccaagagtggaactactgaaacagtgttttcaaagtaggcagtgaaaataactgttgatctagaattgtgtagcc

SEQ ID NO: 18719 - DNA, 80 bp, synthetic construct
  source 1..80: mol_type = other DNA
ttgccagaggaaactgacatttgagctgggggactaggagaggaagacccaccctcaacgtgggtgggcaccatccagtt

SEQ ID NO: 18720 - DNA, 80 bp, synthetic construct
  source 1..80: mol_type = other DNA
taccagtggcttgccaggggctcttgggcttttgccacagactaatggctgcactgttggcttccctggttttgaggctt

SEQ ID NO: 18721 - DNA, 80 bp, synthetic construct; identical to SEQ ID NO: 8618
  source 1..80: mol_type = other DNA

SEQ ID NO: 18722 - DNA, 80 bp, synthetic construct
  source 1..80: mol_type = other DNA
gcaagaaagaaatcaagttaacgacagaatttcattttcacccaggaagtagacacagggtcccttggggctcattttgg

SEQ ID NO: 18723 - DNA, 80 bp, synthetic construct
  source 1..80: mol_type = other DNA
cacatggtagctcgcatggtaacataagtgagtcttggcagtgttgccagggacaggatgactttaatttcattcctcct

SEQ ID NO: 18724 - DNA, 80 bp, synthetic construct; identical to SEQ ID NO: 8619
  source 1..80: mol_type = other DNA

SEQ ID NO: 18725 - DNA, 80 bp, synthetic construct
  source 1..80: mol_type = other DNA
gagccccagaactaccccatgcagctgctttctagtttctaatcaggtgctttttcactaacaccatcttgcctctacaa

SEQ ID NO: 18726 - DNA, 80 bp, synthetic construct
  source 1..80: mol_type = other DNA
gctgggattacaggtgcccgccaccatgcccacctagtttttgtatttttagtagagacggggtttcatcatgttggcca

SEQ ID NO: 18727 - DNA, 80 bp, synthetic construct
  source 1..80: mol_type = other DNA
attgatggatttctttaaaagttttttccatagatctatttgcccatcacctctccaactcctccagcatctgccccctt

SEQ ID NO: 18728 - DNA, 80 bp, synthetic construct; identical to SEQ ID NO: 8620
  source 1..80: mol_type = other DNA

SEQ ID NO: 18729 - DNA, 80 bp, synthetic construct
  source 1..80: mol_type = other DNA
caatgaagcttcatctgtatttacagccgctccccatagtactcattactgcctgagctccgcctcctgtcagatcagtg

SEQ ID NO: 18730 - DNA, 80 bp, synthetic construct
  source 1..80: mol_type = other DNA
cccagataggactgtctagttgcaggaaaacaagctcagggctcccactgattctacattacagtgggttgtataattat

SEQ ID NO: 18731 - DNA, 80 bp, synthetic construct
  source 1..80: mol_type = other DNA
cattggatcatgacacattactatcttgttgaattaaacgttgcaaactgcaacgtttgtaactgccagtaggcagtttt

SEQ ID NO: 18732 - DNA, 80 bp, synthetic construct
  source 1..80: mol_type = other DNA
accttagaccatagaaatatgtgtatttcctggccattcgatcatttgaaggccagattttatcaaaacaaatgaatcac

SEQ ID NO: 18733 - DNA, 80 bp, synthetic construct; identical to SEQ ID NO: 8621
  source 1..80: mol_type = other DNA

SEQ ID NO: 18734 - DNA, 80 bp, synthetic construct
  source 1..80: mol_type = other DNA
caggaacaatggactcacttggctttcaaaagggcagaatatactgagtatttctgactgcaggtttcttctttctggta

SEQ ID NO: 18735 - DNA, 80 bp, synthetic construct
  source 1..80: mol_type = other DNA
ttagtgttacccaagtggtttcttgtgagcatccatttgcatgcagttgggccttttgtccattggtgaactgctccttg

SEQ ID NO: 18736 - DNA, 80 bp, synthetic construct
  source 1..80: mol_type = other DNA
gcctgttcctggaagtggttccagaatagtctgttccttgtagctgttcctttgctcttaattttaaaagtgttttcccg

SEQ ID NO: 18737 - DNA, 80 bp, synthetic construct; identical to SEQ ID NO: 8622
  source 1..80: mol_type = other DNA

SEQ ID NO: 18738 - DNA, 80 bp, synthetic construct
  source 1..80: mol_type = other DNA
tactagtagtcctgctctgacttttctaaaacaagtttatattactttatttaaaaatgtttatgagagtgccttttaaa

SEQ ID NO: 18739 - DNA, 80 bp, synthetic construct
  source 1..80: mol_type = other DNA
ccagctactcgggaggctgaggcaggagaattgcttgaacctgggaggtagaggttgcagtgagccaagatagtgccact

SEQ ID NO: 18740 - DNA, 80 bp, synthetic construct
  source 1..80: mol_type = other DNA
gtggattgcttgagcccaggagttcaagaccagcttgggcaacatagcgaaacctcatctctacaaaaagctgggcatgg

SEQ ID NO: 18741 - DNA, 80 bp, synthetic construct; identical to SEQ ID NO: 8623
  source 1..80: mol_type = other DNA

SEQ ID NO: 18742 - DNA, 80 bp, synthetic construct
  source 1..80: mol_type = other DNA
acaaaaaaactttttttgcctgtaatcccagctactcaggaggctgcggcaggagaaccacttgaacccgggaggtagag

SEQ ID NO: 18743 - DNA, 80 bp, synthetic construct
  source 1..80: mol_type = other DNA
tcacgagatcaggagttcaagaccagggtggccaagatggtgaaaccttgtctctactaaaactacaaaaattagccagg

SEQ ID NO: 18744 - DNA, 80 bp, synthetic construct
  source 1..80: mol_type = other DNA
aaaaaaaaaagaactttgaataaacttcgttgtgtcatattctatcgtaagatttattcttgtctttggagaacttagct

SEQ ID NO: 18745 - DNA, 80 bp, synthetic construct; identical to SEQ ID NO: 8624
  source 1..80: mol_type = other DNA

SEQ ID NO: 18746 - DNA, 80 bp, synthetic construct
  source 1..80: mol_type = other DNA
tctttgttgctaagaccttttctatgtttgacagttattccaaacacgttccatataggaatagtttgccaaatagaaga

SEQ ID NO: 18747 - DNA, 80 bp, synthetic construct
  source 1..80: mol_type = other DNA
ccttgatttaatttcttcagcaggtcagaattgatacagcttccagaagaaatagtagaagtaggcaaaagattagtttt

SEQ ID NO: 18748 - DNA, 80 bp, synthetic construct
  source 1..80: mol_type = other DNA
ttgagacatttctttccacattgcagttttgaaacattctaccccacactcatacatgaaagtgaaggctctgcttctca

SEQ ID NO: 18749 - DNA, 80 bp, synthetic construct; identical to SEQ ID NO: 8625
  source 1..80: mol_type = other DNA

SEQ ID NO: 18750 - DNA, 80 bp, synthetic construct
  source 1..80: mol_type = other DNA
aggcgggtggatcacgaggtcaggagtttgagaccaacctggccaatatggtgaaaccctgtctctactaaaaatacaaa

SEQ ID NO: 18751 - DNA, 80 bp, synthetic construct
  source 1..80: mol_type = other DNA
aaaaaaaaagaattggaagggaatggaggaagcaaggtggttaaacaaaaatcatctttacacacaccacccactctatg

SEQ ID NO: 18752 - DNA, 80 bp, synthetic construct
  source 1..80: mol_type = other DNA
cacccatcggagatgctccatagtgagatttaggataagtgcaaggtgagctttgcttttgtaaaatgcatgaagtgtga

SEQ ID NO: 18753 - DNA, 80 bp, synthetic construct; identical to SEQ ID NO: 8626
  source 1..80: mol_type = other DNA

SEQ ID NO: 18754 - DNA, 80 bp, synthetic construct
  source 1..80: mol_type = other DNA
gataatggcacttccttaaaaggtttgatgggatttcaatggaatattgcatagaaagtgcttgaggcattgtaagtaca

SEQ ID NO: 18755 - DNA, 80 bp, synthetic construct
  source 1..80: mol_type = other DNA
gtcaatcaaaaaaagctttgtgtaataatggacgctaccttgacagagtgtgttagtcaagagaggatacttatttataa

SEQ ID NO: 18756 - DNA, 80 bp, synthetic construct
  source 1..80: mol_type = other DNA
gcacctgtcaccaggcctggctaatttttgtattttttaggagagacggggtttcaccatcttggtcaggctggtctcga

SEQ ID NO: 18757 - DNA, 80 bp, synthetic construct
  source 1..80: mol_type = other DNA
cattttggtgaattactgtgtgtcaatcatgtaacctcaaacacagccaagattataaaacagttctctacgctgctttg

SEQ ID NO: 18758 - DNA, 80 bp, synthetic construct; identical to SEQ ID NO: 8627
  source 1..80: mol_type = other DNA

SEQ ID NO: 18759 - DNA, 80 bp, synthetic construct
  source 1..80: mol_type = other DNA
tttatccattttactagtggataacattagattgcttccaacttgaggctattatagtacagctgctatgaacatttgtg

SEQ ID NO: 18760 - DNA, 80 bp, synthetic construct
  source 1..80: mol_type = other DNA
tgcctgctgggttcaagcaattctcagcgtcagcctcccaagtagctgggattacaggggcccgccaccacacccagcta

SEQ ID NO: 18761 - DNA, 80 bp, synthetic construct
  source 1..80: mol_type = other DNA
atcttgctcaatcatgcaggctggagtgcagtggcacacttggctcactgcaacctccacctcctgggttcaagcgagtc

SEQ ID NO: 18762 - DNA, 80 bp, synthetic construct; identical to SEQ ID NO: 8628
  source 1..80: mol_type = other DNA

SEQ ID NO: 18763 - DNA, 80 bp, synthetic construct
  source 1..80: mol_type = other DNA
gttttgtttttgccccttatagatgtttcactgtcttttggctcatgtgttccgatgagaagtcagcccttcattgggtc

SEQ ID NO: 18764 - DNA, 80 bp, synthetic construct
  source 1..80: mol_type = other DNA
ctgcgtatcattaagtttgggcagtttttggctcttgtttcttctaaattttttctaccccattctccctgtccctctcc

SEQ ID NO: 18765 - DNA, 80 bp, synthetic construct
  source 1..80: mol_type = other DNA
ttggcctcctgggtttaagccatcctcctgcctcagcctctttgagtagctgggaccacaggcacgtgccaccacgcctg

SEQ ID NO: 18766 - DNA, 80 bp, synthetic construct; identical to SEQ ID NO: 8629
  source 1..80: mol_type = other DNA

SEQ ID NO: 18767 - DNA, 80 bp, synthetic construct
  source 1..80: mol_type = other DNA
aatagctgcttaaaatctttgtctattccagcattttgttgatctgcaggttagactggcagttgaactaatttgtccca

SEQ ID NO: 18768 - DNA, 80 bp, synthetic construct
  source 1..80: mol_type = other DNA
ggttttcttggctgggtttgaacacaaatgtgtttctctctgagatctttagtctgtagctgagctgctttgtgtctgtc

SEQ ID NO: 18769 - DNA, 80 bp, synthetic construct
  source 1..80: mol_type = other DNA
atggcgcgatctcagctcactgcaacccctacctcccgggttcaagcgattctcctgcctcagcctcctgagtagctggg

SEQ ID NO: 18770 - DNA, 80 bp, synthetic construct; identical to SEQ ID NO: 8630
  source 1..80: mol_type = other DNA

SEQ ID NO: 18771 - DNA, 80 bp, synthetic construct
  source 1..80: mol_type = other DNA
ggaaaattcagatagttaacaaaatattttgaggataaaaaggaaaggaatctgttatctggaggtagaataacttggcc

SEQ ID NO: 18772 - DNA, 80 bp, synthetic construct
  source 1..80: mol_type = other DNA
ttattatcagctaaagagatcttaaagttgactaaacacctggaaattaaaacttaggccaacacatcaaagtctttatg

SEQ ID NO: 18773 - DNA, 80 bp, synthetic construct; identical to SEQ ID NO: 8631
  source 1..80: mol_type = other DNA

SEQ ID NO: 18774 - DNA, 80 bp, synthetic construct
  source 1..80: mol_type = other DNA
gcctgaggcagaaaaacggcgtgaacccaggaggcggatctcggcagtgagctcacaccagtggctcacacttgtaatcc

SEQ ID NO: 18775 - DNA, 80 bp, synthetic construct
  source 1..80: mol_type = other DNA
tgcctgtaatcccagctacttaggaggctgaggcaggagaatcgcttgaacccgggaggtggaggttgcagtgagccagg

SEQ ID NO: 18776 - DNA, 80 bp, synthetic construct
  source 1..80: mol_type = other DNA
agatcctactggacctataaaactaatgtagttaatttagaaggtttaaatcacgagaagttaagcccaaatcttgggtt

SEQ ID NO: 18777 - DNA, 80 bp, synthetic construct; identical to SEQ ID NO: 8632
  source 1..80: mol_type = other DNA

SEQ ID NO: 18778 - DNA, 80 bp, synthetic construct
  source 1..80: mol_type = other DNA
gcacagtcttggctcactgcaacctctgcctcctgggttcaagtgattctcctgcctcagcctcccgagtagctgggact

SEQ ID NO: 18779 - DNA, 80 bp, synthetic construct
  source 1..80: mol_type = other DNA
ctataacaacattttcaaagtggcacattttaatatgaataaaccttctacaatcacaggcctagaaagtttttcttttt

SEQ ID NO: 18780 - DNA, 80 bp, synthetic construct
  source 1..80: mol_type = other DNA
gattgatctccaaagtttcccaagaaaagagaaaaagtaggaggggaaggaagaaagaagtgagcagaagttggcttcag

SEQ ID NO: 18781 - DNA, 80 bp, synthetic construct; identical to SEQ ID NO: 8633
  source 1..80: mol_type = other DNA

SEQ ID NO: 18782 - DNA, 80 bp, synthetic construct
  source 1..80: mol_type = other DNA
atgatttaaaataggaagaaagcaggtgtctggcccagaggaccagattaagaagaccccatgagagttacaatagttag

SEQ ID NO: 18783 - DNA, 80 bp, synthetic construct
  source 1..80: mol_type = other DNA
atacaaacatggatcagatataatttcaacccacaaggagctcacagtctggctcttcttttgaggcaaaaagactaaag

SEQ ID NO: 18784 - DNA, 80 bp, synthetic construct
  source 1..80: mol_type = other DNA
ttagtaagccaggccagctctatttcctgtgaggactttaaaaaaaattgcattcacacatttaaaaattagcataagca

SEQ ID NO: 18785 - DNA, 80 bp, synthetic construct; identical to SEQ ID NO: 8634
  source 1..80: mol_type = other DNA

SEQ ID NO: 18786 - DNA, 80 bp, synthetic construct
  source 1..80: mol_type = other DNA
gtcaggagtccgagactagcctggccaacatggtgaaaccccatctctactaaaaatacaaaaacttagctgggcgtagt

SEQ ID NO: 18787 - DNA, 80 bp, synthetic construct
  source 1..80: mol_type = other DNA
catacctgcatggtattctattgtgtgagtaggccatcatccagtggtcttcaaactttcctgtgtactccgtaacagaa

SEQ ID NO: 18788 - DNA, 80 bp, synthetic construct
  source 1..80: mol_type = other DNA
ttttagtagagacgggatttcaccgtgttggccaggctggtcttgaactcctgacttcaagtgatctgcccgccgtggcc

SEQ ID NO: 18789 - DNA, 80 bp, synthetic construct; identical to SEQ ID NO: 8635
  source 1..80: mol_type = other DNA

SEQ ID NO: 18790 - DNA, 80 bp, synthetic construct
  source 1..80: mol_type = other DNA
ccatgttggtcaggctggtctcgaactcctgacctcaggtgatcccccccacctcagcttttcaaagtgttgggattaca

SEQ ID NO: 18791 - DNA, 80 bp, synthetic construct
  source 1..80: mol_type = other DNA
aaaattttgacttcatttttttaaatcaaataagcatgttaacccggtattgctgtgacaacctttatcctaatttcttt

SEQ ID NO: 18792 - DNA, 80 bp, synthetic construct
  source 1..80: mol_type = other DNA
tgggactacaggcatgcaccaccacgcctggctaatttttgtatttttagtagagatggggtttcaccgtgttggccagg

SEQ ID NO: 18793 - DNA, 80 bp, synthetic construct
  source 1..80: mol_type = other DNA
acttgcctcgcattcatcttttacataaaataagacagtttcaccttgaacacttctgtggtgagactgtttagtcttgt

SEQ ID NO: 18794 - DNA, 80 bp, synthetic construct; identical to SEQ ID NO: 8636
  source 1..80: mol_type = other DNA

SEQ ID NO: 18795 - DNA, 80 bp, synthetic construct
  source 1..80: mol_type = other DNA
aggtaaaatgaaaatccagggcagctggggcagctagagttcacaggcagagaaacaaagaggcaagagatgcacagaga

SEQ ID NO: 18796 - DNA, 80 bp, synthetic construct
  source 1..80: mol_type = other DNA
cctgttcccagtagcagagtagaacatttcatgattcaggggtattgattggagtactaagaagagttgtattagtgaag

SEQ ID NO: 18797 - DNA, 80 bp, synthetic construct
  source 1..80: mol_type = other DNA
ataagtcccaaaaatctgcagggcgagtcagcaagatggagacttaggagagccaatgatgtggctatagtccaaaggct

SEQ ID NO: 18798 - DNA, 80 bp, synthetic construct
  source 1..80: mol_type = other DNA
gcagttaggctggaagaattctcttttactcaggaaagggtcagattttttgttcaattcaggcctttaacagattgaat

SEQ ID NO: 18799 - DNA, 80 bp, synthetic construct
  source 1..80: mol_type = other DNA
agtcttgcctcaatagttgggaaaaattaatcctagaataaatgctattctggtcttgcttagcaaaggttaagagcaag

SEQ ID NO: 18800 - DNA, 80 bp, synthetic construct; identical to SEQ ID NO: 8637
  source 1..80: mol_type = other DNA

SEQ ID NO: 18801 - DNA, 80 bp, synthetic construct
  source 1..80: mol_type = other DNA
gaggccaaggtaggtggatcacctgaggtcaggagttcaagaccagcctagccaacatggtgaaaccccacctctactaa

SEQ ID NO: 18802 - DNA, 80 bp, synthetic construct
  source 1..80: mol_type = other DNA
cacaaaaaagaaagatacagagatgaaaaatacactgaagactgtcagaataaacattgcacaagtaaagatttgtgatt

SEQ ID NO: 18803 - DNA, 80 bp, synthetic construct; identical to SEQ ID NO: 8638
  source 1..80: mol_type = other DNA

SEQ ID NO: 18804 - DNA, 80 bp, synthetic construct
  source 1..80: mol_type = other DNA
cttaagatcagggtgacaccagatttctcattggaaacaatgtaagccaggttaacagtggaacaatacatttaaagcaa

SEQ ID NO: 18805 - DNA, 80 bp, synthetic construct
  source 1..80: mol_type = other DNA
gatatgcagtacaagaaatatcaaaggatgtaattaaagcagaaagagaatgataactggtagaaaactggagccaccag

SEQ ID NO: 18806 - DNA, 80 bp, synthetic construct; identical to SEQ ID NO: 8639
  source 1..80: mol_type = other DNA

SEQ ID NO: 18807 - DNA, 80 bp, synthetic construct
  source 1..80: mol_type = other DNA
gtcaggagttcgagaccagcctgaccaacagggtgaaactttgtctctactaaaaatacaaaaattagccgggcatggtg

SEQ ID NO: 18808 - DNA, 80 bp, synthetic construct
  source 1..80: mol_type = other DNA
aagttgggataaatatctttaaataatccaaaagatggcagaaaaaaaaactaaacaggaaaagcaaacagagcagatgg

SEQ ID NO: 18809 - DNA, 80 bp, synthetic construct
  source 1..80: mol_type = other DNA
aagccaagtgagactccatctctacaaaaaaaaaaaaaaaaaaaaaaattagccaggtgtggtggtgtagttccactcag

SEQ ID NO: 18810 - DNA, 80 bp, synthetic construct
  source 1..80: mol_type = other DNA
agacctatttatatttatatgctgtctacagttatcccactttgaatataaaaatacaaatacgttaaaagcaaaagagt

SEQ ID NO: 18811 - DNA, 80 bp, synthetic construct; identical to SEQ ID NO: 8640
  source 1..80: mol_type = other DNA

SEQ ID NO: 18812 - DNA, 80 bp, synthetic construct
  source 1..80: mol_type = other DNA
tacacgttcttttcaagtgcatatggaactgtttccaagacaaatcattttctgggccattttaaaagcctcagtagacc

SEQ ID NO: 18813 - DNA, 80 bp, synthetic construct; identical to SEQ ID NO: 8641
  source 1..80: mol_type = other DNA

SEQ ID NO: 18814 - DNA, 80 bp, synthetic construct
  source 1..80: mol_type = other DNA
gaggctgaggcaggagaatcacttgaacccgggaggatgaggttgcagtgagccgagatggtgtcactgcactccagcct

SEQ ID NO: 18815 - DNA, 80 bp, synthetic construct
  source 1..80: mol_type = other DNA
gtcaaagaaaatcaacagcgaagtaagtaagtatctggaactgaatgaaggtgaaagtgccacataaaatttgtgtgatg

SEQ ID NO: 18816 - DNA, 80 bp, synthetic construct
  source 1..80: mol_type = other DNA
cccacttttagaaattagaaaaaatgaagactagtgaaaccccaattaagcagaagaaaaagccagtgtggccaggcagg

SEQ ID NO: 18817 - DNA, 80 bp, synthetic construct
  source 1..80: mol_type = other DNA
actcaggaggctgaggcaggagaatcgctttaaccagggagtcggaggttgcagtgaaccgagatcgcgccattgcactc

SEQ ID NO: 18818 - DNA, 80 bp, synthetic construct; identical to SEQ ID NO: 8642
  source 1..80: mol_type = other DNA

SEQ ID NO: 18819 - DNA, 80 bp, synthetic construct
  source 1..80: mol_type = other DNA
tcacgaggtcaggagaccgagaccatccttgctaacacggtgaaaccccgtctccactaaaaatacaaaaaattctccgg

SEQ ID NO: 18820 - DNA, 80 bp, synthetic construct
  source 1..80: mol_type = other DNA
aaaataaagtttagtaaaataaaaaaaatcagtaaaatacaaataaaatttagtaaaaataaagctgattctaaaatgca

SEQ ID NO: 18821 - DNA, 80 bp, synthetic construct
  source 1..80: mol_type = other DNA
ccagcctggccaacatggtgaaaccccatctctactaaaagtacaaaaattagtcaggcgtgatagcacacgcctgtaat

SEQ ID NO: 18822 - DNA, 80 bp, synthetic construct; identical to SEQ ID NO: 8643
  source 1..80: mol_type = other DNA

SEQ ID NO: 18823 - DNA, 80 bp, synthetic construct
  source 1..80: mol_type = other DNA
ggtatttccttagtttcttctccctacagcagccagagctaatcattttaaatgtcatatttctgtctcgcctcagctgc

SEQ ID NO: 18824 - DNA, 80 bp, synthetic construct
  source 1..80: mol_type = other DNA
tactaaaaatacaaaaattagctgggcgtgatggcgcctgtaatcccagctacttgggaggctgaggcaagagaatcgcc

SEQ ID NO: 18825 - DNA, 80 bp, synthetic construct
  source 1..80: mol_type = other DNA
cactataacctctgacttacctccttttacactccttcttgctgactctgttccttccacattggcctctttgctcttgc

SEQ ID NO: 18826 - DNA, 80 bp, synthetic construct; identical to SEQ ID NO: 8644
  source 1..80: mol_type = other DNA

SEQ ID NO: 18827 - DNA, 80 bp, synthetic construct
  source 1..80: mol_type = other DNA
ttttttttttgagacagaatcttgctctgtctcaaattccctccagccatgagccctgaaatgaaacaagttatctattt

SEQ ID NO: 18828 - DNA, 80 bp, synthetic construct
  source 1..80: mol_type = other DNA
tcactacaacctccgcctcccgggttcaagcgattctcctgcctcagcctcccaagtagctgggattagaggcatgcacc

SEQ ID NO: 18829 - DNA, 80 bp, synthetic construct; identical to SEQ ID NO: 8645
  source 1..80: mol_type = other DNA

SEQ ID NO: 18830 - DNA, 80 bp, synthetic construct
  source 1..80: mol_type = other DNA
ctaacattcttaaatatctgctagccgtaataaagaaatcaatgtactttatattcttagctctcacaatttagcctaaa

SEQ ID NO: 18831 - DNA, 80 bp, synthetic construct
  source 1..80: mol_type = other DNA
tcctagccaatcaggacaaatacagaatgtgaggtcctgttccagccaatggaaactggacacagcagtagggtggacgc

SEQ ID NO: 18832 - DNA, 80 bp, synthetic construct
  source 1..80: mol_type = other DNA
ctaacagatccatatgtgtcgctgcatgtaatcagtggttcattcctttctattgctgagtagtgttccattgtatggat

SEQ ID NO: 18833 - DNA, 80 bp, synthetic construct; identical to SEQ ID NO: 8646
  source 1..80: mol_type = other DNA

SEQ ID NO: 18834 - DNA, 80 bp, synthetic construct
  source 1..80: mol_type = other DNA
tcccagcactttgagagaccgaggagggtggatcacttgaggccaggagattgagaccagcttggccaacatggcgaaac

SEQ ID NO: 18835 - DNA, 80 bp, synthetic construct
  source 1..80: mol_type = other DNA
caaaactccatttcaaaaaaaaataaaataaaatttcagtttatcagtgatttctcttaagtttcatgcattgggtattg

SEQ ID NO: 18836 - DNA, 80 bp, synthetic construct
  source 1..80: mol_type = other DNA
gggtttcggatgttctagcaccatttgttcaacagatagcctcttttcattaaattgccctttcacctttgtggaagatc

SEQ ID NO: 18837 - DNA, 80 bp, synthetic construct; identical to SEQ ID NO: 8647
  source 1..80: mol_type = other DNA

SEQ ID NO: 18838 - DNA, 80 bp, synthetic construct
  source 1..80: mol_type = other DNA
accctgtctctattaaaaatacaaaaattagctgagcgtggtggcacatgcctgtagtcccagctactcgggaggctgag

SEQ ID NO: 18839 - DNA, 80 bp, synthetic construct
  source 1..80: mol_type = other DNA
acagctgcctctctaatgttcgttgaatgaaagggccattcccaaatctctgataagtcaagcatttttaggagagctaa

SEQ ID NO: 18840 - DNA, 80 bp, synthetic construct
  source 1..80: mol_type = other DNA
agcctccccagtagctgggactacgggcacacaccaccatgcccggctactttttttttgtatttttagtagagatggag

SEQ ID NO: 18841 - DNA, 80 bp, synthetic construct; identical to SEQ ID NO: 8648
  source 1..80: mol_type = other DNA

SEQ ID NO: 18842 - DNA, 80 bp, synthetic construct
  source 1..80: mol_type = other DNA
ttcagaggacacttggcttctctataccctatctttggtgacttctgcttgttggacttcagtcactgcagttcacaagt

SEQ ID NO: 18843 - DNA, 80 bp, synthetic construct
  source 1..80: mol_type = other DNA
tttccatgagagatttaacagttggaactgtactgcccataagatgcaggtggggtcatggtatgtagttgggaactcta

SEQ ID NO: 18844 - DNA, 80 bp, synthetic construct
  source 1..80: mol_type = other DNA
tcaacctgtattccatctccccactcccacccagtcttgatcatctcatttgtgtgtatacaaccttcccctcacacaca

SEQ ID NO: 18845 - DNA, 80 bp, synthetic construct; identical to SEQ ID NO: 8649
  source 1..80: mol_type = other DNA

SEQ ID NO: 18846 - DNA, 80 bp, synthetic construct
  source 1..80: mol_type = other DNA
tatttttttttcgagacagagtctcactctgtcactcaagctggagtgcagtggtgcaatctcggctcactgcagcctcc

SEQ ID NO: 18847 - DNA, 80 bp, synthetic construct
  source 1..80: mol_type = other DNA
agcctcagcctcccaaagtgctgggattacaggcgtgagccaccgcacctggccccacaatccagttttagaacatttcc

SEQ ID NO: 18848 - DNA, 80 bp, synthetic construct
  source 1..80: mol_type = other DNA
tcccagcatgtttttgaggtttatctgtattatagcacgtctcagtactttgttccctttttatcactgagtattattcc

SEQ ID NO: 18849 - DNA, 80 bp, synthetic construct; identical to SEQ ID NO: 8650
  source 1..80: mol_type = other DNA

SEQ ID NO: 18850 - DNA, 80 bp, synthetic construct
  source 1..80: mol_type = other DNA
agtgcgcgatctcagctcactgcaagctctgcctcccgggttcatgccattctcccgcctcagcctcccaagtactggga

SEQ ID NO: 18851 - DNA, 80 bp, synthetic construct
  source 1..80: mol_type = other DNA
caaattttgtatttttagtagagacgaggtttcaccatgttgatcaggctggtctcaaactcctgacctcaggtgatcca

SEQ ID NO: 18852 - DNA, 80 bp, synthetic construct
  source 1..80: mol_type = other DNA
gttccagtttttccatgtccttgccaatagttggttttgtctgcctacctatccccgcccctgctttttttttttttttt

SEQ ID NO: 18853 - DNA, 80 bp, synthetic construct; identical to SEQ ID NO: 8651
  source 1..80: mol_type = other DNA

SEQ ID NO: 18854 - DNA, 80 bp, synthetic construct
  source 1..80: mol_type = other DNA
tttttattaagtttgtgcactgtcttattatcgagtggtaagagttctctgtattgtgggtacaagttcttttttttttc

SEQ ID NO: 18855 - DNA, 80 bp, synthetic construct
  source 1..80: mol_type = other DNA
ttagtagagacgggatttcaccatcttggccagacgggtctcaaactactgacctcgtgatcctcccacctcggcctccc

SEQ ID NO: 18856 - DNA, 80 bp, synthetic construct
  source 1..80: mol_type = other DNA
gaatgttttttaggagctggacactgggctgcatgtttcacggggatgatttgggtcactcttcaattttctaaaggtta

SEQ ID NO: 18857 - DNA, 80 bp, synthetic construct; identical to SEQ ID NO: 8652
  source 1..80: mol_type = other DNA

SEQ ID NO: 18858 - DNA, 80 bp, synthetic construct
  source 1..80: mol_type = other DNA
tgcctgttgctttgaagaacctgacccagaagtcttacacagcacttttgcccacataccatcacttagtcatgtggtag

SEQ ID NO: 18859 - DNA, 80 bp, synthetic construct
  source 1..80: mol_type = other DNA
cgagagccagtgttgggattgcagggtcctgtgtgggattcctgttcattttcatcaaagaaagtctagttgatatgcaa

SEQ ID NO: 18860 - DNA, 80 bp, synthetic construct
  source 1..80: mol_type = other DNA
tcctaaaagtgtatcttttgaagagattgattataaggtattggctcatgagatgatggagcttaagaagtcccacagtc

SEQ ID NO: 18861 - DNA, 80 bp, synthetic construct
  source 1..80: mol_type = other DNA
aaatccaaccttcctttttctgtttttttgttctaatcaggccctcaacggactggaggatgcccagccaaagtggggag

SEQ ID NO: 18862 - DNA, 80 bp, synthetic construct; identical to SEQ ID NO: 8653
  source 1..80: mol_type = other DNA

SEQ ID NO: 18863 - DNA, 80 bp, synthetic construct
  source 1..80: mol_type = other DNA
gaacagtttctccaaggttaactgtagctgctcttgttcagttaatatgtagttctggattaatatgccacatctgtcac

SEQ ID NO: 18864 - DNA, 80 bp, synthetic construct
  source 1..80: mol_type = other DNA
aagaaataaacattaactcccctttagtatttcatttctagggtttccagccttggtaacaattaccaagaactttgctg

SEQ ID NO: 18865 - DNA, 80 bp, synthetic construct
  source 1..80: mol_type = other DNA
ctaatccctgctgggttttacactgtggggaggtttagacaacttgttttctttcccttttagcccttctctctacactc

SEQ ID NO: 18866 - DNA, 80 bp, synthetic construct; identical to SEQ ID NO: 8654
  source 1..80: mol_type = other DNA

SEQ ID NO: 18867 - DNA, 80 bp, synthetic construct
  source 1..80: mol_type = other DNA
taaaaaggtaaagggacagagacatctcatgaaaacatggcaaaatctctttaagtttaattcaagcacttagagtttaa

SEQ ID NO: 18868 - DNA, 80 bp, synthetic construct
  source 1..80: mol_type = other DNA
tttcagcctagtgtcctaaaacttgtctgtcatgggtacctagtaggtgtcatgtcacaggaaagggatctaacaaggga

SEQ ID NO: 18869 - DNA, 80 bp, synthetic construct
  source 1..80: mol_type = other DNA
gtcggcgcaatttcggctcactgcaacctccacctcctgggttcaggcgattctcctgtctgagcctcctgagtagctgg

SEQ ID NO: 18870 - DNA, 80 bp, synthetic construct; identical to SEQ ID NO: 8655
  source 1..80: mol_type = other DNA

SEQ ID NO: 18871 - DNA, 80 bp, synthetic construct
  source 1..80: mol_type = other DNA
aagctgaaatcaaggggatcaattgagagcctataaaaggagggtttagattcttcaaacccctcccaaccccacagagt

SEQ ID NO: 18872 - DNA, 80 bp, synthetic construct
  source 1..80: mol_type = other DNA
gtgaaacaccatctctactaaaaatacaaaaaattagccgggcgtggtggcgggcgcctgtagtcccagctactcaggag

SEQ ID NO: 18873 - DNA, 80 bp, synthetic construct
  source 1..80: mol_type = other DNA
cagcatgggtccgggtaggccattggccgaaaatagtggagtgggcaaagagcagattttttaaaagtctgcatactgaa

SEQ ID NO: 18874 - DNA, 80 bp, synthetic construct; identical to SEQ ID NO: 8656
  source 1..80: mol_type = other DNA

SEQ ID NO: 18875 - DNA, 80 bp, synthetic construct
  source 1..80: mol_type = other DNA
caaatagcagaaaacaggaacttggtggaaataaagacaatgcagtcaacagaggaagagtttaaaagaactattcagct

SEQ ID NO: 18876 - DNA, 80 bp, synthetic construct
  source 1..80: mol_type = other DNA
aatacaaaaattaactgaacatggtggcaggcacctgtaatcccagctattgggaggctgaggcaggagaattgcttgaa

SEQ ID NO: 18877 - DNA, 80 bp, synthetic construct; identical to SEQ ID NO: 8657
  source 1..80: mol_type = other DNA

SEQ ID NO: 18878 - DNA, 80 bp, synthetic construct
  source 1..80: mol_type = other DNA
ccacacctggctaatttttaaattttttgtagagagatggggtctcactatgttgcccaggctggtcttgaactcctggg

SEQ ID NO: 18879 - DNA, 80 bp, synthetic construct
  source 1..80: mol_type = other DNA
agacaaagacatggactgttgagagaacaataagagagaacaggtaagaaaattagaaactctcgggaggctgagacagg

SEQ ID NO: 18880 - DNA, 80 bp, synthetic construct
  source 1..80: mol_type = other DNA
ccagaaagaaaacaaaaaaataatgataataacgaagaaacaaatggaggagaagttaggagacgttaaatgtaaggaaa

SEQ ID NO: 18881 - DNA, 80 bp, synthetic construct; identical to SEQ ID NO: 8658
  source 1..80: mol_type = other DNA

SEQ ID NO: 18882 - DNA, 80 bp, synthetic construct
  source 1..80: mol_type = other DNA
ctgtgaagctactggatgatgaattccagcaaaatgaagaagtcagtcaataagtagaactgagcccgggcacggtggct

SEQ ID NO: 18883 - DNA, 80 bp, synthetic construct
  source 1..80: mol_type = other DNA
ggaggctgaggcaggagaatggcgtggtgaacccgggaggcggagcttgcagtgggcggagatcgcgccactgcactccc

SEQ ID NO: 18884 - DNA, 80 bp, synthetic construct
  source 1..80: mol_type = other DNA
aaatgaaaacaaggcaatatctctaggataaacaaagatgtataataaaggaaacattcatagtatattattggctaagc

SEQ ID NO: 18885 - DNA, 80 bp, synthetic construct; identical to SEQ ID NO: 8659
  source 1..80: mol_type = other DNA

SEQ ID NO: 18886 - DNA, 80 bp, synthetic construct
  source 1..80: mol_type = other DNA
agtagtcttactgtaatgagattttctagaaagcggatttactctaaggcagttcagatttggtccccagctgagaatta

SEQ ID NO: 18887 - DNA, 80 bp, synthetic construct
  source 1..80: mol_type = other DNA
atgaaaggtggggctctctgttacatttgaaccttagttgctactcctacctcacagctagtgtttctttctcttcataa

SEQ ID NO: 18888 - DNA, 80 bp, synthetic construct; identical to SEQ ID NO: 8660
  source 1..80: mol_type = other DNA

SEQ ID NO: 18889 - DNA, 80 bp, synthetic construct
  source 1..80: mol_type = other DNA
tgacacataactcgtgaccagcaggtagtgctacccgattgaaaaaatgtgagacttaaagggatgcatgtgtccctata

SEQ ID NO: 18890 - DNA, 80 bp, synthetic construct
  source 1..80: mol_type = other DNA
aatcagagaaagtgggctttgttggcatttgcatgtgaaatactgtgcacatacctcaagatctttgctgttccccccct

SEQ ID NO: 18891 - DNA, 80 bp, synthetic construct
  source 1..80: mol_type = other DNA
aatcctgcctccttcccttgacacacttctatggtgggtgcctgcccaactttttcttaataggactaaattccaaatta

SEQ ID NO: 18892 - DNA, 80 bp, synthetic construct; identical to SEQ ID NO: 8661
  source 1..80: mol_type = other DNA

SEQ ID NO: 18893 - DNA, 80 bp, synthetic construct
  source 1..80: mol_type = other DNA
gtagctgggattacaggtgtgtaccaccatgcctggctaatttttgtatttttagtagagacaggatttccccatgttgg

SEQ ID NO: 18894 - DNA, 80 bp, synthetic construct
  source 1..80: mol_type = other DNA
cacatattctgattctagactagaaaccaagactccgcattttaagcaagccccacattattcaaaatagattgtccatg

SEQ ID NO: 18895 - DNA, 80 bp, synthetic construct
  source 1..80: mol_type = other DNA
caggttcaagcaattctctgcctcagcctcccgagtagctgggattacagatgcccgctaccacgcccagctaatttttt

SEQ ID NO: 18896 - DNA, 80 bp, synthetic construct; identical to SEQ ID NO: 8662
  source 1..80: mol_type = other DNA

SEQ ID NO: 18897 - DNA, 80 bp, synthetic construct
  source 1..80: mol_type = other DNA
agttcacagtctttaatttctttccttttccctttctttttagctaatagcttttgggtcttaggctgattagaaggaat

SEQ ID NO: 18898 - DNA, 80 bp, synthetic construct
  source 1..80: mol_type = other DNA
tgatacagaagtgtagtttggcagttttttcagtatccattgccactaattcagtattttgttagatctgttgatgtatg

SEQ ID NO: 18899 - DNA, 80 bp, synthetic construct
  source 1..80: mol_type = other DNA
aggcaagcaaatatctgggcctatattaacagacggtattcaaggatatggctagaatttccaaaatgcctaataatgtg

SEQ ID NO: 18900 - DNA, 80 bp, synthetic construct
  source 1..80: mol_type = other DNA
acccttttgagtgttatttttggcattacgtgtagaggttgacagattcaagacaacactaaacatgttagcagtcacca

SEQ ID NO: 18901 - DNA, 80 bp, synthetic construct; identical to SEQ ID NO: 8663
  source 1..80: mol_type = other DNA

SEQ ID NO: 18902 - DNA, 80 bp, synthetic construct
  source 1..80: mol_type = other DNA
attacaggataggctagaaagtagccagggtctcataaccaaggctttctctgaaacatataatgacaatgctagttatt

SEQ ID NO: 18903 - DNA, 80 bp, synthetic construct
  source 1..80: mol_type = other DNA
tgagcatctgtggggtttgtttgtttttaaacctgaagaattgggataatctgtttcctcacagaatcattacgcagatg

SEQ ID NO: 18904 - DNA, 80 bp, synthetic construct
  source 1..80: mol_type = other DNA
catgaggggaacttacctgattttattgaattatttggtgccattgagttccttattgtttccctctgacctagatttct

SEQ ID NO: 18905 - DNA, 80 bp, synthetic construct; identical to SEQ ID NO: 8664
  source 1..80: mol_type = other DNA

SEQ ID NO: 18906 - DNA, 80 bp, synthetic construct
  source 1..80: mol_type = other DNA
gagtagaaatgagaccagttagtattggtaactgcagaggaatatgcattttcaccagcgttctcgggtcagagggtttg

SEQ ID NO: 18907 - DNA, 80 bp, synthetic construct
  source 1..80: mol_type = other DNA
ggccgcgcgcggccttccccctgcgaggatcgccattggcccgggttggctttggaaagcggcggtggctttgggccggg

SEQ ID NO: 18908 - DNA, 80 bp, synthetic construct
  source 1..80: mol_type = other DNA
catgggcgggcgcgggcgcgcggggcggcggtgagggcggctggcggggccgggggcgccgggggggcgcgcgggccgag

SEQ ID NO: 18909 - DNA, 80 bp, synthetic construct
  source 1..80: mol_type = other DNA
gccgcacgggttgggctgagtagccgcgcgccctcccgctgctgctgggcccttcctaggcctcgccgcccgcgcgctcc

SEQ ID NO: 18910 - DNA, 80 bp, synthetic construct
  source 1..80: mol_type = other DNA
tttctcgcgatggcccctaggcgccgccggcggagcgtggcccccagccccggcaccagccccggtagagccacgccgga

SEQ ID NO: 18911 - DNA, 80 bp, synthetic construct
  source 1..80: mol_type = other DNA
atgcgatttccattaagcatcatgtacacaaggagcaccactctaccatttatggatacagaatttcaagtgatctttcc

SEQ ID NO: 18912 - DNA, 80 bp, synthetic construct
  source 1..80: mol_type = other DNA
ggcttcacttttgcgttctttctacctactctccttctctaattacatctgttttattttatttttctttcctgttgtag

SEQ ID NO: 18913 - DNA, 80 bp, synthetic construct; identical to SEQ ID NO: 8665
  source 1..80: mol_type = other DNA

SEQ ID NO: 18914 - DNA, 80 bp, synthetic construct
  source 1..80: mol_type = other DNA
acgcctgtaatcccagctactcgggaggctgaggcaggagaattgcttgaacccggcagggggaggttgcagtgagccaa

SEQ ID NO: 18915 - DNA, 80 bp, synthetic construct
  source 1..80: mol_type = other DNA
aacaggcctcatttattttctaacctatttttctttccttaacctctgactctaccctgaaggcctgcttggagtcacat

SEQ ID NO: 18916 - DNA, 80 bp, synthetic construct
  source 1..80: mol_type = other DNA
ctaggtggagtgggctcacagagcctagcatttggagggtggagattgtttatttgtccctaaaagttgatgtctgagca

SEQ ID NO: 18917 - DNA, 80 bp, synthetic construct; identical to SEQ ID NO: 8666
  source 1..80: mol_type = other DNA

SEQ ID NO: 18918 - DNA, 80 bp, synthetic construct
  source 1..80: mol_type = other DNA
cagactgccttgggttaaaccttcttctaggaaggtgtcactctaggaattctttcttactgagttttcttcttttcgtt

SEQ ID NO: 18919 - DNA, 80 bp, synthetic construct
  source 1..80: mol_type = other DNA
aaagactggaagtgctatttgtcttttgggaaaaatagttcctaacatctggatgagtaatccaggctttccactttcac

SEQ ID NO: 18920 - DNA, 80 bp, synthetic construct; identical to SEQ ID NO: 8667
  source 1..80: mol_type = other DNA

SEQ ID NO: 18921 - DNA, 80 bp, synthetic construct
  source 1..80: mol_type = other DNA
tgaactcatgctatctggcttgggagagcccacttttagccactggatgctctactgatgtctcttttggaattcactgt

SEQ ID NO: 18922 - DNA, 80 bp, synthetic construct
  source 1..80: mol_type = other DNA
atcctaaaagggtatttagtgaaaagtaattccctctcctattcattttccccacctagaggcaatcaccctggagtttt

SEQ ID NO: 18923 - DNA, 80 bp, synthetic construct
  source 1..80: mol_type = other DNA
tttctgattatttctttcccctggagacgtcaaagaaaacatgaacactagccttttgaattcagggttttcttttcatt

SEQ ID NO: 18924 - DNA, 80 bp, synthetic construct; identical to SEQ ID NO: 8668
  source 1..80: mol_type = other DNA

SEQ ID NO: 18925 - DNA, 80 bp, synthetic construct
  source 1..80: mol_type = other DNA
tgcactcagcctgaactttcgaaatttattttaagggcccacttttaaatgcttcttttcagcagctaactttccagcgg

SEQ ID NO: 18926 - DNA, 80 bp, synthetic construct
  source 1..80: mol_type = other DNA
gtccatttcattttgggtgctattaacattgttgaccatttacaatgtcacaggccctggcactgagcacatcatgtgca

SEQ ID NO: 18927 - DNA, 80 bp, synthetic construct
  source 1..80: mol_type = other DNA
tctgttcagccaccttagaggattgttttgagggtctataagatgattgagggaaagctctgaaactggtaagagttaaa

SEQ ID NO: 18928 - DNA, 80 bp, synthetic construct
  source 1..80: mol_type = other DNA
ggtcttgcgcattcaccgaggctcactgtaccttggtgttcccatttctaaaataaggcctgtagtaatccctacctcac

SEQ ID NO: 18929 - DNA, 80 bp, synthetic construct; identical to SEQ ID NO: 8669
  source 1..80: mol_type = other DNA

SEQ ID NO: 18930 - DNA, 80 bp, synthetic construct
  source 1..80: mol_type = other DNA
tcctgtccagagacaatatttccacagcctcaaacgtgaaaactgaaaatctggtgccacttaccaccttgtaaaatcaa

SEQ ID NO: 18931 - DNA, 80 bp, synthetic construct
  source 1..80: mol_type = other DNA
ttttcctccataatggtggatcttaattaaacacacagaagaacaatttataaaataaattcataggtttgtttgttctt

SEQ ID NO: 18932 - DNA, 80 bp, synthetic construct
  source 1..80: mol_type = other DNA
gcctaaaactgtctcaaaagtagacagcataatgaactcccatgtacttatgatgtggctttaacaattatcagcttata

SEQ ID NO: 18933 - DNA, 80 bp, synthetic construct; identical to SEQ ID NO: 8670
  source 1..80: mol_type = other DNA

SEQ ID NO: 18934 - DNA, 80 bp, synthetic construct
  source 1..80: mol_type = other DNA
cgggggtttcaccatgttagccaggatggtctccatctcctgacctcgtgatccgcccacctcggcctcccaaagccctg

SEQ ID NO: 18935 - DNA, 80 bp, synthetic construct
  source 1..80: mol_type = other DNA
gcgcggtggctgacgcctgtaatcccagcactttgggaggccgaggcaggtggtcacctgaggtcaggagttcgagacca

SEQ ID NO: 18936 - DNA, 80 bp, synthetic construct
  source 1..80: mol_type = other DNA
tactccagcctgggcaacgagcaaaaactccagctcaaaaaaaaaagttggttttcaaatccttctttctttaccatgtt

SEQ ID NO: 18937 - DNA, 80 bp, synthetic construct; identical to SEQ ID NO: 8671
  source 1..80: mol_type = other DNA

SEQ ID NO: 18938 - DNA, 80 bp, synthetic construct
  source 1..80: mol_type = other DNA
tcagtaacttcacatctctctgtttccatttcctgccctcaaatgccttcataatagagtctacgtaataaggttatagg

SEQ ID NO: 18939 - DNA, 80 bp, synthetic construct
  source 1..80: mol_type = other DNA
gcgttgttcattgaataccttaaaattgtatttaaagacaggccgtgaatacaattaggcattgctttttgaagccaaaa

SEQ ID NO: 18940 - DNA, 80 bp, synthetic construct
  source 1..80: mol_type = other DNA
gctgaccccggagtccatgaagacatgttaaaagaagaggaaatgtgaatgctttcaaaccagccatggctggcagcaga

SEQ ID NO: 18941 - DNA, 80 bp, synthetic construct; identical to SEQ ID NO: 8672
  source 1..80: mol_type = other DNA

SEQ ID NO: 18942 - DNA, 80 bp, synthetic construct
  source 1..80: mol_type = other DNA
taacagattattaaactgcacttttcagtaccttgtagctaaagacagacaagtgcagggtgttccacatctgagttcac

SEQ ID NO: 18943 - DNA, 80 bp, synthetic construct
  source 1..80: mol_type = other DNA
ataagagaagacgcggttgttctgtagtgagcatcccagtgtcaggtgccacagttggcatccatgcagaaattctctgc

SEQ ID NO: 18944 - DNA, 80 bp, synthetic construct; identical to SEQ ID NO: 8673
  source 1..80: mol_type = other DNA

SEQ ID NO: 18945 - DNA, 80 bp, synthetic construct
  source 1..80: mol_type = other DNA
caggagaggcaagcaacaggaggcctgggggatctgaaaggagtttggagaggctggaatggaaagcaggagtagagggc

SEQ ID NO: 18946 - DNA, 80 bp, synthetic construct
  source 1..80: mol_type = other DNA
agctaccctgcaaagcacatcatgatcccagcattgcccccgatgacactgccagtaagtggtagctgaccattgggaga

SEQ ID NO: 18947 - DNA, 80 bp, synthetic construct
  source 1..80: mol_type = other DNA
gggcgtggtagagcatggaaaggacagaagtgatgagagattgaggaggaaaagtgccaagatgcagggtgggaactgac

SEQ ID NO: 18948 - DNA, 80 bp, synthetic construct; identical to SEQ ID NO: 8674
  source 1..80: mol_type = other DNA

SEQ ID NO: 18949 - DNA, 80 bp, synthetic construct
  source 1..80: mol_type = other DNA
gaatgacaagagtgaaactcggtttccccaccaaacaaaaaaagaaatacctagtttctaccagagacagtcacaggcac

SEQ ID NO: 18950 - DNA, 80 bp, synthetic construct
  source 1..80: mol_type = other DNA
gcactaaggaattggctcagtaaaacctcagcattctcacaggaagagcctaaaaaggagactgggataaattagtgaga

SEQ ID NO: 18951 - DNA, 80 bp, synthetic construct
  source 1..80: mol_type = other DNA
tacatgacaatgtcttagccagacaatttttaagaaacaaaattctccatcctaactcctatccccatcaacagtccaaa

SEQ ID NO: 18952 - DNA, 80 bp, synthetic construct; identical to SEQ ID NO: 8675
  source 1..80: mol_type = other DNA

SEQ ID NO: 18953 - DNA, 80 bp, synthetic construct
  source 1..80: mol_type = other DNA
atctaaaaaaaaaaaaattcatccacaggacagcgctggccttccgttagacttttgctgttgagtctgtaagttttcag

SEQ ID NO: 18954 - DNA, 80 bp, synthetic construct
  source 1..80: mol_type = other DNA
agcagctgacacagtgttttgggatttgaagataacacaaaggctgtgttcagttaaacgtatgtctgtgtgtgtgtgtg

SEQ ID NO: 18955 - DNA, 80 bp, synthetic construct
  source 1..80: mol_type = other DNA
gaaaagttgtttgagactgttataaaataacttgagaatagtctgagcatgatctcatccgctggaacggagtatgaaat

SEQ ID NO: 18956 - DNA, 80 bp, synthetic construct; identical to SEQ ID NO: 8676
  source 1..80: mol_type = other DNA

SEQ ID NO: 18957 - DNA, 80 bp, synthetic construct
  source 1..80: mol_type = other DNA
ccccccttgggctgtgaagtagccggtactggggttcatgggcatttcccttccctgactgttcgccagcgtctggcaca

SEQ ID NO: 18958 - DNA, 80 bp, synthetic construct
  source 1..80: mol_type = other DNA
gtctaaacaagttaatcatgcacagatccagtgaattctgtggcctggttcttataaaatttccaaataattttatactg

SEQ ID NO: 18959 - DNA, 80 bp, synthetic construct
  source 1..80: mol_type = other DNA
ggagtgagaggcacttttgaagatccagatcttagatccagatcttaaatctgtttaaagtatgactcagaaaggaggct

SEQ ID NO: 18960 - DNA, 80 bp, synthetic construct; identical to SEQ ID NO: 8677
  source 1..80: mol_type = other DNA

SEQ ID NO: 18961 - DNA, 80 bp, synthetic construct
  source 1..80: mol_type = other DNA
ctatgaaatgaagcaagtaacttggcatttatacattgtgagtcaattttgacatcagcctggattgggaattgactgga

SEQ ID NO: 18962 - DNA, 80 bp, synthetic construct
  source 1..80: mol_type = other DNA
tcaaaaagcagtgggaggccctttccttcctaacaaaggcctcatcctcttgcataacattcccagcatctgtcgacatg

SEQ ID NO: 18963 - DNA, 80 bp, synthetic construct
  source 1..80: mol_type = other DNA
ggcatttgagaagaaaagcatttctgtattcatgactttggtttaatttcctgtgtgggcctggtctgccaaagttgtat

SEQ ID NO: 18964 - DNA, 80 bp, synthetic construct
  source 1..80: mol_type = other DNA
tttgggaggctgaggtgagtagatcacttgagaccaggagttcaagaccagcctggccaacatggcaaaaccccgtctct

SEQ ID NO: 18965 - DNA, 80 bp, synthetic construct; identical to SEQ ID NO: 8678
  source 1..80: mol_type = other DNA

SEQ ID NO: 18966 - DNA, 80 bp, synthetic construct
  source 1..80: mol_type = other DNA
aaaccagcctggccaacatggtgaaaccccatctctactaaaaatacaaaaaaagtagccgagtgtggtggcgggcacct

SEQ ID NO: 18967 - DNA, 80 bp, synthetic construct
  source 1..80: mol_type = other DNA
taaaatcccaccaccctgagttaactactgttcacagtttggtgaaattcctcctcgtcttctattttttcatagttggg

SEQ ID NO: 18968 - DNA, 80 bp, synthetic construct
  source 1..80: mol_type = other DNA
tgcatgcagcataaactaacttatcctgtgttgatagatattttgtacttgcccttttctgtgctgttgtttaaaattag

SEQ ID NO: 18969 - DNA, 80 bp, synthetic construct; identical to SEQ ID NO: 8679
  source 1..80: mol_type = other DNA

SEQ ID NO: 18970 - DNA, 80 bp, synthetic construct
  source 1..80: mol_type = other DNA
tacaggcatgcgccaccatgcccggctaatttgtgtatttttagtagagacggggtttcaccatattggccaggttagtc

SEQ ID NO: 18971 - DNA, 80 bp, synthetic construct
  source 1..80: mol_type = other DNA
ttttcttgttggtatgtaaagtccttgtgtgtcaagaatgctctgcctcacagtttttctaatataatgacagtggaagc

SEQ ID NO: 18972 - DNA, 80 bp, synthetic construct
  source 1..80: mol_type = other DNA
tcatgtttgtttccaagcctggttctttcagatatagctgttgttgtaattacttggttgatatgaaaccaatgaaatgc

SEQ ID NO: 18973 - DNA, 80 bp, synthetic construct; identical to SEQ ID NO: 8680
  source 1..80: mol_type = other DNA

SEQ ID NO: 18974 - DNA, 80 bp, synthetic construct
  source 1..80: mol_type = other DNA
cgtgcctcagcatcctgagtagttggggctacaggtgtgcaccaccacgcccaactaatttttatatttttagtagagac

SEQ ID NO: 18975 - DNA, 80 bp, synthetic construct
  source 1..80: mol_type = other DNA
tacatttcaaaggacagtctttggccctacagtcaagactaccaaaccaatgtacactaaatgggggtggggatcacgtt

SEQ ID NO: 18976 - DNA, 80 bp, synthetic construct
  source 1..80: mol_type = other DNA
tgggactacaggtgcccgccaccacgcccagctaatttttttgtatttttagtagagacggggcttcaccgtgttagtca

SEQ ID NO: 18977 - DNA, 80 bp, synthetic construct; identical to SEQ ID NO: 8681
  source 1..80: mol_type = other DNA

SEQ ID NO: 18978 - DNA, 80 bp, synthetic construct
  source 1..80: mol_type = other DNA
tggtttatgttctgttggtttatcccaaagagatgttttagagcacattcatttctgaaagttctcggtcatgtttccgg

SEQ ID NO: 18979 - DNA, 80 bp, synthetic construct
  source 1..80: mol_type = other DNA
ctctaaatccatagagaaggaaaactaaaacaattttgttaccatttgtttggctcaagcatctggtagatccttcagtt

SEQ ID NO: 18980 - DNA, 80 bp, synthetic construct
  source 1..80: mol_type = other DNA
cccgggttcaggcaattctccggcctcagtctcctgagtagctgggattacaggtacccgccactaattttcatattttt

SEQ ID NO: 18981 - DNA, 80 bp, synthetic construct; identical to SEQ ID NO: 8682
  source 1..80: mol_type = other DNA

SEQ ID NO: 18982 - DNA, 80 bp, synthetic construct
  source 1..80: mol_type = other DNA
ctcagctcactgcaacctccgcctcccagactcaagcgattctcctacctcagcctcctgagtagctgggactagtagct

SEQ ID NO: 18983 - DNA, 80 bp, synthetic construct
  source 1..80: mol_type = other DNA
actgtgcctggcccagttagtgatttttaaattgtagttccttaaatgagtattttggatttcactccacaatgttcttc

SEQ ID NO: 18984 - DNA, 80 bp, synthetic construct
  source 1..80: mol_type = other DNA
tctggagcgtttgagccctgttcaaaaaaaaaaggcaagaagaaacttcaggaacaaataacctatttgaccctgtaatg

SEQ ID NO: 18985 - DNA, 80 bp, synthetic construct; identical to SEQ ID NO: 8683
  source 1..80: mol_type = other DNA

SEQ ID NO: 18986 - DNA, 80 bp, synthetic construct
  source 1..80: mol_type = other DNA
ctctgggagcggagaggactgggatagaaagtatttgtctttcattttaagcccttctgtacgatttgacttttcttttt

SEQ ID NO: 18987 - DNA, 80 bp, synthetic construct
  source 1..80: mol_type = other DNA
cggctgatttttgtatttgtagtaaagacaggatttcactgtgttggtcaggttggtcttgaactcctgacctcatgatc

SEQ ID NO: 18988 - DNA, 80 bp, synthetic construct
  source 1..80: mol_type = other DNA
ggctaatttttgtatgtctaatggagacagggtttcaccatgttggtcaagttggtctcaaactcctgaactcaggtgat

SEQ ID NO: 18989 - DNA, 80 bp, synthetic construct; identical to SEQ ID NO: 8684
  source 1..80: mol_type = other DNA

SEQ ID NO: 18990 - DNA, 80 bp, synthetic construct
  source 1..80: mol_type = other DNA
aattttctcttcctttttcttttttctgttcccccctttctcttccagaagcccttcagcggccagtagcatctgacttt

SEQ ID NO: 18991 - DNA, 80 bp, synthetic construct
  source 1..80: mol_type = other DNA
ccttttcgttgcactgtatgattttgtggccagtggagataacactctaagcataactaaaggtaaaagggttgtgggca

SEQ ID NO: 18992 - DNA, 80 bp, synthetic construct; identical to SEQ ID NO: 8685
  source 1..80: mol_type = other DNA

SEQ ID NO: 18993 - DNA, 80 bp, synthetic construct
  source 1..80: mol_type = other DNA
aaaactgaggctatacacttacctatctgttcagtacaaacaggaagcttcaaatgtaaacgtgaattctcatacactta

SEQ ID NO: 18994 - DNA, 80 bp, synthetic construct
  source 1..80: mol_type = other DNA
tctgatttggttcctttcttctcaggtgaaaagctccgggtcttaggctataatcacaatggggaatggtgtgaagccca

SEQ ID NO: 18995 - DNA, 80 bp, synthetic construct
  source 1..80: mol_type = other DNA
agtcctggccagaggtccatctcgctgagatacgaagggagggtgtaccattacaggatcaacactgcttctgatggcaa

SEQ ID NO: 18996 - DNA, 80 bp, synthetic construct; identical to SEQ ID NO: 8686
  source 1..80: mol_type = other DNA

SEQ ID NO: 18997 - DNA, 80 bp, synthetic construct
  source 1..80: mol_type = other DNA
tatcccctcccccacagacgcctggcacgtgggcttcttcctgcggatgaacacattcatggagaggtgtgtggacatac

SEQ ID NO: 18998 - DNA, 80 bp, synthetic construct
  source 1..80: mol_type = other DNA
ctgaggtattgctataatacctgcatctttgcattaaagaaagggaggcataaagagatcttgcccgatgtcaacctagt

SEQ ID NO: 18999 - DNA, 80 bp, synthetic construct
  source 1..80: mol_type = other DNA
tgcgatcttggctcactgcaacctctgcttcccatgctcaagtgatcctcccaccttagccttccgagtagttgggacca

SEQ ID NO: 19000 - DNA, 80 bp, synthetic construct
  source 1..80: mol_type = other DNA
gtagctgggattacaggcatgcaccaccacacccagctaattttgtatttttagtagagacagggtttcaccatgttggt

SEQ ID NO: 19001 - DNA, 80 bp, synthetic construct; identical to SEQ ID NO: 8687
  source 1..80: mol_type = other DNA

SEQ ID NO: 19002 - DNA, 80 bp, synthetic construct
  source 1..80: mol_type = other DNA
tatgtggatgtttatattcaaaaaggcacgcaaatgatacatgcacgcgaatgcatcatgcttctcccgtgtgataatac

SEQ ID NO: 19003 - DNA, 80 bp, synthetic construct
  source 1..80: mol_type = other DNA
ggctttcaaaccttttcaaaaatctggttctgctgtaagaaaaactcattttacaccaccacccagccctcacaatataa

SEQ ID NO: 19004 - DNA, 80 bp, synthetic construct; identical to SEQ ID NO: 8688
  source 1..80: mol_type = other DNA

SEQ ID NO: 19005 - DNA, 80 bp, synthetic construct
  source 1..80: mol_type = other DNA
tgactggtaaagaatggcatctcattatgttgaatatccatgtggcatattttgggtcatctttatgccatttagtaaat

SEQ ID NO: 19006 - DNA, 80 bp, synthetic construct
  source 1..80: mol_type = other DNA
tatggcttcataccatgttgtggtatctgataggctagtccccacttacctttttaactttttttttttttggctgtctt

SEQ ID NO: 19007 - DNA, 80 bp, synthetic construct
  source 1..80: mol_type = other DNA
ggacaaaagagcctgttatccctgtgtgactagacgtgggcctgtcagcttgctttttgggttattgttcttatcccaga

SEQ ID NO: 19008 - DNA, 80 bp, synthetic construct; identical to SEQ ID NO: 8689
  source 1..80: mol_type = other DNA

SEQ ID NO: 19009 - DNA, 80 bp, synthetic construct
  source 1..80: mol_type = other DNA
gagggagaatctgcctaagatgcctctgtctaaaagctagtatgtgccaggtgggtttgtttcattccaggtagagcaca

SEQ ID NO: 19010 - DNA, 80 bp, synthetic construct
  source 1..80: mol_type = other DNA
gaggttccttcctgtgagggccgcactcgagggggtgtattgggtgggatcgtatcactggaatgagtgaacatcgttag

SEQ ID NO: 19011 - DNA, 80 bp, synthetic construct
  source 1..80: mol_type = other DNA
taaattagctcatctttagaaaacaactgaatttagaagattcttctgtaaggccccaaaggatttctttctgcctcccc

SEQ ID NO: 19012 - DNA, 80 bp, synthetic construct
  source 1..80: mol_type = other DNA
tcctaggagccttgacaggctcaaacatctctgggtacccggggatttgactgtcattgttctgatcctttcccaaagtt

SEQ ID NO: 19013 - DNA, 80 bp, synthetic construct; identical to SEQ ID NO: 8690
  source 1..80: mol_type = other DNA

SEQ ID NO: 19014 - DNA, 80 bp, synthetic construct
  source 1..80: mol_type = other DNA
gccttcctgctggtgtgtgagcagctctcgggggaacttgcttcctggctgagcaacctgtaaacagtatgtctgaggtg

SEQ ID NO: 19015 - DNA, 80 bp, synthetic construct
  source 1..80: mol_type = other DNA
agtggcacaatctcggctcattgcaacctgcgcctcccaggttcgagcgattctcctgcatcagcctctcaagtagctga

SEQ ID NO: 19016 - DNA, 80 bp, synthetic construct; identical to SEQ ID NO: 8691
  source 1..80: mol_type = other DNA

SEQ ID NO: 19017 - DNA, 80 bp, synthetic construct
  source 1..80: mol_type = other DNA
ccttgactgttagtgggacacggggaagatggctgtgaaccaaatatgcggtgcctttgggggagaatggttttagtatt

SEQ ID NO: 19018 - DNA, 80 bp, synthetic construct
  source 1..80: mol_type = other DNA
aagaagaaattctgcgtaaactaggacttaggggagcccttagcattccactttggagtgaaggaacccgatccgccagt

SEQ ID NO: 19019 - DNA, 80 bp, synthetic construct
  source 1..80: mol_type = other DNA
ttgcaggaatgtcttcttggaatggcttttctcacttctctagagtccttggtagggagcacatcatcagctgagctaac

SEQ ID NO: 19020 - DNA, 80 bp, synthetic construct
  source 1..80: mol_type = other DNA
gacgtcaccgtgtggttatgaagctaacggcagccctcagcggtgccgacttccgctccccgacacattcctgtgtgcac

SEQ ID NO: 19021 - DNA, 80 bp, synthetic construct; identical to SEQ ID NO: 8692
  source 1..80: mol_type = other DNA

SEQ ID NO: 19022 - DNA, 80 bp, synthetic construct
  source 1..80: mol_type = other DNA
tatctccccaagcaaaacaaaagaaagagaaaccttcctgttgacgaatcctttttaccttcttgagagttgtcaatggg

SEQ ID NO: 19023 - DNA, 80 bp, synthetic construct
  source 1..80: mol_type = other DNA
ataagatattacagttatagctgaagcctgatcctgttcccttttctccctctcgtcccaagcatcaccactgtcccaaa

SEQ ID NO: 19024 - DNA, 80 bp, synthetic construct; identical to SEQ ID NO: 8693
  source 1..80: mol_type = other DNA

SEQ ID NO: 19025 - DNA, 80 bp, synthetic construct
  source 1..80: mol_type = other DNA
tcctcgtgttggatgtgtttagtggttttcatcttctggtcactatttcattctaggtttatcccctttaaattataaat

SEQ ID NO: 19026 - DNA, 80 bp, synthetic construct
  source 1..80: mol_type = other DNA
tgctcttaggtggagacagacagtaattaagcagataaacaggaaattatgagctagtagtgggtccattgctgagaagt

SEQ ID NO: 19027 - DNA, 80 bp, synthetic construct
  source 1..80: mol_type = other DNA
cagaggccctgaggccttttattgtgtctttttgcttgagcgagtaacttagagcacacgtagagaaagacagcagaagt

SEQ ID NO: 19028 - DNA, 80 bp, synthetic construct; identical to SEQ ID NO: 8694
  source 1..80: mol_type = other DNA

SEQ ID NO: 19029 - DNA, 80 bp, synthetic construct
  source 1..80: mol_type = other DNA
gaggtgtacgagggcgtgtggaagaaatacagcctgacggtggccgtgaagaccttgaaggtaggctgggactgccgggg

SEQ ID NO: 19030 - DNA, 80 bp, synthetic construct
  source 1..80: mol_type = other DNA
tatatcattcctgtgtctttgtaggagtggaatcattctcatagtccgagtgtgtttccacatatggtgagagctgacaa

SEQ ID NO: 19031 - DNA, 80 bp, synthetic construct
  source 1..80: mol_type = other DNA
aagaagatttaaccaaaatgcatttgactcttctgtggatttttgttggctgatttggaaggcaggtgccctgggcatcc

SEQ ID NO: 19032 - DNA, 80 bp, synthetic construct
  source 1..80: mol_type = other DNA
tgtagtttccaggcaggtttttttcttcttttgaagttctttgaaacccttaggacgccaagggaaggaagttttcattt

SEQ ID NO: 19033 - DNA, 80 bp, synthetic construct; identical to SEQ ID NO: 8695
  source 1..80: mol_type = other DNA

SEQ ID NO: 19034 - DNA, 80 bp, synthetic construct
  source 1..80: mol_type = other DNA
gaaaagatcacattctttagtcctagaaaccaaaggtggcttcctgatgctcttattcagcacgtgcctgtctttgaggc

SEQ ID NO: 19035 - DNA, 80 bp, synthetic construct
  source 1..80: mol_type = other DNA
ccccaaattggcgattctccttcctcagcctcacgagtagctgggattacaggcacccgccaccacacccagctaatttt

SEQ ID NO: 19036 - DNA, 80 bp, synthetic construct; identical to SEQ ID NO: 8696
  source 1..80: mol_type = other DNA

SEQ ID NO: 19037 - DNA, 80 bp, synthetic construct
  source 1..80: mol_type = other DNA
tgaccagctcagcaaactgagaatggcctagatttcagcacactttcaccaggatttgtcaaatgaaggaagattccaag

SEQ ID NO: 19038 - DNA, 80 bp, synthetic construct
  source 1..80: mol_type = other DNA
aaaacttccaagatcgggttgtacaacttgacatttgaggaaacgctacttcagtagatggtgctgtggcattgttttct

SEQ ID NO: 19039 - DNA, 80 bp, synthetic construct
  source 1..80: mol_type = other DNA
ttcccaagagcctaattaacttacgatctcacagttggtaaagaattacaggatgtcattgcgtggatttctgtgggcag

SEQ ID NO: 19040 - DNA, 80 bp, synthetic construct; identical to SEQ ID NO: 8697
  source 1..80: mol_type = other DNA

SEQ ID NO: 19041 - DNA, 80 bp, synthetic construct
  source 1..80: mol_type = other DNA
tgcgtgtgtattcctagctacttgggaggctgacatgggaggattacctgagcccgggaggttgaggctgcagtgagccg

SEQ ID NO: 19042 - DNA, 80 bp, synthetic construct
  source 1..80: mol_type = other DNA
tgtgcttactacatgtcgcatctcattgaatcctcacaaccttaagatccttccaggttgagcatcccggaccctaaaat

SEQ ID NO: 19043 - DNA, 80 bp, synthetic construct
  source 1..80: mol_type = other DNA
cgaaacacttgtagccccaagcctttcagttaagggacattcaccctgtatcaacattttaatgctgagaaaatggaaga

SEQ ID NO: 19044 - DNA, 80 bp, synthetic construct; identical to SEQ ID NO: 8698
  source 1..80: mol_type = other DNA

SEQ ID NO: 19045 - DNA, 80 bp, synthetic construct
  source 1..80: mol_type = other DNA
tacttttaaccgcaactccatagtgaacaagtcaagcaaccttgggtcattcatataccttccaggcagaaggaagacag

SEQ ID NO: 19046 - DNA, 80 bp, synthetic construct
  source 1..80: mol_type = other DNA
tagtcttgctatctgtgttaaagggaggacgtgcttaagaaaaccaacagtcaagtacaagaagctctaattttttttga

SEQ ID NO: 19047 - DNA, 80 bp, synthetic construct
  source 1..80: mol_type = other DNA
tacatcagtgtcttttttttctatgaatcagttctctaagtaatagaatttggaaaagaccgctggtgatctagctgtgg

SEQ ID NO: 19048 - DNA, 80 bp, synthetic construct
  source 1..80: mol_type = other DNA
ttaaacagtggaaaataatgtgcaggatatatttttttgaataggttgtcccaccctcgagttctgtgtctttcctgagt

SEQ ID NO: 19049 - DNA, 80 bp, synthetic construct; identical to SEQ ID NO: 8699
  source 1..80: mol_type = other DNA

SEQ ID NO: 19050 - DNA, 80 bp, synthetic construct
  source 1..80: mol_type = other DNA
gtgtttcggttttatttctcccaggaaatgggtgttagttggggagctccagaaagaagccgagaagaagggcagtcgta

SEQ ID NO: 19051 - DNA, 80 bp, synthetic construct
  source 1..80: mol_type = other DNA
tcctgggctttcctctcgagcttcaagtcccacctctggagtgtgaatcgccttcctcagtctaactctatccctccagt

SEQ ID NO: 19052 - DNA, 80 bp, synthetic construct
  source 1..80: mol_type = other DNA
actacaggtgcctgcgaccacgccggctaattttttgtatttttagtagagacagggtttcaccatgttagccaggatgg

SEQ ID NO: 19053 - DNA, 80 bp, synthetic construct; identical to SEQ ID NO: 8700
  source 1..80: mol_type = other DNA

SEQ ID NO: 19054 - DNA, 80 bp, synthetic construct
  source 1..80: mol_type = other DNA
ttttttcagacagagttttgcccagtagttcaggctggagtgcagtggcatgatctcagttcactgcaacggcctcccag

SEQ ID NO: 19055 - DNA, 80 bp, synthetic construct
  source 1..80: mol_type = other DNA
ccccagagaggccaagccatttttaaaaacagtgttctttttcatgctgtagaatacctgtgcttgggggtgagcaaaaa

SEQ ID NO: 19056 - DNA, 80 bp, synthetic construct
  source 1..80: mol_type = other DNA
aattagctgggcgtggtggcaggtgcctgtagtcccagctactcgggaggctgaggcaggagaatggtgtgaacctggga

SEQ ID NO: 19057 - DNA, 80 bp, synthetic construct; identical to SEQ ID NO: 8701
  source 1..80: mol_type = other DNA

SEQ ID NO: 19058 - DNA, 80 bp, synthetic construct
  source 1..80: mol_type = other DNA
cacaagtcattctcttaaccgctccgccgtaccgcccagaatgttcatctgcatctgggccagcctcgtcagtccgtgca

SEQ ID NO: 19059 - DNA, 80 bp, synthetic construct
  source 1..80: mol_type = other DNA
tttaatgaaagtaaaggaatgtcacagaattgcgtcagggatatttccagtttaacacaactacaaacgtaggctgtttt

SEQ ID NO: 19060 - DNA, 80 bp, synthetic construct
  source 1..80: mol_type = other DNA
taccacgcctggctaatttttgtatttttagtagagatggggtttcaccatgttgaccaggttgttccggaactcaggtg

SEQ ID NO: 19061 - DNA, 80 bp, synthetic construct; identical to SEQ ID NO: 8702
  source 1..80: mol_type = other DNA

SEQ ID NO: 19062 - DNA, 80 bp, synthetic construct
  source 1..80: mol_type = other DNA
actttttaaccatattgttgatcaagcaagattcttaaagccccagtcctatacgtgagcagcattgaatccccggatac

SEQ ID NO: 19063 - DNA, 80 bp, synthetic construct
  source 1..80: mol_type = other DNA
ttaattgacattaagagcagctcaccatttttaaagagcgataaattgtttccaagtttcagcctcacggagccctgagc

SEQ ID NO: 19064 - DNA, 80 bp, synthetic construct; identical to SEQ ID NO: 8703
  source 1..80: mol_type = other DNA

SEQ ID NO: 19065 - DNA, 80 bp, synthetic construct
  source 1..80: mol_type = other DNA
tgatagtcagttcagtagacagtagcattttttaagtcaaaaagaggcttagtgatgtaggccaaggtcaaggctctgtg

SEQ ID NO: 19066 - DNA, 80 bp, synthetic construct
  source 1..80: mol_type = other DNA
tctcccccttggcatttagataccatggacttgttaaaatgtgacatgtactgatgatccttatgaatttgttggtaggg

SEQ ID NO: 19067 - DNA, 80 bp, synthetic construct
  source 1..80: mol_type = other DNA
tcttgtcatgagggtctcttcccttaaatcaggtacatttcagattcttcaggtgatgttttttaggctgagtgtgttag

SEQ ID NO: 19068 - DNA, 80 bp, synthetic construct
  source 1..80: mol_type = other DNA
tgccctgttgcctgggggagaattgaaaagtttggccccaaaggggaaaattctttctgccatcaagttgctggtcagct

SEQ ID NO: 19069 - DNA, 80 bp, synthetic construct; identical to SEQ ID NO: 8704
  source 1..80: mol_type = other DNA

SEQ ID NO: 19070 - DNA, 80 bp, synthetic construct
  source 1..80: mol_type = other DNA
ggtgtgtgcgtgtgtgcacatatgcacatgtatgtatgagagggagaatgtgattattttaagtggatacctaaaagcag

SEQ ID NO: 19071 - DNA, 80 bp, synthetic construct
  source 1..80: mol_type = other DNA
tttccagagttttctcactgaagtgattctgtaagtagacacataaccatcagacctaaccattcaggggtaaactgacg

SEQ ID NO: 19072 - DNA, 80 bp, synthetic construct; identical to SEQ ID NO: 8705
  source 1..80: mol_type = other DNA

SEQ ID NO: 19073 - DNA, 80 bp, synthetic construct
  source 1..80: mol_type = other DNA
tacatggccactcagatctcgtcagccatggagtacctggagaagaaaaacttcatccacaggtaggggcctggccaggc

SEQ ID NO: 19074 - DNA, 80 bp, synthetic construct
  source 1..80: mol_type = other DNA
accagtggagcagctaatccccggagtaaggaatatttcatttttgaaccattttgggctaagtggaatattaaatgaag

SEQ ID NO: 19075 - DNA, 80 bp, synthetic construct
  source 1..80: mol_type = other DNA
tcttttcattctccacttaacttgctgtcctctgattcagggatgtttccacaattgtcagaattgtgtatgtggaggtc

SEQ ID NO: 19076 - DNA, 80 bp, synthetic construct; identical to SEQ ID NO: 8706
  source 1..80: mol_type = other DNA

SEQ ID NO: 19077 - DNA, 80 bp, synthetic construct
  source 1..80: mol_type = other DNA
ggccgggtccgttccttcttcattcaagcgaacttaaaatgctttatcaaaatcctcttaggcacaactcttctgtattt

SEQ ID NO: 19078 - DNA, 80 bp, synthetic construct
  source 1..80: mol_type = other DNA
agaggaagcagattatacaggagagagttttttaggatacatttgggtacacctcaggaagaaagagggaagtaggaaac

SEQ ID NO: 19079 - DNA, 80 bp, synthetic construct
  source 1..80: mol_type = other DNA
tattctcgacacttcaatcaaagcacttagcatattaattaattacactcacagcaaccctaagaggtaggtgccattat

SEQ ID NO: 19080 - DNA, 80 bp, synthetic construct; identical to SEQ ID NO: 8707
  source 1..80: mol_type = other DNA

SEQ ID NO: 19081 - DNA, 80 bp, synthetic construct
  source 1..80: mol_type = other DNA
agccaagttccccatcaaatggactgcacccgagagcctggcctacaacaagttctccatcaagtccgacgtctggggta

SEQ ID NO: 19082 - DNA, 80 bp, synthetic construct
  source 1..80: mol_type = other DNA
attgcagcctctccctcccgggttcaagcgattctcctgtctcagcatcttgagtagctgggattataggcacccgccac

SEQ ID NO: 19083 - DNA, 80 bp, synthetic construct
  source 1..80: mol_type = other DNA
tttttttaactgtgtatttggcctgaggtccaaatatggtgcacagtgtatctgctgatctgttaagtctcctctataag

SEQ ID NO: 19084 - DNA, 80 bp, synthetic construct; identical to SEQ ID NO: 8708
  source 1..80: mol_type = other DNA

SEQ ID NO: 19085 - DNA, 80 bp, synthetic construct
  source 1..80: mol_type = other DNA
tcctgcctcagcctcctgagtagctgggattataggcgcatgccaccacccccggctaatttttgtatttttagtagaga

SEQ ID NO: 19086 - DNA, 80 bp, synthetic construct
  source 1..80: mol_type = other DNA
aatttttggcagttactgatatacagtgcctagatccaatagtttgctaggtattgccaggtaggaattctctaattctg

SEQ ID NO: 19087 - DNA, 80 bp, synthetic construct; identical to SEQ ID NO: 8709
  source 1..80: mol_type = other DNA

SEQ ID NO: 19088 - DNA, 80 bp, synthetic construct
  source 1..80: mol_type = other DNA
gcctcccaagtagctgggattacaggtgcctgccaccacgcctggctaaatttttttgtatttttagtaaagatggggtt

SEQ ID NO: 19089 - DNA, 80 bp, synthetic construct
  source 1..80: mol_type = other DNA
gcccaggctggagtgcagtggcatgatctcagctcactgcaagctccgccttccgggttcacgtcattctcctgcctcag

SEQ ID NO: 19090 - DNA, 80 bp, synthetic construct
  source 1..80: mol_type = other DNA
cttaatacccttcagtggtggccaattaggtttttgctgtcattggtggtattatgaactctcagatttatatatatctg

SEQ ID NO: 19091 - DNA, 80 bp, synthetic construct; identical to SEQ ID NO: 8710
  source 1..80: mol_type = other DNA

SEQ ID NO: 19092 - DNA, 80 bp, synthetic construct
  source 1..80: mol_type = other DNA
catctgccctcctctagcatgtttgtggggtaagtttactgagtcttgttctgtcctggtctcctttttttttttttatt

SEQ ID NO: 19093 - DNA, 80 bp, synthetic construct
  source 1..80: mol_type = other DNA
tttttttttgagatggagtctcgctctgtcacccagcctggagtgcagtggcgcgatcttgatcttggctcactgcaagc

SEQ ID NO: 19094 - DNA, 80 bp, synthetic construct
  source 1..80: mol_type = other DNA
agccaccgtgcccggcccctaatttttgtatttttagtagagatggggtttcgccatgttggccagggtggtcttgaatt

SEQ ID NO: 19095 - DNA, 80 bp, synthetic construct; identical to SEQ ID NO: 8711
  source 1..80: mol_type = other DNA

SEQ ID NO: 19096 - DNA, 80 bp, synthetic construct
  source 1..80: mol_type = other DNA
tcctcagcctgttctcacgagtatatgtgggcattccaggaaattcaactgtgcaggagtgtgtacacaaagttgaaagt

SEQ ID NO: 19097 - DNA, 80 bp, synthetic construct
  source 1..80: mol_type = other DNA
ggtattgatagataccaaacctgggtgtattcctaaatacagattcctgggccctgctttcacagacattctgctatagt

SEQ ID NO: 19098 - DNA, 80 bp, synthetic construct
  source 1..80: mol_type = other DNA
tacaggcatgcaccaccacgcccggctaattttgtatttttagtagagatggggtttctccatgttagtcaggctggtct

SEQ ID NO: 19099 - DNA, 80 bp, synthetic construct; identical to SEQ ID NO: 8712
  source 1..80: mol_type = other DNA

SEQ ID NO: 19100 - DNA, 80 bp, synthetic construct
  source 1..80: mol_type = other DNA
aaacaaagcagaaacaaatattcatgtacacgaatctctgggcactttggctggtatttctaaaagttgaactgttggtt

SEQ ID NO: 19101 - DNA, 80 bp, synthetic construct
  source 1..80: mol_type = other DNA
gctttgtcagtctgtttagtcctcatgttagtctcattttcatgagaatttctttacttcagactttgataaccgtgaag

SEQ ID NO: 19102 - DNA, 80 bp, synthetic construct; identical to SEQ ID NO: 8713
  source 1..80: mol_type = other DNA

SEQ ID NO: 19103 - DNA, 80 bp, synthetic construct
  source 1..80: mol_type = other DNA
ctcctttgctgaaatccaccaagcctttgaaacaatgttccaggaatccagtatctcagacggtaaagtacccatcccgg

SEQ ID NO: 19104 - DNA, 80 bp, synthetic construct
  source 1..80: mol_type = other DNA
ttctaagaaatgctaagggctgtttctccggtatccacgtgccttttctttagttgtatgcagatgagcactgttacctt

SEQ ID NO: 19105 - DNA, 80 bp, synthetic construct
  source 1..80: mol_type = other DNA
caagacgaggacctccaggagagctgcagagcacagagacaccactgacgtgcctgagatgcctcactccaagggccagg

SEQ ID NO: 19106 - DNA, 80 bp, synthetic construct; identical to SEQ ID NO: 8714
  source 1..80: mol_type = other DNA

SEQ ID NO: 19107 - DNA, 80 bp, synthetic construct
  source 1..80: mol_type = other DNA
gtgacaagcagctcacggtgaaggcactgatgtgagaagctcgctgcagccaggtggaaccaggacacgcacatggacag

SEQ ID NO: 19108 - DNA, 80 bp, synthetic construct
  source 1..80: mol_type = other DNA
ctatgttcatggttgacccccagaaccagcagtccaggttctgctgcagaccagctgaacaaaagcattgaggggtgtat

SEQ ID NO: 19109 - DNA, 80 bp, synthetic construct
  source 1..80: mol_type = other DNA
agagagcttgtgcaggggaagtccgctttataaaaccatcagatctcgtgagacttattcactaccacgagaatgtggga

SEQ ID NO: 19110 - DNA, 80 bp, synthetic construct; identical to SEQ ID NO: 8715
  source 1..80: mol_type = other DNA

SEQ ID NO: 19111 - DNA, 80 bp, synthetic construct
  source 1..80: mol_type = other DNA
tatgtccactactgtaggagtagagtgcgtatgttatgtaccaaaacgcacatttaaaaggcttgcatgctaaataagtc

SEQ ID NO: 19112 - DNA, 80 bp, synthetic construct
  source 1..80: mol_type = other DNA
gcttattaagaacccagtgatcagcagtcatgttcatttacgcccgtcagtttcatctgaggggtattttgatagtgatc

SEQ ID NO: 19113 - DNA, 80 bp, synthetic construct
  source 1..80: mol_type = other DNA
tgataaatgcatactggtacctctgttgagttacaggtgccaacagaaaacctcttcttgcaagctgacctctgagggag

SEQ ID NO: 19114 - DNA, 80 bp, synthetic construct
  source 1..80: mol_type = other DNA
tcctgagtagctgggactacaggcgtgtgccaccacacccagctaatttttgcattttttagtagagacggggtttcatc

SEQ ID NO: 19115 - DNA, 80 bp, synthetic construct; identical to SEQ ID NO: 8716
  source 1..80: mol_type = other DNA

SEQ ID NO: 19116 - DNA, 80 bp, synthetic construct
  source 1..80: mol_type = other DNA
gttgtaaaggtgaagcacgtgtcacgcttctctcaataaagccatcattgctgttaggattgtcattaggaaaggctttg

SEQ ID NO: 19117 - DNA, 80 bp, synthetic construct
  source 1..80: mol_type = other DNA
agtcctagctacttgggaggctgaggcaagagaaccatttgaacctgggaggcggaggttgcagtgagctgagatcgtgc

SEQ ID NO: 19118 - DNA, 80 bp, synthetic construct; identical to SEQ ID NO: 8717
  source 1..80: mol_type = other DNA

SEQ ID NO: 19119 - DNA, 80 bp, synthetic construct
  source 1..80: mol_type = other DNA
ttgtttgtttgtttgtttgttttgagatggagtctcactctgtctcctgggctggagtgcagcagtggcactctgcctcc

SEQ ID NO: 19120 - DNA, 80 bp, synthetic construct
  source 1..80: mol_type = other DNA
gccttctccccaaagacaaaaagaccaacttgttcagcgccttgatcaagaagaagaagaagacagccccaacccctccc

SEQ ID NO: 19121 - DNA, 80 bp, synthetic construct
  source 1..80: mol_type = other DNA
ccaatggagccctccgggagtccgggggctcaggcttccggtctccccacctgtggaagaagtccagcacgctgaccagc

SEQ ID NO: 19122 - DNA, 80 bp, synthetic construct; identical to SEQ ID NO: 8718
  source 1..80: mol_type = other DNA

SEQ ID NO: 19123 - DNA, 80 bp, synthetic construct
  source 1..80: mol_type = other DNA
gcctcccccacaaggaagaagctggaaagggcagtgccttagggacccctgctgcagctgagccagtgacccccaccagc

SEQ ID NO: 19124 - DNA, 80 bp, synthetic construct
  source 1..80: mol_type = other DNA
aggctggaggaaagccctcgcagagcccgagccaggaggcggccggggaggcagtcctgggcgcaaagacaaaagccacg

SEQ ID NO: 19125 - DNA, 80 bp, synthetic construct
  source 1..80: mol_type = other DNA
cctcggccctggcaggggaccagccgtcttccaccgccttcatccctctcatatcaacccgagtgtctcttcggaaaacc

SEQ ID NO: 19126 - DNA, 80 bp, synthetic construct; identical to SEQ ID NO: 8719
  source 1..80: mol_type = other DNA

SEQ ID NO: 19127 - DNA, 80 bp, synthetic construct
  source 1..80: mol_type = other DNA
gggctcgcccatacccgtgacagtggctgacaagggactagtgagtcagcaccttggcccaggagctctgcgccaggcag

SEQ ID NO: 19128 - DNA, 80 bp, synthetic construct
  source 1..80: mol_type = other DNA
ccacctagtgccccagactgagctctccaggccaggtgggaacggctgatgtggactgtctttttcatttttttctctct

SEQ ID NO: 19129 - DNA, 80 bp, synthetic construct
  source 1..80: mol_type = other DNA
acgggcatgcacacggctggtcactctgccctctgctgctgcccggggtggggtgcactcgccatttcctcacgtgcagg

SEQ ID NO: 19130 - DNA, 80 bp, synthetic construct
  source 1..80: mol_type = other DNA
tcctggcaagaaagcttgagtctcaagggtggcaggtcactgtcactgccgacatccctcccccagcagaatggaggcag

SEQ ID NO: 19131 - DNA, 80 bp, synthetic construct; identical to SEQ ID NO: 8720
  source 1..80: mol_type = other DNA

SEQ ID NO: 19132 - DNA, 80 bp, synthetic construct
  source 1..80: mol_type = other DNA
tcagggagggttaggaaaaccacaaacggagcccctgaaagcctcacgtatttcacagagcacgcctgccatcttctccc

SEQ ID NO: 19133 - DNA, 80 bp, synthetic construct
  source 1..80: mol_type = other DNA
accgcctcgtgccagcagcctcgcacaggccctagctttacgctcatcacctaaacttgtactttatttttctgatagaa

SEQ ID NO: 19134 - DNA, 80 bp, synthetic construct; identical to SEQ ID NO: 8721
  source 1..80: mol_type = other DNA

SEQ ID NO: 19135 - DNA, 80 bp, synthetic construct
  source 1..80: mol_type = other DNA
ccagtgcattttgtttctgtatatgattctctgtggttttttttgaatccaaatctgtcctctgtagtattttttaaata

SEQ ID NO: 19136 - DNA, 80 bp, synthetic construct
  source 1..80: mol_type = other DNA
agaaggggcagagccgagcaccgcgcaccgcgtcatgggggccgcctcgggccgccgggggccggggctgctgctgccgc

SEQ ID NO: 19137 - DNA, 80 bp, synthetic construct
  source 1..80: mol_type = other DNA
ggcgcacgacaccaacatcaccgcggagaatgcaaggcgccaggtgggcgcccgggcccgggcgggggcggggcggggcc

SEQ ID NO: 19138 - DNA, 80 bp, synthetic construct
  source 1..80: mol_type = other DNA
gatggatgagggtggctgctcccaggccgcgcccgccttcgccgaaggtgctgggcttggctctggggcccccgcgctct

SEQ ID NO: 19139 - DNA, 80 bp, synthetic construct
  source 1..80: mol_type = other DNA
gcaaactaaggtctcccgcagggatctccccagggcccgggctctggaagcccttggccttcctcccctcccccagcacc

SEQ ID NO: 19140 - DNA, 80 bp, synthetic construct; identical to SEQ ID NO: 8722
  source 1..80: mol_type = other DNA

SEQ ID NO: 19141 - DNA, 80 bp, synthetic construct
  source 1..80: mol_type = other DNA
tttttcttggagatggggtggggagttactttctgttaaaggaagcattctggagtaggaagccaaattcaaatacactt

SEQ ID NO: 19142 - DNA, 80 bp, synthetic construct
  source 1..80: mol_type = other DNA
acaaaaaaaaaatagctgggcttggtggtgcgtgcacctacagtcccagctactcttgaaactgagggggaaggatcacc

SEQ ID NO: 19143 - DNA, 80 bp, synthetic construct
  source 1..80: mol_type = other DNA
tgcagggtggtgccaagctgggacttgaccctgaccctgactttcaggactcctgtcccccactccacaggctgcctcca

SEQ ID NO: 19144 - DNA, 80 bp, synthetic construct; identical to SEQ ID NO: 8723
  source 1..80: mol_type = other DNA

SEQ ID NO: 19145 - DNA, 80 bp, synthetic construct
  source 1..80: mol_type = other DNA
ccctccaactggggctggacggtgcagatacccccacgccctgcttctcttggcaagtggacttccggaatctccagctg

SEQ ID NO: 19146 - DNA, 80 bp, synthetic construct
  source 1..80: mol_type = other DNA
atgagcagcttcgaggaaggcactccatccaataggccgctaagtgtctgtctgggttttggcctttgggtgtccccttg

SEQ ID NO: 19147 - DNA, 80 bp, synthetic construct; identical to SEQ ID NO: 8724
  source 1..80: mol_type = other DNA

SEQ ID NO: 19148 - DNA, 80 bp, synthetic construct
  source 1..80: mol_type = other DNA
gtccaggaaccacgccaggtgtcctctctcagctgtctccccagagtcccagcccagagtcaggcagagcagctggtatg

SEQ ID NO: 19149 - DNA, 80 bp, synthetic construct
  source 1..80: mol_type = other DNA
ggatctgtttagctggctgtagctaattagaaattgtagagtggcaacccccaagccaattttccagctagctgcagatc

SEQ ID NO: 19150 - DNA, 80 bp, synthetic construct
  source 1..80: mol_type = other DNA
aggacgatctggaacacctctaccaacagctagagcccctctacctgaacctccatgccttcgtccgccgcgcactgcat

SEQ ID NO: 19151 - DNA, 80 bp, synthetic construct; identical to SEQ ID NO: 8725
  source 1..80: mol_type = other DNA

SEQ ID NO: 19152 - DNA, 80 bp, synthetic construct
  source 1..80: mol_type = other DNA
gccagaaatgacagtggcagcatcttgcagccccaggacatgtggccctcggaggagtgtgggtgggactgatgtgtgag

SEQ ID NO: 19153 - DNA, 80 bp, synthetic construct
  source 1..80: mol_type = other DNA
tgggaaaacatctacgacatggtggtgcctttcccagacaagcccaacctcgatgtcaccagtactatgctgcagcaggt

SEQ ID NO: 19154 - DNA, 80 bp, synthetic construct
  source 1..80: mol_type = other DNA
agctcctccctccaggctccacagtggcaggatgagagcaacaacgcactttcactcatctgctgtgggagtgagggccc

SEQ ID NO: 19155 - DNA, 80 bp, synthetic construct; identical to SEQ ID NO: 8726
  source 1..80: mol_type = other DNA

SEQ ID NO: 19156 - DNA, 80 bp, synthetic construct
  source 1..80: mol_type = other DNA
gcctgcctctaccctaccccagcactggttggaggctgggtctgttccagggctagggggtataggaggcctattagtcc

SEQ ID NO: 19157 - DNA, 80 bp, synthetic construct
  source 1..80: mol_type = other DNA
tggatcacctgaggccaggagttcgagaccagcctggccaacatggcgaaaccccgtctctactaaaaatacaaaaataa

SEQ ID NO: 19158 - DNA, 80 bp, synthetic construct
  source 1..80: mol_type = other DNA
aagaaaaaaagaagttacttgtttctactgcggcttcatgccccagggcagctccctcctcattcctgtctttcaggtgc

SEQ ID NO: 19159 - DNA, 80 bp, synthetic construct
  source 1..80: mol_type = other DNA
cctgcagtacaaggatctgcccgtctccctgcgtcggggggccaaccccggcttccatgaggccattggggacgtgctgg

SEQ ID NO: 19160 - DNA, 80 bp, synthetic construct; identical to SEQ ID NO: 8727
  source 1..80: mol_type = other DNA

SEQ ID NO: 19161 - DNA, 80 bp, synthetic construct
  source 1..80: mol_type = other DNA
cctctcctttcatctcatctcccaacagaaagtgacatcaattacttgctaaaaatggcactggaaaaaattgccttcct

SEQ ID NO: 19162 - DNA, 80 bp, synthetic construct
  source 1..80: mol_type = other DNA
ctcctgccccagccagttctagcctctcctctctaatgatgtcccccgctgtgacccaccgccttctcctttcctgcctg

SEQ ID NO: 19163 - DNA, 80 bp, synthetic construct; identical to SEQ ID NO: 8728
  source 1..80: mol_type = other DNA

SEQ ID NO: 19164 - DNA, 80 bp, synthetic construct
  source 1..80: mol_type = other DNA
ctgtcttgggtctcccttctcccccaagatagcttctggtccagcctctgccctgcaggaagctggatggtgcctgggta

SEQ ID NO: 19165 - DNA, 80 bp, synthetic construct
  source 1..80: mol_type = other DNA
caaggcaggggccaagctccggtgtgtggtgggaagccgggggaagtgggaggcagagaggagcggctggcaaagggtgt

SEQ ID NO: 19166 - DNA, 80 bp, synthetic construct
  source 1..80: mol_type = other DNA
atcagagagatcccaggccccagggtcttattgccacagtttctgcagtccattggggggcggaagtggccaggggcatg

SEQ ID NO: 19167 - DNA, 80 bp, synthetic construct; identical to SEQ ID NO: 8729
  source 1..80: mol_type = other DNA

SEQ ID NO: 19168 - DNA, 80 bp, synthetic construct
  source 1..80: mol_type = other DNA
ctggtaccctgtcctggagggccaggcagccccccaagctcatcagcagggcctgcgagtggggacaggcatgtctttcc

SEQ ID NO: 19169 - DNA, 80 bp, synthetic construct
  source 1..80: mol_type = other DNA
ggccagggttgggctactgcaggacttcccagcctcctcttcctgctgctctgctacgggcaccctctgctggtccccag

SEQ ID NO: 19170 - DNA, 80 bp, synthetic construct
  source 1..80: mol_type = other DNA
ggtgggagaggcggggccgggtagggacagggcagggtacaagggagtgcgagagggataatggcttctggtgagaccac

SEQ ID NO: 19171 - DNA, 80 bp, synthetic construct; identical to SEQ ID NO: 8730
  source 1..80: mol_type = other DNA

SEQ ID NO: 19172 - DNA, 80 bp, synthetic construct
  source 1..80: mol_type = other DNA
acgaggtcagatcaagaccatcctggctaacacggtgaaaccccatctctagtaaaaatacaaaaattagccgggtgtgg

SEQ ID NO: 19173 - DNA, 80 bp, synthetic construct
  source 1..80: mol_type = other DNA
aactcaatttcagattttgatgaacatttactcaatgcctgagcaattcttctttccttaaaaatcagtctctgggaggc

SEQ ID NO: 19174 - DNA, 80 bp, synthetic construct
  source 1..80: mol_type = other DNA
tttaaaagattgaaagcctctgtttgtctcctctacaaaaggggctacacttcctctttaccctcattccctgcctattt

SEQ ID NO: 19175 - DNA, 80 bp, synthetic construct; identical to SEQ ID NO: 8731
  source 1..80: mol_type = other DNA

SEQ ID NO: 19176 - DNA, 80 bp, synthetic construct
  source 1..80: mol_type = other DNA
ggtgagtactgcatccaggacgttatcagcgtccagcttgcagagagtcttataggcaaaggttgcaacttaattccact

SEQ ID NO: 19177 - DNA, 80 bp, synthetic construct
  source 1..80: mol_type = other DNA
aggaagtttgatgtgaaccagttgcagaacaccactatcaagcggatcataaagaaggttcaggacctagaacgggcagc

SEQ ID NO: 19178 - DNA, 80 bp, synthetic construct
  source 1..80: mol_type = other DNA
tgtgcacctcagaactgctgagagggcagcgctccccagctccctggctccccacctgccagcccatggggcctgggggt

SEQ ID NO: 19179 - DNA, 80 bp, synthetic construct
  source 1..80: mol_type = other DNA
ctcatgtgcaggctgagtgagaggcgagggctgggactggcatggggcccgggggtgctgggtgagagcacagagttggg

SEQ ID NO: 19180 - DNA, 80 bp, synthetic construct; identical to SEQ ID NO: 8732
  source 1..80: mol_type = other DNA

SEQ ID NO: 19181 - DNA, 80 bp, synthetic construct
  source 1..80: mol_type = other DNA
attcctctcacttccctcacctaccctgccacttcctactggatagaagtagacagctcttgactgtcctcttttctccc

SEQ ID NO: 19182 - DNA, 80 bp, synthetic construct
  source 1..80: mol_type = other DNA
cattagaacaatgacaaatagaaggggaaatggaaaataaacaggagaaacggttttcccaggacagggtttggcctaca

SEQ ID NO: 19183 - DNA, 80 bp, synthetic construct; identical to SEQ ID NO: 8733
  source 1..80: mol_type = other DNA

SEQ ID NO: 19184 - DNA, 80 bp, synthetic construct
  source 1..80: mol_type = other DNA
gtgagccgagatggcgccactgcactccagcctgggcaacagagtgagaccctgtctcagaaaaaaaaaaaaaaaaaaaa

SEQ ID NO: 19185 - DNA, 80 bp, synthetic construct
  source 1..80: mol_type = other DNA
tacagtcacttttatgtggtttcgccaattttattccagctctgaaattctctgagctccccttacaagcagaggtgagc

SEQ ID NO: 19186 - DNA, 80 bp, synthetic construct
  source 1..80: mol_type = other DNA
ttcattttcctcaaagaggtgctgtgaaaccccaagcctaggaaaaggtagatccctggaggaggcaggtaatgtggtgt

SEQ ID NO: 19187 - DNA, 80 bp, synthetic construct; identical to SEQ ID NO: 8734
  source 1..80: mol_type = other DNA

SEQ ID NO: 19188 - DNA, 80 bp, synthetic construct
  source 1..80: mol_type = other DNA
gcatctggtgccacattcactgcagatctatgtcgggcaagtcaccatggatgggggaagaagttaataatcttgtccag

SEQ ID NO: 19189 - DNA, 80 bp, synthetic construct
  source 1..80: mol_type = other DNA
agtgttcaggccaagggaactggaacaaagaagaacctgagaatgtaaatctacttcaaccctggaccctcctttgccaa

SEQ ID NO: 19190 - DNA, 80 bp, synthetic construct
  source 1..80: mol_type = other DNA
cagacaggccctcagaccatttagaaactataagggaggccccagaggacggcctggctgtgggtctagctcccacacag

SEQ ID NO: 19191 - DNA, 80 bp, synthetic construct
  source 1..80: mol_type = other DNA
ggccttagaactcagcccctgacaattggtaaaaggggaaaggggagcaacctaacactgatgcgctctctgtctctctc

SEQ ID NO: 19192 - DNA, 80 bp, synthetic construct; identical to SEQ ID NO: 8735
  source 1..80: mol_type = other DNA

SEQ ID NO: 19193 - DNA, 80 bp, synthetic construct
  source 1..80: mol_type = other DNA
tcctttactagccaatgggaatcgtgacagtacctgggtgcagacaggattgaaagtgaattcacacaatgttcttggtg

SEQ ID NO: 19194 - DNA, 80 bp, synthetic construct
  source 1..80: mol_type = other DNA
cagtaatgacctactgggctggatatgcacaccaaagatgatgtgtgcctcaaagcttgcaaacagtaggtgctcaagaa

SEQ ID NO: 19195 - DNA, 80 bp, synthetic construct; identical to SEQ ID NO: 8736
  source 1..80: mol_type = other DNA

SEQ ID NO: 19196 - DNA, 80 bp, synthetic construct
  source 1..80: mol_type = other DNA
gtttgggcagaactccctctgcttgcagggctggacgcccaggaggatgtttaaggaggctgatgatttcttcacctccc

SEQ ID NO: 19197 - DNA, 80 bp, synthetic construct
  source 1..80: mol_type = other DNA
aggtctcgttcctgagccccacgggcaagggaaatgaaccaagcaaagggtccactactgtcccccagctggagccagca

SEQ ID NO: 19198 - DNA, 80 bp, synthetic construct
  source 1..80: mol_type = other DNA
cctgggtttgagcatggtaggctgccccgcgtccctccttgggagcagcccctgcatggagctggcctctccctgggggc

SEQ ID NO: 19199 - DNA, 80 bp, synthetic construct; identical to SEQ ID NO: 8737
  source 1..80: mol_type = other DNA

SEQ ID NO: 19200 - DNA, 80 bp, synthetic construct
  source 1..80: mol_type = other DNA
tcacatgttgggtgcttggggtgagatggctggaacggctggaggtgggtcaggcatctctccaggctagctcgggcgcc

SEQ ID NO: 19201 - DNA, 80 bp, synthetic construct
  source 1..80: mol_type = other DNA
caagagaagagaaaaaagtccctcccacttgggagaagtggcaaagaccatctgtcacagctgaagaagtgtctcttaca

SEQ ID NO: 19202 - DNA, 80 bp, synthetic construct
  source 1..80: mol_type = other DNA
cttccccctccccgatgagaatgacagaaaaacaggattcacctgagccaaaaggcttccagttagatccaagagagaat

SEQ ID NO: 19203 - DNA, 80 bp, synthetic construct; identical to SEQ ID NO: 8738
  source 1..80: mol_type = other DNA

SEQ ID NO: 19204 - DNA, 80 bp, synthetic construct
  source 1..80: mol_type = other DNA
tgtacatgggaacccactggccacacattctctagaaagtacacaatgtcccagtgcctctagagcaagcactttgtaca

SEQ ID NO: 19205 - DNA, 80 bp, synthetic construct
  source 1..80: mol_type = other DNA
ctgtgtcccctgcatgctgcagtgctggggtctgccctgggtatagcaaggcccactgttcccttatgcccagggcttct

SEQ ID NO: 19206 - DNA, 80 bp, synthetic construct
  source 1..80: mol_type = other DNA
ttggaggacctggtggtggcccaccacgaaatgggccacatccagtatttcatgcagtacaaagacttacctgtggcctt

SEQ ID NO: 19207 - DNA, 80 bp, synthetic construct
  source 1..80: mol_type = other DNA
gaggaccaagaaagggtggtgagcttgggaggtgggaaaggggcacttagtggcccatgggcagaggtgtggggcagagc

SEQ ID NO: 19208 - DNA, 80 bp, synthetic construct; identical to SEQ ID NO: 8739
  source 1..80: mol_type = other DNA

SEQ ID NO: 19209 - DNA, 80 bp, synthetic construct
  source 1..80: mol_type = other DNA
tgtgtgtgtgtacactattgtgtctgtgcatatgatgtgtgtggtgtaagtgatggggaaaacggggtgattgtgcacag

SEQ ID NO: 19210 - DNA, 80 bp, synthetic construct
  source 1..80: mol_type = other DNA
tgccccccagtgcccaggactcaaggtgactttgacccaggggccaagttccacattccttctagcgtgccttacatcag

SEQ ID NO: 19211 - DNA, 80 bp, synthetic construct; identical to SEQ ID NO: 8740
  source 1..80: mol_type = other DNA

SEQ ID NO: 19212 - DNA, 80 bp, synthetic construct
  source 1..80: mol_type = other DNA
tattgaacattgtctgcgatacaatttgaattgtacctggaagcccttctagacactaaaatgtaggattggagatcggt

SEQ ID NO: 19213 - DNA, 80 bp, synthetic construct
  source 1..80: mol_type = other DNA
attactttgtttccttgagaaaattcctcaatttctgtgagcttccatttcctgacctgtgaaccccatttcacaggatg

SEQ ID NO: 19214 - DNA, 80 bp, synthetic construct
  source 1..80: mol_type = other DNA
cccctctccttctgtgtgccccgggagagcacttgctgagggctagcaaggctgtttgtgatccgggaggctccctggga

SEQ ID NO: 19215 - DNA, 80 bp, synthetic construct
  source 1..80: mol_type = other DNA
acctgggatgatgccagcacatcatcaagtgctaataactgattgtgggatggatgaagtctgtccccagagtccaggaa

SEQ ID NO: 19216 - DNA, 80 bp, synthetic construct; identical to SEQ ID NO: 8741
  source 1..80: mol_type = other DNA

SEQ ID NO: 19217 - DNA, 80 bp, synthetic construct
  source 1..80: mol_type = other DNA
tttaagctggggagaatcctccagccttgactggcagatttctaccagggaattcgtgatgctttggataagatcatgta

SEQ ID NO: 19218 - DNA, 80 bp, synthetic construct
  source 1..80: mol_type = other DNA
tcctgagttgtggaggcagctctgtgggtgggaggcatctacacaggcacggctaggaagaggctcagacaatgctaaga

SEQ ID NO: 19219 - DNA, 80 bp, synthetic construct; identical to SEQ ID NO: 8742
  source 1..80: mol_type = other DNA

SEQ ID NO: 19220 - DNA, 80 bp, synthetic construct
  source 1..80: mol_type = other DNA
gccattttgagccgggaactcccacctgcagcgtgggccaggcctgattgccatctccttaggcacctggagccctgggg

SEQ ID NO: 19221 - DNA, 80 bp, synthetic construct
  source 1..80: mol_type = other DNA
atgcagctgatcacgggccagcccaacatgagcgcctcggccatgttgagctacttcaagccgctgctggactggctccg

SEQ ID NO: 19222 - DNA, 80 bp, synthetic construct
  source 1..80: mol_type = other DNA
cctgccccgcacccttgccctgccctgccctgccctgcccatgctgtctccttgcttcccgctcagctcgctcagaaggg

SEQ ID NO: 19223 - DNA, 80 bp, synthetic construct
  source 1..80: mol_type = other DNA
cgcagcctccaccggcactcccacgggccccagttcggctccgaggtggagctgagacactcctgaggtgacccggctgg

SEQ ID NO: 19224 - DNA, 80 bp, synthetic construct; identical to SEQ ID NO: 8743
  source 1..80: mol_type = other DNA

SEQ ID NO: 19225 - DNA, 80 bp, synthetic construct
  source 1..80: mol_type = other DNA
ctggcgctggcgcctgtcttccctccagcccaggcagcccgccactgtcctgccaccgcaggcagcccctgtctggccca

SEQ ID NO: 19226 - DNA, 80 bp, synthetic construct
  source 1..80: mol_type = other DNA
taccttggagggcctgcttcaaggagggtgccccctggagggcacacaccagcctagtgcttaccttggctcctgcctgt

SEQ ID NO: 19227 - DNA, 80 bp, synthetic construct; identical to SEQ ID NO: 8744
  source 1..80: mol_type = other DNA

SEQ ID NO: 19228 - DNA, 80 bp, synthetic construct
  source 1..80: mol_type = other DNA
ttggcttcaattccccagctgatgttcaacactttatttagttctcatttggattttaaacatttgcttgaaaaataatt

SEQ ID NO: 19229 - DNA, 80 bp, synthetic construct
  source 1..80: mol_type = other DNA
acatcagaatggtacggatactgcaataggaaagaagagacattgtattagcatttagacatgcttccatgtgagagtcc

SEQ ID NO: 19230 - DNA, 80 bp, synthetic construct; identical to SEQ ID NO: 8745
  source 1..80: mol_type = other DNA

SEQ ID NO: 19231 - DNA, 80 bp, synthetic construct
  source 1..80: mol_type = other DNA
ataaacactgagacttagaaagatttgtaacttggtctggtcgcatatctagtatagagttttgggattaaaactcaaat

SEQ ID NO: 19232 - DNA, 80 bp, synthetic construct
  source 1..80: mol_type = other DNA
tacttcattcttgtgaagattacaaaaggaacatttacactagaactaatgccctttctataaaccaacttctcatgaat

SEQ ID NO: 19233 - DNA, 80 bp, synthetic construct
  source 1..80: mol_type = other DNA
ttctcaatgtttacttgaatttctatcaacttcttactaggcatatgtacaagttttactgctgttgttgaaaatgtgcg

SEQ ID NO: 19234 - DNA, 80 bp, synthetic construct; identical to SEQ ID NO: 8746
  source 1..80: mol_type = other DNA

SEQ ID NO: 19235 - DNA, 80 bp, synthetic construct
  source 1..80: mol_type = other DNA
ttaatcttattgataggattaattatatttacatatgcatattactatatgacattctcataaagtgaatttaggcatgc

SEQ ID NO: 19236 - DNA, 80 bp, synthetic construct
  source 1..80: mol_type = other DNA
atatccatgcgctcttgaggggcggtgtggtttaatagaagtgagatatttgctaacaacaagatctacctttgaattct

SEQ ID NO: 19237 - DNA, 80 bp, synthetic construct
  source 1..80: mol_type = other DNA
agctggtgctctgtgggtgctagtttctttccctcctcaagaatgttgtcggttaaagtatctactataataattttgtg

SEQ ID NO: 19238 - DNA, 80 bp, synthetic construct; identical to SEQ ID NO: 8747
  source 1..80: mol_type = other DNA

SEQ ID NO: 19239 - DNA, 80 bp, synthetic construct
  source 1..80: mol_type = other DNA
tgttgaggatgtcctgaaaattatttaaatatacagccacctaatgtcagttttatataggtggtaggcagaggcttcaa

SEQ ID NO: 19240 - DNA, 80 bp, synthetic construct
  source 1..80: mol_type = other DNA
gcaactgtttttagcatctcacagaggttttaaacttctcttacaagctctccatgtaaagactgaactggtaatggaag

SEQ ID NO: 19241 - DNA, 80 bp, synthetic construct
  source 1..80: mol_type = other DNA
caaaaggtaaaacatgggttattaatgcatccaatgaaaacttcttagccataaaatcagccacaagttttgggacacat

SEQ ID NO: 19242 - DNA, 80 bp, synthetic construct
  source 1..80: mol_type = other DNA
ataagcttttacaggctcagacttaaaaaaaaatcacagataaacaagggtccctggttattctctctcccacagagaaa

SEQ ID NO: 19243 - DNA, 80 bp, synthetic construct; identical to SEQ ID NO: 8748
  source 1..80: mol_type = other DNA

SEQ ID NO: 19244 - DNA, 80 bp, synthetic construct
  source 1..80: mol_type = other DNA
tagggttcattgagaggttttgggaatcaggaggtacccctacgatgacacttgtgccacatgcctcatgacaacataac

SEQ ID NO: 19245 - DNA, 80 bp, synthetic construct
  source 1..80: mol_type = other DNA
cgggatagtgctgtggatttaggaaatgcccagaaaacggttttttaatgaaagaatggatgaataaattggagtgcact

SEQ ID NO: 19246 - DNA, 80 bp, synthetic construct; identical to SEQ ID NO: 8749
  source 1..80: mol_type = other DNA

SEQ ID NO: 19247 - DNA, 80 bp, synthetic construct
  source 1..80: mol_type = other DNA
gggaacctcaaaagaccgttcagaaagtcttttccagtgagctttctgaacacgttctatagttagaaaatggtttagga

SEQ ID NO: 19248 - DNA, 80 bp, synthetic construct
  source 1..80: mol_type = other DNA
gaaaagaacattaggagaaaagctatagccctggaaaaagtggaatctcttgacacttcattcatctgtggcatttgtcc

SEQ ID NO: 19249 - DNA, 80 bp, synthetic construct
  source 1..80: mol_type = other DNA
tgtgtttcccattgcctttgatatttgtaactgtttgaaagcaatatcatgtaataagccaaagatgatgtaagtactgc

SEQ ID NO: 19250 - DNA, 80 bp, synthetic construct
  source 1..80: mol_type = other DNA
ctgtctcaaataaaaagaagacatttattgggagcttaccatatgacaggctgcactgtgctaagtatattacatgcatt

SEQ ID NO: 19251 - DNA, 80 bp, synthetic construct; identical to SEQ ID NO: 8750
  source 1..80: mol_type = other DNA

SEQ ID NO: 19252 - DNA, 80 bp, synthetic construct
  source 1..80: mol_type = other DNA
acaaagtaatctattatcactcagttaagaaaaacaagccctttgcttttcctctagaggaaatatgacttgagacacgt

SEQ ID NO: 19253 - DNA, 80 bp, synthetic construct; identical to SEQ ID NO: 8768
  source 1..80: mol_type = other DNA

SEQ ID NO: 19254 - DNA, 80 bp, synthetic construct; identical to SEQ ID NO: 8751
  source 1..80: mol_type = other DNA

SEQ ID NO: 19255 - DNA, 80 bp, synthetic construct
  source 1..80: mol_type = other DNA
actgctgcatattggattcatctgggcaggtttaaaaatatcccactgtccaggtcacagcccatgccaattaaatgaga

SEQ ID NO: 19256 - DNA, 80 bp, synthetic construct
  source 1..80: mol_type = other DNA
agccagcttcagtaactcatatatacacaaaggcaatatttggaaaacaaaataagtggaaaaggctactccaggagact

SEQ ID NO: 19257 - DNA, 80 bp, synthetic construct
  source 1..80: mol_type = other DNA
ttatgagtatcctcatcttctgttcttgggtaggctcacttagatcacctgttaaaatagacgaggcaattgaacaaggg

SEQ ID NO: 19258 - DNA, 80 bp, synthetic construct
  source 1..80: mol_type = other DNA
agtccgccttcattttgcgtaacatgctcttcctgttccaaataatctcattcttatattcccttaagggtgtctattca

SEQ ID NO: 19259 - DNA, 80 bp, synthetic construct; identical to SEQ ID NO: 8752
  source 1..80: mol_type = other DNA

SEQ ID NO: 19260 - DNA, 80 bp, synthetic construct
  source 1..80: mol_type = other DNA
tgaaatgtcataatgagtgaattacgcatcactgaagcgtcattactttcagtctaagaatccacagagtgggtgagcct

SEQ ID NO: 19261 - DNA, 80 bp, synthetic construct
  source 1..80: mol_type = other DNA
cctatggtgcctgaagcatgtgtaggtgctctctaattgtagaatgaattactaaatgagttctcaggcctaatatttca

SEQ ID NO: 19262 - DNA, 80 bp, synthetic construct; identical to SEQ ID NO: 8753
  source 1..80: mol_type = other DNA

SEQ ID NO: 19263 - DNA, 80 bp, synthetic construct
  source 1..80: mol_type = other DNA
catcaattttggctactgcattttcatccaccactgtgtactgtgagaaggtgctgatgccaaggaagtggtggatgggc

SEQ ID NO: 19264 - DNA, 80 bp, synthetic construct
  source 1..80: mol_type = other DNA
tttttcaagcagtagttgctctccgggtttttacaaattctgcattttccacactgaggaatagcgagtgggatgacttt

SEQ ID NO: 19265 - DNA, 80 bp, synthetic construct
  source 1..80: mol_type = other DNA
ctgccacagccttgtttccagtttgggtttataagtgcctgaagattcctaaagaggacatgcaaatatgggaaacaaca

SEQ ID NO: 19266 - DNA, 80 bp, synthetic construct; identical to SEQ ID NO: 8754
  source 1..80: mol_type = other DNA

SEQ ID NO: 19267 - DNA, 80 bp, synthetic construct
  source 1..80: mol_type = other DNA
gtttttagctgataatttgtgaattatctacttttcctgttacagtggagggagcatgggtaaaaagtaagggtgtcatt

SEQ ID NO: 19268 - DNA, 80 bp, synthetic construct
  source 1..80: mol_type = other DNA
acagttcaaataagtatttggtaaagtggcaggtccaatctagtgcctaaagtgattttttagactgtaatcccagcact

SEQ ID NO: 19269 - DNA, 80 bp, synthetic construct
  source 1..80: mol_type = other DNA
ggagaatggcgtgaacccgggaggtggaggttgcagtgagctgagatcgcgccactgcactccagcctgggcgacagagc

SEQ ID NO: 19270 - DNA, 80 bp, synthetic construct; identical to SEQ ID NO: 8755
  source 1..80: mol_type = other DNA

SEQ ID NO: 19271 - DNA, 80 bp, synthetic construct
  source 1..80: mol_type = other DNA
aggtcatgctcattcagccgtagccatgtagcgtccattttgtgaactcagcacagaacaatgtccatacttatgttttt

SEQ ID NO: 19272 - DNA, 80 bp, synthetic construct
  source 1..80: mol_type = other DNA
gcatctagcagatgctcagtacataattgttgaagggtagaatacatgcgtgcctaaagacatacatgcttgagtcaggc

SEQ ID NO: 19273 - DNA, 80 bp, synthetic construct
  source 1..80: mol_type = other DNA
ggaaatcttaggatggtgaaccatcatgtttcctgaatgtgaatcctgtacctggtttgactgtagtcaccccttctcca

SEQ ID NO: 19274 - DNA, 80 bp, synthetic construct
  source 1..80: mol_type = other DNA
ccagttccctgaaattgcgcttccaaaatgttttcaagggttttgctaataatccctactatcccaagtatgaaagattc

SEQ ID NO: 19275 - DNA, 80 bp, synthetic construct
  source 1..80: mol_type = other DNA
attaatacataaaaatatctaatgctaattgattttgaagtcttgatatatatcactttgaaattttctttctgtacaaa

SEQ ID NO: 19276 - DNA, 80 bp, synthetic construct; identical to SEQ ID NO: 8756
  source 1..80: mol_type = other DNA

SEQ ID NO: 19277 - DNA, 80 bp, synthetic construct
  source 1..80: mol_type = other DNA
tgtacatacaacatctaatcccatgtctggtacctaacaagtgctctatagaaatgatcacctctgatttataaagagaa

SEQ ID NO: 19278 - DNA, 80 bp, synthetic construct
  source 1..80: mol_type = other DNA
aaatgtctcttcacccacaattattggctggtacatcaaattctaagtcaccttcattttgctgacagagtcagtgtctg

SEQ ID NO: 19279 - DNA, 80 bp, synthetic construct
  source 1..80: mol_type = other DNA
aacacccatttgcaacttagctttgagaggctgtactgttatctgatctatgtgtagagactccttccagctttgatttg

SEQ ID NO: 19280 - DNA, 80 bp, synthetic construct
  source 1..80: mol_type = other DNA
aaaagatgtacacataatttccagtgcttggcagtgaactgtaatatctgtcttcattgtggttaagcatgtacaattca

SEQ ID NO: 19281 - DNA, 80 bp, synthetic construct; identical to SEQ ID NO: 8757
  source 1..80: mol_type = other DNA

SEQ ID NO: 19282 - DNA, 80 bp, synthetic construct
  source 1..80: mol_type = other DNA
cattgcacccaatatgtagtcttttatccctcacctcccctttcaaccttccccctcgagttcccaaagttcatgatatc

SEQ ID NO: 19283 - DNA, 80 bp, synthetic construct
  source 1..80: mol_type = other DNA
aatggctgagtagtattccatggtatatgcacaccatattttctttatctactcgtttgtcgatgggcatttaggtcagt

SEQ ID NO: 19284 - DNA, 80 bp, synthetic construct; identical to SEQ ID NO: 8758
  source 1..80: mol_type = other DNA

SEQ ID NO: 19285 - DNA, 80 bp, synthetic construct
  source 1..80: mol_type = other DNA
taatgcaggatgtataaacataaatgaaatgctgacaacaaactaagttattgatgttgtgcccaagaggggaggcaatt

SEQ ID NO: 19286 - DNA, 80 bp, synthetic construct
  source 1..80: mol_type = other DNA
tgaggtggaataagaacagtaacaatgggccacccatgtgatttccaaccagtcttattgatatgaacctgttttgtcac

SEQ ID NO: 19287 - DNA, 80 bp, synthetic construct
  source 1..80: mol_type = other DNA
gtatttttgtgcacctataaacacattgaacaattaagatatttatggaaggcaaaaccaaatatctgtgttcctagtgc

SEQ ID NO: 19288 - DNA, 80 bp, synthetic construct; identical to SEQ ID NO: 8759
  source 1..80: mol_type = other DNA

SEQ ID NO: 19289 - DNA, 80 bp, synthetic construct
  source 1..80: mol_type = other DNA
catgattagcttggaataaattatcgctttaccgcaaatgtctttaatgtgggaaataaacacttcatagatacagattc

SEQ ID NO: 19290 - DNA, 80 bp, synthetic construct
  source 1..80: mol_type = other DNA
ttccaacagtaatatattttttgcttacttttcctgctgtgctcatgttgattctgtcttctctgcagaccaggagactg

SEQ ID NO: 19291 - DNA, 80 bp, synthetic construct
  source 1..80: mol_type = other DNA
aaggctcagtgccatttaatatgctattttgccattttagtttcctcttccacgaatttccatcattgttcattttcctc

SEQ ID NO: 19292 - DNA, 80 bp, synthetic construct
  source 1..80: mol_type = other DNA
ttctccatgctcagaatttcattttaaatatgttcgtgatattattgaagtcacccccccccactttatttgttttcata

SEQ ID NO: 19293 - DNA, 80 bp, synthetic construct
  source 1..80: mol_type = other DNA
tcactctcataatcctgtttcagcacctatgaaggcacttctgtggaatacttgattacagacccagccaatactttcta

SEQ ID NO: 19294 - DNA, 80 bp, synthetic construct
  source 1..80: mol_type = other DNA
ttcttttttcatagtgcatgatgcagaaggctcccacatgccactcccatcccatggaggacttgccactctatgacaac

SEQ ID NO: 19295 - DNA, 80 bp, synthetic construct; identical to SEQ ID NO: 8760
  source 1..80: mol_type = other DNA

SEQ ID NO: 19296 - DNA, 80 bp, synthetic construct
  source 1..80: mol_type = other DNA
aatttttgtatttttagtagagatggggtttcaccatgttgaccaggctggtctcaaactcctgacctcaggtcatccac

SEQ ID NO: 19297 - DNA, 80 bp, synthetic construct
  source 1..80: mol_type = other DNA
gttaagctgtaatggattggttgagtaattttttcaaaacaaaggatgaacaagctcagagagcctgagagacttactga

SEQ ID NO: 19298 - DNA, 80 bp, synthetic construct
  source 1..80: mol_type = other DNA
caaatccttcccctgagagtgggaaagcattaacaaatgagagtgggaaaagcattaacaaagcattaacacaggtcttt

SEQ ID NO: 19299 - DNA, 80 bp, synthetic construct
  source 1..80: mol_type = other DNA
gcttaaggtgtttgtgccatttcttagttaccaattttacattctgcattcacagcatttgccatcccatctctacactt

SEQ ID NO: 19300 - DNA, 80 bp, synthetic construct
  source 1..80: mol_type = other DNA
agattttttgaacatgattctgggaatagttcagtttttacaattagtaattgaggctttgtcatatgaagcaagaaatc

SEQ ID NO: 19301 - DNA, 80 bp, synthetic construct; identical to SEQ ID NO: 8762
  source 1..80: mol_type = other DNA

SEQ ID NO: 19302 - DNA, 80 bp, synthetic construct
  source 1..80: mol_type = other DNA
aaatgcaagaagtcacaggaatatttttcctcaatggcaaaggtgacacagtagaatggttaagaaggaaggtttgttgg

SEQ ID NO: 19303 - DNA, 80 bp, synthetic construct
  source 1..80: mol_type = other DNA
tgataacatctctgaagagctgaattaatgatatttcctagctgttgctccagatcttgtagggtagaggaggctgaaga

SEQ ID NO: 19304 - DNA, 80 bp, synthetic construct; identical to SEQ ID NO: 8763
  source 1..80: mol_type = other DNA

SEQ ID NO: 19305 - DNA, 80 bp, synthetic construct
  source 1..80: mol_type = other DNA
taagttcttactatttgtcacattcttcgtgcattttcttaaacttcaacctaaacatcaacactaagaggtaggttccc

SEQ ID NO: 19306 - DNA, 80 bp, synthetic construct
  source 1..80: mol_type = other DNA
aacaaagttaagactatgctggaagtttaaaagacctttgatacggatgtttaaggatttgtagaagtagagaataaagt

SEQ ID NO: 19307 - DNA, 80 bp, synthetic construct
  source 1..80: mol_type = other DNA
ttcagagaatacaagacagcaggaagaagaaagtaaaagaaatccataatcccacaacctagaaataatcattctcaatg

SEQ ID NO: 19308 - DNA, 80 bp, synthetic construct
  source 1..80: mol_type = other DNA
aataaaataaatataaaaaaagaaaatttgagacattgcatatacaacatatacaatttatattcttcattaaatgagtc

SEQ ID NO: 19309 - DNA, 80 bp, synthetic construct
  source 1..80: mol_type = other DNA
ttgattatttctgtagaatagatttctagaaatggaattgctggggcaaaggattcagttattttttaaaggtttctgat

SEQ ID NO: 19310 - DNA, 80 bp, synthetic construct
  source 1..80: mol_type = other DNA
gacattctcataaagtgaatttaggcatgcttcatgacttcttatgttgctcaacactgtcctctggttttgttcatctc

SEQ ID NO: 19311 - DNA, 80 bp, synthetic construct
  source 1..80: mol_type = other DNA
tcttgaggggcggtgtggtttaatagaaagtgaatcgatttgctaaaaacaagatctacttttgaattctgcctcccctt

SEQ ID NO: 19312 - DNA, 80 bp, synthetic construct
  source 1..80: mol_type = other DNA
gtaagacacttaatagaacagctggtgctcggtgggtgctagtttctttccttcctcaagaatgttgtcggttaaagtac

SEQ ID NO: 19313 - DNA, 80 bp, synthetic construct; identical to SEQ ID NO: 8764
  source 1..80: mol_type = other DNA

SEQ ID NO: 19314 - DNA, 80 bp, synthetic construct
  source 1..80: mol_type = other DNA
atctacctagaaaacaatcccaatgtagttccacctactcctgtaatgaaaatgttgaggatgtcctgaaaattatttaa

SEQ ID NO: 19315 - DNA, 80 bp, synthetic construct
  source 1..80: mol_type = other DNA
tcattcagatttgcagtaatcaacgtaatttgactccagcagaataggaaatgcaaagcaactgttttcaacttctcaca

SEQ ID NO: 19316 - DNA, 80 bp, synthetic construct
  source 1..80: mol_type = other DNA
ccagagtgaagcaggtcaaatccttcatttattttttcaaaaggtaaaacatgggttattaacgcatccagtgaaaactt

SEQ ID NO: 19317 - DNA, 80 bp, synthetic construct
  source 1..80: mol_type = other DNA
ccaaataaatcaaagtttagaaaaggtgctccattccagactgctataactgaggataagaagagatacagtacttcaat

SEQ ID NO: 19318 - DNA, 80 bp, synthetic construct; identical to SEQ ID NO: 8765
  source 1..80: mol_type = other DNA

SEQ ID NO: 19319 - DNA, 80 bp, synthetic construct
  source 1..80: mol_type = other DNA
gagattatattgagattaatgagatatattgagattaatgagaatttggcacttgagcccaactacataccaccataaac

SEQ ID NO: 19320 - DNA, 80 bp, synthetic construct
  source 1..80: mol_type = other DNA
agccatctggaataaagtgaatatttagcatccttaacgtggagtcgcatagttcctactcataatgcacaatatcatgt

SEQ ID NO: 19321 - DNA, 80 bp, synthetic construct; identical to SEQ ID NO: 8766
  source 1..80: mol_type = other DNA

SEQ ID NO: 19322 - DNA, 80 bp, synthetic construct
  source 1..80: mol_type = other DNA
cagttcagaaaatgttttccagtcagttcttggaacatgttctgtagttagaaaatggttaaagatccccgtaggaatat

SEQ ID NO: 19323 - DNA, 80 bp, synthetic construct
  source 1..80: mol_type = other DNA
agccctggaaaaagttgaattctcttgacattttattcctctgtggcatctgtcctaggtcaaggctgccgagagctttg

SEQ ID NO: 19324 - DNA, 80 bp, synthetic construct
  source 1..80: mol_type = other DNA
tgtaactgtttggaagaaataccatgtaataagccaaagatgatgtaagcactgcaagattggaaatagtatttcatatc

SEQ ID NO: 19325 - DNA, 80 bp, synthetic construct
  source 1..80: mol_type = other DNA
tcaaaaaaaagaaaaaaaagtcagctgacatttattgggagcttaccatatgacaggcggcactgtgctaagtatatcac

SEQ ID NO: 19326 - DNA, 80 bp, synthetic construct
  source 1..80: mol_type = other DNA
atcttggctcactgcaacctccgcctcctgggttcaagtgattctcttgcctcagcctccggagtagctgggattacagg

SEQ ID NO: 19327 - DNA, 80 bp, synthetic construct
  source 1..80: mol_type = other DNA
cttagggcatatttttgttaataaaacagcagttggcctaaaattgctcatttcctttggccaaatactaacatgttaaa

SEQ ID NO: 19328 - DNA, 80 bp, synthetic construct
  source 1..80: mol_type = other DNA
ttgctcagttaagaaaaacaaacccttttcttttcctctagaggaaatatgacttgagacaggtttgggtaattgatgga

SEQ ID NO: 19329 - DNA, 80 bp, synthetic construct
  source 1..80: mol_type = other DNA
tggtacataccatggtgtcaagccgaccgatgacttcaaacgaaaaatccacacctccatcagtcatttcctttagcact

SEQ ID NO: 19330 - DNA, 80 bp, synthetic construct
  source 1..80: mol_type = other DNA
caaacacagcacaggtagagcctggggtgacctgtgttttcagaaaatgcaaaaatagattaagtgatgattgttagaaa

SEQ ID NO: 19331 - DNA, 80 bp, synthetic construct
  source 1..80: mol_type = other DNA
gatgaactagttgagtggttttcaaactgatgcatattagattcatctggggagctttacaaaatatcccacagtccagg

SEQ ID NO: 19332 - DNA, 80 bp, synthetic construct
  source 1..80: mol_type = other DNA
cttgatagccagcttcagtaactcatacatacacaacggcaatatttggaaaacaaaataagtggaaaaggctactccag

SEQ ID NO: 19333 - DNA, 80 bp, synthetic construct
  source 1..80: mol_type = other DNA
tcattggttcatttatgttcggtagttgtgaccagtatatccctgctttaaaaatacactagcgaacaacacagcaatga

SEQ ID NO: 19334 - DNA, 80 bp, synthetic construct; identical to SEQ ID NO: 8769
  source 1..80: mol_type = other DNA

SEQ ID NO: 19335 - DNA, 80 bp, synthetic construct
  source 1..80: mol_type = other DNA
atgtattgcgagctaagattcagcaggagatttgaaaaagatattttagtctcagctctcatattaaaaatatattttag

SEQ ID NO: 19336 - DNA, 80 bp, synthetic construct
  source 1..80: mol_type = other DNA
aggggagttagttttagcagtgaaatcccataatgagtgaattatgcatcactgagtctttattactttccgtctaagaa

SEQ ID NO: 19337 - DNA, 80 bp, synthetic construct; identical to SEQ ID NO: 8770
  source 1..80: mol_type = other DNA

SEQ ID NO: 19338 - DNA, 80 bp, synthetic construct
  source 1..80: mol_type = other DNA
aatttctgattcttgcaagaaattgcttcccttttggtttccgacagtctgcatgtaagcagttttatcacccattgtca

SEQ ID NO: 19339 - DNA, 80 bp, synthetic construct
  source 1..80: mol_type = other DNA
ccgtgtactgggagaaggtgctggtgccaaggaagtggtgaatgggcttccccctgcaggtgaacctcctggtgccatcc

SEQ ID NO: 19340 - DNA, 80 bp, synthetic construct
  source 1..80: mol_type = other DNA
caaactctgcattttccacactgaggagtaaagagcgggatgactttatcacctggagaggaataaaacaagttcttctt

SEQ ID NO: 19341 - DNA, 80 bp, synthetic construct; identical to SEQ ID NO: 8771
  source 1..80: mol_type = other DNA

SEQ ID NO: 19342 - DNA, 80 bp, synthetic construct
  source 1..80: mol_type = other DNA
ttttgtaaaagattgatttacaataaatatgagaatttttaaccaattcttgacttttcaaagtgactatgcttatcttt

SEQ ID NO: 19343 - DNA, 80 bp, synthetic construct
  source 1..80: mol_type = other DNA
tagctgataatttgcgaattatctacttttcctgttatggtggagggagtaggggtaaaaagtaaggctgtcattttgtt

SEQ ID NO: 19344 - DNA, 80 bp, synthetic construct
  source 1..80: mol_type = other DNA
atcacctatgctatacattccacatgatcaagaaaaattgttggtgcattaacattttataggtaaagtttatgtgaaaa

SEQ ID NO: 19345 - DNA, 80 bp, synthetic construct
  source 1..80: mol_type = other DNA
catttaagcatggctgaaggtaacaaggcagacattgttgatggtgggatggttccttctacgtttctttcatttccttt

SEQ ID NO: 19346 - DNA, 80 bp, synthetic construct; identical to SEQ ID NO: 8772
  source 1..80: mol_type = other DNA

SEQ ID NO: 19347 - DNA, 80 bp, synthetic construct
  source 1..80: mol_type = other DNA
cctggcttctagtagatactcggtacataatggttgaagggtacaatacatgagtgcctgaatgcatacatgcttgggtc

SEQ ID NO: 19348 - DNA, 80 bp, synthetic construct
  source 1..80: mol_type = other DNA
ttgactgtagtcaccccttctccaacactctccacgatgccggctgcctcatggcctaaaatcacaggaaggggggtcac

SEQ ID NO: 19349 - DNA, 80 bp, synthetic construct
  source 1..80: mol_type = other DNA
tgctactaatccctactattcctaaatatgaaagattcagtttatccccaaggttattcagtctaaagcccttctctacc

SEQ ID NO: 19350 - DNA, 80 bp, synthetic construct; identical to SEQ ID NO: 8773
  source 1..80: mol_type = other DNA

SEQ ID NO: 19351 - DNA, 80 bp, synthetic construct
  source 1..80: mol_type = other DNA
gaaaaatatttcaccttaatgcgaacttcataagccttaggaggtgcaacctccacatcctcaatggaaaagggtttctt

SEQ ID NO: 19352 - DNA, 80 bp, synthetic construct
  source 1..80: mol_type = other DNA
tattgcgtcccatgtctggtacctaacaagtgctccatggaaatgaagtactctggtttataaagagaataaaagtatct

SEQ ID NO: 19353 - DNA, 80 bp, synthetic construct
  source 1..80: mol_type = other DNA
caactattagctgatatatgaagttagaagtcacctttattttgctgacagagtcagtgtctgtctacataaaatacact

SEQ ID NO: 19354 - DNA, 80 bp, synthetic construct; identical to SEQ ID NO: 8774
  source 1..80: mol_type = other DNA

SEQ ID NO: 19355 - DNA, 80 bp, synthetic construct
  source 1..80: mol_type = other DNA
ttcagcatatatttctagtgcttggcagtgtactgtaaaacccatcttcgttgtggtaaagcatgtataattcgcagagc

SEQ ID NO: 19356 - DNA, 80 bp, synthetic construct
  source 1..80: mol_type = other DNA
agaaggtactaatagtaggaagattcttattatgaggtgcttatgatgtgacaggcacattgtgacctgtgctgggtaaa

SEQ ID NO: 19357 - DNA, 80 bp, synthetic construct
  source 1..80: mol_type = other DNA
atatgtagtcttttatgtcttattcctcctactgcccttttccctcagtccccaaagtccattatatcattctcatcctt

SEQ ID NO: 19358 - DNA, 80 bp, synthetic construct; identical to SEQ ID NO: 8775
  source 1..80: mol_type = other DNA

SEQ ID NO: 19359 - DNA, 80 bp, synthetic construct
  source 1..80: mol_type = other DNA
ttcctagtgctaagtgattcaaattgtattattattcaaattgtatcattgattttctgtaaaaccatattaacttttaa

SEQ ID NO: 19360 - DNA, 80 bp, synthetic construct
  source 1..80: mol_type = other DNA
gttaaaggatatttcagtcttctgagtcaaattcctctcatcaaacttctgtcagacaactttcctgtgttcataaaaaa

SEQ ID NO: 19361 - DNA, 80 bp, synthetic construct
  source 1..80: mol_type = other DNA
aatagacacaggttctatacattcctgttaaaggtacttaagaatagcttatttccactgcagttcagtatacattacat

SEQ ID NO: 19362 - DNA, 80 bp, synthetic construct
  source 1..80: mol_type = other DNA
acagtaatatattttttgcttacttttcctgctgtgctcatgtcgtttctgtcttctctgcccaccagcagactgtgagt

SEQ ID NO: 19363 - DNA, 80 bp, synthetic construct; identical to SEQ ID NO: 8776
  source 1..80: mol_type = other DNA

SEQ ID NO: 19364 - DNA, 80 bp, synthetic construct
  source 1..80: mol_type = other DNA
gcactaagctgcaactttgaatgcacatggggtggcgaggaaggaagaagagtaagaaaacaggaaaaacgaagtaggat

SEQ ID NO: 19365 - DNA, 80 bp, synthetic construct
  source 1..80: mol_type = other DNA
cagtgatgaataagacatgacctctgcctgtgccaagaggcagtatggggcagcggtgatggcatggcttgtgggaccag

SEQ ID NO: 19366 - DNA, 80 bp, synthetic construct
  source 1..80: mol_type = other DNA
ggagttttgcagataggagcaccctcctaaatgttagctacaattattattcatgaaagaaagctcacagtttatagtga

SEQ ID NO: 19367 - DNA, 80 bp, synthetic construct; identical to SEQ ID NO: 8777
  source 1..80: mol_type = other DNA

SEQ ID NO: 19368 - DNA, 80 bp, synthetic construct
  source 1..80: mol_type = other DNA
attatgtaggcactgagactcacaccaagactgagaaacattcacccaatagaaagcaaaggaggtcctatgattttagt

SEQ ID NO: 19369 - DNA, 80 bp, synthetic construct
  source 1..80: mol_type = other DNA
caagctcttgctcatcatgctttttctcttcttttctgtccctctggcccattcaaatcctccccaaactttgagatcta

SEQ ID NO: 19370 - DNA, 80 bp, synthetic construct; identical to SEQ ID NO: 8778
  source 1..80: mol_type = other DNA

SEQ ID NO: 19371 - DNA, 80 bp, synthetic construct
  source 1..80: mol_type = other DNA
gaatcaaaagaggaagaccctactccgtcttttcattgtgaattctcagctcttaactcaatgagtggcacagggtgagt

SEQ ID NO: 19372 - DNA, 80 bp, synthetic construct
  source 1..80: mol_type = other DNA
ttctcccctaatacccccttttatacatttttctgtttaatcctctctcacacctgtagacatagcatttcagggaatta

SEQ ID NO: 19373 - DNA, 80 bp, synthetic construct
  source 1..80: mol_type = other DNA
aactactctgtgcttactctttgccccaccttctaaaagtttaaatggaggggaagagcagttgtcacatgattgagtgt

SEQ ID NO: 19374 - DNA, 80 bp, synthetic construct; identical to SEQ ID NO: 8779
  source 1..80: mol_type = other DNA

SEQ ID NO: 19375 - DNA, 80 bp, synthetic construct
  source 1..80: mol_type = other DNA
ttatggcttcttaaaattggagagcttttccaggttgtggtcaaagagggagatgtgtctacccacagcctgtagatggc

SEQ ID NO: 19376 - DNA, 80 bp, synthetic construct
  source 1..80: mol_type = other DNA
acagactagcatctctgtaagagatccaactgtctccttttccccatgggccaataatttacctggatctaagaaataat

SEQ ID NO: 19377 - DNA, 80 bp, synthetic construct
  source 1..80: mol_type = other DNA
gggatgagatgcaaaatgaagagtgggagagggactttagtagcaataaatagaacttgagaatggaatagttacataaa

SEQ ID NO: 19378 - DNA, 80 bp, synthetic construct; identical to SEQ ID NO: 8780
  source 1..80: mol_type = other DNA

SEQ ID NO: 19379 - DNA, 80 bp, synthetic construct
  source 1..80: mol_type = other DNA
atgatgtgcttggcatatgcttaaaagtacatttactgagatgatgtgggaataccaagtgtttattaaaacaatacaaa

SEQ ID NO: 19380 - DNA, 80 bp, synthetic construct
  source 1..80: mol_type = other DNA
tgattagtatcagtatgtaacatccatggagtgctgactttgctaatctctgtgcacacattgccttacttatagcaatg

SEQ ID NO: 19381 - DNA, 80 bp, synthetic construct
  source 1..80: mol_type = other DNA
taaaatagctaatatccttgtcactgtaagtatgtgccacttactgttctaaatgctttacaattaacagatcatgtaat

SEQ ID NO: 19382 - DNA, 80 bp, synthetic construct; identical to SEQ ID NO: 8781
  source 1..80: mol_type = other DNA

SEQ ID NO: 19383 - DNA, 80 bp, synthetic construct
  source 1..80: mol_type = other DNA
gcacttcattagtaatcttctggagaaaaagttacaccaaggggtgaatttattgagatcttttctttctattggatttc

SEQ ID NO: 19384 - DNA, 80 bp, synthetic construct
  source 1..80: mol_type = other DNA
cctgtttctatctttcctattacaaagctagaatcactccacatttctgatgatctcggttgtcttctgttgcaggatgg

SEQ ID NO: 19385 - DNA, 80 bp, synthetic construct
  source 1..80: mol_type = other DNA
tattttctcttgggctggtcagatttttcaaaggatgattttggaagtttccatgtagaagacacatgcccagctgccag

SEQ ID NO: 19386 - DNA, 80 bp, synthetic construct; identical to SEQ ID NO: 8782
  source 1..80: mol_type = other DNA

SEQ ID NO: 19387 - DNA, 80 bp, synthetic construct
  source 1..80: mol_type = other DNA
ctattactccataatgcataacatcttcttaaggctttagaggtgaccgagacagtttatattattttgacaattatttg

SEQ ID NO: 19388 - DNA, 80 bp, synthetic construct
  source 1..80: mol_type = other DNA
tggttaaaaagttaactttagttcttcaactcttttcagatccttgtttctgagatgaacagcctgttctgtatatttct

SEQ ID NO: 19389 - DNA, 80 bp, synthetic construct
  source 1..80: mol_type = other DNA
ttttttgacatgaggacttgctctgttgcccaagctggagtgcagcggcacgatcatggctctgcctctgccttccaggc

SEQ ID NO: 19390 - DNA, 80 bp, synthetic construct; identical to SEQ ID NO: 8783
  source 1..80: mol_type = other DNA

SEQ ID NO: 19391 - DNA, 80 bp, synthetic construct
  source 1..80: mol_type = other DNA
gattgctcatgctattgtttgtggtttaagaaagcctttaagcggtttgctgccctggatgggccaggtgttccttgccc

SEQ ID NO: 19392 - DNA, 80 bp, synthetic construct
  source 1..80: mol_type = other DNA
cagcctcctagaatgctggaatcacaggtgtgcctgacatccgactccctagtttttaaaagattcacttaccattcaaa

SEQ ID NO: 19393 - DNA, 80 bp, synthetic construct
  source 1..80: mol_type = other DNA
gcatgttggaaattttaataaatatcacaaattgcttgtcagaaacctaagacaatgcacatttctaccaacagtgtaag

SEQ ID NO: 19394 - DNA, 80 bp, synthetic construct
  source 1..80: mol_type = other DNA
gcacttggatactagagatatcattttttgtcaatcatatatgttgaaaatattttttcttgtctattattttctttcat

SEQ ID NO: 19395 - DNA, 80 bp, synthetic construct
  source 1..80: mol_type = other DNA
tctccccatcctcttcagccttgtgtctatcatcctgtttcagcacttataaagtcacttctgtggaatacttgattaca

SEQ ID NO: 19396 - DNA, 80 bp, synthetic construct
  source 1..80: mol_type = other DNA
agaatgtcaatcacattctttaataatttataggaacttgacatcgagagcatcctcatgaattctattgccatgttgtg

SEQ ID NO: 19397 - DNA, 80 bp, synthetic construct
  source 1..80: mol_type = other DNA
ggcttttgggagatgatttcactctcttgaatggggttagtgccattataggaagagacacaaggtgataattcattcag

SEQ ID NO: 19398 - DNA, 80 bp, synthetic construct
  source 1..80: mol_type = other DNA
atagcagcccaagcttattgaacatgatgatagacggaattctaagctgactcccaagattccagctccctggtgtacat

SEQ ID NO: 19399 - DNA, 80 bp, synthetic construct; identical to SEQ ID NO: 8784
  source 1..80: mol_type = other DNA

SEQ ID NO: 19400 - DNA, 80 bp, synthetic construct
  source 1..80: mol_type = other DNA
attgagactgcaattggagcaactagttaagctgtttccagatttttgacttgcagaaaccatgagataataaatggtgt

SEQ ID NO: 19401 - DNA, 80 bp, synthetic construct
  source 1..80: mol_type = other DNA
agatgtttagaaagggatctcttccaggaaagccttcagaaagaggagagaatttggacaaactttttcatgatataaaa

SEQ ID NO: 19402 - DNA, 80 bp, synthetic construct
  source 1..80: mol_type = other DNA
cttcaaatagaaaaaaattatagaatagagacaagatttagcataatttatgaaagattatgatgtaagaattgaaacat

SEQ ID NO: 19403 - DNA, 80 bp, synthetic construct; identical to SEQ ID NO: 8785
  source 1..80: mol_type = other DNA

SEQ ID NO: 19404 - DNA, 80 bp, synthetic construct
  source 1..80: mol_type = other DNA
accacacccagctaatttttgtatttttttagtagaggcgtggtttcaccatgttggcctggatggtcttcatctcttga

SEQ ID NO: 19405 - DNA, 80 bp, synthetic construct
  source 1..80: mol_type = other DNA
aaactcatcaagtccatttcccaaactttaccattgtgatggtttgaatattagtccttcaaatctcaatttgaaattta

SEQ ID NO: 19406 - DNA, 80 bp, synthetic construct
  source 1..80: mol_type = other DNA
ctgtctgtaccaaaaaatacaaaaattagccgggtgtggtgatggaatcctgtactcaggaggttgaggtaggagaatca

SEQ ID NO: 19407 - DNA, 80 bp, synthetic construct
  source 1..80: mol_type = other DNA
cattatgggtgaggttaactacattacaaaaaggtagatttagctttttcttgctctgtctcactctctcaccttctacc

SEQ ID NO: 19408 - DNA, 80 bp, synthetic construct; identical to SEQ ID NO: 8786
  source 1..80: mol_type = other DNA

SEQ ID NO: 19409 - DNA, 80 bp, synthetic construct
  source 1..80: mol_type = other DNA
cctttgtcactacttgaaacagaatccattctgtcttgttcacagctaaaacctcctcattctctctattcttctcctca

SEQ ID NO: 19410 - DNA, 80 bp, synthetic construct
  source 1..80: mol_type = other DNA
cttagagggtaaaatctaaacttcttgtaaggaatccaggaatcattgttacttggccatagacctttcccattgtgaag

SEQ ID NO: 19411 - DNA, 80 bp, synthetic construct
  source 1..80: mol_type = other DNA
cctcctctagttttgcttccatcaaactcctccttattctttaaatttaggcataaatatttgcattaggtaccaatcaa

SEQ ID NO: 19412 - DNA, 80 bp, synthetic construct; identical to SEQ ID NO: 8787
  source 1..80: mol_type = other DNA

SEQ ID NO: 19413 - DNA, 80 bp, synthetic construct
  source 1..80: mol_type = other DNA
ttcaaaataagtatttagtcttgaagttatttctgagctcttttctcccacctacctaaaacatggtatcatctaagtga

SEQ ID NO: 19414 - DNA, 80 bp, synthetic construct
  source 1..80: mol_type = other DNA
acatgatatcttccttttttatggctgcatagtatttcatggtgtatatgtagcacattttttttttatccagttggcca

SEQ ID NO: 19415 - DNA, 80 bp, synthetic construct
  source 1..80: mol_type = other DNA
tttgaggaattgccacattgctttccacaatggttgaactaatttaaactcccaccaacagtgtataagtatatcctttt

SEQ ID NO: 19416 - DNA, 80 bp, synthetic construct; identical to SEQ ID NO: 8788
  source 1..80: mol_type = other DNA

SEQ ID NO: 19417 - DNA, 80 bp, synthetic construct
  source 1..80: mol_type = other DNA
ttccataagaattatctgttgatctctctgacctgctttcactgataactacggagttatttgctgaagtgtcaaatacc

SEQ ID NO: 19418 - DNA, 80 bp, synthetic construct
  source 1..80: mol_type = other DNA
tgccgtgcaggtgatctggaccctgagatctaagtaaaagaaatgagcaaaccaagttaatatatgtaaacatccatctc

SEQ ID NO: 19419 - DNA, 80 bp, synthetic construct; identical to SEQ ID NO: 8789
  source 1..80: mol_type = other DNA

SEQ ID NO: 19420 - DNA, 80 bp, synthetic construct
  source 1..80: mol_type = other DNA
aaccgtcaacataaacttttctctttttaaagtttgaaaagtttctttattttgacaaagcctttggctgctggctaaaa

SEQ ID NO: 19421 - DNA, 80 bp, synthetic construct
  source 1..80: mol_type = other DNA
tatgttttgatttttacttgcctttttagacccaccattgtcaatgtaactaggagccaatgcatggtgcagaaggctcc

SEQ ID NO: 19422 - DNA, 80 bp, synthetic construct
  source 1..80: mol_type = other DNA
ttgtggggtggccatgtagaactgcttcttgtttttctggatctcacaccatcagcatcagtgtaaaagccacagagcac

SEQ ID NO: 19423 - DNA, 80 bp, synthetic construct
  source 1..80: mol_type = other DNA
tttagcctcggtaaagctgtaatgggctggttgagtacttttttcaaaacaaaggatgaacaagctcagagagattgagt

SEQ ID NO: 19424 - DNA, 80 bp, synthetic construct; identical to SEQ ID NO: 8790
  source 1..80: mol_type = other DNA

SEQ ID NO: 19425 - DNA, 80 bp, synthetic construct
  source 1..80: mol_type = other DNA
tgcttgaggagtttttgccattttagttaccaattttacactctgtgttcacagcatttgccacccaatatctacatata

SEQ ID NO: 19426 - DNA, 80 bp, synthetic construct
  source 1..80: mol_type = other DNA
gattctaggaatagttcagttttcacatttagtgtctgaacctaagtttgtcacatgaagcacaaaatccgcttttattt

SEQ ID NO: 19427 - DNA, 80 bp, synthetic construct; identical to SEQ ID NO: 8791
  source 1..80: mol_type = other DNA

SEQ ID NO: 19428 - DNA, 80 bp, synthetic construct
  source 1..80: mol_type = other DNA
gttgaatggttaagaaggaaggtttattggcttcaattccccagttgatgttcaacactttatttagttctcatttggat

SEQ ID NO: 19429 - DNA, 80 bp, synthetic construct
  source 1..80: mol_type = other DNA
agggaaggcatctgtattgtttcaaaacgtcaggacggtacggatactgcaataggaaagaagagacattgtgttaacat

SEQ ID NO: 19430 - DNA, 80 bp, synthetic construct
  source 1..80: mol_type = other DNA
ttcaatcttaagctcactcaaaacctcctgagtatgcctgtcatttagacttcagatctacattagcatcttcaaaaaat

SEQ ID NO: 19431 - DNA, 80 bp, synthetic construct
  source 1..80: mol_type = other DNA
tccatttagagattataaaaactgagacttagaaagatttgtaatttgctctggtcgcacatctagtatagggtgttggg

SEQ ID NO: 19432 - DNA, 80 bp, synthetic construct; identical to SEQ ID NO: 8792
  source 1..80: mol_type = other DNA

SEQ ID NO: 19433 - DNA, 80 bp, synthetic construct
  source 1..80: mol_type = other DNA
tcttacgacctcggagtaatcatggtcaatgttttcttgaattctatcagctttttctagatacagatacactttctatt

SEQ ID NO: 19434 - DNA, 80 bp, synthetic construct
  source 1..80: mol_type = other DNA
cttaaacatatatgtatgtttgagttgattatttctatagaatagatttctagaaatggtattgctggaacaaaggatct

SEQ ID NO: 19435 - DNA, 80 bp, synthetic construct
  source 1..80: mol_type = other DNA
atatgcgtattactatatgacattcttgtaaagtgaatttaggcatgctccatgccttcttttgttgctcaatagtgtct

SEQ ID NO: 19436 - DNA, 80 bp, synthetic construct
  source 1..80: mol_type = other DNA
tcttgaggggtggtgtggtttaatagaaagtgaatagatttgctaataacaagatcttccttcgaattctggctctcctt

SEQ ID NO: 19437 - DNA, 80 bp, synthetic construct
  source 1..80: mol_type = other DNA
tagtgtctttccttcctcaagaatatttgtcggataaagtatctagtatgatagttttgtgagtttcaaagaaacactat

SEQ ID NO: 19438 - DNA, 80 bp, synthetic construct
  source 1..80: mol_type = other DNA
gttagaggtaggaaatagaattggcttatttttctaagacttggagaaaatgtaagacaaatatttaaaatagggtttag

SEQ ID NO: 19439 - DNA, 80 bp, synthetic construct
  source 1..80: mol_type = other DNA
aattttaatatacaatcattagatgtcacacttacttatatgacaggcagaggtgtcagtgattccatgttataattctg

SEQ ID NO: 19440 - DNA, 80 bp, synthetic construct; identical to SEQ ID NO: 8794
  source 1..80: mol_type = other DNA

SEQ ID NO: 19441 - DNA, 80 bp, synthetic construct
  source 1..80: mol_type = other DNA
cagtgaaaacttcttagccataaagtcagccacaagtttggggacagattctttactcttaaagcctgaaaagaagaaaa

SEQ ID NO: 19442 - DNA, 80 bp, synthetic construct
  source 1..80: mol_type = other DNA
atcacagataaacaagggtccttagttattctctctctcacagagaaattatagtacagatgttatgcccaaagttaagg

SEQ ID NO: 19443 - DNA, 80 bp, synthetic construct
  source 1..80: mol_type = other DNA
tgccttacgcagtcacaagtacaaaaagaggtggagatgaaagtcctggttaatagtgacatcagaaaagtctatcttgg

SEQ ID NO: 19444 - DNA, 80 bp, synthetic construct
  source 1..80: mol_type = other DNA
gtaatcccagctactctggaggttgagataggagaatcacttgaacctgtgaggtggaggttgcagtgagtcaagattgc

SEQ ID NO: 19445 - DNA, 80 bp, synthetic construct; identical to SEQ ID NO: 8795
  source 1..80: mol_type = other DNA

SEQ ID NO: 19446 - DNA, 80 bp, synthetic construct
  source 1..80: mol_type = other DNA
agtatccttaacgtggagtggcatagttcatactcataatgcacaatatcatgtaataggcttagctggattgtgagtgt

SEQ ID NO: 19447 - DNA, 80 bp, synthetic construct
  source 1..80: mol_type = other DNA
caaacatcattacaaacatatataaagtcctgttccttgtacaagtgtacatcattcttaggcaatgtgtgagttggttc

SEQ ID NO: 19448 - DNA, 80 bp, synthetic construct
  source 1..80: mol_type = other DNA
gtatatcaccaaaattagtctcttgtccacttgatagcctccctttttaacagattcctatgtccatttctcaagtggac

SEQ ID NO: 19449 - DNA, 80 bp, synthetic construct
  source 1..80: mol_type = other DNA
tataatgattagttctttgattttggattctgatctttgggagactgacatcctcagaacatgtggctgtcagacatttg

SEQ ID NO: 19450 - DNA, 80 bp, synthetic construct
  source 1..80: mol_type = other DNA
tgatctcagggtgctgctccctgttacccacactgctggaccttctagaaaacctcagcaatggaaacttttttgtttct

SEQ ID NO: 19451 - DNA, 80 bp, synthetic construct; identical to SEQ ID NO: 8767
  source 1..80: mol_type = other DNA

SEQ ID NO: 19452 - DNA, 80 bp, synthetic construct
  source 1..80: mol_type = other DNA
aaaaagggggctgctgacatttattggaagctaaccacatgatgagttgtgttgcacaaagtattttacatgcattgtct

SEQ ID NO: 19453 - DNA, 80 bp, synthetic construct
  source 1..80: mol_type = other DNA
aagcagtcactttccttagggcatattttctgttaataaaataatagttggtctaaaattgctcatttcttttgaccgaa

SEQ ID NO: 19454 - DNA, 80 bp, synthetic construct
  source 1..80: mol_type = other DNA
aaagcatatttgtagtggctgtgttaaaaaaaacaagccctttttcttttctcgaggaaatatgacttgagacaggtttg

SEQ ID NO: 19455 - DNA, 80 bp, synthetic construct
  source 1..80: mol_type = other DNA
tcatcattaaaaatatcctttatacataatacgtatattctactgcctaaatgcatcctccaggttgcagaggcagaaat

SEQ ID NO: 19456 - DNA, 80 bp, synthetic construct
  source 1..80: mol_type = other DNA
gcaaatttgtccttgttgatgtccacagcaatgattctggctgctccagctgctttacagcccataacaacagataggcc

SEQ ID NO: 19457 - DNA, 80 bp, synthetic construct
  source 1..80: mol_type = other DNA
atctgttatcgaaacctgttttggcttgaaatgcttcatgtttaaattcaaggggttgaattagttgagtagttctgaaa

SEQ ID NO: 19458 - DNA, 80 bp, synthetic construct
  source 1..80: mol_type = other DNA
cagatgacagtgattacaatcttgtagggactctcaattgctgaaatcccttgatagccagcttcagtatctcatacata

SEQ ID NO: 19459 - DNA, 80 bp, synthetic construct
  source 1..80: mol_type = other DNA
aatctgttgttatgagtatcctcagcttctgttcttgggtaggctcacttagactacccattaaaatagatgaggcaatt

SEQ ID NO: 19460 - DNA, 80 bp, synthetic construct
  source 1..80: mol_type = other DNA
ccttaagggtgtctatttcactcattcattcaccaagtgttattcaatactatgggggacaacaccactttctaccttac

SEQ ID NO: 19461 - DNA, 80 bp, synthetic construct
  source 1..80: mol_type = other DNA
tctactcagatgaggagcctttaaagaatttctgcttgaaatttaccacttctgaatacatatgtgtgttcatgccaggg

SEQ ID NO: 19462 - DNA, 80 bp, synthetic construct
  source 1..80: mol_type = other DNA
gatccacagactagatggtcctcaagggcaaacgcttcatttcatttacttttgctgtcagagcctagcagaacctatgg

SEQ ID NO: 19463 - DNA, 80 bp, synthetic construct
  source 1..80: mol_type = other DNA
aattggtgaaatttctagcctgtgctctcagttctttctgggtcatttttctactcttaatcgacacttcaaatctacaa

SEQ ID NO: 19464 - DNA, 80 bp, synthetic construct
  source 1..80: mol_type = other DNA
gggcgaggctgcatcaattttggccactgcattctcatccaccactgtgtactgggagaaggtgctgacgccgacgaagt

SEQ ID NO: 19465 - DNA, 80 bp, synthetic construct
  source 1..80: mol_type = other DNA
aaacttactcatttttcaagcagtagttgctttctgggtttttacaaattctgcattttccacactgaggagtaaagagc

SEQ ID NO: 19466 - DNA, 80 bp, synthetic construct; identical to SEQ ID NO: 8800
  source 1..80: mol_type = other DNA

SEQ ID NO: 19467 - DNA, 80 bp, synthetic construct
  source 1..80: mol_type = other DNA
aagtagcctattttagtcctagtagatgttgggaagatctggtattttgtaagaatttgatttacaacaaaaatgagatt

SEQ ID NO: 19468 - DNA, 80 bp, synthetic construct
  source 1..80: mol_type = other DNA
tttttagctggtaatttgtgaattatctatttttactgttatggtggaaggaggaggggtgagaaataaggcagtcgttt

SEQ ID NO: 19469 - DNA, 80 bp, synthetic construct
  source 1..80: mol_type = other DNA
cacctatgctatctatttcacaagaccaagaaaaatgattggtgcataacattttatgggtaaagttcatatgaaaacga

SEQ ID NO: 19470 - DNA, 80 bp, synthetic construct; identical to SEQ ID NO: 8801
  source 1..80: mol_type = other DNA

SEQ ID NO: 19471 - DNA, 80 bp, synthetic construct
  source 1..80: mol_type = other DNA
gggcacttacagaagacagtgttcagctaacactaacgtggaagttactagattatgaattccacactggtaggcactgt

SEQ ID NO: 19472 - DNA, 80 bp, synthetic construct
  source 1..80: mol_type = other DNA
ttccctgtgaccttgtgcaagtcctttcgtctttcattgcctcggtttcctcatccaggctgactaatcttgtgatggtg

SEQ ID NO: 19473 - DNA, 80 bp, synthetic construct
  source 1..80: mol_type = other DNA
cctgcagccaccatctacagaataaagagaagatgtttagattcagaaaagattatgactgtcagatggacttaacaaac

SEQ ID NO: 19474 - DNA, 80 bp, synthetic construct
  source 1..80: mol_type = other DNA
ttttgctgataatccctactattcccaaatatgaaagattcagtttatctccaaggttatccagtctaaaaccttcctct

SEQ ID NO: 19475 - DNA, 80 bp, synthetic construct
  source 1..80: mol_type = other DNA
gatatatatccctttgcatttttttctgtacaaacctataaattcttttgtatttcactggagttatccttcatatactg

SEQ ID NO: 19476 - DNA, 80 bp, synthetic construct
  source 1..80: mol_type = other DNA
aaaaagtatttcaccttaatgcgaacttcatgagccttaggaggtgcaacctctacctcctcaatggaaaagggtttctt

SEQ ID NO: 19477 - DNA, 80 bp, synthetic construct
  source 1..80: mol_type = other DNA
cattgagtcccatgtctggcacctaacaagtgttgcatagaaatgaagtcctctggtttataaagagaataagagtatct

SEQ ID NO: 19478 - DNA, 80 bp, synthetic construct
  source 1..80: mol_type = other DNA
attgtgcaggttagttacatatgtatatatgtgccatgctggtgcgctgcacccactaactcgtcatctagcattaggta

SEQ ID NO: 19479 - DNA, 80 bp, synthetic construct; identical to SEQ ID NO: 8803
  source 1..80: mol_type = other DNA

SEQ ID NO: 19480 - DNA, 80 bp, synthetic construct
  source 1..80: mol_type = other DNA
atggctgggtcaaatggtatttccagttctagatccctgaggaatcgccacactgacttccacaatggttgaactagttt

SEQ ID NO: 19481 - DNA, 80 bp, synthetic construct
  source 1..80: mol_type = other DNA
tttttcatgtgttttttggctgcataaatgtcttcttttgagaagtgtctgttcatgtccttcgcccactttttgatggg

SEQ ID NO: 19482 - DNA, 80 bp, synthetic construct
  source 1..80: mol_type = other DNA
attagatcccatttgtcaattttggcttttgttgccattgcttttggtgttttagacatgaagtccttgcccatgcctat

SEQ ID NO: 19483 - DNA, 80 bp, synthetic construct; identical to SEQ ID NO: 8804
  source 1..80: mol_type = other DNA

SEQ ID NO: 19484 - DNA, 80 bp, synthetic construct
  source 1..80: mol_type = other DNA
aacttagctttggcagcctgttttgttcatctaatttatgtgcagagactccttccagcttagatttgagcccaaaatta

SEQ ID NO: 19485 - DNA, 80 bp, synthetic construct
  source 1..80: mol_type = other DNA
catatttccagtgcttggcagtgtactgtaaaacccatctttattgtggtaaagcatgtacaattcactgagctctttct

SEQ ID NO: 19486 - DNA, 80 bp, synthetic construct
  source 1..80: mol_type = other DNA
taatagtaggagtttctgattgtcaggtgcctatgatgtgacaggtgcactgtggcttgtgctgagtgagttacatgcat

SEQ ID NO: 19487 - DNA, 80 bp, synthetic construct
  source 1..80: mol_type = other DNA
ctaaccaaagtcctctatatcattcttatgcctttgtatcctcatagcttagctcccacttataagtgagaccatatggt

SEQ ID NO: 19488 - DNA, 80 bp, synthetic construct
  source 1..80: mol_type = other DNA
tttaggaagtttccatatttttgcaattgcaaattgtgctgctgtaaacaatatgaattacttttaaacctaaaacggat

SEQ ID NO: 19489 - DNA, 80 bp, synthetic construct
  source 1..80: mol_type = other DNA
actttgggaggccgaggtgggcggatcacctgaagtcaagagttggagaccagcctgaccaacatggtgaaaccctgtct

SEQ ID NO: 19490 - DNA, 80 bp, synthetic construct
  source 1..80: mol_type = other DNA
atctccaaacaaaaaaacgaatgaaaaaattaatgtagcctcacgttttctgtactccgtggtagtaaatatcaaaaagt

SEQ ID NO: 19491 - DNA, 80 bp, synthetic construct
  source 1..80: mol_type = other DNA
tgcaggacgggtaaacataaatgaaatgctgtcaaaaagctaagttattgatgttgcactcaagaggggaggattatcta

SEQ ID NO: 19492 - DNA, 80 bp, synthetic construct; identical to SEQ ID NO: 8806
  source 1..80: mol_type = other DNA

SEQ ID NO: 19493 - DNA, 80 bp, synthetic construct
  source 1..80: mol_type = other DNA
actgaattatcatagtgaggtgttttattgtgtgatacactcctagcacaacaaatggctggaaatagttgcacagattt

SEQ ID NO: 19494 - DNA, 80 bp, synthetic construct
  source 1..80: mol_type = other DNA
ttttctgtaagatcatattgacttttatataggggagatactgttccataagatttctgtggaaattgcctgaattgtgt

SEQ ID NO: 19495 - DNA, 80 bp, synthetic construct
  source 1..80: mol_type = other DNA
ttcaaaatcttctcaaatccctctcataaaagttttgtcagacttcttgtgttcacaaaaaatatgaatacaaataataa

SEQ ID NO: 19496 - DNA, 80 bp, synthetic construct; identical to SEQ ID NO: 8807
  source 1..80: mol_type = other DNA

SEQ ID NO: 19497 - DNA, 80 bp, synthetic construct
  source 1..80: mol_type = other DNA
tgcttacttttcctgctgtgctcatattgattctgtcttctctgcagaccaggaggctggtgagtacttgtggatttctt

SEQ ID NO: 19498 - DNA, 80 bp, synthetic construct
  source 1..80: mol_type = other DNA
ggaaggtttattggcttcaattccccagttgatgttcaacactttatttagttctcatttggattttaaacatttgcttg

SEQ ID NO: 19499 - DNA, 80 bp, synthetic construct
  source 1..80: mol_type = other DNA
ttgtttcaaaacgtcaggacggtacggatactgcaataggaaagaagagacattgtgttaacatttagacaacccacatg

SEQ ID NO: 19500 - DNA, 80 bp, synthetic construct
  source 1..80: mol_type = other DNA
ctcaaaacctcctgagtatgcctgtcatttagacttcagatctacattagcatcttcaaaaaatcattttggcgtgccca

SEQ ID NO: 19501 - DNA, 80 bp, synthetic construct
  source 1..80: mol_type = other DNA
aaaaactgagacttagaaagatttgtaatttgctctggtcgcacatctagtatagggtgttgggattcaaacccaaatac

SEQ ID NO: 19502 - DNA, 80 bp, synthetic construct
  source 1..80: mol_type = other DNA
cttcattcttgtgaagattagaaatgtaacatttacactagaattaatgccttttctataaaccaacttttgatgaacac

SEQ ID NO: 19503 - DNA, 80 bp, synthetic construct
  source 1..80: mol_type = other DNA
gacctcggagtaatcatggtcaatgttttcttgaattctatcagctttttctagatacagatacactttctattgtcctt

SEQ ID NO: 19504 - DNA, 80 bp, synthetic construct
  source 1..80: mol_type = other DNA
tgtttgagttgattatttctatagaatagatttctagaaatggtattgctggaacaaaggatctaggttttttttggagg

SEQ ID NO: 19505 - DNA, 80 bp, synthetic construct; identical to SEQ ID NO: 8793
  source 1..80: mol_type = other DNA

SEQ ID NO: 19506 - DNA, 80 bp, synthetic construct
  source 1..80: mol_type = other DNA
ggggtggtgtggtttaatagaaagtgaatagatttgctaataacaagatcttccttcgaattctggctctccttcctacc

SEQ ID NO: 19507 - DNA, 80 bp, synthetic construct
  source 1..80: mol_type = other DNA
tgctctgtgggtgctagtgtctttccttcctcaagaatatttgtcggataaagtatctagtatgatagttttgtgagttt

SEQ ID NO: 19508 - DNA, 80 bp, synthetic construct
  source 1..80: mol_type = other DNA
tattaggtgattgtaagtgtaagtgttagaggtaggaaatagaattggcttatttttctaagacttggagaaaatgtaag

SEQ ID NO: 19509 - DNA, 80 bp, synthetic construct
  source 1..80: mol_type = other DNA
gatgtcctgaaaataattttaatatacaatcattagatgtcacacttacttatatgacaggcagaggtgtcagtgattcc

SEQ ID NO: 19510 - DNA, 80 bp, synthetic construct
  source 1..80: mol_type = other DNA
gcttctcacagtattaccttacatgtgctccatgcaaagattgaactggcaatggaaaaccaaggcactgtaattttttc

SEQ ID NO: 19511 - DNA, 80 bp, synthetic construct
  source 1..80: mol_type = other DNA
gttattaatgcatccagtgaaaacttcttagccataaagtcagccacaagtttggggacagattctttactcttaaagcc

SEQ ID NO: 19512 - DNA, 80 bp, synthetic construct
  source 1..80: mol_type = other DNA
agtgctgcattccagactgctataactgaggataataagagatagagtacttcaatatgcttttacagtgctttcacaaa

SEQ ID NO: 19513 - DNA, 80 bp, synthetic construct
  source 1..80: mol_type = other DNA
actagaaatttccttgccttacgcagtcacaagtacaaaaagaggtggagatgaaagtcctggttaatagtgacatcaga

SEQ ID NO: 19514 - DNA, 80 bp, synthetic construct
  source 1..80: mol_type = other DNA
agctgggcacagtggtgcatgcctgtaatcccagctactctggaggttgagataggagaatcacttgaacctgtgaggtg

SEQ ID NO: 19515 - DNA, 80 bp, synthetic construct
  source 1..80: mol_type = other DNA
aaaacttgccttgtcactcataaaaggagagaaattcttaggttaatgagaatttggctctgaagcctaactacatacct

SEQ ID NO: 19516 - DNA, 80 bp, synthetic construct
  source 1..80: mol_type = other DNA
atttagtatccttaacgtggagtggcatagttcatactcataatgcacaatatcatgtaataggcttagctggattgtga

SEQ ID NO: 19517 - DNA, 80 bp, synthetic construct
  source 1..80: mol_type = other DNA
gaggcaaacatcattacaaacatatataaagtcctgttccttgtacaagtgtacatcattcttaggcaatgtgtgagttg

SEQ ID NO: 19518 - DNA, 80 bp, synthetic construct
  source 1..80: mol_type = other DNA
ccacttgatagcctccctttttaacagattcctatgtccatttctcaagtggacatgttttaaacattgtttttacctcc

SEQ ID NO: 19519 - DNA, 80 bp, synthetic construct
  source 1..80: mol_type = other DNA
ttgattttggattctgatctttgggagactgacatcctcagaacatgtggctgtcagacatttggtgtcttgagataatg

SEQ ID NO: 19520 - DNA, 80 bp, synthetic construct; identical to SEQ ID NO: 8796
  source 1..80: mol_type = other DNA

SEQ ID NO: 19521 - DNA, 80 bp, synthetic construct
  source 1..80: mol_type = other DNA
aagattggaaatagtatttcatatcaataatgccaactgaggctcagcatggttgctcatgtctgtactcagcactttcg

SEQ ID NO: 19522 - DNA, 80 bp, synthetic construct
  source 1..80: mol_type = other DNA
ggggctgctgacatttattggaagctaaccacatgatgagttgtgttgcacaaagtattttacatgcattgtctcatgcg

SEQ ID NO: 19523 - DNA, 80 bp, synthetic construct
  source 1..80: mol_type = other DNA
tcactttccttagggcatattttctgttaataaaataatagttggtctaaaattgctcatttcttttgaccgaagaatac

SEQ ID NO: 19524 - DNA, 80 bp, synthetic construct
  source 1..80: mol_type = other DNA
tatttgtagtggctgtgttaaaaaaaacaagccctttttcttttctcgaggaaatatgacttgagacaggtttgcttagc

SEQ ID NO: 19525 - DNA, 80 bp, synthetic construct; identical to SEQ ID NO: 8797
  source 1..80: mol_type = other DNA

SEQ ID NO: 19526 - DNA, 80 bp, synthetic construct
  source 1..80: mol_type = other DNA
ctttgcaaatttgtccttgttgatgtccacagcaatgattctggctgctccagctgctttacagcccataacaacagata

SEQ ID NO: 19527 - DNA, 80 bp, synthetic construct
  source 1..80: mol_type = other DNA
gaactactcagactcttctgtccaatctgttatcgaaacctgttttggcttgaaatgcttcatgtttaaattcaaggggt

SEQ ID NO: 19528 - DNA, 80 bp, synthetic construct
  source 1..80: mol_type = other DNA
ggggactggatgatctttgagatccagatgacagtgattacaatcttgtagggactctcaattgctgaaatcccttgata

SEQ ID NO: 19529 - DNA, 80 bp, synthetic construct; identical to SEQ ID NO: 8798
  source 1..80: mol_type = other DNA

SEQ ID NO: 19530 - DNA, 80 bp, synthetic construct
  source 1..80: mol_type = other DNA
gctagcggttatttactaaacctagtctcccatagtcagccttcgttttgggtaacatgctgttcctgttccaaataatc

SEQ ID NO: 19531 - DNA, 80 bp, synthetic construct
  source 1..80: mol_type = other DNA
gacattcagcaggagatttgtaaaagatattttagtcttagtgctcatattaagcagaagtcagattttgggcaaatatc

SEQ ID NO: 19532 - DNA, 80 bp, synthetic construct
  source 1..80: mol_type = other DNA
tgaaatgtcataatgagtgaattatgcatcactgagtctttattactttccgtctaagaatccacagagtgggtgagcct

SEQ ID NO: 19533 - DNA, 80 bp, synthetic construct; identical to SEQ ID NO: 8799
  source 1..80: mol_type = other DNA

SEQ ID NO: 19534 - DNA, 80 bp, synthetic construct
  source 1..80: mol_type = other DNA
cttcaaatctacaaaaataatttctgattcttgcaagaaattgcttcccttttggttcctgacagtctgcgtgtaaccgg

SEQ ID NO: 19535 - DNA, 80 bp, synthetic construct
  source 1..80: mol_type = other DNA
agaaggtgctgacgccgacgaagtggtggatgggcttcccgctgcaggtgaacctcctggtgccatcctgcagggtcccc

SEQ ID NO: 19536 - DNA, 80 bp, synthetic construct
  source 1..80: mol_type = other DNA
aattctgcattttccacactgaggagtaaagagcgggatgactttatcacctgcagaggaataaaacaaattcttcttaa

SEQ ID NO: 19537 - DNA, 80 bp, synthetic construct
  source 1..80: mol_type = other DNA
ataagtgcctgaagaatcctaaagagaaaatacaagtgtgggaaacaagatggattaaaaaaattccatcaactgtgtta

SEQ ID NO: 19538 - DNA, 80 bp, synthetic construct
  source 1..80: mol_type = other DNA
atctggtattttgtaagaatttgatttacaacaaaaatgagatttttaacataggtcttggcttttcaaagagactaggt

SEQ ID NO: 19539 - DNA, 80 bp, synthetic construct
  source 1..80: mol_type = other DNA
agtgtttttagctggtaatttgtgaattatctatttttactgttatggtggaaggaggaggggtgagaaataaggcagtc

SEQ ID NO: 19540 - DNA, 80 bp, synthetic construct
  source 1..80: mol_type = other DNA
ttcacaagaccaagaaaaatgattggtgcataacattttatgggtaaagttcatatgaaaacgatggtatggaaatgtcc

SEQ ID NO: 19541 - DNA, 80 bp, synthetic construct
  source 1..80: mol_type = other DNA
tgctatgtttctttcattttctttcacctagtcagtttcattgattccatgctcaggaagagagaccatgttggaagagg

SEQ ID NO: 19542 - DNA, 80 bp, synthetic construct
  source 1..80: mol_type = other DNA
ttacagaagacagtgttcagctaacactaacgtggaagttactagattatgaattccacactggtaggcactgtgtctct

SEQ ID NO: 19543 - DNA, 80 bp, synthetic construct
  source 1..80: mol_type = other DNA
gtgaccttgtgcaagtcctttcgtctttcattgcctcggtttcctcatccaggctgactaatcttgtgatggtgaaccaa

SEQ ID NO: 19544 - DNA, 80 bp, synthetic construct
  source 1..80: mol_type = other DNA
gattcctgcagccaccatctacagaataaagagaagatgtttagattcagaaaagattatgactgtcagatggacttaac

SEQ ID NO: 19545 - DNA, 80 bp, synthetic construct
  source 1..80: mol_type = other DNA
tgataatccctactattcccaaatatgaaagattcagtttatctccaaggttatccagtctaaaaccttcctctttttcc

SEQ ID NO: 19546 - DNA, 80 bp, synthetic construct; identical to SEQ ID NO: 8802
  source 1..80: mol_type = other DNA

SEQ ID NO: 19547 - DNA, 80 bp, synthetic construct
  source 1..80: mol_type = other DNA
ttaaatacaaatggaaaaagtatttcaccttaatgcgaacttcatgagccttaggaggtgcaacctctacctcctcaatg

SEQ ID NO: 19548 - DNA, 80 bp, synthetic construct
  source 1..80: mol_type = other DNA
gtcccatgtctggcacctaacaagtgttgcatagaaatgaagtcctctggtttataaagagaataagagtatcttttaaa

SEQ ID NO: 19549 - DNA, 80 bp, synthetic construct
  source 1..80: mol_type = other DNA
caggttagttacatatgtatatatgtgccatgctggtgcgctgcacccactaactcgtcatctagcattaggtatatctc

SEQ ID NO: 19550 - DNA, 80 bp, synthetic construct
  source 1..80: mol_type = other DNA
atttccagcttcatccatgtccctacaaaggacatgaactcatcattttttatggctgcatagtattccatggtgtatat

SEQ ID NO: 19551 - DNA, 80 bp, synthetic construct; identical to SEQ ID NO: 11701
  source 1..80: mol_type = other DNA

SEQ ID NO: 19552 - DNA, 80 bp, synthetic construct
  source 1..80: mol_type = other DNA
atgtgttttttggctgcataaatgtcttcttttgagaagtgtctgttcatgtccttcgcccactttttgatggggttgtt

SEQ ID NO: 19553 - DNA, 80 bp, synthetic construct
  source 1..80: mol_type = other DNA
tcccatttgtcaattttggcttttgttgccattgcttttggtgttttagacatgaagtccttgcccatgcctatgtcctg

SEQ ID NO: 19554 - DNA, 80 bp, synthetic construct
  source 1..80: mol_type = other DNA
acatgttctaagtcacctttactttgctgacagagtcagtgtctgtccaaaatacactgctttcttgctcaattttctgc

SEQ ID NO: 19555 - DNA, 80 bp, synthetic construct
  source 1..80: mol_type = other DNA
cctgttttgttcatctaatttatgtgcagagactccttccagcttagatttgagcccaaaattacagaggttagagttgg

SEQ ID NO: 19556 - DNA, 80 bp, synthetic construct
  source 1..80: mol_type = other DNA
tccagtgcttggcagtgtactgtaaaacccatctttattgtggtaaagcatgtacaattcactgagctctttctttacag

SEQ ID NO: 19557 - DNA, 80 bp, synthetic construct
  source 1..80: mol_type = other DNA
tgattgtcaggtgcctatgatgtgacaggtgcactgtggcttgtgctgagtgagttacatgcattatttttatttttaaa

SEQ ID NO: 19558 - DNA, 80 bp, synthetic construct; identical to SEQ ID NO: 8805
  source 1..80: mol_type = other DNA

SEQ ID NO: 19559 - DNA, 80 bp, synthetic construct
  source 1..80: mol_type = other DNA
ttgcaaattgtgctgctgtaaacaatatgaattacttttaaacctaaaacggatgctaccaggacagtactattgaatta

SEQ ID NO: 19560 - DNA, 80 bp, synthetic construct
  source 1..80: mol_type = other DNA
gtgggcggatcacctgaagtcaagagttggagaccagcctgaccaacatggtgaaaccctgtctctactaaaaatgctaa

SEQ ID NO: 19561 - DNA, 80 bp, synthetic construct
  source 1..80: mol_type = other DNA
ctccatctccaaacaaaaaaacgaatgaaaaaattaatgtagcctcacgttttctgtactccgtggtagtaaatatcaaa

SEQ ID NO: 19562 - DNA, 80 bp, synthetic construct
  source 1..80: mol_type = other DNA
aaaatgcaggacgggtaaacataaatgaaatgctgtcaaaaagctaagttattgatgttgcactcaagaggggaggatta

SEQ ID NO: 19563 - DNA, 80 bp, synthetic construct
  source 1..80: mol_type = other DNA
taatgaatgaaagtaaagtaaagtgaagtggtgtaagaacagtaccaatgggccactcatgtgatttccaaccagtctta

SEQ ID NO: 19564 - DNA, 80 bp, synthetic construct
  source 1..80: mol_type = other DNA
attaggcaattaataatatcaattgattatattgaatgaccacatgcatttctgtgcacctgtaaacacattgaaaaata

SEQ ID NO: 19565 - DNA, 80 bp, synthetic construct
  source 1..80: mol_type = other DNA
gtgtcataatgggccccctttaaacggaatttgaatgtgatgtcttgcttaaccttgatgattctaatgctgtgagatca

SEQ ID NO: 19566 - DNA, 80 bp, synthetic construct
  source 1..80: mol_type = other DNA
ttctgattaaagacttttctaactttaggtttacaaatcagtcatgattagcttggaataaactatcactttacggcaaa

SEQ ID NO: 19567 - DNA, 80 bp, synthetic construct
  source 1..80: mol_type = other DNA
agtaatatattttttgcttacttttcctgctgtgctcatattgattctgtcttctctgcagaccaggaggctggtgagta

SEQ ID NO: 19568 - DNA, 80 bp, synthetic construct
  source 1..80: mol_type = other DNA
gagcagcagcagctccagctcggtgcagaagcccagcagccggcgtgccgccgcccggccactccagcgccttcttcccc

SEQ ID NO: 19569 - DNA, 80 bp, synthetic construct
  source 1..80: mol_type = other DNA
cctcaccccgccgccgccgccgtcccggagctccgcacagtgtgccccagccccagcagggcgcacaactttggaagtct

SEQ ID NO: 19570 - DNA, 80 bp, synthetic construct; identical to SEQ ID NO: 8808
  source 1..80: mol_type = other DNA

SEQ ID NO: 19571 - DNA, 80 bp, synthetic construct
  source 1..80: mol_type = other DNA
aggcgcagttcgcgggacccgggccatgggccgctagcggtcctccagttcgggcccggcctccctgcggccccctccct

SEQ ID NO: 19572 - DNA, 80 bp, synthetic construct
  source 1..80: mol_type = other DNA
aacgcgagctggaacgggaccgaggcgccggggggcggcgcccgggccaccccttactccctgcaggtgacgctgacgct

SEQ ID NO: 19573 - DNA, 80 bp, synthetic construct; identical to SEQ ID NO: 8809
  source 1..80: mol_type = other DNA

SEQ ID NO: 19574 - DNA, 80 bp, synthetic construct
  source 1..80: mol_type = other DNA
ggcccgcagccggccgagccgcgctgcgagatcaacgaccagaagtggtacgtcatctcgtcgtgcatcggctccttctt

SEQ ID NO: 19575 - DNA, 80 bp, synthetic construct
  source 1..80: mol_type = other DNA
cgaaccgctgcccacccagctcaacggcgcccctggcgagcccgcgccggccgggccgcgcgacaccgacgcgctggacc

SEQ ID NO: 19576 - DNA, 80 bp, synthetic construct
  source 1..80: mol_type = other DNA
ggggaggagcgcgtcggggctgccaaggcgtcgcgctggcgcgggcggcagaaccgcgagaagcgcttcacgttcgtgct

SEQ ID NO: 19577 - DNA, 80 bp, synthetic construct; identical to SEQ ID NO: 8810
  source 1..80: mol_type = other DNA

SEQ ID NO: 19578 - DNA, 80 bp, synthetic construct
  source 1..80: mol_type = other DNA
tgttggtttggccactcttgacctggagccatcttcctagtgggccacccctaatcactattgcttcctaaaggtatttt

SEQ ID NO: 19579 - DNA, 80 bp, synthetic construct
  source 1..80: mol_type = other DNA
atcccccgctgtaaatatacactatttttgatagcacacatggggcccccatatctcttggccttggttttgatgttgaa

SEQ ID NO: 19580 - DNA, 80 bp, synthetic construct
  source 1..80: mol_type = other DNA
ctgctttgagatttcctgacagggaaaagatttctgtccatttttttcctgtgcctaacagcataattgccttttcctat

SEQ ID NO: 19581 - DNA, 80 bp, synthetic construct; identical to SEQ ID NO: 8811
  source 1..80: mol_type = other DNA

SEQ ID NO: 19582 - DNA, 80 bp, synthetic construct
  source 1..80: mol_type = other DNA
agctgttaggtatcaaaatgttgtcctttcccccctccgtgcttttctggttgagatcatgtcattgatgaactgccaaa

SEQ ID NO: 19583 - DNA, 80 bp, synthetic construct
  source 1..80: mol_type = other DNA
tgaatggagtggtcctcttgtctgttatctgagttttcaaaagctttaagactctgggaacatctgattttatggatttt

SEQ ID NO: 19584 - DNA, 80 bp, synthetic construct
  source 1..80: mol_type = other DNA
agaaacatgctgaagtcccggcggctcttccagcagcggcagcggctccagcagcagcggcggcggcggcggcggcggca

SEQ ID NO: 19585 - DNA, 80 bp, synthetic construct
  source 1..80: mol_type = other DNA
ggcctccgcagctcggcatgggcgcgggggtgctcgtcctgggcgcctccgagcccggtaacctgtcgtcggccgcaccg

SEQ ID NO: 19586 - DNA, 80 bp, synthetic construct; identical to SEQ ID NO: 8812
  source 1..80: mol_type = other DNA

SEQ ID NO: 19587 - DNA, 80 bp, synthetic construct
  source 1..80: mol_type = other DNA
tcgcccttccgctaccagagcctgctgacgcgcgcgcgggcgcggggcctcgtgtgcaccgtgtgggccatctcggccct

SEQ ID NO: 19588 - DNA, 80 bp, synthetic construct
  source 1..80: mol_type = other DNA
tgcgggtgttccgcgaggcccagaagcaggtgaagaagatcgacagctgcgagcgccgtttcctcggcggcccagcgcgg

SEQ ID NO: 19589 - DNA, 80 bp, synthetic construct
  source 1..80: mol_type = other DNA
catcatgggcgtcttcacgctctgctggctgcccttcttcctggccaacgtggtgaaggccttccaccgcgagctggtgc

SEQ ID NO: 19590 - DNA, 80 bp, synthetic construct
  source 1..80: mol_type = other DNA
tcgggctgtctggcccggcccggacccccgccatcgcccggggccgcctcggacgacgacgacgacgatgtcgtcggggc

SEQ ID NO: 19591 - DNA, 80 bp, synthetic construct
  source 1..80: mol_type = other DNA
gagatctgtgtttacttaagaccgatagcaggtgaactcgaagcccacaatcctcgtctgaatcatccgaggcaaagaga

SEQ ID NO: 19592 - DNA, 80 bp, synthetic construct; identical to SEQ ID NO: 8813
  source 1..80: mol_type = other DNA

SEQ ID NO: 19593 - DNA, 80 bp, synthetic construct
  source 1..80: mol_type = other DNA
ttgctttccagagaaatttcattttaatttctaagtaatgatttctgctgttatgaaagcaaagagaaaggatggaggca

SEQ ID NO: 19594 - DNA, 80 bp, synthetic construct
  source 1..80: mol_type = other DNA
tattaaacagcttatttatgtatcaatattagttggaaggaccaggcgcagagcctctctctgtgacatgtgactctgtc

SEQ ID NO: 19595 - DNA, 80 bp, synthetic construct
  source 1..80: mol_type = other DNA
agggagaggggctgggcagatcttaaataaaattcaaactctacttctgttgtctagtatgttattgagctaatgattca

SEQ ID NO: 19596 - DNA, 80 bp, synthetic construct; identical to SEQ ID NO: 8814
  source 1..80: mol_type = other DNA

SEQ ID NO: 19597 - DNA, 80 bp, synthetic construct
  source 1..80: mol_type = other DNA
gcactgcgaagcggcttcttcagagcacgggctggaactggcaggcaccgcgagcccctagcacccgacaagctgagtgt

SEQ ID NO: 19598 - DNA, 80 bp, synthetic construct
  source 1..80: mol_type = other DNA
ggaccacgacgtcacgcaggaaagggacgaggtgtgggtggtgggcatgggcatcgtcatgtctctcatcgtcctggcca

SEQ ID NO: 19599 - DNA, 80 bp, synthetic construct; identical to SEQ ID NO: 8815
  source 1..80: mol_type = other DNA

SEQ ID NO: 19600 - DNA, 80 bp, synthetic construct
  source 1..80: mol_type = other DNA
ctgtgacttcttcacgaaccaagcctatgccattgcctcttccatcgtgtccttctacgttcccctggtgatcatggtct

SEQ ID NO: 19601 - DNA, 80 bp, synthetic construct
  source 1..80: mol_type = other DNA
tgcccttcttcatcgttaacattgtgcatgtgatccaggataacctcatccgtaaggaagtttacatcctcctaaattgg

SEQ ID NO: 19602 - DNA, 80 bp, synthetic construct; identical to SEQ ID NO: 8816
  source 1..80: mol_type = other DNA

SEQ ID NO: 19603 - DNA, 80 bp, synthetic construct
  source 1..80: mol_type = other DNA
acagttcagttcctctttgcatggaatttgtaagtttatgtctaaagagctttagtcctagaggacctgagtctgctata

SEQ ID NO: 19604 - DNA, 80 bp, synthetic construct
  source 1..80: mol_type = other DNA
tttaggcagggatttgaggagcagcttcagttgttttcccgagcaaagtctaaagtttacagtaaataaattgtttgacc

SEQ ID NO: 19605 - DNA, 80 bp, synthetic construct
  source 1..80: mol_type = other DNA
agttgcaagctgtctttgctaccatttcaggtaagatatttctcatctaatttcaatgctttgctctttctcatcctgta

SEQ ID NO: 19606 - DNA, 80 bp, synthetic construct
  source 1..80: mol_type = other DNA
tattgtaggtttagcctgaagccagcctgagccaagaaaagggagaaggttttgctgtttaatcaaagtagttttgattt

SEQ ID NO: 19607 - DNA, 80 bp, synthetic construct
  source 1..80: mol_type = other DNA
tgagttgtgcttagtcaacacaccataaatagtattaaagggaagaaaactgatgggccgtggtgctaggagttgggcgg

SEQ ID NO: 19608 - DNA, 80 bp, synthetic construct; identical to SEQ ID NO: 8817
  source 1..80: mol_type = other DNA

SEQ ID NO: 19609 - DNA, 80 bp, synthetic construct
  source 1..80: mol_type = other DNA
ggtatcaaatgactgaatgagaaaatggagcaatgggttctgaccagtcctcaatttatctttacttgtgagatggctaa

SEQ ID NO: 19610 - DNA, 80 bp, synthetic construct
  source 1..80: mol_type = other DNA
gtgctgtacttcctttttcttcaacttttgcattatatatcaaactgtttactcagaatagtgtcataacagcaaacgac

SEQ ID NO: 19611 - DNA, 80 bp, synthetic construct
  source 1..80: mol_type = other DNA
tgtgttgcagggtgcctttctgaatattgtgcaaagtctttgtcctagacagtttgactcaatggaatatcacctttcac

SEQ ID NO: 19612 - DNA, 80 bp, synthetic construct; identical to SEQ ID NO: 8818
  source 1..80: mol_type = other DNA

SEQ ID NO: 19613 - DNA, 80 bp, synthetic construct
  source 1..80: mol_type = other DNA
agaaagctgatgtgagggtgtagtaaagtgcctacccatagaaaataccctatccatgttagttaataatgaaggtaatg

SEQ ID NO: 19614 - DNA, 80 bp, synthetic construct
  source 1..80: mol_type = other DNA
agaaaatggtcaggcagcttttagatttcagagttatgttggcagcgccacctgctgttgaaaataaaaacacttctgga

SEQ ID NO: 19615 - DNA, 80 bp, synthetic construct
  source 1..80: mol_type = other DNA
aagaaatgattccctaatgatgtcatcattaacttcttaatccacttagtgactaacccttattatcaagggattagttt

SEQ ID NO: 19616 - DNA, 80 bp, synthetic construct; identical to SEQ ID NO: 8819
  source 1..80: mol_type = other DNA

SEQ ID NO: 19617 - DNA, 80 bp, synthetic construct
  source 1..80: mol_type = other DNA
gaaatggttatataataaattctctatcagtcatgtggcaaataaaggaagatctcacatgaaatacatttcccatcatc

SEQ ID NO: 19618 - DNA, 80 bp, synthetic construct
  source 1..80: mol_type = other DNA
ttaagcatttactcctcatttccccctcaacccctggcagccacgaatctgcattatgtctcgatgaatttgcctattat

SEQ ID NO: 19619 - DNA, 80 bp, synthetic construct
  source 1..80: mol_type = other DNA
tttgtttatctattcatccatctacagatgctttagttatctccatcttttggctattgtaagtagtgccactgcaaact

SEQ ID NO: 19620 - DNA, 80 bp, synthetic construct; identical to SEQ ID NO: 8820
  source 1..80: mol_type = other DNA

SEQ ID NO: 19621 - DNA, 80 bp, synthetic construct
  source 1..80: mol_type = other DNA
tttaaaatagcattataaggataagacttgagaggagagaatcgtggttaggctcttcaaagctgttaaaaacaggccgg

SEQ ID NO: 19622 - DNA, 80 bp, synthetic construct
  source 1..80: mol_type = other DNA
cctgtagtcccagctgctttggacactgaggcagaagaatcgcttgaacccggaaggtggaggttgcagtgagctgagat

SEQ ID NO: 19623 - DNA, 80 bp, synthetic construct
  source 1..80: mol_type = other DNA
agcagtaacgcagtggtgtctcatgaagaaatggaacgcactttactattgttcaaatgttcagcagtcatttgagggcc

SEQ ID NO: 19624 - DNA, 80 bp, synthetic construct
  source 1..80: mol_type = other DNA
ttttccttatagttttattgccttgtcaatgtcttgcactgaaaagtctctgggagagaacctgattcctttggttggtc

SEQ ID NO: 19625 - DNA, 80 bp, synthetic construct; identical to SEQ ID NO: 8821
  source 1..80: mol_type = other DNA

SEQ ID NO: 19626 - DNA, 80 bp, synthetic construct
  source 1..80: mol_type = other DNA
tgtttctggctcttccaggttctagaggctgctgtgttccccggattgtgctttcatcacccaagtctctgcctccatcg

SEQ ID NO: 19627 - DNA, 80 bp, synthetic construct
  source 1..80: mol_type = other DNA
agttctcgggattaggatgtggacatcttcgggggagttattatttagtctaccatagggcatactaaaaagcaaacaaa

SEQ ID NO: 19628 - DNA, 80 bp, synthetic construct
  source 1..80: mol_type = other DNA
ttatttatcagactgtggtttgcaaacagtgttgttgccttaatgttaacattttggaaatgagccatgaaaggtcgaac

SEQ ID NO: 19629 - DNA, 80 bp, synthetic construct; identical to SEQ ID NO: 8822
  source 1..80: mol_type = other DNA

SEQ ID NO: 19630 - DNA, 80 bp, synthetic construct
  source 1..80: mol_type = other DNA
ttttctagagccaagctgtcttagagaaatggggtggggtgtctctacaagagagattaaaacacatcttttttttttct

SEQ ID NO: 19631 - DNA, 80 bp, synthetic construct
  source 1..80: mol_type = other DNA
aatttttatttctgcttatacatcaccccatccccattcccaggaagtacaggacttctaacccaatgtaaatgtttttt

SEQ ID NO: 19632 - DNA, 80 bp, synthetic construct
  source 1..80: mol_type = other DNA
aatcagcctggctaacatgatgaaaccccgtctctactaaaaatataaaaattagctgggcatggtggttcgtgcctata

SEQ ID NO: 19633 - DNA, 80 bp, synthetic construct; identical to SEQ ID NO: 8823
  source 1..80: mol_type = other DNA

SEQ ID NO: 19634 - DNA, 80 bp, synthetic construct
  source 1..80: mol_type = other DNA
aatcaccctttgaaaaactctcagcccattcctcacttcagcccaaagctgtcctagctattttttcactgtatacagtt

SEQ ID NO: 19635 - DNA, 80 bp, synthetic construct
  source 1..80: mol_type = other DNA
ttgataaacatggcttttaacacctagcctgagagtgagcttgaaccccacctcatcttcccacccactgtagttgataa

SEQ ID NO: 19636 - DNA, 80 bp, synthetic construct; identical to SEQ ID NO: 8824
  source 1..80: mol_type = other DNA

SEQ ID NO: 19637 - DNA, 80 bp, synthetic construct
  source 1..80: mol_type = other DNA
gaatgttggacagaatgtaagcaagcggtttgtttggcgtaaaggaagtaactgttatgatcatttatatcattttacaa

SEQ ID NO: 19638 - DNA, 80 bp, synthetic construct
  source 1..80: mol_type = other DNA
tcacactttgccttatatgaaagtgcaaatctcaccttcagaactgaccattcagcagttgtgaagaagtagttctggaa

SEQ ID NO: 19639 - DNA, 80 bp, synthetic construct
  source 1..80: mol_type = other DNA
tgtctaagttcatggatacagttttagaaatccccacctctcccttctttattgctttccaactaatcttatagacattt

SEQ ID NO: 19640 - DNA, 80 bp, synthetic construct; identical to SEQ ID NO: 8825
  source 1..80: mol_type = other DNA

SEQ ID NO: 19641 - DNA, 80 bp, synthetic construct
  source 1..80: mol_type = other DNA
ggtttcaccctgttggccaagctggccttgaactcctggcctcaggtgatctgcctgccttggcctcccaaagtgctggc

SEQ ID NO: 19642 - DNA, 80 bp, synthetic construct
  source 1..80: mol_type = other DNA
tccaactattctgcaccttgggccaattgctttctctctgtatggccaatttctttacttgttaattaggaaagatgttt

SEQ ID NO: 19643 - DNA, 80 bp, synthetic construct
  source 1..80: mol_type = other DNA
actaccaaatctttactctttctgagagcataatcacagtctctaactttaaagggatgatgtgcactctacattacagc

SEQ ID NO: 19644 - DNA, 80 bp, synthetic construct; identical to SEQ ID NO: 8826
  source 1..80: mol_type = other DNA

SEQ ID NO: 19645 - DNA, 80 bp, synthetic construct
  source 1..80: mol_type = other DNA
cttaaatacctttcaagtgcgttatgacaggcttcttctactctaatggcatttgttactaattgcttcatgaaatcgta

SEQ ID NO: 19646 - DNA, 80 bp, synthetic construct
  source 1..80: mol_type = other DNA
gaacagatcttgaccaattataatttgttttttgtttgtcagaatgggagtgagccatgacttggatggacagggctagg

SEQ ID NO: 19647 - DNA, 80 bp, synthetic construct
  source 1..80: mol_type = other DNA
agggaatgatgacgtggtagcattgtcctttgagtctcatcttctcaaaggcagaggtcacattttctagtgttgtacct

SEQ ID NO: 19648 - DNA, 80 bp, synthetic construct; identical to SEQ ID NO: 8827
  source 1..80: mol_type = other DNA

SEQ ID NO: 19649 - DNA, 80 bp, synthetic construct
  source 1..80: mol_type = other DNA
gtggaagtctaacaaatggattctctgagtcattgaaaggtatgcttaaaaacaggtactctgtataaaacagctggtca

SEQ ID NO: 19650 - DNA, 80 bp, synthetic construct
  source 1..80: mol_type = other DNA
tccattccaaatttgatcctaaatgcgaaaccacagtgtgctataaaacattgaacattcctgcaaaaacagacagaggt

SEQ ID NO: 19651 - DNA, 80 bp, synthetic construct
  source 1..80: mol_type = other DNA
attatagaatgaaggtcacaagggaaaaggaacatattctcttcctcactcagtaaatttatgacagcaaggatccagaa

SEQ ID NO: 19652 - DNA, 80 bp, synthetic construct
  source 1..80: mol_type = other DNA
gagggctgtttactgtaccttgtctgtctttatgttgttagttaaacagtgagtcataaaaatgccccaataacacattt

SEQ ID NO: 19653 - DNA, 80 bp, synthetic construct; identical to SEQ ID NO: 8828
  source 1..80: mol_type = other DNA

SEQ ID NO: 19654 - DNA, 80 bp, synthetic construct
  source 1..80: mol_type = other DNA
cttctcatagaagtctttcccgttgaccttatcttaagtggttccctcgttatttctggacctttatttgttttattcat

SEQ ID NO: 19655 - DNA, 80 bp, synthetic construct
  source 1..80: mol_type = other DNA
tgagcttactatttacctgatagggttgtttgtcataaagaattaacacacgaaaacaagcaaagtgtgtagaacctgtc

SEQ ID NO: 19656 - DNA, 80 bp, synthetic construct; identical to SEQ ID NO: 8829
  source 1..80: mol_type = other DNA

SEQ ID NO: 19657 - DNA, 80 bp, synthetic construct
  source 1..80: mol_type = other DNA
atttttcctctctaaaaagtaagcagggattgtacctgcctaccttatgtgtacattcctgacgtgaatcatagttcttg

SEQ ID NO: 19658 - DNA, 80 bp, synthetic construct
  source 1..80: mol_type = other DNA
ctcagcctcccaagtacctgggactacaggtgcctgccaccatgcccagctgatttttgtatttttagtagaggtggggt

SEQ ID NO: 19659 - DNA, 80 bp, synthetic construct
  source 1..80: mol_type = other DNA
catacacacaggaaatcttagcaatcaacacattagtgattatcactctgtattgatggtaattatggtattttgtggtt

SEQ ID NO: 19660 - DNA, 80 bp, synthetic construct
  source 1..80: mol_type = other DNA
tacttcgaatgagagatgacaccatgcatatggtacttctatcatgatccaatcagattatgtttaccaaggacttggta

SEQ ID NO: 19661 - DNA, 80 bp, synthetic construct; identical to SEQ ID NO: 8830
  source 1..80: mol_type = other DNA

SEQ ID NO: 19662 - DNA, 80 bp, synthetic construct
  source 1..80: mol_type = other DNA
gttaagtggaacactgaaggagctgaagagtcaaaagaggaagtaggtgctaaatagttcagaaaaggaagcagttcact

SEQ ID NO: 19663 - DNA, 80 bp, synthetic construct
  source 1..80: mol_type = other DNA
tggagatactgaagcttcaggtccagaccagtgcaataaggaaatataaaaagtcagtcacatgaatgttttggcttccc

SEQ ID NO: 19664 - DNA, 80 bp, synthetic construct; identical to SEQ ID NO: 8831
  source 1..80: mol_type = other DNA

SEQ ID NO: 19665 - DNA, 80 bp, synthetic construct
  source 1..80: mol_type = other DNA
tcctttactgtttatttttatgttgtgtaaaatgccgacttactgatgcataagacaaatgtttaattgactgctcctct

SEQ ID NO: 19666 - DNA, 80 bp, synthetic construct
  source 1..80: mol_type = other DNA
ctctttataaaaagtgtgaaccacagatcctattgtgattttgtgtcttctcccaggtatgtcctcaaccttagcaaaat

SEQ ID NO: 19667 - DNA, 80 bp, synthetic construct
  source 1..80: mol_type = other DNA
aaacttgaaaatcaaatgattctctgacgtatgggctacagataggatgttgtgtttgcaggcatgaaaacaacattaac

SEQ ID NO: 19668 - DNA, 80 bp, synthetic construct
  source 1..80: mol_type = other DNA
tttatttttccatttgtcgggcacaggccgagtagattcggtataattcccaaggactctaggattttcagcagcacaga

SEQ ID NO: 19669 - DNA, 80 bp, synthetic construct; identical to SEQ ID NO: 8832
  source 1..80: mol_type = other DNA

SEQ ID NO: 19670 - DNA, 80 bp, synthetic construct
  source 1..80: mol_type = other DNA
tgaagagtgttagggccttgctctagattaggctttggcttaagagaatattgtggctggtttgatcttctatccacacc

SEQ ID NO: 19671 - DNA, 80 bp, synthetic construct
  source 1..80: mol_type = other DNA
atgatgcaaaaggcctacctttcggcctatcttggtttttgatatgccttcctcactaagcttaatgatttgtaactttt

SEQ ID NO: 19672 - DNA, 80 bp, synthetic construct; identical to SEQ ID NO: 8833
  source 1..80: mol_type = other DNA

SEQ ID NO: 19673 - DNA, 80 bp, synthetic construct
  source 1..80: mol_type = other DNA
atggcactgatatccttgctcatgtagagttgccacgtatcttcaatttgtaagaaaacacagtagcttcagagcacaat

SEQ ID NO: 19674 - DNA, 80 bp, synthetic construct
  source 1..80: mol_type = other DNA
ggctagtcaagatctttcacctgaactatatcctctcttccgaatattctttcccagcatgatgttcctatttgattctc

SEQ ID NO: 19675 - DNA, 80 bp, synthetic construct
  source 1..80: mol_type = other DNA
caagcccactgttgtagtcctaaaggtgcctttccttctcctttcctcatttgagtattttatttctgaatcccatcctt

SEQ ID NO: 19676 - DNA, 80 bp, synthetic construct; identical to SEQ ID NO: 8834
  source 1..80: mol_type = other DNA

SEQ ID NO: 19677 - DNA, 80 bp, synthetic construct
  source 1..80: mol_type = other DNA
atagcaaatgaattagtttacttctttagttgagtttacttttcaacattagaaatgatcaacatttctgggtttataag

SEQ ID NO: 19678 - DNA, 80 bp, synthetic construct
  source 1..80: mol_type = other DNA
tttgcatttctcctggtattctttgcagctgcttcactcttactagtgagaggatattttcaggctgagctgaatgaaca

SEQ ID NO: 19679 - DNA, 80 bp, synthetic construct
  source 1..80: mol_type = other DNA
taattattttattttattttattttttggtagagacagggcttctctatattgcccaggctggtttcgaactcctaggct

SEQ ID NO: 19680 - DNA, 80 bp, synthetic construct
  source 1..80: mol_type = other DNA
cagcaaaggctctgctgtgggttaatttttgccctatacctttttgtttgtttctgccaaattatattaccttggaaata

SEQ ID NO: 19681 - DNA, 80 bp, synthetic construct; identical to SEQ ID NO: 8835
  source 1..80: mol_type = other DNA

SEQ ID NO: 19682 - DNA, 80 bp, synthetic construct
  source 1..80: mol_type = other DNA
actgaactaaatgtgccagttgtgcactcaaagcctcaagtggttttgcttcactgctgacaataaaatgaaacaacaac

SEQ ID NO: 19683 - DNA, 80 bp, synthetic construct
  source 1..80: mol_type = other DNA
cacacagcagccatttgagatgttgtgagatggggcatgaagatgactgcacttttcagcatctgtgctgtgaaacatct

SEQ ID NO: 19684 - DNA, 80 bp, synthetic construct; identical to SEQ ID NO: 8836
  source 1..80: mol_type = other DNA

SEQ ID NO: 19685 - DNA, 80 bp, synthetic construct
  source 1..80: mol_type = other DNA
aaaataacctatcacttttgttgatccctttttcgagtgtgaaggtaagaggatgtgctgcactcttggctgggaaggtg

SEQ ID NO: 19686 - DNA, 80 bp, synthetic construct
  source 1..80: mol_type = other DNA
tacattatcctgtggaggattttctcacctttatgtgtggtgaattaattctccctatggatgtacacttgcagtcctga

SEQ ID NO: 19687 - DNA, 80 bp, synthetic construct
  source 1..80: mol_type = other DNA
taaggttataaaggaaaacaatgactccctaattaaggcatattcttgacaaaacttggacccaacccttaaacccatgg

SEQ ID NO: 19688 - DNA, 80 bp, synthetic construct; identical to SEQ ID NO: 8837
  source 1..80: mol_type = other DNA

SEQ ID NO: 19689 - DNA, 80 bp, synthetic construct
  source 1..80: mol_type = other DNA
aatccatcatatttcccagggactaaagagtaagcaaagcaataaggacatatatttaaaatggaaatataatacggaga

SEQ ID NO: 19690 - DNA, 80 bp, synthetic construct
  source 1..80: mol_type = other DNA
cagtctcaggctagctctgatttttgtaacttccttatagagttcagccttgtaagggctgtgatgatgtaaatgttaac

SEQ ID NO: 19691 - DNA, 80 bp, synthetic construct
  source 1..80: mol_type = other DNA
ttagtctcttgagaggcagggagcaggaagaaagtgctctatttagagagatgtagacaagatatgaagaattactcatc

SEQ ID NO: 19692 - DNA, 80 bp, synthetic construct; identical to SEQ ID NO: 8838
  source 1..80: mol_type = other DNA

SEQ ID NO: 19693 - DNA, 80 bp, synthetic construct
  source 1..80: mol_type = other DNA
tattattattattttttcaaactgaggatgtctgatattgcctccagttctcttggtgtggttttatctctaagccaagc

SEQ ID NO: 19694 - DNA, 80 bp, synthetic construct
  source 1..80: mol_type = other DNA
tcctgtcattgtgttcagagcatagagaaaaactatgaggttcctcttctaaaatgtaagactcccagtgtgggtcctct

SEQ ID NO: 19695 - DNA, 80 bp, synthetic construct
  source 1..80: mol_type = other DNA
atatttgtatacccaagaaaaggaattcaacacctactgagtagagaaaacctaccagctacttggcaacataatatgag

SEQ ID NO: 19696 - DNA, 80 bp, synthetic construct
  source 1..80: mol_type = other DNA
aggacaagaacaaacttgtagacattaaatatgcctttactgaagtaaaatattctgtagaagagtttgtagataatgct

SEQ ID NO: 19697 - DNA, 80 bp, synthetic construct; identical to SEQ ID NO: 8839
  source 1..80: mol_type = other DNA

SEQ ID NO: 19698 - DNA, 80 bp, synthetic construct
  source 1..80: mol_type = other DNA
taggaagaatcgcaacagcataggaatcctgaacaccagaaaacaacagattaatgcgtaaaagctctgaggaaaaatgg

SEQ ID NO: 19699 - DNA, 80 bp, synthetic construct
  source 1..80: mol_type = other DNA
aaagaaagcaagatgaatccaaggagtataataaacagtggcactaatccaggagtttggtttgtgttaattttaggata

SEQ ID NO: 19700 - DNA, 80 bp, synthetic construct
  source 1..80: mol_type = other DNA
gcgtatgttagtttccatcaacaagaaaataaaaagttcagctccataaaaagcaaagctgtgggtcaagtgtgagggaa

SEQ ID NO: 19701 - DNA, 80 bp, synthetic construct
  source 1..80: mol_type = other DNA
agtgaatgttttcttttgcatggcatagaggtaatgccattggacctacaaagaaggaatgtactcctaacacgttactt

SEQ ID NO: 19702 - DNA, 80 bp, synthetic construct; identical to SEQ ID NO: 8840
  source 1..80: mol_type = other DNA

SEQ ID NO: 19703 - DNA, 80 bp, synthetic construct
  source 1..80: mol_type = other DNA
ctctggcttctaacatttatcgaagtgcatctcattggatgactcttaaattgattctagaaccctctagctacaatatt

SEQ ID NO: 19704 - DNA, 80 bp, synthetic construct
  source 1..80: mol_type = other DNA
aggatgtgaacttacacataacatggccaagcaaaatgtagtaataggagcaccattttggatggctccaagaagtgatt

SEQ ID NO: 19705 - DNA, 80 bp, synthetic construct; identical to SEQ ID NO: 8841
  source 1..80: mol_type = other DNA

SEQ ID NO: 19706 - DNA, 80 bp, synthetic construct
  source 1..80: mol_type = other DNA
atactataaacatataggagtgtaattaactaaaacacaaccaaaaatgataattctatttcttagagcagagtgaatag

SEQ ID NO: 19707 - DNA, 80 bp, synthetic construct
  source 1..80: mol_type = other DNA
aggttgggctcaatatttttgcttttcattttaagatccttttatagtgcttgatttttttaaccatacacatgtattgt

SEQ ID NO: 19708 - DNA, 80 bp, synthetic construct
  source 1..80: mol_type = other DNA
actaagattttgtttttcattagtgttggaaatgattctcactagttgctgtatctaccttttgcatcatgctatggggc

SEQ ID NO: 19709 - DNA, 80 bp, synthetic construct
  source 1..80: mol_type = other DNA
atatcatctgaaggcatctggggaaggaagtttaatggggaatcactagttgaaatatgtgtgcctgaattgtcttaata

SEQ ID NO: 19710 - DNA, 80 bp, synthetic construct; identical to SEQ ID NO: 8842
  source 1..80: mol_type = other DNA

SEQ ID NO: 19711 - DNA, 80 bp, synthetic construct
  source 1..80: mol_type = other DNA
agtaaaaatgggtttagtcatattgtgcaggaaggattcaagatgcaaggaaaagtaaatgtaatgaacgcagtgataag

SEQ ID NO: 19712 - DNA, 80 bp, synthetic construct
  source 1..80: mol_type = other DNA
tgtcctcatgatagtttgtgacttctcatgagatctggctgtttaaaagtgtgtggcacctcgcttgctctctctcttgc

SEQ ID NO: 19713 - DNA, 80 bp, synthetic construct; identical to SEQ ID NO: 8843
  source 1..80: mol_type = other DNA

SEQ ID NO: 19714 - DNA, 80 bp, synthetic construct
  source 1..80: mol_type = other DNA
atgcgtgtgatccagttaactgaatgcaattttggtatcaattctccaagcaaaaatttcttgatttgtaaaaataaaaa

SEQ ID NO: 19715 - DNA, 80 bp, synthetic construct
  source 1..80: mol_type = other DNA
agctgatgttatctagtctagacaggacttccttttagttaattggaagctttgtggcaggaactcaggcaagccatagg

SEQ ID NO: 19716 - DNA, 80 bp, synthetic construct
  source 1..80: mol_type = other DNA
ctgataggctaatatttactggattatttcagtagatgaggctgcagtggtggtttggtattgtgtggacattagatgat

SEQ ID NO: 19717 - DNA, 80 bp, synthetic construct
  source 1..80: mol_type = other DNA
ttggtatgcctgaatctcatttaaactcattgtttcaagttttactttaaaaaagacattttccaggagtgctaaaatta

SEQ ID NO: 19718 - DNA, 80 bp, synthetic construct; identical to SEQ ID NO: 8844
  source 1..80: mol_type = other DNA

SEQ ID NO: 19719 - DNA, 80 bp, synthetic construct
  source 1..80: mol_type = other DNA
ccagaagcaagagtttccaggtactcagaagataatctccacctatacttttctttttggaaaaacctagtgtgagaaag

SEQ ID NO: 19720 - DNA, 80 bp, synthetic construct
  source 1..80: mol_type = other DNA
gcaattgtcccagagattgccaagagctgtggccttgggaaatcaatgaagaatctccaggtgatatagcagttaagaag

SEQ ID NO: 19721 - DNA, 80 bp, synthetic construct; identical to SEQ ID NO: 8845
  source 1..80: mol_type = other DNA

SEQ ID NO: 19722 - DNA, 80 bp, synthetic construct
  source 1..80: mol_type = other DNA
ggctggaagtcccactcaggtgcccttctctgtctcttgcaggagagagagctgttcttctttctctttcttttgcctat

SEQ ID NO: 19723 - DNA, 80 bp, synthetic construct
  source 1..80: mol_type = other DNA
cattctggccatgcttgaggagcctttcagcccgctgctgcaccgagggagcccctctctgggctggccatggctggagc

SEQ ID NO: 19724 - DNA, 80 bp, synthetic construct
  source 1..80: mol_type = other DNA
gggcttagcacccaggctagcagctgtggagggtgcgctgggtcccccagcagtgctggcccacccgcgctgtgcttgaa

SEQ ID NO: 19725 - DNA, 80 bp, synthetic construct; identical to SEQ ID NO: 8846
  source 1..80: mol_type = other DNA

SEQ ID NO: 19726 - DNA, 80 bp, synthetic construct
  source 1..80: mol_type = other DNA
ctctgtatctagctaaactggtagggacttggagaacttttatgtctagctcagggattgtaaatgcaccaatcagcacc

SEQ ID NO: 19727 - DNA, 80 bp, synthetic construct
  source 1..80: mol_type = other DNA
tacatcttgctgctgcttactctttgggtccacactgcggtaatactcaccacgaaggtctgcggcttcactcctgaagc

SEQ ID NO: 19728 - DNA, 80 bp, synthetic construct
  source 1..80: mol_type = other DNA
agacacaacaccacttcacaggtgacagattggcaaggaagctgtggcactatgcaaattctagtgagtgtccatgaaaa

SEQ ID NO: 19729 - DNA, 80 bp, synthetic construct
  source 1..80: mol_type = other DNA
atgtgtctgatttagataaagatgaacaacatggccttaatgtcccctcaggtggactaaacttgagacaggtttcctcc

SEQ ID NO: 19730 - DNA, 80 bp, synthetic construct; identical to SEQ ID NO: 8847
  source 1..80: mol_type = other DNA

SEQ ID NO: 19731 - DNA, 80 bp, synthetic construct
  source 1..80: mol_type = other DNA
cctaggacttaaaaactctctggagttgagctctgtaaaccaaaaagtgacataggcagatctgagtcaattagaggttt

SEQ ID NO: 19732 - DNA, 80 bp, synthetic construct
  source 1..80: mol_type = other DNA
cagtaaatctacattttacagggggaaagagggagtagaggaaaaagtcagattatgcattctgtctcagacaggaaatc

SEQ ID NO: 19733 - DNA, 80 bp, synthetic construct; identical to SEQ ID NO: 8848
  source 1..80: mol_type = other DNA

SEQ ID NO: 19734 - DNA, 80 bp, synthetic construct
  source 1..80: mol_type = other DNA
gctgagatattcattctgatcttgttttcctgttgtaagagacgtgaaagattattcgattccttaaatctggaggaaca

SEQ ID NO: 19735 - DNA, 80 bp, synthetic construct
  source 1..80: mol_type = other DNA
gagtctgttgctgagtgaaagggcctgattggccaggtacttgacaatgattttggctttaggtgtggaagccacagaga

SEQ ID NO: 19736 - DNA, 80 bp, synthetic construct
  source 1..80: mol_type = other DNA
tatagaaaaactcattcctccgagaatgtaggatacaatttttttaaagacattctatgttgtaactagtttactagtta

SEQ ID NO: 19737 - DNA, 80 bp, synthetic construct; identical to SEQ ID NO: 8849
  source 1..80: mol_type = other DNA

SEQ ID NO: 19738 - DNA, 80 bp, synthetic construct
  source 1..80: mol_type = other DNA
ttaagaagagtctccgtagaaatgtatgtgtttatctaagtgaacttggcaagtcccaacctctcttaagctcgattttc

SEQ ID NO: 19739 - DNA, 80 bp, synthetic construct
  source 1..80: mol_type = other DNA
ggtagttgctgctcttgtgaaataatcaaatataatcatatatgcaagaagcagttttgcaagggagcatattattattg

SEQ ID NO: 19740 - DNA, 80 bp, synthetic construct
  source 1..80: mol_type = other DNA
aatggaaacttttcataatataaaaaagtgaaagaagtaaataccttggaaaggaaaaaattacatattgaattttaaat

SEQ ID NO: 19741 - DNA, 80 bp, synthetic construct; identical to SEQ ID NO: 8850
  source 1..80: mol_type = other DNA

SEQ ID NO: 19742 - DNA, 80 bp, synthetic construct
  source 1..80: mol_type = other DNA
ttttttttttagtgacagatgacattttgactttactttcttatctgtattataatatttgtgagaaatcactaccctac

SEQ ID NO: 19743 - DNA, 80 bp, synthetic construct
  source 1..80: mol_type = other DNA
atggttttgaaaatgggagtttccctgcacaaactctctttttgcctgctgccattcatgtaagacatcacttgcttctc

SEQ ID NO: 19744 - DNA, 80 bp, synthetic construct
  source 1..80: mol_type = other DNA
aaaaagatccttgaaaatgggaagcaactttagaaccaggtaacaggaagaggtttgaacagtttggaaggctcagaaga

SEQ ID NO: 19745 - DNA, 80 bp, synthetic construct
  source 1..80: mol_type = other DNA
gttttagcaaagagactggtgagattttgcccctgccttagagatttgtggcactttagacttgaaagagatgatttaag

SEQ ID NO: 19746 - DNA, 80 bp, synthetic construct; identical to SEQ ID NO: 8851
  source 1..80: mol_type = other DNA

SEQ ID NO: 19747 - DNA, 80 bp, synthetic construct
  source 1..80: mol_type = other DNA
aggtacagctcagactgtggcttcagagggtgcaagccccaagccttggcagcttccatgtggtgttgagcctatgggtg

SEQ ID NO: 19748 - DNA, 80 bp, synthetic construct
  source 1..80: mol_type = other DNA
cacagagtccttactggggcactgcctagtggagctgtgagaagaggaccaatgtcctccagaccctagaatggtagatc

SEQ ID NO: 19749 - DNA, 80 bp, synthetic construct; identical to SEQ ID NO: 8852
  source 1..80: mol_type = other DNA

SEQ ID NO: 19750 - DNA, 80 bp, synthetic construct
  source 1..80: mol_type = other DNA
tgagttaatgctgaaatgagttaagactttgggggactgttgggaaggcatgattggtttgaaatgtgaggacatgagat

SEQ ID NO: 19751 - DNA, 80 bp, synthetic construct
  source 1..80: mol_type = other DNA
tgaatgagcctcacaagatctaatggttttaaaaatgggagttttcctgcacaaactctctttttgcctgctgccatcca

SEQ ID NO: 19752 - DNA, 80 bp, synthetic construct
  source 1..80: mol_type = other DNA
atttaaaaaatagttcaattacacaaatgcattgttttaaaatagtctataaagataaaaagtatatatatagctgcaaa

SEQ ID NO: 19753 - DNA, 80 bp, synthetic construct
  source 1..80: mol_type = other DNA
cttgtatataaacaggaagattcaaaggaggttagctggaccaagagctagatctactcttgaattatagtcatatgttg

SEQ ID NO: 19754 - DNA, 80 bp, synthetic construct; identical to SEQ ID NO: 8853
  source 1..80: mol_type = other DNA

SEQ ID NO: 19755 - DNA, 80 bp, synthetic construct
  source 1..80: mol_type = other DNA
accaaattgtatacccatagctattgttaattgcttatttgttcatatatataatatcaacagggatgttactgacttaa

SEQ ID NO: 19756 - DNA, 80 bp, synthetic construct
  source 1..80: mol_type = other DNA
ttctcaatatggagatcaatgggtaaacttgacattgtacctgtgaccttggaagccagtgcatgttattttaactccct

SEQ ID NO: 19757 - DNA, 80 bp, synthetic construct
  source 1..80: mol_type = other DNA
atgtgttccctaagcaggcttattgtactgtttgtttcattaaattgcatacatgtgtggggaaaggatgatggttccag

SEQ ID NO: 19758 - DNA, 80 bp, synthetic construct; identical to SEQ ID NO: 8854
  source 1..80: mol_type = other DNA

SEQ ID NO: 19759 - DNA, 80 bp, synthetic construct
  source 1..80: mol_type = other DNA
tggccaacacttatggcaaaatccatgccatccacttcattctgtttttcagacaggtatatcttcctgatggcatgatt

SEQ ID NO: 19760 - DNA, 80 bp, synthetic construct
  source 1..80: mol_type = other DNA
tacttagttggtctgaggttgtctttgagacagtgatgcatagcaaaactttcattgcccttgaaacttggctcttgaac

SEQ ID NO: 19761 - DNA, 80 bp, synthetic construct
  source 1..80: mol_type = other DNA
tggtcatgggtgattaaacattgagactgattcattcttgcacattgagaaaataatggtcatgtgtgtatgtgtctgtg

SEQ ID NO: 19762 - DNA, 80 bp, synthetic construct; identical to SEQ ID NO: 8855
  source 1..80: mol_type = other DNA

SEQ ID NO: 19763 - DNA, 80 bp, synthetic construct
  source 1..80: mol_type = other DNA
atacatggcttgttaattagattctgtcttcttggagtgatggcgtctcactggtgattaactcttacttcagattcact

SEQ ID NO: 19764 - DNA, 80 bp, synthetic construct
  source 1..80: mol_type = other DNA
gaatagtttacactactgttcaaagcctgagggaaaaatgccttctttctcagcatactttttctgggttcttctctctt

SEQ ID NO: 19765 - DNA, 80 bp, synthetic construct; identical to SEQ ID NO: 8856
  source 1..80: mol_type = other DNA

SEQ ID NO: 19766 - DNA, 80 bp, synthetic construct
  source 1..80: mol_type = other DNA
ataactttctctcatagtacttatcatttcctctcttgttttacccttgcacatattcaaggtttaccttcttcattagg

SEQ ID NO: 19767 - DNA, 80 bp, synthetic construct
  source 1..80: mol_type = other DNA
ttctttgattggggaacttttgattggatatctatagagatagagattagagttgatgtcctagtaactacctgcatttt

SEQ ID NO: 19768 - DNA, 80 bp, synthetic construct
  source 1..80: mol_type = other DNA
caaattcaaaacatcatttcattttagctgtaaatatttcagttttctcaatgcatcttaaatgctctgctgcatatctc

SEQ ID NO: 19769 - DNA, 80 bp, synthetic construct; identical to SEQ ID NO: 8857
  source 1..80: mol_type = other DNA

SEQ ID NO: 19770 - DNA, 80 bp, synthetic construct
  source 1..80: mol_type = other DNA
atcacaaatccatgtgtccttatgtatagcagtgtgtcaaccagccaccatagcagggctctctggtactcagcttggtt

SEQ ID NO: 19771 - DNA, 80 bp, synthetic construct
  source 1..80: mol_type = other DNA
atgcccatttaatttttgcatttttaattttttttagtagagatggggtttcaccatgttggccaggctgatgttgaact

SEQ ID NO: 19772 - DNA, 80 bp, synthetic construct
  source 1..80: mol_type = other DNA
atgcctataggtgcacagtaggtacttagtatctatttgctgaattcagtagtgagtgtgagcaaaaatagaatagcact

SEQ ID NO: 19773 - DNA, 80 bp, synthetic construct; identical to SEQ ID NO: 8858
  source 1..80: mol_type = other DNA

SEQ ID NO: 19774 - DNA, 80 bp, synthetic construct
  source 1..80: mol_type = other DNA
acattaccattcacaatattgtgctgacagggaacggggagtttgataaagatttgtgatatggaaaagttctctgtgat

SEQ ID NO: 19775 - DNA, 80 bp, synthetic construct
  source 1..80: mol_type = other DNA
tgtgggctaaaagggatgttaaataaccatattattaatagctgaagaaacacctatttttgcaaagtagagcttcggtc

SEQ ID NO: 19776 - DNA, 80 bp, synthetic construct
  source 1..80: mol_type = other DNA
tctacaacttgggactagtatatttcgctgtgcctatatacagagaaggatggacagtcctacatgggctgtatgaaatc

SEQ ID NO: 19777 - DNA, 80 bp, synthetic construct; identical to SEQ ID NO: 8859
  source 1..80: mol_type = other DNA

SEQ ID NO: 19778 - DNA, 80 bp, synthetic construct
  source 1..80: mol_type = other DNA
gttaaatgcttatacctggtaatacaaaacctccattcccctgatcattgtctcaaagtatttttgtaagcagctaaatc

SEQ ID NO: 19779 - DNA, 80 bp, synthetic construct
  source 1..80: mol_type = other DNA
aagaaagctcttttctcttagactcacactgtactagcagcccaagtcaatgctgcttggccacacatggttcatcaaac

SEQ ID NO: 19780 - DNA, 80 bp, synthetic construct
  source 1..80: mol_type = other DNA
ctgctgcttttccttttggaaagaactttctaaagtgggttccatttgccttctgaaaacagatttctgttgggtcacat

SEQ ID NO: 19781 - DNA, 80 bp, synthetic construct; identical to SEQ ID NO: 8860
  source 1..80: mol_type = other DNA

SEQ ID NO: 19782 - DNA, 80 bp, synthetic construct
  source 1..80: mol_type = other DNA
tgggggtttgtcaacaaacccccgtgacacatgtttacctatgtaacaaaataattgtggttttttgcattgttgaagtt

SEQ ID NO: 19783 - DNA, 80 bp, synthetic construct
  source 1..80: mol_type = other DNA
aagcaattttcttgtttgagttcaaaatgggtaataaagcaatagaaacaacttgcaaccaccagtggtggttcaagaag

SEQ ID NO: 19784 - DNA, 80 bp, synthetic construct
  source 1..80: mol_type = other DNA
atttgaagcaaattggaaaggtaaaaaagcttgataagtgggtgcctcatgagctgagcaaagaaaaaagttgtcatttt

SEQ ID NO: 19785 - DNA, 80 bp, synthetic construct; identical to SEQ ID NO: 8861
  source 1..80: mol_type = other DNA

SEQ ID NO: 19786 - DNA, 80 bp, synthetic construct
  source 1..80: mol_type = other DNA
ttcacctgccctcttgccaaccagctaccacttcctgaagcatctcgacaactttttgcagggaaaatgcttccacaacc

SEQ ID NO: 19787 - DNA, 80 bp, synthetic construct
  source 1..80: mol_type = other DNA
atgtaaaattcacggtctgaaaccgcaattacttttgcacaaatctaatatttcatcatccagatattaagcccagtacc

SEQ ID NO: 19788 - DNA, 80 bp, synthetic construct
  source 1..80: mol_type = other DNA
ttgctaaggatgatagcctctagctccattcatgctcccgcaaaagacatgatcttttttttttttttttttttaggatg

SEQ ID NO: 19789 - DNA, 80 bp, synthetic construct
  source 1..80: mol_type = other DNA
gagacggggtttcaccatgttggtcaggctggtctccaactcctgaccttgtgatccacctgccttggcctcccaaagtg

SEQ ID NO: 19790 - DNA, 80 bp, synthetic construct; identical to SEQ ID NO: 8862
  source 1..80: mol_type = other DNA

SEQ ID NO: 19791 - DNA, 80 bp, synthetic construct
  source 1..80: mol_type = other DNA
gccattctgactggtgtgagatggtatctcattgtggttttgattttcatttctctaatgatcagtgatattgagcttct

SEQ ID NO: 19792 - DNA, 80 bp, synthetic construct
  source 1..80: mol_type = other DNA
ttctcccattctgtggttgtctgtttactctgttgatactttttcttttgctgtgcaaaagctcttaagttgaattagat

SEQ ID NO: 19793 - DNA, 80 bp, synthetic construct; identical to SEQ ID NO: 8863
  source 1..80: mol_type = other DNA

SEQ ID NO: 19794 - DNA, 80 bp, synthetic construct
  source 1..80: mol_type = other DNA
aagttgggtaacctgatgtctccagctttgttctttttgcttaggattgccttggctatttgggctcttttttggttcca

SEQ ID NO: 19795 - DNA, 80 bp, synthetic construct
  source 1..80: mol_type = other DNA
gtcttctctgctttctttgagcagtgttttgtaattctcattgtagagatctttcacctccctggttagctgtattccta

SEQ ID NO: 19796 - DNA, 80 bp, synthetic construct
  source 1..80: mol_type = other DNA
ttttcttttctgctctttttttttttttttttttcgtgatggagtcctgctctgtcacccaggctggagtgcagtggcat

SEQ ID NO: 19797 - DNA, 80 bp, synthetic construct
  source 1..80: mol_type = other DNA
ctcctgaccttgtgattcaccagccttggcctcccaaagtgctgggattacaggtgtgagccaccactcccagccaaggg

SEQ ID NO: 19798 - DNA, 80 bp, synthetic construct; identical to SEQ ID NO: 8864
  source 1..80: mol_type = other DNA

SEQ ID NO: 19799 - DNA, 80 bp, synthetic construct
  source 1..80: mol_type = other DNA
aatcacactaattgatttgcatatgtcaaaccagctttgcatcctggggatgaagcctacttgactatggtggattagct

SEQ ID NO: 19800 - DNA, 80 bp, synthetic construct
  source 1..80: mol_type = other DNA
agtgcctcctcctcaaatttttggaatagtttttataggaatggtaccagctcttctttgtacatctggtagaattcagc

SEQ ID NO: 19801 - DNA, 80 bp, synthetic construct
  source 1..80: mol_type = other DNA
aaaatgattatataaaatgaaaatttgctatttatttgtttgtcaacttaataatatatacttatttatatattaagctt

SEQ ID NO: 19802 - DNA, 80 bp, synthetic construct; identical to SEQ ID NO: 8865
  source 1..80: mol_type = other DNA

SEQ ID NO: 19803 - DNA, 80 bp, synthetic construct
  source 1..80: mol_type = other DNA
ctagattttggccacgtcttctgtttgtcatggggatttagagcattctaaatctaaatttaaggaatatactcctaaag

SEQ ID NO: 19804 - DNA, 80 bp, synthetic construct
  source 1..80: mol_type = other DNA
tgaaatgtaagcagttgtttctgcctttttataaacatttgcctcacactggagatgtaactcaggaaggggtgtgcaga

SEQ ID NO: 19805 - DNA, 80 bp, synthetic construct
  source 1..80: mol_type = other DNA
aaaggcagttgaaatcatagacttggaattagtaagacctagtggatagaagagagaatagctagggtctattttttccc

SEQ ID NO: 19806 - DNA, 80 bp, synthetic construct; identical to SEQ ID NO: 8866
  source 1..80: mol_type = other DNA

SEQ ID NO: 19807 - DNA, 80 bp, synthetic construct
  source 1..80: mol_type = other DNA
aactttgtggccagtttcctggagttaatgaaggaaataatttccttcaatgaacttatattataggtagtaaaaagggc

SEQ ID NO: 19808 - DNA, 80 bp, synthetic construct
  source 1..80: mol_type = other DNA
catatcagagtgaagagactaagggtataagctttggaactaaatggatctacttaggttcaaggcctggttctagcttg

SEQ ID NO: 19809 - DNA, 80 bp, synthetic construct
  source 1..80: mol_type = other DNA
gctagttattattatggtcttaatttttaaaaatcccataaagaagacaaaacaagacaaaataaagcaagcaaacaaag

SEQ ID NO: 19810 - DNA, 80 bp, synthetic construct; identical to SEQ ID NO: 8867
  source 1..80: mol_type = other DNA

SEQ ID NO: 19811 - DNA, 80 bp, synthetic construct
  source 1..80: mol_type = other DNA
aagtccattcattcaaatcttttgctgtttcgattcatggtattctttcagcaggctatgttttgtaggctggacttcct

SEQ ID NO: 19812 - DNA, 80 bp, synthetic construct
  source 1..80: mol_type = other DNA
attagaaggaaaccagactacccttcaaaaaagtcatccctccctattggaagatttattgacaaaggggaaataaagac

SEQ ID NO: 19813 - DNA, 80 bp, synthetic construct
  source 1..80: mol_type = other DNA
agagttggaaagtggcaaaagggcactaggagttgagtatttagcagaaatcttgtgtcaacagctctctaagacaaaca

SEQ ID NO: 19814 - DNA, 80 bp, synthetic construct
  source 1..80: mol_type = other DNA
atggcttattgattacagtacttatgagtagtttcatcagttttcaaaatgctaatattaaacaagcttgagctatcatc

SEQ ID NO: 19815 - DNA, 80 bp, synthetic construct; identical to SEQ ID NO: 8868
  source 1..80: mol_type = other DNA

SEQ ID NO: 19816 - DNA, 80 bp, synthetic construct
  source 1..80: mol_type = other DNA
aaaattagctgggcatggtggtgcttgcctgtagtcccagctacttgggaggctgaggcaggagaattacttgaacctgg

SEQ ID NO: 19817 - DNA, 80 bp, synthetic construct
  source 1..80: mol_type = other DNA
acttgctttacatattgtagatgagaaaaccaaactagttgactgaaatctgctttaccaaatggtggaggtagcagcat

SEQ ID NO: 19818 - DNA, 80 bp, synthetic construct; identical to SEQ ID NO: 8869
  source 1..80: mol_type = other DNA

SEQ ID NO: 19819 - DNA, 80 bp, synthetic construct
  source 1..80: mol_type = other DNA
cagtggagcaatctcggctcactgcaacctctgcctgccgggttcaagcgattctcctgcctcagcctcccaagtagctg

SEQ ID NO: 19820 - DNA, 80 bp, synthetic construct
  source 1..80: mol_type = other DNA
agcctctgattgtttcatactttgtgtaagccattcactggcctttctcatttgagcttctcctatactcttatagcata

SEQ ID NO: 19821 - DNA, 80 bp, synthetic construct
  source 1..80: mol_type = other DNA
ctactgattaattgatcaaaggccatctttctgtgaatccttcctggattccctcagttgaatgtgtatatgctatgttc

SEQ ID NO: 19822 - DNA, 80 bp, synthetic construct; identical to SEQ ID NO: 8870
  source 1..80: mol_type = other DNA

SEQ ID NO: 19823 - DNA, 80 bp, synthetic construct
  source 1..80: mol_type = other DNA
gggggctttgttgtttcattcatcacaataaatcttgctgttgctcactgtttgggtccacactacctttatgagctgta

SEQ ID NO: 19824 - DNA, 80 bp, synthetic construct
  source 1..80: mol_type = other DNA
accggaaggaagaaactccggatcacatctgaacatctgaaggaacaaactctggacacaccatctttaagagctgtaac

SEQ ID NO: 19825 - DNA, 80 bp, synthetic construct
  source 1..80: mol_type = other DNA
aacattttcatgattgtgttatgattgtaggtgtctgactccctaaccaagatatgattctgaagggctgagagtatgcc

SEQ ID NO: 19826 - DNA, 80 bp, synthetic construct; identical to SEQ ID NO: 8871
  source 1..80: mol_type = other DNA

SEQ ID NO: 19827 - DNA, 80 bp, synthetic construct
  source 1..80: mol_type = other DNA
ccattttcctgcctcagcctcccgagtggctggggctacaggtgcccaccaccacgcctggctaatttttttctactttt

SEQ ID NO: 19828 - DNA, 80 bp, synthetic construct
  source 1..80: mol_type = other DNA
gtttcagatgttttgaggcagactgctagaattattatggcttataattcaggcacatagtttaaaaatttattatcacg

SEQ ID NO: 19829 - DNA, 80 bp, synthetic construct
  source 1..80: mol_type = other DNA
gaaatcatttccccagggaaaagtgaaatggtattctttgtgactgcttcaaaatctagggcccaatgagttagtagatt

SEQ ID NO: 19830 - DNA, 80 bp, synthetic construct
  source 1..80: mol_type = other DNA
tggctcattttaacttttttcccctcgtaatcaacatttcatccttttcttgtctgctgccaaaaccagccttttcctgg

SEQ ID NO: 19831 - DNA, 80 bp, synthetic construct; identical to SEQ ID NO: 8872
  source 1..80: mol_type = other DNA

SEQ ID NO: 19832 - DNA, 80 bp, synthetic construct
  source 1..80: mol_type = other DNA
gaagaacttggagaatgaggggatatttgtagacttcatggtaacatgagggtgatcttaatttccagagtccttggaga

SEQ ID NO: 19833 - DNA, 80 bp, synthetic construct
  source 1..80: mol_type = other DNA
acgggattttattaatgtttctcttttgttgggctggaagttccatgatgacagagatgcatttgtctgcctttggtcgc

SEQ ID NO: 19834 - DNA, 80 bp, synthetic construct; identical to SEQ ID NO: 8873
  source 1..80: mol_type = other DNA

SEQ ID NO: 19835 - DNA, 80 bp, synthetic construct
  source 1..80: mol_type = other DNA
aacatatgacaaaaataacgttttaagcagatttatgcagcagctgtgcaaaggaggctttggaaggaggagcagctgaa

SEQ ID NO: 19836 - DNA, 80 bp, synthetic construct
  source 1..80: mol_type = other DNA
cttcaggtgttcatgacaaggtatggacacttaaaacaatagaaaatttaaggacaactggttgtcgtgagcctgtgtaa

SEQ ID NO: 19837 - DNA, 80 bp, synthetic construct
  source 1..80: mol_type = other DNA
tatagagccaaggcatagaggaaattactgaaaccgtagtagtggatgaggagaagcaaggagtgttgttaaagataagc

SEQ ID NO: 19838 - DNA, 80 bp, synthetic construct; identical to SEQ ID NO: 8874
  source 1..80: mol_type = other DNA

SEQ ID NO: 19839 - DNA, 80 bp, synthetic construct
  source 1..80: mol_type = other DNA
aatcccacagaaaccagaaaacgttcttggtattatttcaatcctttgaaatttgctacgacttgctttatggcctagaa

SEQ ID NO: 19840 - DNA, 80 bp, synthetic construct
  source 1..80: mol_type = other DNA
tctacaatgcttctttaatgccttttttgttctttcagttaatgagaggagtatgttacattttcccactatcatcatga

SEQ ID NO: 19841 - DNA, 80 bp, synthetic construct
  source 1..80: mol_type = other DNA
ttattgatttggaagcttgtcaggggcagatatatttagacttgttatatctttctgttaaaatgagatttttctagtac

SEQ ID NO: 19842 - DNA, 80 bp, synthetic construct; identical to SEQ ID NO: 8875
  source 1..80: mol_type = other DNA

SEQ ID NO: 19843 - DNA, 80 bp, synthetic construct
  source 1..80: mol_type = other DNA
aaggaaagcccattaggtagcagtcatgcattcattcattattttttgagtaatcttatagtagataacaggaagcaggt

SEQ ID NO: 19844 - DNA, 80 bp, synthetic construct
  source 1..80: mol_type = other DNA
ttcaagcattcacctgcctttttagtaggtacttcggttcttccttccaagtcaacaccctcctcttcaattatacagga

SEQ ID NO: 19845 - DNA, 80 bp, synthetic construct
  source 1..80: mol_type = other DNA
ctggttcatccctgattccacttgtttccctcttcccccaaagataaaacaattttctgttttgcttcagaacacaaagt

SEQ ID NO: 19846 - DNA, 80 bp, synthetic construct
  source 1..80: mol_type = other DNA
tgtttgcatctgcaaagaaaaagaaatagaatgagcaagctgactattgacctagaaagacctccaagacatactggtac

SEQ ID NO: 19847 - DNA, 80 bp, synthetic construct; identical to SEQ ID NO: 8876
  source 1..80: mol_type = other DNA

SEQ ID NO: 19848 - DNA, 80 bp, synthetic construct
  source 1..80: mol_type = other DNA
taggttcttggaaaaagtgaggggagttagttttgaaggagaggacagacaactctttattcaaaacagaaagcaaagaa

SEQ ID NO: 19849 - DNA, 80 bp, synthetic construct
  source 1..80: mol_type = other DNA
tattccaaagctgggcacattgggtgaattggcatgtctaagtggtcccagtctgagtgagtgtggttgttagtgggagt

SEQ ID NO: 19850 - DNA, 80 bp, synthetic construct
  source 1..80: mol_type = other DNA
aataccaatttgtaaagtggacaataatcgtacaaatacatgacaataaacaacaaggcaggaaatccctcagcgagtcc

SEQ ID NO: 19851 - DNA, 80 bp, synthetic construct; identical to SEQ ID NO: 8877
  source 1..80: mol_type = other DNA

SEQ ID NO: 19852 - DNA, 80 bp, synthetic construct
  source 1..80: mol_type = other DNA
ttgtacatcgtttcacttaaaagttgacatttccaaaactttacatgaggactcactgtatttaaagtacacaaggatga

SEQ ID NO: 19853 - DNA, 80 bp, synthetic construct
  source 1..80: mol_type = other DNA
gggactacaggaatgcaccaccatgcccagctaatttttctttttctttgtagagattaggtctccctatattgcccagg

SEQ ID NO: 19854 - DNA, 80 bp, synthetic construct
  source 1..80: mol_type = other DNA
aaaaagaataaatgatgtgcctaagtctatacagtaactaaatactccaaacaaacattagaacttgtccacaaatttat

SEQ ID NO: 19855 - DNA, 80 bp, synthetic construct; identical to SEQ ID NO: 8878
  source 1..80: mol_type = other DNA

SEQ ID NO: 19856 - DNA, 80 bp, synthetic construct
  source 1..80: mol_type = other DNA
tgtgcaaagttaaaaaatgtttaaaccatatattgtgttgtgttacttaaaaatctcccaggacgtagaaaaagaagaaa

SEQ ID NO: 19857 - DNA, 80 bp, synthetic construct
  source 1..80: mol_type = other DNA
catagcacaatataaatctacaaaaatcaatagactttctctactagctatacacacctagagttggaatataaaaaatt

SEQ ID NO: 19858 - DNA, 80 bp, synthetic construct
  source 1..80: mol_type = other DNA
tggtggcccatgcctgtaaacccagctactcagaaggctgaggcaggagaattgcttgaatccgggaggcagaggttgtg

SEQ ID NO: 19859 - DNA, 80 bp, synthetic construct; identical to SEQ ID NO: 8879
  source 1..80: mol_type = other DNA

SEQ ID NO: 19860 - DNA, 80 bp, synthetic construct
  source 1..80: mol_type = other DNA
atttagtggaacctcttaaatttagacacacacatacctttcattttagcaatttcacacctgtgaattcagcccacaga

SEQ ID NO: 19861 - DNA, 80 bp, synthetic construct
  source 1..80: mol_type = other DNA
ggtttaatggactcaaagttccacatggctggggaggcctcacaatcatggtggaaggtgaatgaggagcaaagtcacgt

SEQ ID NO: 19862 - DNA, 80 bp, synthetic construct; identical to SEQ ID NO: 8880
  source 1..80: mol_type = other DNA

SEQ ID NO: 19863 - DNA, 80 bp, synthetic construct
  source 1..80: mol_type = other DNA
aaaaattttaagagactgcactaaaatctacaccagtatgtgtaatggactacttatgcatttttctaaaaacaaatttt

SEQ ID NO: 19864 - DNA, 80 bp, synthetic construct
  source 1..80: mol_type = other DNA
tacaaatcaccttcttatttaatcatcaaaaattctcattaataataatttttgggaacatattttctgagtaggctatt

SEQ ID NO: 19865 - DNA, 80 bp, synthetic construct
  source 1..80: mol_type = other DNA
tattcttcctcctatactgaaaatctaaatctcagaatgaaaatgctgaggggtgcttgttggaggagtggattatgatc

SEQ ID NO: 19866 - DNA, 80 bp, synthetic construct
  source 1..80: mol_type = other DNA
gaaagaagcatttgaggaagaggtcacacctcacctaagggtaagaagagaaagaggaagtgcttgcactaattcttgct

SEQ ID NO: 19867 - DNA, 80 bp, synthetic construct; identical to SEQ ID NO: 8881
  source 1..80: mol_type = other DNA

SEQ ID NO: 19868 - DNA, 80 bp, synthetic construct
  source 1..80: mol_type = other DNA
gagaactcttcaggaatactgccaacagtgttaacttgaaagttacatttgattattttgtagacataagattctcctta

SEQ ID NO: 19869 - DNA, 80 bp, synthetic construct
  source 1..80: mol_type = other DNA
gcttgagggattgagtcttgaaattctcaaaggttacaaaagcgtgcagtaacacacttttgtacacacttttgagggta

SEQ ID NO: 19870 - DNA, 80 bp, synthetic construct
  source 1..80: mol_type = other DNA
ctctacagttgatacttctaaggaataagtgcatggcttcatataattcacttgtcctgattgtggaagaaaaaagtaag

SEQ ID NO: 19871 - DNA, 80 bp, synthetic construct; identical to SEQ ID NO: 8882
  source 1..80: mol_type = other DNA

SEQ ID NO: 19872 - DNA, 80 bp, synthetic construct
  source 1..80: mol_type = other DNA
ctcaacattttctacttggattatgattaacaatctcttgcttcccgccttgctcattccttgccatttaaccaatagct

SEQ ID NO: 19873 - DNA, 80 bp, synthetic construct
  source 1..80: mol_type = other DNA
gatctggcccttgcctaactctctggtctcatcttttgctgctctgcttctccatcagccacagtcaatttcactgaatt

SEQ ID NO: 19874 - DNA, 80 bp, synthetic construct; identical to SEQ ID NO: 8883
  source 1..80: mol_type = other DNA

SEQ ID NO: 19875 - DNA, 80 bp, synthetic construct
  source 1..80: mol_type = other DNA
gaggtatagattatttaattccactatagtactttgattgcaaagtaaccagagatgttttcacgtaggtgatgctgaat

SEQ ID NO: 19876 - DNA, 80 bp, synthetic construct
  source 1..80: mol_type = other DNA
ttcacttatttttaagactttgctacatggtctgtcaggccctgggtttctggatgcattgtataattagtgtaaacttg

SEQ ID NO: 19877 - DNA, 80 bp, synthetic construct
  source 1..80: mol_type = other DNA
aacttggagtgtgtgttctcatgatggctgaataagttgatggctttgatctgaactgtaaaggctcagagggcattttt

SEQ ID NO: 19878 - DNA, 80 bp, synthetic construct; identical to SEQ ID NO: 8884
  source 1..80: mol_type = other DNA

SEQ ID NO: 19879 - DNA, 80 bp, synthetic construct
  source 1..80: mol_type = other DNA
cccaaacaaaagaaagattaacagtacatagttcttttttagacaagactgacttgcacagcctgtcccctgagtcacta

SEQ ID NO: 19880 - DNA, 80 bp, synthetic construct
  source 1..80: mol_type = other DNA
caaatatctcttatctcagttggcactcactgctgtcatttatcctctctaatcacctgaactcctaggtgttgggtgaa

SEQ ID NO: 19881 - DNA, 80 bp, synthetic construct
  source 1..80: mol_type = other DNA
taccctctcttaccagaacttcctcaatggccacagctttctaatgatcatttgtaaggacagctataagagaggctgta

SEQ ID NO: 19882 - DNA, 80 bp, synthetic construct
  source 1..80: mol_type = other DNA
gtagcaatgagccatctctgctaaaactcagagaaaacaagctaactaggagttcaagagttcttttttatgtccttcaa

SEQ ID NO: 19883 - DNA, 80 bp, synthetic construct
  source 1..80: mol_type = other DNA
taggcatcttagtgtgctttgttttttgtaatggtttctgtgtatctttactggagtctttagcttccccctctctttac

SEQ ID NO: 19884 - DNA, 80 bp, synthetic construct; identical to SEQ ID NO: 8885
  source 1..80: mol_type = other DNA

SEQ ID NO: 19885 - DNA, 80 bp, synthetic construct
  source 1..80: mol_type = other DNA
ggactgtctctttttctgagattgttgaggggccatctctaactcctcaaagagaaagaaaaagagcttatgttagaatg

SEQ ID NO: 19886 - DNA, 80 bp, synthetic construct
  source 1..80: mol_type = other DNA
agtaaatttatgcaacttgcacctaaatgagtctccatcaattcaatttggtaacttcttctgggctcctattcattcta

SEQ ID NO: 19887 - DNA, 80 bp, synthetic construct; identical to SEQ ID NO: 8886
  source 1..80: mol_type = other DNA

SEQ ID NO: 19888 - DNA, 80 bp, synthetic construct
  source 1..80: mol_type = other DNA
aaattaaaatctcttccgaaatcagggaatcatgtctgtgttccatgaaacttgacctttgagcaattatggaaaacaac

SEQ ID NO: 19889 - DNA, 80 bp, synthetic construct
  source 1..80: mol_type = other DNA
atgtactaggtatggtctagctttctttcatgcagaatttgatattaaagaaagcagaggcattttcaaagccataactg

SEQ ID NO: 19890 - DNA, 80 bp, synthetic construct
  source 1..80: mol_type = other DNA
agtaacctgaacaaagaggccaggtacacagtggctcttgtattctaattgaggggaataaaatatctgcaccattgtct

SEQ ID NO: 19891 - DNA, 80 bp, synthetic construct; identical to SEQ ID NO: 8887
  source 1..80: mol_type = other DNA

SEQ ID NO: 19892 - DNA, 80 bp, synthetic construct
  source 1..80: mol_type = other DNA
tagcttttcaacccttgttcctgtcactacctccccacttttaaaatctccattgtctgtagttcccatctttgtgtccg

SEQ ID NO: 19893 - DNA, 80 bp, synthetic construct
  source 1..80: mol_type = other DNA
atatatgcaccacattttctttatccaagtgaccactgctgagcacctgggttgattccatatctttgctattgtgataa

SEQ ID NO: 19894 - DNA, 80 bp, synthetic construct
  source 1..80: mol_type = other DNA
cattctcaacagttgtgttgtgtttccttttctccccaaccttgccaatgtgttattttctgactttttaataatagcca

SEQ ID NO: 19895 - DNA, 80 bp, synthetic construct; identical to SEQ ID NO: 8888
  source 1..80: mol_type = other DNA

SEQ ID NO: 19896 - DNA, 80 bp, synthetic construct
  source 1..80: mol_type = other DNA
tgtgaccagcagaggacactatgctgcagcaagtctgggcatcaactatctaaaagataaattgctgattgaattcaaag

SEQ ID NO: 19897 - DNA, 80 bp, synthetic construct
  source 1..80: mol_type = other DNA
tttaattctctgaatatgatatgtttttaaaataagacaaactcaaaccagttgccaatagatcctcagctcctcctgag

SEQ ID NO: 19898 - DNA, 80 bp, synthetic construct
  source 1..80: mol_type = other DNA
aaatgagtggacttttccttagaggtttgatcttaaattagagttcctggaatttacaagggaccaaggaggcagttttc

SEQ ID NO: 19899 - DNA, 80 bp, synthetic construct; identical to SEQ ID NO: 8889
  source 1..80: mol_type = other DNA

SEQ ID NO: 19900 - DNA, 80 bp, synthetic construct
  source 1..80: mol_type = other DNA
cagttgtgtgttgtatagatggagacttcaacaattgtttgttctaaaatcaacagtccattaatatattgggtgctctt

SEQ ID NO: 19901 - DNA, 80 bp, synthetic construct
  source 1..80: mol_type = other DNA
ggtcctcaggtgttggtttatgttgctgtgattcaagacttggttctattagtacagaatccagacatacgtttgtttct

SEQ ID NO: 19902 - DNA, 80 bp, synthetic construct
  source 1..80: mol_type = other DNA
ttaaggattcccacaactacctcctgattatatagtaatattatatagatactgccacttcttcacactttaagcttgtg

SEQ ID NO: 19903 - DNA, 80 bp, synthetic construct; identical to SEQ ID NO: 8890
  source 1..80: mol_type = other DNA

SEQ ID NO: 19904 - DNA, 80 bp, synthetic construct
  source 1..80: mol_type = other DNA
aggaattaataagtgggtagtgtacaaagccttttgtttttatttgtggaggggactttaaaagggaaaagctaggatca

SEQ ID NO: 19905 - DNA, 80 bp, synthetic construct
  source 1..80: mol_type = other DNA
agagacccacatctacactcaatattgcagcccttgaaccagcaatctagggacacattttctaaagagtccttaaatag

SEQ ID NO: 19906 - DNA, 80 bp, synthetic construct
  source 1..80: mol_type = other DNA
tttgggtagttgggtcggcagatgggcagagactttgctataaaaatgtgatcatactatagtgctattttaaaataatg

SEQ ID NO: 19907 - DNA, 80 bp, synthetic construct; identical to SEQ ID NO: 8891
  source 1..80: mol_type = other DNA

SEQ ID NO: 19908 - DNA, 80 bp, synthetic construct
  source 1..80: mol_type = other DNA
ccctggaggaggaggttgcagtgagcctagatcacgccactgtactccagcctggtaacagtgagactccgtctcaaaaa

SEQ ID NO: 19909 - DNA, 80 bp, synthetic construct
  source 1..80: mol_type = other DNA
atgagcctctccttttgcaagaaaaagggctagttgcatcacctaggaaaaaggagacagacctttccagcattgtgaac

SEQ ID NO: 19910 - DNA, 80 bp, synthetic construct
  source 1..80: mol_type = other DNA
cctatattccttgtatttggcctttatctggcttatggttgaattcaggaatgacacaagaagttgtggttttccccatt

SEQ ID NO: 19911 - DNA, 80 bp, synthetic construct; identical to SEQ ID NO: 8892
  source 1..80: mol_type = other DNA

SEQ ID NO: 19912 - DNA, 80 bp, synthetic construct
  source 1..80: mol_type = other DNA
tggcaagtgtgaacaatttagcatttttgtcattagggtttttctgaggaatatataattttttatcagaacaggtggga

SEQ ID NO: 19913 - DNA, 80 bp, synthetic construct
  source 1..80: mol_type = other DNA
aattcatggtttcattaatagtgaattgagctgtaagcaaatgtcatgggtggaaagatcaacagcatggtctctgttat

SEQ ID NO: 19914 - DNA, 80 bp, synthetic construct
  source 1..80: mol_type = other DNA
ctttcaaaatgaggaagtacacagtttacaatgttgccatcacaagttgaacttatggggacattaggtcctatgacttt

SEQ ID NO: 19915 - DNA, 80 bp, synthetic construct
  source 1..80: mol_type = other DNA
acttcaaactttattccacatctgtgctattctcaccatatcctcctttgcacgggtataacaggaatcagagctgaaat

SEQ ID NO: 19916 - DNA, 80 bp, synthetic construct; identical to SEQ ID NO: 8893
  source 1..80: mol_type = other DNA

SEQ ID NO: 19917 - DNA, 80 bp, synthetic construct
  source 1..80: mol_type = other DNA
aattcagctgaaggctcaaaagggaccctctgcacacccttgtgtgtggctttcttttgggaatctgcctatgaactcta

SEQ ID NO: 19918 - DNA, 80 bp, synthetic construct
  source 1..80: mol_type = other DNA
ggtcactgtcctatgctgcctgatgtccaatgtctggaaatcacagtttcatatattacgtccatatttttagttgtttc

SEQ ID NO: 19919 - DNA, 80 bp, synthetic construct; identical to SEQ ID NO: 8894
  source 1..80: mol_type = other DNA

SEQ ID NO: 19920 - DNA, 80 bp, synthetic construct
  source 1..80: mol_type = other DNA
ttttataaggtctcttctctctctcctctcttttagaatagctgcatctctagagcacataatgattgcatattctcaga

SEQ ID NO: 19921 - DNA, 80 bp, synthetic construct
  source 1..80: mol_type = other DNA
gttttaataacaggtcctggatcatatactacatatttagaagaaattagagtagtatctatacagagagatgatgagac

SEQ ID NO: 19922 - DNA, 80 bp, synthetic construct
  source 1..80: mol_type = other DNA
agatgacatgagtgggaacactgcaaatttggtgaagtcctaagaattttagaagaaaaagacttctcacaaacaaggca

SEQ ID NO: 19923 - DNA, 80 bp, synthetic construct; identical to SEQ ID NO: 8895
  source 1..80: mol_type = other DNA

SEQ ID NO: 19924 - DNA, 80 bp, synthetic construct
  source 1..80: mol_type = other DNA
ccatgataaagccatttggtgctcattttttatctaaaagatggaatgattttttttgactgcctctcctctttacaagt

SEQ ID NO: 19925 - DNA, 80 bp, synthetic construct
  source 1..80: mol_type = other DNA
ccttgcttatgtatgatacttaagttttgtcaagtcatttacaaggttcttgaatacagagtccctatagttttcttcta

SEQ ID NO: 19926 - DNA, 80 bp, synthetic construct
  source 1..80: mol_type = other DNA
ttaccagcttaatcccatcaacagttcagaaaaataagacaggaaataattgcttgtgaagggccacacaagaagttagg

SEQ ID NO: 19927 - DNA, 80 bp, synthetic construct; identical to SEQ ID NO: 8896
  source 1..80: mol_type = other DNA

SEQ ID NO: 19928 - DNA, 80 bp, synthetic construct
  source 1..80: mol_type = other DNA
tgttgtgtgtggacagctgagagtcatttcctcatctttattccaaacgaagctggacactcccttttcatttttgaaaa

SEQ ID NO: 19929 - DNA, 80 bp, synthetic construct
  source 1..80: mol_type = other DNA
aaagctgccaatcgggatgccagaacatcaaagagatcgctcatgagagcacacaaagtcccatttgttcagcacttgga

SEQ ID NO: 19930 - DNA, 80 bp, synthetic construct
  source 1..80: mol_type = other DNA
ggagaatgactgtgaatagaagtgccttttcaaccttcacttgtatccatttttaaaaggacaaataaggtcatctctgc

SEQ ID NO: 19931 - DNA, 80 bp, synthetic construct
  source 1..80: mol_type = other DNA
tcccaaccataaattctctttcaggtatttcacatgaagcgtagaattctagttagaatccttgagattctactcttact

SEQ ID NO: 19932 - DNA, 80 bp, synthetic construct; identical to SEQ ID NO: 8897
  source 1..80: mol_type = other DNA

SEQ ID NO: 19933 - DNA, 80 bp, synthetic construct
  source 1..80: mol_type = other DNA
cctgagatctaccctcttaatttttaagtgtatgatacaatattgttaatcataggcacaacgttggacggcatatctct

SEQ ID NO: 19934 - DNA, 80 bp, synthetic construct
  source 1..80: mol_type = other DNA
ttctgtggctgctttatttctcctggcataatgtcgtagggcatagtatttaaggaggcatttgttctcagcctcatgta

SEQ ID NO: 19935 - DNA, 80 bp, synthetic construct; identical to SEQ ID NO: 8898
  source 1..80: mol_type = other DNA

SEQ ID NO: 19936 - DNA, 80 bp, synthetic construct
  source 1..80: mol_type = other DNA
tcagaaacacgaggctgtgttactcatagcagccacagttgctaagtagcagcatttatagtgttcccttgaactccagt

SEQ ID NO: 19937 - DNA, 80 bp, synthetic construct
  source 1..80: mol_type = other DNA
ctgcagagggatattattttttgtagactgaacagtaagcatgcttattccttgctctggggggattcctagcatatttg

SEQ ID NO: 19938 - DNA, 80 bp, synthetic construct
  source 1..80: mol_type = other DNA
ctcctgcctcaccctcccaggtagctgggattataggcgcccgccaccacgcctggctaatttttttgtatttttagtag

SEQ ID NO: 19939 - DNA, 80 bp, synthetic construct
  source 1..80: mol_type = other DNA
actctgttacgttgggatgttttatttgtacacaaactgaatcctaacaaatacagaatttggcatctggaggtggggtg

SEQ ID NO: 19940 - DNA, 80 bp, synthetic construct; identical to SEQ ID NO: 8899
  source 1..80: mol_type = other DNA

SEQ ID NO: 19941 - DNA, 80 bp, synthetic construct
  source 1..80: mol_type = other DNA
gtgtgtcctgtaatttgaggtgctgaaattttgaaaaagccttattttcccgtagctcaaatcagagcacttataggtga

SEQ ID NO: 19942 - DNA, 80 bp, synthetic construct
  source 1..80: mol_type = other DNA
aagtattagcttagggttcttattttcccatccaagcctgttttatcaaatagtgtcttagtggctcccgctcatttgag

SEQ ID NO: 19943 - DNA, 80 bp, synthetic construct
  source 1..80: mol_type = other DNA
aagcctactaagatttgaagaataacattggcaaagagaccccaaacttgatctacagtgccctgtgacaattaaacctt

SEQ ID NO: 19944 - DNA, 80 bp, synthetic construct; identical to SEQ ID NO: 8900
  source 1..80: mol_type = other DNA

SEQ ID NO: 19945 - DNA, 80 bp, synthetic construct
  source 1..80: mol_type = other DNA
ctgggaggctttattactgttttgctgttccttttctgccacagtgtagcaagtttgcctcaggcaggattttctcagta

SEQ ID NO: 19946 - DNA, 80 bp, synthetic construct
  source 1..80: mol_type = other DNA
catggaaggagttgaataacccaaagcgcaggctatcacaaagaccactgattatctcaagaaatccattgttcttctcc

SEQ ID NO: 19947 - DNA, 80 bp, synthetic construct; identical to SEQ ID NO: 8901
  source 1..80: mol_type = other DNA

SEQ ID NO: 19948 - DNA, 80 bp, synthetic construct
  source 1..80: mol_type = other DNA
cctggctaacacagtgaaaccccgtctctactaaaaatacaaaatattagccaggcatggtggcgggtgcctgcagtccc

SEQ ID NO: 19949 - DNA, 80 bp, synthetic construct
  source 1..80: mol_type = other DNA
tggatctgctaagtcagcattggactgctagccttcatattttctttataggacagaataatgccttttgtgtttaagcc

SEQ ID NO: 19950 - DNA, 80 bp, synthetic construct
  source 1..80: mol_type = other DNA
taaaagtcaccttgacaatgggtttaaagagtagtttttttctggtatgaatgcctccatagcctggaccatttctaaga

SEQ ID NO: 19951 - DNA, 80 bp, synthetic construct; identical to SEQ ID NO: 8902
  source 1..80: mol_type = other DNA

SEQ ID NO: 19952 - DNA, 80 bp, synthetic construct
  source 1..80: mol_type = other DNA
gctaaagctaaagtcagcagaaatggtcagagtcagactatgatgaccatatataagacaaaagtagaggatggcagaaa

SEQ ID NO: 19953 - DNA, 80 bp, synthetic construct
  source 1..80: mol_type = other DNA
gtttcctgcagctgttgagcaaccatttttgtttctatatggcaaggtaagactgagttattgggttttccgcttccttt

SEQ ID NO: 19954 - DNA, 80 bp, synthetic construct
  source 1..80: mol_type = other DNA
taaacccagtgtcatgcaacacacttaaaataaggttaagtgggagagaaagatagttatagcaagaaactaaaacgaga

SEQ ID NO: 19955 - DNA, 80 bp, synthetic construct; identical to SEQ ID NO: 8903
  source 1..80: mol_type = other DNA

SEQ ID NO: 19956 - DNA, 80 bp, synthetic construct
  source 1..80: mol_type = other DNA
tccaccattgatgggcacctggattgattccatatctttgctattgtgaatagctctgtgatgaacatgagtgtcttttt

SEQ ID NO: 19957 - DNA, 80 bp, synthetic construct
  source 1..80: mol_type = other DNA
aagggaagcaaacgcgtccttcttcacatgatagcaggaaggagaaatatgagaacctagcgaagagggaagccccatat

SEQ ID NO: 19958 - DNA, 80 bp, synthetic construct
  source 1..80: mol_type = other DNA
atcagatatatacccagtaatgggaatgctaggtcaatggcagttctgttttaatttctttgagaaatcccaaaactgcc

SEQ ID NO: 19959 - DNA, 80 bp, synthetic construct
  source 1..80: mol_type = other DNA
ttggtgtagatggtatctcactgtggttttgatttgcattttcctgataattagtgatgtggagcatttattcacgtgtt

SEQ ID NO: 19960 - DNA, 80 bp, synthetic construct; identical to SEQ ID NO: 8904
  source 1..80: mol_type = other DNA

SEQ ID NO: 19961 - DNA, 80 bp, synthetic construct
  source 1..80: mol_type = other DNA
tgaaaggcagaggtccagttttattcttcagcatatggctagcagtctatcccagcaccatttatggaatagttctttcc

SEQ ID NO: 19962 - DNA, 80 bp, synthetic construct
  source 1..80: mol_type = other DNA
ggataatgtgatgcctccagctttgttctttttgcttaggatggcttaggctatttgggctcttttttggttctatatga

SEQ ID NO: 19963 - DNA, 80 bp, synthetic construct; identical to SEQ ID NO: 8905
  source 1..80: mol_type = other DNA

SEQ ID NO: 19964 - DNA, 80 bp, synthetic construct
  source 1..80: mol_type = other DNA
agttccaggagctgtttgggttgatctttagggttctgtaggtatagaataatattacctgtgaagagaggtagtttgac

SEQ ID NO: 19965 - DNA, 80 bp, synthetic construct
  source 1..80: mol_type = other DNA
atattggctgtgggtttgtcatagatgggttttatcattatttggaggcatgttcctttgatgcttactttgttgaaggg

SEQ ID NO: 19966 - DNA, 80 bp, synthetic construct
  source 1..80: mol_type = other DNA
cttatcatgtagctgtctttcttacccccacttcacagataaaaacattgaggttaaaagggttaagtacttgccgtttc

SEQ ID NO: 19967 - DNA, 80 bp, synthetic construct
  source 1..80: mol_type = other DNA
tgaatctacattcttaagcactatgtgttagtgactgtatttaccttgaagctttccagtcacactccccactgataagt

SEQ ID NO: 19968 - DNA, 80 bp, synthetic construct; identical to SEQ ID NO: 8906
  source 1..80: mol_type = other DNA

SEQ ID NO: 19969 - DNA, 80 bp, synthetic construct
  source 1..80: mol_type = other DNA
taagttttaaataatttaatacaagtaaagcccttgaaagagttcatggcagatagaagagcctgataaatgagggttgt

SEQ ID NO: 19970 - DNA, 80 bp, synthetic construct
  source 1..80: mol_type = other DNA
actccttcagacctgaatgattgaatctattaataaagctagacctatcttaccctagctcaagttctttgccacaatct

SEQ ID NO: 19971 - DNA, 80 bp, synthetic construct
  source 1..80: mol_type = other DNA
tgctatgggtatgcccacttcacaggtaagaaaaaattataactgttttaaagtgatagcattgaaaataaaaggcattt

SEQ ID NO: 19972 - DNA, 80 bp, synthetic construct; identical to SEQ ID NO: 8907
  source 1..80: mol_type = other DNA

SEQ ID NO: 19973 - DNA, 80 bp, synthetic construct
  source 1..80: mol_type = other DNA
gagaagtaggaagattcctagaagtgaatgtgagcaaaccatgcaatgcaccctgtatttcctcttattcacaccttact

SEQ ID NO: 19974 - DNA, 80 bp, synthetic construct
  source 1..80: mol_type = other DNA
catgactaagcttttgtacactctcaaaatgaactgctttttgacttgtttgtgatatgtttttcttaaactttttacta

SEQ ID NO: 19975 - DNA, 80 bp, synthetic construct; identical to SEQ ID NO: 8908
  source 1..80: mol_type = other DNA

SEQ ID NO: 19976 - DNA, 80 bp, synthetic construct
  source 1..80: mol_type = other DNA
acagcttaacttttttgatgtatagttctgtgacttttaacatatgttgatccatataatcatcgctacagtcaggacac

SEQ ID NO: 19977 - DNA, 80 bp, synthetic construct
  source 1..80: mol_type = other DNA
ttgattctgataacactatgacctgtaggtgactgtatcgtactgtttggtttttacagaacatcttataaatggaatca

SEQ ID NO: 19978 - DNA, 80 bp, synthetic construct
  source 1..80: mol_type = other DNA
tgtacatatttatggggtacatagtgatgttttgatacatacaatgggtagtgatgagatcaaggtaattagcatattgt

SEQ ID NO: 19979 - DNA, 80 bp, synthetic construct; identical to SEQ ID NO: 8909
  source 1..80: mol_type = other DNA

SEQ ID NO: 19980 - DNA, 80 bp, synthetic construct
  source 1..80: mol_type = other DNA
actcttttttatggcccaatagcattccatccacaatttttaaaaattcatgtattcattgaaaaacatttgggttgttt

SEQ ID NO: 19981 - DNA, 80 bp, synthetic construct
  source 1..80: mol_type = other DNA
gccaaacaattttgccttttcaccagcaatatatgagagttccagttactcagtacttggcttcaatttgcacttccttc

SEQ ID NO: 19982 - DNA, 80 bp, synthetic construct
  source 1..80: mol_type = other DNA
ctttttcagatatgtgatttgtaaatgttttctgtctgttgtttgtctttttattctcctgccaggatatttcacagagc

SEQ ID NO: 19983 - DNA, 80 bp, synthetic construct; identical to SEQ ID NO: 8910
  source 1..80: mol_type = other DNA

SEQ ID NO: 19984 - DNA, 80 bp, synthetic construct
  source 1..80: mol_type = other DNA
tttaacctcttgatagttttaaatggcatcatttgactttctcttttaactatacaacaatttattatattcttcattag

SEQ ID NO: 19985 - DNA, 80 bp, synthetic construct
  source 1..80: mol_type = other DNA
gccattctcctgtctcagcctccctagtagctgggattacaggcatgcaccaccacacccagctaattttttgtattttt

SEQ ID NO: 19986 - DNA, 80 bp, synthetic construct
  source 1..80: mol_type = other DNA
actttgtcagaacttatgattttatatgctatttttttaacctatactctcaattttgttttattcatagatttctagtt

SEQ ID NO: 19987 - DNA, 80 bp, synthetic construct; identical to SEQ ID NO: 8911
  source 1..80: mol_type = other DNA

SEQ ID NO: 19988 - DNA, 80 bp, synthetic construct
  source 1..80: mol_type = other DNA
tttattagtgattttcaaaaggggaaggagtgtatgaatagggtgtgggtcacagagatcacatgcttcacaaggtagta

SEQ ID NO: 19989 - DNA, 80 bp, synthetic construct
  source 1..80: mol_type = other DNA
aggaaggaatttccttgtcctaataagcctgggaacactacaggagaccggggcttatttcatcccttatctacgactgt

SEQ ID NO: 19990 - DNA, 80 bp, synthetic construct
  source 1..80: mol_type = other DNA
gcaggcatactttaaggttatctcccttgttccctgaacatttttgttatcctattcttaaggtgcccagatttgatatt

SEQ ID NO: 19991 - DNA, 80 bp, synthetic construct
  source 1..80: mol_type = other DNA
ataaatgtccatgaaatcttcacaatttatgttcagagattgcagtaaagacaggcataagaaattataaaagtactaat

SEQ ID NO: 19992 - DNA, 80 bp, synthetic construct; identical to SEQ ID NO: 8912
  source 1..80: mol_type = other DNA

SEQ ID NO: 19993 - DNA, 80 bp, synthetic construct
  source 1..80: mol_type = other DNA
ttcagggattctaagtgtacatatattgaatatttgtctaccttagattccaacctccttctctctgacttttaaaagtt

SEQ ID NO: 19994 - DNA, 80 bp, synthetic construct
  source 1..80: mol_type = other DNA
ctgtgtaatttctttcctgagatctatcaactcattgcatttctttctttatttgtatacttctgtgcttactttttgca

SEQ ID NO: 19995 - DNA, 80 bp, synthetic construct
  source 1..80: mol_type = other DNA
ttaatttgttttgcttctattcttatgcattttcttgatgggctttttaggttgagcatattctcttcagtgagtgtaat

SEQ ID NO: 19996 - DNA, 80 bp, synthetic construct; identical to SEQ ID NO: 8913
  source 1..80: mol_type = other DNA

SEQ ID NO: 19997 - DNA, 80 bp, synthetic construct
  source 1..80: mol_type = other DNA
ggctttctaccctacctttcccaatcagtgaaaatctgctggaattgtttgtgtctttatatgaagggaaattgaagttc

SEQ ID NO: 19998 - DNA, 80 bp, synthetic construct
  source 1..80: mol_type = other DNA
gagagatttagattcaggtatccacttctatggccaattggattgcctactttcacatttaatttacactttgtctggat

SEQ ID NO: 19999 - DNA, 80 bp, synthetic construct
  source 1..80: mol_type = other DNA
caggtagatgttctgctgtgagttcctttttctccattgttcaggttactagctggagcatcttgatctgaaaacatggg

SEQ ID NO: 20000 - DNA, 80 bp, synthetic construct; identical to SEQ ID NO: 8914
  source 1..80: mol_type = other DNA

SEQ ID NO: 20001 - DNA, 80 bp, synthetic construct
  source 1..80: mol_type = other DNA
tgcgttgtcataatgacctccattttgggttgctttcatgttagagttttgcctaaagtttagtaatctttggtttggct

SEQ ID NO: 20002 - DNA, 80 bp, synthetic construct
  source 1..80: mol_type = other DNA
ttggattcctgagagaaaaattttccaatgcccccactgtacagacaaaaaatgaataatcgaaaccgaccttgtccaac

SEQ ID NO: 20003 - DNA, 80 bp, synthetic construct; identical to SEQ ID NO: 8915
  source 1..80: mol_type = other DNA

SEQ ID NO: 20004 - DNA, 80 bp, synthetic construct
  source 1..80: mol_type = other DNA
tcccaaagtgctgggattacaggggtgagccatcgcacccggccagtgttagtgtattttacatgtggcccaagaaaatt

SEQ ID NO: 20005 - DNA, 80 bp, synthetic construct
  source 1..80: mol_type = other DNA
atggaactcatatgatgtggttccatttttatgaagttcaaaatggtgtaaatgtgtcagttgtgactgcattcataagt

SEQ ID NO: 20006 - DNA, 80 bp, synthetic construct
  source 1..80: mol_type = other DNA
taagaagagatcttaggaagcagggagactgagaaaaaaaaaggcagaccaatataagtgtgtattttccaggccactga

SEQ ID NO: 20007 - DNA, 80 bp, synthetic construct
  source 1..80: mol_type = other DNA
tggtggtcttggaaatttcttggaacagaaaagctgagattgcaagccaagcacttcaggtgcagcattgtcagcattaa

SEQ ID NO: 20008 - DNA, 80 bp, synthetic construct; identical to SEQ ID NO: 8916
  source 1..80: mol_type = other DNA

SEQ ID NO: 20009 - DNA, 80 bp, synthetic construct
  source 1..80: mol_type = other DNA
taatggtaacagctctgaagtccaagtatttagcctcatttctatattcaaattatgtatgatgtggatggggcattcgt

SEQ ID NO: 20010 - DNA, 80 bp, synthetic construct
  source 1..80: mol_type = other DNA
tggtaataatggtctgaattagtgtggtggcagtgtgaatgcaaaggaaatattgatataaaagctcttcagatcagttt

SEQ ID NO: 20011 - DNA, 80 bp, synthetic construct
  source 1..80: mol_type = other DNA
ctttgattatagctcttatctcactgagtttggaacacgtgtataccagtctacctctctatttcaaagccaacattgag

SEQ ID NO: 20012 - DNA, 80 bp, synthetic construct; identical to SEQ ID NO: 8917
  source 1..80: mol_type = other DNA

SEQ ID NO: 20013 - DNA, 80 bp, synthetic construct
  source 1..80: mol_type = other DNA
ggacaagaagaacagactccttaacttttattttctgccatgaaattgggcttgcatgtgaatttgtcgtctcttacttg

SEQ ID NO: 20014 - DNA, 80 bp, synthetic construct
  source 1..80: mol_type = other DNA
tttttgtcacctaccatgagtgatttactatgtcgagaagtacccacagggtaggatgagtgagaatggatattaggacc

SEQ ID NO: 20015 - DNA, 80 bp, synthetic construct
  source 1..80: mol_type = other DNA
gggtaagcaaataacaatacagacagcatgtgctttgttctaacattgccaaaattagatcagagtctgggataagatca

SEQ ID NO: 20016 - DNA, 80 bp, synthetic construct; identical to SEQ ID NO: 8918
  source 1..80: mol_type = other DNA

SEQ ID NO: 20017 - DNA, 80 bp, synthetic construct
  source 1..80: mol_type = other DNA
tgcttttaccttctttgtttgtgtactccctaagaatgtcgtatctgggctttaaacaccttaaatgactcaaactgttg

SEQ ID NO: 20018 - DNA, 80 bp, synthetic construct
  source 1..80: mol_type = other DNA
ggaacttaaattgtatctattaaatacactttattaaagtgaacaaactatcctacaaagagcaattgctaaatttttgg

SEQ ID NO: 20019 - DNA, 80 bp, synthetic construct
  source 1..80: mol_type = other DNA
aaattgagaatggagaaaaatgaattgcacctttcattgtggtttgcttttacaagcaataaaagccactgttttttcct

SEQ ID NO: 20020 - DNA, 80 bp, synthetic construct; identical to SEQ ID NO: 8919
  source 1..80: mol_type = other DNA

SEQ ID NO: 20021 - DNA, 80 bp, synthetic construct
  source 1..80: mol_type = other DNA
ctgccctttagtcccctgcttcaagggaatggcaaaagattgctttgaaggttaattaggatttcactttgtgtacaaga

SEQ ID NO: 20022 - DNA, 80 bp, synthetic construct
  source 1..80: mol_type = other DNA
tgtttgcatacaaaagccactggtaaatcaggtttggtagaatggagtttgcacagagaataaagaatggattgcaattt

SEQ ID NO: 20023 - DNA, 80 bp, synthetic construct
  source 1..80: mol_type = other DNA
tagcaagattgtatgagatcatggagatggggtagaatatttaaatgtttctcttgatctgcatacttcacactgtttat

SEQ ID NO: 20024 - DNA, 80 bp, synthetic construct; identical to SEQ ID NO: 8920
  source 1..80: mol_type = other DNA

SEQ ID NO: 20025 - DNA, 80 bp, synthetic construct
  source 1..80: mol_type = other DNA
agctgggactacaggtgcccgccaccacgcctggctaattttttttaatttttagtagagacggggtttcactgtgttgg

SEQ ID NO: 20026 - DNA, 80 bp, synthetic construct
  source 1..80: mol_type = other DNA
ctcaaaacaacttaaaaatctcaacacccttttcatcattcaaactaagtatatgcagagacttgacttacagctgaagc

SEQ ID NO: 20027 - DNA, 80 bp, synthetic construct
  source 1..80: mol_type = other DNA
ccatgatttccttgcccttcaggctcagggacagatctacttgtgcttatgcactcgatgaaaatggtttcattgccttc

SEQ ID NO: 20028 - DNA, 80 bp, synthetic construct; identical to SEQ ID NO: 8921
  source 1..80: mol_type = other DNA

SEQ ID NO: 20029 - DNA, 80 bp, synthetic construct
  source 1..80: mol_type = other DNA
tactctgggatggggcattaacaaaagacaaaaattaagtcctgagaatcagaactaagagtcagaaatacgcaagtggt

SEQ ID NO: 20030 - DNA, 80 bp, synthetic construct
  source 1..80: mol_type = other DNA
agtgcccacagatactcaaacttactttcttaggatgctttgaagatatgtgaggaatctcagcatcataccatgcagga

SEQ ID NO: 20031 - DNA, 80 bp, synthetic construct
  source 1..80: mol_type = other DNA
tagtgataaggtggtcagacttatcaagacatcaattgttggcattgttgctgtgtctttccgaggccagatcagcaaag

SEQ ID NO: 20032 - DNA, 80 bp, synthetic construct
  source 1..80: mol_type = other DNA
ttctgcagctcatctgaggtggggactgataggcattgctgagagcagaacaatatgtttatgctggtgttcttgttatg

SEQ ID NO: 20033 - DNA, 80 bp, synthetic construct; identical to SEQ ID NO: 8922
  source 1..80: mol_type = other DNA

SEQ ID NO: 20034 - DNA, 80 bp, synthetic construct
  source 1..80: mol_type = other DNA
atgactgaaagagatggaaagagtttaagggacaggcaattattcacagttatttcaactggtttcttacagctatcttt

SEQ ID NO: 20035 - DNA, 80 bp, synthetic construct
  source 1..80: mol_type = other DNA
gggctaatttttgtattttttgcagacatggggtttctccatgttgcccaggctggtctcaaactcctggactcaagtga

SEQ ID NO: 20036 - DNA, 80 bp, synthetic construct; identical to SEQ ID NO: 8923
  source 1..80: mol_type = other DNA

SEQ ID NO: 20037 - DNA, 80 bp, synthetic construct
  source 1..80: mol_type = other DNA
tatcaagtaaaccctatatagtatggtaaataaaagttgctaattcttcggacagctaattggcaaacaatactacatca

SEQ ID NO: 20038 - DNA, 80 bp, synthetic construct
  source 1..80: mol_type = other DNA
tattgtgaatagctctcactttattgggttccatttatgtatgaaggaaagatttttcacgtgaataagatttctaatct

SEQ ID NO: 20039 - DNA, 80 bp, synthetic construct
  source 1..80: mol_type = other DNA
agaaaaattaatcgaatccgatgacaatatgatggcagcttttctcaaaataccaatacatttatgtcattcatagatac

SEQ ID NO: 20040 - DNA, 80 bp, synthetic construct
  source 1..80: mol_type = other DNA
cacacagagctagaagtattctttgttgaaaaacccattgtactttattgcactattaagggaaatggtccaaatttagt

SEQ ID NO: 20041 - DNA, 80 bp, synthetic construct; identical to SEQ ID NO: 8924
  source 1..80: mol_type = other DNA

SEQ ID NO: 20042 - DNA, 80 bp, synthetic construct
  source 1..80: mol_type = other DNA
cttagtggcagatgccagaaaattcctcagtccatgttactaattgaaaaacaactctcaatctgggaggagagctcaga

SEQ ID NO: 20043 - DNA, 80 bp, synthetic construct
  source 1..80: mol_type = other DNA
atgttcccaatcttgaaaccatgaacaagagggtcagccatgccaggcttatttctccaaattcttttggagctcaaaag

SEQ ID NO: 20044 - DNA, 80 bp, synthetic construct
  source 1..80: mol_type = other DNA
atatagatttaaaaaatatatatgatttaaaaatatatatagatttaaaaatatatatgatgtaaaaatatatagataga

SEQ ID NO: 20045 - DNA, 80 bp, synthetic construct; identical to SEQ ID NO: 8925
  source 1..80: mol_type = other DNA

SEQ ID NO: 20046 - DNA, 80 bp, synthetic construct
  source 1..80: mol_type = other DNA
ttctgatgtagctgcagatgatatttccagttgtcatttttgtctcaaggttagctaggcttttctcaaaacagaacagc

SEQ ID NO: 20047 - DNA, 80 bp, synthetic construct
  source 1..80: mol_type = other DNA
catagggtgcatgtttggataataagattggtaatacactgggaatgcctctgaatactgcctaatttagcaaagcactt

SEQ ID NO: 20048 - DNA, 80 bp, synthetic construct
  source 1..80: mol_type = other DNA
taagaaggtagggaggttttcaaggaagatcatagtgaaaacatgctgttccaactttaagaactaagagatttctaggg

SEQ ID NO: 20049 - DNA, 80 bp, synthetic construct
  source 1..80: mol_type = other DNA
tttctcaggtttgtcaaagatcagatagttgtaggtatgcggcgttatttctgagggctctgttctgttccattgatcta

SEQ ID NO: 20050 - DNA, 80 bp, synthetic construct; identical to SEQ ID NO: 8926
  source 1..80: mol_type = other DNA

SEQ ID NO: 20051 - DNA, 80 bp, synthetic construct
  source 1..80: mol_type = other DNA
cccttgtaaggtggattcctaggtattttattctctttgaagcaattgtgaatgggagttcactcatgatttggctctct

SEQ ID NO: 20052 - DNA, 80 bp, synthetic construct
  source 1..80: mol_type = other DNA
tgacttcctcttttcctaattgaataccctttatttccttctcctgcctaattgccctggccggaacttccaacactatt

SEQ ID NO: 20053 - DNA, 80 bp, synthetic construct; identical to SEQ ID NO: 8927
  source 1..80: mol_type = other DNA

SEQ ID NO: 20054 - DNA, 80 bp, synthetic construct
  source 1..80: mol_type = other DNA
atggcaatcattaaaaagtcaggaaacaacaggtgctggagaggatgtggagaaataggaacacttttacactgttggtg

SEQ ID NO: 20055 - DNA, 80 bp, synthetic construct
  source 1..80: mol_type = other DNA
gcggcattattcacaatagcaaagacttggaaccaacccaaatgtccaacagtgatagactggattaagaaaatgtggca

SEQ ID NO: 20056 - DNA, 80 bp, synthetic construct; identical to SEQ ID NO: 12288
  source 1..80: mol_type = other DNA

SEQ ID NO: 20057 - DNA, 80 bp, synthetic construct
  source 1..80: mol_type = other DNA
tttcaaccgggggtggtcaagtcaaatatactacttaagaaagttataaaaatggttgtaatgtggaaacagattccaga

SEQ ID NO: 20058 - DNA, 80 bp, synthetic construct; identical to SEQ ID NO: 8928
  source 1..80: mol_type = other DNA

SEQ ID NO: 20059 - DNA, 80 bp, synthetic construct
  source 1..80: mol_type = other DNA
ttttctgcaacatataagatgggagaaattgttgctgttttattatcatgattactgttttgaaaattaggctaagataa

SEQ ID NO: 20060 - DNA, 80 bp, synthetic construct
  source 1..80: mol_type = other DNA
catacatatctcattatgtgccatatattttcactctcaagctcatctgtgttctgcattaaataatgaattcctttgga

SEQ ID NO: 20061 - DNA, 80 bp, synthetic construct
  source 1..80: mol_type = other DNA
gcctgcctacctggcgataatagggaggaaattggtcattttgcataaacttatactaagatgttaattaagcgtaatat

SEQ ID NO: 20062 - DNA, 80 bp, synthetic construct; identical to SEQ ID NO: 8929
  source 1..80: mol_type = other DNA

SEQ ID NO: 20063 - DNA, 80 bp, synthetic construct
  source 1..80: mol_type = other DNA
cttgtatgagagatctttatagtcaacatcatagaagtagtgagtgcaatagggcttgccaggggctgcaatgttattca

SEQ ID NO: 20064 - DNA, 80 bp, synthetic construct
  source 1..80: mol_type = other DNA
aagaaactatgggggctgggtgcagtggctcacacctgtaagcccagcactttgggaggatgaagcggatagattacctt

SEQ ID NO: 20065 - DNA, 80 bp, synthetic construct
  source 1..80: mol_type = other DNA
cacgccactgcactccagcctgggtgacagtgagactctgtctcaaaacaaacaaacaaacaaacaaaaacaaaaaagaa

SEQ ID NO: 20066 - DNA, 80 bp, synthetic construct; identical to SEQ ID NO: 8930
  source 1..80: mol_type = other DNA

SEQ ID NO: 20067 - DNA, 80 bp, synthetic construct
  source 1..80: mol_type = other DNA
tttcttggaatctgctgtgtgtttaagatgatatcctacccacacacatgtaacctttacctttttgcaaaccaaatctg

SEQ ID NO: 20068 - DNA, 80 bp, synthetic construct
  source 1..80: mol_type = other DNA
aactatccactgaatttggctatgcaacttcagtttttagagaaggtggtaaagtctctatttttaagggggaaaaatta

SEQ ID NO: 20069 - DNA, 80 bp, synthetic construct; identical to SEQ ID NO: 8931
  source 1..80: mol_type = other DNA

SEQ ID NO: 20070 - DNA, 80 bp, synthetic construct
  source 1..80: mol_type = other DNA
atactttccctggaaaaattcactaagccatgaataaaagtatcaaatggacattcatgaatccaggctttcagtctcca

SEQ ID NO: 20071 - DNA, 80 bp, synthetic construct
  source 1..80: mol_type = other DNA
ggaaggctctcaaaaaatcatcttaggtgttgaaggagtgacctctttttggcatctcctgatgccctctaactttaatc

SEQ ID NO: 20072 - DNA, 80 bp, synthetic construct
  source 1..80: mol_type = other DNA
ccatccaccaaactatcagtgttcttactttttagacacaagtatggtagatgtactctcctgttcttgaatatttaatg

SEQ ID NO: 20073 - DNA, 80 bp, synthetic construct
  source 1..80: mol_type = other DNA
gtattctttttttcctatgttggtttcctctgctcttttgaacttctttgtcatctgtgtcttgaactctaacacctatg

SEQ ID NO: 20074 - DNA, 80 bp, synthetic construct; identical to SEQ ID NO: 8932
  source 1..80: mol_type = other DNA

SEQ ID NO: 20075 - DNA, 80 bp, synthetic construct
  source 1..80: mol_type = other DNA
catttcttgattcatttttagtatatctctccactcttgaaaaaattgtcacaggtctttgagaggctgagttggaagac

SEQ ID NO: 20076 - DNA, 80 bp, synthetic construct
  source 1..80: mol_type = other DNA
gtctcactgaatcctcagcccaaaaagcatttctagtaggcttcttagataactaccttattaaaatgattcacaaactt

SEQ ID NO: 20077 - DNA, 80 bp, synthetic construct
  source 1..80: mol_type = other DNA
gcaagatcttgttgctaacataataataataataacaacttataagtgacccaagaatgattagctgctgtagttttaaa

SEQ ID NO: 20078 - DNA, 80 bp, synthetic construct; identical to SEQ ID NO: 8933
  source 1..80: mol_type = other DNA

SEQ ID NO: 20079 - DNA, 80 bp, synthetic construct
  source 1..80: mol_type = other DNA
tggtgattataatactgaaagaaaaccttttgctcagaagtagagctttcctttaggctgaaccccaagaaaaatgtttt

SEQ ID NO: 20080 - DNA, 80 bp, synthetic construct
  source 1..80: mol_type = other DNA
tgagtaaaactctataaacagcagaaatacagtctatgtgtgtggttctgatgaattagcaagaagacttaagatttctc

SEQ ID NO: 20081 - DNA, 80 bp, synthetic construct
  source 1..80: mol_type = other DNA
tacatacacatgtcatgctattatgaaatcacaggtgatctgtggataatttacacttggttaaaccccaatagattttt

SEQ ID NO: 20082 - DNA, 80 bp, synthetic construct; identical to SEQ ID NO: 8934
  source 1..80: mol_type = other DNA

SEQ ID NO: 20083 - DNA, 80 bp, synthetic construct
  source 1..80: mol_type = other DNA
tggagtttaaagccaagactcatgtactctatctggaaatctaggcagcacaaattcactcaagactgaatgagcgttac

SEQ ID NO: 20084 - DNA, 80 bp, synthetic construct
  source 1..80: mol_type = other DNA
ttttcactgttgcagggatataggttttatctaacattattctattattgctttttactacagtgcataaacagagtata

SEQ ID NO: 20085 - DNA, 80 bp, synthetic construct; identical to SEQ ID NO: 8935
  source 1..80: mol_type = other DNA

SEQ ID NO: 20086 - DNA, 80 bp, synthetic construct
  source 1..80: mol_type = other DNA
attattattgtttttccagacattgacttttggggccaggccaaatggatttctggttcttggattgtgctaatcaatat

SEQ ID NO: 20087 - DNA, 80 bp, synthetic construct
  source 1..80: mol_type = other DNA
cccctactttatcttttgcccttcctttattccttttcttgtagaagaagcaggggaaagaggaaaatcccattttccct

SEQ ID NO: 20088 - DNA, 80 bp, synthetic construct
  source 1..80: mol_type = other DNA
taacacataaccaacaactgacctgtatttgaccaaagctatatccttgtcataaatactcagacacccatggacagtat

SEQ ID NO: 20089 - DNA, 80 bp, synthetic construct; identical to SEQ ID NO: 8936
  source 1..80: mol_type = other DNA

SEQ ID NO: 20090 - DNA, 80 bp, synthetic construct
  source 1..80: mol_type = other DNA
ttttgagggtgcccagctggagtgacatttattcctggattttatcatctcaaatacagcacagagccttatctataaat

SEQ ID NO: 20091 - DNA, 80 bp, synthetic construct
  source 1..80: mol_type = other DNA
gtatgcttatggtaatgaaggaaagaaagaaaagaataaaagttaggtgggcatacagagtagtaagcatcttgaaaata

SEQ ID NO: 20092 - DNA, 80 bp, synthetic construct
  source 1..80: mol_type = other DNA
attcctaaagcaggcatgttaataatagcatcatgctgatttaaaagtgtatacaataatcctccaccagacacattcct

SEQ ID NO: 20093 - DNA, 80 bp, synthetic construct; identical to SEQ ID NO: 8937
  source 1..80: mol_type = other DNA

SEQ ID NO: 20094 - DNA, 80 bp, synthetic construct
  source 1..80: mol_type = other DNA
aggcatttatgtaacacttcagagattgtgcaactcattcacatatgctggcacagtttcttttcaacagttttgtaaag

SEQ ID NO: 20095 - DNA, 80 bp, synthetic construct
  source 1..80: mol_type = other DNA
catgccaaaagatgtccccactggtagccactcattcatattgcttctgtctacattcaaatgtcaggtaagattcatct

SEQ ID NO: 20096 - DNA, 80 bp, synthetic construct
  source 1..80: mol_type = other DNA
ttctttgagaagtacaaatccagcagtgagggtgaagaacatgagtagagaaaggtgctatgatgcatttctgtgttggt

SEQ ID NO: 20097 - DNA, 80 bp, synthetic construct
  source 1..80: mol_type = other DNA
ttctcccatatacatttcctgttttactagactggcctcaccacgggctagttccctcagactttcaacttgggtaattc

SEQ ID NO: 20098 - DNA, 80 bp, synthetic construct; identical to SEQ ID NO: 8938
  source 1..80: mol_type = other DNA

SEQ ID NO: 20099 - DNA, 80 bp, synthetic construct
  source 1..80: mol_type = other DNA
cccttgtcactccctccacagctcgctagggtttttcttccttagagcgtaccaaaatctaagcttcactaaggcagtat

SEQ ID NO: 20100 - DNA, 80 bp, synthetic construct
  source 1..80: mol_type = other DNA
gataaagaaaataatcttcacccaacttggaaaagtttcacagaagaggtgggacctgggttaggccttggcatatagtt

SEQ ID NO: 20101 - DNA, 80 bp, synthetic construct
  source 1..80: mol_type = other DNA
gatttctgctgatctctaattattttcctaactgagaggtctacaaagcattgtattggaagcaggccttaatctatcat

SEQ ID NO: 20102 - DNA, 80 bp, synthetic construct; identical to SEQ ID NO: 8939
  source 1..80: mol_type = other DNA

SEQ ID NO: 20103 - DNA, 80 bp, synthetic construct
  source 1..80: mol_type = other DNA
ctcggctattttcttaatgagaaagtggatcctacaaactttaatcccatttaccgaaatatcaaagcaatctgtacttt

SEQ ID NO: 20104 - DNA, 80 bp, synthetic construct
  source 1..80: mol_type = other DNA
caaatagagtattatcatgaaggtttccatgtctcctaaaggaagtatgactgaaatatgactgcagggaagtcttaatc

SEQ ID NO: 20105 - DNA, 80 bp, synthetic construct
  source 1..80: mol_type = other DNA
gaagaaaagcaccctcattcattaaatagacagggaaaggtggctgcctggcttccctggcttttctgattaagaagaga

SEQ ID NO: 20106 - DNA, 80 bp, synthetic construct; identical to SEQ ID NO: 8940
  source 1..80: mol_type = other DNA

SEQ ID NO: 20107 - DNA, 80 bp, synthetic construct
  source 1..80: mol_type = other DNA
ttcgtcaataaaatcccaaagaggacagaaagagaaggaggggtttgctaaaagaatgagattagaaagacagctgctga

SEQ ID NO: 20108 - DNA, 80 bp, synthetic construct
  source 1..80: mol_type = other DNA
tgtggcaactgcacaatctcagttaaatagccttgaagaccacaggttaatcggttggatccttggttattgaaaaactg

SEQ ID NO: 20109 - DNA, 80 bp, synthetic construct; identical to SEQ ID NO: 8941
  source 1..80: mol_type = other DNA

SEQ ID NO: 20110 - DNA, 80 bp, synthetic construct
  source 1..80: mol_type = other DNA
ttgctatgcacatatatgtagttagttttgtaaaattggaatcattctgtatattttataatagtttaactatttctcac

SEQ ID NO: 20111 - DNA, 80 bp, synthetic construct
  source 1..80: mol_type = other DNA
tatctctgagaatttccttagggtaaatttctcaagagggaattttcaaatcagattatagatattcaaagagtctccag

SEQ ID NO: 20112 - DNA, 80 bp, synthetic construct
  source 1..80: mol_type = other DNA
atgaacattcttgacttcttcggttttaaaattaatttggacaatactgccatactttagtctctttatgaagtagtgac

SEQ ID NO: 20113 - DNA, 80 bp, synthetic construct; identical to SEQ ID NO: 8942
  source 1..80: mol_type = other DNA

SEQ ID NO: 20114 - DNA, 80 bp, synthetic construct
  source 1..80: mol_type = other DNA
atcctcttgtggtactagtacaaaacaaatagagaattatggcccctactctggagctgcttgctgaagtctcttctaag

SEQ ID NO: 20115 - DNA, 80 bp, synthetic construct
  source 1..80: mol_type = other DNA
aattacaaagtgaatagggaaacagaagaaaaaagaatatacatggtttcctgatgccacagtgtggcattgctacagag

SEQ ID NO: 20116 - DNA, 80 bp, synthetic construct
  source 1..80: mol_type = other DNA
atgcttaggatcaaaagaaccaacaatctttgcccattaacagtttaatcagatgtacacatggatcatatcacatgtac

SEQ ID NO: 20117 - DNA, 80 bp, synthetic construct
  source 1..80: mol_type = other DNA
acatttttggtgtgtgttttcaagctgcttccaaatttataaaatcacttccctttataacaaaggattttcagaatcta

SEQ ID NO: 20118 - DNA, 80 bp, synthetic construct; identical to SEQ ID NO: 8943
  source 1..80: mol_type = other DNA

SEQ ID NO: 20119 - DNA, 80 bp, synthetic construct
  source 1..80: mol_type = other DNA
agactgccttcctgcaccaaggaaagaagtgactcttgaaataccgagtggaatttctttaaccaaaataagattgaagc

SEQ ID NO: 20120 - DNA, 80 bp, synthetic construct
  source 1..80: mol_type = other DNA
agcactggtacctaggccactctctgacacaggctggtcaacaggtaccagctgatgaggaagtacagctccgactccaa

SEQ ID NO: 20121 - DNA, 80 bp, synthetic construct; identical to SEQ ID NO: 8944
  source 1..80: mol_type = other DNA

SEQ ID NO: 20122 - DNA, 80 bp, synthetic construct
  source 1..80: mol_type = other DNA
ctccggagtagctgggattacaggcatgcaccaccacccccagctaatttttgtatttttagtagagatggggtttctcc

SEQ ID NO: 20123 - DNA, 80 bp, synthetic construct
  source 1..80: mol_type = other DNA
ttgactaaacttgaattaactttattcattgacattttatatatatacataatatgcactagccattaacataaaatatc

SEQ ID NO: 20124 - DNA, 80 bp, synthetic construct
  source 1..80: mol_type = other DNA
ttaaaaaagtgtttggaaagaccttccccaccacaagatcagattaatactgagctgcattttcttctggttttctatga

SEQ ID NO: 20125 - DNA, 80 bp, synthetic construct
  source 1..80: mol_type = other DNA
cctcaaagagataagaattactcttatacgctatttgatttttccctgtcttgtggtgggatactctcttgatgtggtaa

SEQ ID NO: 20126 - DNA, 80 bp, synthetic construct; identical to SEQ ID NO: 8945
  source 1..80: mol_type = other DNA

SEQ ID NO: 20127 - DNA, 80 bp, synthetic construct
  source 1..80: mol_type = other DNA
gaagattacaaatatttatttttcacacacacaacgatcccctccattattccaactttataaagagcacatttgagttg

SEQ ID NO: 20128 - DNA, 80 bp, synthetic construct
  source 1..80: mol_type = other DNA
agcaaatagctaatgatcagcaaggtgactacaacttttaacaccctacacagctccgaagcactgtgtcccaatgttcc

SEQ ID NO: 20129 - DNA, 80 bp, synthetic construct
  source 1..80: mol_type = other DNA
gaatggcaaactgtaaacaatggtttttctgtggttttcctgttgtctaaaatgtgagtattagccataagtggagcctg

SEQ ID NO: 20130 - DNA, 80 bp, synthetic construct; identical to SEQ ID NO: 8946
  source 1..80: mol_type = other DNA

SEQ ID NO: 20131 - DNA, 80 bp, synthetic construct
  source 1..80: mol_type = other DNA
gtagtaggttgattctggtttactcctagtggagaagacattaattcagacttctggatatggctctatgtttacacact

SEQ ID NO: 20132 - DNA, 80 bp, synthetic construct
  source 1..80: mol_type = other DNA
atctgagccccaatatataaaatgcagagttgcatgaagtgaattccaaatccttcttaacttggtaaagtttccccccg

SEQ ID NO: 20133 - DNA, 80 bp, synthetic construct
  source 1..80: mol_type = other DNA
aatggccaaaattttagagaaaagagactgagaaaatacacaatggaggaaacgttgcctagtaactttaagtctttata

SEQ ID NO: 20134 - DNA, 80 bp, synthetic construct; identical to SEQ ID NO: 8947
  source 1..80: mol_type = other DNA

SEQ ID NO: 20135 - DNA, 80 bp, synthetic construct
  source 1..80: mol_type = other DNA
gttgcatgttctttcaatgttttagtatgtcacactttttcaaaataagcttcttggcagtagtaggccacagagctgag

SEQ ID NO: 20136 - DNA, 80 bp, synthetic construct
  source 1..80: mol_type = other DNA
ctgcgtccacaatatattgctgactattgcatttgcatggattgtgtcacattcatcattcattggtaaaaatcagaact

SEQ ID NO: 20137 - DNA, 80 bp, synthetic construct
  source 1..80: mol_type = other DNA
tgacaatcatgaattaccctttctacaaggaggggctcagaataaattcaagatggaaacatcaacacaatcagttgaaa

SEQ ID NO: 20138 - DNA, 80 bp, synthetic construct; identical to SEQ ID NO: 8948
  source 1..80: mol_type = other DNA

SEQ ID NO: 20139 - DNA, 80 bp, synthetic construct
  source 1..80: mol_type = other DNA
ttttgcctcttagtagcttcgtgacttgaatcaagttccttaatctctccaatcctttgcctgacatgagggaaaaaaaa

SEQ ID NO: 20140 - DNA, 80 bp, synthetic construct
  source 1..80: mol_type = other DNA
aagcagtacagagatgagttgattgaattgttcatgcataaaggtaatcagccattcaaaccccggaatgtaattcccag

SEQ ID NO: 20141 - DNA, 80 bp, synthetic construct; identical to SEQ ID NO: 8949
  source 1..80: mol_type = other DNA

SEQ ID NO: 20142 - DNA, 80 bp, synthetic construct
  source 1..80: mol_type = other DNA
gatgcactgatgaatgatatttagaaagggaaatagacactgctctccaaacagaatgtgacatgaagacacattttcag

SEQ ID NO: 20143 - DNA, 80 bp, synthetic construct
  source 1..80: mol_type = other DNA
ttttctcaactgaaactttggaggaaagagaaaggcagttaatgttttctgagagcctataatatgcagcagtcggggac

SEQ ID NO: 20144 - DNA, 80 bp, synthetic construct
  source 1..80: mol_type = other DNA
cactattaagccacagacctgagctttgtgccctccctactgttcttgtactatatgctgctttctaacgtgctatgctt

SEQ ID NO: 20145 - DNA, 80 bp, synthetic construct; identical to SEQ ID NO: 8950
  source 1..80: mol_type = other DNA

SEQ ID NO: 20146 - DNA, 80 bp, synthetic construct
  source 1..80: mol_type = other DNA
aaaaaatgtgagcaaaagaaagcaatctctttaggaatgctgctgagcaagatcttgtactttttttcagcagtaaccga

SEQ ID NO: 20147 - DNA, 80 bp, synthetic construct
  source 1..80: mol_type = other DNA
aacaaccagagtgagagaattctctcagtcaaaccagtttctctacttctctgtgaagagtttaaaagttaatatcatga

SEQ ID NO: 20148 - DNA, 80 bp, synthetic construct
  source 1..80: mol_type = other DNA
tcaggaggacctctattcatcattataggcaaaatttggttgtccctagcaaccaggtaaaaaatggtactcataatgga

SEQ ID NO: 20149 - DNA, 80 bp, synthetic construct
  source 1..80: mol_type = other DNA
ttggatcattagtatttatgagcctgagccgctcaacttttaagaataaataaagcttcctgcgtctctgttggagagca

SEQ ID NO: 20150 - DNA, 80 bp, synthetic construct; identical to SEQ ID NO: 8951
  source 1..80: mol_type = other DNA

SEQ ID NO: 20151 - DNA, 80 bp, synthetic construct
  source 1..80: mol_type = other DNA
tttgcatttggattattgtctcagagtctgctaacccaaactaagaaaaccacctgattttttctacctaatatacagaa

SEQ ID NO: 20152 - DNA, 80 bp, synthetic construct
  source 1..80: mol_type = other DNA
tttgtctctagtgagactagtattttggggagtgtaatggaattggggaaaatatcttggaaagatgtggcagttatagg

SEQ ID NO: 20153 - DNA, 80 bp, synthetic construct; identical to SEQ ID NO: 8952
  source 1..80: mol_type = other DNA

SEQ ID NO: 20154 - DNA, 80 bp, synthetic construct
  source 1..80: mol_type = other DNA
aggagaccctataattttacttcaaacaaatacagtgatttaacttaaaaagctgggataacgagtggttaataggtttt

SEQ ID NO: 20155 - DNA, 80 bp, synthetic construct
  source 1..80: mol_type = other DNA
caagcaaactattataacgatttggcaattgaccagaagataagaaacctctggttcattctaattcttctatttcctgg

SEQ ID NO: 20156 - DNA, 80 bp, synthetic construct
  source 1..80: mol_type = other DNA
attttggtcattccttctgatttcactgttaaagaactagctatgaaatttgcacaatttcatacaaaataaatttaaca

SEQ ID NO: 20157 - DNA, 80 bp, synthetic construct
  source 1..80: mol_type = other DNA
ggacaaaagctagcatttaattgtttattttacagttagggagtttacattatggaggtattcatatctccatttctttc

SEQ ID NO: 20158 - DNA, 80 bp, synthetic construct; identical to SEQ ID NO: 8953
  source 1..80: mol_type = other DNA

SEQ ID NO: 20159 - DNA, 80 bp, synthetic construct
  source 1..80: mol_type = other DNA
actttttaattttattcacaagtaagttgaaatcaatgctttactgcatgccaactgagcaaaatcaaaacagaacaacc

SEQ ID NO: 20160 - DNA, 80 bp, synthetic construct
  source 1..80: mol_type = other DNA
tttattttaaaagtacatttctcaagcaatagtgactgtaataaatacattgggtcatcctattaagccctccactttga

SEQ ID NO: 20161 - DNA, 80 bp, synthetic construct
  source 1..80: mol_type = other DNA
cttcaattgcatgactatatatgcatgtgtgtttacaactgttgtggatgaccgtgtgtgtgtttatgtattgcatacag

SEQ ID NO: 20162 - DNA, 80 bp, synthetic construct; identical to SEQ ID NO: 8954
  source 1..80: mol_type = other DNA

SEQ ID NO: 20163 - DNA, 80 bp, synthetic construct
  source 1..80: mol_type = other DNA
cttttcccacagtcaatttacatcaagaaaatatgttgccctacaaagtttatttacaatgaaaattcacgtgcatggag

SEQ ID NO: 20164 - DNA, 80 bp, synthetic construct
  source 1..80: mol_type = other DNA
attagctacagccttagctgatttgtcaaaatgtattatagcaactctgttttaatatctcaccatgacaaagcagtaaa

SEQ ID NO: 20165 - DNA, 80 bp, synthetic construct; identical to SEQ ID NO: 8955
  source 1..80: mol_type = other DNA

SEQ ID NO: 20166 - DNA, 80 bp, synthetic construct
  source 1..80: mol_type = other DNA
aactttatcagccccttaaccaaagtcgagttatttttatttgctttcttttttggatctttgcagatgctaacatcttt

SEQ ID NO: 20167 - DNA, 80 bp, synthetic construct
  source 1..80: mol_type = other DNA
ttctttcttgatttctgaatgtgacagagagttctgaggaggtggggagctttcctatgacccattttcattctttgaac

SEQ ID NO: 20168 - DNA, 80 bp, synthetic construct
  source 1..80: mol_type = other DNA
gcctaaaatgaatatactctgacatggaaactaaagctctgtttctggagagggcagaatagaaccagtgagtggaaatt

SEQ ID NO: 20169 - DNA, 80 bp, synthetic construct; identical to SEQ ID NO: 8956
  source 1..80: mol_type = other DNA

SEQ ID NO: 20170 - DNA, 80 bp, synthetic construct
  source 1..80: mol_type = other DNA
tgagaagggcttgtctctatttcctttccacttaacactgacaattttagagcacattaaaactgaggaaactagcaatg

SEQ ID NO: 20171 - DNA, 80 bp, synthetic construct
  source 1..80: mol_type = other DNA
gcctctccagttttatccctgcaaagagttaatgaaggtagaacagaagggcagagcaagcagctgttttagtttttagt

SEQ ID NO: 20172 - DNA, 80 bp, synthetic construct
  source 1..80: mol_type = other DNA
aaagagtttattcatgaggcagtcaagcaaggaggtgggagaacaggtctcaaatctgcttccctaaagatgggatttta

SEQ ID NO: 20173 - DNA, 80 bp, synthetic construct; identical to SEQ ID NO: 8957
  source 1..80: mol_type = other DNA

SEQ ID NO: 20174 - DNA, 80 bp, synthetic construct
  source 1..80: mol_type = other DNA
tttagctacatagattttaaaatcaactaaaggcaagtagctaaaaacaagcaaggcaggttaagcttggcagacctaat

SEQ ID NO: 20175 - DNA, 80 bp, synthetic construct
  source 1..80: mol_type = other DNA
gttacgaccaatatgatagaagacaactatcccatgacagcttttgggaaacttccttaagacagctaatgtacaccgtg

SEQ ID NO: 20176 - DNA, 80 bp, synthetic construct
  source 1..80: mol_type = other DNA
atcatggaatggagctgccataatcatcccaaattgcctcctttatacttgtcctctctaagtaacgttattttgttatt

SEQ ID NO: 20177 - DNA, 80 bp, synthetic construct
  source 1..80: mol_type = other DNA
tctaagattgacacttagcattcctagtagtggaggaacatagtttttcagaaaggtctataaattatgcttttactagg

SEQ ID NO: 20178 - DNA, 80 bp, synthetic construct; identical to SEQ ID NO: 8958
  source 1..80: mol_type = other DNA

SEQ ID NO: 20179 - DNA, 80 bp, synthetic construct
  source 1..80: mol_type = other DNA
ttatattatctatagattattggttttaactggcagcccaggctgattttagagttacgtatacatttatattgtctcat

SEQ ID NO: 20180 - DNA, 80 bp, synthetic construct
  source 1..80: mol_type = other DNA
agttagtcagcccactccactcattttcattactgaccctttcctgttagtcatttgagaagtttacagcctttgtgtgg

SEQ ID NO: 20181 - DNA, 80 bp, synthetic construct; identical to SEQ ID NO: 8959
  source 1..80: mol_type = other DNA

SEQ ID NO: 20182 - DNA, 80 bp, synthetic construct
  source 1..80: mol_type = other DNA
ggtggcgggatttttgccaaagcactctctctctcataacacgatgaggacgtgtttttttttttccactaaatatagtt

SEQ ID NO: 20183 - DNA, 80 bp, synthetic construct
  source 1..80: mol_type = other DNA
tgaaagtccagagggaaaacttcaataaatattgatgatgatgaccatgaattaagcattctctggaatagtcaattaac

SEQ ID NO: 20184 - DNA, 80 bp, synthetic construct
  source 1..80: mol_type = other DNA
acctatgaacagggaatgatatgaacttcggtgtctaccactgataatcaaaatgacagtcctatgccattcgctcttct

SEQ ID NO: 20185 - DNA, 80 bp, synthetic construct
  source 1..80: mol_type = other DNA
agacattttctgttattctattaagacaaccactttcagcttaaactcctgaccgattttcacaggtctccatgctctga

SEQ ID NO: 20186 - DNA, 80 bp, synthetic construct; identical to SEQ ID NO: 8960
  source 1..80: mol_type = other DNA

SEQ ID NO: 20187 - DNA, 80 bp, synthetic construct
  source 1..80: mol_type = other DNA
ttttcctggacaaaccaagaataaatatatcagcttcatgggtttcttgggaccggtaaatgtaatactgcatgtaaagt

SEQ ID NO: 20188 - DNA, 80 bp, synthetic construct
  source 1..80: mol_type = other DNA
tagacacagattttagctccatctgaggaacagcgcatcgataagtagccatagcattcttatttcatgatggagcagag

SEQ ID NO: 20189 - DNA, 80 bp, synthetic construct
  source 1..80: mol_type = other DNA
ttattgttgttgttgcatcagttgttcaatgttaaagttctgggtggaaatatgcaaccgctctctgtcacactctcaaa

SEQ ID NO: 20190 - DNA, 80 bp, synthetic construct; identical to SEQ ID NO: 8961
  source 1..80: mol_type = other DNA

SEQ ID NO: 20191 - DNA, 80 bp, synthetic construct
  source 1..80: mol_type = other DNA
ttttcaagctaaatagactgtctctattcaaattaatatcctgcagattggagagtcaaaatgagagggtcatgccttgt

SEQ ID NO: 20192 - DNA, 80 bp, synthetic construct
  source 1..80: mol_type = other DNA
aaacacaaaagaaaatttttttaaatgttaatcaccacaattttgggggatgcattcatatattggtttgtgtgtatgta

SEQ ID NO: 20193 - DNA, 80 bp, synthetic construct; identical to SEQ ID NO: 8962
  source 1..80: mol_type = other DNA

SEQ ID NO: 20194 - DNA, 80 bp, synthetic construct
  source 1..80: mol_type = other DNA
gaaaataaaataagaaagtatgtaatacatgcaaattctcagcaacccagaagtaaccattgtttatatcttctggtata

SEQ ID NO: 20195 - DNA, 80 bp, synthetic construct
  source 1..80: mol_type = other DNA
tgtcaataggtctatttctgcaccatcatgatttatggctatatagaattccacttggaggatatacacagctgattttc

SEQ ID NO: 20196 - DNA, 80 bp, synthetic construct
  source 1..80: mol_type = other DNA
atatatttatatctttgtatagcaaattgcactctacgatacacatcagtttgaaaataaaaacaggatatgagtgtgca

SEQ ID NO: 20197 - DNA, 80 bp, synthetic construct
  source 1..80: mol_type = other DNA
caggaatattaccaaatagtgatatttctgggaagaatgtatattactatcctatagcatgctgactttggttaatttgt

SEQ ID NO: 20198 - DNA, 80 bp, synthetic construct; identical to SEQ ID NO: 8963
  source 1..80: mol_type = other DNA

SEQ ID NO: 20199 - DNA, 80 bp, synthetic construct
  source 1..80: mol_type = other DNA
caggcccgggtgcgtgatgttccccttcctgtgtccatgtgttctcattgttcaattcccacctatgagtgagaacatgc

SEQ ID NO: 20200 - DNA, 80 bp, synthetic construct
  source 1..80: mol_type = other DNA
acatttggcttggttccaagtctttgctattgtgaatagtgccgcaataaacatacgtgtgcatgtgtctctatagcagc

SEQ ID NO: 20201 - DNA, 80 bp, synthetic construct
  source 1..80: mol_type = other DNA
tcctctccagcacctgttgtttcctgactttttaatgattgccattctaactggtgtaagatggtatctcattgtggttt

SEQ ID NO: 20202 - DNA, 80 bp, synthetic construct; identical to SEQ ID NO: 8964
  source 1..80: mol_type = other DNA

SEQ ID NO: 20203 - DNA, 80 bp, synthetic construct
  source 1..80: mol_type = other DNA
tttcaggtctaatatttaagtcttcaatccatcttgaattaatttttgtataaggtgtaaggaagggatcccgtttcagc

SEQ ID NO: 20204 - DNA, 80 bp, synthetic construct; identical to SEQ ID NO: 9145
  source 1..80: mol_type = other DNA

SEQ ID NO: 20205 - DNA, 80 bp, synthetic construct
  source 1..80: mol_type = other DNA
tgatattgattctttctacccatgagcatggaatgttcttccatttgtttgtatcctcttttatttcattgagcagtggt

SEQ ID NO: 20206 - DNA, 80 bp, synthetic construct; identical to SEQ ID NO: 8965
  source 1..80: mol_type = other DNA

SEQ ID NO: 20207 - DNA, 80 bp, synthetic construct
  source 1..80: mol_type = other DNA
agggaatgcttccagtttttgcccattcagtacgatattggctgtgagtttgtcatagatagctcttattattttgagat

SEQ ID NO: 20208 - DNA, 80 bp, synthetic construct
  source 1..80: mol_type = other DNA
gccttgcatcccagggatgaagcccacttgatcatcgcggataagctttttgatatgctgctggattcggtttaccaaga

SEQ ID NO: 20209 - DNA, 80 bp, synthetic construct; identical to SEQ ID NO: 8966
  source 1..80: mol_type = other DNA

SEQ ID NO: 20210 - DNA, 80 bp, synthetic construct
  source 1..80: mol_type = other DNA
aaggcggcagcaaggctgggggaggggcgcctgccattgccgaggcttgagtaggtaaacaaagcggccaggaagctcga

SEQ ID NO: 20211 - DNA, 80 bp, synthetic construct
  source 1..80: mol_type = other DNA
gctggagatctgataacggacagactgcttcctcaagtgggtccctgacccctgagtagcctaactgggaggcactcccc

SEQ ID NO: 20212 - DNA, 80 bp, synthetic construct
  source 1..80: mol_type = other DNA
aaactccaacagacctgcagctgagggtcctgattgttagaaggaaaactaacaaacagaaaggacatccacaccaaaac

SEQ ID NO: 20213 - DNA, 80 bp, synthetic construct
  source 1..80: mol_type = other DNA
atggaacaaagctggatggagaatgactttgacaagttgagagaagaaagtttcagacgatcaaactactctgagctaaa

SEQ ID NO: 20214 - DNA, 80 bp, synthetic construct; identical to SEQ ID NO: 8967
  source 1..80: mol_type = other DNA

SEQ ID NO: 20215 - DNA, 80 bp, synthetic construct
  source 1..80: mol_type = other DNA
ttgaagttagtcatggccatgtgacttgctttggtctgtcatgttcatatctgacactgttcagtggaagccattaaaag

SEQ ID NO: 20216 - DNA, 80 bp, synthetic construct
  source 1..80: mol_type = other DNA
taagcaccacactgtgatggacaaatactgtatgggaaaaaataacttggtttttaaataccattcagactttggggttg

SEQ ID NO: 20217 - DNA, 80 bp, synthetic construct
  source 1..80: mol_type = other DNA
gtagaatcctgaagagcaggagctttgtctgtcttgttcattgttgtatcatcattgtatgcaatactgccttaaatatt

SEQ ID NO: 20218 - DNA, 80 bp, synthetic construct; identical to SEQ ID NO: 8968
  source 1..80: mol_type = other DNA

SEQ ID NO: 20219 - DNA, 80 bp, synthetic construct
  source 1..80: mol_type = other DNA
tccaaaggcaagatatgacattatatttataatgtctaggctcttatgagacacccttccatgttggcacttgatcattc

SEQ ID NO: 20220 - DNA, 80 bp, synthetic construct
  source 1..80: mol_type = other DNA
tattgggtagttggtgaatagtgtttctgagctagaggtaatagacttgtaccccattgcctcatctgaaagaggctcag

SEQ ID NO: 20221 - DNA, 80 bp, synthetic construct; identical to SEQ ID NO: 8969
  source 1..80: mol_type = other DNA

SEQ ID NO: 20222 - DNA, 80 bp, synthetic construct
  source 1..80: mol_type = other DNA
ataacattctggaactccttgcccttaaatgaactcttcgtggtcctctcaaacatgcttcatatttgtttcttttcccc

SEQ ID NO: 20223 - DNA, 80 bp, synthetic construct
  source 1..80: mol_type = other DNA
gttttactgtatatcaggagttttccatgtttccttgattactaaatggaaacagggtagtaattgaatttagagcatgg

SEQ ID NO: 20224 - DNA, 80 bp, synthetic construct
  source 1..80: mol_type = other DNA
tcagacaggctcatgtttgaaaactagcacatttactgactgtgggcttaagagagttatttaatactttggggcttaat

SEQ ID NO: 20225 - DNA, 80 bp, synthetic construct
  source 1..80: mol_type = other DNA
attagtgttccagagattgtgatttcatcaatgctgtaactaaaactgtgtatatgacgtgtgctatcctagcaagattc

SEQ ID NO: 20226 - DNA, 80 bp, synthetic construct; identical to SEQ ID NO: 8970
  source 1..80: mol_type = other DNA

SEQ ID NO: 20227 - DNA, 80 bp, synthetic construct
  source 1..80: mol_type = other DNA
atgattccatttatgttttatggagtggcaaaagtcactctggctgctggttttagaacagattgtaagggagatgtaag

SEQ ID NO: 20228 - DNA, 80 bp, synthetic construct
  source 1..80: mol_type = other DNA
ctaaacaaatgcaggatggaatcgccattcttcaggtaaattggaacaagtgtcaagggatgcattaggagtttaactca

SEQ ID NO: 20229 - DNA, 80 bp, synthetic construct
  source 1..80: mol_type = other DNA
catagaatgaaccagagcactgaaaataaatgaagaagcaatggatctcatggacgaatactaaaaacacagcatcgtgc

SEQ ID NO: 20230 - DNA, 80 bp, synthetic construct; identical to SEQ ID NO: 8971
  source 1..80: mol_type = other DNA

SEQ ID NO: 20231 - DNA, 80 bp, synthetic construct
  source 1..80: mol_type = other DNA
ctttcaagacctactcctccatgaaatttgttctgatcaccccgttctgtgagctttatttctattctaaagatagaatc

SEQ ID NO: 20232 - DNA, 80 bp, synthetic construct
  source 1..80: mol_type = other DNA
cttccatccagctcttgaaccccatggcaaaaaacccaattttttgttcacaatagtaacttgatgtctggtaactaaca

SEQ ID NO: 20233 - DNA, 80 bp, synthetic construct; identical to SEQ ID NO: 8972
  source 1..80: mol_type = other DNA

SEQ ID NO: 20234 - DNA, 80 bp, synthetic construct
  source 1..80: mol_type = other DNA
aatttttttaattgaaggaaagctcaatatatttcaagtaaaaagacacatagaaaatagaggaaaaaaaatggtgatat

SEQ ID NO: 20235 - DNA, 80 bp, synthetic construct
  source 1..80: mol_type = other DNA
atttatttttcatgggatagaacattgtgtacttagttgccccaattttgctgttttgttttatgggtttatttggggaa

SEQ ID NO: 20236 - DNA, 80 bp, synthetic construct
  source 1..80: mol_type = other DNA
agtgatcagtcactaagcctattactgaacacctccaataacagaggtcttagtatcttctgttgctgcagtttaaaaga

SEQ ID NO: 20237 - DNA, 80 bp, synthetic construct
  source 1..80: mol_type = other DNA
gattactacttactgagagtgagattacatgcttatatttcatgatttgggggaccaatactctaaatcccatatggtgg

SEQ ID NO: 20238 - DNA, 80 bp, synthetic construct; identical to SEQ ID NO: 8973
  source 1..80: mol_type = other DNA

SEQ ID NO: 20239 - DNA, 80 bp, synthetic construct
  source 1..80: mol_type = other DNA
gccaacatggtgaaaccctatctctactaaaaatacgaaatttagatgcgttggcatgctcctgtaatcccagctacttg

SEQ ID NO: 20240 - DNA, 80 bp, synthetic construct
  source 1..80: mol_type = other DNA
ttcagaagacatagttaatttcagttacttcctctttctgttttttaccttcttcattatagagcgtttctccctaaatc

SEQ ID NO: 20241 - DNA, 80 bp, synthetic construct; identical to SEQ ID NO: 8974
  source 1..80: mol_type = other DNA

SEQ ID NO: 20242 - DNA, 80 bp, synthetic construct
  source 1..80: mol_type = other DNA
gcatcctcatattttctttgagctttcaatcaaatgataagtagagttttagtgaagattctcataatgtgttcatttct

SEQ ID NO: 20243 - DNA, 80 bp, synthetic construct
  source 1..80: mol_type = other DNA
atgagcaatttttgtaggcacaaaagaggcgtgctgtttttggagagtttgacagcttcccacccagaggtaccttttaa

SEQ ID NO: 20244 - DNA, 80 bp, synthetic construct
  source 1..80: mol_type = other DNA
ttgcctgaagaggtcttcaaaccttggccttctgcagatctgaccattcaccttcatctttttaatttcctcattatgta

SEQ ID NO: 20245 - DNA, 80 bp, synthetic construct; identical to SEQ ID NO: 8975
  source 1..80: mol_type = other DNA

SEQ ID NO: 20246 - DNA, 80 bp, synthetic construct
  source 1..80: mol_type = other DNA
catgctcagctaatttttgtatttttagtagagacggggtttcaccatgttggccaggctggtctcaaactcctgacctc

SEQ ID NO: 20247 - DNA, 80 bp, synthetic construct
  source 1..80: mol_type = other DNA
ataggtgcaatgggaaaaggtaaacagacaagagagtcagagcactctagaaggtggggaggaatgttaaagtacttgta

SEQ ID NO: 20248 - DNA, 80 bp, synthetic construct
  source 1..80: mol_type = other DNA
ctcatagactctggtcaggtgcataaaaaggctgcacttgtctaggagagcactcaatatttccttaacaggtagatgta

SEQ ID NO: 20249 - DNA, 80 bp, synthetic construct; identical to SEQ ID NO: 8976
  source 1..80: mol_type = other DNA

SEQ ID NO: 20250 - DNA, 80 bp, synthetic construct
  source 1..80: mol_type = other DNA
tttttcatttctgctatgcaacttcaaaaaagaagccagaagattacctagctgaatctaaaccaataaaatgtttcaac

SEQ ID NO: 20251 - DNA, 80 bp, synthetic construct
  source 1..80: mol_type = other DNA
ggaacagattagttcacagatggatttatttaggtcaatgtccctcacactctttctgaaagcagagccaacatccagag

SEQ ID NO: 20252 - DNA, 80 bp, synthetic construct
  source 1..80: mol_type = other DNA
cttagttgaatgatgttccctaaatcagctcacatttgaagtagtccagttaactcctcctgaatgtagctctgctttgg

SEQ ID NO: 20253 - DNA, 80 bp, synthetic construct
  source 1..80: mol_type = other DNA
gctcatggagccccaaattcgttcaagtatttacctcttcaagagctgggccctttccttcattttaagaggaaattctg

SEQ ID NO: 20254 - DNA, 80 bp, synthetic construct; identical to SEQ ID NO: 8977
  source 1..80: mol_type = other DNA

SEQ ID NO: 20255 - DNA, 80 bp, synthetic construct
  source 1..80: mol_type = other DNA
ttctaagtgctgggggtatagctttaaaaaatagaaaaaaaatctctgtgcaatgaagctaatattcaagtagggggagc

SEQ ID NO: 20256 - DNA, 80 bp, synthetic construct
  source 1..80: mol_type = other DNA
agaaagatgtgagagaattaaattctctagtgagtatccgtcccctgttatttgctcagtgtacacttactgacattgat

SEQ ID NO: 20257 - DNA, 80 bp, synthetic construct; identical to SEQ ID NO: 8978
  source 1..80: mol_type = other DNA

SEQ ID NO: 20258 - DNA, 80 bp, synthetic construct
  source 1..80: mol_type = other DNA
tattattaccattttttcatattggaaaaccaagggcaaaaaggttaactttgcaaaggtcacagagcaaaaggtgagcg

SEQ ID NO: 20259 - DNA, 80 bp, synthetic construct
  source 1..80: mol_type = other DNA
gaggtatggaaaaaccaatgcaactcatgaaaacccaatagtcctttagcacagtgaatacctaggccatttttaaagct

SEQ ID NO: 20260 - DNA, 80 bp, synthetic construct
  source 1..80: mol_type = other DNA
tgtattttcctgtaatctattaagagggatcattgcaaccacaaaactgtaaacatgtttacatttaatccccaatctat

SEQ ID NO: 20261 - DNA, 80 bp, synthetic construct
  source 1..80: mol_type = other DNA
attctggttggagggacggctaggagtagaagcaaaaaaatgtgtgaatgagctctaggatatgataaaatattttccaa

SEQ ID NO: 20262 - DNA, 80 bp, synthetic construct; identical to SEQ ID NO: 8979
  source 1..80: mol_type = other DNA

SEQ ID NO: 20263 - DNA, 80 bp, synthetic construct
  source 1..80: mol_type = other DNA
aaggagaaataagctgaatcatccccatgcatgatcctagcactgggactagaatcttctttagaaggtcagcttcatta

SEQ ID NO: 20264 - DNA, 80 bp, synthetic construct
  source 1..80: mol_type = other DNA
gcttaatattttcctattaaatacttcattttatgttgtcatgacctgtttgtccatgagttttctcacgccccatgtgc

SEQ ID NO: 20265 - DNA, 80 bp, synthetic construct; identical to SEQ ID NO: 8980
  source 1..80: mol_type = other DNA

SEQ ID NO: 20266 - DNA, 80 bp, synthetic construct
  source 1..80: mol_type = other DNA
ggaaggtgactgcacccacctttaaacacggggcttgtaactcagctcacacccgaccaatcaggtagtaaagagggctc

SEQ ID NO: 20267 - DNA, 80 bp, synthetic construct
  source 1..80: mol_type = other DNA
tctgttttcattctattagatcttgcaactgcacactcttctggtccgtgtttgttctgcctcaagctgagctttcgctc

SEQ ID NO: 20268 - DNA, 80 bp, synthetic construct
  source 1..80: mol_type = other DNA
tgaacactagttgctgggttccacggttctcttctgtgatccatggcttctaatagagctataacactcaccgcatggcc

SEQ ID NO: 20269 - DNA, 80 bp, synthetic construct; identical to SEQ ID NO: 8981
  source 1..80: mol_type = other DNA

SEQ ID NO: 20270 - DNA, 80 bp, synthetic construct
  source 1..80: mol_type = other DNA
tggtctctgaagacggggatctgggggaagaaaagaagcaaacttggtattttaaaaatatacattccaattatttggaa

SEQ ID NO: 20271 - DNA, 80 bp, synthetic construct
  source 1..80: mol_type = other DNA
gatgccaccttataaacataagaatagttggcttccatatttaagactattagtccagatgatggctgggtaagacccct

SEQ ID NO: 20272 - DNA, 80 bp, synthetic construct
  source 1..80: mol_type = other DNA
taaagaatcactgcttcagggctccacaagatatgctgagctgtggaatcctcagggtattgttactgagctgcaccttc

SEQ ID NO: 20273 - DNA, 80 bp, synthetic construct
  source 1..80: mol_type = other DNA
ctcagcctcccgagtagctgggactacaggtgcctgccaccacgcccagctaattttttgtatttttagtagagacaagg

SEQ ID NO: 20274 - DNA, 80 bp, synthetic construct; identical to SEQ ID NO: 8982
  source 1..80: mol_type = other DNA

SEQ ID NO: 20275 - DNA, 80 bp, synthetic construct
  source 1..80: mol_type = other DNA
cagagttataagtcccaaggctctcagtttggggaagaaatgcttctattcatgtatcccttagcatttacaaactagag

SEQ ID NO: 20276 - DNA, 80 bp, synthetic construct
  source 1..80: mol_type = other DNA
caatttaaggatgattttgcttgcaaccctgaaaagtaccaaaaaaagtttagatctggaattttaacctacatgtacat

SEQ ID NO: 20277 - DNA, 80 bp, synthetic construct
  source 1..80: mol_type = other DNA
ggtcagcttcaagaagaaaatgattgtcttgagaagtcttcactaggcatattgtagtatagaagggatcaaagcaatga

SEQ ID NO: 20278 - DNA, 80 bp, synthetic construct; identical to SEQ ID NO: 8983
  source 1..80: mol_type = other DNA

SEQ ID NO: 20279 - DNA, 80 bp, synthetic construct
  source 1..80: mol_type = other DNA
tgcttgcaattaactacaggttgaatatcccttatccaaagtgcttcagatttaagattattaaaaataaattttgggat

SEQ ID NO: 20280 - DNA, 80 bp, synthetic construct
  source 1..80: mol_type = other DNA
tacaaagggaccgcacttaaaagcatattagaaaaataatacaactcaggacatatagattctcacagagtttcataaag

SEQ ID NO: 20281 - DNA, 80 bp, synthetic construct
  source 1..80: mol_type = other DNA
ctgctagcatgctagcagtcatcaaagagaatcatcaagacacacaccacattccagtagcacttaatctacttaggtac

SEQ ID NO: 20282 - DNA, 80 bp, synthetic construct; identical to SEQ ID NO: 8984
  source 1..80: mol_type = other DNA

SEQ ID NO: 20283 - DNA, 80 bp, synthetic construct
  source 1..80: mol_type = other DNA
aggaatgtgatagtgggtcacagaaaatacagtttgagtcatgagaagtcacggggaggcttccttatttccatttaggt

SEQ ID NO: 20284 - DNA, 80 bp, synthetic construct
  source 1..80: mol_type = other DNA
ttaaagataggaatgacaaaaaagttcccatagaactttcacacttctcagaacttcacatgacttaacccatttaccgc

SEQ ID NO: 20285 - DNA, 80 bp, synthetic construct; identical to SEQ ID NO: 8985
  source 1..80: mol_type = other DNA

SEQ ID NO: 20286 - DNA, 80 bp, synthetic construct
  source 1..80: mol_type = other DNA
tgaagggcttgtgatttttcctttatactatactgccacaaaagagaaaaacaaaaccagaaaataaacatttgaaagcc

SEQ ID NO: 20287 - DNA, 80 bp, synthetic construct
  source 1..80: mol_type = other DNA
taggtatttctggctttaaaaagaattctcattttatgtccaacatgtgtgttggccagacttctcacatccttttttat

SEQ ID NO: 20288 - DNA, 80 bp, synthetic construct
  source 1..80: mol_type = other DNA
agtttttccccatgcatcactggcacatagtgacagatgcagtcacataaatggtaataatttccttggccacatccctg

SEQ ID NO: 20289 - DNA, 80 bp, synthetic construct; identical to SEQ ID NO: 8986
  source 1..80: mol_type = other DNA

SEQ ID NO: 20290 - DNA, 80 bp, synthetic construct
  source 1..80: mol_type = other DNA
gatctcctctcacctccagtaaccaaagctttccgttaagctcattattccagactatcttttccatcagaaaaagaatt

SEQ ID NO: 20291 - DNA, 80 bp, synthetic construct
  source 1..80: mol_type = other DNA
attctatttcatctttacaacaactccatgaagaaaaaatatctctgtgagtcagttgggctaagagagactaagagact

SEQ ID NO: 20292 - DNA, 80 bp, synthetic construct
  source 1..80: mol_type = other DNA
tcacacagtgatatttatggtaaactgcatattcaactaacccagaaattcgaaattcagacacagtagtattcagttgt

SEQ ID NO: 20293 - DNA, 80 bp, synthetic construct; identical to SEQ ID NO: 8987
  source 1..80: mol_type = other DNA

SEQ ID NO: 20294 - DNA, 80 bp, synthetic construct
  source 1..80: mol_type = other DNA
ctgtacctgtctccagttacacattgtatatgatattaactgtgtctctgtgagtgctcacatacataagcactccacat

SEQ ID NO: 20295 - DNA, 80 bp, synthetic construct
  source 1..80: mol_type = other DNA
atattgagagtttctcttccctggtgcttatcgcctacacaataagctatttgactaccagaaactatttgagtagggag

SEQ ID NO: 20296 - DNA, 80 bp, synthetic construct
  source 1..80: mol_type = other DNA
aactataaatccatctcctcttgccattttctttccttaccatatgtgctttttagccacagatgcaggagtgttggagc

SEQ ID NO: 20297 - DNA, 80 bp, synthetic construct; identical to SEQ ID NO: 8988
  source 1..80: mol_type = other DNA

SEQ ID NO: 20298 - DNA, 80 bp, synthetic construct
  source 1..80: mol_type = other DNA
tgaaagagaactatttcattcttttttcaaggtcacaaatggaaaaagtgactctaggtctcatcctcttcactagatgg

SEQ ID NO: 20299 - DNA, 80 bp, synthetic construct
  source 1..80: mol_type = other DNA
tcacagttcagggatggtttgataaatgttgaactccaaaaccccattttatggaaagaaaattgactctgagagagaaa

SEQ ID NO: 20300 - DNA, 80 bp, synthetic construct
  source 1..80: mol_type = other DNA
ggacttcagactagatatacaacagaaagtgagaaaaaacgatgaattgtgcatgataggacaaaggcaggcagattgca

SEQ ID NO: 20301 - DNA, 80 bp, synthetic construct; identical to SEQ ID NO: 8989
  source 1..80: mol_type = other DNA

SEQ ID NO: 20302 - DNA, 80 bp, synthetic construct
  source 1..80: mol_type = other DNA
tcggactgtggtataaccgagaaataaacttttgttgcaggctgttgaaactttggagttagtatagcaactagtgttat

SEQ ID NO: 20303 - DNA, 80 bp, synthetic construct
  source 1..80: mol_type = other DNA
ttgtagatggaattctagttgtataggcattatctcattatttaaggaagtgatatataacaaggattcttttctggtag

SEQ ID NO: 20304 - DNA, 80 bp, synthetic construct
  source 1..80: mol_type = other DNA
aactaattgacaaataagaaaatgtatatatttatggtatacaatgtgatgtttcagtatatgtatacatagtagaataa

SEQ ID NO: 20305 - DNA, 80 bp, synthetic construct; identical to SEQ ID NO: 8990
  source 1..80: mol_type = other DNA

SEQ ID NO: 20306 - DNA, 80 bp, synthetic construct
  source 1..80: mol_type = other DNA
acagtttatttagccattcatctgttgatggacactcaggttgtttccatatattggccattgtgaataatgttgcagtg

SEQ ID NO: 20307 - DNA, 80 bp, synthetic construct
  source 1..80: mol_type = other DNA
aacaatgcaaggattcccttttcatcacatacttaccaacatttatctttttatttgtaataaaagccaccctcacagct

SEQ ID NO: 20308 - DNA, 80 bp, synthetic construct
  source 1..80: mol_type = other DNA
atttcattgtttgagttccttttataatttggatattaacccatatcagatatacattttgcagatgttttcctcccctt

SEQ ID NO: 20309 - DNA, 80 bp, synthetic construct; identical to SEQ ID NO: 8991
  source 1..80: mol_type = other DNA

SEQ ID NO: 20310 - DNA, 80 bp, synthetic construct
  source 1..80: mol_type = other DNA
tacctagactataagatttttgtgacagtaaaatgagatgatacaaataaaactatctttttatccgtaagtcaaaattt

SEQ ID NO: 20311 - DNA, 80 bp, synthetic construct
  source 1..80: mol_type = other DNA
ttctgtcttgcagtgggttaaaggaaaaggcaagttagtcatctgagatgagccatacaatgtactcttgtaggtcaaga

SEQ ID NO: 20312 - DNA, 80 bp, synthetic construct
  source 1..80: mol_type = other DNA
tgaactcagagcttccagaggtcactgcgcgtaggaaaaaaactaagtaatcatcagaattaatcatactgacgcctgtt

SEQ ID NO: 20313 - DNA, 80 bp, synthetic construct
  source 1..80: mol_type = other DNA
caaaccaagttttcaaatacaagagatgccaaacagcaatttgtgaaagggaagagggtggtgataaatttagtattcgt

SEQ ID NO: 20314 - DNA, 80 bp, synthetic construct; identical to SEQ ID NO: 8992
  source 1..80: mol_type = other DNA

SEQ ID NO: 20315 - DNA, 80 bp, synthetic construct
  source 1..80: mol_type = other DNA
caagtaagaaaatgaagaagtctcaaacgttccacacattatgacaattacttggcatttgtctctataggggctctaga

SEQ ID NO: 20316 - DNA, 80 bp, synthetic construct
  source 1..80: mol_type = other DNA
agtgacatttgtacagtatattccacagcacttagatgaccctctgctttgaaaatgcagaaaacacaaagggtttgctg

SEQ ID NO: 20317 - DNA, 80 bp, synthetic construct; identical to SEQ ID NO: 8993
  source 1..80: mol_type = other DNA

SEQ ID NO: 20318 - DNA, 80 bp, synthetic construct
  source 1..80: mol_type = other DNA
atttacccttgggcacgataatgacatactattatttccccaattatattaagccagtggtagcttgatttggatagtga

SEQ ID NO: 20319 - DNA, 80 bp, synthetic construct
  source 1..80: mol_type = other DNA
cattagaatttactcgtggaaacaaatagcatagttgtcatctctaattcagtttgaatgactgacttctattgaaggtg

SEQ ID NO: 20320 - DNA, 80 bp, synthetic construct
  source 1..80: mol_type = other DNA
aagctttgtatgaaatactgttgccttgagggaaaggaaggacagaaatgggtagaggtcaggataaattttatatgtag

SEQ ID NO: 20321 - DNA, 80 bp, synthetic construct
  source 1..80: mol_type = other DNA
gttgtatattttaattaaaggtactccaattcagatctacctatgcttatggcacatgaatatatctagaggacagaaaa

SEQ ID NO: 20322 - DNA, 80 bp, synthetic construct; identical to SEQ ID NO: 8994
  source 1..80: mol_type = other DNA

SEQ ID NO: 20323 - DNA, 80 bp, synthetic construct
  source 1..80: mol_type = other DNA
tcttagactagcatgagaaaaaaaggaaaaaagaacaatgcctgacagttgtttagaaactaaattcaaagtattgaaaa

SEQ ID NO: 20324 - DNA, 80 bp, synthetic construct
  source 1..80: mol_type = other DNA
gtgtgtttttatgaagataaatttcttgatctgtcatgcggcaaattcaggattagaaattcagcgatttactattaggt

SEQ ID NO: 20325 - DNA, 80 bp, synthetic construct; identical to SEQ ID NO: 8995
  source 1..80: mol_type = other DNA

SEQ ID NO: 20326 - DNA, 80 bp, synthetic construct
  source 1..80: mol_type = other DNA
gtcctccctcctttaatggctggccagtaatcttgtgaacaacctatgcaagttttgctttttcaaaaaaaaattaaaat

SEQ ID NO: 20327 - DNA, 80 bp, synthetic construct
  source 1..80: mol_type = other DNA
tggctattacagagtagtatttcacagagtttgtttaaccattccaattgaagggcatctgagttgttttccatttgaaa

SEQ ID NO: 20328 - DNA, 80 bp, synthetic construct
  source 1..80: mol_type = other DNA
tttctagaatgactgagctatttcatattctcaccagaaatatatgaatgattcagtttctccacatcctcaccagcatt

SEQ ID NO: 20329 - DNA, 80 bp, synthetic construct
  source 1..80: mol_type = other DNA
tcctttgccaattttacaattaaattctttaggttcatcttttttaaaaaaattttccagtcacgttttgagagttcttt

SEQ ID NO: 20330 - DNA, 80 bp, synthetic construct; identical to SEQ ID NO: 8996
  source 1..80: mol_type = other DNA

SEQ ID NO: 20331 - DNA, 80 bp, synthetic construct
  source 1..80: mol_type = other DNA
ttttgtggaaggctatttttcctctattgaattatttttgtatctttgtcatggaaagctgggtatattggccagccgcg

SEQ ID NO: 20332 - DNA, 80 bp, synthetic construct
  source 1..80: mol_type = other DNA
ttgggaggctgaggcaggagaatcgcttgaaccagggagtcggaggttgcagtgagccaagatcataccactgcactcta

SEQ ID NO: 20333 - DNA, 80 bp, synthetic construct
  source 1..80: mol_type = other DNA
atagaaatgcaattgatttttaaaaatgtatatcttgtattttgtgaccttgcggagctcactttttaattttaggagat

SEQ ID NO: 20334 - DNA, 80 bp, synthetic construct; identical to SEQ ID NO: 8997
  source 1..80: mol_type = other DNA

SEQ ID NO: 20335 - DNA, 80 bp, synthetic construct
  source 1..80: mol_type = other DNA
tgatgggttatattaatttattttcaaatattaaagtagtcttaaaccacttggtcatgatgtataataaattctattta

SEQ ID NO: 20336 - DNA, 80 bp, synthetic construct
  source 1..80: mol_type = other DNA
tgtgtagaattggtgttaaattttctttaaaagtttggtagaattctccagagaaattatttggcttggagattaatttg

SEQ ID NO: 20337 - DNA, 80 bp, synthetic construct
  source 1..80: mol_type = other DNA
gagatgtttgtagtattcacttactatctttttgatgtcttcaggatctgttttattcctgatgttggcaattagaataa

SEQ ID NO: 20338 - DNA, 80 bp, synthetic construct; identical to SEQ ID NO: 8998
  source 1..80: mol_type = other DNA

SEQ ID NO: 20339 - DNA, 80 bp, synthetic construct
  source 1..80: mol_type = other DNA
aaatcttcttttttggccaatgagttatttggaattgtgttgttcagttttcaagtctttgaggatttttctttctttct

SEQ ID NO: 20340 - DNA, 80 bp, synthetic construct
  source 1..80: mol_type = other DNA
tatattcttctgttgttgtgtcctataaaagtctattagattcatttagttaagagtgttttaatcttctataatcttgt

SEQ ID NO: 20341 - DNA, 80 bp, synthetic construct
  source 1..80: mol_type = other DNA
tcttcttggtagattgacccttttgtcattatatggtgtcttactctaattcttttgttttctctgttctatttaatctg

SEQ ID NO: 20342 - DNA, 80 bp, synthetic construct; identical to SEQ ID NO: 8999
  source 1..80: mol_type = other DNA

SEQ ID NO: 20343 - DNA, 80 bp, synthetic construct
  source 1..80: mol_type = other DNA
accttagcctcctcagtatctgggattataggcataagccactgtactgggctcttaaactttttttttttttttttttt

SEQ ID NO: 20344 - DNA, 80 bp, synthetic construct
  source 1..80: mol_type = other DNA
ggactacaggcgccggccaccacgcccagctaatgttttgcatgtttagtagagacggggtttcactgcgttggccaggc

SEQ ID NO: 20345 - DNA, 80 bp, synthetic construct; identical to SEQ ID NO: 9000
  source 1..80: mol_type = other DNA

SEQ ID NO: 20346 - DNA, 80 bp, synthetic construct
  source 1..80: mol_type = other DNA
aatcatcaaacatagtttaatgttttacctatgttttatgtgtattgtttctcactgtgttctgtcttccttcctggtgt

SEQ ID NO: 20347 - DNA, 80 bp, synthetic construct
  source 1..80: mol_type = other DNA
gtgattttcctttcattcctgatatgtatttttactaattaaatataggatcctaggttgatagttttttttttttcctt

SEQ ID NO: 20348 - DNA, 80 bp, synthetic construct
  source 1..80: mol_type = other DNA
ctgtgtcttattttacatttctgtagatttattgtgttttttattcactcagcttcaatctgtatgtttatgtctttcac

SEQ ID NO: 20349 - DNA, 80 bp, synthetic construct; identical to SEQ ID NO: 9001
  source 1..80: mol_type = other DNA

SEQ ID NO: 20350 - DNA, 80 bp, synthetic construct
  source 1..80: mol_type = other DNA
ctcctttgcatcttttattttgtggctgagattttctatttcagagactttctgtttttctgtttctctcaaatgtgttt

SEQ ID NO: 20351 - DNA, 80 bp, synthetic construct
  source 1..80: mol_type = other DNA
acctgaatatttggaatatcatgttataagagtctggaactcacttaaaccttctgttttagcttatttactgtaacccc

SEQ ID NO: 20352 - DNA, 80 bp, synthetic construct
  source 1..80: mol_type = other DNA
ctctctggaagtgggtagaggagtagtgcatttccttgttatcagaaagcacgctctctacagtttcaattcttatgacc

SEQ ID NO: 20353 - DNA, 80 bp, synthetic construct; identical to SEQ ID NO: 9002
  source 1..80: mol_type = other DNA

SEQ ID NO: 20354 - DNA, 80 bp, synthetic construct
  source 1..80: mol_type = other DNA
gtttttgtctttatttcgatttggtcttagactgcctctttcctggtccttttcctacagagaaaaggctttatttctta

SEQ ID NO: 20355 - DNA, 80 bp, synthetic construct
  source 1..80: mol_type = other DNA
ctggagtgcaatggagtgatttcggctcactgcaacctccacctcctgggttcaagtgggttctcctgcctcagactcct

SEQ ID NO: 20356 - DNA, 80 bp, synthetic construct
  source 1..80: mol_type = other DNA
gcttctttaactgaaagtcttggatatatgagaccaaatgaacatctagggaactcagcatcatatcatttcttaggtcc

SEQ ID NO: 20357 - DNA, 80 bp, synthetic construct; identical to SEQ ID NO: 9003
  source 1..80: mol_type = other DNA

SEQ ID NO: 20358 - DNA, 80 bp, synthetic construct
  source 1..80: mol_type = other DNA
actcagcaaatacactaaagtagaatgcagtactgatacccatgacattgtgagttatgaaaagtaggaaggttgttttc

SEQ ID NO: 20359 - DNA, 80 bp, synthetic construct
  source 1..80: mol_type = other DNA
agggtaaagcactaaatctcgtgtcctgagagttttccagcctgcttaggcagataccaggaacgtttgttttgttcctg

SEQ ID NO: 20360 - DNA, 80 bp, synthetic construct
  source 1..80: mol_type = other DNA
agattataagattgctgggataaaacaaagtcactgcaaaataaattaattactgaaatcttgtggtctttctttaaaag

SEQ ID NO: 20361 - DNA, 80 bp, synthetic construct
  source 1..80: mol_type = other DNA
tttcaggaaaaaatataattatatttcctgtaaggttgtgctgccaggccatgcatggtaggctacctatacacaacaag

SEQ ID NO: 20362 - DNA, 80 bp, synthetic construct; identical to SEQ ID NO: 9004
  source 1..80: mol_type = other DNA

SEQ ID NO: 20363 - DNA, 80 bp, synthetic construct
  source 1..80: mol_type = other DNA
tagttagtcccacctactcgggaggctgaggcaggaggattgcttgtacccaggaggctgcagtgagccatgttcatgcc

SEQ ID NO: 20364 - DNA, 80 bp, synthetic construct
  source 1..80: mol_type = other DNA
taaattatagctaatttagcaaatttctaagtcagctcaagtaaaattttttttattttgtgattaaaatattgactaga

SEQ ID NO: 20365 - DNA, 80 bp, synthetic construct; identical to SEQ ID NO: 9005
  source 1..80: mol_type = other DNA

SEQ ID NO: 20366 - DNA, 80 bp, synthetic construct
  source 1..80: mol_type = other DNA
tttaccaagatatttccattactcttggttaccacaatagcttcccaactctaattccctttcattcctttctcaactct

SEQ ID NO: 20367 - DNA, 80 bp, synthetic construct
  source 1..80: mol_type = other DNA
actctcaggctaaagaccaaaatgtttaacgtgatctgtaaggcactttaggtctggtgcccagtccacctctcaggtca

SEQ ID NO: 20368 - DNA, 80 bp, synthetic construct
  source 1..80: mol_type = other DNA
gagtctcctgcataattctgtaaatgtataattctgttgtttaatagaccttgtatctcctagcatctatcccaattgca

SEQ ID NO: 20369 - DNA, 80 bp, synthetic construct; identical to SEQ ID NO: 9006
  source 1..80: mol_type = other DNA

SEQ ID NO: 20370 - DNA, 80 bp, synthetic construct
  source 1..80: mol_type = other DNA
gctgggactacaggcgcccgccaccatgcccagctaattttttgtattgttagtagagacggggtttcaccatgttagcc

SEQ ID NO: 20371 - DNA, 80 bp, synthetic construct
  source 1..80: mol_type = other DNA
aggaacagatactgtactgacaccatcccaggagcaaccatctttgaaaaatagggtaattcttgctctttttttctgct

SEQ ID NO: 20372 - DNA, 80 bp, synthetic construct
  source 1..80: mol_type = other DNA
cccataccaagaattgaacaaaccagtcatcagtggcattctttttatgattcactgggctaaactggggattcaccata

SEQ ID NO: 20373 - DNA, 80 bp, synthetic construct; identical to SEQ ID NO: 9007
  source 1..80: mol_type = other DNA

SEQ ID NO: 20374 - DNA, 80 bp, synthetic construct
  source 1..80: mol_type = other DNA
tctaaaacagagcttctatcccttcttaaggagctcagtgacctctttgcctctcactctggggcaaatcagcatgcctc

SEQ ID NO: 20375 - DNA, 80 bp, synthetic construct
  source 1..80: mol_type = other DNA
ttattcatgctttgatcttttcaacatcatcctcacaaaacaatcatcatctgcatcatcatcataaaatatgaaggtgt

SEQ ID NO: 20376 - DNA, 80 bp, synthetic construct
  source 1..80: mol_type = other DNA
atatatgtatgtatatctttctacctgtgtataggtagaacctcccatatatgcatgtgtgtatatacctgtctttctaa

SEQ ID NO: 20377 - DNA, 80 bp, synthetic construct
  source 1..80: mol_type = other DNA
acacccatatgtatatatgaagatatttataaagaaaatataaatatattatctttatatacacatatctatgtatatat

SEQ ID NO: 20378 - DNA, 80 bp, synthetic construct; identical to SEQ ID NO: 9008
  source 1..80: mol_type = other DNA

SEQ ID NO: 20379 - DNA, 80 bp, synthetic construct
  source 1..80: mol_type = other DNA
cgttagtctcttttggtgaacagtaagtggtaatgagagaggcttagctgagtttttggcagttctttcaaagcatggga

SEQ ID NO: 20380 - DNA, 80 bp, synthetic construct
  source 1..80: mol_type = other DNA
gagaggccatatgagataataccaaaaccacacaaagaagaatgaggacactgatgtaggacagaatctggaacagccca

SEQ ID NO: 20381 - DNA, 80 bp, synthetic construct
  source 1..80: mol_type = other DNA
agactcaggaagtatgcctaagtctagaaacatcctagagagctatgtccaagaaatcatccgatatttatactttcagt

SEQ ID NO: 20382 - DNA, 80 bp, synthetic construct
  source 1..80: mol_type = other DNA
gtgtaatattgaccatcatctctgcttaccatttattttatgtccagaaaaataacgatcttgtttcaaaatgtacacag

SEQ ID NO: 20383 - DNA, 80 bp, synthetic construct; identical to SEQ ID NO: 9009
  source 1..80: mol_type = other DNA

SEQ ID NO: 20384 - DNA, 80 bp, synthetic construct
  source 1..80: mol_type = other DNA
atggtcctaaatgtattggatcaattgtatgacaatctgtttgattaattggcaataaatatagaaatggctccaaagct

SEQ ID NO: 20385 - DNA, 80 bp, synthetic construct
  source 1..80: mol_type = other DNA
gaatctcactctatcaccagactgtgcagtggtgcgatcatagctcactgcagccacaacctcgacctcctgatcttaag

SEQ ID NO: 20386 - DNA, 80 bp, synthetic construct; identical to SEQ ID NO: 9010
  source 1..80: mol_type = other DNA

SEQ ID NO: 20387 - DNA, 80 bp, synthetic construct
  source 1..80: mol_type = other DNA
tagataatgaatatcattaaaatgcgtatgtaggaattcttgaaactgacactcgtttcggcaactggcaaacctcctct

SEQ ID NO: 20388 - DNA, 80 bp, synthetic construct
  source 1..80: mol_type = other DNA
catatcttctttaattgatttatggggtatgttgtaagcattaaaatgatgaaggaggtaaaagctttgtagaacatgta

SEQ ID NO: 20389 - DNA, 80 bp, synthetic construct
  source 1..80: mol_type = other DNA
aaaaaccccactaaataatgatggcagaaacaatgtatttttctctctgaaaaaattctcagaggtaccaatccagggct

SEQ ID NO: 20390 - DNA, 80 bp, synthetic construct; identical to SEQ ID NO: 9011
  source 1..80: mol_type = other DNA

SEQ ID NO: 20391 - DNA, 80 bp, synthetic construct
  source 1..80: mol_type = other DNA
agtaatgctcagatggaatgagagatgggctaacgctcaaagatacctcagaaatgtgtacttggaaataaagaacatgt

SEQ ID NO: 20392 - DNA, 80 bp, synthetic construct
  source 1..80: mol_type = other DNA
atggcaaattcagagcataaatgaggtgggtacaggggcagtatttagatgagatggtaggaggtagaatttagactgaa

SEQ ID NO: 20393 - DNA, 80 bp, synthetic construct
  source 1..80: mol_type = other DNA
agtcactctagaattgccagtggtgggttatacaggggaaaagaaattatgagaaccaggcccacataaatatttcttct

SEQ ID NO: 20394 - DNA, 80 bp, synthetic construct; identical to SEQ ID NO: 9012
  source 1..80: mol_type = other DNA

SEQ ID NO: 20395 - DNA, 80 bp, synthetic construct
  source 1..80: mol_type = other DNA
taagtattgtaactattaacaataaagtgacagttccatccaacagcagtcgttgggcacttgcaatataccatgtactg

SEQ ID NO: 20396 - DNA, 80 bp, synthetic construct
  source 1..80: mol_type = other DNA
caatctattaatggctcctttttcaatggggagagtctaggtgcattcactttagatcattatctatgtttgtggaatca

SEQ ID NO: 20397 - DNA, 80 bp, synthetic construct
  source 1..80: mol_type = other DNA
tggtgtgaacatgtaagtgccagtaaccagtgctgtgttccaacgctgcatgctcattataatctcagcctgatcattat

SEQ ID NO: 20398 - DNA, 80 bp, synthetic construct; identical to SEQ ID NO: 9013
  source 1..80: mol_type = other DNA

SEQ ID NO: 20399 - DNA, 80 bp, synthetic construct
  source 1..80: mol_type = other DNA
gttcatactgtaattgctaggaaggctcaggcaagaactttattttttaaggtttacagtgtacttgcttcatgttttgg

SEQ ID NO: 20400 - DNA, 80 bp, synthetic construct
  source 1..80: mol_type = other DNA
ttgtgatatgccaaggctttgttttgcaaattaaaattcttacagtgctagacagggtgaagggtgatgacagtagccac

SEQ ID NO: 20401 - DNA, 80 bp, synthetic construct
  source 1..80: mol_type = other DNA
tcaagtgaagccagaaataagaattctgaaattccctaatatataaagcattcatttgtgggttgggaggaagtggtggc

SEQ ID NO: 20402 - DNA, 80 bp, synthetic construct
  source 1..80: mol_type = other DNA
aagtacccaaccactccatactagatgtaaaataagagatgtatttgaaggggttttggaagcaaacatctaaatgggaa

SEQ ID NO: 20403 - DNA, 80 bp, synthetic construct; identical to SEQ ID NO: 9014
  source 1..80: mol_type = other DNA

SEQ ID NO: 20404 - DNA, 80 bp, synthetic construct
  source 1..80: mol_type = other DNA
tatcctccaaaggatgcttgttcactcttaacagtatctcttggttaccatgacaaggaagaatgggaaaaccactctca

SEQ ID NO: 20405 - DNA, 80 bp, synthetic construct
  source 1..80: mol_type = other DNA
acaatgaagcacatctcatctaataacccttgtgtagctctagtcatgttagtggttctgtagccctggtgccatccaag

SEQ ID NO: 20406 - DNA, 80 bp, synthetic construct; identical to SEQ ID NO: 9015
  source 1..80: mol_type = other DNA

SEQ ID NO: 20407 - DNA, 80 bp, synthetic construct
  source 1..80: mol_type = other DNA
atcaatatttttctagcagcatagggtttgtgttcagccatttgtgaagacttttacacataattatttttcatttgaaa

SEQ ID NO: 20408 - DNA, 80 bp, synthetic construct
  source 1..80: mol_type = other DNA
tctggaaccaatattaaaggtaactcatattagctagatttttctctgagaatgaactaagtttgcaggaactccatata

SEQ ID NO: 20409 - DNA, 80 bp, synthetic construct
  source 1..80: mol_type = other DNA
tgcattgctttcaaccaaaagccctgtgggaataaggcaataccaacactgtgatgcatgattggtctcaaccagtattt

SEQ ID NO: 20410 - DNA, 80 bp, synthetic construct
  source 1..80: mol_type = other DNA
atattaaatgattcagagtctggcaggaggaaacactcgtaggagtgttttgtttagttgtgtttcgtagctgcgatgtt

SEQ ID NO: 20411 - DNA, 80 bp, synthetic construct; identical to SEQ ID NO: 9016
  source 1..80: mol_type = other DNA

SEQ ID NO: 20412 - DNA, 80 bp, synthetic construct
  source 1..80: mol_type = other DNA
aatgtacttagactttgagaaatttttgatgatttctgaaaagtttaataatgccatcttaggcagagaatagtttctca

SEQ ID NO: 20413 - DNA, 80 bp, synthetic construct
  source 1..80: mol_type = other DNA
agggggaaaaaacaggatagaaggactagcaagtgcctgaagggtaaggattgtggggtgtggtttataattttaaagtg

SEQ ID NO: 20414 - DNA, 80 bp, synthetic construct
  source 1..80: mol_type = other DNA
ataaaaataagttaaataaatacataaagcaggtgttcaaggaagtgaactgcaaagtgacatttaagcaaagacctgaa

SEQ ID NO: 20415 - DNA, 80 bp, synthetic construct; identical to SEQ ID NO: 9017
  source 1..80: mol_type = other DNA

SEQ ID NO: 20416 - DNA, 80 bp, synthetic construct
  source 1..80: mol_type = other DNA
ttgggctgagtggccccttagtagccttaggactcagagcaacacatttaatttatctgtgtctccgttttctcatctgc

SEQ ID NO: 20417 - DNA, 80 bp, synthetic construct
  source 1..80: mol_type = other DNA
caacaggccaaacaaggaatcgggaacattcctttatacctgtgcccatgtaaatcctctccctgagttttcagctatag

SEQ ID NO: 20418 - DNA, 80 bp, synthetic construct; identical to SEQ ID NO: 9018
  source 1..80: mol_type = other DNA

SEQ ID NO: 20419 - DNA, 80 bp, synthetic construct
  source 1..80: mol_type = other DNA
aattagctgggcgtggttgtgcatgcctgtaatcccagctactctggaggctgaggcaggagaattgcttgaacctggga

SEQ ID NO: 20420 - DNA, 80 bp, synthetic construct
  source 1..80: mol_type = other DNA
tggtgcaaaaggatgtttgctgtttagcagtgctcaaaagtccaaagttcaatttaatattccatttactctttcctgct

SEQ ID NO: 20421 - DNA, 80 bp, synthetic construct
  source 1..80: mol_type = other DNA
gtggaaaggtactattgctgctacaactgagtattgatggtaataattttatgcgtgtgtatattcctcactactacctg

SEQ ID NO: 20422 - DNA, 80 bp, synthetic construct; identical to SEQ ID NO: 9019
  source 1..80: mol_type = other DNA

SEQ ID NO: 20423 - DNA, 80 bp, synthetic construct
  source 1..80: mol_type = other DNA
gttttctttcaatcaaaattccactggaattttgcttggctggccatagtcatctggacctatcataacttgcttcggag

SEQ ID NO: 20424 - DNA, 80 bp, synthetic construct
  source 1..80: mol_type = other DNA
tccaggcttaaccccatgccaagttccattaaaagtcatcattgattattttgtcacccattgccttataatgtcgcaat

SEQ ID NO: 20425 - DNA, 80 bp, synthetic construct
  source 1..80: mol_type = other DNA
agtggagtagaatgtattaagtgagaggaaagctcacagcaaagcagcgatgcggaagatagttcccttacccaaaggca

SEQ ID NO: 20426 - DNA, 80 bp, synthetic construct; identical to SEQ ID NO: 9020
  source 1..80: mol_type = other DNA

SEQ ID NO: 20427 - DNA, 80 bp, synthetic construct
  source 1..80: mol_type = other DNA
tagttaaataatctgtataccaaactcctgtaacacacaatttacctatataactaacctgcacatgtacctctgaacca

SEQ ID NO: 20428 - DNA, 80 bp, synthetic construct
  source 1..80: mol_type = other DNA
ttgaggaaaacttctgctacatttttgctcatatatctaagaatcacaatgaaagtaatgattgctgagtggtttgctat

SEQ ID NO: 20429 - DNA, 80 bp, synthetic construct
  source 1..80: mol_type = other DNA
atcagttgagcgatttattaaaattacagttagtctgggtggagatcaggaatctgcattttatcaaggggcccaggtga

SEQ ID NO: 20430 - DNA, 80 bp, synthetic construct
  source 1..80: mol_type = other DNA
gtaacctctttgaacctcaatttccaactgtaagactggatagttcttaccacgtgggtaagataaaatgaggtatatgc

SEQ ID NO: 20431 - DNA, 80 bp, synthetic construct; identical to SEQ ID NO: 9021
  source 1..80: mol_type = other DNA

SEQ ID NO: 20432 - DNA, 80 bp, synthetic construct
  source 1..80: mol_type = other DNA
atttaactcctgatgcaatttcccacaagagtaaatttacctgcaaattaatctgctttgaggccccctggaatttctga

SEQ ID NO: 20433 - DNA, 80 bp, synthetic construct
  source 1..80: mol_type = other DNA
gctgacctagggttacactgagaacaccctgtgagaagttttcttgataccccagaggtcaggtcgctgctcctctcctt

SEQ ID NO: 20434 - DNA, 80 bp, synthetic construct; identical to SEQ ID NO: 9022
  source 1..80: mol_type = other DNA

SEQ ID NO: 20435 - DNA, 80 bp, synthetic construct
  source 1..80: mol_type = other DNA
ttatactgaagtacaccagggaaatttttagcaggtacatctttaagaacaggtctcaaagcacaaaaagccaaggaaat

SEQ ID NO: 20436 - DNA, 80 bp, synthetic construct
  source 1..80: mol_type = other DNA
ttcataaccgtgttacaaaatgccaaaaactacaatgtgtatttaacttgaagccaagtaatgacatgcaaggggaaaac

SEQ ID NO: 20437 - DNA, 80 bp, synthetic construct
  source 1..80: mol_type = other DNA
agtccattttaaaatgggaactctacctcaggtataatcaacaagatcgttgatggctccctttcattaagagaatattg

SEQ ID NO: 20438 - DNA, 80 bp, synthetic construct; identical to SEQ ID NO: 9023
  source 1..80: mol_type = other DNA

SEQ ID NO: 20439 - DNA, 80 bp, synthetic construct
  source 1..80: mol_type = other DNA
atgtggattggcattttatttttactgtggtatacttagcccaaaataatgccaacagcattgtttctgttcctcactga

SEQ ID NO: 20440 - DNA, 80 bp, synthetic construct
  source 1..80: mol_type = other DNA
atgtgtacagcttgttctgtttacttcacaaaatgacatctgtgtggcacaagcaaccagatgaagaaacagactattat

SEQ ID NO: 20441 - DNA, 80 bp, synthetic construct
  source 1..80: mol_type = other DNA
ttcacttcaagtatgtgtatgggatccatccatgtttttaactgtagttattgttcatttattctcattgctaagcagta

SEQ ID NO: 20442 - DNA, 80 bp, synthetic construct; identical to SEQ ID NO: 9024
  source 1..80: mol_type = other DNA

SEQ ID NO: 20443 - DNA, 80 bp, synthetic construct
  source 1..80: mol_type = other DNA
atgttgtttacatttttcttattgatttgtaggagttatttttatcttctttatacattctttcacaatgcatttattaa

SEQ ID NO: 20444 - DNA, 80 bp, synthetic construct
  source 1..80: mol_type = other DNA
tctgcaagctgaggagataggaagccaacagtgcagcctccatcctgtgcccaaaggcccaagagcccccagaaaactac

SEQ ID NO: 20445 - DNA, 80 bp, synthetic construct
  source 1..80: mol_type = other DNA
tggatggtggccacccacactgagagtgggacttcctctcccaatcccccaactcaaatgttaatctcttctggcaacac

SEQ ID NO: 20446 - DNA, 80 bp, synthetic construct
  source 1..80: mol_type = other DNA
ccttttagaatgtgtgaaaggaaaataaatcctggggcccccaaatcactaagctaaagggaaaagtcaagctgggaact

SEQ ID NO: 20447 - DNA, 80 bp, synthetic construct; identical to SEQ ID NO: 9025
  source 1..80: mol_type = other DNA

SEQ ID NO: 20448 - DNA, 80 bp, synthetic construct
  source 1..80: mol_type = other DNA
attttggcaaccatgaagggattctgaatggagatgcccctgatctttgacaaatctgctaccagtgcttggtaccagca

SEQ ID NO: 20449 - DNA, 80 bp, synthetic construct
  source 1..80: mol_type = other DNA
gcaagatttcctgcttccatgatgatggaaggcaggtaactcctttatggagtgtgaactcactcctgtcagggaagaca

SEQ ID NO: 20450 - DNA, 80 bp, synthetic construct; identical to SEQ ID NO: 9026
  source 1..80: mol_type = other DNA

SEQ ID NO: 20451 - DNA, 80 bp, synthetic construct
  source 1..80: mol_type = other DNA
ccaccctatacctccttcctattttgccatctgcagtgccaaaaacatctagagaagacttctaatgacttgaacccctt

SEQ ID NO: 20452 - DNA, 80 bp, synthetic construct
  source 1..80: mol_type = other DNA
agggagctacaaagttagggatggctgagcagtttacagggagtggtcttggctgttgttatttattttttttctccttg

SEQ ID NO: 20453 - DNA, 80 bp, synthetic construct
  source 1..80: mol_type = other DNA
gaactgttgttttcataggtaaatgtgagactgcattttcacagctctgaagaaaaagggcatttgctcttctcagctga

SEQ ID NO: 20454 - DNA, 80 bp, synthetic construct; identical to SEQ ID NO: 9027
  source 1..80: mol_type = other DNA

SEQ ID NO: 20455 - DNA, 80 bp, synthetic construct
  source 1..80: mol_type = other DNA
taatatggtcttcgaacacatttacattaaagaaaaagatccctaaggtcagtctccaaactatagagttcctaagttct

SEQ ID NO: 20456 - DNA, 80 bp, synthetic construct
  source 1..80: mol_type = other DNA
ttttatgtttaattggtaattaaatccattttaacttccccttaccacagcagaatttttctctccataccttatgatgt

SEQ ID NO: 20457 - DNA, 80 bp, synthetic construct; identical to SEQ ID NO: 9028
  source 1..80: mol_type = other DNA

SEQ ID NO: 20458 - DNA, 80 bp, synthetic construct
  source 1..80: mol_type = other DNA
atgcaagaccagcatatggacccctttgtcagcttaagaaggttttcttgaagcattaactgacatctaataaaggttat

SEQ ID NO: 20459 - DNA, 80 bp, synthetic construct
  source 1..80: mol_type = other DNA
caccttttaaaaaaatccttgactttatcactttggtcaaatgaattacttattttacaatgaagtgtgataccaagtgt

SEQ ID NO: 20460 - DNA, 80 bp, synthetic construct
  source 1..80: mol_type = other DNA
tgaactggtgtttggttttctttgggctgatttgtataaatatattattgatatgtgttccaaaattatgggaaaattgt

SEQ ID NO: 20461 - DNA, 80 bp, synthetic construct; identical to SEQ ID NO: 9029
  source 1..80: mol_type = other DNA

SEQ ID NO: 20462 - DNA, 80 bp, synthetic construct
  source 1..80: mol_type = other DNA
ctttgtttcactttttttcagagtcaaggaaacttttcttttgagctattgacagcttttaacaaatttgtatactccta

SEQ ID NO: 20463 - DNA, 80 bp, synthetic construct
  source 1..80: mol_type = other DNA
actaaggctttgactgggatggtgtgcttttctttaaggaatcaattgacttatacagcaaataaaagccccttgggaaa

SEQ ID NO: 20464 - DNA, 80 bp, synthetic construct
  source 1..80: mol_type = other DNA
atggctgggctcggctttaaaaaagtcttacctgagattccttctatggaataaagttccatcaaagccaatttaaaagc

SEQ ID NO: 20465 - DNA, 80 bp, synthetic construct; identical to SEQ ID NO: 9030
  source 1..80: mol_type = other DNA

SEQ ID NO: 20466 - DNA, 80 bp, synthetic construct
  source 1..80: mol_type = other DNA
cctttcatacctgcctactgatgtatggacttcagagtaatgtggcctatctcaattttccagaatcgttcttttgtttc

SEQ ID NO: 20467 - DNA, 80 bp, synthetic construct
  source 1..80: mol_type = other DNA
aaggtatcgagtggggaatgtgaaaggaaaataaatcttggggcccccaaatcactaagctaaagagaaaagtcaagctg

SEQ ID NO: 20468 - DNA, 80 bp, synthetic construct
  source 1..80: mol_type = other DNA
ccaccttcacctcaagtggtgccccctttctggactgaactaatggacatcctacaaattgattgaggtctcatgtctcc

SEQ ID NO: 20469 - DNA, 80 bp, synthetic construct; identical to SEQ ID NO: 9031
  source 1..80: mol_type = other DNA

SEQ ID NO: 20470 - DNA, 80 bp, synthetic construct
  source 1..80: mol_type = other DNA
tagtctgttcatattcagaccagaaacaatttttttaaaaaaactttttagtatgcagttggttgaatccatgaataaag

SEQ ID NO: 20471 - DNA, 80 bp, synthetic construct
  source 1..80: mol_type = other DNA
gaattgactggtttgtatgttgtgaggcagggatcaaaatttattttttacatagatatttggatgatccggcatgccta

SEQ ID NO: 20472 - DNA, 80 bp, synthetic construct
  source 1..80: mol_type = other DNA
catatatatcatatataatatatgctatatgtatctatatcatatataatatatgctatatgtatctatatcatatatat

SEQ ID NO: 20473 - DNA, 80 bp, synthetic construct; identical to SEQ ID NO: 9032
  source 1..80: mol_type = other DNA

SEQ ID NO: 20474 - DNA, 80 bp, synthetic construct
  source 1..80: mol_type = other DNA
aagtgctgaaatatatgttgcatgatttgatcaacttgaaaaaaacttatatttttacaacattgagtttagcaattaat

SEQ ID NO: 20475 - DNA, 80 bp, synthetic construct
  source 1..80: mol_type = other DNA
cataaaatgcaattgatcccaaacagtgaccttatatctagagatcttaacctcaattcagttaattctaatggcttgag

SEQ ID NO: 20476 - DNA, 80 bp, synthetic construct
  source 1..80: mol_type = other DNA
gtttgttacataggtatatatgtgccatagtggcttgctgcacctatcaacccgtcgtctaggttttaagtcctgcatgc

SEQ ID NO: 20477 - DNA, 80 bp, synthetic construct
  source 1..80: mol_type = other DNA
tgaggatgatggcttccagcttcatccatgtccctgcaaaggatatgaactcatccttttttatgcctgcatagtattcc

SEQ ID NO: 20478 - DNA, 80 bp, synthetic construct; identical to SEQ ID NO: 9033
  source 1..80: mol_type = other DNA

SEQ ID NO: 20479 - DNA, 80 bp, synthetic construct
  source 1..80: mol_type = other DNA
ttttcatatgtttgttggccacataaatgtcttctttggagaagtgtctgctcatatcctttgcccactttttgatgggg

SEQ ID NO: 20480 - DNA, 80 bp, synthetic construct
  source 1..80: mol_type = other DNA
ttcttttgctttgcagaagctctttggtttgattagatcccatttgtcaattttggtttttgttgcaattgcttttggca

SEQ ID NO: 20481 - DNA, 80 bp, synthetic construct
  source 1..80: mol_type = other DNA
agttttcccagcaccatttataaaatagggaatcctctccccataacttgtttttgtcaggtttgtcaaagatcggttgg

SEQ ID NO: 20482 - DNA, 80 bp, synthetic construct; identical to SEQ ID NO: 9034
  source 1..80: mol_type = other DNA

SEQ ID NO: 20483 - DNA, 80 bp, synthetic construct
  source 1..80: mol_type = other DNA
atttcttgaacactctttatctaagaaagttccattccatacctagtttgctacgagttttcatggtaaattgacacaga

SEQ ID NO: 20484 - DNA, 80 bp, synthetic construct
  source 1..80: mol_type = other DNA
actttttgtgatgtgttaacttattatcaaatacatttttatacagcagcttactcgtgagcttgacagtcactgggtca

SEQ ID NO: 20485 - DNA, 80 bp, synthetic construct; identical to SEQ ID NO: 9035
  source 1..80: mol_type = other DNA

SEQ ID NO: 20486 - DNA, 80 bp, synthetic construct
  source 1..80: mol_type = other DNA
taatgcccaagtagcaataatccaagctactatcctacatgtctatgaagtctttaacaagattttcctccaagaataca

SEQ ID NO: 20487 - DNA, 80 bp, synthetic construct
  source 1..80: mol_type = other DNA
ctcattctgtggaaaatttgaaaaactacagtctagaagattctgttattatattgccattcccatctaggagtgagttc

SEQ ID NO: 20488 - DNA, 80 bp, synthetic construct
  source 1..80: mol_type = other DNA
acaataggcaaactgagtcatccaaaaatgagaaataaagtagcagcaggtcacagcagaactaactagaactggaaatt

SEQ ID NO: 20489 - DNA, 80 bp, synthetic construct; identical to SEQ ID NO: 9036
  source 1..80: mol_type = other DNA

SEQ ID NO: 20490 - DNA, 80 bp, synthetic construct
  source 1..80: mol_type = other DNA
cctggtgtgtgtgttcccctctctgtgtccatgtgttttgaatgttcaacctccacttatgagagagcatgcggggtttg

SEQ ID NO: 20491 - DNA, 80 bp, synthetic construct
  source 1..80: mol_type = other DNA
tctttgctattgtaaatagtgctgcaataaacatatgtgtgcatgtttctttatagtagaatggtttataatcctttggg

SEQ ID NO: 20492 - DNA, 80 bp, synthetic construct
  source 1..80: mol_type = other DNA
ttcctgactttttaataattgccattctgactggcatgagatggtatctcactgtggttttgatttgcatttctctgatg

SEQ ID NO: 20493 - DNA, 80 bp, synthetic construct
  source 1..80: mol_type = other DNA
gtcagatgggtagattgcaaatattttctcccattctgcaggttgcctgttcactctggtgatgatagtttcttttgttg

SEQ ID NO: 20494 - DNA, 80 bp, synthetic construct; identical to SEQ ID NO: 9037
  source 1..80: mol_type = other DNA

SEQ ID NO: 20495 - DNA, 80 bp, synthetic construct
  source 1..80: mol_type = other DNA
ttgtaatctccaatcaggctgttttagtaataaaggtgatattttgaattccatttgcttgctattgcttctttgtctca

SEQ ID NO: 20496 - DNA, 80 bp, synthetic construct
  source 1..80: mol_type = other DNA
aaatatggcaatgaaacaagtcacacaaatttgggggggttcccaatgcataaaaaattatgtttactctaaactgtggt

SEQ ID NO: 20497 - DNA, 80 bp, synthetic construct; identical to SEQ ID NO: 9038
  source 1..80: mol_type = other DNA

SEQ ID NO: 20498 - DNA, 80 bp, synthetic construct
  source 1..80: mol_type = other DNA
taaatatggagtgactattatggggaaacactgtcagtttctgtgcagaatcccatgatagacatttctagtagtttcaa

SEQ ID NO: 20499 - DNA, 80 bp, synthetic construct
  source 1..80: mol_type = other DNA
ggaaaataaaagggatgataactattgaaatatttcttaagctaagtggaacatgcataaataatatttaataatgtgct

SEQ ID NO: 20500 - DNA, 80 bp, synthetic construct
  source 1..80: mol_type = other DNA
taggtagaaggcaaatgtctcacttagcatggcatagttcttctacagttagaatcttactttcctttctctactcctct

SEQ ID NO: 20501 - DNA, 80 bp, synthetic construct
  source 1..80: mol_type = other DNA
atttccaattctcatactgtggtatatactttaaggtattctaatgggcttacatatctgtattctccattaaggatagc

SEQ ID NO: 20502 - DNA, 80 bp, synthetic construct; identical to SEQ ID NO: 9039
  source 1..80: mol_type = other DNA

SEQ ID NO: 20503 - DNA, 80 bp, synthetic construct
  source 1..80: mol_type = other DNA
tgtccttattctgtcttccgtagactgttcacatttcctcagtgtttctggtgatttctctagaatcaaagactgtgtta

SEQ ID NO: 20504 - DNA, 80 bp, synthetic construct
  source 1..80: mol_type = other DNA
agtcacaccgagttgatcccaccttgaggaaaatgcagtcgtttatacccccagattagccagttattaactacaggctg

SEQ ID NO: 20505 - DNA, 80 bp, synthetic construct; identical to SEQ ID NO: 9040
  source 1..80: mol_type = other DNA

SEQ ID NO: 20506 - DNA, 80 bp, synthetic construct
  source 1..80: mol_type = other DNA
tctcctggttattggcactacttcttggcactatggccatttctattggataccaccttttatttattaccaggaaacat

SEQ ID NO: 20507 - DNA, 80 bp, synthetic construct
  source 1..80: mol_type = other DNA
ggaagaatgtaccccaatgcttttgagagttaatagtataggtactctttcacttgctacttagagcactaccctaccaa

SEQ ID NO: 20508 - DNA, 80 bp, synthetic construct
  source 1..80: mol_type = other DNA
ggctgccgaaacgtctgaattccagtagtggcaaaaccataaccccagctacatgtgcaaaactctgattaagactaaat

SEQ ID NO: 20509 - DNA, 80 bp, synthetic construct
  source 1..80: mol_type = other DNA
atcccatgatagacatttctaacatttttatcaatgtctggggctcctatccttctaggcaaatggaaaacagccactga

SEQ ID NO: 20510 - DNA, 80 bp, synthetic construct; identical to SEQ ID NO: 9041
  source 1..80: mol_type = other DNA

SEQ ID NO: 20511 - DNA, 80 bp, synthetic construct
  source 1..80: mol_type = other DNA
aaggctacaaattagaaaactttatagtaatgagtactcactttccctgccctcttttgactcattgtatctcctggcat

SEQ ID NO: 20512 - DNA, 80 bp, synthetic construct
  source 1..80: mol_type = other DNA
ttgcctgcataatgtaagaagtgagtgatcatgtaggttgcaagaccctagaaagccaaacctttcaaattctatttttt

SEQ ID NO: 20513 - DNA, 80 bp, synthetic construct
  source 1..80: mol_type = other DNA
aataaataaatctaagaaatacctttgtttatactgttcttggtgagctgtactgaaataaaaagaaagatggaatatga

SEQ ID NO: 20514 - DNA, 80 bp, synthetic construct; identical to SEQ ID NO: 9042
  source 1..80: mol_type = other DNA

SEQ ID NO: 20515 - DNA, 80 bp, synthetic construct
  source 1..80: mol_type = other DNA
cctcacgacatcaaattgtagactggcttttctattacagtcagagaagacccttcatgcggcatttctatagagagaaa

SEQ ID NO: 20516 - DNA, 80 bp, synthetic construct
  source 1..80: mol_type = other DNA
tgtacataacaacaactaaatatttactgaacatgaattatgtgtcaggcattatgttctgtatgaattattttatgtaa

SEQ ID NO: 20517 - DNA, 80 bp, synthetic construct
  source 1..80: mol_type = other DNA
taaaacatgagcccagtccctgtggaacttagtgggagacatagacatgtaaatggcaatttaaaaggacatgaaaagaa

SEQ ID NO: 20518 - DNA, 80 bp, synthetic construct; identical to SEQ ID NO: 9043
  source 1..80: mol_type = other DNA

SEQ ID NO: 20519 - DNA, 80 bp, synthetic construct
  source 1..80: mol_type = other DNA
gctcaagatgacatatatgaggaaatactatataatagattcaggcacgtaaagaagtgagaaaagagataatattcctt

SEQ ID NO: 20520 - DNA, 80 bp, synthetic construct
  source 1..80: mol_type = other DNA
tcaagcctacttgtgaggttggacaatccctaaggttatctagggcatttgaaatataccacaactcctggggaaacccc

SEQ ID NO: 20521 - DNA, 80 bp, synthetic construct
  source 1..80: mol_type = other DNA
atatagagtaattcaggaaaacatacatgcgtttactacaaatgagaaacgcataaagcgtaagtcatgaagggtgtttt

SEQ ID NO: 20522 - DNA, 80 bp, synthetic construct; identical to SEQ ID NO: 9044
  source 1..80: mol_type = other DNA

SEQ ID NO: 20523 - DNA, 80 bp, synthetic construct
  source 1..80: mol_type = other DNA
tgcatatagtttcacagaatataatatagatggaaaagagagaagaagcaaagaagaaggcagaagagatgtggcagaac

SEQ ID NO: 20524 - DNA, 80 bp, synthetic construct
  source 1..80: mol_type = other DNA
gagaaatatgatgtgtcgatggttaaaagaattcgtctgatttttgagggtaggtaatgagaaatgaaagtttccatctc

SEQ ID NO: 20525 - DNA, 80 bp, synthetic construct
  source 1..80: mol_type = other DNA
cctttaagtccttccagctgaggcctcagatatcatggagcagagacaaatgtggacacatacctctcatgagtaagtaa

SEQ ID NO: 20526 - DNA, 80 bp, synthetic construct; identical to SEQ ID NO: 9045
  source 1..80: mol_type = other DNA

SEQ ID NO: 20527 - DNA, 80 bp, synthetic construct
  source 1..80: mol_type = other DNA
ctactgcttctatgtctacagccatgtaattaacataacagtgtcaaacaaactccattaaagagaaatatcccaaggag

SEQ ID NO: 20528 - DNA, 80 bp, synthetic construct
  source 1..80: mol_type = other DNA
tgcttccaattctgatatacctgccttctaactgaagaagttctgtccaggagtggcaatcaaaaaataggatatgcaga

SEQ ID NO: 20529 - DNA, 80 bp, synthetic construct
  source 1..80: mol_type = other DNA
tagagcaactgctttgattggacagtcaaataattctcattaaaagtctctaatttgagttctctgcttccacaatctgt

SEQ ID NO: 20530 - DNA, 80 bp, synthetic construct; identical to SEQ ID NO: 9046
  source 1..80: mol_type = other DNA

SEQ ID NO: 20531 - DNA, 80 bp, synthetic construct
  source 1..80: mol_type = other DNA
aaatgacctctgttttcaacaaaacttaatcaagagtcaggcctcatcttacacattcaagctcacttgcaaccattatc

SEQ ID NO: 20532 - DNA, 80 bp, synthetic construct
  source 1..80: mol_type = other DNA
taagcacaaggagaagcacacatgtcttctgagtgctctgataactcaagatgattattctcacctctttacctttgctc

SEQ ID NO: 20533 - DNA, 80 bp, synthetic construct; identical to SEQ ID NO: 9047
  source 1..80: mol_type = other DNA

SEQ ID NO: 20534 - DNA, 80 bp, synthetic construct
  source 1..80: mol_type = other DNA
tgatagtagtatttcatgaggctctaagtacaagcaaaagttggtaatactaaagaggaaggagggctcatttattggaa

SEQ ID NO: 20535 - DNA, 80 bp, synthetic construct
  source 1..80: mol_type = other DNA
ttgagttaagctgtttgtgtcccactgatgcccatttgaacactcataggctttattctttctatttcagtattagagaa

SEQ ID NO: 20536 - DNA, 80 bp, synthetic construct
  source 1..80: mol_type = other DNA
tcatcaaaggatacagtttatgtttcttagcaacctagaatcgatcagcatcttgatgcaattttatgtggctctttaat

SEQ ID NO: 20537 - DNA, 80 bp, synthetic construct
  source 1..80: mol_type = other DNA
ttctttcttctccatgcagtgtaactaaattgtctgggaaaaaatcagcattcacatgtcttggacaagtgagaagagtg

SEQ ID NO: 20538 - DNA, 80 bp, synthetic construct; identical to SEQ ID NO: 9048
  source 1..80: mol_type = other DNA

SEQ ID NO: 20539 - DNA, 80 bp, synthetic construct
  source 1..80: mol_type = other DNA
ctgcactagccttctccaatgtaggataaatgtgcccgtatgctacaaggaaacagaattattgaatctgctcttggcaa

SEQ ID NO: 20540 - DNA, 80 bp, synthetic construct
  source 1..80: mol_type = other DNA
gccaccatgcccggctaatttttttgtatttttagtagagatggggtttcaccgtgttagccaggatggtctcgatctcc

SEQ ID NO: 20541 - DNA, 80 bp, synthetic construct; identical to SEQ ID NO: 9049
  source 1..80: mol_type = other DNA

SEQ ID NO: 20542 - DNA, 80 bp, synthetic construct
  source 1..80: mol_type = other DNA
caacatggtcacccttctttgaataaagaccaaattgttttaatggatcttcatctcatagaagaggtaaaatggcagag

SEQ ID NO: 20543 - DNA, 80 bp, synthetic construct
  source 1..80: mol_type = other DNA
cgtgaatggactaatccactcatgcattaatggtttaggaggttaacggattaaacagttattgtgggaatgggactggt

SEQ ID NO: 20544 - DNA, 80 bp, synthetic construct
  source 1..80: mol_type = other DNA
gttacaaggaacagaaaacgggctgagagacatgcccagtgaggatggtggctaggaagtgaatgacacagttgctttct

SEQ ID NO: 20545 - DNA, 80 bp, synthetic construct
  source 1..80: mol_type = other DNA
gaggagtataaactattaaaaaaaaggaaacagctgttagaggggtttatatcttaaaataacaaaggtacttgcatgtg

SEQ ID NO: 20546 - DNA, 80 bp, synthetic construct; identical to SEQ ID NO: 9050
  source 1..80: mol_type = other DNA

SEQ ID NO: 20547 - DNA, 80 bp, synthetic construct
  source 1..80: mol_type = other DNA
acttctacctgtgaatgtttaatggcagttggaagaatagatttggacacgcaagagttaggagtagagatgccagttta

SEQ ID NO: 20548 - DNA, 80 bp, synthetic construct
  source 1..80: mol_type = other DNA
catgaggggttagggtcagggagagagaaaatgaagagatttctgtttatttctgttactcagctaagtatcagaaacac

SEQ ID NO: 20549 - DNA, 80 bp, synthetic construct; identical to SEQ ID NO: 9051
  source 1..80: mol_type = other DNA

SEQ ID NO: 20550 - DNA, 80 bp, synthetic construct
  source 1..80: mol_type = other DNA
atttgttagcccattcttttatgtttctcagcagagatctttacgtggtaaaatgtcagattagggctcagcgtaatgat

SEQ ID NO: 20551 - DNA, 80 bp, synthetic construct
  source 1..80: mol_type = other DNA
acacttctttgcacttgcctcacaaaacttccaacagaaaccaaccaacacacatctcattaatcttcttaacactaagc

SEQ ID NO: 20552 - DNA, 80 bp, synthetic construct
  source 1..80: mol_type = other DNA
ggttggaagtttttacttctttgcgctatcatttctattgctttgactgtggtatcttccaagtgtcaggagttacttct

SEQ ID NO: 20553 - DNA, 80 bp, synthetic construct; identical to SEQ ID NO: 9052
  source 1..80: mol_type = other DNA

SEQ ID NO: 20554 - DNA, 80 bp, synthetic construct
  source 1..80: mol_type = other DNA
gcaatgtacatcaggataagattatgttaaaataaggattgtagactctgtgtgatagtcttcgtgcttgattttgtgct

SEQ ID NO: 20555 - DNA, 80 bp, synthetic construct
  source 1..80: mol_type = other DNA
aaatatcctaagttcttacagccatatgaagcacctagaattaccaactatgaagctgttagccatttacacttgtatat

SEQ ID NO: 20556 - DNA, 80 bp, synthetic construct
  source 1..80: mol_type = other DNA
cacctgggtaaaaagaatgtaggaatgattaacagggtggttaatgtgtagcagctgagacaaggttctacagatatagt

SEQ ID NO: 20557 - DNA, 80 bp, synthetic construct; identical to SEQ ID NO: 9053
  source 1..80: mol_type = other DNA

SEQ ID NO: 20558 - DNA, 80 bp, synthetic construct
  source 1..80: mol_type = other DNA
taataattccctaatactaatgtgcacaacaaactcatggactgcttgtttaagatgcatatttccaggccccatcccag

SEQ ID NO: 20559 - DNA, 80 bp, synthetic construct
  source 1..80: mol_type = other DNA
ccatatttaacatttaacagtcttattttctatttttgtatttcagaatcagggaaaagtcctctctccctctcacacgc

SEQ ID NO: 20560 - DNA, 80 bp, synthetic construct
  source 1..80: mol_type = other DNA
aattttggacctcaatgtttgaaaactgaatcgggaatacatgattagaaagatcaacaatgtcttctcccaggacattc

SEQ ID NO: 20561 - DNA, 80 bp, synthetic construct; identical to SEQ ID NO: 9054
  source 1..80: mol_type = other DNA

SEQ ID NO: 20562 - DNA, 80 bp, synthetic construct
  source 1..80: mol_type = other DNA
gtgatcttagttatacatggaataaaaaaggtcaatgatacagataaagaataaaacaatggttaccagggcaaggtggg

SEQ ID NO: 20563 - DNA, 80 bp, synthetic construct
  source 1..80: mol_type = other DNA
ttatttttgctaaatgagagattatagctgttcttgccatagacaaaaaaaaaagagtaactatgtcaggtgatggatac

SEQ ID NO: 20564 - DNA, 80 bp, synthetic construct
  source 1..80: mol_type = other DNA
aaaatcagcagatttgccaatctaatgaaggattacagaaaactattctcaatctgtaaactaggttgttggatggagat

SEQ ID NO: 20565 - DNA, 80 bp, synthetic construct
  source 1..80: mol_type = other DNA
gataagcagggagtaattgcagatgtatttaaatctaaaatgctgcagtgtgatagcaaaacagtggcccccaacgataa

SEQ ID NO: 20566 - DNA, 80 bp, synthetic construct; identical to SEQ ID NO: 9055
  source 1..80: mol_type = other DNA

SEQ ID NO: 20567 - DNA, 80 bp, synthetic construct
  source 1..80: mol_type = other DNA
aaggaacccaggcctgctgaccaccttgacttttggcctggtgaaacagattttagactcctcaccttcaaaactataat

SEQ ID NO: 20568 - DNA, 80 bp, synthetic construct
  source 1..80: mol_type = other DNA
aaggaggaaactcttctcattaattccctttgtgggacattttcttaattgttggtctgggttttcactgacagaaagct

SEQ ID NO: 20569 - DNA, 80 bp, synthetic construct
  source 1..80: mol_type = other DNA
agttcccattctcaatatgtagcagtttcaatttgccccatcactagtgaaactcatctgagggcttcctgagaagtcag

SEQ ID NO: 20570 - DNA, 80 bp, synthetic construct; identical to SEQ ID NO: 9056
  source 1..80: mol_type = other DNA

SEQ ID NO: 20571 - DNA, 80 bp, synthetic construct
  source 1..80: mol_type = other DNA
ataacaatctttccttaaataccaaggagagtgcatcctgtcagcataccttgtcactgctgatattaccgtggattgcc

SEQ ID NO: 20572 - DNA, 80 bp, synthetic construct
  source 1..80: mol_type = other DNA
ttggaatttttctacatgggatgtttgtctattctcttccatttattcaattatttttagtatatggactgcgtgtttac

SEQ ID NO: 20573 - DNA, 80 bp, synthetic construct
  source 1..80: mol_type = other DNA
atgctccaggctcatcttataaatttcctgctgtgttactgaaatcagtcactctttctttccaagaaattctggttact

SEQ ID NO: 20574 - DNA, 80 bp, synthetic construct; identical to SEQ ID NO: 9057
  source 1..80: mol_type = other DNA

SEQ ID NO: 20575 - DNA, 80 bp, synthetic construct
  source 1..80: mol_type = other DNA
atcaactacagcacagtgcttgcgttgaggtctgttaaccttattcttgcacatcttatttccaaggttaattaggtcag

SEQ ID NO: 20576 - DNA, 80 bp, synthetic construct
  source 1..80: mol_type = other DNA
ctgtgggtacagtgtcatagagccatcattttagttccatatatgatggtttatccacccccaaaactcctgtttcacct

SEQ ID NO: 20577 - DNA, 80 bp, synthetic construct
  source 1..80: mol_type = other DNA
gatagctcatttcttaaaatcattgaatagtatcctattgagtgggtgtaccacttctggtttatccatttacatttact

SEQ ID NO: 20578 - DNA, 80 bp, synthetic construct; identical to SEQ ID NO: 9058
  source 1..80: mol_type = other DNA

SEQ ID NO: 20579 - DNA, 80 bp, synthetic construct
  source 1..80: mol_type = other DNA
caatacatgtacacagagtttcttttaaagaatatggaaatgtttgtgtttatcttctggtccacatccaattatgtctt

SEQ ID NO: 20580 - DNA, 80 bp, synthetic construct
  source 1..80: mol_type = other DNA
ttcttctctcactttgtaagaaagcaccagctagtaatatgccattatgagacattagtttccaaattccccagctacct

SEQ ID NO: 20581 - DNA, 80 bp, synthetic construct
  source 1..80: mol_type = other DNA
aggacttccttgacactttcagttctttgaactacaccttttgttaattttttagatttattaagattttagggaaaaat

SEQ ID NO: 20582 - DNA, 80 bp, synthetic construct; identical to SEQ ID NO: 9059
  source 1..80: mol_type = other DNA

SEQ ID NO: 20583 - DNA, 80 bp, synthetic construct
  source 1..80: mol_type = other DNA
aaactatattagcatgattttaacacatgaattccctgattcccaatcctttcacagttctcctttatatcaagatttca

SEQ ID NO: 20584 - DNA, 80 bp, synthetic construct
  source 1..80: mol_type = other DNA
ttatactcacctgagatgtagaacagttaatgcttagtctttgatcgcagcagaacatacagatgatttctgctaacatc

SEQ ID NO: 20585 - DNA, 80 bp, synthetic construct
  source 1..80: mol_type = other DNA
gtaactataaggtaaaatatgatcactatcataaaataaagggtttgatgacctcaaaggaaagagaaagtgtgtctcct

SEQ ID NO: 20586 - DNA, 80 bp, synthetic construct; identical to SEQ ID NO: 9060
  source 1..80: mol_type = other DNA

SEQ ID NO: 20587 - DNA, 80 bp, synthetic construct
  source 1..80: mol_type = other DNA
aggtctagatttcaaacgatagtgtgcatacttgtctctggagcaaataaaaaagccaatgactgtgactaggcccaacc

SEQ ID NO: 20588 - DNA, 80 bp, synthetic construct
  source 1..80: mol_type = other DNA
caacctggcactctgactgtaaaacctgaatttttatacatgactcagtttcagttctgaggcttattttactgaagcat

SEQ ID NO: 20589 - DNA, 80 bp, synthetic construct; identical to SEQ ID NO: 9061
  source 1..80: mol_type = other DNA

SEQ ID NO: 20590 - DNA, 80 bp, synthetic construct
  source 1..80: mol_type = other DNA
tatcagaaaatctaatgtcaccaatgtcctataaaatattgttccaggaaggcgctatgactttctaccacaactggaag

SEQ ID NO: 20591 - DNA, 80 bp, synthetic construct
  source 1..80: mol_type = other DNA
gaagagagcctcaaggcaatacagtttgctacaaggcaaactttatttgctcctaagaattgtagctgcaataaactctg

SEQ ID NO: 20592 - DNA, 80 bp, synthetic construct
  source 1..80: mol_type = other DNA
tttttaaaacagtgagaatgcctgtagttcagtagctactgaagtaatctctcctgtgaaaaggaggaggccagcaataa

SEQ ID NO: 20593 - DNA, 80 bp, synthetic construct
  source 1..80: mol_type = other DNA
atgggaatcttgaaggtgtttgatttatagctgatgcaacagttcctttttctgttacagcagaatactaacattatgct

SEQ ID NO: 20594 - DNA, 80 bp, synthetic construct; identical to SEQ ID NO: 9062
  source 1..80: mol_type = other DNA

SEQ ID NO: 20595 - DNA, 80 bp, synthetic construct
  source 1..80: mol_type = other DNA
aaactatgtattacatggccttccttatgaaatgaggcagcttttaaaattatgtatcataggccagctgcagtggctta

SEQ ID NO: 20596 - DNA, 80 bp, synthetic construct
  source 1..80: mol_type = other DNA
ggctgaagcaggagaattgcttgaacctgggaggcagaggttgcagtgagccgaaattgtgccattgcactccagcctag

SEQ ID NO: 20597 - DNA, 80 bp, synthetic construct; identical to SEQ ID NO: 9063
  source 1..80: mol_type = other DNA

SEQ ID NO: 20598 - DNA, 80 bp, synthetic construct
  source 1..80: mol_type = other DNA
agttcgagaccagcctggccaacacggtgacaccacgtctctactaaaaatacaaaaattagccaggtgtggtggcatgc

SEQ ID NO: 20599 - DNA, 80 bp, synthetic construct
  source 1..80: mol_type = other DNA
ggtcaattaccacagtcaattccatttaaaagaaatttctgatgcaaacatatttcataaaattaaccatatggcatttt

SEQ ID NO: 20600 - DNA, 80 bp, synthetic construct
  source 1..80: mol_type = other DNA
agaaccatgtttgccatatgtttatcatctaggcatatgttgaactattgtgtatgtttaataaatacttaataagaata

SEQ ID NO: 20601 - DNA, 80 bp, synthetic construct; identical to SEQ ID NO: 9064
  source 1..80: mol_type = other DNA

SEQ ID NO: 20602 - DNA, 80 bp, synthetic construct
  source 1..80: mol_type = other DNA
atataagcataaaattagattaaatactggcagctaactgcaggccccagtcctgtaactaaagctaagaagacccctcc

SEQ ID NO: 20603 - DNA, 80 bp, synthetic construct
  source 1..80: mol_type = other DNA
attggcttagaagtgttttggctttcatatgctagacaatactttgagtaaatacagtgaaggactgtgagaaagttaaa

SEQ ID NO: 20604 - DNA, 80 bp, synthetic construct
  source 1..80: mol_type = other DNA
atactgtaaaaggaactaatccaagtattagtgtcttagaagaaaagccactgggtgcttaaaacatgggtggagatttc

SEQ ID NO: 20605 - DNA, 80 bp, synthetic construct
  source 1..80: mol_type = other DNA
tgcaacacttattcaatactttacataagttaaattgaggagattcaaagaggagctttgttctttggcctaatggaacc

SEQ ID NO: 20606 - DNA, 80 bp, synthetic construct; identical to SEQ ID NO: 9065
  source 1..80: mol_type = other DNA

SEQ ID NO: 20607 - DNA, 80 bp, synthetic construct
  source 1..80: mol_type = other DNA
cgtaggaaataggaataggttctttggaaaaactgaaggatgaataggacttgggtggataattgaatgggttcttgggt

SEQ ID NO: 20608 - DNA, 80 bp, synthetic construct
  source 1..80: mol_type = other DNA
aaaaagtgaatattgttcagatgtgcaaaagggttacacaagagtcccaaagaagtcacaggccagaagtgtagctgatg

SEQ ID NO: 20609 - DNA, 80 bp, synthetic construct; identical to SEQ ID NO: 9066
  source 1..80: mol_type = other DNA

SEQ ID NO: 20610 - DNA, 80 bp, synthetic construct
  source 1..80: mol_type = other DNA
tggccacaggaagaaaatagggaatagaattcagtaatcagaatataccacactgatgatactatcttattaccatcagt

SEQ ID NO: 20611 - DNA, 80 bp, synthetic construct
  source 1..80: mol_type = other DNA
ggcttgattaagaagctgcgaagttgccttaacattgttgttttcaaactcacactgcagacacaatgctttgcgaactt

SEQ ID NO: 20612 - DNA, 80 bp, synthetic construct
  source 1..80: mol_type = other DNA
ttttataactcacactgatcttggctacaaaaggattttggtagatgattaaactttagaaagtgaaagtaatatttagt

SEQ ID NO: 20613 - DNA, 80 bp, synthetic construct
  source 1..80: mol_type = other DNA
tatgcttcgctgtcaaattaggttcaactgataagaaaaagcaagtataagagcgagcttttgtttccttagctgtactc

SEQ ID NO: 20614 - DNA, 80 bp, synthetic construct; identical to SEQ ID NO: 9067
  source 1..80: mol_type = other DNA

SEQ ID NO: 20615 - DNA, 80 bp, synthetic construct
  source 1..80: mol_type = other DNA
tctaaaagaattgcatagaaacagtccctttcctagtgcccgctcatgagctcctttattttgtccttctctgttttcct

SEQ ID NO: 20616 - DNA, 80 bp, synthetic construct
  source 1..80: mol_type = other DNA
cccatctagagtgtatgcttgttaaacatcctgttgattcatctttttgataactgaatctttctttatcattactatta

SEQ ID NO: 20617 - DNA, 80 bp, synthetic construct
  source 1..80: mol_type = other DNA
tattttcatccttattttatatgtacagttgacattttgcacaatgcaggagttggggaaatcaacccccctctgtgtct

SEQ ID NO: 20618 - DNA, 80 bp, synthetic construct; identical to SEQ ID NO: 9068
  source 1..80: mol_type = other DNA

SEQ ID NO: 20619 - DNA, 80 bp, synthetic construct
  source 1..80: mol_type = other DNA
tccacatgtatatttagtgatcagttgtgttcttttttaaaaaaattgtcctcattcagatgtttttaaaacatgaaatt

SEQ ID NO: 20620 - DNA, 80 bp, synthetic construct
  source 1..80: mol_type = other DNA
caaatgtacttctccaacgcagatttctcccccaaactctagatcaggagttagcaaactgcagccctcaggccaaattc

SEQ ID NO: 20621 - DNA, 80 bp, synthetic construct; identical to SEQ ID NO: 9069
  source 1..80: mol_type = other DNA

SEQ ID NO: 20622 - DNA, 80 bp, synthetic construct
  source 1..80: mol_type = other DNA
ttaagcctcctattggatttattttcaacatactcagaattcagtctttcatcagccactctgctgctaacattctggct

SEQ ID NO: 20623 - DNA, 80 bp, synthetic construct
  source 1..80: mol_type = other DNA
atgtcccttctctacttcaaaccttatagtagctcctgatttcccttaaagttatagccaaaatgcctgtaatagcccag

SEQ ID NO: 20624 - DNA, 80 bp, synthetic construct
  source 1..80: mol_type = other DNA
tgcatcattttcatatccacgtaactcaccctctcagctttttcgaagtcttttctcagtgaggcatagcctggtcatct

SEQ ID NO: 20625 - DNA, 80 bp, synthetic construct; identical to SEQ ID NO: 9070
  source 1..80: mol_type = other DNA

SEQ ID NO: 20626 - DNA, 80 bp, synthetic construct
  source 1..80: mol_type = other DNA
taattgtaaatatattcaaactatgatagcactttcttatgtaagaccacttcaacttagtatctctgagattactgctt

SEQ ID NO: 20627 - DNA, 80 bp, synthetic construct
  source 1..80: mol_type = other DNA
tccacatttaagaaaatacttccccatcaaaactttgccttaacctaccctctttagaaaccagagcctgaagcaaagat

SEQ ID NO: 20628 - DNA, 80 bp, synthetic construct
  source 1..80: mol_type = other DNA
ttctcaacaaattgcaaaaagaagcagtaagtgccctgagtaggcatgttctggtaggcaggaatttctttgcaaggatt

SEQ ID NO: 20629 - DNA, 80 bp, synthetic construct
  source 1..80: mol_type = other DNA
tgctatcataccatcttaccctccagggtgcaggtgaggtgacttggcaaggatgagcatggcatgtgagaaattagacc

SEQ ID NO: 20630 - DNA, 80 bp, synthetic construct; identical to SEQ ID NO: 9071
  source 1..80: mol_type = other DNA

SEQ ID NO: 20631 - DNA, 80 bp, synthetic construct
  source 1..80: mol_type = other DNA
gcctcagactcccaagtagctaggatcacaggagtgtgctaccacgtctggctaattttttgtatttttagtagagacag

SEQ ID NO: 20632 - DNA, 80 bp, synthetic construct
  source 1..80: mol_type = other DNA
cttacaccccattagtttttttttggtcttccttgctttattatccagagtcagccaattcagggttgtgtttgcttgga

SEQ ID NO: 20633 - DNA, 80 bp, synthetic construct; identical to SEQ ID NO: 9072
  source 1..80: mol_type = other DNA

SEQ ID NO: 20634 - DNA, 80 bp, synthetic construct
  source 1..80: mol_type = other DNA
tgcttattgattatcaactccctatttcctcctcccctcccatctcacttcctacagattattaaatttactgatttatt

SEQ ID NO: 20635 - DNA, 80 bp, synthetic construct
  source 1..80: mol_type = other DNA
tttttatgtatccatcatctgaagctgctaaccagggcctcttctatcctaaaattgaaacatacaagaaggaagtgaaa

SEQ ID NO: 20636 - DNA, 80 bp, synthetic construct
  source 1..80: mol_type = other DNA
cccaaagtggcatattcaggtgctagcagtaaaagtgatttgagtaagtgcctagaatttgaccaggaagcataattcaa

SEQ ID NO: 20637 - DNA, 80 bp, synthetic construct; identical to SEQ ID NO: 9073
  source 1..80: mol_type = other DNA

SEQ ID NO: 20638 - DNA, 80 bp, synthetic construct
  source 1..80: mol_type = other DNA
aagctctctctgggtagctgtaacctagaaaactgggctctttttttccccatgttcttgtccaggagagtggtctctcc

SEQ ID NO: 20639 - DNA, 80 bp, synthetic construct
  source 1..80: mol_type = other DNA
aaccctaatcattcctgctccagctcattagtgagagcagagatttcatgtcagaagaagctagcagagaagaccagaga

SEQ ID NO: 20640 - DNA, 80 bp, synthetic construct
  source 1..80: mol_type = other DNA
cccaccaacatgcccagctaatttttgtatttttagtagagatggggtttcaccatgttagtcaggctggtctcgaactc

SEQ ID NO: 20641 - DNA, 80 bp, synthetic construct; identical to SEQ ID NO: 9074
  source 1..80: mol_type = other DNA

SEQ ID NO: 20642 - DNA, 80 bp, synthetic construct
  source 1..80: mol_type = other DNA
aacaaccacctcacaaaagaagataaaaaggtatatctcaaataaatatatgaaaagttgttcaaaattatttcatgaaa

SEQ ID NO: 20643 - DNA, 80 bp, synthetic construct
  source 1..80: mol_type = other DNA
tggtaggaatgcaaaatggcatagacaggcagttttttttaatcaaggtaaacagtcccaccatttgatccagcaaccac

SEQ ID NO: 20644 - DNA, 80 bp, synthetic construct
  source 1..80: mol_type = other DNA
aaaaagttagacaggcttgctgtcatgtgtctgcagtcctagctactcaggaggctgaagtgggaggattgttaaggcca

SEQ ID NO: 20645 - DNA, 80 bp, synthetic construct; identical to SEQ ID NO: 9075
  source 1..80: mol_type = other DNA

SEQ ID NO: 20646 - DNA, 80 bp, synthetic construct
  source 1..80: mol_type = other DNA
atgcatggattccttgtaaaaggatgagttcaacccccttgcgtctctctcttgccctctctctgccctctgctttctgc

SEQ ID NO: 20647 - DNA, 80 bp, synthetic construct
  source 1..80: mol_type = other DNA
tagagataaaaagaaatgagctattaagctatgaaagacatgaaggaaacttaaatgcatatcgttaagtgaaaaaagcc

SEQ ID NO: 20648 - DNA, 80 bp, synthetic construct
  source 1..80: mol_type = other DNA
tatgtgatattataatggtagatacgtggcatttcacattagtcaaaacacatacaactgtacagcacaaagaatgaacc

SEQ ID NO: 20649 - DNA, 80 bp, synthetic construct
  source 1..80: mol_type = other DNA
tggggaggtaagaagtgatggaatatataggagctctctgtactatctgttcaacaaaatcttaataaatgaaaaacagc

SEQ ID NO: 20650 - DNA, 80 bp, synthetic construct; identical to SEQ ID NO: 9076
  source 1..80: mol_type = other DNA

SEQ ID NO: 20651 - DNA, 80 bp, synthetic construct
  source 1..80: mol_type = other DNA
gaaggacacaaactactgaatctaactcaagaaactgaaaatctgaatctacctataataagaaatagattgaattagta

SEQ ID NO: 20652 - DNA, 80 bp, synthetic construct
  source 1..80: mol_type = other DNA
aaaacctgaaaaggcatcatgagaaaagaaagtgaaagtgacaaatcaatatctcctaaaatataggtgcaaaatcatta

SEQ ID NO: 20653 - DNA, 80 bp, synthetic construct; identical to SEQ ID NO: 9077
  source 1..80: mol_type = other DNA

SEQ ID NO: 20654 - DNA, 80 bp, synthetic construct
  source 1..80: mol_type = other DNA
aggaatctagataggaaaggaaaaaattaaactatctctaatcgaagatgacatgaccttgtatataaataatcctaagg

SEQ ID NO: 20655 - DNA, 80 bp, synthetic construct
  source 1..80: mol_type = other DNA
tttaaccaactgcagactgaaaatatttgaaaaaaaattgtactgaacatgtacagaatttttcttggtccctaaatagt

SEQ ID NO: 20656 - DNA, 80 bp, synthetic construct
  source 1..80: mol_type = other DNA
gatttgagtgtccactgatttcggtatttacatgaggtcttagaaacaattcctcatagataacaagggacaactctaca

SEQ ID NO: 20657 - DNA, 80 bp, synthetic construct; identical to SEQ ID NO: 9078
  source 1..80: mol_type = other DNA

SEQ ID NO: 20658 - DNA, 80 bp, synthetic construct
  source 1..80: mol_type = other DNA
agtaggcaaacctaaagagatagagcatagattagtggttacctaggactgtggttgtgactgctaatggatatagggtt

SEQ ID NO: 20659 - DNA, 80 bp, synthetic construct
  source 1..80: mol_type = other DNA
accacttaaataatgagtatatgacttccaaactagtacagggaacaaaaggctcaattgatccaacagaaaacaaagga

SEQ ID NO: 20660 - DNA, 80 bp, synthetic construct
  source 1..80: mol_type = other DNA
ggcatagaaagattgaaagtaagatagcaaactaaataacatgtatatattaagctagaggaaagaaaatgctgttatga

SEQ ID NO: 20661 - DNA, 80 bp, synthetic construct
  source 1..80: mol_type = other DNA
ttgctctgtcacccaggttggagtgcaatggcaggattttggctcactgcagcctccacctcccgggttcaagcgattct

SEQ ID NO: 20662 - DNA, 80 bp, synthetic construct; identical to SEQ ID NO: 9079
  source 1..80: mol_type = other DNA

SEQ ID NO: 20663 - DNA, 80 bp, synthetic construct
  source 1..80: mol_type = other DNA
accttcatagatcaagtaaacaaagatagcagaaattactagacgattaagcacatccctaaagagtttaaagaaaccca

SEQ ID NO: 20664 - DNA, 80 bp, synthetic construct
  source 1..80: mol_type = other DNA
tgtggaaagttgacctagcatttatcaaatgcctagtgtgtaccagatgttttacttctaatcctcagacaacctcatga

SEQ ID NO: 20665 - DNA, 80 bp, synthetic construct
  source 1..80: mol_type = other DNA
agtgcttaactgctcccttgaaacaagatactaaattttgagcatgggtaaatgtatgtaattctaccctaaagggaaat

SEQ ID NO: 20666 - DNA, 80 bp, synthetic construct; identical to SEQ ID NO: 9080
  source 1..80: mol_type = other DNA

SEQ ID NO: 20667 - DNA, 80 bp, synthetic construct
  source 1..80: mol_type = other DNA
tattccatcaatcttatgaaaaaggtactactatatttgacatgtcataaatgagaaaaatgaggctcagcgcagttaga

SEQ ID NO: 20668 - DNA, 80 bp, synthetic construct
  source 1..80: mol_type = other DNA
tatattttcttccattcatttttgcacttctgatccagatcacacctttatttcactcatccaatctactggacaacttt

SEQ ID NO: 20669 - DNA, 80 bp, synthetic construct; identical to SEQ ID NO: 9081
  source 1..80: mol_type = other DNA

SEQ ID NO: 20670 - DNA, 80 bp, synthetic construct
  source 1..80: mol_type = other DNA
acatgtagtctaatgcttcctgcttctcttcaagttctaagaactaacaggcaagtacttttagttgtaggtgaagttta

SEQ ID NO: 20671 - DNA, 80 bp, synthetic construct
  source 1..80: mol_type = other DNA
tttagccatgcactacatcaattataggaataatagctatgaaagactccacgttttcccttcttcccgtatctgaggtg

SEQ ID NO: 20672 - DNA, 80 bp, synthetic construct
  source 1..80: mol_type = other DNA
aaggactcagactaatactacgcaaatcacaagtttccttttactggtttaatcgttgctgataaaaggtacaaatgaaa

SEQ ID NO: 20673 - DNA, 80 bp, synthetic construct
  source 1..80: mol_type = other DNA
tggcgcaatctcggctcactgcaagctccgcctcccgggttcacgccattctcctgcctcagcctccagagtagctggga

SEQ ID NO: 20674 - DNA, 80 bp, synthetic construct; identical to SEQ ID NO: 9082
  source 1..80: mol_type = other DNA

SEQ ID NO: 20675 - DNA, 80 bp, synthetic construct
  source 1..80: mol_type = other DNA
aaacacctacttgtaactaaaaagtcactggggcttgtgtattgatgccagtaagactcattcatcattgttgatgatgt

SEQ ID NO: 20676 - DNA, 80 bp, synthetic construct
  source 1..80: mol_type = other DNA
caaaatgactttgcagacagtgagagtgaaaggtgttttattcttactattgactctcaaatttgcagtaaaccacgtgg

SEQ ID NO: 20677 - DNA, 80 bp, synthetic construct; identical to SEQ ID NO: 9083
  source 1..80: mol_type = other DNA

SEQ ID NO: 20678 - DNA, 80 bp, synthetic construct
  source 1..80: mol_type = other DNA
tactgagctctgcaaaattccccattctttgtactacataggtgacgctattattcattgtattagacggtgtctacttc

SEQ ID NO: 20679 - DNA, 80 bp, synthetic construct
  source 1..80: mol_type = other DNA
gcctaattttattagtggaaagggcactgtgtaatctagtgttctgttatccttagtcctgcctttattttacatcgtta

SEQ ID NO: 20680 - DNA, 80 bp, synthetic construct
  source 1..80: mol_type = other DNA
attccagtttattttgaatatatctagaagtctttctaactcaacttgattagtttaccctcttcaaccttgggctactc

SEQ ID NO: 20681 - DNA, 80 bp, synthetic construct
  source 1..80: mol_type = other DNA
agagaagttaactatcatgagttttaaaattctttttaccaggtaaaatgtttgctttattgggcatttccttggagttg

SEQ ID NO: 20682 - DNA, 80 bp, synthetic construct; identical to SEQ ID NO: 9084
  source 1..80: mol_type = other DNA

SEQ ID NO: 20683 - DNA, 80 bp, synthetic construct
  source 1..80: mol_type = other DNA
cctgattgtcttccctcactttttctaaggattcagttattcacatccttgtctgttatgtgtgtgctgatactattact

SEQ ID NO: 20684 - DNA, 80 bp, synthetic construct
  source 1..80: mol_type = other DNA
gtatacatgtgccatgttggtgtgctgcacccattaactcgtcatttaatattaggtatatctcctaatgctatccctcc

SEQ ID NO: 20685 - DNA, 80 bp, synthetic construct
  source 1..80: mol_type = other DNA
atgtccctgcaaaggacatgaactcatcattttttatggctgcatagtattccatggtgtatatgtgccacattttctta

SEQ ID NO: 20686 - DNA, 80 bp, synthetic construct; identical to SEQ ID NO: 9085
  source 1..80: mol_type = other DNA

SEQ ID NO: 20687 - DNA, 80 bp, synthetic construct
  source 1..80: mol_type = other DNA
atgtcttcttctgagaagtgtctgttcatgtccttcgcccactttttgatggggttgtttgtttttttcttgtaaatttg

SEQ ID NO: 20688 - DNA, 80 bp, synthetic construct
  source 1..80: mol_type = other DNA
tttgttgccattatttttggtgttttagtcatgaagtccttgcccatgcctatgtcctgaatggtattgcctaggttttc

SEQ ID NO: 20689 - DNA, 80 bp, synthetic construct; identical to SEQ ID NO: 9086
  source 1..80: mol_type = other DNA

SEQ ID NO: 20690 - DNA, 80 bp, synthetic construct
  source 1..80: mol_type = other DNA
cttggcaatgcaggctctttttggttccatatgaactttaaagtagttttttccaattctgtgaagaaagtcattggtag

SEQ ID NO: 20691 - DNA, 80 bp, synthetic construct
  source 1..80: mol_type = other DNA
ttcattgagcagtggtttgtagttagcaagagcaaatacgttcaaaagctagcaaaaggcaagaaatagctgaatcagag

SEQ ID NO: 20692 - DNA, 80 bp, synthetic construct
  source 1..80: mol_type = other DNA
gggatatcaccaccgatcccacagaaatacaaactaccatcagagaatactataaatacctctatgcaaataaactagaa

SEQ ID NO: 20693 - DNA, 80 bp, synthetic construct
  source 1..80: mol_type = other DNA
ctgaattctaccagagttacaaggaggagctggtaccattccttctgaaactattccaatcaatagaaaaagagggaatc

SEQ ID NO: 20694 - DNA, 80 bp, synthetic construct; identical to SEQ ID NO: 9087
  source 1..80: mol_type = other DNA

SEQ ID NO: 20695 - DNA, 80 bp, synthetic construct
  source 1..80: mol_type = other DNA
cacagccaatatgataccgaatgggcaaaaactggaagcattccctttgaaaactggcacaagacagggatgccctctct

SEQ ID NO: 20696 - DNA, 80 bp, synthetic construct
  source 1..80: mol_type = other DNA
tctccttcagctgataggcagcttcagcaaagtctcaggatacaaaatcaatgtgcaaaaatcacaagtattcttataca

SEQ ID NO: 20697 - DNA, 80 bp, synthetic construct; identical to SEQ ID NO: 9088
  source 1..80: mol_type = other DNA

SEQ ID NO: 20698 - DNA, 80 bp, synthetic construct
  source 1..80: mol_type = other DNA
gctatttgagtacttaaagtgtgtctagcataaactgagatgtgttgtaagtacaaaatacatgctgagtttcaaagatg

SEQ ID NO: 20699 - DNA, 80 bp, synthetic construct
  source 1..80: mol_type = other DNA
gaaaatgatacagaaaatttcaacaagaaacaaaattagttttaatgctcttattggtctcccagtaattttattcctgg

SEQ ID NO: 20700 - DNA, 80 bp, synthetic construct
  source 1..80: mol_type = other DNA
tagtaaaatctatacgtacatcacatataatgaccacaagtatacagtgatagcatgcgcatgtgaatgcacacacactg

SEQ ID NO: 20701 - DNA, 80 bp, synthetic construct
  source 1..80: mol_type = other DNA
gggactacaggcgcccaccactacgcccggctaattttttgtatttttagtagacacggggtttcaccattttagccggg

SEQ ID NO: 20702 - DNA, 80 bp, synthetic construct; identical to SEQ ID NO: 9089
  source 1..80: mol_type = other DNA

SEQ ID NO: 20703 - DNA, 80 bp, synthetic construct
  source 1..80: mol_type = other DNA
aaaataatgtattacaaagaaactagcataccttgtgtattaggctgcttgggctggcataacaaaataccatatactgg

SEQ ID NO: 20704 - DNA, 80 bp, synthetic construct
  source 1..80: mol_type = other DNA
tcttgctatgtagggggtgggcaggagatcttcttaaaagaccaccaattctgttagattagggccccacctttatgatc

SEQ ID NO: 20705 - DNA, 80 bp, synthetic construct; identical to SEQ ID NO: 9090
  source 1..80: mol_type = other DNA

SEQ ID NO: 20706 - DNA, 80 bp, synthetic construct
  source 1..80: mol_type = other DNA
attgccttctttgggaataatcaagttattttttgatttttctctattttttcagttacaagcttttgtattcttatgat

SEQ ID NO: 20707 - DNA, 80 bp, synthetic construct
  source 1..80: mol_type = other DNA
caaattgacatttcagctccaattttactctttgatgtctgttctgtgaaaatgagaatgggcctaggtctgccttagtt

SEQ ID NO: 20708 - DNA, 80 bp, synthetic construct
  source 1..80: mol_type = other DNA
agatacagcaagaggacccaactttttttcctaacaatcccactctcagaataacgaacctactcctgcagtaacatcac

SEQ ID NO: 20709 - DNA, 80 bp, synthetic construct
  source 1..80: mol_type = other DNA
gggcctataaactgttttctttgccagttgtggatgttaaactttgatagaagtgctgagaaaagtcattactggaggag

SEQ ID NO: 20710 - DNA, 80 bp, synthetic construct; identical to SEQ ID NO: 9091
  source 1..80: mol_type = other DNA

SEQ ID NO: 20711 - DNA, 80 bp, synthetic construct
  source 1..80: mol_type = other DNA
gctcacctgtgtcctgcaagtttgtttcctgtgatcctcttattgcagataccatgagtttattagtcagggttctctag

SEQ ID NO: 20712 - DNA, 80 bp, synthetic construct
  source 1..80: mol_type = other DNA
agtctagccttttcacatttttctgcctgctttatatttgctggcagctgattagatggtacccacccagattaagggtg

SEQ ID NO: 20713 - DNA, 80 bp, synthetic construct
  source 1..80: mol_type = other DNA
tatatctttacacctgcctacaaccatcagcttgcctgaatgaacagaagttctttccttttttgtttggctcctatggg

SEQ ID NO: 20714 - DNA, 80 bp, synthetic construct; identical to SEQ ID NO: 9092
  source 1..80: mol_type = other DNA

SEQ ID NO: 20715 - DNA, 80 bp, synthetic construct
  source 1..80: mol_type = other DNA
cacttattttcaaacattgtctatgacagaacacagtaattttgagagctgggaactcaccaggagaactctatgatttc

SEQ ID NO: 20716 - DNA, 80 bp, synthetic construct
  source 1..80: mol_type = other DNA
agacccatagaggatttcagttgaatcttcagttgagtatttatcagtgtacatttgagaagaaactctgagtctgagta

SEQ ID NO: 20717 - DNA, 80 bp, synthetic construct; identical to SEQ ID NO: 9093
  source 1..80: mol_type = other DNA

SEQ ID NO: 20718 - DNA, 80 bp, synthetic construct
  source 1..80: mol_type = other DNA
aacagaaaaatcaatcaaaacaaactggaaagtgatgcagatgaaagcgcagacaaggactttaaaaatatataactaag

SEQ ID NO: 20719 - DNA, 80 bp, synthetic construct
  source 1..80: mol_type = other DNA
ggctgaggcaggagaatggcgtgaacccgggaggcggagcttgcagtgagctgagatcgcgccactggactccagcctgg

SEQ ID NO: 20720 - DNA, 80 bp, synthetic construct
  source 1..80: mol_type = other DNA
ttctggagataaaatctgcaaagtctgggatgaaaagtttactggaagggattaacagaagactaggtactgtagaaaga

SEQ ID NO: 20721 - DNA, 80 bp, synthetic construct
  source 1..80: mol_type = other DNA
gtaataaaggctagaaagaatcctctgaccttctgtcccaatgcaggtcataaaacttagaaataatattctcacctttc

SEQ ID NO: 20722 - DNA, 80 bp, synthetic construct; identical to SEQ ID NO: 9094
  source 1..80: mol_type = other DNA

SEQ ID NO: 20723 - DNA, 80 bp, synthetic construct
  source 1..80: mol_type = other DNA
tttattgttaaagctggtcagggactctaagaaggtcaaggaaaatctgcttcccctacacaattaaaatatccaaaatg

SEQ ID NO: 20724 - DNA, 80 bp, synthetic construct
  source 1..80: mol_type = other DNA
aaaaattataaacctacagatgcaagaagtgaaatgaactcaaagaacaagaaacaagaccaggaaaactacatcaggac

SEQ ID NO: 20725 - DNA, 80 bp, synthetic construct
  source 1..80: mol_type = other DNA
tggaggaacaaagacaaggatgacaacccatttctcatctgaaacaatgcaagcaagaagacaagtaagcagtatcttta

SEQ ID NO: 20726 - DNA, 80 bp, synthetic construct; identical to SEQ ID NO: 9095
  source 1..80: mol_type = other DNA

SEQ ID NO: 20727 - DNA, 80 bp, synthetic construct
  source 1..80: mol_type = other DNA
tctgtaagtgctcagtatagatacagccattgtaggcctaactacatagtacaggtcagcaacagtgttaacattttctg

SEQ ID NO: 20728 - DNA, 80 bp, synthetic construct
  source 1..80: mol_type = other DNA
aaaatataacaacatattcaggggtttgtaatatatgtagaaatcaaatatatgacaacaatagaacaaaatctagtgag

SEQ ID NO: 20729 - DNA, 80 bp, synthetic construct
  source 1..80: mol_type = other DNA
ggagataaaatggaaccttaaaaaaataatttatacaacgagttagaaaaaagaatggaataaggaacatgggggaaatt

SEQ ID NO: 20730 - DNA, 80 bp, synthetic construct; identical to SEQ ID NO: 9096
  source 1..80: mol_type = other DNA

SEQ ID NO: 20731 - DNA, 80 bp, synthetic construct
  source 1..80: mol_type = other DNA
gcccttaaaaatagatgaagcaaaaacagaattgaaagaactatgcaaacccacaattgtagttggaaattaacacctac

SEQ ID NO: 20732 - DNA, 80 bp, synthetic construct
  source 1..80: mol_type = other DNA
tgtaaaataaaatgccaataaattaaaaagaatcaacaagtatgtccactgaacataatgaaattgaattagaaatcaat

SEQ ID NO: 20733 - DNA, 80 bp, synthetic construct; identical to SEQ ID NO: 9097
  source 1..80: mol_type = other DNA

SEQ ID NO: 20734 - DNA, 80 bp, synthetic construct
  source 1..80: mol_type = other DNA
gaaaaaaaaggaaaaaacagaaattaccactatttggaggagaagtgacaccactagagtttctatacacatttaaaaaa

SEQ ID NO: 20735 - DNA, 80 bp, synthetic construct
  source 1..80: mol_type = other DNA
tactttcaaaagtttccttgagccccacctccttctttgtggtaacaacacttagcataagatctacattcttagcaaat

SEQ ID NO: 20736 - DNA, 80 bp, synthetic construct
  source 1..80: mol_type = other DNA
gccattcttagcatgatgaaattcatatgcaaataaaccaataaactccagaatacagtattccactgccctaatcaccc

SEQ ID NO: 20737 - DNA, 80 bp, synthetic construct; identical to SEQ ID NO: 9098
  source 1..80: mol_type = other DNA

SEQ ID NO: 20738 - DNA, 80 bp, synthetic construct
  source 1..80: mol_type = other DNA
agagagaatccttgtttcttcttcaggctttagagcagagttcctgatagaactttctgcaattgtggaaaaattttata

SEQ ID NO: 20739 - DNA, 80 bp, synthetic construct
  source 1..80: mol_type = other DNA
ctctagaggttgttgatgtgatctcccccagagcaaatattctcttattttagtagataggaaatggatttgatccagta

SEQ ID NO: 20740 - DNA, 80 bp, synthetic construct
  source 1..80: mol_type = other DNA
tgtttgtttcttgccccatgcaatttaagagtcaacaaatgctttgagggaaacagtggcacaaggtttcaagctcactt

SEQ ID NO: 20741 - DNA, 80 bp, synthetic construct
  source 1..80: mol_type = other DNA
gatgtggagatcctcataggattcgtctgtaaaatattacatataaagtggctatttcgctgacaatatatgtttcctct

SEQ ID NO: 20742 - DNA, 80 bp, synthetic construct; identical to SEQ ID NO: 9099
  source 1..80: mol_type = other DNA

SEQ ID NO: 20743 - DNA, 80 bp, synthetic construct
  source 1..80: mol_type = other DNA
actttctgaaatccaggccttgtgctgtcactttactgctttatacctctcagtcattccccattacccataggaaaaag

SEQ ID NO: 20744 - DNA, 80 bp, synthetic construct
  source 1..80: mol_type = other DNA
atatctgtcacattcttctatttttgtcatttgctactctttctcttaaatgctctttcttcctcctttcccagaagaaa

SEQ ID NO: 20745 - DNA, 80 bp, synthetic construct; identical to SEQ ID NO: 9100
  source 1..80: mol_type = other DNA

SEQ ID NO: 20746 - DNA, 80 bp, synthetic construct
  source 1..80: mol_type = other DNA
tcacatcttgcgccaatcctggatatcataaatgatattgtcatttttaagcccaacaaagttttttttatactcccttc

SEQ ID NO: 20747 - DNA, 80 bp, synthetic construct
  source 1..80: mol_type = other DNA
gctgactctcagcttaggggagtaaattttcttgaataattgaggtcagaggtatttgggttacttcttagatgaaggtt

SEQ ID NO: 20748 - DNA, 80 bp, synthetic construct
  source 1..80: mol_type = other DNA
actttgcaaaacaggcactgcttgtgcgtgaagcagtggaaagatgaggtcttagtacacatcatgtaaggttttttaaa

SEQ ID NO: 20749 - DNA, 80 bp, synthetic construct; identical to SEQ ID NO: 9101
  source 1..80: mol_type = other DNA

SEQ ID NO: 20750 - DNA, 80 bp, synthetic construct
  source 1..80: mol_type = other DNA
tgttctcttcctagctcctaatactggagaaagcaacagagaattttttccaatggataccttactccataaagacaatc

SEQ ID NO: 20751 - DNA, 80 bp, synthetic construct
  source 1..80: mol_type = other DNA
gccagtatccaggctcttgacaccattgtgagaaggaatttaaagatgagtcagaacatagtgaaagcatggagatttat

SEQ ID NO: 20752 - DNA, 80 bp, synthetic construct
  source 1..80: mol_type = other DNA
acctttatgaatttcttcaaccaaggggtggaataattcctgaaaaaaggtagagagttcttggaactttggtgccaccc

SEQ ID NO: 20753 - DNA, 80 bp, synthetic construct; identical to SEQ ID NO: 9102
  source 1..80: mol_type = other DNA

SEQ ID NO: 20754 - DNA, 80 bp, synthetic construct
  source 1..80: mol_type = other DNA
gctgtatactaaatgggaaaggctttatatttactgcaaaaacagcatttgtacattgtaacatataagccactgatcag

SEQ ID NO: 20755 - DNA, 80 bp, synthetic construct
  source 1..80: mol_type = other DNA
agaaactgcgataattcttcttgggaagtgagaatctctattacccacctcccattgagactcactagtgttgttttcga

SEQ ID NO: 20756 - DNA, 80 bp, synthetic construct
  source 1..80: mol_type = other DNA
cacaacattgcacagatgatgctaaacgtaccagtttggactttgtactttgaatttggcactggaaggtgaaacactat

SEQ ID NO: 20757 - DNA, 80 bp, synthetic construct; identical to SEQ ID NO: 9103
  source 1..80: mol_type = other DNA

SEQ ID NO: 20758 - DNA, 80 bp, synthetic construct
  source 1..80: mol_type = other DNA
gagccctaatatgtgtcaatattgacagttgtcagatgagaaattttctcatggaaatagacttagtcatttaacataaa

SEQ ID NO: 20759 - DNA, 80 bp, synthetic construct
  source 1..80: mol_type = other DNA
gtctaagcttctctaagcctttgtagagagctgactttttgaggtgccaacattccatacttgctgatcaaatgaaaagc

SEQ ID NO: 20760 - DNA, 80 bp, synthetic construct
  source 1..80: mol_type = other DNA
ttggccatttgaaatcaggaaatataaatttccccaagtcaaatctgagagacagagctcactcgaaggttctttaacat

SEQ ID NO: 20761 - DNA, 80 bp, synthetic construct; identical to SEQ ID NO: 9104
  source 1..80: mol_type = other DNA

SEQ ID NO: 20762 - DNA, 80 bp, synthetic construct
  source 1..80: mol_type = other DNA
ataatacaatgtgttgacaagtctatgtggaaactagcattcttatacagatacctggttactaggcacataaaatggtg

SEQ ID NO: 20763 - DNA, 80 bp, synthetic construct
  source 1..80: mol_type = other DNA
cttgcaatactgttgaagcagaaaaggcaaactagatgtttaatcaatgtgggactggcaaaattaactgtgatttatcc

SEQ ID NO: 20764 - DNA, 80 bp, synthetic construct
  source 1..80: mol_type = other DNA
aaatatttctggaagggtacataggaaactgctatactgctgcttctaggaagggaaactgaggcctggaatgggaaagt

SEQ ID NO: 20765 - DNA, 80 bp, synthetic construct; identical to SEQ ID NO: 9105
  source 1..80: mol_type = other DNA

SEQ ID NO: 20766 - DNA, 80 bp, synthetic construct
  source 1..80: mol_type = other DNA
atcctggccaacatggtgaaaccctgtctctactaaaaatacaaaaattaggtgggcgtggtggcacgtgcctgtagtcc

SEQ ID NO: 20767 - DNA, 80 bp, synthetic construct
  source 1..80: mol_type = other DNA
gcctttccttcctggtcttctagacaaataataataacaatgtggtttggcagaaatgcatttagttgtcatatactttc

SEQ ID NO: 20768 - DNA, 80 bp, synthetic construct
  source 1..80: mol_type = other DNA
ggccaggattcccagtaaggacaatagaaaagcccacccttcactgagcttgtaattaggttgatattaagttgacacac

SEQ ID NO: 20769 - DNA, 80 bp, synthetic construct
  source 1..80: mol_type = other DNA
agattaaaaatttaacatttctgtttgaaattttgtttaattgtttgggtttctttgaaaagaaatttttccattaaaga

SEQ ID NO: 20770 - DNA, 80 bp, synthetic construct; identical to SEQ ID NO: 9106
  source 1..80: mol_type = other DNA

SEQ ID NO: 20771 - DNA, 80 bp, synthetic construct
  source 1..80: mol_type = other DNA
tgattaaaataacaacatgaaaacaccatgaatatccaacagtaggagactggtttaaaagtagaggaaaggtcaagtag

SEQ ID NO: 20772 - DNA, 80 bp, synthetic construct
  source 1..80: mol_type = other DNA
agccaagctggaatagatattcccacctgcaaagtcctgaatgatacttttggaactgtatggtggaccaaattataaga

SEQ ID NO: 20773 - DNA, 80 bp, synthetic construct
  source 1..80: mol_type = other DNA
gagaaagctatttatataatgcaacctgaggggtgacagaaacaatgacagaaactcatgaccaatcagttattgcaatc

SEQ ID NO: 20774 - DNA, 80 bp, synthetic construct; identical to SEQ ID NO: 9107
  source 1..80: mol_type = other DNA

SEQ ID NO: 20775 - DNA, 80 bp, synthetic construct
  source 1..80: mol_type = other DNA
cctgagtcccaattcctgagtgagccagctggcttttccctcactttctttgagaacttgctcaagcaccttgtcagtga

SEQ ID NO: 20776 - DNA, 80 bp, synthetic construct
  source 1..80: mol_type = other DNA
cgagggtaggagattgcctgatattgtctgtttttttcacccctttacttatttcaacagcaggcacaaagtggacattt

SEQ ID NO: 20777 - DNA, 80 bp, synthetic construct
  source 1..80: mol_type = other DNA
atgtctagcacagtgcaaaatagaattatgtactctattaaaactcgtgtctcaagcatggtaggtatccacgctagaca

SEQ ID NO: 20778 - DNA, 80 bp, synthetic construct
  source 1..80: mol_type = other DNA
ctcatttatttactgaatgcatctctacttctctcctttctcagggctgtttttgtctgcaccgtttatttgacatttct

SEQ ID NO: 20779 - DNA, 80 bp, synthetic construct; identical to SEQ ID NO: 9108
  source 1..80: mol_type = other DNA

SEQ ID NO: 20780 - DNA, 80 bp, synthetic construct
  source 1..80: mol_type = other DNA
atagcatcctctgaaagcagaatgtgaacgagaaaactctcataagattttttttctaagtttgagttagttcgttcctt

SEQ ID NO: 20781 - DNA, 80 bp, synthetic construct
  source 1..80: mol_type = other DNA
tttcagtatacataatactaaggggtaggaacgctatttgcaatgactggttgcctgaagcaatgctaacctcatttctg

SEQ ID NO: 20782 - DNA, 80 bp, synthetic construct; identical to SEQ ID NO: 9109
  source 1..80: mol_type = other DNA

SEQ ID NO: 20783 - DNA, 80 bp, synthetic construct
  source 1..80: mol_type = other DNA
atgtacttttgctgaaaaaaaaaatgcagtcagagtccaatttggggatatgctaaaagcacataattggggaagcttgt

SEQ ID NO: 20784 - DNA, 80 bp, synthetic construct
  source 1..80: mol_type = other DNA
acccagttgctaatggtctgattagctggaacaatttctatctagagtgtgccagaaacaatctgaaagtgatcagaata

SEQ ID NO: 20785 - DNA, 80 bp, synthetic construct
  source 1..80: mol_type = other DNA
ctctcacccagatacagacatctgtttgctcttagcactattgtttctttctgggcttgccaactttgtcactttaaatg

SEQ ID NO: 20786 - DNA, 80 bp, synthetic construct; identical to SEQ ID NO: 9110
  source 1..80: mol_type = other DNA

SEQ ID NO: 20787 - DNA, 80 bp, synthetic construct
  source 1..80: mol_type = other DNA
caatttaaaaattaacctcaagccagtttagagatgtatgtactgtaatttatgtattataaaagttataatgtatattt

SEQ ID NO: 20788 - DNA, 80 bp, synthetic construct
  source 1..80: mol_type = other DNA
gctaaagacagctgagaactaaatatctgccattaagtccccagagctcatatcagaaatggcatgttgtcctcatagag

SEQ ID NO: 20789 - DNA, 80 bp, synthetic construct
  source 1..80: mol_type = other DNA
cccaatcagaagtatgtgtgtgtgttgaatttaaagcaatacattaaaccttcttttctttctagagtaacagaactaac

SEQ ID NO: 20790 - DNA, 80 bp, synthetic construct; identical to SEQ ID NO: 9111
  source 1..80: mol_type = other DNA

SEQ ID NO: 20791 - DNA, 80 bp, synthetic construct
  source 1..80: mol_type = other DNA
taatgttgcaggaactgacatttacttataaaaggaatacttagtaatgatgacaaagtaatgatgctctctggactaga

SEQ ID NO: 20792 - DNA, 80 bp, synthetic construct
  source 1..80: mol_type = other DNA
caagagtgtatgtctaacatgtgatttggtcggactggcctcctgtggactatctttgactgactcatatggttcattcc

SEQ ID NO: 20793 - DNA, 80 bp, synthetic construct
  source 1..80: mol_type = other DNA
ctcctactctgttttgaggcggggaggtgaagcaaccaggatatattaaataactataccagagagaagaaaatgctgca

SEQ ID NO: 20794 - DNA, 80 bp, synthetic construct
  source 1..80: mol_type = other DNA
tatacttttaaagaaaagcaaaatctataaaaaggggcctcatttctcagatgtggtctttgagattatccctctacact

SEQ ID NO: 20795 - DNA, 80 bp, synthetic construct; identical to SEQ ID NO: 9112
  source 1..80: mol_type = other DNA

SEQ ID NO: 20796 - DNA, 80 bp, synthetic construct
  source 1..80: mol_type = other DNA
tgctggcttttctctctgacactagtgccttctcatttagacttgcttttatctcatgttccaatcatgactggcttgat

SEQ ID NO: 20797 - DNA, 80 bp, synthetic construct
  source 1..80: mol_type = other DNA
tcctgatatctcctggccaggacatgtgggaccacactgccatcacctgggacctttacaccttgttttatccaagtaaa

SEQ ID NO: 20798 - DNA, 80 bp, synthetic construct
  source 1..80: mol_type = other DNA
tttgccccaaatggttcatacatgtttaatatgtttttcacttagctctaagccatcagtttcagtcatgttttctggta

SEQ ID NO: 20799 - DNA, 80 bp, synthetic construct; identical to SEQ ID NO: 9113
  source 1..80: mol_type = other DNA

SEQ ID NO: 20800 - DNA, 80 bp, synthetic construct
  source 1..80: mol_type = other DNA
aatataagcatattaattcaccccaatgctgaggtgagtaaagctggagattttcacatcttcacagcaagagagcaatt

SEQ ID NO: 20801 - DNA, 80 bp, synthetic construct
  source 1..80: mol_type = other DNA
attgttgaacatgaatatcaacaaataggttgtagtaaaattactttagttataaaactacattatattgtgatttcatt

SEQ ID NO: 20802 - DNA, 80 bp, synthetic construct
  source 1..80: mol_type = other DNA
gaacacatttcaaagtttggtcatttaaaaagcagttctctttagtactactccttcatatttaggatacaagagaatat

SEQ ID NO: 20803 - DNA, 80 bp, synthetic construct; identical to SEQ ID NO: 9114
  source 1..80: mol_type = other DNA

SEQ ID NO: 20804 - DNA, 80 bp, synthetic construct
  source 1..80: mol_type = other DNA
ttagtgagtgtcaccgagtctgaagtgttttaaaaaaacttaccgtatatatttagggtttaatacatgatgtttagata

SEQ ID NO: 20805 - DNA, 80 bp, synthetic construct
  source 1..80: mol_type = other DNA
attaggtctctagatgtgttcatcctacctatctggtactttataacctttgacttacattttcccactcacctcctaat

SEQ ID NO: 20806 - DNA, 80 bp, synthetic construct; identical to SEQ ID NO: 9115
  source 1..80: mol_type = other DNA

SEQ ID NO: 20807 - DNA, 80 bp, synthetic construct
  source 1..80: mol_type = other DNA
attaaccccatatcagacacatggctcacaaatattttctcattacatatgctgtctttttactgttgattgtttccttt

SEQ ID NO: 20808 - DNA, 80 bp, synthetic construct
  source 1..80: mol_type = other DNA
ttttgagttaatttttgtgtattgtctaaggtaaggtgctaactttattatttcgctggtggatgttcagttttcccaac

SEQ ID NO: 20809 - DNA, 80 bp, synthetic construct; identical to SEQ ID NO: 9116
  source 1..80: mol_type = other DNA

SEQ ID NO: 20810 - DNA, 80 bp, synthetic construct
  source 1..80: mol_type = other DNA
ctgggtagtgtggatgttttaataagattaagactttgaatccataaacgcagggtttctttgcgtttttgtatgtcttc

SEQ ID NO: 20811 - DNA, 80 bp, synthetic construct
  source 1..80: mol_type = other DNA
tatatagaaacacaactgattttttgtgtgctaattttatatactgtaactttgctaaatcgtttattagttctagcagt

SEQ ID NO: 20812 - DNA, 80 bp, synthetic construct
  source 1..80: mol_type = other DNA
gtttcccagggaagccaaaggacctgtcaaagagacagatatgtagtaaatagtcacaaaatttttgaatgcatgcttgc

SEQ ID NO: 20813 - DNA, 80 bp, synthetic construct; identical to SEQ ID NO: 9117
  source 1..80: mol_type = other DNA

SEQ ID NO: 20814 - DNA, 80 bp, synthetic construct
  source 1..80: mol_type = other DNA
aggaaaacatccccgactctgagctatatgcatgcttttgaccttgcgtatgcttctgagattcactgtaccacacactt

SEQ ID NO: 20815 - DNA, 80 bp, synthetic construct
  source 1..80: mol_type = other DNA
ttgaatattatagaagctaatagaggtgaggattaagaaggaggggctactagttggtaccatatgtaggaaatgattca

SEQ ID NO: 20816 - DNA, 80 bp, synthetic construct
  source 1..80: mol_type = other DNA
ttattgataatacgtctaatattgaatatctaatatgaaatatatgtggagggcattttccctccttccaggttcccatc

SEQ ID NO: 20817 - DNA, 80 bp, synthetic construct
  source 1..80: mol_type = other DNA
gtaaatttgatcctatagtgtggcttttatggaaggcagtcttcaccacagaccttgatgaaagactatgcttatcacat

SEQ ID NO: 20818 - DNA, 80 bp, synthetic construct; identical to SEQ ID NO: 9118
  source 1..80: mol_type = other DNA

SEQ ID NO: 20819 - DNA, 80 bp, synthetic construct
  source 1..80: mol_type = other DNA
gttctgcagtcaaactcttagttcaaagctcattccaccccttaatcctataagatgagcaaaattacttaatttcagtt

SEQ ID NO: 20820 - DNA, 80 bp, synthetic construct
  source 1..80: mol_type = other DNA
ccaaattagaacagagagccatttgttaagattgttaataaaacctattgtatttatttcctactccatgccaggtgctg

SEQ ID NO: 20821 - DNA, 80 bp, synthetic construct; identical to SEQ ID NO: 9119
  source 1..80: mol_type = other DNA

SEQ ID NO: 20822 - DNA, 80 bp, synthetic construct
  source 1..80: mol_type = other DNA
aaagagtacaccaaatatggtttctctaaaatagccctgggttctcaaaaggaataactgaccttggtgcaaaagttgaa

SEQ ID NO: 20823 - DNA, 80 bp, synthetic construct
  source 1..80: mol_type = other DNA
atcaaaagagacaaggcaatgtctggaagataaaacggtaagatgaaagaaatttctggatggccaggggtcaaggtaga

SEQ ID NO: 20824 - DNA, 80 bp, synthetic construct
  source 1..80: mol_type = other DNA
cagaactttcacaactgtggtttccatggccgctcaacttgaattcaatgtctctgattttggaaacctaacatttgacc

SEQ ID NO: 20825 - DNA, 80 bp, synthetic construct; identical to SEQ ID NO: 9120
  source 1..80: mol_type = other DNA

SEQ ID NO: 20826 - DNA, 80 bp, synthetic construct
  source 1..80: mol_type = other DNA
actgtctcacattcatcagaatggctattattaaaaagccaaaaaataacagatgttgggggggttgcagagaaaaggga

SEQ ID NO: 20827 - DNA, 80 bp, synthetic construct
  source 1..80: mol_type = other DNA
ggtttatcacagcattattcacaatagcaaagacatggagtctactcagcccaatagtggaatggataaagaaaatgtgg

SEQ ID NO: 20828 - DNA, 80 bp, synthetic construct
  source 1..80: mol_type = other DNA
gggtacacatgcacatgaagatgggaacaataggcactgggaactccaaaagaagagaggggaagcagataagggttgaa

SEQ ID NO: 20829 - DNA, 80 bp, synthetic construct; identical to SEQ ID NO: 9121
  source 1..80: mol_type = other DNA

SEQ ID NO: 20830 - DNA, 80 bp, synthetic construct
  source 1..80: mol_type = other DNA
tcaaaatctaaaatattgcatacacacacaaaaaataggtttcagtccttggaaagagatggtgcttgcttcgtgggtta

SEQ ID NO: 20831 - DNA, 80 bp, synthetic construct
  source 1..80: mol_type = other DNA
attttacatgtgaagaactgaggcttatgaaggtcaaatacagtgtcaaaaaatctaaggcatctgacattgggataatg

SEQ ID NO: 20832 - DNA, 80 bp, synthetic construct
  source 1..80: mol_type = other DNA
ataatgttaaaaatacttgttcaaggtcgccgtggaagagctgaaatatagtggagatctgcctgcctgcagagcccaaa

SEQ ID NO: 20833 - DNA, 80 bp, synthetic construct
  source 1..80: mol_type = other DNA
agactggttccttatatagtggaaaaacgggcaaacaatcattgcagaaggaaacacttattatggatttgggaaaagag

SEQ ID NO: 20834 - DNA, 80 bp, synthetic construct; identical to SEQ ID NO: 9122
  source 1..80: mol_type = other DNA

SEQ ID NO: 20835 - DNA, 80 bp, synthetic construct
  source 1..80: mol_type = other DNA
ctggttttttattgggggcaagatttggaaagatttctgaagtgctatgtttttatccccaggtaggagcaaactatgca

SEQ ID NO: 20836 - DNA, 80 bp, synthetic construct
  source 1..80: mol_type = other DNA
tttctgtttcctaaaatgcctaataaaatgctttcacaaattctgcatgtccagagtcagtgacataaggcacactggtt

SEQ ID NO: 20837 - DNA, 80 bp, synthetic construct; identical to SEQ ID NO: 9123
  source 1..80: mol_type = other DNA

SEQ ID NO: 20838 - DNA, 80 bp, synthetic construct
  source 1..80: mol_type = other DNA
agaggctctgtccctcaggagataacatatttggactcagtctaggaagttaacacaaaccacattttagtacctgaaac

SEQ ID NO: 20839 - DNA, 80 bp, synthetic construct
  source 1..80: mol_type = other DNA
gataaaatggcgataaggacctttcccttaaagggttgtcataagatgagaaagattgtatataaagctcccagtgagtg

SEQ ID NO: 20840 - DNA, 80 bp, synthetic construct
  source 1..80: mol_type = other DNA
attggcaccaagatattctagctccagagaccacagaattaaccactgcttttcagaactggccttagtatagagaggag

SEQ ID NO: 20841 - DNA, 80 bp, synthetic construct; identical to SEQ ID NO: 9124
  source 1..80: mol_type = other DNA

SEQ ID NO: 20842 - DNA, 80 bp, synthetic construct
  source 1..80: mol_type = other DNA
catcatttagctctcacttatacgtgagaacatgtggtatttggttttgtgttcctgtgttagtttactgagaaaaatgg

SEQ ID NO: 20843 - DNA, 80 bp, synthetic construct
  source 1..80: mol_type = other DNA
aggaagagaggaagtcaaactgtccatgcttgaagatgacttgattctatacctagaaaatcccataggctcagcccaaa

SEQ ID NO: 20844 - DNA, 80 bp, synthetic construct
  source 1..80: mol_type = other DNA
ctggtatccttctaacacaacttattttatgttcctgcttaaaatccattaagggtcaagtgcaaactctgcctctctct

SEQ ID NO: 20845 - DNA, 80 bp, synthetic construct; identical to SEQ ID NO: 9125
  source 1..80: mol_type = other DNA

SEQ ID NO: 20846 - DNA, 80 bp, synthetic construct
  source 1..80: mol_type = other DNA
cacttgacattttttgacttctgtttgtctcacccttggctccagttatatcctttttcttctaaatcacatatttaaat

SEQ ID NO: 20847 - DNA, 80 bp, synthetic construct
  source 1..80: mol_type = other DNA
ttcctccttcttccaactatccagccttccacctgttgtaaaattaggttccttctggtacctaaaattctatctaagag

SEQ ID NO: 20848 - DNA, 80 bp, synthetic construct
  source 1..80: mol_type = other DNA
aataaaattaattaaaaaggcacacattaaataatgctgcatattctgtatattcattggagtaaagagggcgagattaa

SEQ ID NO: 20849 - DNA, 80 bp, synthetic construct; identical to SEQ ID NO: 9126
  source 1..80: mol_type = other DNA

SEQ ID NO: 20850 - DNA, 80 bp, synthetic construct
  source 1..80: mol_type = other DNA
ccctggcctctggaagaaaatcttttcagcatgaaggattgaagcaaaaggtatttttggtcaaatacttagtcaaccag

SEQ ID NO: 20851 - DNA, 80 bp, synthetic construct
  source 1..80: mol_type = other DNA
tacttatttctacattaaaaatttcccctataccaagtcagtgctaactcatgacaaggccttagcaagttatttagctt

SEQ ID NO: 20852 - DNA, 80 bp, synthetic construct
  source 1..80: mol_type = other DNA
tcagagttatagacaaacatttgtgaccttaaagacacttataccaggttggtgaattccatcataactcccctccagga

SEQ ID NO: 20853 - DNA, 80 bp, synthetic construct; identical to SEQ ID NO: 9127
  source 1..80: mol_type = other DNA

SEQ ID NO: 20854 - DNA, 80 bp, synthetic construct
  source 1..80: mol_type = other DNA
caaagtgtgctctcctaagataatcagagtggccgtaggggaaaaaataaccatagagtttataccttctgccacattaa

SEQ ID NO: 20855 - DNA, 80 bp, synthetic construct
  source 1..80: mol_type = other DNA
gtcatgtaacggtgagttgcttccttgacataatagttaattcaggcttttatcctttcgtctattttttagtttaccac

SEQ ID NO: 20856 - DNA, 80 bp, synthetic construct
  source 1..80: mol_type = other DNA
agtactatgtgggtactcagcctctgatgcgttaatgtttgttaagagaacgttattcaatctttcttcaattcctgaga

SEQ ID NO: 20857 - DNA, 80 bp, synthetic construct
  source 1..80: mol_type = other DNA
gcaggtcattggagtattctagaacctgggggtcctgcttcactactgatgtcatctcacccctaaaatcatatcatgag

SEQ ID NO: 20858 - DNA, 80 bp, synthetic construct; identical to SEQ ID NO: 9128
  source 1..80: mol_type = other DNA

SEQ ID NO: 20859 - DNA, 80 bp, synthetic construct
  source 1..80: mol_type = other DNA
tcttcttttgaaaagtgtctattcatgtcctttgtccatttttaatggggttgttttttgcttgctgatttaagttcctt

SEQ ID NO: 20860 - DNA, 80 bp, synthetic construct
  source 1..80: mol_type = other DNA
acagtcattaattatttgccaaggctgatgtctagaatagtattccctaggttttcttgtaaggcttttattgtgttagg

SEQ ID NO: 20861 - DNA, 80 bp, synthetic construct; identical to SEQ ID NO: 9129
  source 1..80: mol_type = other DNA

SEQ ID NO: 20862 - DNA, 80 bp, synthetic construct
  source 1..80: mol_type = other DNA
atatacattttggaattttttttctaattctgtgataaatgacattggtagtttgataggaatagtaattgctttgggca

SEQ ID NO: 20863 - DNA, 80 bp, synthetic construct
  source 1..80: mol_type = other DNA
gctattgtaaatgggattgtgttcttaatttggctttagtttggacattattggtggatacaagtgctactgatgtttat

SEQ ID NO: 20864 - DNA, 80 bp, synthetic construct
  source 1..80: mol_type = other DNA
ctttcaattcctttagatccagaagtgtgattgcaagatcatatggtaatgtttaaggaacctacatagtggttccataa

SEQ ID NO: 20865 - DNA, 80 bp, synthetic construct
  source 1..80: mol_type = other DNA
ttgatgattagagatgttgagcttttttttttcatatatctgttggccgtttgtatgttttcctttgagaagtgtctgtt

SEQ ID NO: 20866 - DNA, 80 bp, synthetic construct; identical to SEQ ID NO: 9130
  source 1..80: mol_type = other DNA

SEQ ID NO: 20867 - DNA, 80 bp, synthetic construct
  source 1..80: mol_type = other DNA
acaactggagtcataaattcatggttttattcagcaaatatgtgtttgcttgttgggcttgttggatgttccaggtattg

SEQ ID NO: 20868 - DNA, 80 bp, synthetic construct
  source 1..80: mol_type = other DNA
ataagcaaaggtaataagggagcagagataagggatcacttaactcagagacacacatcagaggaggtaatgtctgaccc

SEQ ID NO: 20869 - DNA, 80 bp, synthetic construct; identical to SEQ ID NO: 9131
  source 1..80: mol_type = other DNA

SEQ ID NO: 20870 - DNA, 80 bp, synthetic construct
  source 1..80: mol_type = other DNA
agaccagcctgaccaacatggtgaaactccatctctactaaaaatataaaaattagccaggcgtggtggtgtgcacctgt

SEQ ID NO: 20871 - DNA, 80 bp, synthetic construct
  source 1..80: mol_type = other DNA
cttatacttccaagttcaccgaggtataccatgttcatgctggtaaagatgtggagaatgtactagagagtgaagactgg

SEQ ID NO: 20872 - DNA, 80 bp, synthetic construct
  source 1..80: mol_type = other DNA
gatgaataggcaaagagtgtgctcctaaactgaccaggttaattgggattaaaaggaaatatatcaccctgaaaccaagg

SEQ ID NO: 20873 - DNA, 80 bp, synthetic construct
  source 1..80: mol_type = other DNA
taaacttccctggctcttgggaaatcagtatgcatcacagttcctgacaaattaagagtccagagaatacagcaattata

SEQ ID NO: 20874 - DNA, 80 bp, synthetic construct; identical to SEQ ID NO: 9132
  source 1..80: mol_type = other DNA

SEQ ID NO: 20875 - DNA, 80 bp, synthetic construct
  source 1..80: mol_type = other DNA
ctaagttggtgcaaaaaaaagtctcaagatgcctgtcatgaatctctgcagaactctgtctgaattccatgttacaaatg

SEQ ID NO: 20876 - DNA, 80 bp, synthetic construct
  source 1..80: mol_type = other DNA
attataattttttaaaaactcagtcagttccataagcctttattaatattttctatggagatatgagattcaactgatgt

SEQ ID NO: 20877 - DNA, 80 bp, synthetic construct; identical to SEQ ID NO: 9133
  source 1..80: mol_type = other DNA

SEQ ID NO: 20878 - DNA, 80 bp, synthetic construct
  source 1..80: mol_type = other DNA
aggcagcccttgatatatgcaagttttgcatcccaagaataccaaatttttgatccccatttagttgaaaatatgtgcgt

SEQ ID NO: 20879 - DNA, 80 bp, synthetic construct
  source 1..80: mol_type = other DNA
accatgcaattgcaaaattccaaaatcagtatttcctcctggggaatttccttaacatttactctcattcttgttgccta

SEQ ID NO: 20880 - DNA, 80 bp, synthetic construct
  source 1..80: mol_type = other DNA
ttccatataggcatattcagtgctttcttaaatcagccataaaagtgaaacagccagataattaaacacaaagaacgata

SEQ ID NO: 20881 - DNA, 80 bp, synthetic construct; identical to SEQ ID NO: 9134
  source 1..80: mol_type = other DNA

SEQ ID NO: 20882 - DNA, 80 bp, synthetic construct
  source 1..80: mol_type = other DNA
tgccatctctgaaaattatttttttctcagaaagagaatacatttcccagccttatctgctgcctacctcgtgctgatca

SEQ ID NO: 20883 - DNA, 80 bp, synthetic construct
  source 1..80: mol_type = other DNA
ttatttttttctcagaaagagaatatatttcccagccttatctgctgtctacttcctcaattcttccccctctcatgaca

SEQ ID NO: 20884 - DNA, 80 bp, synthetic construct
  source 1..80: mol_type = other DNA
tgattaattttttgtttgttagttattcactcaacctacagcaatgacatagccagaaactccctgttcttaatgacgta

SEQ ID NO: 20885 - DNA, 80 bp, synthetic construct
  source 1..80: mol_type = other DNA
gaataattcagtaactactcaggttgctgaagcattgaatgatataggcacatcaagtgttagcatggtgcctcatatat

SEQ ID NO: 20886 - DNA, 80 bp, synthetic construct; identical to SEQ ID NO: 9135
  source 1..80: mol_type = other DNA

SEQ ID NO: 20887 - DNA, 80 bp, synthetic construct
  source 1..80: mol_type = other DNA
gattcagcgtcattcatgatcaattttagtattagtgcataggggagccctgagactattttcctcaatagttgagtttc

SEQ ID NO: 20888 - DNA, 80 bp, synthetic construct
  source 1..80: mol_type = other DNA
tttagatggactttttctgccaatttaggtcttccttgctatcctgcctccacattccctaatcctaatacatgtttgct

SEQ ID NO: 20889 - DNA, 80 bp, synthetic construct
  source 1..80: mol_type = other DNA
ataatatgtggggcccagtgtaacataaaaatgtgaggccccttattaaaaaatgttttagaacttcgagatggtgacag

SEQ ID NO: 20890 - DNA, 80 bp, synthetic construct; identical to SEQ ID NO: 9136
  source 1..80: mol_type = other DNA

SEQ ID NO: 20891 - DNA, 80 bp, synthetic construct
  source 1..80: mol_type = other DNA
ccttttaatcaactgtcacccccgcattgtctgaaaactagacgtagtgtataacatatgaatgtatacaaaagaagaac

SEQ ID NO: 20892 - DNA, 80 bp, synthetic construct
  source 1..80: mol_type = other DNA
aggctaccgtacagtgagttatacaagtaaaactggaaaactcttgacattcttaatatttgtgagttgcatgcccctct

SEQ ID NO: 20893 - DNA, 80 bp, synthetic construct; identical to SEQ ID NO: 9137
  source 1..80: mol_type = other DNA

SEQ ID NO: 20894 - DNA, 80 bp, synthetic construct
  source 1..80: mol_type = other DNA
tgcaagctccgcctcctgggttcacgccattctcctgactcagcctcccgagtagctgggactacaggcgcccgccacca

SEQ ID NO: 20895 - DNA, 80 bp, synthetic construct
  source 1..80: mol_type = other DNA
gttttgtgcagaagaattttaaatacagacatctcattacacacctaactacgtcagtattcagctcttaaaaataaatg

SEQ ID NO: 20896 - DNA, 80 bp, synthetic construct
  source 1..80: mol_type = other DNA
tcaagatgcaatctaggatcatgcattgcatctagctattataccccttaagctgcatttagtctagaacaatcaagatt

SEQ ID NO: 20897 - DNA, 80 bp, synthetic construct; identical to SEQ ID NO: 9138
  source 1..80: mol_type = other DNA

SEQ ID NO: 20898 - DNA, 80 bp, synthetic construct
  source 1..80: mol_type = other DNA
gcttcaattctccttcaaccatttaccatgtcgttttaattctaaatgagaatctatgaatgaatcaattactgcaaaag

SEQ ID NO: 20899 - DNA, 80 bp, synthetic construct
  source 1..80: mol_type = other DNA
taatatatacacttttggccttataaaaagagtttaattgtgcattgagggatttttataaaatcacttttaagccaact

SEQ ID NO: 20900 - DNA, 80 bp, synthetic construct
  source 1..80: mol_type = other DNA
ataatcaaccatttcttcaagaaactgatgcctttactggggaatgatatcagagaccaaaatgtctctaagtatactca

SEQ ID NO: 20901 - DNA, 80 bp, synthetic construct
  source 1..80: mol_type = other DNA
gaatattgaaaatcttgttatctaatagttaataacatttgttggcgtctgtacttgtcctgagcctgttttccctcaca

SEQ ID NO: 20902 - DNA, 80 bp, synthetic construct; identical to SEQ ID NO: 9139
  source 1..80: mol_type = other DNA

SEQ ID NO: 20903 - DNA, 80 bp, synthetic construct
  source 1..80: mol_type = other DNA
cgttatctcctcctggcttcttagttattccattacctatgtagcttattctctaaattacatacccttttgaaaaagag

SEQ ID NO: 20904 - DNA, 80 bp, synthetic construct
  source 1..80: mol_type = other DNA
catttttttccctatagaatgcatccctaaagatgtagtcaaagatctatgctccaaagtcactttaaatattctttctc

SEQ ID NO: 20905 - DNA, 80 bp, synthetic construct
  source 1..80: mol_type = other DNA
tctcctgatttttaaatgtatacatagatgcctctcctgatctttctcacttaatttcccctccctgctcttcataatta

SEQ ID NO: 20906 - DNA, 80 bp, synthetic construct; identical to SEQ ID NO: 9140
  source 1..80: mol_type = other DNA

SEQ ID NO: 20907 - DNA, 80 bp, synthetic construct
  source 1..80: mol_type = other DNA
ttactggaatcctaccaacaatgcatgcaagtggctatttttctagtctcaccaacaaggcctactgctgttttttgttt

SEQ ID NO: 20908 - DNA, 80 bp, synthetic construct
  source 1..80: mol_type = other DNA
aaaataatgggaaaaaacattggcctagaagttagaagatcaggctctatcataatttttcaattcactagtcatggttt

SEQ ID NO: 20909 - DNA, 80 bp, synthetic construct; identical to SEQ ID NO: 9141
  source 1..80: mol_type = other DNA

SEQ ID NO: 20910 - DNA, 80 bp, synthetic construct
  source 1..80: mol_type = other DNA
tactatgctaaaacctgaagactggtgcaaaaatgccagaggaagatgataaataagagtcctaatcttgattagacaac

SEQ ID NO: 20911 - DNA, 80 bp, synthetic construct
  source 1..80: mol_type = other DNA
ggtaaaaattcactcctcttagaatattagcttttttgacactgttaattggcaaaatttgttgaaggagaaatgacagc

SEQ ID NO: 20912 - DNA, 80 bp, synthetic construct
  source 1..80: mol_type = other DNA
agatcttcatcagctacttgctatgcactggcaatgttacttgatatagataagctagttgaaagggtaattactagaca

SEQ ID NO: 20913 - DNA, 80 bp, synthetic construct
  source 1..80: mol_type = other DNA
atgtaacaaacaaaagtaaactgactaaataagtagaccgatatctttcagtctgaatctataaatatgtagtattgtcc

SEQ ID NO: 20914 - DNA, 80 bp, synthetic construct; identical to SEQ ID NO: 9142
  source 1..80: mol_type = other DNA

SEQ ID NO: 20915 - DNA, 80 bp, synthetic construct
  source 1..80: mol_type = other DNA
aatattcatttaatggcagaaaaccagaacttttttaaaaaaaggtttcatgtttgcaggtcaggcggaagcctgtgttt

SEQ ID NO: 20916 - DNA, 80 bp, synthetic construct
  source 1..80: mol_type = other DNA
gaatcattggtaaaaacattccattaggtatataattagtgggcacatgagagagtagcataggaaatatataattaact

SEQ ID NO: 20917 - DNA, 80 bp, synthetic construct
  source 1..80: mol_type = other DNA
ttaagatggagtatcattctgtcacccaggctggactatagtggtgtgatcatagctcactgcagccttgaattccaggg

SEQ ID NO: 20918 - DNA, 80 bp, synthetic construct; identical to SEQ ID NO: 9143
  source 1..80: mol_type = other DNA

SEQ ID NO: 20919 - DNA, 80 bp, synthetic construct
  source 1..80: mol_type = other DNA
attctactgctcaaccaaacaattgatcaagtatttactagtacctactataaatagactcagtactttgccacatgcta

SEQ ID NO: 20920 - DNA, 80 bp, synthetic construct
  source 1..80: mol_type = other DNA
tgaattctaagatgtttcaaaggagaaaacagtttgccttacatttgcctacagtttgcaaaatcatctagcaacacagt

SEQ ID NO: 20921 - DNA, 80 bp, synthetic construct
  source 1..80: mol_type = other DNA
gatcaaaattcaaagtacagtttctacttaatgcatatcacttttgcaccattgcatagtcaaaaaatcttaagttgaga

SEQ ID NO: 20922 - DNA, 80 bp, synthetic construct; identical to SEQ ID NO: 9144
  source 1..80: mol_type = other DNA

SEQ ID NO: 20923 - DNA, 80 bp, synthetic construct
  source 1..80: mol_type = other DNA
acacttcctattcaataatttaataaaaagacgagccaactttaaaaaatacacaaagcgggggtggagccaagatggcc

SEQ ID NO: 20924 - DNA, 80 bp, synthetic construct; identical to SEQ ID NO: 9147
  source 1..80: mol_type = other DNA

SEQ ID NO: 20925 - DNA, 80 bp, synthetic construct
  source 1..80: mol_type = other DNA
aaagtagataataattgcttaggactgggacttggattgggggttgatgggaaatgtgtagccataccctgtatgtatta

SEQ ID NO: 20926 - DNA, 80 bp, synthetic construct
  source 1..80: mol_type = other DNA
tgggaagtttaaatagtaccttcagcccatatggattccataaatacaaaaataataccattttattataaacaaagtag

SEQ ID NO: 20927 - DNA, 80 bp, synthetic construct
  source 1..80: mol_type = other DNA
atgagtctccatcactgatgactgagtcattctgggaaaggcatatgaactcgcagcctcaatgttcctatttacaagaa

SEQ ID NO: 20928 - DNA, 80 bp, synthetic construct
  source 1..80: mol_type = other DNA
tgttataaaagtgtcttcctctacctcaagttacgtatgtagtggagctgggatagaaaaaaatttggttttcttctctt

SEQ ID NO: 20929 - DNA, 80 bp, synthetic construct; identical to SEQ ID NO: 9148
  source 1..80: mol_type = other DNA

SEQ ID NO: 20930 - DNA, 80 bp, synthetic construct
  source 1..80: mol_type = other DNA
atcctctgagagaaacagagaataatagctgcaaatatttcttagagttttgatggcattctgcatggttataaggaatt

SEQ ID NO: 20931 - DNA, 80 bp, synthetic construct
  source 1..80: mol_type = other DNA
aggaacactttataagtgtgcacttatgcactgctgattagattaccttttgatgcaactgttctgagggggattttggc

SEQ ID NO: 20932 - DNA, 80 bp, synthetic construct
  source 1..80: mol_type = other DNA
catgatgacttaggaaataaaattaaacatgtccatggtttgtatttaaaagattgtttataataccttatgtgaagatt

SEQ ID NO: 20933 - DNA, 80 bp, synthetic construct; identical to SEQ ID NO: 9149
  source 1..80: mol_type = other DNA

SEQ ID NO: 20934 - DNA, 80 bp, synthetic construct
  source 1..80: mol_type = other DNA
accccaccacagtccccagagtgtgatattccccttcctgtgaccatgtgatcagttcatgtcctttgtagggacatgga

SEQ ID NO: 20935 - DNA, 80 bp, synthetic construct
  source 1..80: mol_type = other DNA
gaataggaactgtgaaaacaaatgagaatgctctcatacagttattttatggtctatcagtattaatgaattgtactcaa

SEQ ID NO: 20936 - DNA, 80 bp, synthetic construct; identical to SEQ ID NO: 9150
  source 1..80: mol_type = other DNA

SEQ ID NO: 20937 - DNA, 80 bp, synthetic construct
  source 1..80: mol_type = other DNA
gacagtggtcattctctaagtcttgtatatatttcctgtttctgttttgagtaaaatgtccaataccactgggaatgcct

SEQ ID NO: 20938 - DNA, 80 bp, synthetic construct
  source 1..80: mol_type = other DNA
tttaaggtatacaacttggtgagtttgggaataagtatacagccataaaaccattaccatattctatgccatcaacatat

SEQ ID NO: 20939 - DNA, 80 bp, synthetic construct
  source 1..80: mol_type = other DNA
ttgtaaaactagagctttgtaccttttgactaacatctccttgttccctacccccaaccatcccctgacaaccaccattc

SEQ ID NO: 20940 - DNA, 80 bp, synthetic construct
  source 1..80: mol_type = other DNA
tctttatctatttctgtaaatggacatttaggtcacttctgtgccttgtctattgtggacagtagaattaaaatcagaat

SEQ ID NO: 20941 - DNA, 80 bp, synthetic construct; identical to SEQ ID NO: 9151
  source 1..80: mol_type = other DNA

SEQ ID NO: 20942 - DNA, 80 bp, synthetic construct
  source 1..80: mol_type = other DNA
ataacctctgccactctgaggtcaaagtaattcctagtaggctgcttcacagaaactattttgacaactgcttaaaaaaa

SEQ ID NO: 20943 - DNA, 80 bp, synthetic construct
  source 1..80: mol_type = other DNA
ctgatatatatatatatatatatatatctcctgatacatacatatacgaatatatatatatggagagatatatatatata

SEQ ID NO: 20944 - DNA, 80 bp, synthetic construct
  source 1..80: mol_type = other DNA
agtaaactgaatgtttcttgattttttaaaaaaaaattttccttccccagaaagagagttgtatcaaacagtaaaatggc

SEQ ID NO: 20945 - DNA, 80 bp, synthetic construct; identical to SEQ ID NO: 9152
  source 1..80: mol_type = other DNA

SEQ ID NO: 20946 - DNA, 80 bp, synthetic construct
  source 1..80: mol_type = other DNA
ttcctccccaaactgaacactatagatgctacataagagagagaggagaaagatgggtccactgaactaacatgataact

SEQ ID NO: 20947 - DNA, 80 bp, synthetic construct
  source 1..80: mol_type = other DNA
catggccacctattgtccaaggaataacctcagtacagtcccaacaagagtaacgagatgacggaaacaagtccgacaag

SEQ ID NO: 20948 - DNA, 80 bp, synthetic construct; identical to SEQ ID NO: 9153
  source 1..80: mol_type = other DNA

SEQ ID NO: 20949 - DNA, 80 bp, synthetic construct
  source 1..80: mol_type = other DNA
atgatacctggataatattgcataaggatatactaatatacgtgagaatgaagtggtttaagaaaccctcttccaaagag

SEQ ID NO: 20950 - DNA, 80 bp, synthetic construct
  source 1..80: mol_type = other DNA
tggttagtagaggttgagtcaggatttgagctaagttttgcaagatcatgaagttcactctgtttatagcaataaccatt

SEQ ID NO: 20951 - DNA, 80 bp, synthetic construct
  source 1..80: mol_type = other DNA
aacaatttttattgaatgtttaccatatggaagacatcacagaaaatatttactgataaaaaaggaaaagctgtaatctc

SEQ ID NO: 20952 - DNA, 80 bp, synthetic construct; identical to SEQ ID NO: 9154
  source 1..80: mol_type = other DNA

SEQ ID NO: 20953 - DNA, 80 bp, synthetic construct
  source 1..80: mol_type = other DNA
tatgattataggtggggataagagacaaaattgtttatcaaagaatagtccttttatacagacagatgaataagaagttt

SEQ ID NO: 20954 - DNA, 80 bp, synthetic construct
  source 1..80: mol_type = other DNA
tcattcatttcaaatatggatgtttgcttaagtctttggtctaagtaatatgaaacggtatactaactcatctaccgcag

SEQ ID NO: 20955 - DNA, 80 bp, synthetic construct
  source 1..80: mol_type = other DNA
ttatgtctctatttcacaattgtttaattgtaatacagactagtttatgcgtatatactcttgattatgttgtcaattgt

SEQ ID NO: 20956 - DNA, 80 bp, synthetic construct
  source 1..80: mol_type = other DNA
ccatgaaccaaaaatgattcatatgtgtctgtgatctttgagaattaggcttctcttattcgaagataaaacctatacca

SEQ ID NO: 20957 - DNA, 80 bp, synthetic construct; identical to SEQ ID NO: 9155
  source 1..80: mol_type = other DNA

SEQ ID NO: 20958 - DNA, 80 bp, synthetic construct
  source 1..80: mol_type = other DNA
aataattatttgttgtgatggcctctcaactgccttcccacttttgggcctataaggcaggtcatactccttaacattgc

SEQ ID NO: 20959 - DNA, 80 bp, synthetic construct
  source 1..80: mol_type = other DNA
tttgttgctttttttccactcttttggcatttgggcattatgggctctgtcttaacccacccctttagtcttagcttctc

SEQ ID NO: 20960 - DNA, 80 bp, synthetic construct; identical to SEQ ID NO: 9156
  source 1..80: mol_type = other DNA

SEQ ID NO: 20961 - DNA, 80 bp, synthetic construct
  source 1..80: mol_type = other DNA
aaggcagtgtttctaaactctaaaggcaatcttggtcatcagctgctactctgtttccattagtatatgtgacctcacta

SEQ ID NO: 20962 - DNA, 80 bp, synthetic construct
  source 1..80: mol_type = other DNA
aagtcaggtcgggttgggtagtccctgaacagagcatgaatacatgttatttttagttcttagaatactataatcatgtc

SEQ ID NO: 20963 - DNA, 80 bp, synthetic construct
  source 1..80: mol_type = other DNA
tcctaacatgtctaatagttatgattagttgaaaagcagccagggtcatagaagttggcctggaaatggtgctatgcaag

SEQ ID NO: 20964 - DNA, 80 bp, synthetic construct; identical to SEQ ID NO: 9157
  source 1..80: mol_type = other DNA

SEQ ID NO: 20965 - DNA, 80 bp, synthetic construct
  source 1..80: mol_type = other DNA
aaagtttagttttctgagctcttgcaatgttattctggttgaatggttcttcatttttcgcatgctgttgggcttactgc

SEQ ID NO: 20966 - DNA, 80 bp, synthetic construct
  source 1..80: mol_type = other DNA
tctaagcgttcttgagagacttgactgccaaatgaacaaggatgttgtccagaaaacactcaggtagaagaacatctaga

SEQ ID NO: 20967 - DNA, 80 bp, synthetic construct
  source 1..80: mol_type = other DNA
gcagtaactccactgaggccttagaattcctggcacagataagctctctactttcttctctttgaagaaaatgtttatcc

SEQ ID NO: 20968 - DNA, 80 bp, synthetic construct
  source 1..80: mol_type = other DNA
tccccaattatatctcagcgtgatttttcttcattttctggccctaatccagcacttgactcaattgtgctatttctgcc

SEQ ID NO: 20969 - DNA, 80 bp, synthetic construct; identical to SEQ ID NO: 9158
  source 1..80: mol_type = other DNA

SEQ ID NO: 20970 - DNA, 80 bp, synthetic construct
  source 1..80: mol_type = other DNA
gtaccctgacaaagaaacagtaggtggaatgagcaatttatctcatacgtcttggttgataggcctgttgcagaacttca

SEQ ID NO: 20971 - DNA, 80 bp, synthetic construct
  source 1..80: mol_type = other DNA
ccatcaacttgaatagtgtacatggtgcccaacaggtaatttttaagaaacagacattgcagcagatatttgttggttcc

SEQ ID NO: 20972 - DNA, 80 bp, synthetic construct
  source 1..80: mol_type = other DNA
ttgcttctttatccaataaggaattttgagcacactcttttctacatggcattataaggcacacatatgcaatgtttatt

SEQ ID NO: 20973 - DNA, 80 bp, synthetic construct; identical to SEQ ID NO: 9159
  source 1..80: mol_type = other DNA

SEQ ID NO: 20974 - DNA, 80 bp, synthetic construct
  source 1..80: mol_type = other DNA
aatcaatcacataggaagagagggaagacatttcaggcttattaaagcctatgcaccaagtcacagaggtgtggaaaaat

SEQ ID NO: 20975 - DNA, 80 bp, synthetic construct
  source 1..80: mol_type = other DNA
aaataggagacctataataaattttaaggtagaaagagatgacaagatcagacttgcattttagaaaaatcagtgtgtat

SEQ ID NO: 20976 - DNA, 80 bp, synthetic construct
  source 1..80: mol_type = other DNA
cagctgagagcttccttctgccctcatgaaaccataaagagaaaatgtgttatcttaacagggaaaactttcttttacat

SEQ ID NO: 20977 - DNA, 80 bp, synthetic construct; identical to SEQ ID NO: 9160
  source 1..80: mol_type = other DNA

SEQ ID NO: 20978 - DNA, 80 bp, synthetic construct
  source 1..80: mol_type = other DNA
gcttgataaaagatgattgtcaaaagagatccacacagacagtggctataagagtgaagctgcacaggtccctttgtagc

SEQ ID NO: 20979 - DNA, 80 bp, synthetic construct
  source 1..80: mol_type = other DNA
tcacaggtcacttctatcactgcaaaagcacattggtctggagtttatgaagaacatacaatttctgttggcatgttagg

SEQ ID NO: 20980 - DNA, 80 bp, synthetic construct
  source 1..80: mol_type = other DNA
ttagccatttttaataaaagagtagagaagttactctactgcggcttttgctggtactttttatagccgtcgtgtggtag

SEQ ID NO: 20981 - DNA, 80 bp, synthetic construct; identical to SEQ ID NO: 9161
  source 1..80: mol_type = other DNA

SEQ ID NO: 20982 - DNA, 80 bp, synthetic construct
  source 1..80: mol_type = other DNA
aggtattggcaatggggaagtcccctttctacaaagaaatctgatgtccccagaaaaatgtttcatgacattgtcacatt

SEQ ID NO: 20983 - DNA, 80 bp, synthetic construct
  source 1..80: mol_type = other DNA
tccacaattgttgcttctaccttatatcaaggtttaccatttcatttatctaggctcagattgtcctttacttcattgcg

SEQ ID NO: 20984 - DNA, 80 bp, synthetic construct
  source 1..80: mol_type = other DNA
ctaaaaatgcaaaaattagctgggtgtagtgttgcactcctgtaatcccagctactcaggaggctgagacaggagaatcg

SEQ ID NO: 20985 - DNA, 80 bp, synthetic construct; identical to SEQ ID NO: 9162
  source 1..80: mol_type = other DNA

SEQ ID NO: 20986 - DNA, 80 bp, synthetic construct
  source 1..80: mol_type = other DNA
ttgtatccctagctcctcgaagggtgtctggtatgatacaaacattcaatcatcatttactgaaatggtgaatgaaattc

SEQ ID NO: 20987 - DNA, 80 bp, synthetic construct
  source 1..80: mol_type = other DNA
ctaccaattgcctcatatgaactacctcacacaaaccactgcctacttaaattctatcctcctttaaggcccaactgaag

SEQ ID NO: 20988 - DNA, 80 bp, synthetic construct; identical to SEQ ID NO: 9163
  source 1..80: mol_type = other DNA

SEQ ID NO: 20989 - DNA, 80 bp, synthetic construct
  source 1..80: mol_type = other DNA
tgaaaatacttgtggatgaaacgatatgctatctcaaatttatttcaaaataacgtgggaggagataaaataaagtgggt

SEQ ID NO: 20990 - DNA, 80 bp, synthetic construct
  source 1..80: mol_type = other DNA
gggaaaacagagattgacatgtgaagctgagtcaattcagttgctcatgacataagtggttgagtagaagatactggtgc

SEQ ID NO: 20991 - DNA, 80 bp, synthetic construct
  source 1..80: mol_type = other DNA
aaaagaagacaagagaacatcccaaatccacggttctgttgtttccttttgtgaaccacctttcccttttctcatctact

SEQ ID NO: 20992 - DNA, 80 bp, synthetic construct; identical to SEQ ID NO: 9164
  source 1..80: mol_type = other DNA

SEQ ID NO: 20993 - DNA, 80 bp, synthetic construct
  source 1..80: mol_type = other DNA
tttgttgctccttttttctcctaatattcatacatcaagtcttctttcctaatctccccaacccaaaagggctccttctt

SEQ ID NO: 20994 - DNA, 80 bp, synthetic construct
  source 1..80: mol_type = other DNA
ctcagacccggctaatttttgtaattttagttgaaacagggttttgccatgttgattaggttggtctcgaactcccgcct

SEQ ID NO: 20995 - DNA, 80 bp, synthetic construct
  source 1..80: mol_type = other DNA
tgtgatgtatcccatctcctttcttgtccaagacttttgagaacagtgatcatgccttttcctcctgctactttctatac

SEQ ID NO: 20996 - DNA, 80 bp, synthetic construct; identical to SEQ ID NO: 9165
  source 1..80: mol_type = other DNA

SEQ ID NO: 20997 - DNA, 80 bp, synthetic construct
  source 1..80: mol_type = other DNA
ttacattagtagcagtttcagagacagagttaagaattttatcccaagcctttttgtgaatccaactccattgtctcctc

SEQ ID NO: 20998 - DNA, 80 bp, synthetic construct
  source 1..80: mol_type = other DNA
aggacaagccaataatcactctaaagagggggcaaaaaattacttcaatcgccagtactctgcactatatgtaatggttt

SEQ ID NO: 20999 - DNA, 80 bp, synthetic construct
  source 1..80: mol_type = other DNA
ctctacaacctttccaaacatacttagtttgcaaaatcagattggaaattatacaggaatagtttttctcatagtatttc

SEQ ID NO: 21000 - DNA, 80 bp, synthetic construct
  source 1..80: mol_type = other DNA
gatattattggaatatgaattaatcatctcaataactgggcaacacactgagcactatgctgatgtctggttgtgaaata

SEQ ID NO: 21001 - DNA, 80 bp, synthetic construct; identical to SEQ ID NO: 9166
  source 1..80: mol_type = other DNA

SEQ ID NO: 21002 - DNA, 80 bp, synthetic construct
  source 1..80: mol_type = other DNA
gtggaaaagacgaggcagagacagaggtcttatgatggtgacccttgaggccatttcacagaatttggtgacactgtatt

SEQ ID NO: 21003 - DNA, 80 bp, synthetic construct
  source 1..80: mol_type = other DNA
ttggttcaaatgtagttaaaatagcttagacaaaggtcaacattgtccaagattcacgtggttgtatgtccctttttttc

SEQ ID NO: 21004 - DNA, 80 bp, synthetic construct; identical to SEQ ID NO: 9167
  source 1..80: mol_type = other DNA

SEQ ID NO: 21005 - DNA, 80 bp, synthetic construct
  source 1..80: mol_type = other DNA
attgctaaatcttatctctctgagtagttgtgtcaataagagataaggtcctgcctcactttggaagtaatagctttaag

SEQ ID NO: 21006 - DNA, 80 bp, synthetic construct
  source 1..80: mol_type = other DNA
tcataacgatcaacatcatatttcctctaccttctctctctccaactctcagacttagaagcctataggttataacctgc

SEQ ID NO: 21007 - DNA, 80 bp, synthetic construct
  source 1..80: mol_type = other DNA
aaagacattgaaaacaaagtaccagcagacgccaagtcttttaacaagaggagtctatccatagccactcaaataagaat

SEQ ID NO: 21008 - DNA, 80 bp, synthetic construct; identical to SEQ ID NO: 9168
  source 1..80: mol_type = other DNA

SEQ ID NO: 21009 - DNA, 80 bp, synthetic construct
  source 1..80: mol_type = other DNA
attaaacataagcatctctccatgtcataaattaatccccaaaaacaccttattgaatgactaataatctatcatccaga

SEQ ID NO: 21010 - DNA, 80 bp, synthetic construct
  source 1..80: mol_type = other DNA
caatcatttgtagatttgttaagtttcttgacctgtattgtcaaattgctcttctcactaaacccagcagcattaacgat

SEQ ID NO: 21011 - DNA, 80 bp, synthetic construct
  source 1..80: mol_type = other DNA
ctttatttctatcttcttaggaggtagggagaccaaaataagacttgcaaaaaattattaaccacagctaaaacacacac

SEQ ID NO: 21012 - DNA, 80 bp, synthetic construct; identical to SEQ ID NO: 9169
  source 1..80: mol_type = other DNA

SEQ ID NO: 21013 - DNA, 80 bp, synthetic construct
  source 1..80: mol_type = other DNA
gtttgagaccagcctggccaacatggcaaaaccccatttctagtgaaaaaataaaaataaaaaaagcaaaaattagccgg

SEQ ID NO: 21014 - DNA, 80 bp, synthetic construct
  source 1..80: mol_type = other DNA
aaattacaaagcagaatgtcagaatagtttgactcagggaataatgtagaaatagcatggtttaaacatttagatttaca

SEQ ID NO: 21015 - DNA, 80 bp, synthetic construct
  source 1..80: mol_type = other DNA
attcagctgaactggtaaaacaagttcttttctatagcggtcaaatcaggcgctgttttacttctaacaacatgttatct

SEQ ID NO: 21016 - DNA, 80 bp, synthetic construct; identical to SEQ ID NO: 9170
  source 1..80: mol_type = other DNA

SEQ ID NO: 21017 - DNA, 80 bp, synthetic construct
  source 1..80: mol_type = other DNA
ttccttaacagtgccttctttcttttaactgctgcattatatcctatattgcatcatctagcaatctctctatacataga

SEQ ID NO: 21018 - DNA, 80 bp, synthetic construct
  source 1..80: mol_type = other DNA
attctacaaaattaatttcaaaatggttgtaccattttagttcgcgtcagttgattatgagagtacccattttccaatac

SEQ ID NO: 21019 - DNA, 80 bp, synthetic construct
  source 1..80: mol_type = other DNA
atgtgtatttttatttctctctggaaggtcacgtgtattctggctactaatcctttgtctattatatatgttgtaaaatt

SEQ ID NO: 21020 - DNA, 80 bp, synthetic construct
  source 1..80: mol_type = other DNA
cttaaacttaacatcaaaaagacattgcaatatagtataatacttttatggcattatatttatgcttagatgataactat

SEQ ID NO: 21021 - DNA, 80 bp, synthetic construct; identical to SEQ ID NO: 9171
  source 1..80: mol_type = other DNA

SEQ ID NO: 21022 - DNA, 80 bp, synthetic construct
  source 1..80: mol_type = other DNA
aataagttttacatttccataacacatcctcttagttcgtgttagtactgtactaagttcatagactattttgtagagaa

SEQ ID NO: 21023 - DNA, 80 bp, synthetic construct
  source 1..80: mol_type = other DNA
tcccccctccccccacccgacaacagtccccagagtgtgatgttccccttcctgtgtccatgtgttctcattgttcaatt

SEQ ID NO: 21024 - DNA, 80 bp, synthetic construct
  source 1..80: mol_type = other DNA
ttaatccagtctatcattgttggacatttgggttggttccaagtctttgctattgtgaataatgccgcaataaacatacg

SEQ ID NO: 21025 - DNA, 80 bp, synthetic construct
  source 1..80: mol_type = other DNA
aaaagtgttactatttctccacgtcctctccagcacctgttgtttcctgactttttaatgatcgccattctaactggtgt

SEQ ID NO: 21026 - DNA, 80 bp, synthetic construct; identical to SEQ ID NO: 9172
  source 1..80: mol_type = other DNA

SEQ ID NO: 21027 - DNA, 80 bp, synthetic construct
  source 1..80: mol_type = other DNA
actggctttaaaatttgtcactttggggttatcaggtaaattcttatctgcaaattgtgaaaatgttgtaactccctttc

SEQ ID NO: 21028 - DNA, 80 bp, synthetic construct
  source 1..80: mol_type = other DNA
ggaccttgagttaaaagttaaacagttgtcttctagtcaacaatgggcctgcttctaatatctcactattaaggatagtg

SEQ ID NO: 21029 - DNA, 80 bp, synthetic construct
  source 1..80: mol_type = other DNA
agatgattggatttccctccctaaatatattaatgtagtgaattccataaaaagatttctaatgttgagccatctttatg

SEQ ID NO: 21030 - DNA, 80 bp, synthetic construct; identical to SEQ ID NO: 9173
  source 1..80: mol_type = other DNA

SEQ ID NO: 21031 - DNA, 80 bp, synthetic construct
  source 1..80: mol_type = other DNA
aaatacttgctcataaaaaaatctgagtctggaaccttagtgggggctgagaggtagggaaaatcattactttatgacca

SEQ ID NO: 21032 - DNA, 80 bp, synthetic construct
  source 1..80: mol_type = other DNA
tactttttcattatttaggtttttcagttcttcttttgccaattttagtagttttgaaatatatagagatattcctctta

SEQ ID NO: 21033 - DNA, 80 bp, synthetic construct
  source 1..80: mol_type = other DNA
ttcttggatttatttttgttcttttttttagattgttagaatgattgcttagttcttttgtttttaacctaagttttttt

SEQ ID NO: 21034 - DNA, 80 bp, synthetic construct
  source 1..80: mol_type = other DNA
atttttgtattttagtagagacggccaggctggtcttggactcctgatctcgtgatccacccacctcagcctcccaaagt

SEQ ID NO: 21035 - DNA, 80 bp, synthetic construct; identical to SEQ ID NO: 9174
  source 1..80: mol_type = other DNA

SEQ ID NO: 21036 - DNA, 80 bp, synthetic construct
  source 1..80: mol_type = other DNA
actccctcctttcaccttctcctttttctccccaagacaagccgcagaaactaaaatctactctaatttcccccaacctt

SEQ ID NO: 21037 - DNA, 80 bp, synthetic construct
  source 1..80: mol_type = other DNA
tgagtctattagcatcagctgtatcccttttgttccatcacatttctacatggttgctcagtcttcaatcgtgcccattc

SEQ ID NO: 21038 - DNA, 80 bp, synthetic construct; identical to SEQ ID NO: 9175
  source 1..80: mol_type = other DNA

SEQ ID NO: 21039 - DNA, 80 bp, synthetic construct
  source 1..80: mol_type = other DNA
tgacgcggggcagtcttgtgggaactgacactatctcctggaagatgacataagaattgaattggattagaagacgccca

SEQ ID NO: 21040 - DNA, 80 bp, synthetic construct
  source 1..80: mol_type = other DNA
gggagaaatctccacacattgggtaaaagaagtttgctgtgttgattgctgtggtgtaagagcagaagaaaaagttattt

SEQ ID NO: 21041 - DNA, 80 bp, synthetic construct
  source 1..80: mol_type = other DNA
ctttgtattccttggatactcagtggagatgaaatgtttattctctgaaaatagaaaagccatgtagactacagagatca

SEQ ID NO: 21042 - DNA, 80 bp, synthetic construct
  source 1..80: mol_type = other DNA
aacactcccttgagaaggagaacaacaataatcagttgagactggaactcaacaagcaggctcacattattaatattttt

SEQ ID NO: 21043 - DNA, 80 bp, synthetic construct; identical to SEQ ID NO: 9176
  source 1..80: mol_type = other DNA

SEQ ID NO: 21044 - DNA, 80 bp, synthetic construct
  source 1..80: mol_type = other DNA
cttttatgttttgattgtcacctttcagctcaaagggttttagggagctagaaactctatttttgcagtgtacagacttt

SEQ ID NO: 21045 - DNA, 80 bp, synthetic construct
  source 1..80: mol_type = other DNA
cagagcagtatttgttccctatcaatgtgtatctaacaaaacattacacagaatactttctgcctgctttaaaacatttc

SEQ ID NO: 21046 - DNA, 80 bp, synthetic construct
  source 1..80: mol_type = other DNA
ctatattggtctgtttcccacttagaactcatcaattcttgtacattattcagtaattggtcaagtacctgtgacccagg

SEQ ID NO: 21047 - DNA, 80 bp, synthetic construct; identical to SEQ ID NO: 9177
  source 1..80: mol_type = other DNA

SEQ ID NO: 21048 - DNA, 80 bp, synthetic construct
  source 1..80: mol_type = other DNA
aaaccttgtctctactaaaaatacaaaaaacattagctgggcatggtggcaagggcctgtagtcccagctactggagagg

SEQ ID NO: 21049 - DNA, 80 bp, synthetic construct
  source 1..80: mol_type = other DNA
gcaatcaactgccaaataataaaaccttgttaataaaatattaacaaatcgaaggaaaaactctgaggtttttattaaaa

SEQ ID NO: 21050 - DNA, 80 bp, synthetic construct
  source 1..80: mol_type = other DNA
aagaacatgatctttttttatctccaggttaatttttagtgtgaaagcaaactatcgtaagcacaatcacatcctcttat

SEQ ID NO: 21051 - DNA, 80 bp, synthetic construct; identical to SEQ ID NO: 9178
  source 1..80: mol_type = other DNA

SEQ ID NO: 21052 - DNA, 80 bp, synthetic construct
  source 1..80: mol_type = other DNA
atccaccttgagttgatttttgtataaagtgagagataaggatccagtttctttcttctacatatggcttgccaattaat

SEQ ID NO: 21053 - DNA, 80 bp, synthetic construct
  source 1..80: mol_type = other DNA
catgttctttacacagtagattgtattttgattcttatggttattaaacacagagcctatagctacttggctgttgtttg

SEQ ID NO: 21054 - DNA, 80 bp, synthetic construct
  source 1..80: mol_type = other DNA
attaaaataattttttagtagacatgggggtcttcccttattgcccagactggtctcaaactcctggcttaaagtggcct

SEQ ID NO: 21055 - DNA, 80 bp, synthetic construct
  source 1..80: mol_type = other DNA
gctatggctgcttgccagctagtttataagctgcattggcttctcggctcaatacatttatcttacaaactcattctaga

SEQ ID NO: 21056 - DNA, 80 bp, synthetic construct; identical to SEQ ID NO: 9179
  source 1..80: mol_type = other DNA

SEQ ID NO: 21057 - DNA, 80 bp, synthetic construct
  source 1..80: mol_type = other DNA
ttcttattgaatttaaggtattatctccgggaaattatctgaattgccaaattcacctagaattgctagaattaggcaaa

SEQ ID NO: 21058 - DNA, 80 bp, synthetic construct
  source 1..80: mol_type = other DNA
acacatcactaccagtcataaaatgggagctaatattcattgtatgtgctaattgctctacatgtgctatttcatggcca

SEQ ID NO: 21059 - DNA, 80 bp, synthetic construct
  source 1..80: mol_type = other DNA
atacagatagtaatagtgacatcaggattcactcaaattatctaactccagagcctagagcctaggagtgctcattcatg

SEQ ID NO: 21060 - DNA, 80 bp, synthetic construct; identical to SEQ ID NO: 9180
  source 1..80: mol_type = other DNA

SEQ ID NO: 21061 - DNA, 80 bp, synthetic construct
  source 1..80: mol_type = other DNA
atttgcagaaatagaatgtaccacaaatacacttatttttgttctgaagcatctttattttccatctctattgccaatgt

SEQ ID NO: 21062 - DNA, 80 bp, synthetic construct
  source 1..80: mol_type = other DNA
tcccccagtcccccaccccccaacaggccccagtgtgtgatgttccctgccctgtgtccaagtgatctcattgttcaatt

SEQ ID NO: 21063 - DNA, 80 bp, synthetic construct
  source 1..80: mol_type = other DNA
ttaatccagtctatcaggcagtttcccagtgctggcaaaacctgtacacatttgtattacacaaattccacatatgtttc

SEQ ID NO: 21064 - DNA, 80 bp, synthetic construct
  source 1..80: mol_type = other DNA
aaagaaatctgagttagaaagatatattaaaacacagtctattcacactcagatcacattcacagtatgaggtgctaatt

SEQ ID NO: 21065 - DNA, 80 bp, synthetic construct; identical to SEQ ID NO: 9181
  source 1..80: mol_type = other DNA

SEQ ID NO: 21066 - DNA, 80 bp, synthetic construct
  source 1..80: mol_type = other DNA
gatggagggccaaactggtacagtagctcctaccttgatggaatggctgagttatgactaggaagacaactgtgaccaga

SEQ ID NO: 21067 - DNA, 80 bp, synthetic construct
  source 1..80: mol_type = other DNA
tcacactcttcgctcatttgggttcttttgctggtttcccttcttcttccccacttcttgtcttttcattcttttaatag

SEQ ID NO: 21068 - DNA, 80 bp, synthetic construct
  source 1..80: mol_type = other DNA
attttctcccgtgttgtcttcaagaagttttacaattttcaatttaacatttaggtctatgatctatttagagttaattt

SEQ ID NO: 21069 - DNA, 80 bp, synthetic construct; identical to SEQ ID NO: 9182
  source 1..80: mol_type = other DNA

SEQ ID NO: 21070 - DNA, 80 bp, synthetic construct
  source 1..80: mol_type = other DNA
ctgtttttataattgccaaaactggaatcagccaatatgtccttcactgggtgaatggacaaacagttgttcacacatac

SEQ ID NO: 21071 - DNA, 80 bp, synthetic construct
  source 1..80: mol_type = other DNA
atgacattctcaattataaaatagggtgatggagaacagatcaatggttttcagggaaggaagaagggagaaacatgact

SEQ ID NO: 21072 - DNA, 80 bp, synthetic construct
  source 1..80: mol_type = other DNA
tgtgccttgctaccttcttttctctggcaatctactcatatctgaaagtaaatggaaaactaggaattgactgatcaaaa

SEQ ID NO: 21073 - DNA, 80 bp, synthetic construct; identical to SEQ ID NO: 9183
  source 1..80: mol_type = other DNA

SEQ ID NO: 21074 - DNA, 80 bp, synthetic construct
  source 1..80: mol_type = other DNA
tgctattttagatgcactggtcctggaaggggcaccaagaaagtgatatttatcttggcaaaaacgtgacagaagatatg

SEQ ID NO: 21075 - DNA, 80 bp, synthetic construct
  source 1..80: mol_type = other DNA
tagtccatttaaagagtgagtgagtgagatgcaaaaccactcgcagttttaaagaacagattcatgatctgaaatgtgtt

SEQ ID NO: 21076 - DNA, 80 bp, synthetic construct; identical to SEQ ID NO: 9184
  source 1..80: mol_type = other DNA

SEQ ID NO: 21077 - DNA, 80 bp, synthetic construct
  source 1..80: mol_type = other DNA
aggttaaaggataatctattttaagtggaaagatacagcatatatcaagatctctataaaaatccaaggccatattttgg

SEQ ID NO: 21078 - DNA, 80 bp, synthetic construct
  source 1..80: mol_type = other DNA
aatttcaaaagaactctttggctactgcctagagccatttcctcatttttgatgacagcaaatgagtggttcattttctg

SEQ ID NO: 21079 - DNA, 80 bp, synthetic construct
  source 1..80: mol_type = other DNA
caatgatctgtcttgagttgtttataaatctgaccatacctttgcagtgccaacccaggctggcaataagacatttagga

SEQ ID NO: 21080 - DNA, 80 bp, synthetic construct
  source 1..80: mol_type = other DNA
tgcgctgttcacctccttgtaaacattgcctaatgtatggagaaaaaaagtcatataaaacaaggtagtcatgataaatg

SEQ ID NO: 21081 - DNA, 80 bp, synthetic construct; identical to SEQ ID NO: 9185
  source 1..80: mol_type = other DNA

SEQ ID NO: 21082 - DNA, 80 bp, synthetic construct
  source 1..80: mol_type = other DNA
atgagtttgctaagaatatttttggtttgttaatgacaataacaatgcatgctcataaaaaattattttgtcaggtatga

SEQ ID NO: 21083 - DNA, 80 bp, synthetic construct
  source 1..80: mol_type = other DNA
aggaagcactgaacttgtgcatgtcatggtttaggagagaaatctgggctaaagatgcaggtttgtgtcaaaggatattg

SEQ ID NO: 21084 - DNA, 80 bp, synthetic construct; identical to SEQ ID NO: 9186
  source 1..80: mol_type = other DNA

SEQ ID NO: 21085 - DNA, 80 bp, synthetic construct
  source 1..80: mol_type = other DNA
ctgtctaaaaaagttattaaaaactgaaaattgaattttgattgaattggttgaaacaattggaaggtatagagtcctga

SEQ ID NO: 21086 - DNA, 80 bp, synthetic construct
  source 1..80: mol_type = other DNA
agttttttttttccttttatacctttattcacatacttatctggttcttttttttagaagaaattcctagacatagtatt

SEQ ID NO: 21087 - DNA, 80 bp, synthetic construct
  source 1..80: mol_type = other DNA
gtatgtgaatttcacctcaatgaagaaaaatgctgtaatagtgggaattttctttaagcttggaattgaggttgtatttt

SEQ ID NO: 21088 - DNA, 80 bp, synthetic construct; identical to SEQ ID NO: 9187
  source 1..80: mol_type = other DNA

SEQ ID NO: 21089 - DNA, 80 bp, synthetic construct
  source 1..80: mol_type = other DNA
cttactgtatataaagcattgagcaatgtcctttggttgacagtcactgttcttgaaacacttagatatagtcagtatag

SEQ ID NO: 21090 - DNA, 80 bp, synthetic construct
  source 1..80: mol_type = other DNA
gaattaatgtgtgcgaccaaatattgagccttagatgtggctagttttaaagatctgaggataaaaacatgcaaaacaag

SEQ ID NO: 21091 - DNA, 80 bp, synthetic construct
  source 1..80: mol_type = other DNA
caaatttactcacatctccactcagatttggaaagaaaatgttgtctcttcatttctctgtaccagtcagattgtctcca

SEQ ID NO: 21092 - DNA, 80 bp, synthetic construct; identical to SEQ ID NO: 9188
  source 1..80: mol_type = other DNA

SEQ ID NO: 21093 - DNA, 80 bp, synthetic construct
  source 1..80: mol_type = other DNA
agaaagtgtaagctgggggaactcagggtgtggacattctggacttggtcagggcacagttttcttcctgttgacttagc

SEQ ID NO: 21094 - DNA, 80 bp, synthetic construct
  source 1..80: mol_type = other DNA
tgtgagtcctatctctgacacacaggaggcagattaaaggaggaagccacactcaggccttcttttggtctactctccac

SEQ ID NO: 21095 - DNA, 80 bp, synthetic construct
  source 1..80: mol_type = other DNA
tccattcaactcttcggaccaaccagacaagattttccttcttcctttttgactagaacctctttttcacaaaactctgt

SEQ ID NO: 21096 - DNA, 80 bp, synthetic construct; identical to SEQ ID NO: 9189
  source 1..80: mol_type = other DNA

SEQ ID NO: 21097 - DNA, 80 bp, synthetic construct
  source 1..80: mol_type = other DNA
tgatttctgaacttctaatgcactttcttttcattaatttttccatgtttatagattctttctgggtaattaatgttaca

SEQ ID NO: 21098 - DNA, 80 bp, synthetic construct
  source 1..80: mol_type = other DNA
cagttcacaatgctgattttaatccaaatatttgccttccaagatgctggttgtaccatttataatccatactgtacctc

SEQ ID NO: 21099 - DNA, 80 bp, synthetic construct
  source 1..80: mol_type = other DNA
attggttctacaccagttgtttttaaacagtggaaatataaatatatttttgtcaaaaggaaaaatttgagagtgtacat

SEQ ID NO: 21100 - DNA, 80 bp, synthetic construct; identical to SEQ ID NO: 9190
  source 1..80: mol_type = other DNA

SEQ ID NO: 21101 - DNA, 80 bp, synthetic construct
  source 1..80: mol_type = other DNA
caatcttaatgattgatactcagctttggcataagattatgcatcattagaaagaggatgtaggtgtaaaatggttctgt

SEQ ID NO: 21102 - DNA, 80 bp, synthetic construct
  source 1..80: mol_type = other DNA
aaacctcatatctctagaataatctctgctgtcgtatttgtatttctagcatatactatgatgtctgacttagtagcttc

SEQ ID NO: 21103 - DNA, 80 bp, synthetic construct
  source 1..80: mol_type = other DNA
atggtggtgggctcctgtaatcccagctactcaggaggctgaggcaggagaatcgcttgaacccgggagaagaggttgca

SEQ ID NO: 21104 - DNA, 80 bp, synthetic construct; identical to SEQ ID NO: 9191
  source 1..80: mol_type = other DNA

SEQ ID NO: 21105 - DNA, 80 bp, synthetic construct
  source 1..80: mol_type = other DNA
ttgaagagaattggagattttaaatttgggagagtgtctttgggaatatcagtcaattgaggatgaataaatctgctagt

SEQ ID NO: 21106 - DNA, 80 bp, synthetic construct
  source 1..80: mol_type = other DNA
aacccagtacacctctcaagaaacatcttgatgagcatgatatagagggcataccttgccaaagagtaaagatatatatt

SEQ ID NO: 21107 - DNA, 80 bp, synthetic construct
  source 1..80: mol_type = other DNA
gaggagagtaaaaatgctctttgagtttcgggatttggaaagaaaaaatgcccactgctttgcttgagccaaaatcaagg

SEQ ID NO: 21108 - DNA, 80 bp, synthetic construct; identical to SEQ ID NO: 9192
  source 1..80: mol_type = other DNA

SEQ ID NO: 21109 - DNA, 80 bp, synthetic construct
  source 1..80: mol_type = other DNA
ccccccacttcctcaggcataactgccatcatattttgaaaccatctgcctgcagaaaacagcaatccatgtccatagaa

SEQ ID NO: 21110 - DNA, 80 bp, synthetic construct
  source 1..80: mol_type = other DNA
gtattactggtaacttggcccacaactttccaaggctaaactttattctctttgacaggcagggcattgagacaggaaca

SEQ ID NO: 21111 - DNA, 80 bp, synthetic construct
  source 1..80: mol_type = other DNA
acgcagtctggactgagacatcaaacatgcaaaagcacctgtgaactgtggagagttaagatatattacttcttcctgaa

SEQ ID NO: 21112 - DNA, 80 bp, synthetic construct
  source 1..80: mol_type = other DNA
ttgccgtttttgtctagcttttcactataacacctatttcttcatggttattgacctcccaaagatgtccatgacctaat

SEQ ID NO: 21113 - DNA, 80 bp, synthetic construct; identical to SEQ ID NO: 9193
  source 1..80: mol_type = other DNA

SEQ ID NO: 21114 - DNA, 80 bp, synthetic construct
  source 1..80: mol_type = other DNA
ccgcacagttcttcaatctcttctgtcaggtgagaatacaggaagaaggtgccatcttggaagcagaagatgcaagtcct

SEQ ID NO: 21115 - DNA, 80 bp, synthetic construct
  source 1..80: mol_type = other DNA
gaaggggaccatgaaccaaagaatgtgagcagctttaaaagcttgaaaaggcaagaaaatgcatcttcccctagagcctc

SEQ ID NO: 21116 - DNA, 80 bp, synthetic construct
  source 1..80: mol_type = other DNA
tccctgccccaaccccaccaataccaaacgaaataagtttataatactaatgacactactctcttaggcctcattctctg

SEQ ID NO: 21117 - DNA, 80 bp, synthetic construct; identical to SEQ ID NO: 9194
  source 1..80: mol_type = other DNA

SEQ ID NO: 21118 - DNA, 80 bp, synthetic construct
  source 1..80: mol_type = other DNA
tttatgattttcttgatgattagtgatgttgagaacacttgcatatatagtatctattggccatttatatgtcttctttg

SEQ ID NO: 21119 - DNA, 80 bp, synthetic construct
  source 1..80: mol_type = other DNA
ttggatattaacccctaattgcatatatggatagcaaatatttccaatgattctgttggttgtctttttatttggttgat

SEQ ID NO: 21120 - DNA, 80 bp, synthetic construct
  source 1..80: mol_type = other DNA
tcaagtattatatttaagtctttagtccaatttgaggttatttttgtgcatggtataagataagggtccaatttattttt

SEQ ID NO: 21121 - DNA, 80 bp, synthetic construct; identical to SEQ ID NO: 9195
  source 1..80: mol_type = other DNA

SEQ ID NO: 21122 - DNA, 80 bp, synthetic construct
  source 1..80: mol_type = other DNA
tcttcttcaatatctgtcatcaatattttataattttcagcacacagaactttcacatcctaggttaaatatattcctaa

SEQ ID NO: 21123 - DNA, 80 bp, synthetic construct
  source 1..80: mol_type = other DNA
tttctctatataaggtcatgtaattttcaaacagagataattttgttttttcattttctctttgaatatcttttatttgt

SEQ ID NO: 21124 - DNA, 80 bp, synthetic construct
  source 1..80: mol_type = other DNA
gttatattccttttatacctcatttgttgagcatttttaccatgaaaaaatgaattctgtaaaatgctttttctgcatct

SEQ ID NO: 21125 - DNA, 80 bp, synthetic construct; identical to SEQ ID NO: 9196
  source 1..80: mol_type = other DNA

SEQ ID NO: 21126 - DNA, 80 bp, synthetic construct
  source 1..80: mol_type = other DNA
aaccatctgtttctagactttcctttttgggtcatagtgcttactgattcagtgtccttacttgtttttggtatgttcag

SEQ ID NO: 21127 - DNA, 80 bp, synthetic construct
  source 1..80: mol_type = other DNA
tttcatttctttgattcttttctcttttttaatccatctagctaaaggtttttgaattttgtttttcttttcaaaaaacc

SEQ ID NO: 21128 - DNA, 80 bp, synthetic construct
  source 1..80: mol_type = other DNA
gtcttcatgtaggtatttattgccacaaatatcatcttagaaatgctttcgatgcataccatagctttggtatgttgtat

SEQ ID NO: 21129 - DNA, 80 bp, synthetic construct; identical to SEQ ID NO: 9197
  source 1..80: mol_type = other DNA

SEQ ID NO: 21130 - DNA, 80 bp, synthetic construct
  source 1..80: mol_type = other DNA
cttcagatctgctaatatatgtgatatatttgcatatatcacatattgcatatatcatgggtgggctacgtccccaccca

SEQ ID NO: 21131 - DNA, 80 bp, synthetic construct
  source 1..80: mol_type = other DNA
ttgcctgctgccatccatataagacatgacttgctcctccttgccttctgccatgattgtgaggcctctccggccatatg

SEQ ID NO: 21132 - DNA, 80 bp, synthetic construct
  source 1..80: mol_type = other DNA
acttatcattacataaagatactcattgtctcttataacagtttttgacttaaattctattttgcctgaataaatatagc

SEQ ID NO: 21133 - DNA, 80 bp, synthetic construct
  source 1..80: mol_type = other DNA
aatctgtttatatttaaagtaatttttgataggtaagagctatttaaatctattggcattttgttgtttttggattgttt

SEQ ID NO: 21134 - DNA, 80 bp, synthetic construct; identical to SEQ ID NO: 9198
  source 1..80: mol_type = other DNA

SEQ ID NO: 21135 - DNA, 80 bp, synthetic construct
  source 1..80: mol_type = other DNA
actcaccatctttacagtataagaattttctgaatgtgactatatatgtatctttgccagtaatttttatgccttcatat

SEQ ID NO: 21136 - DNA, 80 bp, synthetic construct
  source 1..80: mol_type = other DNA
tttatctttcattcatttccatgggacagctttgctggataaagtattctaggttggcagtgtttctttttgttttcgtt

SEQ ID NO: 21137 - DNA, 80 bp, synthetic construct
  source 1..80: mol_type = other DNA
ggttgttttttctctttctgctttcgaattctcttttatttttttacagattatgtgtcattgaagacctctttggtttg

SEQ ID NO: 21138 - DNA, 80 bp, synthetic construct; identical to SEQ ID NO: 9199
  source 1..80: mol_type = other DNA

SEQ ID NO: 21139 - DNA, 80 bp, synthetic construct
  source 1..80: mol_type = other DNA
gttcatgtattgtttttctgatttgttcagttttctatgtgttctcttgtagcccaccaaactttcttaaaataattatt

SEQ ID NO: 21140 - DNA, 80 bp, synthetic construct
  source 1..80: mol_type = other DNA
atgtctgcccatttgatggagcagtcacctcttctagactttacagactggttttggtgaaaaagaccttcacatggagg

SEQ ID NO: 21141 - DNA, 80 bp, synthetic construct
  source 1..80: mol_type = other DNA
ggatccttgatgataaaggcttttggggtccacttgatctctttttctcccacagaggaagttgtggccaaggggatcac

SEQ ID NO: 21142 - DNA, 80 bp, synthetic construct; identical to SEQ ID NO: 9200
  source 1..80: mol_type = other DNA

SEQ ID NO: 21143 - DNA, 80 bp, synthetic construct
  source 1..80: mol_type = other DNA
gcaaataaacctattgtggcagtggctctggtgtcctaggaataggtgctcagtgtggccatggagctgggatctggagc

SEQ ID NO: 21144 - DNA, 80 bp, synthetic construct
  source 1..80: mol_type = other DNA
gtgtcagctggcccatagcagcagtggctttggtgtatgaagcatgtacatgtgtgatgcagccatagagtcagggtctg

SEQ ID NO: 21145 - DNA, 80 bp, synthetic construct
  source 1..80: mol_type = other DNA
agttgttgctggttaccttagtggcaaaagctgaggcatcctctgtgtagcaggccactgtgatccatgcagatgaacac

SEQ ID NO: 21146 - DNA, 80 bp, synthetic construct
  source 1..80: mol_type = other DNA
ttgttactagccatcttcagatgtctcaagtatactgctctctccagcaatcctttctgtgctgttattatctgtttttt

SEQ ID NO: 21147 - DNA, 80 bp, synthetic construct; identical to SEQ ID NO: 9201
  source 1..80: mol_type = other DNA

SEQ ID NO: 21148 - DNA, 80 bp, synthetic construct
  source 1..80: mol_type = other DNA
aggctgaggcaggagaatggcgtgaacccgggaggcggagcttgcagtgagccgagatcgcgccactgcactccagcctg

SEQ ID NO: 21149 - DNA, 80 bp, synthetic construct
  source 1..80: mol_type = other DNA
attagatattttctttacagactgagaagtaggcactatgacatgtggcctgaatctaggcctcataacaacccaataaa

SEQ ID NO: 21150 - DNA, 80 bp, synthetic construct
  source 1..80: mol_type = other DNA
cacttctagccatcagtactcttttcagaaaacacaaatgtgatctgatctttcccctgctcaacatccttcaattagca

SEQ ID NO: 21151 - DNA, 80 bp, synthetic construct; identical to SEQ ID NO: 9202
  source 1..80: mol_type = other DNA

SEQ ID NO: 21152 - DNA, 80 bp, synthetic construct
  source 1..80: mol_type = other DNA
agaacgatggtgaaagcgcattttaagttgtaaattcacttctggatgatagttattataaatatgccattccccttccc

SEQ ID NO: 21153 - DNA, 80 bp, synthetic construct
  source 1..80: mol_type = other DNA
tacaggactatggaggacagaattctcacaccctgacaaataaattttaaagaagcctacagatgaaagaatccatctca

SEQ ID NO: 21154 - DNA, 80 bp, synthetic construct
  source 1..80: mol_type = other DNA
actattttgtagaaattttcacacctttagcattcataagatccatgaagtattagcttcataattcataagatccatga

SEQ ID NO: 21155 - DNA, 80 bp, synthetic construct; identical to SEQ ID NO: 9203
  source 1..80: mol_type = other DNA

SEQ ID NO: 21156 - DNA, 80 bp, synthetic construct
  source 1..80: mol_type = other DNA
tagattaatgccctccctcaggggtgaatacattctcactttcttagtttgtacagagttcttagttcttagttctcact

SEQ ID NO: 21157 - DNA, 80 bp, synthetic construct
  source 1..80: mol_type = other DNA
catgcttctaatacagtttgtagaactataaggaaaataatcttctttcctttataaattagcctcaggtagtccattat

SEQ ID NO: 21158 - DNA, 80 bp, synthetic construct; identical to SEQ ID NO: 9204
  source 1..80: mol_type = other DNA

SEQ ID NO: 21159 - DNA, 80 bp, synthetic construct
  source 1..80: mol_type = other DNA
tcacagagtttctgagcctcccacagctactaatttactatgagggagtagtttctaactcaagaagattagattcttct

SEQ ID NO: 21160 - DNA, 80 bp, synthetic construct
  source 1..80: mol_type = other DNA
tttccatatgccaatattctgcacgtcagggactttccttttagacgaattcaaatgtctttccttaatcttctccctct

SEQ ID NO: 21161 - DNA, 80 bp, synthetic construct
  source 1..80: mol_type = other DNA
gcttactggtcttgttgctctcttctcttggcaaatttatctatgctgatggcttcagtgaccatgtcaatgttaatgat

SEQ ID NO: 21162 - DNA, 80 bp, synthetic construct
  source 1..80: mol_type = other DNA
tgactaaattgtgctcctctccaatataccattttaaaaaacactagaaatttctttttttatatgtcaaacatatagtc

SEQ ID NO: 21163 - DNA, 80 bp, synthetic construct; identical to SEQ ID NO: 9205
  source 1..80: mol_type = other DNA

SEQ ID NO: 21164 - DNA, 80 bp, synthetic construct
  source 1..80: mol_type = other DNA
tcctttgtttgttcttatttgggttgggagcagttccatggggaataaagaaggtggagagaaacatcccactacaatga

SEQ ID NO: 21165 - DNA, 80 bp, synthetic construct
  source 1..80: mol_type = other DNA
agtctggcttctgtgccaaatatatgtatcattctgtgtactttctagctgcagtctctttaaaagccaactgtgggtaa

SEQ ID NO: 21166 - DNA, 80 bp, synthetic construct; identical to SEQ ID NO: 9206
  source 1..80: mol_type = other DNA

SEQ ID NO: 21167 - DNA, 80 bp, synthetic construct
  source 1..80: mol_type = other DNA
gatcataataaagttgcttaaccactcaaaggttcatttcctcgtatgtaaaactgtggccaataatagcacctgcttca

SEQ ID NO: 21168 - DNA, 80 bp, synthetic construct
  source 1..80: mol_type = other DNA
tcgttttttttaattctcggcagctatattttttcacttctgactcaaggcttttaaaacttctttatgtttgtctatta

SEQ ID NO: 21169 - DNA, 80 bp, synthetic construct
  source 1..80: mol_type = other DNA
gaggagcttacagtctactgaaacggatgggcattaaataaaccatcacaggaagaagtacaggatcacaaatggtctca

SEQ ID NO: 21170 - DNA, 80 bp, synthetic construct
  source 1..80: mol_type = other DNA
tctaaagccccaatcctaaaataatacggattaatcttaaaggctagaatatgtgtttccaataagctacttctttgctc

SEQ ID NO: 21171 - DNA, 80 bp, synthetic construct; identical to SEQ ID NO: 9207
  source 1..80: mol_type = other DNA

SEQ ID NO: 21172 - DNA, 80 bp, synthetic construct
  source 1..80: mol_type = other DNA
ttagaatctcagtgctcagtttctttatttagtaaagtggggttaacaatagtatctacctgaagtgttagaagagaatg

SEQ ID NO: 21173 - DNA, 80 bp, synthetic construct
  source 1..80: mol_type = other DNA
tgacatgtattgagaacccagtaatactatgaatgaaatggtagctattgacgctaagcttaattttttttctttttctt

SEQ ID NO: 21174 - DNA, 80 bp, synthetic construct
  source 1..80: mol_type = other DNA
gtcagcctcccaagcagctgaaattacaggcatatgccaccacacctggctaatgttgtatttttagtagagatagggtt

SEQ ID NO: 21175 - DNA, 80 bp, synthetic construct; identical to SEQ ID NO: 9208
  source 1..80: mol_type = other DNA

SEQ ID NO: 21176 - DNA, 80 bp, synthetic construct
  source 1..80: mol_type = other DNA
tccttcctaaaataggcagaatttaccacctatgctttaacaaaggcttgaataagcagagcatttagagaggagagttc

SEQ ID NO: 21177 - DNA, 80 bp, synthetic construct
  source 1..80: mol_type = other DNA
accttgaaccttaatatggtgtctagcaaatgtttggtttttagcaacaaattgtagagttgaatatttcttaaggctga

SEQ ID NO: 21178 - DNA, 80 bp, synthetic construct
  source 1..80: mol_type = other DNA
tttacaaatctagctttgggaaattaccgtggttagttttcttagctcatgcttcacaatgtatgcagttttgccaattg

SEQ ID NO: 21179 - DNA, 80 bp, synthetic construct; identical to SEQ ID NO: 9209
  source 1..80: mol_type = other DNA

SEQ ID NO: 21180 - DNA, 80 bp, synthetic construct
  source 1..80: mol_type = other DNA
ttatattttcatttctgatgccagaatccacctgtgactattaaagatgtagagaggtctgtttgccttacatcattccc

SEQ ID NO: 21181 - DNA, 80 bp, synthetic construct
  source 1..80: mol_type = other DNA
acggtaagtacagatgggctaatgacatacaaaagtaaaaggagaaaatctttattaaaagatcctacaacacagaaatg

SEQ ID NO: 21182 - DNA, 80 bp, synthetic construct; identical to SEQ ID NO: 9210
  source 1..80: mol_type = other DNA

SEQ ID NO: 21183 - DNA, 80 bp, synthetic construct
  source 1..80: mol_type = other DNA
actgattggcctctttagtgcatctgctgtgcaaatgacaattaattaccagtgatatgttgatcactccaagtatatct

SEQ ID NO: 21184 - DNA, 80 bp, synthetic construct
  source 1..80: mol_type = other DNA
ggcatcattatctgcccaatcattgacaaggaaacatgggaggtatcctagaaaactttaccttccacatcagttgagca

SEQ ID NO: 21185 - DNA, 80 bp, synthetic construct
  source 1..80: mol_type = other DNA
tttaccaaatatggtttgtataacaaaacactcattgaaaactactcaatgaaaatccgtggacctcacagacactaaaa

SEQ ID NO: 21186 - DNA, 80 bp, synthetic construct; identical to SEQ ID NO: 9211
  source 1..80: mol_type = other DNA

SEQ ID NO: 21187 - DNA, 80 bp, synthetic construct
  source 1..80: mol_type = other DNA
acctttcatctttcaaattttctctcaggtgtcactttttctttgacatttccatgacaccgtccaatcccctggctcaa

SEQ ID NO: 21188 - DNA, 80 bp, synthetic construct
  source 1..80: mol_type = other DNA
agaaagaaagaaatatatacatttcaggaagatttttctaccactatatataacgctatgtctaaataggattttcttac

SEQ ID NO: 21189 - DNA, 80 bp, synthetic construct
  source 1..80: mol_type = other DNA
ctgctctcagtatttgactggtatacttggaggaaatccatgaaatatttgaccataaaattgtcaacactgcaagagga

SEQ ID NO: 21190 - DNA, 80 bp, synthetic construct
  source 1..80: mol_type = other DNA
agcaatgatcctaggttcttaaatattcaccacagaaacaacctaagtttatatattttgcagtatagactttttttccc

SEQ ID NO: 21191 - DNA, 80 bp, synthetic construct; identical to SEQ ID NO: 9212
  source 1..80: mol_type = other DNA

SEQ ID NO: 21192 - DNA, 80 bp, synthetic construct
  source 1..80: mol_type = other DNA
ctgaccccttaacctcattatgtcattccaaaataatgactgaaggccaattcattggatttggcactggaaagacaagg

SEQ ID NO: 21193 - DNA, 80 bp, synthetic construct
  source 1..80: mol_type = other DNA
attacataacctacttaaaattatgtaataacttagttgggaagaccaaatttgaattgattttgtctgtctctagggtc

SEQ ID NO: 21194 - DNA, 80 bp, synthetic construct; identical to SEQ ID NO: 9213
  source 1..80: mol_type = other DNA

SEQ ID NO: 21195 - DNA, 80 bp, synthetic construct
  source 1..80: mol_type = other DNA
attcactgaggcaaaattagtgaatttgcctccctgttctcttataacacttatgcccttaccatagggcttggatgtaa

SEQ ID NO: 21196 - DNA, 80 bp, synthetic construct
  source 1..80: mol_type = other DNA
gtaagtgtttgtataatgaatagtattcaatctttatctgcctttgatgttgagcatctttatagagacagaaaacctca

SEQ ID NO: 21197 - DNA, 80 bp, synthetic construct
  source 1..80: mol_type = other DNA
gttttctagaagtttgactttaactcttcaactgtttgaccagctgacacatatatggaggggaaactattatatggggc

SEQ ID NO: 21198 - DNA, 80 bp, synthetic construct; identical to SEQ ID NO: 9214
  source 1..80: mol_type = other DNA

SEQ ID NO: 21199 - DNA, 80 bp, synthetic construct
  source 1..80: mol_type = other DNA
aatggtttcttaaatacgacataaaattgatgaaataagcaatgattttaaaaaattagacaaattggacaatgataaaa

SEQ ID NO: 21200 - DNA, 80 bp, synthetic construct
  source 1..80: mol_type = other DNA
acatatctaagagtctagtatccagaacgtataagtaactcctacaactcaataataaaataaccgaatttaaaaatgag

SEQ ID NO: 21201 - DNA, 80 bp, synthetic construct
  source 1..80: mol_type = other DNA
aaaatttggactttcatatgttgctgatgggaatgtaaaaaggtatagccacttggaaaacagtttggcagttcctcaaa

SEQ ID NO: 21202 - DNA, 80 bp, synthetic construct; identical to SEQ ID NO: 9215
  source 1..80: mol_type = other DNA

SEQ ID NO: 21203 - DNA, 80 bp, synthetic construct
  source 1..80: mol_type = other DNA
gcaacctctgcctcccaggttcaagcgattctcctgcttcagcttcctgagtagctgggattacaggcgcccgccaccat

SEQ ID NO: 21204 - DNA, 80 bp, synthetic construct
  source 1..80: mol_type = other DNA
tatgaaatttccacaatatgccaatccacagaagcagaaaatagatcagcgttttctaatagctggcagaaggaggaatg

SEQ ID NO: 21205 - DNA, 80 bp, synthetic construct
  source 1..80: mol_type = other DNA
aaaaagtactttttacatagcattgttgtaagactaaattaaagaaagtatgtaaagtgcacaggacctgtaatcgataa

SEQ ID NO: 21206 - DNA, 80 bp, synthetic construct; identical to SEQ ID NO: 9216
  source 1..80: mol_type = other DNA

SEQ ID NO: 21207 - DNA, 80 bp, synthetic construct
  source 1..80: mol_type = other DNA
gaaaaaatacaatgtaatcacaacaacgtcagagtttcatatcatcgttaatagagctactggctgtagcaaaaatattt

SEQ ID NO: 21208 - DNA, 80 bp, synthetic construct
  source 1..80: mol_type = other DNA
tgcacgaaatgtttaatgtgtccttgaccaaaagggaatacaacattaattttgttttgaggacaagtggactccagaca

SEQ ID NO: 21209 - DNA, 80 bp, synthetic construct
  source 1..80: mol_type = other DNA
agaaaattctgttcctgaggtggtgggatttttagggaacttacctttctcaagaacataatttcaaaagacactctgta

SEQ ID NO: 21210 - DNA, 80 bp, synthetic construct; identical to SEQ ID NO: 9217
  source 1..80: mol_type = other DNA

SEQ ID NO: 21211 - DNA, 80 bp, synthetic construct
  source 1..80: mol_type = other DNA
atgtaattaaaattgaagaggatttgacatcccaaatcctttttaaatgtttttctgtatatggtcagcagaaaacacaa

SEQ ID NO: 21212 - DNA, 80 bp, synthetic construct
  source 1..80: mol_type = other DNA
ttcctgatttttagatttacttccaatttccccatcccatcttaaatactaccacaaactgttctgaaaactctttccta

SEQ ID NO: 21213 - DNA, 80 bp, synthetic construct
  source 1..80: mol_type = other DNA
attttccccattccctaacgcataccttccacttcaatcacactaattttcttcatttcctcaatatgtcagattcatac

SEQ ID NO: 21214 - DNA, 80 bp, synthetic construct
  source 1..80: mol_type = other DNA
acatttctcatgtaattgaagaataggctggtgaaatcttaagtgcttaatcaatgtgcattgaattgagctaaatttat

SEQ ID NO: 21215 - DNA, 80 bp, synthetic construct; identical to SEQ ID NO: 9218
  source 1..80: mol_type = other DNA

SEQ ID NO: 21216 - DNA, 80 bp, synthetic construct
  source 1..80: mol_type = other DNA
agtaatgagcacttagtgtaattctcctgttttctgagttcacctattgaggaaaactgaagagtgttttcatagtcaag

SEQ ID NO: 21217 - DNA, 80 bp, synthetic construct
  source 1..80: mol_type = other DNA
aagaaagtctcaagggaaaaaatgtcagtgggatgagcccttttaggagaagcagaataaaagactgactacaaatcaaa

SEQ ID NO: 21218 - DNA, 80 bp, synthetic construct
  source 1..80: mol_type = other DNA
aggaaataactgatatgaagcacatcggtgccttaatagtggctgaatatgtgggctagtttaaaggtgaaaaagtctct

SEQ ID NO: 21219 - DNA, 80 bp, synthetic construct; identical to SEQ ID NO: 9219
  source 1..80: mol_type = other DNA

SEQ ID NO: 21220 - DNA, 80 bp, synthetic construct
  source 1..80: mol_type = other DNA
cagaagaaccaatacttcacaaactgtgtttagactttattagctgagcaaaattaatgacaagagaatgccacgagaca

SEQ ID NO: 21221 - DNA, 80 bp, synthetic construct
  source 1..80: mol_type = other DNA
taaaatgcttactaaatctttgggaaggctagagagagaggctctaggctgggaattcagaaatgtttccataacactgt

SEQ ID NO: 21222 - DNA, 80 bp, synthetic construct
  source 1..80: mol_type = other DNA
ctagaacttggatgctggaacccatcacagaaaactcatatttccacaatctcacttattagcagaaaacaatggaagca

SEQ ID NO: 21223 - DNA, 80 bp, synthetic construct; identical to SEQ ID NO: 9220
  source 1..80: mol_type = other DNA

SEQ ID NO: 21224 - DNA, 80 bp, synthetic construct
  source 1..80: mol_type = other DNA
agcattaattcaggcatctgtgaacattgttaccttttagtcttatgtcaaacctagttcttcttccaaactcagactta

SEQ ID NO: 21225 - DNA, 80 bp, synthetic construct
  source 1..80: mol_type = other DNA
ggtcttttcttctttggggtaaaacctaccaatatggcaatatttgcaccttatctttattttgttttctgctgaccaca

SEQ ID NO: 21226 - DNA, 80 bp, synthetic construct; identical to SEQ ID NO: 9221
  source 1..80: mol_type = other DNA

SEQ ID NO: 21227 - DNA, 80 bp, synthetic construct
  source 1..80: mol_type = other DNA
ctctttaaacaaggagataattattgttcaaaagttgttagatcaagtggatctagtagttttgtgctaagagcatatag

SEQ ID NO: 21228 - DNA, 80 bp, synthetic construct
  source 1..80: mol_type = other DNA
taaatcaaaaggaactattgtattcagcacacaaagcagtgaaggctgtgattaacctcaagagaagtttggggtgctta

SEQ ID NO: 21229 - DNA, 80 bp, synthetic construct
  source 1..80: mol_type = other DNA
tatataatatacacacatataaatgttgaggggtatattagagagatcacacaataaggctttttcctttgctttttaca

SEQ ID NO: 21230 - DNA, 80 bp, synthetic construct; identical to SEQ ID NO: 9222
  source 1..80: mol_type = other DNA

SEQ ID NO: 21231 - DNA, 80 bp, synthetic construct
  source 1..80: mol_type = other DNA
gtggcatgcacctgtagtcccagctacgtggaaggctgaggctggagaatcgcgtgaacccgggaggtggaggttgcagt

SEQ ID NO: 21232 - DNA, 80 bp, synthetic construct
  source 1..80: mol_type = other DNA
atatgtaattatatatattatttaatatatgtatgtttgtgtgtgtgtacttgctttttaaacagacttatgttggacat

SEQ ID NO: 21233 - DNA, 80 bp, synthetic construct
  source 1..80: mol_type = other DNA
aacatgaaaaattaagtattaatttcatggtgacagatatttaccatctattttttctgagcataacatatagtaatata

SEQ ID NO: 21234 - DNA, 80 bp, synthetic construct
  source 1..80: mol_type = other DNA
cttgaccctaaagatgtaatgacataaagtgctcagttttgagaagtatatttcactttgtgtactgatggattttcctc

SEQ ID NO: 21235 - DNA, 80 bp, synthetic construct; identical to SEQ ID NO: 9223
  source 1..80: mol_type = other DNA

SEQ ID NO: 21236 - DNA, 80 bp, synthetic construct
  source 1..80: mol_type = other DNA
ccctctactgacctccatttttctcatcttgttaatgcagttcttactgaaattaacatttgtctgaactgttcaagagt

SEQ ID NO: 21237 - DNA, 80 bp, synthetic construct
  source 1..80: mol_type = other DNA
ggcataaatatgaccactcacaaaatgtgtttaaataagtaaataatatggaaaaatacaacacaaatatgtaatgaata

SEQ ID NO: 21238 - DNA, 80 bp, synthetic construct
  source 1..80: mol_type = other DNA
aaccagaatgaattcaacctaacgcaaggattaaaagaatgtaagagatctgtccaagatctgggaatacatcgaatcct

SEQ ID NO: 21239 - DNA, 80 bp, synthetic construct; identical to SEQ ID NO: 9224
  source 1..80: mol_type = other DNA

SEQ ID NO: 21240 - DNA, 80 bp, synthetic construct
  source 1..80: mol_type = other DNA
aagccttatagacataaatcctgtctactgatacattataaagtctcagaaaagtcagtgattatatacaggaaagtaga

SEQ ID NO: 21241 - DNA, 80 bp, synthetic construct
  source 1..80: mol_type = other DNA
tataaatcagctaaattcttgtaatgcacaactaactacacatattcttcagcccacggaggccatacaatggagatttg

SEQ ID NO: 21242 - DNA, 80 bp, synthetic construct; identical to SEQ ID NO: 9225
  source 1..80: mol_type = other DNA

SEQ ID NO: 21243 - DNA, 80 bp, synthetic construct
  source 1..80: mol_type = other DNA
tatgtatatatatatatgtatatatgtgtatatatatatatgtgtgtatatatatatatatatatatacatatatatata

SEQ ID NO: 21244 - DNA, 80 bp, synthetic construct
  source 1..80: mol_type = other DNA
agtggagccaaggatccgtaatttttacagttctcaagtgactacaatatgcaacaaatgttgagaaccactgtccacac

SEQ ID NO: 21245 - DNA, 80 bp, synthetic construct
  source 1..80: mol_type = other DNA
taattttctttgttaaataaatgtattttatcttaatttcagtttcttctatatcatgatttaaaatgcagaaagtatgt

SEQ ID NO: 21246 - DNA, 80 bp, synthetic construct
  source 1..80: mol_type = other DNA
caaattcgtaagaattaaaagtccggaaagaaagaaatcgaaatccaaacttactgcatgttaacattttaataatgtac

SEQ ID NO: 21247 - DNA, 80 bp, synthetic construct; identical to SEQ ID NO: 9226
  source 1..80: mol_type = other DNA

SEQ ID NO: 21248 - DNA, 80 bp, synthetic construct
  source 1..80: mol_type = other DNA
ttctcacctgttaaatgaaggatttagttatgccaaaggtcccaaactttctcagttcacagcattcctagtgtctcagt

SEQ ID NO: 21249 - DNA, 80 bp, synthetic construct
  source 1..80: mol_type = other DNA
tgggcacttcataacttctcaaacttaggaataaacttggaaaccgctaccctcattcctgttctacagtaattttccca

SEQ ID NO: 21250 - DNA, 80 bp, synthetic construct; identical to SEQ ID NO: 9227
  source 1..80: mol_type = other DNA

SEQ ID NO: 21251 - DNA, 80 bp, synthetic construct
  source 1..80: mol_type = other DNA
tgttcagtctgcatgaaattccccttcctccccaggtcacctataaaatgcctacctatgcctacctataaaatgcctac

SEQ ID NO: 21252 - DNA, 80 bp, synthetic construct
  source 1..80: mol_type = other DNA
ctctctcattagaatgtaagctctaagaggaaagaacatgtctgatatcactactgtaacccacagtgtctggtatatta

SEQ ID NO: 21253 - DNA, 80 bp, synthetic construct
  source 1..80: mol_type = other DNA
cagctgcatctgaaacctcagaaactaagctcaacccaattgattaaaaggatgttctttggataaggtaatcaaatgtt

SEQ ID NO: 21254 - DNA, 80 bp, synthetic construct; identical to SEQ ID NO: 9228
  source 1..80: mol_type = other DNA

SEQ ID NO: 21255 - DNA, 80 bp, synthetic construct
  source 1..80: mol_type = other DNA
tgaaagtcaaaataaggtagaaaatgactgcaccaaatagccaacaaccttaaaaagggtaggatttttttaaatcacta

SEQ ID NO: 21256 - DNA, 80 bp, synthetic construct
  source 1..80: mol_type = other DNA
tataagtaagcacagataaatgaagaaatgaaagagaagggaaaaatagagatggttgattctgcctctgcaattgctaa

SEQ ID NO: 21257 - DNA, 80 bp, synthetic construct
  source 1..80: mol_type = other DNA
tgcctaattattttctcttatcacaggatacagggtggatgtccatctacttccttgttgtcacttcccagatcactttc

SEQ ID NO: 21258 - DNA, 80 bp, synthetic construct; identical to SEQ ID NO: 9229
  source 1..80: mol_type = other DNA

SEQ ID NO: 21259 - DNA, 80 bp, synthetic construct
  source 1..80: mol_type = other DNA
taagtgctgtttctgttagtatctaatctattagtcctaatctcccatttatgctttggcactcattccctcctgctttc

SEQ ID NO: 21260 - DNA, 80 bp, synthetic construct
  source 1..80: mol_type = other DNA
tctctcatccacagctaaacttggaagaaaaattgcctgcttgaggatgccattttgttatcttcagctcaatcctgtac

SEQ ID NO: 21261 - DNA, 80 bp, synthetic construct
  source 1..80: mol_type = other DNA
catggtcctccatgacacaatacataatagtccccttattatctatattcctgtctattgtaaagacttcccccgcacac

SEQ ID NO: 21262 - DNA, 80 bp, synthetic construct; identical to SEQ ID NO: 9230
  source 1..80: mol_type = other DNA

SEQ ID NO: 21263 - DNA, 80 bp, synthetic construct
  source 1..80: mol_type = other DNA
ggggcggggctacgcgggatctgggcggggcggggccggtgaggggtcgggggtgctcctgctattcagccggtgcgcgc

SEQ ID NO: 21264 - DNA, 80 bp, synthetic construct
  source 1..80: mol_type = other DNA
tggatttaggaagtcccgggagcagcgcggcggcacctccctcacccaaggggccgcggcgacggtcacggggcgcggcg

SEQ ID NO: 21265 - DNA, 80 bp, synthetic construct
  source 1..80: mol_type = other DNA
cgccaggcccaggcagctcacctgtactggcgcgggctgcggaagcctgcgtgagccgaggcgttgaggcgcggcgccca

SEQ ID NO: 21266 - DNA, 80 bp, synthetic construct
  source 1..80: mol_type = other DNA
cgccaacatcacctacgccagtcgcaagcggcggaagccggtgcagaaaacgtgagtgtcccgagcgcgtcctcatcgcg

SEQ ID NO: 21267 - DNA, 80 bp, synthetic construct; identical to SEQ ID NO: 9231
  source 1..80: mol_type = other DNA

SEQ ID NO: 21268 - DNA, 80 bp, synthetic construct
  source 1..80: mol_type = other DNA
aggacggtcttaattctcattcttcgtagagtttggtaaggcgagatgttttaaagagctaaacacatgctgacttttac

SEQ ID NO: 21269 - DNA, 80 bp, synthetic construct
  source 1..80: mol_type = other DNA
ggatacggtggaggatttgtattcttcagacatctttttcggaagcttgcttatcacttttggggtggctttagggtctg

SEQ ID NO: 21270 - DNA, 80 bp, synthetic construct
  source 1..80: mol_type = other DNA
gtcggttgattttggtggaatatttgtgtgagatggccaattttttgtgtgtgtcagaaaaaactatccgtgctcaaaac

SEQ ID NO: 21271 - DNA, 80 bp, synthetic construct; identical to SEQ ID NO: 9232
  source 1..80: mol_type = other DNA

SEQ ID NO: 21272 - DNA, 80 bp, synthetic construct
  source 1..80: mol_type = other DNA
ttttatggtacagtgtgtcttaagggaatattgtcaaaccagcagttttctaccttggcagtttgagacatcggttatta

SEQ ID NO: 21273 - DNA, 80 bp, synthetic construct
  source 1..80: mol_type = other DNA
gttttatgtgtatggtgagaaaacatgaagatctccctgatgtgtttttaagatactgggtttcagttagggtgttatca

SEQ ID NO: 21274 - DNA, 80 bp, synthetic construct
  source 1..80: mol_type = other DNA
ttttgttagcatagatgtttatcagatctctgctgagcaccgtatattgcttctaatcatacagatgccttaaatattac

SEQ ID NO: 21275 - DNA, 80 bp, synthetic construct; identical to SEQ ID NO: 9233
  source 1..80: mol_type = other DNA

SEQ ID NO: 21276 - DNA, 80 bp, synthetic construct
  source 1..80: mol_type = other DNA
ttggagtaaagtaggtgacaattgtaacctgaagctctttcaatcttgagttgaatttattaagaaaaatcaaccccccc

SEQ ID NO: 21277 - DNA, 80 bp, synthetic construct
  source 1..80: mol_type = other DNA
tttttggagtaatgaaggttgggaaattaaaggctctgaagcaactttacgtccaattcatgttcctaccttcaagaaga

SEQ ID NO: 21278 - DNA, 80 bp, synthetic construct
  source 1..80: mol_type = other DNA
gaaatgaaagtgtttatttattttgtctcatgaagatagtcaaaaaggccattatataattaaatagaatgtttttccct

SEQ ID NO: 21279 - DNA, 80 bp, synthetic construct; identical to SEQ ID NO: 9234
  source 1..80: mol_type = other DNA

SEQ ID NO: 21280 - DNA, 80 bp, synthetic construct
  source 1..80: mol_type = other DNA
aatagcatctaaaataaaagaatgggtcttttcatttacacaattatttctccatcatttttctttccaatagctttaga

SEQ ID NO: 21281 - DNA, 80 bp, synthetic construct
  source 1..80: mol_type = other DNA
cactggatctaaactaaaaaatgaggtctagtttcttcactgttacagatctgggcaagtttcttgaccaataaagcacg

SEQ ID NO: 21282 - DNA, 80 bp, synthetic construct; identical to SEQ ID NO: 9235
  source 1..80: mol_type = other DNA

SEQ ID NO: 21283 - DNA, 80 bp, synthetic construct
  source 1..80: mol_type = other DNA
tagtggcttaatatgacaaaagatgactgtttattagcacttattctgatacaagcttgcccagttctttacatcatttt

SEQ ID NO: 21284 - DNA, 80 bp, synthetic construct
  source 1..80: mol_type = other DNA
tctttttgcttcaaagcttgtgttcttactgacttgtgttcgtactgtccaggtgaacagattcagtgatgcatacagta

SEQ ID NO: 21285 - DNA, 80 bp, synthetic construct
  source 1..80: mol_type = other DNA
cctttcctcttagagtcttttctcctgtcttattgatttgctacccacctcccttcctctttaaaacattgtttttaaag

SEQ ID NO: 21286 - DNA, 80 bp, synthetic construct
  source 1..80: mol_type = other DNA
ctgtaagggaattttgggatagaaaagtatgtgttgttttaaggttgaaccaaatcgtacactccaagagatagtatcaa

SEQ ID NO: 21287 - DNA, 80 bp, synthetic construct; identical to SEQ ID NO: 9236
  source 1..80: mol_type = other DNA

SEQ ID NO: 21288 - DNA, 80 bp, synthetic construct
  source 1..80: mol_type = other DNA
cttatcttttgatgtcttactgtggtagttagggattttagtgctgtcttgtctcactttaacctttttcaccttcctgc

SEQ ID NO: 21289 - DNA, 80 bp, synthetic construct
  source 1..80: mol_type = other DNA
tttattagcatctgggtttagctgtcacttaggttcatcggagacagagtttgtgtttctggctcctgcttttcttgttt

SEQ ID NO: 21290 - DNA, 80 bp, synthetic construct
  source 1..80: mol_type = other DNA
aaagaatgtctttaaagataggactattatttgtctttgaaactaccagagcttcccagtacagtaccatgcacttagta

SEQ ID NO: 21291 - DNA, 80 bp, synthetic construct; identical to SEQ ID NO: 9237
  source 1..80: mol_type = other DNA

SEQ ID NO: 21292 - DNA, 80 bp, synthetic construct
  source 1..80: mol_type = other DNA
ttttgactcatatagggaaataaaatatccagctgtgttcagcctgacaatgaagttggggtctatttgtgctatgtgtc

SEQ ID NO: 21293 - DNA, 80 bp, synthetic construct
  source 1..80: mol_type = other DNA
gggctttattgggtgtaggtagtatggtagggggattttattgaggaatacttcagatttcctagctgttagatggagag

SEQ ID NO: 21294 - DNA, 80 bp, synthetic construct
  source 1..80: mol_type = other DNA
cagtaagagtagattaaatcaccccgaggaaaaatccgatagagcaaactcagtactgtgagaggcaatctcttgttaaa

SEQ ID NO: 21295 - DNA, 80 bp, synthetic construct; identical to SEQ ID NO: 9238
  source 1..80: mol_type = other DNA

SEQ ID NO: 21296 - DNA, 80 bp, synthetic construct
  source 1..80: mol_type = other DNA
tatttcaggagatgtttgaactccagagctcccaaatccaatcttacagggatgtttatttatatttcaaacaggctttt

SEQ ID NO: 21297 - DNA, 80 bp, synthetic construct
  source 1..80: mol_type = other DNA
aacaaaatctgtacatttctcacaaaatcagtgaaaaagtgggtcaaatgcattacctttgttagctttaacaatctgac

SEQ ID NO: 21298 - DNA, 80 bp, synthetic construct; identical to SEQ ID NO: 9239
  source 1..80: mol_type = other DNA

SEQ ID NO: 21299 - DNA, 80 bp, synthetic construct
  source 1..80: mol_type = other DNA
tctctcttcaagccagtcctttcttaacctcactgtcactgcctttggtcaggttgtgatcattccttttcttggcactt

SEQ ID NO: 21300 - DNA, 80 bp, synthetic construct
  source 1..80: mol_type = other DNA
agacacatagtaatgcattagaaatgtagacaattttgcattatgaaaagcaagcctcagaatctagtgtgaggctgaat

SEQ ID NO: 21301 - DNA, 80 bp, synthetic construct
  source 1..80: mol_type = other DNA
ctctccagtgtttcataatcattactggaaagccaccaagagtgcaggactggattgtgtacacactttctatttctgtg

SEQ ID NO: 21302 - DNA, 80 bp, synthetic construct; identical to SEQ ID NO: 9240
  source 1..80: mol_type = other DNA

SEQ ID NO: 21303 - DNA, 80 bp, synthetic construct
  source 1..80: mol_type = other DNA
acatggacagttcagagctactgaaggagtttaatcagaggagtgacacagtcagatttatgttttagaaagaagttcct

SEQ ID NO: 21304 - DNA, 80 bp, synthetic construct
  source 1..80: mol_type = other DNA
ctatcttgaacatttttgcatcagacacccacatagctcacttcattttactcatgtctgtcctgaaacatcacatcaga

SEQ ID NO: 21305 - DNA, 80 bp, synthetic construct
  source 1..80: mol_type = other DNA
gcttttgtatattttgtttacctgtaagtgttctgtgctgggcacttgataggtgttcagcatttgttgaaagaatgtgg

SEQ ID NO: 21306 - DNA, 80 bp, synthetic construct; identical to SEQ ID NO: 9241
  source 1..80: mol_type = other DNA

SEQ ID NO: 21307 - DNA, 80 bp, synthetic construct
  source 1..80: mol_type = other DNA
aatatgattaggggaaaatagctaggggaaccatcaccaatttctattatatacacagttgtacagacaacctggagaag

SEQ ID NO: 21308 - DNA, 80 bp, synthetic construct
  source 1..80: mol_type = other DNA
ttacttctccacatacatcactgaaaagaaattatctagaaatgttttgattgggtcatattaatagcactatgcccagg

SEQ ID NO: 21309 - DNA, 80 bp, synthetic construct
  source 1..80: mol_type = other DNA
ttactcttctggctaacaggaaggtatagaggtataaggtataaattactttagtttcccagttcagcgtgggtatctga

SEQ ID NO: 21310 - DNA, 80 bp, synthetic construct
  source 1..80: mol_type = other DNA
tttattctcaggtgaaaatcatgctaaattgtttagggttccgttgaactttctaattgagacacaagctacgaaagcta

SEQ ID NO: 21311 - DNA, 80 bp, synthetic construct; identical to SEQ ID NO: 9242
  source 1..80: mol_type = other DNA

SEQ ID NO: 21312 - DNA, 80 bp, synthetic construct
  source 1..80: mol_type = other DNA
tttccaccaaacaatggctaatgcatttgagaggggaaaaaaatcccagtagatctgttaattgggaatcactgtgctac

SEQ ID NO: 21313 - DNA, 80 bp, synthetic construct
  source 1..80: mol_type = other DNA
aagacttacgtaaactttaagtagactttaaaagtttgttgtgttagagaaatatttgaggagatgttataatgcaatag

SEQ ID NO: 21314 - DNA, 80 bp, synthetic construct; identical to SEQ ID NO: 9243
  source 1..80: mol_type = other DNA

SEQ ID NO: 21315 - DNA, 80 bp, synthetic construct
  source 1..80: mol_type = other DNA
cttaaaatcaattttccagttttattcacccaacagatgcagccactgaaatgatgcatggtatcattctttgaaaatca

SEQ ID NO: 21316 - DNA, 80 bp, synthetic construct
  source 1..80: mol_type = other DNA
ttacgtatatttctaatctttttttttttttttgaggcagacttttgctcttgttgcccaggctcgagtgcaatgacacg

SEQ ID NO: 21317 - DNA, 80 bp, synthetic construct
  source 1..80: mol_type = other DNA
ctcctgacctcaggtgatctgcccgtctcagcctcccaaagtgctgggattacaggcatgagccactgcgcctggcctat

SEQ ID NO: 21318 - DNA, 80 bp, synthetic construct; identical to SEQ ID NO: 9244
  source 1..80: mol_type = other DNA

SEQ ID NO: 21319 - DNA, 80 bp, synthetic construct
  source 1..80: mol_type = other DNA
taaaatctcagtgggctatgtcagtcaatgcttctcatacattaatgtgcttacaaatcacatagggatcttgttaagat

SEQ ID NO: 21320 - DNA, 80 bp, synthetic construct
  source 1..80: mol_type = other DNA
tttcgtctgagcatctttttattgatttgcttgcttgctctcccgtctttcttttggacaaaagctatttagtttaacag

SEQ ID NO: 21321 - DNA, 80 bp, synthetic construct
  source 1..80: mol_type = other DNA
cagtattcagtgatggtctgtaagtatgtgtgtattagctatagtcatttagctgacatagttggaactagaactcaggt

SEQ ID NO: 21322 - DNA, 80 bp, synthetic construct; identical to SEQ ID NO: 9245
  source 1..80: mol_type = other DNA

SEQ ID NO: 21323 - DNA, 80 bp, synthetic construct
  source 1..80: mol_type = other DNA
ttctggagtctagaagccaaggaggcattattctctgactctgataaagctttattgacttgagtcattttacctttcca

SEQ ID NO: 21324 - DNA, 80 bp, synthetic construct
  source 1..80: mol_type = other DNA
tattcagtgcttcaagtaaaggagatctcacagtctatcttataaagcatgtcatagtttaacacagggttcatcacgga

SEQ ID NO: 21325 - DNA, 80 bp, synthetic construct; identical to SEQ ID NO: 9246
  source 1..80: mol_type = other DNA

SEQ ID NO: 21326 - DNA, 80 bp, synthetic construct
  source 1..80: mol_type = other DNA
cttgtgttatagtggtgtacattcagcctaagcagtttcttagattgtttgatacagaaacatacagttagatggaaaat

SEQ ID NO: 21327 - DNA, 80 bp, synthetic construct
  source 1..80: mol_type = other DNA
gctaacaatgattaggatttttgtgtgcagttggacccactcttccactattagggaaacagtatagcgaagcgaaggga

SEQ ID NO: 21328 - DNA, 80 bp, synthetic construct
  source 1..80: mol_type = other DNA
aaataatccaacttggatggatcttcttaaagtttggaaccatgactatactgctgctgctgtctgaaaagcaacactat

SEQ ID NO: 21329 - DNA, 80 bp, synthetic construct
  source 1..80: mol_type = other DNA
ttctttgacatgatttaagcattacatttaaatatattatctctgagatggagggtattttaaaaatttaaataacaatg

SEQ ID NO: 21330 - DNA, 80 bp, synthetic construct; identical to SEQ ID NO: 9247
  source 1..80: mol_type = other DNA

SEQ ID NO: 21331 - DNA, 80 bp, synthetic construct
  source 1..80: mol_type = other DNA
gacaaaatggagcttagggatccgagtttctgatttcaaagtcttgcatttgcagctgtcatagggaatagtagtattct

SEQ ID NO: 21332 - DNA, 80 bp, synthetic construct
  source 1..80: mol_type = other DNA
atattatgtgatgatctaacatttatttgaccccattgtttatcatggatctttcttgactttattttaaattaaaaatt

SEQ ID NO: 21333 - DNA, 80 bp, synthetic construct
  source 1..80: mol_type = other DNA
cttgaaaaacaagtatacgtacatgtgtatatgcaaagaacaagcttgaacaagcagtaaaaatgaagtaatgcacttct

SEQ ID NO: 21334 - DNA, 80 bp, synthetic construct
  source 1..80: mol_type = other DNA
taattctaggactatccaaagtaggtttgtttgcataacagtttagcacatttgaaatcaccaaataaagtatttgttga

SEQ ID NO: 21335 - DNA, 80 bp, synthetic construct; identical to SEQ ID NO: 9248
  source 1..80: mol_type = other DNA

SEQ ID NO: 21336 - DNA, 80 bp, synthetic construct
  source 1..80: mol_type = other DNA
atataggatacttttatctctgcttttgtttgctttgacaactattttgaagaacacagtgacaaatatctgagattcaa

SEQ ID NO: 21337 - DNA, 80 bp, synthetic construct
  source 1..80: mol_type = other DNA
ttgcttatttggccatgaacaggtcattagtcatcattttttttctttttagggagactaccgtgggctaacattaaaat

SEQ ID NO: 21338 - DNA, 80 bp, synthetic construct
  source 1..80: mol_type = other DNA
tattaattatattaaaatctgaagaaatttttatttggtaatatttgtatattatttttaaatcttgctcttacagcctt

SEQ ID NO: 21339 - DNA, 80 bp, synthetic construct; identical to SEQ ID NO: 9249
  source 1..80: mol_type = other DNA

SEQ ID NO: 21340 - DNA, 80 bp, synthetic construct
  source 1..80: mol_type = other DNA
taataacactagagaaggtgatttctgttccttgtttgtccatagaggccaaaaagccattcagttgttagcagtgggag

SEQ ID NO: 21341 - DNA, 80 bp, synthetic construct
  source 1..80: mol_type = other DNA
tgagacctcgtctccatacaaaataaaaaattagctgggcttggtggtgtacttctgtatcccagttattcgtgacactg

SEQ ID NO: 21342 - DNA, 80 bp, synthetic construct
  source 1..80: mol_type = other DNA
ctgaattcttcatgtattttctagcctgaaattttctcatacaattgtcatatttacagagcattctgttgtcagctgga

SEQ ID NO: 21343 - DNA, 80 bp, synthetic construct; identical to SEQ ID NO: 9250
  source 1..80: mol_type = other DNA

SEQ ID NO: 21344 - DNA, 80 bp, synthetic construct
  source 1..80: mol_type = other DNA
tttttttttttttttgaatatgcataagggcctttacggacctggtattaatatcaattgagaatccctttgtttaatta

SEQ ID NO: 21345 - DNA, 80 bp, synthetic construct
  source 1..80: mol_type = other DNA
tgaggatagaaattttgggcattgtatgctacttgctttattgggatacatgtcaaattttctgttattgcgctatgtct

SEQ ID NO: 21346 - DNA, 80 bp, synthetic construct
  source 1..80: mol_type = other DNA
taagtctctgtttctcaaagaatggcacctcattctcagcatcactggggaacttgttacctatgcaaactgtaaagccc

SEQ ID NO: 21347 - DNA, 80 bp, synthetic construct; identical to SEQ ID NO: 9251
  source 1..80: mol_type = other DNA

SEQ ID NO: 21348 - DNA, 80 bp, synthetic construct
  source 1..80: mol_type = other DNA
gaaattaattgaatttatagcagcagttagggactaaaaggggatatgctttccctggcaagatcatctttctgtttaaa

SEQ ID NO: 21349 - DNA, 80 bp, synthetic construct
  source 1..80: mol_type = other DNA
aggggaaatctgagcttagatgtctaaggaaggaaagtaccgtattaggaaacatggatatggttaaatgcatgtgggaa

SEQ ID NO: 21350 - DNA, 80 bp, synthetic construct
  source 1..80: mol_type = other DNA
cttaacattctactgaatgttcagagtctgattctcacactttggaaagtggtacatatcctcactgatggggaagattt

SEQ ID NO: 21351 - DNA, 80 bp, synthetic construct
  source 1..80: mol_type = other DNA
gtatagttgacccttgaacaatgcattaataacatgaacagccgattaatgtgtcttttgtatatgtattatatactgta

SEQ ID NO: 21352 - DNA, 80 bp, synthetic construct; identical to SEQ ID NO: 9252
  source 1..80: mol_type = other DNA

SEQ ID NO: 21353 - DNA, 80 bp, synthetic construct
  source 1..80: mol_type = other DNA
taggggcactttaattgtaagtttctcatcatggtttgagggtgtataaagtcagcatagacttcgttacctctgtcctt

SEQ ID NO: 21354 - DNA, 80 bp, synthetic construct
  source 1..80: mol_type = other DNA
cacactgaggtctggctacctgagtttttgtctaagctctgccacttaaatctctatgactctgaacattttctcaatct

SEQ ID NO: 21355 - DNA, 80 bp, synthetic construct; identical to SEQ ID NO: 9253
  source 1..80: mol_type = other DNA

SEQ ID NO: 21356 - DNA, 80 bp, synthetic construct
  source 1..80: mol_type = other DNA
tcatgcaggggtagacattacatagtttaggctgaaaggccatgacataaaatgtttcctgaaaaagcacagcagtgttt

SEQ ID NO: 21357 - DNA, 80 bp, synthetic construct
  source 1..80: mol_type = other DNA
ttggtagaaacctccagtgatcattccgccaaatgaacttgtcacttttcctacttatgtagtagttacacatattatct

SEQ ID NO: 21358 - DNA, 80 bp, synthetic construct
  source 1..80: mol_type = other DNA
cccctacttaaagacagggtctgactcaagtgtctaattacattggctaatactcccagtacaagcccaagaacaaatta

SEQ ID NO: 21359 - DNA, 80 bp, synthetic construct
  source 1..80: mol_type = other DNA
ataatttagatatataaagtctgacactgttattgtccgtttttaggcttatttcataatgtaagggtttggctttgttg

SEQ ID NO: 21360 - DNA, 80 bp, synthetic construct; identical to SEQ ID NO: 9254
  source 1..80: mol_type = other DNA

SEQ ID NO: 21361 - DNA, 80 bp, synthetic construct
  source 1..80: mol_type = other DNA
agaatggcatgagattctggtgtgacacattcactgatgatttaccagaaaatacactgcaaatatgaaagactgcagac

SEQ ID NO: 21362 - DNA, 80 bp, synthetic construct
  source 1..80: mol_type = other DNA
gactgccagagtcagttttatttaatggtttctcttattcaaatatcacaggttaaaagaaggtcagaaagtggcaagta

SEQ ID NO: 21363 - DNA, 80 bp, synthetic construct
  source 1..80: mol_type = other DNA
acagtattgatccactatgtgtcagaaactttacatatattctcattactcttcacaacagccctgcaagatgtgcttta

SEQ ID NO: 21364 - DNA, 80 bp, synthetic construct; identical to SEQ ID NO: 9255
  source 1..80: mol_type = other DNA

SEQ ID NO: 21365 - DNA, 80 bp, synthetic construct
  source 1..80: mol_type = other DNA
taatacctaggagtaaatataaagatacctgtgcacatcttttttgtagacaactttaaaacattctagcaggacaaaat

SEQ ID NO: 21366 - DNA, 80 bp, synthetic construct
  source 1..80: mol_type = other DNA
ccaaacatcagaaatccatctctcaataaggtgtatagttgctttttttctcctcaccaccaccagttccctaatatttc

SEQ ID NO: 21367 - DNA, 80 bp, synthetic construct
  source 1..80: mol_type = other DNA
tcaaaaattatttttaacaatctgtcagctgacaacttgactaaacccttcagttttgttactagcatagaataaggagc

SEQ ID NO: 21368 - DNA, 80 bp, synthetic construct; identical to SEQ ID NO: 9256
  source 1..80: mol_type = other DNA

SEQ ID NO: 21369 - DNA, 80 bp, synthetic construct
  source 1..80: mol_type = other DNA
agtaattccctgtttacttaggatttgctcaatgttttttgccactttcatctgaactgcgatagtgaatgatgcttaat

SEQ ID NO: 21370 - DNA, 80 bp, synthetic construct
  source 1..80: mol_type = other DNA
cgtaagattataccatattttttactgtaatttttctagtttagatacaaaaatgcttaccatgtgttaaaattgcctac

SEQ ID NO: 21371 - DNA, 80 bp, synthetic construct; identical to SEQ ID NO: 9257
  source 1..80: mol_type = other DNA

SEQ ID NO: 21372 - DNA, 80 bp, synthetic construct
  source 1..80: mol_type = other DNA
atatgttataacttacattttattttagcaactgtttgtgacttattaacatactaaagattttctcaacaactccaatc

SEQ ID NO: 21373 - DNA, 80 bp, synthetic construct
  source 1..80: mol_type = other DNA
gtgtgctgtcaccgctatgtgatcattatcagtttcacccactgaactgactagaaaaacttcaccattgttacaaaaag

SEQ ID NO: 21374 - DNA, 80 bp, synthetic construct
  source 1..80: mol_type = other DNA
atgttaaacaaagtaaatctattaaagcatgagtcctcccctagccccaactgaggatcttcatgtatatgtaaacccaa

SEQ ID NO: 21375 - DNA, 80 bp, synthetic construct; identical to SEQ ID NO: 9258
  source 1..80: mol_type = other DNA

SEQ ID NO: 21376 - DNA, 80 bp, synthetic construct
  source 1..80: mol_type = other DNA
aacccttaagaagttaaaataaacttacctgtttatattgaataccatttgtagattgctcttttaataggaagactcac

SEQ ID NO: 21377 - DNA, 80 bp, synthetic construct
  source 1..80: mol_type = other DNA
gactttatattgcaaccgacggttatcagccaattaccactacagtgtgaaaggtgttaccagaggttctgtataccata

SEQ ID NO: 21378 - DNA, 80 bp, synthetic construct
  source 1..80: mol_type = other DNA
aagaccagcctggccaacatagggaaaccccatctctactaaaaatacaaaaaattagctgggtgtggtggcgggtgcct

SEQ ID NO: 21379 - DNA, 80 bp, synthetic construct
  source 1..80: mol_type = other DNA
ttctaggttagcttcaatttattactattttacaaggaataaaaatgaaacaatgtgaataactgtgtctttatttactt

SEQ ID NO: 21380 - DNA, 80 bp, synthetic construct; identical to SEQ ID NO: 9259
  source 1..80: mol_type = other DNA

SEQ ID NO: 21381 - DNA, 80 bp, synthetic construct
  source 1..80: mol_type = other DNA
ttctggcatgtacaccaatgagtttattggaatgtgactaaatttgtttcactgtttgaaaaagtatgatgttctacaaa

SEQ ID NO: 21382 - DNA, 80 bp, synthetic construct
  source 1..80: mol_type = other DNA
caccattgtttatcctaagagaattgccaggtattacatatcatatttgcagtcaaaaacctgagagcctgcttgtggtt

SEQ ID NO: 21383 - DNA, 80 bp, synthetic construct
  source 1..80: mol_type = other DNA
gcagggtgggaggagggagagaggatcaggaaaaataactgataagtactaggcttaatacctgggtgatgaaataatct

SEQ ID NO: 21384 - DNA, 80 bp, synthetic construct; identical to SEQ ID NO: 9260
  source 1..80: mol_type = other DNA

SEQ ID NO: 21385 - DNA, 80 bp, synthetic construct
  source 1..80: mol_type = other DNA
atagtccttgacctcagtttcttctattgtaaaactggaacatggcacttacctcattgggtttttgggagaagaaacca

SEQ ID NO: 21386 - DNA, 80 bp, synthetic construct
  source 1..80: mol_type = other DNA
taatgaagatatcgactggactatatgtgagcagcataagcactagggcaaagacttgttaactcttaaatcccagtact

SEQ ID NO: 21387 - DNA, 80 bp, synthetic construct
  source 1..80: mol_type = other DNA
gtgctggctctgtgccaagcattgagttaggtgggatatcgtcattatatctacctgatgaagtgccagtttttgaaata

SEQ ID NO: 21388 - DNA, 80 bp, synthetic construct; identical to SEQ ID NO: 9261
  source 1..80: mol_type = other DNA

SEQ ID NO: 21389 - DNA, 80 bp, synthetic construct
  source 1..80: mol_type = other DNA
agtaggcaaaacagagagaaaaagaaacattatacatgtgaatgtgctgtgaacaaatagaaataacacatataaaatga

SEQ ID NO: 21390 - DNA, 80 bp, synthetic construct
  source 1..80: mol_type = other DNA
atcagtgcttgaaatgtctttgtacaagaagagttttctattaatgttcccagtttaagaatctaatcaacatctttgcc

SEQ ID NO: 21391 - DNA, 80 bp, synthetic construct
  source 1..80: mol_type = other DNA
ttagccatttttccatagacaaatcaaaaggtatgaatagatatttcttagtccaggagtgtatgttttggctgtgtttg

SEQ ID NO: 21392 - DNA, 80 bp, synthetic construct
  source 1..80: mol_type = other DNA
gctctgaatggctttgtattagttgtcactacagatgctttggtcttttatgcttcttctactatacaagattatctagg

SEQ ID NO: 21393 - DNA, 80 bp, synthetic construct; identical to SEQ ID NO: 9262
  source 1..80: mol_type = other DNA

SEQ ID NO: 21394 - DNA, 80 bp, synthetic construct
  source 1..80: mol_type = other DNA
atggtatgtaagctgacctaaataatgtgtaacaggtgggtggtcaagaaaacataggaatattgaagtactgtaagcat

SEQ ID NO: 21395 - DNA, 80 bp, synthetic construct
  source 1..80: mol_type = other DNA
catatatctggttctcaaattgtactgtgcacaagaatcacctgaagaccttgataaaacttggtcatccctgtgagccc

SEQ ID NO: 21396 - DNA, 80 bp, synthetic construct; identical to SEQ ID NO: 9263
  source 1..80: mol_type = other DNA

SEQ ID NO: 21397 - DNA, 80 bp, synthetic construct
  source 1..80: mol_type = other DNA
agtagtggtatctagctactactgctaccacaaagtctaaactcctgatttcttgcattctaaagaaaatacattaatgt

SEQ ID NO: 21398 - DNA, 80 bp, synthetic construct
  source 1..80: mol_type = other DNA
atatctgacgcaagtggtagattaagacaccatttttaaaactgcaagttatgactcgctcatgggtatgcagtcgagac

SEQ ID NO: 21399 - DNA, 80 bp, synthetic construct
  source 1..80: mol_type = other DNA
tcataacttgcagttaaaaaaaaaggaaaactctggtttaagcactaaggactcagcaccgtagtaaatggtgagaggca

SEQ ID NO: 21400 - DNA, 80 bp, synthetic construct; identical to SEQ ID NO: 9264
  source 1..80: mol_type = other DNA

SEQ ID NO: 21401 - DNA, 80 bp, synthetic construct
  source 1..80: mol_type = other DNA
tctatcttaggtgactagggaattttaggaatcattcaattcgtattcatcaccactagcaagcacccactaatctaaat

SEQ ID NO: 21402 - DNA, 80 bp, synthetic construct
  source 1..80: mol_type = other DNA
ccttctcagtgtacagagtctggacaaggaattgaaggtaagaattgatggtacaaaaaatagtgttggtagtttttaaa

SEQ ID NO: 21403 - DNA, 80 bp, synthetic construct
  source 1..80: mol_type = other DNA
agctaaggaatattttggcaaatgagagccatttaatgagtttcaggcaacagagtattgccatagtcagtaatgtattt

SEQ ID NO: 21404 - DNA, 80 bp, synthetic construct
  source 1..80: mol_type = other DNA
atttgttaaagtgttaagaaaacaaaaatgcattagaaaatatgaaaattgttgacagtgatagctcaataaaaatttaa

SEQ ID NO: 21405 - DNA, 80 bp, synthetic construct; identical to SEQ ID NO: 9265
  source 1..80: mol_type = other DNA

SEQ ID NO: 21406 - DNA, 80 bp, synthetic construct
  source 1..80: mol_type = other DNA
caaaatataattcagcagagaactattcccaaatcaggcaaccctcagaaccagagagcttcagagagctcacttaaaaa

SEQ ID NO: 21407 - DNA, 80 bp, synthetic construct
  source 1..80: mol_type = other DNA
gttaggctttccgttagcttatatagtaaatgaagttgcaattccttggtaaggacttaaggagcagaggcatcttcagc

SEQ ID NO: 21408 - DNA, 80 bp, synthetic construct
  source 1..80: mol_type = other DNA
actgttctttaggatatagtaacaaaaattgagtgaaataacacgaagccttgtattttgactattttaggatttttaag

SEQ ID NO: 21409 - DNA, 80 bp, synthetic construct; identical to SEQ ID NO: 9266
  source 1..80: mol_type = other DNA

SEQ ID NO: 21410 - DNA, 80 bp, synthetic construct
  source 1..80: mol_type = other DNA
gtgtttatttctgaagaggattttgctgacccagaattagaattatgctttgagacagttttcccagtgttattgctcat

SEQ ID NO: 21411 - DNA, 80 bp, synthetic construct
  source 1..80: mol_type = other DNA
tgtcatagcattgctcacatgttgatggtgatgctgatggaagcaaacctgtgttgccagtcatataaaaagtatagcac

SEQ ID NO: 21412 - DNA, 80 bp, synthetic construct
  source 1..80: mol_type = other DNA
caggcaggtccttcaggaaatattccaaaagaaggcattgttatcacaggagatgacagctccatgcatgttattgcccc

SEQ ID NO: 21413 - DNA, 80 bp, synthetic construct; identical to SEQ ID NO: 9267
  source 1..80: mol_type = other DNA

SEQ ID NO: 21414 - DNA, 80 bp, synthetic construct
  source 1..80: mol_type = other DNA
atgtctcaggccttcacattcactcaccactcactcactgactaaaccaaagcaactttcagtcctgcctaccttgttta

SEQ ID NO: 21415 - DNA, 80 bp, synthetic construct
  source 1..80: mol_type = other DNA
aaaggctatactgtatagcttagatgcgtagtaagctataccatctaggtttgtgaacctaccctctgatgttcacagga

SEQ ID NO: 21416 - DNA, 80 bp, synthetic construct
  source 1..80: mol_type = other DNA
tgttttaagcaattaaatatatcatgttcatgtttaagtgcctttgttttccctgtcttctaaatttcttccatatcttt

SEQ ID NO: 21417 - DNA, 80 bp, synthetic construct; identical to SEQ ID NO: 9268
  source 1..80: mol_type = other DNA

SEQ ID NO: 21418 - DNA, 80 bp, synthetic construct
  source 1..80: mol_type = other DNA
gagaggagtgaaggaaactaacagttctcagcttcaggaatatttatggaattatcaagaaccctagaggcagccataat

SEQ ID NO: 21419 - DNA, 80 bp, synthetic construct
  source 1..80: mol_type = other DNA
ttgtttgcgatagctactccacttcagccaccatccatacttgaaatccggaccaaaaattttatctttagaaccaaaca

SEQ ID NO: 21420 - DNA, 80 bp, synthetic construct
  source 1..80: mol_type = other DNA
ttcttccagtgtagccttttacagtaaaataatttaatcaggctcacaaatcatctttttaatttttgcaatacttgtct

SEQ ID NO: 21421 - DNA, 80 bp, synthetic construct; identical to SEQ ID NO: 9269
  source 1..80: mol_type = other DNA

SEQ ID NO: 21422 - DNA, 80 bp, synthetic construct
  source 1..80: mol_type = other DNA
gatcagtttacatggatgtgtttaatttcacatctacttatgtgaaattctaaatgtgaactaaaacatattgcagaaac

SEQ ID NO: 21423 - DNA, 80 bp, synthetic construct
  source 1..80: mol_type = other DNA
agctgatatgctttattgtgccgagtcccatatccgaagtaagttgtagttccttatgaacatgtcagaagaaaacggca

SEQ ID NO: 21424 - DNA, 80 bp, synthetic construct
  source 1..80: mol_type = other DNA
gttattaaaaaatgaccattttggcccatgaagttttgcttgggaattttttaattacatcgttatcaattcataaatct

SEQ ID NO: 21425 - DNA, 80 bp, synthetic construct
  source 1..80: mol_type = other DNA
tcttccctttaacatttaaaataataaatttaaaacaactctgaaaaactatttccatgccttttattattttttgttta

SEQ ID NO: 21426 - DNA, 80 bp, synthetic construct; identical to SEQ ID NO: 9270
  source 1..80: mol_type = other DNA

SEQ ID NO: 21427 - DNA, 80 bp, synthetic construct
  source 1..80: mol_type = other DNA
gagcacaggtgagagacattgagaagatagaattgacgaacttgattgagagctacatgtgcagagctatagaaagaata

SEQ ID NO: 21428 - DNA, 80 bp, synthetic construct
  source 1..80: mol_type = other DNA
tgattttaagagtttcttacacatgctgcagatgagtcctttatcaaatatttgtattgcaaatgtttcctcccactctg

SEQ ID NO: 21429 - DNA, 80 bp, synthetic construct
  source 1..80: mol_type = other DNA
ctgcgctgtattttgatcaggggattttgtctgtggttctctgtctggattgtgttgttctattaatagctccattagtg

SEQ ID NO: 21430 - DNA, 80 bp, synthetic construct; identical to SEQ ID NO: 9271
  source 1..80: mol_type = other DNA

SEQ ID NO: 21431 - DNA, 80 bp, synthetic construct
  source 1..80: mol_type = other DNA
cctctacaaatttgtcacttctcccttgatcaatgtttctagaaggcactttttttaattagattttattagtctttatt

SEQ ID NO: 21432 - DNA, 80 bp, synthetic construct
  source 1..80: mol_type = other DNA
gtttccctttaagtacagcattacaaccctcatcttttgctatcttatttttattatttaattgaaaatactggctaatt

SEQ ID NO: 21433 - DNA, 80 bp, synthetic construct
  source 1..80: mol_type = other DNA
tggtgacttattttatgatctaatacatggtctatgttggtaaaatatcccatgtaatcctatgaagaatacatgttctg

SEQ ID NO: 21434 - DNA, 80 bp, synthetic construct
  source 1..80: mol_type = other DNA
ttttttttttttttgagatggagtctcgctctgtcgcccaggctggagtgcagtggcgggatctcggctcactgcaagct

SEQ ID NO: 21435 - DNA, 80 bp, synthetic construct; identical to SEQ ID NO: 9272
  source 1..80: mol_type = other DNA

SEQ ID NO: 21436 - DNA, 80 bp, synthetic construct
  source 1..80: mol_type = other DNA
accatcctggctaacacggtgaaaccccgtctctactaaaaatacaaaaaattagccgggcgttgtagcgggcgcctgta

SEQ ID NO: 21437 - DNA, 80 bp, synthetic construct
  source 1..80: mol_type = other DNA
ttaatattaagtaattttcatattattatgccaatctgtctttatagctgctgggttttattatagaggttagttgtttc

SEQ ID NO: 21438 - DNA, 80 bp, synthetic construct; identical to SEQ ID NO: 9273
  source 1..80: mol_type = other DNA

SEQ ID NO: 21439 - DNA, 80 bp, synthetic construct
  source 1..80: mol_type = other DNA
tctttttttgcagggtgtcaggtagggatgtaacctgaccatggaattaactaagttattttttaaaaattaaatcattt

SEQ ID NO: 21440 - DNA, 80 bp, synthetic construct
  source 1..80: mol_type = other DNA
ctaagacttttttgtacacaattttagagatgaggaaggaacagagcatttacgaaaacgaaatacgaagttgcctttta

SEQ ID NO: 21441 - DNA, 80 bp, synthetic construct
  source 1..80: mol_type = other DNA
tgccatgatgcaacaagatgagtctatttatctctatcctgcttcaagtacttcaagtactgcaccttttgaaaacaact

SEQ ID NO: 21442 - DNA, 80 bp, synthetic construct
  source 1..80: mol_type = other DNA
gaggtcacccagggctctttcaagatagtaaaaacagtgacttgtacagcataatgaaaaacctaggcattgattttgaa

SEQ ID NO: 21443 - DNA, 80 bp, synthetic construct; identical to SEQ ID NO: 9274
  source 1..80: mol_type = other DNA

SEQ ID NO: 21444 - DNA, 80 bp, synthetic construct
  source 1..80: mol_type = other DNA
tgcaagttaatggcatgtttgaaaattggaactctaaccaattcgtgcctttcaattgtccacagcaagacccacaacaa

SEQ ID NO: 21445 - DNA, 80 bp, synthetic construct
  source 1..80: mol_type = other DNA
aaccatccccataccccactacttctagtttagaagattttgtcacttgtttacaacttcctgaaaaccaaaagcatgga

SEQ ID NO: 21446 - DNA, 80 bp, synthetic construct; identical to SEQ ID NO: 9275
  source 1..80: mol_type = other DNA

SEQ ID NO: 21447 - DNA, 80 bp, synthetic construct
  source 1..80: mol_type = other DNA
gagggagaaagatatcaaggaatgaagcaacatgaatgtgtccttaatataagatgacctaaattaccaggtgaaattag

SEQ ID NO: 21448 - DNA, 80 bp, synthetic construct
  source 1..80: mol_type = other DNA
agttaaactcaaatttaagtgtgctttcttacaatgcctctgaaaccctagattaattatatccctggaattcagtccta

SEQ ID NO: 21449 - DNA, 80 bp, synthetic construct
  source 1..80: mol_type = other DNA
gtcatggaaatcaagcttgatagtgcatttttgttgtttaaatgtgtcatcagaatccgtctggcagtgagcacacttta

SEQ ID NO: 21450 - DNA, 80 bp, synthetic construct; identical to SEQ ID NO: 9276
  source 1..80: mol_type = other DNA

SEQ ID NO: 21451 - DNA, 80 bp, synthetic construct
  source 1..80: mol_type = other DNA
gaataatattcagttatagtccgtctcacaaaattgctatgaaagtatattttactcttgagtaaagcaaattgtacaga

SEQ ID NO: 21452 - DNA, 80 bp, synthetic construct
  source 1..80: mol_type = other DNA
agacctacatatgttccagagtacatgttattgagctaagacactcaatattgagccactgagtagctgttcagcacttg

SEQ ID NO: 21453 - DNA, 80 bp, synthetic construct
  source 1..80: mol_type = other DNA
tgaaatgattagttttttcagtagccgcattacaaaagtaaaaagaaacaggtaaaattaactttagaaatgtattttat

SEQ ID NO: 21454 - DNA, 80 bp, synthetic construct
  source 1..80: mol_type = other DNA
atgagaaaaaatcattttaaactcaccattatctggccaggtaatactaactttttatttaaagaatttacagtgttgcc

SEQ ID NO: 21455 - DNA, 80 bp, synthetic construct; identical to SEQ ID NO: 9277
  source 1..80: mol_type = other DNA

SEQ ID NO: 21456 - DNA, 80 bp, synthetic construct
  source 1..80: mol_type = other DNA
agaaatcggttaagaaaatcatacctgtggtgtaatattttaggaatatttagaaacatttagaaaatcagaagctgcct

SEQ ID NO: 21457 - DNA, 80 bp, synthetic construct
  source 1..80: mol_type = other DNA
ccaaaggcaatctgaaatgagacagctgcatcactcatctgtaccatgttcaaaatttcctgtcaaattaatggaaaaac

SEQ ID NO: 21458 - DNA, 80 bp, synthetic construct
  source 1..80: mol_type = other DNA
aagatctattccaataagttgcatcaccatttttgttttcagtttcagaatggagttttaaatgaaacatatccagctga

SEQ ID NO: 21459 - DNA, 80 bp, synthetic construct; identical to SEQ ID NO: 9278
  source 1..80: mol_type = other DNA

SEQ ID NO: 21460 - DNA, 80 bp, synthetic construct
  source 1..80: mol_type = other DNA
aaatggtatcaaaattacatatactacagtcaagatagaaagggtgctgccacggagtggtgaggtaccgtctacatttc

SEQ ID NO: 21461 - DNA, 80 bp, synthetic construct
  source 1..80: mol_type = other DNA
gttagagaactaaactagtttttcctatcatgttaacctctgcttttatctcagatgttaaaataaatggtttggtgctt

SEQ ID NO: 21462 - DNA, 80 bp, synthetic construct; identical to SEQ ID NO: 9279
  source 1..80: mol_type = other DNA

SEQ ID NO: 21463 - DNA, 80 bp, synthetic construct
  source 1..80: mol_type = other DNA
cagtgttttcagaagaaataaatataccactctttacctttattgatatctccatgatgatagttgaatgttgcaatgtg

SEQ ID NO: 21464 - DNA, 80 bp, synthetic construct
  source 1..80: mol_type = other DNA
tttcgcttcttagaacagtggaaactatgtgtttttctcatatttgaggagtgttaagattgcagatagcaaggtttggt

SEQ ID NO: 21465 - DNA, 80 bp, synthetic construct
  source 1..80: mol_type = other DNA
gaaatcaagtaatgaatccaactgcttaaagttggtattaataaaaagacaaccacatagttcgtttaccttcaaacttt

SEQ ID NO: 21466 - DNA, 80 bp, synthetic construct
  source 1..80: mol_type = other DNA
gagtgcagtggcacaatcttggctcactgcaacctctacctcctgggttcaagtgattctcttgcctcagcctcccgagt

SEQ ID NO: 21467 - DNA, 80 bp, synthetic construct; identical to SEQ ID NO: 9280
  source 1..80: mol_type = other DNA

SEQ ID NO: 21468 - DNA, 80 bp, synthetic construct
  source 1..80: mol_type = other DNA
atcctgaccaacatggtgaaaccctgtctctactaaaaatacagaaattagctgggcatggtggcgtgagcctgtagtcc

SEQ ID NO: 21469 - DNA, 80 bp, synthetic construct
  source 1..80: mol_type = other DNA
agttaatgtatataaaaatggcttcggacaaaatatctctgagttctgtgtattttcagtcaaaactttaaacctgtaga

SEQ ID NO: 21470 - DNA, 80 bp, synthetic construct
  source 1..80: mol_type = other DNA
ttattataagtcttacataaaccatttttgttactctcttccacatgttactggataaattgtttagtggaaaataggct

SEQ ID NO: 21471 - DNA, 80 bp, synthetic construct; identical to SEQ ID NO: 9281
  source 1..80: mol_type = other DNA

SEQ ID NO: 21472 - DNA, 80 bp, synthetic construct
  source 1..80: mol_type = other DNA
tgttactgcttacatatatcatgcatagatttttgcttaaagtatgatttataatatcctcattatcaaagttgtataca

SEQ ID NO: 21473 - DNA, 80 bp, synthetic construct
  source 1..80: mol_type = other DNA
cagctaaatattacagggattatttcttttgacaagcagacatgacatcctaggaaacttttcaaaacagtccaaggact

SEQ ID NO: 21474 - DNA, 80 bp, synthetic construct
  source 1..80: mol_type = other DNA
agctagagagatcatacatccgaatttgtctttttttatttaggataggacttgggggtcacatttcagaaggcaaataa

SEQ ID NO: 21475 - DNA, 80 bp, synthetic construct; identical to SEQ ID NO: 9282
  source 1..80: mol_type = other DNA

SEQ ID NO: 21476 - DNA, 80 bp, synthetic construct
  source 1..80: mol_type = other DNA
tggtacgagtttgttcttgttttactggctagggacaatagaaaatatttcttgtgtacagagcattttatatagtagct

SEQ ID NO: 21477 - DNA, 80 bp, synthetic construct
  source 1..80: mol_type = other DNA
gcaacaagatcatcttggagaaatgaaaacaaaaagctctaaaactactcaaaagacaattcgacccaacaagaattttg

SEQ ID NO: 21478 - DNA, 80 bp, synthetic construct; identical to SEQ ID NO: 9283
  source 1..80: mol_type = other DNA

SEQ ID NO: 21479 - DNA, 80 bp, synthetic construct
  source 1..80: mol_type = other DNA
gaggaggaagatgatagattggtctaaattcaggctcttgggctttttgcagttgttgttttttcccctttatacaacct

SEQ ID NO: 21480 - DNA, 80 bp, synthetic construct
  source 1..80: mol_type = other DNA
ttttgggatcttgttatcaggtttatggagacctcccaccagttttagaaactgactgatttaccccttgttgaagagat

SEQ ID NO: 21481 - DNA, 80 bp, synthetic construct
  source 1..80: mol_type = other DNA
aagatcttgatccttttttacccctcccttcttgtgatgtagacaggtatgtagaagacatcattttctgctgggtaacc

SEQ ID NO: 21482 - DNA, 80 bp, synthetic construct; identical to SEQ ID NO: 9284
  source 1..80: mol_type = other DNA

SEQ ID NO: 21483 - DNA, 80 bp, synthetic construct
  source 1..80: mol_type = other DNA
tcaatgtacaaatcacctgggaccttattcaaatactgattctgaattagcaggtctcgagtgaagcctgagttggcatt

SEQ ID NO: 21484 - DNA, 80 bp, synthetic construct
  source 1..80: mol_type = other DNA
acattacatctgatttcctctctgtacccaggattaagactggcactaattaagtaggcacagaagaactgtttgctgaa

SEQ ID NO: 21485 - DNA, 80 bp, synthetic construct
  source 1..80: mol_type = other DNA
taaaggacctacgttaacctaagtgaaacagtacagttacacaaagggaggaatttctgtcttttaactaatcccagagc

SEQ ID NO: 21486 - DNA, 80 bp, synthetic construct; identical to SEQ ID NO: 9285
  source 1..80: mol_type = other DNA

SEQ ID NO: 21487 - DNA, 80 bp, synthetic construct
  source 1..80: mol_type = other DNA
tcagtccttctcttatttgatttctttatgccttcaccttaaagtctgaccaaattatgttcaacgaaattgacatgttt

SEQ ID NO: 21488 - DNA, 80 bp, synthetic construct
  source 1..80: mol_type = other DNA
ttctccagtaatagaaagagaagaaactagggaaggaagaaacccatttgttgaatttacactttgtgacagttatgtgg

SEQ ID NO: 21489 - DNA, 80 bp, synthetic construct
  source 1..80: mol_type = other DNA
caaattcagctggtcagactccagtaatgttttctcagctacgccatgcatttttgatgggctaactttttgttctactt

SEQ ID NO: 21490 - DNA, 80 bp, synthetic construct; identical to SEQ ID NO: 9286
  source 1..80: mol_type = other DNA

SEQ ID NO: 21491 - DNA, 80 bp, synthetic construct
  source 1..80: mol_type = other DNA
gttaaaagatctattttcttcttccactcttatccacactcacaatccttggccttgtctgacagatgaaaatagtgatg

SEQ ID NO: 21492 - DNA, 80 bp, synthetic construct
  source 1..80: mol_type = other DNA
acttatttcatagtgtatgtaggttattttgcatgtcctgccaccacagctatgtagagcatggaacatggtgtcatgtc

SEQ ID NO: 21493 - DNA, 80 bp, synthetic construct
  source 1..80: mol_type = other DNA
tttaatacatttagagattgagaaaggcacattttcacttcctaattacaaaatgagcaagtttacgatctgtgtttgat

SEQ ID NO: 21494 - DNA, 80 bp, synthetic construct
  source 1..80: mol_type = other DNA
tatataccctagtttcaaaagcaattgaaatttcataaatgcatttatatataaatattcttaatctagtcactactata

SEQ ID NO: 21495 - DNA, 80 bp, synthetic construct; identical to SEQ ID NO: 9287
  source 1..80: mol_type = other DNA

SEQ ID NO: 21496 - DNA, 80 bp, synthetic construct
  source 1..80: mol_type = other DNA
gcacttatggagtacatcccacatttaataagctatttggtgctatgaatctccaggaaagaacagaggcaggttttatg

SEQ ID NO: 21497 - DNA, 80 bp, synthetic construct
  source 1..80: mol_type = other DNA
ccaaaggggcactgggcacttaccacgccatagcaattcaccctgaaggaaaagaaaagtgcattatagacaatacttaa

SEQ ID NO: 21498 - DNA, 80 bp, synthetic construct
  source 1..80: mol_type = other DNA
atagtgcaactatatatatggatagccattttggtcgtacattgtgtccctgagaagtggtagtctgaatttataaaaga

SEQ ID NO: 21499 - DNA, 80 bp, synthetic construct
  source 1..80: mol_type = other DNA
tgtatcatattactcagttaattttttttcccattaattggttaaataaattgcttaaacagaggccttggcaggagttg

SEQ ID NO: 21500 - DNA, 80 bp, synthetic construct; identical to SEQ ID NO: 9288
  source 1..80: mol_type = other DNA

SEQ ID NO: 21501 - DNA, 80 bp, synthetic construct
  source 1..80: mol_type = other DNA
tctctcccttcatgctattttaataagtggacaaaaatgtggcttccagagcctgggttagtagctggagactgaggcag

SEQ ID NO: 21502 - DNA, 80 bp, synthetic construct
  source 1..80: mol_type = other DNA
tatcctgagataatattcagatgttttctttgttaaaacactatcccagttcccgaagttccacattctcactggaccat

SEQ ID NO: 21503 - DNA, 80 bp, synthetic construct; identical to SEQ ID NO: 9289
  source 1..80: mol_type = other DNA

SEQ ID NO: 21504 - DNA, 80 bp, synthetic construct
  source 1..80: mol_type = other DNA
cagagagtaaatttgctcattttactgtcaactagaaatgaaactattttactgtgaattaacagggaactgagaaatgt

SEQ ID NO: 21505 - DNA, 80 bp, synthetic construct
  source 1..80: mol_type = other DNA
gtaagtggcgataatatacatacacacagtaactatgctgaattttattaatgcttttatcataggcaaattctatattc

SEQ ID NO: 21506 - DNA, 80 bp, synthetic construct
  source 1..80: mol_type = other DNA
ataccctcccctgccccaaatcagtttatacatttttaaagcccccgagatgattctaatgaacagccagggctgagaac

SEQ ID NO: 21507 - DNA, 80 bp, synthetic construct; identical to SEQ ID NO: 9290
  source 1..80: mol_type = other DNA

SEQ ID NO: 21508 - DNA, 80 bp, synthetic construct
  source 1..80: mol_type = other DNA
gaaagaaagaaagaaagaaagaaagaaagaaagaaaagaaagaagaaagaaagaaagaaagaaagaaagaaagaaagaaa

SEQ ID NO: 21509 - DNA, 80 bp, synthetic construct
  source 1..80: mol_type = other DNA
ctagagactgacagctgagtacagaatgcaacagtttgagaggcacagacttcatgtttatatcctcttgattaaagtat

SEQ ID NO: 21510 - DNA, 80 bp, synthetic construct
  source 1..80: mol_type = other DNA
actcttttacctccctgtatacagcatagtaccacgtgctcagaaattacttggcaattcttatattgtattaatcaaac

SEQ ID NO: 21511 - DNA, 80 bp, synthetic construct
  source 1..80: mol_type = other DNA
ggctcactgcaacctccgcctcccaggctcaagcaattctcctgcctcatcctccatgtagctgggattacaggcatcac

SEQ ID NO: 21512 - DNA, 80 bp, synthetic construct; identical to SEQ ID NO: 9291
  source 1..80: mol_type = other DNA

SEQ ID NO: 21513 - DNA, 80 bp, synthetic construct
  source 1..80: mol_type = other DNA
gctgataagccatagaaagtattgtttgctcttttgatcacgtcatctaaagatttaaacttcatgatttgctgcactgg

SEQ ID NO: 21514 - DNA, 80 bp, synthetic construct
  source 1..80: mol_type = other DNA
tctcatctcaaacctatgtgtgagaatccaaataggtaactgcaaaaatggtaggtgaaaacagataatggtcaggtgtt

SEQ ID NO: 21515 - DNA, 80 bp, synthetic construct; identical to SEQ ID NO: 9292
  source 1..80: mol_type = other DNA

SEQ ID NO: 21516 - DNA, 80 bp, synthetic construct
  source 1..80: mol_type = other DNA
tagccaagttaggtaaacatcacgaacttttagtctactctgtagcaaaatcttaggcaacttaaatatatcaaacagaa

SEQ ID NO: 21517 - DNA, 80 bp, synthetic construct
  source 1..80: mol_type = other DNA
tgcagcccaaactcaattcaccctgtatctcagcctcaggtaaaagaaagacaactggattttctctttaaaattaagct

SEQ ID NO: 21518 - DNA, 80 bp, synthetic construct
  source 1..80: mol_type = other DNA
tcaccactgatttaaatgttagaagggaggggctgctgttcaatagaggttgagtgtgaatcttaacgttataaatctaa

SEQ ID NO: 21519 - DNA, 80 bp, synthetic construct
  source 1..80: mol_type = other DNA
aaatgtttccttaattgaagatttttttccacgtcttatctggtattaatcaagatatgcaagaatgacagctcattttt

SEQ ID NO: 21520 - DNA, 80 bp, synthetic construct; identical to SEQ ID NO: 9293
  source 1..80: mol_type = other DNA

SEQ ID NO: 21521 - DNA, 80 bp, synthetic construct
  source 1..80: mol_type = other DNA
caggatatttacgatagctctcttgaacttactcctcctaattgaaagtttgaatcctttgaccaacatttcccaaccct

SEQ ID NO: 21522 - DNA, 80 bp, synthetic construct
  source 1..80: mol_type = other DNA
atgacaggattcttttccattgttttaaagctgtgaaggcagcacctgaaaattgttaagcatccagatctgtgttggct

SEQ ID NO: 21523 - DNA, 80 bp, synthetic construct; identical to SEQ ID NO: 9294
  source 1..80: mol_type = other DNA

SEQ ID NO: 21524 - DNA, 80 bp, synthetic construct
  source 1..80: mol_type = other DNA
aaaaagtagtcacttgtaaagataacacattgctgggcctgttaacaagggcttcaaaatgctaaaatattgcaattaaa

SEQ ID NO: 21525 - DNA, 80 bp, synthetic construct
  source 1..80: mol_type = other DNA
ccaaatattgaatcgaaacagctaacagaggttcagattcattctttggatatattttcttctcatgacttttaggggaa

SEQ ID NO: 21526 - DNA, 80 bp, synthetic construct
  source 1..80: mol_type = other DNA
tgtcccggctgaaatgaaaggagggaaaagagaaaaacagaactttgatactgagtttaattagatctgttgggaagcag

SEQ ID NO: 21527 - DNA, 80 bp, synthetic construct; identical to SEQ ID NO: 9295
  source 1..80: mol_type = other DNA

SEQ ID NO: 21528 - DNA, 80 bp, synthetic construct
  source 1..80: mol_type = other DNA
tttgtctcaatttctattttgtgacattgaataactgggtgactcttggattccaagtaaccggtgagggctgcctatct

SEQ ID NO: 21529 - DNA, 80 bp, synthetic construct
  source 1..80: mol_type = other DNA
ttccaaagccaagaaaaagcttccataaagttatttctaactgaatacagctcagcccccatatctaactagattaagca

SEQ ID NO: 21530 - DNA, 80 bp, synthetic construct
  source 1..80: mol_type = other DNA
aattactacataggttgaatagtagcagactaaggggtggggtgagataaattctgcctgggtaaggtattctagtttct

SEQ ID NO: 21531 - DNA, 80 bp, synthetic construct; identical to SEQ ID NO: 9296
  source 1..80: mol_type = other DNA

SEQ ID NO: 21532 - DNA, 80 bp, synthetic construct
  source 1..80: mol_type = other DNA
ggagcttgggactacaaacaaaaaattaggctctacttagagactggtcagttttgtctggctaattttgattcaccaca

SEQ ID NO: 21533 - DNA, 80 bp, synthetic construct
  source 1..80: mol_type = other DNA
catgatatggtaacagtctcaaaggaaacattttaaggtgtttgaatgggtaaattctttgattccttaggcttaatggg

SEQ ID NO: 21534 - DNA, 80 bp, synthetic construct
  source 1..80: mol_type = other DNA
catttgagcatgtggaccaagcactctgatggatacattttatagattatccaattgcactgcagaattattcttcaaga

SEQ ID NO: 21535 - DNA, 80 bp, synthetic construct; identical to SEQ ID NO: 9297
  source 1..80: mol_type = other DNA

SEQ ID NO: 21536 - DNA, 80 bp, synthetic construct
  source 1..80: mol_type = other DNA
tgtaattgctctaacccccaaataatttgtaatgttcaaatttttttaaactttaattttttcccctaaaacaaatcgtt

SEQ ID NO: 21537 - DNA, 80 bp, synthetic construct
  source 1..80: mol_type = other DNA
caatagatgaatatttaatggtaaaggagcccagggctttttagtcttttgtttctccaaattctaacatacctacttat

SEQ ID NO: 21538 - DNA, 80 bp, synthetic construct
  source 1..80: mol_type = other DNA
ttttaacttccttatcttaaaatcaatgaggtattccagctcaatttttgagtctttggttgaattgtgaagatgtccta

SEQ ID NO: 21539 - DNA, 80 bp, synthetic construct
  source 1..80: mol_type = other DNA
ttccattcttttttgaaatgggagaccaagtcaaaactgatttgaatatatctcttggcatccatataccaaatatgaaa

SEQ ID NO: 21540 - DNA, 80 bp, synthetic construct; identical to SEQ ID NO: 9298
  source 1..80: mol_type = other DNA

SEQ ID NO: 21541 - DNA, 80 bp, synthetic construct
  source 1..80: mol_type = other DNA
gtgaaagaacagagcctctaagcttaatgtctagactccagagcaggatttctcggcagttgtcctgttggcattttggg

SEQ ID NO: 21542 - DNA, 80 bp, synthetic construct
  source 1..80: mol_type = other DNA
gagcaaaattgccccagtttagaatcactgctctagaacaagacccaaagggcaggaagaaattcacaaccaaagatcca

SEQ ID NO: 21543 - DNA, 80 bp, synthetic construct; identical to SEQ ID NO: 9299
  source 1..80: mol_type = other DNA

SEQ ID NO: 21544 - DNA, 80 bp, synthetic construct
  source 1..80: mol_type = other DNA
tcaaagtggacagagaactgtatataggaatcaagaggtgtgcagattgaggaaagccaaaaatgtagaacatttgttat

SEQ ID NO: 21545 - DNA, 80 bp, synthetic construct
  source 1..80: mol_type = other DNA
aactggcacagcattgtcacctaggaaggtgtgcagatgggaagtaatcttactcaataaaatctaggtctaaagaggat

SEQ ID NO: 21546 - DNA, 80 bp, synthetic construct
  source 1..80: mol_type = other DNA
ttcgaacaaactcatcataaattgattcttccacaaaaatcctggatgcggctatacaacactggccctggtggtagaat

SEQ ID NO: 21547 - DNA, 80 bp, synthetic construct; identical to SEQ ID NO: 9300
  source 1..80: mol_type = other DNA

SEQ ID NO: 21548 - DNA, 80 bp, synthetic construct
  source 1..80: mol_type = other DNA
atgattgtgattatttctttcaggccccagattttaaacagataataaaaaaaacctgacatgtctatcgaattaaataa

SEQ ID NO: 21549 - DNA, 80 bp, synthetic construct
  source 1..80: mol_type = other DNA
ctcaccttatgattttattccatcaaagacattttcaaaatctatctaaagtataccgtattatttcatatgtgcctata

SEQ ID NO: 21550 - DNA, 80 bp, synthetic construct
  source 1..80: mol_type = other DNA
ttcaattcaatgttatagcaactgggtatgattattatttattttgtgaactaattacatctgcttaagttgtagcagaa

SEQ ID NO: 21551 - DNA, 80 bp, synthetic construct
  source 1..80: mol_type = other DNA
gaaccatttgtatttacagcctctaacagataatgcagttgtgaaagaaaaaagaatgtttgaccatgcatttctgctaa

SEQ ID NO: 21552 - DNA, 80 bp, synthetic construct; identical to SEQ ID NO: 9301
  source 1..80: mol_type = other DNA

SEQ ID NO: 21553 - DNA, 80 bp, synthetic construct
  source 1..80: mol_type = other DNA
atacaccatggcatttaaatgcaaaatgtttacatcatctagggttcagctgaggaaatagcaatctattctaaacgagg

SEQ ID NO: 21554 - DNA, 80 bp, synthetic construct
  source 1..80: mol_type = other DNA
caccaaaaacgatgaaggacgaaaagttaacaaagtggtttctactcacagtcggcatcagctaacacaatgcaagggct

SEQ ID NO: 21555 - DNA, 80 bp, synthetic construct
  source 1..80: mol_type = other DNA
gagcattacaaaggaggaggcttaccctgctctcatgaacacaggttgctttagcattctaaatttatgtgatgtttgtg

SEQ ID NO: 21556 - DNA, 80 bp, synthetic construct; identical to SEQ ID NO: 9302
  source 1..80: mol_type = other DNA

SEQ ID NO: 21557 - DNA, 80 bp, synthetic construct
  source 1..80: mol_type = other DNA
atcatctttctacagattgatcagacttatcatgacccagtcgcaacttagctatttcattttttatccctcttctggca

SEQ ID NO: 21558 - DNA, 80 bp, synthetic construct
  source 1..80: mol_type = other DNA
cactaggtcagatgctagaagaaatgacaggaccatttctttttctagtctcccaaaaaacctcatgaagtctccttcag

SEQ ID NO: 21559 - DNA, 80 bp, synthetic construct; identical to SEQ ID NO: 9303
  source 1..80: mol_type = other DNA

SEQ ID NO: 21560 - DNA, 80 bp, synthetic construct
  source 1..80: mol_type = other DNA
ttggctggttctacaattatttcttttttattatttgtatggcagccttaatccaccaacatgttctttgcctttctttt

SEQ ID NO: 21561 - DNA, 80 bp, synthetic construct
  source 1..80: mol_type = other DNA
gagtgtatgtttagattttatgtggttactgaactaactgctactgtgaattacagaatagggcattaatatgctaatgt

SEQ ID NO: 21562 - DNA, 80 bp, synthetic construct
  source 1..80: mol_type = other DNA
ttcatttaagatgttaaggagtttttaattttgtagataaaaaatttacttacctgtcaccctttgatttctctaaattc

SEQ ID NO: 21563 - DNA, 80 bp, synthetic construct
  source 1..80: mol_type = other DNA
gaaagaaagtctacacttttgcttagcacaagtttagatggcaaataaaaggcttgagttttcccaaaagtctagctaaa

SEQ ID NO: 21564 - DNA, 80 bp, synthetic construct; identical to SEQ ID NO: 9304
  source 1..80: mol_type = other DNA

SEQ ID NO: 21565 - DNA, 80 bp, synthetic construct
  source 1..80: mol_type = other DNA
ccccaactctactaaaagtacaaaaaattagctgggcgtggtggtgggcgcctgtagtcccagctactcgggaggctgag

SEQ ID NO: 21566 - DNA, 80 bp, synthetic construct
  source 1..80: mol_type = other DNA
tgcctaaagtgttgttagaatggagggtctttgctacaatgaacacaaaggatacagtctattgtttgcctctttcatga

SEQ ID NO: 21567 - DNA, 80 bp, synthetic construct
  source 1..80: mol_type = other DNA
ttttttttttcatttttttttttttaattatactctaagttttagggtacatgtgcacattgtgcaggttagttacatat

SEQ ID NO: 21568 - DNA, 80 bp, synthetic construct; identical to SEQ ID NO: 9305
  source 1..80: mol_type = other DNA

SEQ ID NO: 21569 - DNA, 80 bp, synthetic construct
  source 1..80: mol_type = other DNA
gcaagtttagagtaggttatggccaaggatgaactaaaagcctgggggaatgaaaagatacatggaataatcaggaagag

SEQ ID NO: 21570 - DNA, 80 bp, synthetic construct
  source 1..80: mol_type = other DNA
gaaattaaaaagtatgggaggaaagaggaaatatggcatgtactgagcgctcagtagggtgataaatgttttactactca

SEQ ID NO: 21571 - DNA, 80 bp, synthetic construct
  source 1..80: mol_type = other DNA
taatctccagggatttttttaagtaggtaaagtgctcccccaatgttataggggatcatggatgagcgaagacaaactga

SEQ ID NO: 21572 - DNA, 80 bp, synthetic construct
  source 1..80: mol_type = other DNA
gatagctgatgagaatgaaaaaaaaatgtgtcgggctacattcaaagccatccctggccatgggttggacagacctcaac

SEQ ID NO: 21573 - DNA, 80 bp, synthetic construct; identical to SEQ ID NO: 9306
  source 1..80: mol_type = other DNA

SEQ ID NO: 21574 - DNA, 80 bp, synthetic construct
  source 1..80: mol_type = other DNA
tcttttttgcttctcaacttccaggaagttaaaaaagtaacaattcctcaaaacccagagctagttctagtacccatttg

SEQ ID NO: 21575 - DNA, 80 bp, synthetic construct
  source 1..80: mol_type = other DNA
gacatcatcattccttcttgtgaaccttttttacagcattttgtacatgccttagtaccttatcacaccctgcctggtct

SEQ ID NO: 21576 - DNA, 80 bp, synthetic construct
  source 1..80: mol_type = other DNA
ctttcttttgcttaggatagaacatcatcaataaatggggatctattttcccaaacttcaccttctagtctgctctccct

SEQ ID NO: 21577 - DNA, 80 bp, synthetic construct; identical to SEQ ID NO: 9307
  source 1..80: mol_type = other DNA

SEQ ID NO: 21578 - DNA, 80 bp, synthetic construct
  source 1..80: mol_type = other DNA
ggtgcatcatgtcattcaaactacatctgcttatattctatccatatgtttgaaggctaaaataagtaacaaatcattaa

SEQ ID NO: 21579 - DNA, 80 bp, synthetic construct
  source 1..80: mol_type = other DNA
gctgcccctgctgtaggcccataaccaggaacaatattcactactccaggaggaaaccctgcctaaaagataaaaagttt

SEQ ID NO: 21580 - DNA, 80 bp, synthetic construct
  source 1..80: mol_type = other DNA
taacttcaagggttgcattattaaaggacaatttcttgtcagggtaagtccatactctatgaatcattgctccagtgatg

SEQ ID NO: 21581 - DNA, 80 bp, synthetic construct; identical to SEQ ID NO: 9308
  source 1..80: mol_type = other DNA

SEQ ID NO: 21582 - DNA, 80 bp, synthetic construct
  source 1..80: mol_type = other DNA
gaattcaggtgaaggcatgggaactgagttgggcacattacaatttcatgttatttgcatcgaaatgtttcattttgaca

SEQ ID NO: 21583 - DNA, 80 bp, synthetic construct
  source 1..80: mol_type = other DNA
atagctgatgaaaatgttttacatgttcttttactgtttttgaacaggaagataaatgcagaggaactcataatagaaaa

SEQ ID NO: 21584 - DNA, 80 bp, synthetic construct
  source 1..80: mol_type = other DNA
acaattttgcagaaaacactaggccatcagtggcaggtacaaaccaacttaatgtttcaacatttgaaagaatgctacat

SEQ ID NO: 21585 - DNA, 80 bp, synthetic construct; identical to SEQ ID NO: 9309
  source 1..80: mol_type = other DNA

SEQ ID NO: 21586 - DNA, 80 bp, synthetic construct
  source 1..80: mol_type = other DNA
gtgtttccacagctcagtgcaggccctatcttccaaatgagcataaccaacgggaaattccactagaaagcaatatgtaa

SEQ ID NO: 21587 - DNA, 80 bp, synthetic construct
  source 1..80: mol_type = other DNA
cattgctaaaagcaactagtaaatgctaaaacgctctgaataaaccagatatgagatatgagaaggaaataggagagaac

SEQ ID NO: 21588 - DNA, 80 bp, synthetic construct
  source 1..80: mol_type = other DNA
ccaataatattatttagtagcttttatttccaggaaaaataccttgctaaagacaaagatgtccagggtccagaggccaa

SEQ ID NO: 21589 - DNA, 80 bp, synthetic construct; identical to SEQ ID NO: 9310
  source 1..80: mol_type = other DNA

SEQ ID NO: 21590 - DNA, 80 bp, synthetic construct
  source 1..80: mol_type = other DNA
aatattgatatgaatatatttcaatctcattggagccaaagataagtcttgaccatttcttcacataaggacttcgctac

SEQ ID NO: 21591 - DNA, 80 bp, synthetic construct
  source 1..80: mol_type = other DNA
gtaatatggaggatctgagcctcttatctaaaggtaaaatatattccatgcagtgcttcaaatgcctctggtattctttt

SEQ ID NO: 21592 - DNA, 80 bp, synthetic construct
  source 1..80: mol_type = other DNA
caaaatgctatcctgcagatgtgcagtggagagcaccttgccatatacatgtaaagcttggctcttataaagagtacata

SEQ ID NO: 21593 - DNA, 80 bp, synthetic construct; identical to SEQ ID NO: 9311
  source 1..80: mol_type = other DNA

SEQ ID NO: 21594 - DNA, 80 bp, synthetic construct
  source 1..80: mol_type = other DNA
cacacacaatcatatataaacaaatgtatttgacattcacaaaatggtggttggtgatgtgagagaaaggtgtagacaat

SEQ ID NO: 21595 - DNA, 80 bp, synthetic construct
  source 1..80: mol_type = other DNA
attcccaaaatggtaagtgaagccctaaaatagtaattcgaaatgataggaaccataaaattgagttaggtgaaatcaaa

SEQ ID NO: 21596 - DNA, 80 bp, synthetic construct
  source 1..80: mol_type = other DNA
ggaggtctctggcgaagagaagaaccacattccaatttgtttctggtagctcaaagttctaccaataagagaattctttt

SEQ ID NO: 21597 - DNA, 80 bp, synthetic construct
  source 1..80: mol_type = other DNA
aaatgacaggagtataagacatttattttcaatctaaatttgaccaatttatgtgccccgaagtttaatgtggtcatcca

SEQ ID NO: 21598 - DNA, 80 bp, synthetic construct; identical to SEQ ID NO: 9312
  source 1..80: mol_type = other DNA

SEQ ID NO: 21599 - DNA, 80 bp, synthetic construct
  source 1..80: mol_type = other DNA
ataacacatacgtacagattcacacacacaaacccttaacttaggctgcaaacacagtcccatcttgctttgaagatatt

SEQ ID NO: 21600 - DNA, 80 bp, synthetic construct
  source 1..80: mol_type = other DNA
cccaaataaataatttcagaggtcagctttaaaaagtttgggaccttagagaggcaattgcctcagatcagtaattactg

SEQ ID NO: 21601 - DNA, 80 bp, synthetic construct; identical to SEQ ID NO: 9313
  source 1..80: mol_type = other DNA

SEQ ID NO: 21602 - DNA, 80 bp, synthetic construct
  source 1..80: mol_type = other DNA
ttgatgcagcctgctaaatcattcagatatgcattggaatagagttttccaccattcattgactccattgtctgaaaaac

SEQ ID NO: 21603 - DNA, 80 bp, synthetic construct
  source 1..80: mol_type = other DNA
ctccactttttaagagttaaaatgacttcctttaggtcaaatagcaagatctgggcacaaagggtagtgagattctgatt

SEQ ID NO: 21604 - DNA, 80 bp, synthetic construct
  source 1..80: mol_type = other DNA
ctatcagaattccaacaaggtttctcttattttgtaatcaactgtgggtgacaacttagtgtcagtgactattaatgatg

SEQ ID NO: 21605 - DNA, 80 bp, synthetic construct; identical to SEQ ID NO: 9314
  source 1..80: mol_type = other DNA

SEQ ID NO: 21606 - DNA, 80 bp, synthetic construct
  source 1..80: mol_type = other DNA
tctctctataggatcttatgctgacaggcagtcaacaaatcagataattgagaaaagccaagttttagcattttctgctt

SEQ ID NO: 21607 - DNA, 80 bp, synthetic construct
  source 1..80: mol_type = other DNA
aatgtagacttctttgttactgccactttcagattctaaagatgaaatttgcttgaaacctgatcttggtatttgtttat

SEQ ID NO: 21608 - DNA, 80 bp, synthetic construct
  source 1..80: mol_type = other DNA
attttttttattttttgcctctttcatctgtaaaaagaacatcatttaattatgacccttgtgaacagacacatttcagg

SEQ ID NO: 21609 - DNA, 80 bp, synthetic construct
  source 1..80: mol_type = other DNA
aggagactcaaacttcatgtgatcttattgaaacctctgagaagttttaaggtaaagaaatttctaaaatttggtttaac

SEQ ID NO: 21610 - DNA, 80 bp, synthetic construct; identical to SEQ ID NO: 9315
  source 1..80: mol_type = other DNA

SEQ ID NO: 21611 - DNA, 80 bp, synthetic construct
  source 1..80: mol_type = other DNA
gcggccttcactgccttgtcaacatcctcctgtaagtcaacaggaattcaattcagtaagctaaacatattaggcaagca

SEQ ID NO: 21612 - DNA, 80 bp, synthetic construct
  source 1..80: mol_type = other DNA
ctgctgaataatctttacatgatgagctccacgtacctagcacatgctggatttcctagaatataagtgttttatgattt

SEQ ID NO: 21613 - DNA, 80 bp, synthetic construct
  source 1..80: mol_type = other DNA
atgaagaaactaaagcaaagagagacgggagctttgctcaaggttaataactaaaagtggctgaactgagttttaaaggg

SEQ ID NO: 21614 - DNA, 80 bp, synthetic construct; identical to SEQ ID NO: 9316
  source 1..80: mol_type = other DNA

SEQ ID NO: 21615 - DNA, 80 bp, synthetic construct
  source 1..80: mol_type = other DNA
agtcaaagagtaaagtgactccacattcagtgtagcctcctgtccttcactctcatagtgccttcactcaatttctttct

SEQ ID NO: 21616 - DNA, 80 bp, synthetic construct
  source 1..80: mol_type = other DNA
ttacagaacatacctactactactgcaaacaccataaaggaatatatcattccagtgttcttttgtacatagaactggcc

SEQ ID NO: 21617 - DNA, 80 bp, synthetic construct; identical to SEQ ID NO: 9317
  source 1..80: mol_type = other DNA

SEQ ID NO: 21618 - DNA, 80 bp, synthetic construct
  source 1..80: mol_type = other DNA
catcacacactgatatatctcactgtctaacttttcagagaatgatgatatatacaaaatatatgtatttattgcctgcc

SEQ ID NO: 21619 - DNA, 80 bp, synthetic construct
  source 1..80: mol_type = other DNA
ttgtcagcatgatctgtggataccagagcttataaaatacatgctggtctgtgtttaaacagatctgtatgacacagctt

SEQ ID NO: 21620 - DNA, 80 bp, synthetic construct
  source 1..80: mol_type = other DNA
gatgttcttatgattatgtcctttggatcatgcgcccccttttctcacatcttatatgtaatcttgcagatgcagaaata

SEQ ID NO: 21621 - DNA, 80 bp, synthetic construct; identical to SEQ ID NO: 9318
  source 1..80: mol_type = other DNA

SEQ ID NO: 21622 - DNA, 80 bp, synthetic construct
  source 1..80: mol_type = other DNA
tgagaggtgcaggttgcagtgagctgagattgcaccactgcactccagcctgggtgatagagtaagaccctcatctcaaa

SEQ ID NO: 21623 - DNA, 80 bp, synthetic construct
  source 1..80: mol_type = other DNA
gtcctagcagttaaaactttaaattttaatataactctcagcaatttctccctctctcaatagagggagattcactctgt

SEQ ID NO: 21624 - DNA, 80 bp, synthetic construct
  source 1..80: mol_type = other DNA
catgcccatctaattgtttatttttagtaaagatgaggtcttgctatgttgtccaggctggtctcaaacccctgggctca

SEQ ID NO: 21625 - DNA, 80 bp, synthetic construct; identical to SEQ ID NO: 9319
  source 1..80: mol_type = other DNA

SEQ ID NO: 21626 - DNA, 80 bp, synthetic construct
  source 1..80: mol_type = other DNA
aattttatcttatcactttgtctttcaaatgtttacacctgttccctttcatctacaatctcaaggtcaaagtcctccct

SEQ ID NO: 21627 - DNA, 80 bp, synthetic construct
  source 1..80: mol_type = other DNA
atatatactttaagacccagctcaaatatcaatctacctaaaaccttgccagactagtccagcttgatgatggctactag

SEQ ID NO: 21628 - DNA, 80 bp, synthetic construct
  source 1..80: mol_type = other DNA
gactacaaaatctagttcttacatctctgtaaggctgccctaataatgacctcctttgcaacaaatatatactgctattt

SEQ ID NO: 21629 - DNA, 80 bp, synthetic construct
  source 1..80: mol_type = other DNA
ataaatcatattttaatagattccatgatacaacaaaacttatacattattcaaaaactgttagacataacagttattgt

SEQ ID NO: 21630 - DNA, 80 bp, synthetic construct
  source 1..80: mol_type = other DNA
ttgaagtaagggccacaagctgaatgtaaaaagacagttcaaatgatgatgagatatcaaatgcctcctaaagcacagtt

SEQ ID NO: 21631 - DNA, 80 bp, synthetic construct; identical to SEQ ID NO: 9320
  source 1..80: mol_type = other DNA

SEQ ID NO: 21632 - DNA, 80 bp, synthetic construct
  source 1..80: mol_type = other DNA
caatatagcctaaaagaaccactgaagtgaaaagaaaacagttcccacccacatctgtactttgctttgtaacctccatt

SEQ ID NO: 21633 - DNA, 80 bp, synthetic construct
  source 1..80: mol_type = other DNA
ctagatttgtacctttcactaagcaatgtcggagtttactatacatttgtcggcaaaattgtgggaagagcaataattat

SEQ ID NO: 21634 - DNA, 80 bp, synthetic construct
  source 1..80: mol_type = other DNA
ggtagatgttaatgagcatccttgatctcttgggtaagcaatagtaattgtcaagaagcacagagcaaatcagtggcaaa

SEQ ID NO: 21635 - DNA, 80 bp, synthetic construct
  source 1..80: mol_type = other DNA
ctttgggcatagagatttgttttcctaataaaattaatcccagtggcaaaggtcgatgttcaaggctccagaactaaaac

SEQ ID NO: 21636 - DNA, 80 bp, synthetic construct; identical to SEQ ID NO: 9321
  source 1..80: mol_type = other DNA

SEQ ID NO: 21637 - DNA, 80 bp, synthetic construct
  source 1..80: mol_type = other DNA
taactttcttaggtgtcaaaactctttgacccctgttaaatgttaacgcttgagaggagatacaacttaacagcttaaca

SEQ ID NO: 21638 - DNA, 80 bp, synthetic construct
  source 1..80: mol_type = other DNA
caagccttcctggacattctgagacaggctaaattttgagaatgtctgccatagccaatagtcaggttagtactaaattc

SEQ ID NO: 21639 - DNA, 80 bp, synthetic construct; identical to SEQ ID NO: 9322
  source 1..80: mol_type = other DNA

SEQ ID NO: 21640 - DNA, 80 bp, synthetic construct
  source 1..80: mol_type = other DNA
ctggcaccgttgaagagctctatatatttaactcctcaagcattttctatctcctcattttacatgaaaaagaacagaat

SEQ ID NO: 21641 - DNA, 80 bp, synthetic construct
  source 1..80: mol_type = other DNA
agttaatgcggtggcctgggaaagaggccataaacaaaggttgagtaatattataaaggacctttgtttgtgcacttttt

SEQ ID NO: 21642 - DNA, 80 bp, synthetic construct
  source 1..80: mol_type = other DNA
tcaaattgttaacccctatggttgaactccgtactcctgtggcttgagacttcggtcttacttgttttcatcatactgaa

SEQ ID NO: 21643 - DNA, 80 bp, synthetic construct; identical to SEQ ID NO: 9323
  source 1..80: mol_type = other DNA

SEQ ID NO: 21644 - DNA, 80 bp, synthetic construct
  source 1..80: mol_type = other DNA
gaaacacttacgtgttcagaaaaatattctgaagttttttactctcctcacccaggaggagaataaaaagtttatttaat

SEQ ID NO: 21645 - DNA, 80 bp, synthetic construct
  source 1..80: mol_type = other DNA
catgcgccaccatgcccagctaatttttgtattttcagtagagacgaggtttcaccatgttggccagaatggtctcaatc

SEQ ID NO: 21646 - DNA, 80 bp, synthetic construct
  source 1..80: mol_type = other DNA
cccccgggttcaagcaattatcctgcgtcagcctccccagtagctgggattacaggaacccaccaccatgcccagctaat

SEQ ID NO: 21647 - DNA, 80 bp, synthetic construct; identical to SEQ ID NO: 9324
  source 1..80: mol_type = other DNA

SEQ ID NO: 21648 - DNA, 80 bp, synthetic construct
  source 1..80: mol_type = other DNA
catttagaacttgagaacaattttcactaaataaaaactggtttttgttgtttctattattagctggaaaataacaacgc

SEQ ID NO: 21649 - DNA, 80 bp, synthetic construct
  source 1..80: mol_type = other DNA
atttcatatgaataaagcatttctctcctttttccttttctttttttttttggctggagtgcagtggtatgatctcggct

SEQ ID NO: 21650 - DNA, 80 bp, synthetic construct
  source 1..80: mol_type = other DNA
caagtgatccaactgccttggtctcacaaagtgctgggattacaggtgtgagccacagcgcccagctgaagatttctcta

SEQ ID NO: 21651 - DNA, 80 bp, synthetic construct
  source 1..80: mol_type = other DNA
tttggtaacaaggacaacttagacaattttcctaagctgccccagaaaccatattttcatggcatgtcttttggagcttg

SEQ ID NO: 21652 - DNA, 80 bp, synthetic construct; identical to SEQ ID NO: 9325
  source 1..80: mol_type = other DNA

SEQ ID NO: 21653 - DNA, 80 bp, synthetic construct
  source 1..80: mol_type = other DNA
gttttcataaacttaaactaaagcatttcaccatgcctaaatgatgcacatctcttcacctctcaaaactttctggctgt

SEQ ID NO: 21654 - DNA, 80 bp, synthetic construct
  source 1..80: mol_type = other DNA
aaaacaatgcttttacctgaaatggccatgaatttgaggcaaagcaaaggcttttgtgggcttggtctttattaatgatt

SEQ ID NO: 21655 - DNA, 80 bp, synthetic construct
  source 1..80: mol_type = other DNA
cacattgtttcattggctttttaaaagcatatggttttattctccttttcaaaagattacctggtaatttcgttgtcttc

SEQ ID NO: 21656 - DNA, 80 bp, synthetic construct; identical to SEQ ID NO: 9326
  source 1..80: mol_type = other DNA

SEQ ID NO: 21657 - DNA, 80 bp, synthetic construct
  source 1..80: mol_type = other DNA
ggatatctaaagataagttattaatagttcaaccccgagggagaatgtaatgaaacactcctccaaggtttaaattagct

SEQ ID NO: 21658 - DNA, 80 bp, synthetic construct
  source 1..80: mol_type = other DNA
tacttccctggtctcctctatacttccattggacaatttgtcactttttaaatagtcatttttaagtgtctgccttccat

SEQ ID NO: 21659 - DNA, 80 bp, synthetic construct
  source 1..80: mol_type = other DNA
tactctatgacacttgtgatttcctacaaaatggggaagaggataagccgtcttgtttgcccattcatgccaatataatt

SEQ ID NO: 21660 - DNA, 80 bp, synthetic construct; identical to SEQ ID NO: 9327
  source 1..80: mol_type = other DNA

SEQ ID NO: 21661 - DNA, 80 bp, synthetic construct
  source 1..80: mol_type = other DNA
gaggaaaaataaattcagacgaaagtgctgatttgcccaatgtctcttagagtgaatcaacactctagctatcagaaata

SEQ ID NO: 21662 - DNA, 80 bp, synthetic construct
  source 1..80: mol_type = other DNA
tttatgcccttacagcttagtatttttcttctcaagggatggctgggaaagaacttaatcaacttgtcccgaactcagct

SEQ ID NO: 21663 - DNA, 80 bp, synthetic construct
  source 1..80: mol_type = other DNA
aaaaaagctttccctgttctctttgccccctacctctgcctaattaaaatttaattttcaccttgtcatcataatcttcc

SEQ ID NO: 21664 - DNA, 80 bp, synthetic construct; identical to SEQ ID NO: 9328
  source 1..80: mol_type = other DNA

SEQ ID NO: 21665 - DNA, 80 bp, synthetic construct
  source 1..80: mol_type = other DNA
tctacatatcagcccataaaattccaaacaaaaaactaaagatattgcgatacctgccgtagacttttaaatcagtcttt

SEQ ID NO: 21666 - DNA, 80 bp, synthetic construct
  source 1..80: mol_type = other DNA
ataaaataaaacaacatacagaatcaattacattttgctaggcctgtggtcggactttctagttctcgcccgagtcctct

SEQ ID NO: 21667 - DNA, 80 bp, synthetic construct
  source 1..80: mol_type = other DNA
taccatctagttccatgatcagaatttgcatctaagctgtacataaaactgccactttagattaaagccagtgaatgttt

SEQ ID NO: 21668 - DNA, 80 bp, synthetic construct
  source 1..80: mol_type = other DNA
acctttaagacaggaggacactgtgagcccaacttgtgtttgaacttgtgttgacatttatataatcatgattagtaact

SEQ ID NO: 21669 - DNA, 80 bp, synthetic construct; identical to SEQ ID NO: 9329
  source 1..80: mol_type = other DNA

SEQ ID NO: 21670 - DNA, 80 bp, synthetic construct
  source 1..80: mol_type = other DNA
ataaagtcaatttgtggcagatcctgatccccagagaaagaagtttaggctctattctggatataaaaagggagagagac

SEQ ID NO: 21671 - DNA, 80 bp, synthetic construct
  source 1..80: mol_type = other DNA
aattatgaattatgccattctcccacaaacagaggcgtttcagcatgaaaagggaatttggcataggtaatgtgatgacc

SEQ ID NO: 21672 - DNA, 80 bp, synthetic construct; identical to SEQ ID NO: 9330
  source 1..80: mol_type = other DNA

SEQ ID NO: 21673 - DNA, 80 bp, synthetic construct
  source 1..80: mol_type = other DNA
gggttctatgtaaccattatatattaactcaattctaattatgaattttggacttaggtgacttttgaataatatatatg

SEQ ID NO: 21674 - DNA, 80 bp, synthetic construct
  source 1..80: mol_type = other DNA
cattttaagaaatgcatcattttacctttgataaacaagtagccatttcctggattcaactggtgtccaagaattagtca

SEQ ID NO: 21675 - DNA, 80 bp, synthetic construct
  source 1..80: mol_type = other DNA
ttatctgctgatatgagattttggagtctgtgggctaaagtggggagcccctgactccttgcaaaagatactcagagtgc

SEQ ID NO: 21676 - DNA, 80 bp, synthetic construct
  source 1..80: mol_type = other DNA
tgagagtccccatttaatgtcatccatgtgaattttcaaacttgagaactgagtcacagcataggctgcatgggtggtgg

SEQ ID NO: 21677 - DNA, 80 bp, synthetic construct; identical to SEQ ID NO: 9331
  source 1..80: mol_type = other DNA

SEQ ID NO: 21678 - DNA, 80 bp, synthetic construct
  source 1..80: mol_type = other DNA
ttagtaacgtgagtatatactcttttttcttgttgtttgcaaaaccccatcagccttttcaattgtgtcagggaaagaga

SEQ ID NO: 21679 - DNA, 80 bp, synthetic construct
  source 1..80: mol_type = other DNA
gatagaaagttctgcccatttttagcagtatcaagacctagtaatagaattgctcgcatgtaagccctcttccttctaaa

SEQ ID NO: 21680 - DNA, 80 bp, synthetic construct; identical to SEQ ID NO: 9332
  source 1..80: mol_type = other DNA

SEQ ID NO: 21681 - DNA, 80 bp, synthetic construct
  source 1..80: mol_type = other DNA
ctgatttattggattctaagtaagggtttgtgaagcaatccttgctcaaattcttttgaacatggttctatgttgtcact

SEQ ID NO: 21682 - DNA, 80 bp, synthetic construct
  source 1..80: mol_type = other DNA
tgctgatttgcaacatatcatcctatagattatccatgccatttcagagtcattacctttactttgggttggtcttcaaa

SEQ ID NO: 21683 - DNA, 80 bp, synthetic construct
  source 1..80: mol_type = other DNA
ttactttagaattgttaattccattttcttacagtcaggcaggtgccagaaaacaaaacaacttgccaagacagcagtcc

SEQ ID NO: 21684 - DNA, 80 bp, synthetic construct; identical to SEQ ID NO: 9333
  source 1..80: mol_type = other DNA

SEQ ID NO: 21685 - DNA, 80 bp, synthetic construct
  source 1..80: mol_type = other DNA
atgataaaaatgcagtaataggtgtgaaaacagttgttagagctaattgggaaagggggataataccctcttctcttagg

SEQ ID NO: 21686 - DNA, 80 bp, synthetic construct
  source 1..80: mol_type = other DNA
ttaagagctatgtgaccttaagtcagtcatgatctctgagctcgggctcctcagctttgaaatgggactctgctaacatc

SEQ ID NO: 21687 - DNA, 80 bp, synthetic construct
  source 1..80: mol_type = other DNA
aggactaagtagttaataagtgccagccacattccacaaattacctcacttaattctcacagccactttccaaggtagtc

SEQ ID NO: 21688 - DNA, 80 bp, synthetic construct; identical to SEQ ID NO: 9334
  source 1..80: mol_type = other DNA

SEQ ID NO: 21689 - DNA, 80 bp, synthetic construct
  source 1..80: mol_type = other DNA
ttctctcccttattcactttactccagccagattagcctttggatagttctttgagcataacatgctcttgtcctcgggg

SEQ ID NO: 21690 - DNA, 80 bp, synthetic construct
  source 1..80: mol_type = other DNA
catttatcctaatttctgattaaagcattctcttattttctgccccacactattccacacaccttccaggaacagaggct

SEQ ID NO: 21691 - DNA, 80 bp, synthetic construct
  source 1..80: mol_type = other DNA
tagctgaatttgtttgttgtaagaatttaaagagataatcatgggggaaaagaagcacttcaaatcgtgcctgggacgta

SEQ ID NO: 21692 - DNA, 80 bp, synthetic construct; identical to SEQ ID NO: 9335
  source 1..80: mol_type = other DNA

SEQ ID NO: 21693 - DNA, 80 bp, synthetic construct
  source 1..80: mol_type = other DNA
tagtggaattgaccttagacaagtctcttgctagtgtgttagctcaaactgccagcattggcagtgtagctttgtcactt

SEQ ID NO: 21694 - DNA, 80 bp, synthetic construct
  source 1..80: mol_type = other DNA
tacctataattatttattgtgtgtgtgtgtgtgcgtgtgtgtgtgtgtgtgtgtatgtatgagtaaaatgtcattagctg

SEQ ID NO: 21695 - DNA, 80 bp, synthetic construct
  source 1..80: mol_type = other DNA
acaacagtattgtgaagagagaatggcaaacaaagttaccgaatcctgtaggagaaaatttttgatccctgaaatcttgg

SEQ ID NO: 21696 - DNA, 80 bp, synthetic construct; identical to SEQ ID NO: 9336
  source 1..80: mol_type = other DNA

SEQ ID NO: 21697 - DNA, 80 bp, synthetic construct
  source 1..80: mol_type = other DNA
aatgtggggttcatttagagttggaaagaggagtaatgaggataaggatgggatatgagttcatattagtgaatttatag

SEQ ID NO: 21698 - DNA, 80 bp, synthetic construct
  source 1..80: mol_type = other DNA
agtcataaaaacatatgcatcaataaattcttttgtttgggtgaaaagcagtcccaagcttgagagtatgtagcttttct

SEQ ID NO: 21699 - DNA, 80 bp, synthetic construct
  source 1..80: mol_type = other DNA
aaataacacaagactttaggggctggtaatagaagataattcctcagacactataaactccttgcttacttggtttgtaa

SEQ ID NO: 21700 - DNA, 80 bp, synthetic construct
  source 1..80: mol_type = other DNA
agttcacccatttagatttaattacatacataactggcgtcctcccaagtgtgaaaacgctgtaaccaataaattaaaca

SEQ ID NO: 21701 - DNA, 80 bp, synthetic construct; identical to SEQ ID NO: 9337
  source 1..80: mol_type = other DNA

SEQ ID NO: 21702 - DNA, 80 bp, synthetic construct
  source 1..80: mol_type = other DNA
tgcaaacttctgcaaagccaaaggagtggggagacaggggcatccagactaccaaaatatcttcctaggtagtattatta

SEQ ID NO: 21703 - DNA, 80 bp, synthetic construct
  source 1..80: mol_type = other DNA
cttttggacatacctttgccaaatgtaaattgtttgacggtatggatttactgcatttttcatgctaccatttgtagtaa

SEQ ID NO: 21704 - DNA, 80 bp, synthetic construct
  source 1..80: mol_type = other DNA
tgttgtgctttatgaaaatgaaaatgcaacagaccttgggatttcaaagccatccatggttacaagtgaggaaataaata

SEQ ID NO: 21705 - DNA, 80 bp, synthetic construct; identical to SEQ ID NO: 9338
  source 1..80: mol_type = other DNA

SEQ ID NO: 21706 - DNA, 80 bp, synthetic construct
  source 1..80: mol_type = other DNA
catctgctccaatggcaacaaacttggctgaagaaataatgcttttcttcctcccaccaaaatatgcaaaataatgcaag

SEQ ID NO: 21707 - DNA, 80 bp, synthetic construct
  source 1..80: mol_type = other DNA
ctctagtgagtattttgctctcttatcatacatgccggctatagtgaagttaatagaagtgcttagtaaagtcctctgaa

SEQ ID NO: 21708 - DNA, 80 bp, synthetic construct
  source 1..80: mol_type = other DNA
caaagggctctttacacaagtttacttaaattgacctttaatgctttacataaatgcagtttttgcaaacccgagtcaaa

SEQ ID NO: 21709 - DNA, 80 bp, synthetic construct; identical to SEQ ID NO: 9339
  source 1..80: mol_type = other DNA

SEQ ID NO: 21710 - DNA, 80 bp, synthetic construct
  source 1..80: mol_type = other DNA
atgcagcagctgctctggccactaaggccagttattatttttttgacttctcatgctttttaatgctactatgtaacttt

SEQ ID NO: 21711 - DNA, 80 bp, synthetic construct
  source 1..80: mol_type = other DNA
cctttatctacaccctaccctaagttagttttaaaatatcgtatcagtcttgtgtattttcagtgctgggtaagtagacc

SEQ ID NO: 21712 - DNA, 80 bp, synthetic construct; identical to SEQ ID NO: 9340
  source 1..80: mol_type = other DNA

SEQ ID NO: 21713 - DNA, 80 bp, synthetic construct
  source 1..80: mol_type = other DNA
ttttttctagtgaaacttgccaattcccctgaatatgggacttacatagggaaactaaaaatttctgaattgtttgccca

SEQ ID NO: 21714 - DNA, 80 bp, synthetic construct
  source 1..80: mol_type = other DNA
tgtttactatttctaccctattctccacaagagaactcctacatgggttcaagcatcaactgctttggttttctcagtga

SEQ ID NO: 21715 - DNA, 80 bp, synthetic construct
  source 1..80: mol_type = other DNA
tgggtgtagttgttttcctatagaactttatttaaaaagacagaaggcaggccagatttggtgcacgggccaactcccta

SEQ ID NO: 21716 - DNA, 80 bp, synthetic construct
  source 1..80: mol_type = other DNA
attgttttctctctcaaaaatgtgttttgagttaaatgcacaattacacaacagctgttacataacttgagagtggcgct

SEQ ID NO: 21717 - DNA, 80 bp, synthetic construct; identical to SEQ ID NO: 9341
  source 1..80: mol_type = other DNA

SEQ ID NO: 21718 - DNA, 80 bp, synthetic construct
  source 1..80: mol_type = other DNA
agggcctgagacctatatttttgaggtaaacatcatcctgccctgagagcttattttgtagaatagcatatttctgggaa

SEQ ID NO: 21719 - DNA, 80 bp, synthetic construct
  source 1..80: mol_type = other DNA
ctgtccctttaacttgagagtaatcgacaaatgatgtttcatcttctttttcctccttatgaacaaactaaatcacacac

SEQ ID NO: 21720 - DNA, 80 bp, synthetic construct
  source 1..80: mol_type = other DNA
tttcattttacaacaaacatctccagaactccgtccaatcctcagttcctgaaaagataaaaggaacctaatctgccacc

SEQ ID NO: 21721 - DNA, 80 bp, synthetic construct; identical to SEQ ID NO: 9342
  source 1..80: mol_type = other DNA

SEQ ID NO: 21722 - DNA, 80 bp, synthetic construct
  source 1..80: mol_type = other DNA
cttataaaaccatcagatctcatgagaattcacttattatcatgagaacaggatgacggtaacccccctccatgattaaa

SEQ ID NO: 21723 - DNA, 80 bp, synthetic construct
  source 1..80: mol_type = other DNA
ccagagagatctctcgctgtttctgccatgtgtggatgcaatgagacattggcaatctgtaacccaaaagagggctctca

SEQ ID NO: 21724 - DNA, 80 bp, synthetic construct; identical to SEQ ID NO: 9343
  source 1..80: mol_type = other DNA

SEQ ID NO: 21725 - DNA, 80 bp, synthetic construct
  source 1..80: mol_type = other DNA
aaaagtggatcttgtatgtagtgagagagtctgtacttagttgacaagttgatgttaaaaatggaagtggaaggcagaat

SEQ ID NO: 21726 - DNA, 80 bp, synthetic construct
  source 1..80: mol_type = other DNA
tctctttggcttgtgttactgagataggatagatgcccctctaatctggtctaaccaggacactaactgattagtaaggt

SEQ ID NO: 21727 - DNA, 80 bp, synthetic construct
  source 1..80: mol_type = other DNA
gtttccagtttgcttccttaatgtgtagaaagaaagacatgaaagacatcaatgagtcaatcaaaatgtagactactttg

SEQ ID NO: 21728 - DNA, 80 bp, synthetic construct; identical to SEQ ID NO: 9344
  source 1..80: mol_type = other DNA

SEQ ID NO: 21729 - DNA, 80 bp, synthetic construct
  source 1..80: mol_type = other DNA
ctttgatattggccagtgaaactgatttcagatctctggcttctaaaagtgttgttttaaaccgccaagtttataactgt

SEQ ID NO: 21730 - DNA, 80 bp, synthetic construct
  source 1..80: mol_type = other DNA
tatctgtaccttacaatgaaaaactcatcaggtgttttatatattttatatacatatatatttatgtatatatatgtatg

SEQ ID NO: 21731 - DNA, 80 bp, synthetic construct
  source 1..80: mol_type = other DNA
gagagagggagcaagagagagggggaaatgtgtcaggctcttcttataaccagctctcctgtaaatttattaccgtgggg

SEQ ID NO: 21732 - DNA, 80 bp, synthetic construct; identical to SEQ ID NO: 9345
  source 1..80: mol_type = other DNA

SEQ ID NO: 21733 - DNA, 80 bp, synthetic construct
  source 1..80: mol_type = other DNA
gggacctacacaagttcaaaatccatcagggtagttgttaaaccttaaagctccagcgtaatccttgactccatgctcag

SEQ ID NO: 21734 - DNA, 80 bp, synthetic construct
  source 1..80: mol_type = other DNA
tagagggcagtggccccattcctacagctccactaggcaatgccctggtgaggactctgtttggggctctaaccccattt

SEQ ID NO: 21735 - DNA, 80 bp, synthetic construct
  source 1..80: mol_type = other DNA
aagccttttgagccaaggctagagccagagaggcctggtatggggagcaatgtcccaaggtagtgtagggcagcagggct

SEQ ID NO: 21736 - DNA, 80 bp, synthetic construct; identical to SEQ ID NO: 9346
  source 1..80: mol_type = other DNA

SEQ ID NO: 21737 - DNA, 80 bp, synthetic construct
  source 1..80: mol_type = other DNA
cataaatccctacagcatggacacaatgcagccaggttctttgctagggcataacaaaggtaacctttgctccagtttcc

SEQ ID NO: 21738 - DNA, 80 bp, synthetic construct
  source 1..80: mol_type = other DNA
ttcgaatgtcttcctgttacccagttccaaagctgctcacattttcaagtatctttatagaaatgcctcactccttggta

SEQ ID NO: 21739 - DNA, 80 bp, synthetic construct
  source 1..80: mol_type = other DNA
cttttactcatcgcagaagcaaaggagcaagtatgttatatggtgagagaggaagaaagagttacattttaaaaaccttc

SEQ ID NO: 21740 - DNA, 80 bp, synthetic construct; identical to SEQ ID NO: 9347
  source 1..80: mol_type = other DNA

SEQ ID NO: 21741 - DNA, 80 bp, synthetic construct
  source 1..80: mol_type = other DNA
cagattttaacttcttaaactgtcagaagacctgaagaatagttttagcctctctgctacacattaaaatcacctgggga

SEQ ID NO: 21742 - DNA, 80 bp, synthetic construct
  source 1..80: mol_type = other DNA
tgagtagtaaaggttctcaaagttggagcaacaactacatccactggcaatcttttagaaatgcagtgtctgaccccatc

SEQ ID NO: 21743 - DNA, 80 bp, synthetic construct
  source 1..80: mol_type = other DNA
gatctatctctattatttattctagtcgcctttcacttaggttactacctagtcctttattttatattttaagaccacta

SEQ ID NO: 21744 - DNA, 80 bp, synthetic construct
  source 1..80: mol_type = other DNA
ttcaaatttccagtgtccttatattttagatttaggttttaaagagcatacagctggactgctttttatccaacctgtct

SEQ ID NO: 21745 - DNA, 80 bp, synthetic construct; identical to SEQ ID NO: 9348
  source 1..80: mol_type = other DNA

SEQ ID NO: 21746 - DNA, 80 bp, synthetic construct
  source 1..80: mol_type = other DNA
tccctgaagcttggagctcattgaccttagcttagtctcatgtccatacctagctataagggtaaataaagattgtaagc

SEQ ID NO: 21747 - DNA, 80 bp, synthetic construct
  source 1..80: mol_type = other DNA
acatatgaaagaaagctcatcatcactggtcattagagaaatgcaaatcaaaaccacaatcagatatcatctcatgccaa

SEQ ID NO: 21748 - DNA, 80 bp, synthetic construct; identical to SEQ ID NO: 9349
  source 1..80: mol_type = other DNA

SEQ ID NO: 21749 - DNA, 80 bp, synthetic construct
  source 1..80: mol_type = other DNA
ggaaaccatcattctcagcactctaacacaggaacagaaaaccaaacactgcatgttctcactcataagtgggagttgaa

SEQ ID NO: 21750 - DNA, 80 bp, synthetic construct
  source 1..80: mol_type = other DNA
tggggagaatgactattgcagaggtaactagcagtttctgctccacactcttcttcttgcctatcttctgttttactgat

SEQ ID NO: 21751 - DNA, 80 bp, synthetic construct
  source 1..80: mol_type = other DNA
cgtgggggcatgtgcctgtagtcccaactactcaggaggctgaggcaggagaatcgcttgaacctgggaggcagaggttg

SEQ ID NO: 21752 - DNA, 80 bp, synthetic construct; identical to SEQ ID NO: 9350
  source 1..80: mol_type = other DNA

SEQ ID NO: 21753 - DNA, 80 bp, synthetic construct
  source 1..80: mol_type = other DNA
atctcagtatttccttcttggcttaatttcactatttgagagtctgtagaggttcacattcttgaccagtcttgtcagga

SEQ ID NO: 21754 - DNA, 80 bp, synthetic construct
  source 1..80: mol_type = other DNA
gggactacaggtgcgtgccacaacaccgggctaatttttgtatttttagtagagatgtggtttcaccatgttggccagga

SEQ ID NO: 21755 - DNA, 80 bp, synthetic construct
  source 1..80: mol_type = other DNA
gtttccttcattctattttctttaggttgttttgatgttccttctctaacttcttgatacttagatatttaattttccag

SEQ ID NO: 21756 - DNA, 80 bp, synthetic construct; identical to SEQ ID NO: 9351
  source 1..80: mol_type = other DNA

SEQ ID NO: 21757 - DNA, 80 bp, synthetic construct
  source 1..80: mol_type = other DNA
aggtatacttgacaaataaaaattttatatattaaaggtatacagctttataatttgatatatgtatacattgtaaaatg

SEQ ID NO: 21758 - DNA, 80 bp, synthetic construct
  source 1..80: mol_type = other DNA
acttttactcttttcctcagtgaatccaaacacaatagaacattttaaattctatttacatctctcccaacatatatcat

SEQ ID NO: 21759 - DNA, 80 bp, synthetic construct; identical to SEQ ID NO: 9352
  source 1..80: mol_type = other DNA

SEQ ID NO: 21760 - DNA, 80 bp, synthetic construct
  source 1..80: mol_type = other DNA
aataatattctactgtatatggatcccacattgtctttattcattcatctatccatggatacttaggttgttccatatct

SEQ ID NO: 21761 - DNA, 80 bp, synthetic construct
  source 1..80: mol_type = other DNA
ttaccataggcgaattgatatgaagaatagttaaattcctatggcatgtttctggtcacaaaaacatcaacaaacttctg

SEQ ID NO: 21762 - DNA, 80 bp, synthetic construct
  source 1..80: mol_type = other DNA
taactagtcttgaccaggatgccatcccattgcagggcaaactcacacaagcacacctatactcacgcaggctgggacca

SEQ ID NO: 21763 - DNA, 80 bp, synthetic construct; identical to SEQ ID NO: 9353
  source 1..80: mol_type = other DNA

SEQ ID NO: 21764 - DNA, 80 bp, synthetic construct
  source 1..80: mol_type = other DNA
ctaactctcagtaacgttttatggtttttactgtgcaggtcttgtacctgatcttttgtcacatctattcctaagtattt

SEQ ID NO: 21765 - DNA, 80 bp, synthetic construct
  source 1..80: mol_type = other DNA
cacttgttagtcttattatcttttgtcttcctggtagatttatttagattttctacatacgttaacatgtcatctgcaaa

SEQ ID NO: 21766 - DNA, 80 bp, synthetic construct
  source 1..80: mol_type = other DNA
attataatgttagctgttgatcattcttagagaccctttaccaggtagaagatgttcctattcttagtttgctgagagtt

SEQ ID NO: 21767 - DNA, 80 bp, synthetic construct
  source 1..80: mol_type = other DNA
tccacctcccaggttcaagcgattctcctgcctcagccacctgagtagctgggattataggtgcccaccactgcgtcggg

SEQ ID NO: 21768 - DNA, 80 bp, synthetic construct; identical to SEQ ID NO: 9354
  source 1..80: mol_type = other DNA

SEQ ID NO: 21769 - DNA, 80 bp, synthetic construct
  source 1..80: mol_type = other DNA
gtaaattttgttgttacaggtttgaaggcaaatgcagtctttttaatttcatcttggctgggagaagaaatctgttcttt

SEQ ID NO: 21770 - DNA, 80 bp, synthetic construct
  source 1..80: mol_type = other DNA
ctttctattgttctttatttctgcatctccagactcatacctagaataattttatctccacctgaaaaatgccctttagt

SEQ ID NO: 21771 - DNA, 80 bp, synthetic construct; identical to SEQ ID NO: 9355
  source 1..80: mol_type = other DNA

SEQ ID NO: 21772 - DNA, 80 bp, synthetic construct
  source 1..80: mol_type = other DNA
aaaataaaatagatggggtctttctatgttgtccaggctggccttgaaatcctgggctccacaaatcctcctgcctcagc

SEQ ID NO: 21773 - DNA, 80 bp, synthetic construct
  source 1..80: mol_type = other DNA
actcaggtactgagcacagtacccaataggtagtttttcagcccttatccctcatccactctctagtagtctccagtgtc

SEQ ID NO: 21774 - DNA, 80 bp, synthetic construct
  source 1..80: mol_type = other DNA
gtctggatagtattccatggtgtatatgtaccacattttctttatccaatacaccattgtcaggcacccaagttgattcc

SEQ ID NO: 21775 - DNA, 80 bp, synthetic construct; identical to SEQ ID NO: 9356
  source 1..80: mol_type = other DNA

SEQ ID NO: 21776 - DNA, 80 bp, synthetic construct
  source 1..80: mol_type = other DNA
ccactttttaatggggttatttttcacttgttgaattggttaagttccttatagattctggaaattagacctttgtcaga

SEQ ID NO: 21777 - DNA, 80 bp, synthetic construct
  source 1..80: mol_type = other DNA
ccaaggctaatgtccagaatggaatttcctaggttttcttcgaggattcttatagtttgaggtcttacatttaaatcttt

SEQ ID NO: 21778 - DNA, 80 bp, synthetic construct
  source 1..80: mol_type = other DNA
tgtggctctatttctgagttctctattctgttccactggtctatgtgtctgtttttgtaccagtaccatgctgttttgat

SEQ ID NO: 21779 - DNA, 80 bp, synthetic construct
  source 1..80: mol_type = other DNA
attggaatagtattgaatctgtacagtgctttgggcagtacggccattttaacaatattgattcttccagtccatgagat

SEQ ID NO: 21780 - DNA, 80 bp, synthetic construct; identical to SEQ ID NO: 9357
  source 1..80: mol_type = other DNA

SEQ ID NO: 21781 - DNA, 80 bp, synthetic construct
  source 1..80: mol_type = other DNA
ttttaaagtctatattggataaatccaatatacgaaacctctccatttctcttcatatcgtctgttgtttcctcagaatt

SEQ ID NO: 21782 - DNA, 80 bp, synthetic construct
  source 1..80: mol_type = other DNA
atatgtgtatttgctactgttaaactcctggtgtctctagttcttccaaaataacaccggactctagtattctggcatca

SEQ ID NO: 21783 - DNA, 80 bp, synthetic construct; identical to SEQ ID NO: 9358
  source 1..80: mol_type = other DNA

SEQ ID NO: 21784 - DNA, 80 bp, synthetic construct
  source 1..80: mol_type = other DNA
tttctatgttatcagcttatttttttctgtcagtcacttatacatgtcatcttctctcttccttttccatgatattgttt

SEQ ID NO: 21785 - DNA, 80 bp, synthetic construct
  source 1..80: mol_type = other DNA
tggaccttctcactctaacctctgtatttttaaatctatttcagaattcctatatcttgatttcctctgctgcatcctag

SEQ ID NO: 21786 - DNA, 80 bp, synthetic construct
  source 1..80: mol_type = other DNA
tgtgttgactttgattaaaaaatagcctcaaatcattgtttaactaaataattcaacagaattataagatggattatgtc

SEQ ID NO: 21787 - DNA, 80 bp, synthetic construct
  source 1..80: mol_type = other DNA
ttgaatgtcttaaaaggcttgtttgtttaaataacacttccaagggtgtgttatggaatagaataggattatacacttat

SEQ ID NO: 21788 - DNA, 80 bp, synthetic construct; identical to SEQ ID NO: 9359
  source 1..80: mol_type = other DNA

SEQ ID NO: 21789 - DNA, 80 bp, synthetic construct
  source 1..80: mol_type = other DNA
ctgctccccttacttggctattaagctatttggctattaaagctgaaaattctcaagggcaggaataatttgtttaccgc

SEQ ID NO: 21790 - DNA, 80 bp, synthetic construct
  source 1..80: mol_type = other DNA
ttagaagaagaattttcacattctctagcttgctatactgaatgaaatggaattttttttcaatcagaagagaaaaacag

SEQ ID NO: 21791 - DNA, 80 bp, synthetic construct
  source 1..80: mol_type = other DNA
ttaactgttatgtagatacataaacgcatgtgtgttggaagatctttcctaatttgaatctgttctttcaccttttccct

SEQ ID NO: 21792 - DNA, 80 bp, synthetic construct; identical to SEQ ID NO: 9360
  source 1..80: mol_type = other DNA

SEQ ID NO: 21793 - DNA, 80 bp, synthetic construct
  source 1..80: mol_type = other DNA
ggtcgtttgctattgaaatttgctttctgacccagcaccctctctcccaaagatggtctctaattataatggtagaaaca

SEQ ID NO: 21794 - DNA, 80 bp, synthetic construct
  source 1..80: mol_type = other DNA
tgcaaaagggaagagagacatattctacccacagtggcttaggggcattaatggatccagaaaatacattatcactggca

SEQ ID NO: 21795 - DNA, 80 bp, synthetic construct
  source 1..80: mol_type = other DNA
tgtaaatgatggcagcgaggtactgtcagatgactttatggaagcaaaaaccatggtaagaacccttgctaaaaagaatg

SEQ ID NO: 21796 - DNA, 80 bp, synthetic construct; identical to SEQ ID NO: 9361
  source 1..80: mol_type = other DNA

SEQ ID NO: 21797 - DNA, 80 bp, synthetic construct
  source 1..80: mol_type = other DNA
aggtgatagagactttccaacatcagagatattaaaagcccaagaaatacagtttttattattttgaaactgactcagca

SEQ ID NO: 21798 - DNA, 80 bp, synthetic construct
  source 1..80: mol_type = other DNA
tatatttttcattatttctgatcattttctgaaaaactaaagatgatttatcttatgttctccctcatttaaagacgaaa

SEQ ID NO: 21799 - DNA, 80 bp, synthetic construct; identical to SEQ ID NO: 9362
  source 1..80: mol_type = other DNA

SEQ ID NO: 21800 - DNA, 80 bp, synthetic construct
  source 1..80: mol_type = other DNA
attatctgcaggcactccgaactatatcttcaagaaaatgaatgtcaacagttcaaattcttggaaaggctatggttcat

SEQ ID NO: 21801 - DNA, 80 bp, synthetic construct
  source 1..80: mol_type = other DNA
gttcatagattctacttcgctctacagaattgcaaattattcattccttaccacttgactcaagtagacttctcagggga

SEQ ID NO: 21802 - DNA, 80 bp, synthetic construct
  source 1..80: mol_type = other DNA
tggaaaaattattttaccgtagtcaacatatggaaagtggctggtggagttctccctcaaaagtgtaaaatggtaaattc

SEQ ID NO: 21803 - DNA, 80 bp, synthetic construct; identical to SEQ ID NO: 9363
  source 1..80: mol_type = other DNA

SEQ ID NO: 21804 - DNA, 80 bp, synthetic construct
  source 1..80: mol_type = other DNA
caaagtattattatttcttccattgtacagatgagaacactaacgtttgaagaggtcaataatacccccagagttctact

SEQ ID NO: 21805 - DNA, 80 bp, synthetic construct
  source 1..80: mol_type = other DNA
gtcactcagctttgtaccaaaagtggtgcagagggaagtgctttgcatatgatagaatctttcataattattttcccatt

SEQ ID NO: 21806 - DNA, 80 bp, synthetic construct
  source 1..80: mol_type = other DNA
acctgagttggcagagatagaatactcatattatagtttagaagcaagactcccaaccagcatacttggtccaaagcatg

SEQ ID NO: 21807 - DNA, 80 bp, synthetic construct
  source 1..80: mol_type = other DNA
cttgtgagataaagagaccatgactatatcaccttgccagtgttcttaatttgtgacaattttgtatcactagttgtttt

SEQ ID NO: 21808 - DNA, 80 bp, synthetic construct; identical to SEQ ID NO: 9364
  source 1..80: mol_type = other DNA

SEQ ID NO: 21809 - DNA, 80 bp, synthetic construct
  source 1..80: mol_type = other DNA
ttcccaccaaaatcgatgaccctcatcttccatagcaataataccgaggctgccacattactgcacagcacatttccaga

SEQ ID NO: 21810 - DNA, 80 bp, synthetic construct
  source 1..80: mol_type = other DNA
gaatgatctcaaagaataaggttttcctgaaaacctggagtgaactcatatggacctttatgggagaaagacatgggctg

SEQ ID NO: 21811 - DNA, 80 bp, synthetic construct
  source 1..80: mol_type = other DNA
gggagttgaataatgagaacacatggacacagggaggggaacaacatacatcggagcctgtcaggcggttgggggctagg

SEQ ID NO: 21812 - DNA, 80 bp, synthetic construct; identical to SEQ ID NO: 9365
  source 1..80: mol_type = other DNA

SEQ ID NO: 21813 - DNA, 80 bp, synthetic construct
  source 1..80: mol_type = other DNA
cataatatgcatacaattttgtatactgtttatttcaaaagttacaaaaccactttccatatttccacattgttttataa

SEQ ID NO: 21814 - DNA, 80 bp, synthetic construct
  source 1..80: mol_type = other DNA
atgcgtatatctttttcctctgctgagtaatatccttaggttataatcgtagggatagaaatattgggcaagattaaaga

SEQ ID NO: 21815 - DNA, 80 bp, synthetic construct
  source 1..80: mol_type = other DNA
ctaagcaagtttccacgagtctctttattgtgcctgtctcttcatgagtgggcctcccgctcattctcgttatactgaag

SEQ ID NO: 21816 - DNA, 80 bp, synthetic construct; identical to SEQ ID NO: 9366
  source 1..80: mol_type = other DNA

SEQ ID NO: 21817 - DNA, 80 bp, synthetic construct
  source 1..80: mol_type = other DNA
ttcaaagatgagggtttaagttttatcccattcacagcagtggcaggcatggaagcagagcacagtgagtcatcctcatc

SEQ ID NO: 21818 - DNA, 80 bp, synthetic construct
  source 1..80: mol_type = other DNA
ttggctattcaccagcgtgcaataaaccacaaagatttccttggactgaaccctaagaagaactaaaagatctcatgctt

SEQ ID NO: 21819 - DNA, 80 bp, synthetic construct
  source 1..80: mol_type = other DNA
cgcttttctttagttatattgttatcactcatctggattattttaattcctcagtacagctctctgcttccgtttttcct

SEQ ID NO: 21820 - DNA, 80 bp, synthetic construct; identical to SEQ ID NO: 9367
  source 1..80: mol_type = other DNA

SEQ ID NO: 21821 - DNA, 80 bp, synthetic construct
  source 1..80: mol_type = other DNA
aaggttattgaaggcctgatgtttccaaccaaatgaatctagttgctcaaaaagtaatttgtgctgagggacctcatcta

SEQ ID NO: 21822 - DNA, 80 bp, synthetic construct
  source 1..80: mol_type = other DNA
atttccttctgggacttgaatcccctggctcccaaccagtactctgcatttctaactacttatatgtgaacagttgcttt

SEQ ID NO: 21823 - DNA, 80 bp, synthetic construct; identical to SEQ ID NO: 9368
  source 1..80: mol_type = other DNA

SEQ ID NO: 21824 - DNA, 80 bp, synthetic construct
  source 1..80: mol_type = other DNA
aactgtggtgcaaacagcaacaccgaccacaaaaatgctcttatgggtaccaccacaccaaatataaacaagacttcagg

SEQ ID NO: 21825 - DNA, 80 bp, synthetic construct
  source 1..80: mol_type = other DNA
tttatcagcaaataatgctgactcactgtgcaagaaatgaaaggtcaaactctaatatatagattaaatccaaagaaaag

SEQ ID NO: 21826 - DNA, 80 bp, synthetic construct
  source 1..80: mol_type = other DNA
aacattcagaaccctatgagatgcacctagtggtgccatctatcagagatgtcacagttcaggtgtgctctttattaaca

SEQ ID NO: 21827 - DNA, 80 bp, synthetic construct
  source 1..80: mol_type = other DNA
ataaagaaatattcattaggtattacaaactacctataaaatactggataccaattatttaggccaagtgggagcctgtt

SEQ ID NO: 21828 - DNA, 80 bp, synthetic construct; identical to SEQ ID NO: 9369
  source 1..80: mol_type = other DNA

SEQ ID NO: 21829 - DNA, 80 bp, synthetic construct
  source 1..80: mol_type = other DNA
tttggctctttaacgagtagatttcttgatatagtctcaagtgttagttctttgatcttctaccgaagcctgctactcac

SEQ ID NO: 21830 - DNA, 80 bp, synthetic construct
  source 1..80: mol_type = other DNA
ttaagggagatgtgtttatgaacaatggagagtgtctttcattcatctttgggcttttcatgataaacaactgattttct

SEQ ID NO: 21831 - DNA, 80 bp, synthetic construct; identical to SEQ ID NO: 9370
  source 1..80: mol_type = other DNA

SEQ ID NO: 21832 - DNA, 80 bp, synthetic construct
  source 1..80: mol_type = other DNA
tgaaagttgtgtagatctccttcagggccaggaattagccttatttctctaaatctctgacacttaggacaaattttgac

SEQ ID NO: 21833 - DNA, 80 bp, synthetic construct
  source 1..80: mol_type = other DNA
gctgccccaaaagactggactaatttttaacccccttgctttgctttcttgtttcctagatctggcctctggagaaatgg

SEQ ID NO: 21834 - DNA, 80 bp, synthetic construct
  source 1..80: mol_type = other DNA
ctatggtgcaggcagaatagtctttcaaaataccgaaaggatcactccattcctttgcttaaaactcttcaaaaatttac

SEQ ID NO: 21835 - DNA, 80 bp, synthetic construct
  source 1..80: mol_type = other DNA
atgtaatatcaattcagtaagttgagaccagcatttacaaaaataaaatgcagtggaatatgttagtgtgtactgcatgt

SEQ ID NO: 21836 - DNA, 80 bp, synthetic construct; identical to SEQ ID NO: 9371
  source 1..80: mol_type = other DNA

SEQ ID NO: 21837 - DNA, 80 bp, synthetic construct
  source 1..80: mol_type = other DNA
aaagtttcttaggagtagtcccaagttcggaatctcaaactctcttcaattctttacccccacctgcttcatgatgatgg

SEQ ID NO: 21838 - DNA, 80 bp, synthetic construct
  source 1..80: mol_type = other DNA
aaaaataaatctaatttagatgtcttctgtggttacaaaatggcttaacagacaacttttgatgaatacatcacaggagt

SEQ ID NO: 21839 - DNA, 80 bp, synthetic construct
  source 1..80: mol_type = other DNA
aaagtttgcctgcattcatgaaatttaagctaaatactggcaatgggaagcaaaaagcggaataactaactaaaatatcc

SEQ ID NO: 21840 - DNA, 80 bp, synthetic construct; identical to SEQ ID NO: 9372
  source 1..80: mol_type = other DNA

SEQ ID NO: 21841 - DNA, 80 bp, synthetic construct
  source 1..80: mol_type = other DNA
tgcacattctctcaggctgctcattaaggtacttatttgccatggaagataataatctgattcaaattatgtatctagac

SEQ ID NO: 21842 - DNA, 80 bp, synthetic construct
  source 1..80: mol_type = other DNA
atatcctcatccccacatcaggctgcagataaagttgttaatcatcaacttgcactgttaaaagcaattgcggttgaaca

SEQ ID NO: 21843 - DNA, 80 bp, synthetic construct
  source 1..80: mol_type = other DNA
cactgatgacactgcattttgagagaagtggagaggagaactgactacataaatgtagttacatcataacaagaaataat

SEQ ID NO: 21844 - DNA, 80 bp, synthetic construct; identical to SEQ ID NO: 9373
  source 1..80: mol_type = other DNA

SEQ ID NO: 21845 - DNA, 80 bp, synthetic construct
  source 1..80: mol_type = other DNA
agattcctaaatattctgccaatcttggcccttctaatgttttctccacagaggcagaccattccttgtgaaacacaaat

SEQ ID NO: 21846 - DNA, 80 bp, synthetic construct
  source 1..80: mol_type = other DNA
cataaattgagcttcctcatgttactttaccaccctgaatagaactccctctttggcttatgggaattagaatatgatat

SEQ ID NO: 21847 - DNA, 80 bp, synthetic construct; identical to SEQ ID NO: 9374
  source 1..80: mol_type = other DNA

SEQ ID NO: 21848 - DNA, 80 bp, synthetic construct
  source 1..80: mol_type = other DNA
ataagagtaacacatatcatggtcctgggggagatgcaggaaaacattttctttgtgtaccaggttcataacagattttt

SEQ ID NO: 21849 - DNA, 80 bp, synthetic construct
  source 1..80: mol_type = other DNA
acgtagagtaagtgcctgggaggagcatgcctataaaaagtaactgtgcttccatttttaggcatctttgttcagcacgg

SEQ ID NO: 21850 - DNA, 80 bp, synthetic construct
  source 1..80: mol_type = other DNA
gctgcatcacacagatgtttcacctggactatgtctggcagtgcaagaccccaagtgatgataatttcattgtacttaac

SEQ ID NO: 21851 - DNA, 80 bp, synthetic construct
  source 1..80: mol_type = other DNA
ttcaataaaatggttccagtgtcagccccctttgaaaactttatactcatgccaaactatcactgtgatcacttgtgaaa

SEQ ID NO: 21852 - DNA, 80 bp, synthetic construct; identical to SEQ ID NO: 9375
  source 1..80: mol_type = other DNA

SEQ ID NO: 21853 - DNA, 80 bp, synthetic construct
  source 1..80: mol_type = other DNA
agtgtggtttagttcaccaatgtcctacaagagacattttacttctcaaacagaagcgctaaagctaacttcacaaagaa

SEQ ID NO: 21854 - DNA, 80 bp, synthetic construct
  source 1..80: mol_type = other DNA
gtcattaatttcttcaagttaataaagtcctggagaagttctgtttcaagtattacccaaataccctttaatacaggtgt

SEQ ID NO: 21855 - DNA, 80 bp, synthetic construct
  source 1..80: mol_type = other DNA
tgattctacctttgactataggactttgggcaattctgttttgcctttcactatgtcagtggttctcaaactcgtaatca

SEQ ID NO: 21856 - DNA, 80 bp, synthetic construct; identical to SEQ ID NO: 9376
  source 1..80: mol_type = other DNA

SEQ ID NO: 21857 - DNA, 80 bp, synthetic construct
  source 1..80: mol_type = other DNA
tgaattgcaaccatgttcaaaaacccagagtagactagagaagagtgaagaatgtgtcagaacattctaagtacatttgc

SEQ ID NO: 21858 - DNA, 80 bp, synthetic construct
  source 1..80: mol_type = other DNA
acatacaaagtgacaactctcatcagctttgtatttaaagaagaacaacaaggttggatgcattttttaaacagaatgtg

SEQ ID NO: 21859 - DNA, 80 bp, synthetic construct; identical to SEQ ID NO: 9377
  source 1..80: mol_type = other DNA

SEQ ID NO: 21860 - DNA, 80 bp, synthetic construct
  source 1..80: mol_type = other DNA
ccaggctggattgcagtggtgccatctcgtctcactgcaaactccgcctactgggttcaagcgattctcctgcctcagcc

SEQ ID NO: 21861 - DNA, 80 bp, synthetic construct
  source 1..80: mol_type = other DNA
tgagccatggcgcctggcctggatttgtcttataaaagctattgtctcttcaaagatgaggctgcatgcttttcttattt

SEQ ID NO: 21862 - DNA, 80 bp, synthetic construct
  source 1..80: mol_type = other DNA
aacaagacatctgcttcctctggaggaaattgcatgaactctctgtgtaattttcaatgagaaagagaacactttgataa

SEQ ID NO: 21863 - DNA, 80 bp, synthetic construct; identical to SEQ ID NO: 9378
  source 1..80: mol_type = other DNA

SEQ ID NO: 21864 - DNA, 80 bp, synthetic construct
  source 1..80: mol_type = other DNA
tgaataaataaaattataaataatgaaaatatttaatttctgaaataggtacacagatttgacagatatttttacatatt

SEQ ID NO: 21865 - DNA, 80 bp, synthetic construct
  source 1..80: mol_type = other DNA
attttcaagactttttcttccataaaaataatacatcttgtctctacaaggtgaacagtcttcagaacatatagaaggaa

SEQ ID NO: 21866 - DNA, 80 bp, synthetic construct
  source 1..80: mol_type = other DNA
tcctctattgtgtcaggggctagcagagtgagtggtgaagaatgaatattctaaattgtgttcataattttatttttcaa

SEQ ID NO: 21867 - DNA, 80 bp, synthetic construct
  source 1..80: mol_type = other DNA
acttttttgttactgaggcaacatctgagttattcatattttaaacagacaattatgaatgtaactgttataaaagtcac

SEQ ID NO: 21868 - DNA, 80 bp, synthetic construct; identical to SEQ ID NO: 9379
  source 1..80: mol_type = other DNA

SEQ ID NO: 21869 - DNA, 80 bp, synthetic construct
  source 1..80: mol_type = other DNA
gcaccatcctacacagtagtcatgggccccatgtaagtgctgagcacatgaaacatggaaagtatgactgaagaactgat

SEQ ID NO: 21870 - DNA, 80 bp, synthetic construct
  source 1..80: mol_type = other DNA
aaaattagccgggtgtagttgtgcatgcctgtagtcccagctgctcaggaggctgagatgggagaatcacttgacctggg

SEQ ID NO: 21871 - DNA, 80 bp, synthetic construct
  source 1..80: mol_type = other DNA
aaaatttagcctttggattgaaatttgctttaagtgtaagacacaattatgaaaaacaaagaaagggaaacaggtatcgg

SEQ ID NO: 21872 - DNA, 80 bp, synthetic construct; identical to SEQ ID NO: 9380
  source 1..80: mol_type = other DNA

SEQ ID NO: 21873 - DNA, 80 bp, synthetic construct
  source 1..80: mol_type = other DNA
cacagggcaaagatttctccttaacttgtgggaccatttcaattgctagtaaagtgttcagagccccatattaggttagt

SEQ ID NO: 21874 - DNA, 80 bp, synthetic construct
  source 1..80: mol_type = other DNA
gtctggtgtaaggagcttctctccaaattggcagaaagacagcatacaggctagctaactctgcatgttttcatcaacat

SEQ ID NO: 21875 - DNA, 80 bp, synthetic construct; identical to SEQ ID NO: 9381
  source 1..80: mol_type = other DNA

SEQ ID NO: 21876 - DNA, 80 bp, synthetic construct
  source 1..80: mol_type = other DNA
tgtgaagcagtctcatagacataaacattgcaactaaaattgaatataacatttataggctaagaacagacccaaccata

SEQ ID NO: 21877 - DNA, 80 bp, synthetic construct
  source 1..80: mol_type = other DNA
ataaaagtgttctcccttgaaaatgttcctgaaaataacagctacctttaagaaacaactttgcattatagtcaattaaa

SEQ ID NO: 21878 - DNA, 80 bp, synthetic construct
  source 1..80: mol_type = other DNA
ttagtagtttcttattcaatgtagatttcttaagtagctgacatttattttatttcctaccacctgatcttggtacctta

SEQ ID NO: 21879 - DNA, 80 bp, synthetic construct
  source 1..80: mol_type = other DNA
aaacattgatgactcattgattatactcttaatagttactaattttaaaccactgaattggaagcttatagttacttgaa

SEQ ID NO: 21880 - DNA, 80 bp, synthetic construct; identical to SEQ ID NO: 9382
  source 1..80: mol_type = other DNA

SEQ ID NO: 21881 - DNA, 80 bp, synthetic construct
  source 1..80: mol_type = other DNA
tcacacacactactcattcggtaaatcatataatggacattgtcattttgacatgtagaacatttctcttcctccatcac

SEQ ID NO: 21882 - DNA, 80 bp, synthetic construct
  source 1..80: mol_type = other DNA
taataagggaagccccactggctttctgtctcctccagacaatacaatggcataattgtgtctgtgcttctcttttcaat

SEQ ID NO: 21883 - DNA, 80 bp, synthetic construct; identical to SEQ ID NO: 9383
  source 1..80: mol_type = other DNA

SEQ ID NO: 21884 - DNA, 80 bp, synthetic construct
  source 1..80: mol_type = other DNA
agaggtggcaggaatagaaaaataacttattgatataaaaatctgtgctcagcaagttttttccaagtatagaaaattta

SEQ ID NO: 21885 - DNA, 80 bp, synthetic construct
  source 1..80: mol_type = other DNA
ctcattaaaatgtatttcttttacaatgagtgctcaacttttatactgctgcttctaatgttcactcatttctctgaatt

SEQ ID NO: 21886 - DNA, 80 bp, synthetic construct
  source 1..80: mol_type = other DNA
gtttgtattttgaatccttgtggttctacaaaggatataaggcagccaaacttaaatacaaattaagtattatataaaat

SEQ ID NO: 21887 - DNA, 80 bp, synthetic construct
  source 1..80: mol_type = other DNA
ctggaagccaaagtaaaaaaggagataaggtaggctacacgactcaagatttataaaagtggaatctcattaattcctca

SEQ ID NO: 21888 - DNA, 80 bp, synthetic construct; identical to SEQ ID NO: 9384
  source 1..80: mol_type = other DNA

SEQ ID NO: 21889 - DNA, 80 bp, synthetic construct
  source 1..80: mol_type = other DNA
aattccatctctctgcccttcaagcactgaccagtactttgcacaaaatattctctggaagccaagtgacaatagtcttg

SEQ ID NO: 21890 - DNA, 80 bp, synthetic construct
  source 1..80: mol_type = other DNA
gctcctcaggttctcaaaatggaaaaatgtgtttcaaagagctcttctgttcaaatgcagatggaggtagtgatattgga

SEQ ID NO: 21891 - DNA, 80 bp, synthetic construct
  source 1..80: mol_type = other DNA
ccaggctggagtgcaatgctgccgtctcggctcactgcaacctctgcctcccgggttcaagtgattctcctgcctcagcc

SEQ ID NO: 21892 - DNA, 80 bp, synthetic construct; identical to SEQ ID NO: 9385
  source 1..80: mol_type = other DNA

SEQ ID NO: 21893 - DNA, 80 bp, synthetic construct
  source 1..80: mol_type = other DNA
cacttttcgaacagcatgtgctcacttcatgtctccatgtcacattttggtaattcttgcaatatttcaaacttttttat

SEQ ID NO: 21894 - DNA, 80 bp, synthetic construct
  source 1..80: mol_type = other DNA
ccttctcctcaagcttccctattctctgagacacgacaatattgaaattaggtcaatgtataaacctacaatgggcttta

SEQ ID NO: 21895 - DNA, 80 bp, synthetic construct
  source 1..80: mol_type = other DNA
ccaaacagttagccaagctgtgaatgcaaagaaaatgtccttgaaggaaattgaaagtgctactccagtgaacacatgaa

SEQ ID NO: 21896 - DNA, 80 bp, synthetic construct; identical to SEQ ID NO: 9386
  source 1..80: mol_type = other DNA

SEQ ID NO: 21897 - DNA, 80 bp, synthetic construct
  source 1..80: mol_type = other DNA
taatctacccataagaaaacattaagttttattgagatgtctacatcaaatctttccctcaaatgtctactaataatcgc

SEQ ID NO: 21898 - DNA, 80 bp, synthetic construct
  source 1..80: mol_type = other DNA
aatttagtgactgaaacactgtaaattggaatacaattgtgaccagtacctatgacatacaagagaagacagaaggactc

SEQ ID NO: 21899 - DNA, 80 bp, synthetic construct
  source 1..80: mol_type = other DNA
ttttcaactgtttttccaggaaagactacaagaggaaagcattgacattcttttatatgtttcacttcctctcattattc

SEQ ID NO: 21900 - DNA, 80 bp, synthetic construct; identical to SEQ ID NO: 9387
  source 1..80: mol_type = other DNA

SEQ ID NO: 21901 - DNA, 80 bp, synthetic construct
  source 1..80: mol_type = other DNA
atttgtgccagttatttgctaattgactgcctcattcttataactgccttaaacctagactgaatctgaaaagaggcagt

SEQ ID NO: 21902 - DNA, 80 bp, synthetic construct
  source 1..80: mol_type = other DNA
cttctctgctttttgcttatatctgtaatagcattttgtgcagaatttacccaattctttgcttctcttgtaagactagc

SEQ ID NO: 21903 - DNA, 80 bp, synthetic construct
  source 1..80: mol_type = other DNA
attgttgtgaagctcaaaactgataatgtgtgataagttaaattaaaccttgtaaaccgaagtgccatggacaggttccc

SEQ ID NO: 21904 - DNA, 80 bp, synthetic construct; identical to SEQ ID NO: 9388
  source 1..80: mol_type = other DNA

SEQ ID NO: 21905 - DNA, 80 bp, synthetic construct
  source 1..80: mol_type = other DNA
gagtagaaaaagaaagggcaagtgagattactggtcatctggtgtcttagatcacacgcaaaacaaacgtcaagcacaac

SEQ ID NO: 21906 - DNA, 80 bp, synthetic construct; identical to SEQ ID NO: 9389
  source 1..80: mol_type = other DNA

SEQ ID NO: 21907 - DNA, 80 bp, synthetic construct
  source 1..80: mol_type = other DNA
ttcattttaaaataataatatttagaagtgaactaaaaattcatttaacttgtcatttttataagctacctttcttagaa

SEQ ID NO: 21908 - DNA, 80 bp, synthetic construct
  source 1..80: mol_type = other DNA
ggtgaacatttttatatacctgcattgtggcaatttcatcactttttttacagttctttgtttacgtgaatattgttcca

SEQ ID NO: 21909 - DNA, 80 bp, synthetic construct
  source 1..80: mol_type = other DNA
tcatagcaaaattgagtggaaagtgtagagaactcccatacaccctctttctccacagaggcacaactgccagctatttg

SEQ ID NO: 21910 - DNA, 80 bp, synthetic construct; identical to SEQ ID NO: 9390
  source 1..80: mol_type = other DNA

SEQ ID NO: 21911 - DNA, 80 bp, synthetic construct
  source 1..80: mol_type = other DNA
tgtctttttatggcttgataactcatttcttttcagcactgagtaatattccattgtccgaatgtaccacatgtactatt

SEQ ID NO: 21912 - DNA, 80 bp, synthetic construct
  source 1..80: mol_type = other DNA
ataagcaattgctaaactatcttccaaagtgtcggtaccatgtcgcattcccactagcaataaacaagagcccttcttct

SEQ ID NO: 21913 - DNA, 80 bp, synthetic construct
  source 1..80: mol_type = other DNA
acactttttcctctgtttattaccatctgtaaattttatttggtgagttgtctgttcaggacttctgtccagattttaat

SEQ ID NO: 21914 - DNA, 80 bp, synthetic construct
  source 1..80: mol_type = other DNA
tttaataaagttcagcttattatttatttatttcatgggtcatgcctttaagggtgtatctaaaaagtcagtgttatacc

SEQ ID NO: 21915 - DNA, 80 bp, synthetic construct; identical to SEQ ID NO: 9391
  source 1..80: mol_type = other DNA

SEQ ID NO: 21916 - DNA, 80 bp, synthetic construct
  source 1..80: mol_type = other DNA
ctgaagctttactgtagtcttgaagtctagtagtgcaggccctcccattttgtttctcttcttcaacataaaattggctc

SEQ ID NO: 21917 - DNA, 80 bp, synthetic construct
  source 1..80: mol_type = other DNA
atatctcttcatttgtttaattctttttgttatctttcataagtgttgtgcagttttcctcatatagatcttgtacatat

SEQ ID NO: 21918 - DNA, 80 bp, synthetic construct
  source 1..80: mol_type = other DNA
ctaaaatttgtttttgattattataatgtctttttctggttttgatactgagataatgctggcctcattaaatgaggtat

SEQ ID NO: 21919 - DNA, 80 bp, synthetic construct; identical to SEQ ID NO: 9392
  source 1..80: mol_type = other DNA

SEQ ID NO: 21920 - DNA, 80 bp, synthetic construct
  source 1..80: mol_type = other DNA
ctgcagcctcaacctcctgggctcaatcctcctgcctcagcctcctcagtagctgggaccacaggcatagaccaccatcc

SEQ ID NO: 21921 - DNA, 80 bp, synthetic construct
  source 1..80: mol_type = other DNA
tgtcttttttttttttttttttttttttttttttttttagctagcctggcaagaaccaatttttggttttattgattttc

SEQ ID NO: 21922 - DNA, 80 bp, synthetic construct
  source 1..80: mol_type = other DNA
tgtatctttctctaagcactgcttaaatgcttttcacatattttgataagttgaattttcaatttgttttagttcaaata

SEQ ID NO: 21923 - DNA, 80 bp, synthetic construct; identical to SEQ ID NO: 9393
  source 1..80: mol_type = other DNA

SEQ ID NO: 21924 - DNA, 80 bp, synthetic construct
  source 1..80: mol_type = other DNA
taaatctatccgacttatagctctgacagatgggtgttaaagtctccaaacatattagttgattcatctatttctcaata

SEQ ID NO: 21925 - DNA, 80 bp, synthetic construct
  source 1..80: mol_type = other DNA
acctctgataacttttttgctctaaaatgtgatctgtctgaaaataatgtagccactcccactttcttttgattactgtt

SEQ ID NO: 21926 - DNA, 80 bp, synthetic construct
  source 1..80: mol_type = other DNA
tgacatttaaagtgatatagttgaattagtatctactatattttttactgtattctgttacccttgttttctgtttctat

SEQ ID NO: 21927 - DNA, 80 bp, synthetic construct; identical to SEQ ID NO: 9394
  source 1..80: mol_type = other DNA

SEQ ID NO: 21928 - DNA, 80 bp, synthetic construct
  source 1..80: mol_type = other DNA
caattaataatagaaaattttttgctttcaattatgctctgatgttcttcattttttatgaatatctgagtttttgacct

SEQ ID NO: 21929 - DNA, 80 bp, synthetic construct
  source 1..80: mol_type = other DNA
ctggagtgcaatggcgtgatcttggctcactgcaacctctgcctcccggtttcaagcgattctcctgcctcagcctcctg

SEQ ID NO: 21930 - DNA, 80 bp, synthetic construct
  source 1..80: mol_type = other DNA
gccaccgtgcctggcctctccttcacttttgaaggattatttatttacctttcaagggtatatattaattatttaccctt

SEQ ID NO: 21931 - DNA, 80 bp, synthetic construct; identical to SEQ ID NO: 9395
  source 1..80: mol_type = other DNA

SEQ ID NO: 21932 - DNA, 80 bp, synthetic construct
  source 1..80: mol_type = other DNA
cctttccagtgcttaaagagttgacttagtcaaatgtaattctctttgttcctctataggtaaggtgttctttccatctg

SEQ ID NO: 21933 - DNA, 80 bp, synthetic construct
  source 1..80: mol_type = other DNA
ttattgtttcaaatattttttcttctttcagtttttttccattatgtatatgttataccttctgaactgtcccacagttc

SEQ ID NO: 21934 - DNA, 80 bp, synthetic construct; identical to SEQ ID NO: 9396
  source 1..80: mol_type = other DNA

SEQ ID NO: 21935 - DNA, 80 bp, synthetic construct
  source 1..80: mol_type = other DNA
cttcagcctcccgagtagctgggactacaggcgcccgccaccacgcctggctaattttttgtattttttgtagagacggg

SEQ ID NO: 21936 - DNA, 80 bp, synthetic construct
  source 1..80: mol_type = other DNA
actcatgttgaaacataatccccaatgtggcagtattgaaaggtgggacctttaagaggtgattggatcatgagtgcatt

SEQ ID NO: 21937 - DNA, 80 bp, synthetic construct
  source 1..80: mol_type = other DNA
gcagtgtccccactaaaaagaatggtctcaccagatgcaatccctgagcaaattgttaactattcaataatttaagaata

SEQ ID NO: 21938 - DNA, 80 bp, synthetic construct; identical to SEQ ID NO: 9397
  source 1..80: mol_type = other DNA

SEQ ID NO: 21939 - DNA, 80 bp, synthetic construct
  source 1..80: mol_type = other DNA
gtggcgtgcacctgtagtcccagctactcaggaggctgaggcaggagaatcgtttgaacctgggaggcggaggttggagt

SEQ ID NO: 21940 - DNA, 80 bp, synthetic construct
  source 1..80: mol_type = other DNA
gtaagtatcttctcttattttctaattttcatagagctgaaaatataatgtgatcaattaaatattcattgccaataata

SEQ ID NO: 21941 - DNA, 80 bp, synthetic construct
  source 1..80: mol_type = other DNA
tgttgttagccatccataattcctcttctgtgaaatgcaccacctcctcttcttttcagtccaggatcaaagctactttt

SEQ ID NO: 21942 - DNA, 80 bp, synthetic construct; identical to SEQ ID NO: 9398
  source 1..80: mol_type = other DNA

SEQ ID NO: 21943 - DNA, 80 bp, synthetic construct
  source 1..80: mol_type = other DNA
tgtaaaacttcaaagaatacaccaaattatagggaaggatgaaaaaagtccttcgaaatcctgctactcttacatatact

SEQ ID NO: 21944 - DNA, 80 bp, synthetic construct
  source 1..80: mol_type = other DNA
cctaccctccccacctggtcccccactcaccgattatgcaaccaaaagttaactatctggtatatgtgtttctgtaactt

SEQ ID NO: 21945 - DNA, 80 bp, synthetic construct
  source 1..80: mol_type = other DNA
atatatagatctgggtcattctttttaatgactaggtaataatgtatgaaattaccccagtatattaaattatgcctcat

SEQ ID NO: 21946 - DNA, 80 bp, synthetic construct
  source 1..80: mol_type = other DNA
tttttctaaaaggctatatctgtttgtacttccaccagtgatagatgagagtttccttcctctcttgttaccatgctcat

SEQ ID NO: 21947 - DNA, 80 bp, synthetic construct; identical to SEQ ID NO: 9399
  source 1..80: mol_type = other DNA

SEQ ID NO: 21948 - DNA, 80 bp, synthetic construct
  source 1..80: mol_type = other DNA
gttaatcactttaagcccctgacaaacactaatcaattttctgtgtctgtatacttgcctattcggaacatttcatatat

SEQ ID NO: 21949 - DNA, 80 bp, synthetic construct
  source 1..80: mol_type = other DNA
gggtttatttagttggtaggcttttgggtcaatctaatgtgtgttcaaatccaagttttaacattcctttatgaagatgg

SEQ ID NO: 21950 - DNA, 80 bp, synthetic construct
  source 1..80: mol_type = other DNA
atatgtaaaatacagtatctggcccttgtaataagtactcatatcagtcaggaaatcagaaaccacaataattataacag

SEQ ID NO: 21951 - DNA, 80 bp, synthetic construct; identical to SEQ ID NO: 9400
  source 1..80: mol_type = other DNA

SEQ ID NO: 21952 - DNA, 80 bp, synthetic construct
  source 1..80: mol_type = other DNA
gagcatagaatgaagagtttggaactgagaaaagctagtttaataaactggcatagtctacccctttgaccattctacat

SEQ ID NO: 21953 - DNA, 80 bp, synthetic construct
  source 1..80: mol_type = other DNA
tcaatttctgactgatgttgattgctcctcaaattctgtcacagtcccacctggaaattggtaatataaagtctgaagtg

SEQ ID NO: 21954 - DNA, 80 bp, synthetic construct; identical to SEQ ID NO: 9401
  source 1..80: mol_type = other DNA

SEQ ID NO: 21955 - DNA, 80 bp, synthetic construct
  source 1..80: mol_type = other DNA
tcgagtagttgggactacaggtgcatgccactatgcccagctaagttttgtgtttttgttgttgttgttgttttgttttt

SEQ ID NO: 21956 - DNA, 80 bp, synthetic construct
  source 1..80: mol_type = other DNA
ttgtgctctctgcctccctcactgtttggaagctgctcaggttccctttggtaatgaacatcaattgctcttctccatac

SEQ ID NO: 21957 - DNA, 80 bp, synthetic construct
  source 1..80: mol_type = other DNA
aaggaattcccttggattgagtgagagaagacaatgaagatggagtaggtctcaaaggacgtgaaggacaaattgaggca

SEQ ID NO: 21958 - DNA, 80 bp, synthetic construct
  source 1..80: mol_type = other DNA
acaaagatcaaaagcattccagtaactgtttctcaaaaaaagaagcaaatatgttgaagacatagatttgctcccaaacc

SEQ ID NO: 21959 - DNA, 80 bp, synthetic construct; identical to SEQ ID NO: 9402
  source 1..80: mol_type = other DNA

SEQ ID NO: 21960 - DNA, 80 bp, synthetic construct
  source 1..80: mol_type = other DNA
aataggaagaccatgttccttctcttatttctgcctttaaatttccgttagctccttcattggtaggctttaacaggaaa

SEQ ID NO: 21961 - DNA, 80 bp, synthetic construct
  source 1..80: mol_type = other DNA
tcagtatcagaaaactaagccagaagggtaagataggacatgacacggagtagcttaataatcagcacagaatgaaacta

SEQ ID NO: 21962 - DNA, 80 bp, synthetic construct
  source 1..80: mol_type = other DNA
ccttgttatacatacactgacacatttgaaatgttttaaatgttttcaataacttgcattaataaataatactgtgctaa

SEQ ID NO: 21963 - DNA, 80 bp, synthetic construct; identical to SEQ ID NO: 9403
  source 1..80: mol_type = other DNA

SEQ ID NO: 21964 - DNA, 80 bp, synthetic construct
  source 1..80: mol_type = other DNA
tatgaagagagagtttttgaatgtgggtagtgatgagaacagctgggatgtagactggaggaaatggcaaggacattcaa

SEQ ID NO: 21965 - DNA, 80 bp, synthetic construct
  source 1..80: mol_type = other DNA
tcttaaagccatctgtgctctttctgcaagtttgaaacttgaatttaggtaagtcaaattgaaaaagtctagggatgctg

SEQ ID NO: 21966 - DNA, 80 bp, synthetic construct; identical to SEQ ID NO: 9404
  source 1..80: mol_type = other DNA

SEQ ID NO: 21967 - DNA, 80 bp, synthetic construct
  source 1..80: mol_type = other DNA
atatcagactgaagagcaagaagaggatgagaaagtatgcttgtgctcttgttcctggaaatgttccatttaaattccaa

SEQ ID NO: 21968 - DNA, 80 bp, synthetic construct
  source 1..80: mol_type = other DNA
aattgtaaggaaatgattcaaaattgctagttgggcctcctccccacctatgaagacatatgtttatttaaaagccaaag

SEQ ID NO: 21969 - DNA, 80 bp, synthetic construct
  source 1..80: mol_type = other DNA
atgcatacacctttcctggctgttcttgaatgaagatgtcagcatctgttaatcgttggcctagaaagttgtgattggat

SEQ ID NO: 21970 - DNA, 80 bp, synthetic construct
  source 1..80: mol_type = other DNA
acttggactagttattataaatttgtgtgtacattgcttatatatgatagggcaatattgttaacctgttattgctagtt

SEQ ID NO: 21971 - DNA, 80 bp, synthetic construct; identical to SEQ ID NO: 9405
  source 1..80: mol_type = other DNA

SEQ ID NO: 21972 - DNA, 80 bp, synthetic construct
  source 1..80: mol_type = other DNA
atgtaaatggttaatttccttctagtttttaactatctttaacccttttgatcattacaaaatatctttctttttctcta

SEQ ID NO: 21973 - DNA, 80 bp, synthetic construct
  source 1..80: mol_type = other DNA
gtagataagaaaataatcttttcatttaattttaaagagtagtactagtttcttatgtgagtccaatgccatattaatag

SEQ ID NO: 21974 - DNA, 80 bp, synthetic construct; identical to SEQ ID NO: 9406
  source 1..80: mol_type = other DNA

SEQ ID NO: 21975 - DNA, 80 bp, synthetic construct
  source 1..80: mol_type = other DNA
tgctttcaaaatattaatgtttccaaatttgtggtcatttttagtaatatcctgcctacattgtatctagagaagagtgg

SEQ ID NO: 21976 - DNA, 80 bp, synthetic construct
  source 1..80: mol_type = other DNA
cactaacacctcagatttgtttttatgtggcttatctaaaagtataaatctgagacttggatagataagcatgtggagaa

SEQ ID NO: 21977 - DNA, 80 bp, synthetic construct
  source 1..80: mol_type = other DNA
tggctagcttcaaattctgcttttgccatttacaagctgtgtaacctcaggaaagttattgaatctctttgtgctttaac

SEQ ID NO: 21978 - DNA, 80 bp, synthetic construct
  source 1..80: mol_type = other DNA
ctggttactattaacttagcacccttctatgctctatgaggactttaaaagtgcctgctttcaagaaagcttaaaatata

SEQ ID NO: 21979 - DNA, 80 bp, synthetic construct; identical to SEQ ID NO: 9407
  source 1..80: mol_type = other DNA

SEQ ID NO: 21980 - DNA, 80 bp, synthetic construct
  source 1..80: mol_type = other DNA
taatatttattaactatcttctgttacccaatgtgtactgttgcaagctctaattataccatgaagaaagagtcagagca

SEQ ID NO: 21981 - DNA, 80 bp, synthetic construct
  source 1..80: mol_type = other DNA
acctccacctcccaggttcaagcaattctcctgcctcagtcttcctagtagctggaattacattcccaccaccacgcccg

SEQ ID NO: 21982 - DNA, 80 bp, synthetic construct; identical to SEQ ID NO: 9408
  source 1..80: mol_type = other DNA

SEQ ID NO: 21983 - DNA, 80 bp, synthetic construct
  source 1..80: mol_type = other DNA
tgccaaaaatgagcaaaaaaaacatatcatatatatgtttatagtcaatataatataaaatggtagaatccagttaaaat

SEQ ID NO: 21984 - DNA, 80 bp, synthetic construct
  source 1..80: mol_type = other DNA
ccaggaaaatatattaaaaagtcacattgttgataacactactagattgataacactgcaaggtataattccacctaaaa

SEQ ID NO: 21985 - DNA, 80 bp, synthetic construct
  source 1..80: mol_type = other DNA
cattcacccaaattggtcttctattagatcacataaaagacctcattacattccaaagaatagacaatgcaaataatatt

SEQ ID NO: 21986 - DNA, 80 bp, synthetic construct; identical to SEQ ID NO: 9409
  source 1..80: mol_type = other DNA

SEQ ID NO: 21987 - DNA, 80 bp, synthetic construct
  source 1..80: mol_type = other DNA
attaatatatcccaatgagatttggtttactctcggaatgcaaaagtgcttcattattgggataaatattaataaatgta

SEQ ID NO: 21988 - DNA, 80 bp, synthetic construct
  source 1..80: mol_type = other DNA
ttataatccatctagcctttagctgtagcttcttgtttacaatatgttaatagaggtaggaggaagagaaattctaggca

SEQ ID NO: 21989 - DNA, 80 bp, synthetic construct
  source 1..80: mol_type = other DNA
tataaagagcccagactcagtaaataaagggggagatgcctggacttcaaggagacaactggaatttggggaagagatgg

SEQ ID NO: 21990 - DNA, 80 bp, synthetic construct; identical to SEQ ID NO: 9410
  source 1..80: mol_type = other DNA

SEQ ID NO: 21991 - DNA, 80 bp, synthetic construct
  source 1..80: mol_type = other DNA
aacaattagtagattgattatgaagcaatgaggcagtagttcagatgagagatgaagatgtattaggtggtatctcactg

SEQ ID NO: 21992 - DNA, 80 bp, synthetic construct
  source 1..80: mol_type = other DNA
tttgatatttaccacttgtcagatatatgatttgcaaatattttctctcattctgtaggttactttttcactctgttgac

SEQ ID NO: 21993 - DNA, 80 bp, synthetic construct
  source 1..80: mol_type = other DNA
ttttccactatgcttccttttaagaattttatgtttttaactctcccatttaggtcctttgatccattttgaattttgac

SEQ ID NO: 21994 - DNA, 80 bp, synthetic construct; identical to SEQ ID NO: 9411
  source 1..80: mol_type = other DNA

SEQ ID NO: 21995 - DNA, 80 bp, synthetic construct
  source 1..80: mol_type = other DNA
attgctttgtctatttaggtcccttcaatctcaaatgaatttcaggatggattttcctatgtatgcaaataataccattg

SEQ ID NO: 21996 - DNA, 80 bp, synthetic construct
  source 1..80: mol_type = other DNA
acttcttttcagcaacattttgtggctttcggcatacaagtcaagtctttcacctcgttgttaggttttgtcctaagtat

SEQ ID NO: 21997 - DNA, 80 bp, synthetic construct
  source 1..80: mol_type = other DNA
cactgagctgatttcattcattagttctaacagtttctttttggtggaatctttagggttttctacagcaaaatcatatc

SEQ ID NO: 21998 - DNA, 80 bp, synthetic construct; identical to SEQ ID NO: 9412
  source 1..80: mol_type = other DNA

SEQ ID NO: 21999 - DNA, 80 bp, synthetic construct
  source 1..80: mol_type = other DNA
ttgcattgtttgatttttatatattgaaatattgttccattccagggataaattctaattggtcatggtatatctcttag

SEQ ID NO: 22000 - DNA, 80 bp, synthetic construct
  source 1..80: mol_type = other DNA
gcatgtgcagagctcacatggccagaaaggaggcaagagagagagagaggagaaagagttatcaggctcttcttagcaac

SEQ ID NO: 22001 - DNA, 80 bp, synthetic construct
  source 1..80: mol_type = other DNA
aacaaaccaaatcattgcagtgcacgatcctttacctacacaattgaattcagtttgctaacattatgttgaggatttct

SEQ ID NO: 22002 - DNA, 80 bp, synthetic construct
  source 1..80: mol_type = other DNA
aaatgtatggtagaatgcaccagtgaagacatctagtgctaggcttttctttgtggggagaattctgattattgattcaa

SEQ ID NO: 22003 - DNA, 80 bp, synthetic construct; identical to SEQ ID NO: 9413
  source 1..80: mol_type = other DNA

SEQ ID NO: 22004 - DNA, 80 bp, synthetic construct
  source 1..80: mol_type = other DNA
ggccactgtcatgaaggtgttttagaataaggtgttgtggtagtgatggagaaatgtggctggcttgaggtttgtttaag

SEQ ID NO: 22005 - DNA, 80 bp, synthetic construct
  source 1..80: mol_type = other DNA
taggggatggttgaaggaggaccagtgtattgcttattgattttcactctggggaggagattatgagttaaatttggatg

SEQ ID NO: 22006 - DNA, 80 bp, synthetic construct
  source 1..80: mol_type = other DNA
gtccaggatcagaattattctgaaaacattagatatgaagacttcttctctttgggattcgatctcccccaacataaagc

SEQ ID NO: 22007 - DNA, 80 bp, synthetic construct; identical to SEQ ID NO: 9414
  source 1..80: mol_type = other DNA

SEQ ID NO: 22008 - DNA, 80 bp, synthetic construct
  source 1..80: mol_type = other DNA
ctgaaataccatttcctttacggcaatgtgaggcattgtggtaggggaaattgagtggctaaaggtttccctttaataaa

SEQ ID NO: 22009 - DNA, 80 bp, synthetic construct
  source 1..80: mol_type = other DNA
atggacataaaaatattataagaaatctatacatggctgcctagaagtagcattccagggcttggccattgtcatgagcc

SEQ ID NO: 22010 - DNA, 80 bp, synthetic construct; identical to SEQ ID NO: 9415
  source 1..80: mol_type = other DNA

SEQ ID NO: 22011 - DNA, 80 bp, synthetic construct
  source 1..80: mol_type = other DNA
tcaaaatgtatgcatatttgttgttaaaactcaaacattatgaaggtagacacagcatcagaatactgtgtggtattcag

SEQ ID NO: 22012 - DNA, 80 bp, synthetic construct
  source 1..80: mol_type = other DNA
tctagaaggcatttcaccttctccctctctctctccagagtatcataattcacagttcccaccgtatagctttacagaac

SEQ ID NO: 22013 - DNA, 80 bp, synthetic construct
  source 1..80: mol_type = other DNA
gttaactgtaacaattgcaaggtaatatttagcactgtgtgagcacaagatgttttgtagtattcagaacccaaaacaac

SEQ ID NO: 22014 - DNA, 80 bp, synthetic construct; identical to SEQ ID NO: 9416
  source 1..80: mol_type = other DNA

SEQ ID NO: 22015 - DNA, 80 bp, synthetic construct
  source 1..80: mol_type = other DNA
attggtaaattacttgttctgatatcttcttcaatgattgcctccaacaataaatatttcccaaaaagtactggcgccat

SEQ ID NO: 22016 - DNA, 80 bp, synthetic construct
  source 1..80: mol_type = other DNA
aaaaaacacaaagatgtatggaaatcatatgggggagaattaaatgtttgggtaattgctggggaatgaaactatggcgt

SEQ ID NO: 22017 - DNA, 80 bp, synthetic construct
  source 1..80: mol_type = other DNA
gcaactcaagtaatgattctatcccagatataggcttaatgtcaccaaaagaaaaggatagaggatgttaggttgtggct

SEQ ID NO: 22018 - DNA, 80 bp, synthetic construct; identical to SEQ ID NO: 9417
  source 1..80: mol_type = other DNA

SEQ ID NO: 22019 - DNA, 80 bp, synthetic construct
  source 1..80: mol_type = other DNA
atctgtataaactaaaagcaagaaagagtacctagggccagattaaacaaccttgcactaagtgctttggattttatccc

SEQ ID NO: 22020 - DNA, 80 bp, synthetic construct
  source 1..80: mol_type = other DNA
taaatgtttaaaagaggtgttattattaaaaagtaaagttgtacctctctagtccatcattccctattcccttactctgc

SEQ ID NO: 22021 - DNA, 80 bp, synthetic construct
  source 1..80: mol_type = other DNA
taagtttcatgagggtaggggctctgttgcttgtgtttactgttgtatccctaacttctaagataggatatttgataaat

SEQ ID NO: 22022 - DNA, 80 bp, synthetic construct; identical to SEQ ID NO: 9418
  source 1..80: mol_type = other DNA

SEQ ID NO: 22023 - DNA, 80 bp, synthetic construct
  source 1..80: mol_type = other DNA
aaacgttgtttgtactaaaaatacaaaaaaaaaaaaaaaaaattagccgggcatggtggctggcccctgtaatcccagct

SEQ ID NO: 22024 - DNA, 80 bp, synthetic construct
  source 1..80: mol_type = other DNA
tacgtacatatatgcccctatatctatataggggcagtcagttgggaagcatgttttggtgagataacagattaaacttt

SEQ ID NO: 22025 - DNA, 80 bp, synthetic construct
  source 1..80: mol_type = other DNA
aagatttctgtgggacaaactctagatgcagcgagaaagaagacagaaaaataaaccctatgcctatttaagccatcttg

SEQ ID NO: 22026 - DNA, 80 bp, synthetic construct; identical to SEQ ID NO: 9419
  source 1..80: mol_type = other DNA

SEQ ID NO: 22027 - DNA, 80 bp, synthetic construct
  source 1..80: mol_type = other DNA
gatttaacgtgcagcccatcctaacatatttgcaatcaggaagacagccttttctctaccttacctcttaaattagacaa

SEQ ID NO: 22028 - DNA, 80 bp, synthetic construct
  source 1..80: mol_type = other DNA
acctggtaggaactcagtatataatggtgatcaaattagaaacatcgatgttttgttcagggaaatttcatcagatagga

SEQ ID NO: 22029 - DNA, 80 bp, synthetic construct
  source 1..80: mol_type = other DNA
tagtgaagcatttttctatctgtgtgtattgcctggggtgggaggatggtgaaaatggccctaaaaatacataatatgga

SEQ ID NO: 22030 - DNA, 80 bp, synthetic construct
  source 1..80: mol_type = other DNA
gtgtacacaagagcagacacacacttaggtgtatacacacacactaaaaccaaattttacgttaatatttacatttacta

SEQ ID NO: 22031 - DNA, 80 bp, synthetic construct; identical to SEQ ID NO: 9420
  source 1..80: mol_type = other DNA

SEQ ID NO: 22032 - DNA, 80 bp, synthetic construct
  source 1..80: mol_type = other DNA
tgtaaatttatgtttctatttgtagaacatgtttgcatttaaagatatgcatggctgcatgtggtggctcgcggccgtaa

SEQ ID NO: 22033 - DNA, 80 bp, synthetic construct
  source 1..80: mol_type = other DNA
aaggctgagttgggaagattgcatgagcccaggagttcaaagctgcagtgagctatgatcgcaccactgcactccagcct

SEQ ID NO: 22034 - DNA, 80 bp, synthetic construct; identical to SEQ ID NO: 9421
  source 1..80: mol_type = other DNA

SEQ ID NO: 22035 - DNA, 80 bp, synthetic construct
  source 1..80: mol_type = other DNA
tagagtaaaactgatattttcatattatgtaacaagtctttaagacagaaaccaagacagaagccaaataagcaagtgag

SEQ ID NO: 22036 - DNA, 80 bp, synthetic construct
  source 1..80: mol_type = other DNA
ggtttacactatgatgtcatttgatttccctgctcttacattctatcatgtggcagaggctagagcaaaccttcagtgat

SEQ ID NO: 22037 - DNA, 80 bp, synthetic construct
  source 1..80: mol_type = other DNA
ccccaactttaattggctgtgcaactgtgtagagctacctacttccatttggtttttctgacaaaaatgcacaacctgaa

SEQ ID NO: 22038 - DNA, 80 bp, synthetic construct
  source 1..80: mol_type = other DNA
tagattgaaggagtttatagaaacacgacgactaaatgcaacgtgcttctgctataaagaatattattaggcaaattaaa

SEQ ID NO: 22039 - DNA, 80 bp, synthetic construct; identical to SEQ ID NO: 9422
  source 1..80: mol_type = other DNA

SEQ ID NO: 22040 - DNA, 80 bp, synthetic construct
  source 1..80: mol_type = other DNA
aaaaggcataattatactgaacataaaaagctcttactaaggattaaatgagataatgtatgcaatgctgagaattctaa

SEQ ID NO: 22041 - DNA, 80 bp, synthetic construct
  source 1..80: mol_type = other DNA
aaacctccagtggcagtttcaccctttgcagccttttaccatgggcttatagtttctcctccaaatgtaactcaaagagg

SEQ ID NO: 22042 - DNA, 80 bp, synthetic construct; identical to SEQ ID NO: 9423
  source 1..80: mol_type = other DNA

SEQ ID NO: 22043 - DNA, 80 bp, synthetic construct
  source 1..80: mol_type = other DNA
acatgttttatgttaacagactgtattatttcctaagtaggaagaataaaaagcataaattttattaagagcacatggtt

SEQ ID NO: 22044 - DNA, 80 bp, synthetic construct
  source 1..80: mol_type = other DNA
gccttctaaaccaattcactgtattttcaagtaaaatccagacttattagtgtagtaacagtaagcactcctcaggtcaa

SEQ ID NO: 22045 - DNA, 80 bp, synthetic construct
  source 1..80: mol_type = other DNA
aagctaaaaagaaatgtttttgcaatcaacaagaggagatgcttggaaaagaagtttaaccacatgcccagtttctctag

SEQ ID NO: 22046 - DNA, 80 bp, synthetic construct
  source 1..80: mol_type = other DNA
gtcattttcaaattctggtaatgtatacttaacataaaatgtgccattttaatattttttaagtatacagggcagtggca

SEQ ID NO: 22047 - DNA, 80 bp, synthetic construct; identical to SEQ ID NO: 9424
  source 1..80: mol_type = other DNA

SEQ ID NO: 22048 - DNA, 80 bp, synthetic construct
  source 1..80: mol_type = other DNA
taggcattcagattggctgaacatgggtgtacaaattatctgttcaaatcctgttttcaattctttaagatacatgccca

SEQ ID NO: 22049 - DNA, 80 bp, synthetic construct
  source 1..80: mol_type = other DNA
gaaggtaaggtggttctttctcacctgacttaacagaattcttgctgaagccagactgtggtgatctgatatcaaatgtg

SEQ ID NO: 22050 - DNA, 80 bp, synthetic construct; identical to SEQ ID NO: 9425
  source 1..80: mol_type = other DNA

SEQ ID NO: 22051 - DNA, 80 bp, synthetic construct
  source 1..80: mol_type = other DNA
tagcaatcttaatgggtatgaagcaatatctcattgttgcaattttgatttgcgtttccctgatgattagtgttgttgag

SEQ ID NO: 22052 - DNA, 80 bp, synthetic construct
  source 1..80: mol_type = other DNA
gcaaatattttctcccattatgtgggttgcctttttactctgttgagagtgtcctttaatacaaaaaagtttgtgaatat

SEQ ID NO: 22053 - DNA, 80 bp, synthetic construct
  source 1..80: mol_type = other DNA
tgtacatggtgtaagggtccaaatttattcttttgtatgtggatagccagttttctcagcaccattttctaaaaagactg

SEQ ID NO: 22054 - DNA, 80 bp, synthetic construct; identical to SEQ ID NO: 9426
  source 1..80: mol_type = other DNA

SEQ ID NO: 22055 - DNA, 80 bp, synthetic construct
  source 1..80: mol_type = other DNA
tcctaagcattttcttctttccaatgctattgtaaaatagaatagaattgttctctttgctatggtcctatgtattagat

SEQ ID NO: 22056 - DNA, 80 bp, synthetic construct
  source 1..80: mol_type = other DNA
aatgtaaatgaacattcagtgaactcccttttgttattgttttcgtcttcactttcgatgtgtgcaatgttcattggtaa

SEQ ID NO: 22057 - DNA, 80 bp, synthetic construct
  source 1..80: mol_type = other DNA
ttgtttatctgaaggcaaacttatttgtgtgatttctgcaatggaaaaattggagtcgccaaggaatgaactagggggtg

SEQ ID NO: 22058 - DNA, 80 bp, synthetic construct
  source 1..80: mol_type = other DNA
ccaaggcagatggatcacttgaggtcaggagttcgagaccagcctgggcaacatggtaaaatgccatctctattaaaatt

SEQ ID NO: 22059 - DNA, 80 bp, synthetic construct; identical to SEQ ID NO: 9427
  source 1..80: mol_type = other DNA

SEQ ID NO: 22060 - DNA, 80 bp, synthetic construct
  source 1..80: mol_type = other DNA
tgagaaaaatgaagagattcacaaaagatagatgagtttcccaaagacaatcggctaggaccatgctatctttcctcttc

SEQ ID NO: 22061 - DNA, 80 bp, synthetic construct
  source 1..80: mol_type = other DNA
atgtcagaatccattgtgtgtcagtagcatttcctgggaatctatgtgtgtcagtatcatttcctgggaaggtttgcata

SEQ ID NO: 22062 - DNA, 80 bp, synthetic construct
  source 1..80: mol_type = other DNA
caaagtagatcaacattttattaacagaataatatatgctcactgtaaaaaaaaatcaacacaagcaaagtatgaagaga

SEQ ID NO: 22063 - DNA, 80 bp, synthetic construct; identical to SEQ ID NO: 9428
  source 1..80: mol_type = other DNA

SEQ ID NO: 22064 - DNA, 80 bp, synthetic construct
  source 1..80: mol_type = other DNA
ttccaagatgttggatatttgggtccaagggtagaagcatgatgttacagtataaacctgtaagctactcagttagaaaa

SEQ ID NO: 22065 - DNA, 80 bp, synthetic construct
  source 1..80: mol_type = other DNA
atcctgtttcgttattgacattgttgtctaacacaggcacgaagtataacaggcacaattactacctgttctcagaagtt

SEQ ID NO: 22066 - DNA, 80 bp, synthetic construct; identical to SEQ ID NO: 9429
  source 1..80: mol_type = other DNA

SEQ ID NO: 22067 - DNA, 80 bp, synthetic construct
  source 1..80: mol_type = other DNA
tccacatcctaattaaaaaatggttggatcgcagcagaggcaaagaaacaaaggcagctaatatctgccatacttcattc

SEQ ID NO: 22068 - DNA, 80 bp, synthetic construct
  source 1..80: mol_type = other DNA
agccaatacgggtggtctatatttgagactttatgagtatctcctactcactgtcaagaacactgctgtgtgtatatgtg

SEQ ID NO: 22069 - DNA, 80 bp, synthetic construct
  source 1..80: mol_type = other DNA
gattgccattttgataagacaaaaggagaaatattaaagtttctattttgtggggagaggtagtggcaagtcttcctaac

SEQ ID NO: 22070 - DNA, 80 bp, synthetic construct
  source 1..80: mol_type = other DNA
ttccatagcagagctgactgcagggggcagtcagtttacaaatatgccaaatatcattatatgggcagcattgcccaaaa

SEQ ID NO: 22071 - DNA, 80 bp, synthetic construct; identical to SEQ ID NO: 9430
  source 1..80: mol_type = other DNA

SEQ ID NO: 22072 - DNA, 80 bp, synthetic construct
  source 1..80: mol_type = other DNA
caaaatttcctgagatgcagttaagaaccatcagcagcagaaattcccaacagctgcctggatatatatgttgaccctga

SEQ ID NO: 22073 - DNA, 80 bp, synthetic construct
  source 1..80: mol_type = other DNA
gacaatgtagagtgtaaggacatcctaggcaaagggaacattgaacactacagcataaggactggtaaaacttaaaaatg

SEQ ID NO: 22074 - DNA, 80 bp, synthetic construct; identical to SEQ ID NO: 9431
  source 1..80: mol_type = other DNA

SEQ ID NO: 22075 - DNA, 80 bp, synthetic construct
  source 1..80: mol_type = other DNA
aagccaaatactttatcatcctatctgacatgataaaacttaagcagaagtctactggtggttttggggaaagctcaagt

SEQ ID NO: 22076 - DNA, 80 bp, synthetic construct
  source 1..80: mol_type = other DNA
ctaaagagtggcagagatatcaccccaagtgtcatgaaggtactgaaccaaaggaagcagtcacccacatgtaggcattt

SEQ ID NO: 22077 - DNA, 80 bp, synthetic construct
  source 1..80: mol_type = other DNA
aacaacaattgggaatagaaatgccaggacaatgagaaacatgtagatggctgaatccacaagaccaagtcactagctgt

SEQ ID NO: 22078 - DNA, 80 bp, synthetic construct
  source 1..80: mol_type = other DNA
ttttgaacctctcttccttttaaaatgttcttctctgctagattgcttcattccaacttcacctagtaagctccccttta

SEQ ID NO: 22079 - DNA, 80 bp, synthetic construct; identical to SEQ ID NO: 9432
  source 1..80: mol_type = other DNA

SEQ ID NO: 22080 - DNA, 80 bp, synthetic construct
  source 1..80: mol_type = other DNA
cacttacacactgttagcctgaacagattttgtaacttccctgggcctcagaattcatcatatgtaaaacagagaaaaaa

SEQ ID NO: 22081 - DNA, 80 bp, synthetic construct
  source 1..80: mol_type = other DNA
tttcctcttaaccaatgggaatgcaaggcaattttcattaccctctcctatgaacccttttaaataacacactattagtc

SEQ ID NO: 22082 - DNA, 80 bp, synthetic construct; identical to SEQ ID NO: 9433
  source 1..80: mol_type = other DNA

SEQ ID NO: 22083 - DNA, 80 bp, synthetic construct
  source 1..80: mol_type = other DNA
gtgagaaagtactgactaccattgattattcttgggcactcttattaaatctgaccttgaaactcagaatatttaggaag

SEQ ID NO: 22084 - DNA, 80 bp, synthetic construct
  source 1..80: mol_type = other DNA
aaaaatgccttggcgcagatgggaatatttactcaaaccaaagctaccaatattgcactcagaagttaactgttctagtt

SEQ ID NO: 22085 - DNA, 80 bp, synthetic construct
  source 1..80: mol_type = other DNA
aagtccagtttggagaaaaggaattcaaaattcacatcacagcaacgtctctgtatcgctcctccctgtttctccttccc

SEQ ID NO: 22086 - DNA, 80 bp, synthetic construct
  source 1..80: mol_type = other DNA
tgactccactcacagtgaaatctccgagcttcccagacccgatcctggccacaaaagcctctctacccctctttcctgct

SEQ ID NO: 22087 - DNA, 80 bp, synthetic construct; identical to SEQ ID NO: 9434
  source 1..80: mol_type = other DNA

SEQ ID NO: 22088 - DNA, 80 bp, synthetic construct
  source 1..80: mol_type = other DNA
tctagagattttgatgtaattggtccatgtggatactgctattgtttaacacctcctgagggaagtctaatgtgtgtgtc

SEQ ID NO: 22089 - DNA, 80 bp, synthetic construct
  source 1..80: mol_type = other DNA
caccaggaacagaatgtgcttcagtgctttccaagaatgttgctgagaaagttggcaaagcatctgagcctggtaaatcg

SEQ ID NO: 22090 - DNA, 80 bp, synthetic construct
  source 1..80: mol_type = other DNA
tcacacttggcttctgccctttttttccttttagctttcattattgaagtctggagctggccttagacatcttctactct

SEQ ID NO: 22091 - DNA, 80 bp, synthetic construct; identical to SEQ ID NO: 9435
  source 1..80: mol_type = other DNA

SEQ ID NO: 22092 - DNA, 80 bp, synthetic construct
  source 1..80: mol_type = other DNA
cccagagatgtgagttttgaaagacagtgcagactttgtttactgctatatctgccacatggtaagattgcagttaatgg

SEQ ID NO: 22093 - DNA, 80 bp, synthetic construct
  source 1..80: mol_type = other DNA
aaagattatcccttaaaaaacaatgccaagcaaattactgtacttagccacattttatccatgaagcttagaaagattaa

SEQ ID NO: 22094 - DNA, 80 bp, synthetic construct
  source 1..80: mol_type = other DNA
cctgtaatcccagctacttgggaggctgaggcaggagaatcgcttgaacctaggagatggaggttgcagtgagtggaggt

SEQ ID NO: 22095 - DNA, 80 bp, synthetic construct; identical to SEQ ID NO: 9436
  source 1..80: mol_type = other DNA

SEQ ID NO: 22096 - DNA, 80 bp, synthetic construct
  source 1..80: mol_type = other DNA
ttacactagccaatgagtatatctatcagtgctatttgtctctgtaagtaatttgagaagtgtgaacagtttagttgtgt

SEQ ID NO: 22097 - DNA, 80 bp, synthetic construct
  source 1..80: mol_type = other DNA
gttaggatcctcttggtcacaagtagcagaaaccagttctagctagtttaagtgggaaataattcaacctagagacaaga

SEQ ID NO: 22098 - DNA, 80 bp, synthetic construct
  source 1..80: mol_type = other DNA
tgatgggtgaaagaccaccaaatcatatctttggaacttagatgttatagatctagctgcccagagaaaggatgatcttt

SEQ ID NO: 22099 - DNA, 80 bp, synthetic construct; identical to SEQ ID NO: 9437
  source 1..80: mol_type = other DNA

SEQ ID NO: 22100 - DNA, 80 bp, synthetic construct
  source 1..80: mol_type = other DNA
ggctaatttttgtatttttaggagagactaggtttcaccatgttggccaggctggtctcgaactcgtgacctcaagtgat

SEQ ID NO: 22101 - DNA, 80 bp, synthetic construct
  source 1..80: mol_type = other DNA
tttttatttacctggtttcctccttagtctgtgaatttttgttttatattcttagtgcttgatattagggggtgtggaaa

SEQ ID NO: 22102 - DNA, 80 bp, synthetic construct; identical to SEQ ID NO: 9438
  source 1..80: mol_type = other DNA

SEQ ID NO: 22103 - DNA, 80 bp, synthetic construct
  source 1..80: mol_type = other DNA
aaaataagatagacatttttctgttttaggtgttatattcccgaaaatgattctcgacctggcagtcactcctggagagg

SEQ ID NO: 22104 - DNA, 80 bp, synthetic construct
  source 1..80: mol_type = other DNA
tccagcttggagatcatccttaccttacattaatggagatgaggaagaaatatggagatgtctttctcctcaaacttggc

SEQ ID NO: 22105 - DNA, 80 bp, synthetic construct
  source 1..80: mol_type = other DNA
ttcataaaaaaattgcctctaaagccttatgaactttttctaatgcagaagcgaaatcctccacttgctcttgctcactt

SEQ ID NO: 22106 - DNA, 80 bp, synthetic construct
  source 1..80: mol_type = other DNA
gccctttgctttggcaagagataggaccacagtgatgaggaatttcttaggatagttaaaacaaatgacgacttactcaa

SEQ ID NO: 22107 - DNA, 80 bp, synthetic construct; identical to SEQ ID NO: 9439
  source 1..80: mol_type = other DNA

SEQ ID NO: 22108 - DNA, 80 bp, synthetic construct
  source 1..80: mol_type = other DNA
tttgaggtccaaacagtgagactgcatgacagcattactcagttctcatataaaaccctaagaaaagttctgaattcttt

SEQ ID NO: 22109 - DNA, 80 bp, synthetic construct
  source 1..80: mol_type = other DNA
tgtatttctaacttgctgcttctaaaagttgtttaatatttcacgacgtgacccccttgccccatacatttcacccatct

SEQ ID NO: 22110 - DNA, 80 bp, synthetic construct
  source 1..80: mol_type = other DNA
aagcaataatttcatctctcccatttcatatctggcaccatgatctcagacttacaggtatcacaaatattagcatattt

SEQ ID NO: 22111 - DNA, 80 bp, synthetic construct; identical to SEQ ID NO: 9440
  source 1..80: mol_type = other DNA

SEQ ID NO: 22112 - DNA, 80 bp, synthetic construct
  source 1..80: mol_type = other DNA
ggaagatgggaattctagatcaggtatagtaagtatcagcatttgtaaggtgtataaacttttattcccattctctcaaa

SEQ ID NO: 22113 - DNA, 80 bp, synthetic construct
  source 1..80: mol_type = other DNA
gcctggccaacatggtgaaaccccgtctctactaaaaatacaaaaattagccacgtgtagttttgcgtgcctataatccc

SEQ ID NO: 22114 - DNA, 80 bp, synthetic construct
  source 1..80: mol_type = other DNA
aactttttaaacattgccaagcaatttctctgtaataagttatagagaatgctgatattttcaagttgtgcttatagata

SEQ ID NO: 22115 - DNA, 80 bp, synthetic construct; identical to SEQ ID NO: 9441
  source 1..80: mol_type = other DNA

SEQ ID NO: 22116 - DNA, 80 bp, synthetic construct
  source 1..80: mol_type = other DNA
aaatcataagcaccgtgagcgacctctttggagctggtatgtgagagaatttagcaacatgtaagaccaataaaaattag

SEQ ID NO: 22117 - DNA, 80 bp, synthetic construct
  source 1..80: mol_type = other DNA
ataatagcccgcagttaatagtgccttcacattattgtccatgaaatgattgtccttgtttatcactttcacttccagtc

SEQ ID NO: 22118 - DNA, 80 bp, synthetic construct
  source 1..80: mol_type = other DNA
gtactcttacaatccaaccatgattgtcaggcatatttccaattggctgcttctaaagttcacgtaatattagacgtctg

SEQ ID NO: 22119 - DNA, 80 bp, synthetic construct; identical to SEQ ID NO: 9442
  source 1..80: mol_type = other DNA

SEQ ID NO: 22120 - DNA, 80 bp, synthetic construct
  source 1..80: mol_type = other DNA
ttttatagttttctttaaaagtcattttttatctgtcacatttattagagttcctctaagatactagactgcaggaagcc

SEQ ID NO: 22121 - DNA, 80 bp, synthetic construct
  source 1..80: mol_type = other DNA
tctctgcaaacagaggcatttgttttgatttgtattatttttcctcatgcaaatgcacgagcccccacatatgtgtgtgt

SEQ ID NO: 22122 - DNA, 80 bp, synthetic construct
  source 1..80: mol_type = other DNA
aaatatgagtatttgtcagaacatttttaaatgcctgaacattagtgagtactaaagactgggtatgtgtgggtgtgata

SEQ ID NO: 22123 - DNA, 80 bp, synthetic construct; identical to SEQ ID NO: 9443
  source 1..80: mol_type = other DNA

SEQ ID NO: 22124 - DNA, 80 bp, synthetic construct
  source 1..80: mol_type = other DNA
taaaattatggcagatgacaaaaatgactaggatggagaataaaaccatatgacatgtacaacacagctaaaaaaaggtt

SEQ ID NO: 22125 - DNA, 80 bp, synthetic construct
  source 1..80: mol_type = other DNA
ttaataaaaccataaacttccacatgtacctgctacctcactagtgagatgtaataaaatatattattagaataaatcag

SEQ ID NO: 22126 - DNA, 80 bp, synthetic construct
  source 1..80: mol_type = other DNA
cattgattttaccctcaatgtttcaataatctaccaagatagataactgctggttgcttaagccttgatataaaaagcaa

SEQ ID NO: 22127 - DNA, 80 bp, synthetic construct; identical to SEQ ID NO: 9444
  source 1..80: mol_type = other DNA

SEQ ID NO: 22128 - DNA, 80 bp, synthetic construct
  source 1..80: mol_type = other DNA
gtgaaaacaggcttacgaagtgaagtttggaaaggagctaactctgttctgcagctgcatctgggtatatttactgtgca

SEQ ID NO: 22129 - DNA, 80 bp, synthetic construct
  source 1..80: mol_type = other DNA
ccatctcagatgacaatgtatttaagtggtcaatgtttggtaaacatattcatcattacccgtgttgttatcatcatcag

SEQ ID NO: 22130 - DNA, 80 bp, synthetic construct
  source 1..80: mol_type = other DNA
tttctgagttttaggttttcaagaattgattgagtacattcttcgatgtagtaatcataaaatagcccttgaaaaaagat

SEQ ID NO: 22131 - DNA, 80 bp, synthetic construct; identical to SEQ ID NO: 9445
  source 1..80: mol_type = other DNA

SEQ ID NO: 22132 - DNA, 80 bp, synthetic construct
  source 1..80: mol_type = other DNA
gagagagagagcacactcctggatcagagtaactacttaataacttcttatttttattacaaataatagccattattatt

SEQ ID NO: 22133 - DNA, 80 bp, synthetic construct
  source 1..80: mol_type = other DNA
tcacatggttgtgcaacagatctctagaacttcttcatcttgcaaaactgaaatcctgtgcccattaaacactaattttc

SEQ ID NO: 22134 - DNA, 80 bp, synthetic construct
  source 1..80: mol_type = other DNA
actgagcctaatgtcctcaaggttttttcatgtggtggcatgtgacagaatctactttcttaagactacataatattcca

SEQ ID NO: 22135 - DNA, 80 bp, synthetic construct; identical to SEQ ID NO: 9446
  source 1..80: mol_type = other DNA

SEQ ID NO: 22136 - DNA, 80 bp, synthetic construct
  source 1..80: mol_type = other DNA
ataaaatgagcaaactgatttaactatgctttttttcatgacactcggtctcttggttctattttagggtttgaaacagt

SEQ ID NO: 22137 - DNA, 80 bp, synthetic construct
  source 1..80: mol_type = other DNA
aaacattgggctgagaccacccagatttgaagacaggaaaattttaccatacacagaagctttcgtaagtgaagtattca

SEQ ID NO: 22138 - DNA, 80 bp, synthetic construct; identical to SEQ ID NO: 9447
  source 1..80: mol_type = other DNA

SEQ ID NO: 22139 - DNA, 80 bp, synthetic construct
  source 1..80: mol_type = other DNA
atcacagggtcagaaagttatggaatgtccaagcaacagataatccaaccgtaatatgtatttggctatgaaaagtcatg

SEQ ID NO: 22140 - DNA, 80 bp, synthetic construct
  source 1..80: mol_type = other DNA
gaatcttactccagaatctctagcacgcaaatgcatgccagcataaattaggtagatagcttcattaaatgcatctgtgg

SEQ ID NO: 22141 - DNA, 80 bp, synthetic construct
  source 1..80: mol_type = other DNA
agtgggaatatctctcttcccaggaaactgatgtaatcatttagtaattggtgtgacagcatgcagtgtccttaggtaag

SEQ ID NO: 22142 - DNA, 80 bp, synthetic construct; identical to SEQ ID NO: 9448
  source 1..80: mol_type = other DNA

SEQ ID NO: 22143 - DNA, 80 bp, synthetic construct
  source 1..80: mol_type = other DNA
tgtcccaataacttttaaaggtgactttgggtgcttcatacgagtattatctacacttttgctaagtacccaggaacaga

SEQ ID NO: 22144 - DNA, 80 bp, synthetic construct
  source 1..80: mol_type = other DNA
attgaaagaactactgcattggctaatgaaagcagcatgatatgaaccaggaattttgtgcacacaaaagagctatctta

SEQ ID NO: 22145 - DNA, 80 bp, synthetic construct
  source 1..80: mol_type = other DNA
ataacatatatacacacatataaaacacacaggaaagaccaaaccatatcctaataaatatttattgcatatgcatttct

SEQ ID NO: 22146 - DNA, 80 bp, synthetic construct
  source 1..80: mol_type = other DNA
tctgagcagctgaatccacagaggcagtgtggacagggatgtgttgagaaagtcaagtggctatgcatgagaaaaggtaa

SEQ ID NO: 22147 - DNA, 80 bp, synthetic construct; identical to SEQ ID NO: 9449
  source 1..80: mol_type = other DNA

SEQ ID NO: 22148 - DNA, 80 bp, synthetic construct
  source 1..80: mol_type = other DNA
aagtagtgagacaatgccttctctcaaactaatcaaattgaaatgtttctgcttctcttggggaagtgagtgtgagagta

SEQ ID NO: 22149 - DNA, 80 bp, synthetic construct
  source 1..80: mol_type = other DNA
ccatccaacacaaccaacaccttcgtttcatagctaggaagtggagtcgcagaatagataatttgcccaatatcccactg

SEQ ID NO: 22150 - DNA, 80 bp, synthetic construct
  source 1..80: mol_type = other DNA
gtaatttgatctgcctgcttatggtcaactctgtcatagaaatattgagataattttctatggaaatgtttagctcatag

SEQ ID NO: 22151 - DNA, 80 bp, synthetic construct; identical to SEQ ID NO: 9450
  source 1..80: mol_type = other DNA

SEQ ID NO: 22152 - DNA, 80 bp, synthetic construct
  source 1..80: mol_type = other DNA
ttgcctgcttggttgtttactgtttattaatctggaaaagatttacagtcttcttagccaaccttcactcctgtttctct

SEQ ID NO: 22153 - DNA, 80 bp, synthetic construct
  source 1..80: mol_type = other DNA
tgcatggccatggctaatacattgaaatggagtctgaaatcccccactggaatgtaagccaccaagcagggatttttttt

SEQ ID NO: 22154 - DNA, 80 bp, synthetic construct
  source 1..80: mol_type = other DNA
aaagtgaggataatgacagtggtggtggtgagaatgatgattacagctaatatttatagactcctactgtgggcaaggca

SEQ ID NO: 22155 - DNA, 80 bp, synthetic construct; identical to SEQ ID NO: 9451
  source 1..80: mol_type = other DNA

SEQ ID NO: 22156 - DNA, 80 bp, synthetic construct
  source 1..80: mol_type = other DNA
tggcagcttcacaatctctgtaaacagaaagatggtagaagactatgcatatgctgtcccactgcaacacttactgtcac

SEQ ID NO: 22157 - DNA, 80 bp, synthetic construct
  source 1..80: mol_type = other DNA
aatgtgcaaacaaactgagttaacatgggtgctcctaaagaaataccatttgtatggaggcacttgtttaagctgaacga

SEQ ID NO: 22158 - DNA, 80 bp, synthetic construct
  source 1..80: mol_type = other DNA
ggaggcggagcttgcagtgagccgagatcccgccactgcactccagcctgggcgacagagcgagactccgtctcaaaaaa

SEQ ID NO: 22159 - DNA, 80 bp, synthetic construct; identical to SEQ ID NO: 9452
  source 1..80: mol_type = other DNA

SEQ ID NO: 22160 - DNA, 80 bp, synthetic construct
  source 1..80: mol_type = other DNA
caaaatgtattggaggactgtgtacagaactaatcctctaggtctgtggtctctggtacagacagaaaccagtttctcct

SEQ ID NO: 22161 - DNA, 80 bp, synthetic construct
  source 1..80: mol_type = other DNA
aggtacacagtgatttgagaactgtgggcaatcccccaattagagctgctttctggagacccagatcctctctgtattgt

SEQ ID NO: 22162 - DNA, 80 bp, synthetic construct; identical to SEQ ID NO: 9453
  source 1..80: mol_type = other DNA

SEQ ID NO: 22163 - DNA, 80 bp, synthetic construct
  source 1..80: mol_type = other DNA
caagcagaacttcacatctcaggtagttcatatgcttagattctcagactgagtggagggtttcttatttagttcagaaa

SEQ ID NO: 22164 - DNA, 80 bp, synthetic construct
  source 1..80: mol_type = other DNA
tccataagtacttatacatatatgtgtatatatacttcatttatgtatacctcctttctctatacataatttctaaggaa

SEQ ID NO: 22165 - DNA, 80 bp, synthetic construct
  source 1..80: mol_type = other DNA
ctaaacgaaaacagagaactgaataaaagtcttgttgagaaagttttgatatttggaatgggcatccggaagtgtctggg

SEQ ID NO: 22166 - DNA, 80 bp, synthetic construct
  source 1..80: mol_type = other DNA
ggcagttcatctgcttagattctcagactgagtggagggtttcttactcaattcagaaaaatagatgatttgagtttatt

SEQ ID NO: 22167 - DNA, 80 bp, synthetic construct; identical to SEQ ID NO: 9454
  source 1..80: mol_type = other DNA

SEQ ID NO: 22168 - DNA, 80 bp, synthetic construct
  source 1..80: mol_type = other DNA
ggggttcagaataagaaaaagttctgatcttaaatattttcagtgatctagagcatagatgctcaggagggccagagaag

SEQ ID NO: 22169 - DNA, 80 bp, synthetic construct
  source 1..80: mol_type = other DNA
ttggtgttttcacaacgttaccaacttcttttggtacatattttatatatatatatataattaatagcttaccaggactg

SEQ ID NO: 22170 - DNA, 80 bp, synthetic construct; identical to SEQ ID NO: 9455
  source 1..80: mol_type = other DNA

SEQ ID NO: 22171 - DNA, 80 bp, synthetic construct
  source 1..80: mol_type = other DNA
cggattcaagtgattctcctgcctcagcctcctgagtagctgggactacaggcgtgtgccaccacacctggctaattttt

SEQ ID NO: 22172 - DNA, 80 bp, synthetic construct
  source 1..80: mol_type = other DNA
tacagtcacattctgaagtactaaaagttgggatgtcaacccatcaatttcagagtcgggggggtgggggacaaaattga

SEQ ID NO: 22173 - DNA, 80 bp, synthetic construct
  source 1..80: mol_type = other DNA
gtaagtgaacttaaaatgggcagtgaaagaactagtatttcagattgagggtttgaggtggagttgcattataaaggatg

SEQ ID NO: 22174 - DNA, 80 bp, synthetic construct; identical to SEQ ID NO: 9456
  source 1..80: mol_type = other DNA

SEQ ID NO: 22175 - DNA, 80 bp, synthetic construct
  source 1..80: mol_type = other DNA
aaaaatacaacaattagctgggcttggtggtgcatgcctgtagtcccagctacttgggaggctgaggcagaagaatccct

SEQ ID NO: 22176 - DNA, 80 bp, synthetic construct
  source 1..80: mol_type = other DNA
tgaacagacaattgaattgcttgtgcttctctaagagcttttgaaattatttatattaccctcatggcgttgtgtcaaaa

SEQ ID NO: 22177 - DNA, 80 bp, synthetic construct
  source 1..80: mol_type = other DNA
caaagcttatactttcaacaccttgtattataaaatgctattttgcactcttcctctgctcctaaggcataattaaatag

SEQ ID NO: 22178 - DNA, 80 bp, synthetic construct
  source 1..80: mol_type = other DNA
ttgcttatcctaaagcaataatttgtttcatgaaatatgtaatcagaaacaacatagtataactctctatctatctatct

SEQ ID NO: 22179 - DNA, 80 bp, synthetic construct; identical to SEQ ID NO: 9457
  source 1..80: mol_type = other DNA

SEQ ID NO: 22180 - DNA, 80 bp, synthetic construct
  source 1..80: mol_type = other DNA
aaatgagtgcaggatgtgcctggtctcaagtcttttacagaagaaaacttgcacccaaaatttaaaagaacaggatcgcc

SEQ ID NO: 22181 - DNA, 80 bp, synthetic construct
  source 1..80: mol_type = other DNA
gggattttactatctacataattattaattaggctgtgaaatctgtcctggtttgcagatggttccaggactctggaagt

SEQ ID NO: 22182 - DNA, 80 bp, synthetic construct
  source 1..80: mol_type = other DNA
aagggagttgtttttacggcttaacaagctataaaaagaaattccctgtgaggaatacctccattgcatttctctttaga

SEQ ID NO: 22183 - DNA, 80 bp, synthetic construct; identical to SEQ ID NO: 9458
  source 1..80: mol_type = other DNA

SEQ ID NO: 22184 - DNA, 80 bp, synthetic construct
  source 1..80: mol_type = other DNA
atttgatgatctcttgattacatcctccatccctgccccaatacctggttccattcattattttaaggctgatctctacc

SEQ ID NO: 22185 - DNA, 80 bp, synthetic construct
  source 1..80: mol_type = other DNA
ggccgaacattcaatccattcacattggtttgaatgttcagtgaatgatggaattaattaatgattaagtgagtggatct

SEQ ID NO: 22186 - DNA, 80 bp, synthetic construct
  source 1..80: mol_type = other DNA
cttaaaaatctgttcagtcttctcacacttttttaatctacaaggtccaaggtccaagtctcatcaaagaagctcttaat

SEQ ID NO: 22187 - DNA, 80 bp, synthetic construct; identical to SEQ ID NO: 9459
  source 1..80: mol_type = other DNA

SEQ ID NO: 22188 - DNA, 80 bp, synthetic construct
  source 1..80: mol_type = other DNA
gtatttaggaagctttccaaagccaacatctcaagtgcattccaaaatgtcactgaactttttcctctcttcccattgca

SEQ ID NO: 22189 - DNA, 80 bp, synthetic construct
  source 1..80: mol_type = other DNA
tacccatttttcaagactgtaactgagatttagctgtgattttgaagaaaatttacttgaaggtttggggctattggaaa

SEQ ID NO: 22190 - DNA, 80 bp, synthetic construct
  source 1..80: mol_type = other DNA
tcactccaacttatgaacaccttgaggctggtaaaataaagaagcaaaggagccttctctcagccccagagaactgtctc

SEQ ID NO: 22191 - DNA, 80 bp, synthetic construct; identical to SEQ ID NO: 9460
  source 1..80: mol_type = other DNA

SEQ ID NO: 22192 - DNA, 80 bp, synthetic construct
  source 1..80: mol_type = other DNA
ctcagctcatggcaacctctgcctcccaggttcaagcgtttctcctgcctcagcctcctgagtagctggaactacaggca

SEQ ID NO: 22193 - DNA, 80 bp, synthetic construct
  source 1..80: mol_type = other DNA
aaactttttgcagaaaaagaggctcagaaagatgaatatgcccaagatactcttcaggtaaggcttactgcagcgttaaa

SEQ ID NO: 22194 - DNA, 80 bp, synthetic construct
  source 1..80: mol_type = other DNA
gtatgttccaaagttattccattcagaaaatcaatttcaggtaggttaaagacctccataagaaaagtcaaaccttagat

SEQ ID NO: 22195 - DNA, 80 bp, synthetic construct; identical to SEQ ID NO: 9461
  source 1..80: mol_type = other DNA

SEQ ID NO: 22196 - DNA, 80 bp, synthetic construct
  source 1..80: mol_type = other DNA
gcacatagtaggttggcgaacaatctacaatttacaaataggtcaatacaaatagtgctaagtatttggagaaatgagaa

SEQ ID NO: 22197 - DNA, 80 bp, synthetic construct
  source 1..80: mol_type = other DNA
tgaaaaactagaaacaacccaatgctcataaataagatgctagatatacataattatgttgtagtcatacaatagaattc

SEQ ID NO: 22198 - DNA, 80 bp, synthetic construct
  source 1..80: mol_type = other DNA
ctggagtgcagttgcacgatcttggctcactgcaacctctgccttctgggttcaagcgattctcctccctcagcctcctg

SEQ ID NO: 22199 - DNA, 80 bp, synthetic construct; identical to SEQ ID NO: 9462
  source 1..80: mol_type = other DNA

SEQ ID NO: 22200 - DNA, 80 bp, synthetic construct
  source 1..80: mol_type = other DNA
ctagttttctctatgtttgaaatattccaaactaaaatttaaaactgaagtgtgatacatgcatgcagatggttaatatt

SEQ ID NO: 22201 - DNA, 80 bp, synthetic construct
  source 1..80: mol_type = other DNA
aaagagaaagatgtggcaatgtgctgtaaatagaatgctgacaaaactatgaatttttcaaaaaacgtaatactataagt

SEQ ID NO: 22202 - DNA, 80 bp, synthetic construct
  source 1..80: mol_type = other DNA
tgaatcctcagactctcagactagacaaccgaactgtgagttgaaactgcaggatatagaagttttgcattaattaaatg

SEQ ID NO: 22203 - DNA, 80 bp, synthetic construct; identical to SEQ ID NO: 9463
  source 1..80: mol_type = other DNA

SEQ ID NO: 22204 - DNA, 80 bp, synthetic construct
  source 1..80: mol_type = other DNA
tcataaatattcaagcttcctcctaccctccttacacataaaaatggggtatgcatctgaaaattgctttgcaataacct

SEQ ID NO: 22205 - DNA, 80 bp, synthetic construct
  source 1..80: mol_type = other DNA
taaaagacttcagctggcagagcaacacaagcaactgagcatcaaggatacaagcagctgagtggcgagcagagaagcaa

SEQ ID NO: 22206 - DNA, 80 bp, synthetic construct
  source 1..80: mol_type = other DNA
ttcctttccactgaaagccacccaccgctcaataaagtcttctgcattaatcacctttcagtttgtgtgacctgattctt

SEQ ID NO: 22207 - DNA, 80 bp, synthetic construct; identical to SEQ ID NO: 9464
  source 1..80: mol_type = other DNA

SEQ ID NO: 22208 - DNA, 80 bp, synthetic construct
  source 1..80: mol_type = other DNA
tttgtatagctctaccaatttacctctttgcacagaaggtcacttttctagagtcttcattccttgactcctccatgcca

SEQ ID NO: 22209 - DNA, 80 bp, synthetic construct
  source 1..80: mol_type = other DNA
aaggcttttgccatctgaatcggtgaaaacagggtagtttagaaatccagcagattaggaagagagtttaacacatttga

SEQ ID NO: 22210 - DNA, 80 bp, synthetic construct; identical to SEQ ID NO: 9465
  source 1..80: mol_type = other DNA

SEQ ID NO: 22211 - DNA, 80 bp, synthetic construct
  source 1..80: mol_type = other DNA
gccatttacttggtgatgatgagagctggttgttgaaaggagcttgcaagagaggggattaagacggtggataggaggca

SEQ ID NO: 22212 - DNA, 80 bp, synthetic construct
  source 1..80: mol_type = other DNA
ttgcaaaaatgaccatactgccaaaagcaatctacagattcaatacaatccctatcaaaatatcaatatcattcctcaca

SEQ ID NO: 22213 - DNA, 80 bp, synthetic construct; identical to SEQ ID NO: 9466
  source 1..80: mol_type = other DNA

SEQ ID NO: 22214 - DNA, 80 bp, synthetic construct
  source 1..80: mol_type = other DNA
taatgattctagaagatgaggttggaaaaaaaaccttctggacattggcttaggcaaagacttcatgaccaagaacccaa

SEQ ID NO: 22215 - DNA, 80 bp, synthetic construct
  source 1..80: mol_type = other DNA
tacaaagaactcaaaccaatcagcaagaaaaaacaaacaatcccatcaaaaagtgggctaaaaaacatgaatagacaatt

SEQ ID NO: 22216 - DNA, 80 bp, synthetic construct; identical to SEQ ID NO: 9467
  source 1..80: mol_type = other DNA

SEQ ID NO: 22217 - DNA, 80 bp, synthetic construct
  source 1..80: mol_type = other DNA
agaaaatgtgatacacagacagacaccacacacaaacacacacacacacacacacacacacacaccatggaatactactc

SEQ ID NO: 22218 - DNA, 80 bp, synthetic construct
  source 1..80: mol_type = other DNA
attggactttggggactcagggggaaaagttgggggtggcgagggataacagactacatgttgggtacagtgtacgctgc

SEQ ID NO: 22219 - DNA, 80 bp, synthetic construct
  source 1..80: mol_type = other DNA
cttgccacctcctccttgctctctcttgctctctctcgtcatgtgatgcaccagcttccctttcaccttcagccatgatt

SEQ ID NO: 22220 - DNA, 80 bp, synthetic construct
  source 1..80: mol_type = other DNA
agcaatattcttagtttacataatggaatcaagtacatgaaaactattatttgaagcaggtataatattagcctttggct

SEQ ID NO: 22221 - DNA, 80 bp, synthetic construct; identical to SEQ ID NO: 9468
  source 1..80: mol_type = other DNA

SEQ ID NO: 22222 - DNA, 80 bp, synthetic construct
  source 1..80: mol_type = other DNA
ccattatcctgacctccaatgcccatagtttagcttgttttttaattgtatataaagggaagtaaacaacacatgctgtt

SEQ ID NO: 22223 - DNA, 80 bp, synthetic construct
  source 1..80: mol_type = other DNA
gtaatcacttagtttctagtttggttctgttatgaatagtgctgcttgggcattcttgtgcacattttttggtgaacatt

SEQ ID NO: 22224 - DNA, 80 bp, synthetic construct
  source 1..80: mol_type = other DNA
actcctaccagtgccataaaagagctctctggttgttccacaccttcttcaacatgtgatattttctgtctttcccattt

SEQ ID NO: 22225 - DNA, 80 bp, synthetic construct; identical to SEQ ID NO: 9469
  source 1..80: mol_type = other DNA

SEQ ID NO: 22226 - DNA, 80 bp, synthetic construct
  source 1..80: mol_type = other DNA
gtagtgacttatgtttatcttgtggcatgccacttttatgttttccagaatcctatttttcattgccatgattggactga

SEQ ID NO: 22227 - DNA, 80 bp, synthetic construct
  source 1..80: mol_type = other DNA
atttttcattgcctttgtgtttcttttgctctgttttactctgtatcttttcgaatgagtaccattctgctttttatcta

SEQ ID NO: 22228 - DNA, 80 bp, synthetic construct
  source 1..80: mol_type = other DNA
ataatcctatgaattctacagaaggaattcacatgtaatgatcctttaataactagtgcccgagaaaaataaacttattc

SEQ ID NO: 22229 - DNA, 80 bp, synthetic construct; identical to SEQ ID NO: 9470
  source 1..80: mol_type = other DNA

SEQ ID NO: 22230 - DNA, 80 bp, synthetic construct
  source 1..80: mol_type = other DNA
tgtttacctattcctgtgctaaaattatacacttacctttgattacagttactccatagttattttagtatctggaagtc

SEQ ID NO: 22231 - DNA, 80 bp, synthetic construct
  source 1..80: mol_type = other DNA
agaagtagtgacatttctataatagtagtatcattaggaatattttatgtacttcatttggattttataaattaactttt

SEQ ID NO: 22232 - DNA, 80 bp, synthetic construct; identical to SEQ ID NO: 9471
  source 1..80: mol_type = other DNA

SEQ ID NO: 22233 - DNA, 80 bp, synthetic construct
  source 1..80: mol_type = other DNA
gatggagatatggcaggttctggagctattatttgaactcctagaataagccatatttgaaaccattaccagttatcctt

SEQ ID NO: 22234 - DNA, 80 bp, synthetic construct
  source 1..80: mol_type = other DNA
acaaaaaaaaaaaaaattagctgggtgtggcggtatgtgcctataataccagctactcaggaggctgaggcaggagaatc

SEQ ID NO: 22235 - DNA, 80 bp, synthetic construct
  source 1..80: mol_type = other DNA
tttgaatttggcttccccagataattcttatgctagtaatcttcagaaaaaataccaggatcaatacactctattactat

SEQ ID NO: 22236 - DNA, 80 bp, synthetic construct
  source 1..80: mol_type = other DNA
caaaactataaaaatgaaatgaagtaattgtgtgaaaggaagatgaagaacatttattctattgcttgcgaaatataaat

SEQ ID NO: 22237 - DNA, 80 bp, synthetic construct; identical to SEQ ID NO: 9472
  source 1..80: mol_type = other DNA

SEQ ID NO: 22238 - DNA, 80 bp, synthetic construct
  source 1..80: mol_type = other DNA
tgattgggactcaaataacagtagtactgaccatgtatcactcagtgtgccataacataaattctgcatcattggtcaat

SEQ ID NO: 22239 - DNA, 80 bp, synthetic construct
  source 1..80: mol_type = other DNA
catcactggaaaaaaacagacaaaagttcttgctctcatggaacttagattctgacaaagaaagatatcaaataaacctt

SEQ ID NO: 22240 - DNA, 80 bp, synthetic construct; identical to SEQ ID NO: 9473
  source 1..80: mol_type = other DNA

SEQ ID NO: 22241 - DNA, 80 bp, synthetic construct
  source 1..80: mol_type = other DNA
cattcagtttagtttgctggcatggatcaggatttagaaaagagaatgaacctggagggacaatttgaagatattcagaa

SEQ ID NO: 22242 - DNA, 80 bp, synthetic construct
  source 1..80: mol_type = other DNA
aatttaagatggcaacttgacagtagatgtaagccaaaaaatgtataagtcaggtgtatccaggagatgttgggactgaa

SEQ ID NO: 22243 - DNA, 80 bp, synthetic construct
  source 1..80: mol_type = other DNA
taaatacttggaatcagatgaagtcacctacacaaggagtactggtggagaagagtttatgaaaataaagagaaatcagc

SEQ ID NO: 22244 - DNA, 80 bp, synthetic construct; identical to SEQ ID NO: 9474
  source 1..80: mol_type = other DNA

SEQ ID NO: 22245 - DNA, 80 bp, synthetic construct
  source 1..80: mol_type = other DNA
gtgctctagataaattagcgctgtttgacttttcctttgaatcagttataacatctccgtggctccctcatattatgtaa

SEQ ID NO: 22246 - DNA, 80 bp, synthetic construct
  source 1..80: mol_type = other DNA
cagaggtacttgacagaaaatggaaaatggggtcaaaatggttgatttgatattcagaaaaaccttttttggtaaagcac

SEQ ID NO: 22247 - DNA, 80 bp, synthetic construct
  source 1..80: mol_type = other DNA
tgaggctaggagtttgagatcagcctggccaacatggcaaaaccctgtctctactaaaaatacaattattagccaggtgt

SEQ ID NO: 22248 - DNA, 80 bp, synthetic construct; identical to SEQ ID NO: 9475
  source 1..80: mol_type = other DNA

SEQ ID NO: 22249 - DNA, 80 bp, synthetic construct
  source 1..80: mol_type = other DNA
aacttagctctagataagctagaataaaagaacaattatctgctgagaatttctaaccacaaggtggcacacaccttgtt

SEQ ID NO: 22250 - DNA, 80 bp, synthetic construct
  source 1..80: mol_type = other DNA
ctctctcttgattcacatcataaaaacccaaacattattcttttgttgccatgcacacttgcaggtacaaggatgttaaa

SEQ ID NO: 22251 - DNA, 80 bp, synthetic construct
  source 1..80: mol_type = other DNA
tttctttgggacaaaaatgttatttgcctttgttggcagggacagttagttacatttttaggggaaaatctcagaatgag

SEQ ID NO: 22252 - DNA, 80 bp, synthetic construct; identical to SEQ ID NO: 9476
  source 1..80: mol_type = other DNA

SEQ ID NO: 22253 - DNA, 80 bp, synthetic construct
  source 1..80: mol_type = other DNA
ccaaaactccgctcacctcctgcaatgctgtgaaggagaaagctgtaggttccctgggagtctgcagatctctcttccca

SEQ ID NO: 22254 - DNA, 80 bp, synthetic construct; identical to SEQ ID NO: 9477
  source 1..80: mol_type = other DNA

SEQ ID NO: 22255 - DNA, 80 bp, synthetic construct
  source 1..80: mol_type = other DNA
caaccacatctgggccttgtatttatcactcatttttatgatattttcttctttcgaaagaataggatgaacccatgctc

SEQ ID NO: 22256 - DNA, 80 bp, synthetic construct
  source 1..80: mol_type = other DNA
gcgaccgagctcagggcccaggctggttcatgctattcttgcttttcagaatggtatcctcgtaatgaccagctccaggg

SEQ ID NO: 22257 - DNA, 80 bp, synthetic construct
  source 1..80: mol_type = other DNA
cgttaggtgggacagtacagcttccctccagccccaggttacccctgtcgtgtggctccttctttgctataggattattc

SEQ ID NO: 22258 - DNA, 80 bp, synthetic construct
  source 1..80: mol_type = other DNA
atattcacgtgtcccccttccacggccggccctctagggactcgaacagagatctctgcagctgtgggtttctttgcagc

SEQ ID NO: 22259 - DNA, 80 bp, synthetic construct; identical to SEQ ID NO: 9478
  source 1..80: mol_type = other DNA

SEQ ID NO: 22260 - DNA, 80 bp, synthetic construct
  source 1..80: mol_type = other DNA
gaagtgtgtatgggtgcctgggacagagtggagcaggaaaagctttgcagaggaggagacctttggccagtttttaaaga

SEQ ID NO: 22261 - DNA, 80 bp, synthetic construct
  source 1..80: mol_type = other DNA
atgttggcctacagggtttattttttgatctcttcccagctgctttccatttccatttgggtactttacacttgattgta

SEQ ID NO: 22262 - DNA, 80 bp, synthetic construct
  source 1..80: mol_type = other DNA
ctcagcctcctgagtagctgggattacaggcatgcaccccacccccccacccccccacccccgctaatttttgtgttttt

SEQ ID NO: 22263 - DNA, 80 bp, synthetic construct; identical to SEQ ID NO: 9479
  source 1..80: mol_type = other DNA

SEQ ID NO: 22264 - DNA, 80 bp, synthetic construct
  source 1..80: mol_type = other DNA
aacattctttagttccctctgtgttttagtaatttctatagtgaatcaatcattttaaatatgcttgtgtaaaactgcct

SEQ ID NO: 22265 - DNA, 80 bp, synthetic construct
  source 1..80: mol_type = other DNA
aaaaatgccagttcactcacgtgagctgaaaggaataagaggatggagtagtgaggctggaaaatgactacagtttgaaa

SEQ ID NO: 22266 - DNA, 80 bp, synthetic construct
  source 1..80: mol_type = other DNA
atcagcctgccaaaatggtgaaacaccatctctactaaaattacaaaaaaaattagctggatatggtggcacatgcctgt

SEQ ID NO: 22267 - DNA, 80 bp, synthetic construct; identical to SEQ ID NO: 9480
  source 1..80: mol_type = other DNA

SEQ ID NO: 22268 - DNA, 80 bp, synthetic construct
  source 1..80: mol_type = other DNA
tgatctccaccctcttggtgagggaggaagcatagctgtcggctgaaaatgagggagagaagcaaaaatttcgagtcgtt

SEQ ID NO: 22269 - DNA, 80 bp, synthetic construct
  source 1..80: mol_type = other DNA
gattgctagaagaatgtttgacttggacagactcttcaggccttaactcctcatctataaggtagggatattttacattc

SEQ ID NO: 22270 - DNA, 80 bp, synthetic construct
  source 1..80: mol_type = other DNA
tgcaattaattacttcacatgttgttatttctccagccaggctctaaactatttgagagcagatgtgttccatacgtctg

SEQ ID NO: 22271 - DNA, 80 bp, synthetic construct
  source 1..80: mol_type = other DNA
caccagtcatttcattttagagaaaattaattttcactattttgatcataaatcttgtactctgactggcttgacctatt

SEQ ID NO: 22272 - DNA, 80 bp, synthetic construct; identical to SEQ ID NO: 9481
  source 1..80: mol_type = other DNA

SEQ ID NO: 22273 - DNA, 80 bp, synthetic construct
  source 1..80: mol_type = other DNA
cctgatgtttatgttaaccacggctgctgtcactccattcctgagttaaagccactttggggacagaatattccaattat

SEQ ID NO: 22274 - DNA, 80 bp, synthetic construct
  source 1..80: mol_type = other DNA
taggcctggtgagtccacagcctgtagccagacaatggatactttttctgggatggcatccttgcttttgagggcctggg

SEQ ID NO: 22275 - DNA, 80 bp, synthetic construct; identical to SEQ ID NO: 9482
  source 1..80: mol_type = other DNA

SEQ ID NO: 22276 - DNA, 80 bp, synthetic construct
  source 1..80: mol_type = other DNA
cacacacacaggcacacagacatacaatttcaacctttttttcccccattatacccttttccataacatagaactcttaa

SEQ ID NO: 22277 - DNA, 80 bp, synthetic construct
  source 1..80: mol_type = other DNA
cattatatcataaacattttccatgccagtccatttcataaataacatttggaatggctaatggctgtaaaacattccat

SEQ ID NO: 22278 - DNA, 80 bp, synthetic construct
  source 1..80: mol_type = other DNA
tctcttacagttctctgagcttcagtttcatctatcagatgcccactcatcaacttcactggcctattttaataggcaac

SEQ ID NO: 22279 - DNA, 80 bp, synthetic construct
  source 1..80: mol_type = other DNA
ttgattccattctcccacacccctccacttcccatccaacagtcagcagtcctataactttcaagatagatcttgaatcc

SEQ ID NO: 22280 - DNA, 80 bp, synthetic construct; identical to SEQ ID NO: 9483
  source 1..80: mol_type = other DNA

SEQ ID NO: 22281 - DNA, 80 bp, synthetic construct
  source 1..80: mol_type = other DNA
atggttggatgttttcccaagtgtttattaattcatttcacttttttttcctatgaattgcccatttttatctgctggga

SEQ ID NO: 22282 - DNA, 80 bp, synthetic construct
  source 1..80: mol_type = other DNA
tgccatcttggctcactgcaacctccaccttccaggttcaagtgattcgcctgcctcagcctcccaagtagctgggatta

SEQ ID NO: 22283 - DNA, 80 bp, synthetic construct
  source 1..80: mol_type = other DNA
ttagttgctttctaatgctactttttagcataccaaagaaagatttttatttttagatagtcaaacctatttttttaatg

SEQ ID NO: 22284 - DNA, 80 bp, synthetic construct; identical to SEQ ID NO: 9484
  source 1..80: mol_type = other DNA

SEQ ID NO: 22285 - DNA, 80 bp, synthetic construct
  source 1..80: mol_type = other DNA
tgagatgaattcttcgtgttctaaaagaatcacctttgatattttgattaaaactttaaaccactacctaatgatcagct

SEQ ID NO: 22286 - DNA, 80 bp, synthetic construct
  source 1..80: mol_type = other DNA
tcatcatctgtgtgaaatttcaaagactcttgtgagaaggattgggcaaagatattttccctatttttcaggtgagaagg

SEQ ID NO: 22287 - DNA, 80 bp, synthetic construct
  source 1..80: mol_type = other DNA
ttcctttctgtttggtgatcttacttcccttcaaggcaaaactaactaggcaaaatcaaatgaacaagaaactggcagta

SEQ ID NO: 22288 - DNA, 80 bp, synthetic construct
  source 1..80: mol_type = other DNA
ttgaataagtaggattttcatatttgcaaacaataccagatacctagttaaatttgagttccagataagcaacacatagt

SEQ ID NO: 22289 - DNA, 80 bp, synthetic construct; identical to SEQ ID NO: 9485
  source 1..80: mol_type = other DNA

SEQ ID NO: 22290 - DNA, 80 bp, synthetic construct
  source 1..80: mol_type = other DNA
tcttttggtattaaacttgctctgcctggaatgattgatagaaataatagcaaacattattgctgattaaactgttaaac

SEQ ID NO: 22291 - DNA, 80 bp, synthetic construct
  source 1..80: mol_type = other DNA
gaggttatgctcttaggaaaaatgggagccaaaaattaatatctttaaatgtccatccagtggattccaagatctcatac

SEQ ID NO: 22292 - DNA, 80 bp, synthetic construct; identical to SEQ ID NO: 9486
  source 1..80: mol_type = other DNA

SEQ ID NO: 22293 - DNA, 80 bp, synthetic construct
  source 1..80: mol_type = other DNA
ccgtctctactaaaaatacaaaaattagctgggtgtggtagcacgcgtctgtaatcccagctacttgggaggctgaagtg

SEQ ID NO: 22294 - DNA, 80 bp, synthetic construct
  source 1..80: mol_type = other DNA
ctcctgtttctctcagctagcaatgtgcaggattttcttaactggtttctttcttcacttacccacctctagtgtaaatt

SEQ ID NO: 22295 - DNA, 80 bp, synthetic construct
  source 1..80: mol_type = other DNA
ccgtctgtgttctgacccatcccttccacccctattggccctgggctcccttagctccgaccatcaggacttgatttcat

SEQ ID NO: 22296 - DNA, 80 bp, synthetic construct
  source 1..80: mol_type = other DNA
aaaaaaaccccagctcctcctctttctgcctgattgtcttagagcacttcctaatccttgcagctatataatttgtttaa

SEQ ID NO: 22297 - DNA, 80 bp, synthetic construct; identical to SEQ ID NO: 9487
  source 1..80: mol_type = other DNA

SEQ ID NO: 22298 - DNA, 80 bp, synthetic construct
  source 1..80: mol_type = other DNA
gcggaatagttttccatgatgtaagtaaaccacagttaatttttccatctcctagttgaggggtagttgggttgggtttt

SEQ ID NO: 22299 - DNA, 80 bp, synthetic construct
  source 1..80: mol_type = other DNA
taattgcttaagttattctctgtctctggatcccctgggttgctggtgctctaacttccctgcatatcagaatcatctga

SEQ ID NO: 22300 - DNA, 80 bp, synthetic construct; identical to SEQ ID NO: 9488
  source 1..80: mol_type = other DNA

SEQ ID NO: 22301 - DNA, 80 bp, synthetic construct
  source 1..80: mol_type = other DNA
ttactattaatttttaaattttctttgtggaagtttgcaggatctttatcaccattggcctgaggatgtgcctttttttt

SEQ ID NO: 22302 - DNA, 80 bp, synthetic construct
  source 1..80: mol_type = other DNA
tttttgtatttttagtagagacgggtttcaccatcttggccaggctggtctcgaactcctgacctcatgatccacctgcc

SEQ ID NO: 22303 - DNA, 80 bp, synthetic construct
  source 1..80: mol_type = other DNA
ctcttcatttcctctgttccttctctctgggactcctattttgtcagctaaattggaccttttggtctaccccttaattt

SEQ ID NO: 22304 - DNA, 80 bp, synthetic construct; identical to SEQ ID NO: 9489
  source 1..80: mol_type = other DNA

SEQ ID NO: 22305 - DNA, 80 bp, synthetic construct
  source 1..80: mol_type = other DNA
ttacatttaattgtcttgtttctttgggcttctcttgactatgacaacacctccgactttcctcgttttttatgaccttg

SEQ ID NO: 22306 - DNA, 80 bp, synthetic construct
  source 1..80: mol_type = other DNA
gacccagccctgttgttattactattattatttgagatggagtttcgctcttgtcacccaggctggagtgcagttgcaca

SEQ ID NO: 22307 - DNA, 80 bp, synthetic construct
  source 1..80: mol_type = other DNA
tctgacctcaggtgatccgcccaccttggcctcccaaagagctgggattacaggcatgagctactgtgcttggcccctag

SEQ ID NO: 22308 - DNA, 80 bp, synthetic construct
  source 1..80: mol_type = other DNA
atctccttgaggccacctcttatcacacttggatttccttatcctcctaagagtattgtttaaaataaccttttgtcctc

SEQ ID NO: 22309 - DNA, 80 bp, synthetic construct; identical to SEQ ID NO: 9490
  source 1..80: mol_type = other DNA

SEQ ID NO: 22310 - DNA, 80 bp, synthetic construct
  source 1..80: mol_type = other DNA
tgtgctcacactccctcttcttttgtgtgtgtgaaatctcctggtccttctctcttataaggatacttgcgatggcattt

SEQ ID NO: 22311 - DNA, 80 bp, synthetic construct
  source 1..80: mol_type = other DNA
ccccacttggcagtactgtatctgtaattttctcttcatcggtcctccaaagagaaattctctgatgatctgcccagttg

SEQ ID NO: 22312 - DNA, 80 bp, synthetic construct; identical to SEQ ID NO: 9491
  source 1..80: mol_type = other DNA

SEQ ID NO: 22313 - DNA, 80 bp, synthetic construct
  source 1..80: mol_type = other DNA
ctccccctctcttgcttgcccaggctggagtggagtggcatgatcatagctcactgcagccttgacttcctgggctctag

SEQ ID NO: 22314 - DNA, 80 bp, synthetic construct
  source 1..80: mol_type = other DNA
actcctgggctcgagcagtcctccagcttcagcctcccaaagtattgggattacaggcatgagcaaccgtgcctggccta

SEQ ID NO: 22315 - DNA, 80 bp, synthetic construct
  source 1..80: mol_type = other DNA
tgttcatgacttcccagtttccaaaattttgtcattgttgtgttcttgcagggtttaatgcaactaaaagactcccttta

SEQ ID NO: 22316 - DNA, 80 bp, synthetic construct; identical to SEQ ID NO: 9492
  source 1..80: mol_type = other DNA

SEQ ID NO: 22317 - DNA, 80 bp, synthetic construct
  source 1..80: mol_type = other DNA
ggctgcagggatacctggaggatgatggctgacttaccatgtgtctgttttagaagtgaatattccttccatgaaggcct

SEQ ID NO: 22318 - DNA, 80 bp, synthetic construct
  source 1..80: mol_type = other DNA
ttaaaggtctgaaattaaccatgagtccttggcggttcaggaggagagcaggggcacacagatcatttagttaagaactt

SEQ ID NO: 22319 - DNA, 80 bp, synthetic construct; identical to SEQ ID NO: 9493
  source 1..80: mol_type = other DNA

SEQ ID NO: 22320 - DNA, 80 bp, synthetic construct
  source 1..80: mol_type = other DNA
tcagtaatgtcattaatgcaactcactgctaaaaaccaataaattaactcatctgcctgttaggccaattgcatgtctag

SEQ ID NO: 22321 - DNA, 80 bp, synthetic construct
  source 1..80: mol_type = other DNA
tgctgaggacataaataggtcagtctctctctcccaaggatattgtttagtggaagaaatggatatatatgcattgcaat

SEQ ID NO: 22322 - DNA, 80 bp, synthetic construct
  source 1..80: mol_type = other DNA
attgtacaaagtgcagagtaggtggggaatgaaggactgtaggtaacttagggtggttgaagcctggagctgggagctgt

SEQ ID NO: 22323 - DNA, 80 bp, synthetic construct
  source 1..80: mol_type = other DNA
ggagaggagtgcgacggatagcagtggtagacactccagagacgtctttactacatcttccacatgctgctgccccgtgg

SEQ ID NO: 22324 - DNA, 80 bp, synthetic construct; identical to SEQ ID NO: 9494
  source 1..80: mol_type = other DNA

SEQ ID NO: 22325 - DNA, 80 bp, synthetic construct
  source 1..80: mol_type = other DNA
aatgtagtcttgaaaatgtgacagggaaaaaaaaaataaggctgcgctaagtactgatgggttctgcgctatactccaca

SEQ ID NO: 22326 - DNA, 80 bp, synthetic construct
  source 1..80: mol_type = other DNA
tcaagtatccaagttatcccatgtctcagagcatggccagattacagttggaaccgatggacaacctaattaagaacttg

SEQ ID NO: 22327 - DNA, 80 bp, synthetic construct
  source 1..80: mol_type = other DNA
ctactaaaaatacaaaaaattagccaggcatggtggtgcatgcctgtaatcccagctactcgagaagctgaggcaggaaa

SEQ ID NO: 22328 - DNA, 80 bp, synthetic construct; identical to SEQ ID NO: 9495
  source 1..80: mol_type = other DNA

SEQ ID NO: 22329 - DNA, 80 bp, synthetic construct
  source 1..80: mol_type = other DNA
gaggcagtttctggcagcaatgtctctgggaagaaaggaaatgcatttcctaattttatccctaggaagatgagtgtaca

SEQ ID NO: 22330 - DNA, 80 bp, synthetic construct
  source 1..80: mol_type = other DNA
acttcagtgtgagagaaacagccttaacaattctaggcctcacaactaagagagaaatggaaaaggattaggggaaatga

SEQ ID NO: 22331 - DNA, 80 bp, synthetic construct; identical to SEQ ID NO: 9496
  source 1..80: mol_type = other DNA

SEQ ID NO: 22332 - DNA, 80 bp, synthetic construct
  source 1..80: mol_type = other DNA
gcgatcttggctcactgcaacctctgcctcccgggttcaagcaattctcctatttcagcctcccaagtagctggggttac

SEQ ID NO: 22333 - DNA, 80 bp, synthetic construct
  source 1..80: mol_type = other DNA
tcttttgtccatgattttatctaaagcccttgctaagctacatggctgaagaatcgcttcttccaggtgataaagttgtc

SEQ ID NO: 22334 - DNA, 80 bp, synthetic construct
  source 1..80: mol_type = other DNA
taataatattaaggtcctgtgcaggaaaaaacaagatgtacttagggagcacagctgctgttttcatgttcaactggttt

SEQ ID NO: 22335 - DNA, 80 bp, synthetic construct
  source 1..80: mol_type = other DNA
cagaaggtttaagttgaattttgaggtggtgtataaaatgcccccataaaaccataaaagcataacacatatgacatcaa

SEQ ID NO: 22336 - DNA, 80 bp, synthetic construct; identical to SEQ ID NO: 9497
  source 1..80: mol_type = other DNA

SEQ ID NO: 22337 - DNA, 80 bp, synthetic construct
  source 1..80: mol_type = other DNA
ggtatgtaccacagacctcttagctagttagaacatgtaaaagacgttttttccatacagatgaccaaattgccccagaa

SEQ ID NO: 22338 - DNA, 80 bp, synthetic construct
  source 1..80: mol_type = other DNA
agtgacaggagtcttgagggaatgtaatcctgttaacatcatagcaacagagcattgggtatcatcaaaatgtcttgtgg

SEQ ID NO: 22339 - DNA, 80 bp, synthetic construct
  source 1..80: mol_type = other DNA
tgacgcgggttgctctcataggagtctagacttaaagcacatggacaaagatggaaagatgactctaaccaaggacgact

SEQ ID NO: 22340 - DNA, 80 bp, synthetic construct; identical to SEQ ID NO: 9498
  source 1..80: mol_type = other DNA

SEQ ID NO: 22341 - DNA, 80 bp, synthetic construct
  source 1..80: mol_type = other DNA
gcaagtgtacttcctgacctctcatttccccatttttattagggagaaagcataacttgttatatatttgcatgattttc

SEQ ID NO: 22342 - DNA, 80 bp, synthetic construct
  source 1..80: mol_type = other DNA
ccccaccatgcctggctaattttgtatttttagtagacatggggttgctccatgttggtcaggctggtctcgaactccca

SEQ ID NO: 22343 - DNA, 80 bp, synthetic construct; identical to SEQ ID NO: 9499
  source 1..80: mol_type = other DNA

SEQ ID NO: 22344 - DNA, 80 bp, synthetic construct
  source 1..80: mol_type = other DNA
agcaatgaaaatcatctttatgcttcatttcagagtattttagaaaaaattaatgtatccaacaaacattgtgtctatgc

SEQ ID NO: 22345 - DNA, 80 bp, synthetic construct
  source 1..80: mol_type = other DNA
tcacaggaggttaagaataacttataggtctccagccctggcgaggatattttatgacacttgttttatgtaaggggcaa

SEQ ID NO: 22346 - DNA, 80 bp, synthetic construct
  source 1..80: mol_type = other DNA
tctctcacaaaaaaacaataaaacaaagctgaatcatcctacatccaaatggctctggagggagacctagtattctgctc

SEQ ID NO: 22347 - DNA, 80 bp, synthetic construct; identical to SEQ ID NO: 9500
  source 1..80: mol_type = other DNA

SEQ ID NO: 22348 - DNA, 80 bp, synthetic construct
  source 1..80: mol_type = other DNA
agaccgtgaacatgcagctacaccaggggcctcggccctggctgcacattagaaatcacctggaggcatttgaaagaatt

SEQ ID NO: 22349 - DNA, 80 bp, synthetic construct
  source 1..80: mol_type = other DNA
agctaggttggagcaggtgttctttcccttttaatttattgtgcacattctctcaccccaatcttcataagcatttgaat

SEQ ID NO: 22350 - DNA, 80 bp, synthetic construct
  source 1..80: mol_type = other DNA
gctaaaattgattgaaaaagaaaagcttttgggaaatgctgggcaattatgagctatctcaagcttttccgcatgaggtc

SEQ ID NO: 22351 - DNA, 80 bp, synthetic construct
  source 1..80: mol_type = other DNA
tctcttttaattcctaaatccctgacgtgtgcggcagctcagcttcatgcagtgtccgagtcactgtgttgttccatgtt

SEQ ID NO: 22352 - DNA, 80 bp, synthetic construct; identical to SEQ ID NO: 9501
  source 1..80: mol_type = other DNA

SEQ ID NO: 22353 - DNA, 80 bp, synthetic construct
  source 1..80: mol_type = other DNA
tcctgaggtgcccacagggaagtcacccagccaggcggcagcggtggaaccaggtggggtctgggtgcaggcttagcctg

SEQ ID NO: 22354 - DNA, 80 bp, synthetic construct
  source 1..80: mol_type = other DNA
gccccagagcacatacatgatctgctgtgtggtaggtagggaagagaaggtgatctccatattaacgatgagaaggctga

SEQ ID NO: 22355 - DNA, 80 bp, synthetic construct; identical to SEQ ID NO: 9502
  source 1..80: mol_type = other DNA

SEQ ID NO: 22356 - DNA, 80 bp, synthetic construct
  source 1..80: mol_type = other DNA
gcctctcagagccagtttcatctgtgacagtggcgtgggactgtcggtctccctgggttgtcaggagcacccacgccagc

SEQ ID NO: 22357 - DNA, 80 bp, synthetic construct
  source 1..80: mol_type = other DNA
tcattcccatcaagcagcactcatgcctgcatcatccctcctgcggcaaagagttggaatcaggattttatccccatctg

SEQ ID NO: 22358 - DNA, 80 bp, synthetic construct
  source 1..80: mol_type = other DNA
tggccctagctgtgctagggccttgaggaagattttcttcctaccagtctctttgtgtcttagcatccatcactcaggat

SEQ ID NO: 22359 - DNA, 80 bp, synthetic construct
  source 1..80: mol_type = other DNA
gtcagcaagcgtgggttatggggggtgtctggtgtgtacgtgtctgtggtgtgcgtgtgtattgtgtatatgtgcgtatg

SEQ ID NO: 22360 - DNA, 80 bp, synthetic construct; identical to SEQ ID NO: 9503
  source 1..80: mol_type = other DNA

SEQ ID NO: 22361 - DNA, 80 bp, synthetic construct
  source 1..80: mol_type = other DNA
gtgttgtatgtgtatgtgtagtgtatgtaagtggtatatgtctatgtggtgtgtctgtggggggggggcgtgtgtggtgt

SEQ ID NO: 22362 - DNA, 80 bp, synthetic construct
  source 1..80: mol_type = other DNA
gtgtgatgtgtgtatatatgcatgtggtgtgtgttttttgtgtgtagcatgtgttgtgcgtgtgtggtgtgtgtctggga

SEQ ID NO: 22363 - DNA, 80 bp, synthetic construct; identical to SEQ ID NO: 9504
  source 1..80: mol_type = other DNA

SEQ ID NO: 22364 - DNA, 80 bp, synthetic construct
  source 1..80: mol_type = other DNA
caggagtatcagggtgattccaacaagcgaatcaggtggaattcaggcctctgaagtccaagtttcagaatctggaggca

SEQ ID NO: 22365 - DNA, 80 bp, synthetic construct
  source 1..80: mol_type = other DNA
atcacattcctttctcacagtccactgaatcctcatcttacaaagttggattttgtggccccgagaatccatgcaggaag

SEQ ID NO: 22366 - DNA, 80 bp, synthetic construct
  source 1..80: mol_type = other DNA
ctgcctgggtgtgcctggttggcaacgagagccacacagaggaaaagcggggccaagggttgaaagagcagattgggtga

SEQ ID NO: 22367 - DNA, 80 bp, synthetic construct; identical to SEQ ID NO: 9505
  source 1..80: mol_type = other DNA

SEQ ID NO: 22368 - DNA, 80 bp, synthetic construct
  source 1..80: mol_type = other DNA
gcatgcatacaactttctctccttaagcctcaggaaggtccagtgggagaaccagggctgtgcctcttcccaaagtgtga

SEQ ID NO: 22369 - DNA, 80 bp, synthetic construct
  source 1..80: mol_type = other DNA
acctcatcttgatagtttacagcttcccagaggggaccactggataagcagtaagttggagagggcactgaatcaagagt

SEQ ID NO: 22370 - DNA, 80 bp, synthetic construct
  source 1..80: mol_type = other DNA
tttctcatccatagaattggggagagacctgcattgtctgttcatagggtggtgttgagaaatgtgaaaggtctgaggag

SEQ ID NO: 22371 - DNA, 80 bp, synthetic construct; identical to SEQ ID NO: 9506
  source 1..80: mol_type = other DNA

SEQ ID NO: 22372 - DNA, 80 bp, synthetic construct
  source 1..80: mol_type = other DNA
gagcgggagggtggccgctgcttttactgtgcaagtcttccttgtgatccccatagtacagtggttcgttgaggaagcct

SEQ ID NO: 22373 - DNA, 80 bp, synthetic construct
  source 1..80: mol_type = other DNA
tttagaaccacctttgagatgttctagtccaatcctcagatctcacctgtgaggatacccaggttaaaggtttaagactg

SEQ ID NO: 22374 - DNA, 80 bp, synthetic construct
  source 1..80: mol_type = other DNA
taaatatacggttggaatgtccaggtattattatccctacttgagacgtgaggactgtgggctctgaatgagtagctgca

SEQ ID NO: 22375 - DNA, 80 bp, synthetic construct
  source 1..80: mol_type = other DNA
tcttacgttgaattgtaatccctagtgttggaggaggggcctggtgggaggtgattggaccatgggtggatttccccctt

SEQ ID NO: 22376 - DNA, 80 bp, synthetic construct; identical to SEQ ID NO: 9507
  source 1..80: mol_type = other DNA

SEQ ID NO: 22377 - DNA, 80 bp, synthetic construct
  source 1..80: mol_type = other DNA
gaacttgctacccaggctgcccactcttgctccttccatccttgctcctgtccttggcacaacaactgcagcaaagactg

SEQ ID NO: 22378 - DNA, 80 bp, synthetic construct
  source 1..80: mol_type = other DNA
tgtaaccaaaattaactgagctgagtctgggcaaatcttaaactgggaggaacaggatacaaagttacattttcagcagc

SEQ ID NO: 22379 - DNA, 80 bp, synthetic construct
  source 1..80: mol_type = other DNA
acttgggtgaggaagtgtctcagggggcaggagagtgtctttctcagatactggtgcgtggactgggtgctagaattcat

SEQ ID NO: 22380 - DNA, 80 bp, synthetic construct; identical to SEQ ID NO: 9508
  source 1..80: mol_type = other DNA

SEQ ID NO: 22381 - DNA, 80 bp, synthetic construct
  source 1..80: mol_type = other DNA
aataatggttagttaccaccaagtagtgagatttgagtgatatgggtcttcttcaatataatctcatacttgccaagttt

SEQ ID NO: 22382 - DNA, 80 bp, synthetic construct
  source 1..80: mol_type = other DNA
gacgttcagagtcttcccagtgtgacagggggccatgagcccccacctgatcttgaggtcaaatatctgccccctccttg

SEQ ID NO: 22383 - DNA, 80 bp, synthetic construct; identical to SEQ ID NO: 9509
  source 1..80: mol_type = other DNA

SEQ ID NO: 22384 - DNA, 80 bp, synthetic construct
  source 1..80: mol_type = other DNA
cctactggagaaaaggggacatgctagggacaacacgatttcccttggagatatcgatctgttagaaacctctccaggtt

SEQ ID NO: 22385 - DNA, 80 bp, synthetic construct
  source 1..80: mol_type = other DNA
tgagaactgcagcctacagagtccgcaagccaagggcaggctcaagagtgagccacttcttaccttcacagccacttgca

SEQ ID NO: 22386 - DNA, 80 bp, synthetic construct
  source 1..80: mol_type = other DNA
ttagtggacaaacacgagaggcgggggtaacatacacactcaggagtaataccctcaacatggctttgctatgcaatctc

SEQ ID NO: 22387 - DNA, 80 bp, synthetic construct
  source 1..80: mol_type = other DNA
catgctccttggggagagacagatcactgtgggtactggctggggagtatttccagtgagtgacagaggaaggcgcagtt

SEQ ID NO: 22388 - DNA, 80 bp, synthetic construct; identical to SEQ ID NO: 9510
  source 1..80: mol_type = other DNA

SEQ ID NO: 22389 - DNA, 80 bp, synthetic construct
  source 1..80: mol_type = other DNA
cttcaggtcactgatggaggaggtcttgccagcaaagcagtagttggggttgtagtcggtcatgatggtcgaggtgcgga

SEQ ID NO: 22390 - DNA, 80 bp, synthetic construct
  source 1..80: mol_type = other DNA
tggatctccatatcctcccctgagctctgaacctttccatcatacttagaaatactaataaaatgattaaagaaggtgtg

SEQ ID NO: 22391 - DNA, 80 bp, synthetic construct; identical to SEQ ID NO: 9511
  source 1..80: mol_type = other DNA

SEQ ID NO: 22392 - DNA, 80 bp, synthetic construct
  source 1..80: mol_type = other DNA
ctaaggggttctggagccaaagtcagtcatcagaggagtcccatgactcccaggaattggcctgccttagtatttctgct

SEQ ID NO: 22393 - DNA, 80 bp, synthetic construct
  source 1..80: mol_type = other DNA
agaagagccacatcatgaaaagatctctgaattggtgtctggggatctgtgctctaattccgcctcttgttacttacaag

SEQ ID NO: 22394 - DNA, 80 bp, synthetic construct
  source 1..80: mol_type = other DNA
atcctaaagagctctaccaatgtgagtgaccattatcactcctacatgtgaggatgttctggaaggcaaactccatggaa

SEQ ID NO: 22395 - DNA, 80 bp, synthetic construct; identical to SEQ ID NO: 9512
  source 1..80: mol_type = other DNA

SEQ ID NO: 22396 - DNA, 80 bp, synthetic construct
  source 1..80: mol_type = other DNA
ctggttgggaccacactgagttctctgtgacctgcaggtcagctcaccttggctcacaggctgaacagaaatatactcag

SEQ ID NO: 22397 - DNA, 80 bp, synthetic construct
  source 1..80: mol_type = other DNA
agctagaagtgacgtctaggggtgggggcgagctttcaccatcgtgatggacactgaaggagctccccaccccctgatca

SEQ ID NO: 22398 - DNA, 80 bp, synthetic construct
  source 1..80: mol_type = other DNA
caccttggcacctgtggcacagcctgagacactattcagtcctgccttcctgcccccttgggagtccctggggctctgtg

SEQ ID NO: 22399 - DNA, 80 bp, synthetic construct
  source 1..80: mol_type = other DNA
ttgagttggtcccaagtcagaaataacctcccccactgagacaaaaactacttgctccttcccatcgctggagaccttgt

SEQ ID NO: 22400 - DNA, 80 bp, synthetic construct; identical to SEQ ID NO: 9513
  source 1..80: mol_type = other DNA

SEQ ID NO: 22401 - DNA, 80 bp, synthetic construct
  source 1..80: mol_type = other DNA
gaccacacggaggtatcgtgcttggtactggacactacatttcaaaagggacatcgatagtggaacacatgcagaagagg

SEQ ID NO: 22402 - DNA, 80 bp, synthetic construct
  source 1..80: mol_type = other DNA
gaatcacctgaggtcaggagtttgagaccagcctggccaaaaggtgaaaccctgtctctactgaaaatatgaaaattagc

SEQ ID NO: 22403 - DNA, 80 bp, synthetic construct; identical to SEQ ID NO: 9514
  source 1..80: mol_type = other DNA

SEQ ID NO: 22404 - DNA, 80 bp, synthetic construct
  source 1..80: mol_type = other DNA
gactccttcaggagccatgacccacctttcacacagtggtcagagcactcgagctgtggcaggtaggggagggacagaaa

SEQ ID NO: 22405 - DNA, 80 bp, synthetic construct
  source 1..80: mol_type = other DNA
gatgaccttgtggctttcagggtccatgtgacattcgtctacctcacagtgactgcagtttagataatgcttaatattca

SEQ ID NO: 22406 - DNA, 80 bp, synthetic construct
  source 1..80: mol_type = other DNA
gtgtagaagagtcttcctgtgcatatagagagtgcagcggaggcagcgggcatgggtgtctatggatgtttgcttttgag

SEQ ID NO: 22407 - DNA, 80 bp, synthetic construct; identical to SEQ ID NO: 9515
  source 1..80: mol_type = other DNA

SEQ ID NO: 22408 - DNA, 80 bp, synthetic construct
  source 1..80: mol_type = other DNA
agtttaacatggggggtgggtgccaaaatcttaacacacacacacgtcagtggggcatgcagctctggccaaagttaggg

SEQ ID NO: 22409 - DNA, 80 bp, synthetic construct
  source 1..80: mol_type = other DNA
ttaatgtgagcaagagtccaaaaagttctagtctttccaggctgggatatgcccatggtgcctctcccaggactggtcag

SEQ ID NO: 22410 - DNA, 80 bp, synthetic construct
  source 1..80: mol_type = other DNA
cacccacccagcttggaaaagaagagcatgtggttaacacaagcatcttacacacagcgtcaatgcaaaacacagacacg

SEQ ID NO: 22411 - DNA, 80 bp, synthetic construct
  source 1..80: mol_type = other DNA
ggggtcaatgggcagctgcttgctgaagggctgggctaagcctgcctgcagttgccctcgggaatagctcccatcagcag

SEQ ID NO: 22412 - DNA, 80 bp, synthetic construct; identical to SEQ ID NO: 9516
  source 1..80: mol_type = other DNA

SEQ ID NO: 22413 - DNA, 80 bp, synthetic construct
  source 1..80: mol_type = other DNA
agggcagggaggtgaggagcctaggactaagcagggagggagtgacaccttgaacacgaatcatctttacctatatatcc

SEQ ID NO: 22414 - DNA, 80 bp, synthetic construct
  source 1..80: mol_type = other DNA
agattttccggcccagagcaaggaagtgttatcattccagccacctccaccacctgcgggaagagatagggaacctgcgt

SEQ ID NO: 22415 - DNA, 80 bp, synthetic construct
  source 1..80: mol_type = other DNA
tcagatccacactaggaaaaccaggaggctgcttgccctaggagacctgtttggccacagctgagtacacccagatgaga

SEQ ID NO: 22416 - DNA, 80 bp, synthetic construct; identical to SEQ ID NO: 9517
  source 1..80: mol_type = other DNA

SEQ ID NO: 22417 - DNA, 80 bp, synthetic construct
  source 1..80: mol_type = other DNA
acagtgagtgtacgaaatgctccacaaactgccaggggtggggagcgtcaggggctcgagaggcagaacacacgcgtgca

SEQ ID NO: 22418 - DNA, 80 bp, synthetic construct
  source 1..80: mol_type = other DNA
gctcttacaaaggaagctatctacagagccgaggttgaatgtagccacaggttgaccacaagaaatctcttctgctaacc

SEQ ID NO: 22419 - DNA, 80 bp, synthetic construct
  source 1..80: mol_type = other DNA
tccctttatataaagtggcatagtatttgcacattctcctataaaaaaatcatctctagattacatataatacccaatac

SEQ ID NO: 22420 - DNA, 80 bp, synthetic construct; identical to SEQ ID NO: 9518
  source 1..80: mol_type = other DNA

SEQ ID NO: 22421 - DNA, 80 bp, synthetic construct
  source 1..80: mol_type = other DNA
gctagaaagaggaagccaggttttgaaaatgaagctgaggtcaggaacaagcttgaatctagaatggggacaagcagagc

SEQ ID NO: 22422 - DNA, 80 bp, synthetic construct
  source 1..80: mol_type = other DNA
aggcgcgttaggggccagaagttggcgctggtgtttgtgcacggctgtgagtaagcgcgtaataaataaatcagaacgag

SEQ ID NO: 22423 - DNA, 80 bp, synthetic construct; identical to SEQ ID NO: 9519
  source 1..80: mol_type = other DNA

SEQ ID NO: 22424 - DNA, 80 bp, synthetic construct
  source 1..80: mol_type = other DNA
tgtaatcccagctactcgggaggctgaggcaggagaatcgcttgaacctgcaagtcagaggtggcatgagccgagaccgt

SEQ ID NO: 22425 - DNA, 80 bp, synthetic construct
  source 1..80: mol_type = other DNA
tatctgcctggaaacctgcaggttgttttgacagcacatgtgcaacagaggcagaggtgcttcagggtttctcgggtgct

SEQ ID NO: 22426 - DNA, 80 bp, synthetic construct
  source 1..80: mol_type = other DNA
tgtgtggaaaagaaaatacaaaaaggaattgcattttctgtctttaggggtggctgactttagaggaatcagggaattga

SEQ ID NO: 22427 - DNA, 80 bp, synthetic construct; identical to SEQ ID NO: 9520
  source 1..80: mol_type = other DNA

SEQ ID NO: 22428 - DNA, 80 bp, synthetic construct
  source 1..80: mol_type = other DNA
gtaccaatattcagagctcctagcatcccaggtgccagtgactaagatgccctcaggcatgcgatggcatcggggcccag

SEQ ID NO: 22429 - DNA, 80 bp, synthetic construct
  source 1..80: mol_type = other DNA
gcaatgatcaggggcaccggcactccatccttcatctgaccaggggagacattcagacattgagaaaccgagctgtgctt

SEQ ID NO: 22430 - DNA, 80 bp, synthetic construct
  source 1..80: mol_type = other DNA
aaccagagaagcaagacctatataccaagagcaaaatatagataccaggaggtgggggttgatcttagaggctgcttcct

SEQ ID NO: 22431 - DNA, 80 bp, synthetic construct
  source 1..80: mol_type = other DNA
ctatgctctctctccctcattcttaggggtctctggctctgacccccaaagattcaaggttaagccctcagcatcacagt

SEQ ID NO: 22432 - DNA, 80 bp, synthetic construct; identical to SEQ ID NO: 9521
  source 1..80: mol_type = other DNA

SEQ ID NO: 22433 - DNA, 80 bp, synthetic construct
  source 1..80: mol_type = other DNA
tgcctcagcctcccaagtagctaggactacaggtgcaagccaccaaaactggctaatttttaaattttttttggtagaga

SEQ ID NO: 22434 - DNA, 80 bp, synthetic construct
  source 1..80: mol_type = other DNA
agggctgtcatgaggctctgacattgcagatgcacaggaacctggtggaaatctggcagcacacaccataccttaaatac

SEQ ID NO: 22435 - DNA, 80 bp, synthetic construct
  source 1..80: mol_type = other DNA
ccagagttctccactttgcagcagacagaacttctatgcttaaaaacaggatctgactctctctcaaaaaacttacagtt

SEQ ID NO: 22436 - DNA, 80 bp, synthetic construct; identical to SEQ ID NO: 9522
  source 1..80: mol_type = other DNA

SEQ ID NO: 22437 - DNA, 80 bp, synthetic construct
  source 1..80: mol_type = other DNA
gatcctgtgggatgaagagatccaagaaagaatgggaaaggtcctatgtggtgagatggggctggagggagcgtaaatta

SEQ ID NO: 22438 - DNA, 80 bp, synthetic construct
  source 1..80: mol_type = other DNA
aaaccagcaagaggccagactcaagttttattcccagttcttctctgggaagatcagttctcccttttggacatctcatt

SEQ ID NO: 22439 - DNA, 80 bp, synthetic construct; identical to SEQ ID NO: 9523
  source 1..80: mol_type = other DNA

SEQ ID NO: 22440 - DNA, 80 bp, synthetic construct
  source 1..80: mol_type = other DNA
gtagaggaggggttttgccatgttggccaggctggtcttgaacgcctgacctcaggtgatccgcctgccttggcctccca

SEQ ID NO: 22441 - DNA, 80 bp, synthetic construct
  source 1..80: mol_type = other DNA
tcggccaccacagctcagacgaattcttcaaacatcagcctgaccttggaggaaagtgacttttctttcacttaatagaa

SEQ ID NO: 22442 - DNA, 80 bp, synthetic construct
  source 1..80: mol_type = other DNA
tcatggaattttggatttaacgatggaaataatttgatatttcttagagtggatctagtgtgggtggaaggctctgaatt

SEQ ID NO: 22443 - DNA, 80 bp, synthetic construct; identical to SEQ ID NO: 9524
  source 1..80: mol_type = other DNA

SEQ ID NO: 22444 - DNA, 80 bp, synthetic construct
  source 1..80: mol_type = other DNA
aacagggtcttgctatgttgcccagactggtctctgactcctggctttaagtagttctcttgcctcagccgcctgagtag

SEQ ID NO: 22445 - DNA, 80 bp, synthetic construct
  source 1..80: mol_type = other DNA
accctgctcagtctgggttcttgacagctctgttggagatttgctgggctatacttggtgaggcaccccgcctccctgga

SEQ ID NO: 22446 - DNA, 80 bp, synthetic construct
  source 1..80: mol_type = other DNA
gattgctgggatggggaggagacagcagtggggcttgaggatgggctttcctgtagttagagccaatttctttaaccaat

SEQ ID NO: 22447 - DNA, 80 bp, synthetic construct
  source 1..80: mol_type = other DNA
tggaccagtagcagcatttggaggagctgccgccctttcctcacatgacttccaggactccccatcctcttgcatcctct

SEQ ID NO: 22448 - DNA, 80 bp, synthetic construct; identical to SEQ ID NO: 9525
  source 1..80: mol_type = other DNA

SEQ ID NO: 22449 - DNA, 80 bp, synthetic construct
  source 1..80: mol_type = other DNA
ctcaggcacaatttttggagtcatccttgactcttttctttctcttaatttctcattcaatctggcagaaaatccttttg

SEQ ID NO: 22450 - DNA, 80 bp, synthetic construct
  source 1..80: mol_type = other DNA
agattcttcacattgcagccagagtgagctttttaacacacataccacattatgtcaccatttgcctcaaaaccctccta

SEQ ID NO: 22451 - DNA, 80 bp, synthetic construct
  source 1..80: mol_type = other DNA
tatttccccctccctctcctcagatgtaagttccttgagagcaaagatctttcttttgttcaccaatatatcccaagttc

SEQ ID NO: 22452 - DNA, 80 bp, synthetic construct; identical to SEQ ID NO: 9526
  source 1..80: mol_type = other DNA

SEQ ID NO: 22453 - DNA, 80 bp, synthetic construct
  source 1..80: mol_type = other DNA
cccgcccctagccacaaagaattacctgctccaaaatgccaataatgccactgttgagaaagcctgatttagactcatgc

SEQ ID NO: 22454 - DNA, 80 bp, synthetic construct
  source 1..80: mol_type = other DNA
gctgcccccatagatgtgcagttgaaccagcaaagctgccacatccggcagtttaattattttttatttattaatctttt

SEQ ID NO: 22455 - DNA, 80 bp, synthetic construct
  source 1..80: mol_type = other DNA
tttagtatatacatggtttcgctgtgttggccaggctggtctcgaacttctgacctcaagtgatcctcccgctttggcct

SEQ ID NO: 22456 - DNA, 80 bp, synthetic construct; identical to SEQ ID NO: 9527
  source 1..80: mol_type = other DNA

SEQ ID NO: 22457 - DNA, 80 bp, synthetic construct
  source 1..80: mol_type = other DNA
caattgaatttttaaaaaagacgcggtcccgtgaaaagacataactgattacagtccaatcaagtgaaagtcccttgcag

SEQ ID NO: 22458 - DNA, 80 bp, synthetic construct
  source 1..80: mol_type = other DNA
tttatgcaaaaggttgcacttgctaagcttactcctgtcgtttcaccttaaccccgaaggagcagaagggaaaaactgaa

SEQ ID NO: 22459 - DNA, 80 bp, synthetic construct
  source 1..80: mol_type = other DNA
gatgttctcaaataagtttctggagaaggagctgggggtcctgggtgctagaacatagctgtctgctttggccccttttc

SEQ ID NO: 22460 - DNA, 80 bp, synthetic construct; identical to SEQ ID NO: 9528
  source 1..80: mol_type = other DNA

SEQ ID NO: 22461 - DNA, 80 bp, synthetic construct
  source 1..80: mol_type = other DNA
gaccgcatcatggtgttcttcccgcctttcccgccagcagctccgtagcccgagatgctgcaatgggacaaagaacgttg

SEQ ID NO: 22462 - DNA, 80 bp, synthetic construct
  source 1..80: mol_type = other DNA
gagggacagggagttgcctcagtcacagaactaagaaggtgaaagactagtaaagggtgcaagagagaaagagaggaaaa

SEQ ID NO: 22463 - DNA, 80 bp, synthetic construct
  source 1..80: mol_type = other DNA
tctccttgtcccagatcaatggactcatgtgaccttagacaagtaacttccctattcctcatctatactatggggataat

SEQ ID NO: 22464 - DNA, 80 bp, synthetic construct; identical to SEQ ID NO: 9529
  source 1..80: mol_type = other DNA

SEQ ID NO: 22465 - DNA, 80 bp, synthetic construct
  source 1..80: mol_type = other DNA
atgtgtgcaaacaaacaacccatcatgatgaaaataaaaacagagtgtggggatgggagatgatttctgctgcctcttag

SEQ ID NO: 22466 - DNA, 80 bp, synthetic construct
  source 1..80: mol_type = other DNA
tgtgtattcagatccaaggtcttttacaaaaaaccaggaagagatgcaaggcagttttgcccatgtgcacatagtagctc

SEQ ID NO: 22467 - DNA, 80 bp, synthetic construct
  source 1..80: mol_type = other DNA
cccattgccctggtgagtgcctgggcattgatgggagtttattgaatgttgggagcggtgtaaggcgttgtgaacctgag

SEQ ID NO: 22468 - DNA, 80 bp, synthetic construct; identical to SEQ ID NO: 9530
  source 1..80: mol_type = other DNA

SEQ ID NO: 22469 - DNA, 80 bp, synthetic construct
  source 1..80: mol_type = other DNA
aaggctgatgttggcttcacatggagcttgcagatgggtagggctctgagacaagcagaaagaggtggtgggaattgggg

SEQ ID NO: 22470 - DNA, 80 bp, synthetic construct
  source 1..80: mol_type = other DNA
ctccaatgtgccaggcacaatgcatgctcacaggcacacggcatcacccaatagccataaacggcaaatgttattaatct

SEQ ID NO: 22471 - DNA, 80 bp, synthetic construct
  source 1..80: mol_type = other DNA
gagaagctatttgcccctcctaattcccagactctcagccaaacactccctcctgatccatgagaaatggacaaggtgat

SEQ ID NO: 22472 - DNA, 80 bp, synthetic construct; identical to SEQ ID NO: 9531
  source 1..80: mol_type = other DNA

SEQ ID NO: 22473 - DNA, 80 bp, synthetic construct
  source 1..80: mol_type = other DNA
tattttagacgttgtttgttcctgactccttttacccttcctaagccttctttgctatttttctcaccccgctcccctca

SEQ ID NO: 22474 - DNA, 80 bp, synthetic construct
  source 1..80: mol_type = other DNA
tccactactgaggaagaaaatgaagacaagaacccctgctctcatgggcatacaaagcgaatttgagaagactgcaaacc

SEQ ID NO: 22475 - DNA, 80 bp, synthetic construct; identical to SEQ ID NO: 9532
  source 1..80: mol_type = other DNA

SEQ ID NO: 22476 - DNA, 80 bp, synthetic construct
  source 1..80: mol_type = other DNA
taggttgagcccggcgaggtgcctccctcccagggaggaccttgcactcgactgaccccaagaagaagcacctccttaaa

SEQ ID NO: 22477 - DNA, 80 bp, synthetic construct
  source 1..80: mol_type = other DNA
ataattaaatgagatgatgcttataagggacctacttcagagcccagagggtagccagtgagtgacaaatggcagctgct

SEQ ID NO: 22478 - DNA, 80 bp, synthetic construct
  source 1..80: mol_type = other DNA
ggcagccttagctcttctgaagacccctgcaccctgtgaatcacgttacacaaactcatgctatgataatagcctcagcc

SEQ ID NO: 22479 - DNA, 80 bp, synthetic construct; identical to SEQ ID NO: 9533
  source 1..80: mol_type = other DNA

SEQ ID NO: 22480 - DNA, 80 bp, synthetic construct
  source 1..80: mol_type = other DNA
ggactgccgctcagaaaaacagaagcaccccattcctttccggcacaccctctggaggagcggcagagtggcatcctgct

SEQ ID NO: 22481 - DNA, 80 bp, synthetic construct
  source 1..80: mol_type = other DNA
gtcagcgggagatttctgatcaggtatatagttgtattatccagataggagtcagggttgaagggcccaattgtggaggc

SEQ ID NO: 22482 - DNA, 80 bp, synthetic construct
  source 1..80: mol_type = other DNA
ctcgctctgcagatggagcctgtggagaggagggaagacaactttctaagtcacatggagcatcggtggtggaggttgaa

SEQ ID NO: 22483 - DNA, 80 bp, synthetic construct; identical to SEQ ID NO: 9534
  source 1..80: mol_type = other DNA

SEQ ID NO: 22484 - DNA, 80 bp, synthetic construct
  source 1..80: mol_type = other DNA
ggggctccatggctcagtgccctgcacacagttggagcggtatggctcagtgccctgcacacagcaaggtttcatggctc

SEQ ID NO: 22485 - DNA, 80 bp, synthetic construct
  source 1..80: mol_type = other DNA
gctcagtgccctgcacacagtaggggctccatggctcagtgccctgcacacagtaggggctccatggctcagtgccctgc

SEQ ID NO: 22486 - DNA, 80 bp, synthetic construct
  source 1..80: mol_type = other DNA
ctgcacacagcagggctccatggctcagtgccctgcacacagtaggggctttatggctcagtgccctgcacatagtaggg

SEQ ID NO: 22487 - DNA, 80 bp, synthetic construct
  source 1..80: mol_type = other DNA
gggctctatggctcagtgccttgcacacagttggggctccatggctcagtgccctgcacacagtagggcttcatggctat

SEQ ID NO: 22488 - DNA, 80 bp, synthetic construct; identical to SEQ ID NO: 9535
  source 1..80: mol_type = other DNA

SEQ ID NO: 22489 - DNA, 80 bp, synthetic construct
  source 1..80: mol_type = other DNA
ctgtggcaggccacccgtgggctctcactgagtcccccaacagccctctcagagctgggctgtgccatcatctgtctcca

SEQ ID NO: 22490 - DNA, 80 bp, synthetic construct
  source 1..80: mol_type = other DNA
atcagggcccctctcgctgctgccctggccttgcctgttctcagccaagctcgtgggagagtggctgcgctcctttgtcc

SEQ ID NO: 22491 - DNA, 80 bp, synthetic construct
  source 1..80: mol_type = other DNA
cagtccttttgaccatggcctgagtgacagtgactcccttccaactgctctccccacctccaggccgtttctctcacttc

SEQ ID NO: 22492 - DNA, 80 bp, synthetic construct; identical to SEQ ID NO: 9536
  source 1..80: mol_type = other DNA

SEQ ID NO: 22493 - DNA, 80 bp, synthetic construct
  source 1..80: mol_type = other DNA
caccaccactggcagcagggcctctggggcagggctggatcttcatcacctttgcacacttggtgtcaggcacagcatcc

SEQ ID NO: 22494 - DNA, 80 bp, synthetic construct
  source 1..80: mol_type = other DNA
gcacccaagcccccatgccagcctgctgtcttctcctgcctgccccgcacccccttcctctccctctttctgggcctctt

SEQ ID NO: 22495 - DNA, 80 bp, synthetic construct
  source 1..80: mol_type = other DNA
ccttcccttcacctccccagcagtgggcagagaagtcagtggagccgtcccagtgccaggcctcggtggcagccatgcct

SEQ ID NO: 22496 - DNA, 80 bp, synthetic construct; identical to SEQ ID NO: 9537
  source 1..80: mol_type = other DNA

SEQ ID NO: 22497 - DNA, 80 bp, synthetic construct
  source 1..80: mol_type = other DNA
atctataatcccagcactttgggaggtcaaggcaggaggatcacttgaggccaggagttagagaccagcctggccaacat

SEQ ID NO: 22498 - DNA, 80 bp, synthetic construct
  source 1..80: mol_type = other DNA
ctctgtctcaaaaacagcagtgacaaaaaccccaactgagcggcttttggttttggttcttccattttgatatggtccta

SEQ ID NO: 22499 - DNA, 80 bp, synthetic construct
  source 1..80: mol_type = other DNA
attctatgaatgcactgtggaaataatgtggcacttcatgcagatcagaaacctgactcgacttagatatggctgtgatt

SEQ ID NO: 22500 - DNA, 80 bp, synthetic construct; identical to SEQ ID NO: 9538
  source 1..80: mol_type = other DNA

SEQ ID NO: 22501 - DNA, 80 bp, synthetic construct
  source 1..80: mol_type = other DNA
tttacagcccctgccacttacagatgggaaaacagagtctcaagagattagctgacctgtgcaagtttggaagtgagctt

SEQ ID NO: 22502 - DNA, 80 bp, synthetic construct
  source 1..80: mol_type = other DNA
cttactgttgggtttcctgtgcgcctcccagcgcctctgctttcttcttcatattgctttttgtatacggggtgtgttgc

SEQ ID NO: 22503 - DNA, 80 bp, synthetic construct; identical to SEQ ID NO: 9539
  source 1..80: mol_type = other DNA

SEQ ID NO: 22504 - DNA, 80 bp, synthetic construct
  source 1..80: mol_type = other DNA
gggggtgtgtgggcactgtagcagctaatctgattgtagccaaatctcgttatagcatttctgcccggagtgccatttaa

SEQ ID NO: 22505 - DNA, 80 bp, synthetic construct
  source 1..80: mol_type = other DNA
gaggaggcgagctcatttcctattgtttcagccctgggggacactgttcccacaaggcatagtggttttgctttcctttt

SEQ ID NO: 22506 - DNA, 80 bp, synthetic construct
  source 1..80: mol_type = other DNA
tagtcatagagctcgtttgggggccacccaggtttatttaagtccaagacttgatcgagctcagaggttctaaaaggctg

SEQ ID NO: 22507 - DNA, 80 bp, synthetic construct
  source 1..80: mol_type = other DNA
taccattagcttcattcaatgccatggcctcaaagtggccaagtggagctggatctcgttccagcctggctctgctctaa

SEQ ID NO: 22508 - DNA, 80 bp, synthetic construct; identical to SEQ ID NO: 9540
  source 1..80: mol_type = other DNA

SEQ ID NO: 22509 - DNA, 80 bp, synthetic construct
  source 1..80: mol_type = other DNA
gggcaccccaggaacatgcacccataggcaagactccaggcttcttcggaaggggtggtctgcccctcccctccccctct

SEQ ID NO: 22510 - DNA, 80 bp, synthetic construct
  source 1..80: mol_type = other DNA
gaacagccaatgaactgtggcacaagaggagaggcagtcactcatgtggccaggccctccctcctccaggggcctccctg

SEQ ID NO: 22511 - DNA, 80 bp, synthetic construct
  source 1..80: mol_type = other DNA
agatggaccctggccttaagcagcttacaggctactatgagagacccaaagggaggccaggacagcaagaatagcaagcc

SEQ ID NO: 22512 - DNA, 80 bp, synthetic construct; identical to SEQ ID NO: 9541
  source 1..80: mol_type = other DNA

SEQ ID NO: 22513 - DNA, 80 bp, synthetic construct
  source 1..80: mol_type = other DNA
tggaaatgcaacgaagacagctttcaggctctccaagcaacagagtataaaaaatggaaaaacaggtcaactttgtcttt

SEQ ID NO: 22514 - DNA, 80 bp, synthetic construct
  source 1..80: mol_type = other DNA
tttgagccagaccaaaccttggggagttgtcagatctcatgttggccaaaattctaacatttttacaacctataaaaact

SEQ ID NO: 22515 - DNA, 80 bp, synthetic construct; identical to SEQ ID NO: 9542
  source 1..80: mol_type = other DNA

SEQ ID NO: 22516 - DNA, 80 bp, synthetic construct
  source 1..80: mol_type = other DNA
ttctatttggtttcaggatggtcatttcaggggctagaaggtaatggagccattcactttgggtgtgaatggctgattgt

SEQ ID NO: 22517 - DNA, 80 bp, synthetic construct
  source 1..80: mol_type = other DNA
cctgccttagcctcctgagtagctgggactacagacctaccccaccaagcccagctaatttttaaaactttttgttgaga

SEQ ID NO: 22518 - DNA, 80 bp, synthetic construct
  source 1..80: mol_type = other DNA
agagggcaaacctgctaattcagactctttatagaatgcatttttggcagagctagtttgaccagctgcccttttactca

SEQ ID NO: 22519 - DNA, 80 bp, synthetic construct; identical to SEQ ID NO: 9543
  source 1..80: mol_type = other DNA

SEQ ID NO: 22520 - DNA, 80 bp, synthetic construct
  source 1..80: mol_type = other DNA
ccccagaaaagaagttgtgaaatccactcctctccttatctatagttccttgaaacctgttctgcagacccaggctttcc

SEQ ID NO: 22521 - DNA, 80 bp, synthetic construct
  source 1..80: mol_type = other DNA
aggtagatagctgtggtttggctgtgtccccaccgaaatctcatcttgaattgtagttcccataattcccatgtgtcatg

SEQ ID NO: 22522 - DNA, 80 bp, synthetic construct
  source 1..80: mol_type = other DNA
tttgcttccccttctgccataagtgtaagtttcctgaggcctctccagccatgctgaactgtgagtcagttaaacctctt

SEQ ID NO: 22523 - DNA, 80 bp, synthetic construct
  source 1..80: mol_type = other DNA
ctaaaggtatgggcttggcacactacctgagcatctcaccttcagtgggaaccacttcagcctaggttagtttattctga

SEQ ID NO: 22524 - DNA, 80 bp, synthetic construct; identical to SEQ ID NO: 9544
  source 1..80: mol_type = other DNA

SEQ ID NO: 22525 - DNA, 80 bp, synthetic construct
  source 1..80: mol_type = other DNA
gggtcatttctcaataaaagggacctgtactttcccaattcagtggacatacattagtctccagtggtttccatacacaa

SEQ ID NO: 22526 - DNA, 80 bp, synthetic construct
  source 1..80: mol_type = other DNA
gtcctcgctgccttggatggctctgaccctcataaatctgcccagagttgcttggaatcaatttatgattcccaccagca

SEQ ID NO: 22527 - DNA, 80 bp, synthetic construct; identical to SEQ ID NO: 9545
  source 1..80: mol_type = other DNA

SEQ ID NO: 22528 - DNA, 80 bp, synthetic construct
  source 1..80: mol_type = other DNA
atcagtattggagaaggaaccaaaattgagggttcctccttctcggtccaagggtcctttgggggtgattaaaccgttcc

SEQ ID NO: 22529 - DNA, 80 bp, synthetic construct
  source 1..80: mol_type = other DNA
ttgttattctgttttatctatagtgtctctctgaagctgctccatacactattgacctctcttagctgtgcactggactg

SEQ ID NO: 22530 - DNA, 80 bp, synthetic construct
  source 1..80: mol_type = other DNA
atgctaggttgattttcaaaagtgttgctgaagtggaaggcaatgggcaccactttgtggatcaaagtgagcaggtctaa

SEQ ID NO: 22531 - DNA, 80 bp, synthetic construct
  source 1..80: mol_type = other DNA
ggtaatctccactcacaaaaggggtgaaaacctctcagtgtttactgtgcacctaatataggccagtcactgcgctttca

SEQ ID NO: 22532 - DNA, 80 bp, synthetic construct; identical to SEQ ID NO: 9546
  source 1..80: mol_type = other DNA

SEQ ID NO: 22533 - DNA, 80 bp, synthetic construct
  source 1..80: mol_type = other DNA
agtaggcaggccactatgaggggacaggtgagagtatggtcactatactgaggtgagtggaccctccatcccagaaagtc

SEQ ID NO: 22534 - DNA, 80 bp, synthetic construct
  source 1..80: mol_type = other DNA
tataaggtcaggaagcagagagagactgtgtcataagcaacaggacaaaaatcccagtttttggagagaagatcaaggtc

SEQ ID NO: 22535 - DNA, 80 bp, synthetic construct
  source 1..80: mol_type = other DNA
gacgtcacctgcctctttcctcttctctcaaacaaacaaacctattctattaatactcatttatgaaagaaaaaaaaaaa

SEQ ID NO: 22536 - DNA, 80 bp, synthetic construct; identical to SEQ ID NO: 9547
  source 1..80: mol_type = other DNA

SEQ ID NO: 22537 - DNA, 80 bp, synthetic construct
  source 1..80: mol_type = other DNA
aagagcgctcaatgcttcatgtggatcatttgtacaatttttattcagatccatagcattgaatttcatccacatccact

SEQ ID NO: 22538 - DNA, 80 bp, synthetic construct
  source 1..80: mol_type = other DNA
agtagcatgatcttggctcactgcaacctccatctcctgggctcaagcgatcctaccacctcagactccagagtagctgg

SEQ ID NO: 22539 - DNA, 80 bp, synthetic construct; identical to SEQ ID NO: 9548
  source 1..80: mol_type = other DNA

SEQ ID NO: 22540 - DNA, 80 bp, synthetic construct
  source 1..80: mol_type = other DNA
aggagatactttgtgtctgattattgctctcttttatcatgttagcacttatcaaacaaagctcaatgcttagaaccatt

SEQ ID NO: 22541 - DNA, 80 bp, synthetic construct
  source 1..80: mol_type = other DNA
tctccttatgtatacatttcaagatactgaattggttctctatcatcctctgaagctggccaattaactgtttgtacatt

SEQ ID NO: 22542 - DNA, 80 bp, synthetic construct
  source 1..80: mol_type = other DNA
acaaaatacttcttctccagacctggaatcaaccgtttcctcaaaagccctgatttctcttagtaggaaaaggtatttta

SEQ ID NO: 22543 - DNA, 80 bp, synthetic construct
  source 1..80: mol_type = other DNA
gtacatcatgagttcatattgatatttccaactcaaattcaggacgacaggactttttatttaacctcgtgtatatcata

SEQ ID NO: 22544 - DNA, 80 bp, synthetic construct; identical to SEQ ID NO: 9549
  source 1..80: mol_type = other DNA

SEQ ID NO: 22545 - DNA, 80 bp, synthetic construct
  source 1..80: mol_type = other DNA
ttgtccgaagcttgttttaaagtaaattccttagagaggggtcactggagaaatattccttgaattatttgagtgttgat

SEQ ID NO: 22546 - DNA, 80 bp, synthetic construct
  source 1..80: mol_type = other DNA
agcaattttactagaatacacattggtaccgctcattctgggttaatattcttaggtatacagtgtgctcttttaacaag

SEQ ID NO: 22547 - DNA, 80 bp, synthetic construct
  source 1..80: mol_type = other DNA
ctttgggcacctaagcaaaatagcaaatgacttattagagaaggaaatttagaattatcagagtttttgacagcaacact

SEQ ID NO: 22548 - DNA, 80 bp, synthetic construct; identical to SEQ ID NO: 9550
  source 1..80: mol_type = other DNA

SEQ ID NO: 22549 - DNA, 80 bp, synthetic construct
  source 1..80: mol_type = other DNA
ctggcatgattttgctttctgtaggcgtgttattccgccctctgtatcctgtttttgttttcttattttaattttgaatg

SEQ ID NO: 22550 - DNA, 80 bp, synthetic construct
  source 1..80: mol_type = other DNA
ttatttcacagaactccctctactcctttttttaatacagtgttcaaaaatatggcagtttggccaggtgtggtgactca

SEQ ID NO: 22551 - DNA, 80 bp, synthetic construct
  source 1..80: mol_type = other DNA
gtatggtggtgggtgcctatgtcccagctacttgggaggctgaggcaggtgaatcacctgaagccaggaggctgaggttg

SEQ ID NO: 22552 - DNA, 80 bp, synthetic construct; identical to SEQ ID NO: 9551
  source 1..80: mol_type = other DNA

SEQ ID NO: 22553 - DNA, 80 bp, synthetic construct
  source 1..80: mol_type = other DNA
ctcctgttctcaggcctgtttctttcctgtcttatatcttgtacagatgctgataccatgcaggtcttgtggttgttggt

SEQ ID NO: 22554 - DNA, 80 bp, synthetic construct
  source 1..80: mol_type = other DNA
accatcactgccctcttcccagaatcctagaaacattttttaaatgtagaaatcatttgagctcatttgctatggtgagc

SEQ ID NO: 22555 - DNA, 80 bp, synthetic construct
  source 1..80: mol_type = other DNA
tataatttaaccttttcttgatagtgcttcccagacttaatgagttgtttagggctatttgactcttcactaaatggcct

SEQ ID NO: 22556 - DNA, 80 bp, synthetic construct; identical to SEQ ID NO: 9552
  source 1..80: mol_type = other DNA

SEQ ID NO: 22557 - DNA, 80 bp, synthetic construct
  source 1..80: mol_type = other DNA
cttacaaccacgataggtcagtagatagggaagggagaagaactgtgacttttgtctcataagtcatgcaatcatgtaga

SEQ ID NO: 22558 - DNA, 80 bp, synthetic construct
  source 1..80: mol_type = other DNA
cttccagcttgtttctcagaccgaatttatttgcgtgtatgtgcatgcacaggtacacacatgtgtgtgcttatacacat

SEQ ID NO: 22559 - DNA, 80 bp, synthetic construct
  source 1..80: mol_type = other DNA
ttaggggtggtaacaacaacaatgatcacaccagccctgtcttttactagaaatgctcacacacatgatctcatttttac

SEQ ID NO: 22560 - DNA, 80 bp, synthetic construct
  source 1..80: mol_type = other DNA
cccatcaacagggcagcaagctggggctgtctagataaaagctgctttcagggctgaattgccctaagcagctctgacac

SEQ ID NO: 22561 - DNA, 80 bp, synthetic construct; identical to SEQ ID NO: 9553
  source 1..80: mol_type = other DNA

SEQ ID NO: 22562 - DNA, 80 bp, synthetic construct
  source 1..80: mol_type = other DNA
gacttctgccttgtccattcttgtctgcggataggagagatttaatctagtgcatcaccataggggttatgtgattagga

SEQ ID NO: 22563 - DNA, 80 bp, synthetic construct
  source 1..80: mol_type = other DNA
ctaagtcattcctgctcattgtttggttctaactcatgatgactgaaatctctacaaggcccttggaattgtaacacttc

SEQ ID NO: 22564 - DNA, 80 bp, synthetic construct; identical to SEQ ID NO: 9554
  source 1..80: mol_type = other DNA

SEQ ID NO: 22565 - DNA, 80 bp, synthetic construct
  source 1..80: mol_type = other DNA
atctcagagatgtgagtcttgacattatcaggcactggataatgacagtagtcacttctagggccactgaattaacatca

SEQ ID NO: 22566 - DNA, 80 bp, synthetic construct
  source 1..80: mol_type = other DNA
tctcaaacagcaatgccagcctggattggaaccaactttttcgtgcttcttcagagttgactgcacgtggccttctgcct

SEQ ID NO: 22567 - DNA, 80 bp, synthetic construct
  source 1..80: mol_type = other DNA
cttgaagatttccctaggccacaccagcctagagtaagaagtagcatcttaatattagtagccagtagcattttcctgat

SEQ ID NO: 22568 - DNA, 80 bp, synthetic construct; identical to SEQ ID NO: 9555
  source 1..80: mol_type = other DNA

SEQ ID NO: 22569 - DNA, 80 bp, synthetic construct
  source 1..80: mol_type = other DNA
tacagtgagtgggtgctgggacacttttggccctttggggctcctgttttagtgttagaatgtttaagatggacaaacca

SEQ ID NO: 22570 - DNA, 80 bp, synthetic construct
  source 1..80: mol_type = other DNA
acacacacaattgcgcacaccagcccacactcatacatgcatgcatacacatatccaaaatgcagggtgccctgtttttt

SEQ ID NO: 22571 - DNA, 80 bp, synthetic construct
  source 1..80: mol_type = other DNA
cacaccggctaatttttgtatttctgtagagacagggtttcaccatgttggccaggctggtcttgaactccggacctcaa

SEQ ID NO: 22572 - DNA, 80 bp, synthetic construct; identical to SEQ ID NO: 9556
  source 1..80: mol_type = other DNA

SEQ ID NO: 22573 - DNA, 80 bp, synthetic construct
  source 1..80: mol_type = other DNA
ctcttatcttattatgaagacactgttaatattcaccataaaaacaaatcagagctgggcgtggtggctcatgcctgtaa

SEQ ID NO: 22574 - DNA, 80 bp, synthetic construct
  source 1..80: mol_type = other DNA
agaattgcttgaacccaggaggtggaggttgcagtgagccaagatcacggcactgcactccagcctgggtgacaagagcg

SEQ ID NO: 22575 - DNA, 80 bp, synthetic construct
  source 1..80: mol_type = other DNA
taaagatcctcttttaaattctacggatgagaggatttttcgggcaatcctctataccccacacaaatcatttatttccc

SEQ ID NO: 22576 - DNA, 80 bp, synthetic construct; identical to SEQ ID NO: 9557
  source 1..80: mol_type = other DNA

SEQ ID NO: 22577 - DNA, 80 bp, synthetic construct
  source 1..80: mol_type = other DNA
catattgttttgtacctttgaaagcctgatagaaatgatctcatttgctcagtacaatagccagctctgagaaagaactg

SEQ ID NO: 22578 - DNA, 80 bp, synthetic construct
  source 1..80: mol_type = other DNA
tcttgctattgcctggcactcagtaggtgcttcgtgactatttaagcatctgtagaatattgaatacatagtcttgagat

SEQ ID NO: 22579 - DNA, 80 bp, synthetic construct
  source 1..80: mol_type = other DNA
cagcttctgataatcacacccttgtgtaacctcctccctttgagtataggtgagatctgtgaattgcttctaaccaacag

SEQ ID NO: 22580 - DNA, 80 bp, synthetic construct
  source 1..80: mol_type = other DNA
cctccagccagttaggaagtgaggccctcagtccagtaaccctccaagaactgccaaccaccatatgagtttggcagtga

SEQ ID NO: 22581 - DNA, 80 bp, synthetic construct; identical to SEQ ID NO: 9558
  source 1..80: mol_type = other DNA

SEQ ID NO: 22582 - DNA, 80 bp, synthetic construct
  source 1..80: mol_type = other DNA
accttttgtgatcaagagttagcattttaacctttttactcctagattcactgtccacctccaggcccggatgaattaaa

SEQ ID NO: 22583 - DNA, 80 bp, synthetic construct
  source 1..80: mol_type = other DNA
tgataaaaaagcagtcttcccaaacaagtacttaatgcacttgccctgatggaggggcctttgtgttctgttagtcttca

SEQ ID NO: 22584 - DNA, 80 bp, synthetic construct
  source 1..80: mol_type = other DNA
aagggcaacagtatcgactttatgtggaagcattttgtcagcagctttgccataattccaacccccacctagcattagac

SEQ ID NO: 22585 - DNA, 80 bp, synthetic construct; identical to SEQ ID NO: 9559
  source 1..80: mol_type = other DNA

SEQ ID NO: 22586 - DNA, 80 bp, synthetic construct
  source 1..80: mol_type = other DNA
cacagagcaggcacccagtacatgcttgttaaattgaactatatgagttgttagtccctaggcttgggattcagggaaag

SEQ ID NO: 22587 - DNA, 80 bp, synthetic construct
  source 1..80: mol_type = other DNA
gattgagccggcttgactttgaaccctggccctgcatttgattagtgggtcaagtcacataatctttctgatcctctgtt

SEQ ID NO: 22588 - DNA, 80 bp, synthetic construct; identical to SEQ ID NO: 9560
  source 1..80: mol_type = other DNA

SEQ ID NO: 22589 - DNA, 80 bp, synthetic construct
  source 1..80: mol_type = other DNA
gagcttagtgactgtcaccctgtgttcagatggaaggaggtggctgacaaatggcggaacacactctgggaagctctatt

SEQ ID NO: 22590 - DNA, 80 bp, synthetic construct
  source 1..80: mol_type = other DNA
actggaagagactcattagcgttggtaatgggatcatgaatcacaaattagttctttgccacctctcttcctggagcaca

SEQ ID NO: 22591 - DNA, 80 bp, synthetic construct
  source 1..80: mol_type = other DNA
ctaaaattagcgagataatctaaaataagcaagaacacagagcatgaggttaatcagcagggcagctgagcagggaaatg

SEQ ID NO: 22592 - DNA, 80 bp, synthetic construct; identical to SEQ ID NO: 9561
  source 1..80: mol_type = other DNA

SEQ ID NO: 22593 - DNA, 80 bp, synthetic construct
  source 1..80: mol_type = other DNA
acctattcagtaatgaaagagagatccctctcgaagacctattcaataatgaaagagagatccctcttgaagatctattc

SEQ ID NO: 22594 - DNA, 80 bp, synthetic construct
  source 1..80: mol_type = other DNA
gatttttaagaaacatgatcatttgccttttacacaagttgtctaacttagtgcaagttagttcacctctctggacctca

SEQ ID NO: 22595 - DNA, 80 bp, synthetic construct
  source 1..80: mol_type = other DNA
cccgggttcctaaacttttttgctaatcaaactttccttgagggatggttaaaaatgtggattttgacttcctgctccca

SEQ ID NO: 22596 - DNA, 80 bp, synthetic construct; identical to SEQ ID NO: 9562
  source 1..80: mol_type = other DNA

SEQ ID NO: 22597 - DNA, 80 bp, synthetic construct
  source 1..80: mol_type = other DNA
ggctagcaaggaagaggccaggatttttcggaactggattagaatacattattgattcaggaacggagtgactctgaagg

SEQ ID NO: 22598 - DNA, 80 bp, synthetic construct
  source 1..80: mol_type = other DNA
cgtcatccccagaagggcgtacttggaacataatggctctagctacaaattctattaactctaatagttgttctgtggtg

SEQ ID NO: 22599 - DNA, 80 bp, synthetic construct
  source 1..80: mol_type = other DNA
atatgaaacatataaaactttctcattggaattggcatctgttcttgaatcaggagcgtgtgtgaaagtggacagcctgt

SEQ ID NO: 22600 - DNA, 80 bp, synthetic construct
  source 1..80: mol_type = other DNA
gaagggacttggacactgtctacttctaaccttgattttttaaaaaattgcagtctctctgcccttgtctgtgttcacat

SEQ ID NO: 22601 - DNA, 80 bp, synthetic construct; identical to SEQ ID NO: 9563
  source 1..80: mol_type = other DNA

SEQ ID NO: 22602 - DNA, 80 bp, synthetic construct
  source 1..80: mol_type = other DNA
ttagggaaagagtgtggcagagcctgactgttcctcctcactgctaacattcattactgccagagagagacagtcacagg

SEQ ID NO: 22603 - DNA, 80 bp, synthetic construct
  source 1..80: mol_type = other DNA
atttccctggacttaatacttgccccattttctctttcagcatcttcatctgattagctaaagtgactcagagtcttccg

SEQ ID NO: 22604 - DNA, 80 bp, synthetic construct; identical to SEQ ID NO: 9564
  source 1..80: mol_type = other DNA

SEQ ID NO: 22605 - DNA, 80 bp, synthetic construct
  source 1..80: mol_type = other DNA
gctggaactcttccctgctcttttccatttttagtgtttatctccgattggagactttgatacctagaagtagcttagtt

SEQ ID NO: 22606 - DNA, 80 bp, synthetic construct
  source 1..80: mol_type = other DNA
aggctatgggaccacgctctatgatctttcctttcctttccttccccctctggcctatccctctgtccttcttcaggggg

SEQ ID NO: 22607 - DNA, 80 bp, synthetic construct
  source 1..80: mol_type = other DNA
attattactgactgggtgtggccttggcctctgcctccatgagtctgcctggacccataggcactacctcagtattgctc

SEQ ID NO: 22608 - DNA, 80 bp, synthetic construct
  source 1..80: mol_type = other DNA
ggcccttactgagtaaccttttagggacagtgggagttatgtggcaataaactcaggagttgagcagggtggatggctgt

SEQ ID NO: 22609 - DNA, 80 bp, synthetic construct; identical to SEQ ID NO: 9565
  source 1..80: mol_type = other DNA

SEQ ID NO: 22610 - DNA, 80 bp, synthetic construct
  source 1..80: mol_type = other DNA
cctctgtgtgggaatatacaaaggtctttcatggttctagttaaaggggaagggagggatgatgcgaaaagtaactaact

SEQ ID NO: 22611 - DNA, 80 bp, synthetic construct
  source 1..80: mol_type = other DNA
gctaatgtctagttcacatgttgagagcagatgtggcaaaggtatggacctcattttttgtactttgtgccaaaaaagga

SEQ ID NO: 22612 - DNA, 80 bp, synthetic construct; identical to SEQ ID NO: 9566
  source 1..80: mol_type = other DNA

SEQ ID NO: 22613 - DNA, 80 bp, synthetic construct
  source 1..80: mol_type = other DNA
cctctttataaggaggagaaatcttacagtaagctttgctttgttcagtaaggcggcagtgaattcaaagcagagttggg

SEQ ID NO: 22614 - DNA, 80 bp, synthetic construct
  source 1..80: mol_type = other DNA
atactccttctaaagactgtttcattctttcagcacagctccccaccctaaagacagcaccaatctttcttctgcctttt

SEQ ID NO: 22615 - DNA, 80 bp, synthetic construct
  source 1..80: mol_type = other DNA
ttttccccgggtttcagctccttgtttgggtttctctcaaacaggtttcttgatttgggtgctgtattctgcaggatctt

SEQ ID NO: 22616 - DNA, 80 bp, synthetic construct
  source 1..80: mol_type = other DNA
cagagtgctggggtcagagtgaactcactggtgaggtagcagtccaggctgatggagatattgtcaaaagccacgatggc

SEQ ID NO: 22617 - DNA, 80 bp, synthetic construct; identical to SEQ ID NO: 9567
  source 1..80: mol_type = other DNA

SEQ ID NO: 22618 - DNA, 80 bp, synthetic construct
  source 1..80: mol_type = other DNA
gataatctgaggagaaatcttttgctttctgggtgtgcaggatgcttggaaatgggaagaaatctgacagtaactgcttc

SEQ ID NO: 22619 - DNA, 80 bp, synthetic construct
  source 1..80: mol_type = other DNA
cttaagtcattattaaaatattaaaatgcttctgtaccagccaataaagaaccacagttccaccagttccccttgcttgt

SEQ ID NO: 22620 - DNA, 80 bp, synthetic construct; identical to SEQ ID NO: 9568
  source 1..80: mol_type = other DNA

SEQ ID NO: 22621 - DNA, 80 bp, synthetic construct
  source 1..80: mol_type = other DNA
ctgctctaagtgaaggtttcctgagaaccttaaaatcctttcctaccctccagaacgtcaatccagaatgacatgcagaa

SEQ ID NO: 22622 - DNA, 80 bp, synthetic construct
  source 1..80: mol_type = other DNA
aaagaccgcctattgaatgattccattgatagaaaatgtctagaaaaggtaaatctgtggggccagaaagcagattagtg

SEQ ID NO: 22623 - DNA, 80 bp, synthetic construct
  source 1..80: mol_type = other DNA
ttatgatatataaattacagtctgataaaggtgttagaaaaaaaggagagagaggaagagagagggaacccaggccacag

SEQ ID NO: 22624 - DNA, 80 bp, synthetic construct; identical to SEQ ID NO: 9569
  source 1..80: mol_type = other DNA

SEQ ID NO: 22625 - DNA, 80 bp, synthetic construct
  source 1..80: mol_type = other DNA
cttttatccgaataactgtgatcgattatgcttaactgaactactccatacatttatctgtgctttcaaccatcttgtga

SEQ ID NO: 22626 - DNA, 80 bp, synthetic construct
  source 1..80: mol_type = other DNA
tgctaccctcagtcaggatagtgtgtgctggtggttgggtgtggaaggagaagtgcctgatggagaaccttcaaatcctg

SEQ ID NO: 22627 - DNA, 80 bp, synthetic construct
  source 1..80: mol_type = other DNA
catataggtctatggggcattctaagagaaatcgacatgaacgctgcattcaagttacttattgtccagtgtgaagatga

SEQ ID NO: 22628 - DNA, 80 bp, synthetic construct
  source 1..80: mol_type = other DNA
ggcttcacagagaagacagtatttaagttggttttgaatgcagggaagggcttgaggatgtgggtgtgggagtgcagtgc

SEQ ID NO: 22629 - DNA, 80 bp, synthetic construct; identical to SEQ ID NO: 9570
  source 1..80: mol_type = other DNA

SEQ ID NO: 22630 - DNA, 80 bp, synthetic construct
  source 1..80: mol_type = other DNA
agtttctggcttgagcctctgtaaccctggacaaagcccaagcctgggatctcaactggaaaaccagggccctaatactg

SEQ ID NO: 22631 - DNA, 80 bp, synthetic construct
  source 1..80: mol_type = other DNA
gagtgcccccacagggcacatttctccaccaggtcatcatctcctaatctgtcattcacaggaccaggggccaagccagg

SEQ ID NO: 22632 - DNA, 80 bp, synthetic construct
  source 1..80: mol_type = other DNA
ctgtgccttccttccttattactaagagattagatctgcgaagtctctcacagccactgggcctcttagcatggatggga

SEQ ID NO: 22633 - DNA, 80 bp, synthetic construct; identical to SEQ ID NO: 9571
  source 1..80: mol_type = other DNA

SEQ ID NO: 22634 - DNA, 80 bp, synthetic construct
  source 1..80: mol_type = other DNA
tctaggaatggggtctgtgggtggtaggtgatgggcagtcagcaggtagagcagcaccaatctaggaggctcttttctgt

SEQ ID NO: 22635 - DNA, 80 bp, synthetic construct
  source 1..80: mol_type = other DNA
tcaaggctctcgcagtctcctggttctacccactcctttccgtgagtcccccagaagtacagctaccatgtcactctcca

SEQ ID NO: 22636 - DNA, 80 bp, synthetic construct
  source 1..80: mol_type = other DNA
ggtatgtaccaggtagactaccaagggactgagggaaaattctgttatataccaggtagacctgacacttagttgggacc

SEQ ID NO: 22637 - DNA, 80 bp, synthetic construct; identical to SEQ ID NO: 9572
  source 1..80: mol_type = other DNA

SEQ ID NO: 22638 - DNA, 80 bp, synthetic construct
  source 1..80: mol_type = other DNA
accgggggttagttctagtatgtaccaggtggtccattctgggactgacggaaagttctagtatgtaccaggtagaacac

SEQ ID NO: 22639 - DNA, 80 bp, synthetic construct
  source 1..80: mol_type = other DNA
aggtggtccattctgggattgagggaaagttctggcatgtatcaggtggaccctcttggactgagggagaaaattctagt

SEQ ID NO: 22640 - DNA, 80 bp, synthetic construct; identical to SEQ ID NO: 9573
  source 1..80: mol_type = other DNA

SEQ ID NO: 22641 - DNA, 80 bp, synthetic construct
  source 1..80: mol_type = other DNA
tgccaagactgcgagggacaggccatcctagagaacatagttactcctctgccccactttgaaacctcagctctggatgg

SEQ ID NO: 22642 - DNA, 80 bp, synthetic construct
  source 1..80: mol_type = other DNA
cagtgcttagcagcagagattttgctcctgacccttcatagttcgtacctgctcagctctttctgtttcttcaaagagga

SEQ ID NO: 22643 - DNA, 80 bp, synthetic construct
  source 1..80: mol_type = other DNA
gagacgccttttgaaaacagactcagcggggatctgggaggtggccatctgggcagtgggccaagtctggaagggcagct

SEQ ID NO: 22644 - DNA, 80 bp, synthetic construct; identical to SEQ ID NO: 9574
  source 1..80: mol_type = other DNA

SEQ ID NO: 22645 - DNA, 80 bp, synthetic construct
  source 1..80: mol_type = other DNA
aaacactttctccaatttctcgctgcacagttaatttgctctgcaaaagtcttctaaaatgggctgtcatgaagcttggg

SEQ ID NO: 22646 - DNA, 80 bp, synthetic construct
  source 1..80: mol_type = other DNA
tggctaggaatgtgtgtcttggctctaggagtctttaacttctgcacagtaaactggagatgagctggacattcaaggcc

SEQ ID NO: 22647 - DNA, 80 bp, synthetic construct
  source 1..80: mol_type = other DNA
tcacaatgagtctggcttggtgaggaagcccttctagaaataagagagaaaatgaattttcagccaggctgagcaagcat

SEQ ID NO: 22648 - DNA, 80 bp, synthetic construct; identical to SEQ ID NO: 9575
  source 1..80: mol_type = other DNA

SEQ ID NO: 22649 - DNA, 80 bp, synthetic construct
  source 1..80: mol_type = other DNA
tgcatccctggccaattttcccatcatctcttgcagaaccatccaacttgtcgaatctcatttagtctcatatgtactcc

SEQ ID NO: 22650 - DNA, 80 bp, synthetic construct
  source 1..80: mol_type = other DNA
ttggaacacacaaacatttcctctgtcctctgttgctgtgttggcttgcggcttggggagctgacatggtaccgagatgg

SEQ ID NO: 22651 - DNA, 80 bp, synthetic construct
  source 1..80: mol_type = other DNA
ggtggggccctgggcaagttgccaaaacttttaaggtgccatcttggtttttaaaagaatctatgtaagatgtgtttttt

SEQ ID NO: 22652 - DNA, 80 bp, synthetic construct; identical to SEQ ID NO: 9576
  source 1..80: mol_type = other DNA

SEQ ID NO: 22653 - DNA, 80 bp, synthetic construct
  source 1..80: mol_type = other DNA
agaaagacttaaaataatgaaaagtcttggagaatggtagaactatgggcgaaactctcactaggcagtggggtgtgctg

SEQ ID NO: 22654 - DNA, 80 bp, synthetic construct
  source 1..80: mol_type = other DNA
atagatagaactggattctttgcttcaaatattggaagctcaattatctcctaaattgcaggctttgtgtttagggaaag

SEQ ID NO: 22655 - DNA, 80 bp, synthetic construct
  source 1..80: mol_type = other DNA
acatcctgttattttaaagaggttcacttagtgccattttgagcaactgcctcctaaaccaagctcatgggccggatctg

SEQ ID NO: 22656 - DNA, 80 bp, synthetic construct; identical to SEQ ID NO: 9577
  source 1..80: mol_type = other DNA

SEQ ID NO: 22657 - DNA, 80 bp, synthetic construct
  source 1..80: mol_type = other DNA
aggctgtcgatggacagtgaatatattgccttatttgctaccctgccaaccttagggattgacaaacctaattaagttca

SEQ ID NO: 22658 - DNA, 80 bp, synthetic construct
  source 1..80: mol_type = other DNA
ctttctgagcttcacactgaggctccaatcacttgccactgggcccctcaaaagaccttccaatatcccccatgctctgt

SEQ ID NO: 22659 - DNA, 80 bp, synthetic construct
  source 1..80: mol_type = other DNA
cccgagtagctgggattacaggtacgccaccttgcccagctaattttttatatttttagtagagatggggtttcactatg

SEQ ID NO: 22660 - DNA, 80 bp, synthetic construct
  source 1..80: mol_type = other DNA
atgcagtggtgcgatttcagctccctgcaatctccgcctcccaggttcaagtgattctccagcctcagcctcccaaggaa

SEQ ID NO: 22661 - DNA, 80 bp, synthetic construct; identical to SEQ ID NO: 9578
  source 1..80: mol_type = other DNA

SEQ ID NO: 22662 - DNA, 80 bp, synthetic construct
  source 1..80: mol_type = other DNA
ccttttccatttctctaagacttaaattttcctcaagcaccagtttataaaaagctcattttctccgtgatggttcatct

SEQ ID NO: 22663 - DNA, 80 bp, synthetic construct
  source 1..80: mol_type = other DNA
gatcaaacatccttttccatcctctgtgcttgatggaggcttaatatatgtttgccgacaatgtgtcagccaatgacatt

SEQ ID NO: 22664 - DNA, 80 bp, synthetic construct
  source 1..80: mol_type = other DNA
acagattcctggtcccaatatgtcatctgtgaatcagaatctttgtgtatgagatctggggctctgaaagaaaaaaatac

SEQ ID NO: 22665 - DNA, 80 bp, synthetic construct; identical to SEQ ID NO: 9579
  source 1..80: mol_type = other DNA

SEQ ID NO: 22666 - DNA, 80 bp, synthetic construct
  source 1..80: mol_type = other DNA
tctcaagtgacactctgatagatggccagacatgagagctatattccttgacttagtctgtgacacaccatctcattttt

SEQ ID NO: 22667 - DNA, 80 bp, synthetic construct
  source 1..80: mol_type = other DNA
ctaagaaactcatccacagaaccttgaacgcttcttgtgtgcaccatgtattctagagtttttccaagtcacatttaatg

SEQ ID NO: 22668 - DNA, 80 bp, synthetic construct; identical to SEQ ID NO: 9580
  source 1..80: mol_type = other DNA

SEQ ID NO: 22669 - DNA, 80 bp, synthetic construct
  source 1..80: mol_type = other DNA
tacgaagcataaaaaccagcccagataaggcaaacaaaaagtcagtaaggaaatccaaagagagcagatggcaaaggagg

SEQ ID NO: 22670 - DNA, 80 bp, synthetic construct
  source 1..80: mol_type = other DNA
aggccacccaccaaccagcatgcttatttttaatttcacacgagcaggaaataacatttcttttgtttacagctcctgga

SEQ ID NO: 22671 - DNA, 80 bp, synthetic construct
  source 1..80: mol_type = other DNA
tgcaggaatctgcagtattcttccttcacagctatagccttcccctctgcagcacactcctgcactactccaggactagg

SEQ ID NO: 22672 - DNA, 80 bp, synthetic construct; identical to SEQ ID NO: 9581
  source 1..80: mol_type = other DNA

SEQ ID NO: 22673 - DNA, 80 bp, synthetic construct
  source 1..80: mol_type = other DNA
cctgttgtcactgagattcatggaaaaaattttttgaccatgaaagcatggtgtttggaaaagggtgagtgtttgagcta

SEQ ID NO: 22674 - DNA, 80 bp, synthetic construct
  source 1..80: mol_type = other DNA
tggtggtggatgcctgtaagcccagctacttgggaggctgaggcaggagaatcgcttgaacccaggaggtggaggttgca

SEQ ID NO: 22675 - DNA, 80 bp, synthetic construct
  source 1..80: mol_type = other DNA
ttgataaactaaggtcattaaaatctgacttataatgatgaagataaacgggcacagatgcttggttcagtgagaatgcc

SEQ ID NO: 22676 - DNA, 80 bp, synthetic construct; identical to SEQ ID NO: 9582
  source 1..80: mol_type = other DNA

SEQ ID NO: 22677 - DNA, 80 bp, synthetic construct
  source 1..80: mol_type = other DNA
gccacagcaggtcatgagtagagagcaccttttattttcttcactcaccatgtgaacgaatcggttttgcctaagtgtat

SEQ ID NO: 22678 - DNA, 80 bp, synthetic construct
  source 1..80: mol_type = other DNA
gcatgtgtctgctgagagtggatgagcaaatgcatgtctacctggggtggtagtcattgctctctgcttctattcgtgtg

SEQ ID NO: 22679 - DNA, 80 bp, synthetic construct
  source 1..80: mol_type = other DNA
taattagatggagattgagagctggggctgtattgcttgtctgggtgtgcccatcacctggcacccaacactgcagtaaa

SEQ ID NO: 22680 - DNA, 80 bp, synthetic construct; identical to SEQ ID NO: 9583
  source 1..80: mol_type = other DNA

SEQ ID NO: 22681 - DNA, 80 bp, synthetic construct
  source 1..80: mol_type = other DNA
cctgaggtggagttagaggcggagcagttacagatgaaaatgctcctaggaggggcagacaggcaggaggacaagagcag

SEQ ID NO: 22682 - DNA, 80 bp, synthetic construct
  source 1..80: mol_type = other DNA
ggttatttttatgccttggttagacttggtacatgaatagatatgcaaattaaaaatgcctatcagagactgtgctccag

SEQ ID NO: 22683 - DNA, 80 bp, synthetic construct
  source 1..80: mol_type = other DNA
agcaggaggtggtggtgggaattgctaggatgaatttcaggagctggttgaagcaaagggaaagcagtaaactaatgtga

SEQ ID NO: 22684 - DNA, 80 bp, synthetic construct
  source 1..80: mol_type = other DNA
aagaggatcacttgaggccaggagttcaagatcagcctaggcaacatagcaagaccctgtctgtacaattttttttttta

SEQ ID NO: 22685 - DNA, 80 bp, synthetic construct; identical to SEQ ID NO: 9584
  source 1..80: mol_type = other DNA

SEQ ID NO: 22686 - DNA, 80 bp, synthetic construct
  source 1..80: mol_type = other DNA
tacatgactggcaggcagtaagcactcaacaaacgctagctctaatcatcatttataactcttaaatggctttatcagga

SEQ ID NO: 22687 - DNA, 80 bp, synthetic construct
  source 1..80: mol_type = other DNA
ctctacacagataagaacaagtaataaaagacgctcttcaatgcctttctcatcacagaaagatgctacacaaagggaga

SEQ ID NO: 22688 - DNA, 80 bp, synthetic construct
  source 1..80: mol_type = other DNA
accacttgtcgtttaggacaaaggattgcaaagggaacaggaaatctaaatatctccagaaggaacaatttttcttgtta

SEQ ID NO: 22689 - DNA, 80 bp, synthetic construct; identical to SEQ ID NO: 9585
  source 1..80: mol_type = other DNA

SEQ ID NO: 22690 - DNA, 80 bp, synthetic construct
  source 1..80: mol_type = other DNA
tggggagaggatgaggaaaagtagctatgtgaggtggatgtaaagtaatgagataatttttaagcacacatcaagctgat

SEQ ID NO: 22691 - DNA, 80 bp, synthetic construct
  source 1..80: mol_type = other DNA
agactattacattccttctatcgctttacatgtttgtaagtggacagaagaaatatcattccatggatcaatgcctccct

SEQ ID NO: 22692 - DNA, 80 bp, synthetic construct; identical to SEQ ID NO: 9586
  source 1..80: mol_type = other DNA

SEQ ID NO: 22693 - DNA, 80 bp, synthetic construct
  source 1..80: mol_type = other DNA
ttgaagagaggaggaatgttagatagattccatcaagtgaaattctcagtttattcaactggaatttgaaagtatatgca

SEQ ID NO: 22694 - DNA, 80 bp, synthetic construct
  source 1..80: mol_type = other DNA
aattattatagggatgtttcaagagccatgagaatatattgtgggtacatatagagtataggtgtctggggataattttt

SEQ ID NO: 22695 - DNA, 80 bp, synthetic construct
  source 1..80: mol_type = other DNA
agaaagaatggtttaagaagcagctggtgaaactagcgctggacagatcacacatgggcttaaaaaaggtcttattaggg

SEQ ID NO: 22696 - DNA, 80 bp, synthetic construct; identical to SEQ ID NO: 9587
  source 1..80: mol_type = other DNA

SEQ ID NO: 22697 - DNA, 80 bp, synthetic construct
  source 1..80: mol_type = other DNA
gttggtttttctttgtcttttatccatcctatttttctattttccttgcttatgtcttcctctaccttctcctttctccc

SEQ ID NO: 22698 - DNA, 80 bp, synthetic construct
  source 1..80: mol_type = other DNA
tgactggttatattgctaaattggccatcccagacccttctgagccattaggtggggagatattgtcattattatactat

SEQ ID NO: 22699 - DNA, 80 bp, synthetic construct
  source 1..80: mol_type = other DNA
gaggccaaataactgaaagatgcagaaaataaaatctattaatactctgtgtagactctttcaatagtcatttcatttag

SEQ ID NO: 22700 - DNA, 80 bp, synthetic construct
  source 1..80: mol_type = other DNA
tttcatctagagtgcttctttggtttctttggggccagtcacatctacagtctagtttgattttagcgaatgaaaactgc

SEQ ID NO: 22701 - DNA, 80 bp, synthetic construct; identical to SEQ ID NO: 9588
  source 1..80: mol_type = other DNA

SEQ ID NO: 22702 - DNA, 80 bp, synthetic construct
  source 1..80: mol_type = other DNA
tgagagtgaaccgagtcaacatcttactttaaatcccctggagtagctatgaaagagagaagacttgctggattgaggag

SEQ ID NO: 22703 - DNA, 80 bp, synthetic construct
  source 1..80: mol_type = other DNA
acttaaatccatttgtcctggggtcactgatccttggaatgtccttgggctttgatcgttaacccacacacatctgaagg

SEQ ID NO: 22704 - DNA, 80 bp, synthetic construct; identical to SEQ ID NO: 9589
  source 1..80: mol_type = other DNA

SEQ ID NO: 22705 - DNA, 80 bp, synthetic construct
  source 1..80: mol_type = other DNA
gcagggtcacatgagtgctgccatgcagggccatctttattcaagtacggcttgctccaggctgactgcaggtggcagaa

SEQ ID NO: 22706 - DNA, 80 bp, synthetic construct
  source 1..80: mol_type = other DNA
ccattagtgatagagcccaaataggaactaagaccacaagtagaagcattcctctgtttactgaagaatttgccatcctc

SEQ ID NO: 22707 - DNA, 80 bp, synthetic construct
  source 1..80: mol_type = other DNA
ccccttataacaggacaggagtggtaaatgatgataaggcctgtcctacctaccttgcaggttttcttgttaataaggat

SEQ ID NO: 22708 - DNA, 80 bp, synthetic construct
  source 1..80: mol_type = other DNA
acaagtgttcagtagcctcttcatcccttggagaagcttgtaaactgcagaaagtgtgtaacctgcagagtgtgtgtgtg

SEQ ID NO: 22709 - DNA, 80 bp, synthetic construct; identical to SEQ ID NO: 9590
  source 1..80: mol_type = other DNA

SEQ ID NO: 22710 - DNA, 80 bp, synthetic construct
  source 1..80: mol_type = other DNA
ggagctgtgagggcgagaagagtcagaggacaaggtatgattgctgaaaggtcccctttctggaattctccactgaagtt

SEQ ID NO: 22711 - DNA, 80 bp, synthetic construct
  source 1..80: mol_type = other DNA
atgggcagttttggaactttgttcaggttgatgttatcatcctacctttcacaagattctgcctgtaaggtgatatcaag

SEQ ID NO: 22712 - DNA, 80 bp, synthetic construct; identical to SEQ ID NO: 9591
  source 1..80: mol_type = other DNA

SEQ ID NO: 22713 - DNA, 80 bp, synthetic construct
  source 1..80: mol_type = other DNA
taacctttgtaagaaagtttaagtacgatcatattcagaggtaggacatactataaacaaggtttctggtctttgtgttt

SEQ ID NO: 22714 - DNA, 80 bp, synthetic construct
  source 1..80: mol_type = other DNA
aaaggtaccccctttttactgattctctctgaatacctgcttctttgtaaattaccactcctttgtcttccagtccttga

SEQ ID NO: 22715 - DNA, 80 bp, synthetic construct
  source 1..80: mol_type = other DNA
aagcctggtctataaccacagacacttcacttacacctttcccatttctccatatcctgggtagcaaatatgcatctcta

SEQ ID NO: 22716 - DNA, 80 bp, synthetic construct
  source 1..80: mol_type = other DNA
acgatgctttctccttttgctccttggctgaagaatactgctaatttgaacttccatgaattcagactgttgagtctcaa

SEQ ID NO: 22717 - DNA, 80 bp, synthetic construct; identical to SEQ ID NO: 9592
  source 1..80: mol_type = other DNA

SEQ ID NO: 22718 - DNA, 80 bp, synthetic construct
  source 1..80: mol_type = other DNA
tacaaataagatcaaggttcacccattctggagaaatatcctttatttcatcctctgggctcctctggcttgtaaccatt

SEQ ID NO: 22719 - DNA, 80 bp, synthetic construct
  source 1..80: mol_type = other DNA
ttgaactcttcagagtctcctaaagtgcctctccctctccactctttctctcttccgaattctcttgtatatttctatca

SEQ ID NO: 22720 - DNA, 80 bp, synthetic construct
  source 1..80: mol_type = other DNA
acatgaattctccatttcagaatggtctaagacctctagaatcagagagttctgaattcaaaacctgtttttaccacttt

SEQ ID NO: 22721 - DNA, 80 bp, synthetic construct; identical to SEQ ID NO: 9593
  source 1..80: mol_type = other DNA

SEQ ID NO: 22722 - DNA, 80 bp, synthetic construct
  source 1..80: mol_type = other DNA
ggttttatgataccatatcaaggacttgatacttacccctgcagttttggaaacacggtggattagtgtctgtctcctac

SEQ ID NO: 22723 - DNA, 80 bp, synthetic construct
  source 1..80: mol_type = other DNA
atgcagggtcactgtagatcttgcctaagagggaggtaaatagacaatagtaggaagaagctgccggtatcttgagatgc

SEQ ID NO: 22724 - DNA, 80 bp, synthetic construct
  source 1..80: mol_type = other DNA
aggtcagaagtttgagaccagcctggcaaacatggtgaaaccccgactctactaaaaatacaaaaattagccaggtgtgg

SEQ ID NO: 22725 - DNA, 80 bp, synthetic construct; identical to SEQ ID NO: 9594
  source 1..80: mol_type = other DNA

SEQ ID NO: 22726 - DNA, 80 bp, synthetic construct
  source 1..80: mol_type = other DNA
tgtgtctatgcttacaaccccaacaagtcagaagtcaacaagatgacagaagaggaggagaggttgggtggagaactaga

SEQ ID NO: 22727 - DNA, 80 bp, synthetic construct
  source 1..80: mol_type = other DNA
ttttaagtgactgaagaactgtctgcattaccttccagtgaccagagaagtagtctgtcagttttcacctagcaatccac

SEQ ID NO: 22728 - DNA, 80 bp, synthetic construct; identical to SEQ ID NO: 9595
  source 1..80: mol_type = other DNA

SEQ ID NO: 22729 - DNA, 80 bp, synthetic construct
  source 1..80: mol_type = other DNA
cagcatgaataaaattgcatatctatatagggagacactctcatctttgccaggctttcctcttagaggtagtcaatcaa

SEQ ID NO: 22730 - DNA, 80 bp, synthetic construct
  source 1..80: mol_type = other DNA
ctgctccctggaactttacagtttaaagtagagtctgctgatggtatgagcatgtcagcaagatgcagccctgtcttgtc

SEQ ID NO: 22731 - DNA, 80 bp, synthetic construct
  source 1..80: mol_type = other DNA
atccttcctgggattagtccttaagggagatcatcatctactcactcgcagatagttactgcactcctactctttgctgc

SEQ ID NO: 22732 - DNA, 80 bp, synthetic construct; identical to SEQ ID NO: 9596
  source 1..80: mol_type = other DNA

SEQ ID NO: 22733 - DNA, 80 bp, synthetic construct
  source 1..80: mol_type = other DNA
gatcacctgaggtcaggagttcgagatcagcctggccaatatggtgaaaccctgcctctactgaaaatacaaaaattagc

SEQ ID NO: 22734 - DNA, 80 bp, synthetic construct
  source 1..80: mol_type = other DNA
gaattaaccttctttcatcttataatgatacctcctatgtttatagcagaagacactcaactacagccacaactcaagcc

SEQ ID NO: 22735 - DNA, 80 bp, synthetic construct
  source 1..80: mol_type = other DNA
tttttttcatccactgagtgttcagtaagggagtatatccaggcagatgttcttcctcaggatataagcagtccactggc

SEQ ID NO: 22736 - DNA, 80 bp, synthetic construct; identical to SEQ ID NO: 9597
  source 1..80: mol_type = other DNA

SEQ ID NO: 22737 - DNA, 80 bp, synthetic construct
  source 1..80: mol_type = other DNA
atacaaccagccaatacacatatgaaaaactgctcaacaacgctaaccaccagagaaatgcaaatcaaaaccaatgagat

SEQ ID NO: 22738 - DNA, 80 bp, synthetic construct
  source 1..80: mol_type = other DNA
aacagaactaccattcaactcagaaatctcaccactgggtgtccacccaaaggaaaataaatcattttaccataaagaca

SEQ ID NO: 22739 - DNA, 80 bp, synthetic construct
  source 1..80: mol_type = other DNA
aacgtggatgcagctggaggccattatcttaagtgagttaatgtagaaacagaaaatcaaataccgtatgtgctcactta

SEQ ID NO: 22740 - DNA, 80 bp, synthetic construct; identical to SEQ ID NO: 9598
  source 1..80: mol_type = other DNA

SEQ ID NO: 22741 - DNA, 80 bp, synthetic construct
  source 1..80: mol_type = other DNA
ctggctgggcgcggtggcttgtgcctgtaatcccagcactttgggaggctgaggtgggcagatcacaaggtcaggagttc

SEQ ID NO: 22742 - DNA, 80 bp, synthetic construct
  source 1..80: mol_type = other DNA
cactgcactccagcctgggcaatagagcaagactgtgtctaaaaaaaaaaaaaaaaaagaaaagaaaaaagaaatgcaga

SEQ ID NO: 22743 - DNA, 80 bp, synthetic construct
  source 1..80: mol_type = other DNA
aaccatcctcttttcttgtctgctgactatggcataatttggagtctgtgcttcaaggccaatgtgtattaactgtgtga

SEQ ID NO: 22744 - DNA, 80 bp, synthetic construct
  source 1..80: mol_type = other DNA
gaaaccagtggttttcaacctggggtgcaaattagaatcagctttccagacgactaatgtctgggcaccactccagagac

SEQ ID NO: 22745 - DNA, 80 bp, synthetic construct; identical to SEQ ID NO: 9599
  source 1..80: mol_type = other DNA

SEQ ID NO: 22746 - DNA, 80 bp, synthetic construct
  source 1..80: mol_type = other DNA
tcttggacctgcagataaggtttttaccaatttcttaattagaagacctggaggcctggtatcagttcttactgagtatt

SEQ ID NO: 22747 - DNA, 80 bp, synthetic construct
  source 1..80: mol_type = other DNA
atacccagcttgatcttggcagtcaaggttctggtccaaaaacacccttagaattccatcttaagacctatttctatctg

SEQ ID NO: 22748 - DNA, 80 bp, synthetic construct
  source 1..80: mol_type = other DNA
gtaataaataatggaataattatacaactcaccataatgtcagatcagtgcaatagggctcgcacttctatgagaatcta

SEQ ID NO: 22749 - DNA, 80 bp, synthetic construct; identical to SEQ ID NO: 9600
  source 1..80: mol_type = other DNA

SEQ ID NO: 22750 - DNA, 80 bp, synthetic construct
  source 1..80: mol_type = other DNA
atgctctgtgttctttctaccatacatggagtgcaatgcccatgtaatatattatggtactccttaaagctttgggggca

SEQ ID NO: 22751 - DNA, 80 bp, synthetic construct
  source 1..80: mol_type = other DNA
ctttcgtgctggagaaattagggagctagtgaattttaatgcatttacaaccattgtccttaccagacaattaacagtcg

SEQ ID NO: 22752 - DNA, 80 bp, synthetic construct; identical to SEQ ID NO: 9601
  source 1..80: mol_type = other DNA

SEQ ID NO: 22753 - DNA, 80 bp, synthetic construct
  source 1..80: mol_type = other DNA
taatgctattatttctctcatggcccattcctcctccagaggtaattattgcaattttatgtcttgaatatgccccatgt

SEQ ID NO: 22754 - DNA, 80 bp, synthetic construct
  source 1..80: mol_type = other DNA
aggtgctatctttcttcaaatttctgaagacctgcatgaattccaatagtagagacaaaaccaaggctagatgctgtagt

SEQ ID NO: 22755 - DNA, 80 bp, synthetic construct
  source 1..80: mol_type = other DNA
gaattgtcatcaggaacatctctgtatgggggttaaggctctccctcaatatagggtgccagagggttgtaattctcagt

SEQ ID NO: 22756 - DNA, 80 bp, synthetic construct; identical to SEQ ID NO: 9602
  source 1..80: mol_type = other DNA

SEQ ID NO: 22757 - DNA, 80 bp, synthetic construct
  source 1..80: mol_type = other DNA
catgaaggccacatacaaaaataatcaccttgagatctctggctggtgaggttataaagttacaagttttttttttttct

SEQ ID NO: 22758 - DNA, 80 bp, synthetic construct
  source 1..80: mol_type = other DNA
aaataagacacaggatgtttatatttatataaaccctttctctatagcaaagctcaaatctaaatctatctgtctggaag

SEQ ID NO: 22759 - DNA, 80 bp, synthetic construct
  source 1..80: mol_type = other DNA
ctgatgttggaaaacagtaaaagctagtactatgtttttacccacttcagggagaatcaagttattgtgcctgtactcta

SEQ ID NO: 22760 - DNA, 80 bp, synthetic construct
  source 1..80: mol_type = other DNA
caacagtaccctgcttagatatttattatggggctttaataagattatatgagaccagtgcccagcttagcgaagacatt

SEQ ID NO: 22761 - DNA, 80 bp, synthetic construct; identical to SEQ ID NO: 9603
  source 1..80: mol_type = other DNA

SEQ ID NO: 22762 - DNA, 80 bp, synthetic construct
  source 1..80: mol_type = other DNA
caggagcatctgcagggggcccagagccctctggggagtatttttccctgatagctggagggagtgtgtgctctcaatgg

SEQ ID NO: 22763 - DNA, 80 bp, synthetic construct
  source 1..80: mol_type = other DNA
cctagacctcagcttcatcatgcaatgggagaggtattagttgtgaatggctcaaaggtattacattaattatgtctgac

SEQ ID NO: 22764 - DNA, 80 bp, synthetic construct
  source 1..80: mol_type = other DNA
catttgttgggtcctcgagactcattgaggagtcttcttgttcactctcatcctggaagagggttatgcttgcaaccgtg

SEQ ID NO: 22765 - DNA, 80 bp, synthetic construct; identical to SEQ ID NO: 9604
  source 1..80: mol_type = other DNA

SEQ ID NO: 22766 - DNA, 80 bp, synthetic construct
  source 1..80: mol_type = other DNA
gctgggatctaaactcaggccatctaaatcaaatcgagtatttatagatttggttggggagttgggcagacctggtttga

SEQ ID NO: 22767 - DNA, 80 bp, synthetic construct
  source 1..80: mol_type = other DNA
cttagcatagtgccagccttatactagggaatcaatatttgaaaactacatccttagttggctttatcgatactaagggt

SEQ ID NO: 22768 - DNA, 80 bp, synthetic construct; identical to SEQ ID NO: 9605
  source 1..80: mol_type = other DNA

SEQ ID NO: 22769 - DNA, 80 bp, synthetic construct
  source 1..80: mol_type = other DNA
gattttatccactcacagggtagccgtgggaggtggagagactctgtaagctttgacacacaggggattctcattacagt

SEQ ID NO: 22770 - DNA, 80 bp, synthetic construct
  source 1..80: mol_type = other DNA
aagttgcggatgcctagaccccagctaaaggctttctgaggttactgtctccatcaccagcagtgttagcagctgccagg

SEQ ID NO: 22771 - DNA, 80 bp, synthetic construct
  source 1..80: mol_type = other DNA
agatcctaaaggtggggaggccttggggcttccgaaaacggcagtgagggtgggagctcttcctctgggtttcttagagt

SEQ ID NO: 22772 - DNA, 80 bp, synthetic construct; identical to SEQ ID NO: 9606
  source 1..80: mol_type = other DNA

SEQ ID NO: 22773 - DNA, 80 bp, synthetic construct
  source 1..80: mol_type = other DNA
tgacaatatcatcttctctgggggatgggggcgatgtgggggaaggcccctctgtaaacatgttgggactatatcaaggt

SEQ ID NO: 22774 - DNA, 80 bp, synthetic construct
  source 1..80: mol_type = other DNA
gcataaacttcctctgactccagccactgagctgggcaacacccctctccactggcaatagttgggagaggggtgttgcc

SEQ ID NO: 22775 - DNA, 80 bp, synthetic construct
  source 1..80: mol_type = other DNA
catttttaagcacctaattgtgtctagattcaggctgggcatgtttcatatctcctctcactcatttctcctgacagccc

SEQ ID NO: 22776 - DNA, 80 bp, synthetic construct
  source 1..80: mol_type = other DNA
gccagctggattcttctggtcacaggagatggcgtggctgttgggctgtggggcaggagggaggcagctctacctggagc

SEQ ID NO: 22777 - DNA, 80 bp, synthetic construct; identical to SEQ ID NO: 9607
  source 1..80: mol_type = other DNA

SEQ ID NO: 22778 - DNA, 80 bp, synthetic construct
  source 1..80: mol_type = other DNA
ggcttagtgagggagatagagataacattaccctggaatccctctagcttggtactggtccccaactatttacaagaagg

SEQ ID NO: 22779 - DNA, 80 bp, synthetic construct
  source 1..80: mol_type = other DNA
tgtgcaatattcttctccctagatggtcatccgttctatgcagaaggtaaactggctccaggaaataacaactttatttg

SEQ ID NO: 22780 - DNA, 80 bp, synthetic construct
  source 1..80: mol_type = other DNA
ccagtgactactcccagcctgtggagagacgaaggggagaactctttgtttacacaatggggtgggattctctatctgcc

SEQ ID NO: 22781 - DNA, 80 bp, synthetic construct; identical to SEQ ID NO: 9608
  source 1..80: mol_type = other DNA

SEQ ID NO: 22782 - DNA, 80 bp, synthetic construct
  source 1..80: mol_type = other DNA
catctgatactaagttttcttactcttatcctccttttcttgactttccacagaagattttgtcactgagtttaataaac

SEQ ID NO: 22783 - DNA, 80 bp, synthetic construct
  source 1..80: mol_type = other DNA
gataagcctgtttccagggatgatcaccagcaccctgaaaagtcttacaaaatcaatcagagagcaatttacagaaaaat

SEQ ID NO: 22784 - DNA, 80 bp, synthetic construct
  source 1..80: mol_type = other DNA
ggaaggggcccgctggtcaccttctgcctagatcacagcagctccccacagctaatccaacctgattccttttattgcta

SEQ ID NO: 22785 - DNA, 80 bp, synthetic construct; identical to SEQ ID NO: 9609
  source 1..80: mol_type = other DNA

SEQ ID NO: 22786 - DNA, 80 bp, synthetic construct
  source 1..80: mol_type = other DNA
ggtttaaattattctagtcacaggcaggctattcaaataaaatagaatttcaaaccacacggggcttgttgagacattca

SEQ ID NO: 22787 - DNA, 80 bp, synthetic construct
  source 1..80: mol_type = other DNA
gattcgagcaggtctgacagcaagtgagcacatgaaagccactgcaagccttccctccccggtggcaactttaattattt

SEQ ID NO: 22788 - DNA, 80 bp, synthetic construct
  source 1..80: mol_type = other DNA
gtctttaaatattcatgccccgtgtgtaactgtgcagagagataggaggcagccgtggtagtcagcaagagcaggctgca

SEQ ID NO: 22789 - DNA, 80 bp, synthetic construct; identical to SEQ ID NO: 9610
  source 1..80: mol_type = other DNA

SEQ ID NO: 22790 - DNA, 80 bp, synthetic construct
  source 1..80: mol_type = other DNA
ggggcatttgttacattttccaggtgaatgtgactggtgaaacacagaactactggttaactcactttctagactttgca

SEQ ID NO: 22791 - DNA, 80 bp, synthetic construct
  source 1..80: mol_type = other DNA
ccagtcgccagtccctgtaggcctgatgctcatcagagtcctgtccccaaaactctgcctagtgtccatctttctgcact

SEQ ID NO: 22792 - DNA, 80 bp, synthetic construct; identical to SEQ ID NO: 9611
  source 1..80: mol_type = other DNA

SEQ ID NO: 22793 - DNA, 80 bp, synthetic construct
  source 1..80: mol_type = other DNA
acttattcccttcctttcattatgcctgctgagccaagttctggaaaagggcagggaatagcagaaacagcccagagcaa

SEQ ID NO: 22794 - DNA, 80 bp, synthetic construct
  source 1..80: mol_type = other DNA
aagagtaaatttaaagaccaaatgctcttaaggatcctcccgtcctctccggtgggccaaccatctgtcttcatttatat

SEQ ID NO: 22795 - DNA, 80 bp, synthetic construct
  source 1..80: mol_type = other DNA
aggatttaaggtggttcacagagatacataaaatctagtaggatagcatagcctagaagagggtgagaaggaagtggcga

SEQ ID NO: 22796 - DNA, 80 bp, synthetic construct; identical to SEQ ID NO: 9612
  source 1..80: mol_type = other DNA

SEQ ID NO: 22797 - DNA, 80 bp, synthetic construct
  source 1..80: mol_type = other DNA
gtccagaacgagatgactggccaaacccaaactacgtgtaggttttctactacacgcaagatgttgatgcaggtgcagtg

SEQ ID NO: 22798 - DNA, 80 bp, synthetic construct
  source 1..80: mol_type = other DNA
aatgctcttccaagccctttggacattatctatttaatcctcactcttcaggataggcactataaatgtgttcactttcc

SEQ ID NO: 22799 - DNA, 80 bp, synthetic construct
  source 1..80: mol_type = other DNA
aaagaatatgactgtatgctaaggaacagggcgccagtccctccacccacaccaatgagataacagcatcaggaaccatt

SEQ ID NO: 22800 - DNA, 80 bp, synthetic construct; identical to SEQ ID NO: 9613
  source 1..80: mol_type = other DNA

SEQ ID NO: 22801 - DNA, 80 bp, synthetic construct
  source 1..80: mol_type = other DNA
acaagaggtgggaggagaaattagagaactagagaaacaaggagacttgcctcacatggagagctcttgatcggtgcagg

SEQ ID NO: 22802 - DNA, 80 bp, synthetic construct
  source 1..80: mol_type = other DNA
tctagcctagggatatctttgaggaaacaggtttctggcctgcaatggagaagaaagcccacctgtcaacaatttctttt

SEQ ID NO: 22803 - DNA, 80 bp, synthetic construct
  source 1..80: mol_type = other DNA
ctgcgcctggccaacaatttcattctaaactgcctgtgaggtcccagcaccatcatctgggctaccacatccctgatctt

SEQ ID NO: 22804 - DNA, 80 bp, synthetic construct; identical to SEQ ID NO: 9614
  source 1..80: mol_type = other DNA

SEQ ID NO: 22805 - DNA, 80 bp, synthetic construct
  source 1..80: mol_type = other DNA
tctctcagtaaaggctgttattaagtaacaaattcgggtgggtcaagggcagagtaaccaagagatctcagcaagcatga

SEQ ID NO: 22806 - DNA, 80 bp, synthetic construct
  source 1..80: mol_type = other DNA
tgagtagaagtcatggagaggtggagcttgcctccaggtaaggaaagctaatctgtgattgagaacaacagcatgtctgc

SEQ ID NO: 22807 - DNA, 80 bp, synthetic construct; identical to SEQ ID NO: 9615
  source 1..80: mol_type = other DNA

SEQ ID NO: 22808 - DNA, 80 bp, synthetic construct
  source 1..80: mol_type = other DNA
cgttgggagctctgctggccatatagaccctctgtgatcccacatcctgcccagcctggtgtctctgagtctggagtcag

SEQ ID NO: 22809 - DNA, 80 bp, synthetic construct
  source 1..80: mol_type = other DNA
tgcagggaatggaccatggaccgggtatagggtgaggctccctgggcacaaccctggggcaaatgacacaaggacttgct

SEQ ID NO: 22810 - DNA, 80 bp, synthetic construct
  source 1..80: mol_type = other DNA
tattttaagtaaccaaaggtgacatctatcttggccagatttaatcactcgaaagcccaaggtgtgaagagggaattgtg

SEQ ID NO: 22811 - DNA, 80 bp, synthetic construct
  source 1..80: mol_type = other DNA
tcctttagggtcctgacctgccattgaggagtgtggggtgacagtgtgccttgggtccagccacagaagccatcttcaaa

SEQ ID NO: 22812 - DNA, 80 bp, synthetic construct; identical to SEQ ID NO: 9616
  source 1..80: mol_type = other DNA

SEQ ID NO: 22813 - DNA, 80 bp, synthetic construct
  source 1..80: mol_type = other DNA
taaattctgcactctttatactcagccaccatgaatgtgaccccaggagaagccactgtatagctcactacatttctaat

SEQ ID NO: 22814 - DNA, 80 bp, synthetic construct
  source 1..80: mol_type = other DNA
atcttctctgaattaaggctgctaaaagcccttgtgtaaatctttggtctctctgttcccttgctgaaacaaccaatgaa

SEQ ID NO: 22815 - DNA, 80 bp, synthetic construct; identical to SEQ ID NO: 9617
  source 1..80: mol_type = other DNA

SEQ ID NO: 22816 - DNA, 80 bp, synthetic construct
  source 1..80: mol_type = other DNA
tgagggagagagctcactttctccagctcactctgagcatggctccaggaaaggcactcagccctaaggagctagtggcc

SEQ ID NO: 22817 - DNA, 80 bp, synthetic construct
  source 1..80: mol_type = other DNA
gccctaacgcttcctggctgtgacagcaccttagtgaattattactcatttcccccagattctctgtgcatttcacacag

SEQ ID NO: 22818 - DNA, 80 bp, synthetic construct
  source 1..80: mol_type = other DNA
agctaagaagaactttctgttttattttttatttccccctcaagggatcccacatctacttctcttgcagaaaccaactg

SEQ ID NO: 22819 - DNA, 80 bp, synthetic construct
  source 1..80: mol_type = other DNA
ggagactctgtcttgactaaaaatacagaaattagccgggtctggtggtgggtgcctgtaatctcagctactcgggaggc

SEQ ID NO: 22820 - DNA, 80 bp, synthetic construct; identical to SEQ ID NO: 9618
  source 1..80: mol_type = other DNA

SEQ ID NO: 22821 - DNA, 80 bp, synthetic construct
  source 1..80: mol_type = other DNA
aaaatggggcagtattagtgtctattttactgagctggtttgaggataaagtaggggagagagtgtggaaacactttgta

SEQ ID NO: 22822 - DNA, 80 bp, synthetic construct
  source 1..80: mol_type = other DNA
cctatgcctttcagctggacagaagaaagccactgaagaaagccatcagcattctctgtctctggaatcccattcttgtt

SEQ ID NO: 22823 - DNA, 80 bp, synthetic construct
  source 1..80: mol_type = other DNA
gcaattaaaacccctaagggaggaaggagagctgaggatttccatgattgtaaactcatcagggcagcttgctcagccag

SEQ ID NO: 22824 - DNA, 80 bp, synthetic construct; identical to SEQ ID NO: 9619
  source 1..80: mol_type = other DNA

SEQ ID NO: 22825 - DNA, 80 bp, synthetic construct
  source 1..80: mol_type = other DNA
aatcagaatctgcatttttaagaggctcccctagtgactcctgtgcaccttaaatctggagaagcactgttctaaccaac

SEQ ID NO: 22826 - DNA, 80 bp, synthetic construct
  source 1..80: mol_type = other DNA
gtgggagctgccaagtataaactccaggccaaatgacactacttcttttccttcctgcgtgacaactctgttaacatttt

SEQ ID NO: 22827 - DNA, 80 bp, synthetic construct; identical to SEQ ID NO: 9620
  source 1..80: mol_type = other DNA

SEQ ID NO: 22828 - DNA, 80 bp, synthetic construct
  source 1..80: mol_type = other DNA
cttggatttggcgatgtttaattagaaatgcaggagtggctgtattggagaggggaccgagagtactgtgttggagtgtg

SEQ ID NO: 22829 - DNA, 80 bp, synthetic construct
  source 1..80: mol_type = other DNA
gataatctgtttgcagccccagcatgtgcggaggactccctctgggaaggtgtggggagttgaggctggcttttggtagg

SEQ ID NO: 22830 - DNA, 80 bp, synthetic construct
  source 1..80: mol_type = other DNA
cattttaacaggttccagaccacctggaaagagctggtgtagtcaagagtattttcctatgatgttggtgttgattctgg

SEQ ID NO: 22831 - DNA, 80 bp, synthetic construct
  source 1..80: mol_type = other DNA
agggggaggcccccagagaaaggcggtagcagggccctggacctccctgtctcttcctggccccttcatcctgggtgtgt

SEQ ID NO: 22832 - DNA, 80 bp, synthetic construct; identical to SEQ ID NO: 9621
  source 1..80: mol_type = other DNA

SEQ ID NO: 22833 - DNA, 80 bp, synthetic construct
  source 1..80: mol_type = other DNA
taagaaaaaggatattttctaagagttttgctaagatctgagtgggaataactctcctgaattgaacttccctcccagca

SEQ ID NO: 22834 - DNA, 80 bp, synthetic construct
  source 1..80: mol_type = other DNA
tggccaggaaaccagtagtggtaagctttggagtggtgggaaatgccctgagcccatagtaatggactggatcctgaagg

SEQ ID NO: 22835 - DNA, 80 bp, synthetic construct; identical to SEQ ID NO: 9622
  source 1..80: mol_type = other DNA

SEQ ID NO: 22836 - DNA, 80 bp, synthetic construct
  source 1..80: mol_type = other DNA
cagggtaagcaaagcccttccctgtaactctttgctgagttttatctaaaaacatacaactattccattatcattggaaa

SEQ ID NO: 22837 - DNA, 80 bp, synthetic construct
  source 1..80: mol_type = other DNA
ataaatgaaaccttctccaccccccacaaagggtccagatgactgggggcagagggccctgttttaaaacgtattttgga

SEQ ID NO: 22838 - DNA, 80 bp, synthetic construct
  source 1..80: mol_type = other DNA
gccaagttattcatctctgctccaggatctggcacattttccagctgcctgtaggtattctggaagcgttggtggtttca

SEQ ID NO: 22839 - DNA, 80 bp, synthetic construct
  source 1..80: mol_type = other DNA
actcattctttcctctcatcaatgaagagtcagtaagcacagacgctgtgccaggaatcatgagaggtattgctatggga

SEQ ID NO: 22840 - DNA, 80 bp, synthetic construct; identical to SEQ ID NO: 9623
  source 1..80: mol_type = other DNA

SEQ ID NO: 22841 - DNA, 80 bp, synthetic construct
  source 1..80: mol_type = other DNA
aaaagtaatggcaatgatgatatttggatggatccactggattgtgggggaaggatccagagggagaagaaccagtggta

SEQ ID NO: 22842 - DNA, 80 bp, synthetic construct
  source 1..80: mol_type = other DNA
ggaggagggagaggatgaggggcaggtggggaatgggacttggaaggcgagggaagtctgggcatagaggacttccaatg

SEQ ID NO: 22843 - DNA, 80 bp, synthetic construct; identical to SEQ ID NO: 9624
  source 1..80: mol_type = other DNA

SEQ ID NO: 22844 - DNA, 80 bp, synthetic construct
  source 1..80: mol_type = other DNA
agggccatcttggagcctggggatgttcctggagagcacacagacacacaaccatggtaagtttgcatggccccaggcag

SEQ ID NO: 22845 - DNA, 80 bp, synthetic construct
  source 1..80: mol_type = other DNA
ccatggcctgctggggtatctcactttctaggaaggtgagcagcagagtggtccatgttccctccatgacattcctcctc

SEQ ID NO: 22846 - DNA, 80 bp, synthetic construct
  source 1..80: mol_type = other DNA
ctggagtgacttattgagaagatattagaaagatgcagcactttctgttctggaatgcaaagaacaccatcatgcaagcc

SEQ ID NO: 22847 - DNA, 80 bp, synthetic construct; identical to SEQ ID NO: 9625
  source 1..80: mol_type = other DNA

SEQ ID NO: 22848 - DNA, 80 bp, synthetic construct
  source 1..80: mol_type = other DNA
ggctgatgtcagatggggagactctggcccctgtggagatgagcaggtagggctcacctgggtcaacaccccgagtgagc

SEQ ID NO: 22849 - DNA, 80 bp, synthetic construct
  source 1..80: mol_type = other DNA
ctggctgcaaatcaaactcaactgattctgatgaggtactctccaggttaggtgatctttaatatctaaaagtccatgat

SEQ ID NO: 22850 - DNA, 80 bp, synthetic construct
  source 1..80: mol_type = other DNA
cttaatgatgtccatttcctaagtgggaaaactgaggtcagagaggttcagtgacttatctcaggccccacacctggtat

SEQ ID NO: 22851 - DNA, 80 bp, synthetic construct; identical to SEQ ID NO: 9626
  source 1..80: mol_type = other DNA

SEQ ID NO: 22852 - DNA, 80 bp, synthetic construct
  source 1..80: mol_type = other DNA
caatcctcacaccttcctccccacctccatttggggagctgctgcttccatgcaacctgcctccagaacgcttgtgcaca

SEQ ID NO: 22853 - DNA, 80 bp, synthetic construct
  source 1..80: mol_type = other DNA
ccgtgaaaatgttacctatgtggtaaaagaggctttgctgctgtgattaagaatctttagctggagatattaacctggaa

SEQ ID NO: 22854 - DNA, 80 bp, synthetic construct
  source 1..80: mol_type = other DNA
aagcgattctcctaaagcctccaggaggaacctggcctgcctgacatgactttagtccagtgaaactaatttcatacttc

SEQ ID NO: 22855 - DNA, 80 bp, synthetic construct
  source 1..80: mol_type = other DNA
atccacttctcagtgctctaatttgtttttgtgactagacctttgtggtcccctggactattcatctctacctttttctt

SEQ ID NO: 22856 - DNA, 80 bp, synthetic construct; identical to SEQ ID NO: 9627
  source 1..80: mol_type = other DNA

SEQ ID NO: 22857 - DNA, 80 bp, synthetic construct
  source 1..80: mol_type = other DNA
cagctttaattttgggcatcaattctttacctatcattcatgtcctcttggaagctagaaggtaaaacgcctttctgcac

SEQ ID NO: 22858 - DNA, 80 bp, synthetic construct
  source 1..80: mol_type = other DNA
ctgcttgctcactaaacttgtaacaaccaggacagggagttctattctttctacttagtaggagaaaatggggaaggcca

SEQ ID NO: 22859 - DNA, 80 bp, synthetic construct; identical to SEQ ID NO: 9628
  source 1..80: mol_type = other DNA

SEQ ID NO: 22860 - DNA, 80 bp, synthetic construct
  source 1..80: mol_type = other DNA
tactttggagactgaggcaggagaaccgcttgaaccagggaggcggaggttgcagtgagccaagaccgcaccattgtact

SEQ ID NO: 22861 - DNA, 80 bp, synthetic construct
  source 1..80: mol_type = other DNA
cacaccaatcacctgtcattcctcaaagaggtcttacagcttcttttactttccttcattctaaaaacagaatccaattg

SEQ ID NO: 22862 - DNA, 80 bp, synthetic construct
  source 1..80: mol_type = other DNA
cttggtagatttctctttggtttagtttcttctgcccatgctttataagtatgtatagttgtgtcatacatataggcctt

SEQ ID NO: 22863 - DNA, 80 bp, synthetic construct; identical to SEQ ID NO: 9629
  source 1..80: mol_type = other DNA

SEQ ID NO: 22864 - DNA, 80 bp, synthetic construct
  source 1..80: mol_type = other DNA
cagctgtgttcatacaggcacatccctcatactacctcctggccaaccctgagttttaccagaatttttatttttaacta

SEQ ID NO: 22865 - DNA, 80 bp, synthetic construct
  source 1..80: mol_type = other DNA
gaagtgattctcctgcctcagcctcccaggcagctgggattacaggtgcctgccaccatgcctggctaatttttgtattt

SEQ ID NO: 22866 - DNA, 80 bp, synthetic construct
  source 1..80: mol_type = other DNA
tttattttttagggaattgccaacgtatcgattaggttcttcctgttttcatactgagttgtatgaggtcattaataagg

SEQ ID NO: 22867 - DNA, 80 bp, synthetic construct
  source 1..80: mol_type = other DNA
tagccttgaccttcccgacctcgggtgattcttccacctcagccttttaaatagctgggaatagaggtgtgcagcaccat

SEQ ID NO: 22868 - DNA, 80 bp, synthetic construct; identical to SEQ ID NO: 9630
  source 1..80: mol_type = other DNA

SEQ ID NO: 22869 - DNA, 80 bp, synthetic construct
  source 1..80: mol_type = other DNA
tacttcttcttacaattaatgtggtagacactgctacatatcattactatggcttgtatgcctgacttcctcatccagct

SEQ ID NO: 22870 - DNA, 80 bp, synthetic construct
  source 1..80: mol_type = other DNA
gctccgagtggttagtggctggctgagagactgatggaaacccactgatttagatcccttgttctctattctttatgcgg

SEQ ID NO: 22871 - DNA, 80 bp, synthetic construct
  source 1..80: mol_type = other DNA
tggaagcacagcagcagcccagaggtgcctacgttttcagcactgctaccaactccgcccagtctccttccccgaatgga

SEQ ID NO: 22872 - DNA, 80 bp, synthetic construct; identical to SEQ ID NO: 9631
  source 1..80: mol_type = other DNA

SEQ ID NO: 22873 - DNA, 80 bp, synthetic construct
  source 1..80: mol_type = other DNA
cccatgtggttcctggtaaccactgaaacacctaaatgccctaataggcaaaagtaagggagatctgagatcaagccact

SEQ ID NO: 22874 - DNA, 80 bp, synthetic construct
  source 1..80: mol_type = other DNA
acccttcgtttgaatctcataaaaactggaaggaccgttagtaatatgctcatttgattaatcagaagactgaggatgtg

SEQ ID NO: 22875 - DNA, 80 bp, synthetic construct; identical to SEQ ID NO: 9632
  source 1..80: mol_type = other DNA

SEQ ID NO: 22876 - DNA, 80 bp, synthetic construct
  source 1..80: mol_type = other DNA
tggattgcttgtggtcaggagttcaagaccagcctgaccaacatagtgaaaccccatctctactaaaaatacaaaaatta

SEQ ID NO: 22877 - DNA, 80 bp, synthetic construct
  source 1..80: mol_type = other DNA
acaacaacaacaacaacaaactgttcctcaggcaattctcaggggcatatggttgagtatcatttccttggaggcctgga

SEQ ID NO: 22878 - DNA, 80 bp, synthetic construct
  source 1..80: mol_type = other DNA
agctgttggtggttgcatgtttatgaggttgattggatagagttagtgtcgactttattaatgctggctgttgttaatga

SEQ ID NO: 22879 - DNA, 80 bp, synthetic construct; identical to SEQ ID NO: 9633
  source 1..80: mol_type = other DNA

SEQ ID NO: 22880 - DNA, 80 bp, synthetic construct
  source 1..80: mol_type = other DNA
gcatcctctgctctttcaatcgtgttttagagatttgatgctacaaaacctacacaactctcctaacgcaaatttctttt

SEQ ID NO: 22881 - DNA, 80 bp, synthetic construct
  source 1..80: mol_type = other DNA
actaatgacactcgttaaaggaggaaatttgagtgctgcttcagtgagaagggggtcttgctcttcaattaaagtgaggg

SEQ ID NO: 22882 - DNA, 80 bp, synthetic construct
  source 1..80: mol_type = other DNA
agtgcacagactaacagctgcagattcctttctgacgttaatgggggtattagaaggcctgagaactgtgtaaattaagc

SEQ ID NO: 22883 - DNA, 80 bp, synthetic construct; identical to SEQ ID NO: 9634
  source 1..80: mol_type = other DNA

SEQ ID NO: 22884 - DNA, 80 bp, synthetic construct
  source 1..80: mol_type = other DNA
ctgggtggggagcttggaaaaagcaggtgccacaggctctctgggtgataattgagtacagccaagtctgagaacctctg

SEQ ID NO: 22885 - DNA, 80 bp, synthetic construct
  source 1..80: mol_type = other DNA
ttgcaggcccaaggacccactttgttcagtttgtgttgatgagctgcctaaggtatagagaaaataatactaggctccag

SEQ ID NO: 22886 - DNA, 80 bp, synthetic construct
  source 1..80: mol_type = other DNA
acagaatacatgggttcttattatgggctaacttcagagactatcctaaggactttgagaggaccagctatggagggtgg

SEQ ID NO: 22887 - DNA, 80 bp, synthetic construct; identical to SEQ ID NO: 9635
  source 1..80: mol_type = other DNA

SEQ ID NO: 22888 - DNA, 80 bp, synthetic construct
  source 1..80: mol_type = other DNA
ctagaatcatcttgatctcaacaattcctgctaatttggatgccactttccccaactgcttgctcttctctcttgaagaa

SEQ ID NO: 22889 - DNA, 80 bp, synthetic construct
  source 1..80: mol_type = other DNA
gtcacatagcaagtgctaatgtatgtagtcaaataatacaaaccagatcaccgagtttcagtagaagaatgtcgtgaggt

SEQ ID NO: 22890 - DNA, 80 bp, synthetic construct
  source 1..80: mol_type = other DNA
gggcggatcacctgaggtggggagttcaagaccagcctggccaacatggcgaaaccctgtctctactaaaaatacaataa

SEQ ID NO: 22891 - DNA, 80 bp, synthetic construct; identical to SEQ ID NO: 9636
  source 1..80: mol_type = other DNA

SEQ ID NO: 22892 - DNA, 80 bp, synthetic construct
  source 1..80: mol_type = other DNA
ggccgtggcaaggagcatggaccttatttaaggagtttagacaagaaactgaaaaaaatctaagtctttagaaagatcat

SEQ ID NO: 22893 - DNA, 80 bp, synthetic construct
  source 1..80: mol_type = other DNA
acataaaggatggcactagggtgggaccagggctgtctgacatgacagagcctatgagggctggtttccaacttccaaat

SEQ ID NO: 22894 - DNA, 80 bp, synthetic construct
  source 1..80: mol_type = other DNA
tgttgtgtgatcctttcctaaggttttcctattcaacatttatcttcattgctttgctgaaaacacacaccaataatttc

SEQ ID NO: 22895 - DNA, 80 bp, synthetic construct; identical to SEQ ID NO: 9637
  source 1..80: mol_type = other DNA

SEQ ID NO: 22896 - DNA, 80 bp, synthetic construct
  source 1..80: mol_type = other DNA
atgacatccacggtagccacagtagaagggctggctactttctaaagagacaagatagccaccgggtgctgatgccactg

SEQ ID NO: 22897 - DNA, 80 bp, synthetic construct
  source 1..80: mol_type = other DNA
catctgacatttacacatgataaacccataagaggcttccacacctccatctttactgaaacgttaccttctcagcaagg

SEQ ID NO: 22898 - DNA, 80 bp, synthetic construct
  source 1..80: mol_type = other DNA
tacctgtataactgagcaatatacacctttcttattagtgttgttggtagtctgtctgcctgactagcactcaggggatg

SEQ ID NO: 22899 - DNA, 80 bp, synthetic construct; identical to SEQ ID NO: 9638
  source 1..80: mol_type = other DNA

SEQ ID NO: 22900 - DNA, 80 bp, synthetic construct
  source 1..80: mol_type = other DNA
catgggctgctgggagccaccatacatggaggagagtgatggctgattcacagtgagtagcgagaggctgggagacagtc

SEQ ID NO: 22901 - DNA, 80 bp, synthetic construct
  source 1..80: mol_type = other DNA
tccatctctcaaaaaaaaagtgcttcccattctaggcacaaagccaagtgcaaaacagactccaacctagcagtgtgcag

SEQ ID NO: 22902 - DNA, 80 bp, synthetic construct
  source 1..80: mol_type = other DNA
gctaggagtcaagaacctctttgtattttttagtttttagttcttttctaagcctctcatgtgagggtctgaacttctca

SEQ ID NO: 22903 - DNA, 80 bp, synthetic construct
  source 1..80: mol_type = other DNA
aaatatacaagaagatgactgatttggtatggttactataaaaaaatagaaatagaaaataatgagtgttggcaaagata

SEQ ID NO: 22904 - DNA, 80 bp, synthetic construct; identical to SEQ ID NO: 9639
  source 1..80: mol_type = other DNA

SEQ ID NO: 22905 - DNA, 80 bp, synthetic construct
  source 1..80: mol_type = other DNA
agatggtaaattttatgttatattttagagcaatttgaaagatgactgattatcctggccttgaaaataagccctaatga

SEQ ID NO: 22906 - DNA, 80 bp, synthetic construct
  source 1..80: mol_type = other DNA
ctacagtgccctggcagtgacgaagcctctgagctaacccgacacggctgtgtgctcagtgatctttttttttttttttt

SEQ ID NO: 22907 - DNA, 80 bp, synthetic construct
  source 1..80: mol_type = other DNA
tcttatttttttttagtagagatggggtttcaccatgttagccaggatggtctcgatctcctgacctcgtgatccaccca

SEQ ID NO: 22908 - DNA, 80 bp, synthetic construct; identical to SEQ ID NO: 9640
  source 1..80: mol_type = other DNA

SEQ ID NO: 22909 - DNA, 80 bp, synthetic construct
  source 1..80: mol_type = other DNA
tggcattagcctctcagcctcagtccgcttatttatgaaatgatggggttggaccaggtgagctctgagggatgtttctc

SEQ ID NO: 22910 - DNA, 80 bp, synthetic construct
  source 1..80: mol_type = other DNA
aatggagatgagtttccatgtgcaggaagaaagtgttaggggagggtctggtaatggtgatacatgtggatgacaatttg

SEQ ID NO: 22911 - DNA, 80 bp, synthetic construct; identical to SEQ ID NO: 9641
  source 1..80: mol_type = other DNA

SEQ ID NO: 22912 - DNA, 80 bp, synthetic construct
  source 1..80: mol_type = other DNA
gtattcaataaatagtagacaatgaggaaaatgtggatgacaatcttcaggccatcctgtatactaggacagatattttg

SEQ ID NO: 22913 - DNA, 80 bp, synthetic construct
  source 1..80: mol_type = other DNA
actaacagcatatgatggaagccaccacataacttttgaggctagatcataaagactgtgcagcgtcctccttggtcatg

SEQ ID NO: 22914 - DNA, 80 bp, synthetic construct
  source 1..80: mol_type = other DNA
caatgcatgacctgtcaatgccatgtggcatgaaaaagttacctgcccaaattcttgtcccacacaattgtgaaaaatga

SEQ ID NO: 22915 - DNA, 80 bp, synthetic construct; identical to SEQ ID NO: 9642
  source 1..80: mol_type = other DNA

SEQ ID NO: 22916 - DNA, 80 bp, synthetic construct
  source 1..80: mol_type = other DNA
acttgaaaataatacccaggccgggcgcagtggctcacatctgtaatcccagcactttggaagtcctaggcaggcagatg

SEQ ID NO: 22917 - DNA, 80 bp, synthetic construct
  source 1..80: mol_type = other DNA
agaaggtcgagcctgtagtgagttgtgatctcagcactgcaatccagcctgggtgactgagtgtgagaccctgtcttaat

SEQ ID NO: 22918 - DNA, 80 bp, synthetic construct
  source 1..80: mol_type = other DNA
ttaaaaactttgtatttaagacctttgaaccccaaggttccacttttaggaaacttccttgaggaaatagagttatcaga

SEQ ID NO: 22919 - DNA, 80 bp, synthetic construct; identical to SEQ ID NO: 9643
  source 1..80: mol_type = other DNA

SEQ ID NO: 22920 - DNA, 80 bp, synthetic construct
  source 1..80: mol_type = other DNA
acaatcaaaaaaaggaagtaaatttctctaaaagaagcatgagtgagtcagtccttctttttccttcctaggctgatgct

SEQ ID NO: 22921 - DNA, 80 bp, synthetic construct
  source 1..80: mol_type = other DNA
gggaaaaaaagatccacaggaaggtaccaattgaatgcagtctgctttattttcagagatccacagctcattcacacccc

SEQ ID NO: 22922 - DNA, 80 bp, synthetic construct
  source 1..80: mol_type = other DNA
ttctgaatcacactgtagacccatatttctgacagaggcacaaattgctacttcgtttcacagtgaatctcaacatctga

SEQ ID NO: 22923 - DNA, 80 bp, synthetic construct
  source 1..80: mol_type = other DNA
tcaggggtaaactgtagattattcactgcgtccatttcactggctgaaccaggaagcaattcctgggtccatctgtcaga

SEQ ID NO: 22924 - DNA, 80 bp, synthetic construct; identical to SEQ ID NO: 9644
  source 1..80: mol_type = other DNA

SEQ ID NO: 22925 - DNA, 80 bp, synthetic construct
  source 1..80: mol_type = other DNA
ttatagatgagaaaactggctcaaggtcacatgggtggtaagaggtagagaggaactagaaccgtggtctcctggctgcc

SEQ ID NO: 22926 - DNA, 80 bp, synthetic construct
  source 1..80: mol_type = other DNA
tttccatgagcacttggaggaacactgcacaggaccactaaatgccgtcctttggtttggatggggtggggtgtgaatgg

SEQ ID NO: 22927 - DNA, 80 bp, synthetic construct
  source 1..80: mol_type = other DNA
aaataactggctgtatggtcccatccactcctaagatgcagggaatacttgggcagtaaaatgaaatgatagagatgtat

SEQ ID NO: 22928 - DNA, 80 bp, synthetic construct; identical to SEQ ID NO: 9645
  source 1..80: mol_type = other DNA

SEQ ID NO: 22929 - DNA, 80 bp, synthetic construct
  source 1..80: mol_type = other DNA
cagggctgaaggagttgcttcttctcagagacaacatgatctgtgtcaggctgggcaggggtggaatgcatgagttgtag

SEQ ID NO: 22930 - DNA, 80 bp, synthetic construct
  source 1..80: mol_type = other DNA
gtatcttagcacaattaccataataataaatgctttctgttcatttggtatttgtgcatcctcggggcacccaggggctc

SEQ ID NO: 22931 - DNA, 80 bp, synthetic construct; identical to SEQ ID NO: 9646
  source 1..80: mol_type = other DNA

SEQ ID NO: 22932 - DNA, 80 bp, synthetic construct
  source 1..80: mol_type = other DNA
taattcaatgctctattatgttatcagtgttcactgagtactctccattaaagggacccagattcaatcaggacctttca

SEQ ID NO: 22933 - DNA, 80 bp, synthetic construct
  source 1..80: mol_type = other DNA
ttactgtccatcaagttcttagtggtgcctaacacagagtaagtcttgatgaatgttggctgcattactagctcagtccc

SEQ ID NO: 22934 - DNA, 80 bp, synthetic construct
  source 1..80: mol_type = other DNA
cctctgtttgtttgtagcctcatcaggggaaagtcatttcaaactgcttgtttgtgattgctgcctcataggctgagatt

SEQ ID NO: 22935 - DNA, 80 bp, synthetic construct; identical to SEQ ID NO: 9647
  source 1..80: mol_type = other DNA

SEQ ID NO: 22936 - DNA, 80 bp, synthetic construct
  source 1..80: mol_type = other DNA
tgtacagtgcgactgtggggaagactccaaactggatgagtagaaccaggacctgctgggtcctgtcaccatggctacag

SEQ ID NO: 22937 - DNA, 80 bp, synthetic construct
  source 1..80: mol_type = other DNA
aactgctgctctcagggtgaaggtttgggcaactggcttagtctttccaagtcttactttatgtatgtgtaaaatgggca

SEQ ID NO: 22938 - DNA, 80 bp, synthetic construct
  source 1..80: mol_type = other DNA
gtaagtgactgtattattttattctgcatgctgcatgagaatagccttgggccaccagacatttgttgtggccagtgaaa

SEQ ID NO: 22939 - DNA, 80 bp, synthetic construct
  source 1..80: mol_type = other DNA
tgtgggacagagacagctgccactggctctggtcttgctcagtttctgttggctctcaggggccttctaggcttctcagt

SEQ ID NO: 22940 - DNA, 80 bp, synthetic construct; identical to SEQ ID NO: 9648
  source 1..80: mol_type = other DNA

SEQ ID NO: 22941 - DNA, 80 bp, synthetic construct
  source 1..80: mol_type = other DNA
cacctgagtctaaggaatttctgctacatgtgtatctcccaaactgttttctgcaaaaacactggttctgggaactgttt

SEQ ID NO: 22942 - DNA, 80 bp, synthetic construct
  source 1..80: mol_type = other DNA
gctcctatttgaacatgggacacgttttcaccacaacagtgttgggaaacactgagttatattgtggcttctattttgaa

SEQ ID NO: 22943 - DNA, 80 bp, synthetic construct
  source 1..80: mol_type = other DNA
agcctttgtgcttcacttgggctgggccatgacaggtcagcagggatcacccgataatgacacaggggaggcatcccaga

SEQ ID NO: 22944 - DNA, 80 bp, synthetic construct; identical to SEQ ID NO: 9649
  source 1..80: mol_type = other DNA

SEQ ID NO: 22945 - DNA, 80 bp, synthetic construct
  source 1..80: mol_type = other DNA
ggaagaagaagcaccagagagagaagtggcacttaactggggctgagacaggtgaagagcagaatgctggctttaagatc

SEQ ID NO: 22946 - DNA, 80 bp, synthetic construct
  source 1..80: mol_type = other DNA
cagctgccccgtcataaggagtaggagatgatgaccatcttggaggagggagatgctgtatcctggagaggccactgggg

SEQ ID NO: 22947 - DNA, 80 bp, synthetic construct
  source 1..80: mol_type = other DNA
caggagtggcatagatttattactgttactggttgtggaaatgtatgtagagaggacaggcagaaatgcctttaaaatct

SEQ ID NO: 22948 - DNA, 80 bp, synthetic construct; identical to SEQ ID NO: 9650
  source 1..80: mol_type = other DNA

SEQ ID NO: 22949 - DNA, 80 bp, synthetic construct
  source 1..80: mol_type = other DNA
ggctgtggggtagtgaggaataagagggtttgtgggaagtgggcagagtccagaaagggttgagggatgggagtgaaact

SEQ ID NO: 22950 - DNA, 80 bp, synthetic construct
  source 1..80: mol_type = other DNA
cagtaacagccctttcccaaaacaaacctccttcttgcctggggaccagactgcctttgtaggactaacagactagctac

SEQ ID NO: 22951 - DNA, 80 bp, synthetic construct
  source 1..80: mol_type = other DNA
gatcagtaaactggcccatctgttcttgtggccccatgtcctccatcaggccctgcctgtgcttagaagagcttcaggtc

SEQ ID NO: 22952 - DNA, 80 bp, synthetic construct; identical to SEQ ID NO: 9651
  source 1..80: mol_type = other DNA

SEQ ID NO: 22953 - DNA, 80 bp, synthetic construct
  source 1..80: mol_type = other DNA
atgacccaaaggcagtgtgttgaggtttcaatattttctagtggagaaggtcatgatgaagtgaggatctaaaaaaaaaa

SEQ ID NO: 22954 - DNA, 80 bp, synthetic construct
  source 1..80: mol_type = other DNA
tttgttttgcctgattaggatgttgagactcaaaggtaggaagataaatggacatagctgacacttttaacaaaggacag

SEQ ID NO: 22955 - DNA, 80 bp, synthetic construct; identical to SEQ ID NO: 9652
  source 1..80: mol_type = other DNA

SEQ ID NO: 22956 - DNA, 80 bp, synthetic construct
  source 1..80: mol_type = other DNA
atcagattcctttcttcagaattcaagactgggatagtgctgggtgtctgtgagggttgagctgaatgatcctggggtgg

SEQ ID NO: 22957 - DNA, 80 bp, synthetic construct
  source 1..80: mol_type = other DNA
gaagctaaaacccagaggctttggcatgatacctaagagatgctctcacctcttttgaggagcaagatgaagagctgctt

SEQ ID NO: 22958 - DNA, 80 bp, synthetic construct
  source 1..80: mol_type = other DNA
cctcccaggttcacaccattctcctgcctcagcctcccaagtagctaggactacaggtgcctgccaccgcgcctggctaa

SEQ ID NO: 22959 - DNA, 80 bp, synthetic construct
  source 1..80: mol_type = other DNA
atacctgataccttccctagcaactgattggtttccaaggtgtttggccgactcatgagcatttagctacttcacagttg

SEQ ID NO: 22960 - DNA, 80 bp, synthetic construct; identical to SEQ ID NO: 9653
  source 1..80: mol_type = other DNA

SEQ ID NO: 22961 - DNA, 80 bp, synthetic construct
  source 1..80: mol_type = other DNA
cgtgttgcccaatgggccctagcagtaactgaatggctgcactggaagggaaagacttttagctacaggaagcagttctg

SEQ ID NO: 22962 - DNA, 80 bp, synthetic construct
  source 1..80: mol_type = other DNA
tccatttcctcacatctgccaaacattggtggggagcttaactccaatgtttaggctaccctgagttaggatatacaaag

SEQ ID NO: 22963 - DNA, 80 bp, synthetic construct; identical to SEQ ID NO: 9654
  source 1..80: mol_type = other DNA

SEQ ID NO: 22964 - DNA, 80 bp, synthetic construct
  source 1..80: mol_type = other DNA
cagagcaataatagctgacgtttcctgaggactatatatgtgccaggttgtatgctgacattttgcaagtattaactcat

SEQ ID NO: 22965 - DNA, 80 bp, synthetic construct
  source 1..80: mol_type = other DNA
gtacctggatttgaattcaggcagtctgactcttaacccacattcttaacctctatgctatactccttctccacatcaga

SEQ ID NO: 22966 - DNA, 80 bp, synthetic construct
  source 1..80: mol_type = other DNA
ttaataaataagtatctttcagaaacctcaaacttgttccactcctgcctgattttgggatgggagactgagcagaccca

SEQ ID NO: 22967 - DNA, 80 bp, synthetic construct
  source 1..80: mol_type = other DNA
attctgagctgtcttggacagagaaggagacacctgagttcagccagggttaaagaattctccaggttcctgggcatgag

SEQ ID NO: 22968 - DNA, 80 bp, synthetic construct; identical to SEQ ID NO: 9655
  source 1..80: mol_type = other DNA

SEQ ID NO: 22969 - DNA, 80 bp, synthetic construct
  source 1..80: mol_type = other DNA
tccttcactaggactaaatatgagtcagcaatgattagtggtgacaatgcagacactagttagttctttgccctcatctc

SEQ ID NO: 22970 - DNA, 80 bp, synthetic construct
  source 1..80: mol_type = other DNA
atcataccaccgcttctagcttctagaaaggccagttatattattcctgaaatctcagcagtcatggcaaactttcacgg

SEQ ID NO: 22971 - DNA, 80 bp, synthetic construct
  source 1..80: mol_type = other DNA
ttggaatattcctggtctcccatgtcaaatgccaagctccaggtgggatttgacctagcatctctttcatgtcaatgctc

SEQ ID NO: 22972 - DNA, 80 bp, synthetic construct; identical to SEQ ID NO: 9656
  source 1..80: mol_type = other DNA

SEQ ID NO: 22973 - DNA, 80 bp, synthetic construct
  source 1..80: mol_type = other DNA
ttcatgcaagaaaatctgcaaatgtattaaaacaataactgaaccaagacaggccttccactctttggaaaaggcaatgc

SEQ ID NO: 22974 - DNA, 80 bp, synthetic construct
  source 1..80: mol_type = other DNA
ctcacataaatatttaagcctcacacagagtgttagtgattgggcctatggttcagtctaaggctctccatcttgtttgt

SEQ ID NO: 22975 - DNA, 80 bp, synthetic construct; identical to SEQ ID NO: 9657
  source 1..80: mol_type = other DNA

SEQ ID NO: 22976 - DNA, 80 bp, synthetic construct
  source 1..80: mol_type = other DNA
accttaccagctctgtgaggaccaacaattccctattatatacgttcgtaaatgattaataaatgtttggggagtaataa

SEQ ID NO: 22977 - DNA, 80 bp, synthetic construct
  source 1..80: mol_type = other DNA
aggtatatctaaaaggatgacccaaaccagaatgtaaaggagcctttagaaaaactaacactgcagcatccacacacaaa

SEQ ID NO: 22978 - DNA, 80 bp, synthetic construct
  source 1..80: mol_type = other DNA
cctccacccactttaagttccatcaaatctgtgtgatttggcttccagattgtctcccacacagaggagggttcctggca

SEQ ID NO: 22979 - DNA, 80 bp, synthetic construct; identical to SEQ ID NO: 9658
  source 1..80: mol_type = other DNA

SEQ ID NO: 22980 - DNA, 80 bp, synthetic construct
  source 1..80: mol_type = other DNA
aagataattccacctaacacagttaagcagcacggccctttggtggtgcctaagactttttgggctttgtccagatgctt

SEQ ID NO: 22981 - DNA, 80 bp, synthetic construct
  source 1..80: mol_type = other DNA
ttttctaagaatgtgggtctcagggatctctcttcttctcaggcagagcctgaggtgtgcactaaaataaatcaatggct

SEQ ID NO: 22982 - DNA, 80 bp, synthetic construct
  source 1..80: mol_type = other DNA
cttctgggtcccaggtcttatttagtctgagtggactccatttcctttctttttggataatgcactgctgtcctgccctt

SEQ ID NO: 22983 - DNA, 80 bp, synthetic construct; identical to SEQ ID NO: 9659
  source 1..80: mol_type = other DNA

SEQ ID NO: 22984 - DNA, 80 bp, synthetic construct
  source 1..80: mol_type = other DNA
ggtgaagcataagggccataatggtggtaaaaaataaaagcccacagacatttagaagagaagttatttctaggttgatg

SEQ ID NO: 22985 - DNA, 80 bp, synthetic construct
  source 1..80: mol_type = other DNA
ggtcatgggcctgaaaccacataaactgctagggctcagctagatgcagagatgcagagatgcagagaagcatgggcata

SEQ ID NO: 22986 - DNA, 80 bp, synthetic construct
  source 1..80: mol_type = other DNA
gctattaggagtggtgacagctttcagatggggcataaaccaattgttaaagaccgtccacattattcaccagggtggga

SEQ ID NO: 22987 - DNA, 80 bp, synthetic construct; identical to SEQ ID NO: 9660
  source 1..80: mol_type = other DNA

SEQ ID NO: 22988 - DNA, 80 bp, synthetic construct
  source 1..80: mol_type = other DNA
tccctgtggggtctgcaatttggggtcaccatgtagggtctttttcagtggggcacaggctctcccaggacttctgcttt

SEQ ID NO: 22989 - DNA, 80 bp, synthetic construct
  source 1..80: mol_type = other DNA
tctttgaaacaaataatctttagcccatcctttttcatcacttcattgttcctcatgagccatagcagacctctgaccct

SEQ ID NO: 22990 - DNA, 80 bp, synthetic construct
  source 1..80: mol_type = other DNA
ggtggtgggcaggaagaatcgaagagaacagggggaaagaaggagttactggatggaacaaaaaaggagccaaatacagg

SEQ ID NO: 22991 - DNA, 80 bp, synthetic construct; identical to SEQ ID NO: 9661
  source 1..80: mol_type = other DNA

SEQ ID NO: 22992 - DNA, 80 bp, synthetic construct
  source 1..80: mol_type = other DNA
atcctcccccatttccacagcactgcgtctcattcacctcactatattgtagtcccttctttatctgtcttatccactgt

SEQ ID NO: 22993 - DNA, 80 bp, synthetic construct
  source 1..80: mol_type = other DNA
atatataatttctcttccattggttcccatttacatgggttgctacaacagtaactccccatctagtatttccatcacat

SEQ ID NO: 22994 - DNA, 80 bp, synthetic construct
  source 1..80: mol_type = other DNA
ccagtttctctctcataatggctatctagaacctttttctaagaatgtgggtttcagggatctcttctcttctcaggcag

SEQ ID NO: 22995 - DNA, 80 bp, synthetic construct; identical to SEQ ID NO: 9662
  source 1..80: mol_type = other DNA

SEQ ID NO: 22996 - DNA, 80 bp, synthetic construct
  source 1..80: mol_type = other DNA
gattcagtctatcttcctgggggaatagtaccttttaatctttgtacacaagcccaggggcctcagtgatggacacattt

SEQ ID NO: 22997 - DNA, 80 bp, synthetic construct
  source 1..80: mol_type = other DNA
agcattgagagaatatataataatactatagctggaaactgaagtaacatgggcatgaggtggcatccccttttctagga

SEQ ID NO: 22998 - DNA, 80 bp, synthetic construct
  source 1..80: mol_type = other DNA
actaatattctacattgaattagaatccttcatggttagagattaacgaaagggaggctattcagatacatgtgtctaag

SEQ ID NO: 22999 - DNA, 80 bp, synthetic construct
  source 1..80: mol_type = other DNA
tggtgacttctctgcatcatgggtcggaggtggagctggggaaggaccagctaaccaagtcagctcaccatggacttcat

SEQ ID NO: 23000 - DNA, 80 bp, synthetic construct; identical to SEQ ID NO: 9663
  source 1..80: mol_type = other DNA

SEQ ID NO: 23001 - DNA, 80 bp, synthetic construct
  source 1..80: mol_type = other DNA
ttcatcatccaacactgagcccatctttatgatgcacatattattttgagcattgtaccatcatgtgagttagcaggacc

SEQ ID NO: 23002 - DNA, 80 bp, synthetic construct
  source 1..80: mol_type = other DNA
atgattcctattttgcaatgagaaataccaatgctcagagaggttgagttcggtggatgctgtttgtggctccaaaattt

SEQ ID NO: 23003 - DNA, 80 bp, synthetic construct; identical to SEQ ID NO: 9664
  source 1..80: mol_type = other DNA

SEQ ID NO: 23004 - DNA, 80 bp, synthetic construct
  source 1..80: mol_type = other DNA
tccaaactttattctacagatgatggggaccttgtgcaggaaaaagacacaagtggtgctttccaaaaatgaatcagaac

SEQ ID NO: 23005 - DNA, 80 bp, synthetic construct
  source 1..80: mol_type = other DNA
tacaagctctgaatctgactcaggactacaatcgataccaaaaagggttgggtatttaatggaacatcagaattttaaaa

SEQ ID NO: 23006 - DNA, 80 bp, synthetic construct
  source 1..80: mol_type = other DNA
tgacaattacgactcaaaatatggtgatgctttgcaacatcgcctgaggtttctttttcctgagctttgcagacccaatc

SEQ ID NO: 23007 - DNA, 80 bp, synthetic construct; identical to SEQ ID NO: 9665
  source 1..80: mol_type = other DNA

SEQ ID NO: 23008 - DNA, 80 bp, synthetic construct
  source 1..80: mol_type = other DNA
tggggagcccttggcagatagggcctgggaacccagagaagcataggagagctttgagggtctcagtgtcgccctgagag

SEQ ID NO: 23009 - DNA, 80 bp, synthetic construct
  source 1..80: mol_type = other DNA
gaagggagtagatggctcttccaatactaggatgatacagaagccttcccatgtttacttacacttcagaggaatgatat

SEQ ID NO: 23010 - DNA, 80 bp, synthetic construct
  source 1..80: mol_type = other DNA
gcatatagaatgtaagatttatattctctatatgctcctgaaggtcctttccaattggtcagttctttcatattccagct

SEQ ID NO: 23011 - DNA, 80 bp, synthetic construct
  source 1..80: mol_type = other DNA
ttatccatttaataatttatctggatgccatgtgttccatttatttcagtgtgtgcatccagtatgtgccaggctctgtg

SEQ ID NO: 23012 - DNA, 80 bp, synthetic construct; identical to SEQ ID NO: 9666
  source 1..80: mol_type = other DNA

SEQ ID NO: 23013 - DNA, 80 bp, synthetic construct
  source 1..80: mol_type = other DNA
tccattgtaagatcctcagagcagtggcaaggttacaccttaagcaactcatgctggggtgcgtacataattgatcagct

SEQ ID NO: 23014 - DNA, 80 bp, synthetic construct
  source 1..80: mol_type = other DNA
ggcaggggagaatctagaatctaagcttatgctacttggcttatttgtctttgcctataattacaaagttgaatgcctat

SEQ ID NO: 23015 - DNA, 80 bp, synthetic construct; identical to SEQ ID NO: 9667
  source 1..80: mol_type = other DNA

SEQ ID NO: 23016 - DNA, 80 bp, synthetic construct
  source 1..80: mol_type = other DNA
gaattctacaccccacaaaataacttgtcaaatggtggctgtgtgacttcctttccaatttttttcatctctgaaaagca

SEQ ID NO: 23017 - DNA, 80 bp, synthetic construct
  source 1..80: mol_type = other DNA
gcttcttgttgcaaaatcaaattaccaggtggtggggaaatggacagaccagtttatatgtctgatagggaatataccag

SEQ ID NO: 23018 - DNA, 80 bp, synthetic construct
  source 1..80: mol_type = other DNA
tttgtttggagtatcccatggatcactactgccatcatccatctgttctcaggggtgatatttaaaccctttaaaaccct

SEQ ID NO: 23019 - DNA, 80 bp, synthetic construct; identical to SEQ ID NO: 9668
  source 1..80: mol_type = other DNA

SEQ ID NO: 23020 - DNA, 80 bp, synthetic construct
  source 1..80: mol_type = other DNA
cttatctacctagagccttgcttttgccatgtgactggcactagggaagacctcagccttggataagacctcaatctcta

SEQ ID NO: 23021 - DNA, 80 bp, synthetic construct
  source 1..80: mol_type = other DNA
aaggaggagaaatagcagaaggggaaagggaagagagatcatcagaggatctttgcttagagtaaggatgaaaagagaag

SEQ ID NO: 23022 - DNA, 80 bp, synthetic construct
  source 1..80: mol_type = other DNA
attccacggcccaggtttcttcccttcacaaaaggaaaggaagaaagtcgagaagtgagaatgaattaatagacaagcaa

SEQ ID NO: 23023 - DNA, 80 bp, synthetic construct; identical to SEQ ID NO: 9669
  source 1..80: mol_type = other DNA

SEQ ID NO: 23024 - DNA, 80 bp, synthetic construct
  source 1..80: mol_type = other DNA
aagacaaggaggaaaacagagaccacttcttcctgtcactttctgctttctcttctaattcaaatcatgtagttcaagaa

SEQ ID NO: 23025 - DNA, 80 bp, synthetic construct
  source 1..80: mol_type = other DNA
ctgtggttggtcccagccatggcagcttattcacacacgtgtggtgtgtttctgaatcataaatcttacagacagcctag

SEQ ID NO: 23026 - DNA, 80 bp, synthetic construct
  source 1..80: mol_type = other DNA
tgaggcattcaacctctctgggccttttaagaccacagacttattatgaccatgtgagtttccaggaagaagcttctaat

SEQ ID NO: 23027 - DNA, 80 bp, synthetic construct
  source 1..80: mol_type = other DNA
tgttggcccatcatcccctagacgtgagacttgggatccagacaggatattgcacctgtcttgaaggaaatgttcttgaa

SEQ ID NO: 23028 - DNA, 80 bp, synthetic construct; identical to SEQ ID NO: 9670
  source 1..80: mol_type = other DNA

SEQ ID NO: 23029 - DNA, 80 bp, synthetic construct
  source 1..80: mol_type = other DNA
aatgtttcctccccaaacaaatctcaaccagaagggcaaaataaagttccacaaaaaccgtgctctcagcataacttgaa

SEQ ID NO: 23030 - DNA, 80 bp, synthetic construct
  source 1..80: mol_type = other DNA
agcttcccacagatcctggtgtgaggagctctgtccaggggtctgggtagggaggaagtaaaatgtctccaggatcttca

SEQ ID NO: 23031 - DNA, 80 bp, synthetic construct; identical to SEQ ID NO: 9671
  source 1..80: mol_type = other DNA

SEQ ID NO: 23032 - DNA, 80 bp, synthetic construct
  source 1..80: mol_type = other DNA
catgttcctctgtccaccctggagtgatgccttactattgtcccctctgatgtgtcccaaatggcaaagaagagtaaagc

SEQ ID NO: 23033 - DNA, 80 bp, synthetic construct
  source 1..80: mol_type = other DNA
tattcctccactccaatcttttggtaaaactgaagctcttgaaagatgagccacactgattctttgggtttgcatgcttt

SEQ ID NO: 23034 - DNA, 80 bp, synthetic construct
  source 1..80: mol_type = other DNA
tacctctcaacctgtccatagccaaatgcctttagcctcctgtatggagaggctctggaagtactacagtgagctgaatc

SEQ ID NO: 23035 - DNA, 80 bp, synthetic construct; identical to SEQ ID NO: 9672
  source 1..80: mol_type = other DNA

SEQ ID NO: 23036 - DNA, 80 bp, synthetic construct
  source 1..80: mol_type = other DNA
gatgtaatggacatgtagcacccaaatgactcaggattcaagtccacgtttttcttctccaagtcctatatcttctttcc

SEQ ID NO: 23037 - DNA, 80 bp, synthetic construct
  source 1..80: mol_type = other DNA
gggacaggtggtgaactggaaccaatgtctaaagtgacatttctctgatcacatctggaattaatttatctgggtccacc

SEQ ID NO: 23038 - DNA, 80 bp, synthetic construct
  source 1..80: mol_type = other DNA
ataactggagcctaatccttcacattcaaagggagtcccattacccaaaacaataatatttttaattacccaggcagagt

SEQ ID NO: 23039 - DNA, 80 bp, synthetic construct
  source 1..80: mol_type = other DNA
ttcattactattttactaccagacattgatgtcaatgactgagtattgctccaaattacttgtaaaatagaccaattatt

SEQ ID NO: 23040 - DNA, 80 bp, synthetic construct; identical to SEQ ID NO: 9673
  source 1..80: mol_type = other DNA

SEQ ID NO: 23041 - DNA, 80 bp, synthetic construct
  source 1..80: mol_type = other DNA
tggataagccattccaaagtaagaacttctttgccaacagtagctaggcactggtagagaaaggaaagaccagcgaattt

SEQ ID NO: 23042 - DNA, 80 bp, synthetic construct
  source 1..80: mol_type = other DNA
agcaggattactcctttgtgtggcacaaaggactctgtgcacccagtgaccaaggtaaaaaaatgactttatcaggcata

SEQ ID NO: 23043 - DNA, 80 bp, synthetic construct
  source 1..80: mol_type = other DNA
aacataccccaggatagttgtgcagaattattcagctctggttccagaattaggagattcagcttagtcaagggatgcca

SEQ ID NO: 23044 - DNA, 80 bp, synthetic construct; identical to SEQ ID NO: 9674
  source 1..80: mol_type = other DNA

SEQ ID NO: 23045 - DNA, 80 bp, synthetic construct
  source 1..80: mol_type = other DNA
tggaaacaattctgagtggagacttagagaaaatactatttaagctgggatttgaaagatgtgcaggtctttgaaaggtg

SEQ ID NO: 23046 - DNA, 80 bp, synthetic construct
  source 1..80: mol_type = other DNA
atagggagtttagaaggagagcgtttttaaaatggagttgaacatccacctggagataggcactagaactaagtgaggat

SEQ ID NO: 23047 - DNA, 80 bp, synthetic construct
  source 1..80: mol_type = other DNA
taattaacatcacaaagctctgcaggaggcctcagaggagccagtttgtttctgtgaatggtaatttcttcatgagaaac

SEQ ID NO: 23048 - DNA, 80 bp, synthetic construct; identical to SEQ ID NO: 9675
  source 1..80: mol_type = other DNA

SEQ ID NO: 23049 - DNA, 80 bp, synthetic construct
  source 1..80: mol_type = other DNA
gtcttgatctcctgacctcgtgatctgcccgcctcggcctcccaaagtgctgggattacaggtgtgagccactgcgcctg

SEQ ID NO: 23050 - DNA, 80 bp, synthetic construct
  source 1..80: mol_type = other DNA
ctcattctgtggtctttctgagaaaggaatgttggaactgctttggaggaagacatttccaggaatggaacacctattca

SEQ ID NO: 23051 - DNA, 80 bp, synthetic construct
  source 1..80: mol_type = other DNA
cctccccaaccagagacatgctagccccgagatagtctccctctggccggaaagatgtcagccccaagataacctctcct

SEQ ID NO: 23052 - DNA, 80 bp, synthetic construct
  source 1..80: mol_type = other DNA
tctctaaaataaatctgtttttaaccattgagccgcattttgtgtttctttcctctttctttaactcttacaaactcttc

SEQ ID NO: 23053 - DNA, 80 bp, synthetic construct; identical to SEQ ID NO: 9676
  source 1..80: mol_type = other DNA

SEQ ID NO: 23054 - DNA, 80 bp, synthetic construct
  source 1..80: mol_type = other DNA
gattttggagcctactctagatgttgattggttccacatggctggccaaagatttgaatctatttgttcagcttctttcg

SEQ ID NO: 23055 - DNA, 80 bp, synthetic construct
  source 1..80: mol_type = other DNA
aacccacctggacaagaacttgccttgtgaaaatggcccatattcaaagtctaatagccttgtgctaagccctaattttt

SEQ ID NO: 23056 - DNA, 80 bp, synthetic construct
  source 1..80: mol_type = other DNA
atcacgaggtcaggagttcgagaccagcctgaccaacatggtgaaaccccgtctctactgaaaatacaaaaattagccag

SEQ ID NO: 23057 - DNA, 80 bp, synthetic construct; identical to SEQ ID NO: 9677
  source 1..80: mol_type = other DNA

SEQ ID NO: 23058 - DNA, 80 bp, synthetic construct
  source 1..80: mol_type = other DNA
aatggtatttgtgcatctcagactctttggggacatgtgtttcaaggtatccataataatgggactgcatttgactttgg

SEQ ID NO: 23059 - DNA, 80 bp, synthetic construct
  source 1..80: mol_type = other DNA
ttagtgagctgaatgtggctgtggcctgggaaacctcagatgtgtttttgtaggttcctgaaagagaagaggagatatag

SEQ ID NO: 23060 - DNA, 80 bp, synthetic construct
  source 1..80: mol_type = other DNA
gaattgatttcttagaaaaattgagaacttgacaaccataaggtggaggcagaaagcaccttgggctggtcagtaattta

SEQ ID NO: 23061 - DNA, 80 bp, synthetic construct; identical to SEQ ID NO: 9678
  source 1..80: mol_type = other DNA

SEQ ID NO: 23062 - DNA, 80 bp, synthetic construct
  source 1..80: mol_type = other DNA
tagaacagggcctagtgcatggaagagctagatgagggtttgcaatgctgtgcatttttaggagctgttcagggccatgc

SEQ ID NO: 23063 - DNA, 80 bp, synthetic construct
  source 1..80: mol_type = other DNA
caagcttctgcctcagcctcccgagtagctgagaccacaggtgcatgccaccatgcctggctactttttttgtattttca

SEQ ID NO: 23064 - DNA, 80 bp, synthetic construct
  source 1..80: mol_type = other DNA
actggtccttttcaaatccctttcaagaagctagtctttcccattctgacgtatgtgttgctgtaggcacctctgaacct

SEQ ID NO: 23065 - DNA, 80 bp, synthetic construct; identical to SEQ ID NO: 9679
  source 1..80: mol_type = other DNA

SEQ ID NO: 23066 - DNA, 80 bp, synthetic construct
  source 1..80: mol_type = other DNA
taaatttagatgtagagtataaagtcttccaaggagaatttctgtggctgcaaatgacatttcctggccccaggaaatga

SEQ ID NO: 23067 - DNA, 80 bp, synthetic construct
  source 1..80: mol_type = other DNA
tggctgctgccaaaattcaagtctgcgtatatgaagaatatagaaagaataagacacacagctgggaatatgaagtcaga

SEQ ID NO: 23068 - DNA, 80 bp, synthetic construct; identical to SEQ ID NO: 9680
  source 1..80: mol_type = other DNA

SEQ ID NO: 23069 - DNA, 80 bp, synthetic construct
  source 1..80: mol_type = other DNA
cacaaccatgcccagctaatttttgtatttttagtagagacggggtttcaccatgttggccaggatggtcttgatctctt

SEQ ID NO: 23070 - DNA, 80 bp, synthetic construct
  source 1..80: mol_type = other DNA
ccgcaacctccgcctcccaggttcaagcgattctcctgcctcagcctcctgagtagttgggattacaggcatgtgccacc

SEQ ID NO: 23071 - DNA, 80 bp, synthetic construct
  source 1..80: mol_type = other DNA
cactgcacacttttaaacatccagatcttatgagaactcactcactatcacgagaatagcaagagggagatcctcctcca

SEQ ID NO: 23072 - DNA, 80 bp, synthetic construct
  source 1..80: mol_type = other DNA
aatttgggtgtagtggtaaaaggaacaggaagagtcaaagatgatgctaaggttttcaggaaataaatgaaacctcagcc

SEQ ID NO: 23073 - DNA, 80 bp, synthetic construct; identical to SEQ ID NO: 9681
  source 1..80: mol_type = other DNA

SEQ ID NO: 23074 - DNA, 80 bp, synthetic construct
  source 1..80: mol_type = other DNA
tgcggggagaattgtcccatgtctccttgagccttctccagatgaactaaaatggcacgtctctgctgtgggccaaggaa

SEQ ID NO: 23075 - DNA, 80 bp, synthetic construct
  source 1..80: mol_type = other DNA
ccatttttctccttttatcccctcttcttctggcttaaccaaagcaatgaccccagaaaacatagacatttgcctacatc

SEQ ID NO: 23076 - DNA, 80 bp, synthetic construct
  source 1..80: mol_type = other DNA
atcaccttgttcttcactattctctgccttacacatccgtatcaatcaatccctccccatcccttgttgaccacaggcgg

SEQ ID NO: 23077 - DNA, 80 bp, synthetic construct; identical to SEQ ID NO: 9682
  source 1..80: mol_type = other DNA

SEQ ID NO: 23078 - DNA, 80 bp, synthetic construct
  source 1..80: mol_type = other DNA
gcagggcaagggagaaaacatctatagcttgagatccttgattttaacatgcaaagaatttttttcaggtcaagaaattt

SEQ ID NO: 23079 - DNA, 80 bp, synthetic construct
  source 1..80: mol_type = other DNA
gtacatagatccttgacatctgtgaggactgatgatgtccagagacattcacaaatcttcaagttcatgagtgcggaaac

SEQ ID NO: 23080 - DNA, 80 bp, synthetic construct
  source 1..80: mol_type = other DNA
aaacaaaatacactataaaatttcctgcaaagccagcaataaatgaagagccacaggggcaaaagaagctgggttggtga

SEQ ID NO: 23081 - DNA, 80 bp, synthetic construct; identical to SEQ ID NO: 9683
  source 1..80: mol_type = other DNA

SEQ ID NO: 23082 - DNA, 80 bp, synthetic construct
  source 1..80: mol_type = other DNA
tatgtgttctcaaggtagatatcattttataccagctctttgaaattgattatctgggatatggatcacctggtatcatt

SEQ ID NO: 23083 - DNA, 80 bp, synthetic construct
  source 1..80: mol_type = other DNA
tcaagcaattctcctgcctcagactcccaagtagttgggattacagacgcacatcaccacaccaggctaatttttgtaat

SEQ ID NO: 23084 - DNA, 80 bp, synthetic construct
  source 1..80: mol_type = other DNA
gcccactctagacttttcttcataagtgtgcacattcccagccaaacatggttgcaggttattgacacatctaacacaat

SEQ ID NO: 23085 - DNA, 80 bp, synthetic construct; identical to SEQ ID NO: 9684
  source 1..80: mol_type = other DNA

SEQ ID NO: 23086 - DNA, 80 bp, synthetic construct
  source 1..80: mol_type = other DNA
ccactggcattccttttgtcatattctgtttaaggcaaatgcagctctttggactatttgagtagctagtatcacaagaa

SEQ ID NO: 23087 - DNA, 80 bp, synthetic construct
  source 1..80: mol_type = other DNA
cttaagacggaagctagtaagaactatttatttactgcaggaaaattaaagtgcaccgaagcatgtattttggggtaaaa

SEQ ID NO: 23088 - DNA, 80 bp, synthetic construct
  source 1..80: mol_type = other DNA
taacctcttgaaatagcctcctgtcactgattggaccatcgaatttactttccagcattgattcataaatgtctgcgagt

SEQ ID NO: 23089 - DNA, 80 bp, synthetic construct
  source 1..80: mol_type = other DNA
aggccaaggtgggcggatcatgaggtcaagagattgaaaccatcctgcccaacatggtgaaaccctgtctctactaaaaa

SEQ ID NO: 23090 - DNA, 80 bp, synthetic construct; identical to SEQ ID NO: 9685
  source 1..80: mol_type = other DNA

SEQ ID NO: 23091 - DNA, 80 bp, synthetic construct
  source 1..80: mol_type = other DNA
aggctgataatggaaagtaaaagtcacctagaataccattgtccagcaataaccatagtcaccacctaaggaaacaacct

SEQ ID NO: 23092 - DNA, 80 bp, synthetic construct
  source 1..80: mol_type = other DNA
tgtgagccaccacacctggataatttttgcatttttttgcagagacagggtctcactgtcttacccaggctggtctccaa

SEQ ID NO: 23093 - DNA, 80 bp, synthetic construct
  source 1..80: mol_type = other DNA
ccatagtacatatactctgtggttgcactttctcacttgatggtatgtcacaagacaatatagattacagtatcatttta

SEQ ID NO: 23094 - DNA, 80 bp, synthetic construct; identical to SEQ ID NO: 9686
  source 1..80: mol_type = other DNA

SEQ ID NO: 23095 - DNA, 80 bp, synthetic construct
  source 1..80: mol_type = other DNA
ctgaagctaattcttcagccatttaataaaagtgtattgagtttccccacaatagatgctgtagaagggattattgctgc

SEQ ID NO: 23096 - DNA, 80 bp, synthetic construct
  source 1..80: mol_type = other DNA
tgagaagaacatgtaaacaagtggttcttaaggagataaacaaaaagacaaaaagagccgaatttgtcttgttcttctga

SEQ ID NO: 23097 - DNA, 80 bp, synthetic construct
  source 1..80: mol_type = other DNA
cccttgacaatgatttccatttctatattggcactagccctctggataaatgtgtcaagagttttaggaattagtttctg

SEQ ID NO: 23098 - DNA, 80 bp, synthetic construct; identical to SEQ ID NO: 9687
  source 1..80: mol_type = other DNA

SEQ ID NO: 23099 - DNA, 80 bp, synthetic construct
  source 1..80: mol_type = other DNA
ctggtgcttccatcaatcaatgtgacagtgtggggtgtccatctggactttaggaagtcaggggactgtatggacagctt

SEQ ID NO: 23100 - DNA, 80 bp, synthetic construct
  source 1..80: mol_type = other DNA
catgaattttttgagaaaaacacggaccagccatttttgcagagtgcctatattataatgagtatgttagagtccatcaa

SEQ ID NO: 23101 - DNA, 80 bp, synthetic construct
  source 1..80: mol_type = other DNA
ttcctcattagcaaaatgcaggcattgaattaaaagttccctaagggcccttattgatctgatatctatacttccctagc

SEQ ID NO: 23102 - DNA, 80 bp, synthetic construct; identical to SEQ ID NO: 9688
  source 1..80: mol_type = other DNA

SEQ ID NO: 23103 - DNA, 80 bp, synthetic construct
  source 1..80: mol_type = other DNA
tcagaaaaatctacaaaaaaatcacaagaagctctgacatggaaacaaaaagaatttctaagcctcccacagctccctac

SEQ ID NO: 23104 - DNA, 80 bp, synthetic construct
  source 1..80: mol_type = other DNA
agcccagaatgaagggacactttatgacaacacgtgaggaccatgagtggcagttgacaagacagggaacatcatacttt

SEQ ID NO: 23105 - DNA, 80 bp, synthetic construct; identical to SEQ ID NO: 9689
  source 1..80: mol_type = other DNA

SEQ ID NO: 23106 - DNA, 80 bp, synthetic construct
  source 1..80: mol_type = other DNA
ctgctttcttcatggaatgacactggtccttgcaaatatctgcatctcaattcatttatgagcgtcaaaggagaaaggaa

SEQ ID NO: 23107 - DNA, 80 bp, synthetic construct
  source 1..80: mol_type = other DNA
tgatagcagatcaccactcctctcagaatcctccaaaggcctccatctcacttagagtaaaagcttcttctttacctttg

SEQ ID NO: 23108 - DNA, 80 bp, synthetic construct
  source 1..80: mol_type = other DNA
ctcaaggagcttacagactggtgagaaagaataaacataggtaccaagatttttagtgaatggtagcatacgagaggtga

SEQ ID NO: 23109 - DNA, 80 bp, synthetic construct
  source 1..80: mol_type = other DNA
catgagcagaggccacatagacagtgtgtgtttggagaacaggtggtccaatcttgcaggtgccaatgtttttcattggc

SEQ ID NO: 23110 - DNA, 80 bp, synthetic construct; identical to SEQ ID NO: 9690
  source 1..80: mol_type = other DNA

SEQ ID NO: 23111 - DNA, 80 bp, synthetic construct
  source 1..80: mol_type = other DNA
tgccaagagcgaatcagaaggaaccggagaattatgtaattgagacctggaggatacctgagttctcaactatgacagtt

SEQ ID NO: 23112 - DNA, 80 bp, synthetic construct
  source 1..80: mol_type = other DNA
ggcatgcctctataatctttagaacaccattttattctgccatttaagctccctgaggttagaaactgtttttccgaggc

SEQ ID NO: 23113 - DNA, 80 bp, synthetic construct
  source 1..80: mol_type = other DNA
aaaagccacataaactagataaccagccaagtccctgtcacatagaacacagtcacgtggtgatgattattatcaagcat

SEQ ID NO: 23114 - DNA, 80 bp, synthetic construct; identical to SEQ ID NO: 9691
  source 1..80: mol_type = other DNA

SEQ ID NO: 23115 - DNA, 80 bp, synthetic construct
  source 1..80: mol_type = other DNA
ctgcatttaaagcatttttatgggagatagcaggggaaaaatgctagatcaatgtaaattttagtgtgaggtcctttgtt

SEQ ID NO: 23116 - DNA, 80 bp, synthetic construct
  source 1..80: mol_type = other DNA
tcgaaaggggatctggcttccaatggcccagcgtggagaagagctgctctgaggctaagggggctccaggctctgtaggg

SEQ ID NO: 23117 - DNA, 80 bp, synthetic construct; identical to SEQ ID NO: 9692
  source 1..80: mol_type = other DNA

SEQ ID NO: 23118 - DNA, 80 bp, synthetic construct
  source 1..80: mol_type = other DNA
tcatgcccagctaatttttgtatttttagtcaagatggggtttccccgtgttggccaggttggtcttaaactcctgacct

SEQ ID NO: 23119 - DNA, 80 bp, synthetic construct
  source 1..80: mol_type = other DNA
gcttctattcctccctcacttttcctttccttctttcaagagaaatataataattaagcagccagacttttattggctgt

SEQ ID NO: 23120 - DNA, 80 bp, synthetic construct
  source 1..80: mol_type = other DNA
actaattgactcataaaggggtattgtgaagatcacatgggttgagatatgtgggcatgtagtttgcactcaataagcat

SEQ ID NO: 23121 - DNA, 80 bp, synthetic construct
  source 1..80: mol_type = other DNA
tggagaagagcctcccattccagacataaaggtttcaggactccttccattaaatatgaaaatcttatttaattttccta

SEQ ID NO: 23122 - DNA, 80 bp, synthetic construct; identical to SEQ ID NO: 9693
  source 1..80: mol_type = other DNA

SEQ ID NO: 23123 - DNA, 80 bp, synthetic construct
  source 1..80: mol_type = other DNA
ttttcttcattctgtgtaccaggccagaaggtaggagacgaagagtctacctctacagacttagcctctaaatcattgca

SEQ ID NO: 23124 - DNA, 80 bp, synthetic construct
  source 1..80: mol_type = other DNA
aatgttcaaggttgctgactggtcaaggttactgagtgttaaaggtcagtgaatgttcaatgttactgaggttcaatgtt

SEQ ID NO: 23125 - DNA, 80 bp, synthetic construct
  source 1..80: mol_type = other DNA
tctttagtacccctagaccccctactcccatcatttgagttccacacccactgagagtcagttatgcttattctgtcaga

SEQ ID NO: 23126 - DNA, 80 bp, synthetic construct; identical to SEQ ID NO: 9694
  source 1..80: mol_type = other DNA

SEQ ID NO: 23127 - DNA, 80 bp, synthetic construct
  source 1..80: mol_type = other DNA
gtccgtcaccactggatcatcccctttctgtcccatccccttctgcaatggctcactcttcatcaaaccaaacaaagaca

SEQ ID NO: 23128 - DNA, 80 bp, synthetic construct
  source 1..80: mol_type = other DNA
ctaaaacagtttatgccagctgtactcattaagtggatgaaataggcaggagaacatttgaatactttggaaagactggt

SEQ ID NO: 23129 - DNA, 80 bp, synthetic construct; identical to SEQ ID NO: 9695
  source 1..80: mol_type = other DNA

SEQ ID NO: 23130 - DNA, 80 bp, synthetic construct
  source 1..80: mol_type = other DNA
gttgattcccaaacaacaattggtcccagtagtattgtctaagagggattcttctttgctctggtttgtataaaaaatat

SEQ ID NO: 23131 - DNA, 80 bp, synthetic construct
  source 1..80: mol_type = other DNA
caagagtagtgaccctgagaatcctgaatttcctctttctgtttctctaaattttggattaggtcccatgcaagccacct

SEQ ID NO: 23132 - DNA, 80 bp, synthetic construct
  source 1..80: mol_type = other DNA
ggcagggtgggtggtagattttctgtgattagagtcccaggtgatcattttgcctttctaactctttctgtaaggagatg

SEQ ID NO: 23133 - DNA, 80 bp, synthetic construct
  source 1..80: mol_type = other DNA
catccccatggagaaggataaagacaacattgaaactgaaatgtggccgtttctgtgggatccctccttcagtccagtct

SEQ ID NO: 23134 - DNA, 80 bp, synthetic construct; identical to SEQ ID NO: 9696
  source 1..80: mol_type = other DNA

SEQ ID NO: 23135 - DNA, 80 bp, synthetic construct
  source 1..80: mol_type = other DNA
tgaggtggggtaagaatagctcacagacttgtatctgctagagagggtcccccacccacaccttgctatgccctgcccct

SEQ ID NO: 23136 - DNA, 80 bp, synthetic construct
  source 1..80: mol_type = other DNA
ggcaagccatagaaatgagaattgttgctctaaccttccccctgcctttctgtatagagctgtccataacagaattctct

SEQ ID NO: 23137 - DNA, 80 bp, synthetic construct; identical to SEQ ID NO: 9697
  source 1..80: mol_type = other DNA

SEQ ID NO: 23138 - DNA, 80 bp, synthetic construct
  source 1..80: mol_type = other DNA
aacctgttttttgttataggtgtgtcagctgtggttgttgtgatgagtgaggagagggatcacacctttccacctccaca

SEQ ID NO: 23139 - DNA, 80 bp, synthetic construct
  source 1..80: mol_type = other DNA
ataataacgctgttgcaggcttgatagatgttaagaggggtctgagccttggaaatcactgtgtctaatcctctaatatg

SEQ ID NO: 23140 - DNA, 80 bp, synthetic construct
  source 1..80: mol_type = other DNA
tcacgaggtcaggagttcgagaccagcctgaccaacatggtgaaaccctgtctctactaaaaatacaaaaatcagctgga

SEQ ID NO: 23141 - DNA, 80 bp, synthetic construct
  source 1..80: mol_type = other DNA
aacaaaaaaaaccctcaaacatgaccacagttctccaatggcctcgggacctgcctctggctccctgcacataccagggc

SEQ ID NO: 23142 - DNA, 80 bp, synthetic construct; identical to SEQ ID NO: 9698
  source 1..80: mol_type = other DNA

SEQ ID NO: 23143 - DNA, 80 bp, synthetic construct
  source 1..80: mol_type = other DNA
ggtgggcaggaaaggcagtatcattgtttgaattgtgactcactcaaaaaggtatgtttaagtcttaaccccccatgcct

SEQ ID NO: 23144 - DNA, 80 bp, synthetic construct
  source 1..80: mol_type = other DNA
tatgaaggcagggattagggtgatgtataccaaggaatgccaaagattgccagaaaaccactagaagcacagtggcatgg

SEQ ID NO: 23145 - DNA, 80 bp, synthetic construct
  source 1..80: mol_type = other DNA
tcattcaaaaccatccccactaactggagaaacaaactttaaaagtatttttgcagacttcggatgaatggtatcatttt

SEQ ID NO: 23146 - DNA, 80 bp, synthetic construct; identical to SEQ ID NO: 9699
  source 1..80: mol_type = other DNA

SEQ ID NO: 23147 - DNA, 80 bp, synthetic construct
  source 1..80: mol_type = other DNA
tgagattgtgccaacgatatgttcacttgggagtcaatttctgggctgggactgccactgccaattttcatgactttcga

SEQ ID NO: 23148 - DNA, 80 bp, synthetic construct
  source 1..80: mol_type = other DNA
gactttgaatcaatacagtaagaaagccccaaaccctcaggatcatttgacatggtccctggcctaatacactggaagct

SEQ ID NO: 23149 - DNA, 80 bp, synthetic construct; identical to SEQ ID NO: 9700
  source 1..80: mol_type = other DNA

SEQ ID NO: 23150 - DNA, 80 bp, synthetic construct
  source 1..80: mol_type = other DNA
tcctccttcccagtttccagcattctccgaggtcagaggactctggaatagaccgtgacaaaggctggaaagatggaatc

SEQ ID NO: 23151 - DNA, 80 bp, synthetic construct
  source 1..80: mol_type = other DNA
ttcatggctacagggtgaggcttgtgtggcaggagctgctgcaggggtatctgaaaatggtcgagactgtggtctgcaag

SEQ ID NO: 23152 - DNA, 80 bp, synthetic construct
  source 1..80: mol_type = other DNA
tctcttaggagctctaagaggtaggaattgttgttcccattgcacagattaaaaaactgagattctagcaagtgaattat

SEQ ID NO: 23153 - DNA, 80 bp, synthetic construct
  source 1..80: mol_type = other DNA
ccaccgcccaactaatctgattcttacagccaccctgggcaaaaggcacgagggtgcccgtgtctcctttgtagcatagc

SEQ ID NO: 23154 - DNA, 80 bp, synthetic construct; identical to SEQ ID NO: 9701
  source 1..80: mol_type = other DNA

SEQ ID NO: 23155 - DNA, 80 bp, synthetic construct
  source 1..80: mol_type = other DNA
tggaaagcagaaggaaataaaagcccattttttcgataggaaaagacacagacactaggatcctagagcaagagtctggt

SEQ ID NO: 23156 - DNA, 80 bp, synthetic construct
  source 1..80: mol_type = other DNA
gagccccatgttgagttaaatcatatgccactgagtcttctggtgtcaggtacatcatctcatttaaaagattttttttc

SEQ ID NO: 23157 - DNA, 80 bp, synthetic construct; identical to SEQ ID NO: 9702
  source 1..80: mol_type = other DNA

SEQ ID NO: 23158 - DNA, 80 bp, synthetic construct
  source 1..80: mol_type = other DNA
ttgtctgctgccacccaagaacaagactttgatcacaatgtgcgagaccctgaatcctagattttctttgttgcccttgc

SEQ ID NO: 23159 - DNA, 80 bp, synthetic construct
  source 1..80: mol_type = other DNA
agaccagcctgaccaacatggagaaaccctgtctctactaaaaatacaaagattagccaggcatggtggcacatgcctgt

SEQ ID NO: 23160 - DNA, 80 bp, synthetic construct
  source 1..80: mol_type = other DNA
accttctttcagcacttagtggctctggttacagagttatgcatttaccccttacaaattgctgtcatcagatacaaagc

SEQ ID NO: 23161 - DNA, 80 bp, synthetic construct
  source 1..80: mol_type = other DNA
tgtcctctttctgtccttggtggaggtggtggtgagagtctctttcgaatactccacaaccccctcaggtagtgtctgct

SEQ ID NO: 23162 - DNA, 80 bp, synthetic construct; identical to SEQ ID NO: 9703
  source 1..80: mol_type = other DNA

SEQ ID NO: 23163 - DNA, 80 bp, synthetic construct
  source 1..80: mol_type = other DNA
tgggttgggtattcaaattggccgtctcatgggccacagtgtggaaataattgaagtcttttaacagaggtgtctaagag

SEQ ID NO: 23164 - DNA, 80 bp, synthetic construct
  source 1..80: mol_type = other DNA
gattttaatactaagaagtagaaataatgaatgataatcagggtattgtttctgggagccggggcagctctgagggccgg

SEQ ID NO: 23165 - DNA, 80 bp, synthetic construct
  source 1..80: mol_type = other DNA
agaggcacaaacagcccgtgcctgttacacagctgctctgggtcagattgtgtggggggccaggggctggctaagggctg

SEQ ID NO: 23166 - DNA, 80 bp, synthetic construct; identical to SEQ ID NO: 9704
  source 1..80: mol_type = other DNA

SEQ ID NO: 23167 - DNA, 80 bp, synthetic construct
  source 1..80: mol_type = other DNA
gatgaccaaaatacagctagatgactcttgaagctttgttcagctacagaagtctaggacaatggtggtaccttgtactg

SEQ ID NO: 23168 - DNA, 80 bp, synthetic construct
  source 1..80: mol_type = other DNA
tgttacccccaattcttttcccacaaatgattaccgaaccagatctcctagattctgtaggttgtggctcaaagcagctg

SEQ ID NO: 23169 - DNA, 80 bp, synthetic construct
  source 1..80: mol_type = other DNA
atctgtgaagttggctttgctcctgagctttgaatcatcagcagaccaggccactcataaaatgagatgataaccacaca

SEQ ID NO: 23170 - DNA, 80 bp, synthetic construct; identical to SEQ ID NO: 9705
  source 1..80: mol_type = other DNA

SEQ ID NO: 23171 - DNA, 80 bp, synthetic construct
  source 1..80: mol_type = other DNA
tgtttagaatgttactgcggttaatctttttaaattaaaacaattggtgggagggtgggggcgctggcatgcttgttcac

SEQ ID NO: 23172 - DNA, 80 bp, synthetic construct
  source 1..80: mol_type = other DNA
aaaaaggaagaaaagaaaaggaaagaaaattagccaggcatgatagtgtatgcttgtaataccagctactggggaggctg

SEQ ID NO: 23173 - DNA, 80 bp, synthetic construct; identical to SEQ ID NO: 9706
  source 1..80: mol_type = other DNA

SEQ ID NO: 23174 - DNA, 80 bp, synthetic construct
  source 1..80: mol_type = other DNA
gaatcacttgaacccaggaggcggaggttgcagtgagcccagatcatgccactgaactccagcctgcgtgacccacggag

SEQ ID NO: 23175 - DNA, 80 bp, synthetic construct
  source 1..80: mol_type = other DNA
catccagcatgtggagaacctgttacatcaatgtgtagcaactgttctagaggtagggcaaaaaaagaataagacaagaa

SEQ ID NO: 23176 - DNA, 80 bp, synthetic construct
  source 1..80: mol_type = other DNA
gagacagtctctgccctggaggaacttgtgttcaagagttttcatactaaaactgtctaaatgctgagaaaaatcaaaga

SEQ ID NO: 23177 - DNA, 80 bp, synthetic construct; identical to SEQ ID NO: 9707
  source 1..80: mol_type = other DNA

SEQ ID NO: 23178 - DNA, 80 bp, synthetic construct
  source 1..80: mol_type = other DNA
cctcgctaagcatctgccaccctacacaataattagccagctacacattttctttgttgttcattaaagattaatgagag

SEQ ID NO: 23179 - DNA, 80 bp, synthetic construct
  source 1..80: mol_type = other DNA
tctaacctacaatatgcctttggtggaaactcagatgtttctggcatgctgtctcccaccatcagctaaaaagcacatgc

SEQ ID NO: 23180 - DNA, 80 bp, synthetic construct
  source 1..80: mol_type = other DNA
aaacacagcaaggtctggccaatttggaagctagccctcctttacctatttattttgttctaactgttagagtttttcta

SEQ ID NO: 23181 - DNA, 80 bp, synthetic construct
  source 1..80: mol_type = other DNA
cctggaataattaatgcccttctggtacttagcaggtcctggccctttaagattagctcacatgaatggatttcggctgg

SEQ ID NO: 23182 - DNA, 80 bp, synthetic construct; identical to SEQ ID NO: 9708
  source 1..80: mol_type = other DNA

SEQ ID NO: 23183 - DNA, 80 bp, synthetic construct
  source 1..80: mol_type = other DNA
tccctaggaactctgatctcccaaatccctccctcacctcctgtttccatttcttcctccaggaacccttttgtataagg

SEQ ID NO: 23184 - DNA, 80 bp, synthetic construct
  source 1..80: mol_type = other DNA
attgtacctgtgttcctttgcagagcctgcatggagctgggagggtacccaattcatggattttctgtattagaaagtta

SEQ ID NO: 23185 - DNA, 80 bp, synthetic construct
  source 1..80: mol_type = other DNA
tactgaaaatacaaaaatcagctgggcatggtggtgcactcctgtaatcccgctacttcggaggctgaggcaggagaatg

SEQ ID NO: 23186 - DNA, 80 bp, synthetic construct; identical to SEQ ID NO: 9709
  source 1..80: mol_type = other DNA

SEQ ID NO: 23187 - DNA, 80 bp, synthetic construct
  source 1..80: mol_type = other DNA
ccaggttcaaccataaataaacctatgaatcaaatttgtctcctttgggtgagatatacaacatccagatgaaggatcca

SEQ ID NO: 23188 - DNA, 80 bp, synthetic construct
  source 1..80: mol_type = other DNA
ccctaccatatgaagtaggtttattatgatgaagaaacagaaattcaggaaagtcagatgacttgctcaagatcacacag

SEQ ID NO: 23189 - DNA, 80 bp, synthetic construct
  source 1..80: mol_type = other DNA
atctctgggactgtctttatatgcaaagtaagggagtaggtctagggctttccttggtccattcagttctcacatgctgt

SEQ ID NO: 23190 - DNA, 80 bp, synthetic construct; identical to SEQ ID NO: 9710
  source 1..80: mol_type = other DNA

SEQ ID NO: 23191 - DNA, 80 bp, synthetic construct
  source 1..80: mol_type = other DNA
gaaagagtgagtaggctacaggtgggcctgggaagattcttataggcaaaggtactcagggaaagttctttttctttttt

SEQ ID NO: 23192 - DNA, 80 bp, synthetic construct
  source 1..80: mol_type = other DNA
ttttttttgtatttttagtagagacagggttccactgtgttagccaggatggtctcgatctcctgacctcatgatccgcc

SEQ ID NO: 23193 - DNA, 80 bp, synthetic construct; identical to SEQ ID NO: 9711
  source 1..80: mol_type = other DNA

SEQ ID NO: 23194 - DNA, 80 bp, synthetic construct
  source 1..80: mol_type = other DNA
aatgggcagatgagaatttttagttctatgagtttcaggctgagaagggaggcattctggaggcgggcagacctttctga

SEQ ID NO: 23195 - DNA, 80 bp, synthetic construct
  source 1..80: mol_type = other DNA
ttccgtggctttcatatctcaatccacacctatctctgaaggcaaagaacaccagggacttgttttgttgtactttgcat

SEQ ID NO: 23196 - DNA, 80 bp, synthetic construct
  source 1..80: mol_type = other DNA
atatgcttcactattagcctctagtaagggaagagaataggtcaccttttagtgtatttacccagcgagaagagagtgtt

SEQ ID NO: 23197 - DNA, 80 bp, synthetic construct
  source 1..80: mol_type = other DNA
actcggaaccatttctgcctggatgccaaaaattacacggagcccccttcaatccatcagcccatccctctatccattat

SEQ ID NO: 23198 - DNA, 80 bp, synthetic construct; identical to SEQ ID NO: 9712
  source 1..80: mol_type = other DNA

SEQ ID NO: 23199 - DNA, 80 bp, synthetic construct
  source 1..80: mol_type = other DNA
tgtgtgccctgttggctgttcatcttttctctgcttggaccttgaactgggtcaagtacttccagtttcactctttcttg

SEQ ID NO: 23200 - DNA, 80 bp, synthetic construct
  source 1..80: mol_type = other DNA
gtgtacttacacaaacctagacggtgtgaaaggaggacccccaaatcactaaggaaagctcaagctggaagctgcttagg

SEQ ID NO: 23201 - DNA, 80 bp, synthetic construct
  source 1..80: mol_type = other DNA
ctttgcttcaagttgtcccgcctttctagactgaacctatgtactttttacgtatattgattgatgtgtcatgtctccct

SEQ ID NO: 23202 - DNA, 80 bp, synthetic construct; identical to SEQ ID NO: 9713
  source 1..80: mol_type = other DNA

SEQ ID NO: 23203 - DNA, 80 bp, synthetic construct
  source 1..80: mol_type = other DNA
gcaacactggacacttaggctacactgaattaataaaaaatatttttcttcaataatagattagccttagcttactgtaa

SEQ ID NO: 23204 - DNA, 80 bp, synthetic construct
  source 1..80: mol_type = other DNA
tgtattactttttaaacttttttgttaaaaactaagacacgaacatgcacattagcctaggcctacacatggtcaggatc

SEQ ID NO: 23205 - DNA, 80 bp, synthetic construct
  source 1..80: mol_type = other DNA
gaaatatgttcagggtggatttcttgctttgtttcctctcttcatcacagagttgcttgtaagcagataatgcacgatga

SEQ ID NO: 23206 - DNA, 80 bp, synthetic construct; identical to SEQ ID NO: 9714
  source 1..80: mol_type = other DNA

SEQ ID NO: 23207 - DNA, 80 bp, synthetic construct
  source 1..80: mol_type = other DNA
aggagctcctcaatgtcattctcatccacacccacgttaaacttatttgccatctcagcttacagccttgttgatttttg

SEQ ID NO: 23208 - DNA, 80 bp, synthetic construct
  source 1..80: mol_type = other DNA
catctcagtgtcttcctcagcttcagcaatagcctgtccaggtagtagatacaaatgttatgtccaggtagtaggcctga

SEQ ID NO: 23209 - DNA, 80 bp, synthetic construct; identical to SEQ ID NO: 9715
  source 1..80: mol_type = other DNA

SEQ ID NO: 23210 - DNA, 80 bp, synthetic construct
  source 1..80: mol_type = other DNA
acttagtcaccttatggatggaagtcctttcaggcatccatttccagaatagggaggtttcaaccatattgaagattttc

SEQ ID NO: 23211 - DNA, 80 bp, synthetic construct
  source 1..80: mol_type = other DNA
ctagagctagcagtaaattcaacatcacagtcaggtccagccttgttttttcaacattgcaaacaagctttttgctttgg

SEQ ID NO: 23212 - DNA, 80 bp, synthetic construct
  source 1..80: mol_type = other DNA
tcaatgaagtagatcctttaatagcttccatcactttgttcttgttcttcaagatcgtagctatggtggcatgtgacatg

SEQ ID NO: 23213 - DNA, 80 bp, synthetic construct; identical to SEQ ID NO: 9716
  source 1..80: mol_type = other DNA

SEQ ID NO: 23214 - DNA, 80 bp, synthetic construct
  source 1..80: mol_type = other DNA
ttgactcactgcaacctccgcctcccaggttcaattgattctactgcctcagcctcccaagtaactgggactacaggtgc

SEQ ID NO: 23215 - DNA, 80 bp, synthetic construct
  source 1..80: mol_type = other DNA
cccaagtagctgggactacaggcaccctccaccatgcccggctaattttttatatatttagtagagacagggtttcacca

SEQ ID NO: 23216 - DNA, 80 bp, synthetic construct
  source 1..80: mol_type = other DNA
acctcaggtgacccacccacctcgacctcccaaagtgctgggattacaggcgtgagccatcgtgcccaggcctgtttatt

SEQ ID NO: 23217 - DNA, 80 bp, synthetic construct
  source 1..80: mol_type = other DNA
ggaagtttttaacttcattatagtcttatgggacaatggttgataggtggtctgctgttgaccaaaattttatgtggcac

SEQ ID NO: 23218 - DNA, 80 bp, synthetic construct; identical to SEQ ID NO: 9717
  source 1..80: mol_type = other DNA

SEQ ID NO: 23219 - DNA, 80 bp, synthetic construct
  source 1..80: mol_type = other DNA
gggaatgtgcaacccacttacgagaacaaactatttttaagtacttgagcacattgattgtttgtgtgtgagtggcacca

SEQ ID NO: 23220 - DNA, 80 bp, synthetic construct
  source 1..80: mol_type = other DNA
ttgagacaagagtctataattgggatcctcaaactgccatatttaaggaagcctgcacaagaagggaggtttatcaaatc

SEQ ID NO: 23221 - DNA, 80 bp, synthetic construct
  source 1..80: mol_type = other DNA
tagtttgcaattaagcttcttcttccctcactataagtgaccatctagaatgccatggtctgaaatcttacatgattcat

SEQ ID NO: 23222 - DNA, 80 bp, synthetic construct; identical to SEQ ID NO: 9718
  source 1..80: mol_type = other DNA

SEQ ID NO: 23223 - DNA, 80 bp, synthetic construct
  source 1..80: mol_type = other DNA
agtgctgcttcaatccattaggtttggaaaacacaggctccccaatcagaactacccagttaaaagctatgacgattaat

SEQ ID NO: 23224 - DNA, 80 bp, synthetic construct
  source 1..80: mol_type = other DNA
cacattctccttctctcttcttgaactaaaatatccaccttttcttgcccttggacatcagagcttttggttttcaggcc

SEQ ID NO: 23225 - DNA, 80 bp, synthetic construct; identical to SEQ ID NO: 9719
  source 1..80: mol_type = other DNA

SEQ ID NO: 23226 - DNA, 80 bp, synthetic construct
  source 1..80: mol_type = other DNA
gggtcttcccagtctctgcaaggtctatgaatacttgtatgcaaattcaacaagaagccaggggctttggggaacaagat

SEQ ID NO: 23227 - DNA, 80 bp, synthetic construct
  source 1..80: mol_type = other DNA
tctaagggccaggcttcagggatctagttctgaggttgtcaaaggcaattttctaagagtttagtatgattaacagaaga

SEQ ID NO: 23228 - DNA, 80 bp, synthetic construct
  source 1..80: mol_type = other DNA
atctcattttagtggctcttgtagaaagaatacccaggatattagatcaaggcttgggccccagatactactccttttgg

SEQ ID NO: 23229 - DNA, 80 bp, synthetic construct; identical to SEQ ID NO: 9720
  source 1..80: mol_type = other DNA

SEQ ID NO: 23230 - DNA, 80 bp, synthetic construct
  source 1..80: mol_type = other DNA
tctcctacctcagcctcccgggtagctgggactacaggtgcctgccaccatgcccggctaatttttttgtagttttagta

SEQ ID NO: 23231 - DNA, 80 bp, synthetic construct
  source 1..80: mol_type = other DNA
gctaatcaacttttgaaacattttctccttcctttcctcaacatgaatgaatctgttcttgagctatcctgagagccaaa

SEQ ID NO: 23232 - DNA, 80 bp, synthetic construct
  source 1..80: mol_type = other DNA
aatgacttgcccgagatcacatggctagtgagtgaaaggatatgtttattccaaggcaagcctatttttactgataaaat

SEQ ID NO: 23233 - DNA, 80 bp, synthetic construct; identical to SEQ ID NO: 9721
  source 1..80: mol_type = other DNA

SEQ ID NO: 23234 - DNA, 80 bp, synthetic construct
  source 1..80: mol_type = other DNA
cttcccttatgctttacttacagcccataagaagtttgcttttactaattggattcgattcgtcctttaacattttgatt

SEQ ID NO: 23235 - DNA, 80 bp, synthetic construct
  source 1..80: mol_type = other DNA
tggggatcctgggactagaaaacctagccccgaggtccaagtttttatgctctctactctcttgtttttacaattaagga

SEQ ID NO: 23236 - DNA, 80 bp, synthetic construct
  source 1..80: mol_type = other DNA
acccctcttaccctcccaccttttggggtctccaatgtctattattccactctgtgtatctatgtgtacccactgtttag

SEQ ID NO: 23237 - DNA, 80 bp, synthetic construct; identical to SEQ ID NO: 9722
  source 1..80: mol_type = other DNA

SEQ ID NO: 23238 - DNA, 80 bp, synthetic construct
  source 1..80: mol_type = other DNA
tgcaaagcagtgggctttataagtgagagggtatggtagaaatataaaaaatacatagtctgtgctctcaataatcctat

SEQ ID NO: 23239 - DNA, 80 bp, synthetic construct
  source 1..80: mol_type = other DNA
cctcccgagtagctgggattacaggtacatgccaccatgcccggctaatttttgtatttttagtagagacagggtttcac

SEQ ID NO: 23240 - DNA, 80 bp, synthetic construct
  source 1..80: mol_type = other DNA
tgcttataatacaaggagttcccaaacaagagttaccagtaaagccttcatgaccttgcagcatgacttggaatgtgtta

SEQ ID NO: 23241 - DNA, 80 bp, synthetic construct
  source 1..80: mol_type = other DNA
gatcaggggtagaggatgagtatgatacaaaatgagaatggtcatttgtaaggaccttaactgctctatgaagaagtttg

SEQ ID NO: 23242 - DNA, 80 bp, synthetic construct; identical to SEQ ID NO: 9723
  source 1..80: mol_type = other DNA

SEQ ID NO: 23243 - DNA, 80 bp, synthetic construct
  source 1..80: mol_type = other DNA
ctgggcaagatggcccacctgtagtcccagctactcaggaggctgaggcaggaggatcgcttgaatttgggaggttgagg

SEQ ID NO: 23244 - DNA, 80 bp, synthetic construct
  source 1..80: mol_type = other DNA
gatcttctccaactcctgttatgtagggactaaagctagtcagtagacagaagtgaagctatctgaaatagaacaaactt

SEQ ID NO: 23245 - DNA, 80 bp, synthetic construct; identical to SEQ ID NO: 9724
  source 1..80: mol_type = other DNA

SEQ ID NO: 23246 - DNA, 80 bp, synthetic construct
  source 1..80: mol_type = other DNA
tccgaagtcaatcatcatgaatgaagccatttaagagtggggcccgcgactcctctgtgcggatgaataagcaggcagag

SEQ ID NO: 23247 - DNA, 80 bp, synthetic construct
  source 1..80: mol_type = other DNA
tttaaaaagtctggagaaagagaatgctagccagaccttacttttgctcgacatagcttgccctctccactttgtgatta

SEQ ID NO: 23248 - DNA, 80 bp, synthetic construct
  source 1..80: mol_type = other DNA
ctagcttccaaaggggagattggctccaatctgttctctaagacaacggacatcctctgctggtactggaagctgcagat

SEQ ID NO: 23249 - DNA, 80 bp, synthetic construct; identical to SEQ ID NO: 9725
  source 1..80: mol_type = other DNA

SEQ ID NO: 23250 - DNA, 80 bp, synthetic construct
  source 1..80: mol_type = other DNA
tctttccactctaacagtctgcaacagcaattctgtgattgacctctgactccctactcccaccagataaacaccagatt

SEQ ID NO: 23251 - DNA, 80 bp, synthetic construct
  source 1..80: mol_type = other DNA
agaagaacccttgaatttaaaccttcctccagagccccattctgcaaatcggaaactctacagaacaccccactgtaata

SEQ ID NO: 23252 - DNA, 80 bp, synthetic construct
  source 1..80: mol_type = other DNA
agtgaggctccctgagctttttccacgaggggaggcaaaggaatcagagtctgaagaccaaagccaggtagtctttttgg

SEQ ID NO: 23253 - DNA, 80 bp, synthetic construct; identical to SEQ ID NO: 9726
  source 1..80: mol_type = other DNA

SEQ ID NO: 23254 - DNA, 80 bp, synthetic construct
  source 1..80: mol_type = other DNA
attgggtgcttcctgaggtgctagtctgactctctattttctgtcttctctaacactttctgaagaaatgcttaagaatt

SEQ ID NO: 23255 - DNA, 80 bp, synthetic construct
  source 1..80: mol_type = other DNA
gttccttaaggggtccaggttttactcttcctacagatattagaaatctttcatcttaaaagctttttcaggaactgctt

SEQ ID NO: 23256 - DNA, 80 bp, synthetic construct
  source 1..80: mol_type = other DNA
actgctctccatagttttaagaaagagaaatagagggcatattcctgccagaagaaggagaaagaattatttttttctct

SEQ ID NO: 23257 - DNA, 80 bp, synthetic construct
  source 1..80: mol_type = other DNA
cctgagacttgaaagaaactggaacttgcctgtgagccctttgactggtaagagataaaactagaatttgtaccaagatt

SEQ ID NO: 23258 - DNA, 80 bp, synthetic construct; identical to SEQ ID NO: 9727
  source 1..80: mol_type = other DNA

SEQ ID NO: 23259 - DNA, 80 bp, synthetic construct
  source 1..80: mol_type = other DNA
tacttaagacagaaaaattaagaaggggtgaataactccttaggacactgggggaccctcctaggaggaggttttggctg

SEQ ID NO: 23260 - DNA, 80 bp, synthetic construct
  source 1..80: mol_type = other DNA
cctccttcccctttccctttctatccctagaggtagccattgtaaaagtttggaatatatcttttcaggcctttttttca

SEQ ID NO: 23261 - DNA, 80 bp, synthetic construct
  source 1..80: mol_type = other DNA
ccaaacttttggggtgtccaatagatcaatgtatgtgtcaaaaacagactcaggtacaatcatgatatgaatggcttatc

SEQ ID NO: 23262 - DNA, 80 bp, synthetic construct; identical to SEQ ID NO: 9728
  source 1..80: mol_type = other DNA

SEQ ID NO: 23263 - DNA, 80 bp, synthetic construct
  source 1..80: mol_type = other DNA
agtcaagaaggttgccatggaggtacatcaatcagcctgaaagcaaaatgcaaaaggagtgagagtagcagtatgcttat

SEQ ID NO: 23264 - DNA, 80 bp, synthetic construct
  source 1..80: mol_type = other DNA
gatggagtgggaagaccatggagttgagagaaagacacttggtttgtgttcttggaaccaacatttactaatggtaagat

SEQ ID NO: 23265 - DNA, 80 bp, synthetic construct
  source 1..80: mol_type = other DNA
aaaggcattcactgtctggtatcagagagagaaaaataaagaattgcagagggattctacttttgaatgggggaatgagg

SEQ ID NO: 23266 - DNA, 80 bp, synthetic construct; identical to SEQ ID NO: 9729
  source 1..80: mol_type = other DNA

SEQ ID NO: 23267 - DNA, 80 bp, synthetic construct
  source 1..80: mol_type = other DNA
agcatttctaattttccccagctacacaaggcagaggctaaactccaggtaagcatggccaagaagttggggatccctta

SEQ ID NO: 23268 - DNA, 80 bp, synthetic construct
  source 1..80: mol_type = other DNA
gagacatgttgagaagaagagaggctacttaccctgctcagcactctgaccataatgtagggtgtcactctaagaaaagt

SEQ ID NO: 23269 - DNA, 80 bp, synthetic construct
  source 1..80: mol_type = other DNA
caaacaattatgatttttgtggcaaacaactgagaggagactggcagtttcatgactatctacaacaagctaaacagttg

SEQ ID NO: 23270 - DNA, 80 bp, synthetic construct; identical to SEQ ID NO: 9730
  source 1..80: mol_type = other DNA

SEQ ID NO: 23271 - DNA, 80 bp, synthetic construct
  source 1..80: mol_type = other DNA
agactacactaaagccaaataaggccacatttacaggtaggagggggtcaggaattcaacatgtctttttgggagacaaa

SEQ ID NO: 23272 - DNA, 80 bp, synthetic construct
  source 1..80: mol_type = other DNA
gtggggtggcatgttcaaagtgctgaaagaaaaactctgtcaatataaaaaattcccagatcagcaaaaactgagatttg

SEQ ID NO: 23273 - DNA, 80 bp, synthetic construct; identical to SEQ ID NO: 9731
  source 1..80: mol_type = other DNA

SEQ ID NO: 23274 - DNA, 80 bp, synthetic construct
  source 1..80: mol_type = other DNA
tgagcatagtggggtgcgcctgtagtcccagctactcagaaggctgaggcaggagaatcgcttaaacccagggaggcaga

SEQ ID NO: 23275 - DNA, 80 bp, synthetic construct
  source 1..80: mol_type = other DNA
ttgataataaccgcacaaaggattggggggggcagaaaaggcatacttgagtaaggaaagcacacctgatagtaatttta

SEQ ID NO: 23276 - DNA, 80 bp, synthetic construct
  source 1..80: mol_type = other DNA
atagttgtaatatgtatgagaataatagcattaaaaagtggaggggaatagagctatatgagagcaatgtttctgtatct

SEQ ID NO: 23277 - DNA, 80 bp, synthetic construct
  source 1..80: mol_type = other DNA
acaaattaaaatgttactctagaagatattcacttaataaaaaaagaaaacagtatgagataaaaagaacaaaagacatg

SEQ ID NO: 23278 - DNA, 80 bp, synthetic construct; identical to SEQ ID NO: 9732
  source 1..80: mol_type = other DNA

SEQ ID NO: 23279 - DNA, 80 bp, synthetic construct
  source 1..80: mol_type = other DNA
tcttctaaataaccagtgggtcaaaggagaaatcataagaaaacttagagcatactttgagataaatgaaaacaaagatg

SEQ ID NO: 23280 - DNA, 80 bp, synthetic construct
  source 1..80: mol_type = other DNA
ctgtaaataacaaagagcagaaattaataaaacagagaatagaaaaaatagagaaaatcaataaaacttaaatttgttct

SEQ ID NO: 23281 - DNA, 80 bp, synthetic construct
  source 1..80: mol_type = other DNA
gtgccaataaagtagatgacttagatgaaatagatacattcctagatagacacaaactactgaaactgactcaagaagaa

SEQ ID NO: 23282 - DNA, 80 bp, synthetic construct; identical to SEQ ID NO: 9733
  source 1..80: mol_type = other DNA

SEQ ID NO: 23283 - DNA, 80 bp, synthetic construct
  source 1..80: mol_type = other DNA
ctcaacagacgcagaaagaagattcaacaaacttgaacaccgtatcatgacagaacagtcaacaagcaagtaatagtaag

SEQ ID NO: 23284 - DNA, 80 bp, synthetic construct
  source 1..80: mol_type = other DNA
ggaaattaggcaaaaatataaataaataaaaagcaaccagactgaaaagaaagaaggataactatctctatttgcaaatg

SEQ ID NO: 23285 - DNA, 80 bp, synthetic construct
  source 1..80: mol_type = other DNA
aaagaataaaatggaaataaattttacaaaagaagtacaaaacttacactctgaaaaactacaaaacattgttgaaggaa

SEQ ID NO: 23286 - DNA, 80 bp, synthetic construct; identical to SEQ ID NO: 9734
  source 1..80: mol_type = other DNA

SEQ ID NO: 23287 - DNA, 80 bp, synthetic construct
  source 1..80: mol_type = other DNA
aaaaaaatttttcagggaaatggcatatccaatgcaaaatgaagttgaacccctacctcatataagatataaaacttaaa

SEQ ID NO: 23288 - DNA, 80 bp, synthetic construct
  source 1..80: mol_type = other DNA
agcagcaataaaaaaatagaaaaattagaatttatcaaaattttaaaccttgttgcttcaaagcataccatcaggaaact

SEQ ID NO: 23289 - DNA, 80 bp, synthetic construct
  source 1..80: mol_type = other DNA
ctgtaaaaggccacatagtcaatgttttaggcttgagggccatacagtctttaacacaactactcagctttgccatggta

SEQ ID NO: 23290 - DNA, 80 bp, synthetic construct
  source 1..80: mol_type = other DNA
aattctggagataaaatggaatctatgggcatacccagactgtgataggtacttattgcctggtataaagagagcaatta

SEQ ID NO: 23291 - DNA, 80 bp, synthetic construct; identical to SEQ ID NO: 9735
  source 1..80: mol_type = other DNA

SEQ ID NO: 23292 - DNA, 80 bp, synthetic construct
  source 1..80: mol_type = other DNA
tctgtatctcagggataagagtaagagttcttagaaacataatcacttccaccaaagacagacctggagatgccagacac

SEQ ID NO: 23293 - DNA, 80 bp, synthetic construct
  source 1..80: mol_type = other DNA
aacgtgctctcaggttgtatctcccaagagtcattaatgttaatgtgtatttaaggctgtgtctacaagacagaggacca

SEQ ID NO: 23294 - DNA, 80 bp, synthetic construct
  source 1..80: mol_type = other DNA
ggagatgggaatcaatcctcttgactcctgtagccaactgattcgaattttagctaaaattaagtcccaaataaaaatcc

SEQ ID NO: 23295 - DNA, 80 bp, synthetic construct; identical to SEQ ID NO: 9736
  source 1..80: mol_type = other DNA

SEQ ID NO: 23296 - DNA, 80 bp, synthetic construct
  source 1..80: mol_type = other DNA
caaataggattgagggcctactaggtaataggcactttggggacccagatacaagtcagatgtgtactctatctttagga

SEQ ID NO: 23297 - DNA, 80 bp, synthetic construct
  source 1..80: mol_type = other DNA
tgccctgctaccacctcaacccctgaagcctaggttacaggtaggcctctctctgataactatttcttggatatcagaaa

SEQ ID NO: 23298 - DNA, 80 bp, synthetic construct
  source 1..80: mol_type = other DNA
tagttcccatgagatctggttatttaaaagagcctggcaccatcttcccattgctctctcccttgccatgtgatacgcag

SEQ ID NO: 23299 - DNA, 80 bp, synthetic construct
  source 1..80: mol_type = other DNA
tggacaatcaacctcagatttgtatgataacgaggtcatttatttaatgattaaacttggtcagtctccacattgtccct

SEQ ID NO: 23300 - DNA, 80 bp, synthetic construct; identical to SEQ ID NO: 9737
  source 1..80: mol_type = other DNA

SEQ ID NO: 23301 - DNA, 80 bp, synthetic construct
  source 1..80: mol_type = other DNA
agttctaactccagctctcatacttactagctatgagctattgatcatttccctgctctgggtttccttatctgtatgag

SEQ ID NO: 23302 - DNA, 80 bp, synthetic construct
  source 1..80: mol_type = other DNA
attgaacccatagtagggacttcaggatgccccctgtgaatactctttgatcagccaagtgattgtttctcaggcccttt

SEQ ID NO: 23303 - DNA, 80 bp, synthetic construct
  source 1..80: mol_type = other DNA
caagtttctagagggttttgaggaggaaacatgaggccattaggaggcttgatactatatctgagagaataccaaattgt

SEQ ID NO: 23304 - DNA, 80 bp, synthetic construct; identical to SEQ ID NO: 9738
  source 1..80: mol_type = other DNA

SEQ ID NO: 23305 - DNA, 80 bp, synthetic construct
  source 1..80: mol_type = other DNA
atggaatctatgggtatgggtatacccagactataataggaacttatttcctggcataaaaaggcaattaatggatactg

SEQ ID NO: 23306 - DNA, 80 bp, synthetic construct
  source 1..80: mol_type = other DNA
caatgtgctttgtaaagtactgaaaaggcaaagcatggagaaggggatgcttgcttgtgcctggagttttatacaggatg

SEQ ID NO: 23307 - DNA, 80 bp, synthetic construct; identical to SEQ ID NO: 9739
  source 1..80: mol_type = other DNA

SEQ ID NO: 23308 - DNA, 80 bp, synthetic construct
  source 1..80: mol_type = other DNA
tgttcctttttgaatacagtgtacattacttggaagcaacactagttgcatcataaatatttcagctgccagtgtttggg

SEQ ID NO: 23309 - DNA, 80 bp, synthetic construct
  source 1..80: mol_type = other DNA
ccaacatgtataataaccactttcaatggaggctcgcctttcaattctaatggacattgctgagctcagggttgaatgat

SEQ ID NO: 23310 - DNA, 80 bp, synthetic construct
  source 1..80: mol_type = other DNA
actgatttgcccaaggttacacaattatttaaagcactcagatctcctggttgttaggtcagggctgttcatgaatgcag

SEQ ID NO: 23311 - DNA, 80 bp, synthetic construct
  source 1..80: mol_type = other DNA
aaaacagacattgagcctactatgtggcaagtatttaaataattaaattccccaggaaccatgaaccctcctactggaac

SEQ ID NO: 23312 - DNA, 80 bp, synthetic construct; identical to SEQ ID NO: 9740
  source 1..80: mol_type = other DNA

SEQ ID NO: 23313 - DNA, 80 bp, synthetic construct
  source 1..80: mol_type = other DNA
gatttgaatacaggtatgtttaacaccaaaagcaacacaagcttctcccttatgccaatatgactgaggaactgtgacaa

SEQ ID NO: 23314 - DNA, 80 bp, synthetic construct
  source 1..80: mol_type = other DNA
gatttggtttgagtataactttggtcgaaaaaatgataggaagaagcaaagaaggcactgtaagcacatctggagaactt

SEQ ID NO: 23315 - DNA, 80 bp, synthetic construct
  source 1..80: mol_type = other DNA
atgagctaaccaataaaggaaacaaagagtctctactacttggcattcattcattaaataaaatagatattgagcctacc

SEQ ID NO: 23316 - DNA, 80 bp, synthetic construct; identical to SEQ ID NO: 9741
  source 1..80: mol_type = other DNA

SEQ ID NO: 23317 - DNA, 80 bp, synthetic construct
  source 1..80: mol_type = other DNA
gaggccagtttttttgctatcatattgatgttcgctcatcagctgataactctctcttagcccatcaagtttggctttta

SEQ ID NO: 23318 - DNA, 80 bp, synthetic construct
  source 1..80: mol_type = other DNA
ctgcttgattagccaccagagataaatggcttagtcattttaaagttttatggaacatctgtgcactgtgatcacagacc

SEQ ID NO: 23319 - DNA, 80 bp, synthetic construct
  source 1..80: mol_type = other DNA
gaggtcaaatctacaaccagtcccaggatttgattcaagtggtgccctttaagggaatcaaatggtgttggtgttttctc

SEQ ID NO: 23320 - DNA, 80 bp, synthetic construct; identical to SEQ ID NO: 9742
  source 1..80: mol_type = other DNA

SEQ ID NO: 23321 - DNA, 80 bp, synthetic construct
  source 1..80: mol_type = other DNA
aatgcagaataccaagttcagacaaggcttgtctgagatcttgataaaatgagacaaagcgaggccacttctaagtacag

SEQ ID NO: 23322 - DNA, 80 bp, synthetic construct
  source 1..80: mol_type = other DNA
ggaggtttattgagataaacaattatagaattgctgctacctaatgacaccatccaattcagagcaaagtcctgcttccc

SEQ ID NO: 23323 - DNA, 80 bp, synthetic construct; identical to SEQ ID NO: 9743
  source 1..80: mol_type = other DNA

SEQ ID NO: 23324 - DNA, 80 bp, synthetic construct
  source 1..80: mol_type = other DNA
gaagttccactagtgtctgccatccatttctgatcaaagaacacgaagcaaataccttagactgacattattttattcaa

SEQ ID NO: 23325 - DNA, 80 bp, synthetic construct
  source 1..80: mol_type = other DNA
agtgttttgttcacatgagctggtcatagaagaaaaatgtcccatagctatttgttatttagtgctgcactaattggaga

SEQ ID NO: 23326 - DNA, 80 bp, synthetic construct
  source 1..80: mol_type = other DNA
ctcaaagaaatgttcaaatagaaagcaaagaaatttgcagtaatttgctgccaatggttgaaggctactctcccagatcc

SEQ ID NO: 23327 - DNA, 80 bp, synthetic construct
  source 1..80: mol_type = other DNA
gccatgagggtcaatggagtaggttacaatatcccccagcgctcctactgatttggggaggagagcactgtgggcttgtt

SEQ ID NO: 23328 - DNA, 80 bp, synthetic construct; identical to SEQ ID NO: 9744
  source 1..80: mol_type = other DNA

SEQ ID NO: 23329 - DNA, 80 bp, synthetic construct
  source 1..80: mol_type = other DNA
aacatgtagctgctttaaatagaacaggtgacaattgtcaaggactgcctgagctgacaaattatgtattctcatattat

SEQ ID NO: 23330 - DNA, 80 bp, synthetic construct
  source 1..80: mol_type = other DNA
aggtgctatttgctgaaacaatatcgctgctcacaggacagacagatagagaatagacggctcctactcaggttctataa

SEQ ID NO: 23331 - DNA, 80 bp, synthetic construct; identical to SEQ ID NO: 9745
  source 1..80: mol_type = other DNA

SEQ ID NO: 23332 - DNA, 80 bp, synthetic construct
  source 1..80: mol_type = other DNA
actaatacacatctttggccgggcatggtggctcacgcctgtaatcccagcactttgggaggccaaggcaggaggatcac

SEQ ID NO: 23333 - DNA, 80 bp, synthetic construct
  source 1..80: mol_type = other DNA
cagtgagccgagatcgtgccattgcactccagcctgggtgacagatcaagactccatctcaaaaacaaaaacaaaaaaaa

SEQ ID NO: 23334 - DNA, 80 bp, synthetic construct
  source 1..80: mol_type = other DNA
tcaagcaattctcctgcctcagcctcctgagtagctgggattacaggcatctgccaccacacccagctaatttttgtatt

SEQ ID NO: 23335 - DNA, 80 bp, synthetic construct; identical to SEQ ID NO: 9746
  source 1..80: mol_type = other DNA

SEQ ID NO: 23336 - DNA, 80 bp, synthetic construct
  source 1..80: mol_type = other DNA
tcatttaaattatcatagagaactcacagatccttgtgtatggactctgatttgaggggcaagaacatcagattttgtcc

SEQ ID NO: 23337 - DNA, 80 bp, synthetic construct
  source 1..80: mol_type = other DNA
cacctgaacactgtaagaggtagtgctggcacgccctgctcaggggcagaacctactctagatctgtctatgtcaacttc

SEQ ID NO: 23338 - DNA, 80 bp, synthetic construct
  source 1..80: mol_type = other DNA
caatcactttaggtgcctctgggggaatcacagagtgggcattagcctgctagggctcggtgtcactgtaagggatggtg

SEQ ID NO: 23339 - DNA, 80 bp, synthetic construct
  source 1..80: mol_type = other DNA
aagaggtgatggagcacttgtagggcttggagaaatggctatttttcaattgatctggaaatatgtcaatgttttaataa

SEQ ID NO: 23340 - DNA, 80 bp, synthetic construct; identical to SEQ ID NO: 9747
  source 1..80: mol_type = other DNA

SEQ ID NO: 23341 - DNA, 80 bp, synthetic construct
  source 1..80: mol_type = other DNA
aattaacactaattgagaagcagatgtccaaatccttctctagagctcgctggtttcatcattaaaatcttcacaggaag

SEQ ID NO: 23342 - DNA, 80 bp, synthetic construct
  source 1..80: mol_type = other DNA
acttgaccggtaaaaagagcatctgttgggagaatgcactgaatccaaaaaccttatggtactaggagatttggggtgtt

SEQ ID NO: 23343 - DNA, 80 bp, synthetic construct
  source 1..80: mol_type = other DNA
tggatgggaatccttgctccttcacaatatccataaccacagagctctggacagtaggctttgaggcagtgtgggatgga

SEQ ID NO: 23344 - DNA, 80 bp, synthetic construct; identical to SEQ ID NO: 9748
  source 1..80: mol_type = other DNA

SEQ ID NO: 23345 - DNA, 80 bp, synthetic construct
  source 1..80: mol_type = other DNA
ttagacaaatgattctcaatgtcccttccaggtcgaagatctctgattctaacttgaaacctgaaagggacaaagcgtga

SEQ ID NO: 23346 - DNA, 80 bp, synthetic construct
  source 1..80: mol_type = other DNA
ttcccatccctgtggcatttttaactaaactttcgcttcttgcacttctcctctttctccttgtttgcctctgtagtgtc

SEQ ID NO: 23347 - DNA, 80 bp, synthetic construct
  source 1..80: mol_type = other DNA
agcaggtgtccctgagaatgcaaacctcccagagagtatctgagaaccaatgaggaaaacagttccattgcatacataca

SEQ ID NO: 23348 - DNA, 80 bp, synthetic construct; identical to SEQ ID NO: 9749
  source 1..80: mol_type = other DNA

SEQ ID NO: 23349 - DNA, 80 bp, synthetic construct
  source 1..80: mol_type = other DNA
cactcaccctttcacaggttgtgggcataaactgagaataactggagctcagggcccatttagtagtggtgaaagcaatt

SEQ ID NO: 23350 - DNA, 80 bp, synthetic construct
  source 1..80: mol_type = other DNA
ctccaggttgtaattttatttcttttcctactgtttctaccagattgctcttgttacgcccaatttgcaaaaggagaaac

SEQ ID NO: 23351 - DNA, 80 bp, synthetic construct; identical to SEQ ID NO: 9750
  source 1..80: mol_type = other DNA

SEQ ID NO: 23352 - DNA, 80 bp, synthetic construct
  source 1..80: mol_type = other DNA
gtgctcactgggcatcatgaaatgttgggagctaggtcagcccaaggctgcctgatttggaagctcttttgcaaatgaac

SEQ ID NO: 23353 - DNA, 80 bp, synthetic construct
  source 1..80: mol_type = other DNA
acttttgggggccctgggtgcttttgccattatgggatcctttatacaaaaaaaattaaaaattctgttttacaattgca

SEQ ID NO: 23354 - DNA, 80 bp, synthetic construct
  source 1..80: mol_type = other DNA
aaattaaaaagtttccttgggctcctaaaagtactgtggccctaggcactgtgcattcctctttctcatgaataagtcgg

SEQ ID NO: 23355 - DNA, 80 bp, synthetic construct; identical to SEQ ID NO: 9751
  source 1..80: mol_type = other DNA

SEQ ID NO: 23356 - DNA, 80 bp, synthetic construct
  source 1..80: mol_type = other DNA
tgatagatcacagggagaaaagtctaaaaataaatttcacacaatgcaatgaaaaaggtcccatggagatgcacggagaa

SEQ ID NO: 23357 - DNA, 80 bp, synthetic construct
  source 1..80: mol_type = other DNA
atagggggttccctcacatcgcttcccagtggcagtgtggtgtctgaagaggagatgctggattaatagtaaataagggc

SEQ ID NO: 23358 - DNA, 80 bp, synthetic construct
  source 1..80: mol_type = other DNA
tgcctgtagtcccagttacttgggaggctgaggcagtagaatcacttgaaacggggaggtggaagtggcagtgagcagac

SEQ ID NO: 23359 - DNA, 80 bp, synthetic construct
  source 1..80: mol_type = other DNA
ctaaaaatacaaaaaattagccgggcgtagtggcgggcgcctgtagtcccagctacttgggaggctgaggcaggagaatg

SEQ ID NO: 23360 - DNA, 80 bp, synthetic construct; identical to SEQ ID NO: 9752
  source 1..80: mol_type = other DNA

SEQ ID NO: 23361 - DNA, 80 bp, synthetic construct
  source 1..80: mol_type = other DNA
gtagaaaagttcttaacaatcctagccctaccaagtacacaggtttttgtgagacttaaataagagatataactgggatt

SEQ ID NO: 23362 - DNA, 80 bp, synthetic construct
  source 1..80: mol_type = other DNA
ttcttaaaaactgattcttggctcttccgccaccactgccaagatctccaagctgagctgctatacaatggcagtagatt

SEQ ID NO: 23363 - DNA, 80 bp, synthetic construct
  source 1..80: mol_type = other DNA
tggcttagaaaaatctggtggccaaaggctgtctgtatcttcacaagaatcaggaagaagagtttaaactttagttaccc

SEQ ID NO: 23364 - DNA, 80 bp, synthetic construct; identical to SEQ ID NO: 9753
  source 1..80: mol_type = other DNA

SEQ ID NO: 23365 - DNA, 80 bp, synthetic construct
  source 1..80: mol_type = other DNA
accttccagccagagtctcctcccctacccgtctccattattcattagcactgcccatcatgatttcttgcagaaatctc

SEQ ID NO: 23366 - DNA, 80 bp, synthetic construct
  source 1..80: mol_type = other DNA
agatggggaaattattttgagcagcacagcaaggagtggctttaggagggaaaaaaaaaatctcgtgtttattataactc

SEQ ID NO: 23367 - DNA, 80 bp, synthetic construct
  source 1..80: mol_type = other DNA
tggagtcaggccccatccttctctccacagtcagcttctattaggagatgacatgattcaatagcacctttcatagaaag

SEQ ID NO: 23368 - DNA, 80 bp, synthetic construct; identical to SEQ ID NO: 9754
  source 1..80: mol_type = other DNA

SEQ ID NO: 23369 - DNA, 80 bp, synthetic construct
  source 1..80: mol_type = other DNA
cagatgcagcaatttatggtctattattctttcctgtggcgcttgctaaaatatttcaaagctataccatactgactttt

SEQ ID NO: 23370 - DNA, 80 bp, synthetic construct
  source 1..80: mol_type = other DNA
tatacgcagtaatttaggagggaggctggcttcgtttggccagtaatgtgagttcatttgcaattctcttctcttcttaa

SEQ ID NO: 23371 - DNA, 80 bp, synthetic construct
  source 1..80: mol_type = other DNA
gtcatcctggaacagcagacactgatatatgtgtttggggacatctatagagcacagtgaatcatgcaacatacgagtca

SEQ ID NO: 23372 - DNA, 80 bp, synthetic construct; identical to SEQ ID NO: 9755
  source 1..80: mol_type = other DNA

SEQ ID NO: 23373 - DNA, 80 bp, synthetic construct
  source 1..80: mol_type = other DNA
ctgcttgattctcatttcatccagtattgcacaaaggccataaacaatctttctttgcatgacaatcttccaatagctgc

SEQ ID NO: 23374 - DNA, 80 bp, synthetic construct
  source 1..80: mol_type = other DNA
acaagtcaactaatctgaattttctatggtgagtgaaagcctaaacaatgtcctctgggggtctacaggaaagcacgttc

SEQ ID NO: 23375 - DNA, 80 bp, synthetic construct
  source 1..80: mol_type = other DNA
gtgttggggcctccattaatgtgggctctgacagtcacaacagtttggtgcatttccattcacagttcagatccatctta

SEQ ID NO: 23376 - DNA, 80 bp, synthetic construct; identical to SEQ ID NO: 9756
  source 1..80: mol_type = other DNA

SEQ ID NO: 23377 - DNA, 80 bp, synthetic construct
  source 1..80: mol_type = other DNA
gtgggcacatggcattggaggaataggaagacaaagtgtcaaagttggaagtggataatagcaagcaaaacacaaagggc

SEQ ID NO: 23378 - DNA, 80 bp, synthetic construct
  source 1..80: mol_type = other DNA
tctgagaccgaggttcaaaaccgctcagatgttcatgtatgcttctgaggattccacataaacactctgagacttgctca

SEQ ID NO: 23379 - DNA, 80 bp, synthetic construct
  source 1..80: mol_type = other DNA
aggtctttgccctcagagtttttggttgtgtggggcagacagggcaaagaaaaacaaacgccaatataagggatacatag

SEQ ID NO: 23380 - DNA, 80 bp, synthetic construct
  source 1..80: mol_type = other DNA
gaaaaaggcataatgagagaggaacaattttcatgtttgcaggactatggcctataaataatgagaagaggaacctgtta

SEQ ID NO: 23381 - DNA, 80 bp, synthetic construct; identical to SEQ ID NO: 9757
  source 1..80: mol_type = other DNA

SEQ ID NO: 23382 - DNA, 80 bp, synthetic construct
  source 1..80: mol_type = other DNA
tatatttcaagcagcctgtcttcttgtgcttgagaatgctttcaggtttcagaaaaatagatgctggaagaggaatgacc

SEQ ID NO: 23383 - DNA, 80 bp, synthetic construct
  source 1..80: mol_type = other DNA
ctctgggataaagataaaactctttagcttggctccaaggcccttcacactctatcgccctccttcctgctaaaatctcc

SEQ ID NO: 23384 - DNA, 80 bp, synthetic construct
  source 1..80: mol_type = other DNA
acttcctcctctcaacccaaaagaatcttacctagacatttaacccctgcttctccaggaagcctcttttgatctcctgt

SEQ ID NO: 23385 - DNA, 80 bp, synthetic construct; identical to SEQ ID NO: 9758
  source 1..80: mol_type = other DNA

SEQ ID NO: 23386 - DNA, 80 bp, synthetic construct
  source 1..80: mol_type = other DNA
attggacagcacagttgagaatatatttaacgaaggaggttgcactgtgcttcgaaaacgtccccactctctaccccact

SEQ ID NO: 23387 - DNA, 80 bp, synthetic construct
  source 1..80: mol_type = other DNA
tgttctggcttcaaggcttttgctgttgtatgctttgcctagagtgtgtttctcttagatctcactcaagttttttttgt

SEQ ID NO: 23388 - DNA, 80 bp, synthetic construct
  source 1..80: mol_type = other DNA
ttacttcttcattgtctaactcctaataaaaggtaagcttcttgagtaaggaagtgctcaaaaacaatgcataataaaat

SEQ ID NO: 23389 - DNA, 80 bp, synthetic construct; identical to SEQ ID NO: 9759
  source 1..80: mol_type = other DNA

SEQ ID NO: 23390 - DNA, 80 bp, synthetic construct
  source 1..80: mol_type = other DNA
gaaaataagcagatacgataattaaatgcaatgcaggaaacgggattggctcctgaactggaaaaatgagtaggaaaact

SEQ ID NO: 23391 - DNA, 80 bp, synthetic construct
  source 1..80: mol_type = other DNA
agttagataagatgttggcataaggtgaagttaggtgatgggtttatagaaactctgtactgtttttgcaactcttattt

SEQ ID NO: 23392 - DNA, 80 bp, synthetic construct
  source 1..80: mol_type = other DNA
gtgtgcaccaacatgcctggcaatttttttttttaattttttggtagagacgagttctcactatgttgctcaggctggtc

SEQ ID NO: 23393 - DNA, 80 bp, synthetic construct; identical to SEQ ID NO: 9760
  source 1..80: mol_type = other DNA

SEQ ID NO: 23394 - DNA, 80 bp, synthetic construct
  source 1..80: mol_type = other DNA
aggctcactcacagcatccagcataccccagggacacacaaaagcatggagatctcacattctagatgtttgattgagtt

SEQ ID NO: 23395 - DNA, 80 bp, synthetic construct
  source 1..80: mol_type = other DNA
gcatatgtgagtctctacagactgctagaaattggagcaagactaattcagtaaaatagggcccattcttggatgaccta

SEQ ID NO: 23396 - DNA, 80 bp, synthetic construct
  source 1..80: mol_type = other DNA
atctttccatatactttaaatcatctccagattacttacaatacctaatacaatgtaagtgctaggtaaacagctgtgat

SEQ ID NO: 23397 - DNA, 80 bp, synthetic construct; identical to SEQ ID NO: 9761
  source 1..80: mol_type = other DNA

SEQ ID NO: 23398 - DNA, 80 bp, synthetic construct
  source 1..80: mol_type = other DNA
aacccatcacctagtacataagtgcctatatactgggcacataattggcaattgatacatatagttaaaattatatacta

SEQ ID NO: 23399 - DNA, 80 bp, synthetic construct
  source 1..80: mol_type = other DNA
aaactcaaatctagctctctctcattccgagctcttgaaaagggtcctagacgtcatctaatccagctcttcacttcttc

SEQ ID NO: 23400 - DNA, 80 bp, synthetic construct; identical to SEQ ID NO: 9762
  source 1..80: mol_type = other DNA

SEQ ID NO: 23401 - DNA, 80 bp, synthetic construct
  source 1..80: mol_type = other DNA
ctcacaatcctctcttttttccctccgtcttcttttcactgcttctatttctgtctctttttctctctttcactgtcagt

SEQ ID NO: 23402 - DNA, 80 bp, synthetic construct
  source 1..80: mol_type = other DNA
ttcaaaagcttctatttataactgcacagactgaagttctgggctgtgcccttgactgggcaattatgttgcagagactg

SEQ ID NO: 23403 - DNA, 80 bp, synthetic construct
  source 1..80: mol_type = other DNA
caaggaacacagccataagtttgaggccaaagagctctagattaaaactgagcctggtgggaataccactttatatccat

SEQ ID NO: 23404 - DNA, 80 bp, synthetic construct; identical to SEQ ID NO: 9763
  source 1..80: mol_type = other DNA

SEQ ID NO: 23405 - DNA, 80 bp, synthetic construct
  source 1..80: mol_type = other DNA
attcagccttaaagaggaaaaaaaatttgacacacactccgagatggataaacctttaagacatgagaagtgaaataagc

SEQ ID NO: 23406 - DNA, 80 bp, synthetic construct
  source 1..80: mol_type = other DNA
attgctcaactggtacagaattacagttttcaagatgaaaaacattctggagttggatggcagtaatgattgcacaataa

SEQ ID NO: 23407 - DNA, 80 bp, synthetic construct
  source 1..80: mol_type = other DNA
ttttgaggattaaattagatgtcacatgtgaaatatctagaataatgctccatctcctaatagttgctcaacgtgtactg

SEQ ID NO: 23408 - DNA, 80 bp, synthetic construct; identical to SEQ ID NO: 9764
  source 1..80: mol_type = other DNA

SEQ ID NO: 23409 - DNA, 80 bp, synthetic construct
  source 1..80: mol_type = other DNA
tccttacctacttagtccactaggccagctaacacttcagcattggctcgattgaaatgtaggagctggaatcttaccca

SEQ ID NO: 23410 - DNA, 80 bp, synthetic construct
  source 1..80: mol_type = other DNA
aattccaaacagtacttctctaaggcttcttccagatcatttgcagtgcatctatggcctctgtgtatggacaggtttcc

SEQ ID NO: 23411 - DNA, 80 bp, synthetic construct
  source 1..80: mol_type = other DNA
gtgccttcaaacaacactatgaatcagggagcttgggttcagatcacgttttcaaacctgtcacatctacatatagagat

SEQ ID NO: 23412 - DNA, 80 bp, synthetic construct; identical to SEQ ID NO: 9765
  source 1..80: mol_type = other DNA

SEQ ID NO: 23413 - DNA, 80 bp, synthetic construct
  source 1..80: mol_type = other DNA
gacaaatggagacatgtaatctactttttaaacctataatcgtgtttaacatgtgactcccacagtgttttacaatgtgt

SEQ ID NO: 23414 - DNA, 80 bp, synthetic construct
  source 1..80: mol_type = other DNA
tgggacacacagcctggaataatcatccataacttgattaatttgcttcaaaatcaaccaggaaaacatctgctcagtca

SEQ ID NO: 23415 - DNA, 80 bp, synthetic construct
  source 1..80: mol_type = other DNA
tgagggactccatgccctttatagatactgcatcaatcttgcaaatgccttcaacacaatcttgaggcttaacatttctt

SEQ ID NO: 23416 - DNA, 80 bp, synthetic construct; identical to SEQ ID NO: 9766
  source 1..80: mol_type = other DNA

SEQ ID NO: 23417 - DNA, 80 bp, synthetic construct
  source 1..80: mol_type = other DNA
attttaataggcttataggtcacttgggaaatgtttcaaaatataagttcctgggactcacctagaggtccaccttcagt

SEQ ID NO: 23418 - DNA, 80 bp, synthetic construct
  source 1..80: mol_type = other DNA
tttgttcactccttaatttaccgagaggttaacataatgaatgatctcatttcattggtgcttttataggttgaaagtca

SEQ ID NO: 23419 - DNA, 80 bp, synthetic construct
  source 1..80: mol_type = other DNA
aacttgggaacataagtccctatctaatcctcaggcggaaatctttgattgttgcaaactcgttatttttggcaactgat

SEQ ID NO: 23420 - DNA, 80 bp, synthetic construct
  source 1..80: mol_type = other DNA
tgaagtaacaagcatacaaataaaagccaaaatgctaagtatgatgggacagaaagataaaaacagctgaggtccccaac

SEQ ID NO: 23421 - DNA, 80 bp, synthetic construct; identical to SEQ ID NO: 9767
  source 1..80: mol_type = other DNA

SEQ ID NO: 23422 - DNA, 80 bp, synthetic construct
  source 1..80: mol_type = other DNA
tgggggctgagctcctgatctcacttcagccagaagaattcttgttaatatattttctaaattgggcttccatgtaaaat

SEQ ID NO: 23423 - DNA, 80 bp, synthetic construct
  source 1..80: mol_type = other DNA
attgttctaagcacatttgttacccagcggaggacataagtcatatacacatgcaggcacgccttgttttattgcacttc

SEQ ID NO: 23424 - DNA, 80 bp, synthetic construct; identical to SEQ ID NO: 9768
  source 1..80: mol_type = other DNA

SEQ ID NO: 23425 - DNA, 80 bp, synthetic construct
  source 1..80: mol_type = other DNA
tgttactcaagggagcacacaaatgataagaaaagtgaaacagacttattgctgctgtgcagaaaagtttcggtgttctg

SEQ ID NO: 23426 - DNA, 80 bp, synthetic construct
  source 1..80: mol_type = other DNA
tgaagctagcagaggttggtttatgaggtttaaggcaacaagccatgtccataacataaaagtacaaagtgaagcagcaa

SEQ ID NO: 23427 - DNA, 80 bp, synthetic construct
  source 1..80: mol_type = other DNA
tcaaaacttaaaaggacagtctgactcttttgttaagggcaaatgcagctggtgacttgtaagttacaaacaatattcat

SEQ ID NO: 23428 - DNA, 80 bp, synthetic construct; identical to SEQ ID NO: 9769
  source 1..80: mol_type = other DNA

SEQ ID NO: 23429 - DNA, 80 bp, synthetic construct
  source 1..80: mol_type = other DNA
aaaggaccattctaggtgtcattaagaatatttttgatttgtagcagaggtcgaaatatcaacatggacaagagtttaga

SEQ ID NO: 23430 - DNA, 80 bp, synthetic construct
  source 1..80: mol_type = other DNA
agaggagttgctttttgtggaagaacaaagaaagtagtatcttgaaatcgaatctattcttggtgaagatattgttaaca

SEQ ID NO: 23431 - DNA, 80 bp, synthetic construct
  source 1..80: mol_type = other DNA
aagagttagttgatgcagcgaacttcattgctgtcatttttaaaattgccacagccatcccacccttcagcatccactac

SEQ ID NO: 23432 - DNA, 80 bp, synthetic construct
  source 1..80: mol_type = other DNA
gtaaacaaaactcatatgcactggaaaaaccaaacaatttgtgttacttgctttactgagatacttgctttatcgtggtg

SEQ ID NO: 23433 - DNA, 80 bp, synthetic construct; identical to SEQ ID NO: 9770
  source 1..80: mol_type = other DNA

SEQ ID NO: 23434 - DNA, 80 bp, synthetic construct
  source 1..80: mol_type = other DNA
gatgatccaaatcctataaaatgggaataaatatatagaacatattacagcacatttgggctgattgtataatcaaagta

SEQ ID NO: 23435 - DNA, 80 bp, synthetic construct
  source 1..80: mol_type = other DNA
taacatgtgaaatacccaaggaaattagtgcttacgtgctcccttgttttggattgactgttgcagcaagaagaaggatt

SEQ ID NO: 23436 - DNA, 80 bp, synthetic construct; identical to SEQ ID NO: 9771
  source 1..80: mol_type = other DNA

SEQ ID NO: 23437 - DNA, 80 bp, synthetic construct
  source 1..80: mol_type = other DNA
aaggttgggatgggagatgtaggggagagagagaatatgagtgttctggaaatctgtaaaggcgtccccttgagtctttg

SEQ ID NO: 23438 - DNA, 80 bp, synthetic construct
  source 1..80: mol_type = other DNA
gtagagccctcagaaaagttacactttcccagtattaggattaaattagtcccacaataaaggctactctgagtctgaca

SEQ ID NO: 23439 - DNA, 80 bp, synthetic construct
  source 1..80: mol_type = other DNA
gcattcaaaaaagaagaaaattggacctataattaagaagataatcactcagtggaaacagagatagaagtcaaagcgat

SEQ ID NO: 23440 - DNA, 80 bp, synthetic construct; identical to SEQ ID NO: 9772
  source 1..80: mol_type = other DNA

SEQ ID NO: 23441 - DNA, 80 bp, synthetic construct
  source 1..80: mol_type = other DNA
cagatggaaatttttgagataaaaaatataccggatgggactaaaagcagattagagagtgtagggcagtggttctcaac

SEQ ID NO: 23442 - DNA, 80 bp, synthetic construct
  source 1..80: mol_type = other DNA
cctataattcacaggacagctcccccaacaaagtattaactagcaccaagtgttaatagtgacaaagttgagaaaccttg

SEQ ID NO: 23443 - DNA, 80 bp, synthetic construct
  source 1..80: mol_type = other DNA
gaaataatagcacaaagatttccaaatttgttgaaaactttaagttcacagagccaagatgcttaacaaaccccaatctg

SEQ ID NO: 23444 - DNA, 80 bp, synthetic construct; identical to SEQ ID NO: 9773
  source 1..80: mol_type = other DNA

SEQ ID NO: 23445 - DNA, 80 bp, synthetic construct
  source 1..80: mol_type = other DNA
gaccagcctggccaacatggtgaaactctgtctctactaaaaatatgaaaattaactgggcgtagtggtgtgtgcctgta

SEQ ID NO: 23446 - DNA, 80 bp, synthetic construct
  source 1..80: mol_type = other DNA
aggcagaaggcaaatgatatcagatgaaaaactggatctacctaaagaaatgaagaacgtcagaaatggcaaatatttag

SEQ ID NO: 23447 - DNA, 80 bp, synthetic construct
  source 1..80: mol_type = other DNA
taatagcacaaaggctgggggtagagattggaaatacaagaatgtaaagatcttatactatacatagtcatattatttga

SEQ ID NO: 23448 - DNA, 80 bp, synthetic construct; identical to SEQ ID NO: 9774
  source 1..80: mol_type = other DNA

SEQ ID NO: 23449 - DNA, 80 bp, synthetic construct
  source 1..80: mol_type = other DNA
cactcacactcaccaagctttatctggagaacacatttcaaatatgcctcacaaatatatgcacaataattttcaaacac

SEQ ID NO: 23450 - DNA, 80 bp, synthetic construct
  source 1..80: mol_type = other DNA
tttaagaggctaggaaccatggaaccattgtgatgaattaaagggcttggccttgagggtttgagactgtttcttgtaag

SEQ ID NO: 23451 - DNA, 80 bp, synthetic construct
  source 1..80: mol_type = other DNA
tgataacagtgctctcacaagttttacatttgatgaaaatgaggtagaaaaaagctgaagagtttgttttgaggctgact

SEQ ID NO: 23452 - DNA, 80 bp, synthetic construct
  source 1..80: mol_type = other DNA
tttagtggacatctgtaattttgtgtgatgtgtgatcagtatttcttcttttttgggaactgccgcatctccagttgttt

SEQ ID NO: 23453 - DNA, 80 bp, synthetic construct
  source 1..80: mol_type = other DNA
gaggaccaagagccttgtttgaccagggcttccaatgagcaatcttatggagagtcttattgataacagaaaaaaaaaaa

SEQ ID NO: 23454 - DNA, 80 bp, synthetic construct; identical to SEQ ID NO: 9775
  source 1..80: mol_type = other DNA

SEQ ID NO: 23455 - DNA, 80 bp, synthetic construct
  source 1..80: mol_type = other DNA
tatccactagaccagttcctctcaaagtgtggctcgggggccctgagatcttttcagggaccctcaagattaaagctctt

SEQ ID NO: 23456 - DNA, 80 bp, synthetic construct
  source 1..80: mol_type = other DNA
ggtaaatatggttactgtttattaaaataggttatttacaccaatattgttatgtaacatatttattattatttgtaaat

SEQ ID NO: 23457 - DNA, 80 bp, synthetic construct
  source 1..80: mol_type = other DNA
tctcagctcactgcaacctgcgcctaccgggttcaagtgattctcttgcttcagccttccaagtagctgggactacaggc

SEQ ID NO: 23458 - DNA, 80 bp, synthetic construct; identical to SEQ ID NO: 9776
  source 1..80: mol_type = other DNA

SEQ ID NO: 23459 - DNA, 80 bp, synthetic construct
  source 1..80: mol_type = other DNA
gctcagtggctcatgcctgtaatccaacactctgggaggccaagaatggtgtattgtttgagcccaggggttcaggacca

SEQ ID NO: 23460 - DNA, 80 bp, synthetic construct
  source 1..80: mol_type = other DNA
actgcactctagcctgggcagtagagtgagaccctgcctcaaaaaaaaaaaaaaaaaaaaaaaaaaagaactagcacacc

SEQ ID NO: 23461 - DNA, 80 bp, synthetic construct; identical to SEQ ID NO: 9777
  source 1..80: mol_type = other DNA

SEQ ID NO: 23462 - DNA, 80 bp, synthetic construct
  source 1..80: mol_type = other DNA
tatcttgtgccaaattgccttctcaatacccagagcccctaatttgacaattgctgagaaccagtgacatcaacagtaat

SEQ ID NO: 23463 - DNA, 80 bp, synthetic construct
  source 1..80: mol_type = other DNA
atgaaatctctccttactctttcctaactttggccctttctgtagctctcttaatggcaccatccccctccttgacattg

SEQ ID NO: 23464 - DNA, 80 bp, synthetic construct
  source 1..80: mol_type = other DNA
ctgattggatcaaggtttctgcctgccaaaagaaaatgaaacttctctgaagaacaacaacctttagagcttctggaatt

SEQ ID NO: 23465 - DNA, 80 bp, synthetic construct
  source 1..80: mol_type = other DNA
caataaagaatttcattagaaaacgggaatttataagaatcaaatggaaattctagaagtgaaaaatacaataacgaatt

SEQ ID NO: 23466 - DNA, 80 bp, synthetic construct; identical to SEQ ID NO: 9778
  source 1..80: mol_type = other DNA

SEQ ID NO: 23467 - DNA, 80 bp, synthetic construct
  source 1..80: mol_type = other DNA
acacattacctccaaacaagcattgataaaactgacaactgacttcaacagaggcaaggaaggccgaaagagaacagagt

SEQ ID NO: 23468 - DNA, 80 bp, synthetic construct
  source 1..80: mol_type = other DNA
tttttttgccagcagacccttactaaaagaaatattaacgcaagctcttgaagcaagaggaaatttttcccaaatggagg

SEQ ID NO: 23469 - DNA, 80 bp, synthetic construct
  source 1..80: mol_type = other DNA
tggctagtggagtttaagtaatcaggttcttgccttgttcaggagtggcaagcatactaatttaagatatactctaatgg

SEQ ID NO: 23470 - DNA, 80 bp, synthetic construct; identical to SEQ ID NO: 9779
  source 1..80: mol_type = other DNA

SEQ ID NO: 23471 - DNA, 80 bp, synthetic construct
  source 1..80: mol_type = other DNA
ttatatatcaaataggtaatacatcacaaaaagttgagcttattccagtatataaggttggtttaattctcaaaactcaa

SEQ ID NO: 23472 - DNA, 80 bp, synthetic construct
  source 1..80: mol_type = other DNA
gtcacagcaatatttccgttcccacatgctctcacagaacttgcagagtagaatgcagtggcaatgatgctaaataactt

SEQ ID NO: 23473 - DNA, 80 bp, synthetic construct
  source 1..80: mol_type = other DNA
accacatccaggtaattttttgtgtttttagtagagatggggttttaccatgttggccaggctggcctcaaactcctgac

SEQ ID NO: 23474 - DNA, 80 bp, synthetic construct
  source 1..80: mol_type = other DNA
aagcctgaattagcctctatggagagactatatgagaggcccaagtagtgatgccaccagtctactgttggcatcaacca

SEQ ID NO: 23475 - DNA, 80 bp, synthetic construct; identical to SEQ ID NO: 9780
  source 1..80: mol_type = other DNA

SEQ ID NO: 23476 - DNA, 80 bp, synthetic construct
  source 1..80: mol_type = other DNA
aggcacatttggaaaaaaaataaaatgatcaactagaatcaataggtgaatttaacatggtttttgaatacacagtcaat

SEQ ID NO: 23477 - DNA, 80 bp, synthetic construct
  source 1..80: mol_type = other DNA
attaaagaagatctgataaatgaaaatttatcatgtgttaaggactggaagactcactatagttagaatgtcaggtctcc

SEQ ID NO: 23478 - DNA, 80 bp, synthetic construct
  source 1..80: mol_type = other DNA
atgattctaaaatacacgtagaaatgcaaaaggcaaagcatggcaaagatgatcttgaagaacaaagttggagcacttac

SEQ ID NO: 23479 - DNA, 80 bp, synthetic construct; identical to SEQ ID NO: 9781
  source 1..80: mol_type = other DNA

SEQ ID NO: 23480 - DNA, 80 bp, synthetic construct
  source 1..80: mol_type = other DNA
gatttggagaaaatatctgcaatattcacaatgtatacatcttaaggactgttgtctgtaatatataaagaagccctaaa

SEQ ID NO: 23481 - DNA, 80 bp, synthetic construct
  source 1..80: mol_type = other DNA
ccccatctctactgaaaaaaaaaatacaaaaattagcctgtaatctcagctactcaggaggctgaggcaggagaatcgct

SEQ ID NO: 23482 - DNA, 80 bp, synthetic construct; identical to SEQ ID NO: 9782
  source 1..80: mol_type = other DNA

SEQ ID NO: 23483 - DNA, 80 bp, synthetic construct
  source 1..80: mol_type = other DNA
atattgtggtatgtttatacaatgaaatagtctgcaacaacaacaaaattgaattactgctacatacaactaaacaggaa

SEQ ID NO: 23484 - DNA, 80 bp, synthetic construct
  source 1..80: mol_type = other DNA
gtgtttcacatcttggtccgagtggtaattccatgaatgatttccttttgtaaaaatgtatccactgacgtgtggtttta

SEQ ID NO: 23485 - DNA, 80 bp, synthetic construct
  source 1..80: mol_type = other DNA
cgccaaagttgtgtgctctatttaaaatcacatgtagatttccagttaccttgtgtaactaactctacagaaataatatc

SEQ ID NO: 23486 - DNA, 80 bp, synthetic construct; identical to SEQ ID NO: 9783
  source 1..80: mol_type = other DNA

SEQ ID NO: 23487 - DNA, 80 bp, synthetic construct
  source 1..80: mol_type = other DNA
ttcttatctcctccactcactcatcttccctatgagtctctgagcccttccgctgacttcctgcagaagcatcagacaac

SEQ ID NO: 23488 - DNA, 80 bp, synthetic construct
  source 1..80: mol_type = other DNA
agactgccctttacttaatgtctcctcccaactccacatcccctcaggtaacacagttaccatctgactgtggaagaaat

SEQ ID NO: 23489 - DNA, 80 bp, synthetic construct
  source 1..80: mol_type = other DNA
agagggaggcagctgtcgccatcctcattgttcccctgaagtgagtggctaagcccctgctagctctatgtagagatcgg

SEQ ID NO: 23490 - DNA, 80 bp, synthetic construct; identical to SEQ ID NO: 9784
  source 1..80: mol_type = other DNA

SEQ ID NO: 23491 - DNA, 80 bp, synthetic construct
  source 1..80: mol_type = other DNA
ctatgggcgggagtggtcaggagactccctctagaacaacttaggatgctgggaccaccagggtttgttgctcactttac

SEQ ID NO: 23492 - DNA, 80 bp, synthetic construct
  source 1..80: mol_type = other DNA
tcaaaccaaggcctagtttctggcctggatgatcctacagtacagtagggacataaaattaccacaatcattttaaacac

SEQ ID NO: 23493 - DNA, 80 bp, synthetic construct
  source 1..80: mol_type = other DNA
gaaggaaataaaaaacacacagaatcccactctccagagacaatcatggtatgtgtttaggtatatggaaaaaaactccg

SEQ ID NO: 23494 - DNA, 80 bp, synthetic construct
  source 1..80: mol_type = other DNA
ccgacaaggcacaggaggatgcagggaagtgtgctgcatgggctgagactcagagcgtgtgaggctgcccagggaagaca

SEQ ID NO: 23495 - DNA, 80 bp, synthetic construct; identical to SEQ ID NO: 9785
  source 1..80: mol_type = other DNA

SEQ ID NO: 23496 - DNA, 80 bp, synthetic construct
  source 1..80: mol_type = other DNA
tgaaccacgagggagagttgagctgagcagtgcaggctgggtaagatttgggcacgtgaataggagccaagagatacttc

SEQ ID NO: 23497 - DNA, 80 bp, synthetic construct
  source 1..80: mol_type = other DNA
tgctatataccagctgtgtggtctgggacacatttacttaagctttctgagattccacattacaaaataaatggcaacac

SEQ ID NO: 23498 - DNA, 80 bp, synthetic construct; identical to SEQ ID NO: 9786
  source 1..80: mol_type = other DNA

SEQ ID NO: 23499 - DNA, 80 bp, synthetic construct
  source 1..80: mol_type = other DNA
ttcagatatggctaaaagacttaggggaaattgcttccctggccagcaccaggtggcaatcaggaaatcagagctgaatg

SEQ ID NO: 23500 - DNA, 80 bp, synthetic construct
  source 1..80: mol_type = other DNA
gctgtgcaaagcactgtccttcttgatgtatgctcctccatccataaaaaatgaagagactgtctcactctcagcttctc

SEQ ID NO: 23501 - DNA, 80 bp, synthetic construct
  source 1..80: mol_type = other DNA
acaactctcactccatgttccagttagagtcaatcagcaaaccatgttttaccatacacaggactgtaatgatcctgctt

SEQ ID NO: 23502 - DNA, 80 bp, synthetic construct; identical to SEQ ID NO: 9787
  source 1..80: mol_type = other DNA

SEQ ID NO: 23503 - DNA, 80 bp, synthetic construct
  source 1..80: mol_type = other DNA
catattcaaagaaagcggtcactcaaaggctgggtggcctgagaagaggcttcaaagaggacctcagtgtttaagctggg

SEQ ID NO: 23504 - DNA, 80 bp, synthetic construct
  source 1..80: mol_type = other DNA
gaaataaatctagtttctggccctgcaaagaataggaccctagacctaagtgaatgccgtctaatgaagccttgccatga

SEQ ID NO: 23505 - DNA, 80 bp, synthetic construct
  source 1..80: mol_type = other DNA
tcctgtgatgtccccgaaatgatggctcaccctgaagcaggcagatctacactgccctggggaaagaccctatcctgagc

SEQ ID NO: 23506 - DNA, 80 bp, synthetic construct
  source 1..80: mol_type = other DNA
gacgcttgaacacacaggcctgaaactcattcttcacccgcttggtgattttggaattaattaaatatcctatcttacca

SEQ ID NO: 23507 - DNA, 80 bp, synthetic construct; identical to SEQ ID NO: 9788
  source 1..80: mol_type = other DNA

SEQ ID NO: 23508 - DNA, 80 bp, synthetic construct
  source 1..80: mol_type = other DNA
aaggataggttcagactgggaaaaggacatgagagtcttgaaatctggtacaggaaatctttgacctaaaatataccaga

SEQ ID NO: 23509 - DNA, 80 bp, synthetic construct
  source 1..80: mol_type = other DNA
tgtggagtgaaaaacacaagttgcaaaagagatatacagtgtgataaaaacaggaatatgcattgactatggtatggaca

SEQ ID NO: 23510 - DNA, 80 bp, synthetic construct
  source 1..80: mol_type = other DNA
aaaaacaaagcaaatagggtgaaatattaatatctgctaattctaagtggtggggatggagctgtttgtaatatttgtga

SEQ ID NO: 23511 - DNA, 80 bp, synthetic construct; identical to SEQ ID NO: 9789
  source 1..80: mol_type = other DNA

SEQ ID NO: 23512 - DNA, 80 bp, synthetic construct
  source 1..80: mol_type = other DNA
agccatcatttaagccagcacttctcaatgcttaaatgtgcacaggaatctcttagagaccttgcagattctgattcacc

SEQ ID NO: 23513 - DNA, 80 bp, synthetic construct
  source 1..80: mol_type = other DNA
agcaaagtccctaacaaggaaaagagatccggcatgatcctttgaaccatctcatatatcacgtgggtgtattcctgtaa

SEQ ID NO: 23514 - DNA, 80 bp, synthetic construct; identical to SEQ ID NO: 9790
  source 1..80: mol_type = other DNA

SEQ ID NO: 23515 - DNA, 80 bp, synthetic construct
  source 1..80: mol_type = other DNA
attatttttcagtctttatcataagattcctggaaactacaagctcccataatacacttcacatttaatttgattttacc

SEQ ID NO: 23516 - DNA, 80 bp, synthetic construct
  source 1..80: mol_type = other DNA
tccgactttggcaaagcttcttccctaggcctcaagtttttcatctaaaaactggtgttgaacacatcatcactaaagtc

SEQ ID NO: 23517 - DNA, 80 bp, synthetic construct
  source 1..80: mol_type = other DNA
gtggttactttacattcaggaaagagggtcaaggtgatatttaaaactcagcaacagaatgactttctgtttgattttca

SEQ ID NO: 23518 - DNA, 80 bp, synthetic construct; identical to SEQ ID NO: 9791
  source 1..80: mol_type = other DNA

SEQ ID NO: 23519 - DNA, 80 bp, synthetic construct
  source 1..80: mol_type = other DNA
taatttcataaaatagagggttggcctgcaagaatttctggtgtctagttctaggattctgtgtatgaaagtggacttgg

SEQ ID NO: 23520 - DNA, 80 bp, synthetic construct
  source 1..80: mol_type = other DNA
aaagtgacctgatgctttaaataggcaccaagctaatggtgtgaggtgaggtcaggtaggtagggtttcctcagttattt

SEQ ID NO: 23521 - DNA, 80 bp, synthetic construct
  source 1..80: mol_type = other DNA
gagaaactctgagacctggtctttggataagaaagttctttagtcttccatgacgactacatggattactaaaatccaca

SEQ ID NO: 23522 - DNA, 80 bp, synthetic construct; identical to SEQ ID NO: 9792
  source 1..80: mol_type = other DNA

SEQ ID NO: 23523 - DNA, 80 bp, synthetic construct
  source 1..80: mol_type = other DNA
tattgcttgaggagctttcaaaaaacaccaatgtctaggcactgcctcaggtcaactgaaccagaatctctggggatagg

SEQ ID NO: 23524 - DNA, 80 bp, synthetic construct
  source 1..80: mol_type = other DNA
atccacattttaacaggattctcaaatgattcatgtgcacatccaagtttgaaaagccccaagacagttcatctctaaat

SEQ ID NO: 23525 - DNA, 80 bp, synthetic construct
  source 1..80: mol_type = other DNA
accctccctgtgtattcctcttagatcttatgcttattgctttcttcatagatagagtcaatatcctgactttggtgttt

SEQ ID NO: 23526 - DNA, 80 bp, synthetic construct
  source 1..80: mol_type = other DNA
gagcaaaggcatgtcttacatggtggcaggaaagagagcatgtgcagggggaactgcactttacaaaaccatcagatctt

SEQ ID NO: 23527 - DNA, 80 bp, synthetic construct; identical to SEQ ID NO: 9793
  source 1..80: mol_type = other DNA

SEQ ID NO: 23528 - DNA, 80 bp, synthetic construct
  source 1..80: mol_type = other DNA
tgttcctctattgtcagggaacttagcaagctttaagtatagactgaacaccacttccagttttgtttttttctagtgtt

SEQ ID NO: 23529 - DNA, 80 bp, synthetic construct
  source 1..80: mol_type = other DNA
aactctcttagtcctgataagtctgaaaacatctttatttgtacgttattccttaacactactttaaatgactgcaaaat

SEQ ID NO: 23530 - DNA, 80 bp, synthetic construct
  source 1..80: mol_type = other DNA
ttttgataatctaaagtttcactataatttgtctaggagtagatgtatcttaatcctgctgcctagttggagtgaacctt

SEQ ID NO: 23531 - DNA, 80 bp, synthetic construct; identical to SEQ ID NO: 9794
  source 1..80: mol_type = other DNA

SEQ ID NO: 23532 - DNA, 80 bp, synthetic construct
  source 1..80: mol_type = other DNA
tctacctgttctcatttcatttcagcctgattctgtttcataacttctggctctttttaaacaaaagatttcctccctgt

SEQ ID NO: 23533 - DNA, 80 bp, synthetic construct
  source 1..80: mol_type = other DNA
cagggttttacattttagaattttgtacttgaaggctaggctccttttgcttgatgggtgtttgtttacaggtcctcccc

SEQ ID NO: 23534 - DNA, 80 bp, synthetic construct
  source 1..80: mol_type = other DNA
cattgttcctaggactgcaacttgcgaaaaacagtggcctcagtggcattttttttaggatcctttttgtggttgtggga

SEQ ID NO: 23535 - DNA, 80 bp, synthetic construct; identical to SEQ ID NO: 9795
  source 1..80: mol_type = other DNA

SEQ ID NO: 23536 - DNA, 80 bp, synthetic construct
  source 1..80: mol_type = other DNA
ttttcttggtggatgaggatcagtatatagtatattatctcttaccctttagaatacaagtaccagaaggacagagacta

SEQ ID NO: 23537 - DNA, 80 bp, synthetic construct
  source 1..80: mol_type = other DNA
ggaccataacttcagtgttgcacataaagtcagcacattttgaagatcaatgacgtcttgaagtcagccattaactgcaa

SEQ ID NO: 23538 - DNA, 80 bp, synthetic construct
  source 1..80: mol_type = other DNA
attatttatgagggataatttactgatattgtggttaccccaaattatataccaaagaaaattaaaagcactacagagga

SEQ ID NO: 23539 - DNA, 80 bp, synthetic construct; identical to SEQ ID NO: 9796
  source 1..80: mol_type = other DNA

SEQ ID NO: 23540 - DNA, 80 bp, synthetic construct
  source 1..80: mol_type = other DNA
aaattggatttctaagaattgccagtttgggagtatggtccaaaagggactgaaataaacagatgaccatgtaggggagc

SEQ ID NO: 23541 - DNA, 80 bp, synthetic construct
  source 1..80: mol_type = other DNA
tgaggaaataggattcactctagacaataaggagagactgtttttccaagtactagcttagagcttgtggaaaggtggtc

SEQ ID NO: 23542 - DNA, 80 bp, synthetic construct; identical to SEQ ID NO: 9797
  source 1..80: mol_type = other DNA

SEQ ID NO: 23543 - DNA, 80 bp, synthetic construct
  source 1..80: mol_type = other DNA
tactgagctagttgtcattttaccgagacagaaccaaggccatagatggcaccagatcgagaactcacagcttatgcatc

SEQ ID NO: 23544 - DNA, 80 bp, synthetic construct
  source 1..80: mol_type = other DNA
ctagttatacacatatgcacgtgcacacagaaaagcactaacatccctttacattcagtctgccttatctgacttaactt

SEQ ID NO: 23545 - DNA, 80 bp, synthetic construct
  source 1..80: mol_type = other DNA
ttcacagcctgcttttcaggcaactgacaagttcctactatttacttcttaataatctgtcaccatgttccaccaggtgc

SEQ ID NO: 23546 - DNA, 80 bp, synthetic construct
  source 1..80: mol_type = other DNA
ttcagggtatgtcaagcagtttccctggcatgactgatggcattggagtggtaggattgacttggaccagataatattgg

SEQ ID NO: 23547 - DNA, 80 bp, synthetic construct; identical to SEQ ID NO: 9798
  source 1..80: mol_type = other DNA

SEQ ID NO: 23548 - DNA, 80 bp, synthetic construct
  source 1..80: mol_type = other DNA
cactttattagccaactcagcaccagtaatcactgggggagggaatggggccacaagctctgaaaagaaagcaaaagaac

SEQ ID NO: 23549 - DNA, 80 bp, synthetic construct
  source 1..80: mol_type = other DNA
ttacgtctcatattagcctatgcatttcttaaaacaaggtctgtatcttagttttttgactttctatccctaaggcttgg

SEQ ID NO: 23550 - DNA, 80 bp, synthetic construct
  source 1..80: mol_type = other DNA
cagtgagcctcgacttcctgggctcaagcaatctgcccacctcaaacttctgagtagctgggactacaggtgcacaccac

SEQ ID NO: 23551 - DNA, 80 bp, synthetic construct; identical to SEQ ID NO: 9799
  source 1..80: mol_type = other DNA

SEQ ID NO: 23552 - DNA, 80 bp, synthetic construct
  source 1..80: mol_type = other DNA
gtggccctgcaaaagaaagaagcatgtcaacaagaaagccaatagcaggcaatgctcacacatgcaggaaggtggaaaat

SEQ ID NO: 23553 - DNA, 80 bp, synthetic construct
  source 1..80: mol_type = other DNA
gacaaaggattagagctggctaggcagcgagtatgccttgatgctaaatcccagaatattcagtgcttctgaaattgtcc

SEQ ID NO: 23554 - DNA, 80 bp, synthetic construct
  source 1..80: mol_type = other DNA
tagtagcattccaataatctgaaagtgttcacgtgccaggtcaatgttggggaaaaaggagtttaaatacttgtcatata

SEQ ID NO: 23555 - DNA, 80 bp, synthetic construct; identical to SEQ ID NO: 9800
  source 1..80: mol_type = other DNA

SEQ ID NO: 23556 - DNA, 80 bp, synthetic construct
  source 1..80: mol_type = other DNA
tctcatggcagatctaataacatctgtaattttgatgtagtgatgagcttcagtagtatttcaagatgtctgcaacagct

SEQ ID NO: 23557 - DNA, 80 bp, synthetic construct
  source 1..80: mol_type = other DNA
ttctttccagggtcctctgaggatccatggtccccaaattaagaactacgctataagtccttaataaacattatcttatt

SEQ ID NO: 23558 - DNA, 80 bp, synthetic construct; identical to SEQ ID NO: 9801
  source 1..80: mol_type = other DNA

SEQ ID NO: 23559 - DNA, 80 bp, synthetic construct
  source 1..80: mol_type = other DNA
acgagcaacattattccgacaaaattggaaaacaattcaacaaattgaggagaggagtgtctcagcaaggaacgccagtc

SEQ ID NO: 23560 - DNA, 80 bp, synthetic construct
  source 1..80: mol_type = other DNA
agagaagcacaaaatgagagaagagaaacataccaggccttctcttcttctaagcaaaacaaatttttctcaggcacttt

SEQ ID NO: 23561 - DNA, 80 bp, synthetic construct
  source 1..80: mol_type = other DNA
tctatctagtaggattaatcaaaagctaatcatgaaaaatatcatcctgggtctggctcaaagaatatgccatggttacc

SEQ ID NO: 23562 - DNA, 80 bp, synthetic construct; identical to SEQ ID NO: 9802
  source 1..80: mol_type = other DNA

SEQ ID NO: 23563 - DNA, 80 bp, synthetic construct
  source 1..80: mol_type = other DNA
tggatatgtccagggcctagctgtttctgcacacggtcagtaggtgtttagcccaagtttgatgacttcagtttggtcca

SEQ ID NO: 23564 - DNA, 80 bp, synthetic construct
  source 1..80: mol_type = other DNA
agatgccagttgcagattagacgtaggtaactgttttgattcaaaaaatcaacttcatagtggtaatattggcaaagatc

SEQ ID NO: 23565 - DNA, 80 bp, synthetic construct
  source 1..80: mol_type = other DNA
aatgcagtggagagcatgcatctcatttcagcttttgatgaaatctctcctgctgtccttttgagtaatatgatagatgt

SEQ ID NO: 23566 - DNA, 80 bp, synthetic construct
  source 1..80: mol_type = other DNA
tcctctgccctgtcctgtctcacatttttttccaacactgggatgaagactggatggctatagcccattggattttcaaa

SEQ ID NO: 23567 - DNA, 80 bp, synthetic construct; identical to SEQ ID NO: 9803
  source 1..80: mol_type = other DNA

SEQ ID NO: 23568 - DNA, 80 bp, synthetic construct
  source 1..80: mol_type = other DNA
ggggataataattcctacttcccgaggttgtgggaggattaagtgatgaggcctgtctagtgcagcaagcacataggtgt

SEQ ID NO: 23569 - DNA, 80 bp, synthetic construct
  source 1..80: mol_type = other DNA
ctcaagcacaatgaaggagaaggctctttcacccttccatgtctaattctgacagagaggaggagacacagtggggtgga

SEQ ID NO: 23570 - DNA, 80 bp, synthetic construct
  source 1..80: mol_type = other DNA
gatgggaggcttagatgtgtggcttagatccaccaatgtgatgggtggcttagatgagattaggtatttggatttcctgg

SEQ ID NO: 23571 - DNA, 80 bp, synthetic construct; identical to SEQ ID NO: 9804
  source 1..80: mol_type = other DNA

SEQ ID NO: 23572 - DNA, 80 bp, synthetic construct
  source 1..80: mol_type = other DNA
tctgcgcggtgccaggcatgtccagcccctctgcagtttgaggtaacccagcctggaacataaaggggtgagttgtgcta

SEQ ID NO: 23573 - DNA, 80 bp, synthetic construct
  source 1..80: mol_type = other DNA
gtcccaggactgacttcctgcctagtaaattccatgctattgtgagaagctcaaagctctttagagactcgtgtgtgtgt

SEQ ID NO: 23574 - DNA, 80 bp, synthetic construct; identical to SEQ ID NO: 9805
  source 1..80: mol_type = other DNA

SEQ ID NO: 23575 - DNA, 80 bp, synthetic construct
  source 1..80: mol_type = other DNA
cgtgctgcaggaggctgaaggggatgaagtgcatcctgcctccctggctctctggcttctggttgtgtttggccaatggg

SEQ ID NO: 23576 - DNA, 80 bp, synthetic construct
  source 1..80: mol_type = other DNA
aaccttctctacaaaactcttctccctttggattctagcaatcacgccttccccactgaggactgggctagtgatggtta

SEQ ID NO: 23577 - DNA, 80 bp, synthetic construct
  source 1..80: mol_type = other DNA
tctttcttcctgggaccttgagtgataaagatcatctattccttattttgacagaggaggaaacacaggaagtgacttac

SEQ ID NO: 23578 - DNA, 80 bp, synthetic construct; identical to SEQ ID NO: 9806
  source 1..80: mol_type = other DNA

SEQ ID NO: 23579 - DNA, 80 bp, synthetic construct
  source 1..80: mol_type = other DNA
cctttttcccatgtcagttctctgctcaggaatagactatagccatgtagggatcaaatgaaataacttatctgaggtat

SEQ ID NO: 23580 - DNA, 80 bp, synthetic construct
  source 1..80: mol_type = other DNA
aaatgtactgcctttcctccacaactcactcactttttcatcaggcagtgtgggctcgtggaactaatacagacaaacta

SEQ ID NO: 23581 - DNA, 80 bp, synthetic construct
  source 1..80: mol_type = other DNA
ggctgtgtcctgcacaggatgccacatctaaggtatttgcatcatcactgctatagatctttatgttttttaatgacagt

SEQ ID NO: 23582 - DNA, 80 bp, synthetic construct
  source 1..80: mol_type = other DNA
atcacttacttcaggttgtataatctaatcaagggaaatctcttagaatagagatgacaaatatttgccatgtacaccac

SEQ ID NO: 23583 - DNA, 80 bp, synthetic construct; identical to SEQ ID NO: 9807
  source 1..80: mol_type = other DNA

SEQ ID NO: 23584 - DNA, 80 bp, synthetic construct
  source 1..80: mol_type = other DNA
tggtggtgggcgcctgtaatctcagctactagggaggatgaggcaggagaatcgcttgaacctgggagacggaggttgca

SEQ ID NO: 23585 - DNA, 80 bp, synthetic construct
  source 1..80: mol_type = other DNA
aatacctggctccctccctaccaccggcctatgctcagcctcaattcattgctcaaatagaaacagaaccttggtctagg

SEQ ID NO: 23586 - DNA, 80 bp, synthetic construct; identical to SEQ ID NO: 9808
  source 1..80: mol_type = other DNA

SEQ ID NO: 23587 - DNA, 80 bp, synthetic construct
  source 1..80: mol_type = other DNA
aaataaggcatgatcatttgttataactagtccctggtcaccttcttcatatgaggctaagaaaatgaatatagtcatga

SEQ ID NO: 23588 - DNA, 80 bp, synthetic construct
  source 1..80: mol_type = other DNA
actactaacttcattaggattcatttcttcctctcccccactctcatttggccaaatgcatttcagtaagtgcacatggg

SEQ ID NO: 23589 - DNA, 80 bp, synthetic construct
  source 1..80: mol_type = other DNA
aaatatgacctaaaaaattgaaagggaggcacagtgactgggtttgggggaggaggttgggagatatccttcattatttg

SEQ ID NO: 23590 - DNA, 80 bp, synthetic construct
  source 1..80: mol_type = other DNA
ggtggagggcctatgagatatagaggaaattactgatgctttctctgtgtcgacctcatccgtaaaatgggagtaatgga

SEQ ID NO: 23591 - DNA, 80 bp, synthetic construct; identical to SEQ ID NO: 9809
  source 1..80: mol_type = other DNA

SEQ ID NO: 23592 - DNA, 80 bp, synthetic construct
  source 1..80: mol_type = other DNA
ggacgcagattcacaggagtatagcatttggaagctagaagatcacctactccaaacactcccattttgcagaaaaggag

SEQ ID NO: 23593 - DNA, 80 bp, synthetic construct
  source 1..80: mol_type = other DNA
tcctcaccccggttttgtggcatttgagaatccaacatctgagtatttcttgagggtccttctccagggtctcctttttt

SEQ ID NO: 23594 - DNA, 80 bp, synthetic construct
  source 1..80: mol_type = other DNA
ttttagtaaacaaggtttcatcactttggtcaggttggttttgaacccctggcctcaagtgatccacctgccttggcctc

SEQ ID NO: 23595 - DNA, 80 bp, synthetic construct; identical to SEQ ID NO: 9810
  source 1..80: mol_type = other DNA

SEQ ID NO: 23596 - DNA, 80 bp, synthetic construct
  source 1..80: mol_type = other DNA
tcacccttgccagccaagtataccttcccctctccttcccctgttcttccctccccagtggttgcttttcttattcatgg

SEQ ID NO: 23597 - DNA, 80 bp, synthetic construct
  source 1..80: mol_type = other DNA
ctcaacatggctccttccccacagtggctccttggccatgatttccgatcccagagttccttgatggctgatatggtttg

SEQ ID NO: 23598 - DNA, 80 bp, synthetic construct
  source 1..80: mol_type = other DNA
acaaagtttggttgtttaaaagtgtgtggcacgtccctgctaccgctcttgctcttgctccaccgtgtaagatgcctgct

SEQ ID NO: 23599 - DNA, 80 bp, synthetic construct; identical to SEQ ID NO: 9811
  source 1..80: mol_type = other DNA

SEQ ID NO: 23600 - DNA, 80 bp, synthetic construct
  source 1..80: mol_type = other DNA
tctccttcaggctaccaggagcccaatgctgccatttctccaggctttctgggatccttgcatacacaggggctctggtc

SEQ ID NO: 23601 - DNA, 80 bp, synthetic construct
  source 1..80: mol_type = other DNA
cccccaggagcccttaaataccctcttcttccccttgctttttcctgacacctctcttctctcatcttcttatactgacc

SEQ ID NO: 23602 - DNA, 80 bp, synthetic construct; identical to SEQ ID NO: 9812
  source 1..80: mol_type = other DNA

SEQ ID NO: 23603 - DNA, 80 bp, synthetic construct
  source 1..80: mol_type = other DNA
actgcttcatgtcctcttcttcctccttccgggggaaagtacaggttcccctcaatagcctcatctctgtggaaagctcc

SEQ ID NO: 23604 - DNA, 80 bp, synthetic construct
  source 1..80: mol_type = other DNA
gatcactgccatccatctctagaacatttctcgttttgcaaaattgaaacttcgtaccagttaagcagtcactccccatt

SEQ ID NO: 23605 - DNA, 80 bp, synthetic construct
  source 1..80: mol_type = other DNA
ccatttatctcttgatggacacttaccatttaacaaatttttaatgagctcctctttgccaggtcctgtaataggcacag

SEQ ID NO: 23606 - DNA, 80 bp, synthetic construct; identical to SEQ ID NO: 9813
  source 1..80: mol_type = other DNA

SEQ ID NO: 23607 - DNA, 80 bp, synthetic construct
  source 1..80: mol_type = other DNA
actcagaggttcttgttacttcataaatcttgagctcccccaatgtaaattgccatcaaacaagcagaacaatgactcag

SEQ ID NO: 23608 - DNA, 80 bp, synthetic construct
  source 1..80: mol_type = other DNA
cctacaatgttaaatattggcttagaattacattatctctttacacagatggatgggctgggtgctgtgtgtactgctga

SEQ ID NO: 23609 - DNA, 80 bp, synthetic construct; identical to SEQ ID NO: 9814
  source 1..80: mol_type = other DNA

SEQ ID NO: 23610 - DNA, 80 bp, synthetic construct
  source 1..80: mol_type = other DNA
aatttatagttttcaaactattttggtatttactattttattttcatcttaaactgacttatgagatagataggtaacaa

SEQ ID NO: 23611 - DNA, 80 bp, synthetic construct
  source 1..80: mol_type = other DNA
gaacaactaatatgctccaggttctgtatttgattatgagtgaaggttggtggagatggaaaagccgtgatatctttcat

SEQ ID NO: 23612 - DNA, 80 bp, synthetic construct
  source 1..80: mol_type = other DNA
ctttgcttggggaacctggaaatgctttagagaggaggtaacatttccatcagtggagttttctggcttaagaatcccag

SEQ ID NO: 23613 - DNA, 80 bp, synthetic construct; identical to SEQ ID NO: 9815
  source 1..80: mol_type = other DNA

SEQ ID NO: 23614 - DNA, 80 bp, synthetic construct
  source 1..80: mol_type = other DNA
gtgctaaaaggagctaaacacaacactgagacagaggaaaacacagatcacagtgggaattcctgaggtggtggttttcc

SEQ ID NO: 23615 - DNA, 80 bp, synthetic construct
  source 1..80: mol_type = other DNA
ccaggtcacacagggctttaggctgagatttttttctgagaccaatgggaagccatgcaaaggttttatagtgaggtggc

SEQ ID NO: 23616 - DNA, 80 bp, synthetic construct
  source 1..80: mol_type = other DNA
gggaggggcaagtgggtaagtgtatattttggagatggaattgacagggtttgctctcatgggggatatggggtgaagag

SEQ ID NO: 23617 - DNA, 80 bp, synthetic construct; identical to SEQ ID NO: 9816
  source 1..80: mol_type = other DNA

SEQ ID NO: 23618 - DNA, 80 bp, synthetic construct
  source 1..80: mol_type = other DNA
ttaggattgtgaaggaaaatgcagttattatctgggaggcattagtaattggaccagggtgagggaggcaagatgggctg

SEQ ID NO: 23619 - DNA, 80 bp, synthetic construct
  source 1..80: mol_type = other DNA
agggacctgctgctgtgtagactgttgggtcatcaatggtgcctgagtgaatgtgctatctcaagatgattgaactatct

SEQ ID NO: 23620 - DNA, 80 bp, synthetic construct
  source 1..80: mol_type = other DNA
tctacgttaggccaggcactcctgagatgactgaaaccttgttgtgggtggaagaggttgaaaggaccctgaaactgggc

SEQ ID NO: 23621 - DNA, 80 bp, synthetic construct; identical to SEQ ID NO: 9817
  source 1..80: mol_type = other DNA

SEQ ID NO: 23622 - DNA, 80 bp, synthetic construct
  source 1..80: mol_type = other DNA
aggtttgctacagatttgcggctagctcttccagagccagtttttttctgagaggcatctcacctcacccgatgatcttt

SEQ ID NO: 23623 - DNA, 80 bp, synthetic construct
  source 1..80: mol_type = other DNA
tttgcccttgtacagagttctcagatcagggatcaaactttgggcatttaatccctttttccaattctgcatggttcttg

SEQ ID NO: 23624 - DNA, 80 bp, synthetic construct; identical to SEQ ID NO: 9818
  source 1..80: mol_type = other DNA

SEQ ID NO: 23625 - DNA, 80 bp, synthetic construct
  source 1..80: mol_type = other DNA
cgagattgtgccactgccctccagcctgggtgacggagcaagactccgtctcaaaaacaaaacaaaaaaaaaaagttaag

SEQ ID NO: 23626 - DNA, 80 bp, synthetic construct
  source 1..80: mol_type = other DNA
aaatgatgcagccactatggaaacatcatggtaactccttagaaaattaaaagccaaattaccgtaggatccagcaattc

SEQ ID NO: 23627 - DNA, 80 bp, synthetic construct
  source 1..80: mol_type = other DNA
tgacagatgaatgaataaaccaaatgtggtatatacatacaatggaatattattcagcattaaaaaaggaagaaaactct

SEQ ID NO: 23628 - DNA, 80 bp, synthetic construct
  source 1..80: mol_type = other DNA
tagacagaaagtatagtggtggttgcctggggttggaggtagggggaagtggggaactattgtttattgggtacacagtt

SEQ ID NO: 23629 - DNA, 80 bp, synthetic construct; identical to SEQ ID NO: 9819
  source 1..80: mol_type = other DNA

SEQ ID NO: 23630 - DNA, 80 bp, synthetic construct
  source 1..80: mol_type = other DNA
aggggccatgatgtcaatgagttgatgtatctgaaggcctgttcaccaaaccacctactgatcataatcagttatcttgg

SEQ ID NO: 23631 - DNA, 80 bp, synthetic construct
  source 1..80: mol_type = other DNA
ccaccaaactgagggtctgatctagaacttggggagtgcactgagaaactgccaccctacagggtctggctggctttctt

SEQ ID NO: 23632 - DNA, 80 bp, synthetic construct; identical to SEQ ID NO: 9820
  source 1..80: mol_type = other DNA

SEQ ID NO: 23633 - DNA, 80 bp, synthetic construct
  source 1..80: mol_type = other DNA
tggtgcctgtcatggggtgtggggagcgggaagggatagcattaggagatatacctaatgttaaatgatgagttaatggg

SEQ ID NO: 23634 - DNA, 80 bp, synthetic construct
  source 1..80: mol_type = other DNA
agcccatccctgacctattgaatcagaacatgcattttactagatccccaggtgattcacaggcacaacaaatgctgaga

SEQ ID NO: 23635 - DNA, 80 bp, synthetic construct
  source 1..80: mol_type = other DNA
tatttttattttaatagaaagggaaaaagaaatggatgtgagtagcgtgtgcaggtatgcccatctgtggacggagggga

SEQ ID NO: 23636 - DNA, 80 bp, synthetic construct; identical to SEQ ID NO: 9821
  source 1..80: mol_type = other DNA

SEQ ID NO: 23637 - DNA, 80 bp, synthetic construct
  source 1..80: mol_type = other DNA
aagctttctgtacttgcttgtacaatccctttcagtccctccttctctcatgcttttcagtgaatattaagtctgaaatc

SEQ ID NO: 23638 - DNA, 80 bp, synthetic construct
  source 1..80: mol_type = other DNA
tcaaagaaccatgactcaccctaagttatgcaaaaatcaaagacacatagttggaatctatatttcttaacatgtctctc

SEQ ID NO: 23639 - DNA, 80 bp, synthetic construct
  source 1..80: mol_type = other DNA
agggggctttatttacaaggcaatcgaaaggtagtttttaggtttagcaattgtgatctgtttgtggttcaggtttggga

SEQ ID NO: 23640 - DNA, 80 bp, synthetic construct; identical to SEQ ID NO: 9822
  source 1..80: mol_type = other DNA

SEQ ID NO: 23641 - DNA, 80 bp, synthetic construct
  source 1..80: mol_type = other DNA
gttgaaggaattaatcaatgaataaaccaatatttgtttagcatcttgcaatggtgggccaacaaagcataaaacatggc

SEQ ID NO: 23642 - DNA, 80 bp, synthetic construct
  source 1..80: mol_type = other DNA
taattataatatgtttgcagcaaaaagaaatcaataactaatagtgaaacaacagtctctttggggaaaccagaaacacc

SEQ ID NO: 23643 - DNA, 80 bp, synthetic construct
  source 1..80: mol_type = other DNA
ggtctagacagttttacagagttgagagaggaagagaacagagtgggctgatgttttctgagaagtcttcatgaggaagg

SEQ ID NO: 23644 - DNA, 80 bp, synthetic construct
  source 1..80: mol_type = other DNA
ctcaatgcacttgtctgtacatacatgtatcacttcctcatctccttttcactaattttactctcacctcttttttctag

SEQ ID NO: 23645 - DNA, 80 bp, synthetic construct; identical to SEQ ID NO: 9823
  source 1..80: mol_type = other DNA

SEQ ID NO: 23646 - DNA, 80 bp, synthetic construct
  source 1..80: mol_type = other DNA
tatcatatatatcagtattttatttatttttattgttggatagtgttccatagtatagataaaccacaatttctttatct

SEQ ID NO: 23647 - DNA, 80 bp, synthetic construct
  source 1..80: mol_type = other DNA
tctagtttttaaagaaatgttccaattgtttttccaaagtgattataccatgttgtattctcaccagtagtatatgaaag

SEQ ID NO: 23648 - DNA, 80 bp, synthetic construct; identical to SEQ ID NO: 9824
  source 1..80: mol_type = other DNA

SEQ ID NO: 23649 - DNA, 80 bp, synthetic construct
  source 1..80: mol_type = other DNA
cccaagtctgcaataattttctcttatgttttattccagaaatgttataatagctttagattttgtttaggtctagacca

SEQ ID NO: 23650 - DNA, 80 bp, synthetic construct
  source 1..80: mol_type = other DNA
taaacagagccaaagacaaaaaccacatgattatctcaatagatgcagaaaaggcctttgacaaaattcaacaagacttc

SEQ ID NO: 23651 - DNA, 80 bp, synthetic construct; identical to SEQ ID NO: 10001
  source 1..80: mol_type = other DNA

SEQ ID NO: 23652 - DNA, 80 bp, synthetic construct; identical to SEQ ID NO: 9825
  source 1..80: mol_type = other DNA

SEQ ID NO: 23653 - DNA, 80 bp, synthetic construct
  source 1..80: mol_type = other DNA
aatgccgtccccatcaagctaccaatgactttcttcacataattggaaaaaactactttaaagttcatacggaaccaaaa

SEQ ID NO: 23654 - DNA, 80 bp, synthetic construct; identical to SEQ ID NO: 12287
  source 1..80: mol_type = other DNA

SEQ ID NO: 23655 - DNA, 80 bp, synthetic construct
  source 1..80: mol_type = other DNA
aggacttaggcacgggcaaggacttcatgtctaaaacaccaaaagcaatggcaacaaaagacaaaattgacaaatgggat

SEQ ID NO: 23656 - DNA, 80 bp, synthetic construct
  source 1..80: mol_type = other DNA
acaaccccatcaaaaagtgggcaaaggaaatgaacagacacttctcaaaagaagacatttatgcagccaaaaaacacatg

SEQ ID NO: 23657 - DNA, 80 bp, synthetic construct; identical to SEQ ID NO: 9826
  source 1..80: mol_type = other DNA

SEQ ID NO: 23658 - DNA, 80 bp, synthetic construct
  source 1..80: mol_type = other DNA
tatacaccatggaatactatgcagccataaaaaatgatgagttcatgtcctttgtagggacatggatgaaattggaaatc

SEQ ID NO: 23659 - DNA, 80 bp, synthetic construct
  source 1..80: mol_type = other DNA
gaaagatggtccacatctttcctccaaactccagacccttgtgtccacatgcgtttcctcttggatgtttataagtttca

SEQ ID NO: 23660 - DNA, 80 bp, synthetic construct
  source 1..80: mol_type = other DNA
cccattgtctcttgtacatatctgcaagtcattcacttttctctatgcctcactctgtattcaggactaccctccctttc

SEQ ID NO: 23661 - DNA, 80 bp, synthetic construct; identical to SEQ ID NO: 9827
  source 1..80: mol_type = other DNA

SEQ ID NO: 23662 - DNA, 80 bp, synthetic construct
  source 1..80: mol_type = other DNA
ctcctgcaagcctgtacccctctgtcatgtatcactgtggcaatgacataattatacatataattgtaatgtagtatata

SEQ ID NO: 23663 - DNA, 80 bp, synthetic construct
  source 1..80: mol_type = other DNA
gtttctgcttgtcccctgttctattttcaccatctagctaatttccctgcacataatagaggaattcgtattgaaataag

SEQ ID NO: 23664 - DNA, 80 bp, synthetic construct
  source 1..80: mol_type = other DNA
cttttgtagatgtcctttttgaattggaaatcaataaacaattttctttccccaatcatgtagcagactatcaattatag

SEQ ID NO: 23665 - DNA, 80 bp, synthetic construct; identical to SEQ ID NO: 9828
  source 1..80: mol_type = other DNA

SEQ ID NO: 23666 - DNA, 80 bp, synthetic construct
  source 1..80: mol_type = other DNA
cagcagaatgcatgcagactcagtcaccctcatcttgcctcagtttacctaagaatacattatgtacatgtctctcctct

SEQ ID NO: 23667 - DNA, 80 bp, synthetic construct
  source 1..80: mol_type = other DNA
tgaaacagggcacagcatgaaacatctctccagcttgcaatggttctgctctcagttttcccatacagataccatatgtg

SEQ ID NO: 23668 - DNA, 80 bp, synthetic construct
  source 1..80: mol_type = other DNA
cagggccactgtgaagtcccctgctaagggggaggaatagtggggagccacctctctacatctcttctggaggggtcaca

SEQ ID NO: 23669 - DNA, 80 bp, synthetic construct; identical to SEQ ID NO: 9829
  source 1..80: mol_type = other DNA

SEQ ID NO: 23670 - DNA, 80 bp, synthetic construct
  source 1..80: mol_type = other DNA
actgcccagtcaacaaaaatttattgaatacttcttctgtgtcaggcactcttttggactttggggaccccacaatgaaa

SEQ ID NO: 23671 - DNA, 80 bp, synthetic construct
  source 1..80: mol_type = other DNA
ctcccccagaaggtgccatccttacgttgctgataatcatacatctcagagcttcaagatcttcattatacaactgtcat

SEQ ID NO: 23672 - DNA, 80 bp, synthetic construct
  source 1..80: mol_type = other DNA
catttaaccaatcctctatgaggacgtccagatttcttcagaaaccaggatgccagatagaataattttttgatggatgg

SEQ ID NO: 23673 - DNA, 80 bp, synthetic construct; identical to SEQ ID NO: 9830
  source 1..80: mol_type = other DNA

SEQ ID NO: 23674 - DNA, 80 bp, synthetic construct
  source 1..80: mol_type = other DNA
cactctgagaccaccaagtcaaactccgtttgtaaatttacttcccaaatctgagctcttagaagttctcacctagttca

SEQ ID NO: 23675 - DNA, 80 bp, synthetic construct
  source 1..80: mol_type = other DNA
atgttaatgcacacttaagacaacagtgcagctcatactcttcccaaattgattcattttgcagtgggcctgatgcaatt

SEQ ID NO: 23676 - DNA, 80 bp, synthetic construct
  source 1..80: mol_type = other DNA
ggccttctttgcctgcaagaaaaacttgaggattctccattcagaaaaaagaatcaaatagtctaagaaatggttttagt

SEQ ID NO: 23677 - DNA, 80 bp, synthetic construct; identical to SEQ ID NO: 9831
  source 1..80: mol_type = other DNA

SEQ ID NO: 23678 - DNA, 80 bp, synthetic construct
  source 1..80: mol_type = other DNA
aggagaaggaactatcatgtgttgggtgctgatatgattctaggtgctttgtatgcattatcatagtactacttcatagg

SEQ ID NO: 23679 - DNA, 80 bp, synthetic construct
  source 1..80: mol_type = other DNA
tggagatattgaataactttttagagacagtcattacctttccaaagttacaaagccaaggggatatcagcaagttctac

SEQ ID NO: 23680 - DNA, 80 bp, synthetic construct; identical to SEQ ID NO: 9832
  source 1..80: mol_type = other DNA

SEQ ID NO: 23681 - DNA, 80 bp, synthetic construct
  source 1..80: mol_type = other DNA
tagacaaggtggcagaggttaaacaagaaagttgatagacaagtgaggctttttagaaatggaagtcatctggatctact

SEQ ID NO: 23682 - DNA, 80 bp, synthetic construct
  source 1..80: mol_type = other DNA
gactgccgattagaatttcatgcagtcacagagaaattttagtcctaagacagagaaacaaaatcatggagggaatattt

SEQ ID NO: 23683 - DNA, 80 bp, synthetic construct
  source 1..80: mol_type = other DNA
aggaattgggggaaaattactaagtagaagtcctgactggaagaacaggaaatatgcaggaaatagctcaggaaattaga

SEQ ID NO: 23684 - DNA, 80 bp, synthetic construct; identical to SEQ ID NO: 9833
  source 1..80: mol_type = other DNA

SEQ ID NO: 23685 - DNA, 80 bp, synthetic construct
  source 1..80: mol_type = other DNA
ttgttcatttcataagcatttattgactgtgagacaagtactgtgctaggcattgcagatacagtgataaataatgccca

SEQ ID NO: 23686 - DNA, 80 bp, synthetic construct
  source 1..80: mol_type = other DNA
aaaaggagctaagagattccttcttggaggagaagacctattgttcttgatggtcgggaaggtgagggaaggcaaaatgg

SEQ ID NO: 23687 - DNA, 80 bp, synthetic construct
  source 1..80: mol_type = other DNA
cacagggatcccctaaaggatttgaggctgaagattaacagcccgtgatattcacttgtcagttctctcatccgggtctt

SEQ ID NO: 23688 - DNA, 80 bp, synthetic construct
  source 1..80: mol_type = other DNA
atcacacagtggggctaagaaaaaagcagcatggcccacaggtctttccttagactcccattatgtgtgcatcatttgag

SEQ ID NO: 23689 - DNA, 80 bp, synthetic construct; identical to SEQ ID NO: 9834
  source 1..80: mol_type = other DNA

SEQ ID NO: 23690 - DNA, 80 bp, synthetic construct
  source 1..80: mol_type = other DNA
aggcatatgtgtgtcgttccctaaataaaacaaagaggaaaaggcaaacttagaaacaggccaagtaatgagaaagaagg

SEQ ID NO: 23691 - DNA, 80 bp, synthetic construct
  source 1..80: mol_type = other DNA
agagctggcaattccatcacccgattccatctcctcaatgcagacttggtttttgaaggtgaaggcaactgggttggaat

SEQ ID NO: 23692 - DNA, 80 bp, synthetic construct; identical to SEQ ID NO: 9835
  source 1..80: mol_type = other DNA

SEQ ID NO: 23693 - DNA, 80 bp, synthetic construct
  source 1..80: mol_type = other DNA
ctgcatccttaattatcagctggcaatagggtagttaccatccatagagtggtgattgggagcagggacagtggagctgg

SEQ ID NO: 23694 - DNA, 80 bp, synthetic construct
  source 1..80: mol_type = other DNA
caaagcacttagaacaatgctgagaccagagagtaagcatcaagtgattcttcctctttctcttcctcattatcatacaa

SEQ ID NO: 23695 - DNA, 80 bp, synthetic construct
  source 1..80: mol_type = other DNA
aagctggtaactgaatggtcacaaggctacatggtcaatgctatttgagaaaccctaaaagggcttctcagaggagggga

SEQ ID NO: 23696 - DNA, 80 bp, synthetic construct; identical to SEQ ID NO: 9836
  source 1..80: mol_type = other DNA

SEQ ID NO: 23697 - DNA, 80 bp, synthetic construct
  source 1..80: mol_type = other DNA
gtctgaggactgcttttgtggagagggatgggctttcttgctacataagccagtggccacaaacacatgaaagtgagcac

SEQ ID NO: 23698 - DNA, 80 bp, synthetic construct
  source 1..80: mol_type = other DNA
tggaatgtcttcctctcatcatccacctgacaccccttgcccctgcagagccagctcaagtgtccttctcagggctagct

SEQ ID NO: 23699 - DNA, 80 bp, synthetic construct
  source 1..80: mol_type = other DNA
tgagcatgactcatagacatttgttgacagaatgcatacatgaactatgagtgaatttcttgacaccagtgttctatcac

SEQ ID NO: 23700 - DNA, 80 bp, synthetic construct
  source 1..80: mol_type = other DNA
tatatatttatcattatgggattggccaagatgccattctgacaagcacggggttacaggtattcacagttctctcatcg

SEQ ID NO: 23701 - DNA, 80 bp, synthetic construct; identical to SEQ ID NO: 9837
  source 1..80: mol_type = other DNA

SEQ ID NO: 23702 - DNA, 80 bp, synthetic construct
  source 1..80: mol_type = other DNA
agcttaggctttagaagaggtgcatcctagaactagcttcaattgatatgttatccatccacctaatatagaacccctac

SEQ ID NO: 23703 - DNA, 80 bp, synthetic construct
  source 1..80: mol_type = other DNA
cagaattagatgaccaaatttcagaggagtcctcctgagaagagcttttcctgactggataagaacagctcttagtttcc

SEQ ID NO: 23704 - DNA, 80 bp, synthetic construct; identical to SEQ ID NO: 9838
  source 1..80: mol_type = other DNA

SEQ ID NO: 23705 - DNA, 80 bp, synthetic construct
  source 1..80: mol_type = other DNA
tgatagatggattaatggatgaatggattgatggatggatggatggatggatgaatggatggatggtagatggatgagtg

SEQ ID NO: 23706 - DNA, 80 bp, synthetic construct
  source 1..80: mol_type = other DNA
ggctttaagaggtttggcttctctagtccatctgtattcttctcattcccctgtggctttggaagccatagtccttctag

SEQ ID NO: 23707 - DNA, 80 bp, synthetic construct
  source 1..80: mol_type = other DNA
aaaaatggctctccaccttaaacacaagtccctcccaagtctttaagctttcttttttacttttcttcctagtgcttagt

SEQ ID NO: 23708 - DNA, 80 bp, synthetic construct; identical to SEQ ID NO: 9839
  source 1..80: mol_type = other DNA

SEQ ID NO: 23709 - DNA, 80 bp, synthetic construct
  source 1..80: mol_type = other DNA
gtggtgggggcctgtaatcccagctactcaggaggctgaggcaggaaaatcacttgaacccaggagacggaggctggcag

SEQ ID NO: 23710 - DNA, 80 bp, synthetic construct
  source 1..80: mol_type = other DNA
atcgctgaaggtccagttcctcttaagaggactagcattttagtagttgcttcaatattactacttaaagtggggaggaa

SEQ ID NO: 23711 - DNA, 80 bp, synthetic construct
  source 1..80: mol_type = other DNA
tatcagcacctgctctgcttgttgatctaatttaaacccacgacaaccccgtgagtggcacaattactaccatttgacaa

SEQ ID NO: 23712 - DNA, 80 bp, synthetic construct; identical to SEQ ID NO: 9840
  source 1..80: mol_type = other DNA

SEQ ID NO: 23713 - DNA, 80 bp, synthetic construct
  source 1..80: mol_type = other DNA
aatgatcaccttttttatttctgatctcatttatcatgcaggcaagattcgaagagaacttttgaccatggaggctgaat

SEQ ID NO: 23714 - DNA, 80 bp, synthetic construct
  source 1..80: mol_type = other DNA
cgcttggcctgtctactgacaggaacagccagggttctgtgcattagtggtgaaggtatcagtgggccagtagggaggtt

SEQ ID NO: 23715 - DNA, 80 bp, synthetic construct
  source 1..80: mol_type = other DNA
caaccagagcttccactttagaaggtaagaagctacggctgggcaatactgtggttgtccataaccatgctgcaaattag

SEQ ID NO: 23716 - DNA, 80 bp, synthetic construct; identical to SEQ ID NO: 9841
  source 1..80: mol_type = other DNA

SEQ ID NO: 23717 - DNA, 80 bp, synthetic construct
  source 1..80: mol_type = other DNA
cacagtttactgcagcctcaacctcttgggctcaagcaagcctcctgcctcagcctcatgaatagctgggattacaggca

SEQ ID NO: 23718 - DNA, 80 bp, synthetic construct
  source 1..80: mol_type = other DNA
ctgagcctgcagtttgaccttcatcacgtcacattacatcacatcacccgcctgggcttcatgttccccatcaggaaacc

SEQ ID NO: 23719 - DNA, 80 bp, synthetic construct
  source 1..80: mol_type = other DNA
ttatttgtgctttaaaatgccctgacagcttatcttggctcaagcctgagtttcctcaacgacttccggtttaaaatatc

SEQ ID NO: 23720 - DNA, 80 bp, synthetic construct
  source 1..80: mol_type = other DNA
ggtggccttctgggtaggagccctggagagtgtctcctatagccctacacgccacccaccatcaagcttgcgttcttgca

SEQ ID NO: 23721 - DNA, 80 bp, synthetic construct; identical to SEQ ID NO: 9842
  source 1..80: mol_type = other DNA

SEQ ID NO: 23722 - DNA, 80 bp, synthetic construct
  source 1..80: mol_type = other DNA
tcacagctcaccattttacataagtattatcctattcattcagttcatggggactttatggccactaatttctagctaag

SEQ ID NO: 23723 - DNA, 80 bp, synthetic construct
  source 1..80: mol_type = other DNA
gccttggccaacgtggccactcatgctctgtgattcattagacctcatatactctgctgctttccaggcaaccaggaagg

SEQ ID NO: 23724 - DNA, 80 bp, synthetic construct; identical to SEQ ID NO: 9843
  source 1..80: mol_type = other DNA

SEQ ID NO: 23725 - DNA, 80 bp, synthetic construct
  source 1..80: mol_type = other DNA
tccaaagattcttgagactagcagcgaccccataatcagagagcaggcaaatctccatcctttgtgatcccaaactctga

SEQ ID NO: 23726 - DNA, 80 bp, synthetic construct
  source 1..80: mol_type = other DNA
gtgaggaggctggtccaggcatctttaaatctggaatcactccagctcatcactaaactctgccccagacaaagccatca

SEQ ID NO: 23727 - DNA, 80 bp, synthetic construct
  source 1..80: mol_type = other DNA
gtggagggaaggctgcccctgaaggcactgacatggcaagtcccagggctcatttgtcttgaaggatcaaataatcaaaa

SEQ ID NO: 23728 - DNA, 80 bp, synthetic construct; identical to SEQ ID NO: 9844
  source 1..80: mol_type = other DNA

SEQ ID NO: 23729 - DNA, 80 bp, synthetic construct
  source 1..80: mol_type = other DNA
cccgccaccagcaccacaatggactgatgcctgagggctcagaagcctcaagcagcactccctggtctctgccagtcctg

SEQ ID NO: 23730 - DNA, 80 bp, synthetic construct
  source 1..80: mol_type = other DNA
gcttggtgccagaagatagctggtcccaaacaaggggcagcccagacacctgctatgccacactgatatctggtgaatag

SEQ ID NO: 23731 - DNA, 80 bp, synthetic construct
  source 1..80: mol_type = other DNA
actaaatacagatgggttaatggctgggagtggggagaagactttcaagaaattacgaaggaggccattcagccttattg

SEQ ID NO: 23732 - DNA, 80 bp, synthetic construct
  source 1..80: mol_type = other DNA
atagctagacagttgggctttttctcctgtaaacaagtcacaaagaaggatccttgttgctaaagtaatcagatctgggg

SEQ ID NO: 23733 - DNA, 80 bp, synthetic construct; identical to SEQ ID NO: 9845
  source 1..80: mol_type = other DNA

SEQ ID NO: 23734 - DNA, 80 bp, synthetic construct
  source 1..80: mol_type = other DNA
tcttcttggctgtatctgaactttgggaaatgaacatctttaacacccactcatgaaatccccactctggcagctggtcc

SEQ ID NO: 23735 - DNA, 80 bp, synthetic construct
  source 1..80: mol_type = other DNA
gtgtaaccaaaagccaaatcacctggtataaaatcaattttggacatggagaagtacttacccatgcttccctggagtgg

SEQ ID NO: 23736 - DNA, 80 bp, synthetic construct
  source 1..80: mol_type = other DNA
ggtgttgagaaggagaaaggagcctggaaagagacagggaaaacgaatctgcagatgtgttcaggtaagaccagcagtag

SEQ ID NO: 23737 - DNA, 80 bp, synthetic construct; identical to SEQ ID NO: 9846
  source 1..80: mol_type = other DNA

SEQ ID NO: 23738 - DNA, 80 bp, synthetic construct
  source 1..80: mol_type = other DNA
tgagagggttggctgaactcaataatctcttaatgttcatttcagctcttgagcctatgagtcatgtgaacttgcaactg

SEQ ID NO: 23739 - DNA, 80 bp, synthetic construct
  source 1..80: mol_type = other DNA
attcatggggattactgtcagtgtaaaagcacaccaccattatattgttccaggcattccttctgatacattaattttac

SEQ ID NO: 23740 - DNA, 80 bp, synthetic construct; identical to SEQ ID NO: 9847
  source 1..80: mol_type = other DNA

SEQ ID NO: 23741 - DNA, 80 bp, synthetic construct
  source 1..80: mol_type = other DNA
gctggatcgagaacgtgaaccctctgtacttgttgggaagcttcagcatggcatataagaaaagtgatctacaactgtca

SEQ ID NO: 23742 - DNA, 80 bp, synthetic construct
  source 1..80: mol_type = other DNA
gggaaatgacttgtccaaagtcttagtttgaaagttaagaccatactccagatttctggacttctaagcagtactcttct

SEQ ID NO: 23743 - DNA, 80 bp, synthetic construct
  source 1..80: mol_type = other DNA
tcctttctgccctcagattccatttaatggatgcctattttgagcaaacatccaagcactggctctgccctgaggacata

SEQ ID NO: 23744 - DNA, 80 bp, synthetic construct
  source 1..80: mol_type = other DNA
ggtgggaagatccgtaaagaggaagacccttgagccaggtcttacagggagagaaaaacaaagatactggcagaatggac

SEQ ID NO: 23745 - DNA, 80 bp, synthetic construct; identical to SEQ ID NO: 9848
  source 1..80: mol_type = other DNA

SEQ ID NO: 23746 - DNA, 80 bp, synthetic construct
  source 1..80: mol_type = other DNA
gactaaatgcaaattcgaagtgtttgctatattactgttgtaagcaaaggcaatgtgttgagggtggatgactggggttt

SEQ ID NO: 23747 - DNA, 80 bp, synthetic construct
  source 1..80: mol_type = other DNA
ccatgtccaataataatttacacataagggagcagcagcaactgtgtcctggtctgagaccattctctgatgttctcagg

SEQ ID NO: 23748 - DNA, 80 bp, synthetic construct
  source 1..80: mol_type = other DNA
cattcttctcaggaagattactgctatgcacatgtgcacatgcatgagaagctcaaaaatccagctgaaggtgttgaggt

SEQ ID NO: 23749 - DNA, 80 bp, synthetic construct
  source 1..80: mol_type = other DNA
gaatcttattttctgcaaccggactatcaataagcgactgagcttattttcactctcaatggaactctatagttgagagc

SEQ ID NO: 23750 - DNA, 80 bp, synthetic construct; identical to SEQ ID NO: 9849
  source 1..80: mol_type = other DNA

SEQ ID NO: 23751 - DNA, 80 bp, synthetic construct
  source 1..80: mol_type = other DNA
ccagcagggctcacattatgggccaaaacccaagggtcatgaacttagaggtcaaactcttttgtatctgttcagttatt

SEQ ID NO: 23752 - DNA, 80 bp, synthetic construct
  source 1..80: mol_type = other DNA
tccctgtgttgacaggtgtcttagtctggaattcctttgatctaggactaaacctggaatcagaaggactaaactggagt

SEQ ID NO: 23753 - DNA, 80 bp, synthetic construct; identical to SEQ ID NO: 9850
  source 1..80: mol_type = other DNA

SEQ ID NO: 23754 - DNA, 80 bp, synthetic construct
  source 1..80: mol_type = other DNA
cacaatgcttgccacatggtaggtactcaatgatcctaaaaatcaaattgatatgatggtaacatggtgatgtagtttgg

SEQ ID NO: 23755 - DNA, 80 bp, synthetic construct
  source 1..80: mol_type = other DNA
ttatttaaaagagtctaggacctcccctcctttctctctcgctctcactctcaccatgtggcatgctggttccttgttgc

SEQ ID NO: 23756 - DNA, 80 bp, synthetic construct
  source 1..80: mol_type = other DNA
tacagaaaattggcaccaatgagtggtgttttgctataaaaatacctgaaaatatagaagtaactttggaactgagtaac

SEQ ID NO: 23757 - DNA, 80 bp, synthetic construct; identical to SEQ ID NO: 9851
  source 1..80: mol_type = other DNA

SEQ ID NO: 23758 - DNA, 80 bp, synthetic construct
  source 1..80: mol_type = other DNA
caggtagtagaaaggaaaagaactttttcaggggaggaattcaagtggcctgtggagcaactcgctaagcgaatagcatg

SEQ ID NO: 23759 - DNA, 80 bp, synthetic construct
  source 1..80: mol_type = other DNA
cagacaccactttggataacataagccatgcttccatgtggtattcagcctacagacacacagaatgcaagagtgaagaa

SEQ ID NO: 23760 - DNA, 80 bp, synthetic construct
  source 1..80: mol_type = other DNA
gtgggaagggggctgctgccttctatatccaagaatggtagagacactggcagctagacactggcagcttgaagcctcag

SEQ ID NO: 23761 - DNA, 80 bp, synthetic construct; identical to SEQ ID NO: 9852
  source 1..80: mol_type = other DNA

SEQ ID NO: 23762 - DNA, 80 bp, synthetic construct
  source 1..80: mol_type = other DNA
ttgaggaactattgtgaaggcataatcatattttgaaatgtaaggacatgatatttggggggggcaggggtgaaataata

SEQ ID NO: 23763 - DNA, 80 bp, synthetic construct
  source 1..80: mol_type = other DNA
atgtgagatctggttgtttaaaagagtctgggacctcctcattctctttcacttgctcttgctgtcactatgtgacatgc

SEQ ID NO: 23764 - DNA, 80 bp, synthetic construct; identical to SEQ ID NO: 9853
  source 1..80: mol_type = other DNA

SEQ ID NO: 23765 - DNA, 80 bp, synthetic construct
  source 1..80: mol_type = other DNA
tgtgatatatttatgacttcttccaacagctccaggcagtatcacttgactcttctcactataaagatgaggctatttag

SEQ ID NO: 23766 - DNA, 80 bp, synthetic construct
  source 1..80: mol_type = other DNA
gttgatgctaagtgtggaaaatcaataaacagatcttttatactgatggctatatatttctcactgcagtgaataagggt

SEQ ID NO: 23767 - DNA, 80 bp, synthetic construct
  source 1..80: mol_type = other DNA
gttatcagcaataattaagattattatgttaaattgtcgtgtgccacaaaaataaccaaatttcattgccagttgtgtct

SEQ ID NO: 23768 - DNA, 80 bp, synthetic construct; identical to SEQ ID NO: 9854
  source 1..80: mol_type = other DNA

SEQ ID NO: 23769 - DNA, 80 bp, synthetic construct
  source 1..80: mol_type = other DNA
aagttaagaaaactttttcttttgagctacttagagcttacaacaacaactgggtaaagtatagttttgtgagcaaaatt

SEQ ID NO: 23770 - DNA, 80 bp, synthetic construct
  source 1..80: mol_type = other DNA
gttattggatatagtggttattttaccaaggccttgactgaaatggtatattttcaaatatgatcagactgctttgagga

SEQ ID NO: 23771 - DNA, 80 bp, synthetic construct
  source 1..80: mol_type = other DNA
gggaaaaattcacccaatttgtacaggtattacagatatagataagtggcacatccttggcttggctttctagcctcgag

SEQ ID NO: 23772 - DNA, 80 bp, synthetic construct
  source 1..80: mol_type = other DNA
cattatttgtctttggtagaaataaaggactaaagagaagaattatgttttttttttttaaaaaaaaaaaaccctatagg

SEQ ID NO: 23773 - DNA, 80 bp, synthetic construct; identical to SEQ ID NO: 9855
  source 1..80: mol_type = other DNA

SEQ ID NO: 23774 - DNA, 80 bp, synthetic construct
  source 1..80: mol_type = other DNA
gacattagccttttttccctgtttccatagaaataccttttatttatgatctgtttgcctgcatcatatatagagcctag

SEQ ID NO: 23775 - DNA, 80 bp, synthetic construct
  source 1..80: mol_type = other DNA
aataatctctaacccaaacctctccaaagctatcaacttggcttttaatatgtgaaacattttttgttcgagacagagtc

SEQ ID NO: 23776 - DNA, 80 bp, synthetic construct
  source 1..80: mol_type = other DNA
acctgccttagcttcccaaagtgctgggattacaggtgtgagccaccacacatggccaaacatgtgaaacttgttaaggc

SEQ ID NO: 23777 - DNA, 80 bp, synthetic construct; identical to SEQ ID NO: 9856
  source 1..80: mol_type = other DNA

SEQ ID NO: 23778 - DNA, 80 bp, synthetic construct
  source 1..80: mol_type = other DNA
tggcaaataagcttctgcatcccactgaggggtgggttaatcactctgtgactttcctttgtgtgcacattaataaattg

SEQ ID NO: 23779 - DNA, 80 bp, synthetic construct
  source 1..80: mol_type = other DNA
tttttccatgaaccttcagagggagggcaaagggaaagttttccctcggtccccacagaatcagtttttgttttgttttg

SEQ ID NO: 23780 - DNA, 80 bp, synthetic construct
  source 1..80: mol_type = other DNA
tgctttctgggcctacggtacagctattattctgaaatttcttttcactgggacttttatgttagtcccaccatcctcag

SEQ ID NO: 23781 - DNA, 80 bp, synthetic construct
  source 1..80: mol_type = other DNA
aaaatttgaagacctagtttcagcgttttctagtgtcagtgttactaagaagaagtctaacgctggttttatttgtaatt

SEQ ID NO: 23782 - DNA, 80 bp, synthetic construct; identical to SEQ ID NO: 9857
  source 1..80: mol_type = other DNA

SEQ ID NO: 23783 - DNA, 80 bp, synthetic construct
  source 1..80: mol_type = other DNA
cagaagaaaaagcatataaatttatttatgtgcaaatgcatgggagccacacaaaatatgagacttgaaggaccagagga

SEQ ID NO: 23784 - DNA, 80 bp, synthetic construct
  source 1..80: mol_type = other DNA
tgagtgatcattgatcagtccctcacatttaaacaggagagactagggaggctaacaggagctatatgtgtacagatggt

SEQ ID NO: 23785 - DNA, 80 bp, synthetic construct
  source 1..80: mol_type = other DNA
tttttcctagccctatggttaagcatcctgctaccctctgctttgggaaaatgatattgaaaaaggaatgaaggccatct

SEQ ID NO: 23786 - DNA, 80 bp, synthetic construct; identical to SEQ ID NO: 9858
  source 1..80: mol_type = other DNA

SEQ ID NO: 23787 - DNA, 80 bp, synthetic construct
  source 1..80: mol_type = other DNA
aggagacaaatgttcaatccacttttctgaaccagaggcctcttaatcatattctctgagtgagaacataaatacacaca

SEQ ID NO: 23788 - DNA, 80 bp, synthetic construct
  source 1..80: mol_type = other DNA
tcacaatgccactcatgttaggtgggaactaaggaaaagcagaggtttaatgggttggaatctggacagaaggagtgcag

SEQ ID NO: 23789 - DNA, 80 bp, synthetic construct; identical to SEQ ID NO: 9859
  source 1..80: mol_type = other DNA

SEQ ID NO: 23790 - DNA, 80 bp, synthetic construct
  source 1..80: mol_type = other DNA
caaagaccgtttgcagaaaataggaaaggaagaaatcatggaaaaaaaggagaaacaacatatccttatccatatctatc

SEQ ID NO: 23791 - DNA, 80 bp, synthetic construct
  source 1..80: mol_type = other DNA
tcgctacctgaggagacttaaaaatgctacattccatatctggctttcagaatgtcgtaactagacataaacatgattgt

SEQ ID NO: 23792 - DNA, 80 bp, synthetic construct
  source 1..80: mol_type = other DNA
atgatagaaatctacgaaggtgtttcagtcagatgccctgtggtttggtccccagatgcctgcagatgttcctttcactt

SEQ ID NO: 23793 - DNA, 80 bp, synthetic construct
  source 1..80: mol_type = other DNA
ggctgagcagtatttgagggtttcctttgttcatgtggtcttatgaattgttcaaagcaaactggggccactgaaagagg

SEQ ID NO: 23794 - DNA, 80 bp, synthetic construct; identical to SEQ ID NO: 9860
  source 1..80: mol_type = other DNA

SEQ ID NO: 23795 - DNA, 80 bp, synthetic construct
  source 1..80: mol_type = other DNA
ccaccaggacttacatgtattgcttttctgcaccttcattcggaagcactttgaagagaaatggtattcgtttttgagac

SEQ ID NO: 23796 - DNA, 80 bp, synthetic construct
  source 1..80: mol_type = other DNA
ggcaaaacaacctttcgggtcctacttaactgaggcagaagttccctagaaataatatatatttatgctcatgtgtgtgt

SEQ ID NO: 23797 - DNA, 80 bp, synthetic construct
  source 1..80: mol_type = other DNA
atatattcccttttagatctctgaccctgttaaaatctgaccctgttagatctcacctcatttttaggtgagacacaaag

SEQ ID NO: 23798 - DNA, 80 bp, synthetic construct; identical to SEQ ID NO: 9861
  source 1..80: mol_type = other DNA

SEQ ID NO: 23799 - DNA, 80 bp, synthetic construct
  source 1..80: mol_type = other DNA
aggttttccctttcccacgtgggttttttagctctggaatcggattgttcaatttttgctttaagtcccagatgtcaagg

SEQ ID NO: 23800 - DNA, 80 bp, synthetic construct
  source 1..80: mol_type = other DNA
tttccttgcaggagtctcataaaatctcaaccttattataacaagttctgatgttccatctactgtggttctcagatacc

SEQ ID NO: 23801 - DNA, 80 bp, synthetic construct
  source 1..80: mol_type = other DNA
tttttcggaagagtcaatgcacatgcaggaagctgaggtatctgcatggcaagatggctaggctgagttctcaaaggttc

SEQ ID NO: 23802 - DNA, 80 bp, synthetic construct; identical to SEQ ID NO: 9862
  source 1..80: mol_type = other DNA

SEQ ID NO: 23803 - DNA, 80 bp, synthetic construct
  source 1..80: mol_type = other DNA
ggctgaggcaggagaatcgcttgaaccagggaggcggaggttgcagtgagcagagatcgtgccactgcactctagcctgg

SEQ ID NO: 23804 - DNA, 80 bp, synthetic construct
  source 1..80: mol_type = other DNA
gactggaagtttaaaaaaaagacttgatttaaccaggcttccttgcagataggaacagccatgtgacacagttctggtgg

SEQ ID NO: 23805 - DNA, 80 bp, synthetic construct
  source 1..80: mol_type = other DNA
tgaaatgtgagcagaattatgctcgtatggttgccaggttcagcaaataaacatatagaacacccagttcaatgtgcatt

SEQ ID NO: 23806 - DNA, 80 bp, synthetic construct; identical to SEQ ID NO: 9863
  source 1..80: mol_type = other DNA

SEQ ID NO: 23807 - DNA, 80 bp, synthetic construct
  source 1..80: mol_type = other DNA
aaaccctgtctctactaaaaatacaaaaacttagccgggcgtggtggcgtgcacctgtaatcccagctactccggaggtt

SEQ ID NO: 23808 - DNA, 80 bp, synthetic construct
  source 1..80: mol_type = other DNA
acacccaagatccttatctggctaagtcatcgcagcgaaggcttctgttgttttggagctgaacttctataagcacaggg

SEQ ID NO: 23809 - DNA, 80 bp, synthetic construct
  source 1..80: mol_type = other DNA
tcttatttaccttgggggggatgtttttcctttttgaacattatgacgagtggctacagagggttactctttgcaacata

SEQ ID NO: 23810 - DNA, 80 bp, synthetic construct
  source 1..80: mol_type = other DNA
aggaggaagaagcagaattaatttataaaatatcctcattgtaactctcttttgggaaataacagtggctgctgatctac

SEQ ID NO: 23811 - DNA, 80 bp, synthetic construct; identical to SEQ ID NO: 9864
  source 1..80: mol_type = other DNA

SEQ ID NO: 23812 - DNA, 80 bp, synthetic construct
  source 1..80: mol_type = other DNA
atccccagttgtagttgtgtgtctaataatggcagccaatagccacatgtggtttttgagtatttgaaatgtggctgacg

SEQ ID NO: 23813 - DNA, 80 bp, synthetic construct
  source 1..80: mol_type = other DNA
tgaaaatttagtctctaaactgaaatggctatcagtataaaatgcatactggatttcaaagatttagtacagaagacata

SEQ ID NO: 23814 - DNA, 80 bp, synthetic construct; identical to SEQ ID NO: 9865
  source 1..80: mol_type = other DNA

SEQ ID NO: 23815 - DNA, 80 bp, synthetic construct
  source 1..80: mol_type = other DNA
aatgcttatccagtgcctattagtcccgagcaatatgttaacattttgcaaggtttactgcattttaatttgcaacaacc

SEQ ID NO: 23816 - DNA, 80 bp, synthetic construct
  source 1..80: mol_type = other DNA
ggaccttggcctttatgaaagcagctggactctgtttgagagatggtatattgcttttatttctagagtctttttagatt

SEQ ID NO: 23817 - DNA, 80 bp, synthetic construct
  source 1..80: mol_type = other DNA
gttatcatgggtgcttatttaaagttctacttgcaatgtcagactacatctcaatgaaagctttcaaatatagggacaaa

SEQ ID NO: 23818 - DNA, 80 bp, synthetic construct
  source 1..80: mol_type = other DNA
gtaagaaaaaatttatctgtagtcctaccaattaaccattccattttggttttttatttcaccacctgcataggatttta

SEQ ID NO: 23819 - DNA, 80 bp, synthetic construct; identical to SEQ ID NO: 9866
  source 1..80: mol_type = other DNA

SEQ ID NO: 23820 - DNA, 80 bp, synthetic construct
  source 1..80: mol_type = other DNA
tacataagattagttatgtaaagtatggtgtatccacataataaagtacttcatggagtcattaaaattattctctggaa

SEQ ID NO: 23821 - DNA, 80 bp, synthetic construct
  source 1..80: mol_type = other DNA
tagagggttaggtgacctcccatagccacaaagctgataactgagtaagcaatagaactaagacaaaaaaaccctggtgg

SEQ ID NO: 23822 - DNA, 80 bp, synthetic construct
  source 1..80: mol_type = other DNA
ttgagaaaattcaccaaaatgtaaaatgggtaactctggaggttagaatatttttctttacactttcttgaattttccaa

SEQ ID NO: 23823 - DNA, 80 bp, synthetic construct; identical to SEQ ID NO: 9867
  source 1..80: mol_type = other DNA

SEQ ID NO: 23824 - DNA, 80 bp, synthetic construct
  source 1..80: mol_type = other DNA
tgatattgccatgaatgttggtgtacaagtatgtttgagtctctgttttgaatttttgggggtgtatatgcaggaatgga

SEQ ID NO: 23825 - DNA, 80 bp, synthetic construct
  source 1..80: mol_type = other DNA
catacatcctcaccaatatttgttgtattactttaaaaaaataatagacaaactaatggatgcgaagtggtatcccatgg

SEQ ID NO: 23826 - DNA, 80 bp, synthetic construct; identical to SEQ ID NO: 9868
  source 1..80: mol_type = other DNA

SEQ ID NO: 23827 - DNA, 80 bp, synthetic construct
  source 1..80: mol_type = other DNA
tatgctgagaaagcctcctcatcttctcttcctgttatttcccttctttattcagcgaaattctaatcatccttccagat

SEQ ID NO: 23828 - DNA, 80 bp, synthetic construct
  source 1..80: mol_type = other DNA
cttgtaaaaaggctggagggaactagcttagcctcctttttcccttagccccttctgacatctgaagacacaacagcaag

SEQ ID NO: 23829 - DNA, 80 bp, synthetic construct
  source 1..80: mol_type = other DNA
ataccttccaaactctttggctttactcctgcatttgccacatgtgtgaatgcttctgacatttacctcctaataatgga

SEQ ID NO: 23830 - DNA, 80 bp, synthetic construct; identical to SEQ ID NO: 9869
  source 1..80: mol_type = other DNA

SEQ ID NO: 23831 - DNA, 80 bp, synthetic construct
  source 1..80: mol_type = other DNA
aaaactaggctcttaattaaccctttatctattatatttgctaaaagaaattattccatgtgtcctttgccatttagttt

SEQ ID NO: 23832 - DNA, 80 bp, synthetic construct
  source 1..80: mol_type = other DNA
accttgctttatggatctttggctggaaattttaagcataattatattcatagatatcattaagtggggggaaaaaggga

SEQ ID NO: 23833 - DNA, 80 bp, synthetic construct
  source 1..80: mol_type = other DNA
aacaatagcaaggctgggagaagaagatttagaaaagagcttgcaaattgtcagcctttcagagcacattgattgttctt

SEQ ID NO: 23834 - DNA, 80 bp, synthetic construct; identical to SEQ ID NO: 9870
  source 1..80: mol_type = other DNA

SEQ ID NO: 23835 - DNA, 80 bp, synthetic construct
  source 1..80: mol_type = other DNA
gctgataaaacaggtttcatttcagtaaagaagccagcccaaccccaccaaaaccaagatggtgacgagagtggcctctg

SEQ ID NO: 23836 - DNA, 80 bp, synthetic construct
  source 1..80: mol_type = other DNA
gccctcagggctgctctgtctatggagtaaccattcttttattcttctactttcttaataaacttgctttcactttactc

SEQ ID NO: 23837 - DNA, 80 bp, synthetic construct
  source 1..80: mol_type = other DNA
gggtcagtggccatttatcatcttaccattggcccacttcactcatttactttacctgctaggctgctgtgggcatttga

SEQ ID NO: 23838 - DNA, 80 bp, synthetic construct; identical to SEQ ID NO: 9871
  source 1..80: mol_type = other DNA

SEQ ID NO: 23839 - DNA, 80 bp, synthetic construct
  source 1..80: mol_type = other DNA
gcaggtagtgatggtaaataaataggggcagactcccaatttctttggaaagcagaaatgcttgaactttgaaaatcaga

SEQ ID NO: 23840 - DNA, 80 bp, synthetic construct
  source 1..80: mol_type = other DNA
caatctaaaatgccaggctcaaggatccgaacattcaagaggctggatttgaaatcctgagcatctgtatgccccctcag

SEQ ID NO: 23841 - DNA, 80 bp, synthetic construct
  source 1..80: mol_type = other DNA
ctctgccattacttgctgtgtgatcttactgtaggacaaggcatgtagcgtttctaaagtgtctatgaaatagggacagt

SEQ ID NO: 23842 - DNA, 80 bp, synthetic construct
  source 1..80: mol_type = other DNA
atcacagtccttactattgcaaacaagactgtcttgaggatttgtgttactgtcaagacaactttcaatgacgagggata

SEQ ID NO: 23843 - DNA, 80 bp, synthetic construct; identical to SEQ ID NO: 9872
  source 1..80: mol_type = other DNA

SEQ ID NO: 23844 - DNA, 80 bp, synthetic construct
  source 1..80: mol_type = other DNA
atgaggtagcctccatttggtgtttataagcttacactattcagtctgtgtcataagctgtaaatatttctcctccagac

SEQ ID NO: 23845 - DNA, 80 bp, synthetic construct
  source 1..80: mol_type = other DNA
tttgtcacacaaatgtgtaataaaaccacatatattttgttctctagtactgtgtaggttctgaacaggcagatgttcac

SEQ ID NO: 23846 - DNA, 80 bp, synthetic construct; identical to SEQ ID NO: 9873
  source 1..80: mol_type = other DNA

SEQ ID NO: 23847 - DNA, 80 bp, synthetic construct
  source 1..80: mol_type = other DNA
tttaactaacaaatgggcatgagacaaaacttcacaccaagggtcctacatgaatgcattctctttcattggaaacaccc

SEQ ID NO: 23848 - DNA, 80 bp, synthetic construct
  source 1..80: mol_type = other DNA
cctaagtgccacataatagtaataatggagattgagattttagggtgtgggttagggtggacatttgcatgtatctagtc

SEQ ID NO: 23849 - DNA, 80 bp, synthetic construct
  source 1..80: mol_type = other DNA
aggctgtctctttcctcctccaggtctggccagtgatgtctacactgcattccttgtttgattccttttgctttaaaaac

SEQ ID NO: 23850 - DNA, 80 bp, synthetic construct
  source 1..80: mol_type = other DNA
gcaaacatacttgtttgtttatggcatgtgctataacacttgagattactcacagagacagaaaactttagacctggcca

SEQ ID NO: 23851 - DNA, 80 bp, synthetic construct; identical to SEQ ID NO: 9874
  source 1..80: mol_type = other DNA

SEQ ID NO: 23852 - DNA, 80 bp, synthetic construct
  source 1..80: mol_type = other DNA
aagggtcacctcctctgggatgacttttccaacttcctcaagcagagttggccttattcccctttcctgtagccaaatct

SEQ ID NO: 23853 - DNA, 80 bp, synthetic construct
  source 1..80: mol_type = other DNA
ttctctgcaccatttattccagttctggcatacggtggacacccataaatgactcctgaattgaactgaaagggactata

SEQ ID NO: 23854 - DNA, 80 bp, synthetic construct; identical to SEQ ID NO: 9875
  source 1..80: mol_type = other DNA

SEQ ID NO: 23855 - DNA, 80 bp, synthetic construct
  source 1..80: mol_type = other DNA
actctgtaggtggttttggggactcagaattacatccaagtctgtttattagaaatttagagagccaagagaccaagcat

SEQ ID NO: 23856 - DNA, 80 bp, synthetic construct
  source 1..80: mol_type = other DNA
gacacagtttttaatatgttcagctttctaatcttccttgtctctccacattcttaatatttgccatcaactcttaatga

SEQ ID NO: 23857 - DNA, 80 bp, synthetic construct
  source 1..80: mol_type = other DNA
ctaattattgcaacattctgtaaaggcaaatgaataaatcataaatgaagagtaatgagggtggagctgctgtgcctgtg

SEQ ID NO: 23858 - DNA, 80 bp, synthetic construct
  source 1..80: mol_type = other DNA
cagccccacatggctattaaacatttaaaatgtggctagtcttaatatgaatgtattagaagtataatatacacaccaga

SEQ ID NO: 23859 - DNA, 80 bp, synthetic construct; identical to SEQ ID NO: 9876
  source 1..80: mol_type = other DNA

SEQ ID NO: 23860 - DNA, 80 bp, synthetic construct
  source 1..80: mol_type = other DNA
tctttacagctgtagagacaagaaatagattaagggttgcctggggcttgggatgggaattgagaatgactgcaaatgag

SEQ ID NO: 23861 - DNA, 80 bp, synthetic construct
  source 1..80: mol_type = other DNA
caggctggagtgcagtggcataatttcggctcactgcagccttgaccttccagattcaaactatcctcccacctcagccc

SEQ ID NO: 23862 - DNA, 80 bp, synthetic construct; identical to SEQ ID NO: 9877
  source 1..80: mol_type = other DNA

SEQ ID NO: 23863 - DNA, 80 bp, synthetic construct
  source 1..80: mol_type = other DNA
tgagttaaataaaatgtattattaaaattaattttacttatttacttttacttttttaagtggctactagacaattttga

SEQ ID NO: 23864 - DNA, 80 bp, synthetic construct
  source 1..80: mol_type = other DNA
ttggctcacaaccagccccatatggaaactgagtgcttgcatcatccagaagatgctaaaaaagggggaagttgcccagt

SEQ ID NO: 23865 - DNA, 80 bp, synthetic construct
  source 1..80: mol_type = other DNA
ataccaagttcactgtcaatggcacatccatcgcgtctgaaaatggagcatgttcactgtccatccaaatgttcatataa

SEQ ID NO: 23866 - DNA, 80 bp, synthetic construct
  source 1..80: mol_type = other DNA
atgtttagaggagcgaggttgttatcacattctctttttgtctgaagcagttgttcccaaccctggctccccatgaaaat

SEQ ID NO: 23867 - DNA, 80 bp, synthetic construct; identical to SEQ ID NO: 9878
  source 1..80: mol_type = other DNA

SEQ ID NO: 23868 - DNA, 80 bp, synthetic construct
  source 1..80: mol_type = other DNA
agacagcttctctgtgttggatgagctttaattgttagacatgtctttcccagtctaaactcaaccctgctgctctctaa

SEQ ID NO: 23869 - DNA, 80 bp, synthetic construct
  source 1..80: mol_type = other DNA
cctcctttccaggcctgtaaccatctctcagctctagtttatcagttttctctctaagctgggaaacttccaaatgctca

SEQ ID NO: 23870 - DNA, 80 bp, synthetic construct
  source 1..80: mol_type = other DNA
ctcatccataaaccttttacatttgagtatgacacttcacaaaatactcatccagtgaatgtggacccaatttactggaa

SEQ ID NO: 23871 - DNA, 80 bp, synthetic construct; identical to SEQ ID NO: 9879
  source 1..80: mol_type = other DNA

SEQ ID NO: 23872 - DNA, 80 bp, synthetic construct
  source 1..80: mol_type = other DNA
gcccagactgtggtaggatatatttgcttcttaggcagcctaactatccacatctctgtccaaagataattcatttcaaa

SEQ ID NO: 23873 - DNA, 80 bp, synthetic construct
  source 1..80: mol_type = other DNA
tggagagtctatataggaattgggagaggagcagggaagtaccagaaaaactcaggaatatcttcctgcctgattttgag

SEQ ID NO: 23874 - DNA, 80 bp, synthetic construct; identical to SEQ ID NO: 9880
  source 1..80: mol_type = other DNA

SEQ ID NO: 23875 - DNA, 80 bp, synthetic construct
  source 1..80: mol_type = other DNA
caaagagataaggagcatacacacaagtaataatgtttttctaatgatttacagaagcactgtggcctgaccaagggcaa

SEQ ID NO: 23876 - DNA, 80 bp, synthetic construct
  source 1..80: mol_type = other DNA
tatgccctttaaggtggttctttaggacattagcccaccatcttctcagattgctggctccctgaaatattatggggaca

SEQ ID NO: 23877 - DNA, 80 bp, synthetic construct
  source 1..80: mol_type = other DNA
acttggactctcaaaggccaatctcaaggggtgacaggtgcttcttcttacccaactatcctaactatcaaaatcaaaac

SEQ ID NO: 23878 - DNA, 80 bp, synthetic construct
  source 1..80: mol_type = other DNA
cttccaataaaaatgagtgaacatagaatattcaaccctgtgccttgcataaaggatccctaccaccacccccaccgcca

SEQ ID NO: 23879 - DNA, 80 bp, synthetic construct
  source 1..80: mol_type = other DNA
tcaacctgccctctcatccactcctcttctttctccatttccctcttaaaaatagaaatgataaaaggcactcatatttg

SEQ ID NO: 23880 - DNA, 80 bp, synthetic construct; identical to SEQ ID NO: 9881
  source 1..80: mol_type = other DNA

SEQ ID NO: 23881 - DNA, 80 bp, synthetic construct
  source 1..80: mol_type = other DNA
caaaaaataatatcgacaataaccacagcttccatttgccaattgcctactctgtacagacacggagctggagaagggac

SEQ ID NO: 23882 - DNA, 80 bp, synthetic construct
  source 1..80: mol_type = other DNA
aagaagatctaagagcaaggacataaagaccctaactggtggaactgagatttgaactcgggtcttccggcgttagcttc

SEQ ID NO: 23883 - DNA, 80 bp, synthetic construct; identical to SEQ ID NO: 9882
  source 1..80: mol_type = other DNA

SEQ ID NO: 23884 - DNA, 80 bp, synthetic construct
  source 1..80: mol_type = other DNA
cacagcagccatctaatagcaccctgcaaaactgacagattgttcctctcaacataaactctgcttcactcctaaaagga

SEQ ID NO: 23885 - DNA, 80 bp, synthetic construct
  source 1..80: mol_type = other DNA
tcttacttcttcgagtgactctcccagtgtgtcaagctgtggaaggtctccaggagatgctccgtatgagaggttaaggc

SEQ ID NO: 23886 - DNA, 80 bp, synthetic construct
  source 1..80: mol_type = other DNA
tagttagtcattaaagaggtccacatgatttgattggccacaacaggcttagtctaggcatcttgggtttacaccgagtt

SEQ ID NO: 23887 - DNA, 80 bp, synthetic construct; identical to SEQ ID NO: 9883
  source 1..80: mol_type = other DNA

SEQ ID NO: 23888 - DNA, 80 bp, synthetic construct
  source 1..80: mol_type = other DNA
attgtcacatacatggccggtaggaacatacattggttggagatttctggaggaaaatttggcaaaaaccttgagatttg

SEQ ID NO: 23889 - DNA, 80 bp, synthetic construct
  source 1..80: mol_type = other DNA
catgcatataatgagaatgggagataaggttgaaggaaagtaattaatgacctgggagatgatcatcatatatatctaca

SEQ ID NO: 23890 - DNA, 80 bp, synthetic construct
  source 1..80: mol_type = other DNA
cataagctatgagtaattttctgtttatcttcattttcttaattttctacaatgaatatgttagttttgtcaacttaaat

SEQ ID NO: 23891 - DNA, 80 bp, synthetic construct
  source 1..80: mol_type = other DNA
gtcttactgggcgtcagcattcttgcagcatttaggatttgatagatactccatccttgttgacagattattaatgtctt

SEQ ID NO: 23892 - DNA, 80 bp, synthetic construct; identical to SEQ ID NO: 9884
  source 1..80: mol_type = other DNA

SEQ ID NO: 23893 - DNA, 80 bp, synthetic construct
  source 1..80: mol_type = other DNA
cactctccaagagaagaaaaaaaataaagcaattatctggacagttcaggtaaaatgtaagctttcttctgaactccctt

SEQ ID NO: 23894 - DNA, 80 bp, synthetic construct
  source 1..80: mol_type = other DNA
tggggatgtgtgtaccttgtgccatctcttggaggaatattttaccatgaaaaatggactttaataacagaacattgaga

SEQ ID NO: 23895 - DNA, 80 bp, synthetic construct
  source 1..80: mol_type = other DNA
taaatgaaacatccaatatctgtaccagcacacagcaaaagtgactgcagaaaagcaaaaacacagagacatccatatgt

SEQ ID NO: 23896 - DNA, 80 bp, synthetic construct; identical to SEQ ID NO: 9885
  source 1..80: mol_type = other DNA

SEQ ID NO: 23897 - DNA, 80 bp, synthetic construct
  source 1..80: mol_type = other DNA
ttttcaagtcgagagttctttaggggtccctggaactccacacccactccagaaggggaaaaacctgggtaccagattgt

SEQ ID NO: 23898 - DNA, 80 bp, synthetic construct
  source 1..80: mol_type = other DNA
tgttttgtcatctataaagatgctgtgtgttgccagtgttttctcagtgggactaggtggaaaaacaatcgcttggcagt

SEQ ID NO: 23899 - DNA, 80 bp, synthetic construct
  source 1..80: mol_type = other DNA
cagggcgggggatgagtctttcttttcagaccttagccttggctctctgcagtacccctgtttccatccaaagaggaagg

SEQ ID NO: 23900 - DNA, 80 bp, synthetic construct; identical to SEQ ID NO: 9886
  source 1..80: mol_type = other DNA

SEQ ID NO: 23901 - DNA, 80 bp, synthetic construct
  source 1..80: mol_type = other DNA
ggatacttacatgtaccttgtaggtgggtaataatgaatgggaaagtacctaacacagaatatgactcaaagaacatgcc

SEQ ID NO: 23902 - DNA, 80 bp, synthetic construct
  source 1..80: mol_type = other DNA
ggtgctgattccaccatcaactgactaacatgattattctactagggtattcccttcagtccctagcacagatcctgggc

SEQ ID NO: 23903 - DNA, 80 bp, synthetic construct
  source 1..80: mol_type = other DNA
gataagaaatgataagaaatgaccccaggcctgaaggaaccacctgcttaattggggagtagcctaacactgtggaaaca

SEQ ID NO: 23904 - DNA, 80 bp, synthetic construct; identical to SEQ ID NO: 9887
  source 1..80: mol_type = other DNA

SEQ ID NO: 23905 - DNA, 80 bp, synthetic construct
  source 1..80: mol_type = other DNA
gagctgcatgggaagagggaaacattagaacagaaagtgttcagagattctggattgtgagggattgtaaaggtcaaaca

SEQ ID NO: 23906 - DNA, 80 bp, synthetic construct
  source 1..80: mol_type = other DNA
ttctctctcttagaacttgttaaatgccagctccagggcaaggatcctcaaagcctctgacgggcatagcttatctcttt

SEQ ID NO: 23907 - DNA, 80 bp, synthetic construct
  source 1..80: mol_type = other DNA
agggctcatcagcaaagcaaaacttttatttacctgtttctgagaaaggaattagacactgttctctcagcagcctttta

SEQ ID NO: 23908 - DNA, 80 bp, synthetic construct
  source 1..80: mol_type = other DNA
agcagagactcagggagaaaggaaggagaaaaaggagggggaagaaagagttggaggagagaaaaatagacataaagaaa

SEQ ID NO: 23909 - DNA, 80 bp, synthetic construct; identical to SEQ ID NO: 9888
  source 1..80: mol_type = other DNA

SEQ ID NO: 23910 - DNA, 80 bp, synthetic construct
  source 1..80: mol_type = other DNA
ggcatttcccctgctattgtgaagaacatccttgtttcccctttgctttctgccatgattctaagtttcctgaggcctcc

SEQ ID NO: 23911 - DNA, 80 bp, synthetic construct
  source 1..80: mol_type = other DNA
gcaacctccgtctcctgggttcaagcgattcttctgcctcagcctcctgagtagctcagactacaggtgtgcaccaccgt

SEQ ID NO: 23912 - DNA, 80 bp, synthetic construct
  source 1..80: mol_type = other DNA
tgtgagaacagactaataccatgagaatatctgcaaacacaaagaaagcccaggtgaagaatgggctgagccttgctaga

SEQ ID NO: 23913 - DNA, 80 bp, synthetic construct; identical to SEQ ID NO: 9889
  source 1..80: mol_type = other DNA

SEQ ID NO: 23914 - DNA, 80 bp, synthetic construct
  source 1..80: mol_type = other DNA
gccaccgtttaaatgaaacgtttcagacttcaggattgaactcaaactcctcagcttagtaagcaaggtcctagggaagc

SEQ ID NO: 23915 - DNA, 80 bp, synthetic construct
  source 1..80: mol_type = other DNA
gttattatattctcatagcagcctctatttcttcaccagagcacctcccacaaatttaacacaataacctttagcgtcta

SEQ ID NO: 23916 - DNA, 80 bp, synthetic construct
  source 1..80: mol_type = other DNA
aacatgggagctgaacagatgaatgaagacttctctcaaatattttgtcttgggaaaatgcccctcatccacccattcct

SEQ ID NO: 23917 - DNA, 80 bp, synthetic construct
  source 1..80: mol_type = other DNA
ctcaggccctggcttctgagctcaccatcccgtctctagttccaaagcagtttttaccaagggaactcaatttctgggta

SEQ ID NO: 23918 - DNA, 80 bp, synthetic construct; identical to SEQ ID NO: 9890
  source 1..80: mol_type = other DNA

SEQ ID NO: 23919 - DNA, 80 bp, synthetic construct
  source 1..80: mol_type = other DNA
aggccaaatccagtctaacacctgtttttgtacagcccatgggtaagaatgttatatgcttatcttttgcatttgtaaat

SEQ ID NO: 23920 - DNA, 80 bp, synthetic construct
  source 1..80: mol_type = other DNA
tccaccaaaatttcactggaacaccgtcaggcccattcatacacgtatcattcatgtattattcgtactactatggcaga

SEQ ID NO: 23921 - DNA, 80 bp, synthetic construct; identical to SEQ ID NO: 9891
  source 1..80: mol_type = other DNA

SEQ ID NO: 23922 - DNA, 80 bp, synthetic construct
  source 1..80: mol_type = other DNA
gcagagacctgcacaataaaaaggagagagagatggatatatagtgggtagaatttcaggtagtgagaataccaagtaca

SEQ ID NO: 23923 - DNA, 80 bp, synthetic construct
  source 1..80: mol_type = other DNA
ggctctggtgtcagcagatctgtgtttggatcccagctgtgcaaaaaagatttgctcttaccactgcatctccctaagcc

SEQ ID NO: 23924 - DNA, 80 bp, synthetic construct
  source 1..80: mol_type = other DNA
tgttctctgcttttgattttaagcccccatgggttggctaccatttagcttgaattttctgggacagacttgattttata

SEQ ID NO: 23925 - DNA, 80 bp, synthetic construct
  source 1..80: mol_type = other DNA
aatgaagatttggtgagaaaagcttgacctctgggcgtgcaggcaggaatgggtacaagttccctagacttgctttgagg

SEQ ID NO: 23926 - DNA, 80 bp, synthetic construct; identical to SEQ ID NO: 9892
  source 1..80: mol_type = other DNA

SEQ ID NO: 23927 - DNA, 80 bp, synthetic construct
  source 1..80: mol_type = other DNA
tctaaatcagactctatttctgattgcctcaacgttgtatgctgatgaactttgattcatgaagtggcctctctaggtga

SEQ ID NO: 23928 - DNA, 80 bp, synthetic construct
  source 1..80: mol_type = other DNA
ccattgacacggccttctacagacttattttatggaaagctgcgaatgttttcaccaggtttcatctgtttttattctct

SEQ ID NO: 23929 - DNA, 80 bp, synthetic construct; identical to SEQ ID NO: 9893
  source 1..80: mol_type = other DNA

SEQ ID NO: 23930 - DNA, 80 bp, synthetic construct
  source 1..80: mol_type = other DNA
cagagaagcagtgctgaattcccaagctggcaattttgccggcagataagtgagttcccagtcctttggaaagtttctaa

SEQ ID NO: 23931 - DNA, 80 bp, synthetic construct
  source 1..80: mol_type = other DNA
ggctgatgggctcatgaaaggcatattctgaacaccagaggttgatgcagaggaaatgtgtttatatgagagcatactgt

SEQ ID NO: 23932 - DNA, 80 bp, synthetic construct
  source 1..80: mol_type = other DNA
tttgaagtgaaacagagacacatttttgagactaagaaatgaatgaagcagagagctaggatgtgctgaaaagcaaatcc

SEQ ID NO: 23933 - DNA, 80 bp, synthetic construct; identical to SEQ ID NO: 9894
  source 1..80: mol_type = other DNA

SEQ ID NO: 23934 - DNA, 80 bp, synthetic construct
  source 1..80: mol_type = other DNA
cccaacccccagggccacagaccatccaggaggaggtgagtggtgggtgagtgagcgaagctacatctgtatttacagcc

SEQ ID NO: 23935 - DNA, 80 bp, synthetic construct
  source 1..80: mol_type = other DNA
tctcccaccacccccagatgggaccatctagttgcaggaaaacaagctcagggcttccaccaattctacattatggtgaa

SEQ ID NO: 23936 - DNA, 80 bp, synthetic construct
  source 1..80: mol_type = other DNA
accgctgctctggagaacttcttagatgcctgtcagcccatgcatggcacccgcctcgggagcccaagacttcacccaca

SEQ ID NO: 23937 - DNA, 80 bp, synthetic construct; identical to SEQ ID NO: 9895
  source 1..80: mol_type = other DNA

SEQ ID NO: 23938 - DNA, 80 bp, synthetic construct
  source 1..80: mol_type = other DNA
tgcatgggaagggatgggaccggtaagtctacacggaggagatctgtggccatgacgataaaggattagtaaaggtagaa

SEQ ID NO: 23939 - DNA, 80 bp, synthetic construct
  source 1..80: mol_type = other DNA
gatgtgagacaaaagcacatgcttggtgaatctctgctctcgttctcacatgagctgacagttgatgaatcttttctggc

SEQ ID NO: 23940 - DNA, 80 bp, synthetic construct
  source 1..80: mol_type = other DNA
gggctctttcctctaggtaaagaggaagaagagtgaatcttgatctacactaactgatagggtttggctgtgtccccacc

SEQ ID NO: 23941 - DNA, 80 bp, synthetic construct
  source 1..80: mol_type = other DNA
cctgctgctgttcatgtaagacatgacttgcccctccttgcctttcaccataattgtgaggcctccccagccatctggag

SEQ ID NO: 23942 - DNA, 80 bp, synthetic construct; identical to SEQ ID NO: 9896
  source 1..80: mol_type = other DNA

SEQ ID NO: 23943 - DNA, 80 bp, synthetic construct
  source 1..80: mol_type = other DNA
ggttccactgcagcaaagcaaaaactgcctcaaaagccacagagatggttgatttcatgtccacgtttcagagtcaaagg

SEQ ID NO: 23944 - DNA, 80 bp, synthetic construct
  source 1..80: mol_type = other DNA
agggagaaagtctaaaaagcaatgtcagcaggagaatgcacactcttgaagaagtactagctatctgcactttgatgttc

SEQ ID NO: 23945 - DNA, 80 bp, synthetic construct; identical to SEQ ID NO: 9897
  source 1..80: mol_type = other DNA

SEQ ID NO: 23946 - DNA, 80 bp, synthetic construct
  source 1..80: mol_type = other DNA
cccatggcttatttaatttgaacttcaacaaaatgaaattcttatccacatgggaatgatgtgatagcaaatgttcagct

SEQ ID NO: 23947 - DNA, 80 bp, synthetic construct
  source 1..80: mol_type = other DNA
aagagcacccactacatgccagatttgaaaaactgtcaactcatcagattgagagctgtttcatttgcttcagatgccgg

SEQ ID NO: 23948 - DNA, 80 bp, synthetic construct
  source 1..80: mol_type = other DNA
tgattcactctgaggcttcagaacagtattaaattacttgtccattattctgtgatttatgctggggttgggctgagagg

SEQ ID NO: 23949 - DNA, 80 bp, synthetic construct
  source 1..80: mol_type = other DNA
tgccagggatttttgctactgtgtcggttttatgcatatgtccacatgattcttatattaagccacaggaaaaaaaatcc

SEQ ID NO: 23950 - DNA, 80 bp, synthetic construct; identical to SEQ ID NO: 9898
  source 1..80: mol_type = other DNA

SEQ ID NO: 23951 - DNA, 80 bp, synthetic construct
  source 1..80: mol_type = other DNA
gtttgactgggtgtcagattagagccccgttattacagtccatgcagaaaacccagataccaggcaacactttaatttgg

SEQ ID NO: 23952 - DNA, 80 bp, synthetic construct
  source 1..80: mol_type = other DNA
tatgccatcctgctgcccaatggcggggagtcagaggggctgacgcttatgccacaggttcagcagtggtcagctctatg

SEQ ID NO: 23953 - DNA, 80 bp, synthetic construct; identical to SEQ ID NO: 9899
  source 1..80: mol_type = other DNA

SEQ ID NO: 23954 - DNA, 80 bp, synthetic construct
  source 1..80: mol_type = other DNA
gacacgcgcctatagtcccagctgctcgggaggctgaggcaggagaatcgcttgaacccgggaggtggaggttgcagtga

SEQ ID NO: 23955 - DNA, 80 bp, synthetic construct
  source 1..80: mol_type = other DNA
gccaggggaacacctcctaggaccacttcgtcatatccacttcccaccagctctgctctcctctccctgctgtcagtgca

SEQ ID NO: 23956 - DNA, 80 bp, synthetic construct
  source 1..80: mol_type = other DNA
ctggatccccaaaacaggaaggagttcctttcttctctcttcttacttctttctttccaaattggaaagactgggcattt

SEQ ID NO: 23957 - DNA, 80 bp, synthetic construct
  source 1..80: mol_type = other DNA
gcctctgctgagtttttgctcagtgatggcttaaatgtccatcctgccttgtttccttacctcttaggcagagagaaaca

SEQ ID NO: 23958 - DNA, 80 bp, synthetic construct; identical to SEQ ID NO: 9900
  source 1..80: mol_type = other DNA

SEQ ID NO: 23959 - DNA, 80 bp, synthetic construct
  source 1..80: mol_type = other DNA
ccacccaaaatcctacaagaatgggtatctcacttccttctaactgcttctaaaggcacaatctcattttgttcagtatc

SEQ ID NO: 23960 - DNA, 80 bp, synthetic construct
  source 1..80: mol_type = other DNA
taggcttctgcggggcatttgcagattaaaggcacactgtgatgtgacttcattttgttagtttctgtgttgatgctcta

SEQ ID NO: 23961 - DNA, 80 bp, synthetic construct; identical to SEQ ID NO: 9901
  source 1..80: mol_type = other DNA

SEQ ID NO: 23962 - DNA, 80 bp, synthetic construct
  source 1..80: mol_type = other DNA
caccatgcctggctaacttttgttttttgtttttttgttttttttagtaaagatgggattttgccatgttggccaggctg

SEQ ID NO: 23963 - DNA, 80 bp, synthetic construct
  source 1..80: mol_type = other DNA
actgtaaaactaaacattgcatcatgctttataatttgcaaggcatttcaaacctcataactgtttgacaatcctttcat

SEQ ID NO: 23964 - DNA, 80 bp, synthetic construct
  source 1..80: mol_type = other DNA
gaactcctggctagacccctaagtcaaagcaaaacccttcacaaagaacacaatagatgcatcctcattctaattccaac

SEQ ID NO: 23965 - DNA, 80 bp, synthetic construct; identical to SEQ ID NO: 9902
  source 1..80: mol_type = other DNA

SEQ ID NO: 23966 - DNA, 80 bp, synthetic construct
  source 1..80: mol_type = other DNA
tcaccactttctccagctctgcatcttgaacactctttccctggcataaaacaaaaacaattagcttctgtctttcttgg

SEQ ID NO: 23967 - DNA, 80 bp, synthetic construct
  source 1..80: mol_type = other DNA
aacatctttgagttaaatctagcaagatttactgaagggcaaggatgcagggagtccatgaacattccatgataggaacc

SEQ ID NO: 23968 - DNA, 80 bp, synthetic construct
  source 1..80: mol_type = other DNA
caggaattttgcagtgaaattagtcaaataaattggagcaggcctgtattgaacactgtctgatttggtaacataccctg

SEQ ID NO: 23969 - DNA, 80 bp, synthetic construct; identical to SEQ ID NO: 9903
  source 1..80: mol_type = other DNA

SEQ ID NO: 23970 - DNA, 80 bp, synthetic construct
  source 1..80: mol_type = other DNA
tgttcagatgctgttgagtattggtgtctctttaaggatccatataaaagatttctctctggtcatagtttcagaccaca

SEQ ID NO: 23971 - DNA, 80 bp, synthetic construct
  source 1..80: mol_type = other DNA
ggcttcctctctcaggtaaattgcatggcatggttttttgtattaaggacattctaaggttcatagtaacttgcttatct

SEQ ID NO: 23972 - DNA, 80 bp, synthetic construct
  source 1..80: mol_type = other DNA
agtaaaagtcaattgcaattcaaacaccagagaaagttatgcagttaatatttcaatgtattttctgtcagctattatta

SEQ ID NO: 23973 - DNA, 80 bp, synthetic construct
  source 1..80: mol_type = other DNA
ttttttatatttttagtagagatggtgtttcgccatgttggtcagactggtcttgaactcctgacctcaggtgatccacc

SEQ ID NO: 23974 - DNA, 80 bp, synthetic construct; identical to SEQ ID NO: 9904
  source 1..80: mol_type = other DNA

SEQ ID NO: 23975 - DNA, 80 bp, synthetic construct
  source 1..80: mol_type = other DNA
acagcataaaaagcatgcctatttcatcacaacctcattggcattattgtgttattacagttaaaaccttcgccattttg

SEQ ID NO: 23976 - DNA, 80 bp, synthetic construct
  source 1..80: mol_type = other DNA
atgtgaggctttcatacatatattaaatacgatgactattttcttatgtatttatggaaaatatgcttgtgtttccattt

SEQ ID NO: 23977 - DNA, 80 bp, synthetic construct
  source 1..80: mol_type = other DNA
ttagttaaaatctagaattaatcttggtgtattttgggcttctgttgcaggctcaaggcctaggcccatgacaatatatt

SEQ ID NO: 23978 - DNA, 80 bp, synthetic construct; identical to SEQ ID NO: 9905
  source 1..80: mol_type = other DNA

SEQ ID NO: 23979 - DNA, 80 bp, synthetic construct
  source 1..80: mol_type = other DNA
gtgattatttttgaagatgtttagctgagattcccagactcctgggaccagttccaggacggaggagcactgagatgggg

SEQ ID NO: 23980 - DNA, 80 bp, synthetic construct
  source 1..80: mol_type = other DNA
gctaatatatttccccttgggggaggggtaggatattctcatgttttagacttgggcacagacaccaagtccctggtctt

SEQ ID NO: 23981 - DNA, 80 bp, synthetic construct; identical to SEQ ID NO: 9906
  source 1..80: mol_type = other DNA

SEQ ID NO: 23982 - DNA, 80 bp, synthetic construct
  source 1..80: mol_type = other DNA
tcattcgcctggagctaatacttagcattttgcatttggttttatagaaaatgcataactgtccatagcttcacttcttc

SEQ ID NO: 23983 - DNA, 80 bp, synthetic construct
  source 1..80: mol_type = other DNA
atccctctaaaagcaacaacatatagaaatatcaaaatattgatttaacagtgaaggcctggttcaggggaaagaggtgg

SEQ ID NO: 23984 - DNA, 80 bp, synthetic construct
  source 1..80: mol_type = other DNA
ttactttgctttgctatcactaaggattttaagtagattgatcttgcatcccagcttttctgggactgtgtccgtttatg

SEQ ID NO: 23985 - DNA, 80 bp, synthetic construct
  source 1..80: mol_type = other DNA
catctcagctcattgcaacccccacccaccaggttcaagcgattcttgcgtctcagcctcccgagtagctgggattacag

SEQ ID NO: 23986 - DNA, 80 bp, synthetic construct; identical to SEQ ID NO: 9907
  source 1..80: mol_type = other DNA

SEQ ID NO: 23987 - DNA, 80 bp, synthetic construct
  source 1..80: mol_type = other DNA
tgagtttggctatttcctaactaaacttcatttatggtcacagacatttgaatttcatataatgttcatgtgtcacaaaa

SEQ ID NO: 23988 - DNA, 80 bp, synthetic construct
  source 1..80: mol_type = other DNA
gggctggttctctgcatacattgggtatcatcatcatcaacaacatttacatttatatagcctgaacacacacatgaggt

SEQ ID NO: 23989 - DNA, 80 bp, synthetic construct
  source 1..80: mol_type = other DNA
atgctgttgctataataatgctattctccctcacttgcatttgccttctccaggtaggagatggggtctgctgcaagatg

SEQ ID NO: 23990 - DNA, 80 bp, synthetic construct; identical to SEQ ID NO: 9908
  source 1..80: mol_type = other DNA

SEQ ID NO: 23991 - DNA, 80 bp, synthetic construct
  source 1..80: mol_type = other DNA
gccttctcgttcatggttacagctcgggaagttacactatccccattttatggatgagtaactgtattttcagaatgcta

SEQ ID NO: 23992 - DNA, 80 bp, synthetic construct
  source 1..80: mol_type = other DNA
aaattgccattctaaaagggctttggaggtcattgtgtcaagctctctgtgtgccagggaataagaaactattgagcata

SEQ ID NO: 23993 - DNA, 80 bp, synthetic construct; identical to SEQ ID NO: 9909
  source 1..80: mol_type = other DNA

SEQ ID NO: 23994 - DNA, 80 bp, synthetic construct
  source 1..80: mol_type = other DNA
attttttaccttcaaactcaagttcacgttcagttgacaaagattttttgccagattaaactttagtgaggttcctgaac

SEQ ID NO: 23995 - DNA, 80 bp, synthetic construct
  source 1..80: mol_type = other DNA
caagaatcctgtgaggtcactttagccagaatccccccattacccgtgatgtttcctccttggaattttccatcctctta

SEQ ID NO: 23996 - DNA, 80 bp, synthetic construct
  source 1..80: mol_type = other DNA
gaggtcaggagatcgagaccatcttggctaacacggtgaaaccccgtttctactaaaaatacaaaaaattagccgggcgt

SEQ ID NO: 23997 - DNA, 80 bp, synthetic construct; identical to SEQ ID NO: 9910
  source 1..80: mol_type = other DNA

SEQ ID NO: 23998 - DNA, 80 bp, synthetic construct
  source 1..80: mol_type = other DNA
cattctttccttttagtccctggaaagaagttcaaagatttaaagctgctcttgaatttgggatcttaaagactacttgg

SEQ ID NO: 23999 - DNA, 80 bp, synthetic construct
  source 1..80: mol_type = other DNA
ataaaacgtcagaggagcccaggtgaaggctgggctctgccagaatttaaagagatggaaataaacatagagctctaaga

SEQ ID NO: 24000 - DNA, 80 bp, synthetic construct
  source 1..80: mol_type = other DNA
aaagaaagtttttacaaaaataatcaacgtatgaagtcctggtcacgtagattacatcatcatccctgagtggcagaagc

SEQ ID NO: 24001 - DNA, 80 bp, synthetic construct; identical to SEQ ID NO: 9911
  source 1..80: mol_type = other DNA

SEQ ID NO: 24002 - DNA, 80 bp, synthetic construct
  source 1..80: mol_type = other DNA
gcacctttctgctccctgcgggtctgactctcatattcctcttaatcctcatcctttgttcctggaataccaccaggccc

SEQ ID NO: 24003 - DNA, 80 bp, synthetic construct
  source 1..80: mol_type = other DNA
gcaggctgcttggagttgcaaagtatccctctcgcctgagctcttggggcacaaacttggtgggagaagggagtgaaaga

SEQ ID NO: 24004 - DNA, 80 bp, synthetic construct
  source 1..80: mol_type = other DNA
ctagagaaataacccttctcctaatatccctatagtgtgttaaacagtgtccctcagaaagatatgtactagtcctaacc

SEQ ID NO: 24005 - DNA, 80 bp, synthetic construct
  source 1..80: mol_type = other DNA
acatatgaggaaggagcttggagtccttctgcaagtcaaggagctccaggaaccaccagaactggaagaggcaagaatga

SEQ ID NO: 24006 - DNA, 80 bp, synthetic construct; identical to SEQ ID NO: 9912
  source 1..80: mol_type = other DNA

SEQ ID NO: 24007 - DNA, 80 bp, synthetic construct
  source 1..80: mol_type = other DNA
gatgatttccagtatcttaaaggctcgaccattgcctatggagaaacagggagtgaagagatgcaggcagactaggattt

SEQ ID NO: 24008 - DNA, 80 bp, synthetic construct
  source 1..80: mol_type = other DNA
agagggaactctagggctatgcacctgagaagaatattggccgttagccaagcattctttaattcaaagaaaaccaaaac

SEQ ID NO: 24009 - DNA, 80 bp, synthetic construct; identical to SEQ ID NO: 9913
  source 1..80: mol_type = other DNA

SEQ ID NO: 24010 - DNA, 80 bp, synthetic construct
  source 1..80: mol_type = other DNA
tgggtagaggccagagattctgctaaacatcctataatcacaaggcagaccccccaaaacaaagaattatcctgcccaaa

SEQ ID NO: 24011 - DNA, 80 bp, synthetic construct
  source 1..80: mol_type = other DNA
tatataagggtgtgagctgtgtatctcttcccaactccacattcggtaaaatcacgtcagtagcttaaagtggccatggt

SEQ ID NO: 24012 - DNA, 80 bp, synthetic construct
  source 1..80: mol_type = other DNA
ttctcctgcctccgcctcctgagtagctagaattacaggtgtgcactaccatgcttggctaatttttgtgtttttagtag

SEQ ID NO: 24013 - DNA, 80 bp, synthetic construct; identical to SEQ ID NO: 9914
  source 1..80: mol_type = other DNA

SEQ ID NO: 24014 - DNA, 80 bp, synthetic construct
  source 1..80: mol_type = other DNA
gtcatgcgtctaaatatctttttacacgattaaaaacatctgaatgaaaagtgaaaatcaatcctcctcccagatgtctt

SEQ ID NO: 24015 - DNA, 80 bp, synthetic construct
  source 1..80: mol_type = other DNA
gtgatcccaggtggaagcagagacacagacagtggtttcttcactgagatctgctgtcttactggatttttttttttttt

SEQ ID NO: 24016 - DNA, 80 bp, synthetic construct
  source 1..80: mol_type = other DNA
gggactacaggcgcccaccaccacgcccggctaattttttgtatttttagtatagacggggtttcaccgtgttaggcagg

SEQ ID NO: 24017 - DNA, 80 bp, synthetic construct
  source 1..80: mol_type = other DNA
gagtagggggaacagagaggaagacggagagagaaaacaaaacattttcaatgaaaggaagaattttacaaattttaaaa

SEQ ID NO: 24018 - DNA, 80 bp, synthetic construct; identical to SEQ ID NO: 9915
  source 1..80: mol_type = other DNA

SEQ ID NO: 24019 - DNA, 80 bp, synthetic construct
  source 1..80: mol_type = other DNA
cctacctctaccatatcctttggccagatttttctttccctaacccaaatagaggctctgtttttaggtcctgcacactt

SEQ ID NO: 24020 - DNA, 80 bp, synthetic construct
  source 1..80: mol_type = other DNA
aaacaaatcaccctctctttccccaaaccatctttccttccctgatagtgttccctgaagagagagtgatttgtcagaag

SEQ ID NO: 24021 - DNA, 80 bp, synthetic construct; identical to SEQ ID NO: 9916
  source 1..80: mol_type = other DNA

SEQ ID NO: 24022 - DNA, 80 bp, synthetic construct
  source 1..80: mol_type = other DNA
tgcagactgcttgctatgtcttgaatgaggtctgccctcttaaagtggtccatgaagtctttcatcattgccctttgtgg

SEQ ID NO: 24023 - DNA, 80 bp, synthetic construct
  source 1..80: mol_type = other DNA
tcccccactttgaaacagacacaaaaaaaatagcactccctcagaggctgagaataagacaaaggcaaccgcattcttta

SEQ ID NO: 24024 - DNA, 80 bp, synthetic construct
  source 1..80: mol_type = other DNA
atagctactgtcaacagagtagcgagggagtggagatttagtgctcactctcaaacccatcatatctgttgtgcttcaaa

SEQ ID NO: 24025 - DNA, 80 bp, synthetic construct; identical to SEQ ID NO: 9917
  source 1..80: mol_type = other DNA

SEQ ID NO: 24026 - DNA, 80 bp, synthetic construct
  source 1..80: mol_type = other DNA
tttaattaaaaccttgaagactcctggagcgttctctcctcttcaccaagggaggagacacagaatggccccagggtaat

SEQ ID NO: 24027 - DNA, 80 bp, synthetic construct
  source 1..80: mol_type = other DNA
ttttgtcacctgctctagctcctcactttgtggaggggaaaacagaggttcagagagtactgttattttttggagtcaga

SEQ ID NO: 24028 - DNA, 80 bp, synthetic construct
  source 1..80: mol_type = other DNA
cgaggtttcaccatgttggccaggctgctctcaaactcctgacctcaggtgatccacccacctcggcctcccaaagtgct

SEQ ID NO: 24029 - DNA, 80 bp, synthetic construct; identical to SEQ ID NO: 9918
  source 1..80: mol_type = other DNA

SEQ ID NO: 24030 - DNA, 80 bp, synthetic construct
  source 1..80: mol_type = other DNA
gaaaaaagaatggaaggaaatgctctaaaatattaatattgattaaaagccttgagatgatgggagcatgagaaattttt

SEQ ID NO: 24031 - DNA, 80 bp, synthetic construct
  source 1..80: mol_type = other DNA
caaggcaccttaagccatctcttttgttccctgttacaaaatatatggacacttaaaagtacatgtaaaaggacacataa

SEQ ID NO: 24032 - DNA, 80 bp, synthetic construct
  source 1..80: mol_type = other DNA
taccctctgaggtagcttaagaaacagtggctggttttaaaatgactacaaagcaaacctgacaataaaattcacttaaa

SEQ ID NO: 24033 - DNA, 80 bp, synthetic construct; identical to SEQ ID NO: 9919
  source 1..80: mol_type = other DNA

SEQ ID NO: 24034 - DNA, 80 bp, synthetic construct
  source 1..80: mol_type = other DNA
attttcagggacctgcctggaccagaagggaagaatttgaacttgaagacacttgagtttcttcttgaagatagaaaatt

SEQ ID NO: 24035 - DNA, 80 bp, synthetic construct
  source 1..80: mol_type = other DNA
tgagaccaaaatggggattccttaaaccctaaaacatgaaaacaaaaggaacatcaaatgggcaatacgccaatgctctt

SEQ ID NO: 24036 - DNA, 80 bp, synthetic construct
  source 1..80: mol_type = other DNA
gtgacacaagggcccagagctcactccggtgaggacagagctcagatccacatcacccatccacacgtggggcagaccag

SEQ ID NO: 24037 - DNA, 80 bp, synthetic construct
  source 1..80: mol_type = other DNA
acaccacaaaaggcagacaacaaacagaagtcacatggggaaacagagctgatagagtaacattaaattggctcttaaac

SEQ ID NO: 24038 - DNA, 80 bp, synthetic construct; identical to SEQ ID NO: 9920
  source 1..80: mol_type = other DNA

SEQ ID NO: 24039 - DNA, 80 bp, synthetic construct
  source 1..80: mol_type = other DNA
atgattcaaaaggacagtctggggacacgttaagagttggggcataaacagtagaagaggtatggtgttggttggtgggt

SEQ ID NO: 24040 - DNA, 80 bp, synthetic construct
  source 1..80: mol_type = other DNA
gtcaccaactacactgggttaaaggtttcagaattgggttggtagtctattttatgattcctttctggaagtccaaataa

SEQ ID NO: 24041 - DNA, 80 bp, synthetic construct
  source 1..80: mol_type = other DNA
cctagtgttgcagcaagcccctagacaggttctaatactttacaaatattaatttaatacttatcaagacattgggcacg

SEQ ID NO: 24042 - DNA, 80 bp, synthetic construct; identical to SEQ ID NO: 9921
  source 1..80: mol_type = other DNA

SEQ ID NO: 24043 - DNA, 80 bp, synthetic construct
  source 1..80: mol_type = other DNA
gtgctcactcagcttctctgagtgttccatagagtgaagtgagccgtgggaagagttctctgaaaaaacaaaagcaggca

SEQ ID NO: 24044 - DNA, 80 bp, synthetic construct
  source 1..80: mol_type = other DNA
ggcctatctggattaggggagatagaaactctgagagaagcatgttcaagctggacagagatagagagccccaggcatgc

SEQ ID NO: 24045 - DNA, 80 bp, synthetic construct
  source 1..80: mol_type = other DNA
ggaaagctgagcaaactcgatatgaatcatatatttttgtttttttcttgatattttgccagcaggatgggatttatcat

SEQ ID NO: 24046 - DNA, 80 bp, synthetic construct; identical to SEQ ID NO: 9922
  source 1..80: mol_type = other DNA

SEQ ID NO: 24047 - DNA, 80 bp, synthetic construct
  source 1..80: mol_type = other DNA
taaaatctcttaattttccagtttagcaaggattaagtgatgtgtctagcattacctaacaaggtggtggtagaacaaga

SEQ ID NO: 24048 - DNA, 80 bp, synthetic construct
  source 1..80: mol_type = other DNA
gtggaaggactatagctggacaatagaggctaccacatttggaggtgagtttgttgatgaaaaagccaagttctataaaa

SEQ ID NO: 24049 - DNA, 80 bp, synthetic construct
  source 1..80: mol_type = other DNA
gattctgtctggaaaggcaggacaacttgaagtgggggcttgcaggtcagaggtagattcaaagattttctgattggcaa

SEQ ID NO: 24050 - DNA, 80 bp, synthetic construct; identical to SEQ ID NO: 9923
  source 1..80: mol_type = other DNA

SEQ ID NO: 24051 - DNA, 80 bp, synthetic construct
  source 1..80: mol_type = other DNA
tgatgctacactagagtcaggctggaagttagtatcttattactacaaagagtctgttttgtcagccttcaggtctctgt

SEQ ID NO: 24052 - DNA, 80 bp, synthetic construct
  source 1..80: mol_type = other DNA
gtggctcagaattttgtttttggtttaccagttcatccctcacacttggcccagcaagctcagcaccattcagtctctct

SEQ ID NO: 24053 - DNA, 80 bp, synthetic construct
  source 1..80: mol_type = other DNA
ctggctaaatccttaaatctttgcacccacttgacttgccaattctccaatttaaacgatgttttcctgtaatgattcct

SEQ ID NO: 24054 - DNA, 80 bp, synthetic construct; identical to SEQ ID NO: 9924
  source 1..80: mol_type = other DNA

SEQ ID NO: 24055 - DNA, 80 bp, synthetic construct
  source 1..80: mol_type = other DNA
ttcggtgttcataagtaaggttttgttggatgacaggcatgttcattcatttacgtatggtctatggccctttcgtgtta

SEQ ID NO: 24056 - DNA, 80 bp, synthetic construct
  source 1..80: mol_type = other DNA
tgaatttctccaaactggcaacaaagacagcaaaactcatggcccagaatctaacctggtcccctcagcaggttttctag

SEQ ID NO: 24057 - DNA, 80 bp, synthetic construct; identical to SEQ ID NO: 9925
  source 1..80: mol_type = other DNA

SEQ ID NO: 24058 - DNA, 80 bp, synthetic construct
  source 1..80: mol_type = other DNA
gttgggatattctgacatatttcactccagccaataaatataggtgatatttaatgacagtgggggccagcgcaatagta

SEQ ID NO: 24059 - DNA, 80 bp, synthetic construct
  source 1..80: mol_type = other DNA
tctcataaggagtgtgcaactaaatcccctgaatgtgcggtgcacgatagggttcacgcttctatgagaatttaatgcca

SEQ ID NO: 24060 - DNA, 80 bp, synthetic construct
  source 1..80: mol_type = other DNA
ggaggcctgtcataaatgaccaggattgaaaggggccttaaaaagttatcccactgctatagactaaatgttcaaaattc

SEQ ID NO: 24061 - DNA, 80 bp, synthetic construct
  source 1..80: mol_type = other DNA
gtgatcacctggcaagaaggtggccgtctacgagccaggaagaaggccctcaccagaaaccggccatgtgagcaccctga

SEQ ID NO: 24062 - DNA, 80 bp, synthetic construct; identical to SEQ ID NO: 9926
  source 1..80: mol_type = other DNA

SEQ ID NO: 24063 - DNA, 80 bp, synthetic construct
  source 1..80: mol_type = other DNA
tttctaatcactcttcatgtgctatggttccaagactcattttttcacaaaagctttcaacagggacaataagcagccaa

SEQ ID NO: 24064 - DNA, 80 bp, synthetic construct
  source 1..80: mol_type = other DNA
ttttcagtttggacccaaacagttttataaaaatggcaaagaagctggatacctctggtgtgaatcatgaggaaaagggc

SEQ ID NO: 24065 - DNA, 80 bp, synthetic construct
  source 1..80: mol_type = other DNA
gtatttgagagtgctcctaagtgaaaggtaaagaaaaatagcccctgccaaagagaggtaagtaggaacttggcatccct

SEQ ID NO: 24066 - DNA, 80 bp, synthetic construct; identical to SEQ ID NO: 9927
  source 1..80: mol_type = other DNA

SEQ ID NO: 24067 - DNA, 80 bp, synthetic construct
  source 1..80: mol_type = other DNA
ctcaccagcctttaaagcctccaagaagtcttgcagccatgcatctgctttcctttttttaactcagcagtccttaaact

SEQ ID NO: 24068 - DNA, 80 bp, synthetic construct
  source 1..80: mol_type = other DNA
ccttacttagattttcaagtttagtgacagttttgctgatgatatctgagggagggctgtggtttccccttaagccaggg

SEQ ID NO: 24069 - DNA, 80 bp, synthetic construct; identical to SEQ ID NO: 9928
  source 1..80: mol_type = other DNA

SEQ ID NO: 24070 - DNA, 80 bp, synthetic construct
  source 1..80: mol_type = other DNA
caatagtcaaggctcagcttctgctgcagtcaaaatatctgcagcattctacacagaaaatgaccttcctcttccaagca

SEQ ID NO: 24071 - DNA, 80 bp, synthetic construct
  source 1..80: mol_type = other DNA
tcatcctgtctcgtggctttaataccaagcacctgctagcaactcccacatttctttcttttttttttcaatctcagtag

SEQ ID NO: 24072 - DNA, 80 bp, synthetic construct
  source 1..80: mol_type = other DNA
tacacaggtaaaccacatttctattgctttgtctggaatgctctctccccagaaatccatgtggcttacttctttcatgt

SEQ ID NO: 24073 - DNA, 80 bp, synthetic construct; identical to SEQ ID NO: 9929
  source 1..80: mol_type = other DNA

SEQ ID NO: 24074 - DNA, 80 bp, synthetic construct
  source 1..80: mol_type = other DNA
gcttgttagtggcagagctgacatcagacacctggtcatttgttgagtctctcctaagttccaggcactgtaatgaaccg

SEQ ID NO: 24075 - DNA, 80 bp, synthetic construct
  source 1..80: mol_type = other DNA
atagccaccattccctcctgaggcataaatcttagacagaggacttctgcagcaggaaagaaatttacccttcacattta

SEQ ID NO: 24076 - DNA, 80 bp, synthetic construct
  source 1..80: mol_type = other DNA
ggtgcagtggcatgatcttggctcactgcaacctccacctgctgggttccagtgattcttgtgcctcagcctctcaagta

SEQ ID NO: 24077 - DNA, 80 bp, synthetic construct
  source 1..80: mol_type = other DNA
atgcccagactatttccagtttttaatgcctgtgccttatctgggtgaatagttgtttttttgtgtgtggttttttttct

SEQ ID NO: 24078 - DNA, 80 bp, synthetic construct; identical to SEQ ID NO: 9930
  source 1..80: mol_type = other DNA

SEQ ID NO: 24079 - DNA, 80 bp, synthetic construct
  source 1..80: mol_type = other DNA
tgatccctgaaacatctgtgacatgtgagtcaccttcacttggtgctttttatcaacagaacatatttacattttttttt

SEQ ID NO: 24080 - DNA, 80 bp, synthetic construct
  source 1..80: mol_type = other DNA
taatcttttgtagggatgagatctcactgtgttgcccaggctggtcttgaactcctggcctcaagtgaccttcccaatgc

SEQ ID NO: 24081 - DNA, 80 bp, synthetic construct
  source 1..80: mol_type = other DNA
gttcacttaattatcaggtcttccagtaggcctgtgaacccagaaaagagcatttagtccattcatgttggatataagta

SEQ ID NO: 24082 - DNA, 80 bp, synthetic construct; identical to SEQ ID NO: 9931
  source 1..80: mol_type = other DNA

SEQ ID NO: 24083 - DNA, 80 bp, synthetic construct
  source 1..80: mol_type = other DNA
tattatttctgctccacggctggcctgataaatctgaaattccactcacaccagccagcaaactcgattccaagcagcgg

SEQ ID NO: 24084 - DNA, 80 bp, synthetic construct
  source 1..80: mol_type = other DNA
ttacagctagagtctgggcatccgcatcaaatcatttctctgtaactagattctgcttctcaacaataattaaaaaaatg

SEQ ID NO: 24085 - DNA, 80 bp, synthetic construct; identical to SEQ ID NO: 9932
  source 1..80: mol_type = other DNA

SEQ ID NO: 24086 - DNA, 80 bp, synthetic construct
  source 1..80: mol_type = other DNA
tgataggcattatttgggtggatggtgtgggacagcacaaagggaaaggaggctacagagaagaactttctctggctctc

SEQ ID NO: 24087 - DNA, 80 bp, synthetic construct
  source 1..80: mol_type = other DNA
gtagagttttaaatccctggctttccgtgtgcttgtttgtttgctgttaacagttacatgaaatggttatgtcaaccatc

SEQ ID NO: 24088 - DNA, 80 bp, synthetic construct
  source 1..80: mol_type = other DNA
gctgttcttgtgatagtgagtgaactctcaggagatctggttgtttgaaggtgtgtggcacttcccccttcgctctatct

SEQ ID NO: 24089 - DNA, 80 bp, synthetic construct
  source 1..80: mol_type = other DNA
cagcagtgtgaaaacagactaatacaataaataaacaaagagacagacaaacaggttctttctctacggtatcaatgcca

SEQ ID NO: 24090 - DNA, 80 bp, synthetic construct; identical to SEQ ID NO: 9933
  source 1..80: mol_type = other DNA

SEQ ID NO: 24091 - DNA, 80 bp, synthetic construct
  source 1..80: mol_type = other DNA
cattttactctgcttccttggtttcaatcatccctggagttatttctacgtttcagggttccatgctgaagataaatgta

SEQ ID NO: 24092 - DNA, 80 bp, synthetic construct
  source 1..80: mol_type = other DNA
gaaacttctctctcttttcacctggcccctagccctgaacgatcgccctcctgttgaggagtctgtgatggcaacatctc

SEQ ID NO: 24093 - DNA, 80 bp, synthetic construct; identical to SEQ ID NO: 9934
  source 1..80: mol_type = other DNA

SEQ ID NO: 24094 - DNA, 80 bp, synthetic construct
  source 1..80: mol_type = other DNA
cctatttacatttcaatccccaaactaattgtttactcataagtgttctgtcatgattgtggtcattggtagctttctgt

SEQ ID NO: 24095 - DNA, 80 bp, synthetic construct
  source 1..80: mol_type = other DNA
tccatttttaattgtccaggtttatttgagatttaacataataaactacctcaatcccttttgcatttctcttcgggaaa

SEQ ID NO: 24096 - DNA, 80 bp, synthetic construct
  source 1..80: mol_type = other DNA
agccagggcgtatgtcacacaggtacacaagcacttcacacatctatatctctttcatgaagaaagtgaaaccttgttct

SEQ ID NO: 24097 - DNA, 80 bp, synthetic construct; identical to SEQ ID NO: 9935
  source 1..80: mol_type = other DNA

SEQ ID NO: 24098 - DNA, 80 bp, synthetic construct
  source 1..80: mol_type = other DNA
ggcatcaggactcagagaaagtgaggaggagctggggcagagttcacctccccctaccgttccccaggctcctttcccta

SEQ ID NO: 24099 - DNA, 80 bp, synthetic construct
  source 1..80: mol_type = other DNA
tgtcgcctctcgaaagtccagtttgctcaacaggtagaataatcctcacatcactactgaaagtttcacctatttccagt

SEQ ID NO: 24100 - DNA, 80 bp, synthetic construct
  source 1..80: mol_type = other DNA
gtagactgacagcatgttccatccactccaaatgatctggagaccgacaagaattctgtctgtgaccaaacattaatcag

SEQ ID NO: 24101 - DNA, 80 bp, synthetic construct
  source 1..80: mol_type = other DNA
tttagccagaatcccctactcttcatatctgattgaatttcccatccttcaccatcccccaggtcatgtctgattaccct

SEQ ID NO: 24102 - DNA, 80 bp, synthetic construct; identical to SEQ ID NO: 9936
  source 1..80: mol_type = other DNA

SEQ ID NO: 24103 - DNA, 80 bp, synthetic construct
  source 1..80: mol_type = other DNA
caagacctggagtatctatgctcttgcttgtgactttaaggatgctgttccctcttctcctccttcctacttggttacat

SEQ ID NO: 24104 - DNA, 80 bp, synthetic construct
  source 1..80: mol_type = other DNA
tccacctttctctaattgtttactttgggcaaatggtttaacctgtctgtgctgtggttcccttgttaaaaaatgaggat

SEQ ID NO: 24105 - DNA, 80 bp, synthetic construct; identical to SEQ ID NO: 9937
  source 1..80: mol_type = other DNA

SEQ ID NO: 24106 - DNA, 80 bp, synthetic construct
  source 1..80: mol_type = other DNA
ttctctgcagttttaatgtgccctccaaggcagtttattttaataggaggcttcaaatagtgcttgagctgcaaggaata

SEQ ID NO: 24107 - DNA, 80 bp, synthetic construct
  source 1..80: mol_type = other DNA
atttctactcaaagccattttattaagtcagggatggggagacccagaccctgctctggtgaggccgacatctctacagc

SEQ ID NO: 24108 - DNA, 80 bp, synthetic construct
  source 1..80: mol_type = other DNA
agggtttctactggcaggattaagggaaggacagcctggaaagatggggagggattatcagcagtgaataaagagagggg

SEQ ID NO: 24109 - DNA, 80 bp, synthetic construct; identical to SEQ ID NO: 9938
  source 1..80: mol_type = other DNA

SEQ ID NO: 24110 - DNA, 80 bp, synthetic construct
  source 1..80: mol_type = other DNA
acagaggactggccttataaacactctttcctgataagcatctgtagcccttaagccagttccagcagctcatagaaact

SEQ ID NO: 24111 - DNA, 80 bp, synthetic construct
  source 1..80: mol_type = other DNA
attgtgcatgtgcttgacccacctcataaatttgtatggccttcctccacacctggtgaatatgtacagtgatattcacc

SEQ ID NO: 24112 - DNA, 80 bp, synthetic construct
  source 1..80: mol_type = other DNA
catcctgatggtcttttagatgtcaaagctatgaggaaattacaccacacagccccccacttcttgtctgtgttgaccat

SEQ ID NO: 24113 - DNA, 80 bp, synthetic construct; identical to SEQ ID NO: 9939
  source 1..80: mol_type = other DNA

SEQ ID NO: 24114 - DNA, 80 bp, synthetic construct
  source 1..80: mol_type = other DNA
cttcccttgacccactcatctgcttcatagctatgaaaccccacttgtccttgctgtatcgggagcactatcttccctac

SEQ ID NO: 24115 - DNA, 80 bp, synthetic construct
  source 1..80: mol_type = other DNA
ctagttcctggttgggaaggcagcacacccatagtcctgtgatgactcttctagcaccaccgttgggctgggagacctgc

SEQ ID NO: 24116 - DNA, 80 bp, synthetic construct
  source 1..80: mol_type = other DNA
ctccagttccaagcaatcaaaccagccttttgtcagggagaggcctcatcttaggaaaccaatgtttctgatcaaaggtc

SEQ ID NO: 24117 - DNA, 80 bp, synthetic construct
  source 1..80: mol_type = other DNA
actcggtgctaccttcaagttgtcatcagtttgtcatttttttttttttgttgacaaattaaggtgagtgggcaggagtg

SEQ ID NO: 24118 - DNA, 80 bp, synthetic construct; identical to SEQ ID NO: 9940
  source 1..80: mol_type = other DNA

SEQ ID NO: 24119 - DNA, 80 bp, synthetic construct
  source 1..80: mol_type = other DNA
ctgtaatcccagctacttgggaggctgaggcaaaagaatcccttgaacctgggaggcggaggttgcagtgagctgagatt

SEQ ID NO: 24120 - DNA, 80 bp, synthetic construct
  source 1..80: mol_type = other DNA
gtggatgttattgctttagatgaggttaaatatttaagtttagctagctgacttgcaatagtaccaagtaactgatcaca

SEQ ID NO: 24121 - DNA, 80 bp, synthetic construct; identical to SEQ ID NO: 9941
  source 1..80: mol_type = other DNA

SEQ ID NO: 24122 - DNA, 80 bp, synthetic construct
  source 1..80: mol_type = other DNA
gttgccttccttctctctgctctccctgacaacaccattgaaagggcctcttcagtgtcactgacgacttcccaaatagc

SEQ ID NO: 24123 - DNA, 80 bp, synthetic construct
  source 1..80: mol_type = other DNA
tccacccatttatatttaaaacccctcctgggttgtcaaacaatacatgacaagggtccctggtctgctgcccgcactca

SEQ ID NO: 24124 - DNA, 80 bp, synthetic construct
  source 1..80: mol_type = other DNA
gggagagtgaagaaaagcagctcaggtttctgggttcattacttggctctccagtagacgttccagccttggaccaatga

SEQ ID NO: 24125 - DNA, 80 bp, synthetic construct
  source 1..80: mol_type = other DNA
ctggaagtccaaaatcaaggtggtggttccttcagagggctgtgagggaaggatccattccaggcccttctccctggttt

SEQ ID NO: 24126 - DNA, 80 bp, synthetic construct; identical to SEQ ID NO: 9942
  source 1..80: mol_type = other DNA

SEQ ID NO: 24127 - DNA, 80 bp, synthetic construct
  source 1..80: mol_type = other DNA
atagccaatggcttcacatctaacttaaaccgttctaaatgttagcagagtatttaaaacttcttacatgggcgatacag

SEQ ID NO: 24128 - DNA, 80 bp, synthetic construct
  source 1..80: mol_type = other DNA
agagcaaactgacaattgtgctatcatctggtcaagtaaaagaacaacatctcagacaagataatagcagacttatctgc

SEQ ID NO: 24129 - DNA, 80 bp, synthetic construct; identical to SEQ ID NO: 9943
  source 1..80: mol_type = other DNA

SEQ ID NO: 24130 - DNA, 80 bp, synthetic construct
  source 1..80: mol_type = other DNA
gtggttttgctattgcaaaggtagaaaagatatctgttttcttcctttctaaatcagggctagaaaagtaggcaaccttg

SEQ ID NO: 24131 - DNA, 80 bp, synthetic construct
  source 1..80: mol_type = other DNA
aggaaaagctgatggtcaggcacagtttatcccaggacactgatttcacactccatgtagaaggcaagatgaaggaggca

SEQ ID NO: 24132 - DNA, 80 bp, synthetic construct
  source 1..80: mol_type = other DNA
tctgaaattccactactggagactctttgggttgaaagaatatctatcctccaggtgaccccctcaagaattcaattgct

SEQ ID NO: 24133 - DNA, 80 bp, synthetic construct; identical to SEQ ID NO: 9944
  source 1..80: mol_type = other DNA

SEQ ID NO: 24134 - DNA, 80 bp, synthetic construct
  source 1..80: mol_type = other DNA
gggttcttctgaggctgcttttattattaaaacttaccaatcaaccaaccaacaaataaaaagcagtgtattagcctgtt

SEQ ID NO: 24135 - DNA, 80 bp, synthetic construct
  source 1..80: mol_type = other DNA
catggcagcggcaagagaaaataagaaagaagcaaaagtggaaagccctaaatccatcagatctcctgagacttattcac

SEQ ID NO: 24136 - DNA, 80 bp, synthetic construct
  source 1..80: mol_type = other DNA
acagcaaaaccatattaagcagctttgaaaaatcataactttacacagaacccagcttctctgtatgacctggtgccagc

SEQ ID NO: 24137 - DNA, 80 bp, synthetic construct
  source 1..80: mol_type = other DNA
tcccttttctacctggttaactaccattcttcattcaatactaaactcaagtctgccccttccaggaagccttcctgact

SEQ ID NO: 24138 - DNA, 80 bp, synthetic construct; identical to SEQ ID NO: 9945
  source 1..80: mol_type = other DNA

SEQ ID NO: 24139 - DNA, 80 bp, synthetic construct
  source 1..80: mol_type = other DNA
tatcaactttgaccctggcactccacttctgggaatctagcctaaggaaataatgtaaactatgaaaaaatgatcttcat

SEQ ID NO: 24140 - DNA, 80 bp, synthetic construct
  source 1..80: mol_type = other DNA
cactagaagaaactgtgtcaaatgtggaaaagaattatgataaaacattaaatgaaaatgacataaaacacatggacagg

SEQ ID NO: 24141 - DNA, 80 bp, synthetic construct; identical to SEQ ID NO: 9946
  source 1..80: mol_type = other DNA

SEQ ID NO: 24142 - DNA, 80 bp, synthetic construct
  source 1..80: mol_type = other DNA
tttataatatagaagtctttcttcaaacgtctatttgtaaagcatgtttacaacagttggtggcttaaatattccagaat

SEQ ID NO: 24143 - DNA, 80 bp, synthetic construct
  source 1..80: mol_type = other DNA
attcactagttgaggaaaaaaatcattgtcagactatgtgttgatgcctttcctttgctcaaacaccagtcctgctctcg

SEQ ID NO: 24144 - DNA, 80 bp, synthetic construct
  source 1..80: mol_type = other DNA
ttaatctgatttaggtcttttataaaagcaaaactgaccgtccaggattccctgagctctcacacagagtatttctgtta

SEQ ID NO: 24145 - DNA, 80 bp, synthetic construct
  source 1..80: mol_type = other DNA
gaactgcagggaagccaccactgttgcctaaaacttaagactcaccgaggcctgctggagcaggggatggggggagggag

SEQ ID NO: 24146 - DNA, 80 bp, synthetic construct; identical to SEQ ID NO: 9947
  source 1..80: mol_type = other DNA

SEQ ID NO: 24147 - DNA, 80 bp, synthetic construct
  source 1..80: mol_type = other DNA
aaaggtaattgataatctcaaactatgcatgtggttcacatttgcccacatgagtggtatggacgtgagtgtgtcaggtt

SEQ ID NO: 24148 - DNA, 80 bp, synthetic construct
  source 1..80: mol_type = other DNA
gtagctatccattatgttctaggtgctgtgctaagcaatttcactatgttgttatttcatcctcaccaacaatcctatat

SEQ ID NO: 24149 - DNA, 80 bp, synthetic construct
  source 1..80: mol_type = other DNA
gcattttcccaaaagctttccgatagatttaaatcaaatgttaccatttgcaaagttcttcttccccagaagtttaactg

SEQ ID NO: 24150 - DNA, 80 bp, synthetic construct; identical to SEQ ID NO: 9948
  source 1..80: mol_type = other DNA

SEQ ID NO: 24151 - DNA, 80 bp, synthetic construct
  source 1..80: mol_type = other DNA
atccactgaggtctttatgcttcacctggggagccaagattggaaagggctttgaagattcctaaagctgaatcttaaaa

SEQ ID NO: 24152 - DNA, 80 bp, synthetic construct
  source 1..80: mol_type = other DNA
gaagccctataccctatgtgatggtatttggaggtgggacccttgggaggtaattagattgagatgtggtcatgagagta

SEQ ID NO: 24153 - DNA, 80 bp, synthetic construct
  source 1..80: mol_type = other DNA
tattgttctcgtggtagtgaataagtctcaagagatctgatggttttataaacaggagctcccctgcacaagctctcttg

SEQ ID NO: 24154 - DNA, 80 bp, synthetic construct; identical to SEQ ID NO: 9949
  source 1..80: mol_type = other DNA

SEQ ID NO: 24155 - DNA, 80 bp, synthetic construct
  source 1..80: mol_type = other DNA
gcagcctgagcagactgagacagtatgctttctccactctagctagatgcaggcctctacctctgcagagatagtgcctg

SEQ ID NO: 24156 - DNA, 80 bp, synthetic construct
  source 1..80: mol_type = other DNA
tccaaaccacctgaaatctgcccactagttattagacttgcttctaggagcctggttgcagtttccaaaagagaaagatg

SEQ ID NO: 24157 - DNA, 80 bp, synthetic construct
  source 1..80: mol_type = other DNA
ccgcattttctagaccaccacggttctgttttgtaaaagatttctctcttgtccaattaaaacagaaaattctcttctgt

SEQ ID NO: 24158 - DNA, 80 bp, synthetic construct; identical to SEQ ID NO: 9950
  source 1..80: mol_type = other DNA

SEQ ID NO: 24159 - DNA, 80 bp, synthetic construct
  source 1..80: mol_type = other DNA
ggaccttcttgaaggggagatgggggtgggaggatgaatacttcaagttctatgaatcaaatatgaattgaactgtaatc

SEQ ID NO: 24160 - DNA, 80 bp, synthetic construct
  source 1..80: mol_type = other DNA
accatttaagcaagaagagatcttgtgtgtttaaagagagaaaagtttagcgtgctccattctcaatggcactgcaaagg

SEQ ID NO: 24161 - DNA, 80 bp, synthetic construct
  source 1..80: mol_type = other DNA
acaggcttaatttaaggagtcttcagatgaagaattggtaaattcagtaaagactgatcttactttatgcatcacaagcc

SEQ ID NO: 24162 - DNA, 80 bp, synthetic construct; identical to SEQ ID NO: 9951
  source 1..80: mol_type = other DNA

SEQ ID NO: 24163 - DNA, 80 bp, synthetic construct
  source 1..80: mol_type = other DNA
tgcttcagggttgcagccaaacttacgagctggagggaccatatggaggagttttcttggacagaattcagttgtaccac

SEQ ID NO: 24164 - DNA, 80 bp, synthetic construct
  source 1..80: mol_type = other DNA
ctctggcagagatgagattgcaaaaactgtttgctaaactagttcatgtgtgatctcaagcaattcaatgcaaatgactt

SEQ ID NO: 24165 - DNA, 80 bp, synthetic construct
  source 1..80: mol_type = other DNA
tatataggagccagtcattctttctaaagtagagaagatgcagggaaccaaattaaaaatgaaacctaagactgccatgg

SEQ ID NO: 24166 - DNA, 80 bp, synthetic construct; identical to SEQ ID NO: 9952
  source 1..80: mol_type = other DNA

SEQ ID NO: 24167 - DNA, 80 bp, synthetic construct
  source 1..80: mol_type = other DNA
ttcttcaagcagaggaatatgacaatgaacagacatacaatggcccacaacaggagttttacttgtttgaatctttcttg

SEQ ID NO: 24168 - DNA, 80 bp, synthetic construct
  source 1..80: mol_type = other DNA
cctagcacagattctaagaaatcataatccaaggcattttctgtccacttattaagcactgtctttcaaccacaacaatg

SEQ ID NO: 24169 - DNA, 80 bp, synthetic construct; identical to SEQ ID NO: 9953
  source 1..80: mol_type = other DNA

SEQ ID NO: 24170 - DNA, 80 bp, synthetic construct
  source 1..80: mol_type = other DNA
taaataggaagatattatgctttaaaggtatttcatgtcagttgcctttcttcgacacacaatgcaattagagtctgggc

SEQ ID NO: 24171 - DNA, 80 bp, synthetic construct
  source 1..80: mol_type = other DNA
tagatcgtggatatttctcctagcttctgccaagcccatcgtggagaaaataaaagttcctcctccttgcaaagaaagag

SEQ ID NO: 24172 - DNA, 80 bp, synthetic construct
  source 1..80: mol_type = other DNA
gggtctctaattctaagcaccagggagttttatggtagcctagggacttttgacatccaaactaccataaatgagaagaa

SEQ ID NO: 24173 - DNA, 80 bp, synthetic construct
  source 1..80: mol_type = other DNA
cttaagggtatcactaaaatgttatataaaccaccaggtatcaggaatctttctagattaatgctttgctttcttaatga

SEQ ID NO: 24174 - DNA, 80 bp, synthetic construct; identical to SEQ ID NO: 9954
  source 1..80: mol_type = other DNA

SEQ ID NO: 24175 - DNA, 80 bp, synthetic construct
  source 1..80: mol_type = other DNA
gaataacacatgttcatagttatatatgcagctttaagatttgggaaaaacttgggcattcattatgtcatagatatcgc

SEQ ID NO: 24176 - DNA, 80 bp, synthetic construct
  source 1..80: mol_type = other DNA
aagctgtttctaaactcaaaacagttcagatcaatcaggggaatcttgctgacatggaggagcctctgcttctggctcta

SEQ ID NO: 24177 - DNA, 80 bp, synthetic construct
  source 1..80: mol_type = other DNA
gtgaattagttaacctctttgatttcattgcttgaaatctctaaaactgaaaaaacagtacctgccctgtgcaattcaaa

SEQ ID NO: 24178 - DNA, 80 bp, synthetic construct; identical to SEQ ID NO: 9955
  source 1..80: mol_type = other DNA

SEQ ID NO: 24179 - DNA, 80 bp, synthetic construct
  source 1..80: mol_type = other DNA
aagaaaattgcacaaatcccatgcacatagtaactggtggagacaggatgtgggtccggattcatctcttagggttgggt

SEQ ID NO: 24180 - DNA, 80 bp, synthetic construct
  source 1..80: mol_type = other DNA
cttgtagagtacagggttagtgggaatgcaagtattatggagtgaattgtgtccctctcctgccaaattcataagttgaa

SEQ ID NO: 24181 - DNA, 80 bp, synthetic construct; identical to SEQ ID NO: 9956
  source 1..80: mol_type = other DNA

SEQ ID NO: 24182 - DNA, 80 bp, synthetic construct
  source 1..80: mol_type = other DNA
gcaggcgaagagaggatgagaaagatgcaaaagcagaaccccctgataaaaccatcagatctcatgagacttatttacta

SEQ ID NO: 24183 - DNA, 80 bp, synthetic construct
  source 1..80: mol_type = other DNA
gaacttctaacctctagaacagaaatctctcttagttacacaacctcatctatggttgttatggaagcctgagcagacat

SEQ ID NO: 24184 - DNA, 80 bp, synthetic construct; identical to SEQ ID NO: 9957
  source 1..80: mol_type = other DNA

SEQ ID NO: 24185 - DNA, 80 bp, synthetic construct
  source 1..80: mol_type = other DNA
gcttacattagaaaagaatacaattctcaaatcaacaatctatgctcccaattcaaaaaactagaaaaagaagagcacaa

SEQ ID NO: 24186 - DNA, 80 bp, synthetic construct
  source 1..80: mol_type = other DNA
agagaaaatgcaaattaccaatatgaggaaggaaacaagggttgctatggagcattcaaccatcaaaagcgtaataaggg

SEQ ID NO: 24187 - DNA, 80 bp, synthetic construct
  source 1..80: mol_type = other DNA
aaaagaaatctccaggaccagatggctttattgaaaaattccaccaaacatataaagaattaataccaattatatacaaa

SEQ ID NO: 24188 - DNA, 80 bp, synthetic construct
  source 1..80: mol_type = other DNA
ctgcaccctctgcctcccggttcaagtgattctcctgcctcaccctctcgaatagctaggattagtgacacactgcggtg

SEQ ID NO: 24189 - DNA, 80 bp, synthetic construct; identical to SEQ ID NO: 9958
  source 1..80: mol_type = other DNA

SEQ ID NO: 24190 - DNA, 80 bp, synthetic construct
  source 1..80: mol_type = other DNA
tatagctaacactgtatataatagtaaaagactgactactttccttctgagatttaaagcaagatgtccacactaacgac

SEQ ID NO: 24191 - DNA, 80 bp, synthetic construct
  source 1..80: mol_type = other DNA
ctattttcagagggcatagttgtctgtatagaaaatatatgattaatcaaaatactcctacaactaataagtgaattcag

SEQ ID NO: 24192 - DNA, 80 bp, synthetic construct
  source 1..80: mol_type = other DNA
acttaggcttaaatctaacaaaaccggtacagaatttgtgtgctgaaaactactaaatgctgatgatgcaaatcaaagaa

SEQ ID NO: 24193 - DNA, 80 bp, synthetic construct; identical to SEQ ID NO: 9959
  source 1..80: mol_type = other DNA

SEQ ID NO: 24194 - DNA, 80 bp, synthetic construct
  source 1..80: mol_type = other DNA
ctcttgagggagaatggctctgctgacactttgatttttaatttctggcctttagaactctggataatacatttctattg

SEQ ID NO: 24195 - DNA, 80 bp, synthetic construct
  source 1..80: mol_type = other DNA
tgtattttttttttttaattatactttaagttctagggtacatgtgagggttctatcatgttggccagactggtcacgaa

SEQ ID NO: 24196 - DNA, 80 bp, synthetic construct; identical to SEQ ID NO: 9960
  source 1..80: mol_type = other DNA

SEQ ID NO: 24197 - DNA, 80 bp, synthetic construct
  source 1..80: mol_type = other DNA
cagtaatcaagacatgtggtgttgggggaggaatatacacatagatcaatggaatgaaatgagaacacagaaacagacac

SEQ ID NO: 24198 - DNA, 80 bp, synthetic construct
  source 1..80: mol_type = other DNA
aagaaaagaaagataaagaaaaatggagaagaaacaaatgaccttaggtcagaatttttagttaataaaagctaactcaa

SEQ ID NO: 24199 - DNA, 80 bp, synthetic construct
  source 1..80: mol_type = other DNA
aaaaacttttgctctgcaaaaagatcctgtttataggatgaaaagataagctgcagactgggagaaaatatttacaaacc

SEQ ID NO: 24200 - DNA, 80 bp, synthetic construct
  source 1..80: mol_type = other DNA
acagctggaaaataagcacacgaaagatgttaaatatcattaactattaggaaaacgcaaattacaaccacactgagcta

SEQ ID NO: 24201 - DNA, 80 bp, synthetic construct; identical to SEQ ID NO: 9961
  source 1..80: mol_type = other DNA

SEQ ID NO: 24202 - DNA, 80 bp, synthetic construct
  source 1..80: mol_type = other DNA
tctccagaaaatgtatggtgagtaagaaaagccaagttcaacaggttttatgccttacgactccatttgtatagcatgtt

SEQ ID NO: 24203 - DNA, 80 bp, synthetic construct
  source 1..80: mol_type = other DNA
tcccttctctactaaaaaatacaaaattagccgggcgtggtggtataggcctgtaataccaactacttgggaggctgagg

SEQ ID NO: 24204 - DNA, 80 bp, synthetic construct
  source 1..80: mol_type = other DNA
caatatcatggttgtgatatcacacttatgttttcaagatattactgttagtggaaattgtgtaaaaagggaaatgaaat

SEQ ID NO: 24205 - DNA, 80 bp, synthetic construct; identical to SEQ ID NO: 9962
  source 1..80: mol_type = other DNA

SEQ ID NO: 24206 - DNA, 80 bp, synthetic construct
  source 1..80: mol_type = other DNA
caagttattgtgaagtctgtgcctaggggcacagaacatgactgtacatcaacacatagtaactttttgccaatataaac

SEQ ID NO: 24207 - DNA, 80 bp, synthetic construct
  source 1..80: mol_type = other DNA
acagcttcgagtgtcagggaacttgtttgtggcaatgaccacagggcaaggatgatggagtagggtgggggtggggggag

SEQ ID NO: 24208 - DNA, 80 bp, synthetic construct
  source 1..80: mol_type = other DNA
tacagtttctctgttctaacaccatctgaaatgggctgtagaggatctgcctatttgggatcagaagactgggactgaac

SEQ ID NO: 24209 - DNA, 80 bp, synthetic construct; identical to SEQ ID NO: 9963
  source 1..80: mol_type = other DNA

SEQ ID NO: 24210 - DNA, 80 bp, synthetic construct
  source 1..80: mol_type = other DNA
actccccagaaaaggattcggatcttgcatggaggtcggcatcactcacacttctgggtcacctgagggtagcttcggca

SEQ ID NO: 24211 - DNA, 80 bp, synthetic construct
  source 1..80: mol_type = other DNA
ttaaacggaatgtatctcagaacctcatgcatttctttctttcatatatctccttgccacattccactaaggatttgagc

SEQ ID NO: 24212 - DNA, 80 bp, synthetic construct; identical to SEQ ID NO: 9964
  source 1..80: mol_type = other DNA

SEQ ID NO: 24213 - DNA, 80 bp, synthetic construct
  source 1..80: mol_type = other DNA
atccacatatcctcccagagtaacaatgccaccacagttctaggaaacctagatcaaatgtgctgggtcttgacgttcaa

SEQ ID NO: 24214 - DNA, 80 bp, synthetic construct
  source 1..80: mol_type = other DNA
tctattgcaatttcagtacctggtggattctcaaacattcatctcctcagtaagtaactattaagcatttactatgtgcc

SEQ ID NO: 24215 - DNA, 80 bp, synthetic construct
  source 1..80: mol_type = other DNA
agtgagttctcatgagctctggttgtttaaaagtgtgtgacacctacttcctacgatctgtctcttgcttctgctctggc

SEQ ID NO: 24216 - DNA, 80 bp, synthetic construct; identical to SEQ ID NO: 9965
  source 1..80: mol_type = other DNA

SEQ ID NO: 24217 - DNA, 80 bp, synthetic construct
  source 1..80: mol_type = other DNA
ataagaactaaacagctagggaaagagtattatgaatagaaagaagagcatgtacaaatcccctaagtcagagaggtgtt

SEQ ID NO: 24218 - DNA, 80 bp, synthetic construct
  source 1..80: mol_type = other DNA
gaagtggcacacttcattaagggcctggaaagctttgccaaggatttgtgttttatcctaaaataaataggcagatattg

SEQ ID NO: 24219 - DNA, 80 bp, synthetic construct
  source 1..80: mol_type = other DNA
tcttgaatgaacagtaggtcagtaccagaaaagaaaagatgaccacagcgcgtgattctgaaaaaacaatccaattgcct

SEQ ID NO: 24220 - DNA, 80 bp, synthetic construct; identical to SEQ ID NO: 9966
  source 1..80: mol_type = other DNA

SEQ ID NO: 24221 - DNA, 80 bp, synthetic construct
  source 1..80: mol_type = other DNA
ttcaggaaagcccctttcatataaacagaaacttttcttcatggaattcaattagtctctgggcctcagttttgctatcc

SEQ ID NO: 24222 - DNA, 80 bp, synthetic construct
  source 1..80: mol_type = other DNA
tgagaatttgtattttgaaccacttgcttggatgacctctcaagttccttctgtcttcaaaagtctaggacactgctttg

SEQ ID NO: 24223 - DNA, 80 bp, synthetic construct
  source 1..80: mol_type = other DNA
tgagaagttctagtctaggactctacctttcaaatatgcaccttatttcctatagttcaggaaaacttggccattggaga

SEQ ID NO: 24224 - DNA, 80 bp, synthetic construct; identical to SEQ ID NO: 9967
  source 1..80: mol_type = other DNA

SEQ ID NO: 24225 - DNA, 80 bp, synthetic construct
  source 1..80: mol_type = other DNA
gttctgcagtttctctcctgtctcagactcaactctcacctattcagctcttctttaaaaaaagaaaaacaggcaaatca

SEQ ID NO: 24226 - DNA, 80 bp, synthetic construct
  source 1..80: mol_type = other DNA
tccaccaacttttatttagcacctacatagtttggtaccccaagtatcatactatgtgagattaaatccaacctgcctct

SEQ ID NO: 24227 - DNA, 80 bp, synthetic construct
  source 1..80: mol_type = other DNA
aaagagataaaatggtatgggggaaagccaaagaagataatctttttggctggggaaaaataataatggtttcttggggg

SEQ ID NO: 24228 - DNA, 80 bp, synthetic construct
  source 1..80: mol_type = other DNA
gcaaactggttaccacatatagtgtgtggacatctgaacataacaaagttgacttgagtggcccctgcatgaagacaagt

SEQ ID NO: 24229 - DNA, 80 bp, synthetic construct; identical to SEQ ID NO: 9968
  source 1..80: mol_type = other DNA

SEQ ID NO: 24230 - DNA, 80 bp, synthetic construct
  source 1..80: mol_type = other DNA
cttagaccctctttcctgagctggctcagatcaatcaggttagggaggggaggaaatgggcatactataacaatcgaaat

SEQ ID NO: 24231 - DNA, 80 bp, synthetic construct
  source 1..80: mol_type = other DNA
ctgggtatatacctgagggattacaaaacatgctgctataaagacacatgcacacgtatgtttattgtggcactattcac

SEQ ID NO: 24232 - DNA, 80 bp, synthetic construct
  source 1..80: mol_type = other DNA
aaactatcgcaaggacaaaaaaccaaacaccgcatattctcactcataggtgggaattgaacaatgagaacacatggaca

SEQ ID NO: 24233 - DNA, 80 bp, synthetic construct; identical to SEQ ID NO: 9969
  source 1..80: mol_type = other DNA

SEQ ID NO: 24234 - DNA, 80 bp, synthetic construct
  source 1..80: mol_type = other DNA
atttatagaagtttatacccctagcaaccagatatgctcagtttgtctccgacacagatggaagaccttaaaaaaaaaca

SEQ ID NO: 24235 - DNA, 80 bp, synthetic construct
  source 1..80: mol_type = other DNA
cctaggaatatctcataaatattcagtgtgtttagatttcactggctctgggtgcaaggactccaggccaagcacccaat

SEQ ID NO: 24236 - DNA, 80 bp, synthetic construct; identical to SEQ ID NO: 9970
  source 1..80: mol_type = other DNA

SEQ ID NO: 24237 - DNA, 80 bp, synthetic construct
  source 1..80: mol_type = other DNA
aaagtcagaaagtgtgtattcagttgttttcaacaggaaacaaacttggcttctttcatataagacccaatggtcagctt

SEQ ID NO: 24238 - DNA, 80 bp, synthetic construct
  source 1..80: mol_type = other DNA
ggccctagagaagttgcatggtgacttggtggaatggaccagggcccagcaattccttctccagccaggctttttccgcc

SEQ ID NO: 24239 - DNA, 80 bp, synthetic construct
  source 1..80: mol_type = other DNA
tcttggttttcctcctacctcatcatcctttctttaatcacatttactagttccttctcatctccccaagatgctaatat

SEQ ID NO: 24240 - DNA, 80 bp, synthetic construct; identical to SEQ ID NO: 9971
  source 1..80: mol_type = other DNA

SEQ ID NO: 24241 - DNA, 80 bp, synthetic construct
  source 1..80: mol_type = other DNA
aaaaacaccactccttaccatctgcccttccagcatctgatacaagttgtctttttcttgcttagtttcttgaaaatatt

SEQ ID NO: 24242 - DNA, 80 bp, synthetic construct
  source 1..80: mol_type = other DNA
tccatttctctaagagtataagccaaagtccttatgatgtttccaagacgcttacagcctgccctgaagcctctttgacc

SEQ ID NO: 24243 - DNA, 80 bp, synthetic construct
  source 1..80: mol_type = other DNA
acctccttcaattctttgttcaaatttctctgtcacacaaagctttcctgaccaccctttcaaaaattgcaccacaccac

SEQ ID NO: 24244 - DNA, 80 bp, synthetic construct; identical to SEQ ID NO: 9972
  source 1..80: mol_type = other DNA

SEQ ID NO: 24245 - DNA, 80 bp, synthetic construct
  source 1..80: mol_type = other DNA
aaattcaatacggcaatgaacttctgccatcacttctgtattgtggcatgtaaggcttgttctctaagagttgtgtatct

SEQ ID NO: 24246 - DNA, 80 bp, synthetic construct
  source 1..80: mol_type = other DNA
aggcccacatagtctcctgttaggtcacttgcatcagcttctcagttgacttccccattcttagtctttctcccctaatt

SEQ ID NO: 24247 - DNA, 80 bp, synthetic construct
  source 1..80: mol_type = other DNA
aattgagggagctgtagaatgaagttcatattcccctgattaagcccgtccatacacttagcttgaatgccccttttcac

SEQ ID NO: 24248 - DNA, 80 bp, synthetic construct
  source 1..80: mol_type = other DNA
ttataaacttagattcagtttagggaatctaaatcattattgtcatcaccataaactaaaacccaatgtgtcattcatta

SEQ ID NO: 24249 - DNA, 80 bp, synthetic construct; identical to SEQ ID NO: 9973
  source 1..80: mol_type = other DNA

SEQ ID NO: 24250 - DNA, 80 bp, synthetic construct
  source 1..80: mol_type = other DNA
taggcttacaacaaaacacagctgcccctccctcctaattctcccttcctagagcatacactttctttttttaaaaaatt

SEQ ID NO: 24251 - DNA, 80 bp, synthetic construct
  source 1..80: mol_type = other DNA
ccaattcactccccactccctcattcccctagtctctggcaatcatcattctactgtctgtctctgtgaatttgactact

SEQ ID NO: 24252 - DNA, 80 bp, synthetic construct
  source 1..80: mol_type = other DNA
cctctcttctgaaatggatcctctgtcttctggatcccatgttttcctattctttgttttattctcttattttgatgtgg

SEQ ID NO: 24253 - DNA, 80 bp, synthetic construct; identical to SEQ ID NO: 9974
  source 1..80: mol_type = other DNA

SEQ ID NO: 24254 - DNA, 80 bp, synthetic construct
  source 1..80: mol_type = other DNA
atgtgagagagagagagagagagagagagaaagtgcgtgcgtgtgtgtgtgtgtgacagagtgtgtgtttcatatttatt

SEQ ID NO: 24255 - DNA, 80 bp, synthetic construct
  source 1..80: mol_type = other DNA
ggaatttctatgcacatgaatgagggctgttgccttgtaaacttcataggagggtgattgggccaggaatgaaccattga

SEQ ID NO: 24256 - DNA, 80 bp, synthetic construct
  source 1..80: mol_type = other DNA
ctcttcctcaacctcctggtggttggtatggtgcacccatgctctcacctctgcctggcttgtggactctgtccttatat

SEQ ID NO: 24257 - DNA, 80 bp, synthetic construct; identical to SEQ ID NO: 9975
  source 1..80: mol_type = other DNA

SEQ ID NO: 24258 - DNA, 80 bp, synthetic construct
  source 1..80: mol_type = other DNA
aatgaaacatatcaagatgaactgaacatatggataggttagcagctataaaagtcctaatcttctaattctgtattggt

SEQ ID NO: 24259 - DNA, 80 bp, synthetic construct
  source 1..80: mol_type = other DNA
atcaagaaactttcattatggaaaagggtaactctctttaaggtggcttattactagaagtaagatttggggtcttaaga

SEQ ID NO: 24260 - DNA, 80 bp, synthetic construct; identical to SEQ ID NO: 9976
  source 1..80: mol_type = other DNA

SEQ ID NO: 24261 - DNA, 80 bp, synthetic construct
  source 1..80: mol_type = other DNA
atgctgatgctctccagatgcaccaaacgaattaaatcatgcgataattcaattggaaaattgggtgtaattatggagaa

SEQ ID NO: 24262 - DNA, 80 bp, synthetic construct
  source 1..80: mol_type = other DNA
agttaagagctatctgagtgccactaaagagatctcctctgtaacttcaaagcttctcacatccagaccactcttcctga

SEQ ID NO: 24263 - DNA, 80 bp, synthetic construct
  source 1..80: mol_type = other DNA
cacacacatattcatacaccaatctcttgatagagggtcatgtccaaggtcaatgtcttctgcgtagcatctttctcaca

SEQ ID NO: 24264 - DNA, 80 bp, synthetic construct; identical to SEQ ID NO: 9977
  source 1..80: mol_type = other DNA

SEQ ID NO: 24265 - DNA, 80 bp, synthetic construct
  source 1..80: mol_type = other DNA
ctccttgcattgcaattgaatcttataattaccataaatatcttttagaacaaatacaatagcctcttgggaagtgagca

SEQ ID NO: 24266 - DNA, 80 bp, synthetic construct
  source 1..80: mol_type = other DNA
cagagagctggtaaagggaaggttaattaagagagcttctactgtcctgtgaatttagtgatgctcttaaacaaatttct

SEQ ID NO: 24267 - DNA, 80 bp, synthetic construct
  source 1..80: mol_type = other DNA
atagtcttcagattgggaacccctggcttagggtctgctgcccatagtgaaataaaaaatgattgagcttggttaatgaa

SEQ ID NO: 24268 - DNA, 80 bp, synthetic construct
  source 1..80: mol_type = other DNA
tttcattttcgatcccatttcttggcattcaattcctaaaatccttaaaaattccaaagtgatgcatttttgtatgctaa

SEQ ID NO: 24269 - DNA, 80 bp, synthetic construct; identical to SEQ ID NO: 9978
  source 1..80: mol_type = other DNA

SEQ ID NO: 24270 - DNA, 80 bp, synthetic construct
  source 1..80: mol_type = other DNA
gctctagcaaattaatcaaacccaaagtggcaatggtgagaaccccaacttgaagctggtcaggcagaggttcctaaggc

SEQ ID NO: 24271 - DNA, 80 bp, synthetic construct
  source 1..80: mol_type = other DNA
ggaaaatctccatacatgtggtcacagatgtcttctatctgtgttgacttttggcgtgagagctgagaaacccaatctgt

SEQ ID NO: 24272 - DNA, 80 bp, synthetic construct
  source 1..80: mol_type = other DNA
tctttaggtacatcacatcttgtcttttaatttgaccagaccaagaattagactcgagaagctcctcactgagaaactgt

SEQ ID NO: 24273 - DNA, 80 bp, synthetic construct; identical to SEQ ID NO: 9979
  source 1..80: mol_type = other DNA

SEQ ID NO: 24274 - DNA, 80 bp, synthetic construct
  source 1..80: mol_type = other DNA
gagttcaagaccagcctgtccaacatggcaaaaccctatccctactaaaaatacaaaaatcagctgggcagggcacatgc

SEQ ID NO: 24275 - DNA, 80 bp, synthetic construct
  source 1..80: mol_type = other DNA
gttaaaaagtgaatttatacacattatgtcactggcatagtccaacagccctgtgagataggatgggatttagtattcat

SEQ ID NO: 24276 - DNA, 80 bp, synthetic construct
  source 1..80: mol_type = other DNA
atgatcttcagctttctgtctttaccacaccatcttggagactccgtgatggctgtcatgctccagatgacctccttttg

SEQ ID NO: 24277 - DNA, 80 bp, synthetic construct; identical to SEQ ID NO: 9980
  source 1..80: mol_type = other DNA

SEQ ID NO: 24278 - DNA, 80 bp, synthetic construct
  source 1..80: mol_type = other DNA
tagctacacaatgataatgaaaattgattacagccacattcccctccttaagacactgtcagtaaatgaactgagatgcc

SEQ ID NO: 24279 - DNA, 80 bp, synthetic construct
  source 1..80: mol_type = other DNA
ctgtaggctaagaaaacaagttcttttgttctaccaactgaagacatcttcaaaagctgaaagtatctgagctgctgaag

SEQ ID NO: 24280 - DNA, 80 bp, synthetic construct
  source 1..80: mol_type = other DNA
acttggcaatactggggtattataaaaatgctggtaggggctgaatatggtgacattaacaaactaaggatctagagaaa

SEQ ID NO: 24281 - DNA, 80 bp, synthetic construct; identical to SEQ ID NO: 9981
  source 1..80: mol_type = other DNA

SEQ ID NO: 24282 - DNA, 80 bp, synthetic construct
  source 1..80: mol_type = other DNA
tggagttgtaaggtctcagctcatttcagagatcaggctcatttaaaaaatcagctcacaaacatggattgcctttgaac

SEQ ID NO: 24283 - DNA, 80 bp, synthetic construct
  source 1..80: mol_type = other DNA
tatggtcatgctagctggagactgggtcataggagaagagctgctgtgctactaaatgcctgtgtccatatttatatcca

SEQ ID NO: 24284 - DNA, 80 bp, synthetic construct
  source 1..80: mol_type = other DNA
gactgtacactacaaagggtgaattttaaaaatgtaaatttttacattaaatacttcattaaccccacccccaacacaca

SEQ ID NO: 24285 - DNA, 80 bp, synthetic construct; identical to SEQ ID NO: 9982
  source 1..80: mol_type = other DNA

SEQ ID NO: 24286 - DNA, 80 bp, synthetic construct
  source 1..80: mol_type = other DNA
ttgtctccattttacacacaaggaacctgaaacacaaagaagttagatgtcctgttcacagtcaaacagcaagtgagtgg

SEQ ID NO: 24287 - DNA, 80 bp, synthetic construct
  source 1..80: mol_type = other DNA
catcacagacttctttatccttgctcctcattctccatcctactactccatccctttttgcagggaaaaaaaactgttca

SEQ ID NO: 24288 - DNA, 80 bp, synthetic construct
  source 1..80: mol_type = other DNA
catcagttcaggtaagctgccagcttgaagtaagattggtgaagttgcaaggaggatgaaccaataggtggatcttttgt

SEQ ID NO: 24289 - DNA, 80 bp, synthetic construct; identical to SEQ ID NO: 9983
  source 1..80: mol_type = other DNA

SEQ ID NO: 24290 - DNA, 80 bp, synthetic construct
  source 1..80: mol_type = other DNA
caaaggtgcctgggtaaagaagctagggaattgggggatatggacatagagtgatcatgtttattctctttccaacaaag

SEQ ID NO: 24291 - DNA, 80 bp, synthetic construct
  source 1..80: mol_type = other DNA
gaaactcctccaagaaagacaatgaaagacaacaagttaggtcacggtggctaaagaggagacaatgatttgttgtctga

SEQ ID NO: 24292 - DNA, 80 bp, synthetic construct; identical to SEQ ID NO: 9984
  source 1..80: mol_type = other DNA

SEQ ID NO: 24293 - DNA, 80 bp, synthetic construct
  source 1..80: mol_type = other DNA
ggattgtaattccatgggaaacaaaggaaatgaaaatgcttaaaatgagtttttttctgcctttgtgtagcactcaaatg

SEQ ID NO: 24294 - DNA, 80 bp, synthetic construct
  source 1..80: mol_type = other DNA
aagctgggcttctcttacctcacctgaactaactacctgcatggaaagatgttcatttggtatcctttctagcattatga

SEQ ID NO: 24295 - DNA, 80 bp, synthetic construct
  source 1..80: mol_type = other DNA
agcaagggctgcaaaagtgctcaaataaaacacccacacagagttgacctggcttcagaaaatactagcatgatttctaa

SEQ ID NO: 24296 - DNA, 80 bp, synthetic construct
  source 1..80: mol_type = other DNA
ccctagaatagaccaagatgctcataaactacactgaagcagggaccataagtttaattccctctttgagccagtttaag

SEQ ID NO: 24297 - DNA, 80 bp, synthetic construct; identical to SEQ ID NO: 9985
  source 1..80: mol_type = other DNA

SEQ ID NO: 24298 - DNA, 80 bp, synthetic construct
  source 1..80: mol_type = other DNA
acagtatttaggatcccatggtaaatcagtaggtgaggcttccaggaaggcaagtgcataccactgacatcactacaccc

SEQ ID NO: 24299 - DNA, 80 bp, synthetic construct
  source 1..80: mol_type = other DNA
gcaaagtgaatcatccattctctcagggctggggctggaccaaagttattaaacaaataaagagttctaccagcctacca

SEQ ID NO: 24300 - DNA, 80 bp, synthetic construct; identical to SEQ ID NO: 9986
  source 1..80: mol_type = other DNA

SEQ ID NO: 24301 - DNA, 80 bp, synthetic construct
  source 1..80: mol_type = other DNA
gtgtacaattttggaaggaagccttgtcctttccaaataagccatggatgtgctatggacaatgggggcaccaagagtct

SEQ ID NO: 24302 - DNA, 80 bp, synthetic construct
  source 1..80: mol_type = other DNA
gtgaacacaaaccagataacgttttaaagcctgagtgatctgtgcccaatttgttcagaggaactggaaacaagaagagt

SEQ ID NO: 24303 - DNA, 80 bp, synthetic construct
  source 1..80: mol_type = other DNA
gaggggagtggtggagatggggtgtgatgagaaagaaaagaaggaaagatacatatgaggaagtcagggtgaaaagggga

SEQ ID NO: 24304 - DNA, 80 bp, synthetic construct
  source 1..80: mol_type = other DNA
cacagctttctttcctttggggtcttcttagtttccttgcattttcataacttatgtctcttcctgaatgtgattaaacg

SEQ ID NO: 24305 - DNA, 80 bp, synthetic construct; identical to SEQ ID NO: 9987
  source 1..80: mol_type = other DNA

SEQ ID NO: 24306 - DNA, 80 bp, synthetic construct
  source 1..80: mol_type = other DNA
acgggtctgacttcactgtctccagtgcatcatgctaaccctcctgcttctcctctctacctagttaggggctttctaac

SEQ ID NO: 24307 - DNA, 80 bp, synthetic construct
  source 1..80: mol_type = other DNA
cacgtaagtgtgcaatcactttgaactctaacaagaaaaataacatgattgtttaggtcttaacaggtgatgttctaaga

SEQ ID NO: 24308 - DNA, 80 bp, synthetic construct; identical to SEQ ID NO: 9988
  source 1..80: mol_type = other DNA

SEQ ID NO: 24309 - DNA, 80 bp, synthetic construct
  source 1..80: mol_type = other DNA
atctcagctcactgaaacccctacctcccaggttcaagcaattctcctgcctcagcctcccgagtagctggtactacagg

SEQ ID NO: 24310 - DNA, 80 bp, synthetic construct
  source 1..80: mol_type = other DNA
tcaatatcttttaatacatatgtaactaaaagttgaccggggccagcctccctgccctttgaggtctaaggaagatgagt

SEQ ID NO: 24311 - DNA, 80 bp, synthetic construct
  source 1..80: mol_type = other DNA
tggccccttccttaagtttcatccaaaaggttacttattgcaaggccatttgtgtgttcactataagatttgggtaggag

SEQ ID NO: 24312 - DNA, 80 bp, synthetic construct
  source 1..80: mol_type = other DNA
ccttctcttctttccagaaatatcctctcattgttttttttgcgtaaatatggacatctgtgacctacacgtgaaggcat

SEQ ID NO: 24313 - DNA, 80 bp, synthetic construct; identical to SEQ ID NO: 9989
  source 1..80: mol_type = other DNA

SEQ ID NO: 24314 - DNA, 80 bp, synthetic construct
  source 1..80: mol_type = other DNA
agcctatattcaactaccactgtatttccttaaagggcaattcataaatcagagcagactaaaccacgggcctaatttcc

SEQ ID NO: 24315 - DNA, 80 bp, synthetic construct
  source 1..80: mol_type = other DNA
gacccaaaattcttttatggagacacactcttattaatcacttcaggtgagtcaaagtaaacgtaatcagtcaaagcttt

SEQ ID NO: 24316 - DNA, 80 bp, synthetic construct; identical to SEQ ID NO: 9990
  source 1..80: mol_type = other DNA

SEQ ID NO: 24317 - DNA, 80 bp, synthetic construct
  source 1..80: mol_type = other DNA
gggtatcagtagttgtgaaagtttaaattttgttccatgtaacaatgcaggaaaattataactaataggtctagtctgta

SEQ ID NO: 24318 - DNA, 80 bp, synthetic construct
  source 1..80: mol_type = other DNA
aaaaacctttccttgttatgttgaaacaacacaaggagagggcaaaaagagaggaaagtactacctctaggaaccccctt

SEQ ID NO: 24319 - DNA, 80 bp, synthetic construct
  source 1..80: mol_type = other DNA
agagccaggagagatgatcttagcccactaaaatctcacatctacaacaaaagtggcaatgatgaaaatggcattccaac

SEQ ID NO: 24320 - DNA, 80 bp, synthetic construct
  source 1..80: mol_type = other DNA
tctcttttctttagttaccaaaacagacctcagactcacagcctttttgtactcccacttccatttgggagtaggtttgg

SEQ ID NO: 24321 - DNA, 80 bp, synthetic construct; identical to SEQ ID NO: 9991
  source 1..80: mol_type = other DNA

SEQ ID NO: 24322 - DNA, 80 bp, synthetic construct
  source 1..80: mol_type = other DNA
ttccatatcacttacggaggttcagaacttgtccaaggctgcccaccagtctatcctctggctacattgccctttcattt

SEQ ID NO: 24323 - DNA, 80 bp, synthetic construct
  source 1..80: mol_type = other DNA
gggctcaagtgatcctcctgcctccaccccccaagtagctgtgacattatgcttggataattcttgtattttttgtaaag

SEQ ID NO: 24324 - DNA, 80 bp, synthetic construct
  source 1..80: mol_type = other DNA
ctcccgcttttccctatctgatgttactctgagcctactgtatttttttcataaaatattgtttaaacttgattacagca

SEQ ID NO: 24325 - DNA, 80 bp, synthetic construct; identical to SEQ ID NO: 9992
  source 1..80: mol_type = other DNA

SEQ ID NO: 24326 - DNA, 80 bp, synthetic construct
  source 1..80: mol_type = other DNA
atcattcagaattagagttgaaattaagtattggcctacttgatattgtttgcttcaacagggcttcccctgggacccag

SEQ ID NO: 24327 - DNA, 80 bp, synthetic construct
  source 1..80: mol_type = other DNA
ctcttgttcctgagaagtaatgaaataattaaatagaactaacccttgacctgaaattccctgccccatgtctccctact

SEQ ID NO: 24328 - DNA, 80 bp, synthetic construct
  source 1..80: mol_type = other DNA
tctattccgttagtctactcatcaaaaaagcaatcaactttgtctggcatgatttgttcttttaaaacctataatgctta

SEQ ID NO: 24329 - DNA, 80 bp, synthetic construct; identical to SEQ ID NO: 9993
  source 1..80: mol_type = other DNA

SEQ ID NO: 24330 - DNA, 80 bp, synthetic construct
  source 1..80: mol_type = other DNA
ctgaaagaggatgatgggctgaagacacagatctgagctccaatcttgagcatgccattaactagccatgtgactttaag

SEQ ID NO: 24331 - DNA, 80 bp, synthetic construct
  source 1..80: mol_type = other DNA
tcccagcctctggtaaccaccaatctactctctatcttcatgagatccactttttaagctcccacatagaaatgagaaca

SEQ ID NO: 24332 - DNA, 80 bp, synthetic construct
  source 1..80: mol_type = other DNA
taggttgagtccatattttgactattgtgaatagtgttgcaataaacaggagagtgcagatgtcttttagatatatgcat

SEQ ID NO: 24333 - DNA, 80 bp, synthetic construct; identical to SEQ ID NO: 9994
  source 1..80: mol_type = other DNA

SEQ ID NO: 24334 - DNA, 80 bp, synthetic construct
  source 1..80: mol_type = other DNA
tctaggtgtaagatatgttattgatttgtgtatgttgaaccatccttgcatccctgggataaatcccacttggtcatggt

SEQ ID NO: 24335 - DNA, 80 bp, synthetic construct
  source 1..80: mol_type = other DNA
aagtattccctcctcttcaatttttttgaagagtttgagcaaaattggtattaattcttctctaaatgtttgttacacaa

SEQ ID NO: 24336 - DNA, 80 bp, synthetic construct
  source 1..80: mol_type = other DNA
atttgccaatttgctggcatatagttgttcataatagtctctaataattctttgtatttctgaggtatcagttgttatgt

SEQ ID NO: 24337 - DNA, 80 bp, synthetic construct; identical to SEQ ID NO: 9995
  source 1..80: mol_type = other DNA

SEQ ID NO: 24338 - DNA, 80 bp, synthetic construct
  source 1..80: mol_type = other DNA
tttaatttctgtgtctgtgtattttccaaggttactcttcttattagagttttatcccattgtgggcagcaaagatactt

SEQ ID NO: 24339 - DNA, 80 bp, synthetic construct
  source 1..80: mol_type = other DNA
aaagaaaaagaggtttaatggactcacagtttcacatggctgcggagacctcacaatcatggtggaaggcaaaggaagag

SEQ ID NO: 24340 - DNA, 80 bp, synthetic construct
  source 1..80: mol_type = other DNA
ttatgggagctacaattcaagatgagattttggtggggacacagccaaaccatatcagcaaagatgggtgaaatgttctg

SEQ ID NO: 24341 - DNA, 80 bp, synthetic construct; identical to SEQ ID NO: 9996
  source 1..80: mol_type = other DNA

SEQ ID NO: 24342 - DNA, 80 bp, synthetic construct
  source 1..80: mol_type = other DNA
atgtgaagtggggttcttgaaggcagcatatagctgaattttatttctttatccattcagccactctatgccttttaatt

SEQ ID NO: 24343 - DNA, 80 bp, synthetic construct
  source 1..80: mol_type = other DNA
gattaccataggcttacaaaaacatcttatagataataataagttgttttaaagagataacttatcttagatcacaaata

SEQ ID NO: 24344 - DNA, 80 bp, synthetic construct; identical to SEQ ID NO: 9997
  source 1..80: mol_type = other DNA

SEQ ID NO: 24345 - DNA, 80 bp, synthetic construct
  source 1..80: mol_type = other DNA
cttcatagttgaagaataattttgctgagcacagtattcttggaaggcagaatttttttcctttgggcactttgaaaatg

SEQ ID NO: 24346 - DNA, 80 bp, synthetic construct
  source 1..80: mol_type = other DNA
gtggtcttatttgggttgattctggtgttcatagaccttggatttgtatatttcccaagtttgaggaagttttctgctat

SEQ ID NO: 24347 - DNA, 80 bp, synthetic construct
  source 1..80: mol_type = other DNA
agtgtttgagctcactgatttttcctctgcttggccgatttttctgttgagagtctctaatgagttcttcacttcagcaa

SEQ ID NO: 24348 - DNA, 80 bp, synthetic construct; identical to SEQ ID NO: 9998
  source 1..80: mol_type = other DNA

SEQ ID NO: 24349 - DNA, 80 bp, synthetic construct
  source 1..80: mol_type = other DNA
cccaggttcacctctgcgctaataaatagtcaaagtgctgcctgttccaaatgggggaggtctcaaagagattacccagt

SEQ ID NO: 24350 - DNA, 80 bp, synthetic construct
  source 1..80: mol_type = other DNA
gcccatccttagggatatttttccctttagacaatcacaatgcttcctgtgcattaagggaaggacagatctcctgccaa

SEQ ID NO: 24351 - DNA, 80 bp, synthetic construct
  source 1..80: mol_type = other DNA
gatcctcatgtttgaatttcaagtgttgctagtgaaaatctcagtgctttggttttgattttctacagggtgtggggagt

SEQ ID NO: 24352 - DNA, 80 bp, synthetic construct; identical to SEQ ID NO: 9999
  source 1..80: mol_type = other DNA

SEQ ID NO: 24353 - DNA, 80 bp, synthetic construct
  source 1..80: mol_type = other DNA
tatttaaacagttattgaaaatcaagtgaaggaaagagtgacaactgtgagatcctgagagtttccccttaaaggcagcc

SEQ ID NO: 24354 - DNA, 80 bp, synthetic construct
  source 1..80: mol_type = other DNA
ttccctcatccagtgtgaaaatcacctgtgaatttttttttcttagatactgaaagttacagctggatccatgcctgctg

SEQ ID NO: 24355 - DNA, 80 bp, synthetic construct
  source 1..80: mol_type = other DNA
ctgtgtagcaaacattgtgccaatgtttgctttagtgtatgtgcaatgtgagctttagtgtattattttgtttaattctt

SEQ ID NO: 24356 - DNA, 80 bp, synthetic construct
  source 1..80: mol_type = other DNA
tggcacctggcctgaatcttattttttaattcagcttttagtcttattattgatttgtaagagttgtttatatattatgg

SEQ ID NO: 24357 - DNA, 80 bp, synthetic construct; identical to SEQ ID NO: 10002
  source 1..80: mol_type = other DNA

SEQ ID NO: 24358 - DNA, 80 bp, synthetic construct
  source 1..80: mol_type = other DNA
tctcatttctgttccattggtatataagcctctcctttctttaatatcacactgtcttcattactttggctttatagtaa

SEQ ID NO: 24359 - DNA, 80 bp, synthetic construct
  source 1..80: mol_type = other DNA
atagcaattacattaagcttattgatcaatgtggggagaaataccatcttgaagctattgatattttcaattccaaaatg

SEQ ID NO: 24360 - DNA, 80 bp, synthetic construct
  source 1..80: mol_type = other DNA
tgtcagtggaattactttcttaattcccttttggaaattgttgttagaacatagaaatacagttagttttttaatattga

SEQ ID NO: 24361 - DNA, 80 bp, synthetic construct; identical to SEQ ID NO: 10003
  source 1..80: mol_type = other DNA

SEQ ID NO: 24362 - DNA, 80 bp, synthetic construct
  source 1..80: mol_type = other DNA
cccttcctttgtattggctaggctcaatcactacaagtgatgaaagcaagtatttttcccttattcttaatcttggagac

SEQ ID NO: 24363 - DNA, 80 bp, synthetic construct
  source 1..80: mol_type = other DNA
gatgttggattctatcaactgccttttctgtgtttattgagatagccaaacggcttatgtactttatcctattaacatgg

SEQ ID NO: 24364 - DNA, 80 bp, synthetic construct; identical to SEQ ID NO: 10004
  source 1..80: mol_type = other DNA

SEQ ID NO: 24365 - DNA, 80 bp, synthetic construct
  source 1..80: mol_type = other DNA
attggcataatttattctgcaagtatttggtagaattccccaatgaaggcacctgggtctggacttttcttttggggtag

SEQ ID NO: 24366 - DNA, 80 bp, synthetic construct
  source 1..80: mol_type = other DNA
aggatgtttagtttcccttacaatcttttaaattctttagggtcaagagtgatggtccctcatttattcctgaattagta

SEQ ID NO: 24367 - DNA, 80 bp, synthetic construct
  source 1..80: mol_type = other DNA
ttttacatcgcatgttttcattgatttttctaatttcttaaaataaaaacttaggttatagatttgagactttactcttt

SEQ ID NO: 24368 - DNA, 80 bp, synthetic construct
  source 1..80: mol_type = other DNA
tatttaatttcctaatagtcagggatttctgagatttctttcagtggtcaacttttagtttgttttattgtgattgaagg

SEQ ID NO: 24369 - DNA, 80 bp, synthetic construct; identical to SEQ ID NO: 10005
  source 1..80: mol_type = other DNA

SEQ ID NO: 24370 - DNA, 80 bp, synthetic construct
  source 1..80: mol_type = other DNA
tttgatgcacatacatttataattgttatctcttcctggtgaattgacatttttatcattataaaatatactgtttagta

SEQ ID NO: 24371 - DNA, 80 bp, synthetic construct
  source 1..80: mol_type = other DNA
tttttatgtagtctgacaatctctgatcttgtgtgttttttagttcctctgtatctttcttccttttttttcagcactga

SEQ ID NO: 24372 - DNA, 80 bp, synthetic construct
  source 1..80: mol_type = other DNA
agtttatcacagtctatttaagattaatattacctaattttactaaaatatagaaattttgctccaatctaattctactc

SEQ ID NO: 24373 - DNA, 80 bp, synthetic construct; identical to SEQ ID NO: 10006
  source 1..80: mol_type = other DNA

SEQ ID NO: 24374 - DNA, 80 bp, synthetic construct
  source 1..80: mol_type = other DNA
cattttttcttatctttcaacatgttggaatatgtgttccactgtcttttagtctttcatgtttcaaataagaagtcagc

SEQ ID NO: 24375 - DNA, 80 bp, synthetic construct
  source 1..80: mol_type = other DNA
ttctaggtgggattttctgaggcacttggatgtgcaaattgatttttttcaccaaatttggcaagttttaggccattatt

SEQ ID NO: 24376 - DNA, 80 bp, synthetic construct
  source 1..80: mol_type = other DNA
cttgtcttcacattttaaaatttcttctgccttcttaaatctgctgttgagctggtctagtgaattcttcattttagtta

SEQ ID NO: 24377 - DNA, 80 bp, synthetic construct
  source 1..80: mol_type = other DNA
agctacttttaaggttttattttctaaatccaatagttgaggacattcagaaagttttattagctttttgttttcttatg

SEQ ID NO: 24378 - DNA, 80 bp, synthetic construct; identical to SEQ ID NO: 10007
  source 1..80: mol_type = other DNA

SEQ ID NO: 24379 - DNA, 80 bp, synthetic construct
  source 1..80: mol_type = other DNA
ctgatcagcaaagtagttttgacctgctttgtttacgacatgtccagttcatccttttttaggcaacctggtagtcccct

SEQ ID NO: 24380 - DNA, 80 bp, synthetic construct
  source 1..80: mol_type = other DNA
tttaagcctggatttctatgggtacttcctatgttccttagtgattggcaaatgtttttacagatgatgggcttatattc

SEQ ID NO: 24381 - DNA, 80 bp, synthetic construct
  source 1..80: mol_type = other DNA
acacaaccgtaggattggctaaaaggctgtggctacctcagactctgtcctatctccattgggaatatatgcagccataa

SEQ ID NO: 24382 - DNA, 80 bp, synthetic construct; identical to SEQ ID NO: 10008
  source 1..80: mol_type = other DNA

SEQ ID NO: 24383 - DNA, 80 bp, synthetic construct
  source 1..80: mol_type = other DNA
ttattagtagggccagcccatttagtctgtatgtcagccaatcttgctggttctgcctattctgtttccagagttgttga

SEQ ID NO: 24384 - DNA, 80 bp, synthetic construct
  source 1..80: mol_type = other DNA
gagaactgcctagccaaaagcactgagactcctgtcttctctcaaatcctcattttgaaagcattaattattttgatgac

SEQ ID NO: 24385 - DNA, 80 bp, synthetic construct; identical to SEQ ID NO: 10009
  source 1..80: mol_type = other DNA

SEQ ID NO: 24386 - DNA, 80 bp, synthetic construct
  source 1..80: mol_type = other DNA
catggcaatatataaccgaaagactattctcattgtaggcaccttgcctaagaataattcaccattcttagcaaaatatt

SEQ ID NO: 24387 - DNA, 80 bp, synthetic construct
  source 1..80: mol_type = other DNA
acagcatctcgcatatttccaaatactaacagcttccataagaatcaactaggaaaggagtaatactcaacatatgtact

SEQ ID NO: 24388 - DNA, 80 bp, synthetic construct
  source 1..80: mol_type = other DNA
taaaaatacaaaaattagctgggtgtggtggcgcacacctgtagtcccagctacttgggaagctgaggcaggagaatcgc

SEQ ID NO: 24389 - DNA, 80 bp, synthetic construct
  source 1..80: mol_type = other DNA
agatgtagaaaattcaaagtggaccataatgcattagataagaataacctgaccacaacctttgctatgcaggttaaagg

SEQ ID NO: 24390 - DNA, 80 bp, synthetic construct; identical to SEQ ID NO: 10010
  source 1..80: mol_type = other DNA

SEQ ID NO: 24391 - DNA, 80 bp, synthetic construct
  source 1..80: mol_type = other DNA
tgtgcattattttgattgatttttataacaagtcaggaaagggagccacagaggtaaaatgacccccagatccctcttca

SEQ ID NO: 24392 - DNA, 80 bp, synthetic construct
  source 1..80: mol_type = other DNA
gtcccggctttctttcaaatcccttcaagcataaattcagagtggttcatgacttttcttaagcagagcccatttttctt

SEQ ID NO: 24393 - DNA, 80 bp, synthetic construct; identical to SEQ ID NO: 10011
  source 1..80: mol_type = other DNA

SEQ ID NO: 24394 - DNA, 80 bp, synthetic construct
  source 1..80: mol_type = other DNA
tttctaaaagggcagggaaactataaacagcttagctggtggcagtaatcgattccacttcctcacatggattgcatctc

SEQ ID NO: 24395 - DNA, 80 bp, synthetic construct
  source 1..80: mol_type = other DNA
acggcacttccagacaccccaattgatgtaatttggttgtgtcataggacaaagcggacaccccagtatcactggtatct

SEQ ID NO: 24396 - DNA, 80 bp, synthetic construct
  source 1..80: mol_type = other DNA
agactgggtgttcaaaaactggaattgaatatctgactgcaatatactggctttggagatttgaacctcttacttcattt

SEQ ID NO: 24397 - DNA, 80 bp, synthetic construct
  source 1..80: mol_type = other DNA
atacctatcttgctatattataggaatcaattgtgactgtggctggagaagcactttacagtctgcaactcttgccagtt

SEQ ID NO: 24398 - DNA, 80 bp, synthetic construct
  source 1..80: mol_type = other DNA
cccttggcagctgttacagcaccttcaggctctctctacaggtaaagtagtagccttatcccaggtgccccatttctagc

SEQ ID NO: 24399 - DNA, 80 bp, synthetic construct; identical to SEQ ID NO: 10012
  source 1..80: mol_type = other DNA

SEQ ID NO: 24400 - DNA, 80 bp, synthetic construct
  source 1..80: mol_type = other DNA
agtggggggctgaaaatgacacaactatattatcttttggttctgcaggtaagaagtctaaaatgggttggtggaactgc

SEQ ID NO: 24401 - DNA, 80 bp, synthetic construct
  source 1..80: mol_type = other DNA
tcacattccttctctgacactgactctcctgcctccctccttcccttttaaggtcccctgtgattccactgggtcaaccc

SEQ ID NO: 24402 - DNA, 80 bp, synthetic construct
  source 1..80: mol_type = other DNA
gaacctctagaatctaatctgacaagttcagctgctgtgatgggccaggagttcctctttccttcctccagagaaaacac

SEQ ID NO: 24403 - DNA, 80 bp, synthetic construct; identical to SEQ ID NO: 10013
  source 1..80: mol_type = other DNA

SEQ ID NO: 24404 - DNA, 80 bp, synthetic construct
  source 1..80: mol_type = other DNA
ggttcagttaggaggggttccttgttcactggacatctataatccatcccaacaccccaggaaaggcctgtcctgatggg

SEQ ID NO: 24405 - DNA, 80 bp, synthetic construct
  source 1..80: mol_type = other DNA
ggtccagatctaagggccagggactgtattgcttgagagacgagtgacgtgtttctacaaacagaaccagagaactaatg

SEQ ID NO: 24406 - DNA, 80 bp, synthetic construct; identical to SEQ ID NO: 10014
  source 1..80: mol_type = other DNA

SEQ ID NO: 24407 - DNA, 80 bp, synthetic construct
  source 1..80: mol_type = other DNA
ggatttttggctaggcttttttgactgtggttgtggcacaaaatagttaacgtttttcccccaaagtctaagataactca

SEQ ID NO: 24408 - DNA, 80 bp, synthetic construct
  source 1..80: mol_type = other DNA
tagaaataacttctgctactgtgttggtatatttccttacagactttatccttatgtacatagttctttttttcttttac

SEQ ID NO: 24409 - DNA, 80 bp, synthetic construct
  source 1..80: mol_type = other DNA
aggcatttaagttatttctagtttttcaccatcataaacagcaccaagatagttttttagataagccagtaggaaatatt

SEQ ID NO: 24410 - DNA, 80 bp, synthetic construct; identical to SEQ ID NO: 10015
  source 1..80: mol_type = other DNA

SEQ ID NO: 24411 - DNA, 80 bp, synthetic construct
  source 1..80: mol_type = other DNA
catcaggaacgttggggccagggtaagatgacttagcaaacaaggaagtctgattccatttatagaggacagatgtgtgg

SEQ ID NO: 24412 - DNA, 80 bp, synthetic construct
  source 1..80: mol_type = other DNA
aaaccattaacttaaagtagaaacttggccatgaacagagcagcacaggaagggagctctggggagctgcagcctgtgaa

SEQ ID NO: 24413 - DNA, 80 bp, synthetic construct
  source 1..80: mol_type = other DNA
ctgtttccccaacttcaacatttttctaaaataagaggtttgctaaaggttgttcctacagacaaactgaagtgtgtaat

SEQ ID NO: 24414 - DNA, 80 bp, synthetic construct
  source 1..80: mol_type = other DNA
tggcagcacttttgggagaaagatcagtgattctccagctctgaaggtcgtccgtctccatcttactgacagcctgtcct

SEQ ID NO: 24415 - DNA, 80 bp, synthetic construct; identical to SEQ ID NO: 10016
  source 1..80: mol_type = other DNA

SEQ ID NO: 24416 - DNA, 80 bp, synthetic construct
  source 1..80: mol_type = other DNA
ttttaagaacatggcaaacttttggggtaggggaagaaattgaagaaaggatgagaaatgctggtatgaatctggtctcc

SEQ ID NO: 24417 - DNA, 80 bp, synthetic construct
  source 1..80: mol_type = other DNA
acctgtgaagatgaacttaattgaaaatagagtatttgcagatgttatcaagcattccagaatgagatcatgctggactt

SEQ ID NO: 24418 - DNA, 80 bp, synthetic construct
  source 1..80: mol_type = other DNA
gggcatggaaaggatttctcttcagagcctccgggaggtactaaccctgcagacatcttgatttcatactcttggcttct

SEQ ID NO: 24419 - DNA, 80 bp, synthetic construct; identical to SEQ ID NO: 10017
  source 1..80: mol_type = other DNA

SEQ ID NO: 24420 - DNA, 80 bp, synthetic construct
  source 1..80: mol_type = other DNA
tgaggccctggggagagggctctgcagatgggctgagagtgtgttttccatttttaagccaggattcatgctacagagta

SEQ ID NO: 24421 - DNA, 80 bp, synthetic construct
  source 1..80: mol_type = other DNA
tcaaaatgatcactttttattatcttgctgctctgaattgtatcttccttattattctcagctacagaggccataaatta

SEQ ID NO: 24422 - DNA, 80 bp, synthetic construct
  source 1..80: mol_type = other DNA
acccatgaatattgagttagaaaacaaactagtgactacataatactaaaggcaacccatccccacttctcatcttcacc

SEQ ID NO: 24423 - DNA, 80 bp, synthetic construct; identical to SEQ ID NO: 10018
  source 1..80: mol_type = other DNA

SEQ ID NO: 24424 - DNA, 80 bp, synthetic construct
  source 1..80: mol_type = other DNA
gacagtggtgagcctctcttaagttatgtttggatgtgtccattcatgaaagagcttggtaaaggagactggtgtatcca

SEQ ID NO: 24425 - DNA, 80 bp, synthetic construct
  source 1..80: mol_type = other DNA
attcagtgtgtgcactgacccttgggatccagcttcataaaaactaaaggcattgatatgtttccatgctaaagaatgct

SEQ ID NO: 24426 - DNA, 80 bp, synthetic construct
  source 1..80: mol_type = other DNA
aaacatttctttaaagcacaaactttcaaagttatcatgtgtgactcagtaacatctgtggaatttacaaagaacacaat

SEQ ID NO: 24427 - DNA, 80 bp, synthetic construct; identical to SEQ ID NO: 10019
  source 1..80: mol_type = other DNA

SEQ ID NO: 24428 - DNA, 80 bp, synthetic construct
  source 1..80: mol_type = other DNA
ctttggaaaatagattggcattacccaatgaaatggaagatgttctgaccctctcacccagcaattccactcttagttac

SEQ ID NO: 24429 - DNA, 80 bp, synthetic construct
  source 1..80: mol_type = other DNA
tctcataagaagtactcaacctagaacccttgcatgcacagtctgtgtgtgtgcacagtgcacaatacgattcacgtttt

SEQ ID NO: 24430 - DNA, 80 bp, synthetic construct
  source 1..80: mol_type = other DNA
tgttagggatccctgttctagagaaattcttgaacatgtgcaccaagagagatgtacaaaaatgtttacaattgtgttga

SEQ ID NO: 24431 - DNA, 80 bp, synthetic construct; identical to SEQ ID NO: 10020
  source 1..80: mol_type = other DNA

SEQ ID NO: 24432 - DNA, 80 bp, synthetic construct
  source 1..80: mol_type = other DNA
aggaaactccaaaaagactgataatgttcagattcttcggctttttggtggtgagaatgcaagtgttgttggttttgctg

SEQ ID NO: 24433 - DNA, 80 bp, synthetic construct
  source 1..80: mol_type = other DNA
aggatctaggcagtcttttctataagatatccagaagaattctgatgcactgtcaggttaagagcactcacctacacaca

SEQ ID NO: 24434 - DNA, 80 bp, synthetic construct; identical to SEQ ID NO: 10021
  source 1..80: mol_type = other DNA

SEQ ID NO: 24435 - DNA, 80 bp, synthetic construct
  source 1..80: mol_type = other DNA
catcacagcaagtatttagacccagacccacatgtacattctgtgtgatcttggggcagtcactcccccgctctgagcac

SEQ ID NO: 24436 - DNA, 80 bp, synthetic construct
  source 1..80: mol_type = other DNA
tgagttagtagagttttctaggtccaagacattgggagtcccaagatttggcttggtgagacataaaactagactagagc

SEQ ID NO: 24437 - DNA, 80 bp, synthetic construct
  source 1..80: mol_type = other DNA
gtgtcgcctgagtatttatgaacggcttagaaacatttaagccagttctacaataccttccaaattaggattgccagatc

SEQ ID NO: 24438 - DNA, 80 bp, synthetic construct
  source 1..80: mol_type = other DNA
ttgtattttatctggcaatcccatttcaaataccgatcagcactttctcctgcagggaaatctgcatggaagagagttat

SEQ ID NO: 24439 - DNA, 80 bp, synthetic construct; identical to SEQ ID NO: 10022
  source 1..80: mol_type = other DNA

SEQ ID NO: 24440 - DNA, 80 bp, synthetic construct
  source 1..80: mol_type = other DNA
atactccagctcacaggggaagtcaaagctgcactccagacctgcaataatagccaagggtcaatggaaaaaaccatttc

SEQ ID NO: 24441 - DNA, 80 bp, synthetic construct
  source 1..80: mol_type = other DNA
catattacgggagatgttctcagagaaggcaggtaaaaaacaaagctaactaacaggttgaatggtgagaagctctgcat

SEQ ID NO: 24442 - DNA, 80 bp, synthetic construct; identical to SEQ ID NO: 10023
  source 1..80: mol_type = other DNA

SEQ ID NO: 24443 - DNA, 80 bp, synthetic construct
  source 1..80: mol_type = other DNA
agtgggcaaaggatatgaacagacatttctcaaaagaagacagttatgtggccaacaaacatatgaaaaaaagctcatca

SEQ ID NO: 24444 - DNA, 80 bp, synthetic construct
  source 1..80: mol_type = other DNA
accattgtggaagacagggtggcgattcctcaaggatctagaaccagaaataccatttgacccagcaatccccagcaatc

SEQ ID NO: 24445 - DNA, 80 bp, synthetic construct
  source 1..80: mol_type = other DNA
cacatgtacaccatggaatattatgcagccttaaaaacggatgagttcatgtcttttgcacggacatagatgaagctgga

SEQ ID NO: 24446 - DNA, 80 bp, synthetic construct
  source 1..80: mol_type = other DNA
taggagaaatacataatgtagatgaaggcttgatgggtgcagcaaaccaccatggcacgtgtatacctatgtaacaaacc

SEQ ID NO: 24447 - DNA, 80 bp, synthetic construct; identical to SEQ ID NO: 10024
  source 1..80: mol_type = other DNA

SEQ ID NO: 24448 - DNA, 80 bp, synthetic construct
  source 1..80: mol_type = other DNA
gctgtctttagagcaagtgctctctccttctccatgcctggccagaaataaaacctgcttgcccttttccctaaaaaaaa

SEQ ID NO: 24449 - DNA, 80 bp, synthetic construct
  source 1..80: mol_type = other DNA
aaaaaagtactgcctatgaaaaatggacctggtccatatttgatgctctgaaaaatgctagccaggccctgtcctttctg

SEQ ID NO: 24450 - DNA, 80 bp, synthetic construct
  source 1..80: mol_type = other DNA
ggtttattttctcttggggagtgtttggggagggtcattgggtaaggagagagagaaaagagaggcaggaagggcccatg

SEQ ID NO: 24451 - DNA, 80 bp, synthetic construct; identical to SEQ ID NO: 10025
  source 1..80: mol_type = other DNA

SEQ ID NO: 24452 - DNA, 80 bp, synthetic construct
  source 1..80: mol_type = other DNA
tctcaccaaaagaaaccaaaagctgttaaagcagtgcattttaacagctgcttctgaggctactactaccccaatctcca

SEQ ID NO: 24453 - DNA, 80 bp, synthetic construct
  source 1..80: mol_type = other DNA
tcaattgtaggagaaaagaaaaaaatccttcaattacacttctattgagtgtctttctgctcctcagctgctttccagga

SEQ ID NO: 24454 - DNA, 80 bp, synthetic construct; identical to SEQ ID NO: 10026
  source 1..80: mol_type = other DNA

SEQ ID NO: 24455 - DNA, 80 bp, synthetic construct
  source 1..80: mol_type = other DNA
ccacattgacaattatcagtgcctttcccaaagcttcgacttctgcggccatcccctaccttgatttttctcttccaatg

SEQ ID NO: 24456 - DNA, 80 bp, synthetic construct
  source 1..80: mol_type = other DNA
agagtttaagtgtgataattggctgtgtttgggccagatcctgcctagtaaaacaggctatgcaaatgtaccgattaaaa

SEQ ID NO: 24457 - DNA, 80 bp, synthetic construct
  source 1..80: mol_type = other DNA
gcttttctacattctgatttaatttcttacaaaacatggagacacaggtttttctcactcaaactagcctcagtgcctct

SEQ ID NO: 24458 - DNA, 80 bp, synthetic construct; identical to SEQ ID NO: 10027
  source 1..80: mol_type = other DNA

SEQ ID NO: 24459 - DNA, 80 bp, synthetic construct
  source 1..80: mol_type = other DNA
ccatcactgtacctcatctgcagaacaacactgagaagtggacggtttcttcttctctctataggtgaggaagctgaggc

SEQ ID NO: 24460 - DNA, 80 bp, synthetic construct
  source 1..80: mol_type = other DNA
aaaccaatgaagtgttttatcttggttactcttagacccaaagcctgtaaacttttcatatctgaaaagccttcttcatg

SEQ ID NO: 24461 - DNA, 80 bp, synthetic construct
  source 1..80: mol_type = other DNA
aaaaagagcattgagaaaaagacacactttccaggacctgcctatcacatatgtgaaatcattgtcacttactttcttgt

SEQ ID NO: 24462 - DNA, 80 bp, synthetic construct; identical to SEQ ID NO: 10028
  source 1..80: mol_type = other DNA

SEQ ID NO: 24463 - DNA, 80 bp, synthetic construct
  source 1..80: mol_type = other DNA
aggcagatttcctatggaagaagggtgaatgtacatcacactcaatggggacttggtttgcctccagattctcaaagaat

SEQ ID NO: 24464 - DNA, 80 bp, synthetic construct
  source 1..80: mol_type = other DNA
catgcctgtaatcccagctacttgggaggctgaggcaggagaatggcttgaacccgggaggcggagggtgcggtgagccg

SEQ ID NO: 24465 - DNA, 80 bp, synthetic construct
  source 1..80: mol_type = other DNA
ttatcatctgatactcacttcctgaaatctcccagtatatgaatcacatttttaaagactgaattcattaacaattagct

SEQ ID NO: 24466 - DNA, 80 bp, synthetic construct; identical to SEQ ID NO: 10029
  source 1..80: mol_type = other DNA

SEQ ID NO: 24467 - DNA, 80 bp, synthetic construct
  source 1..80: mol_type = other DNA
ggaatagggagcttggtgcattttggacacttgggtctcctcttgagtgggctcagaatatctaacaatgctcctttgta

SEQ ID NO: 24468 - DNA, 80 bp, synthetic construct
  source 1..80: mol_type = other DNA
ttgggtcagtttcaaggtagaggaccagcagctccccttagttttaaagacatcccctccaacattgcccagtttccagg

SEQ ID NO: 24469 - DNA, 80 bp, synthetic construct
  source 1..80: mol_type = other DNA
caattccataacacttcatccttcttgattttgtctcttattatgaagtaaagctggaggtcttactttcttgttcctgg

SEQ ID NO: 24470 - DNA, 80 bp, synthetic construct; identical to SEQ ID NO: 10030
  source 1..80: mol_type = other DNA

SEQ ID NO: 24471 - DNA, 80 bp, synthetic construct
  source 1..80: mol_type = other DNA
tgcagtgaggcaggaaacagtgtacgagctccacaagtgaggcagagctgacagccactgactctgaaagtatcacctaa

SEQ ID NO: 24472 - DNA, 80 bp, synthetic construct
  source 1..80: mol_type = other DNA
caatgtgctgatttagaatctcgatattctaaatggccacacttcatactacaacaatgtacaagctctacaagtgaggc

SEQ ID NO: 24473 - DNA, 80 bp, synthetic construct
  source 1..80: mol_type = other DNA
taagtctgaatctcagtgggtgtacggctcaggaagccaaagccacaagtgcaataaagcccagggcttaaagttccctt

SEQ ID NO: 24474 - DNA, 80 bp, synthetic construct
  source 1..80: mol_type = other DNA
cttacatggcagcaggcaagagtgtgtgtgcaggggaactgtcctttataaaaccatcagatctcctgagatttactatc

SEQ ID NO: 24475 - DNA, 80 bp, synthetic construct; identical to SEQ ID NO: 10031
  source 1..80: mol_type = other DNA

SEQ ID NO: 24476 - DNA, 80 bp, synthetic construct
  source 1..80: mol_type = other DNA
ttgtattggggttattttcctgctaaaaatgcttttctgtctccagttatcttgacttgatgtctaactactgggataca

SEQ ID NO: 24477 - DNA, 80 bp, synthetic construct
  source 1..80: mol_type = other DNA
aatattgtcatgaatgattcacaggaatagagcacaagacttgagatttgactctaattctgccatttgtcagctctgtg

SEQ ID NO: 24478 - DNA, 80 bp, synthetic construct
  source 1..80: mol_type = other DNA
aaagcacattggctgattccgaatttgcataaccatgccttttgtgaacacagcttcctgttcatcctgagaaatagtat

SEQ ID NO: 24479 - DNA, 80 bp, synthetic construct; identical to SEQ ID NO: 10032
  source 1..80: mol_type = other DNA

SEQ ID NO: 24480 - DNA, 80 bp, synthetic construct
  source 1..80: mol_type = other DNA
gcataggaaaatgccaatgtattcctgacaagcctggttaagtgtcttcaataaagaaccatatgaaacatcatgcatac

SEQ ID NO: 24481 - DNA, 80 bp, synthetic construct
  source 1..80: mol_type = other DNA
cgtaaagctacatttcattaaatggaaccccagaaattagcattcttaaaacactgtcagtccttaaagattgtacccag

SEQ ID NO: 24482 - DNA, 80 bp, synthetic construct
  source 1..80: mol_type = other DNA
tcaaagaatgcacagtggctggttgcaaggctggtactaaaattctgtttctaatcctgtgattgttattattataatta

SEQ ID NO: 24483 - DNA, 80 bp, synthetic construct; identical to SEQ ID NO: 10033
  source 1..80: mol_type = other DNA

SEQ ID NO: 24484 - DNA, 80 bp, synthetic construct
  source 1..80: mol_type = other DNA
ttgtgcttggggcaattcatttaaccacttgagtcttggttttctcatggataaaccagggagaattatcacactaatga

SEQ ID NO: 24485 - DNA, 80 bp, synthetic construct
  source 1..80: mol_type = other DNA
ctaaaaatacaaaaattagccaagcgtggtggctggtgcctgtaatcccagctgctcgggaggctgaggcaggagaatcg

SEQ ID NO: 24486 - DNA, 80 bp, synthetic construct; identical to SEQ ID NO: 10034
  source 1..80: mol_type = other DNA

SEQ ID NO: 24487 - DNA, 80 bp, synthetic construct
  source 1..80: mol_type = other DNA
ctgacctgacttgaccttggaggacccagggagaagcaggctagaacagacatccttctttccttgccctattttatatc

SEQ ID NO: 24488 - DNA, 80 bp, synthetic construct
  source 1..80: mol_type = other DNA
caattttttcaactgaaaaataagaattaaagcagggaccacctcctggaattgtgaggagggtgaaatgcaatagtgta

SEQ ID NO: 24489 - DNA, 80 bp, synthetic construct
  source 1..80: mol_type = other DNA
ctgtttcagctggaagcataaaaggaaaaggggtggagaaacgtgtgctcctctctcaatatttcctttgcgatggctga

SEQ ID NO: 24490 - DNA, 80 bp, synthetic construct; identical to SEQ ID NO: 10035
  source 1..80: mol_type = other DNA

SEQ ID NO: 24491 - DNA, 80 bp, synthetic construct
  source 1..80: mol_type = other DNA
tggcccctaccccctctgcccacaaccactgttcatttgtcatagagccccagaacttgaaaccattcacttccttccca

SEQ ID NO: 24492 - DNA, 80 bp, synthetic construct
  source 1..80: mol_type = other DNA
catgtgcacactgcagtgggagatacacacggaaagctgaattcttatttctcttatctgtgaccattactatgttacag

SEQ ID NO: 24493 - DNA, 80 bp, synthetic construct
  source 1..80: mol_type = other DNA
gtaagagagttgagaccagaacccagattggacttccagtttaattctctgcttgcaatttccaggaaacactcatgcag

SEQ ID NO: 24494 - DNA, 80 bp, synthetic construct; identical to SEQ ID NO: 10036
  source 1..80: mol_type = other DNA

SEQ ID NO: 24495 - DNA, 80 bp, synthetic construct
  source 1..80: mol_type = other DNA
ctgtctctaaagagacaggacctactgggtgttaatgtgaacatggggttccattcctccctgttttcaaacacaggaag

SEQ ID NO: 24496 - DNA, 80 bp, synthetic construct
  source 1..80: mol_type = other DNA
tgctgggctgcatcttgaaggatgaaacaatttgaacagatagtaagggtttggctaggaagtttgctaagaacagagga

SEQ ID NO: 24497 - DNA, 80 bp, synthetic construct
  source 1..80: mol_type = other DNA
gcaaaatgctttcaagttccagagggcaaaactagggacttaaaagagttttaagcaagaggcttagagcaaatggagcc

SEQ ID NO: 24498 - DNA, 80 bp, synthetic construct; identical to SEQ ID NO: 10037
  source 1..80: mol_type = other DNA

SEQ ID NO: 24499 - DNA, 80 bp, synthetic construct
  source 1..80: mol_type = other DNA
ctcagctcacggcaacctccatctcctgggttcaagcaattatcctgcctcagcctcccaagtagctgggattacaggtg

SEQ ID NO: 24500 - DNA, 80 bp, synthetic construct
  source 1..80: mol_type = other DNA
aagatttaaacaggcaatgcagaggtgagttaaagccctaggattaccagacctagttctctagtccagtgaataccctc

SEQ ID NO: 24501 - DNA, 80 bp, synthetic construct
  source 1..80: mol_type = other DNA
atgagttgtgtaaagcaacagatgggactgaaatgtgagaaaatactttgtgagccatcttattgagaagaaaatgaacc

SEQ ID NO: 24502 - DNA, 80 bp, synthetic construct
  source 1..80: mol_type = other DNA
gacagctcacaatttctatgaacttctcatagaccaaattattctagtcatctacccaaatgggctggttcaagtcctgt

SEQ ID NO: 24503 - DNA, 80 bp, synthetic construct; identical to SEQ ID NO: 10038
  source 1..80: mol_type = other DNA

SEQ ID NO: 24504 - DNA, 80 bp, synthetic construct
  source 1..80: mol_type = other DNA
tgattaatatgactagaaatgagagggctggtgggaatgtccctgccctttaataaaacagagaactttgggggctgaaa

SEQ ID NO: 24505 - DNA, 80 bp, synthetic construct
  source 1..80: mol_type = other DNA
aggtgtgcaaaaggaaacaagatgtgaattccttgacgtttaaatgcttaacgtctaggaagagtgataacgcaggacca

SEQ ID NO: 24506 - DNA, 80 bp, synthetic construct; identical to SEQ ID NO: 10039
  source 1..80: mol_type = other DNA

SEQ ID NO: 24507 - DNA, 80 bp, synthetic construct
  source 1..80: mol_type = other DNA
cacacatgcatacaacattccttcatctaaaaattcctcacttccttggctttgctgttgatatgatttgtctgtgcccc

SEQ ID NO: 24508 - DNA, 80 bp, synthetic construct
  source 1..80: mol_type = other DNA
cctgcacatgctctctttgcctgccaccatgtaagatgtggcaagaggtaagcacatcttacttaccacaaaatgctcct

SEQ ID NO: 24509 - DNA, 80 bp, synthetic construct
  source 1..80: mol_type = other DNA
tgtctcccatttcttcatctctctgtttcatgctcctcttcctctgcttacctctcaaatgaaacatcctggatctcctc

SEQ ID NO: 24510 - DNA, 80 bp, synthetic construct; identical to SEQ ID NO: 10040
  source 1..80: mol_type = other DNA

SEQ ID NO: 24511 - DNA, 80 bp, synthetic construct
  source 1..80: mol_type = other DNA
cctcaaagccaagacctgggtttacagctctctactggccatcttcacctggctgtcttgaaggcatttcaaatgtaact

SEQ ID NO: 24512 - DNA, 80 bp, synthetic construct
  source 1..80: mol_type = other DNA
ccttatatccagaatctcttccagattctcctccttccctttcttttccatcctatgcctcatatgtaggaccatgccca

SEQ ID NO: 24513 - DNA, 80 bp, synthetic construct
  source 1..80: mol_type = other DNA
tccagttcagctgccgcagtctccaaaacatctcccttcttgagtcctctacagacctggtcctccctcctctgtgttcc

SEQ ID NO: 24514 - DNA, 80 bp, synthetic construct
  source 1..80: mol_type = other DNA
cccattctctgtgttggtggagacgtgctaagggggaaatgatgcaggcagggtgggggttgtgggagggcctctgaagg

SEQ ID NO: 24515 - DNA, 80 bp, synthetic construct; identical to SEQ ID NO: 10041
  source 1..80: mol_type = other DNA

SEQ ID NO: 24516 - DNA, 80 bp, synthetic construct
  source 1..80: mol_type = other DNA
aagagatatgaccaagaggagcattttaaacatgtctctcctcgaaacacctaaggcaactcctttatattgaatttcca

SEQ ID NO: 24517 - DNA, 80 bp, synthetic construct
  source 1..80: mol_type = other DNA
aatgcatgcagagatcttttgcttatcaagcttgtagatgaaaatacagaggcatgagctaggaaagagcttgaccccct

SEQ ID NO: 24518 - DNA, 80 bp, synthetic construct; identical to SEQ ID NO: 10042
  source 1..80: mol_type = other DNA

SEQ ID NO: 24519 - DNA, 80 bp, synthetic construct
  source 1..80: mol_type = other DNA
ctaatttttctttctaaaagcaccagcccctgaactggataggtctccttggactggaaagcagacaaagtttgaataaa

SEQ ID NO: 24520 - DNA, 80 bp, synthetic construct
  source 1..80: mol_type = other DNA
cagtcataacaaagtaccatcaactgggtggcttaaaataacggaaatttattttctcacagttttggaggccaaaaatt

SEQ ID NO: 24521 - DNA, 80 bp, synthetic construct
  source 1..80: mol_type = other DNA
acatcactctaatttctgattccatagttacatggtgtgcaccctatatgtgcctgtgttttctcttcttataaggacac

SEQ ID NO: 24522 - DNA, 80 bp, synthetic construct
  source 1..80: mol_type = other DNA
gtctgggatggggagggagggtagagaagacaagactacctacagtgccaaggggattccactcatggttagaaagggtt

SEQ ID NO: 24523 - DNA, 80 bp, synthetic construct; identical to SEQ ID NO: 10043
  source 1..80: mol_type = other DNA

SEQ ID NO: 24524 - DNA, 80 bp, synthetic construct
  source 1..80: mol_type = other DNA
aataaatgaaaagtccctttctcctgctcatatgggcagaacctttcatcgtcctgtttaaaaagttgatgtgattcttc

SEQ ID NO: 24525 - DNA, 80 bp, synthetic construct
  source 1..80: mol_type = other DNA
gcatctggtgctacctgatggaacagatttttatctgagtaggtagttagagcctaatcctttagccaagcctataaata

SEQ ID NO: 24526 - DNA, 80 bp, synthetic construct
  source 1..80: mol_type = other DNA
atctgatgtcaaaagccacggaagagaatatattttacacagcatattaggccccaatgcaaattagaagaaatatgggg

SEQ ID NO: 24527 - DNA, 80 bp, synthetic construct; identical to SEQ ID NO: 10044
  source 1..80: mol_type = other DNA

SEQ ID NO: 24528 - DNA, 80 bp, synthetic construct
  source 1..80: mol_type = other DNA
aagaacgatcccttcaggcagcaattttccagtcaaatttatctgcccaagtttgaggccttaaaattaatgaagttgtt

SEQ ID NO: 24529 - DNA, 80 bp, synthetic construct
  source 1..80: mol_type = other DNA
agactcttggccttagctctgtctttagcttgttctgcagtgggtcttggggcaagtcctcaacatctgtactctgaggt

SEQ ID NO: 24530 - DNA, 80 bp, synthetic construct; identical to SEQ ID NO: 10045
  source 1..80: mol_type = other DNA

SEQ ID NO: 24531 - DNA, 80 bp, synthetic construct
  source 1..80: mol_type = other DNA
gaggagagtttgaaagagatcttgaaaaacctccagatcgattcctttgccctaaggtggcatgccatttcaccctcatt

SEQ ID NO: 24532 - DNA, 80 bp, synthetic construct
  source 1..80: mol_type = other DNA
tggagtgggtagatttaccccttggggcattctgcattttataaaaattgtccttctgtagagatactgaatgactttgg

SEQ ID NO: 24533 - DNA, 80 bp, synthetic construct
  source 1..80: mol_type = other DNA
cactcagtgtctggtttaaataaaatcaggaagtaattcttatctggaatctcctgacgaccactgatctttctctcctg

SEQ ID NO: 24534 - DNA, 80 bp, synthetic construct; identical to SEQ ID NO: 10046
  source 1..80: mol_type = other DNA

SEQ ID NO: 24535 - DNA, 80 bp, synthetic construct
  source 1..80: mol_type = other DNA
gttattgccattgaaagtagccattgaaagactaataaggctttatgcatatcttccatgcgatagaataaagtggaaag

SEQ ID NO: 24536 - DNA, 80 bp, synthetic construct
  source 1..80: mol_type = other DNA
gagctgttagaatgagcacagagaaggaggaatcttataccatgtaaaggcagcctcctgagggctgctaggacaggacc

SEQ ID NO: 24537 - DNA, 80 bp, synthetic construct
  source 1..80: mol_type = other DNA
agaatcaaatgaaccaaaataatatcaaagaacatgtttgggaaactttaaggagcttcttaactgtaaggggccctgga

SEQ ID NO: 24538 - DNA, 80 bp, synthetic construct
  source 1..80: mol_type = other DNA
aaccccgtgtctaccaaaaatccaaaaaaaaaaaaaaaaaaaaaaaaaattagccaggcatggtagtgggagcctgtagt

SEQ ID NO: 24539 - DNA, 80 bp, synthetic construct; identical to SEQ ID NO: 10047
  source 1..80: mol_type = other DNA

SEQ ID NO: 24540 - DNA, 80 bp, synthetic construct
  source 1..80: mol_type = other DNA
tcttttgcatatagggagctgagggaatgccctggagcactatgaatcccaaactgaaactcacagagtccttattatga

SEQ ID NO: 24541 - DNA, 80 bp, synthetic construct
  source 1..80: mol_type = other DNA
tgacctggacataaaaataaagaaaacactgatccatgtgcttggggtgtgtcttttagctgtcactcaatatcagtcaa

SEQ ID NO: 24542 - DNA, 80 bp, synthetic construct
  source 1..80: mol_type = other DNA
gaggatctctgggagatgaactagaagccagggcacttaatggcttggtctaagagttctatccaaagtctattctgcct

SEQ ID NO: 24543 - DNA, 80 bp, synthetic construct; identical to SEQ ID NO: 10048
  source 1..80: mol_type = other DNA

SEQ ID NO: 24544 - DNA, 80 bp, synthetic construct
  source 1..80: mol_type = other DNA
ttacaatatatctacaaatcaaatgatcatgcactgcctgatctaacacagtgcttcccagaaaatcccaagctcaatca

SEQ ID NO: 24545 - DNA, 80 bp, synthetic construct
  source 1..80: mol_type = other DNA
gccatgctggactctttacctacataatgtcacatgatattcaccgtggctctttgagatagaaatgatcatctctgttt

SEQ ID NO: 24546 - DNA, 80 bp, synthetic construct; identical to SEQ ID NO: 10049
  source 1..80: mol_type = other DNA

SEQ ID NO: 24547 - DNA, 80 bp, synthetic construct
  source 1..80: mol_type = other DNA
aggttctggtctcctacctctaacccccttttaggataaaccccacttcacacacttgaaggaaatctctggcctgggta

SEQ ID NO: 24548 - DNA, 80 bp, synthetic construct
  source 1..80: mol_type = other DNA
ctctgagttggaagtgctggctcttgggtatctaggaaagaattttgacttttctcttatatttggtctacagagattag

SEQ ID NO: 24549 - DNA, 80 bp, synthetic construct
  source 1..80: mol_type = other DNA
ggctcagagaagtgaatgcaaagccacgtagggttactttgggtggggttaagtttattagccttttaaaaaattagtat

SEQ ID NO: 24550 - DNA, 80 bp, synthetic construct
  source 1..80: mol_type = other DNA
ggcataaagacgttagttaccttgactacagccacacagccagcaggagacaggaaatcagggtcaaaagactagatcaa

SEQ ID NO: 24551 - DNA, 80 bp, synthetic construct; identical to SEQ ID NO: 10050
  source 1..80: mol_type = other DNA

SEQ ID NO: 24552 - DNA, 80 bp, synthetic construct
  source 1..80: mol_type = other DNA
cttatgaatctgtgaatgggtacagaatggcagataactttaatatgaatgggggccagataatatattcaggggtttaa

SEQ ID NO: 24553 - DNA, 80 bp, synthetic construct
  source 1..80: mol_type = other DNA
aaaacaccaataacttgccaggcatccacagggttgaatattgcagggttgaaaaaaagcagaaagtcttaacttgccct

SEQ ID NO: 24554 - DNA, 80 bp, synthetic construct
  source 1..80: mol_type = other DNA
aggaaagcaaagcccacatgaatgcagttgttttccaaaatcggaagcattggaacagaaatgagtgctagtcaaagttc

SEQ ID NO: 24555 - DNA, 80 bp, synthetic construct; identical to SEQ ID NO: 10051
  source 1..80: mol_type = other DNA

SEQ ID NO: 24556 - DNA, 80 bp, synthetic construct
  source 1..80: mol_type = other DNA
tgaagagaaaggaggaagaaatatacctggactgaaggcattattgatttgctagcaatacaattgttgctgtttttctg

SEQ ID NO: 24557 - DNA, 80 bp, synthetic construct
  source 1..80: mol_type = other DNA
cagggctcatctctatcataatttcatttcacacaatctcaactcctttgcctctttctttacaattatcctggagcagg

SEQ ID NO: 24558 - DNA, 80 bp, synthetic construct
  source 1..80: mol_type = other DNA
ctagttcaaacttcctctcaagttctcaaaactccaattccccatatgcttccacattctcagtgaatgaatttgtttct

SEQ ID NO: 24559 - DNA, 80 bp, synthetic construct; identical to SEQ ID NO: 10052
  source 1..80: mol_type = other DNA

SEQ ID NO: 24560 - DNA, 80 bp, synthetic construct
  source 1..80: mol_type = other DNA
caaaatctagattgtcttcactactccacctcaaggtcgccgacgaccctaggctgcagatacattgaacaactctaggt

SEQ ID NO: 24561 - DNA, 80 bp, synthetic construct
  source 1..80: mol_type = other DNA
tgtagaggaggaaacgtctccttttccggcagcacttgcttaggaactgtcatggctgagtattatattttatcccactg

SEQ ID NO: 24562 - DNA, 80 bp, synthetic construct
  source 1..80: mol_type = other DNA
attttcaactccaaataaccagaaccacattgtagccctcttcgtaagactttaaaaactctgacttttcttacttggaa

SEQ ID NO: 24563 - DNA, 80 bp, synthetic construct; identical to SEQ ID NO: 10053
  source 1..80: mol_type = other DNA

SEQ ID NO: 24564 - DNA, 80 bp, synthetic construct
  source 1..80: mol_type = other DNA
ggccaaaaaccaatgaggaatccttaacttcttccttttattcacaccccacatcaattcatcagcaaatcttgatggct

SEQ ID NO: 24565 - DNA, 80 bp, synthetic construct
  source 1..80: mol_type = other DNA
cctaaaggccccacaggatctggctcctgattctgtctctaacctcatttgcaaccattttccctcattgctggagctca

SEQ ID NO: 24566 - DNA, 80 bp, synthetic construct; identical to SEQ ID NO: 10054
  source 1..80: mol_type = other DNA

SEQ ID NO: 24567 - DNA, 80 bp, synthetic construct
  source 1..80: mol_type = other DNA
taacttcaggctaagcacacactctgccaaacctcaattttctgaaaacgatgacgagaataagaatagggcatattcta

SEQ ID NO: 24568 - DNA, 80 bp, synthetic construct
  source 1..80: mol_type = other DNA
gtgtcaataattacaacgtccagaaatcaaaagtgctcccagagagctgcttcgctattattcactagttaatcattaac

SEQ ID NO: 24569 - DNA, 80 bp, synthetic construct
  source 1..80: mol_type = other DNA
agagctatgcatgtgtgatggttatttacatgaatgccccaggctcactggcaagcatgttttacaaacctacatcaata

SEQ ID NO: 24570 - DNA, 80 bp, synthetic construct
  source 1..80: mol_type = other DNA
ttacaatgattttgtgtcacacaaagcaaagcttaatgtggccaaataaatagtggtctggatgtcaaatcaggcacagc

SEQ ID NO: 24571 - DNA, 80 bp, synthetic construct; identical to SEQ ID NO: 10055
  source 1..80: mol_type = other DNA

SEQ ID NO: 24572 - DNA, 80 bp, synthetic construct
  source 1..80: mol_type = other DNA
gaattaaacagctcccactccacctcacctttctctaagccccatcccatcctgccagagaagtttgtgctctttcttag

SEQ ID NO: 24573 - DNA, 80 bp, synthetic construct
  source 1..80: mol_type = other DNA
taccccttcccaaggcacaacagtgaggaatattaataaaggaaattgttagcatggtgcctacccttagggatttggtt

SEQ ID NO: 24574 - DNA, 80 bp, synthetic construct; identical to SEQ ID NO: 10056
  source 1..80: mol_type = other DNA

SEQ ID NO: 24575 - DNA, 80 bp, synthetic construct
  source 1..80: mol_type = other DNA
acttgggccctgacctccttaaccacttaggatagtggtgttgaggccattcaacaaacatgttaatgacgatggattgt

SEQ ID NO: 24576 - DNA, 80 bp, synthetic construct
  source 1..80: mol_type = other DNA
cattgatttagaaaaaattaggaaaagcatttcacagtggctgtttttggtttggtgtcatgtaggacatgctttgcagg

SEQ ID NO: 24577 - DNA, 80 bp, synthetic construct
  source 1..80: mol_type = other DNA
cctcctcttcagaacctgtatctctcagaatttgatagttccaggtcactcactgcattttcacctttccagacatgatt

SEQ ID NO: 24578 - DNA, 80 bp, synthetic construct
  source 1..80: mol_type = other DNA
tcacactggcttttggtagctgtggaagactaatgggcatttttattttactaatccaagacagcaaatatcactctcca

SEQ ID NO: 24579 - DNA, 80 bp, synthetic construct; identical to SEQ ID NO: 10057
  source 1..80: mol_type = other DNA

SEQ ID NO: 24580 - DNA, 80 bp, synthetic construct
  source 1..80: mol_type = other DNA
ccaggagtctccagacatgttagacaagaggctacaaactatccaagaacaactggctcttctcttgacctgatgtttca

SEQ ID NO: 24581 - DNA, 80 bp, synthetic construct
  source 1..80: mol_type = other DNA
tcagaggcatctgcttttgtgatccttacaacaactttggtagttaacctcttttacagatgaaaagattgaggctcgga

SEQ ID NO: 24582 - DNA, 80 bp, synthetic construct
  source 1..80: mol_type = other DNA
agaaagaaactgaccaggtcagagatgcttgctgcattctcctaactgaggacaatagatccctttgggtcaaccaggaa

SEQ ID NO: 24583 - DNA, 80 bp, synthetic construct; identical to SEQ ID NO: 10058
  source 1..80: mol_type = other DNA

SEQ ID NO: 24584 - DNA, 80 bp, synthetic construct
  source 1..80: mol_type = other DNA
cttaacctttttcaagctttgtttctctgcatgtaaaacagaactcatcatgctttcccagccaacttttgggatgctca

SEQ ID NO: 24585 - DNA, 80 bp, synthetic construct
  source 1..80: mol_type = other DNA
cctgtattactaaaataaactcagcttgtattaaaatagataggccaacagcctgattggcttcatcctactctggtgct

SEQ ID NO: 24586 - DNA, 80 bp, synthetic construct; identical to SEQ ID NO: 10059
  source 1..80: mol_type = other DNA

SEQ ID NO: 24587 - DNA, 80 bp, synthetic construct
  source 1..80: mol_type = other DNA
actgagaaagaaaccaatacttcatgtgtgcctattacacacggtgcccagcaccatactgggggctttatagtcattgc

SEQ ID NO: 24588 - DNA, 80 bp, synthetic construct
  source 1..80: mol_type = other DNA
taacttgtccaaggttctggagccaaaaggggtggagctaagattaattcattaattccattcatacttcctgagtatct

SEQ ID NO: 24589 - DNA, 80 bp, synthetic construct
  source 1..80: mol_type = other DNA
aacaacctctcaagtccttttgacatcttgatgttgttatccattgtgaaggagacagacacaaccctatgagaacgtat

SEQ ID NO: 24590 - DNA, 80 bp, synthetic construct; identical to SEQ ID NO: 10060
  source 1..80: mol_type = other DNA

SEQ ID NO: 24591 - DNA, 80 bp, synthetic construct
  source 1..80: mol_type = other DNA
ccatctaaaactgctacctaaaatggctctgccccgtaacaggactgacctgacttgccagggaccctcctgccttttct

SEQ ID NO: 24592 - DNA, 80 bp, synthetic construct
  source 1..80: mol_type = other DNA
ataagccctggcttgctctccttgccctctcccatggccagggccagcaaggtcagagcctctctctttattttgcttta

SEQ ID NO: 24593 - DNA, 80 bp, synthetic construct
  source 1..80: mol_type = other DNA
acattttttcactatctggaagttactgggagaaagttattcaagtaccacggtaaaaaggccataaaacaccttgggga

SEQ ID NO: 24594 - DNA, 80 bp, synthetic construct; identical to SEQ ID NO: 10061
  source 1..80: mol_type = other DNA

SEQ ID NO: 24595 - DNA, 80 bp, synthetic construct
  source 1..80: mol_type = other DNA
cacttaacaagacagcacttggctgaaaagtatatcgaggagaagggaaggagagagttcctctgcacccatgagatttg

SEQ ID NO: 24596 - DNA, 80 bp, synthetic construct
  source 1..80: mol_type = other DNA
taggaagggcaggcctacggggatttgggagatgctgggatgtgagtgcaggatagaccaggaggaggcagatacactag

SEQ ID NO: 24597 - DNA, 80 bp, synthetic construct
  source 1..80: mol_type = other DNA
ggctaaaaaaaagtggaattccacctcattttcaaaggaacagccaatgaaagtaaactagagatagagggatagagttc

SEQ ID NO: 24598 - DNA, 80 bp, synthetic construct; identical to SEQ ID NO: 10062
  source 1..80: mol_type = other DNA

SEQ ID NO: 24599 - DNA, 80 bp, synthetic construct
  source 1..80: mol_type = other DNA
agctcactactggagaaggaagctctgggtcaggagatgtggccacaatcacacaatgagaagagcaagatgcactgtca

SEQ ID NO: 24600 - DNA, 80 bp, synthetic construct
  source 1..80: mol_type = other DNA
ttccttaaagcatttgtaactgtcaagaggcttccctaaagaaaaggggtaaaacttggctcctatctctactctgggaa

SEQ ID NO: 24601 - DNA, 80 bp, synthetic construct
  source 1..80: mol_type = other DNA
ctggccaagatggcttggcttcttccatgtccccttcaatcatggtggcagaagccttccaaggtttgagcataaactcg

SEQ ID NO: 24602 - DNA, 80 bp, synthetic construct; identical to SEQ ID NO: 10063
  source 1..80: mol_type = other DNA

SEQ ID NO: 24603 - DNA, 80 bp, synthetic construct
  source 1..80: mol_type = other DNA
tgggctaattggataatactacatctatctcttataattgtggaccaagagcacccctgactccttgggaggttctgtca

SEQ ID NO: 24604 - DNA, 80 bp, synthetic construct
  source 1..80: mol_type = other DNA
accctggtcatttgtacagcatgcatccagagacttctggaatcctcatcttcaagaatattgctgtaacatatcactac

SEQ ID NO: 24605 - DNA, 80 bp, synthetic construct
  source 1..80: mol_type = other DNA
tagaaagtgtgactattaaatctgccactaccaagcaactgctgtagtcagaatatgagagagaaataaaacaagatgca

SEQ ID NO: 24606 - DNA, 80 bp, synthetic construct; identical to SEQ ID NO: 10064
  source 1..80: mol_type = other DNA

SEQ ID NO: 24607 - DNA, 80 bp, synthetic construct
  source 1..80: mol_type = other DNA
ctcaccccttccaccatgtgaggacacagcaagaaggcactgctcgtgaatcaggaaacaggccctcaccagacactcaa

SEQ ID NO: 24608 - DNA, 80 bp, synthetic construct
  source 1..80: mol_type = other DNA
tcatgaattgatataagtggagtgaatataagaccaacagagagaagcactagaacatgaagcagccttccagggggttg

SEQ ID NO: 24609 - DNA, 80 bp, synthetic construct
  source 1..80: mol_type = other DNA
aagtaaagcaggatcaggatctgctggtatcacccagaagaatgaaatggcagccaggtcttcttatagctttgaaatgt

SEQ ID NO: 24610 - DNA, 80 bp, synthetic construct; identical to SEQ ID NO: 10065
  source 1..80: mol_type = other DNA

SEQ ID NO: 24611 - DNA, 80 bp, synthetic construct
  source 1..80: mol_type = other DNA
ccagccattgagagttctgagttttaaaacttcagggaagagtcatgtgatccctatgagggaaacatacactttgtaga

SEQ ID NO: 24612 - DNA, 80 bp, synthetic construct
  source 1..80: mol_type = other DNA
caccactgatcaacatcagaggggccaacagtagatggcctgaacttggagttgcttgtaatgcttacaaaagctgtcag

SEQ ID NO: 24613 - DNA, 80 bp, synthetic construct
  source 1..80: mol_type = other DNA
aagattcattgacttggcaattgtgcaatctgtgctgtttatattcattatccctcaaccatgttcaagttccaagaaaa

SEQ ID NO: 24614 - DNA, 80 bp, synthetic construct; identical to SEQ ID NO: 10066
  source 1..80: mol_type = other DNA

SEQ ID NO: 24615 - DNA, 80 bp, synthetic construct
  source 1..80: mol_type = other DNA
aatatagatcctgatctctctttctccctctctctttctgaaacacacacacacacacaaatatccaaatatcaatggct

SEQ ID NO: 24616 - DNA, 80 bp, synthetic construct
  source 1..80: mol_type = other DNA
aaaatatattttaaaataattatgctcagcactgctgagggcaatgagatagataatcttatacattcctggtagaagta

SEQ ID NO: 24617 - DNA, 80 bp, synthetic construct
  source 1..80: mol_type = other DNA
attggtattctcgttttgcatatgaagaaattaaaagggtcagtttcaaatgccccagagattctgattctcacttgtca

SEQ ID NO: 24618 - DNA, 80 bp, synthetic construct
  source 1..80: mol_type = other DNA
ctgtacataaggacagataactaatttaggcagtatttaagagtgttgatacttttgactgattctctcctaagaaaata

SEQ ID NO: 24619 - DNA, 80 bp, synthetic construct; identical to SEQ ID NO: 10067
  source 1..80: mol_type = other DNA

SEQ ID NO: 24620 - DNA, 80 bp, synthetic construct
  source 1..80: mol_type = other DNA
ataaggagcttttccccctttgctcggcatttctttctccagctgccatgtgaataaggacatatttgcttcaatttctg

SEQ ID NO: 24621 - DNA, 80 bp, synthetic construct
  source 1..80: mol_type = other DNA
acccctattttgcgtataagaaaactgagccatcgaaaagtaacttgctcaagaccccaagccagcccatgacagcatca

SEQ ID NO: 24622 - DNA, 80 bp, synthetic construct
  source 1..80: mol_type = other DNA
aaaattacatatattgtatgatctagctgtgtgaaaaatatacaaagaaaatgcctggaaggaaatgcaccaattaacag

SEQ ID NO: 24623 - DNA, 80 bp, synthetic construct; identical to SEQ ID NO: 10068
  source 1..80: mol_type = other DNA

SEQ ID NO: 24624 - DNA, 80 bp, synthetic construct
  source 1..80: mol_type = other DNA
tatacactcttgaatttctactccccttaccccagtatctagcagagtgccttatgtagtgtcgacttttggcaaatatt

SEQ ID NO: 24625 - DNA, 80 bp, synthetic construct
  source 1..80: mol_type = other DNA
tgggcacaaatacttagacccagtgatgttccttgttccagtacttggtagaacctaaagattagaaagaattagatgtt

SEQ ID NO: 24626 - DNA, 80 bp, synthetic construct
  source 1..80: mol_type = other DNA
taatgttgtgaaaatatataggtgctagctagagataaatgcatgaaacagattgggaggctatacatgaaaatgttagg

SEQ ID NO: 24627 - DNA, 80 bp, synthetic construct; identical to SEQ ID NO: 10069
  source 1..80: mol_type = other DNA

SEQ ID NO: 24628 - DNA, 80 bp, synthetic construct
  source 1..80: mol_type = other DNA
tcatttcttgcattgttttagaaaagaactggcaaactagggaatccagaatacaacaagcaggtggtaggcatctgcca

SEQ ID NO: 24629 - DNA, 80 bp, synthetic construct
  source 1..80: mol_type = other DNA
ttgggatggttcctcagaataacacatgtgcctgcatggagggtggaaaatggtttgagttgtagttgaagttagacctt

SEQ ID NO: 24630 - DNA, 80 bp, synthetic construct; identical to SEQ ID NO: 10070
  source 1..80: mol_type = other DNA

SEQ ID NO: 24631 - DNA, 80 bp, synthetic construct
  source 1..80: mol_type = other DNA
ccttggagtccatatcaatggaaagagaaggaccaaatggatgcttgaaaagtaaacgatatattataaatttgcatgcc

SEQ ID NO: 24632 - DNA, 80 bp, synthetic construct
  source 1..80: mol_type = other DNA
aacttatgtggccatctactactttgttgtcactccagaactactgagtggtgataacacagcccatgaatccatctctg

SEQ ID NO: 24633 - DNA, 80 bp, synthetic construct
  source 1..80: mol_type = other DNA
tatagagactgaatcaattaaagagtggcctcaacttaaagctgaagcatgataggaacaccatgccatgagccatttgc

SEQ ID NO: 24634 - DNA, 80 bp, synthetic construct; identical to SEQ ID NO: 10071
  source 1..80: mol_type = other DNA

SEQ ID NO: 24635 - DNA, 80 bp, synthetic construct
  source 1..80: mol_type = other DNA
ccaggcatagtggcacccatctgtagttctagcttctcaggagcctgaagcagggagatcactggagccgaggagtttga

SEQ ID NO: 24636 - DNA, 80 bp, synthetic construct
  source 1..80: mol_type = other DNA
tagatcacaaggccaagaaattgagaccatcctggccaactttgtgaaacaccgtctctactaaaaatacaaaaattagc

SEQ ID NO: 24637 - DNA, 80 bp, synthetic construct
  source 1..80: mol_type = other DNA
agaacatagttacatggtttgtgaaatttgataaacttggatctgcatttccattctaccacttacaaggcatgtgattg

SEQ ID NO: 24638 - DNA, 80 bp, synthetic construct; identical to SEQ ID NO: 10072
  source 1..80: mol_type = other DNA

SEQ ID NO: 24639 - DNA, 80 bp, synthetic construct
  source 1..80: mol_type = other DNA
cctacaccatacatactcattccctagtttagtagaacctcagagagctactgcattctgatgtgaggtcagaggctgtt

SEQ ID NO: 24640 - DNA, 80 bp, synthetic construct
  source 1..80: mol_type = other DNA
cctaactatgcagggccagtttacttgactattatgctccacaaaggtaaaacagagctctatcagcttcacgaattaac

SEQ ID NO: 24641 - DNA, 80 bp, synthetic construct
  source 1..80: mol_type = other DNA
gaggacagtcagagggacagttagacaaagggacagacagacagaaaaacatggttatttgtccttttgttctcttatct

SEQ ID NO: 24642 - DNA, 80 bp, synthetic construct; identical to SEQ ID NO: 10073
  source 1..80: mol_type = other DNA

SEQ ID NO: 24643 - DNA, 80 bp, synthetic construct
  source 1..80: mol_type = other DNA
caggaggctaaggcaggagaatcgcctgaacccaggaggcagaggttgcagtgagcagtgatcgtgccactgcatgccag

SEQ ID NO: 24644 - DNA, 80 bp, synthetic construct
  source 1..80: mol_type = other DNA
gaccttctagaaatggaaaactatggaggaaaaagattagtgtttgctaggggttaggagtaggggtggggaagataaat

SEQ ID NO: 24645 - DNA, 80 bp, synthetic construct
  source 1..80: mol_type = other DNA
gtcagcataggtctgtcaattgttacaaattataccaaaccggtgtgaatgttgacagtgggggagctatgcattgtggg

SEQ ID NO: 24646 - DNA, 80 bp, synthetic construct
  source 1..80: mol_type = other DNA
taatcaatcttcacaaaaacaatctggaataagaggtcagatccattcaaagcttttaagttgagctgcttggttattga

SEQ ID NO: 24647 - DNA, 80 bp, synthetic construct; identical to SEQ ID NO: 10074
  source 1..80: mol_type = other DNA

SEQ ID NO: 24648 - DNA, 80 bp, synthetic construct
  source 1..80: mol_type = other DNA
caataatgaaacctgaactctgcctcccacatcagtgagcatcttggccttcatcacactaacaactttactgctcacag

SEQ ID NO: 24649 - DNA, 80 bp, synthetic construct
  source 1..80: mol_type = other DNA
taggtgagatgccatcttaatcctaaggcaggcttgctgataaacatcagcagggcaagcactctacattgcttttccca

SEQ ID NO: 24650 - DNA, 80 bp, synthetic construct
  source 1..80: mol_type = other DNA
tggctgtgggcctagtttctgcattcataatagaaaggggctaggccaattgattgccaaggtccttcctggctctgatt

SEQ ID NO: 24651 - DNA, 80 bp, synthetic construct; identical to SEQ ID NO: 10075
  source 1..80: mol_type = other DNA

SEQ ID NO: 24652 - DNA, 80 bp, synthetic construct
  source 1..80: mol_type = other DNA
aaacacttcttgtactttggcaacgtctcagccaaatatcacaataatggccaggctctaggcaatagacaagaaaaact

SEQ ID NO: 24653 - DNA, 80 bp, synthetic construct
  source 1..80: mol_type = other DNA
tttttccatattgataatgcataagctagctgagatttctaaagcttctacaatttttcatttcttcttcccgccaaagc

SEQ ID NO: 24654 - DNA, 80 bp, synthetic construct
  source 1..80: mol_type = other DNA
accttggtggtataaaattaaagactaaatgaaggaagcaacagacttcaaaagaaaagctatcccctccacaaaggaag

SEQ ID NO: 24655 - DNA, 80 bp, synthetic construct; identical to SEQ ID NO: 10076
  source 1..80: mol_type = other DNA

SEQ ID NO: 24656 - DNA, 80 bp, synthetic construct
  source 1..80: mol_type = other DNA
aattggatcaggacaggcctgcaaggctccaaccaagcccattttatggttcacatggaggtctcgagatacataaaatc

SEQ ID NO: 24657 - DNA, 80 bp, synthetic construct
  source 1..80: mol_type = other DNA
ttcatattagtttcctacatgaccttgggactagcagatgccttagggagtatttaatccaaactcaccacacacaggag

SEQ ID NO: 24658 - DNA, 80 bp, synthetic construct; identical to SEQ ID NO: 10077
  source 1..80: mol_type = other DNA

SEQ ID NO: 24659 - DNA, 80 bp, synthetic construct
  source 1..80: mol_type = other DNA
attcactcacatatctggtgggtgattctgacttttttttaattaactgacttttctgggaaattattttattgattgat

SEQ ID NO: 24660 - DNA, 80 bp, synthetic construct
  source 1..80: mol_type = other DNA
cacttggcttttttacaacacggtttcaagatggggggtaccgagagagagagcagatggaagctgtattagcttttcca

SEQ ID NO: 24661 - DNA, 80 bp, synthetic construct
  source 1..80: mol_type = other DNA
atgccaaagatgtctttttctaccacatgggttagaaagtgaggaatcgattttcactgttttaaatacacagccccaca

SEQ ID NO: 24662 - DNA, 80 bp, synthetic construct
  source 1..80: mol_type = other DNA
actgaattaggaagtggttgaggtagattttatcccagatctggactgaaggctcactctcttttcataacttcctgcaa

SEQ ID NO: 24663 - DNA, 80 bp, synthetic construct; identical to SEQ ID NO: 10078
  source 1..80: mol_type = other DNA

SEQ ID NO: 24664 - DNA, 80 bp, synthetic construct
  source 1..80: mol_type = other DNA
atgtatcccaaccaataattacacacgggcttagtcacttgcttattgtctgactgctaccatagtgcctggcagagagt

SEQ ID NO: 24665 - DNA, 80 bp, synthetic construct
  source 1..80: mol_type = other DNA
gtccacactctcaagccccactatggaaaaatcaggtataataatagcaatcttaatgaggcacttaagtataaatcagg

SEQ ID NO: 24666 - DNA, 80 bp, synthetic construct; identical to SEQ ID NO: 10079
  source 1..80: mol_type = other DNA

SEQ ID NO: 24667 - DNA, 80 bp, synthetic construct
  source 1..80: mol_type = other DNA
ttataggatcagcatttgtgagcctcttgaatcttcagaatacaaatagggaatggtgcaacaaagtttggctttgcttg

SEQ ID NO: 24668 - DNA, 80 bp, synthetic construct
  source 1..80: mol_type = other DNA
tgagaaacctgacattttctgggattcactgaaactctaggtccttagtccagtttggggaggaaagtgcctgtaatttt

SEQ ID NO: 24669 - DNA, 80 bp, synthetic construct
  source 1..80: mol_type = other DNA
acgaaataagccatgaggatgttatgctaaaagaaaccacagtccctgagatgaatctcacacagccctctattcctcac

SEQ ID NO: 24670 - DNA, 80 bp, synthetic construct; identical to SEQ ID NO: 10080
  source 1..80: mol_type = other DNA

SEQ ID NO: 24671 - DNA, 80 bp, synthetic construct
  source 1..80: mol_type = other DNA
tcacaccaataaaaatggaagtttcctttactattgagttaccatcaggatacatcggttttggagtgacaggaggagag

SEQ ID NO: 24672 - DNA, 80 bp, synthetic construct
  source 1..80: mol_type = other DNA
acagagtgaatgctcaataaatactccaaagaatttccagtaatggaaagagccccagagaccatttggcccaatcattt

SEQ ID NO: 24673 - DNA, 80 bp, synthetic construct
  source 1..80: mol_type = other DNA
ttcccttctaaagtggcaaggtccaaaggaaagataaattaacctcaactcacactaaggtataaaggacagtgggcaga

SEQ ID NO: 24674 - DNA, 80 bp, synthetic construct
  source 1..80: mol_type = other DNA
ctgggaaaacaaaaaagcagtttggaagggcggtcaagtggacttcccttcttaaaggggttgcaagacccacaacaaga

SEQ ID NO: 24675 - DNA, 80 bp, synthetic construct; identical to SEQ ID NO: 10081
  source 1..80: mol_type = other DNA

SEQ ID NO: 24676 - DNA, 80 bp, synthetic construct
  source 1..80: mol_type = other DNA
ctatacattgaataggaaggttatttctaaaattcactgggtgaaagaagcccgtgggaagcatgttgaacagacacaat

SEQ ID NO: 24677 - DNA, 80 bp, synthetic construct
  source 1..80: mol_type = other DNA
ctcactctgtcacccaggctggaatgcagtggcacgatcaaggctcactgcaacctctgcctcctgggttcaagcgattc

SEQ ID NO: 24678 - DNA, 80 bp, synthetic construct; identical to SEQ ID NO: 10082
  source 1..80: mol_type = other DNA

SEQ ID NO: 24679 - DNA, 80 bp, synthetic construct
  source 1..80: mol_type = other DNA
aggaaatgctaacattggtggtttggaggtcatgctctgagaacctgtgatatagatgaaaggtaaccttttaaaaatca

SEQ ID NO: 24680 - DNA, 80 bp, synthetic construct
  source 1..80: mol_type = other DNA
ggccccttaatcctgaatagataatagttttaaataaatattcttaggaccccagagagacatgtgggactgctgaccaa

SEQ ID NO: 24681 - DNA, 80 bp, synthetic construct
  source 1..80: mol_type = other DNA
ctccaaccccctgagcccagccatttattagcccacataaggcaacttcagtttagccgaacagcttatctataatatat

SEQ ID NO: 24682 - DNA, 80 bp, synthetic construct
  source 1..80: mol_type = other DNA
gtaatcagaagtgcagtgctcctcccctaaaacactccagacccttgaaagcaggttcatgtcattatctcaagagcagc

SEQ ID NO: 24683 - DNA, 80 bp, synthetic construct; identical to SEQ ID NO: 10083
  source 1..80: mol_type = other DNA

SEQ ID NO: 24684 - DNA, 80 bp, synthetic construct
  source 1..80: mol_type = other DNA
caatggtatttgtgacctaaacatattaaaatatagaaaaggtactaagctgggcagagtggctcatgcttataattcaa

SEQ ID NO: 24685 - DNA, 80 bp, synthetic construct
  source 1..80: mol_type = other DNA
gattgcttgaggtcaggttgattgcttgagtggagtggagtgtaacggaacagaatgggaaggaaggaaggaaggaagga

SEQ ID NO: 24686 - DNA, 80 bp, synthetic construct
  source 1..80: mol_type = other DNA
gtaatcccagcattttgggaggccaaggtgggtggatcatgaggtcaggagttcgagaccagcctggccagcatggtgaa

SEQ ID NO: 24687 - DNA, 80 bp, synthetic construct; identical to SEQ ID NO: 10084
  source 1..80: mol_type = other DNA

SEQ ID NO: 24688 - DNA, 80 bp, synthetic construct
  source 1..80: mol_type = other DNA
taaatttattttaaaaaaattaattgtgctaggacattacgatggctatgacttcagcacgcgataggaatttttcagct

SEQ ID NO: 24689 - DNA, 80 bp, synthetic construct
  source 1..80: mol_type = other DNA
agcttcttgtaatcccaagtaataactgcactttctgttcctcttgccttctgctactctgagttaatgaataacaccag

SEQ ID NO: 24690 - DNA, 80 bp, synthetic construct
  source 1..80: mol_type = other DNA
tcttcatgttctagatttttagggacagttcccagctcaagtattctgtcctcttgttcaaccaataagtactaattagt

SEQ ID NO: 24691 - DNA, 80 bp, synthetic construct; identical to SEQ ID NO: 10085
  source 1..80: mol_type = other DNA

SEQ ID NO: 24692 - DNA, 80 bp, synthetic construct
  source 1..80: mol_type = other DNA
tgttccgagcacgtttaaggtaggctaggctaggctatgatgtttggtagcttacgtgtattcaatgcatttgtgacttc

SEQ ID NO: 24693 - DNA, 80 bp, synthetic construct
  source 1..80: mol_type = other DNA
cacgcgccaccatgcccggctaatttttgtatttttagtagagacggggtttcaccgtgttagccaggatggtctcgatc

SEQ ID NO: 24694 - DNA, 80 bp, synthetic construct
  source 1..80: mol_type = other DNA
ctctcacatcctgtactgacactgcagaatagccctgaaggttctccttcctggaagaaggagcaacagtcttgtcatct

SEQ ID NO: 24695 - DNA, 80 bp, synthetic construct; identical to SEQ ID NO: 10086
  source 1..80: mol_type = other DNA

SEQ ID NO: 24696 - DNA, 80 bp, synthetic construct
  source 1..80: mol_type = other DNA
gcctggatcgagaaagtaaagtcattttaggagctgccactaatcttaaaaaataacaagtgcgatttgatctgtgcaag

SEQ ID NO: 24697 - DNA, 80 bp, synthetic construct
  source 1..80: mol_type = other DNA
ctggcttccccctctcttaagcctggtctccgtctcaatttccattcctatcggccagaaaaataaagattgtttacaga

SEQ ID NO: 24698 - DNA, 80 bp, synthetic construct
  source 1..80: mol_type = other DNA
attacccagggcaatttccaatttcatcctgcaatttcccaaagtttaaactcggctgaaccataactgaatgcccttga

SEQ ID NO: 24699 - DNA, 80 bp, synthetic construct; identical to SEQ ID NO: 10087
  source 1..80: mol_type = other DNA

SEQ ID NO: 24700 - DNA, 80 bp, synthetic construct
  source 1..80: mol_type = other DNA
ttgcaggatgctgccagcccaaacgcaggagtgattgggctcatcagataagaaagccacgtcctcaaatccaggctatc

SEQ ID NO: 24701 - DNA, 80 bp, synthetic construct
  source 1..80: mol_type = other DNA
tcactgagtttaagcatgataccagtcactccctgactcagtctcttcatctgtgatgaggaataccaaatattctacag

SEQ ID NO: 24702 - DNA, 80 bp, synthetic construct
  source 1..80: mol_type = other DNA
cactccagcctgggtgacagagcaagaccctgtctcaaaataataataataataataataaagtagagctctaaacttgt

SEQ ID NO: 24703 - DNA, 80 bp, synthetic construct; identical to SEQ ID NO: 10088
  source 1..80: mol_type = other DNA

SEQ ID NO: 24704 - DNA, 80 bp, synthetic construct
  source 1..80: mol_type = other DNA
cgtgattctgagcttggttgcctgtgaaggaatgcttataaagtttttccaacagcagcttctctaagggtaccaactct

SEQ ID NO: 24705 - DNA, 80 bp, synthetic construct
  source 1..80: mol_type = other DNA
tagtcagaaacacctcaaccctgcactcaaagggactcatggacttggagtccctgccggtgaatggccctgtgtgaggg

SEQ ID NO: 24706 - DNA, 80 bp, synthetic construct
  source 1..80: mol_type = other DNA
tttaggggaagaattctccacggacctattttaccacagcacctatttctgcagactatctcaggtaaccggaatttcaa

SEQ ID NO: 24707 - DNA, 80 bp, synthetic construct; identical to SEQ ID NO: 10089
  source 1..80: mol_type = other DNA

SEQ ID NO: 24708 - DNA, 80 bp, synthetic construct
  source 1..80: mol_type = other DNA
ccctttctgccagtgcttaaatgaactgaaaagaataacaaacccaagttttaataagtacatgcaaggaggctgccgtt

SEQ ID NO: 24709 - DNA, 80 bp, synthetic construct
  source 1..80: mol_type = other DNA
caattctcttcttcccccttttcacttggctaaattggtcttgcttcatggctcagctcaaaagtccatttcccgggagg

SEQ ID NO: 24710 - DNA, 80 bp, synthetic construct
  source 1..80: mol_type = other DNA
taccctgtctcagcatgtagtcaatcctctatatactgtgttgatgtctttataactatttccatgactctgaagcaagc

SEQ ID NO: 24711 - DNA, 80 bp, synthetic construct; identical to SEQ ID NO: 10090
  source 1..80: mol_type = other DNA

SEQ ID NO: 24712 - DNA, 80 bp, synthetic construct
  source 1..80: mol_type = other DNA
agcagaccatgagcaaataacacagataaacagtatcagggagaggtaaatgctgtgatgacagaggaaagcagaaaggg

SEQ ID NO: 24713 - DNA, 80 bp, synthetic construct
  source 1..80: mol_type = other DNA
gaagaccacaatagctatagtgaaatgtggaaactggggagcagcaggaggaaaagccagacgggcatcttggagcaggt

SEQ ID NO: 24714 - DNA, 80 bp, synthetic construct
  source 1..80: mol_type = other DNA
acccaggcagtgtgatccagagctcatactcctgctataccaccctttcatgtcctgtaaggaaggttaccaagtaaaat

SEQ ID NO: 24715 - DNA, 80 bp, synthetic construct; identical to SEQ ID NO: 10091
  source 1..80: mol_type = other DNA

SEQ ID NO: 24716 - DNA, 80 bp, synthetic construct
  source 1..80: mol_type = other DNA
ggattttgagtagtagacagacagacatgatctcactcaggccttcattcttttcatgagggaaaacacacccattccca

SEQ ID NO: 24717 - DNA, 80 bp, synthetic construct
  source 1..80: mol_type = other DNA
tggagtagctaggaccacaggcatgtgccaccatacctggctaattttttgtctttttagtagagacagggttttgctat

SEQ ID NO: 24718 - DNA, 80 bp, synthetic construct
  source 1..80: mol_type = other DNA
ggactcactttagcattaaggttcaaccatggcacctcattgacaagccactggttaaaccttttctcagtgccaggctt

SEQ ID NO: 24719 - DNA, 80 bp, synthetic construct; identical to SEQ ID NO: 10092
  source 1..80: mol_type = other DNA

SEQ ID NO: 24720 - DNA, 80 bp, synthetic construct
  source 1..80: mol_type = other DNA
ctttctggcctcttcctgcttttttctctcattcttcttcttcaattaaaaaggctttagccaaaatgaattcctacctc

SEQ ID NO: 24721 - DNA, 80 bp, synthetic construct
  source 1..80: mol_type = other DNA
aacaatttgccttctctgggaatacaggctaaatcttgctttttttttctgcaatccacaatccacacttcactttggac

SEQ ID NO: 24722 - DNA, 80 bp, synthetic construct
  source 1..80: mol_type = other DNA
gttaaccagttggaatgcaagtctgcaagatggtcacacaagacctttttcttcattattgtactttcctattccttgag

SEQ ID NO: 24723 - DNA, 80 bp, synthetic construct; identical to SEQ ID NO: 10093
  source 1..80: mol_type = other DNA

SEQ ID NO: 24724 - DNA, 80 bp, synthetic construct
  source 1..80: mol_type = other DNA
tttcccttgacatgctttctgggaaatttccaatgtctggctttgaccactctggctgttttaaatcagaaacactcttt

SEQ ID NO: 24725 - DNA, 80 bp, synthetic construct
  source 1..80: mol_type = other DNA
taacactgaagattaataggtcactgcttccaacgtcgaaagccattgtcacattaattcatttgtgcatacatgatgtc

SEQ ID NO: 24726 - DNA, 80 bp, synthetic construct
  source 1..80: mol_type = other DNA
tcattctcacagaggtaaagttagttttgtttgtttggttttgtcacaacaagtgcaactaagctacaagtactttactc

SEQ ID NO: 24727 - DNA, 80 bp, synthetic construct
  source 1..80: mol_type = other DNA
catccctatatacacacttccttttcctgatgctcagcctatctgtagagtctgttggactgagtgggtgggacttctgg

SEQ ID NO: 24728 - DNA, 80 bp, synthetic construct; identical to SEQ ID NO: 10094
  source 1..80: mol_type = other DNA

SEQ ID NO: 24729 - DNA, 80 bp, synthetic construct
  source 1..80: mol_type = other DNA
agggcttacagacattattgttgggattactactaatttttatttgggggtagagggagtatttgaaactctggaaccca

SEQ ID NO: 24730 - DNA, 80 bp, synthetic construct
  source 1..80: mol_type = other DNA
acccctgccccttctgtcccaaggaaagaaacaactgcctggggctgtagacttctcaggaagctctaatgaatcacttc

SEQ ID NO: 24731 - DNA, 80 bp, synthetic construct; identical to SEQ ID NO: 10095
  source 1..80: mol_type = other DNA

SEQ ID NO: 24732 - DNA, 80 bp, synthetic construct
  source 1..80: mol_type = other DNA
tgtgggacatattccttgacctttggagctttggccttcctgtgttaaatgggagcaataggatgatgaatatgctctgg

SEQ ID NO: 24733 - DNA, 80 bp, synthetic construct
  source 1..80: mol_type = other DNA
cacaaaggaagagtctgcactggaaagcaaagcaaaatagattggaaatgttcagtggaatttaagcaaagaatgcagag

SEQ ID NO: 24734 - DNA, 80 bp, synthetic construct
  source 1..80: mol_type = other DNA
agacaaaaacagacttctggatggggtgagcaatctctccctttgggttccagtaacgagtccagaagcttagaaggact

SEQ ID NO: 24735 - DNA, 80 bp, synthetic construct
  source 1..80: mol_type = other DNA
aggggaataatcgcaatctgcacaatgtaaattcaagtcaatcggtaaagggggaaagaaaatcatttgcctttgacatt

SEQ ID NO: 24736 - DNA, 80 bp, synthetic construct; identical to SEQ ID NO: 10096
  source 1..80: mol_type = other DNA

SEQ ID NO: 24737 - DNA, 80 bp, synthetic construct
  source 1..80: mol_type = other DNA
tgtagcccttggtccatctgacaagaggaaatcattataccagatccatgtctcagcagaggaaaaatatgataataagg

SEQ ID NO: 24738 - DNA, 80 bp, synthetic construct
  source 1..80: mol_type = other DNA
ttaaaatgtagcagctcttagagacatagacatatgtggctctgaactacagaacagaagaggaaatgaggataagggaa

SEQ ID NO: 24739 - DNA, 80 bp, synthetic construct
  source 1..80: mol_type = other DNA
cgaggcgggcggatcacgaggtcaagagatagagaccatcctggccaacatggtgaaaccccatctctactaaaaataca

SEQ ID NO: 24740 - DNA, 80 bp, synthetic construct; identical to SEQ ID NO: 10097
  source 1..80: mol_type = other DNA

SEQ ID NO: 24741 - DNA, 80 bp, synthetic construct
  source 1..80: mol_type = other DNA
gaggcccgtaggtagacacctaaatagcattattataatcattataaatgccaacattctccttctagtcactttgagag

SEQ ID NO: 24742 - DNA, 80 bp, synthetic construct
  source 1..80: mol_type = other DNA
cagttaataaaaataacgagtgcctcataaatcaggaaattaagtgcttccccattaaaccaggctcagcccccacattt

SEQ ID NO: 24743 - DNA, 80 bp, synthetic construct; identical to SEQ ID NO: 10098
  source 1..80: mol_type = other DNA

SEQ ID NO: 24744 - DNA, 80 bp, synthetic construct
  source 1..80: mol_type = other DNA
tttgaaactccctctcgtaacaccctgtttattctgctctcacagccacctggggaggtggagatcactatctccaagac

SEQ ID NO: 24745 - DNA, 80 bp, synthetic construct
  source 1..80: mol_type = other DNA
attcattacatgtgtccaagggtcaggctgaggccctgggttgactgcagggctgtctgagtagagctctccaagtgatt

SEQ ID NO: 24746 - DNA, 80 bp, synthetic construct
  source 1..80: mol_type = other DNA
ggtaggagtatttacaccacaaatatcagtgaacgtcccaaatcaggaaaatagttcttcaacatttaccggcacaccac

SEQ ID NO: 24747 - DNA, 80 bp, synthetic construct; identical to SEQ ID NO: 10099
  source 1..80: mol_type = other DNA

SEQ ID NO: 24748 - DNA, 80 bp, synthetic construct
  source 1..80: mol_type = other DNA
cctagttggaggtgattggatcaagggggcagatctcccgatggtgctgttctcatgctagtgagtgagttctcgtgaga

SEQ ID NO: 24749 - DNA, 80 bp, synthetic construct
  source 1..80: mol_type = other DNA
gactaatacagttctgtgaaagcattgcccaagtattcattctccatgactttctcacctgaaaatgatcgaaagttttg

SEQ ID NO: 24750 - DNA, 80 bp, synthetic construct; identical to SEQ ID NO: 10100
  source 1..80: mol_type = other DNA

SEQ ID NO: 24751 - DNA, 80 bp, synthetic construct
  source 1..80: mol_type = other DNA
aatgagcaaagaaataacctctaatctcatcaacaagtagtgctcaggtttttctcttaatatttatatatacacagtgg

SEQ ID NO: 24752 - DNA, 80 bp, synthetic construct
  source 1..80: mol_type = other DNA
cgagcttatgtgagctggctgcagtgcaccactgtaaaactcatatataatttgaagtgaaatgtggaaatgctttgtct

SEQ ID NO: 24753 - DNA, 80 bp, synthetic construct
  source 1..80: mol_type = other DNA
tgaacataattacaaacagatctgtgtggacacagcaatagttccaattcagaaatctggttcttgcctccttcttaaac

SEQ ID NO: 24754 - DNA, 80 bp, synthetic construct; identical to SEQ ID NO: 10101
  source 1..80: mol_type = other DNA

SEQ ID NO: 24755 - DNA, 80 bp, synthetic construct
  source 1..80: mol_type = other DNA
tgatctgtctactcagcaggaccataaccctttgaggatatggtaagaatgagtcttcctcatcttcatatgcatagtaa

SEQ ID NO: 24756 - DNA, 80 bp, synthetic construct
  source 1..80: mol_type = other DNA
tcctctgcatgatttactttctgacagaaagcatgaaagtgtccctgacagacctgaaacccatgtccaggagaaaagga

SEQ ID NO: 24757 - DNA, 80 bp, synthetic construct
  source 1..80: mol_type = other DNA
gaaaaacagcaatccaacccaaagagggcagagttgactttcttaactccaaaatctcttacagtgacaatgacatctag

SEQ ID NO: 24758 - DNA, 80 bp, synthetic construct
  source 1..80: mol_type = other DNA
acaacaatctgatgaagtgttcattagtaagaagatcaagcttaaacaggccaagttacttgatcaaggtcacacaactt

SEQ ID NO: 24759 - DNA, 80 bp, synthetic construct
  source 1..80: mol_type = other DNA
agaaaaggagatcatcccagttttcccaggaccgttgtgattttaaaaatgaaaaatctcatgtcccaggaaacccatca

SEQ ID NO: 24760 - DNA, 80 bp, synthetic construct; identical to SEQ ID NO: 10102
  source 1..80: mol_type = other DNA

SEQ ID NO: 24761 - DNA, 80 bp, synthetic construct
  source 1..80: mol_type = other DNA
gccatctggcctggcatcttgtgtcctgtcaacagggatgtcaaacaggcaagatgaaaggacataactccaaggaacat

SEQ ID NO: 24762 - DNA, 80 bp, synthetic construct
  source 1..80: mol_type = other DNA
atttcttgtcttagtgagtcttctggggagcatcctaggagtttcaaatgaaggtggatatcggctggagtatcccaaga

SEQ ID NO: 24763 - DNA, 80 bp, synthetic construct; identical to SEQ ID NO: 10103
  source 1..80: mol_type = other DNA

SEQ ID NO: 24764 - DNA, 80 bp, synthetic construct
  source 1..80: mol_type = other DNA
caagtaaaaaaggaaaataatacactgatggaaaagatacaacaaagttccattatattggtatataaagttcttaatta

SEQ ID NO: 24765 - DNA, 80 bp, synthetic construct
  source 1..80: mol_type = other DNA
tgtgtgtgtgtatatatgtatatgtgcctataagcaaatatttataataaaatgttaaaagtggtctggttaacagtaac

SEQ ID NO: 24766 - DNA, 80 bp, synthetic construct
  source 1..80: mol_type = other DNA
caggtgcacaccaccatgcccagctaatttttgcattttttatacagatagggttttatcatgttacctaggctggtctt

SEQ ID NO: 24767 - DNA, 80 bp, synthetic construct; identical to SEQ ID NO: 10104
  source 1..80: mol_type = other DNA

SEQ ID NO: 24768 - DNA, 80 bp, synthetic construct
  source 1..80: mol_type = other DNA
ctgactttcacttttttctgtgtcttttttcatgacaaatagagagtaaggaaagctcacgattacagccatcacttctt

SEQ ID NO: 24769 - DNA, 80 bp, synthetic construct
  source 1..80: mol_type = other DNA
cagggtagtcacacttcagcacatagtgatcttcccctgctgagtactgagaactattaagcatgtggatgcatcgcttc

SEQ ID NO: 24770 - DNA, 80 bp, synthetic construct
  source 1..80: mol_type = other DNA
gtgcaagggtaaagaaaataagcaagcaaacaacagcaacagcggtttagatactgggcagcaaatggatgactagactg

SEQ ID NO: 24771 - DNA, 80 bp, synthetic construct
  source 1..80: mol_type = other DNA
agccttgatgaaagttcattcaagaagcagctggatccacaaatccccttcccatatccagcaagagaccaaaggcttct

SEQ ID NO: 24772 - DNA, 80 bp, synthetic construct; identical to SEQ ID NO: 10105
  source 1..80: mol_type = other DNA

SEQ ID NO: 24773 - DNA, 80 bp, synthetic construct
  source 1..80: mol_type = other DNA
tactaagagcagaaactagtgttgacagacatctgagggaaatctctgagtttaaatatggcaatcaaatcaagcaaacg

SEQ ID NO: 24774 - DNA, 80 bp, synthetic construct
  source 1..80: mol_type = other DNA
ataagataaagagatagaaaataggacaggaaatataagaaaagcaaatcaccagtccaggatgcccagcatgtaaataa

SEQ ID NO: 24775 - DNA, 80 bp, synthetic construct; identical to SEQ ID NO: 10106
  source 1..80: mol_type = other DNA

SEQ ID NO: 24776 - DNA, 80 bp, synthetic construct
  source 1..80: mol_type = other DNA
aggaaagaaaattaaccacaaaacaattcaaaaaaatgtccctaaaccaaaagacttgaatttctagattaaaggagttc

SEQ ID NO: 24777 - DNA, 80 bp, synthetic construct
  source 1..80: mol_type = other DNA
gtaataccagagaccagaaaacaatggagtgatgtcttccaaaatctgaagggctatgacttgcaccctggaattcttct

SEQ ID NO: 24778 - DNA, 80 bp, synthetic construct
  source 1..80: mol_type = other DNA
cccgctaattttttgtatttttagtagagacggggtttcaccgtgttagccaggatggtctcgattgcctgacctcgtga

SEQ ID NO: 24779 - DNA, 80 bp, synthetic construct
  source 1..80: mol_type = other DNA
ctctttctcaggaagctgactgaggaggggctccttcagtaccagccagtaccatttggacactaaaagacagaggtcta

SEQ ID NO: 24780 - DNA, 80 bp, synthetic construct; identical to SEQ ID NO: 10107
  source 1..80: mol_type = other DNA

SEQ ID NO: 24781 - DNA, 80 bp, synthetic construct
  source 1..80: mol_type = other DNA
gaaattaaaatttagctctattggaagagtgaagagaaattaaaggcatgtcttggcacatatgcagatgcaggggtggg

SEQ ID NO: 24782 - DNA, 80 bp, synthetic construct
  source 1..80: mol_type = other DNA
aaaatggcaaatcaagaaacagcaacacaagtgtattatttacagaagtctagctgtatgcccccctaaaacagctgaaa

SEQ ID NO: 24783 - DNA, 80 bp, synthetic construct; identical to SEQ ID NO: 10108
  source 1..80: mol_type = other DNA

SEQ ID NO: 24784 - DNA, 80 bp, synthetic construct
  source 1..80: mol_type = other DNA
tgatgttggaactatactcatttgttaattacaaccatatgttgactattaatacaaattttggtaaaatcaacaaaagc

SEQ ID NO: 24785 - DNA, 80 bp, synthetic construct
  source 1..80: mol_type = other DNA
agcacaccagtgtacctataagcaattgctcaggaatgaggaatgagaaatcctatgtagaaacagagaattggccaaaa

SEQ ID NO: 24786 - DNA, 80 bp, synthetic construct
  source 1..80: mol_type = other DNA
tgatgaccgcaaagggcaaaactcattagataatgatgagtttctttagcataaagttaaagattattgataactgacag

SEQ ID NO: 24787 - DNA, 80 bp, synthetic construct
  source 1..80: mol_type = other DNA
tcataaaaaataagacttcaaagaggaagagattaatttagaatcgtgaagggaacaaggagaaggaagaggatctctga

SEQ ID NO: 24788 - DNA, 80 bp, synthetic construct; identical to SEQ ID NO: 10109
  source 1..80: mol_type = other DNA

SEQ ID NO: 24789 - DNA, 80 bp, synthetic construct
  source 1..80: mol_type = other DNA
gctttgaaactccctgactgacacatttctgactgacaggaacgttaatctctgaggcaacttaattccaaccaccctcc

SEQ ID NO: 24790 - DNA, 80 bp, synthetic construct
  source 1..80: mol_type = other DNA
aacaaccttatgacaagggcagagctggcagagtggctattttctcaagaagaaaccaggattcccaaaggttaatgcct

SEQ ID NO: 24791 - DNA, 80 bp, synthetic construct; identical to SEQ ID NO: 10110
  source 1..80: mol_type = other DNA

SEQ ID NO: 24792 - DNA, 80 bp, synthetic construct
  source 1..80: mol_type = other DNA
gatttctttgtggatatagttaacccagatgctcatgttaagcagacaaatagggcctaaggggagaaaagatggagaca

SEQ ID NO: 24793 - DNA, 80 bp, synthetic construct
  source 1..80: mol_type = other DNA
cattatgctcagtggaaggttataaaaggagccatgaattagatggggatttgaacaaaagggcctttaaattcccttcc

SEQ ID NO: 24794 - DNA, 80 bp, synthetic construct
  source 1..80: mol_type = other DNA
gaaatccctcctaaataactgcataccacatgaatgaagccttagatgttataccccaaagcttttcctcatagtcagaa

SEQ ID NO: 24795 - DNA, 80 bp, synthetic construct; identical to SEQ ID NO: 10111
  source 1..80: mol_type = other DNA

SEQ ID NO: 24796 - DNA, 80 bp, synthetic construct
  source 1..80: mol_type = other DNA
agtaagtattgcagtgaaggagaatcataaaggtcagggcaccatggggtatttcacacattcttgagcattttgaaaaa

SEQ ID NO: 24797 - DNA, 80 bp, synthetic construct
  source 1..80: mol_type = other DNA
tctccttgcaaggcatgatgtgaggcacagcacaaggcttaattatattcagaccttcctggaagaagcatgacatatgt

SEQ ID NO: 24798 - DNA, 80 bp, synthetic construct
  source 1..80: mol_type = other DNA
tttaaaagtaaaaaacagcaatggtaaaccccctcctcattccttccaatcctaaccttgattcagcgttgagcaagaaa

SEQ ID NO: 24799 - DNA, 80 bp, synthetic construct; identical to SEQ ID NO: 10112
  source 1..80: mol_type = other DNA

SEQ ID NO: 24800 - DNA, 80 bp, synthetic construct
  source 1..80: mol_type = other DNA
aaaaaagaaaaagaaaaaacaagcccaaaccccaagtcttagttcacgtcaagtcctagaagctaagaaaatttcaggat

SEQ ID NO: 24801 - DNA, 80 bp, synthetic construct
  source 1..80: mol_type = other DNA
tagggggccatggagtcgggattttcctcatctagtctcaagaatgtgtctcctcaaactacagcaagggcagggcctgg

SEQ ID NO: 24802 - DNA, 80 bp, synthetic construct
  source 1..80: mol_type = other DNA
tatttttgattctatggcaggagtaggaaaaagggtacatcatgaccttcttagagaccagggtctcttgaaatcatcac

SEQ ID NO: 24803 - DNA, 80 bp, synthetic construct
  source 1..80: mol_type = other DNA
atcccctcttgccatccatctattttgcttattgctaggtacctagggtcttctaccacccagaaacctgagtcagaaat

SEQ ID NO: 24804 - DNA, 80 bp, synthetic construct; identical to SEQ ID NO: 10113
  source 1..80: mol_type = other DNA

SEQ ID NO: 24805 - DNA, 80 bp, synthetic construct
  source 1..80: mol_type = other DNA
tagtctcagggattattcctgcaggcccttgctttctgagccatcccaatacaccagtccagccttccacctggcaaaaa

SEQ ID NO: 24806 - DNA, 80 bp, synthetic construct
  source 1..80: mol_type = other DNA
acaagtctaggagaaaccccctaaaatcatttgcattcacagcacaggaaacacaaaggcattaggatgcgctctgcagt

SEQ ID NO: 24807 - DNA, 80 bp, synthetic construct
  source 1..80: mol_type = other DNA
gctccaaggaagggtcatggtcacagactaaatttcggttcaaatgctaaatttggagaagatgacttcccaacagagca

SEQ ID NO: 24808 - DNA, 80 bp, synthetic construct; identical to SEQ ID NO: 10114
  source 1..80: mol_type = other DNA

SEQ ID NO: 24809 - DNA, 80 bp, synthetic construct
  source 1..80: mol_type = other DNA
tcacgaggtcaggagatcgagaccatcctggctaacatggtgaaacccggtctctactaaaaaatacaaaaaattagccg

SEQ ID NO: 24810 - DNA, 80 bp, synthetic construct
  source 1..80: mol_type = other DNA
aaaaaaaagagaaagaaaaccttgaggtggttttactaggcctctaggaagggttaagtcgaaataatttgctcctggtg

SEQ ID NO: 24811 - DNA, 80 bp, synthetic construct; identical to SEQ ID NO: 10115
  source 1..80: mol_type = other DNA

SEQ ID NO: 24812 - DNA, 80 bp, synthetic construct
  source 1..80: mol_type = other DNA
tgcaaaagaagctccccaaggaagccagtctttggttctgcagataatatatcatgtgctaaatcactcagggaaatgtc

SEQ ID NO: 24813 - DNA, 80 bp, synthetic construct
  source 1..80: mol_type = other DNA
aaggacatcgagtaaaaacagagattagacctctgctagccactttgggacaattataggcaaagggaacaaatgtatta

SEQ ID NO: 24814 - DNA, 80 bp, synthetic construct
  source 1..80: mol_type = other DNA
acacagtgagtattgactctggatctctacaggtgctctcaaaaacgcagactgaagattatcaatcgacctgcagtcaa

SEQ ID NO: 24815 - DNA, 80 bp, synthetic construct; identical to SEQ ID NO: 10116
  source 1..80: mol_type = other DNA

SEQ ID NO: 24816 - DNA, 80 bp, synthetic construct
  source 1..80: mol_type = other DNA
tgcaaagtgcttagggctagttttcaaagggcaaagcttattttaaaagattattgatcgggcctaactgcaacatgaca

SEQ ID NO: 24817 - DNA, 80 bp, synthetic construct
  source 1..80: mol_type = other DNA
catgctggttaaggaagatgatactggcgagagtgtctccaaatctttctagcatcttttcagttgatgaagctctgact

SEQ ID NO: 24818 - DNA, 80 bp, synthetic construct
  source 1..80: mol_type = other DNA
gaatggattaaaatatgccaaggcattcaaacatcatcctcagaaaagaaagaactaccctgggcttcactctccccttt

SEQ ID NO: 24819 - DNA, 80 bp, synthetic construct; identical to SEQ ID NO: 10117
  source 1..80: mol_type = other DNA

SEQ ID NO: 24820 - DNA, 80 bp, synthetic construct
  source 1..80: mol_type = other DNA
aagaactgtaccccagcctttaagcttttacacaaatctctgtattccagagaccaatggaaaccactcttctgggcttc

SEQ ID NO: 24821 - DNA, 80 bp, synthetic construct
  source 1..80: mol_type = other DNA
gcaaagtgacatcaaatcattacaatgtgcgaagcaaacaaagaatctgtctcacccacataaaaatgacactgcatgcc

SEQ ID NO: 24822 - DNA, 80 bp, synthetic construct
  source 1..80: mol_type = other DNA
ccaaattctccatgggctgtcttctttgtctcctgtcctctgctaacctgtcctacgacacaaaataaaccttctcacag

SEQ ID NO: 24823 - DNA, 80 bp, synthetic construct; identical to SEQ ID NO: 10118
  source 1..80: mol_type = other DNA

SEQ ID NO: 24824 - DNA, 80 bp, synthetic construct
  source 1..80: mol_type = other DNA
cctgagattagacaaggattctctggagtcagggagccagaggtggatcagagagaggtagggtgaagagacctgtgggt

SEQ ID NO: 24825 - DNA, 80 bp, synthetic construct
  source 1..80: mol_type = other DNA
ctttggtgccccgcacccattcaccaccatcactagcccctcgcggccttccctctcctgtgcctggccagcgttaaccc

SEQ ID NO: 24826 - DNA, 80 bp, synthetic construct; identical to SEQ ID NO: 10119
  source 1..80: mol_type = other DNA

SEQ ID NO: 24827 - DNA, 80 bp, synthetic construct
  source 1..80: mol_type = other DNA
cctgttgtgtgagccattttgctgttcatgaacattactcaaaacatctttctttaacataactcctgcctgcgatggta

SEQ ID NO: 24828 - DNA, 80 bp, synthetic construct
  source 1..80: mol_type = other DNA
tcataatcaatagttcttcccccctttgtgatggatcatatcagtcacaactatgctaaattgtcacctgacatttagct

SEQ ID NO: 24829 - DNA, 80 bp, synthetic construct
  source 1..80: mol_type = other DNA
agacccataaagagcaaactcagtaagtgtcaacctgtctcctaacaaaagcccatttattattgagaaatcagacacat

SEQ ID NO: 24830 - DNA, 80 bp, synthetic construct; identical to SEQ ID NO: 10120
  source 1..80: mol_type = other DNA

SEQ ID NO: 24831 - DNA, 80 bp, synthetic construct
  source 1..80: mol_type = other DNA
caagtggcagtcgtgtgtaagatgttaatttccctgggcatcagttgtctcatctcacacataggagctagaactgagaa

SEQ ID NO: 24832 - DNA, 80 bp, synthetic construct
  source 1..80: mol_type = other DNA
tgagggagcaaggagatagaactaagaaaatgtctttaggaaaccacaagagaagtataacagaaaatgaaagtgtagac

SEQ ID NO: 24833 - DNA, 80 bp, synthetic construct
  source 1..80: mol_type = other DNA
cagttttctgaggctggtaggaacacatctgtctcataggtgaagaaattgaggttgagtggagttaaagaactggtcca

SEQ ID NO: 24834 - DNA, 80 bp, synthetic construct
  source 1..80: mol_type = other DNA
taatcccagctacttgggagactgagcagaagaatcgcttgaacccaggaggcagaggttgcagtgaaccgagatcatac

SEQ ID NO: 24835 - DNA, 80 bp, synthetic construct; identical to SEQ ID NO: 10121
  source 1..80: mol_type = other DNA

SEQ ID NO: 24836 - DNA, 80 bp, synthetic construct
  source 1..80: mol_type = other DNA
tgggggacagcatagcaaaaagagggacaagtactggcttagacatccggagagctgggcctacactctggccacagatt

SEQ ID NO: 24837 - DNA, 80 bp, synthetic construct
  source 1..80: mol_type = other DNA
tttcagcagaacataccgatatcctgcaaacagcaggcacacagttgttgcttcaggaaaaccagactcagctttaagaa

SEQ ID NO: 24838 - DNA, 80 bp, synthetic construct; identical to SEQ ID NO: 10122
  source 1..80: mol_type = other DNA

SEQ ID NO: 24839 - DNA, 80 bp, synthetic construct
  source 1..80: mol_type = other DNA
ttctgactgctcccctatctttcattcccttggtatcaggaagcacaggagagattcagggggaatatcatttacatagg

SEQ ID NO: 24840 - DNA, 80 bp, synthetic construct
  source 1..80: mol_type = other DNA
taaagtggctttaaaaagttttcgccattgtcatttccattttcgccttcactcaggcacacaatgaagaaaaaacgaga

SEQ ID NO: 24841 - DNA, 80 bp, synthetic construct
  source 1..80: mol_type = other DNA
tcttttcgtttctttcccttatattatctgaaatgtctatagaacccgagaaggataggagatcctcccatagccctaac

SEQ ID NO: 24842 - DNA, 80 bp, synthetic construct; identical to SEQ ID NO: 10123
  source 1..80: mol_type = other DNA

SEQ ID NO: 24843 - DNA, 80 bp, synthetic construct
  source 1..80: mol_type = other DNA
gtctcagttgtgggagcccaaagtccaggtggaaaataaatgctaatgaaaagttcccttgtattcactctgcttattga

SEQ ID NO: 24844 - DNA, 80 bp, synthetic construct
  source 1..80: mol_type = other DNA
caagcgattctcctgcctcagcctcccgagtagctgggactataggcaaccaccaccacgcctggctaattttttgtatt

SEQ ID NO: 24845 - DNA, 80 bp, synthetic construct
  source 1..80: mol_type = other DNA
cttccctgggagttttttgaaagggaatggaagccccctcaacagaaagaagcctcttgaagtccaatttcatacatgtt

SEQ ID NO: 24846 - DNA, 80 bp, synthetic construct; identical to SEQ ID NO: 10124
  source 1..80: mol_type = other DNA

SEQ ID NO: 24847 - DNA, 80 bp, synthetic construct
  source 1..80: mol_type = other DNA
cttactggactcatactacacacatcatgtatgtgaagataaacaatgcacaggcttttccttggagctcacagcaatat

SEQ ID NO: 24848 - DNA, 80 bp, synthetic construct
  source 1..80: mol_type = other DNA
tgcagataagaggctgtaagacagtagggtgggttaagtaagggagaatatttaagtggtcctccaaggaagaagaagaa

SEQ ID NO: 24849 - DNA, 80 bp, synthetic construct
  source 1..80: mol_type = other DNA
tagtatatggaaatattggttaggtgtggcacatagacatagtcatggaaatgaaaacacatcatcatttgcagcagaca

SEQ ID NO: 24850 - DNA, 80 bp, synthetic construct; identical to SEQ ID NO: 10125
  source 1..80: mol_type = other DNA

SEQ ID NO: 24851 - DNA, 80 bp, synthetic construct
  source 1..80: mol_type = other DNA
aaaccagagaggtctagacagatcccaacagcctgctgtggagaccaggagcaacagttgctttctttccctttccattt

SEQ ID NO: 24852 - DNA, 80 bp, synthetic construct
  source 1..80: mol_type = other DNA
ctgggaacatagcaaagagactcaaagaacctcagtaagactaactgactgtcataatagaacagaaagggacaggaaga

SEQ ID NO: 24853 - DNA, 80 bp, synthetic construct
  source 1..80: mol_type = other DNA
atggtttttgtttccagttctctaaccaatgtcactttctatattgacacttctttctgaaggtaaaagagttagtagac

SEQ ID NO: 24854 - DNA, 80 bp, synthetic construct
  source 1..80: mol_type = other DNA
agtctaggtcattgcaatatcccaaggcaatatgaacaccataattactaccatttattgagcacctcctatgggcactg

SEQ ID NO: 24855 - DNA, 80 bp, synthetic construct; identical to SEQ ID NO: 10126
  source 1..80: mol_type = other DNA

SEQ ID NO: 24856 - DNA, 80 bp, synthetic construct
  source 1..80: mol_type = other DNA
ggaattaccccgattatttcctgtatgaaagatgccagcctggattaaaacctcaagaacttctgtcataaaccaaactg

SEQ ID NO: 24857 - DNA, 80 bp, synthetic construct
  source 1..80: mol_type = other DNA
gttgtccagctaaatctcaaccatgattattcattagaatcacctaaggagcgtttaaaatcattgatgtggggaggtcc

SEQ ID NO: 24858 - DNA, 80 bp, synthetic construct
  source 1..80: mol_type = other DNA
ctcagtttcctgtttatttgttgaggatgtcagaccaggtaatatccagggccctgtaaagttctaagattttatgttca

SEQ ID NO: 24859 - DNA, 80 bp, synthetic construct; identical to SEQ ID NO: 10127
  source 1..80: mol_type = other DNA

SEQ ID NO: 24860 - DNA, 80 bp, synthetic construct
  source 1..80: mol_type = other DNA
tcatgttaagaccagatgccaggttaagcctccaagagccatgtctatgcaatcacaagtgacatagactgggcttgaaa

SEQ ID NO: 24861 - DNA, 80 bp, synthetic construct
  source 1..80: mol_type = other DNA
aaatgttactacccattgctatttctgacatattgacattggaacacacacacacaaaatctttctttgagatggagtct

SEQ ID NO: 24862 - DNA, 80 bp, synthetic construct
  source 1..80: mol_type = other DNA
ccactacacccggctaatttttgtgtttttagcagagatgaggtttcaccatgttggccaggatggtctcaaactcctga

SEQ ID NO: 24863 - DNA, 80 bp, synthetic construct; identical to SEQ ID NO: 10128
  source 1..80: mol_type = other DNA

SEQ ID NO: 24864 - DNA, 80 bp, synthetic construct
  source 1..80: mol_type = other DNA
agacttggaaccaacccaaatgcccatcaatgatagactggataaagaaaatgtggcacatatacaccatggaatactat

SEQ ID NO: 24865 - DNA, 80 bp, synthetic construct
  source 1..80: mol_type = other DNA
gaacatcacacaccagggcctgtcgaggggtggtgggtaggggagagatagcattaggataaatacctaatgtagatgac

SEQ ID NO: 24866 - DNA, 80 bp, synthetic construct
  source 1..80: mol_type = other DNA
aacaatagtcaccactgcccagatgatactgaaggcctctggtagaccagatctcttgtttttcatgacgcttttgtaat

SEQ ID NO: 24867 - DNA, 80 bp, synthetic construct
  source 1..80: mol_type = other DNA
gggaatttgaaacattgcatttcaggattttctctaaacaatcgggtgattcagatgcactaagttatctgaaaatgagt

SEQ ID NO: 24868 - DNA, 80 bp, synthetic construct; identical to SEQ ID NO: 10129
  source 1..80: mol_type = other DNA

SEQ ID NO: 24869 - DNA, 80 bp, synthetic construct
  source 1..80: mol_type = other DNA
ttaatatgtaataaatgggacatctcagtttcagggggagggtagcactagataataattactgctgggggccactagtt

SEQ ID NO: 24870 - DNA, 80 bp, synthetic construct
  source 1..80: mol_type = other DNA
aaaatcagtaaaaaggattaaaagaaaatgagcaaaatgtgaccatttgaaatgcctcaatgatattgagggtttatttc

SEQ ID NO: 24871 - DNA, 80 bp, synthetic construct; identical to SEQ ID NO: 10130
  source 1..80: mol_type = other DNA

SEQ ID NO: 24872 - DNA, 80 bp, synthetic construct
  source 1..80: mol_type = other DNA
attgaagtcaatcgtctcaaaccctgccactgctttatcaactaagtttatgtaatattttaaaccctttgctgccattt

SEQ ID NO: 24873 - DNA, 80 bp, synthetic construct
  source 1..80: mol_type = other DNA
tgctatttccatcacatctccaattgctgcctccaacgaagactctactgaagtcttgaacccctcaaagtaatccatga

SEQ ID NO: 24874 - DNA, 80 bp, synthetic construct
  source 1..80: mol_type = other DNA
agctacagccttacaagacatgtttcttaaataataaggcttgaaagtcaaaattagtccactatccatggattgcagaa

SEQ ID NO: 24875 - DNA, 80 bp, synthetic construct
  source 1..80: mol_type = other DNA
ttgaatattcagtttacatggtttaccatgttgtaaacacttgtgttgtcattcagcccttgttgttacatttatagaat

SEQ ID NO: 24876 - DNA, 80 bp, synthetic construct; identical to SEQ ID NO: 10131
  source 1..80: mol_type = other DNA

SEQ ID NO: 24877 - DNA, 80 bp, synthetic construct
  source 1..80: mol_type = other DNA
tcttttggccttcatagaattgaagagagttgaactttgcactagattaagctttgacttaaggaaatattgtggctgat

SEQ ID NO: 24878 - DNA, 80 bp, synthetic construct
  source 1..80: mol_type = other DNA
tgatctgtctcagcttttgacatgcctactcaccaaacttaatcatgtctagttttttactgaaagtgagagacatacta

SEQ ID NO: 24879 - DNA, 80 bp, synthetic construct; identical to SEQ ID NO: 10132
  source 1..80: mol_type = other DNA

SEQ ID NO: 24880 - DNA, 80 bp, synthetic construct
  source 1..80: mol_type = other DNA
tgtgaagtgaaataaagcaaagcacgaaaaatggaagtatgtctgtgttacaactgcatacaaatattgcaaaagacttt

SEQ ID NO: 24881 - DNA, 80 bp, synthetic construct
  source 1..80: mol_type = other DNA
aatatgaaaagttgttcagcctcgctggtaagcaaagaattgtaatttaaggtggcagtttttctttgcccatctaatta

SEQ ID NO: 24882 - DNA, 80 bp, synthetic construct
  source 1..80: mol_type = other DNA
aaatatagatcgcctttacaatatacctattttttgacccagtaatttaactcatcgaaatccatcccaagaaaattacc

SEQ ID NO: 24883 - DNA, 80 bp, synthetic construct
  source 1..80: mol_type = other DNA
caacaaagatgactaagactttatgtaatattaaatgaaaatatcatcttaaaaattttatatgaatcaactctagtctt

SEQ ID NO: 24884 - DNA, 80 bp, synthetic construct; identical to SEQ ID NO: 10133
  source 1..80: mol_type = other DNA

SEQ ID NO: 24885 - DNA, 80 bp, synthetic construct
  source 1..80: mol_type = other DNA
tagataaatagataaatacttcacaaagggtctctctgctagggaagagctcctggaaccatcggtagatctgtaataaa

SEQ ID NO: 24886 - DNA, 80 bp, synthetic construct
  source 1..80: mol_type = other DNA
gccaatattaaaagaccaaaaaagctccttaaatattacaaagaccaatttgagccatcagacctgcatctgaacaaatg

SEQ ID NO: 24887 - DNA, 80 bp, synthetic construct
  source 1..80: mol_type = other DNA
cacagatggccctgtctgcttcaacccagcagagactacgaataactttggagttgtttaaactcgtttcttttctctaa

SEQ ID NO: 24888 - DNA, 80 bp, synthetic construct; identical to SEQ ID NO: 10134
  source 1..80: mol_type = other DNA

SEQ ID NO: 24889 - DNA, 80 bp, synthetic construct
  source 1..80: mol_type = other DNA
aaatgaagtttagcagctctctgctcataacttcctttaactgtcccatcctgtatattctaaccagtccagataactct

SEQ ID NO: 24890 - DNA, 80 bp, synthetic construct
  source 1..80: mol_type = other DNA
gttatatttgatttcttgcctgtgaatctctcttaagatccagtttatcagacactctccttctcccatcaaaggacagc

SEQ ID NO: 24891 - DNA, 80 bp, synthetic construct
  source 1..80: mol_type = other DNA
gacattgcttagtgtagaaggactcactaaatatttgctgattgaaggaactgatattctgactagttactggagtagtg

SEQ ID NO: 24892 - DNA, 80 bp, synthetic construct; identical to SEQ ID NO: 10135
  source 1..80: mol_type = other DNA

SEQ ID NO: 24893 - DNA, 80 bp, synthetic construct
  source 1..80: mol_type = other DNA
tagcagccagattcctcacacctgccagtgtccttcattacatcagctaataaagaaacaagcacagaaggctaaatcca

SEQ ID NO: 24894 - DNA, 80 bp, synthetic construct
  source 1..80: mol_type = other DNA
tgctttattattaaattggtatcatcaccagctcctttccattttgggaaagccaagtacactcagccctaggttcactc

SEQ ID NO: 24895 - DNA, 80 bp, synthetic construct
  source 1..80: mol_type = other DNA
gaaaatatgtagaatttggtcttttcatcacaaagtacaaaaacccccgctcctcgcatccaggtcttttcagcaaatgt

SEQ ID NO: 24896 - DNA, 80 bp, synthetic construct; identical to SEQ ID NO: 10136
  source 1..80: mol_type = other DNA

SEQ ID NO: 24897 - DNA, 80 bp, synthetic construct
  source 1..80: mol_type = other DNA
cctgtgcttaccaccagtgagaacttggatatgccattgagcttttctgagtttccattctctcgtctataaaatagaaa

SEQ ID NO: 24898 - DNA, 80 bp, synthetic construct
  source 1..80: mol_type = other DNA
ggctttttcaccagccaggttactataaaaaccaacaaactttccatagttgcttctctatcatttgtttccacttctct

SEQ ID NO: 24899 - DNA, 80 bp, synthetic construct
  source 1..80: mol_type = other DNA
aaagtaatagcagctgggtgcagtggctcacacctataatctcagtgctttaggaggccaaggcaggagaatagcttgag

SEQ ID NO: 24900 - DNA, 80 bp, synthetic construct
  source 1..80: mol_type = other DNA
ttcaaggctcagtgagctatgattgcaccactgcactccatcctgggtcacagagcaagccctgactcagaaataaagta

SEQ ID NO: 24901 - DNA, 80 bp, synthetic construct; identical to SEQ ID NO: 10137
  source 1..80: mol_type = other DNA

SEQ ID NO: 24902 - DNA, 80 bp, synthetic construct
  source 1..80: mol_type = other DNA
atgaggacactcattggagatgaaagtgaggggtggagaggaatgtgaaagccagggaggacccctcagaggaggcaatg

SEQ ID NO: 24903 - DNA, 80 bp, synthetic construct
  source 1..80: mol_type = other DNA
tccttgcatgtttcttcatcattcccagccgtttcctgaagctcaggcaaggaatgtgaaccattacttggttttattgc

SEQ ID NO: 24904 - DNA, 80 bp, synthetic construct
  source 1..80: mol_type = other DNA
aaaatcattaggattagggtacccaggaatttccactgaagtgtggcaacagggaggttgctgagaaggaccagagccct

SEQ ID NO: 24905 - DNA, 80 bp, synthetic construct; identical to SEQ ID NO: 10138
  source 1..80: mol_type = other DNA

SEQ ID NO: 24906 - DNA, 80 bp, synthetic construct
  source 1..80: mol_type = other DNA
ccaacctcccaagaacctacagatggcaagagagacacaaccttcaacctatggaagaccatgaggcccaggaatatgct

SEQ ID NO: 24907 - DNA, 80 bp, synthetic construct
  source 1..80: mol_type = other DNA
gtaggcgaagaaaacaagaaacatggaaaacaataacccatttgctttcccaatttccagttcctcttcattgcacctaa

SEQ ID NO: 24908 - DNA, 80 bp, synthetic construct
  source 1..80: mol_type = other DNA
ctcctacctatactgagcaacacctcagttttctcatttgcttttaacgattctaagttcggctcctagacatataggtt

SEQ ID NO: 24909 - DNA, 80 bp, synthetic construct; identical to SEQ ID NO: 10139
  source 1..80: mol_type = other DNA

SEQ ID NO: 24910 - DNA, 80 bp, synthetic construct
  source 1..80: mol_type = other DNA
agtaccactgcagggcaaatcagtttgggaaatgatagagtaaacaacttcttaacccctaggtctgggggacataaata

SEQ ID NO: 24911 - DNA, 80 bp, synthetic construct
  source 1..80: mol_type = other DNA
agtcacataagaaacccatgcatgtctcccaaaatagttacctacttaagctcagtgaagtatggagactgaatgagaaa

SEQ ID NO: 24912 - DNA, 80 bp, synthetic construct
  source 1..80: mol_type = other DNA
gaggggaggggaggggagggcaggggaggggaggggaggggaggggagggcaggggaggggaggggagggcaggggaggg

SEQ ID NO: 24913 - DNA, 80 bp, synthetic construct; identical to SEQ ID NO: 10140
  source 1..80: mol_type = other DNA

SEQ ID NO: 24914 - DNA, 80 bp, synthetic construct
  source 1..80: mol_type = other DNA
gtttataataatgaggagaaggaggaaagggttgaaaaaccaaacagaaggcccaagacatattttagacagtgacagcc

SEQ ID NO: 24915 - DNA, 80 bp, synthetic construct
  source 1..80: mol_type = other DNA
aatggcttgaactgttatgcaagtaaggaattgcttttattaaatgccaaatctttttttaaagcaacctcagggagtta

SEQ ID NO: 24916 - DNA, 80 bp, synthetic construct
  source 1..80: mol_type = other DNA
tgggccagaagagatgaagctcccacaaagtattattgtaaagctgaatagagtcagactcttatttgcttgaattccac

SEQ ID NO: 24917 - DNA, 80 bp, synthetic construct; identical to SEQ ID NO: 10141
  source 1..80: mol_type = other DNA

SEQ ID NO: 24918 - DNA, 80 bp, synthetic construct
  source 1..80: mol_type = other DNA
tttaagaagtaatgcagataaataatgggatgccaagcttagaggttggaggtgggggaaggaagcccaaaccctttggt

SEQ ID NO: 24919 - DNA, 80 bp, synthetic construct
  source 1..80: mol_type = other DNA
aacctcccccaagcaacagtggtaaatagataagtaagatgggagacataatatacatatgttcagtattagaagctgaa

SEQ ID NO: 24920 - DNA, 80 bp, synthetic construct
  source 1..80: mol_type = other DNA
atctcatcttctaagaactagctactgaatgtaaagatatgtttccaagtgaaagttaaaagtggctgcctgttgccact

SEQ ID NO: 24921 - DNA, 80 bp, synthetic construct; identical to SEQ ID NO: 10142
  source 1..80: mol_type = other DNA

SEQ ID NO: 24922 - DNA, 80 bp, synthetic construct
  source 1..80: mol_type = other DNA
ctggcgtcgcagcccattagtcctaattctgactttttccaagttggaaagtatgcccaccctctctgtttcttagaccc

SEQ ID NO: 24923 - DNA, 80 bp, synthetic construct
  source 1..80: mol_type = other DNA
actgtatttactataaatcctgcccctagatgtcaaaacaaccttgatgttatggtgcgttgattgtcctacacatcact

SEQ ID NO: 24924 - DNA, 80 bp, synthetic construct
  source 1..80: mol_type = other DNA
aagtttgcacagacctgcccactgtgaaacaactcatcacctattaaatgaaatgagaacagtcatagtgcccacctcgc

SEQ ID NO: 24925 - DNA, 80 bp, synthetic construct; identical to SEQ ID NO: 10143
  source 1..80: mol_type = other DNA

SEQ ID NO: 24926 - DNA, 80 bp, synthetic construct
  source 1..80: mol_type = other DNA
ataggtgggagcatgtggtatttggtttcctgttcctgtgttactttgctgaggataatggcttccagttccatccatgt

SEQ ID NO: 24927 - DNA, 80 bp, synthetic construct
  source 1..80: mol_type = other DNA
ggctattgtgaataatggggagcactttttaatcatctctgtttatgtgttcaggctgctggtttctcccacctctccat

SEQ ID NO: 24928 - DNA, 80 bp, synthetic construct
  source 1..80: mol_type = other DNA
tgaggattacagaacccaaaccataaggaactcagcacatttgacaagccatgtacatgtgagtgaggaggtgaaatgga

SEQ ID NO: 24929 - DNA, 80 bp, synthetic construct; identical to SEQ ID NO: 10144
  source 1..80: mol_type = other DNA

SEQ ID NO: 24930 - DNA, 80 bp, synthetic construct
  source 1..80: mol_type = other DNA
aaagaaatcatttagaaaagagaaaatgagatcgaaatctaggaacaccccccaaaatgaaagatagcttagaagctacc

SEQ ID NO: 24931 - DNA, 80 bp, synthetic construct
  source 1..80: mol_type = other DNA
tgtcaatatttgcagatgttgtccggaatgctggggtttgtcaaaatagattggtgaggacttaaagccttccgggggaa

SEQ ID NO: 24932 - DNA, 80 bp, synthetic construct
  source 1..80: mol_type = other DNA
aggttagatggtggtaagaggaacaaacagggttcttggaggaaaagaccacaggtctgtgttagacaattgtaaggaaa

SEQ ID NO: 24933 - DNA, 80 bp, synthetic construct; identical to SEQ ID NO: 10145
  source 1..80: mol_type = other DNA

SEQ ID NO: 24934 - DNA, 80 bp, synthetic construct
  source 1..80: mol_type = other DNA
caagggagggtgaatgaaaaagaatagaagataaccatagcggtgtgagtcttgtgctattgattttgcatctgtctgaa

SEQ ID NO: 24935 - DNA, 80 bp, synthetic construct
  source 1..80: mol_type = other DNA
ttgctgagtgaaagtgacaatggttttagcacctggaagttgtttgaaggtacaagtgttaggtgggagttcaaataaat

SEQ ID NO: 24936 - DNA, 80 bp, synthetic construct
  source 1..80: mol_type = other DNA
taaagtttccttgtagaattttccccacagtatagaatccatactattgttgttatggcatctcactgtagatggtttgg

SEQ ID NO: 24937 - DNA, 80 bp, synthetic construct; identical to SEQ ID NO: 10146
  source 1..80: mol_type = other DNA

SEQ ID NO: 24938 - DNA, 80 bp, synthetic construct
  source 1..80: mol_type = other DNA
ggcacaaatgtgaccagagtttggagaacaaggatgttggtcccagtgcaggaaatgacttgcccatagtgtcacatttg

SEQ ID NO: 24939 - DNA, 80 bp, synthetic construct
  source 1..80: mol_type = other DNA
tccccaaccctgaggtgcatcacatcgtagtgacagaattagtcactttgcctcatttttcttccatcaatttcctagat

SEQ ID NO: 24940 - DNA, 80 bp, synthetic construct
  source 1..80: mol_type = other DNA
ttgggccttctggtggctgatcactgcctttccacattgcagcccagcatgaccagcatacaaagtggaaagcaaaagtc

SEQ ID NO: 24941 - DNA, 80 bp, synthetic construct; identical to SEQ ID NO: 10147
  source 1..80: mol_type = other DNA

SEQ ID NO: 24942 - DNA, 80 bp, synthetic construct
  source 1..80: mol_type = other DNA
ctggaaacacaagcttaccacacaagtacatttccattttaaaataatgaatattatgtgttgggcacctactatgtgcc

SEQ ID NO: 24943 - DNA, 80 bp, synthetic construct
  source 1..80: mol_type = other DNA
tgactacatggcagagttggatgtgaactacagttggtctgactcccttcatattcattctactggaccttactactttt

SEQ ID NO: 24944 - DNA, 80 bp, synthetic construct
  source 1..80: mol_type = other DNA
gtttggtgggatcttgatgtgtcttctgctgctctgtcctgaattcaaatgattactttccagagacatatacaaggcca

SEQ ID NO: 24945 - DNA, 80 bp, synthetic construct; identical to SEQ ID NO: 10148
  source 1..80: mol_type = other DNA

SEQ ID NO: 24946 - DNA, 80 bp, synthetic construct
  source 1..80: mol_type = other DNA
ggttaaaaaggtaacacagacaaagaacagtgatggtgtcaagatggtggtgttttgggtaaaattttctccttcacaac

SEQ ID NO: 24947 - DNA, 80 bp, synthetic construct
  source 1..80: mol_type = other DNA
tctactaaaaatacaaaaatcagccgagtgtggtggtggttgcctgtaattccagctactcgggaggctgaggcaggaga

SEQ ID NO: 24948 - DNA, 80 bp, synthetic construct
  source 1..80: mol_type = other DNA
attgcatttttagttgggtatgacttgaatcttgaataacttgtattggagggcctgggagaacaatgtgaagagatcag

SEQ ID NO: 24949 - DNA, 80 bp, synthetic construct
  source 1..80: mol_type = other DNA
cagggccttttctggctgtctcttaggccttatattaagaatatatacattatggattgaattgtgtaccctccaaattt

SEQ ID NO: 24950 - DNA, 80 bp, synthetic construct
  source 1..80: mol_type = other DNA
ataaagatagggctctaccagggacaccagggagctttctctctgcacactctcagaagaaaagccatgttaggacacag

SEQ ID NO: 24951 - DNA, 80 bp, synthetic construct; identical to SEQ ID NO: 10149
  source 1..80: mol_type = other DNA

SEQ ID NO: 24952 - DNA, 80 bp, synthetic construct
  source 1..80: mol_type = other DNA
tctcccgtgaatacttacaaaagaagcagagataaccagcccatgagatatttacaaacagtatttacattgggtcatca

SEQ ID NO: 24953 - DNA, 80 bp, synthetic construct; identical to SEQ ID NO: 10150
  source 1..80: mol_type = other DNA

SEQ ID NO: 24954 - DNA, 80 bp, synthetic construct
  source 1..80: mol_type = other DNA
atgcctttctcttctcttgatactgtgtatctcattgcataaatgatgtccagagtaatgcattggtatctgtctacgcc

SEQ ID NO: 24955 - DNA, 80 bp, synthetic construct
  source 1..80: mol_type = other DNA
ggtgaaacacacatggcaaagatgacaaggtaaatccctgttttgaaaaggcagtaattcaggttcttcatgcctccttg

SEQ ID NO: 24956 - DNA, 80 bp, synthetic construct
  source 1..80: mol_type = other DNA
aggacaagtatgagacacaaaaggcacacagttctacatcctggtccatactcacccatatctccttcacagatctcagg

SEQ ID NO: 24957 - DNA, 80 bp, synthetic construct
  source 1..80: mol_type = other DNA
tctatagcataaatacccccgccatcatcaatttctagctaccaacaaaaactcactccatggagtcagaaagagttgtg

SEQ ID NO: 24958 - DNA, 80 bp, synthetic construct; identical to SEQ ID NO: 10151
  source 1..80: mol_type = other DNA

SEQ ID NO: 24959 - DNA, 80 bp, synthetic construct
  source 1..80: mol_type = other DNA
atcacttatcatgtgttaggactgagctggacactagggctgtacatccctccaacacacacacaatctagaatgtgctg

SEQ ID NO: 24960 - DNA, 80 bp, synthetic construct
  source 1..80: mol_type = other DNA
caggacctgggtatgacagattgtgaagcatgatgctccattaagagataaacttcatgggatttcagactggaagacat

SEQ ID NO: 24961 - DNA, 80 bp, synthetic construct
  source 1..80: mol_type = other DNA
ccaaagaagattcaaaaatgtcttttccaggtgtcctcacctcatatttaggtaaaggccaaacatccatttcagtctgg

SEQ ID NO: 24962 - DNA, 80 bp, synthetic construct
  source 1..80: mol_type = other DNA
cttgttacaccagaagcaaggagtcactgtctcccccaagacagcctgctaaattcattatttatattaaaaaagaagag

SEQ ID NO: 24963 - DNA, 80 bp, synthetic construct; identical to SEQ ID NO: 10152
  source 1..80: mol_type = other DNA

SEQ ID NO: 24964 - DNA, 80 bp, synthetic construct
  source 1..80: mol_type = other DNA
gaggctatctctttaaacctctcttccaaagtctggggcctgatttctcccacagtggtacaaggaataaagaaacttgg

SEQ ID NO: 24965 - DNA, 80 bp, synthetic construct
  source 1..80: mol_type = other DNA
taactgacttgtccgtgttatgctgcactgtaagtggtggagctgtgagtttaatccagacagcccagtggtgatcctcc

SEQ ID NO: 24966 - DNA, 80 bp, synthetic construct
  source 1..80: mol_type = other DNA
atcgagaccatcctggctaacacagtgaaaccctgtctctactaaaaatacaaaaaattagctgggcgaggtggcaggca

SEQ ID NO: 24967 - DNA, 80 bp, synthetic construct; identical to SEQ ID NO: 10153
  source 1..80: mol_type = other DNA

SEQ ID NO: 24968 - DNA, 80 bp, synthetic construct
  source 1..80: mol_type = other DNA
ggaatgttagtggcagtagtcgtggtggttgtgatttagaatcacagaatgccaggttttacaaaccctctaatttaatc

SEQ ID NO: 24969 - DNA, 80 bp, synthetic construct
  source 1..80: mol_type = other DNA
aaggtatgtctggaacctcagatattcctggtgaaactgtctaaattgagtttaaatcccacttctatcacttaataatg

SEQ ID NO: 24970 - DNA, 80 bp, synthetic construct
  source 1..80: mol_type = other DNA
aatttacttaaaaataaaggggaaggggtagcaggagctattcattaaagtctctgagtgaccccgctattcctggccta

SEQ ID NO: 24971 - DNA, 80 bp, synthetic construct; identical to SEQ ID NO: 10154
  source 1..80: mol_type = other DNA

SEQ ID NO: 24972 - DNA, 80 bp, synthetic construct
  source 1..80: mol_type = other DNA
gaaattccatatacactctttctcctggctttgtgtttacagtccctttgtgtaaggagtccatgaatgtttagttacca

SEQ ID NO: 24973 - DNA, 80 bp, synthetic construct
  source 1..80: mol_type = other DNA
gtagaaaactgcctaatttcttccacaagtacacattatgaatctgctgtgattactgtaggctattcgagaagataaag

SEQ ID NO: 24974 - DNA, 80 bp, synthetic construct; identical to SEQ ID NO: 10155
  source 1..80: mol_type = other DNA

SEQ ID NO: 24975 - DNA, 80 bp, synthetic construct
  source 1..80: mol_type = other DNA
tttactaattatacgctaataaaaaagccttcccaagagagcaagcaccagaggaaagatgccgacaataacagctctga

SEQ ID NO: 24976 - DNA, 80 bp, synthetic construct
  source 1..80: mol_type = other DNA
ttggatttaattatctgcacagctcctcccagcctgacgggatgtgatgtatggtctatgaggggctaggccttgaaagc

SEQ ID NO: 24977 - DNA, 80 bp, synthetic construct
  source 1..80: mol_type = other DNA
tcctcacaacaaccctaggaggtagaaaactgtccattcctcttttacagaggacacgatggaagcatggggagcttcag

SEQ ID NO: 24978 - DNA, 80 bp, synthetic construct; identical to SEQ ID NO: 10156
  source 1..80: mol_type = other DNA

SEQ ID NO: 24979 - DNA, 80 bp, synthetic construct
  source 1..80: mol_type = other DNA
tgtcccagtggaggggacccgcaggttggaaaaactgaaagtttcacaatggagagtcaaaacagaaagagtgcttaggg

SEQ ID NO: 24980 - DNA, 80 bp, synthetic construct
  source 1..80: mol_type = other DNA
cctccctttatacataccactgtgttttgtccaagtccacatagatgcagggcagagctaaacacacacagattaaacaa

SEQ ID NO: 24981 - DNA, 80 bp, synthetic construct
  source 1..80: mol_type = other DNA
ctgagctcttaagactggattatctaattttagagaaagcaagaaatgaagccaaaaaccaagcgcttatggccagtcct

SEQ ID NO: 24982 - DNA, 80 bp, synthetic construct; identical to SEQ ID NO: 10157
  source 1..80: mol_type = other DNA

SEQ ID NO: 24983 - DNA, 80 bp, synthetic construct
  source 1..80: mol_type = other DNA
ttttcattttaatcacgctctctgggcaggccaaatttaggcataatgaaaacaaaaagtgttatgcaaaatgagacgtt

SEQ ID NO: 24984 - DNA, 80 bp, synthetic construct
  source 1..80: mol_type = other DNA
tgcataagaaatatagcatcaaacttttctgtccaccgtgcctccagcagcgcagtagcagatatagggtttgactgtgg

SEQ ID NO: 24985 - DNA, 80 bp, synthetic construct
  source 1..80: mol_type = other DNA
gatgcttttaaaacctacttcctttggaaggcaccccagaccaagtgaatcagaacttctgagggtggcacataggcaga

SEQ ID NO: 24986 - DNA, 80 bp, synthetic construct; identical to SEQ ID NO: 10158
  source 1..80: mol_type = other DNA

SEQ ID NO: 24987 - DNA, 80 bp, synthetic construct
  source 1..80: mol_type = other DNA
ctgctcaattcacatggaatacgttacacagcttcttcatatctcagtctcctcatctgtaggatgagttatagcactta

SEQ ID NO: 24988 - DNA, 80 bp, synthetic construct
  source 1..80: mol_type = other DNA
cctgctcacccaggtgttttcaccgctgactgcattctcccatggtgtagagtaaaattcattgccataaaaagtttctt

SEQ ID NO: 24989 - DNA, 80 bp, synthetic construct
  source 1..80: mol_type = other DNA
gactccccatggtcagcaggtcactaaaaggtgttactggaagtgactgcttgccttccaccatccacattccccaatcc

SEQ ID NO: 24990 - DNA, 80 bp, synthetic construct; identical to SEQ ID NO: 10159
  source 1..80: mol_type = other DNA

SEQ ID NO: 24991 - DNA, 80 bp, synthetic construct
  source 1..80: mol_type = other DNA
agccttatggagaagtccacacagggaggaagtgaggacatgccaatgagccattatggaagcagattctccagctccat

SEQ ID NO: 24992 - DNA, 80 bp, synthetic construct
  source 1..80: mol_type = other DNA
ggaatttgttatgctgcagtagataaccaatacattggtcttgaaaacatcaaatagatgttttctgaaagcctgagcaa

SEQ ID NO: 24993 - DNA, 80 bp, synthetic construct
  source 1..80: mol_type = other DNA
gactggttttgtgacctgagtcccttaactaatcttcctcttagaagaacagaagtgatgtgatgttggagaaccaaccc

SEQ ID NO: 24994 - DNA, 80 bp, synthetic construct; identical to SEQ ID NO: 10160
  source 1..80: mol_type = other DNA

SEQ ID NO: 24995 - DNA, 80 bp, synthetic construct
  source 1..80: mol_type = other DNA
ccagaggaagaagaggaaggttgtgagaataatggcgggtgctctccccaccaaccacccatcttctcctaccctcggtg

SEQ ID NO: 24996 - DNA, 80 bp, synthetic construct
  source 1..80: mol_type = other DNA
acaagcaccaattttgataaatctctcttgcacagatcgaagtgaagagcacctgaatttgagggccaagaggttctcat

SEQ ID NO: 24997 - DNA, 80 bp, synthetic construct
  source 1..80: mol_type = other DNA
ttgctccagatcactctgctcctgacatcctcctggcattaagaggaagacctctggaatgcatttcaccaattgaattg

SEQ ID NO: 24998 - DNA, 80 bp, synthetic construct; identical to SEQ ID NO: 10161
  source 1..80: mol_type = other DNA

SEQ ID NO: 24999 - DNA, 80 bp, synthetic construct
  source 1..80: mol_type = other DNA
gagtcaaaggactgaatggcgaataatccaaggcctcatccctgccccctatctaacgaggagatctgaaatcaaaaggc

SEQ ID NO: 25000 - DNA, 80 bp, synthetic construct
  source 1..80: mol_type = other DNA
atgtggccaagtctgaattctgcccatttgctcagggagcatcactgtagctccatgtatagtcaaagtcacatggtttt

SEQ ID NO: 25001 - DNA, 80 bp, synthetic construct
  source 1..80: mol_type = other DNA
aggattccttccatctcctgaaggtctacaagtcacaaatatgaactccttggggatgcagcaagggaaccagaagagtt

SEQ ID NO: 25002 - DNA, 80 bp, synthetic construct; identical to SEQ ID NO: 10162
  source 1..80: mol_type = other DNA

SEQ ID NO: 25003 - DNA, 80 bp, synthetic construct
  source 1..80: mol_type = other DNA
gagttcccttgcacaaattctttttttgcctgctgccacccatgtaagacatgatttgctcctgcttgccttctgccatg

SEQ ID NO: 25004 - DNA, 80 bp, synthetic construct
  source 1..80: mol_type = other DNA
aatgtggaagcgactttggaactgggtaacaggcagaggctggaacagtttggggggctcagaataagacaggaaaatgt

SEQ ID NO: 25005 - DNA, 80 bp, synthetic construct
  source 1..80: mol_type = other DNA
attggtggcattttgcccctggtccagagatttgtggaactttgaacttgagagagatgatttagggtatctggtggatg

SEQ ID NO: 25006 - DNA, 80 bp, synthetic construct; identical to SEQ ID NO: 10163
  source 1..80: mol_type = other DNA

SEQ ID NO: 25007 - DNA, 80 bp, synthetic construct
  source 1..80: mol_type = other DNA
agcagcttccatgtagtgttgagcctgcaggtacacagaagtcaagaattgaagtttgggaacctctgcctagatttcag

SEQ ID NO: 25008 - DNA, 80 bp, synthetic construct
  source 1..80: mol_type = other DNA
ggccactgtcctccaggccccagaatggtaaatccactgacagcttgcaccatgagcctggaaaagccacagacactcaa

SEQ ID NO: 25009 - DNA, 80 bp, synthetic construct
  source 1..80: mol_type = other DNA
gctggatttcaaacttgcacagggcctgtagcccctttgttttggtcaatttcttccatttggaatggttgtatttaccc

SEQ ID NO: 25010 - DNA, 80 bp, synthetic construct; identical to SEQ ID NO: 10164
  source 1..80: mol_type = other DNA

SEQ ID NO: 25011 - DNA, 80 bp, synthetic construct
  source 1..80: mol_type = other DNA
tctttgcctgctgccatccatgtaagaagtgactttctcctccttgccttccaccatgattgtgaggtctccccagccat

SEQ ID NO: 25012 - DNA, 80 bp, synthetic construct
  source 1..80: mol_type = other DNA
agattccctgttaggtcctgggccataacaacaagcaagatgagtatggtttggtccatgtcttaatgaatttacaatca

SEQ ID NO: 25013 - DNA, 80 bp, synthetic construct
  source 1..80: mol_type = other DNA
gttggaggcagatctggagggcttcaaactccagattaaggatgatgacttctaaaggaatcctagagaaaatcattgag

SEQ ID NO: 25014 - DNA, 80 bp, synthetic construct
  source 1..80: mol_type = other DNA
gactgggattgagatgaagaaagcatcagatgaagcatctgagaaatactgagaagttagaatcaaaacaacaaaaaggg

SEQ ID NO: 25015 - DNA, 80 bp, synthetic construct; identical to SEQ ID NO: 10165
  source 1..80: mol_type = other DNA

SEQ ID NO: 25016 - DNA, 80 bp, synthetic construct
  source 1..80: mol_type = other DNA
gtgtgaaaaatcaagcaaaaataggaaatacgtctgcagtttgtggtgtttgggcttgatctatcatgggctttgatata

SEQ ID NO: 25017 - DNA, 80 bp, synthetic construct
  source 1..80: mol_type = other DNA
ctcagtcagtcttatacaagcctcatgcaatattaaaatgtttatgcaactctttctgtgcttgaagcagcagcaaatgt

SEQ ID NO: 25018 - DNA, 80 bp, synthetic construct
  source 1..80: mol_type = other DNA
ttggctgagtactaaaaagagagcatcatgtggtttatttgccataaggaacaaaaattggaggggcactcaaaatgttt

SEQ ID NO: 25019 - DNA, 80 bp, synthetic construct
  source 1..80: mol_type = other DNA
tcagctgctgtacccttacaggagattgatttccacatatatgaacccaaatccaagtgtcagagactaacagagatatc

SEQ ID NO: 25020 - DNA, 80 bp, synthetic construct; identical to SEQ ID NO: 10166
  source 1..80: mol_type = other DNA

SEQ ID NO: 25021 - DNA, 80 bp, synthetic construct
  source 1..80: mol_type = other DNA
taaatccacaggtcttctctgcttctgagcttctaccaaatgatgaactctttgcagattttacatattagagatgctgt

SEQ ID NO: 25022 - DNA, 80 bp, synthetic construct
  source 1..80: mol_type = other DNA
taagaaactgattccacagcccaagactactactggctttgcaaggagactgagaatgaaagatgaagatggaacattcc

SEQ ID NO: 25023 - DNA, 80 bp, synthetic construct; identical to SEQ ID NO: 10167
  source 1..80: mol_type = other DNA

SEQ ID NO: 25024 - DNA, 80 bp, synthetic construct
  source 1..80: mol_type = other DNA
tgggaaaactggctagccatatgtagaaagctgaaactggatcccttccttacaccttatacaaaaattaattcgagatg

SEQ ID NO: 25025 - DNA, 80 bp, synthetic construct
  source 1..80: mol_type = other DNA
aagagcttctgcacagcaaaagaaactaccatcagagtgaacaggcaacctacagaatgggagagaatttttgcatctac

SEQ ID NO: 25026 - DNA, 80 bp, synthetic construct
  source 1..80: mol_type = other DNA
actggccatcaaagaaatgcaaatcaaaaccacaatgagataccatctcacacctgttagaatggcgatcattaaaaagt

SEQ ID NO: 25027 - DNA, 80 bp, synthetic construct; identical to SEQ ID NO: 10168
  source 1..80: mol_type = other DNA

SEQ ID NO: 25028 - DNA, 80 bp, synthetic construct
  source 1..80: mol_type = other DNA
ctatcgcaaggacaaaaaaccaaacaccgcatgttctcactcataggtggaaattgaacaataagaacacatggacacag

SEQ ID NO: 25029 - DNA, 80 bp, synthetic construct
  source 1..80: mol_type = other DNA
atgaagatggttaaactgatgcagtttaaccatattctttgtgccttctaggcctgagtttgtagattgtagtgtctctt

SEQ ID NO: 25030 - DNA, 80 bp, synthetic construct
  source 1..80: mol_type = other DNA
gtcctactgcatgttgcccaagactattaccaagcaagtttgtgtatactttaggcttatcacaggatatgttcagagga

SEQ ID NO: 25031 - DNA, 80 bp, synthetic construct
  source 1..80: mol_type = other DNA
aacctatcctaatactattgagttctgctgttagaaaaatccaaaatcaccagtgcaagactgtctctgattctctgaag

SEQ ID NO: 25032 - DNA, 80 bp, synthetic construct; identical to SEQ ID NO: 10169
  source 1..80: mol_type = other DNA

SEQ ID NO: 25033 - DNA, 80 bp, synthetic construct
  source 1..80: mol_type = other DNA
ttatttcaactctgtgaacaaatacatgctttgtccttcacaaagagaccaatggcaaggagttcttttcccttccaatt

SEQ ID NO: 25034 - DNA, 80 bp, synthetic construct
  source 1..80: mol_type = other DNA
agaccctactgagaaagtagatatggagctttcaaaagagacttcaggtaagaggagccctattgacacaaggtcttctt

SEQ ID NO: 25035 - DNA, 80 bp, synthetic construct; identical to SEQ ID NO: 10170
  source 1..80: mol_type = other DNA

SEQ ID NO: 25036 - DNA, 80 bp, synthetic construct
  source 1..80: mol_type = other DNA
accctaactctaaagaaatgaagaagaagaaaagaagaagaagaagaagaaaagaagaagaaaagaagaagaagaagaag

SEQ ID NO: 25037 - DNA, 80 bp, synthetic construct
  source 1..80: mol_type = other DNA
ggggaagaaggggaagaaggggaagaaggagaagaggaagaggaaggggaaggggaaggggaaggggaaggggaagagga

SEQ ID NO: 25038 - DNA, 80 bp, synthetic construct
  source 1..80: mol_type = other DNA
tcattagactcctaggagttctggatatatattacactttgagaagcatgctttagagcttctctctttatgccctgagg

SEQ ID NO: 25039 - DNA, 80 bp, synthetic construct; identical to SEQ ID NO: 10171
  source 1..80: mol_type = other DNA

SEQ ID NO: 25040 - DNA, 80 bp, synthetic construct
  source 1..80: mol_type = other DNA
tctgtctgggttaatggccaatatctcctgaataggcgaaccattttcactgcatgcttaattctgaaaatgttagaaaa

SEQ ID NO: 25041 - DNA, 80 bp, synthetic construct
  source 1..80: mol_type = other DNA
ttgtcatctcgtggaaatggacaaacaagaaacagtaataaagggcatctcaacatcatggagaaactgggttgaaattc

SEQ ID NO: 25042 - DNA, 80 bp, synthetic construct
  source 1..80: mol_type = other DNA
cagagaagcagaggcagagcctgatgtgtcagaactagggaactgaggtgaattgaagaggaaggggtagatctttcaaa

SEQ ID NO: 25043 - DNA, 80 bp, synthetic construct; identical to SEQ ID NO: 10172
  source 1..80: mol_type = other DNA

SEQ ID NO: 25044 - DNA, 80 bp, synthetic construct
  source 1..80: mol_type = other DNA
cccatcttcatgggtctcaaagtctagtgggcatgaatcaagtaagaatagaaataaatgttcaattttcacttcaccat

SEQ ID NO: 25045 - DNA, 80 bp, synthetic construct
  source 1..80: mol_type = other DNA
ctaaagtatgtgtagggattgacagggcaaagagaagtagggagagggctttcaacagaggcaggggcatggaaagaaag

SEQ ID NO: 25046 - DNA, 80 bp, synthetic construct
  source 1..80: mol_type = other DNA
tctcctctcctctgttggaatctctccaggtatcagattgaaagaacgatgaaaaggcatccctgctctgcatccctgtg

SEQ ID NO: 25047 - DNA, 80 bp, synthetic construct; identical to SEQ ID NO: 10173
  source 1..80: mol_type = other DNA

SEQ ID NO: 25048 - DNA, 80 bp, synthetic construct
  source 1..80: mol_type = other DNA
atggagcacttaccaggtgccaggcactgggcacatgcttcacaggcattgtttcatttcatcttgactatattgcatgt

SEQ ID NO: 25049 - DNA, 80 bp, synthetic construct
  source 1..80: mol_type = other DNA
tatctccttgaaagcatctcaagcatgcagcatctcctttcttgaaaaattacaaacatatctcaccacatccagctcta

SEQ ID NO: 25050 - DNA, 80 bp, synthetic construct
  source 1..80: mol_type = other DNA
aagccagggagcacagtttaattctgcaaaatcaataggacacatggttgggcagaaaaaatggggtatacgaaagcact

SEQ ID NO: 25051 - DNA, 80 bp, synthetic construct
  source 1..80: mol_type = other DNA
aatatgagactgcttctttctgcctgagagctctaatcacacagtatgtttattgtctacatggtactcacccaattaga

SEQ ID NO: 25052 - DNA, 80 bp, synthetic construct; identical to SEQ ID NO: 10174
  source 1..80: mol_type = other DNA

SEQ ID NO: 25053 - DNA, 80 bp, synthetic construct
  source 1..80: mol_type = other DNA
gattgcaataggaaatactttgtctagaaatggcaacaagccaaaagggtgcgagtatagagaggggagatcacaaaaat

SEQ ID NO: 25054 - DNA, 80 bp, synthetic construct
  source 1..80: mol_type = other DNA
gaccagagtttcctgatctgccttcagcactaacagtaccatcaattgcagcaaaagaatcacacaccttcacttcaaat

SEQ ID NO: 25055 - DNA, 80 bp, synthetic construct; identical to SEQ ID NO: 10175
  source 1..80: mol_type = other DNA

SEQ ID NO: 25056 - DNA, 80 bp, synthetic construct
  source 1..80: mol_type = other DNA
agacctaataacataaggggggaaaggtatttccatctgagagtactgaaaccaccagcatttctaccctcaaataacat

SEQ ID NO: 25057 - DNA, 80 bp, synthetic construct
  source 1..80: mol_type = other DNA
tctacagattccccattcaccactctcccttccccaacccagactgtatgtggatataagaaagtccatgatatggtttg

SEQ ID NO: 25058 - DNA, 80 bp, synthetic construct
  source 1..80: mol_type = other DNA
gggaaaccccctttgcctggctctcgttcttacttgtctgcctccatgtaagacaagcctcaccttccgccatgattgtg

SEQ ID NO: 25059 - DNA, 80 bp, synthetic construct
  source 1..80: mol_type = other DNA
tgccttgagttgagacatcaccgaggcacaacttccattccatagctcccctgtagatcatgctgcagcatgacaaatga

SEQ ID NO: 25060 - DNA, 80 bp, synthetic construct; identical to SEQ ID NO: 10176
  source 1..80: mol_type = other DNA

SEQ ID NO: 25061 - DNA, 80 bp, synthetic construct
  source 1..80: mol_type = other DNA
ccattttgaacactgctagtcaccatgaaaaaaatagagattggaatgctcgtgtcagcaataagtgttcactcagaact

SEQ ID NO: 25062 - DNA, 80 bp, synthetic construct
  source 1..80: mol_type = other DNA
aggaagaacttcactaatggctactgcagcaaatcagagcttagacccctaatctgttacctccttgtgaaacatgcttt

SEQ ID NO: 25063 - DNA, 80 bp, synthetic construct; identical to SEQ ID NO: 10177
  source 1..80: mol_type = other DNA

SEQ ID NO: 25064 - DNA, 80 bp, synthetic construct
  source 1..80: mol_type = other DNA
tgttgttttaaaccactgatattttgagagttgtatgtttcacagtataacttagcctatccggaattatacagataatt

SEQ ID NO: 25065 - DNA, 80 bp, synthetic construct
  source 1..80: mol_type = other DNA
gtaggatatggcaccagaaagaagggagcagtgcaaacaatgagatctacatatgtgcataggtattcccttgagtcttt

SEQ ID NO: 25066 - DNA, 80 bp, synthetic construct
  source 1..80: mol_type = other DNA
aaattcatagaagccccagaaagtccatgcttaggagtagacctaaactagccctaggttaaagactactttagatcatc

SEQ ID NO: 25067 - DNA, 80 bp, synthetic construct
  source 1..80: mol_type = other DNA
ataggcaaagaagaaagaaaatgtgactcatttccagaagaaaagccagtcaatagaaacaaatcagaactgatagagaa

SEQ ID NO: 25068 - DNA, 80 bp, synthetic construct; identical to SEQ ID NO: 10178
  source 1..80: mol_type = other DNA

SEQ ID NO: 25069 - DNA, 80 bp, synthetic construct
  source 1..80: mol_type = other DNA
aaaattatttttgaaaatagtgttgattattttccccaaatttgatgaaaaatacaaatctacagatctaagaagctcaa

SEQ ID NO: 25070 - DNA, 80 bp, synthetic construct
  source 1..80: mol_type = other DNA
acaggagaatgcacaaactaatggaataaccatacaatagaatactataaataaaaaggaacaaaccactgatcgagtca

SEQ ID NO: 25071 - DNA, 80 bp, synthetic construct; identical to SEQ ID NO: 10179
  source 1..80: mol_type = other DNA

SEQ ID NO: 25072 - DNA, 80 bp, synthetic construct
  source 1..80: mol_type = other DNA
atcacttttaccacccaaaatgacttccctatatgctttctgatgcctaaagttacactgataattatttatatattctg

SEQ ID NO: 25073 - DNA, 80 bp, synthetic construct
  source 1..80: mol_type = other DNA
ctgggtcaaattccatgggggtcacaggagatagattttcttgcgtgttctaatctcccttcaataaacaaatattattt

SEQ ID NO: 25074 - DNA, 80 bp, synthetic construct
  source 1..80: mol_type = other DNA
ccaattcagaccagcaaagcattaggataattgcggcaattttctacacagggagacatggcaaggtatctttatggaaa

SEQ ID NO: 25075 - DNA, 80 bp, synthetic construct
  source 1..80: mol_type = other DNA
tctctgccaatagaaaattctcttatccttaaatggtccagggtcattccccacaaagcctttgctgagtgctcccttct

SEQ ID NO: 25076 - DNA, 80 bp, synthetic construct; identical to SEQ ID NO: 10180
  source 1..80: mol_type = other DNA

SEQ ID NO: 25077 - DNA, 80 bp, synthetic construct
  source 1..80: mol_type = other DNA
ttttaagtcacttactatgtgacaggcagagtattcagtgtgccttgagggaaggggcaatatcttgtacatctttgtat

SEQ ID NO: 25078 - DNA, 80 bp, synthetic construct
  source 1..80: mol_type = other DNA
ggattcctagaacttcaagcaactgaaatgaaagaataaatggataaagacaaagctcagttcccacttcagtctagtaa

SEQ ID NO: 25079 - DNA, 80 bp, synthetic construct
  source 1..80: mol_type = other DNA
aagattacaaagaaaaactatggctgcagtatggctatatgagatcttgaattcgggaaagaaagaatttcagactttca

SEQ ID NO: 25080 - DNA, 80 bp, synthetic construct; identical to SEQ ID NO: 10181
  source 1..80: mol_type = other DNA

SEQ ID NO: 25081 - DNA, 80 bp, synthetic construct
  source 1..80: mol_type = other DNA
aggattaactcttctccctttgaataaatcatattcggccagatttttctgaatgtggtttctatcagttatagtaacag

SEQ ID NO: 25082 - DNA, 80 bp, synthetic construct
  source 1..80: mol_type = other DNA
agtgttttataaagctctatcatcagctaattctagaagagatacttccggtcaagacactggcttgtgttcagaaagaa

SEQ ID NO: 25083 - DNA, 80 bp, synthetic construct
  source 1..80: mol_type = other DNA
agagaaggataataaccagtactgccattacagttgaacatcttgatgtcttccaccaaattttgctcagtgttcttggg

SEQ ID NO: 25084 - DNA, 80 bp, synthetic construct; identical to SEQ ID NO: 10182
  source 1..80: mol_type = other DNA

SEQ ID NO: 25085 - DNA, 80 bp, synthetic construct
  source 1..80: mol_type = other DNA
ccaataactgttccttgacccttatgcctttgacctacctcatcctccactcttaccccagccatggtacacagtgtaat

SEQ ID NO: 25086 - DNA, 80 bp, synthetic construct
  source 1..80: mol_type = other DNA
ttttttcaaaccaattttcatcagaagctagaaagttgactttgaaggagagcctgccttaagaagcctgtagtgtgata

SEQ ID NO: 25087 - DNA, 80 bp, synthetic construct
  source 1..80: mol_type = other DNA
gtttgagtgacttcaagtaacaagggatttattggaaggaatacaagaaaagccccaccgtcacacttcagaaaaagcaa

SEQ ID NO: 25088 - DNA, 80 bp, synthetic construct; identical to SEQ ID NO: 10183
  source 1..80: mol_type = other DNA

SEQ ID NO: 25089 - DNA, 80 bp, synthetic construct
  source 1..80: mol_type = other DNA
gactgagcaggcagggctcatttctatcagagcagctttgtcatgtgcctgcattggactgtgtagacctaacaacagta

SEQ ID NO: 25090 - DNA, 80 bp, synthetic construct
  source 1..80: mol_type = other DNA
ctcggatgtttctgtggcaggatactgaaaggaagtggaggttggagcaaatgctctagcataaaggacagaggaaatga

SEQ ID NO: 25091 - DNA, 80 bp, synthetic construct
  source 1..80: mol_type = other DNA
gtaagaaaaatattggggcttgagacttcagtaataccaatattaggttgtgttcatggagaggaggggaatatcaatgg

SEQ ID NO: 25092 - DNA, 80 bp, synthetic construct
  source 1..80: mol_type = other DNA
gaattattggtagtgaaattttgccctactttacacctactcccacatacggggcacacatatacacataaaatttcctc

SEQ ID NO: 25093 - DNA, 80 bp, synthetic construct; identical to SEQ ID NO: 10184
  source 1..80: mol_type = other DNA

SEQ ID NO: 25094 - DNA, 80 bp, synthetic construct
  source 1..80: mol_type = other DNA
ttcaaaaccagaagttaacagaacaaaatctctgggaccatggaatgggttgctttgatatatagggagcattcataatc

SEQ ID NO: 25095 - DNA, 80 bp, synthetic construct
  source 1..80: mol_type = other DNA
ttcaactgtgacatacgcttttgaaagaaacgtctacagtgctatgagaatacaggatggataatctgacatataggact

SEQ ID NO: 25096 - DNA, 80 bp, synthetic construct; identical to SEQ ID NO: 10185
  source 1..80: mol_type = other DNA

SEQ ID NO: 25097 - DNA, 80 bp, synthetic construct
  source 1..80: mol_type = other DNA
atgaacaacaggatttaaataggtattcaaggaacagttattaaccatatcacacataaggggtaccaaggacataaaaa

SEQ ID NO: 25098 - DNA, 80 bp, synthetic construct
  source 1..80: mol_type = other DNA
gactggatgatttcttactacgtcacttccatttctacgattcatgagccgaaaaccaacccagatccatccaagtgact

SEQ ID NO: 25099 - DNA, 80 bp, synthetic construct
  source 1..80: mol_type = other DNA
cacacacacacagtacacacactgctcatcctacagaaaggctcctcacaggctgtggacctcaactctttgagaagctt

SEQ ID NO: 25100 - DNA, 80 bp, synthetic construct; identical to SEQ ID NO: 10186
  source 1..80: mol_type = other DNA

SEQ ID NO: 25101 - DNA, 80 bp, synthetic construct
  source 1..80: mol_type = other DNA
ctctgtaaataaataaggtttcacggttaagtaagcttgggacatgttggattacaaaaggtgagacaggtgtctttgct

SEQ ID NO: 25102 - DNA, 80 bp, synthetic construct
  source 1..80: mol_type = other DNA
acgggcatgtgccatcatgaccggccaattttgtatttttagtagagacaggatttcaccatgttggccaggctggtttc

SEQ ID NO: 25103 - DNA, 80 bp, synthetic construct
  source 1..80: mol_type = other DNA
ggagcacctcttgggtgctggtgctccaagacagattctgggaactgtgactctccacagcactcttaaaaagtgtctgt

SEQ ID NO: 25104 - DNA, 80 bp, synthetic construct; identical to SEQ ID NO: 10187
  source 1..80: mol_type = other DNA

SEQ ID NO: 25105 - DNA, 80 bp, synthetic construct
  source 1..80: mol_type = other DNA
ttattaaccactggaactcaacagcacccctccccaaatttcctactgtcctagaaccccgttttattttcttcacaata

SEQ ID NO: 25106 - DNA, 80 bp, synthetic construct
  source 1..80: mol_type = other DNA
tgctctcaatgagttcttgcttataacttttataaagcagaggagtctacttggtggtagagactctggtcagtgctgta

SEQ ID NO: 25107 - DNA, 80 bp, synthetic construct; identical to SEQ ID NO: 10188
  source 1..80: mol_type = other DNA

SEQ ID NO: 25108 - DNA, 80 bp, synthetic construct
  source 1..80: mol_type = other DNA
gactccagaactagaatcttgctgagctatagaatttgtaaacacacgtaaaaaggagcttgtaaagtaaaaaatggccc

SEQ ID NO: 25109 - DNA, 80 bp, synthetic construct
  source 1..80: mol_type = other DNA
cctcggtattctcatctatgaataggcagccccttcttctagaggtgaccataatgagctgctcaccacacagttggcaa

SEQ ID NO: 25110 - DNA, 80 bp, synthetic construct
  source 1..80: mol_type = other DNA
aaatgccccaggagctatgagatgcctagaaaccaacaggggattttaataaaagcaacttgctgatcaggtacatactt

SEQ ID NO: 25111 - DNA, 80 bp, synthetic construct
  source 1..80: mol_type = other DNA
tttgtgctttcagggaataatgaaaaagacagaaaggtgaacatgacaatctagttccaagagccctagattgaaaaaag

SEQ ID NO: 25112 - DNA, 80 bp, synthetic construct; identical to SEQ ID NO: 10189
  source 1..80: mol_type = other DNA

SEQ ID NO: 25113 - DNA, 80 bp, synthetic construct
  source 1..80: mol_type = other DNA
acttaaatccccccataagtggcagggatttccaagtatccaaaaagtgctctcttggctgctggtgaggctcggtacgc

SEQ ID NO: 25114 - DNA, 80 bp, synthetic construct
  source 1..80: mol_type = other DNA
ttgcatagattcaaaactatccttgaaaatcccttaaattcccccagaacatgcagcctgcatgtttcatgctgaccacc

SEQ ID NO: 25115 - DNA, 80 bp, synthetic construct; identical to SEQ ID NO: 10190
  source 1..80: mol_type = other DNA

SEQ ID NO: 25116 - DNA, 80 bp, synthetic construct
  source 1..80: mol_type = other DNA
aaggctaggtgaaggtcttgagcacatatcctgcgggctgttggcagaagctgacttaggagaccggctggggaggaaag

SEQ ID NO: 25117 - DNA, 80 bp, synthetic construct
  source 1..80: mol_type = other DNA
acagcccagagacacctctcccctccccatagtctcacctgcccttggcagtgtccctgaccttctgacttacacatctc

SEQ ID NO: 25118 - DNA, 80 bp, synthetic construct
  source 1..80: mol_type = other DNA
tgctgtcccttctgtttagctatgctcacttggcagtattcaagtgtcacagtggcagttagagcacaaattcaagccca

SEQ ID NO: 25119 - DNA, 80 bp, synthetic construct
  source 1..80: mol_type = other DNA
cagaattacaggaggcaggaggcggaacatgctgagatggtgcctgatgttggcctaagtgctcggccaaatgtgtttca

SEQ ID NO: 25120 - DNA, 80 bp, synthetic construct; identical to SEQ ID NO: 10191
  source 1..80: mol_type = other DNA

SEQ ID NO: 25121 - DNA, 80 bp, synthetic construct
  source 1..80: mol_type = other DNA
gccctcccccctcatccctccaatctcgtggtgccaatttttcatttagtattctttttttatttgtttccattgtcaaa

SEQ ID NO: 25122 - DNA, 80 bp, synthetic construct
  source 1..80: mol_type = other DNA
aagacaaatcaatggcagtgtatacacgtcacctgatggaatatcacacagcaatgaggatgaatcaatctacaactaca

SEQ ID NO: 25123 - DNA, 80 bp, synthetic construct; identical to SEQ ID NO: 10192
  source 1..80: mol_type = other DNA

SEQ ID NO: 25124 - DNA, 80 bp, synthetic construct
  source 1..80: mol_type = other DNA
acagggaattctcattggcaactgcagaaaaaggcctcaatcccttgcatgaggcctcccaaaagggaccttggccacaa

SEQ ID NO: 25125 - DNA, 80 bp, synthetic construct
  source 1..80: mol_type = other DNA
agagaaatcctttgctcatctctgcccctgtgctttctcccaagccctttcctcgtccaggaagcctggtctggctgccc

SEQ ID NO: 25126 - DNA, 80 bp, synthetic construct
  source 1..80: mol_type = other DNA
taactttctgcctccttcatagtgcctagcacagtgccaaacacataatttgtgtttaatatatatattcaaagacttcc

SEQ ID NO: 25127 - DNA, 80 bp, synthetic construct; identical to SEQ ID NO: 10193
  source 1..80: mol_type = other DNA

SEQ ID NO: 25128 - DNA, 80 bp, synthetic construct
  source 1..80: mol_type = other DNA
ctcttggtctgtctaagagctgattatttctcagattttattaaagtcattttctcaggaagtgctttcctgaatgccta

SEQ ID NO: 25129 - DNA, 80 bp, synthetic construct
  source 1..80: mol_type = other DNA
aagcagctcgccttattcatcttcctcaccagacacacttccatgagaacaggggcctggcggaatacatgcaaacaaat

SEQ ID NO: 25130 - DNA, 80 bp, synthetic construct
  source 1..80: mol_type = other DNA
aggtcagcagcagtaagtagtagaatgagaggtagaacctgtattttcttatgtgcagccaaagaaaagtttcttcatat

SEQ ID NO: 25131 - DNA, 80 bp, synthetic construct; identical to SEQ ID NO: 10194
  source 1..80: mol_type = other DNA

SEQ ID NO: 25132 - DNA, 80 bp, synthetic construct
  source 1..80: mol_type = other DNA
aaacagactagcagccccactcaccattacctaccaagatgggccacaccagccagacctacaagtaagacagttgctga

SEQ ID NO: 25133 - DNA, 80 bp, synthetic construct
  source 1..80: mol_type = other DNA
tagttacaactactcctgatggtacacaatctaatgggtatgcctgacaactcctatggaccgaatgtttgtgtaccccc

SEQ ID NO: 25134 - DNA, 80 bp, synthetic construct
  source 1..80: mol_type = other DNA
aaccagaagacagccatctgctaagtaggaagcagccatcactggtggacactgtatcagtcaacaccttggttttggac

SEQ ID NO: 25135 - DNA, 80 bp, synthetic construct
  source 1..80: mol_type = other DNA
tgggaatcgaaagcagccttattgatttaggctttaaacatcatcaatatggttgacaacttttatttttatctctccac

SEQ ID NO: 25136 - DNA, 80 bp, synthetic construct; identical to SEQ ID NO: 10195
  source 1..80: mol_type = other DNA

SEQ ID NO: 25137 - DNA, 80 bp, synthetic construct
  source 1..80: mol_type = other DNA
gcagtcttcttaacacttaattcagatcatgccatctgccaactcaaacctcatcaaagactttctgttgcacttgcaat

SEQ ID NO: 25138 - DNA, 80 bp, synthetic construct
  source 1..80: mol_type = other DNA
cctcctggctttgggatttactgttccctctgacaagaaagttttctttcttttcttttctttttttttttcctgagaca

SEQ ID NO: 25139 - DNA, 80 bp, synthetic construct; identical to SEQ ID NO: 10196
  source 1..80: mol_type = other DNA

SEQ ID NO: 25140 - DNA, 80 bp, synthetic construct
  source 1..80: mol_type = other DNA
caagagctggttgtttaaaggagcctggaacctccccctctctctctcttaagagctccctcttttaccacatgatatgc

SEQ ID NO: 25141 - DNA, 80 bp, synthetic construct
  source 1..80: mol_type = other DNA
aacacaaaatgcactaatgtagttcatcatccactgttggactttaaggttgtttccaactttctattaaccatcctggg

SEQ ID NO: 25142 - DNA, 80 bp, synthetic construct
  source 1..80: mol_type = other DNA
gtgcgtgcatactttcttttgtagttaaatatactagctcatttatttatgtctttattttattgcggtaagagcactta

SEQ ID NO: 25143 - DNA, 80 bp, synthetic construct
  source 1..80: mol_type = other DNA
ccaattgtaattctggtgcatggcatggacctggcatacagaaggactcaatcaatatttattgaatgaagccataaagg

SEQ ID NO: 25144 - DNA, 80 bp, synthetic construct; identical to SEQ ID NO: 10197
  source 1..80: mol_type = other DNA

SEQ ID NO: 25145 - DNA, 80 bp, synthetic construct
  source 1..80: mol_type = other DNA
agatgagaaccttgattaataggcctatacataacctttaattaattggtcaacattcaaggattatacccttgaacttt

SEQ ID NO: 25146 - DNA, 80 bp, synthetic construct
  source 1..80: mol_type = other DNA
ttgcccattttgtctccataagcccatggctttcaggttctgaaaatcctgaaaatcttggtcaaaaccagccacgtgta

SEQ ID NO: 25147 - DNA, 80 bp, synthetic construct
  source 1..80: mol_type = other DNA
taattacataaacatagagcgagcagtactatgatgccttgcagatgaaatatgcatattctgtgtactgatacgttgtc

SEQ ID NO: 25148 - DNA, 80 bp, synthetic construct; identical to SEQ ID NO: 10198
  source 1..80: mol_type = other DNA

SEQ ID NO: 25149 - DNA, 80 bp, synthetic construct
  source 1..80: mol_type = other DNA
agtcatttctcacttcaacctttgagacaagttttacatatgaggaaaataagtctgaggctgagttagtaatttgctcg

SEQ ID NO: 25150 - DNA, 80 bp, synthetic construct
  source 1..80: mol_type = other DNA
ggatgagtgggtgcatcacccaggaaacagagtttcaattagtggagaagcaacatgggtgaaggagaaaagaaacggat

SEQ ID NO: 25151 - DNA, 80 bp, synthetic construct
  source 1..80: mol_type = other DNA
agttgtaccttttagccaagtgtccttagttgtctgtgtgtaagtgtgtgtgtcgtgtacaggaccacgggggtgggatt

SEQ ID NO: 25152 - DNA, 80 bp, synthetic construct; identical to SEQ ID NO: 10199
  source 1..80: mol_type = other DNA

SEQ ID NO: 25153 - DNA, 80 bp, synthetic construct
  source 1..80: mol_type = other DNA
gaaaatacaaaccaatgagatgatccagctttgactgtggcatataatagtgtagtcacccttggctaaggctgaatgtg

SEQ ID NO: 25154 - DNA, 80 bp, synthetic construct
  source 1..80: mol_type = other DNA
aagaggaagctggagaagctgaagctagcagtacattctggagagtgagtagaaacatactctcgttaaatgaacaaaag

SEQ ID NO: 25155 - DNA, 80 bp, synthetic construct; identical to SEQ ID NO: 10200
  source 1..80: mol_type = other DNA

SEQ ID NO: 25156 - DNA, 80 bp, synthetic construct
  source 1..80: mol_type = other DNA
ttctatgcaattttatcacacgcattagtttctgtatccatcaccacagtcaggattcagaacagttccgtcaccacaag

SEQ ID NO: 25157 - DNA, 80 bp, synthetic construct
  source 1..80: mol_type = other DNA
aattaagcatgaggaacatcccttagggtgataactgagacacaaaagtggaaccacccccctctcgcacagcatctcct

SEQ ID NO: 25158 - DNA, 80 bp, synthetic construct
  source 1..80: mol_type = other DNA
aatacaaaaaaaaaaaaaaattagccgctcgtggtggcgcacacctgtagtcccagctatgccagaggctgaggcaggag

SEQ ID NO: 25159 - DNA, 80 bp, synthetic construct
  source 1..80: mol_type = other DNA
agatcacctgaggtcaggaattcgagaccagcctggccaacatggtgaaacctggtatctactaaaaatacaaaaattag

SEQ ID NO: 25160 - DNA, 80 bp, synthetic construct; identical to SEQ ID NO: 10201
  source 1..80: mol_type = other DNA

SEQ ID NO: 25161 - DNA, 80 bp, synthetic construct
  source 1..80: mol_type = other DNA
actcaggcacaagtggcacgtgtaaagaaaactatgggatgccaaaactgctgagaacaaaccatgctcaagaactttca

SEQ ID NO: 25162 - DNA, 80 bp, synthetic construct
  source 1..80: mol_type = other DNA
gaagaaaacctgagtgaaggtaatggcagagaaagggggtcgcttgtgaaaaaaaataaatagaaaaaatcaggagtgat

SEQ ID NO: 25163 - DNA, 80 bp, synthetic construct; identical to SEQ ID NO: 10202
  source 1..80: mol_type = other DNA

SEQ ID NO: 25164 - DNA, 80 bp, synthetic construct
  source 1..80: mol_type = other DNA
agaatttcaagagggtagggttaagcaacattgagtgcttccaaataagacacacaaagacctacatggctagggcctta

SEQ ID NO: 25165 - DNA, 80 bp, synthetic construct
  source 1..80: mol_type = other DNA
atttttgtggtacctctcaaatcctaccatatggcaactgcctacgttagctcttgttaggaagtctcttgctcaactat

SEQ ID NO: 25166 - DNA, 80 bp, synthetic construct; identical to SEQ ID NO: 10203
  source 1..80: mol_type = other DNA

SEQ ID NO: 25167 - DNA, 80 bp, synthetic construct
  source 1..80: mol_type = other DNA
ccagggtctgtgctcttgtccctggctacgtacacatacccctccctttacttgtcacagggcagtcacagcagtctatt

SEQ ID NO: 25168 - DNA, 80 bp, synthetic construct
  source 1..80: mol_type = other DNA
cagtactcctggccttcctaagtaggccctttctctttctgtcacttgcttatttcctttacagcactcaccacaacata

SEQ ID NO: 25169 - DNA, 80 bp, synthetic construct
  source 1..80: mol_type = other DNA
caaatgatgggtaagttaatgtatttgcatagtatttcttcatacatattgtctcatgtaatcatggggaaagagaagac

SEQ ID NO: 25170 - DNA, 80 bp, synthetic construct; identical to SEQ ID NO: 10204
  source 1..80: mol_type = other DNA

SEQ ID NO: 25171 - DNA, 80 bp, synthetic construct
  source 1..80: mol_type = other DNA
cctgatgctactgagttcaatgggcttttgctcctatcagcctaaagcagaactctgctgccaacagttaaattagcaga

SEQ ID NO: 25172 - DNA, 80 bp, synthetic construct
  source 1..80: mol_type = other DNA
cccacttttcacaaaagaaatgtgtttaggatttttatcacagtgactagaaacctaattcctactagctccagctaagg

SEQ ID NO: 25173 - DNA, 80 bp, synthetic construct
  source 1..80: mol_type = other DNA
ctatgtggattggcttcttttgcctttcagctgctcctgagttttatatgtaacaatctgcacatccagacactcatgga

SEQ ID NO: 25174 - DNA, 80 bp, synthetic construct; identical to SEQ ID NO: 10205
  source 1..80: mol_type = other DNA

SEQ ID NO: 25175 - DNA, 80 bp, synthetic construct
  source 1..80: mol_type = other DNA
agtacttattattgttattgatatggcttttattgtccaaaatcatattgccagtaagacaggagtcaggacttgaaacc

SEQ ID NO: 25176 - DNA, 80 bp, synthetic construct
  source 1..80: mol_type = other DNA
gttgtccccactgttcctagaacaacagcaacatcagtgtctttctctacaggggagagaaagacaagggcatgggagaa

SEQ ID NO: 25177 - DNA, 80 bp, synthetic construct
  source 1..80: mol_type = other DNA
cacatcctttctcatctctagcacatctcaggaactgaactcactcccactgaatttattaactgaattgaaaggaaggg

SEQ ID NO: 25178 - DNA, 80 bp, synthetic construct; identical to SEQ ID NO: 10206
  source 1..80: mol_type = other DNA

SEQ ID NO: 25179 - DNA, 80 bp, synthetic construct
  source 1..80: mol_type = other DNA
tactgaaacagagaagagtctgaaagaaaattcttaaaggcctattgaaaatgagccacatggagcacaagtcacctgtt

SEQ ID NO: 25180 - DNA, 80 bp, synthetic construct
  source 1..80: mol_type = other DNA
ctggtccttttcgccacttacaaacaagccagttttaaccttttggctgaaatacatacactggttcaataattgaaggg

SEQ ID NO: 25181 - DNA, 80 bp, synthetic construct
  source 1..80: mol_type = other DNA
cagtagaatgttagatttaaaagaaaccttctagaaaacagtccccattttatcaaggcccagagctcaagtgagcatgt

SEQ ID NO: 25182 - DNA, 80 bp, synthetic construct; identical to SEQ ID NO: 10207
  source 1..80: mol_type = other DNA

SEQ ID NO: 25183 - DNA, 80 bp, synthetic construct
  source 1..80: mol_type = other DNA
ctctgacaatttaagatcttacaactgcctcataacttgggatgtgttttaaattcctttatgaggaaatggaagcccaa

SEQ ID NO: 25184 - DNA, 80 bp, synthetic construct
  source 1..80: mol_type = other DNA
tttcctcatctgcaaatgggatcccctatatttgaccttcatgcttctcagggttgttctgaggatcaagtctccttgct

SEQ ID NO: 25185 - DNA, 80 bp, synthetic construct
  source 1..80: mol_type = other DNA
aacaggtgtgtgtaatctgggaagctcaaagccttgagatcatgccctactttggctacagcagagcaaaggctggccac

SEQ ID NO: 25186 - DNA, 80 bp, synthetic construct
  source 1..80: mol_type = other DNA
ctcctgcccttcattcagtcatttatttgttcaattattttgagcacctactatgtattagtcacattgtaggcacttgg

SEQ ID NO: 25187 - DNA, 80 bp, synthetic construct; identical to SEQ ID NO: 10208
  source 1..80: mol_type = other DNA

SEQ ID NO: 25188 - DNA, 80 bp, synthetic construct
  source 1..80: mol_type = other DNA
agaacatcaagcaggacaaatagtctaagccttatgctctaatccagcttgccaaatttcctcactctaacaaatcatac

SEQ ID NO: 25189 - DNA, 80 bp, synthetic construct
  source 1..80: mol_type = other DNA
gtaacatataaagggtagtaaaccttctacctggttctcctggcacccttactcttggaatcctgccaccatgttgtgat

SEQ ID NO: 25190 - DNA, 80 bp, synthetic construct; identical to SEQ ID NO: 10209
  source 1..80: mol_type = other DNA

SEQ ID NO: 25191 - DNA, 80 bp, synthetic construct
  source 1..80: mol_type = other DNA
ttgatttgcatgtcccttgaatatataccttccttaggcatcttgtgaggaaagaagatagttaggctaaggtaagatca

SEQ ID NO: 25192 - DNA, 80 bp, synthetic construct
  source 1..80: mol_type = other DNA
aacactggaacaattggttaactatatggaagaaaatcaatttagatcctacacttaaatctacttgctataaatcaaaa

SEQ ID NO: 25193 - DNA, 80 bp, synthetic construct
  source 1..80: mol_type = other DNA
aaaagaaaataaactaaaaactgtatctgccacaaagattataagcaaagaacaaataccaaaaacaaacaaatatgcaa

SEQ ID NO: 25194 - DNA, 80 bp, synthetic construct
  source 1..80: mol_type = other DNA
aatgataataatggtgtattgtgagctgagtagtctcatacattgctggtagaagtatacatttttttaaaagttggtga

SEQ ID NO: 25195 - DNA, 80 bp, synthetic construct; identical to SEQ ID NO: 10210
  source 1..80: mol_type = other DNA

SEQ ID NO: 25196 - DNA, 80 bp, synthetic construct
  source 1..80: mol_type = other DNA
atataggattgcaattcaatgtgagattggggtggggacatagagccaaaccatatcaaccaccattaaagaaatagtta

SEQ ID NO: 25197 - DNA, 80 bp, synthetic construct
  source 1..80: mol_type = other DNA
ccttaaactaatggtgttggttatcttagggattacctgtgaattttcttatctacttcatacatttttgttttggtcat

SEQ ID NO: 25198 - DNA, 80 bp, synthetic construct; identical to SEQ ID NO: 10211
  source 1..80: mol_type = other DNA

SEQ ID NO: 25199 - DNA, 80 bp, synthetic construct
  source 1..80: mol_type = other DNA
agaggagagatccctggtgacattaagcctacagccaaccaccagtgaaggcatcctttcacctagaggaagtttgtgtc

SEQ ID NO: 25200 - DNA, 80 bp, synthetic construct
  source 1..80: mol_type = other DNA
ggcttcattggattgacaactacactccctgtatagttcttcccactattgcccactcatcattcatagatgggagtcca

SEQ ID NO: 25201 - DNA, 80 bp, synthetic construct
  source 1..80: mol_type = other DNA
ataagaaacctgccttgactacatatgtgcttaaaaagagctttggacactctacagtggttgctactaatatcacatga

SEQ ID NO: 25202 - DNA, 80 bp, synthetic construct; identical to SEQ ID NO: 10212
  source 1..80: mol_type = other DNA

SEQ ID NO: 25203 - DNA, 80 bp, synthetic construct
  source 1..80: mol_type = other DNA
cacttgcttctccttttgattaagctcagaggctttcagagaggagaccccagaatatttgaacaatgacagggagttga

SEQ ID NO: 25204 - DNA, 80 bp, synthetic construct
  source 1..80: mol_type = other DNA
catcctgaaatccttccaagcctcaatttcctcacttggtgagcagacaaaacaggtagttaaactagatacagacgttc

SEQ ID NO: 25205 - DNA, 80 bp, synthetic construct
  source 1..80: mol_type = other DNA
acagtataccatagactgttgtttatcctcatggttgtgtggctgactggaagcctttgttcgctgctgctgcccagcat

SEQ ID NO: 25206 - DNA, 80 bp, synthetic construct; identical to SEQ ID NO: 10213
  source 1..80: mol_type = other DNA

SEQ ID NO: 25207 - DNA, 80 bp, synthetic construct
  source 1..80: mol_type = other DNA
ccaaaggcttctttgaaagtgtcttagacagtgtgagctcctcagctgactgtatctccagccacactccctccaggagt

SEQ ID NO: 25208 - DNA, 80 bp, synthetic construct
  source 1..80: mol_type = other DNA
tgatttcagatgcctcttctcctcaatactcccaaataccatatccagagccagaatgacatttgtagggggtggaggaa

SEQ ID NO: 25209 - DNA, 80 bp, synthetic construct
  source 1..80: mol_type = other DNA
atgaggactgtgctcaagggtttgttccaagtcagagatgggaagtataagggacaactaaaatcagtggagcaaaccaa

SEQ ID NO: 25210 - DNA, 80 bp, synthetic construct
  source 1..80: mol_type = other DNA
tggagctgaactcacccttcctgagttcctctgatatgaaaatgccaccaagacaagcagaacatcattacccaggatag

SEQ ID NO: 25211 - DNA, 80 bp, synthetic construct; identical to SEQ ID NO: 10214
  source 1..80: mol_type = other DNA

SEQ ID NO: 25212 - DNA, 80 bp, synthetic construct
  source 1..80: mol_type = other DNA
gctcaaggatttatgcatacagaagcacttgttggtatgactgttcttgtgacttcaaaaaatggtgagattattccctt

SEQ ID NO: 25213 - DNA, 80 bp, synthetic construct
  source 1..80: mol_type = other DNA
agacactcagtgaaatatcagataagccagatcagatgttttcctctctcttgagaagaactcagacaacatgaaaattt

SEQ ID NO: 25214 - DNA, 80 bp, synthetic construct
  source 1..80: mol_type = other DNA
atgccaggaagagagaaggaaagcaagcatgagacaagtttgcatagaaatatacatgggaaaatcattttcagaaaatc

SEQ ID NO: 25215 - DNA, 80 bp, synthetic construct; identical to SEQ ID NO: 10215
  source 1..80: mol_type = other DNA

SEQ ID NO: 25216 - DNA, 80 bp, synthetic construct
  source 1..80: mol_type = other DNA
tcaaaaggtagaaataacccaaatgaccatcaatagatgaaagaacaaacaaaatgtggtatatttatacaatggaatat

SEQ ID NO: 25217 - DNA, 80 bp, synthetic construct
  source 1..80: mol_type = other DNA
gagggtggcacaacattgtaaatggacttaatgtcactcaattgtacacttaccacaataaaatatttctttttttacca

SEQ ID NO: 25218 - DNA, 80 bp, synthetic construct; identical to SEQ ID NO: 10216
  source 1..80: mol_type = other DNA

SEQ ID NO: 25219 - DNA, 80 bp, synthetic construct
  source 1..80: mol_type = other DNA
tttatccagtctatcattgatgggcatttttattggttccaagtctttgctattgtaaatagtgctgcaagaaacataca

SEQ ID NO: 25220 - DNA, 80 bp, synthetic construct
  source 1..80: mol_type = other DNA
caatatgtgtgtgtgttgagattatattctgttatctaccctgcctttgccagttctatggccatgggcagcttacttta

SEQ ID NO: 25221 - DNA, 80 bp, synthetic construct
  source 1..80: mol_type = other DNA
aaataatacaaaagatgcttagtccaatgtctggcacatgataaactcattaaatgttagcagtgatggtaatgatgaca

SEQ ID NO: 25222 - DNA, 80 bp, synthetic construct; identical to SEQ ID NO: 10217
  source 1..80: mol_type = other DNA

SEQ ID NO: 25223 - DNA, 80 bp, synthetic construct
  source 1..80: mol_type = other DNA
tggtagtgatggtgatggtggtgatggtgatgatgatggtggtgatggtaatgatgatggtggtgatggtgatgatgatg

SEQ ID NO: 25224 - DNA, 80 bp, synthetic construct
  source 1..80: mol_type = other DNA
ccatccttccatctttcttagcttccttggtcctgacttctccctgaaatatctaacctcccaggactcatagtaaaaat

SEQ ID NO: 25225 - DNA, 80 bp, synthetic construct
  source 1..80: mol_type = other DNA
tttgcctgtttataagttaagttggaggctgatgtgagccaaaatacactcacacctcagactttttgtacttgctgttt

SEQ ID NO: 25226 - DNA, 80 bp, synthetic construct
  source 1..80: mol_type = other DNA
attttctccctgacccttaccagcatgtattttttggcttattgtctgttctctcctctggaatataaacaccatgacag

SEQ ID NO: 25227 - DNA, 80 bp, synthetic construct; identical to SEQ ID NO: 10218
  source 1..80: mol_type = other DNA

SEQ ID NO: 25228 - DNA, 80 bp, synthetic construct
  source 1..80: mol_type = other DNA
actggctgccatatggttcccagtaaagcaaaggcaggaaacctcctattccctctgcccaaccctaggattctggcttc

SEQ ID NO: 25229 - DNA, 80 bp, synthetic construct
  source 1..80: mol_type = other DNA
gataaaaagctacctccttcattttgttggattgcaggatcaatcaagtacacagctttttgtttagcaagaagccacct

SEQ ID NO: 25230 - DNA, 80 bp, synthetic construct
  source 1..80: mol_type = other DNA
aactattataagccaagcctgtattaagtacactgttcactgcctctattactctcacaacattcctgcagtcatttgta

SEQ ID NO: 25231 - DNA, 80 bp, synthetic construct; identical to SEQ ID NO: 10219
  source 1..80: mol_type = other DNA

SEQ ID NO: 25232 - DNA, 80 bp, synthetic construct
  source 1..80: mol_type = other DNA
gggtggggagctggaaagcattgtagttgacagatatgtgggatacagggttactaggtctaagaggaaagtaaaatcag

SEQ ID NO: 25233 - DNA, 80 bp, synthetic construct
  source 1..80: mol_type = other DNA
gccagggagtgtcagtcagcagaagtcaattctacccagcattctttgactccaaagacacaagatcctttgaactcagt

SEQ ID NO: 25234 - DNA, 80 bp, synthetic construct
  source 1..80: mol_type = other DNA
aacttccaaactttagacaaaacagcttacaaggaaatactcttattttaaaccaaagtgcttgtggttgatcaggtaag

SEQ ID NO: 25235 - DNA, 80 bp, synthetic construct; identical to SEQ ID NO: 10220
  source 1..80: mol_type = other DNA

SEQ ID NO: 25236 - DNA, 80 bp, synthetic construct
  source 1..80: mol_type = other DNA
ggaagagaaaggatgaatgctaggtcattcatcccaaaagaatgcttttcttttagggaaaaacttctcttccctttggt

SEQ ID NO: 25237 - DNA, 80 bp, synthetic construct
  source 1..80: mol_type = other DNA
agatgattttctccaactgccaatgtcccatggcagatttaaagcagatccaagaagctccatactacagatttcctctt

SEQ ID NO: 25238 - DNA, 80 bp, synthetic construct; identical to SEQ ID NO: 10221
  source 1..80: mol_type = other DNA

SEQ ID NO: 25239 - DNA, 80 bp, synthetic construct
  source 1..80: mol_type = other DNA
tgctgaaaagctgatgaaagctatggactccccactttggaccaaattaaaagccattgacttagtggctgtcacccacc

SEQ ID NO: 25240 - DNA, 80 bp, synthetic construct
  source 1..80: mol_type = other DNA
ggagatctgggttttaattctcacaatatctatgtgcttggttatgggaaagccacatttcttctagtacccatgccata

SEQ ID NO: 25241 - DNA, 80 bp, synthetic construct
  source 1..80: mol_type = other DNA
tttgaagctctctggattaaagggtctctaaatttccttccagagttaactttttagtagtctagatctggccccggaca

SEQ ID NO: 25242 - DNA, 80 bp, synthetic construct
  source 1..80: mol_type = other DNA
agagaaaggtagaaatctcttcctggagaaagaggaatgcaggctgctttgccctcatttccaatccctccatttccaaa

SEQ ID NO: 25243 - DNA, 80 bp, synthetic construct; identical to SEQ ID NO: 10222
  source 1..80: mol_type = other DNA

SEQ ID NO: 25244 - DNA, 80 bp, synthetic construct
  source 1..80: mol_type = other DNA
ttacaaagtaatgaggtagaactgggagaggaaaggaaatttcacaggcaagaatggggcaaaagttctacccagctgtt

SEQ ID NO: 25245 - DNA, 80 bp, synthetic construct
  source 1..80: mol_type = other DNA
cattttaaacctcaaattttctgtagtttctactcccagcagattggagggagaaacaactagagcttcctcagttcaga

SEQ ID NO: 25246 - DNA, 80 bp, synthetic construct; identical to SEQ ID NO: 10223
  source 1..80: mol_type = other DNA

SEQ ID NO: 25247 - DNA, 80 bp, synthetic construct
  source 1..80: mol_type = other DNA
actcgactgtcagaccggaaagtttaaaatcaagagaataaagccagacaagaagaaaccaagccacaaattgcaaacaa

SEQ ID NO: 25248 - DNA, 80 bp, synthetic construct
  source 1..80: mol_type = other DNA
cggaggctgaggcaggtgcatcacaaggtcaagagatcaagaccagcctggccaacatggtgaaaccccgtctctaataa

SEQ ID NO: 25249 - DNA, 80 bp, synthetic construct
  source 1..80: mol_type = other DNA
caacgaactagataataccaaggaggcatcacttcacctggcttgagaagtcaaaagggctgtttatgtttacctaatgc

SEQ ID NO: 25250 - DNA, 80 bp, synthetic construct
  source 1..80: mol_type = other DNA
agctggtcactctacctattactctaatgtttttccttggtcataaacggaagtgcaaataagcttaatgtttatattga

SEQ ID NO: 25251 - DNA, 80 bp, synthetic construct; identical to SEQ ID NO: 10224
  source 1..80: mol_type = other DNA

SEQ ID NO: 25252 - DNA, 80 bp, synthetic construct
  source 1..80: mol_type = other DNA
aagtatcctactgccttaatgctgttaagctcatttattttcagtgaattccttcaaggcccaggtttaggccatcttca

SEQ ID NO: 25253 - DNA, 80 bp, synthetic construct
  source 1..80: mol_type = other DNA
agaatgctgaattgaaacatgttcttttcccaagagatgaatacagagaagccaactaactcagattcagtggggtaaaa

SEQ ID NO: 25254 - DNA, 80 bp, synthetic construct
  source 1..80: mol_type = other DNA
gtgacagtttgagaaaactcacagatatagtacatagcctggaaatatcaaaaaataagaaaaagttatgtatgttatga

SEQ ID NO: 25255 - DNA, 80 bp, synthetic construct; identical to SEQ ID NO: 10225
  source 1..80: mol_type = other DNA

SEQ ID NO: 25256 - DNA, 80 bp, synthetic construct
  source 1..80: mol_type = other DNA
ctgctcccaagaagcagagaaaagtcatgacgttacaagaaaaagatgaattgcttgatatgtgccatagattgaggtct

SEQ ID NO: 25257 - DNA, 80 bp, synthetic construct
  source 1..80: mol_type = other DNA
atgcaggattgttataagaaagccatacctatagagtctaatgtgatttgagaaaaagccaagttattatgtaacaactt

SEQ ID NO: 25258 - DNA, 80 bp, synthetic construct; identical to SEQ ID NO: 10226
  source 1..80: mol_type = other DNA

SEQ ID NO: 25259 - DNA, 80 bp, synthetic construct
  source 1..80: mol_type = other DNA
aggtttggagttatacaagaaggcctagatgctgagaccctttttctggattggtgtccttaatgctttgtctctaaaat

SEQ ID NO: 25260 - DNA, 80 bp, synthetic construct
  source 1..80: mol_type = other DNA
gtaagttcaacaatgaaggcactgaagtattctacttgcctccaaacacaatgtctgtagttcagcctctagatcagggg

SEQ ID NO: 25261 - DNA, 80 bp, synthetic construct
  source 1..80: mol_type = other DNA
agcccaaaacaatcaattcctgcttgagaaaaccatgcccaggttttgtatatgactttgcaggatttatgacaatcaag

SEQ ID NO: 25262 - DNA, 80 bp, synthetic construct; identical to SEQ ID NO: 10227
  source 1..80: mol_type = other DNA

SEQ ID NO: 25263 - DNA, 80 bp, synthetic construct
  source 1..80: mol_type = other DNA
tccacctcctccacctcttctgctcctgccacctctgagatagcaagaccaacccacccttttcctcctcctcctcagcc

SEQ ID NO: 25264 - DNA, 80 bp, synthetic construct
  source 1..80: mol_type = other DNA
tatgtgttaactgactgtttatgttatcagtaagactttcagtcaacagtatgctattagtggttaatcataatagtagt

SEQ ID NO: 25265 - DNA, 80 bp, synthetic construct
  source 1..80: mol_type = other DNA
tgtaccttcatctttgttagcccttttataagagactaaacagaaaaagagatgtaactcaaaactcaggcctatggccc

SEQ ID NO: 25266 - DNA, 80 bp, synthetic construct
  source 1..80: mol_type = other DNA
agaagttcactttgcacaagttatatcaccccttttggcctcagttccatcatttacaacatgggaatcattatacctag

SEQ ID NO: 25267 - DNA, 80 bp, synthetic construct; identical to SEQ ID NO: 10228
  source 1..80: mol_type = other DNA

SEQ ID NO: 25268 - DNA, 80 bp, synthetic construct
  source 1..80: mol_type = other DNA
tttaactagttgattcttctgttccatgtggcatgagctggagtcacttgttggtattcagctggcagatagctggtctt

SEQ ID NO: 25269 - DNA, 80 bp, synthetic construct
  source 1..80: mol_type = other DNA
gagaatcaggagaaagctgcacgaccttttctgtcctatgctcagaagtcatcctgggtcatttctgccacacactatta

SEQ ID NO: 25270 - DNA, 80 bp, synthetic construct; identical to SEQ ID NO: 10229
  source 1..80: mol_type = other DNA

SEQ ID NO: 25271 - DNA, 80 bp, synthetic construct
  source 1..80: mol_type = other DNA
aagaaagaaacatccctgtgtttagatttcacaagagaacctaaaagggctaccaggaaaacctttggcagagaatgtca

SEQ ID NO: 25272 - DNA, 80 bp, synthetic construct
  source 1..80: mol_type = other DNA
aaatattgatgtcttggtttctggcaatataagtcaattatccaattaccatggctgttcctagctgtggaggattgggc

SEQ ID NO: 25273 - DNA, 80 bp, synthetic construct
  source 1..80: mol_type = other DNA
atcagctgttataaattatcattcccataggaccaactttctttaaagggacttttccctttttcccatcgaaacaagtg

SEQ ID NO: 25274 - DNA, 80 bp, synthetic construct
  source 1..80: mol_type = other DNA
ctggagtactgaaatttcacagaagtaaaatttgatatatgtccatgaattcctattaatttcccaaaaaggagtccctc

SEQ ID NO: 25275 - DNA, 80 bp, synthetic construct; identical to SEQ ID NO: 10230
  source 1..80: mol_type = other DNA

SEQ ID NO: 25276 - DNA, 80 bp, synthetic construct
  source 1..80: mol_type = other DNA
atataaatctagtctggctagatttatattaagctttcttcttaaaaagttctgtctttttacttagttgcattttaaag

SEQ ID NO: 25277 - DNA, 80 bp, synthetic construct
  source 1..80: mol_type = other DNA
tatttactaatgtttacttgcttatttaaggaatgataccattcaaagcaggattacaggaaatgtaaacctcttgataa

SEQ ID NO: 25278 - DNA, 80 bp, synthetic construct
  source 1..80: mol_type = other DNA
gagagaaagtgacagcagagagacagcaggggaaaacacccacttcctgggtctggccatgcacagacccccagtactgt

SEQ ID NO: 25279 - DNA, 80 bp, synthetic construct; identical to SEQ ID NO: 10231
  source 1..80: mol_type = other DNA

SEQ ID NO: 25280 - DNA, 80 bp, synthetic construct
  source 1..80: mol_type = other DNA
tagagcatctgcaagtaggagagagacaagctctgctgggtctttaaccaggcatttatcttgacaattgactctatgcc

SEQ ID NO: 25281 - DNA, 80 bp, synthetic construct
  source 1..80: mol_type = other DNA
taccatacctaacctaagtattagtactgtttcagaatgaaacagtggaagtttccagagtcaaacaggcctgggcctga

SEQ ID NO: 25282 - DNA, 80 bp, synthetic construct; identical to SEQ ID NO: 10232
  source 1..80: mol_type = other DNA

SEQ ID NO: 25283 - DNA, 80 bp, synthetic construct
  source 1..80: mol_type = other DNA
cacatatacgactcatcttaagccagtgacttaatcagctgtgtccccccatctaagaaccaaggtctcctggtagctaa

SEQ ID NO: 25284 - DNA, 80 bp, synthetic construct
  source 1..80: mol_type = other DNA
cataataaaagaggaactgaatagaatggaaatttcagtgaagaagacctaagtttgaatctcacacctgctgttcctgg

SEQ ID NO: 25285 - DNA, 80 bp, synthetic construct
  source 1..80: mol_type = other DNA
tatttatcaaattggaatagaggaaaaagaggggccttcctgccctaaaatgtcttcctccatacacctgtaacatcaca

SEQ ID NO: 25286 - DNA, 80 bp, synthetic construct
  source 1..80: mol_type = other DNA
gtgacaatctctacttacagtaatgtgggtaacactatgcatcttaaataagcacaatgttgacataacacttatctgca

SEQ ID NO: 25287 - DNA, 80 bp, synthetic construct; identical to SEQ ID NO: 10233
  source 1..80: mol_type = other DNA

SEQ ID NO: 25288 - DNA, 80 bp, synthetic construct
  source 1..80: mol_type = other DNA
acatccagcttctctctgtacaatgctagcatcaagagaaagattcagcaaaagctcattctctgaccacatgtcttttg

SEQ ID NO: 25289 - DNA, 80 bp, synthetic construct
  source 1..80: mol_type = other DNA
gaaggatgtggtttcctgtccactgatgttggccttggcttcaagatttcctttgctgattggaatgtgtgcagaagggg

SEQ ID NO: 25290 - DNA, 80 bp, synthetic construct
  source 1..80: mol_type = other DNA
cagccatcccactgcaccaacaagcaacatcaataataaagttgttggaaagtatcaagaatttgaggttattcacgcag

SEQ ID NO: 25291 - DNA, 80 bp, synthetic construct; identical to SEQ ID NO: 10234
  source 1..80: mol_type = other DNA

SEQ ID NO: 25292 - DNA, 80 bp, synthetic construct
  source 1..80: mol_type = other DNA
tgactctacgcacattaatgcaatgagaatgcatcttcttccctgctcccacacacatacttcccaactgtgtataatac

SEQ ID NO: 25293 - DNA, 80 bp, synthetic construct
  source 1..80: mol_type = other DNA
ttgacttggtcaattccattgtgcccagagcctggccaacccagctttataaagtcctccagcccattccccattagggc

SEQ ID NO: 25294 - DNA, 80 bp, synthetic construct; identical to SEQ ID NO: 10235
  source 1..80: mol_type = other DNA

SEQ ID NO: 25295 - DNA, 80 bp, synthetic construct
  source 1..80: mol_type = other DNA
ttcttcttatcaaataagaaaatggatgtggaagggccagggaaactataaagaggtgtataaatattagttctttgtgt

SEQ ID NO: 25296 - DNA, 80 bp, synthetic construct
  source 1..80: mol_type = other DNA
ctgcctctaataagcagactgcagcacaggcttccagatgactcagttacgtagattactgtttccataatatctgtaat

SEQ ID NO: 25297 - DNA, 80 bp, synthetic construct
  source 1..80: mol_type = other DNA
gacatttacaagcagaatgaccttgagcaaggtaaactctgaacctccatttcctcatttaaagtctcttatggactgat

SEQ ID NO: 25298 - DNA, 80 bp, synthetic construct; identical to SEQ ID NO: 10236
  source 1..80: mol_type = other DNA

SEQ ID NO: 25299 - DNA, 80 bp, synthetic construct
  source 1..80: mol_type = other DNA
agctcctgctccacaactgaacagtgagatacttgggcaagggacaacctctctaagcctctgtgaaatgggaaaagcaa

SEQ ID NO: 25300 - DNA, 80 bp, synthetic construct
  source 1..80: mol_type = other DNA
gagggggagcagggaaaaaaactatcaataacttatctaagataacttagtaaattagtggggaccagcaaaaccccaag

SEQ ID NO: 25301 - DNA, 80 bp, synthetic construct
  source 1..80: mol_type = other DNA
gtattctgtgattctggactcccttttaattctcaactattttgcttttctaggaggatgacgggaacatactagtatct

SEQ ID NO: 25302 - DNA, 80 bp, synthetic construct
  source 1..80: mol_type = other DNA
atgtttccatcagtggtaaaacctccatatgtcaagtcatgtgctccatatgtcaagtcatgtgcttcctttctgaagac

SEQ ID NO: 25303 - DNA, 80 bp, synthetic construct; identical to SEQ ID NO: 10237
  source 1..80: mol_type = other DNA

SEQ ID NO: 25304 - DNA, 80 bp, synthetic construct
  source 1..80: mol_type = other DNA
aacacagagcttttctttaaaggagaatgggcaatgagctgaaagtttaagactgaaaggcttggcagagagacaagaat

SEQ ID NO: 25305 - DNA, 80 bp, synthetic construct
  source 1..80: mol_type = other DNA
agaatgccttaacaacaccaatgccttcagaaacccacagaaaggaaacaatgcagaaaggaattcatggtcttttaaat

SEQ ID NO: 25306 - DNA, 80 bp, synthetic construct
  source 1..80: mol_type = other DNA
ttgtgagcctccatctgcttaattaccatcttattggccagtttatctgctctcctaggtcatttcttttggccgatgtg

SEQ ID NO: 25307 - DNA, 80 bp, synthetic construct; identical to SEQ ID NO: 10238
  source 1..80: mol_type = other DNA

SEQ ID NO: 25308 - DNA, 80 bp, synthetic construct
  source 1..80: mol_type = other DNA
catttgagtggagacttaaggtacgaagaacatttgccaagatgaagaagaatacaaagggtacctccgacccccaagag

SEQ ID NO: 25309 - DNA, 80 bp, synthetic construct
  source 1..80: mol_type = other DNA
tggggctctaatctaacaggattcacatccttataagaagaggaagagacaaagagaaaaggctctgcaaggacaaggag

SEQ ID NO: 25310 - DNA, 80 bp, synthetic construct
  source 1..80: mol_type = other DNA
aagacaagtgtggagcacctccacatgatcccattggacaataaaagttcattgtaagaagaataaaatctccatcacgc

SEQ ID NO: 25311 - DNA, 80 bp, synthetic construct; identical to SEQ ID NO: 10239
  source 1..80: mol_type = other DNA

SEQ ID NO: 25312 - DNA, 80 bp, synthetic construct
  source 1..80: mol_type = other DNA
gctgggcatgttgataggtgcctgtaatcccagctactcggaaggctgaggcaggagaaccacctgaggttgcaagtggt

SEQ ID NO: 25313 - DNA, 80 bp, synthetic construct
  source 1..80: mol_type = other DNA
gtcactttcataaataatacttcagtttaaaaacaattgtaaagaggaagggaagggtgcatttgttctgttaccaggga

SEQ ID NO: 25314 - DNA, 80 bp, synthetic construct
  source 1..80: mol_type = other DNA
ctgggatttggtgattaaatctctcctccttctacctaggactttttataattgtgtaactcaatcctattcccttcagc

SEQ ID NO: 25315 - DNA, 80 bp, synthetic construct; identical to SEQ ID NO: 10240
  source 1..80: mol_type = other DNA

SEQ ID NO: 25316 - DNA, 80 bp, synthetic construct
  source 1..80: mol_type = other DNA
agcctagagctgtccatagcaggcctgtctgattttttcggtgaacccattctgaattcttcttccaagttttaggtttg

SEQ ID NO: 25317 - DNA, 80 bp, synthetic construct
  source 1..80: mol_type = other DNA
agagaagtgattggtgattaagaattagatgaggtgactaattatatcaggaatctgccttcgaagaaatctcagcacca

SEQ ID NO: 25318 - DNA, 80 bp, synthetic construct
  source 1..80: mol_type = other DNA
ttcaagttcaattaacatcaataatgagtgctcatttagaagtaaccgccacatcaagctccctgatggctgagctcggg

SEQ ID NO: 25319 - DNA, 80 bp, synthetic construct
  source 1..80: mol_type = other DNA
attacaaaacaaggaagaatgtgatgttcagaaagagagaagcttcagatggcaccgaagtttacagtgaggaagaagag

SEQ ID NO: 25320 - DNA, 80 bp, synthetic construct; identical to SEQ ID NO: 10241
  source 1..80: mol_type = other DNA

SEQ ID NO: 25321 - DNA, 80 bp, synthetic construct
  source 1..80: mol_type = other DNA
ttgtgttcttttctctagtgattgactttggcatcgtgtgaggcagccccagcaaatgggacaaagaaggaaatccagtg

SEQ ID NO: 25322 - DNA, 80 bp, synthetic construct
  source 1..80: mol_type = other DNA
gggctcttgagcttgtaatgttgcagctgaattaacctaccctggagtcacatgtgctctcaagctctcacatgaaatac

SEQ ID NO: 25323 - DNA, 80 bp, synthetic construct
  source 1..80: mol_type = other DNA
gtctctactaaaaatacaaaaaattagttgggtatggtggcatgcacctgtagtcccagctactcaggaggctgaggcag

SEQ ID NO: 25324 - DNA, 80 bp, synthetic construct; identical to SEQ ID NO: 10242
  source 1..80: mol_type = other DNA

SEQ ID NO: 25325 - DNA, 80 bp, synthetic construct
  source 1..80: mol_type = other DNA
cccagatgaatgggctttggaaagcacacacagatctatcctgagagtaggccagttcatgcattctttcatttatcatt

SEQ ID NO: 25326 - DNA, 80 bp, synthetic construct
  source 1..80: mol_type = other DNA
ggcagtgaccatatagtggaccagggcaggttgccaaggctgcatatcaagctgtcactttgtataccagggaactcctt

SEQ ID NO: 25327 - DNA, 80 bp, synthetic construct
  source 1..80: mol_type = other DNA
ttagccacttcaaaataattttttctggcacccactgtggtgccttgcacagagtgggtacttcactcaatgtctatccg

SEQ ID NO: 25328 - DNA, 80 bp, synthetic construct; identical to SEQ ID NO: 10243
  source 1..80: mol_type = other DNA

SEQ ID NO: 25329 - DNA, 80 bp, synthetic construct
  source 1..80: mol_type = other DNA
gtagatagatatgagagccactcgattttcatcctactccacaggcttccagaaaatcacagctgaatgtcttaagaaag

SEQ ID NO: 25330 - DNA, 80 bp, synthetic construct
  source 1..80: mol_type = other DNA
tgagtcatttgacctaggcaagtcacttaaccccacagagcctcatttgtgaaacagagataaaactatctgtctcttgc

SEQ ID NO: 25331 - DNA, 80 bp, synthetic construct
  source 1..80: mol_type = other DNA
gtcatgtctgatattctctctggcaggtaattcttgagcatgtctcagcaaattgcttgcaaatttttccctttgaagag

SEQ ID NO: 25332 - DNA, 80 bp, synthetic construct; identical to SEQ ID NO: 10244
  source 1..80: mol_type = other DNA

SEQ ID NO: 25333 - DNA, 80 bp, synthetic construct
  source 1..80: mol_type = other DNA
atcccttcactgacagtcttctgatctgaaagaaatagtttattgtgttcctcagtttacaaagaattaggggtaggggg

SEQ ID NO: 25334 - DNA, 80 bp, synthetic construct
  source 1..80: mol_type = other DNA
cacataatttatgagaagtctctgtgctgatgactcccaaatccccatgcccagccctgacttcttacatgagttctagt

SEQ ID NO: 25335 - DNA, 80 bp, synthetic construct; identical to SEQ ID NO: 10245
  source 1..80: mol_type = other DNA

SEQ ID NO: 25336 - DNA, 80 bp, synthetic construct
  source 1..80: mol_type = other DNA
ccagaccacacaccattgccagtttcatcttcctaaaatgctatttacatcaggcctttgatggctgcctgtttcctgct

SEQ ID NO: 25337 - DNA, 80 bp, synthetic construct
  source 1..80: mol_type = other DNA
ttgtgctccatactctgtggtccccacctggaatgctattcctctttcatcctgactattccaaaccctactcctccaaa

SEQ ID NO: 25338 - DNA, 80 bp, synthetic construct
  source 1..80: mol_type = other DNA
ataatgctcacagtgcttttgattttacagtgcactaacctatgcatataatcttatctgatcccctcaacctggtgggg

SEQ ID NO: 25339 - DNA, 80 bp, synthetic construct; identical to SEQ ID NO: 10246
  source 1..80: mol_type = other DNA

SEQ ID NO: 25340 - DNA, 80 bp, synthetic construct
  source 1..80: mol_type = other DNA
gatagtccttttaatataccacatttatatccctcattcattccttttttcttccttcactgattcagcaaatatttact

SEQ ID NO: 25341 - DNA, 80 bp, synthetic construct
  source 1..80: mol_type = other DNA
caattgattgattgcctctgttcacacaattggctataatgattggaacagaaaaccataacaaagcagctctggtgagt

SEQ ID NO: 25342 - DNA, 80 bp, synthetic construct
  source 1..80: mol_type = other DNA
tttcttattactgctttatgaaattctaacggaccctgcaactgtttatagaaataacaccttcccagtcatgcttcagc

SEQ ID NO: 25343 - DNA, 80 bp, synthetic construct
  source 1..80: mol_type = other DNA
atctcacaactcctggtcgagaactctcttccctctttccactgcttcaactcacattacagtttttaaattttcctagt

SEQ ID NO: 25344 - DNA, 80 bp, synthetic construct; identical to SEQ ID NO: 10247
  source 1..80: mol_type = other DNA

SEQ ID NO: 25345 - DNA, 80 bp, synthetic construct
  source 1..80: mol_type = other DNA
aagataatggataatatcttcagtgctctaaccatgtcacagatgctacactaaactcttcttaaaatttacctcattta

SEQ ID NO: 25346 - DNA, 80 bp, synthetic construct
  source 1..80: mol_type = other DNA
aattccagattctgcttccttaacacaatgtaatatcctctcctttcagaagtacaggggttaacgaatgttcagagttc

SEQ ID NO: 25347 - DNA, 80 bp, synthetic construct
  source 1..80: mol_type = other DNA
gtaaatgtcttcagtaaaatgggaataaatgatacacatacacatgcacatataaaatactttgcatctgataaaggaga

SEQ ID NO: 25348 - DNA, 80 bp, synthetic construct; identical to SEQ ID NO: 10248
  source 1..80: mol_type = other DNA

SEQ ID NO: 25349 - DNA, 80 bp, synthetic construct
  source 1..80: mol_type = other DNA
atgacatttttctccaatcagattcttccaaattatggtgtcaagattaatactatgaaagaaagaaggtaagagggaag

SEQ ID NO: 25350 - DNA, 80 bp, synthetic construct
  source 1..80: mol_type = other DNA
acagtgaagcattctatttagtaaattttgtgctttcccccttggctgcatttgtcaagcagatgtgtgggtccaagggg

SEQ ID NO: 25351 - DNA, 80 bp, synthetic construct
  source 1..80: mol_type = other DNA
gatacatttgtcttctcatctcagagaaggaggttgttttccttctctattgtacccctgcctgcagttctgcccatgcc

SEQ ID NO: 25352 - DNA, 80 bp, synthetic construct; identical to SEQ ID NO: 10249
  source 1..80: mol_type = other DNA

SEQ ID NO: 25353 - DNA, 80 bp, synthetic construct
  source 1..80: mol_type = other DNA
gattttttaaagaaaagggataggagagaaagaggaggagaatgaaaagaaggaggagacaaagaaaaatatataggata

SEQ ID NO: 25354 - DNA, 80 bp, synthetic construct
  source 1..80: mol_type = other DNA
taaacaggctgaaattcaaataccagatccttcacttactggctgtgcaacctggatcgtgttatctgacctctctgagc

SEQ ID NO: 25355 - DNA, 80 bp, synthetic construct; identical to SEQ ID NO: 10250
  source 1..80: mol_type = other DNA

SEQ ID NO: 25356 - DNA, 80 bp, synthetic construct
  source 1..80: mol_type = other DNA
ttaaataagattgaatgaactctattttaagaggaaactccagaagcagacagggccctagatataacggcatctaagtc

SEQ ID NO: 25357 - DNA, 80 bp, synthetic construct
  source 1..80: mol_type = other DNA
tgctatcataaaacatgtttcctccatgctgctgaaccctctgacatcactgatatttcattctctttctcttctttctt

SEQ ID NO: 25358 - DNA, 80 bp, synthetic construct
  source 1..80: mol_type = other DNA
tctataacaccacatgatccacagaggcctctgttccttcttgtaagaaaattctttctggtgatgtcattgactccatt

SEQ ID NO: 25359 - DNA, 80 bp, synthetic construct; identical to SEQ ID NO: 10251
  source 1..80: mol_type = other DNA

SEQ ID NO: 25360 - DNA, 80 bp, synthetic construct
  source 1..80: mol_type = other DNA
aaaaccttagacttttgactccttctcatttgttcctcttatatctgggcatctattggcccagctctgactctttcatt

SEQ ID NO: 25361 - DNA, 80 bp, synthetic construct
  source 1..80: mol_type = other DNA
tctcccctactcaagacctaaataggttcagatttctctagcatcaaatcaaaattccagacacaaaaagccaggctaac

SEQ ID NO: 25362 - DNA, 80 bp, synthetic construct
  source 1..80: mol_type = other DNA
ctagccaattgttcttcatctgggcattattttggctcttgccccaactcagaagatcctttgtccttctcttttgaagt

SEQ ID NO: 25363 - DNA, 80 bp, synthetic construct; identical to SEQ ID NO: 10252
  source 1..80: mol_type = other DNA

SEQ ID NO: 25364 - DNA, 80 bp, synthetic construct
  source 1..80: mol_type = other DNA
ttagcattcaagtgctgccttttattggagttatttattagcatactttgtctgccttttctcctccaactagtttgtga

SEQ ID NO: 25365 - DNA, 80 bp, synthetic construct
  source 1..80: mol_type = other DNA
cctcccatggagatctatatggtatctcaggagacaagctagtatgacctagatcccaaagcttatcatataggctcctg

SEQ ID NO: 25366 - DNA, 80 bp, synthetic construct
  source 1..80: mol_type = other DNA
tttgcctagaggcatttaccagactctgacacaggaaagagaaggccaaaaagagcatagtggcctcagtgacttgaggt

SEQ ID NO: 25367 - DNA, 80 bp, synthetic construct; identical to SEQ ID NO: 10253
  source 1..80: mol_type = other DNA

SEQ ID NO: 25368 - DNA, 80 bp, synthetic construct
  source 1..80: mol_type = other DNA
agaaaggccaaaccttaagaggaggcttaaactaaccatagaataaagacttctctaaactccctcaaacaaagcttgac

SEQ ID NO: 25369 - DNA, 80 bp, synthetic construct
  source 1..80: mol_type = other DNA
aagaagcaggaaaatgtgacctatttccaagagaaaaactgatcaatataagtagacatagaaatgatagaaatactata

SEQ ID NO: 25370 - DNA, 80 bp, synthetic construct
  source 1..80: mol_type = other DNA
cagtatctaaagtgaaaacttattacatgggctggtttattagcacattagacactatagaagaaaagagggtgaacttc

SEQ ID NO: 25371 - DNA, 80 bp, synthetic construct
  source 1..80: mol_type = other DNA
ttccaaatgtgatgaaaaatataaagagaaccaagagtctatcaacaaattgctaggaggaaaaacacaaagcaaattac

SEQ ID NO: 25372 - DNA, 80 bp, synthetic construct; identical to SEQ ID NO: 10254
  source 1..80: mol_type = other DNA

SEQ ID NO: 25373 - DNA, 80 bp, synthetic construct
  source 1..80: mol_type = other DNA
caagtgcagccaagatgaaataagcccacaaagtcctgttcatcctgttctttacaaccgaaatactctggacgaaacaa

SEQ ID NO: 25374 - DNA, 80 bp, synthetic construct
  source 1..80: mol_type = other DNA
ggcccaaagcaatcttttctttctcacccaaaggacagggaaaggaactttatgattcagtgagtgcagaggaaaatcta

SEQ ID NO: 25375 - DNA, 80 bp, synthetic construct; identical to SEQ ID NO: 10255
  source 1..80: mol_type = other DNA

SEQ ID NO: 25376 - DNA, 80 bp, synthetic construct
  source 1..80: mol_type = other DNA
gcagaataacaaaggctttgagaacaaagcaaaggttcaaaccacacccaactcagaccaaacaatgtaatgtacaaaat

SEQ ID NO: 25377 - DNA, 80 bp, synthetic construct
  source 1..80: mol_type = other DNA
aagaagctgttatgaccatgtcccataaggtgaaagtaaacactctggaaaatgaatggaaaggtagttctcatcaagaa

SEQ ID NO: 25378 - DNA, 80 bp, synthetic construct
  source 1..80: mol_type = other DNA
aaaagaaattagcagcgtctcaagagcatgggagatctaacaggtgtgtaatcagagtctcaggagaggaatatattggt

SEQ ID NO: 25379 - DNA, 80 bp, synthetic construct; identical to SEQ ID NO: 10256
  source 1..80: mol_type = other DNA

SEQ ID NO: 25380 - DNA, 80 bp, synthetic construct
  source 1..80: mol_type = other DNA
aaaagacctctttaggctgaagggaaataataaaataggaaatattgaaacttgaggaaaagggaagagcaaaagaaatg

SEQ ID NO: 25381 - DNA, 80 bp, synthetic construct
  source 1..80: mol_type = other DNA
taaagaacatcatagaattcatgtcttcgagctcctaatctagtgttctcctcaccacagaacacttactttacttatct

SEQ ID NO: 25382 - DNA, 80 bp, synthetic construct
  source 1..80: mol_type = other DNA
tcccttgtcctctaacttcatacctttttcataccttcctttagctttattcttactctaaggatttctgactgcctacc

SEQ ID NO: 25383 - DNA, 80 bp, synthetic construct
  source 1..80: mol_type = other DNA
ctgggaaaggacccaagctcagaacagccagctgaaaaattcatcacaaaatttactgaagaaaaataagctattctgaa

SEQ ID NO: 25384 - DNA, 80 bp, synthetic construct; identical to SEQ ID NO: 10257
  source 1..80: mol_type = other DNA

SEQ ID NO: 25385 - DNA, 80 bp, synthetic construct
  source 1..80: mol_type = other DNA
atggttcatagaaaccaccatgtacaaaatgttctgtggttcttagcctctttttttagattgagggatcttcctgaggc

SEQ ID NO: 25386 - DNA, 80 bp, synthetic construct
  source 1..80: mol_type = other DNA
tggcaatgaagggtgatgctgaaaatacagaaagaacacatcttcagctaattaaaataaaagagttaccagaggccagt

SEQ ID NO: 25387 - DNA, 80 bp, synthetic construct; identical to SEQ ID NO: 10258
  source 1..80: mol_type = other DNA

SEQ ID NO: 25388 - DNA, 80 bp, synthetic construct
  source 1..80: mol_type = other DNA
tactacacttataactctcttcatttcccatacatcccacctttcatctcttaggggtaagaagctagttgaatggagaa

SEQ ID NO: 25389 - DNA, 80 bp, synthetic construct
  source 1..80: mol_type = other DNA
tgcacagcctgcatgaccagatgctggagtgcagctgttgctattatataaaaaaacaatagtggttcatattgatgaag

SEQ ID NO: 25390 - DNA, 80 bp, synthetic construct
  source 1..80: mol_type = other DNA
cctatttttctaatgataaagctgggcctcaatgatttcaaggaatttttccaagccctggctattgcccaccaaatatt

SEQ ID NO: 25391 - DNA, 80 bp, synthetic construct; identical to SEQ ID NO: 10259
  source 1..80: mol_type = other DNA

SEQ ID NO: 25392 - DNA, 80 bp, synthetic construct
  source 1..80: mol_type = other DNA
aggacactaataatgattataaagaaaggcaaaatttcctttacaggtcagactggaaaaatttccatgttgtgaggttg

SEQ ID NO: 25393 - DNA, 80 bp, synthetic construct
  source 1..80: mol_type = other DNA
cacaatctcagctcactgaaacctccaactcccaggttcaagcaactctcctgagtagctggaactaaggcgcatgccac

SEQ ID NO: 25394 - DNA, 80 bp, synthetic construct
  source 1..80: mol_type = other DNA
tattaataatcacactctcctcccatgccttacacaaaaacccctcatggaccttctttctcttttaaaaatttttgaaa

SEQ ID NO: 25395 - DNA, 80 bp, synthetic construct; identical to SEQ ID NO: 10260
  source 1..80: mol_type = other DNA

SEQ ID NO: 25396 - DNA, 80 bp, synthetic construct
  source 1..80: mol_type = other DNA
atgcaattcttttcttttcctctaaaaacaccaatgcccaaaggctccagggtttggatcataaaaaggttctgattcct

SEQ ID NO: 25397 - DNA, 80 bp, synthetic construct
  source 1..80: mol_type = other DNA
ccattggaattccattccatagtcagaggaatatcaatgtcagaaaacaaggtttccctgatatccaacccgaagtttgc

SEQ ID NO: 25398 - DNA, 80 bp, synthetic construct
  source 1..80: mol_type = other DNA
gtaaatcagtcccttcaactgttaaatcagctctctgctcttctctggactagttccaattctcccaattcacctccaat

SEQ ID NO: 25399 - DNA, 80 bp, synthetic construct; identical to SEQ ID NO: 10261
  source 1..80: mol_type = other DNA

SEQ ID NO: 25400 - DNA, 80 bp, synthetic construct
  source 1..80: mol_type = other DNA
ttctatgatttgggctgtcctgggagaggccagaaccattaatacagtcccagaaactgcctcttcacctcttctccatg

SEQ ID NO: 25401 - DNA, 80 bp, synthetic construct
  source 1..80: mol_type = other DNA
ctgtcctctcagacagcccaaatcacaagcaatgcaacggttttgctttctcctaactggtgctttttcatttttactat

SEQ ID NO: 25402 - DNA, 80 bp, synthetic construct
  source 1..80: mol_type = other DNA
ggcagacacaggaagaaaataagctgagctgtgcctactttccttctgtataattgaagagcccacatcatagaagagtt

SEQ ID NO: 25403 - DNA, 80 bp, synthetic construct; identical to SEQ ID NO: 10262
  source 1..80: mol_type = other DNA

SEQ ID NO: 25404 - DNA, 80 bp, synthetic construct
  source 1..80: mol_type = other DNA
caataggctggctgtctctctggaggtcatggggagctcatccagttacacttagtgtcttatttgatcctatcaataat

SEQ ID NO: 25405 - DNA, 80 bp, synthetic construct
  source 1..80: mol_type = other DNA
catttgattccaatcctgctgaaaaatgcttggccaaattttcttgccttttaatggcagaatcctggctcctactgaaa

SEQ ID NO: 25406 - DNA, 80 bp, synthetic construct
  source 1..80: mol_type = other DNA
agcagctccaacaccttatttaagacttgagtggagtatattctttaaatgaattaagcatgtgactcttcagagacacc

SEQ ID NO: 25407 - DNA, 80 bp, synthetic construct
  source 1..80: mol_type = other DNA
tcatttgataaaaggtgatggggaagctccacagatgctcagaggcatgaaactagaagataatctgcatttccagagaa

SEQ ID NO: 25408 - DNA, 80 bp, synthetic construct; identical to SEQ ID NO: 10263
  source 1..80: mol_type = other DNA

SEQ ID NO: 25409 - DNA, 80 bp, synthetic construct
  source 1..80: mol_type = other DNA
aagatacttgtagctctacaatgggcccttttcaatggtttccatccaattaatattagacattagtagccagtggagca

SEQ ID NO: 25410 - DNA, 80 bp, synthetic construct
  source 1..80: mol_type = other DNA
caagaagaacatcgattcaaaaccacctggttttccagtcaaaggatactctggaaagagttagaagtaagtgcctgcac

SEQ ID NO: 25411 - DNA, 80 bp, synthetic construct
  source 1..80: mol_type = other DNA
agaggggaaaggaggagtggggaaaggtaagaaaagcaggaaaaccaacgatggtttctccctggcttcatagtgactcc

SEQ ID NO: 25412 - DNA, 80 bp, synthetic construct; identical to SEQ ID NO: 10264
  source 1..80: mol_type = other DNA

SEQ ID NO: 25413 - DNA, 80 bp, synthetic construct
  source 1..80: mol_type = other DNA
ggggcgcccaattttgtctcggacagcgtataagtccagagaagaaggcgctctgccaagagtatgaaacttttccccca

SEQ ID NO: 25414 - DNA, 80 bp, synthetic construct
  source 1..80: mol_type = other DNA
gttttagaaagtggggtggaagtgaagattatttaatggttgcatatcaatgtgactaaaaacactaaatcccggcacac

SEQ ID NO: 25415 - DNA, 80 bp, synthetic construct
  source 1..80: mol_type = other DNA
aggcggatcctcagtcgcccttcgccttggcgaatccaccaactgaacagctcgctgagattgaactggagcagccccac

SEQ ID NO: 25416 - DNA, 80 bp, synthetic construct
  source 1..80: mol_type = other DNA
gagacccccggcgccggccccagcaacctgagcagcggggcgcagtccagagctagcgagccgcgggcctcgggcctgcc

SEQ ID NO: 25417 - DNA, 80 bp, synthetic construct; identical to SEQ ID NO: 10265
  source 1..80: mol_type = other DNA

SEQ ID NO: 25418 - DNA, 80 bp, synthetic construct
  source 1..80: mol_type = other DNA
atctccagaggactgtgcgtgcgcgcaagtctcttgctttcccccaactgcacggaggcgagcaggagtctaaatgaaac

SEQ ID NO: 25419 - DNA, 80 bp, synthetic construct
  source 1..80: mol_type = other DNA
ttgggtaccgtcctctcctgccccccgcagtcggagctggggtctgtcccctctcggggcagcctccaatctctgcaact

SEQ ID NO: 25420 - DNA, 80 bp, synthetic construct
  source 1..80: mol_type = other DNA
gcttcggactgtctgcctgctgaacttctgggcgtgaatcccagcccccgcgctgcgcaagtttgcagcgtccttgctct

SEQ ID NO: 25421 - DNA, 80 bp, synthetic construct; identical to SEQ ID NO: 10266
  source 1..80: mol_type = other DNA

SEQ ID NO: 25422 - DNA, 80 bp, synthetic construct
  source 1..80: mol_type = other DNA
ccggggccagggaccagtggtgggaggaggctgcggcgctagatgcggacacctggaccgccgcgccgaggctcccggcg

SEQ ID NO: 25423 - DNA, 80 bp, synthetic construct
  source 1..80: mol_type = other DNA
agcgagaagcacctgctggacaagcccttctacaacgacttcgagcgtggcgcggtgagcgcgggcggggcacgggtgga

SEQ ID NO: 25424 - DNA, 80 bp, synthetic construct
  source 1..80: mol_type = other DNA
gtgggtaccctggtgggcaagcgtccaggacccctcgcggcggccgcgacccctgtcggaaacggagacttcccgcgtgc

SEQ ID NO: 25425 - DNA, 80 bp, synthetic construct
  source 1..80: mol_type = other DNA
atgagtcatgctcacagaactctgagggcacctcggagcagccagctgtgagccgtggggaagggtgcacgtcagcgggt

SEQ ID NO: 25426 - DNA, 80 bp, synthetic construct; identical to SEQ ID NO: 10267
  source 1..80: mol_type = other DNA

SEQ ID NO: 25427 - DNA, 80 bp, synthetic construct
  source 1..80: mol_type = other DNA
agttctcactgagcctttaatgaagtgcctaatccagtacctggcacagaggaagcgctccgtaaatgactggtaatagt

SEQ ID NO: 25428 - DNA, 80 bp, synthetic construct
  source 1..80: mol_type = other DNA
tgatcaaaccttgtgaaattgctcataatggacaaatacaaccggcaagttcatgtttcaactgattactcttggataaa

SEQ ID NO: 25429 - DNA, 80 bp, synthetic construct; identical to SEQ ID NO: 10268
  source 1..80: mol_type = other DNA

SEQ ID NO: 25430 - DNA, 80 bp, synthetic construct
  source 1..80: mol_type = other DNA
gggtacaggctacttcccctttgtaagtgcttcctcctccccattctcctccacacatcataaggttctagaagcacagg

SEQ ID NO: 25431 - DNA, 80 bp, synthetic construct
  source 1..80: mol_type = other DNA
agtcattcaaatgacattataattaaacacctcagccggaatcccaggggcaaatttcaggagagatttgcatgtcacat

SEQ ID NO: 25432 - DNA, 80 bp, synthetic construct
  source 1..80: mol_type = other DNA
ttgcccagcccagaactacttcctcattctcccagcttggtatctgtaaagacaatcatcctttttgggtaaaggtaaaa

SEQ ID NO: 25433 - DNA, 80 bp, synthetic construct
  source 1..80: mol_type = other DNA
gagaaaccctagaggaagtacttgctgagaagacaaggttatcccattttacagggaaaagtgttaaaatctgtattgtt

SEQ ID NO: 25434 - DNA, 80 bp, synthetic construct; identical to SEQ ID NO: 10269
  source 1..80: mol_type = other DNA

SEQ ID NO: 25435 - DNA, 80 bp, synthetic construct
  source 1..80: mol_type = other DNA
actgtaacagatctgaagatttctgagaaatcttagttggcccatttcattctgtgctggtacttttaagaaagctaagg

SEQ ID NO: 25436 - DNA, 80 bp, synthetic construct
  source 1..80: mol_type = other DNA
agaatacctccttcttgtgaatgggaatatattagtggagcataaatatttctttggtatgaccctcaatccgtctctca

SEQ ID NO: 25437 - DNA, 80 bp, synthetic construct
  source 1..80: mol_type = other DNA
ctctcccttcttttttgctctgaattttcctctacactctgtcttccagccacctctcagaggccccttctctgctccct

SEQ ID NO: 25438 - DNA, 80 bp, synthetic construct
  source 1..80: mol_type = other DNA
cctctctgctctacagcttcctcctcccacagcccctcattagtccccctccaagatgggtagtctgggggtggggcaca

SEQ ID NO: 25439 - DNA, 80 bp, synthetic construct; identical to SEQ ID NO: 10270
  source 1..80: mol_type = other DNA

SEQ ID NO: 25440 - DNA, 80 bp, synthetic construct
  source 1..80: mol_type = other DNA
ccctctgaaatctgatcagcccctaaaagctgcctgaaataccctcttatgaagcttttccctgtccttccatgccactc

SEQ ID NO: 25441 - DNA, 80 bp, synthetic construct
  source 1..80: mol_type = other DNA
ccattgctctctgagcctcagtttctatctgtaaagcaggataatcactcgctcggccattcccaggcccagtgcttcct

SEQ ID NO: 25442 - DNA, 80 bp, synthetic construct; identical to SEQ ID NO: 10271
  source 1..80: mol_type = other DNA

SEQ ID NO: 25443 - DNA, 80 bp, synthetic construct
  source 1..80: mol_type = other DNA
actgcaggcctggccccctcctgctgtggaagtccctgtcagatggcagatggagtccttgtaaatctgcctagtgattt

SEQ ID NO: 25444 - DNA, 80 bp, synthetic construct
  source 1..80: mol_type = other DNA
tgtccactccctcagagaagctgctcagtctcttcgtgtgggtcgtcacccccaggtagacatcgggccctccctgtggg

SEQ ID NO: 25445 - DNA, 80 bp, synthetic construct
  source 1..80: mol_type = other DNA
ctgtcatctatcccctggggacaccttcctccctctccagcccctcagagccataggaaagctacttcccctgcagcagc

SEQ ID NO: 25446 - DNA, 80 bp, synthetic construct
  source 1..80: mol_type = other DNA
tgaaggagtttgaggtcacaggttcagtttcctcctcccatgtgtgctccagttactcggattggcacatgtagtcacga

SEQ ID NO: 25447 - DNA, 80 bp, synthetic construct; identical to SEQ ID NO: 10272
  source 1..80: mol_type = other DNA

SEQ ID NO: 25448 - DNA, 80 bp, synthetic construct
  source 1..80: mol_type = other DNA
ccctgtggcatgcagggcctggcgtggggcaggcccgacgcgtatccagtcctgggccactcagcccccactctgctcct

SEQ ID NO: 25449 - DNA, 80 bp, synthetic construct
  source 1..80: mol_type = other DNA
cctgcaggaggggcattgtcgtggggccgaggctggtccacatgtggctggacccaagacatgtcatcccaccacatggg

SEQ ID NO: 25450 - DNA, 80 bp, synthetic construct; identical to SEQ ID NO: 10273
  source 1..80: mol_type = other DNA

SEQ ID NO: 25451 - DNA, 80 bp, synthetic construct
  source 1..80: mol_type = other DNA
ctttgggagaccgaggcaggtggatcacttgaggtcaggagtttgagaccagcctggccaacatggtgaaaccctgtctc

SEQ ID NO: 25452 - DNA, 80 bp, synthetic construct
  source 1..80: mol_type = other DNA
cacctcaaaataaaaaagaacatgccttggagggcatcgagtccggggctttccaaacctgctggtcatcagaatgcgtg

SEQ ID NO: 25453 - DNA, 80 bp, synthetic construct
  source 1..80: mol_type = other DNA
tggcagggagggggccaagcagccttgtcccagaggcctgggcagctgcgctgtacacagcctggggtggtgccttctag

SEQ ID NO: 25454 - DNA, 80 bp, synthetic construct; identical to SEQ ID NO: 10274
  source 1..80: mol_type = other DNA

SEQ ID NO: 25455 - DNA, 80 bp, synthetic construct
  source 1..80: mol_type = other DNA
agttgtaaaggtctcccacaaggctatcccatgtgggggcagctgcggaccctcactgggcacagcctcgcaggtgcagg

SEQ ID NO: 25456 - DNA, 80 bp, synthetic construct
  source 1..80: mol_type = other DNA
ctgagccttgtcaggggcaggccttcagtgaatgtcttgggtaaatgaattcaggagttcatttaaggtgttcatgaaga

SEQ ID NO: 25457 - DNA, 80 bp, synthetic construct
  source 1..80: mol_type = other DNA
caagaagcagttagagtcaatcccccttagatactgcattgaatgaatcatcgtgagatgtgataaggccaaggggcttg

SEQ ID NO: 25458 - DNA, 80 bp, synthetic construct; identical to SEQ ID NO: 10275
  source 1..80: mol_type = other DNA

SEQ ID NO: 25459 - DNA, 80 bp, synthetic construct
  source 1..80: mol_type = other DNA
cagaatcgagaagcgcaagtactggctgaatgacgactggtacctgaagtacatcacgctgaagacgccccacggggact

SEQ ID NO: 25460 - DNA, 80 bp, synthetic construct
  source 1..80: mol_type = other DNA
ctgtcctcaaagcactgtagtcataggaggaatgacactgctgtgcaggggcgggaagtgggagggctctgccctgtgcc

SEQ ID NO: 25461 - DNA, 80 bp, synthetic construct
  source 1..80: mol_type = other DNA
ccatacaggcagatacctatgggacatgcccctggatgggcacttctctagttgccagggtgtggcatcactttctagtt

SEQ ID NO: 25462 - DNA, 80 bp, synthetic construct; identical to SEQ ID NO: 10276
  source 1..80: mol_type = other DNA

SEQ ID NO: 25463 - DNA, 80 bp, synthetic construct
  source 1..80: mol_type = other DNA
gtgtgcctggcaaaatcctacctcacttcgagtcataacccttcagcttgctctcagtttaaacctggaaagataagcct

SEQ ID NO: 25464 - DNA, 80 bp, synthetic construct
  source 1..80: mol_type = other DNA
agaaaactgagacaaaggagaaaaaagttattctgtacctgctgttcttaagctaccaggccacatcccatcgtttctga

SEQ ID NO: 25465 - DNA, 80 bp, synthetic construct
  source 1..80: mol_type = other DNA
tcaacagaatgtggaaggttgtggacagggcacttctctttttctggtagttagaaaatgctggctctgaaactccctcc

SEQ ID NO: 25466 - DNA, 80 bp, synthetic construct
  source 1..80: mol_type = other DNA
atcagcaccactagtcctgatgcagggggagggggaaggttgtgggagtaatgcagaagtatcctggagacagcaccctt

SEQ ID NO: 25467 - DNA, 80 bp, synthetic construct; identical to SEQ ID NO: 10277
  source 1..80: mol_type = other DNA

SEQ ID NO: 25468 - DNA, 80 bp, synthetic construct
  source 1..80: mol_type = other DNA
aggcttctcacagaatggtgtcctctgggtgcctgcatttcttacatgatggctggcttccaagagcaagttttctaaga

SEQ ID NO: 25469 - DNA, 80 bp, synthetic construct
  source 1..80: mol_type = other DNA
ggtggggatgcagacccccccatctctcaatggaaggaatgtcaaagaatttgtggcctattattattattattattatt

SEQ ID NO: 25470 - DNA, 80 bp, synthetic construct
  source 1..80: mol_type = other DNA
tggtttacaggctccaggtagccaccaagcctggctaatttttgtatttttactagagaaagggttttgccatgttggcc

SEQ ID NO: 25471 - DNA, 80 bp, synthetic construct
  source 1..80: mol_type = other DNA
cagcctacaagtgattcaattactcaccatatgatcaccccttaaatctaatatttcaccactacaccttgggtgaacat

SEQ ID NO: 25472 - DNA, 80 bp, synthetic construct; identical to SEQ ID NO: 10278
  source 1..80: mol_type = other DNA

SEQ ID NO: 25473 - DNA, 80 bp, synthetic construct
  source 1..80: mol_type = other DNA
ctggttccttaaggtagataagagatgatgaatgttgagtgcctccagaattacccccatagccaatgataacagttatt

SEQ ID NO: 25474 - DNA, 80 bp, synthetic construct
  source 1..80: mol_type = other DNA
agaggtatcccgttaatattcctttttggaccccagttccaagctcaaggatgaagatgtctcagcctggaagtgctgtc

SEQ ID NO: 25475 - DNA, 80 bp, synthetic construct; identical to SEQ ID NO: 10279
  source 1..80: mol_type = other DNA

SEQ ID NO: 25476 - DNA, 80 bp, synthetic construct
  source 1..80: mol_type = other DNA
atgccactgtaccccagcctgggcaacagagcaagactctgtctcaaaaaaaaaaaaaaaattagccaggtgtggtggtg

SEQ ID NO: 25477 - DNA, 80 bp, synthetic construct
  source 1..80: mol_type = other DNA
aataaaatacaaagactcagaggaggggttttagaaacttttatagcaacttaacagaacaattttgtgacttttgcacc

SEQ ID NO: 25478 - DNA, 80 bp, synthetic construct
  source 1..80: mol_type = other DNA
tttaaaacacaatgctttaccacgagagctagagaaactattccaggacctgttttcaggagatctgggctccccctatt

SEQ ID NO: 25479 - DNA, 80 bp, synthetic construct
  source 1..80: mol_type = other DNA
ggctgagagataagatgctctcagagctaggcttagagggaggagcagaaccctcaggccagtgatgactataggcataa

SEQ ID NO: 25480 - DNA, 80 bp, synthetic construct; identical to SEQ ID NO: 10280
  source 1..80: mol_type = other DNA

SEQ ID NO: 25481 - DNA, 80 bp, synthetic construct
  source 1..80: mol_type = other DNA
ttgctcagtataagaatttcagagaagaggagtaaactattctgcagtgatttaaagatacccaccaagggccacgaaat

SEQ ID NO: 25482 - DNA, 80 bp, synthetic construct; identical to SEQ ID NO: 10281
  source 1..80: mol_type = other DNA

SEQ ID NO: 25483 - DNA, 80 bp, synthetic construct
  source 1..80: mol_type = other DNA
ttgagtgtgagcatcacctcacctgggaagtgcaaggagtcagggaattccctttcctagccaagggaagtggtgacgga

SEQ ID NO: 25484 - DNA, 80 bp, synthetic construct
  source 1..80: mol_type = other DNA
tcgcagctcaggaaggcctgccagcctctgtagactccacctctgggggcaggtcatagccgaacaaaaggcagcagaaa

SEQ ID NO: 25485 - DNA, 80 bp, synthetic construct
  source 1..80: mol_type = other DNA
acaccccacatggccaggtacacctctgagacaaagcttccagaggagcaatcaggcagcaacatttgctgttcagcaat

SEQ ID NO: 25486 - DNA, 80 bp, synthetic construct
  source 1..80: mol_type = other DNA
tcaccatcatcaaagaccaaaggtaaataaaaccacaaagatggggaaaaacagagcagaaaagctgaacattctacaaa

SEQ ID NO: 25487 - DNA, 80 bp, synthetic construct; identical to SEQ ID NO: 10282
  source 1..80: mol_type = other DNA

SEQ ID NO: 25488 - DNA, 80 bp, synthetic construct
  source 1..80: mol_type = other DNA
agaaatatgggactatgtgaaaagaccaaatctacatctgattggtgtacctgaaagtgatggggagaatggaaccaggt

SEQ ID NO: 25489 - DNA, 80 bp, synthetic construct
  source 1..80: mol_type = other DNA
cgagacacataattgtcagattcaccaaagttgaaatgaaggaaaagatgttaagggcagccagagagaaaggtcaggtt

SEQ ID NO: 25490 - DNA, 80 bp, synthetic construct
  source 1..80: mol_type = other DNA
taaaatcctttacagacaagcaaatgctgagagattttgtcaccaccaggcctgccctaaaagaactcctgaaggaagca

SEQ ID NO: 25491 - DNA, 80 bp, synthetic construct; identical to SEQ ID NO: 10283
  source 1..80: mol_type = other DNA

SEQ ID NO: 25492 - DNA, 80 bp, synthetic construct
  source 1..80: mol_type = other DNA
gccattacataatggtaaagggatcaattcaacaagaagagctaactatccgaaacgtatatgcacccaatacaggagca

SEQ ID NO: 25493 - DNA, 80 bp, synthetic construct
  source 1..80: mol_type = other DNA
cggagctaatagacatctacagaactctccaccccaaatcaacagaatgtacattcttctcagcactgcatcacacctat

SEQ ID NO: 25494 - DNA, 80 bp, synthetic construct
  source 1..80: mol_type = other DNA
tgcacctgaatgactactgggtacataacgaaatgaaggcagaaataaagattttctttgaaaccaatgagaacaaagac

SEQ ID NO: 25495 - DNA, 80 bp, synthetic construct; identical to SEQ ID NO: 10284
  source 1..80: mol_type = other DNA

SEQ ID NO: 25496 - DNA, 80 bp, synthetic construct
  source 1..80: mol_type = other DNA
ctccctctccctctccccacggtctccctctccctctccccacggtctccctctccctctctttccacggtctccctctg

SEQ ID NO: 25497 - DNA, 80 bp, synthetic construct
  source 1..80: mol_type = other DNA
tgttggccaggctggtctccagctcctaaccgcgagtgatccgccagcctcggcctcccgaggtgccgggattgcagacg

SEQ ID NO: 25498 - DNA, 80 bp, synthetic construct; identical to SEQ ID NO: 10285
  source 1..80: mol_type = other DNA

SEQ ID NO: 25499 - DNA, 80 bp, synthetic construct
  source 1..80: mol_type = other DNA
gcccggccgccctgtctgagaagtgaggagaccctccgcccggcagccgccccatctgagaagtgaggagcccctccatc

SEQ ID NO: 25500 - DNA, 80 bp, synthetic construct
  source 1..80: mol_type = other DNA
gccgccccgtccgggaggggaggggttcagccccccgcccggccagccgccccgtccgagagggaggtgggggggtcagc

SEQ ID NO: 25501 - DNA, 80 bp, synthetic construct
  source 1..80: mol_type = other DNA
ggaatagaaaagggggaaaggtggggaaaagattgagaaatcggatggttgctgtgtctgtgtagaaagaggtagacatg

SEQ ID NO: 25502 - DNA, 80 bp, synthetic construct; identical to SEQ ID NO: 10286
  source 1..80: mol_type = other DNA

SEQ ID NO: 25503 - DNA, 80 bp, synthetic construct
  source 1..80: mol_type = other DNA
atcaattagacgcaataaaaagtgataaaggggacatcaccacggattccacagaaatacaaactaccatcagagaatac

SEQ ID NO: 25504 - DNA, 80 bp, synthetic construct
  source 1..80: mol_type = other DNA
agaaaagttcaggaccagatggattcacagccgaattctaccagaggtacaaggaggagctggtaccattccttctgaaa

SEQ ID NO: 25505 - DNA, 80 bp, synthetic construct
  source 1..80: mol_type = other DNA
caaaccgaatccagcagcacatcaaaaagcttatccaccaggatcaagtgggcatcatccctgggatgcaaagctggttc

SEQ ID NO: 25506 - DNA, 80 bp, synthetic construct
  source 1..80: mol_type = other DNA
aaataataagagctatttatgacaaacccacaaccaatatcatactgaatgggcaaaaactggaagcattccctttgaaa

SEQ ID NO: 25507 - DNA, 80 bp, synthetic construct; identical to SEQ ID NO: 10287
  source 1..80: mol_type = other DNA

SEQ ID NO: 25508 - DNA, 80 bp, synthetic construct
  source 1..80: mol_type = other DNA
ctgctcaacgaaataaaggaagacacaaacaaatggaagaacatcccatgctcatggataggaagaatgaatatcataaa

SEQ ID NO: 25509 - DNA, 80 bp, synthetic construct
  source 1..80: mol_type = other DNA
gaggcatcatgctacctgacttcaaactatactacaaggctacagtaaccaaaacagcatggtactggtaccaaaacaga

SEQ ID NO: 25510 - DNA, 80 bp, synthetic construct; identical to SEQ ID NO: 10288
  source 1..80: mol_type = other DNA

SEQ ID NO: 25511 - DNA, 80 bp, synthetic construct
  source 1..80: mol_type = other DNA
gagtgaacaggcaacctacagaatgggaaaaaaattttgcaatctactcatctgacaaagggctaatatccagaatctac

SEQ ID NO: 25512 - DNA, 80 bp, synthetic construct
  source 1..80: mol_type = other DNA
ccataatgatataccatctcacaccagttacaatggcaatcattaaaaagtcaggaaacaacaggtgctggagagggtgt

SEQ ID NO: 25513 - DNA, 80 bp, synthetic construct; identical to SEQ ID NO: 14691
  source 1..80: mol_type = other DNA

SEQ ID NO: 25514 - DNA, 80 bp, synthetic construct
  source 1..80: mol_type = other DNA
tgttctcactcataggtgggaattgaacaatgagaacacttggacacaggaaggggaacatcacacaccaaggtctgtca

SEQ ID NO: 25515 - DNA, 80 bp, synthetic construct; identical to SEQ ID NO: 10289
  source 1..80: mol_type = other DNA

SEQ ID NO: 25516 - DNA, 80 bp, synthetic construct
  source 1..80: mol_type = other DNA
aaagttggcccgagatgaccaaattcacattctcaagcaacaccgacgtaaagaactggaaacacggcaaaaacaatatc

SEQ ID NO: 25517 - DNA, 80 bp, synthetic construct
  source 1..80: mol_type = other DNA
ccttacctacaactccagacaagagatggagaggagagtaatgaaaataactttggatcaaccatattggcatgtaggaa

SEQ ID NO: 25518 - DNA, 80 bp, synthetic construct; identical to SEQ ID NO: 10290
  source 1..80: mol_type = other DNA

SEQ ID NO: 25519 - DNA, 80 bp, synthetic construct
  source 1..80: mol_type = other DNA
agaaatagttaatctgaataaaacaatcacaaccaaagagattgaattactaattctaaaatttcccacaaatagaagcc

SEQ ID NO: 25520 - DNA, 80 bp, synthetic construct
  source 1..80: mol_type = other DNA
aatatcccttagcaatatagatataaacattttcaacgaaatactagcaaacctaacccagaagtatataaaaggcatta

SEQ ID NO: 25521 - DNA, 80 bp, synthetic construct
  source 1..80: mol_type = other DNA
aacacccattcatgataaaacactcaaaaaataggaattgaagaaaatgtcctcaacctgataaaggtttgaaaattcac

SEQ ID NO: 25522 - DNA, 80 bp, synthetic construct
  source 1..80: mol_type = other DNA
tgtagtcccagctactcaggaggctgaggcaggagaatcacttgaacccagaaggcggaggttgcagtgagctgagatca

SEQ ID NO: 25523 - DNA, 80 bp, synthetic construct; identical to SEQ ID NO: 10291
  source 1..80: mol_type = other DNA

SEQ ID NO: 25524 - DNA, 80 bp, synthetic construct
  source 1..80: mol_type = other DNA
gattgcaagatacaagataatcaattgtttttctatacattaacaaccaactatgtgaaataaaagtaagaaaaagttca

SEQ ID NO: 25525 - DNA, 80 bp, synthetic construct
  source 1..80: mol_type = other DNA
gttaaaatggcaataccccacaaattaatgtacacgttcaacacaacccttatcaaaattctagctgatttctttgcaga

SEQ ID NO: 25526 - DNA, 80 bp, synthetic construct; identical to SEQ ID NO: 10292
  source 1..80: mol_type = other DNA

SEQ ID NO: 25527 - DNA, 80 bp, synthetic construct
  source 1..80: mol_type = other DNA
aaaccttcatgactttggatttgacaaaggactcttgatatgacaccaaaagcatcagcaacaaaagaaaaatagataaa

SEQ ID NO: 25528 - DNA, 80 bp, synthetic construct
  source 1..80: mol_type = other DNA
aagacaaatagtccaattaaaaaatgaaaaaaatgagtgaggatctgaatagatatttctccaaggacccattagtcatc

SEQ ID NO: 25529 - DNA, 80 bp, synthetic construct
  source 1..80: mol_type = other DNA
gtctgctagctcctgactgttcaacagagagttacaatatgacagcatttccactcttaagcatattcccaacagaaatg

SEQ ID NO: 25530 - DNA, 80 bp, synthetic construct
  source 1..80: mol_type = other DNA
tctatataatttgaccatgaaagaagaatgaaatactgacacttgttacaacatggatgaatctcaaaaacattatgcta

SEQ ID NO: 25531 - DNA, 80 bp, synthetic construct; identical to SEQ ID NO: 10293
  source 1..80: mol_type = other DNA

SEQ ID NO: 25532 - DNA, 80 bp, synthetic construct
  source 1..80: mol_type = other DNA
cactcttggaagaaaacatacaagtaagtcttcataatcttgggttcggcaaagtctcttagatatggcaccaagagcac

SEQ ID NO: 25533 - DNA, 80 bp, synthetic construct
  source 1..80: mol_type = other DNA
tctgacaactcaattttaaaatattctgtacaaaaaaccccgtttaaaaattagcaaaggatttaattaaatagttctcc

SEQ ID NO: 25534 - DNA, 80 bp, synthetic construct; identical to SEQ ID NO: 10294
  source 1..80: mol_type = other DNA

SEQ ID NO: 25535 - DNA, 80 bp, synthetic construct
  source 1..80: mol_type = other DNA
cttgtacacacatatttatagcaccattgttcacaatagtcaaaaagtagaaacaacctaaattccattaactgaggaat

SEQ ID NO: 25536 - DNA, 80 bp, synthetic construct
  source 1..80: mol_type = other DNA
atggtgaaaccccatgtctacaaaaatacaaaaattagccgggcatgttggtgcacgcctgtaatcccagctgcttggga

SEQ ID NO: 25537 - DNA, 80 bp, synthetic construct
  source 1..80: mol_type = other DNA
aacttcaaaaatatgctaaatggaaaactcacttacggaagaccccatattgtgtgattctatctgtatgaaatgtccag

SEQ ID NO: 25538 - DNA, 80 bp, synthetic construct
  source 1..80: mol_type = other DNA
atgttaatgggttcgaggtgtcctctggggatgagattatttcagaattgggttataatgatggttacacatacaactct

SEQ ID NO: 25539 - DNA, 80 bp, synthetic construct; identical to SEQ ID NO: 10295
  source 1..80: mol_type = other DNA

SEQ ID NO: 25540 - DNA, 80 bp, synthetic construct
  source 1..80: mol_type = other DNA
ggaggggcctttgggagccaatattgtgatacttttctacatatccctcaatagttgaacttcttacaaggaatatgtag

SEQ ID NO: 25541 - DNA, 80 bp, synthetic construct
  source 1..80: mol_type = other DNA
tgggattgtgctatatataccactttgcatcctccttgctgccctttagcagtgtagcaaaaatcattttcccatatttt

SEQ ID NO: 25542 - DNA, 80 bp, synthetic construct; identical to SEQ ID NO: 10296
  source 1..80: mol_type = other DNA

SEQ ID NO: 25543 - DNA, 80 bp, synthetic construct
  source 1..80: mol_type = other DNA
gtgggtggatcaccaggtcaggagatcgagaccatcctggctaacacggtgaaaccccgtctctactaaaaaatacaaaa

SEQ ID NO: 25544 - DNA, 80 bp, synthetic construct
  source 1..80: mol_type = other DNA
aaaaaaaaaaatctttaaccagttttcacgagccatgtatgggtccctgtttcatcaaacacttgccataactgagcaat

SEQ ID NO: 25545 - DNA, 80 bp, synthetic construct
  source 1..80: mol_type = other DNA
tttcatcaaaaacattccttgaaacagaataaagaaacaacaaacagccacacgtatgtgggtactgggtctgctacgga

SEQ ID NO: 25546 - DNA, 80 bp, synthetic construct
  source 1..80: mol_type = other DNA
gactcagcttggggttgattagacttaaaagttaaaggcaaaactgtaagacatttagactacaggtgattattcttcca

SEQ ID NO: 25547 - DNA, 80 bp, synthetic construct; identical to SEQ ID NO: 10297
  source 1..80: mol_type = other DNA

SEQ ID NO: 25548 - DNA, 80 bp, synthetic construct
  source 1..80: mol_type = other DNA
gagggctgggaacactcatataccaccggcaggaggacaagttggtaagacctccgtggaaaacaatttagcaatatgtc

SEQ ID NO: 25549 - DNA, 80 bp, synthetic construct
  source 1..80: mol_type = other DNA
aaggaaaattctacactgcaaggaaaatcaacaaactgctgctaacatggacaaacctcactgacgcagtgttgaaggaa

SEQ ID NO: 25550 - DNA, 80 bp, synthetic construct; identical to SEQ ID NO: 10298
  source 1..80: mol_type = other DNA

SEQ ID NO: 25551 - DNA, 80 bp, synthetic construct
  source 1..80: mol_type = other DNA
ttagagtatttgtgcacaagcctctcagctcaggcaccatatgatgtgtttccagacttccatacctggtgcagtgcaca

SEQ ID NO: 25552 - DNA, 80 bp, synthetic construct
  source 1..80: mol_type = other DNA
aattagtggggctctaattagactttgctatctactcatctaagataacacaaactagcccaattatctgggagctactt

SEQ ID NO: 25553 - DNA, 80 bp, synthetic construct
  source 1..80: mol_type = other DNA
tcttggagttcctctttctcagaagatttctcaggcttccagatcagagtttggaagtaaagcaatgactaagaatagtc

SEQ ID NO: 25554 - DNA, 80 bp, synthetic construct
  source 1..80: mol_type = other DNA
atctgtctgtgttacatgcacactcacacacagcagtaaatggcaaagtgtaggtgtttgttaatcgatataatttaatc

SEQ ID NO: 25555 - DNA, 80 bp, synthetic construct; identical to SEQ ID NO: 10299
  source 1..80: mol_type = other DNA

SEQ ID NO: 25556 - DNA, 80 bp, synthetic construct
  source 1..80: mol_type = other DNA
ctgagattcactgtttccctgcatcatcaacacttcgcatcttcagatgttttcattcttgcgtgtgaaatagtatctca

SEQ ID NO: 25557 - DNA, 80 bp, synthetic construct
  source 1..80: mol_type = other DNA
aaccttgtacaaacatcttgatgtactggtgctttaattaatggcagatccatttccagaactcagattgctggaacaaa

SEQ ID NO: 25558 - DNA, 80 bp, synthetic construct
  source 1..80: mol_type = other DNA
cttgtggttgttttagtctgcactcccctgaccactaataagcatcactgcattgcctatttataagctttttttcccta

SEQ ID NO: 25559 - DNA, 80 bp, synthetic construct; identical to SEQ ID NO: 10300
  source 1..80: mol_type = other DNA

SEQ ID NO: 25560 - DNA, 80 bp, synthetic construct
  source 1..80: mol_type = other DNA
tgcctcaaactaacccaggctcaatccatcttcccacgtcagcctcccaagtagctggggctacaggcgtgcgccaccat

SEQ ID NO: 25561 - DNA, 80 bp, synthetic construct
  source 1..80: mol_type = other DNA
ctctggattcgagtgtctgggctcaactcacacttactggcactttctccagtcctgtgaaagttgtttaatctgtctgt

SEQ ID NO: 25562 - DNA, 80 bp, synthetic construct; identical to SEQ ID NO: 10301
  source 1..80: mol_type = other DNA

SEQ ID NO: 25563 - DNA, 80 bp, synthetic construct
  source 1..80: mol_type = other DNA
ttccatccaggaacacagcgtgtctttccacctctctagatcctgtgtcaacgtacttccatagaatttctagttttctt

SEQ ID NO: 25564 - DNA, 80 bp, synthetic construct
  source 1..80: mol_type = other DNA
actgtgtgttggtcccttactgaattctttcattggttctaatcacttgtttttgtttgtttgttgttagtgagtctggt

SEQ ID NO: 25565 - DNA, 80 bp, synthetic construct
  source 1..80: mol_type = other DNA
ttattccatgtctggaattcccaaaacaagtagtggtagtagtgatgaacatccctctcatatttttgtttctttgttta

SEQ ID NO: 25566 - DNA, 80 bp, synthetic construct; identical to SEQ ID NO: 10302
  source 1..80: mol_type = other DNA

SEQ ID NO: 25567 - DNA, 80 bp, synthetic construct
  source 1..80: mol_type = other DNA
ctgtctcttggacattttaaaatgtattcagtatatacctaggtgtatctttttcctttttttttttcccccccacctag

SEQ ID NO: 25568 - DNA, 80 bp, synthetic construct
  source 1..80: mol_type = other DNA
tacacaattttcatgtaagagcagggcagggaaaaatagttattcatgcctttctctggctcagtgaatctgcatttttt

SEQ ID NO: 25569 - DNA, 80 bp, synthetic construct
  source 1..80: mol_type = other DNA
gccatggtgaaattttaacggttcactaggaatttccttgtgagcaaaatatggtggagacatgtagcttttcatcatag

SEQ ID NO: 25570 - DNA, 80 bp, synthetic construct; identical to SEQ ID NO: 10303
  source 1..80: mol_type = other DNA

SEQ ID NO: 25571 - DNA, 80 bp, synthetic construct
  source 1..80: mol_type = other DNA
atggacagtggtttggttttggaaaggtgggacaacttgggggaggggagcttccaggtcataggcagattcaaagagtt

SEQ ID NO: 25572 - DNA, 80 bp, synthetic construct
  source 1..80: mol_type = other DNA
gagtctgttctaatgggcttaacatctctgtgttgatgtgaatgctgatcagttgtgcctgaattccaagaggaggagag

SEQ ID NO: 25573 - DNA, 80 bp, synthetic construct
  source 1..80: mol_type = other DNA
ccatttctttgtagtttcaccctgtatttgggttacatgttcttctattttgcacaaagcacttcctggcacatagtagg

SEQ ID NO: 25574 - DNA, 80 bp, synthetic construct; identical to SEQ ID NO: 10304
  source 1..80: mol_type = other DNA

SEQ ID NO: 25575 - DNA, 80 bp, synthetic construct
  source 1..80: mol_type = other DNA
ttttctgcccataaatcctatccaactatgagacagcatcaaagtcactcggagcctgctctggtttaggggctgcccta

SEQ ID NO: 25576 - DNA, 80 bp, synthetic construct
  source 1..80: mol_type = other DNA
gtcttcattcagaaatcatgtttgtggttacagaaagtctttttacactccaattatactaactgcatccccttaggatc

SEQ ID NO: 25577 - DNA, 80 bp, synthetic construct
  source 1..80: mol_type = other DNA
taaatgcctttctacttctttgttccttctgcctgggtgttccacttggtcttcctcaatggagtgggattccatctcca

SEQ ID NO: 25578 - DNA, 80 bp, synthetic construct; identical to SEQ ID NO: 10305
  source 1..80: mol_type = other DNA

SEQ ID NO: 25579 - DNA, 80 bp, synthetic construct
  source 1..80: mol_type = other DNA
ttaattgatcattactaccagtgaggctactgaatggctcaattttagatatatattggagatgccttgagtcattttcc

SEQ ID NO: 25580 - DNA, 80 bp, synthetic construct
  source 1..80: mol_type = other DNA
cataacagaaaacacttgacaaaatgcctttgctgtcagaaggatcatacccggtccctgttcacttcttgtgatcctaa

SEQ ID NO: 25581 - DNA, 80 bp, synthetic construct
  source 1..80: mol_type = other DNA
atataaatgaaaaagctaaaaccctaaaatgtaaaatctggtttttaaacaaacacaaaatcattctccctccccaaaga

SEQ ID NO: 25582 - DNA, 80 bp, synthetic construct; identical to SEQ ID NO: 10306
  source 1..80: mol_type = other DNA

SEQ ID NO: 25583 - DNA, 80 bp, synthetic construct
  source 1..80: mol_type = other DNA
catataatgagtggtgaggatgaacagaggtcactttcatcaccatcttagttttgttgggttttggccggcttctttac

SEQ ID NO: 25584 - DNA, 80 bp, synthetic construct
  source 1..80: mol_type = other DNA
gtaaacaaaaaagcaaaataaacatttttcaaaaacacaaatgcccaatgccacgggatacgtttcaaggatgtcaggat

SEQ ID NO: 25585 - DNA, 80 bp, synthetic construct
  source 1..80: mol_type = other DNA
ctgagcatgtttactggatgcagtccgtggcttgtctttggggaagctgttttgattgtaataatctctaaagctgctat

SEQ ID NO: 25586 - DNA, 80 bp, synthetic construct
  source 1..80: mol_type = other DNA
tcaagttggcagaatggtggatgtccaggttgggcgtggctgggcagccttaataccttctacctccagtgactggcaag

SEQ ID NO: 25587 - DNA, 80 bp, synthetic construct; identical to SEQ ID NO: 10307
  source 1..80: mol_type = other DNA

SEQ ID NO: 25588 - DNA, 80 bp, synthetic construct
  source 1..80: mol_type = other DNA
gtgatatccagtttgatagtgaaaaaggagtggactttgttctgaattactccaaagcgtaagtttacgagaactgaggg

SEQ ID NO: 25589 - DNA, 80 bp, synthetic construct
  source 1..80: mol_type = other DNA
atcttaaaaaaggcataaccagaggactccagacaccagacatacatgtgtttttggcccaaagcaggggtctttagttg

SEQ ID NO: 25590 - DNA, 80 bp, synthetic construct
  source 1..80: mol_type = other DNA
accccacgagggagccacagtcatcatccccattttacagttgaggaactgaggaatacggaggttgactaccttccttg

SEQ ID NO: 25591 - DNA, 80 bp, synthetic construct; identical to SEQ ID NO: 10308
  source 1..80: mol_type = other DNA

SEQ ID NO: 25592 - DNA, 80 bp, synthetic construct
  source 1..80: mol_type = other DNA
cagcagtacatcagaaagcttatccaccatgatcaagtgggcttcatccctgggatggaaggctggttcaacatacgcaa

SEQ ID NO: 25593 - DNA, 80 bp, synthetic construct
  source 1..80: mol_type = other DNA
gctatttatgacagacccacagccaatatcatactgaaggagcaaaaactggaagcattccctttgaaaactggcacaag

SEQ ID NO: 25594 - DNA, 80 bp, synthetic construct
  source 1..80: mol_type = other DNA
atcgtctcagcccaaaatctccttaagctgataaggaacttcagcaaagtctcaggatacaaaatcaatgtgcaaaaatc

SEQ ID NO: 25595 - DNA, 80 bp, synthetic construct; identical to SEQ ID NO: 10309
  source 1..80: mol_type = other DNA

SEQ ID NO: 25596 - DNA, 80 bp, synthetic construct
  source 1..80: mol_type = other DNA
gacttcaaaccatactacgaggctacagtaaccaaaacagcatggcactggtaccaaaacagacatatagaccaatggaa

SEQ ID NO: 25597 - DNA, 80 bp, synthetic construct
  source 1..80: mol_type = other DNA
acaccttatacaaaaattaattcaagatggattaaatacttaaatgttagacctaaaaccataaaaaccctagaagaaaa

SEQ ID NO: 25598 - DNA, 80 bp, synthetic construct; identical to SEQ ID NO: 10310
  source 1..80: mol_type = other DNA

SEQ ID NO: 25599 - DNA, 80 bp, synthetic construct
  source 1..80: mol_type = other DNA
caccagttagaatggcaatcattaaaaagtcaggaaacaacaggtgctggagaggatgtggagaagtaggaacactttta

SEQ ID NO: 25600 - DNA, 80 bp, synthetic construct
  source 1..80: mol_type = other DNA
gtatgtttattgtggcactattcacaatagcaaagacttggaaccaacccaaatgtccatcaccgatagactggattaag

SEQ ID NO: 25601 - DNA, 80 bp, synthetic construct
  source 1..80: mol_type = other DNA
attgaacaatgagaacacttggacacaggaaggggaacatcacacaccagggcctgtcatggggtggggagaggggggag

SEQ ID NO: 25602 - DNA, 80 bp, synthetic construct; identical to SEQ ID NO: 10311
  source 1..80: mol_type = other DNA

SEQ ID NO: 25603 - DNA, 80 bp, synthetic construct
  source 1..80: mol_type = other DNA
aaggtgaacaccaagagctacctgtggaggttttcaccttttatctgtagctatcttcgtttcttgcatcactcagcttt

SEQ ID NO: 25604 - DNA, 80 bp, synthetic construct
  source 1..80: mol_type = other DNA
tgcacacccagcaggtagacgaggctgagaacccagccagacttcaaagcttaaaataatattatttatttctaaacatt

SEQ ID NO: 25605 - DNA, 80 bp, synthetic construct
  source 1..80: mol_type = other DNA
caggatttgaatccaggtctgtttgtgtccaaagctggggcatttttctcctaccacaattggggtctactggagagaaa

SEQ ID NO: 25606 - DNA, 80 bp, synthetic construct
  source 1..80: mol_type = other DNA
acaggcaggacagaaggcccttgtgaaagagacagtttggagggaataataaggatggtgaggtagtgaggtggagagta

SEQ ID NO: 25607 - DNA, 80 bp, synthetic construct; identical to SEQ ID NO: 10312
  source 1..80: mol_type = other DNA

SEQ ID NO: 25608 - DNA, 80 bp, synthetic construct
  source 1..80: mol_type = other DNA
gtgaaggccagactgtgcctttcttatctctgttcagtgtttctgaaggtcattgtcatctctgtatctcaggagcctct

SEQ ID NO: 25609 - DNA, 80 bp, synthetic construct
  source 1..80: mol_type = other DNA
acctccttttcatgtatccccatcatggctaacaacagcctagacatatggttctcaatcctgtgtgtttagtgttacag

SEQ ID NO: 25610 - DNA, 80 bp, synthetic construct; identical to SEQ ID NO: 10313
  source 1..80: mol_type = other DNA

SEQ ID NO: 25611 - DNA, 80 bp, synthetic construct
  source 1..80: mol_type = other DNA
caagacagtgggagggcttattctcaagtgcttgtataatttgttggaggctcgctctaaaaagtaaatataatttcttg

SEQ ID NO: 25612 - DNA, 80 bp, synthetic construct
  source 1..80: mol_type = other DNA
ctagctgtttcctttgccacacccaccctccccacttcttggccaagacatgggtgaggggccccttcttgcagaagctt

SEQ ID NO: 25613 - DNA, 80 bp, synthetic construct
  source 1..80: mol_type = other DNA
gacagtaagcttagccccactctgagcaccgcctctgtgctggcacagtggatggagacccttgagttctgcgggggaga

SEQ ID NO: 25614 - DNA, 80 bp, synthetic construct; identical to SEQ ID NO: 10314
  source 1..80: mol_type = other DNA

SEQ ID NO: 25615 - DNA, 80 bp, synthetic construct
  source 1..80: mol_type = other DNA
gggcgtcctctctgatggggcccaggaaggctttgcagccgggggccatctgaccaggtcttactgggcccaggcagagg

SEQ ID NO: 25616 - DNA, 80 bp, synthetic construct
  source 1..80: mol_type = other DNA
cagcctggaagacgattgcagggggtggcagggctgaaaagacaatgtcctcattaaaggaaattgagaaagagagtttc

SEQ ID NO: 25617 - DNA, 80 bp, synthetic construct
  source 1..80: mol_type = other DNA
aggggcgctttccagtgaaggcgccgtaggaaacgccagtctgtgccgcagtgtacgtagaggcgctatgagcccgagtt

SEQ ID NO: 25618 - DNA, 80 bp, synthetic construct
  source 1..80: mol_type = other DNA
gcacccggccgggggggtcatttacaagggacgctgggcacgaaggaggctggggcgaagatgagtccaggggttgggtt

SEQ ID NO: 25619 - DNA, 80 bp, synthetic construct; identical to SEQ ID NO: 10315
  source 1..80: mol_type = other DNA

SEQ ID NO: 25620 - DNA, 80 bp, synthetic construct
  source 1..80: mol_type = other DNA
ccaggcaaggaaggctgcggaggggccaggccaggagagaagggccctgagctcagtggacgggcagggtgcctgtggag

SEQ ID NO: 25621 - DNA, 80 bp, synthetic construct
  source 1..80: mol_type = other DNA
tcttatcgtcatcccaactcagaaaccatttggccccaagtcaccaaagcactcataggaaccacttttcctgtgacaca

SEQ ID NO: 25622 - DNA, 80 bp, synthetic construct; identical to SEQ ID NO: 10316
  source 1..80: mol_type = other DNA

SEQ ID NO: 25623 - DNA, 80 bp, synthetic construct
  source 1..80: mol_type = other DNA
cagaatcccctggggcccttgctaaaatctggatggctacactccccgcctagagtgggttaaactcagtgcccactggc

SEQ ID NO: 25624 - DNA, 80 bp, synthetic construct
  source 1..80: mol_type = other DNA
gctttgctcctgccctgcacagcacaactgtggcgtaaaaaatggaaaagctggtagcagaaggaaagagcagggagaca

SEQ ID NO: 25625 - DNA, 80 bp, synthetic construct
  source 1..80: mol_type = other DNA
tgggccacagtttggcacaggagaaagctgaagatgcaggagaaagctaggtcactgcccctaggccaggtgatcaaggt

SEQ ID NO: 25626 - DNA, 80 bp, synthetic construct; identical to SEQ ID NO: 10317
  source 1..80: mol_type = other DNA

SEQ ID NO: 25627 - DNA, 80 bp, synthetic construct
  source 1..80: mol_type = other DNA
ccctctggcactgggccatcttcaggccctacagggctctcggggcctgcgtaggcctctcatctcccagaaataagttc

SEQ ID NO: 25628 - DNA, 80 bp, synthetic construct
  source 1..80: mol_type = other DNA
ctggtcgtagccatggtgagaccacagcagcctccctggaagcaagcacctgtgtaaaagcccctccttccccacaaggg

SEQ ID NO: 25629 - DNA, 80 bp, synthetic construct
  source 1..80: mol_type = other DNA
cctctcggtcacctgcaggctccttgttcatcctgacacatgaggagaaaaagacagtactcacaaaggcctctagcctt

SEQ ID NO: 25630 - DNA, 80 bp, synthetic construct; identical to SEQ ID NO: 10318
  source 1..80: mol_type = other DNA

SEQ ID NO: 25631 - DNA, 80 bp, synthetic construct
  source 1..80: mol_type = other DNA
ccagccatgctccacctgagaagtgggtccaggcagagcactgggtcctggccacctagggctgcctcctcaggggtggg

SEQ ID NO: 25632 - DNA, 80 bp, synthetic construct
  source 1..80: mol_type = other DNA
gcatagggcagcaggcatagattcatacacgtgagtttgcacttaagctgcagtaagagctacagaggaaatgaacagag

SEQ ID NO: 25633 - DNA, 80 bp, synthetic construct
  source 1..80: mol_type = other DNA
gtgccagccaatccacttgctggtgagggccctcttcccagcttgcagatgtctctgtgttcccacagcatggtcacgtg

SEQ ID NO: 25634 - DNA, 80 bp, synthetic construct; identical to SEQ ID NO: 10319
  source 1..80: mol_type = other DNA

SEQ ID NO: 25635 - DNA, 80 bp, synthetic construct
  source 1..80: mol_type = other DNA
tgtcatggtgaacactgggcagcactcccacgctcctgtcctgcactctgcagggttatggaggaagcctgggaagtctc

SEQ ID NO: 25636 - DNA, 80 bp, synthetic construct
  source 1..80: mol_type = other DNA
agtgagcatttggaaacttctcctcagcaccaaacacggagccatttagcagaaaatacatgagttttcaagtcaattga

SEQ ID NO: 25637 - DNA, 80 bp, synthetic construct
  source 1..80: mol_type = other DNA
ttctggagggtactggcctgtctcttcgacaggtgaggtgcagtagaacagcatcccgtatagatgccagtttctgacct

SEQ ID NO: 25638 - DNA, 80 bp, synthetic construct; identical to SEQ ID NO: 10320
  source 1..80: mol_type = other DNA

SEQ ID NO: 25639 - DNA, 80 bp, synthetic construct
  source 1..80: mol_type = other DNA
tacactccacaccttttaccatcactgtggtcacccttgtgcccagaggtttctcctcctcagatattcaagctcgagca

SEQ ID NO: 25640 - DNA, 80 bp, synthetic construct
  source 1..80: mol_type = other DNA
aacagagcaaaggcagaacttggcttgtgttttaggtatttacacaaaagcaactttgggttcctttggactaggatgtg

SEQ ID NO: 25641 - DNA, 80 bp, synthetic construct
  source 1..80: mol_type = other DNA
tcctggacactccatgctgggctgaaggacctgagtgctccaggaggcttctgagccacgaagggccagctcaggtatga

SEQ ID NO: 25642 - DNA, 80 bp, synthetic construct; identical to SEQ ID NO: 10321
  source 1..80: mol_type = other DNA

SEQ ID NO: 25643 - DNA, 80 bp, synthetic construct
  source 1..80: mol_type = other DNA
tcaggtggaagccagttcctcctggccagtgctcataggccaccaagacgctaactgcaggcccatctggcctacagcag

SEQ ID NO: 25644 - DNA, 80 bp, synthetic construct
  source 1..80: mol_type = other DNA
ataatgtcaatattttcactatcagtatcaataattacaggagctacccttgattaggggcctgtggtgggacaggcatt

SEQ ID NO: 25645 - DNA, 80 bp, synthetic construct
  source 1..80: mol_type = other DNA
tcctgtcgcaccctcctccccaccctcacctgcagactcagctgcctccggctgcaaggctgacctagtcttgagacaga

SEQ ID NO: 25646 - DNA, 80 bp, synthetic construct
  source 1..80: mol_type = other DNA
cttttgagctcagcttaccctgaggccctagttggagagggatggttggtgccctttagagataaacctacagccccagt

SEQ ID NO: 25647 - DNA, 80 bp, synthetic construct; identical to SEQ ID NO: 10322
  source 1..80: mol_type = other DNA

SEQ ID NO: 25648 - DNA, 80 bp, synthetic construct
  source 1..80: mol_type = other DNA
gcacgtgggttatgagtcacctttcctttgagctgacccacccctcactgactagactcttaaacacacactgccccgtc

SEQ ID NO: 25649 - DNA, 80 bp, synthetic construct
  source 1..80: mol_type = other DNA
gtgcagttattttccggatcatgaatagagaaattgtatccctgttgttggtattgattcagtgttccagctcaagtttg

SEQ ID NO: 25650 - DNA, 80 bp, synthetic construct; identical to SEQ ID NO: 10323
  source 1..80: mol_type = other DNA

SEQ ID NO: 25651 - DNA, 80 bp, synthetic construct
  source 1..80: mol_type = other DNA
tagaggggacagggactctagacaggcaaaaactccactgtcagaagcagaatcctaaaatgtcagaactgaaaggtagg

SEQ ID NO: 25652 - DNA, 80 bp, synthetic construct
  source 1..80: mol_type = other DNA
ctgatggtcacttcagctctcaaagtccagctatccagccatagtcctagaaggcaagacatcactgtgcccgaccaacc

SEQ ID NO: 25653 - DNA, 80 bp, synthetic construct
  source 1..80: mol_type = other DNA
gagctcctgccgtcctgggtgggtggcttctgtcctgcgtgccgccgggcagcccgggggtcctgcgcgcgggcgcggtc

SEQ ID NO: 25654 - DNA, 80 bp, synthetic construct
  source 1..80: mol_type = other DNA
gcaggcctaccctgcacctggcgttcctaggggcccctctgcgggacccactgcgcggctcgcagcggccgcccgcctcc

SEQ ID NO: 25655 - DNA, 80 bp, synthetic construct; identical to SEQ ID NO: 10324
  source 1..80: mol_type = other DNA

SEQ ID NO: 25656 - DNA, 80 bp, synthetic construct
  source 1..80: mol_type = other DNA
actggggttgagttcgccagttttgacttatgtgtagagtccggcagcatcattttttggcatttaactcgtcacatcta

SEQ ID NO: 25657 - DNA, 80 bp, synthetic construct
  source 1..80: mol_type = other DNA
ttaccccgaactgccacaacctgtgaacaccttccatgtgaatcaatcagccttggagtcagaggagagaagtacacatt

SEQ ID NO: 25658 - DNA, 80 bp, synthetic construct
  source 1..80: mol_type = other DNA
tggcatcgatgccaacaaaacagacccctgcacactccagttcctggccgctcccatctgcttgctgtataagaacctgg

SEQ ID NO: 25659 - DNA, 80 bp, synthetic construct
  source 1..80: mol_type = other DNA
aggtgggctgtccataggggcggagagggttctactccccaaggcacacttgagaagcccctggccagtcgaggcacact

SEQ ID NO: 25660 - DNA, 80 bp, synthetic construct; identical to SEQ ID NO: 10325
  source 1..80: mol_type = other DNA

SEQ ID NO: 25661 - DNA, 80 bp, synthetic construct
  source 1..80: mol_type = other DNA
ccgtgggagactggcagatgagcattcagcaaataatgtccatgaactggaccttgggagctgtggacacaatagcagct

SEQ ID NO: 25662 - DNA, 80 bp, synthetic construct
  source 1..80: mol_type = other DNA
agcaataggtgaggttatttagaggctttttccattcaatgtgatatgtatgtggatcactgcagaaatactgctctgtt

SEQ ID NO: 25663 - DNA, 80 bp, synthetic construct
  source 1..80: mol_type = other DNA
gttttagataacctatctttatttgtgtaatcatcaccacaaccatcctaggtagtgggctctattgatgttgatcattt

SEQ ID NO: 25664 - DNA, 80 bp, synthetic construct; identical to SEQ ID NO: 10326
  source 1..80: mol_type = other DNA

SEQ ID NO: 25665 - DNA, 80 bp, synthetic construct
  source 1..80: mol_type = other DNA
gccacagaatgttcctgggtctctttcttcttctgaaaatggaaactttgcaaactataaagactcaagcaaatgaaagc

SEQ ID NO: 25666 - DNA, 80 bp, synthetic construct
  source 1..80: mol_type = other DNA
ggtggtacacaactgtagtcccagctacttgagaggctgaggcaggaggctcacttgaggctgtagtgtgctatgatcac

SEQ ID NO: 25667 - DNA, 80 bp, synthetic construct; identical to SEQ ID NO: 10327
  source 1..80: mol_type = other DNA

SEQ ID NO: 25668 - DNA, 80 bp, synthetic construct
  source 1..80: mol_type = other DNA
aaaggtgatattagcgaagtgagtgcagcagtgtattaaatgactatatgtaataaccaagcagggtttattccagatat

SEQ ID NO: 25669 - DNA, 80 bp, synthetic construct
  source 1..80: mol_type = other DNA
taataggaggaaccttactttatatgataaagatagctaacatcaaaaaggtgcaactctaatgccatttccattaaaat

SEQ ID NO: 25670 - DNA, 80 bp, synthetic construct
  source 1..80: mol_type = other DNA
gtaatgctatggtagacctagaaaacacaagagattctaatttttttaaaagctactagattaataaattcatttggcaa

SEQ ID NO: 25671 - DNA, 80 bp, synthetic construct
  source 1..80: mol_type = other DNA
aggctagagtgcagtggcgtgatctcggctcactgcaacctccacctcccaggttcaagcaattctcctgcctcagcctc

SEQ ID NO: 25672 - DNA, 80 bp, synthetic construct; identical to SEQ ID NO: 10328
  source 1..80: mol_type = other DNA

SEQ ID NO: 25673 - DNA, 80 bp, synthetic construct
  source 1..80: mol_type = other DNA
atggaaaaagaaatctagcatagtcaaaaattttttgaaaaaaattaaaaccacatagagaggcagggcaaccaagtgag

SEQ ID NO: 25674 - DNA, 80 bp, synthetic construct
  source 1..80: mol_type = other DNA
aagtaaaagaaaacacagaaggaacactttccttgctggatttgtaaggttactgttaagcagacactgtgcttgaaaac

SEQ ID NO: 25675 - DNA, 80 bp, synthetic construct; identical to SEQ ID NO: 10329
  source 1..80: mol_type = other DNA

SEQ ID NO: 25676 - DNA, 80 bp, synthetic construct
  source 1..80: mol_type = other DNA
aaagccaaaaagcaaaacagagattagggtgagtaaccataacagaagtgacagctaagagatgcctatctatgatacac

SEQ ID NO: 25677 - DNA, 80 bp, synthetic construct
  source 1..80: mol_type = other DNA
tcctaacttcacctgtagttagagaaatgcaaatgaaagttaacaatgagatatcatttctgacatgcctggttggaaaa

SEQ ID NO: 25678 - DNA, 80 bp, synthetic construct
  source 1..80: mol_type = other DNA
tcggccagcaccggagcaaggtcagagcttcggccagcaccggagcagatcccacagcgcctgctgtaccaggtgcatgt

SEQ ID NO: 25679 - DNA, 80 bp, synthetic construct; identical to SEQ ID NO: 10330
  source 1..80: mol_type = other DNA

SEQ ID NO: 25680 - DNA, 80 bp, synthetic construct
  source 1..80: mol_type = other DNA
agattcaaaaatttgttgttttgaaattggttaaggaagagaagtttcatttaaaaatttgggttaccagaaaggaatgt

SEQ ID NO: 25681 - DNA, 80 bp, synthetic construct
  source 1..80: mol_type = other DNA
acacatgttcaggggttctctttagtttccagagggaaccaaacagcccaggactctggcttccttggctgttgttttag

SEQ ID NO: 25682 - DNA, 80 bp, synthetic construct
  source 1..80: mol_type = other DNA
ctcaattggaggagcactggaggggactttattgtttaagtgttctgacagccagtagcactgaacaggtgtgcaccagg

SEQ ID NO: 25683 - DNA, 80 bp, synthetic construct; identical to SEQ ID NO: 10331
  source 1..80: mol_type = other DNA

SEQ ID NO: 25684 - DNA, 80 bp, synthetic construct
  source 1..80: mol_type = other DNA
tctccacaatgagttaacagtggaaaaacaagacacaagggaccgataaaggatacatatctgtcgtatacaaatagctc

SEQ ID NO: 25685 - DNA, 80 bp, synthetic construct
  source 1..80: mol_type = other DNA
tgatggcccagtgggggacaggtgagcaaaacaaagagacagatgttgattataatcatattcagttgatggaaaattgg

SEQ ID NO: 25686 - DNA, 80 bp, synthetic construct
  source 1..80: mol_type = other DNA
agaaacgcaaagctacttccttacccaaaaaacaaatttaagaaacacaaattgctcagggcaagttctggcatcccatg

SEQ ID NO: 25687 - DNA, 80 bp, synthetic construct
  source 1..80: mol_type = other DNA
gcactgggcccatcctcattcagctctttttttactggtcagaacagtttttttttttttaatatataaaattttagatt

SEQ ID NO: 25688 - DNA, 80 bp, synthetic construct; identical to SEQ ID NO: 10332
  source 1..80: mol_type = other DNA

SEQ ID NO: 25689 - DNA, 80 bp, synthetic construct
  source 1..80: mol_type = other DNA
gttgattacatgattttgatattgtgaacagtgctgcaataaacatatgtgtgcctatgtccttttggtaaaacaatttc

SEQ ID NO: 25690 - DNA, 80 bp, synthetic construct
  source 1..80: mol_type = other DNA
acatctgtcatttttttactttttaataatagccattctgactggtatccctttgtggttttaatttgcatttctctgat

SEQ ID NO: 25691 - DNA, 80 bp, synthetic construct
  source 1..80: mol_type = other DNA
caaatattttctctcattctgtaggttgtctgtttactttgttgatagtttgttttgctgtgcagaagctctttaatttg

SEQ ID NO: 25692 - DNA, 80 bp, synthetic construct; identical to SEQ ID NO: 10333
  source 1..80: mol_type = other DNA

SEQ ID NO: 25693 - DNA, 80 bp, synthetic construct
  source 1..80: mol_type = other DNA
tcttgtagtatagtttgaagtcaggtaatgtgatgcctccagctttgtatttttgcctaggattgctttggctattcggc

SEQ ID NO: 25694 - DNA, 80 bp, synthetic construct
  source 1..80: mol_type = other DNA
tccttggctggatacattctttggtattttattttgtgtatgggggactattgtaactgagatcaccacgttcctgatat

SEQ ID NO: 25695 - DNA, 80 bp, synthetic construct
  source 1..80: mol_type = other DNA
aaccccgtctcaattaaaaatacaaaaattagccaggtgtggtaacacctgcctgtaatcccagctacttgggaggctga

SEQ ID NO: 25696 - DNA, 80 bp, synthetic construct; identical to SEQ ID NO: 10334
  source 1..80: mol_type = other DNA

SEQ ID NO: 25697 - DNA, 80 bp, synthetic construct
  source 1..80: mol_type = other DNA
atgttattacttttctaagtcctttcataagcaacttcctcttttcctttgtctttccactgcttttacctatttagaaa

SEQ ID NO: 25698 - DNA, 80 bp, synthetic construct
  source 1..80: mol_type = other DNA
gcaccctttctgcagaaagtaaaattggcttgctaaaaaaactttttgtctaaatgctgatttttccttgcagtaccgag

SEQ ID NO: 25699 - DNA, 80 bp, synthetic construct
  source 1..80: mol_type = other DNA
tttttttcatttggatcccttttatttctttctcttgcctaattgctctgactaggacttccagtactctattgaatagg

SEQ ID NO: 25700 - DNA, 80 bp, synthetic construct; identical to SEQ ID NO: 10335
  source 1..80: mol_type = other DNA

SEQ ID NO: 25701 - DNA, 80 bp, synthetic construct
  source 1..80: mol_type = other DNA
gaaagtgtctcagagcatgccaggcagcccagcattctagggcacagatcaggtatcagtggcccaggcatctcatgcaa

SEQ ID NO: 25702 - DNA, 80 bp, synthetic construct
  source 1..80: mol_type = other DNA
ttcaaatttttatgtgaaactgtctggtatttaaaagcagccaactaatctcaagtataaacagacaggcacgcctaatg

SEQ ID NO: 25703 - DNA, 80 bp, synthetic construct; identical to SEQ ID NO: 10336
  source 1..80: mol_type = other DNA

SEQ ID NO: 25704 - DNA, 80 bp, synthetic construct
  source 1..80: mol_type = other DNA
atgtgtggggtagcattatatgtctattggacagcactgttttcgagggagagacgcccaaggaccccaccttccacaat

SEQ ID NO: 25705 - DNA, 80 bp, synthetic construct
  source 1..80: mol_type = other DNA
ctgtcaacccctccaataccccatgtcttcatgtaaaaatgggcaatgccagcacctgctgccggctcccgtgagaactc

SEQ ID NO: 25706 - DNA, 80 bp, synthetic construct
  source 1..80: mol_type = other DNA
ttattttctggcattaagaggtgattgaggaggcagttaacatgacatgatttgcattttggaaaagaaaaaaactcacc

SEQ ID NO: 25707 - DNA, 80 bp, synthetic construct
  source 1..80: mol_type = other DNA
gctgacttagggcaagaaaagaagacaggagcaccagggcagaccctggggagctccagcatttcagggaagaggagagg

SEQ ID NO: 25708 - DNA, 80 bp, synthetic construct; identical to SEQ ID NO: 10337
  source 1..80: mol_type = other DNA

SEQ ID NO: 25709 - DNA, 80 bp, synthetic construct
  source 1..80: mol_type = other DNA
actatactctgaagtgaaatatagcagtgtgtttcctttcccccaatgtatcagctcaaccaaatcccgggagatgagaa

SEQ ID NO: 25710 - DNA, 80 bp, synthetic construct
  source 1..80: mol_type = other DNA
gtgcaccccattttcaaggtacagccagctaccgccccacctgctatgggagggcatctgagatgtggagtgggagggat

SEQ ID NO: 25711 - DNA, 80 bp, synthetic construct
  source 1..80: mol_type = other DNA
cctcgctggccagccagtagagttggaaaaggcaaatgagttcatggtgatcctcggctgatgctgatggccgcccctgc

SEQ ID NO: 25712 - DNA, 80 bp, synthetic construct; identical to SEQ ID NO: 10338
  source 1..80: mol_type = other DNA

SEQ ID NO: 25713 - DNA, 80 bp, synthetic construct
  source 1..80: mol_type = other DNA
ctccccagctgctggtggcacacgtgagattcaccattgcaatcaacaccaaggcccgtgagcagctcatctgcgagtgt

SEQ ID NO: 25714 - DNA, 80 bp, synthetic construct
  source 1..80: mol_type = other DNA
gatgtctccagcccgtgccattcagccaggagcactcctccaggcgcaccaccaggtcttccttctcactgatggctcct

SEQ ID NO: 25715 - DNA, 80 bp, synthetic construct
  source 1..80: mol_type = other DNA
ttaatctgccacacccctgccaccctgacctggacctccccagcactctgcttcccgggtcccaaccctcccaacccact

SEQ ID NO: 25716 - DNA, 80 bp, synthetic construct; identical to SEQ ID NO: 10339
  source 1..80: mol_type = other DNA

SEQ ID NO: 25717 - DNA, 80 bp, synthetic construct
  source 1..80: mol_type = other DNA
catgggagagggcacaggagctcatcatagtagctccacctcaggttctcatgtggccattatctcccagccgcatctaa

SEQ ID NO: 25718 - DNA, 80 bp, synthetic construct
  source 1..80: mol_type = other DNA
gacacacatatgtgccagtgagcttgtgagtgtgtctgcatcactcagaagccgggatcgggatcaggaccaggatccct

SEQ ID NO: 25719 - DNA, 80 bp, synthetic construct
  source 1..80: mol_type = other DNA
gcagacttcacagcccaggcccgctggtgctggggtcccccacacacctgcccacgcctgctgccctcctgtggctggga

SEQ ID NO: 25720 - DNA, 80 bp, synthetic construct; identical to SEQ ID NO: 10340
  source 1..80: mol_type = other DNA

SEQ ID NO: 25721 - DNA, 80 bp, synthetic construct
  source 1..80: mol_type = other DNA
ccggggcatggagagcaaagaagacatcccctactacttctaccgggacgacgggctcctggtgtgggaagccatcagga

SEQ ID NO: 25722 - DNA, 80 bp, synthetic construct
  source 1..80: mol_type = other DNA
ctggctgggtcgcccaccccggctgcgccccctgagccaggttcacggccgaggtggtagacatctactacgagggcgac

SEQ ID NO: 25723 - DNA, 80 bp, synthetic construct
  source 1..80: mol_type = other DNA
tcctgcccagggtgccctccggccttggggcagggaatccgggcacggggtgggcgccgggccctggggtcctcagggac

SEQ ID NO: 25724 - DNA, 80 bp, synthetic construct; identical to SEQ ID NO: 10341
  source 1..80: mol_type = other DNA

SEQ ID NO: 25725 - DNA, 80 bp, synthetic construct
  source 1..80: mol_type = other DNA
gctggcggtcgtctccgcagtacgactggtgctcctggatccccaatgcgcccccaaccatgcgagccccgccaccgact

SEQ ID NO: 25726 - DNA, 80 bp, synthetic construct
  source 1..80: mol_type = other DNA
ggttcctcagcctcagggctttgtgactcgggccccaaggctcacttggagcaaaggaatcctgacttccaaggctggaa

SEQ ID NO: 25727 - DNA, 80 bp, synthetic construct
  source 1..80: mol_type = other DNA
catgtgttttaccctggtactccagagggaatgaccaagagtttcctgggttccttccggacacgtgcatctcatttaac

SEQ ID NO: 25728 - DNA, 80 bp, synthetic construct; identical to SEQ ID NO: 10342
  source 1..80: mol_type = other DNA

SEQ ID NO: 25729 - DNA, 80 bp, synthetic construct
  source 1..80: mol_type = other DNA
ggaccccaacagggcagccaccccttcaggctccctggcccgctttctgccttcctgggctggagaggccagtgctggcc

SEQ ID NO: 25730 - DNA, 80 bp, synthetic construct
  source 1..80: mol_type = other DNA
ctggagccttccttagagaagcaggttggaggcgacgacacttgccttcccgaggccctcttgtcaggcagcagagggtg

SEQ ID NO: 25731 - DNA, 80 bp, synthetic construct
  source 1..80: mol_type = other DNA
attttatcgagaagcctgtgaaggaagccatggcccgattccgcaagaacctcgaggccattgtcagcgtgattgctgag

SEQ ID NO: 25732 - DNA, 80 bp, synthetic construct; identical to SEQ ID NO: 10343
  source 1..80: mol_type = other DNA

SEQ ID NO: 25733 - DNA, 80 bp, synthetic construct
  source 1..80: mol_type = other DNA
ttgtgcttagtccaattccttgcacatagtaggtacccaattcaattactattgaatgaattaagaattggttgccataa

SEQ ID NO: 25734 - DNA, 80 bp, synthetic construct
  source 1..80: mol_type = other DNA
attcccctctcccggacccgaggagcaggaagcggcggctccttcggccacccaggcagcagccacagcggggagtgcgc

SEQ ID NO: 25735 - DNA, 80 bp, synthetic construct
  source 1..80: mol_type = other DNA
gacggagtacgccatcaagtgcgccccctgccttccacccgacgccgccaggtactgccagcctcgccctcccctttctc

SEQ ID NO: 25736 - DNA, 80 bp, synthetic construct; identical to SEQ ID NO: 10344
  source 1..80: mol_type = other DNA

SEQ ID NO: 25737 - DNA, 80 bp, synthetic construct
  source 1..80: mol_type = other DNA
agcatcctgggaggctgtggcactttgctcagatctgcagggaatcatgttctctcttcccacggtggcgggagggagga

SEQ ID NO: 25738 - DNA, 80 bp, synthetic construct
  source 1..80: mol_type = other DNA
cccctatttttctcttcctacctctttcctacgtttccattattctctgtcttcccactgatttggaatccagtctcatt

SEQ ID NO: 25739 - DNA, 80 bp, synthetic construct
  source 1..80: mol_type = other DNA
tctctctgactggcatctggcttggatgctatctgtggttctctaggattaccatgcaaactcttaagatacagcctcag

SEQ ID NO: 25740 - DNA, 80 bp, synthetic construct; identical to SEQ ID NO: 10345
  source 1..80: mol_type = other DNA

SEQ ID NO: 25741 - DNA, 80 bp, synthetic construct
  source 1..80: mol_type = other DNA
actttactagatcctctttccagctattcattcattcatccacttgacaaatgcttactgctcttctactatgtgtcagg

SEQ ID NO: 25742 - DNA, 80 bp, synthetic construct
  source 1..80: mol_type = other DNA
aggagagctcattaacagaaagtttgactgatatcagaaaaggcttccttgaagaagttacactacagctgaaatgtgaa

SEQ ID NO: 25743 - DNA, 80 bp, synthetic construct
  source 1..80: mol_type = other DNA
catgggagggattaatcagaattgcagtatggagaatgcattgggaggggtagagtggattctggttaagttaggagatt

SEQ ID NO: 25744 - DNA, 80 bp, synthetic construct; identical to SEQ ID NO: 10346
  source 1..80: mol_type = other DNA

SEQ ID NO: 25745 - DNA, 80 bp, synthetic construct
  source 1..80: mol_type = other DNA
tcagatgcctttaaacaaccaagaagagttgtcatggacatcagagtaaaggttggtgctaacaatattaaaacttggga

SEQ ID NO: 25746 - DNA, 80 bp, synthetic construct
  source 1..80: mol_type = other DNA
acataaattagctgggcgtggtggtgggcacctgtagtcccagctactcaggaggttgagataggagaattgcttgaacc

SEQ ID NO: 25747 - DNA, 80 bp, synthetic construct
  source 1..80: mol_type = other DNA
gccctcatgaagcttatagtctaaaggaggaagacaaaataaatagcaaatgaataataaactttttagctatagcactc

SEQ ID NO: 25748 - DNA, 80 bp, synthetic construct; identical to SEQ ID NO: 10347
  source 1..80: mol_type = other DNA

SEQ ID NO: 25749 - DNA, 80 bp, synthetic construct
  source 1..80: mol_type = other DNA
cttgtaggactttctcagccatgaaagaactttggcttttactgtgaatgaggagagccattggagaagggcagtgacat

SEQ ID NO: 25750 - DNA, 80 bp, synthetic construct
  source 1..80: mol_type = other DNA
agattttaaaatatgactttggctgctgggttgagaatagattgtggagaggaagcgggagaaacagagtccaattagga

SEQ ID NO: 25751 - DNA, 80 bp, synthetic construct
  source 1..80: mol_type = other DNA
ggactagaaggacagaggccccattcactgaaatgatgaaaactaaaggaagagcaggtttcaggggaaaatcaggaggt

SEQ ID NO: 25752 - DNA, 80 bp, synthetic construct; identical to SEQ ID NO: 10348
  source 1..80: mol_type = other DNA

SEQ ID NO: 25753 - DNA, 80 bp, synthetic construct
  source 1..80: mol_type = other DNA
gacttctgggtaggaagctatgaaagaactgtgcaaggtagttacaattattcccagtttttagtttagaaactgaggcc

SEQ ID NO: 25754 - DNA, 80 bp, synthetic construct
  source 1..80: mol_type = other DNA
agattaaaaatatcacagaggtggagaagggatctctggcacaagtgaacaagaataggagaaacctacactagccaaca

SEQ ID NO: 25755 - DNA, 80 bp, synthetic construct
  source 1..80: mol_type = other DNA
tccccatccctgcaatcccaaaataatctataacaattttcatatttactgttctgtgggcacatacagtgaaatgagca

SEQ ID NO: 25756 - DNA, 80 bp, synthetic construct
  source 1..80: mol_type = other DNA
ttttgtaaggccttcccttaagtttcgacttctgttccaattcaacaaagatgtattgtgcaatgcatggcaatgcactt

SEQ ID NO: 25757 - DNA, 80 bp, synthetic construct; identical to SEQ ID NO: 10349
  source 1..80: mol_type = other DNA

SEQ ID NO: 25758 - DNA, 80 bp, synthetic construct
  source 1..80: mol_type = other DNA
ctaggggagataaacatagaaacaagcaactagaataaagggcaaactgtgatacctgcttttttgtggccacctttgca

SEQ ID NO: 25759 - DNA, 80 bp, synthetic construct
  source 1..80: mol_type = other DNA
agtctggcatcatggctagtttatgtgttcagctggttgctgtagtaatgaatgggtcacccccttccatatcttgctcc

SEQ ID NO: 25760 - DNA, 80 bp, synthetic construct
  source 1..80: mol_type = other DNA
acccacagcctctgctggaagctcaggttccgcatcatccatgagaccagcttggccatgaacttcctgcacagcattaa

SEQ ID NO: 25761 - DNA, 80 bp, synthetic construct; identical to SEQ ID NO: 10350
  source 1..80: mol_type = other DNA

SEQ ID NO: 25762 - DNA, 80 bp, synthetic construct
  source 1..80: mol_type = other DNA
taatggacattctttcacttcctaaaactcttttttgccccaggacctttgcagcttctgtttccccactcccctctatt

SEQ ID NO: 25763 - DNA, 80 bp, synthetic construct
  source 1..80: mol_type = other DNA
ttcattaatgactggaccccctatttgaataagtatttacgaggatatggagtgtgtgtgttggcagggggtgtctcatt

SEQ ID NO: 25764 - DNA, 80 bp, synthetic construct; identical to SEQ ID NO: 10351
  source 1..80: mol_type = other DNA

SEQ ID NO: 25765 - DNA, 80 bp, synthetic construct
  source 1..80: mol_type = other DNA
tcatagaaaaccactactctaccctggaacaggcagatagcaggaggggtgagaagccatagccgttttctggtcatgag

SEQ ID NO: 25766 - DNA, 80 bp, synthetic construct
  source 1..80: mol_type = other DNA
aaggccccaggacctaaatatgatgtgtacaggtgagaaggaggcctggcgtgatgccacacacccagcaggcagtttgc

SEQ ID NO: 25767 - DNA, 80 bp, synthetic construct
  source 1..80: mol_type = other DNA
atcttggatgttcaactaagtcattcagaaagggttctctgcatccacagctttgcaattgtcatctgggagctactcac

SEQ ID NO: 25768 - DNA, 80 bp, synthetic construct; identical to SEQ ID NO: 10352
  source 1..80: mol_type = other DNA

SEQ ID NO: 25769 - DNA, 80 bp, synthetic construct
  source 1..80: mol_type = other DNA
ggcctgcccatcagctgcctgtcctgctgcctttggacagcacagacctgcaatgtggggtcatgtctagtcttgacctg

SEQ ID NO: 25770 - DNA, 80 bp, synthetic construct
  source 1..80: mol_type = other DNA
tccagccctacctctcagcacccacatagcctgagcctccctttgcagggttcaacatgatgatgattattatccgagtg

SEQ ID NO: 25771 - DNA, 80 bp, synthetic construct
  source 1..80: mol_type = other DNA
agatgactgggcactcctgggagctatgcagagagacacttttggtactacggcctagaaggactttttttttttttttt

SEQ ID NO: 25772 - DNA, 80 bp, synthetic construct; identical to SEQ ID NO: 10353
  source 1..80: mol_type = other DNA

SEQ ID NO: 25773 - DNA, 80 bp, synthetic construct
  source 1..80: mol_type = other DNA
tcaccaagctctccagccagccttgagtcctttcagagctactgtttcctcatttgtaaaatgtttccaggccatgagat

SEQ ID NO: 25774 - DNA, 80 bp, synthetic construct
  source 1..80: mol_type = other DNA
acccaggtttcctgccttctcgtgcatttatatgaacatatgtgagcccaggaatggattttgggagacaggaatgttag

SEQ ID NO: 25775 - DNA, 80 bp, synthetic construct
  source 1..80: mol_type = other DNA
gtcctgcaagctgtcgctgcgccagcccggggaggtgagtgtgtgggctgggcagtccttatggtcatgctaagctggag

SEQ ID NO: 25776 - DNA, 80 bp, synthetic construct
  source 1..80: mol_type = other DNA
taccttctctctcatgtttgggaccaaactgactcctgtcctgcagaggaaggcccggctctcccaagctttcatgctgt

SEQ ID NO: 25777 - DNA, 80 bp, synthetic construct; identical to SEQ ID NO: 10354
  source 1..80: mol_type = other DNA

SEQ ID NO: 25778 - DNA, 80 bp, synthetic construct
  source 1..80: mol_type = other DNA
ggacagtggtgagtctgggtgccacgggcgggaccagagaactcacagcagagaaaatggagtcaaaccacaccctttcc

SEQ ID NO: 25779 - DNA, 80 bp, synthetic construct
  source 1..80: mol_type = other DNA
tcctgacctgaaaggtggagcattggttctcaaggctggctgcatgttagaattgctcgggaaattaaaaaaaaaaaaaa

SEQ ID NO: 25780 - DNA, 80 bp, synthetic construct
  source 1..80: mol_type = other DNA
gaactccaaccacaagtttatttccaacttagaattgcttactttccctcaggtcctccactgaaagtttttacctatat

SEQ ID NO: 25781 - DNA, 80 bp, synthetic construct; identical to SEQ ID NO: 10355
  source 1..80: mol_type = other DNA

SEQ ID NO: 25782 - DNA, 80 bp, synthetic construct
  source 1..80: mol_type = other DNA
tccgaccgtaagaatttggtcccgagagatgaggaactgtgtatctatgagaacaaggtcacccccctccacttcctggt

SEQ ID NO: 25783 - DNA, 80 bp, synthetic construct
  source 1..80: mol_type = other DNA
gtggatgaggatggctgggccccactgcactttgcagcccagaatggggatgacggcactgcgcgcctgctcctggacca

SEQ ID NO: 25784 - DNA, 80 bp, synthetic construct
  source 1..80: mol_type = other DNA
tttggccatgttagcctggtcaagctgctgaccagccagggggctgagttggatgctcagcagagaaacctgagaacacc

SEQ ID NO: 25785 - DNA, 80 bp, synthetic construct
  source 1..80: mol_type = other DNA
gccagccttgagctgcccacccaccagggctggacacccctgcatctagcagcctacaagggccacctggagatcatcca

SEQ ID NO: 25786 - DNA, 80 bp, synthetic construct; identical to SEQ ID NO: 10356
  source 1..80: mol_type = other DNA

SEQ ID NO: 25787 - DNA, 80 bp, synthetic construct
  source 1..80: mol_type = other DNA
ctagagggcaaggagccgtcagtggccactctgggtggttctaagccaggagccgagatggaaatttagacaacttggcc

SEQ ID NO: 25788 - DNA, 80 bp, synthetic construct
  source 1..80: mol_type = other DNA
ggccagaaaagccctggccagtggcgggcgcgacactatccgtgcggccaggcggaggtgagtgcgcggcggccggatgg

SEQ ID NO: 25789 - DNA, 80 bp, synthetic construct
  source 1..80: mol_type = other DNA
gtcttccagacccggaggaccgaagcttccggacgacgaggaaccgcccaacatggcctcggaggtgagtgggacctcgg

SEQ ID NO: 25790 - DNA, 80 bp, synthetic construct
  source 1..80: mol_type = other DNA
ccagcagtcacctttaccaggactcaccagtatccgcaggcagcccttgtggcaaacccaccaacccacactactagggg

SEQ ID NO: 25791 - DNA, 80 bp, synthetic construct; identical to SEQ ID NO: 10357
  source 1..80: mol_type = other DNA

SEQ ID NO: 25792 - DNA, 80 bp, synthetic construct
  source 1..80: mol_type = other DNA
catagttgatttatctggcaatgggggtaataatagctgtcggcctcactctgtaaggcactagattatgaggccattgc

SEQ ID NO: 25793 - DNA, 80 bp, synthetic construct
  source 1..80: mol_type = other DNA
ttctgtaccagtcacttgagccctttaaacctctttcctcatttgtgaaataggggtaatattgcccacctcataaaagg

SEQ ID NO: 25794 - DNA, 80 bp, synthetic construct
  source 1..80: mol_type = other DNA
gagaccctgtctctacaaaaagattttgaaaattacccaggtgtggtggcgtacacctgtagtctcacaggaggcggagg

SEQ ID NO: 25795 - DNA, 80 bp, synthetic construct
  source 1..80: mol_type = other DNA
aggtcgaggtgggcagatcacctgaggtcaggagtttgagaccagcctggccaacatggtgaaaccccgtctctactaaa

SEQ ID NO: 25796 - DNA, 80 bp, synthetic construct; identical to SEQ ID NO: 10358
  source 1..80: mol_type = other DNA

SEQ ID NO: 25797 - DNA, 80 bp, synthetic construct
  source 1..80: mol_type = other DNA
cttatgcctgccagtaaggataggagtttggttctagagcagagtggtctggcttccaacaagcccagtgttctaggtga

SEQ ID NO: 25798 - DNA, 80 bp, synthetic construct
  source 1..80: mol_type = other DNA
tcctgtaggttggcactaattggtttggctgcagctccacttattaagtagttatttttattactaacaacctaggcagg

SEQ ID NO: 25799 - DNA, 80 bp, synthetic construct
  source 1..80: mol_type = other DNA
gtaaggggcaggaccagctcaaagatggggtgggggcggaggctgcctctgcagggcagagtcctttggcagtcgggact

SEQ ID NO: 25800 - DNA, 80 bp, synthetic construct; identical to SEQ ID NO: 10359
  source 1..80: mol_type = other DNA

SEQ ID NO: 25801 - DNA, 80 bp, synthetic construct
  source 1..80: mol_type = other DNA
aagtggctgggactacagcttcctgccaccgcgcctggctaatgtttatatttttagtacagatgaggtttcaccatgtt

SEQ ID NO: 25802 - DNA, 80 bp, synthetic construct
  source 1..80: mol_type = other DNA
agctccgcctcccgggttcacgccattctcctgcctcagcctcccaagtagctgggactacaggcgcccaacacccccat

SEQ ID NO: 25803 - DNA, 80 bp, synthetic construct; identical to SEQ ID NO: 10360
  source 1..80: mol_type = other DNA

SEQ ID NO: 25804 - DNA, 80 bp, synthetic construct
  source 1..80: mol_type = other DNA
tgccctctttcaaaacatagatgtggctggcgcctaggctcatgcctataatctcagcactttgggaagctgaggctgga

SEQ ID NO: 25805 - DNA, 80 bp, synthetic construct
  source 1..80: mol_type = other DNA
cgtgatcttggctcactgcaacctccgcctcccgggttcaagcgattctcctgcctcagcctcctaagtagctggaacta

SEQ ID NO: 25806 - DNA, 80 bp, synthetic construct
  source 1..80: mol_type = other DNA
ataaaattttaaaaaaatgtctgggtgtggtggcgcatgcttgtagtcccaactattggggaggctgaggcaagaggatt

SEQ ID NO: 25807 - DNA, 80 bp, synthetic construct
  source 1..80: mol_type = other DNA
atcacgaggtcagattaagaccatcctggctaacaaggtgaaaccacgtctctactgaaaaaaaaaaatacaaaaaatta

SEQ ID NO: 25808 - DNA, 80 bp, synthetic construct; identical to SEQ ID NO: 10361
  source 1..80: mol_type = other DNA

SEQ ID NO: 25809 - DNA, 80 bp, synthetic construct
  source 1..80: mol_type = other DNA
ggaaaattggcttgaagccgggaggtggaggttgcagtgagccgagatcacgccactgcactccagcctaggcaacagag

SEQ ID NO: 25810 - DNA, 80 bp, synthetic construct
  source 1..80: mol_type = other DNA
agtggtaggaattgggatcttagtccagctccaagctgtgagggagagagttgcagggcacttaagcttggtggagaccc

SEQ ID NO: 25811 - DNA, 80 bp, synthetic construct; identical to SEQ ID NO: 10362
  source 1..80: mol_type = other DNA

SEQ ID NO: 25812 - DNA, 80 bp, synthetic construct
  source 1..80: mol_type = other DNA
gaggccaagatgggaggatcacctgaggtcaggagttcaagaccagcctggccaacatggtgaaaccccatctctactaa

SEQ ID NO: 25813 - DNA, 80 bp, synthetic construct
  source 1..80: mol_type = other DNA
aaaaaaaaaaaaaaagaacccaaacttttggtgttcagccatgttcccatgctcactcccagggtggtgactctgggaag

SEQ ID NO: 25814 - DNA, 80 bp, synthetic construct
  source 1..80: mol_type = other DNA
tggccggtttgtgggtgcagtggaccccatcatggagaagttcaacgcgtccattgcctacgaccggcacctttgggagg

SEQ ID NO: 25815 - DNA, 80 bp, synthetic construct; identical to SEQ ID NO: 10363
  source 1..80: mol_type = other DNA

SEQ ID NO: 25816 - DNA, 80 bp, synthetic construct
  source 1..80: mol_type = other DNA
gggtgggaccaaggcaggggctctcttggctgctgatgcctgctcacctgaccccggcattgctgctacccactacaggt

SEQ ID NO: 25817 - DNA, 80 bp, synthetic construct
  source 1..80: mol_type = other DNA
attagcaccattctgtttacttcgccattggcagacagcatgtgagacctcaggacatgagccaggcaccctggctcatg

SEQ ID NO: 25818 - DNA, 80 bp, synthetic construct
  source 1..80: mol_type = other DNA
gaggacccggagccctggggtatggaggtaggttggcagggctgatgaggaaaactgccctgcctgggttgactcctctg

SEQ ID NO: 25819 - DNA, 80 bp, synthetic construct; identical to SEQ ID NO: 10364
  source 1..80: mol_type = other DNA

SEQ ID NO: 25820 - DNA, 80 bp, synthetic construct
  source 1..80: mol_type = other DNA
aggagacctagggggcaggggtgaacagcgtgggggtgccaggccctgggggacaggggcatcccagaactccaggatcg

SEQ ID NO: 25821 - DNA, 80 bp, synthetic construct
  source 1..80: mol_type = other DNA
aggtcaggagttcgagaccagcctggccaacatgggaaaactctgtctctactaaaaatacaaaaattaggcaatgtggt

SEQ ID NO: 25822 - DNA, 80 bp, synthetic construct
  source 1..80: mol_type = other DNA
aaaaaaagaaaactcaccatttgcagatttgaaggcaggaagctaagccaagcacagctagcttggctgtgcctggagca

SEQ ID NO: 25823 - DNA, 80 bp, synthetic construct
  source 1..80: mol_type = other DNA
gactggatttgttccttgcagacctggacgaagagctgctgagaagtctccatgtgttgtcagagacccctcctcttcct

SEQ ID NO: 25824 - DNA, 80 bp, synthetic construct; identical to SEQ ID NO: 10365
  source 1..80: mol_type = other DNA

SEQ ID NO: 25825 - DNA, 80 bp, synthetic construct
  source 1..80: mol_type = other DNA
cgtcggcctgccaaagtgctaggattacacccataagccactgcgctcagcttaatttttaaatttttaactttttaaat

SEQ ID NO: 25826 - DNA, 80 bp, synthetic construct
  source 1..80: mol_type = other DNA
gacagagtcttgctctgttgcccaggctggagtgcagtggcgtgatctccactcactgcaacctctgcctcccaggttca

SEQ ID NO: 25827 - DNA, 80 bp, synthetic construct
  source 1..80: mol_type = other DNA
cggactctcaaagtgctgggattacaggtgtgagccaccgtgcccagccgcgaattctttaaattttttgtagaaacagg

SEQ ID NO: 25828 - DNA, 80 bp, synthetic construct; identical to SEQ ID NO: 10366
  source 1..80: mol_type = other DNA

SEQ ID NO: 25829 - DNA, 80 bp, synthetic construct
  source 1..80: mol_type = other DNA
tagctgggtgtgatggtgggcacctgtagtcccagctacttgggaggcaggagaatctcttggacctgggaggtggaggt

SEQ ID NO: 25830 - DNA, 80 bp, synthetic construct
  source 1..80: mol_type = other DNA
cctgaaaccaggagtttcagaccactctgggcaacatagcaagaccccatctttttttttttttttgagacggagtctcg

SEQ ID NO: 25831 - DNA, 80 bp, synthetic construct
  source 1..80: mol_type = other DNA
agtatagatggggtttcaccgtgttagccaggatggtctcgatctcctgaccttgtgatctgcccgcctcggcctcccaa

SEQ ID NO: 25832 - DNA, 80 bp, synthetic construct; identical to SEQ ID NO: 10367
  source 1..80: mol_type = other DNA

SEQ ID NO: 25833 - DNA, 80 bp, synthetic construct
  source 1..80: mol_type = other DNA
acggccaagtcatacccaacatgggcctcctcccctattctggcccctgctcggagatgctgagtgacagaggctggact

SEQ ID NO: 25834 - DNA, 80 bp, synthetic construct
  source 1..80: mol_type = other DNA
agcgtgacactttttccaggggtgacccaggcctgcagggttccagtgtcacaggcaggccttgcatgagcctccacccg

SEQ ID NO: 25835 - DNA, 80 bp, synthetic construct
  source 1..80: mol_type = other DNA
ctgccctgaccctcctgcccctggcttcccacagccacgccgtggcactgacccgagactctgagcggctgctggaggtg

SEQ ID NO: 25836 - DNA, 80 bp, synthetic construct; identical to SEQ ID NO: 10368
  source 1..80: mol_type = other DNA

SEQ ID NO: 25837 - DNA, 80 bp, synthetic construct
  source 1..80: mol_type = other DNA
actgggccagggaagaggctaagcgccaggtggttgccctggcaaccaggacttggttctctgtgtgtgcgttcgtgtgt

SEQ ID NO: 25838 - DNA, 80 bp, synthetic construct
  source 1..80: mol_type = other DNA
cccctcctccccagggagaatcaccctcagcacccgccaagacctgcagacacacctgaaaccagagggcaggggcctgt

SEQ ID NO: 25839 - DNA, 80 bp, synthetic construct
  source 1..80: mol_type = other DNA
ccccaccctgatcaggggagggggctgggcaacctagttgggggagagggggccactccctgtcctccagcttagccctg

SEQ ID NO: 25840 - DNA, 80 bp, synthetic construct; identical to SEQ ID NO: 10369
  source 1..80: mol_type = other DNA

SEQ ID NO: 25841 - DNA, 80 bp, synthetic construct
  source 1..80: mol_type = other DNA
aggaggcggaggctgcagtgagccaagatcacgccagtgcactccagcctgggcaacaagagcgaaactccatctcaaaa

SEQ ID NO: 25842 - DNA, 80 bp, synthetic construct
  source 1..80: mol_type = other DNA
aaagcacaaaaattagctgggcatggtggtgcatgcctgtaatcccagctactcgggaggctaaggaaggagattcgctg

SEQ ID NO: 25843 - DNA, 80 bp, synthetic construct
  source 1..80: mol_type = other DNA
aaaacaacaacaataacaaaaaacacgctaggtgcaatggcttacgtttgtaatcctagcactttgggaggccaaagcag

SEQ ID NO: 25844 - DNA, 80 bp, synthetic construct; identical to SEQ ID NO: 10370
  source 1..80: mol_type = other DNA

SEQ ID NO: 25845 - DNA, 80 bp, synthetic construct
  source 1..80: mol_type = other DNA
acccctccgccagacctggccattgcggcgctggaccagccaagggtccagccccttcagcgccagcacctctgtcccca

SEQ ID NO: 25846 - DNA, 80 bp, synthetic construct
  source 1..80: mol_type = other DNA
cccgggtccagcccctgtgcctccctcttcccgcagtgtgccgggctcctgatgaccctcaagggacttcccagcaccta

SEQ ID NO: 25847 - DNA, 80 bp, synthetic construct
  source 1..80: mol_type = other DNA
catacatcctcccatcctgtgcacacagctccatccgtggctgcccttgaactctctgcccttcctttgttggggtattg

SEQ ID NO: 25848 - DNA, 80 bp, synthetic construct
  source 1..80: mol_type = other DNA
gagtgccgtgctccaggtggccactggcgtcatctctacgctgcaggcaagacatcacccccctgcttctcctcccctag

SEQ ID NO: 25849 - DNA, 80 bp, synthetic construct; identical to SEQ ID NO: 10371
  source 1..80: mol_type = other DNA

SEQ ID NO: 25850 - DNA, 80 bp, synthetic construct
  source 1..80: mol_type = other DNA
cccagctactcaggaggcggaggcagaagaatagcttgaacccaggagatggaagttgtagtgagccaagatcatgccgc

SEQ ID NO: 25851 - DNA, 80 bp, synthetic construct
  source 1..80: mol_type = other DNA
aactcttgggctcaagtgatcttcccacctcagtctccagagtagctgggactacaaacatgcgccaccacgcctggcta

SEQ ID NO: 25852 - DNA, 80 bp, synthetic construct
  source 1..80: mol_type = other DNA
ggaaatttatgtatataacagctagagaatgcataatgaaccctatgtaccgacacccagcttcaatgataatcaactca

SEQ ID NO: 25853 - DNA, 80 bp, synthetic construct; identical to SEQ ID NO: 10372
  source 1..80: mol_type = other DNA

SEQ ID NO: 25854 - DNA, 80 bp, synthetic construct
  source 1..80: mol_type = other DNA
cccagctactcaggaggctgaggcaggagaattgcttgaacccgggagatggagactgcagtgagcagagatcacgccac

SEQ ID NO: 25855 - DNA, 80 bp, synthetic construct
  source 1..80: mol_type = other DNA
tggctgaatcagagactctgggggtgctccccagcaatttgtatttttcttagtaaattctccagtggctaggcctggtg

SEQ ID NO: 25856 - DNA, 80 bp, synthetic construct
  source 1..80: mol_type = other DNA
cttaggagactgatgtgggaggatcccttgagcccaggagctcaaggatgcagagagccaggattgtgccattgcactcc

SEQ ID NO: 25857 - DNA, 80 bp, synthetic construct; identical to SEQ ID NO: 10373
  source 1..80: mol_type = other DNA

SEQ ID NO: 25858 - DNA, 80 bp, synthetic construct
  source 1..80: mol_type = other DNA
cctgggcctggcagcttcagatcccagggtccccagggctcaccactcgcccacctgtgcccccagattcaccaagagaa

SEQ ID NO: 25859 - DNA, 80 bp, synthetic construct
  source 1..80: mol_type = other DNA
ggcccagcctggtggctcacccctgtaatcccagcactttgggaagccgaggtgggcgggtcacttgaggccaggagttc

SEQ ID NO: 25860 - DNA, 80 bp, synthetic construct
  source 1..80: mol_type = other DNA
gaggtgagatcgcgccactgcactccagcctgggcaacagagcgagactttgtgtcaaaaagaaaaaaaaaaaaaaaagg

SEQ ID NO: 25861 - DNA, 80 bp, synthetic construct; identical to SEQ ID NO: 10374
  source 1..80: mol_type = other DNA

SEQ ID NO: 25862 - DNA, 80 bp, synthetic construct
  source 1..80: mol_type = other DNA
tcgactggcagatccgccaggtgcgggcgctactgcaggcacagcaggcctaggtcctcccacacctgccccctaataaa

SEQ ID NO: 25863 - DNA, 80 bp, synthetic construct
  source 1..80: mol_type = other DNA
gaggatgcttgaggccaggagtttgacacagcctgggcaacacagggagacccccatctctactcaataataaaacaaat

SEQ ID NO: 25864 - DNA, 80 bp, synthetic construct; identical to SEQ ID NO: 10375
  source 1..80: mol_type = other DNA

SEQ ID NO: 25865 - DNA, 80 bp, synthetic construct
  source 1..80: mol_type = other DNA
gaagactccaactaccatattaaaaaaaacatgaatgaaagcaaaaacaaaacaactagccaaactgggcgcggtggctc

SEQ ID NO: 25866 - DNA, 80 bp, synthetic construct
  source 1..80: mol_type = other DNA
ccagcctgggccacagagcaagactctgtctaaaaacaacaacaaaaactagccagttgtggtggtatgtgcctatagtc

SEQ ID NO: 25867 - DNA, 80 bp, synthetic construct
  source 1..80: mol_type = other DNA
aacaacaaagacaaacaagctaaactcaaggaagaatgaataacccctaccacgtgattttgggagcaatgacagatttt

SEQ ID NO: 25868 - DNA, 80 bp, synthetic construct; identical to SEQ ID NO: 10376
  source 1..80: mol_type = other DNA

SEQ ID NO: 25869 - DNA, 80 bp, synthetic construct
  source 1..80: mol_type = other DNA
atcttccagagcagttgttctcagactgtcattcctggccatcataattttcaccaaggagcttagaaatgcaaactttc

SEQ ID NO: 25870 - DNA, 80 bp, synthetic construct
  source 1..80: mol_type = other DNA
aattcttattttaattaggaaacataatattgtaaactatggtgtacagtgtttcaatatttaattcatttaaaaaagat

SEQ ID NO: 25871 - DNA, 80 bp, synthetic construct
  source 1..80: mol_type = other DNA
aattaaacacgttctagccatttgggttttgaaatgctaggtaaaatactaagttaaagatgtgaggaatcaatattatc

SEQ ID NO: 25872 - DNA, 80 bp, synthetic construct; identical to SEQ ID NO: 10377
  source 1..80: mol_type = other DNA

SEQ ID NO: 25873 - DNA, 80 bp, synthetic construct
  source 1..80: mol_type = other DNA
aaaagagattttaataaaatctttacagattatgtgaaaatgcaaataatgtatatataatttatataacgtataacata

SEQ ID NO: 25874 - DNA, 80 bp, synthetic construct
  source 1..80: mol_type = other DNA
aacagataattatttctgatgaaaattatatatgactacagtcatccttagtatttgtggggagttggttctaggacctc

SEQ ID NO: 25875 - DNA, 80 bp, synthetic construct
  source 1..80: mol_type = other DNA
aaaaaggtctgtatatgtttagtatagatgtatttatttatcaaatgtttttgactcgtggttggttaaatccatggatg

SEQ ID NO: 25876 - DNA, 80 bp, synthetic construct
  source 1..80: mol_type = other DNA
agtgcaatggcgccatcttggctcaccgcaacctctgcctcctgggttcaagagattctccctcctcagactcccgagta

SEQ ID NO: 25877 - DNA, 80 bp, synthetic construct
  source 1..80: mol_type = other DNA
caccatccctggccaatacattttaatgggaaacaacattaagtcattgtttcagccacttaccttgaaagcagtttatt

SEQ ID NO: 25878 - DNA, 80 bp, synthetic construct; identical to SEQ ID NO: 10378
  source 1..80: mol_type = other DNA

SEQ ID NO: 25879 - DNA, 80 bp, synthetic construct
  source 1..80: mol_type = other DNA
gtcattaaactaacaaaaaattttaagtaatttcatgtatactgaaaataggggctggcaactcttttaatatatacttt

SEQ ID NO: 25880 - DNA, 80 bp, synthetic construct
  source 1..80: mol_type = other DNA
tgttcacaatgcttggacattggaaaaatatttgaaagtttacataaagtgtttcactttcatgtaaaaatggcttttaa

SEQ ID NO: 25881 - DNA, 80 bp, synthetic construct
  source 1..80: mol_type = other DNA
atataaaataaaaactctaaattccagaaaaaatttttcttgataaataaatttttggtaatttaaaatttagaccatga

SEQ ID NO: 25882 - DNA, 80 bp, synthetic construct
  source 1..80: mol_type = other DNA
tacaatttagtattttgaaatgctttttagttcacaaatgctctataaatctaaatctgctttagaaatagggggcattg

SEQ ID NO: 25883 - DNA, 80 bp, synthetic construct; identical to SEQ ID NO: 10379
  source 1..80: mol_type = other DNA

SEQ ID NO: 25884 - DNA, 80 bp, synthetic construct
  source 1..80: mol_type = other DNA
acttatttaaaatttgagaggataaagacctttatggtaggcaatgtatttgctttacaattgattaattaaaacataat

SEQ ID NO: 25885 - DNA, 80 bp, synthetic construct
  source 1..80: mol_type = other DNA
atgtttcttttcatgcctcatggtgtctgaaagtccacaaatataatgataatagcaatgttgattgtcattctctaagt

SEQ ID NO: 25886 - DNA, 80 bp, synthetic construct
  source 1..80: mol_type = other DNA
tagaaataaagaaccctaacttgtagaaagagttttattattattttttcttctttatagtggtaacattttgtgttttg

SEQ ID NO: 25887 - DNA, 80 bp, synthetic construct; identical to SEQ ID NO: 10380
  source 1..80: mol_type = other DNA

SEQ ID NO: 25888 - DNA, 80 bp, synthetic construct
  source 1..80: mol_type = other DNA
ttaataggattttaaatcctcaatattaataaagcttacaattctcgtaactatttttcagagaaatatcttcattcttg

SEQ ID NO: 25889 - DNA, 80 bp, synthetic construct
  source 1..80: mol_type = other DNA
aatgtgttaaaaataatgtgttacattagttatcaccccaataaagcttattaaatttgtatttaataaatatataaata

SEQ ID NO: 25890 - DNA, 80 bp, synthetic construct
  source 1..80: mol_type = other DNA
gtttctccaaagcaaatctctgtgtgcaggggcaaagcaaatttgcaagtacaaatgtttaaaagaaaaggtaaaaaata

SEQ ID NO: 25891 - DNA, 80 bp, synthetic construct
  source 1..80: mol_type = other DNA
aaacctttgtgatgatcaacttccactcaataagtagtaaatatattttctctcttatgattttcattttctttacacta

SEQ ID NO: 25892 - DNA, 80 bp, synthetic construct; identical to SEQ ID NO: 10381
  source 1..80: mol_type = other DNA

SEQ ID NO: 25893 - DNA, 80 bp, synthetic construct
  source 1..80: mol_type = other DNA
tatattcctgatgcgaatgaaccagcaaacaaaagcagctatttggaagaaagaccctacctcagaaatgaaattattat

SEQ ID NO: 25894 - DNA, 80 bp, synthetic construct
  source 1..80: mol_type = other DNA
tttaaattctttagcatgatgcacaagacacttcatctctggttcctgcttatctggcttctctccactttgccttcaca

SEQ ID NO: 25895 - DNA, 80 bp, synthetic construct; identical to SEQ ID NO: 10382
  source 1..80: mol_type = other DNA

SEQ ID NO: 25896 - DNA, 80 bp, synthetic construct
  source 1..80: mol_type = other DNA
tttgtgggtaattgctattaggaatatttcacattaattttcattaataaacattttgcaaaccagtcaccctccccacc

SEQ ID NO: 25897 - DNA, 80 bp, synthetic construct
  source 1..80: mol_type = other DNA
caagtacattttccactctgtaggaaaagaaactgtttgaaaattctgcaagggaaatggccttcaatgaaattcaacat

SEQ ID NO: 25898 - DNA, 80 bp, synthetic construct
  source 1..80: mol_type = other DNA
cactcctattcaacatagtattgggagttctggccagggcaatcagacaagagaaagaaagggtattcaaataaaaagaa

SEQ ID NO: 25899 - DNA, 80 bp, synthetic construct
  source 1..80: mol_type = other DNA
gacaagcagagagccaaatcatgaatgaactccattcacaattgctacaaagagaataaactatgtaggaacacagctaa

SEQ ID NO: 25900 - DNA, 80 bp, synthetic construct; identical to SEQ ID NO: 10383
  source 1..80: mol_type = other DNA

SEQ ID NO: 25901 - DNA, 80 bp, synthetic construct
  source 1..80: mol_type = other DNA
atcatacatcgacaaccatttgttctttgacaaacctgaaaaatcaagaatggggaaaagattccctatctaataaatgg

SEQ ID NO: 25902 - DNA, 80 bp, synthetic construct
  source 1..80: mol_type = other DNA
gcatggacaaagacttcatgacgaaaatgtcaaaagcaattgcagccaaagccaaaattgacaaatagggtataattaaa

SEQ ID NO: 25903 - DNA, 80 bp, synthetic construct; identical to SEQ ID NO: 10384
  source 1..80: mol_type = other DNA

SEQ ID NO: 25904 - DNA, 80 bp, synthetic construct
  source 1..80: mol_type = other DNA
tagttcaaccattgtggaagacagtgtggcaatgcctcaaggatctggaaccagaaatatcatttgacccagcaatccca

SEQ ID NO: 25905 - DNA, 80 bp, synthetic construct
  source 1..80: mol_type = other DNA
aaaccctgtctatactaaaaatacaaaattagccaggcgtggtggcatatgcttgtaatcccagctaatcccagctactc

SEQ ID NO: 25906 - DNA, 80 bp, synthetic construct
  source 1..80: mol_type = other DNA
ttacaacagcaaagacatgaaaccaacccaaaagcctatcagtgatagactggataaagaaaatgtggcacatatatacc

SEQ ID NO: 25907 - DNA, 80 bp, synthetic construct; identical to SEQ ID NO: 10385
  source 1..80: mol_type = other DNA

SEQ ID NO: 25908 - DNA, 80 bp, synthetic construct
  source 1..80: mol_type = other DNA
gaccaaatggctcaatatacataaaacagttaaaatctggcagattataaatttttatgtggtatgaaaaataataaata

SEQ ID NO: 25909 - DNA, 80 bp, synthetic construct
  source 1..80: mol_type = other DNA
tagcaattttagtataaattttcaaagcatattaataggacataaatctaataagaggttagaggctctctacataaaca

SEQ ID NO: 25910 - DNA, 80 bp, synthetic construct
  source 1..80: mol_type = other DNA
atgtcaccaagtcttgttgtgattgtaaaacagagacaacttgctttgtgtgtgggttttggggagatagaaaagatggg

SEQ ID NO: 25911 - DNA, 80 bp, synthetic construct
  source 1..80: mol_type = other DNA
cgttttctcttctatgaaaataataatgataagttttttgtgtgtggttgttgttttttgtctagccaaaaaggacactg

SEQ ID NO: 25912 - DNA, 80 bp, synthetic construct; identical to SEQ ID NO: 10386
  source 1..80: mol_type = other DNA

SEQ ID NO: 25913 - DNA, 80 bp, synthetic construct
  source 1..80: mol_type = other DNA
atgttctcacatggaagaatgggggagttccctcaggattttttttttaaagcattaatcccttttaaacaggctttttc

SEQ ID NO: 25914 - DNA, 80 bp, synthetic construct
  source 1..80: mol_type = other DNA
caaaggtgaattaacccacaattgctagtggaggtgaagataggagagattatactgatatttaattaagtctgccatca

SEQ ID NO: 25915 - DNA, 80 bp, synthetic construct
  source 1..80: mol_type = other DNA
tttgagcatggggtaagaacatagagtgaactagtataaacttaggctaggctttgtgaagacttcatgtagtttaaagt

SEQ ID NO: 25916 - DNA, 80 bp, synthetic construct; identical to SEQ ID NO: 10387
  source 1..80: mol_type = other DNA

SEQ ID NO: 25917 - DNA, 80 bp, synthetic construct
  source 1..80: mol_type = other DNA
acagtgggtcatttttctacttctttttcttttttcaaatagttatgatattgtaatattgaatagttgtatccttgtgg

SEQ ID NO: 25918 - DNA, 80 bp, synthetic construct
  source 1..80: mol_type = other DNA
ttattgctcaaacgtaaactattgctgaggtggtacttacaaagcttattgggcttccatcttgagtaaggtaaacattt

SEQ ID NO: 25919 - DNA, 80 bp, synthetic construct
  source 1..80: mol_type = other DNA
tataagatatggcaagaacatgggcccttaatctttttaatctgtccacactatttatttataaaacctaaatccttgta

SEQ ID NO: 25920 - DNA, 80 bp, synthetic construct; identical to SEQ ID NO: 10388
  source 1..80: mol_type = other DNA

SEQ ID NO: 25921 - DNA, 80 bp, synthetic construct
  source 1..80: mol_type = other DNA
atcatcgcataaattgcaatagatcacacatgatttaaccagaagggctcagcttggcttataataaataagtcacttaa

SEQ ID NO: 25922 - DNA, 80 bp, synthetic construct
  source 1..80: mol_type = other DNA
aaaaggatggcactgttgctctgccaagagaagcagaatcccatccctggttatatattatgtcacagaacatttggtaa

SEQ ID NO: 25923 - DNA, 80 bp, synthetic construct
  source 1..80: mol_type = other DNA
tgcccatatttgctgaaactagcccacaacttatctaaacaagaaatggaaaacatctactgtattatgataccaaatat

SEQ ID NO: 25924 - DNA, 80 bp, synthetic construct; identical to SEQ ID NO: 10389
  source 1..80: mol_type = other DNA

SEQ ID NO: 25925 - DNA, 80 bp, synthetic construct
  source 1..80: mol_type = other DNA
taatattatatcatatcatattatgtaatgtgcgtgtgtgctcttagataaatatttccaagttcagaatatttagaaat

SEQ ID NO: 25926 - DNA, 80 bp, synthetic construct
  source 1..80: mol_type = other DNA
attaattccacaaagattatctgaataacaagtagggctctattttagtttcctttttctattttatatttccacagggt

SEQ ID NO: 25927 - DNA, 80 bp, synthetic construct
  source 1..80: mol_type = other DNA
gttattttaaagtcagagatacatatagtaactccatcaccgtgccttggagagtatacttcatcccttttttacataac

SEQ ID NO: 25928 - DNA, 80 bp, synthetic construct; identical to SEQ ID NO: 10390
  source 1..80: mol_type = other DNA

SEQ ID NO: 25929 - DNA, 80 bp, synthetic construct
  source 1..80: mol_type = other DNA
atgtggatatatattgatgatatgaaacgtatgtgaactgggcttagtggtttgagcactgagaaccactatgttattta

SEQ ID NO: 25930 - DNA, 80 bp, synthetic construct
  source 1..80: mol_type = other DNA
agggtggtgttacttttgtttcattatcttcccttatcctaggcccaaaaatttcacaataaggaatcatatcacttact

SEQ ID NO: 25931 - DNA, 80 bp, synthetic construct
  source 1..80: mol_type = other DNA
tatgtaataatctcattactccaggaaacttctttcagtcccacttttaagtttagctaacatctcatagatctgtttac

SEQ ID NO: 25932 - DNA, 80 bp, synthetic construct
  source 1..80: mol_type = other DNA
tagggaattagatagagttccccagtaaatccctccttttttcatttcttctctttgctctagctgttacttttgcttgg

SEQ ID NO: 25933 - DNA, 80 bp, synthetic construct; identical to SEQ ID NO: 10391
  source 1..80: mol_type = other DNA

SEQ ID NO: 25934 - DNA, 80 bp, synthetic construct
  source 1..80: mol_type = other DNA
ccgagtctaaaaaaagggccacaaattgttcagaagaaggagcagtcattacatgcttgaaaggaaattacctgatggaa

SEQ ID NO: 25935 - DNA, 80 bp, synthetic construct
  source 1..80: mol_type = other DNA
ggagatacaattgaatatatggacttaggatatcagtgttgtcacattaaggtctaacagccctggaaaattgtttgaaa

SEQ ID NO: 25936 - DNA, 80 bp, synthetic construct
  source 1..80: mol_type = other DNA
ttttcagccttttctaacataaacaaaagattaaagtgacaaagataagtaattcattccttgctcttattctaccttat

SEQ ID NO: 25937 - DNA, 80 bp, synthetic construct
  source 1..80: mol_type = other DNA
ccaaagtctctaagtccagtagaatttggaagaagtaaacattcatccagtatggttatcaagaggcagatttttgccat

SEQ ID NO: 25938 - DNA, 80 bp, synthetic construct; identical to SEQ ID NO: 10392
  source 1..80: mol_type = other DNA

SEQ ID NO: 25939 - DNA, 80 bp, synthetic construct
  source 1..80: mol_type = other DNA
aacaagtacagctgctggaggctggatattaaaccaggagaaccgatggtctgattcagtacagcaattcttatgttcct

SEQ ID NO: 25940 - DNA, 80 bp, synthetic construct
  source 1..80: mol_type = other DNA
agagcaaagcactaatgacactgccagtgagtgttcatttaacaaactttgtcctatgaaataactcatgacataccaaa

SEQ ID NO: 25941 - DNA, 80 bp, synthetic construct
  source 1..80: mol_type = other DNA
acaaaataacaagagagacaattctgtctgtatcaattaaaagctttgtgaaatacaacatatttccaccatgcacaatt

SEQ ID NO: 25942 - DNA, 80 bp, synthetic construct; identical to SEQ ID NO: 10393
  source 1..80: mol_type = other DNA

SEQ ID NO: 25943 - DNA, 80 bp, synthetic construct
  source 1..80: mol_type = other DNA
aggatgccctgatatgaagaaaaattatgcatctagcttcaaaaataaagtattcttggaattatagaatcctagtgctg

SEQ ID NO: 25944 - DNA, 80 bp, synthetic construct
  source 1..80: mol_type = other DNA
tccatgtcacttaaatgatattctattgtaaaataaggaatagaagggctataagaagacctaaatttagaaaacagatt

SEQ ID NO: 25945 - DNA, 80 bp, synthetic construct; identical to SEQ ID NO: 10394
  source 1..80: mol_type = other DNA

SEQ ID NO: 25946 - DNA, 80 bp, synthetic construct
  source 1..80: mol_type = other DNA
tactgacctccatggaggggaaggagctgaagattgattttaaccatgcgaacaatgattcaatcgatcatgcctaaata

SEQ ID NO: 25947 - DNA, 80 bp, synthetic construct
  source 1..80: mol_type = other DNA
gtctcattcctcagctggttctaatttgtaactttttgctataagaaaactgtcattgtaattacagggcttttctgagt

SEQ ID NO: 25948 - DNA, 80 bp, synthetic construct
  source 1..80: mol_type = other DNA
actttctctaactctgggtaagggagctttgtaatatttaatagaaaatgaagtgaagacttgaggagagaagggatgag

SEQ ID NO: 25949 - DNA, 80 bp, synthetic construct; identical to SEQ ID NO: 10395
  source 1..80: mol_type = other DNA

SEQ ID NO: 25950 - DNA, 80 bp, synthetic construct
  source 1..80: mol_type = other DNA
ggccaacatggtgaaaccccgtctttaataaaaatacaaaaattagctgggagtgatggcgggcacctgtaatcccagct

SEQ ID NO: 25951 - DNA, 80 bp, synthetic construct
  source 1..80: mol_type = other DNA
agatcatctgtctgtagtgctgggaataactacagatggttcaaggtgaccaattaggaggctactaaaataatttaggt

SEQ ID NO: 25952 - DNA, 80 bp, synthetic construct; identical to SEQ ID NO: 10396
  source 1..80: mol_type = other DNA

SEQ ID NO: 25953 - DNA, 80 bp, synthetic construct
  source 1..80: mol_type = other DNA
tgtgatcccagctactcgggaggctgaggcaggagaatggcttgaacctgggagacagaggttgcagtgaactgagatct

SEQ ID NO: 25954 - DNA, 80 bp, synthetic construct
  source 1..80: mol_type = other DNA
gtagttactcttgattttactgatagaatctctgcgtttcaattagatccaccagttcttacttaacatgcattttttta

SEQ ID NO: 25955 - DNA, 80 bp, synthetic construct
  source 1..80: mol_type = other DNA
aatctaagtaacggaaaattttcttttaggaaaaattacccggaaaagagttaaccgaaacaatttaagaataaaaaatc

SEQ ID NO: 25956 - DNA, 80 bp, synthetic construct
  source 1..80: mol_type = other DNA
attattgaaaaacaagatgccattataagtggaaggtagcaaacatatctttattgttacctctctaatattaatataga

SEQ ID NO: 25957 - DNA, 80 bp, synthetic construct; identical to SEQ ID NO: 10397
  source 1..80: mol_type = other DNA

SEQ ID NO: 25958 - DNA, 80 bp, synthetic construct
  source 1..80: mol_type = other DNA
tagtttaatacagttccatttgtctaaatttggttttgttacctgtgcttttacagtcttagccataacatctttgccta

SEQ ID NO: 25959 - DNA, 80 bp, synthetic construct
  source 1..80: mol_type = other DNA
tataccaattcataggatatacaatgcctatatttccccaaagcatagctccttgtcctattctcctcctaccatctctt

SEQ ID NO: 25960 - DNA, 80 bp, synthetic construct
  source 1..80: mol_type = other DNA
gactcatagtgtgcaggcaagaaatatgagtaaaataagtaagaaacatcacaactgatgtgtggttacctcttcgtcct

SEQ ID NO: 25961 - DNA, 80 bp, synthetic construct; identical to SEQ ID NO: 10398
  source 1..80: mol_type = other DNA

SEQ ID NO: 25962 - DNA, 80 bp, synthetic construct
  source 1..80: mol_type = other DNA
ttgcagtgagccaagattgcgccactgcactccagcctgggcgatggagcgacactccatctcaaataaaaaaaaaaaaa

SEQ ID NO: 25963 - DNA, 80 bp, synthetic construct
  source 1..80: mol_type = other DNA
ccacaaggcaatgtcctaggtaatttgttagttttataaaaccttttctttcatggttttctacaagcttctaagatgaa

SEQ ID NO: 25964 - DNA, 80 bp, synthetic construct
  source 1..80: mol_type = other DNA
tcaaaatcaaggcattggcaactttggtgtctgatgagagggcttacttcttggttcatagacagcagtctttttgctgt

SEQ ID NO: 25965 - DNA, 80 bp, synthetic construct; identical to SEQ ID NO: 10399
  source 1..80: mol_type = other DNA

SEQ ID NO: 25966 - DNA, 80 bp, synthetic construct
  source 1..80: mol_type = other DNA
aatcagtcttatctattttttcatgtccagtgcctatcataaacctaggaaaatatacactgaaaaaaatggtttttgca

SEQ ID NO: 25967 - DNA, 80 bp, synthetic construct
  source 1..80: mol_type = other DNA
tcacattgaaaactcacactgattcttcaagtgtcgtgacatagcaaaacgtttgacttcaatgtccttcatctgctgat

SEQ ID NO: 25968 - DNA, 80 bp, synthetic construct
  source 1..80: mol_type = other DNA
aaggcagaaaaaattagttaccaaagcaatgtgaactgtataataatgcagctgtgcatagagaatgtaagaggattatt

SEQ ID NO: 25969 - DNA, 80 bp, synthetic construct
  source 1..80: mol_type = other DNA
cttagttaaataataaggtttgctatttttgggcaggaatcaaggtacctagagggacaggattataatagcatacctta

SEQ ID NO: 25970 - DNA, 80 bp, synthetic construct; identical to SEQ ID NO: 10400
  source 1..80: mol_type = other DNA

SEQ ID NO: 25971 - DNA, 80 bp, synthetic construct
  source 1..80: mol_type = other DNA
aaattacacttcatttaaaaaaatactaggaagaagacatactagctgcacataattttcaaactttaagaaaaattaac

SEQ ID NO: 25972 - DNA, 80 bp, synthetic construct
  source 1..80: mol_type = other DNA
acacaaaaatgtaaaactgaatcctgcatataaggtgagacttcttgaatgatttctggtatcagaagtcttcctttact

SEQ ID NO: 25973 - DNA, 80 bp, synthetic construct
  source 1..80: mol_type = other DNA
tattttcaccgttgctgagatgtagtgtgtttttttaatcctaaatttctaactgggaatcaagtgcccacttaaagcat

SEQ ID NO: 25974 - DNA, 80 bp, synthetic construct; identical to SEQ ID NO: 10401
  source 1..80: mol_type = other DNA

SEQ ID NO: 25975 - DNA, 80 bp, synthetic construct
  source 1..80: mol_type = other DNA
ttgcataattagctggcaagttaaagaggagatacgaggcaatgtttagcctcctccaacttcagaaaatgaattgggct

SEQ ID NO: 25976 - DNA, 80 bp, synthetic construct
  source 1..80: mol_type = other DNA
ccttctttcttccctcccttccttccttccctccttcccttccttccttccttccttcctccctccttcctccctccctc

SEQ ID NO: 25977 - DNA, 80 bp, synthetic construct; identical to SEQ ID NO: 10402
  source 1..80: mol_type = other DNA

SEQ ID NO: 25978 - DNA, 80 bp, synthetic construct
  source 1..80: mol_type = other DNA
tttgctcttattcacgtctgtttgctttagtctgtgccataaaattgatggcagcaagcccacagtttcagggatgagtc

SEQ ID NO: 25979 - DNA, 80 bp, synthetic construct
  source 1..80: mol_type = other DNA
atgggtagtttcagcatatcaaataattgttcttgaattcaaagttattgactttatatcactattcactggaggtccca

SEQ ID NO: 25980 - DNA, 80 bp, synthetic construct
  source 1..80: mol_type = other DNA
aatagcagacaacatgtctgtttttttgactcttgtagacttgcatagagtcagtgtctgataaaaggctgtttggtaaa

SEQ ID NO: 25981 - DNA, 80 bp, synthetic construct; identical to SEQ ID NO: 10403
  source 1..80: mol_type = other DNA

SEQ ID NO: 25982 - DNA, 80 bp, synthetic construct
  source 1..80: mol_type = other DNA
aatatcacacaacttgaatggctgaggtaggtgaattttcaaatctcaaagcctacaatgtcaaaaacataaatctggtg

SEQ ID NO: 25983 - DNA, 80 bp, synthetic construct
  source 1..80: mol_type = other DNA
ttctagatatgcctgggcaacatagtgagctccccatctgaacaaaaaaagaagtaagcagtcttctcatgcagtttttc

SEQ ID NO: 25984 - DNA, 80 bp, synthetic construct
  source 1..80: mol_type = other DNA
agtttttaggataatatctgtggctgtgggtgactagctcatctccttatttctttagtacttattcaaaacatatctat

SEQ ID NO: 25985 - DNA, 80 bp, synthetic construct; identical to SEQ ID NO: 10404
  source 1..80: mol_type = other DNA

SEQ ID NO: 25986 - DNA, 80 bp, synthetic construct
  source 1..80: mol_type = other DNA
ttaacttccttttatgaacctacactcctgcctagcagtgaatttaggttaaaaattttaaggtgttgaacctagtatca

SEQ ID NO: 25987 - DNA, 80 bp, synthetic construct
  source 1..80: mol_type = other DNA
aaccaaatgtgccacattaaggtgcatagacagcaatgacactgtttatggaggaagctgtcagcacaacaaataaacat

SEQ ID NO: 25988 - DNA, 80 bp, synthetic construct
  source 1..80: mol_type = other DNA
atctatattaatattagagaggtaacaataaagatatgtgtgctacctaccatataaaatgccatatttttccacaattc

SEQ ID NO: 25989 - DNA, 80 bp, synthetic construct
  source 1..80: mol_type = other DNA
ctattcttaaattatttcaggtaacaattttctgggtattttttcctccaaaattttttttctgttacttgaatactttt

SEQ ID NO: 25990 - DNA, 80 bp, synthetic construct; identical to SEQ ID NO: 10405
  source 1..80: mol_type = other DNA

SEQ ID NO: 25991 - DNA, 80 bp, synthetic construct
  source 1..80: mol_type = other DNA
gacataattttaattgtacttgacaccagatgtattcactactgctactctctctctgtatatatagacctcaagactaa

SEQ ID NO: 25992 - DNA, 80 bp, synthetic construct
  source 1..80: mol_type = other DNA
tgacatgtgccaggaatgtgggcaatggatataacagtaaacagaacctgtaagtcactgatctctgagatccatcagtt

SEQ ID NO: 25993 - DNA, 80 bp, synthetic construct
  source 1..80: mol_type = other DNA
tgaagaagggtattgaaagccaaccttccttcctgcccttcttggctacagctttctagcttttgcaaacaaacagaaac

SEQ ID NO: 25994 - DNA, 80 bp, synthetic construct; identical to SEQ ID NO: 10406
  source 1..80: mol_type = other DNA

SEQ ID NO: 25995 - DNA, 80 bp, synthetic construct; identical to SEQ ID NO: 10424
  source 1..80: mol_type = other DNA

SEQ ID NO: 25996 - DNA, 80 bp, synthetic construct
  source 1..80: mol_type = other DNA
gagcatggtaactttataagaaacatgagaagtattcctgccaatagtatatttatcttgtttatgttgacctggtattc

SEQ ID NO: 25997 - DNA, 80 bp, synthetic construct
  source 1..80: mol_type = other DNA
atggtgattcatatctgtctctccacattctttcatccacaatatcttgctggggtctagtcataatattacacacactg

SEQ ID NO: 25998 - DNA, 80 bp, synthetic construct; identical to SEQ ID NO: 10407
  source 1..80: mol_type = other DNA

SEQ ID NO: 25999 - DNA, 80 bp, synthetic construct
  source 1..80: mol_type = other DNA
taaaattaaaaaatcactgaagagttattatccaggcagtgctaagatctggcttatattttgaaaggattgctccaaca

SEQ ID NO: 26000 - DNA, 80 bp, synthetic construct
  source 1..80: mol_type = other DNA
gttacttgcagatccattttaaagatcaagctgatagaatttgctgatgtggaatggggaaaaattttaaaaataggaaa

SEQ ID NO: 26001 - DNA, 80 bp, synthetic construct
  source 1..80: mol_type = other DNA
caggctggagtaccgtggcgcgatctcggctcactgcaagctccgcctcccgggttcacgccattctcctgtctcaccct

SEQ ID NO: 26002 - DNA, 80 bp, synthetic construct; identical to SEQ ID NO: 10408
  source 1..80: mol_type = other DNA

SEQ ID NO: 26003 - DNA, 80 bp, synthetic construct
  source 1..80: mol_type = other DNA
ttagagcttacatgttggtgaaagagagaaagatgagcaggatcaatccgttaagtaaatacatgctaaggaaaattcta

SEQ ID NO: 26004 - DNA, 80 bp, synthetic construct
  source 1..80: mol_type = other DNA
gagccaaaacaacactgtcacacttaatacatttatttaacaataatctgttaatatcatccaattcccagactatattt

SEQ ID NO: 26005 - DNA, 80 bp, synthetic construct
  source 1..80: mol_type = other DNA
gttatttttctaaaggtcaagttgacagaatttactgattaactggcagtggagaatgatgatcaatattgaccttgaat

SEQ ID NO: 26006 - DNA, 80 bp, synthetic construct; identical to SEQ ID NO: 10409
  source 1..80: mol_type = other DNA

SEQ ID NO: 26007 - DNA, 80 bp, synthetic construct
  source 1..80: mol_type = other DNA
aaaaactctgatgatttctgggtttccatgactccactgaaagagatgcttcaaggaggagagagactacacacacatca

SEQ ID NO: 26008 - DNA, 80 bp, synthetic construct
  source 1..80: mol_type = other DNA
tgctgtcaagaagagtatgaaaatgggaaagtagctattaaacaatgtgaagtctttttttcagattacatatttttttt

SEQ ID NO: 26009 - DNA, 80 bp, synthetic construct
  source 1..80: mol_type = other DNA
tgcaactggagggaggtagagaggacttggccagggtttttgataagttaattgattttgcgatctgattaattttgggt

SEQ ID NO: 26010 - DNA, 80 bp, synthetic construct; identical to SEQ ID NO: 10410
  source 1..80: mol_type = other DNA

SEQ ID NO: 26011 - DNA, 80 bp, synthetic construct
  source 1..80: mol_type = other DNA
gtttacaagatttttagtagatagaaggaaagtaagctagatgctaaaacatattcaatggatgagtaagattcagcagg

SEQ ID NO: 26012 - DNA, 80 bp, synthetic construct
  source 1..80: mol_type = other DNA
ctatggtacacgaatagcagaataaaaaagccatcacttgagaagggtgaagatgaagtagaatcttcacgatcagtcag

SEQ ID NO: 26013 - DNA, 80 bp, synthetic construct
  source 1..80: mol_type = other DNA
gcatcagtgtaaaagaagtgttcataagttgaaactgcagttagttttgctgccagattgcaaatcacaaaagaagagtt

SEQ ID NO: 26014 - DNA, 80 bp, synthetic construct; identical to SEQ ID NO: 10411
  source 1..80: mol_type = other DNA

SEQ ID NO: 26015 - DNA, 80 bp, synthetic construct
  source 1..80: mol_type = other DNA
ttttcagtccgacatacgttcttaactcatgaaatggccctggatattgctaagtaagaaaactgaataacattcattga

SEQ ID NO: 26016 - DNA, 80 bp, synthetic construct
  source 1..80: mol_type = other DNA
gtgtctcctctcattctccctgtcagctttcttactctcttctatgccattctctcttctgcacacaaaatgatttttct

SEQ ID NO: 26017 - DNA, 80 bp, synthetic construct
  source 1..80: mol_type = other DNA
tctctttctctatcacctctcggtctttgcctgtactgtttcatcttaccccaaaactttttatttctttaagaaaggtt

SEQ ID NO: 26018 - DNA, 80 bp, synthetic construct; identical to SEQ ID NO: 10412
  source 1..80: mol_type = other DNA

SEQ ID NO: 26019 - DNA, 80 bp, synthetic construct
  source 1..80: mol_type = other DNA
atatagttttttaaatctgcctaaataatagccaaatcataaatgaagtattattctaattgtttaatggccatatttgg

SEQ ID NO: 26020 - DNA, 80 bp, synthetic construct
  source 1..80: mol_type = other DNA
actttaaaacaactatgatcgatcatattttccttaagaaattattacttttttggggggttggtggagcggagtaggaa

SEQ ID NO: 26021 - DNA, 80 bp, synthetic construct
  source 1..80: mol_type = other DNA
tttttataagttcattgcaaaaaccttgaagattgaggtaaattataattgaattataatgtttgtctacctttctgaca

SEQ ID NO: 26022 - DNA, 80 bp, synthetic construct; identical to SEQ ID NO: 10413
  source 1..80: mol_type = other DNA

SEQ ID NO: 26023 - DNA, 80 bp, synthetic construct
  source 1..80: mol_type = other DNA
cttgcctcagcctccagagtacctgggactacaggcacatgccaccacacttggcaattttttttttgtacaatattttt

SEQ ID NO: 26024 - DNA, 80 bp, synthetic construct
  source 1..80: mol_type = other DNA
ttgtatgcttaacatttgttgatttgaatttcctttaatggaaactgacaacctggtatattgttgcttgtttttttttg

SEQ ID NO: 26025 - DNA, 80 bp, synthetic construct
  source 1..80: mol_type = other DNA
tggctaatttttggtatttttttagtagagacgaggtttcaccgtgttagtcaggatggtctcgatttcctgacctcgtg

SEQ ID NO: 26026 - DNA, 80 bp, synthetic construct
  source 1..80: mol_type = other DNA
aatatgtcaaatacatacctaatttttgcataccagatacctgtaccatatgaaaataatgagaaagtcatatattcctt

SEQ ID NO: 26027 - DNA, 80 bp, synthetic construct; identical to SEQ ID NO: 10414
  source 1..80: mol_type = other DNA

SEQ ID NO: 26028 - DNA, 80 bp, synthetic construct
  source 1..80: mol_type = other DNA
ctaattttgaatcacatctaggttgctataaatgtacttctaaagagccattcatatctacaaaacacgggcatatactg

SEQ ID NO: 26029 - DNA, 80 bp, synthetic construct
  source 1..80: mol_type = other DNA
tattatattaagtttaaaaagtaagaaagccaatgactatgcttactttatttaaaaagtaaatgatccatatgtatttc

SEQ ID NO: 26030 - DNA, 80 bp, synthetic construct; identical to SEQ ID NO: 10415
  source 1..80: mol_type = other DNA

SEQ ID NO: 26031 - DNA, 80 bp, synthetic construct
  source 1..80: mol_type = other DNA
tatgcactaaacatttaggatgaatgagcagattttaaattttgtatatgcaatgtgcattaaaatgttatttctcacta

SEQ ID NO: 26032 - DNA, 80 bp, synthetic construct
  source 1..80: mol_type = other DNA
taacacaagggtagcttactatcataatatagtactccccaatgataatgtacacaaatcctctaagagaagtgtcatgg

SEQ ID NO: 26033 - DNA, 80 bp, synthetic construct
  source 1..80: mol_type = other DNA
cactctttcgttagtattttacaggggtcagtagaattttacacattcctaggaaacttttatatgtttattattattga

SEQ ID NO: 26034 - DNA, 80 bp, synthetic construct; identical to SEQ ID NO: 10416
  source 1..80: mol_type = other DNA

SEQ ID NO: 26035 - DNA, 80 bp, synthetic construct
  source 1..80: mol_type = other DNA
tgcagataggcgtattttaagagattcactgagtactttgcatggattcatcacttaacattggttcttattttatcttt

SEQ ID NO: 26036 - DNA, 80 bp, synthetic construct
  source 1..80: mol_type = other DNA
gctctgttttggggctatctggagaattaagttcctccatttgaaatgaatggtaagtttttcaacattggcttccttag

SEQ ID NO: 26037 - DNA, 80 bp, synthetic construct
  source 1..80: mol_type = other DNA
agaggtttggctcaagattaatatataacaactctaactaaaatacgtagtggagtgaagtatcctttttcttctacatc

SEQ ID NO: 26038 - DNA, 80 bp, synthetic construct
  source 1..80: mol_type = other DNA
acacccaagaatcgaaactatcttgctcagaagtgaaaaagtaaaattataggtgaatttaaaattgaggattagaccgc

SEQ ID NO: 26039 - DNA, 80 bp, synthetic construct; identical to SEQ ID NO: 10417
  source 1..80: mol_type = other DNA

SEQ ID NO: 26040 - DNA, 80 bp, synthetic construct
  source 1..80: mol_type = other DNA
gaattctctgtgtctaccaaaaaacactgaactgacaaaaattgatttgctcttagaaaattctatttttggaattctgt

SEQ ID NO: 26041 - DNA, 80 bp, synthetic construct
  source 1..80: mol_type = other DNA
gtactgagcccagtgaggattaagaaataataatcaaaacagtaaatttagagtgacaaggtagctaggtggtctagtaa

SEQ ID NO: 26042 - DNA, 80 bp, synthetic construct; identical to SEQ ID NO: 10418
  source 1..80: mol_type = other DNA

SEQ ID NO: 26043 - DNA, 80 bp, synthetic construct
  source 1..80: mol_type = other DNA
aaatggatctcatgagtctttgatttttttttttgaggtcccactacgtttatcatgtattttatcaaatctttatcaca

SEQ ID NO: 26044 - DNA, 80 bp, synthetic construct
  source 1..80: mol_type = other DNA
ttaaactggatttagcatgggcatttacaattttctgtataatcacatctttatttcatttgaaaatttatctcttgttt

SEQ ID NO: 26045 - DNA, 80 bp, synthetic construct
  source 1..80: mol_type = other DNA
aatattctctcaaagaaagcataatacagtgaatatgcatatactctaatcgtgtgtgagtattggagaggtgcttcctt

SEQ ID NO: 26046 - DNA, 80 bp, synthetic construct; identical to SEQ ID NO: 10419
  source 1..80: mol_type = other DNA

SEQ ID NO: 26047 - DNA, 80 bp, synthetic construct
  source 1..80: mol_type = other DNA
tatgtagttgaaatctctctattgctgaatgaatttttatattatgcttaggtattaagtaatcaaatcattaggtttac

SEQ ID NO: 26048 - DNA, 80 bp, synthetic construct
  source 1..80: mol_type = other DNA
tggtttaccaatattttgtaaagtcaatgctatttacaaaataatatttattctttttgaaatctcattgaaaagtttat

SEQ ID NO: 26049 - DNA, 80 bp, synthetic construct
  source 1..80: mol_type = other DNA
aaggacaattataaaggtttaattttatatttagtagataatcatttatctgactctaatattatttattctttatatat

SEQ ID NO: 26050 - DNA, 80 bp, synthetic construct; identical to SEQ ID NO: 10420
  source 1..80: mol_type = other DNA

SEQ ID NO: 26051 - DNA, 80 bp, synthetic construct
  source 1..80: mol_type = other DNA
tggtttatgttattctcctctcattctctatttcagggttcattaatatgattcaaaatttttatgactaccttctttga

SEQ ID NO: 26052 - DNA, 80 bp, synthetic construct
  source 1..80: mol_type = other DNA
gctcttatgatgttaatccttactttcctcagctcactaatacttactggaaacctgaaacgtgcatgctgagccctgcc

SEQ ID NO: 26053 - DNA, 80 bp, synthetic construct
  source 1..80: mol_type = other DNA
agcttttgtcaaaattttgttccttggggctacttcctagtctctttagtccctaacttgcagttaggtttaccagattt

SEQ ID NO: 26054 - DNA, 80 bp, synthetic construct
  source 1..80: mol_type = other DNA
tagtattatatttatactaatttttaacttatactaatatttaattataaattttatatctataatattagtgttagtaa

SEQ ID NO: 26055 - DNA, 80 bp, synthetic construct; identical to SEQ ID NO: 10421
  source 1..80: mol_type = other DNA

SEQ ID NO: 26056 - DNA, 80 bp, synthetic construct
  source 1..80: mol_type = other DNA
tcaatttggagttccggttttcactgatagctgtggaattttgagtagcttcagctctgtaagcctcaatatccttatca

SEQ ID NO: 26057 - DNA, 80 bp, synthetic construct
  source 1..80: mol_type = other DNA
tccaaaggctacctggtcagtactttctttagaatatcctgactatacaataggctaaattattattattctttacatat

SEQ ID NO: 26058 - DNA, 80 bp, synthetic construct
  source 1..80: mol_type = other DNA
ttttgtcactacttataccaggttgcttatgagaagttattttcccccgctttcttgtcatgcaattagactgtgacctc

SEQ ID NO: 26059 - DNA, 80 bp, synthetic construct
  source 1..80: mol_type = other DNA
catatcaaagaaacatttgtcatacttttttgatgttcagaatatctaggatgttgtctgtttttctctttgctacctgt

SEQ ID NO: 26060 - DNA, 80 bp, synthetic construct; identical to SEQ ID NO: 10422
  source 1..80: mol_type = other DNA

SEQ ID NO: 26061 - DNA, 80 bp, synthetic construct
  source 1..80: mol_type = other DNA
ttgcatctctattaaggttttagttcccaccatcccatcaaaacaccacatctttgctaccaatatgtccacatttccaa

SEQ ID NO: 26062 - DNA, 80 bp, synthetic construct
  source 1..80: mol_type = other DNA
agttttttcttcctcctccctccctctaaccttgaggtgcttagacatgtgttttatctaaaacctccgtaagtgaaata

SEQ ID NO: 26063 - DNA, 80 bp, synthetic construct
  source 1..80: mol_type = other DNA
ttgaaatgtctgaaatagaacttttgatttcactctcccaaccatatcctccaatagttgttaatatctcaggaaatgtt

SEQ ID NO: 26064 - DNA, 80 bp, synthetic construct; identical to SEQ ID NO: 10423
  source 1..80: mol_type = other DNA

SEQ ID NO: 26065 - DNA, 80 bp, synthetic construct
  source 1..80: mol_type = other DNA
cccttcacatacctattccagccgcactatctttcttgctgttcctgcaacatcccaaatactttagtcttagaggttgt

SEQ ID NO: 26066 - DNA, 80 bp, synthetic construct
  source 1..80: mol_type = other DNA
aactctcaccatgataacacacaaatatatttgaaagctcacatgcatcaagcattattgaggtaatagggatgcagcag

SEQ ID NO: 26067 - DNA, 80 bp, synthetic construct
  source 1..80: mol_type = other DNA
agcagtgtaccttggaaacaatctcatgactttcattcaaaaatgtctatctgagggaatgctgaagaatcagaagcatc

SEQ ID NO: 26068 - DNA, 80 bp, synthetic construct
  source 1..80: mol_type = other DNA
attataaaatgtcattttggataaagtttacctagtacactgagaatggtaacttcataaggaggatgagacatatttct

SEQ ID NO: 26069 - DNA, 80 bp, synthetic construct
  source 1..80: mol_type = other DNA
gttagttgtgtgacctaaactttccaatcatcagtagctttctttgtaaaatagggatattaatgcattttacacagagt

SEQ ID NO: 26070 - DNA, 80 bp, synthetic construct
  source 1..80: mol_type = other DNA
aactaccaacacgaagatcatgaagcagaggaagagacgttagtgaaaagaacaacaataccatcctattaccaatctag

SEQ ID NO: 26071 - DNA, 80 bp, synthetic construct; identical to SEQ ID NO: 10425
  source 1..80: mol_type = other DNA

SEQ ID NO: 26072 - DNA, 80 bp, synthetic construct
  source 1..80: mol_type = other DNA
tcttggctcactgcattctctgcctcctgggttcaaacgattctcctgccttagcttccagagttgctgggattaaaagc

SEQ ID NO: 26073 - DNA, 80 bp, synthetic construct
  source 1..80: mol_type = other DNA
tttaacttctaactgggattatttcaacatttttagaattaaaagtaattaaaataaatagtattacatctcttaaaagt

SEQ ID NO: 26074 - DNA, 80 bp, synthetic construct
  source 1..80: mol_type = other DNA
ggctctatctgttttgctgctaccactattttcttttatgctgttaaccttgtcttctgtgtttgtagttttaaaaatat

SEQ ID NO: 26075 - DNA, 80 bp, synthetic construct; identical to SEQ ID NO: 10426
  source 1..80: mol_type = other DNA

SEQ ID NO: 26076 - DNA, 80 bp, synthetic construct
  source 1..80: mol_type = other DNA
tgaaatacttgatcaaacatatctcagttttatagctctctttgtagatttgcccctttgggggacatcggatttctcta

SEQ ID NO: 26077 - DNA, 80 bp, synthetic construct
  source 1..80: mol_type = other DNA
atctgttaaaattaaggtaagttacaggaatactacagttggcatttttgccttattcttttctgagtaactcctaaatt

SEQ ID NO: 26078 - DNA, 80 bp, synthetic construct
  source 1..80: mol_type = other DNA
tcagagggtaagaatttttctcttcactctggaagccacgtgaactattatctgtcggaaaatctaattataagtctgat

SEQ ID NO: 26079 - DNA, 80 bp, synthetic construct; identical to SEQ ID NO: 10427
  source 1..80: mol_type = other DNA

SEQ ID NO: 26080 - DNA, 80 bp, synthetic construct
  source 1..80: mol_type = other DNA
caccttgtcattgtgatagtacactgttcatgttaagagtatctttaactgatattattttgatatattgaagagacctc

SEQ ID NO: 26081 - DNA, 80 bp, synthetic construct
  source 1..80: mol_type = other DNA
tagaatgaagtagcacgatttctccatccataatttctttgacctttccccagtttttctgttgtcatttaaaaacatgg

SEQ ID NO: 26082 - DNA, 80 bp, synthetic construct
  source 1..80: mol_type = other DNA
aaaacattagagaacaaattattgagtgtatttcaggtactttaatgacgttatggccatctgtatggccacccttcctt

SEQ ID NO: 26083 - DNA, 80 bp, synthetic construct; identical to SEQ ID NO: 10428
  source 1..80: mol_type = other DNA

SEQ ID NO: 26084 - DNA, 80 bp, synthetic construct
  source 1..80: mol_type = other DNA
aggacaaaataaaagtgacatgtcagaacatttattcctggcaaaaaagcattagaaaatattaaccatttcagagaggt

SEQ ID NO: 26085 - DNA, 80 bp, synthetic construct
  source 1..80: mol_type = other DNA
tttttttggtgtggaagctaagtttaatcttagatgagaatagagcatgaggaagaactgacttttttaaatagagaagt

SEQ ID NO: 26086 - DNA, 80 bp, synthetic construct
  source 1..80: mol_type = other DNA
acattggctgtcacacatgatctggaaggctgtgtaactgcactgtgaatggttctctctgagattttacactgaagaag

SEQ ID NO: 26087 - DNA, 80 bp, synthetic construct; identical to SEQ ID NO: 10429
  source 1..80: mol_type = other DNA

SEQ ID NO: 26088 - DNA, 80 bp, synthetic construct
  source 1..80: mol_type = other DNA
ttagaggaagaacaaaacgaagtaaaatatgtataggtagcaattccagttagcaaaggcctaaattatattatgacttc

SEQ ID NO: 26089 - DNA, 80 bp, synthetic construct
  source 1..80: mol_type = other DNA
aactgaatgagatctataaatgttaagatgcccttaaaataccaacggagaggaaagtgttggactttcaccttcatcca

SEQ ID NO: 26090 - DNA, 80 bp, synthetic construct
  source 1..80: mol_type = other DNA
ggataatgggcaatgcaaacctatgacagttaagaaaaggggaatgccaattgataatggaataactggaaaaataatcc

SEQ ID NO: 26091 - DNA, 80 bp, synthetic construct
  source 1..80: mol_type = other DNA
taaataatcccaatggtttgcaaactaaaaaatcttgaagcagaaggaagattactacatattttttttctcagagagga

SEQ ID NO: 26092 - DNA, 80 bp, synthetic construct; identical to SEQ ID NO: 10430
  source 1..80: mol_type = other DNA

SEQ ID NO: 26093 - DNA, 80 bp, synthetic construct
  source 1..80: mol_type = other DNA
tagaaaacaatataaaaatatattaaaatgacactatattatgataaagttgtttttattctaggaatgcaagattgttt

SEQ ID NO: 26094 - DNA, 80 bp, synthetic construct
  source 1..80: mol_type = other DNA
acgaagggcaaaactatagttaatatagacaataccaaaattgtgaactcatccctctaagatttgaaactatatgctcc

SEQ ID NO: 26095 - DNA, 80 bp, synthetic construct; identical to SEQ ID NO: 10431
  source 1..80: mol_type = other DNA

SEQ ID NO: 26096 - DNA, 80 bp, synthetic construct
  source 1..80: mol_type = other DNA
attctctttacattaatcaatcatttcaacacctaatcagcttttgtgaaaactgagaagctgattctaatctttatttg

SEQ ID NO: 26097 - DNA, 80 bp, synthetic construct
  source 1..80: mol_type = other DNA
taagacactccagtactggcataagaatagacatgagaccatttagtgggacagaataaaatgtactcattcatatccac

SEQ ID NO: 26098 - DNA, 80 bp, synthetic construct
  source 1..80: mol_type = other DNA
tattatgaatcaaaagtaaaaagctaaaaccataaagcaagaagaaaacagaaaaaaaaaccagtcttcacaaatgttgg

SEQ ID NO: 26099 - DNA, 80 bp, synthetic construct
  source 1..80: mol_type = other DNA
ggtacatgtgcacaacgtacagcttagttacacatgtatacatgtgccgtgttggtgtgctgcacccattaactcgtcat

SEQ ID NO: 26100 - DNA, 80 bp, synthetic construct; identical to SEQ ID NO: 10432
  source 1..80: mol_type = other DNA

SEQ ID NO: 26101 - DNA, 80 bp, synthetic construct
  source 1..80: mol_type = other DNA
gattgattagttgcaagtgatgctgaagatgtgaaacaagtggggctctggtacatcactgcttttgggagtataaaatt

SEQ ID NO: 26102 - DNA, 80 bp, synthetic construct
  source 1..80: mol_type = other DNA
tcataatatccccaaaaggaaacaacgtatgagtgaatggataaacaagtagtggtacaatcatccataggaaatagcac

SEQ ID NO: 26103 - DNA, 80 bp, synthetic construct; identical to SEQ ID NO: 10433
  source 1..80: mol_type = other DNA

SEQ ID NO: 26104 - DNA, 80 bp, synthetic construct
  source 1..80: mol_type = other DNA
cagctccaattctacttttacttccttaataagacattttgaagttctgaggaagtagagactagaagagtttctcaacc

SEQ ID NO: 26105 - DNA, 80 bp, synthetic construct
  source 1..80: mol_type = other DNA
tgcccttggaaattacagatttgggacatcaagtctgtggtcagaaagatgtggatagatttccagacctaacagttatc

SEQ ID NO: 26106 - DNA, 80 bp, synthetic construct
  source 1..80: mol_type = other DNA
gtgcaaatatcgtctgcaaataaaattactaaaataacatcttgttattgccacactactttacagtttaactctttata

SEQ ID NO: 26107 - DNA, 80 bp, synthetic construct; identical to SEQ ID NO: 10434
  source 1..80: mol_type = other DNA

SEQ ID NO: 26108 - DNA, 80 bp, synthetic construct
  source 1..80: mol_type = other DNA
tcttgagggagagagcagaatgagatataagtaattctaatacacctctaaaaataagctgatcgttctttccttgagca

SEQ ID NO: 26109 - DNA, 80 bp, synthetic construct
  source 1..80: mol_type = other DNA
acccatcatagtacttcaatgaatatcaaatcaaaaccacaggttctgtttcaagaacgtagtttagtatggttgaggaa

SEQ ID NO: 26110 - DNA, 80 bp, synthetic construct
  source 1..80: mol_type = other DNA
ggaaagaggtaggtgttctaaacagggcacattgagagaagaaagttctaaggtgcagttaaactcagaatctttggtat

SEQ ID NO: 26111 - DNA, 80 bp, synthetic construct; identical to SEQ ID NO: 10435
  source 1..80: mol_type = other DNA

SEQ ID NO: 26112 - DNA, 80 bp, synthetic construct
  source 1..80: mol_type = other DNA
gtggttttggtttacaaatgtagtgggagaaaaaaaaactactttattttctatagatacacatacatatttagaaaata

SEQ ID NO: 26113 - DNA, 80 bp, synthetic construct
  source 1..80: mol_type = other DNA
caaacacaggctgcctcaaatctgatcaggcctattaggaaaaaaagaaaaaccaaacaatacaatggcaaatgtatatt

SEQ ID NO: 26114 - DNA, 80 bp, synthetic construct
  source 1..80: mol_type = other DNA
gttaaaaagtattctcacattaattttagttctccaactaagcatctttttctataaaaactttggctaacattgttgaa

SEQ ID NO: 26115 - DNA, 80 bp, synthetic construct; identical to SEQ ID NO: 10436
  source 1..80: mol_type = other DNA

SEQ ID NO: 26116 - DNA, 80 bp, synthetic construct
  source 1..80: mol_type = other DNA
ggaagtttggaggatcggtgttcaaaatagtagaaaaaggcattatttccccattctgagaacttcttggtgaactccaa

SEQ ID NO: 26117 - DNA, 80 bp, synthetic construct
  source 1..80: mol_type = other DNA
tcttttctagttatgatactattgttatctttgctgaagccaggagcaccatagactaaaaaagctgtcccttcatcttt

SEQ ID NO: 26118 - DNA, 80 bp, synthetic construct
  source 1..80: mol_type = other DNA
ggatctttatttctaagacacttgattatttcagtctcattctctctagagcaaccagtcaatttagctaagttcaacgt

SEQ ID NO: 26119 - DNA, 80 bp, synthetic construct; identical to SEQ ID NO: 10437
  source 1..80: mol_type = other DNA

SEQ ID NO: 26120 - DNA, 80 bp, synthetic construct
  source 1..80: mol_type = other DNA
acagtggcattttttggtttaggtgctggaatccatacatttagatataaacagtcttcactgaggtcagtgtttgggtt

SEQ ID NO: 26121 - DNA, 80 bp, synthetic construct
  source 1..80: mol_type = other DNA
agaaaggctgttaccgtgccaccaaaaactgtcaagttcatccctctgacttttccattctttgttgcaattatgatgtc

SEQ ID NO: 26122 - DNA, 80 bp, synthetic construct
  source 1..80: mol_type = other DNA
gatgataattacctaaaatatagtcgttagtaattctacaaattatgaaaacaaataaacctgcttctgtaaaggcctac

SEQ ID NO: 26123 - DNA, 80 bp, synthetic construct; identical to SEQ ID NO: 10438
  source 1..80: mol_type = other DNA

SEQ ID NO: 26124 - DNA, 80 bp, synthetic construct
  source 1..80: mol_type = other DNA
ttttctgttttccttgtcttttctgtggtcccttttgccaagtgacatcttcctctatacaatcctattatacaaactga

SEQ ID NO: 26125 - DNA, 80 bp, synthetic construct
  source 1..80: mol_type = other DNA
caaaatttaataaacatgagggactctttaccagatttataatgtcaatagagagaaccaggggctagcattataatgtc

SEQ ID NO: 26126 - DNA, 80 bp, synthetic construct
  source 1..80: mol_type = other DNA
aatgactgaaattagaggatcaaagcttagaaactattgggccacatggcagaagcaaaaataatctttgtgacctacaa

SEQ ID NO: 26127 - DNA, 80 bp, synthetic construct; identical to SEQ ID NO: 10439
  source 1..80: mol_type = other DNA

SEQ ID NO: 26128 - DNA, 80 bp, synthetic construct
  source 1..80: mol_type = other DNA
ctgggattacaggtgtatggcaccacacccaggtaatttttgtattttagtagagatggggttttaccatgttggccagg

SEQ ID NO: 26129 - DNA, 80 bp, synthetic construct
  source 1..80: mol_type = other DNA
acaaagatccattaatgtacaaagccttccctttattttttctcatgctgtaattaggttgctgaaatccaacctacaca

SEQ ID NO: 26130 - DNA, 80 bp, synthetic construct
  source 1..80: mol_type = other DNA
agggtatcatatttcaaatcagcctaattcaccaatggtcataggatatctagtgacctacaagtattttttatcccaat

SEQ ID NO: 26131 - DNA, 80 bp, synthetic construct
  source 1..80: mol_type = other DNA
atcaagccacaagattattattttttcagttctgtttggtacaattagatgtgtgctaagatcaataaaacataattaaa

SEQ ID NO: 26132 - DNA, 80 bp, synthetic construct; identical to SEQ ID NO: 10440
  source 1..80: mol_type = other DNA

SEQ ID NO: 26133 - DNA, 80 bp, synthetic construct
  source 1..80: mol_type = other DNA
cttaaagtttcctgttacctgacactaataacatttcagacataatcaaagttttagaggcactctactgcttcagttct

SEQ ID NO: 26134 - DNA, 80 bp, synthetic construct
  source 1..80: mol_type = other DNA
tctaagctgcaatttaataaattaattgcatcatccctggttgtacccattctccctcttgcctagctcagtcaatgttc

SEQ ID NO: 26135 - DNA, 80 bp, synthetic construct; identical to SEQ ID NO: 10441
  source 1..80: mol_type = other DNA

SEQ ID NO: 26136 - DNA, 80 bp, synthetic construct
  source 1..80: mol_type = other DNA
atgtgatgtttcattgtttatgttaaacagttgctataacatctaaatggttgtaatatcttcccatgtcacttaacttg

SEQ ID NO: 26137 - DNA, 80 bp, synthetic construct
  source 1..80: mol_type = other DNA
tgtaagcatgcattcattgcaaaaatgacaatataatgctaactcatatgtattgttgcagagtgtcatatgacatatta

SEQ ID NO: 26138 - DNA, 80 bp, synthetic construct
  source 1..80: mol_type = other DNA
tagttttgccattaaaagactttaaaaattttgatatgtttatcatgtaattgagcaatcgaaagagaaataaatgaaaa

SEQ ID NO: 26139 - DNA, 80 bp, synthetic construct; identical to SEQ ID NO: 10442
  source 1..80: mol_type = other DNA

SEQ ID NO: 26140 - DNA, 80 bp, synthetic construct
  source 1..80: mol_type = other DNA
agtttttgtttggaattaagaaaatttactggcaatttttgaaaatgctaaactgttataacaataactttcaaataaaa

SEQ ID NO: 26141 - DNA, 80 bp, synthetic construct
  source 1..80: mol_type = other DNA
accagattttcaaaataagggacaagccaagaatttttaaaagatgttcaagcaaatattcaaaatattttccctgtgta

SEQ ID NO: 26142 - DNA, 80 bp, synthetic construct
  source 1..80: mol_type = other DNA
agtgaagtggggaattgaggaagtctgattataaatagactacatcactgtctttcagggattcttcagctatgctttag

SEQ ID NO: 26143 - DNA, 80 bp, synthetic construct; identical to SEQ ID NO: 10443
  source 1..80: mol_type = other DNA

SEQ ID NO: 26144 - DNA, 80 bp, synthetic construct
  source 1..80: mol_type = other DNA
ttttacaattaaaaaactaggacaatacaaacaaacaacaacaacaaaaaattaggagaacaaaacagaactttgataac

SEQ ID NO: 26145 - DNA, 80 bp, synthetic construct
  source 1..80: mol_type = other DNA
gtaactatgagatagtttatattaaggaaggcattacacagactagtgacaggagctcctaattgagtttattatcatga

SEQ ID NO: 26146 - DNA, 80 bp, synthetic construct
  source 1..80: mol_type = other DNA
caaaataatagttttacaagattataggatgagcagaaagtacatttgcttactatttctataatagtaaaataatagca

SEQ ID NO: 26147 - DNA, 80 bp, synthetic construct
  source 1..80: mol_type = other DNA
aaagttttaggtgacaaaatgttgattgagaaaagtattttgttcaggaaaaagtaagttaactactaactttatcccat

SEQ ID NO: 26148 - DNA, 80 bp, synthetic construct; identical to SEQ ID NO: 10444
  source 1..80: mol_type = other DNA

SEQ ID NO: 26149 - DNA, 80 bp, synthetic construct
  source 1..80: mol_type = other DNA
agcaacttacccgattctctgcaacaaagatggcaaagtttgcaaggagtgaaaatcatgtaatacttcggggaaatgca

SEQ ID NO: 26150 - DNA, 80 bp, synthetic construct
  source 1..80: mol_type = other DNA
aacccgtgtggcagccacccacagcagatccacaacgtgagaggcccgctgaaacaagggtgctggcattggttactcag

SEQ ID NO: 26151 - DNA, 80 bp, synthetic construct
  source 1..80: mol_type = other DNA
gcatcgttgggccagatctgcctggtcttgcagatgcccacgatggtggcctctgacacgacgactgggcagtgccggtg

SEQ ID NO: 26152 - DNA, 80 bp, synthetic construct; identical to SEQ ID NO: 10445
  source 1..80: mol_type = other DNA

SEQ ID NO: 26153 - DNA, 80 bp, synthetic construct
  source 1..80: mol_type = other DNA
ccacggcgcggcccctttaagaggcccgcctggctccgtcatccgcgccgcggccacctccccccggccctccccttcct

SEQ ID NO: 26154 - DNA, 80 bp, synthetic construct
  source 1..80: mol_type = other DNA
gcggcggcctggcggagcggagagcagcgcccgcgcctcgccgtgcggaggagccccgcacacaatagcggcgcgcgcag

SEQ ID NO: 26155 - DNA, 80 bp, synthetic construct
  source 1..80: mol_type = other DNA
cgccgctgagacgggccccgcgcgcagcccggcggcgcaggtaaggccggccgcgccatggtggacccggtgggcttcgc

SEQ ID NO: 26156 - DNA, 80 bp, synthetic construct
  source 1..80: mol_type = other DNA
ggtgaaccaggagcgcttccgcatgatctacctgcagacgttgctggccaaggaaaagaagagctatgaccggcagcgat

SEQ ID NO: 26157 - DNA, 80 bp, synthetic construct
  source 1..80: mol_type = other DNA
cgggaccgcccgcaggcccggggcagccgcgtcgggggaacgggacgaccggggaccccccgccagcgtggcggcgctca

SEQ ID NO: 26158 - DNA, 80 bp, synthetic construct; identical to SEQ ID NO: 10446
  source 1..80: mol_type = other DNA

SEQ ID NO: 26159 - DNA, 80 bp, synthetic construct
  source 1..80: mol_type = other DNA
ggaaggggagggcaagggcccgctcctgcgcagccagagcacctctgagcaggagaagcgccttacctggccccgcaggt

SEQ ID NO: 26160 - DNA, 80 bp, synthetic construct
  source 1..80: mol_type = other DNA
ctctccctcgcagaactcgcaacagtccttcgacagcagcagtccccccacgccgcagtgccataagcggcaccggcact

SEQ ID NO: 26161 - DNA, 80 bp, synthetic construct
  source 1..80: mol_type = other DNA
gggatacaaaacagaagttgggagggaggagtggatagttttgagtgtatcaggtgcacttgtggttcacgcggatcctg

SEQ ID NO: 26162 - DNA, 80 bp, synthetic construct
  source 1..80: mol_type = other DNA
gcaatgtgtttgtgaagtacagcttgtgagttgaaggaagatgcttcaggcagtaacctccttgctatgtgctctctcca

SEQ ID NO: 26163 - DNA, 80 bp, synthetic construct; identical to SEQ ID NO: 10447
  source 1..80: mol_type = other DNA

SEQ ID NO: 26164 - DNA, 80 bp, synthetic construct
  source 1..80: mol_type = other DNA
gtgaagcagagccacacccgttctgatctgcctggctttgatgggaggcttcacccatgattattcaccaccaggctcct

SEQ ID NO: 26165 - DNA, 80 bp, synthetic construct
  source 1..80: mol_type = other DNA
cactaagattaaaactatgggattgtacgcctaacttctgtgctagatgcaaataccatcaggcattttgggtcatggga

SEQ ID NO: 26166 - DNA, 80 bp, synthetic construct; identical to SEQ ID NO: 10448
  source 1..80: mol_type = other DNA

SEQ ID NO: 26167 - DNA, 80 bp, synthetic construct
  source 1..80: mol_type = other DNA
tgctttgcaggcacatcagctcgttcggggtctggaggattgccttgtggttactgggcaccagccttgtctggccagct

SEQ ID NO: 26168 - DNA, 80 bp, synthetic construct
  source 1..80: mol_type = other DNA
ttcctacagctcctgtagacttggccatgttggccacatcactagacgccgaatgcaagtcagtaaatgaatataggaat

SEQ ID NO: 26169 - DNA, 80 bp, synthetic construct
  source 1..80: mol_type = other DNA
aatgtcctcaaggtcccacagtctctttcccattaggttttattttttcccccttaaatgttttgtttgttttttgtttt

SEQ ID NO: 26170 - DNA, 80 bp, synthetic construct
  source 1..80: mol_type = other DNA
ttttttttgtaaatacagggtcttgctgtgttgcccaggctggtatcaaactcctgggctcaagcattcctctagcttca

SEQ ID NO: 26171 - DNA, 80 bp, synthetic construct; identical to SEQ ID NO: 10449
  source 1..80: mol_type = other DNA

SEQ ID NO: 26172 - DNA, 80 bp, synthetic construct
  source 1..80: mol_type = other DNA
gatcctgttatgttttaaaactcctgcttcttttagccctgggcaccttgacactctgcctagcagtttcccctgacgtg

SEQ ID NO: 26173 - DNA, 80 bp, synthetic construct
  source 1..80: mol_type = other DNA
ctaatgctccgcagtggcagatgtggtgacccagatctaataacctcggaatcagtctgtttggatgaatggaccgtccc

SEQ ID NO: 26174 - DNA, 80 bp, synthetic construct; identical to SEQ ID NO: 10450
  source 1..80: mol_type = other DNA

SEQ ID NO: 26175 - DNA, 80 bp, synthetic construct
  source 1..80: mol_type = other DNA
ggccgggcgcggtggctcaagcctgtaatcccagcacttagggagtccaaggcgggtggatcacaagggcaggagatgga

SEQ ID NO: 26176 - DNA, 80 bp, synthetic construct
  source 1..80: mol_type = other DNA
gggctgcactccagcctgggcgacagagcgagacacagtctcaaaaaacaaacaaaaaactatgcggaactcacagaagg

SEQ ID NO: 26177 - DNA, 80 bp, synthetic construct
  source 1..80: mol_type = other DNA
gaccacaggcgcccaccaccacacccagctaatttttttgtatttttagtagagacggggtttcactgtgttagccagta

SEQ ID NO: 26178 - DNA, 80 bp, synthetic construct
  source 1..80: mol_type = other DNA
agggaagtgagatcagagaagcttccggaaatggcaggactgaagaggacttgatcagtcaccagaagttggagggcaga

SEQ ID NO: 26179 - DNA, 80 bp, synthetic construct; identical to SEQ ID NO: 10451
  source 1..80: mol_type = other DNA

SEQ ID NO: 26180 - DNA, 80 bp, synthetic construct
  source 1..80: mol_type = other DNA
ccatctgtgtctctgaattcagctattatagatacctcatgtaagtccagtcctgtggcattcgtctttttgtgattggc

SEQ ID NO: 26181 - DNA, 80 bp, synthetic construct
  source 1..80: mol_type = other DNA
gcttcaggagttcaggattctcctgcttcagcctcccgagtagctgggattacaggtgtgcaccaccacacccagctaat

SEQ ID NO: 26182 - DNA, 80 bp, synthetic construct; identical to SEQ ID NO: 10452
  source 1..80: mol_type = other DNA

SEQ ID NO: 26183 - DNA, 80 bp, synthetic construct
  source 1..80: mol_type = other DNA
tctctggttggctaggcagttttcctgttgtgggcccactgggctgaaataggacggtctagttagcctcacccacacat

SEQ ID NO: 26184 - DNA, 80 bp, synthetic construct
  source 1..80: mol_type = other DNA
ttttttttttaatagagattggatctccctatgttgcccaggctggcctcgaactcctgggcttaagcaatctacccacc

SEQ ID NO: 26185 - DNA, 80 bp, synthetic construct
  source 1..80: mol_type = other DNA
gcatattcatcacctcaaacacatttattatttgtttatgctgggaggtctgaggaattcttgattcaaacacccagccc

SEQ ID NO: 26186 - DNA, 80 bp, synthetic construct
  source 1..80: mol_type = other DNA
ccactgcattgtttttcccttgggtgatgggctggactggcaaccagtttgagtgagtaactgtggggcagagaaaggtc

SEQ ID NO: 26187 - DNA, 80 bp, synthetic construct; identical to SEQ ID NO: 10453
  source 1..80: mol_type = other DNA

SEQ ID NO: 26188 - DNA, 80 bp, synthetic construct
  source 1..80: mol_type = other DNA
ctaacctcaccaggacaaagagcccaggtgagctatgtgcttgagcacacttgggagaggacacagcagtgcatgaggcc

SEQ ID NO: 26189 - DNA, 80 bp, synthetic construct
  source 1..80: mol_type = other DNA
ctatgaaccccagggaatatcttgaccctgactggaatacaactgttgtggctcaagtaggttttttttttccccttttg

SEQ ID NO: 26190 - DNA, 80 bp, synthetic construct
  source 1..80: mol_type = other DNA
acaacccccgccacccaggttcaagcgattcttctgccacagcctcccgagtagctgggattacagctaattagcctagc

SEQ ID NO: 26191 - DNA, 80 bp, synthetic construct; identical to SEQ ID NO: 10454
  source 1..80: mol_type = other DNA

SEQ ID NO: 26192 - DNA, 80 bp, synthetic construct
  source 1..80: mol_type = other DNA
tcctagatgcctcgtgtaagtggagtcttataatatttgtcctgtgtctggctgatttcactcaagcagggctttgaagt

SEQ ID NO: 26193 - DNA, 80 bp, synthetic construct
  source 1..80: mol_type = other DNA
ccaagtagctgggattacaggcgcctgccatcacacccggctaattttttgtatttttagtagagatggggtttcaccat

SEQ ID NO: 26194 - DNA, 80 bp, synthetic construct
  source 1..80: mol_type = other DNA
ccggaaaacacccgttagcaatggcgatcttccctgggccttcacgcccttagctttgaagtggcccagagtattagttt

SEQ ID NO: 26195 - DNA, 80 bp, synthetic construct; identical to SEQ ID NO: 10455
  source 1..80: mol_type = other DNA

SEQ ID NO: 26196 - DNA, 80 bp, synthetic construct
  source 1..80: mol_type = other DNA
ttttagtagagacggggtttcaccatgttagccagcctggtctcgaacttctgaccttaggtgatccgccctcctcggcc

SEQ ID NO: 26197 - DNA, 80 bp, synthetic construct
  source 1..80: mol_type = other DNA
gaggtactgggagttagaacgtcaacatatggggagtgaggcatggtttagttcgtaacacttggtgagtccgttactgg

SEQ ID NO: 26198 - DNA, 80 bp, synthetic construct; identical to SEQ ID NO: 10456
  source 1..80: mol_type = other DNA

SEQ ID NO: 26199 - DNA, 80 bp, synthetic construct
  source 1..80: mol_type = other DNA
ctggtactacaggcgcgtgccaccatgcctggctaatttttaatttttgttgagacagggtcttgctttgttgcccaggc

SEQ ID NO: 26200 - DNA, 80 bp, synthetic construct
  source 1..80: mol_type = other DNA
atctcttttctgtttatcttggtttatgtctcccttattaaaaacgaaggcaaccacctctccctatccaatcgctcaaa

SEQ ID NO: 26201 - DNA, 80 bp, synthetic construct
  source 1..80: mol_type = other DNA
tatctttctttaacggtatatttgcagctgtttcctgttaatcctttgtctatctggcttcctttttagggtgatgggat

SEQ ID NO: 26202 - DNA, 80 bp, synthetic construct
  source 1..80: mol_type = other DNA
tgggtgtttgcagattgaagatggaatgatacacaccatctctgagatttttatttgctcagaccttcccctgttctggc

SEQ ID NO: 26203 - DNA, 80 bp, synthetic construct; identical to SEQ ID NO: 10457
  source 1..80: mol_type = other DNA

SEQ ID NO: 26204 - DNA, 80 bp, synthetic construct
  source 1..80: mol_type = other DNA
agaccggacaccccactgaagtagtaaatatgactttcatggaggctgcttcatgggccctcgaaagtttcttgtaaagt

SEQ ID NO: 26205 - DNA, 80 bp, synthetic construct
  source 1..80: mol_type = other DNA
agacacagaatgactttgcggaggtggaggagacctggatcatttgctcagcaaaccggttttgggcacctgctgtgttg

SEQ ID NO: 26206 - DNA, 80 bp, synthetic construct; identical to SEQ ID NO: 10458
  source 1..80: mol_type = other DNA

SEQ ID NO: 26207 - DNA, 80 bp, synthetic construct
  source 1..80: mol_type = other DNA
tggctgggaagatgtagcggagatacacagaggtagccggctgtgtgtgcacagggccaggtgcagggcccagagagcca

SEQ ID NO: 26208 - DNA, 80 bp, synthetic construct
  source 1..80: mol_type = other DNA
caagtgccactgttggctcaagaagagtttttgaagattcacttcactttaaaggcctgacatgcttccgtgtttaaagt

SEQ ID NO: 26209 - DNA, 80 bp, synthetic construct
  source 1..80: mol_type = other DNA
attttctgcacatgacgaggtattgatgagcattcgaagcaacctacaggcaacatatgttgacagtgcagactttgaag

SEQ ID NO: 26210 - DNA, 80 bp, synthetic construct
  source 1..80: mol_type = other DNA
tctcatagagtctcctgttcatgtatctgatgtcagttgattgaacatcacttagcaaaaaatcttaagaagaaatgcat

SEQ ID NO: 26211 - DNA, 80 bp, synthetic construct; identical to SEQ ID NO: 10459
  source 1..80: mol_type = other DNA

SEQ ID NO: 26212 - DNA, 80 bp, synthetic construct
  source 1..80: mol_type = other DNA
gggtcatttgactcctaccttatctgggtagataggatcatctttgtcccacagtccttcccagtattgtgaagtgatgc

SEQ ID NO: 26213 - DNA, 80 bp, synthetic construct
  source 1..80: mol_type = other DNA
cagcgtagcctgttccctctgtgggggtgtgcagaagcactgtttatttttgcccacatcttagagtgataaatggaact

SEQ ID NO: 26214 - DNA, 80 bp, synthetic construct; identical to SEQ ID NO: 10460
  source 1..80: mol_type = other DNA

SEQ ID NO: 26215 - DNA, 80 bp, synthetic construct
  source 1..80: mol_type = other DNA
aggttcacgccattctcctgcctcagcctcccgagtagctggaactgcaggcgcctgccacaacgcccagctaatttttt

SEQ ID NO: 26216 - DNA, 80 bp, synthetic construct
  source 1..80: mol_type = other DNA
cagcctgggcaacatagcaagaccccatctctacaaaaaatttaaaagtgagctgggcatggtggcatgtgcccgtaatc

SEQ ID NO: 26217 - DNA, 80 bp, synthetic construct
  source 1..80: mol_type = other DNA
tgcttttttttggccgggagtggtggctcatgcctgtaatcccaacactttgggaggccgaggcaggcagaacatctgag

SEQ ID NO: 26218 - DNA, 80 bp, synthetic construct
  source 1..80: mol_type = other DNA
cagcctgaccaacatggagaaaccccgtctctactaaaaatacaaaattagctgggcatggtggcacatgcctgtaatcc

SEQ ID NO: 26219 - DNA, 80 bp, synthetic construct; identical to SEQ ID NO: 10461
  source 1..80: mol_type = other DNA

SEQ ID NO: 26220 - DNA, 80 bp, synthetic construct
  source 1..80: mol_type = other DNA
tggtgacactccatctctactaaaaatacaaaaaattaattgggcattgtggcaggcgcctgtaatcccagctactcggg

SEQ ID NO: 26221 - DNA, 80 bp, synthetic construct
  source 1..80: mol_type = other DNA
aaattttaaagagaaataaaaaaacattgccatcttcaaatctccacaaaaatggaaagacaggacagtgccagtcagcc

SEQ ID NO: 26222 - DNA, 80 bp, synthetic construct; identical to SEQ ID NO: 10462
  source 1..80: mol_type = other DNA

SEQ ID NO: 26223 - DNA, 80 bp, synthetic construct
  source 1..80: mol_type = other DNA
gtgccaggggctgtgcgggaagggaaaccttacatctgtcctgtttcttaggggacgaggttgtggaggggagggtattc

SEQ ID NO: 26224 - DNA, 80 bp, synthetic construct
  source 1..80: mol_type = other DNA
ctgggggttaggggatggtttcaggatgggactgttaacagctcagatcatcaggtattagattctcatgaggagcctgc

SEQ ID NO: 26225 - DNA, 80 bp, synthetic construct
  source 1..80: mol_type = other DNA
acctccagctctgcggcccagttcctaacaggccacggactgataccagttcatggcccgggggttggggacccctgccc

SEQ ID NO: 26226 - DNA, 80 bp, synthetic construct
  source 1..80: mol_type = other DNA
tggtcccataagattataatactgtgtttttactgtaccttttctacatttggtatgtttagaaacagataccactgtgt

SEQ ID NO: 26227 - DNA, 80 bp, synthetic construct; identical to SEQ ID NO: 10463
  source 1..80: mol_type = other DNA

SEQ ID NO: 26228 - DNA, 80 bp, synthetic construct
  source 1..80: mol_type = other DNA
aaaatgtggacaacagggaaggtgagggataggagagttggggtcatcctatgtgggtctccgaagccaggctgagggtg

SEQ ID NO: 26229 - DNA, 80 bp, synthetic construct
  source 1..80: mol_type = other DNA
gaggaatggggagggatggagaggacaaggaatatgagctgattctggggagggggtgacagaaagggaggctgtatgag

SEQ ID NO: 26230 - DNA, 80 bp, synthetic construct; identical to SEQ ID NO: 10464
  source 1..80: mol_type = other DNA

SEQ ID NO: 26231 - DNA, 80 bp, synthetic construct
  source 1..80: mol_type = other DNA
gagtgtccaccgtcggcctgctctgttccggggcagggccacatctttgtccgtgtgccgaggaggggactggtgggctg

SEQ ID NO: 26232 - DNA, 80 bp, synthetic construct
  source 1..80: mol_type = other DNA
agggtgatatggctttgcaggggtccagtccatgggcctgacatgttgtagctatgctttgaaggcattttcctggtggg

SEQ ID NO: 26233 - DNA, 80 bp, synthetic construct
  source 1..80: mol_type = other DNA
gggatctaggactgctatgcaccgggccgaatcgtgatacccaagggaggcatcttgtcgtggagcagttgcatgggccc

SEQ ID NO: 26234 - DNA, 80 bp, synthetic construct
  source 1..80: mol_type = other DNA
acccggtctctattacaaatacacaaaaattagctggacgtgggggtgcacacctgtgatcccagctactcaggaggctg

SEQ ID NO: 26235 - DNA, 80 bp, synthetic construct; identical to SEQ ID NO: 10465
  source 1..80: mol_type = other DNA

SEQ ID NO: 26236 - DNA, 80 bp, synthetic construct
  source 1..80: mol_type = other DNA
tctgggaaggttgatggggatgggctggcgggctgggagaggtgctttgttttcactcctcaggaagcttgaggcttctt

SEQ ID NO: 26237 - DNA, 80 bp, synthetic construct
  source 1..80: mol_type = other DNA
agtgcaggggatagatctgaaaggagaggggaaaatggatgttttcttctttgtctctcctttctccctgctttcaagtc

SEQ ID NO: 26238 - DNA, 80 bp, synthetic construct
  source 1..80: mol_type = other DNA
gaaaccccgtctctactaaaaatacaaaaaaaaaattagccgggcgtggtggcgggcgcctgtagtcccagccactcagg

SEQ ID NO: 26239 - DNA, 80 bp, synthetic construct; identical to SEQ ID NO: 10466
  source 1..80: mol_type = other DNA

SEQ ID NO: 26240 - DNA, 80 bp, synthetic construct
  source 1..80: mol_type = other DNA
aactcactgcagcctcaacctcctgggctcaaacagtcccctcatctcagcatctcaagtagctgggactacaggcatgc

SEQ ID NO: 26241 - DNA, 80 bp, synthetic construct
  source 1..80: mol_type = other DNA
catggctcaccgcagccttgacctctccaggctcaggcgattctcccacctcagccttctgagtagctgggacggcaggc

SEQ ID NO: 26242 - DNA, 80 bp, synthetic construct
  source 1..80: mol_type = other DNA
gggcttttcaaaggctgggctgggctgttcatttggaaaaaaggttggggatgttttcacttcaccaggacttctgccag

SEQ ID NO: 26243 - DNA, 80 bp, synthetic construct; identical to SEQ ID NO: 10467
  source 1..80: mol_type = other DNA

SEQ ID NO: 26244 - DNA, 80 bp, synthetic construct
  source 1..80: mol_type = other DNA
cttctagagcccaccctgttcataggcagttcacacacagctgtttgcttttctcttctcagtgaatctggtttttttgt

SEQ ID NO: 26245 - DNA, 80 bp, synthetic construct
  source 1..80: mol_type = other DNA
attttttgtatttttagtagaggtggtttcaccatgttagccaggatggtctcgatctcctgaccttgtgatccgccctc

SEQ ID NO: 26246 - DNA, 80 bp, synthetic construct; identical to SEQ ID NO: 10468
  source 1..80: mol_type = other DNA

SEQ ID NO: 26247 - DNA, 80 bp, synthetic construct
  source 1..80: mol_type = other DNA
aagatgttgctgtgtagttgggtgtccggccttagttaatgtgaacgtttccatgtattagtaaatcttgtgtaaatatt

SEQ ID NO: 26248 - DNA, 80 bp, synthetic construct
  source 1..80: mol_type = other DNA
gtgaacttctctctctttttttaaatagcttcactgaggtaattcatgtaccatacaattcaaccctttaaagcagccaa

SEQ ID NO: 26249 - DNA, 80 bp, synthetic construct
  source 1..80: mol_type = other DNA
gtcatgcacccatcactatcatccatctccagaactctttccaccttgcaaaactgaaaatctgtactcatttccaccca

SEQ ID NO: 26250 - DNA, 80 bp, synthetic construct; identical to SEQ ID NO: 10469
  source 1..80: mol_type = other DNA

SEQ ID NO: 26251 - DNA, 80 bp, synthetic construct
  source 1..80: mol_type = other DNA
tctcactctgcatctgcactggtgcagtaagagctcactgcagccttgacctcctgtgatcctcccacctcagcctcctg

SEQ ID NO: 26252 - DNA, 80 bp, synthetic construct
  source 1..80: mol_type = other DNA
gagccaccatacttggccaagtgaatacctttttatatgagtttctgcccatgatggggtgggcctctgtcactggattt

SEQ ID NO: 26253 - DNA, 80 bp, synthetic construct
  source 1..80: mol_type = other DNA
gttccatcaggtgctaaaacgtctgagctgtgtggggccttaccctccaaaaatccaaaattgtgatgtgggattttcat

SEQ ID NO: 26254 - DNA, 80 bp, synthetic construct
  source 1..80: mol_type = other DNA
taccctccaaaaatccaaaattgtgatgtgggattttcattccagagaagcagaatctgagattaaggtttgctttgggt

SEQ ID NO: 26255 - DNA, 80 bp, synthetic construct; identical to SEQ ID NO: 10470
  source 1..80: mol_type = other DNA

SEQ ID NO: 26256 - DNA, 80 bp, synthetic construct
  source 1..80: mol_type = other DNA
gctttcattgaagctccaaggaagcagaaggccatggcagaaaaggatttctacaaagggaaagggacttgcatggctgc

SEQ ID NO: 26257 - DNA, 80 bp, synthetic construct
  source 1..80: mol_type = other DNA
atggccccttcttcagcactgactagtcgtcctgcaccgtggagggtgttccgtcttattttccagcgctcacaactagg

SEQ ID NO: 26258 - DNA, 80 bp, synthetic construct
  source 1..80: mol_type = other DNA
cagtgaatcacgtagactccttgggcctctgaattcctgtccgtaaatgatgaagctgaatggcagcatttttaagatcc

SEQ ID NO: 26259 - DNA, 80 bp, synthetic construct; identical to SEQ ID NO: 10471
  source 1..80: mol_type = other DNA

SEQ ID NO: 26260 - DNA, 80 bp, synthetic construct
  source 1..80: mol_type = other DNA
tctggggcaacgtgccaaagtgcagagcgtgggcagcgggaggccctgccgtccgcgtggatgggggagacggcagcatg

SEQ ID NO: 26261 - DNA, 80 bp, synthetic construct
  source 1..80: mol_type = other DNA
gccacccctatttctgtgctatagtgggaggagcacattaggtactttgaggccataatttacctttgttacagatgacc

SEQ ID NO: 26262 - DNA, 80 bp, synthetic construct
  source 1..80: mol_type = other DNA
ctggtcagtctggagggcataaggacaggaaggataccggcactgaacgttgtcactcctgtgggggtacagatgcctca

SEQ ID NO: 26263 - DNA, 80 bp, synthetic construct
  source 1..80: mol_type = other DNA
tttgcacttgggtttggctttgtgctttgtaaggggatcccattcagcgtccaggatccgagccttgctctatttctgca

SEQ ID NO: 26264 - DNA, 80 bp, synthetic construct; identical to SEQ ID NO: 10472
  source 1..80: mol_type = other DNA

SEQ ID NO: 26265 - DNA, 80 bp, synthetic construct
  source 1..80: mol_type = other DNA
agccaggtgtgggcgtctcacatctgtgctcaggagctcacaggagcttctctcctatagaacctgtgaggcaggtaggg

SEQ ID NO: 26266 - DNA, 80 bp, synthetic construct
  source 1..80: mol_type = other DNA
tgagctaataatcgttgaagccaaatgatggggtaatgggcattcatgatgctgtgctcttacttttgtatttgtttgaa

SEQ ID NO: 26267 - DNA, 80 bp, synthetic construct
  source 1..80: mol_type = other DNA
cttacacggtgaaaccatgtctctactaaaaatacaaaaaaaaagtagccgggcgtggtggcgggcacctgtaatcccag

SEQ ID NO: 26268 - DNA, 80 bp, synthetic construct; identical to SEQ ID NO: 10473
  source 1..80: mol_type = other DNA

SEQ ID NO: 26269 - DNA, 80 bp, synthetic construct
  source 1..80: mol_type = other DNA
atacaaccatccatttaactattctttattcatcatccatccaactaaatctattcatccctctgtcatccattcattcc

SEQ ID NO: 26270 - DNA, 80 bp, synthetic construct
  source 1..80: mol_type = other DNA
cctccaaccattcatctgttcatttgaagttgatgtgacacctactggggtccaagcacaatgcttaggccttgactttg

SEQ ID NO: 26271 - DNA, 80 bp, synthetic construct; identical to SEQ ID NO: 10474
  source 1..80: mol_type = other DNA

SEQ ID NO: 26272 - DNA, 80 bp, synthetic construct
  source 1..80: mol_type = other DNA
gaaaaacaaaacaaacaaaaggagtatgttaggccattgtaggggaggaggagaggccttctaagcagggactgtcacaa

SEQ ID NO: 26273 - DNA, 80 bp, synthetic construct
  source 1..80: mol_type = other DNA
gagcatggagtgtgcgactgccataggccctgctcagtgccctacaccccgtgtgtgcctgtgacacctgatggcctatg

SEQ ID NO: 26274 - DNA, 80 bp, synthetic construct
  source 1..80: mol_type = other DNA
gctggagcttcgtgtttgcagagcttcatgcttcagttggtaccccgtgaggcttgtgtgggcagctgttcagaaacctc

SEQ ID NO: 26275 - DNA, 80 bp, synthetic construct; identical to SEQ ID NO: 10475
  source 1..80: mol_type = other DNA

SEQ ID NO: 26276 - DNA, 80 bp, synthetic construct
  source 1..80: mol_type = other DNA
catgttgttcagccatcaccatctgtcactgaatgtttttgtcttgtacaacaaaaactctggactcagccaggcactgt

SEQ ID NO: 26277 - DNA, 80 bp, synthetic construct
  source 1..80: mol_type = other DNA
aattagccaggcatggtagcgggcgcctgtaatcccagctcctcaggaggctgaggcaggagaatcgcttgaacccggga

SEQ ID NO: 26278 - DNA, 80 bp, synthetic construct
  source 1..80: mol_type = other DNA
ttcccctccccgcggcaaccactgttctactttctgtatggatttggctaatcgaggtacttcatatgagtggattcata

SEQ ID NO: 26279 - DNA, 80 bp, synthetic construct
  source 1..80: mol_type = other DNA
gctcaggagttcaagaccacccaggacaacatcatgagaccccatctctactaaaaatacaaaaaaatgaaccgggtgtg

SEQ ID NO: 26280 - DNA, 80 bp, synthetic construct; identical to SEQ ID NO: 10476
  source 1..80: mol_type = other DNA

SEQ ID NO: 26281 - DNA, 80 bp, synthetic construct
  source 1..80: mol_type = other DNA
ctcccaagtagctgggactacaggcacccgccaccacacctggctaattttttgtattttcagtagaaacggggtttcac

SEQ ID NO: 26282 - DNA, 80 bp, synthetic construct
  source 1..80: mol_type = other DNA
acagacatgcaccactgcgcccctactcaatggtatttttcacatatcagatttttacattatttgcccctcacccactt

SEQ ID NO: 26283 - DNA, 80 bp, synthetic construct; identical to SEQ ID NO: 10477
  source 1..80: mol_type = other DNA

SEQ ID NO: 26284 - DNA, 80 bp, synthetic construct
  source 1..80: mol_type = other DNA
gtcatttgatggttgtatatgtgcacgtatgtgcattcaggtgtaatttacagacaatgaaagtcactcttggtatactg

SEQ ID NO: 26285 - DNA, 80 bp, synthetic construct
  source 1..80: mol_type = other DNA
cacgacaccactgatgtgctttctccccttacagtttagcacttttccgaatgtcatataaatagaattgtacagtgtgt

SEQ ID NO: 26286 - DNA, 80 bp, synthetic construct
  source 1..80: mol_type = other DNA
agatgtaacatacataccatagagttcacccgtttaaaatggaccattcagtggtggttagtattatctcagagttgtgc

SEQ ID NO: 26287 - DNA, 80 bp, synthetic construct; identical to SEQ ID NO: 10478
  source 1..80: mol_type = other DNA

SEQ ID NO: 26288 - DNA, 80 bp, synthetic construct
  source 1..80: mol_type = other DNA
cccgccactacacccagctaatttttttgtatttttagtaaagacagggtttcactgtgttagccaggatggtctcgatt

SEQ ID NO: 26289 - DNA, 80 bp, synthetic construct
  source 1..80: mol_type = other DNA
caaggattctcctgcctcagcctcccgagcagctgggattacaggcgcccaccaccacgcctggctagttttttttgttt

SEQ ID NO: 26290 - DNA, 80 bp, synthetic construct
  source 1..80: mol_type = other DNA
catctcaccctccaggggtaggggctggtggagctgttctcactcagtttgtcctcagttccttcttgagcctggaccct

SEQ ID NO: 26291 - DNA, 80 bp, synthetic construct; identical to SEQ ID NO: 10479
  source 1..80: mol_type = other DNA

SEQ ID NO: 26292 - DNA, 80 bp, synthetic construct
  source 1..80: mol_type = other DNA
ttgggattggcagacacactgggtttgtacaggaggggaccctgaaggatgggctgtggtcaaagtgggatcccttcact

SEQ ID NO: 26293 - DNA, 80 bp, synthetic construct
  source 1..80: mol_type = other DNA
ttctgggaagcttgatggagttgttgctgcataggtgcagaaaatcccagcagtggagtaaggcctgaagtaagccccca

SEQ ID NO: 26294 - DNA, 80 bp, synthetic construct
  source 1..80: mol_type = other DNA
aacacacacagcttccatgggctgctcactccaattctgatggagagggcatttatgactctgtccgttggtttgttttc

SEQ ID NO: 26295 - DNA, 80 bp, synthetic construct; identical to SEQ ID NO: 10480
  source 1..80: mol_type = other DNA

SEQ ID NO: 26296 - DNA, 80 bp, synthetic construct
  source 1..80: mol_type = other DNA
tgcagccatctctccacagacaatcatggccctgagcttggctgtccttggttgggtacatccaaggctctgcctgccag

SEQ ID NO: 26297 - DNA, 80 bp, synthetic construct
  source 1..80: mol_type = other DNA
ttccggagggacgctgagccaggtcccagcctgtgcactgagcatgtcattcactttgagatcccctctagggtaaggca

SEQ ID NO: 26298 - DNA, 80 bp, synthetic construct
  source 1..80: mol_type = other DNA
accagcctgggcaagaaagtgagagctcgtctctccaaaaaaacgtaaaaatattaattgctggggcgtggtggtgcatg

SEQ ID NO: 26299 - DNA, 80 bp, synthetic construct
  source 1..80: mol_type = other DNA
gaggaagacagtactcccagttatcattgcgagaggcagagatgcgagattccactttgaattatgttgaaatttgggga

SEQ ID NO: 26300 - DNA, 80 bp, synthetic construct; identical to SEQ ID NO: 10481
  source 1..80: mol_type = other DNA

SEQ ID NO: 26301 - DNA, 80 bp, synthetic construct
  source 1..80: mol_type = other DNA
gttttcaaatggttttattttagggatagatcccttctttgccaatggtatttcagatgaccccccagtatatgaaaaag

SEQ ID NO: 26302 - DNA, 80 bp, synthetic construct
  source 1..80: mol_type = other DNA
cctgtgccatggccaggaggacctgcatttccttcggactgtctctctgctcaggcggattatttcgtgcttcgtgtgcc

SEQ ID NO: 26303 - DNA, 80 bp, synthetic construct; identical to SEQ ID NO: 10482
  source 1..80: mol_type = other DNA

SEQ ID NO: 26304 - DNA, 80 bp, synthetic construct
  source 1..80: mol_type = other DNA
ccagactgaaggtctgtacccatttatagccagtaaacaactctctactccctcctccctcagcccctggccaccaccat

SEQ ID NO: 26305 - DNA, 80 bp, synthetic construct
  source 1..80: mol_type = other DNA
aataatattccattatatgtctgcaccgcattttgcttatgcatccattggtggatggacacctggcttgtttctgcctt

SEQ ID NO: 26306 - DNA, 80 bp, synthetic construct
  source 1..80: mol_type = other DNA
cacagctttctggaatgtagcaggttacttgataaagagggcgggaattcttagaaaggagggtttctggctgcaagccc

SEQ ID NO: 26307 - DNA, 80 bp, synthetic construct
  source 1..80: mol_type = other DNA
gaacagtcagtgatgaaggcagagtggcggtaggacagggaccccgcttagttatgacactgcctcctaagtggaactaa

SEQ ID NO: 26308 - DNA, 80 bp, synthetic construct; identical to SEQ ID NO: 10483
  source 1..80: mol_type = other DNA

SEQ ID NO: 26309 - DNA, 80 bp, synthetic construct
  source 1..80: mol_type = other DNA
atctggctgagctggtaattaccaagtctaactgagaaatgtcttatatgtaaccttctgtttcccttgagtgtttcgga

SEQ ID NO: 26310 - DNA, 80 bp, synthetic construct
  source 1..80: mol_type = other DNA
cctccttttaaaatcatgctacaaggatgtctttcactttgaattctgcgcttacattgttcaagaggcatcaccatgtt

SEQ ID NO: 26311 - DNA, 80 bp, synthetic construct; identical to SEQ ID NO: 10484
  source 1..80: mol_type = other DNA

SEQ ID NO: 26312 - DNA, 80 bp, synthetic construct
  source 1..80: mol_type = other DNA
tatgaggtggttctgctgtcacacaggcttggtcatgtgactgtattcagtttgtggtttgactgccgctggcatccgag

SEQ ID NO: 26313 - DNA, 80 bp, synthetic construct
  source 1..80: mol_type = other DNA
tgggctatggaacttctcagctgaacttccaccggattctgttggtacagtgtgtcgcaagtcttgcccagatctaagcg

SEQ ID NO: 26314 - DNA, 80 bp, synthetic construct
  source 1..80: mol_type = other DNA
gaaaatgatcctagaccattggtagaggaggtgaggttgtggatgacttttttagatttttgctgttgccatgttatata

SEQ ID NO: 26315 - DNA, 80 bp, synthetic construct
  source 1..80: mol_type = other DNA
gaccacaccatggggtaccttcaagctctggtgctctctcttcgccttgctgaccttgatggagtggataggccttgggt

SEQ ID NO: 26316 - DNA, 80 bp, synthetic construct; identical to SEQ ID NO: 10485
  source 1..80: mol_type = other DNA

SEQ ID NO: 26317 - DNA, 80 bp, synthetic construct
  source 1..80: mol_type = other DNA
tctgcagctgtggccgcctgctcggacaggaaaggccttgacgtccagatcctgctggtgggagagccgtggcccaggct

SEQ ID NO: 26318 - DNA, 80 bp, synthetic construct
  source 1..80: mol_type = other DNA
ttctcttcattctggacccccttgtcatcacgatgccagtgctgtccctttggtgtggggtttgtgctctgacctgaccc

SEQ ID NO: 26319 - DNA, 80 bp, synthetic construct; identical to SEQ ID NO: 10486
  source 1..80: mol_type = other DNA

SEQ ID NO: 26320 - DNA, 80 bp, synthetic construct
  source 1..80: mol_type = other DNA
ggaggtgaggctggtggctgttcttcagctgtgggactcgtgtggggacaagctgaacagtgtgctgatctctgatcacc

SEQ ID NO: 26321 - DNA, 80 bp, synthetic construct
  source 1..80: mol_type = other DNA
gaatgagcacattctgagggtgagtggctgtcagcagttaggaaaaattgcctgttgacttgtttcattaagaggcccct

SEQ ID NO: 26322 - DNA, 80 bp, synthetic construct
  source 1..80: mol_type = other DNA
tgacaatggatggatggatggacggagggccaggccaaccaggcagtgaaaacaggaaacctaatcttttaaaaataatc

SEQ ID NO: 26323 - DNA, 80 bp, synthetic construct; identical to SEQ ID NO: 10487
  source 1..80: mol_type = other DNA

SEQ ID NO: 26324 - DNA, 80 bp, synthetic construct
  source 1..80: mol_type = other DNA
cttctcacaaacctctgagttgcccatgggctgaaggtcaaggtcacgcatctcaggcaggcaggtgtgcaggaccctcc

SEQ ID NO: 26325 - DNA, 80 bp, synthetic construct
  source 1..80: mol_type = other DNA
tttgaggctactttctgcagtcaccactattatcccaccccatgtagttctctgtccccgacctgcatgtaacctgtttc

SEQ ID NO: 26326 - DNA, 80 bp, synthetic construct
  source 1..80: mol_type = other DNA
ttaccattgcttctgactcgaaggacacggccccttggggctggctggtgtcatgtgtggctgcacagaggggaggggct

SEQ ID NO: 26327 - DNA, 80 bp, synthetic construct
  source 1..80: mol_type = other DNA
tgtacttctgaaaggaggaaggttacactgaagtttcacctaccgtccatgggattttgaccctgctgtagtgacagctg

SEQ ID NO: 26328 - DNA, 80 bp, synthetic construct; identical to SEQ ID NO: 10488
  source 1..80: mol_type = other DNA

SEQ ID NO: 26329 - DNA, 80 bp, synthetic construct
  source 1..80: mol_type = other DNA
tcttactgtatacttggtgtttcattcacactccttgcagcatgcttctgggatatgatgaaaatcagctgtgggtgttg

SEQ ID NO: 26330 - DNA, 80 bp, synthetic construct
  source 1..80: mol_type = other DNA
gcactgtgggcttccagggagatttatttcatgccatggttccccttttggataaggggctagatttgctttcttcatca

SEQ ID NO: 26331 - DNA, 80 bp, synthetic construct; identical to SEQ ID NO: 10489
  source 1..80: mol_type = other DNA

SEQ ID NO: 26332 - DNA, 80 bp, synthetic construct
  source 1..80: mol_type = other DNA
ttgcagaggagccatgggggaccatgtctcagcacctctgaaaggttttctgccccatccagtctgctgcttctctcccc

SEQ ID NO: 26333 - DNA, 80 bp, synthetic construct
  source 1..80: mol_type = other DNA
cattcctgcacctccatgctgaatgaagaggccacacgaggatgctcacactgctcagtgcttcttagagaaagctgctg

SEQ ID NO: 26334 - DNA, 80 bp, synthetic construct
  source 1..80: mol_type = other DNA
cccacttttctttgtgggacagctttcgggagggtggggttgtctttgttatgagaagtgacagccagatggactcagtg

SEQ ID NO: 26335 - DNA, 80 bp, synthetic construct
  source 1..80: mol_type = other DNA
gggaggctgaggcaggagaatcacttgaacccaggaggcggaggttgcagtgagctgagatcatgccactgcactccagc

SEQ ID NO: 26336 - DNA, 80 bp, synthetic construct; identical to SEQ ID NO: 10490
  source 1..80: mol_type = other DNA

SEQ ID NO: 26337 - DNA, 80 bp, synthetic construct
  source 1..80: mol_type = other DNA
gtatgttggtgggaaaaggttgatacgattgtcagataaattgcacaagtgctaagtgctgagaaagttcagagcagggg

SEQ ID NO: 26338 - DNA, 80 bp, synthetic construct
  source 1..80: mol_type = other DNA
tggtgaacagaccagacgtgggctatgttgtctgggcctgtgaagctgagttcaagagcccaagccttcctccctcatgc

SEQ ID NO: 26339 - DNA, 80 bp, synthetic construct; identical to SEQ ID NO: 10491
  source 1..80: mol_type = other DNA

SEQ ID NO: 26340 - DNA, 80 bp, synthetic construct
  source 1..80: mol_type = other DNA
ggttagactttaacataagagctttggtggggggtacagtattaagtccatagcacaaggggtgacaccttggagtgggt

SEQ ID NO: 26341 - DNA, 80 bp, synthetic construct
  source 1..80: mol_type = other DNA
gggaattggggtgtgagtgtgagcatgtgtgagtatttgtatgtgcacacttgtgtgtgtacatgcatatctccaagtgt

SEQ ID NO: 26342 - DNA, 80 bp, synthetic construct
  source 1..80: mol_type = other DNA
catatccaaagccctgtgtgcacagtcgctcccttcttccctcttctcctggtatcagcccccctattctggctggctga

SEQ ID NO: 26343 - DNA, 80 bp, synthetic construct
  source 1..80: mol_type = other DNA
ttttgtttctagaccctgattgccatgtggttttcacaccgcctctcctcctgccattgacagtggggggctttgattgc

SEQ ID NO: 26344 - DNA, 80 bp, synthetic construct; identical to SEQ ID NO: 10492
  source 1..80: mol_type = other DNA

SEQ ID NO: 26345 - DNA, 80 bp, synthetic construct
  source 1..80: mol_type = other DNA
ttttttgcactggcatttatacctttacttggttaatgattcttagagttctttatggactgtagggggaggaccgaggt

SEQ ID NO: 26346 - DNA, 80 bp, synthetic construct
  source 1..80: mol_type = other DNA
cagggtggtgggttggcagatgacttgaaggaagagcccactccctgcttacccactctcgttttaatacgccaagtctg

SEQ ID NO: 26347 - DNA, 80 bp, synthetic construct
  source 1..80: mol_type = other DNA
aaaccctgtctctactaagaatacaaaaatcagccaggcatggtggcacacgcctgtgatcccagctacttgggaggctg

SEQ ID NO: 26348 - DNA, 80 bp, synthetic construct; identical to SEQ ID NO: 10493
  source 1..80: mol_type = other DNA

SEQ ID NO: 26349 - DNA, 80 bp, synthetic construct
  source 1..80: mol_type = other DNA
tgtggtgctttttttttttttttcctgtgccttgattcttccatttaaatacagaggacacctgaccctaaggcgcatgg

SEQ ID NO: 26350 - DNA, 80 bp, synthetic construct
  source 1..80: mol_type = other DNA
aaggcgagaccgctggctggagactggactgcggggccatcctccaggctcttgcacggggacctggaggatgtggccca

SEQ ID NO: 26351 - DNA, 80 bp, synthetic construct
  source 1..80: mol_type = other DNA
ttatatcccactgacaccgaggtttattcgcaatgcacttcagcagatagggtgatggggtagaatcacagagctgagga

SEQ ID NO: 26352 - DNA, 80 bp, synthetic construct; identical to SEQ ID NO: 10494
  source 1..80: mol_type = other DNA

SEQ ID NO: 26353 - DNA, 80 bp, synthetic construct
  source 1..80: mol_type = other DNA
aatggtgcaaaccttcttgcactccgtaaatgattcatttccttcaaatgtcctatgctgttttccagcagaatctccat

SEQ ID NO: 26354 - DNA, 80 bp, synthetic construct
  source 1..80: mol_type = other DNA
gctgttgtgagctttcccgtcagaaatatccttcccatggggcctgaagtaattattttatatttattggcattaagtgt

SEQ ID NO: 26355 - DNA, 80 bp, synthetic construct
  source 1..80: mol_type = other DNA
cagagaggaagagagaggttcctaagcttcatggtgaatttctaagtctgtgttgactgcaggaaatgtatgaggaaagg

SEQ ID NO: 26356 - DNA, 80 bp, synthetic construct; identical to SEQ ID NO: 10495
  source 1..80: mol_type = other DNA

SEQ ID NO: 26357 - DNA, 80 bp, synthetic construct
  source 1..80: mol_type = other DNA
atagcagagtatcttttcaactaggttcaatatgaatgaacaggtcccctcagttgcacctgaaaggggccagaagtcct

SEQ ID NO: 26358 - DNA, 80 bp, synthetic construct
  source 1..80: mol_type = other DNA
aaaattccttcaaagccaaaaaccatgcaaatatggagctgcctgacaagccgaatgattgatagggtagaaaatagggt

SEQ ID NO: 26359 - DNA, 80 bp, synthetic construct
  source 1..80: mol_type = other DNA
gtagctcccagtattccccagttaccagtggaggctccaaagatatatcttttgtgtgaattgcacagcccacgatcagg

SEQ ID NO: 26360 - DNA, 80 bp, synthetic construct; identical to SEQ ID NO: 10496
  source 1..80: mol_type = other DNA

SEQ ID NO: 26361 - DNA, 80 bp, synthetic construct
  source 1..80: mol_type = other DNA
ggccatgagttattggagattcagtttccagggtggttcttgaacctaagaaatcttctagaagcctgggtcatgttgtg

SEQ ID NO: 26362 - DNA, 80 bp, synthetic construct
  source 1..80: mol_type = other DNA
tctaagttgccaaacttatgtgcacagagttgttcgcagtatttccctagcatcttcttaatgtgtgtgggatcagtagt

SEQ ID NO: 26363 - DNA, 80 bp, synthetic construct
  source 1..80: mol_type = other DNA
acaaatttttatatattgcatttttattttcagtcattccaaaccagtttctaattttcctcgagacttcctttttcatc

SEQ ID NO: 26364 - DNA, 80 bp, synthetic construct; identical to SEQ ID NO: 10497
  source 1..80: mol_type = other DNA

SEQ ID NO: 26365 - DNA, 80 bp, synthetic construct
  source 1..80: mol_type = other DNA
gactttaagatgtttcatcctcttctggcctctatagtttctgatgggaaatctacagttacgtgaatccttattctcct

SEQ ID NO: 26366 - DNA, 80 bp, synthetic construct
  source 1..80: mol_type = other DNA
cactgcatttctcgggtctgtaaatttatgttcttcccctaatttgggaagtgttcagctattgtattttccgatactgt

SEQ ID NO: 26367 - DNA, 80 bp, synthetic construct
  source 1..80: mol_type = other DNA
tctttaagttcactgactccattgtcatctccattctgctgttgaacccctccaggtaattgtttattttttggttctaa

SEQ ID NO: 26368 - DNA, 80 bp, synthetic construct
  source 1..80: mol_type = other DNA
ggttgatgttagttgattgccttttcctttcacagtttatgttgcttagttctctgtcaagtaattttgggttatatcct

SEQ ID NO: 26369 - DNA, 80 bp, synthetic construct; identical to SEQ ID NO: 10498
  source 1..80: mol_type = other DNA

SEQ ID NO: 26370 - DNA, 80 bp, synthetic construct
  source 1..80: mol_type = other DNA
tctgtgctgtgctgattctaagtgttttcacacatgtgcagtttaggggtgagcccagggcttcttatgaagatttaaag

SEQ ID NO: 26371 - DNA, 80 bp, synthetic construct
  source 1..80: mol_type = other DNA
ttggttagtgtagagtggaaagagtccacgggtctccaccccagggaggccgctgcttgcatctgtggggagaggaatgg

SEQ ID NO: 26372 - DNA, 80 bp, synthetic construct; identical to SEQ ID NO: 10499
  source 1..80: mol_type = other DNA

SEQ ID NO: 26373 - DNA, 80 bp, synthetic construct
  source 1..80: mol_type = other DNA
tgtgtgtggtgatgttccctgggatagaccactactgcccttagacagcattctgagggtggtggcccatactgatcacc

SEQ ID NO: 26374 - DNA, 80 bp, synthetic construct
  source 1..80: mol_type = other DNA
agcagtgtcccagggtttgctcattgtctgctttgcttcagacccttctatcaaattccattgtctctgtcttaatggtc

SEQ ID NO: 26375 - DNA, 80 bp, synthetic construct
  source 1..80: mol_type = other DNA
cctgctccccagccgcacatccagctgtcatttcctagagaacccatcccacgcagttgttttggacacatagcgttcct

SEQ ID NO: 26376 - DNA, 80 bp, synthetic construct; identical to SEQ ID NO: 10500
  source 1..80: mol_type = other DNA

SEQ ID NO: 26377 - DNA, 80 bp, synthetic construct
  source 1..80: mol_type = other DNA
ttgagaccagcctgggcaacctagtgagactccgtctctataaaaaaataaaattagctggatgtggtagtgcacgcctg

SEQ ID NO: 26378 - DNA, 80 bp, synthetic construct
  source 1..80: mol_type = other DNA
aaaataaataaaataccaacagcctgtgctggctggagccatggtgttaaaaggcccatggacttgggccatgcctgagc

SEQ ID NO: 26379 - DNA, 80 bp, synthetic construct
  source 1..80: mol_type = other DNA
cccgtgcctacgcccaacctttatgccccgtttttagtgggagaattttgtttggagctgcaggtgttggggggtggcac

SEQ ID NO: 26380 - DNA, 80 bp, synthetic construct; identical to SEQ ID NO: 10501
  source 1..80: mol_type = other DNA

SEQ ID NO: 26381 - DNA, 80 bp, synthetic construct
  source 1..80: mol_type = other DNA
tcggggtgtcctggctgaccagccgaatccactttttattgacaagaagcctgggtcccagagacattaagtaacgtgct

SEQ ID NO: 26382 - DNA, 80 bp, synthetic construct
  source 1..80: mol_type = other DNA
gtgcaccagagtgggttggagacaggacccagagcaccaccctttacctgaccagcatcttggtggggttccccacctgg

SEQ ID NO: 26383 - DNA, 80 bp, synthetic construct
  source 1..80: mol_type = other DNA
cagagagatggaatgaatgctgccgtgtcgcattcatgtaggaaggccttatttacaaaccatctgtagcagtcagaagg

SEQ ID NO: 26384 - DNA, 80 bp, synthetic construct; identical to SEQ ID NO: 10502
  source 1..80: mol_type = other DNA

SEQ ID NO: 26385 - DNA, 80 bp, synthetic construct
  source 1..80: mol_type = other DNA
ttcttggagcgagcttcctgagcagcctctgcaggctccaggctctggcagcatctccacgccactcctgccggcctttc

SEQ ID NO: 26386 - DNA, 80 bp, synthetic construct
  source 1..80: mol_type = other DNA
tggtgcacgcctggccctggggtcttcacattcttcagaagaggccaggcatggaggctcgtgcctgtaatcccagcact

SEQ ID NO: 26387 - DNA, 80 bp, synthetic construct
  source 1..80: mol_type = other DNA
cgcttgaacccaggagtcgggggttgttgtgagctgagatcacaccactgcacgccagcctgggtgacagagcgagaccc

SEQ ID NO: 26388 - DNA, 80 bp, synthetic construct
  source 1..80: mol_type = other DNA
tctctgggtggtcgctgaccaaaaacatcacttctgggttttgtgactcagaaatgagctcagcctgtataccctgcaga

SEQ ID NO: 26389 - DNA, 80 bp, synthetic construct; identical to SEQ ID NO: 10503
  source 1..80: mol_type = other DNA

SEQ ID NO: 26390 - DNA, 80 bp, synthetic construct
  source 1..80: mol_type = other DNA
gttatttacttcatctgtttatttagatctgggccctggggtggccccatgcgttgaataagtgtgttctacagaaccca

SEQ ID NO: 26391 - DNA, 80 bp, synthetic construct
  source 1..80: mol_type = other DNA
cacctgggagagcatcccgcagcccaggagggtggtcaggttaagtcacagcagggatggggctatcagaatggtgggct

SEQ ID NO: 26392 - DNA, 80 bp, synthetic construct
  source 1..80: mol_type = other DNA
ccctgatgcgggggtgtgtgtgagctggagccgtgggaccagggccgaacccgtgtgctggacagtcttcggggcccaga

SEQ ID NO: 26393 - DNA, 80 bp, synthetic construct; identical to SEQ ID NO: 10504
  source 1..80: mol_type = other DNA

SEQ ID NO: 26394 - DNA, 80 bp, synthetic construct
  source 1..80: mol_type = other DNA
gagacggggtttcaccatgctggccagactggtctcgaactcctgacctcaagtgatccgcctgccttggcatcccaaag

SEQ ID NO: 26395 - DNA, 80 bp, synthetic construct
  source 1..80: mol_type = other DNA
gtggcgaggacatagatgtccaggcccatgtgttccacggcataatgtggggactgcagagaggaagggacatgtttatg

SEQ ID NO: 26396 - DNA, 80 bp, synthetic construct
  source 1..80: mol_type = other DNA
cagtatcaaggagctggaacatttggagtctgccaagggcccacttcctggttcttagccatcttcttgctgtgttctca

SEQ ID NO: 26397 - DNA, 80 bp, synthetic construct; identical to SEQ ID NO: 10505
  source 1..80: mol_type = other DNA

SEQ ID NO: 26398 - DNA, 80 bp, synthetic construct
  source 1..80: mol_type = other DNA
cttctgtttcatggagaagagctacttgcttaagacaggttcctcaaacccctggcatctggtctcaggtgactctgagc

SEQ ID NO: 26399 - DNA, 80 bp, synthetic construct
  source 1..80: mol_type = other DNA
gtgaatccacttgtcctaatagaccactccaactttctgaacatcccaggctttcctggtacagtccccatcttccagcc

SEQ ID NO: 26400 - DNA, 80 bp, synthetic construct
  source 1..80: mol_type = other DNA
gatgtctgctgtgttcctgacgttggcctgggtgtgggatgtgactgggtgtctgttgctctccttggcaggtgcctgcc

SEQ ID NO: 26401 - DNA, 80 bp, synthetic construct; identical to SEQ ID NO: 10506
  source 1..80: mol_type = other DNA

SEQ ID NO: 26402 - DNA, 80 bp, synthetic construct
  source 1..80: mol_type = other DNA
tttgtgagttgaatctctgcagaactcacttttcccaggaggtgctttcagaatgcagcataccacagtcctcatcagga

SEQ ID NO: 26403 - DNA, 80 bp, synthetic construct
  source 1..80: mol_type = other DNA
gattgggagtaacaggtgggatctggaccaggttgtcacacccacaatgacagctgggattatcaccgtgggtggtaatt

SEQ ID NO: 26404 - DNA, 80 bp, synthetic construct
  source 1..80: mol_type = other DNA
tctggcctgatttttgctggagaagagaaatgtggaagtcagggtggtggcctttgcagtgggtcagctttgggctgctg

SEQ ID NO: 26405 - DNA, 80 bp, synthetic construct; identical to SEQ ID NO: 10507
  source 1..80: mol_type = other DNA

SEQ ID NO: 26406 - DNA, 80 bp, synthetic construct
  source 1..80: mol_type = other DNA
gagagtgtcattatccccatttcattggtgggaacattgagagatgaaacgaggagtttcatctgcaggcccctgggccc

SEQ ID NO: 26407 - DNA, 80 bp, synthetic construct
  source 1..80: mol_type = other DNA
caaatacttgtttaagaatggaagagttcctggccacataatccatgtgcacagattttccgggggaaaatccatttgag

SEQ ID NO: 26408 - DNA, 80 bp, synthetic construct; identical to SEQ ID NO: 10508
  source 1..80: mol_type = other DNA

SEQ ID NO: 26409 - DNA, 80 bp, synthetic construct
  source 1..80: mol_type = other DNA
tgacccaggattaggccgggggtgggaattacagactacccccaggactgacccagagctatacccctccagggccggtg

SEQ ID NO: 26410 - DNA, 80 bp, synthetic construct
  source 1..80: mol_type = other DNA
aacccaggctatggaatcatgtgtgggcccagcagggttcataggcaccttctcagtctgtctccagcgttgggctcttc

SEQ ID NO: 26411 - DNA, 80 bp, synthetic construct
  source 1..80: mol_type = other DNA
caggaggggctggttggctggcagtgttgtgcaggacattcagaacgtgactgggtttctattctgatttgtacaagcat

SEQ ID NO: 26412 - DNA, 80 bp, synthetic construct
  source 1..80: mol_type = other DNA
tactctgaccttgtgggccttggtgtctgctcttcccctctgtctgccactctgagtctggaatgtggcagtgatatggg

SEQ ID NO: 26413 - DNA, 80 bp, synthetic construct; identical to SEQ ID NO: 10509
  source 1..80: mol_type = other DNA

SEQ ID NO: 26414 - DNA, 80 bp, synthetic construct
  source 1..80: mol_type = other DNA
tttttatatttttttgtagagacacgttcttgttatgttgtccaggctagtctcgaactcctggcctgaagtgatcctgc

SEQ ID NO: 26415 - DNA, 80 bp, synthetic construct
  source 1..80: mol_type = other DNA
gaatttaggagggaacacaatttagcccctaaaactgtacttctattcttttgttttaaatttcagagcctggctgatcg

SEQ ID NO: 26416 - DNA, 80 bp, synthetic construct
  source 1..80: mol_type = other DNA
acacggtgaaaccccgtctctactaaaaatacaaaaaatcagccgggcgtggtggcgggcgcctgtagttccagctaatc

SEQ ID NO: 26417 - DNA, 80 bp, synthetic construct; identical to SEQ ID NO: 10510
  source 1..80: mol_type = other DNA

SEQ ID NO: 26418 - DNA, 80 bp, synthetic construct
  source 1..80: mol_type = other DNA
ggctgaataatactcctttacatgtatgtggcacgttctggttttccactcatgcattgatggatgctagggttgctgcc

SEQ ID NO: 26419 - DNA, 80 bp, synthetic construct
  source 1..80: mol_type = other DNA
tggctgggccctggccccgggctcagggtggtgaccgccagcagggggaagtccctcttcctgccattcccccccgacca

SEQ ID NO: 26420 - DNA, 80 bp, synthetic construct; identical to SEQ ID NO: 10511
  source 1..80: mol_type = other DNA

SEQ ID NO: 26421 - DNA, 80 bp, synthetic construct
  source 1..80: mol_type = other DNA
cctggagtgaccatcgcagaagcccccagccctgccccacctccagtgccacactcagatgtgctgccagaacgtcacct

SEQ ID NO: 26422 - DNA, 80 bp, synthetic construct
  source 1..80: mol_type = other DNA
ctttcccagagaccacttccagccccccttagctcttagtggcctctggctggatctagaaaccaaactgacaccaggta

SEQ ID NO: 26423 - DNA, 80 bp, synthetic construct; identical to SEQ ID NO: 10512
  source 1..80: mol_type = other DNA

SEQ ID NO: 26424 - DNA, 80 bp, synthetic construct
  source 1..80: mol_type = other DNA
cgaagtcagtgtagccatccggtgtattttgggatggcacgtccttcactctttcccagcctttctgcatttgtaagccc

SEQ ID NO: 26425 - DNA, 80 bp, synthetic construct
  source 1..80: mol_type = other DNA
tgtcctcagactccatggcaccgagttcaggccatgtcttagtgtcctgtggcttccttaacagaatgccacaagcttag

SEQ ID NO: 26426 - DNA, 80 bp, synthetic construct
  source 1..80: mol_type = other DNA
aacatctctccagtccctgcctccgccttcaaatggcctcctgtatgcctgtgtcttctgtctctttaaagatatttgtc

SEQ ID NO: 26427 - DNA, 80 bp, synthetic construct
  source 1..80: mol_type = other DNA
gagcatcttttgttattcatacaagcccttttctgtgggacctgaggttatgctaatgaggtgatgcttgaggggcccct

SEQ ID NO: 26428 - DNA, 80 bp, synthetic construct; identical to SEQ ID NO: 10513
  source 1..80: mol_type = other DNA

SEQ ID NO: 26429 - DNA, 80 bp, synthetic construct
  source 1..80: mol_type = other DNA
cgaattctgtgagctgttctagcaattttttttttttttttttaagatggagcctcgctctgttgcccaggctggagtgc

SEQ ID NO: 26430 - DNA, 80 bp, synthetic construct
  source 1..80: mol_type = other DNA
aactcctgaccttgtgatccgcctgcctcagcctcccaaagttgctgggattacaggcatgagccaccgtgcccggctct

SEQ ID NO: 26431 - DNA, 80 bp, synthetic construct
  source 1..80: mol_type = other DNA
cttattccacatacttactggcagaatggaattaaattataggacacccggctggtgtccagagactgggaggattgcct

SEQ ID NO: 26432 - DNA, 80 bp, synthetic construct; identical to SEQ ID NO: 10514
  source 1..80: mol_type = other DNA

SEQ ID NO: 26433 - DNA, 80 bp, synthetic construct
  source 1..80: mol_type = other DNA
ctgcctctctcccgtggccttgtcatggttgctgtgatgcccacgtcacgtgactccatggattccgctggctcccatgg

SEQ ID NO: 26434 - DNA, 80 bp, synthetic construct
  source 1..80: mol_type = other DNA
ataataactgtatcatcctggggcggagggctgctgcctcttcccagctggggtttcagcctctgccctgcccccgcacc

SEQ ID NO: 26435 - DNA, 80 bp, synthetic construct; identical to SEQ ID NO: 10515
  source 1..80: mol_type = other DNA

SEQ ID NO: 26436 - DNA, 80 bp, synthetic construct
  source 1..80: mol_type = other DNA
gctcaggcccttcccgactgacattttccagcctatggggggccttggctagcctggtggctttctctgtggcatacgct

SEQ ID NO: 26437 - DNA, 80 bp, synthetic construct
  source 1..80: mol_type = other DNA
ggtggcaggcctttagccagggtgcggtggctaactggatggggcacgtctcatttataaagaattttgaggcacttggc

SEQ ID NO: 26438 - DNA, 80 bp, synthetic construct
  source 1..80: mol_type = other DNA
tcgggaaacagtggaattatgttccgggttccctgcttaggagaggaaaacaggtcagccttaaaaaaaaaaaaaaattg

SEQ ID NO: 26439 - DNA, 80 bp, synthetic construct; identical to SEQ ID NO: 10516
  source 1..80: mol_type = other DNA

SEQ ID NO: 26440 - DNA, 80 bp, synthetic construct
  source 1..80: mol_type = other DNA
agaccagcctaggcaacatagcgagacccctgtctctacaaaaagaaaaaaaaaattattttagctggacataatggcac

SEQ ID NO: 26441 - DNA, 80 bp, synthetic construct
  source 1..80: mol_type = other DNA
ttttgtttgaacactagttttcaattgttttgattatacacctaggaggggagttgctaagtcgtaaggttatcaatgcc

SEQ ID NO: 26442 - DNA, 80 bp, synthetic construct
  source 1..80: mol_type = other DNA
ctctgcctgagactcagtttttcctgtctgaaaaatagcaatctaaaagttcatgcccactcaggtgcgtattccaagag

SEQ ID NO: 26443 - DNA, 80 bp, synthetic construct; identical to SEQ ID NO: 10517
  source 1..80: mol_type = other DNA

SEQ ID NO: 26444 - DNA, 80 bp, synthetic construct
  source 1..80: mol_type = other DNA
gacccgaacctctgtcccagccatggttttccaagcctctctggaggacagtgcctgcctgacaatccctccaaaagacg

SEQ ID NO: 26445 - DNA, 80 bp, synthetic construct
  source 1..80: mol_type = other DNA
cacagctggccgagccaccggatgtttgatctccttttacctttgtaaataaatactgcctagtctttggctgccagtgt

SEQ ID NO: 26446 - DNA, 80 bp, synthetic construct
  source 1..80: mol_type = other DNA
ggccctttacagccgctctcattgttctgggtagggagggcccagagcatgacctctgatcccctgagggcttgctccca

SEQ ID NO: 26447 - DNA, 80 bp, synthetic construct
  source 1..80: mol_type = other DNA
ccgatggtctgagctcagttctgcatgcatttcctgggagcccaccgttccaccttctgtctctatgaatctgactactg

SEQ ID NO: 26448 - DNA, 80 bp, synthetic construct; identical to SEQ ID NO: 10518
  source 1..80: mol_type = other DNA

SEQ ID NO: 26449 - DNA, 80 bp, synthetic construct
  source 1..80: mol_type = other DNA
aaatacgaaaattagctgggtgtggtggcgcacgcttgtaatcacagctacttgggaggccaaggcaggagaatcacttg

SEQ ID NO: 26450 - DNA, 80 bp, synthetic construct
  source 1..80: mol_type = other DNA
aattttttgaaagatttttttttttgaaccagtgtagtctaggggatgtgaccgcagcacctacctgggcctgggctgac

SEQ ID NO: 26451 - DNA, 80 bp, synthetic construct
  source 1..80: mol_type = other DNA
ttccacaccaaccctgggctgtctgcactggacttcctctccccagccccactcctagtctggttcctggttcaggtgag

SEQ ID NO: 26452 - DNA, 80 bp, synthetic construct; identical to SEQ ID NO: 10519
  source 1..80: mol_type = other DNA

SEQ ID NO: 26453 - DNA, 80 bp, synthetic construct
  source 1..80: mol_type = other DNA
ggcaggccaggcacggtggctcacgcctgtaatcccagcactttgggaggccaaggtgggtggatcacaaggtcaggaga

SEQ ID NO: 26454 - DNA, 80 bp, synthetic construct
  source 1..80: mol_type = other DNA
atcgcgccactgcactccagcctggacgacagagcaagactctgtctcaaaaaaaaaaaaaaaaaaattagctgggcata

SEQ ID NO: 26455 - DNA, 80 bp, synthetic construct; identical to SEQ ID NO: 10520
  source 1..80: mol_type = other DNA

SEQ ID NO: 26456 - DNA, 80 bp, synthetic construct
  source 1..80: mol_type = other DNA
ccctcatatggaacgtggcagggatgagcaggccatctggaatccagacttaaaagcatcagtcacccagacattgattt

SEQ ID NO: 26457 - DNA, 80 bp, synthetic construct
  source 1..80: mol_type = other DNA
gggcacttgattcttgcaccaggttttagcgtggacgttgctaagccagcatgtggcttcgcacatgtggagtcttacag

SEQ ID NO: 26458 - DNA, 80 bp, synthetic construct
  source 1..80: mol_type = other DNA
ttgatgtcttaagatcgtcttcagataaacagcaaaaccgttggttaaaagctggtctaacccaccttattttgttgttg

SEQ ID NO: 26459 - DNA, 80 bp, synthetic construct
  source 1..80: mol_type = other DNA
tctgctagaacatttagtagacgctgacaattccaagctaatgtaaaagccaagtctggagggtcatggggtgggagact

SEQ ID NO: 26460 - DNA, 80 bp, synthetic construct; identical to SEQ ID NO: 10521
  source 1..80: mol_type = other DNA

SEQ ID NO: 26461 - DNA, 80 bp, synthetic construct
  source 1..80: mol_type = other DNA
ttaataaccaacatagcgatcttggtacctggagccccctcgatgtcccatggattaaggagaccagattcctccataca

SEQ ID NO: 26462 - DNA, 80 bp, synthetic construct
  source 1..80: mol_type = other DNA
cccggcccggactttgcagccagtagttgtgtgcaatcacctgggacagtgctgcaggtcagcagccggcaatgctagac

SEQ ID NO: 26463 - DNA, 80 bp, synthetic construct
  source 1..80: mol_type = other DNA
ctgttagagggtgctgagtcctgtgggacgagaagtggagaacctgggagagggagaggcagaggtgtgcaaggaagccg

SEQ ID NO: 26464 - DNA, 80 bp, synthetic construct; identical to SEQ ID NO: 10522
  source 1..80: mol_type = other DNA

SEQ ID NO: 26465 - DNA, 80 bp, synthetic construct
  source 1..80: mol_type = other DNA
ggccagaagatccttgtgggttgacagtggtcatgatgagtccactggcttagaaaactcaggctgagaacaggccatgg

SEQ ID NO: 26466 - DNA, 80 bp, synthetic construct
  source 1..80: mol_type = other DNA
ctctgtcctcctgcgggtactcacattggggtaagggtggtctgggatttcgacagacctgctggaaggtggtctatgac

SEQ ID NO: 26467 - DNA, 80 bp, synthetic construct; identical to SEQ ID NO: 10523
  source 1..80: mol_type = other DNA

SEQ ID NO: 26468 - DNA, 80 bp, synthetic construct
  source 1..80: mol_type = other DNA
ccatgcccacctaattttttatagttttagtagagatggggttcaccatattggccaggctggtctcgaactcctgacct

SEQ ID NO: 26469 - DNA, 80 bp, synthetic construct
  source 1..80: mol_type = other DNA
gttttctctgtacacaagctcaacgcagaacacttatgtgaccaaatgtaggggtttttcccacaccaagcagttctctg

SEQ ID NO: 26470 - DNA, 80 bp, synthetic construct
  source 1..80: mol_type = other DNA
agtagcaagtccaggttatctattggccgtaaattggaggttcctacagccccctccttgagtttgatcacttgctggaa

SEQ ID NO: 26471 - DNA, 80 bp, synthetic construct
  source 1..80: mol_type = other DNA
cctggaagctctcctaaccctggccttttggacagccctcattgtgtaggcatgattgattacgtcactggccattggtg

SEQ ID NO: 26472 - DNA, 80 bp, synthetic construct; identical to SEQ ID NO: 10524
  source 1..80: mol_type = other DNA

SEQ ID NO: 26473 - DNA, 80 bp, synthetic construct
  source 1..80: mol_type = other DNA
acagagatggtgtcagctgggtgcttgctgggatgggttgagtatggatgctcccttctctgtctctaacacaggatgct

SEQ ID NO: 26474 - DNA, 80 bp, synthetic construct
  source 1..80: mol_type = other DNA
tgcgctggtctcgggagccctggagtccactaaagcggtgagtccccatggtgtacgtgtggcaggagggccaggtgagg

SEQ ID NO: 26475 - DNA, 80 bp, synthetic construct
  source 1..80: mol_type = other DNA
acagcctgccagatgtgttgatcagggagatcgggggatgctttgaactgagcgtggaggaggcaggcagcatgtggtct

SEQ ID NO: 26476 - DNA, 80 bp, synthetic construct; identical to SEQ ID NO: 10525
  source 1..80: mol_type = other DNA

SEQ ID NO: 26477 - DNA, 80 bp, synthetic construct
  source 1..80: mol_type = other DNA
agaacgtagcccgggctggttgcaggctggatggtgctggaccgcccggccctgcatgaagttctgattcctcttgctgg

SEQ ID NO: 26478 - DNA, 80 bp, synthetic construct
  source 1..80: mol_type = other DNA
ctgatgacagattacttccgcactctgcttagcttatttctagatggtttccaccatagcctggcatggtggctcacacc

SEQ ID NO: 26479 - DNA, 80 bp, synthetic construct; identical to SEQ ID NO: 10526
  source 1..80: mol_type = other DNA

SEQ ID NO: 26480 - DNA, 80 bp, synthetic construct
  source 1..80: mol_type = other DNA
gccttaggtagcttcctatcccacgtcgagtgtcagctttttacagactaggaggccgaggttcagagaggtgaagtaac

SEQ ID NO: 26481 - DNA, 80 bp, synthetic construct
  source 1..80: mol_type = other DNA
ggtttggtacaaagaaggaccaagttcaggtaggctaagtgctgaacttgagaaaggcaatttctttccatcattcttga

SEQ ID NO: 26482 - DNA, 80 bp, synthetic construct
  source 1..80: mol_type = other DNA
gacttggagtacagccttcacctttcagtccagggcttctcctctgtgaagccactccagatcctggtcccccgacccct

SEQ ID NO: 26483 - DNA, 80 bp, synthetic construct
  source 1..80: mol_type = other DNA
cagagctggtctgaagaggaggggatttgattggaggagaactgtgtgtagctcctttccagaaaccttctggtgctctt

SEQ ID NO: 26484 - DNA, 80 bp, synthetic construct; identical to SEQ ID NO: 10527
  source 1..80: mol_type = other DNA

SEQ ID NO: 26485 - DNA, 80 bp, synthetic construct
  source 1..80: mol_type = other DNA
gtggactcctgtggcatgggtcttctctgtgaatacccactcgtagtgcagacagaggctggacagaggccaggcacccc

SEQ ID NO: 26486 - DNA, 80 bp, synthetic construct
  source 1..80: mol_type = other DNA
ctgttggtaatgaaaacctgcccttgcccagagcaagagggtcctttctccagcagctgtgctagctacacactcccagc

SEQ ID NO: 26487 - DNA, 80 bp, synthetic construct; identical to SEQ ID NO: 10528
  source 1..80: mol_type = other DNA

SEQ ID NO: 26488 - DNA, 80 bp, synthetic construct
  source 1..80: mol_type = other DNA
gtgtttgtacccacctaggtagggtcatggtaggagggccttccttccatgtcactgacttctttttccaatttcccttt

SEQ ID NO: 26489 - DNA, 80 bp, synthetic construct
  source 1..80: mol_type = other DNA
ctgatttctgagccatccctgtctgatgccatcagcactattcaggactctagaagattcttagtctaaggagaagtgcc

SEQ ID NO: 26490 - DNA, 80 bp, synthetic construct
  source 1..80: mol_type = other DNA
ggtggggctgtcatgggccctgctgccctagcagcctccctgggccctacaggccgcctggtactcatagtagcaagatt

SEQ ID NO: 26491 - DNA, 80 bp, synthetic construct
  source 1..80: mol_type = other DNA
actccaccattcatgatgggcagagagggggtgtcataggtcgccccaccctacgtgtatgtgcaccatgggcagcagac

SEQ ID NO: 26492 - DNA, 80 bp, synthetic construct; identical to SEQ ID NO: 10529
  source 1..80: mol_type = other DNA

SEQ ID NO: 26493 - DNA, 80 bp, synthetic construct
  source 1..80: mol_type = other DNA
gtataaatgcatatatatacacacatatacacaggcacccgggcatgctgacacctcatgcatacattcacacaagtgtg

SEQ ID NO: 26494 - DNA, 80 bp, synthetic construct
  source 1..80: mol_type = other DNA
atttgcctgagaccatggggcaggccaggccctgggcacttcgtgttgaacctgctgtctataccatgacatgcctccct

SEQ ID NO: 26495 - DNA, 80 bp, synthetic construct; identical to SEQ ID NO: 10530
  source 1..80: mol_type = other DNA

SEQ ID NO: 26496 - DNA, 80 bp, synthetic construct
  source 1..80: mol_type = other DNA
agttccacgcctgtgagcccagcaaccagtggagaagtggacggggctgtcacagacaccggacctggcaccacccccac

SEQ ID NO: 26497 - DNA, 80 bp, synthetic construct
  source 1..80: mol_type = other DNA
ggaagtcaggtggcgatttctgtggcctttggcatcatcatctttggtgtcatgcctttgctgggactgttgtaacaaag

SEQ ID NO: 26498 - DNA, 80 bp, synthetic construct
  source 1..80: mol_type = other DNA
tcttctctatgtgtcttcacataatgttccctccatttgagtctgtgtcctgacctcttcttttacaagcaccccagtcc

SEQ ID NO: 26499 - DNA, 80 bp, synthetic construct
  source 1..80: mol_type = other DNA
taccaaaaaaaaaattttttttttttttttgagatggagtttcgctcttgttgcccaggctggagtgccacagcatggtc

SEQ ID NO: 26500 - DNA, 80 bp, synthetic construct; identical to SEQ ID NO: 10531
  source 1..80: mol_type = other DNA

SEQ ID NO: 26501 - DNA, 80 bp, synthetic construct
  source 1..80: mol_type = other DNA
tctcaaaaaaaacaaaaaagaatgtgacatatggaaccttttggcttcagtttaccttaaaggccctgccttcagatacg

SEQ ID NO: 26502 - DNA, 80 bp, synthetic construct
  source 1..80: mol_type = other DNA
caacatccaacaatgtgtcagcttcatcatttggagacaaaaacagtagagcttccctgaactttcagcagggacgctaa

SEQ ID NO: 26503 - DNA, 80 bp, synthetic construct
  source 1..80: mol_type = other DNA
gcatctggagaaggcggtgctgcctgggccccgtcaatcgaagggtcatgtggcggcagcagtcagagaatccaggtgag

SEQ ID NO: 26504 - DNA, 80 bp, synthetic construct; identical to SEQ ID NO: 10532
  source 1..80: mol_type = other DNA

SEQ ID NO: 26505 - DNA, 80 bp, synthetic construct
  source 1..80: mol_type = other DNA
ccccctaccacccttccaggctgacttctgtctatttctcctgcagagtgagctggacttggaaaagggcttggagatga

SEQ ID NO: 26506 - DNA, 80 bp, synthetic construct
  source 1..80: mol_type = other DNA
gtcagagcctgggtgcagctcgccatccctggagtggataccagtggaagactgagttgccaaaccaagctggttttaaa

SEQ ID NO: 26507 - DNA, 80 bp, synthetic construct; identical to SEQ ID NO: 10533
  source 1..80: mol_type = other DNA

SEQ ID NO: 26508 - DNA, 80 bp, synthetic construct
  source 1..80: mol_type = other DNA
gttttgctatgttggccaggctggtctcaaactcctaacctcaagtgatccacctgcctcagcctcccaaagtactgaga

SEQ ID NO: 26509 - DNA, 80 bp, synthetic construct
  source 1..80: mol_type = other DNA
gttttgacctccttcctttccaaccttggctgtttcactccttcttaggcaaactgatggttcccgactcctgggaggtc

SEQ ID NO: 26510 - DNA, 80 bp, synthetic construct
  source 1..80: mol_type = other DNA
gtgcgccatcacaccctgtgtgcaccatcacaccctgtgtgcacacactttccctaaagcaggcttcctccgctgggaaa

SEQ ID NO: 26511 - DNA, 80 bp, synthetic construct
  source 1..80: mol_type = other DNA
ctcgggcctccccttggctggtgctgggggctgagttttctgctctgaggtgtggctttcctgtagggggacccctccct

SEQ ID NO: 26512 - DNA, 80 bp, synthetic construct; identical to SEQ ID NO: 10534
  source 1..80: mol_type = other DNA

SEQ ID NO: 26513 - DNA, 80 bp, synthetic construct
  source 1..80: mol_type = other DNA
gaagctgcaggaagggagggtgacgagggggaagcgaaggaaggggaagaggaagggaaaagcgagcgagaggggcaagg

SEQ ID NO: 26514 - DNA, 80 bp, synthetic construct
  source 1..80: mol_type = other DNA
ggagcgtaggggccgggaaagaggcacaaggaagaaagtatgggaaggaggaatggagggtcagggctaggcggcgggag

SEQ ID NO: 26515 - DNA, 80 bp, synthetic construct
  source 1..80: mol_type = other DNA
cggaagtgctgctgctgcacatgtgctcctacctcgacatgcgggccctcggccgcctggcccaggtgtaccgctggctg

SEQ ID NO: 26516 - DNA, 80 bp, synthetic construct; identical to SEQ ID NO: 10535
  source 1..80: mol_type = other DNA

SEQ ID NO: 26517 - DNA, 80 bp, synthetic construct
  source 1..80: mol_type = other DNA
aagtactgggctcatgaacaggaggtgaactgtgtggattgcaaagggggcatcatatcattgtgagtggctccagggac

SEQ ID NO: 26518 - DNA, 80 bp, synthetic construct
  source 1..80: mol_type = other DNA
gggacctcaacagtgggcagctgatgacacacttggacagagactttcccccaagggctggggtgctggatgtcatatat

SEQ ID NO: 26519 - DNA, 80 bp, synthetic construct; identical to SEQ ID NO: 10536
  source 1..80: mol_type = other DNA

SEQ ID NO: 26520 - DNA, 80 bp, synthetic construct
  source 1..80: mol_type = other DNA
agggtgcagtgatagttcctccccactgccccactgtgctcctgggcctgtgaccccagtgctcaggcaccttgcagtag

SEQ ID NO: 26521 - DNA, 80 bp, synthetic construct
  source 1..80: mol_type = other DNA
tacaccccttattagagccgtgatagcctacagagtgaggtgaggttctcccgccttcccaggtggtttctttctgccac

SEQ ID NO: 26522 - DNA, 80 bp, synthetic construct
  source 1..80: mol_type = other DNA
gttctagccagccctacctcaggctggctgttgagagattttacaattttcatttttgtaaaaataaagcttgattgttc

SEQ ID NO: 26523 - DNA, 80 bp, synthetic construct; identical to SEQ ID NO: 10537
  source 1..80: mol_type = other DNA

SEQ ID NO: 26524 - DNA, 80 bp, synthetic construct
  source 1..80: mol_type = other DNA
agataggcccggtgcctgcccttgtccccatgaccagctcagtagggttggcccagcatcgctctgtcaggtttccgggt

SEQ ID NO: 26525 - DNA, 80 bp, synthetic construct
  source 1..80: mol_type = other DNA
tgctctgggttgtggttctggctgaagttttatcaactcagaatttttatttttctaattatttcaaacttacaggagaa

SEQ ID NO: 26526 - DNA, 80 bp, synthetic construct
  source 1..80: mol_type = other DNA
acacaagcacaagaagttttccccctgaatacttcatttgctaagaacaaggacattcctataactcacagtagaatttg

SEQ ID NO: 26527 - DNA, 80 bp, synthetic construct; identical to SEQ ID NO: 10538
  source 1..80: mol_type = other DNA

SEQ ID NO: 26528 - DNA, 80 bp, synthetic construct
  source 1..80: mol_type = other DNA
tacaggcacgtgccaccatgcccagctaaatttttttgtgtttttagtagagacaaggtttcaccatgttggccaggctg

SEQ ID NO: 26529 - DNA, 80 bp, synthetic construct
  source 1..80: mol_type = other DNA
cacgcccgtctaatttttgtattttcagtagaaactgggtattgccatgttggccaggttggtcttgaactcctgacctc

SEQ ID NO: 26530 - DNA, 80 bp, synthetic construct
  source 1..80: mol_type = other DNA
tgtgcttctcagtgcatcagatccggaggcacatttttgattagtgaaaaatgtggaaaggaattgcttagaactttgca

SEQ ID NO: 26531 - DNA, 80 bp, synthetic construct; identical to SEQ ID NO: 10539
  source 1..80: mol_type = other DNA

SEQ ID NO: 26532 - DNA, 80 bp, synthetic construct
  source 1..80: mol_type = other DNA
ctgcacggatgaggaagaacctagaattggaggatgcaaggactcctccaggtggtcagcatggcaggggcctggcaggt

SEQ ID NO: 26533 - DNA, 80 bp, synthetic construct
  source 1..80: mol_type = other DNA
cacatggaaataaaatttaggtttgacacaaaacaaacaccaggagccgtgaatgccttgggcttccagcttgcagtcag

SEQ ID NO: 26534 - DNA, 80 bp, synthetic construct; identical to SEQ ID NO: 10540
  source 1..80: mol_type = other DNA

SEQ ID NO: 26535 - DNA, 80 bp, synthetic construct
  source 1..80: mol_type = other DNA
cttggcatttcttatgtgtctgaagggactggacatgcgtggaacaccatgggtgggaaagggggtgacctctgtgtcca

SEQ ID NO: 26536 - DNA, 80 bp, synthetic construct
  source 1..80: mol_type = other DNA
ataagtagctctggaagggaactgttacctgcctggcgccgtgagtcacttctcagcatgtcattttgggagcgggaagt

SEQ ID NO: 26537 - DNA, 80 bp, synthetic construct
  source 1..80: mol_type = other DNA
tctctcttccttcctccccctcaggccagccagctgggtgtgtaccgggccttcgtggacaactacggagttgccatgga

SEQ ID NO: 26538 - DNA, 80 bp, synthetic construct; identical to SEQ ID NO: 10541
  source 1..80: mol_type = other DNA

SEQ ID NO: 26539 - DNA, 80 bp, synthetic construct
  source 1..80: mol_type = other DNA
tctctccacaagagtcctgaggctgactttgtacctggcactggaggcgaggccggaggtggcccactcttccttttcta

SEQ ID NO: 26540 - DNA, 80 bp, synthetic construct
  source 1..80: mol_type = other DNA
tgcctgcatttagccccaggaagctgaaacctcaaaccatgtggtgttagcgcccagggcctcgaaagagtcattcagaa

SEQ ID NO: 26541 - DNA, 80 bp, synthetic construct
  source 1..80: mol_type = other DNA
cttgcctcttcatgagccccccatctcgctgtagctttgccttctgacttggctttcccccacccagcaagggttctgag

SEQ ID NO: 26542 - DNA, 80 bp, synthetic construct
  source 1..80: mol_type = other DNA
atcacgggcttcgctctgatgtctccagtggtgacagtacctgccgctctgttcttccagagtctgtggggcaccctgct

SEQ ID NO: 26543 - DNA, 80 bp, synthetic construct; identical to SEQ ID NO: 10542
  source 1..80: mol_type = other DNA

SEQ ID NO: 26544 - DNA, 80 bp, synthetic construct
  source 1..80: mol_type = other DNA
cctgcaccatcagggcgacatgcactttggttctctgtgtttcaaaaaagacccagaggaattggagccacccaaagaaa

SEQ ID NO: 26545 - DNA, 80 bp, synthetic construct
  source 1..80: mol_type = other DNA
ggaataggaattacatgaaaagggctttgggagtcaggccagtttgggaaatgcagggttaaaccaaactcacaagtttt

SEQ ID NO: 26546 - DNA, 80 bp, synthetic construct; identical to SEQ ID NO: 10543
  source 1..80: mol_type = other DNA

SEQ ID NO: 26547 - DNA, 80 bp, synthetic construct
  source 1..80: mol_type = other DNA
cacagggatcttttattctgcacttctccagtgatgctttcaacacaattgtatcaaaacagcctaggctattcacttac

SEQ ID NO: 26548 - DNA, 80 bp, synthetic construct
  source 1..80: mol_type = other DNA
cctgcatgctgtctaattgccccaagaaaacagtgacgtgtgtttaggagcatgctcctgttggcctccatttacaggat

SEQ ID NO: 26549 - DNA, 80 bp, synthetic construct
  source 1..80: mol_type = other DNA
gacagctgctcagagaatctgtagcccaaaatgtcaacagtgacctggctgagaagccctgtcccaggtggaccgcagca

SEQ ID NO: 26550 - DNA, 80 bp, synthetic construct; identical to SEQ ID NO: 10544
  source 1..80: mol_type = other DNA

SEQ ID NO: 26551 - DNA, 80 bp, synthetic construct
  source 1..80: mol_type = other DNA
cagtttgccaccaacattagcaacaaggtgctgcttaaattgacttaaatgttatcctgttgaccccagtggcctcataa

SEQ ID NO: 26552 - DNA, 80 bp, synthetic construct
  source 1..80: mol_type = other DNA
taccgcacctggcagtaacaaggattttattttctgtttttgccaatgacaagtttggtcataaagtaatctgtgcagag

SEQ ID NO: 26553 - DNA, 80 bp, synthetic construct; identical to SEQ ID NO: 10545
  source 1..80: mol_type = other DNA

SEQ ID NO: 26554 - DNA, 80 bp, synthetic construct
  source 1..80: mol_type = other DNA
aggtcgccagagaacctgtcaaaccaagagttgtattggcatctgagtaggtttctgcttgtctcagagtcaggtgtctg

SEQ ID NO: 26555 - DNA, 80 bp, synthetic construct
  source 1..80: mol_type = other DNA
tttcagctgttgccaccgagccagccatgcaggctcgggtctgacagccgctctggactctgcatgcagtgaatgtcctg

SEQ ID NO: 26556 - DNA, 80 bp, synthetic construct
  source 1..80: mol_type = other DNA
cccctctctctccacagctctgctctacaagcctgtggaccgtgtgacgaggagcacgctggtcctccatgtaagtcaca

SEQ ID NO: 26557 - DNA, 80 bp, synthetic construct; identical to SEQ ID NO: 10546
  source 1..80: mol_type = other DNA

SEQ ID NO: 26558 - DNA, 80 bp, synthetic construct
  source 1..80: mol_type = other DNA
ctccgtccacactttgtgtctgcactttgcacacagtggcaggtgccagtgctcctctgtgtctaactcaagtctttctt

SEQ ID NO: 26559 - DNA, 80 bp, synthetic construct
  source 1..80: mol_type = other DNA
acggcagtccatgacggtgaagaagggagaggtgagtgtggcaggggatggcttgggtccacccatcctgctgagctggg

SEQ ID NO: 26560 - DNA, 80 bp, synthetic construct
  source 1..80: mol_type = other DNA
gcagccatcaccatgcctcactcagccacctctttccttttctgtcattgtgggttgtgtccagggaccccttttttttt

SEQ ID NO: 26561 - DNA, 80 bp, synthetic construct; identical to SEQ ID NO: 10547
  source 1..80: mol_type = other DNA

SEQ ID NO: 26562 - DNA, 80 bp, synthetic construct
  source 1..80: mol_type = other DNA
caggtagcagctactgagaacagccaaggcgtgtaagctggggagccagtgtccagggggaacagcttttgtcagaagca

SEQ ID NO: 26563 - DNA, 80 bp, synthetic construct
  source 1..80: mol_type = other DNA
ctttgggaggcctaggcgggtggatcaggaggtcaagaattcgagaccagcctggccaacatggtgaaaccccgtctcta

SEQ ID NO: 26564 - DNA, 80 bp, synthetic construct
  source 1..80: mol_type = other DNA
tctcaaaaaaaaaaaaaaaaaaaaaaaagagaaccacctccttctctttcttctggttcatgggccaggtggtcggcact

SEQ ID NO: 26565 - DNA, 80 bp, synthetic construct
  source 1..80: mol_type = other DNA
aatccgagttgacctttagtgagggacttggtcaggtttctcctggtgggcctggcccaggaagggcatggaggaggagg

SEQ ID NO: 26566 - DNA, 80 bp, synthetic construct; identical to SEQ ID NO: 10548
  source 1..80: mol_type = other DNA

SEQ ID NO: 26567 - DNA, 80 bp, synthetic construct
  source 1..80: mol_type = other DNA
gtgacaaacctgtgggcagtccacacagatctaagtggatgttggatttgcttctcctaagcctccacgtgctgggtggg

SEQ ID NO: 26568 - DNA, 80 bp, synthetic construct
  source 1..80: mol_type = other DNA
ttagcattcctagagacaaggaagggccttctcagtgctcggatcattggaatccactgctttggggaattaaggaaaac

SEQ ID NO: 26569 - DNA, 80 bp, synthetic construct; identical to SEQ ID NO: 10549
  source 1..80: mol_type = other DNA

SEQ ID NO: 26570 - DNA, 80 bp, synthetic construct
  source 1..80: mol_type = other DNA
gcgagattctgtctcaaaaaaaagaaaaaaaaaaaaaaagggctggttgcttcacaaaggcaggggcctggatctgcatc

SEQ ID NO: 26571 - DNA, 80 bp, synthetic construct
  source 1..80: mol_type = other DNA
taagggaggtggcttgatggtggctaaggcaggatgatagatgcctgtgctttgcccctgcccctgccattcctggggca

SEQ ID NO: 26572 - DNA, 80 bp, synthetic construct
  source 1..80: mol_type = other DNA
tggggacacccttttgcttccctgggtgtccgtgctctctgagggcaatgatgcagggtccgtggcccctccactgggtg

SEQ ID NO: 26573 - DNA, 80 bp, synthetic construct; identical to SEQ ID NO: 10550
  source 1..80: mol_type = other DNA

SEQ ID NO: 26574 - DNA, 80 bp, synthetic construct
  source 1..80: mol_type = other DNA
tcacacagccactaagtagctaagccaggatgcgagtgaggccatgggcccctggccgcctgtgtgcccctcgggtgtgt

SEQ ID NO: 26575 - DNA, 80 bp, synthetic construct
  source 1..80: mol_type = other DNA
aggggttggggctgtttctgtcttccctggcatttgatgtcaagaggaaagctgcttctgttggcctgggtgtttcgagg

SEQ ID NO: 26576 - DNA, 80 bp, synthetic construct
  source 1..80: mol_type = other DNA
ttttcagccacatcccatggctccagggctgtgctctttggggaacagtgactttgggctgcattccaggtagctccctg

SEQ ID NO: 26577 - DNA, 80 bp, synthetic construct; identical to SEQ ID NO: 10551
  source 1..80: mol_type = other DNA

SEQ ID NO: 26578 - DNA, 80 bp, synthetic construct
  source 1..80: mol_type = other DNA
ctgcctgggattgcagaggcccctcttttaggaagaacacagacagcagtccaaacaggagctgcaggaaggccctggag

SEQ ID NO: 26579 - DNA, 80 bp, synthetic construct
  source 1..80: mol_type = other DNA
atcacttgaggttaggactttgagaccagcctggccaacatggtgaaaccccgtctccactaaaaatgcaaaaattagcc

SEQ ID NO: 26580 - DNA, 80 bp, synthetic construct
  source 1..80: mol_type = other DNA
agttggaaaacagttggagaagccagaccctgttggcaaagtttgcaaggggtgctacggagagggaggtgcccacccca

SEQ ID NO: 26581 - DNA, 80 bp, synthetic construct; identical to SEQ ID NO: 10552
  source 1..80: mol_type = other DNA

SEQ ID NO: 26582 - DNA, 80 bp, synthetic construct
  source 1..80: mol_type = other DNA
tcagccagcattgttcttcccaggccctgccctaccctcctcctggcatagtgtctctcagggcataggaaactttctcg

SEQ ID NO: 26583 - DNA, 80 bp, synthetic construct
  source 1..80: mol_type = other DNA
cactgccaaacctctggagtctgccacatccctgcatagacagggccactgacaggcagtggcagccagttcagtggcac

SEQ ID NO: 26584 - DNA, 80 bp, synthetic construct
  source 1..80: mol_type = other DNA
tgggcttctttggcaacttttccttgtctcaccagtcaaggccctgctgatttgttgatgatcagactgtagttcgtgta

SEQ ID NO: 26585 - DNA, 80 bp, synthetic construct
  source 1..80: mol_type = other DNA
ccagcagggtcaggttctgatgagggcagtgagaagcacggccaccctcccactgtaccctcacatggccttcctgggag

SEQ ID NO: 26586 - DNA, 80 bp, synthetic construct; identical to SEQ ID NO: 10553
  source 1..80: mol_type = other DNA

SEQ ID NO: 26587 - DNA, 80 bp, synthetic construct
  source 1..80: mol_type = other DNA
ctcagaagacagggcacataatgtgacctcacagggcctcagtttccttgtgtgtagaaatcagggttatggtgcctgcc

SEQ ID NO: 26588 - DNA, 80 bp, synthetic construct
  source 1..80: mol_type = other DNA
tttcatttaatcctcagaacataccaccagactggtctttctcaccccatcatgtttaaggaaacagaggctccaagaaa

SEQ ID NO: 26589 - DNA, 80 bp, synthetic construct
  source 1..80: mol_type = other DNA
gtttcccacctgggatgtgggggggctccccaaagggagtgttgtcctgccaactggggcctgctgtcccactgccctgc

SEQ ID NO: 26590 - DNA, 80 bp, synthetic construct; identical to SEQ ID NO: 10554
  source 1..80: mol_type = other DNA

SEQ ID NO: 26591 - DNA, 80 bp, synthetic construct
  source 1..80: mol_type = other DNA
ggactgtttgccctagttgagatgctgagccttggggacagtggtttccagccacgtggccttatgccggctttgggatg

SEQ ID NO: 26592 - DNA, 80 bp, synthetic construct
  source 1..80: mol_type = other DNA
gggagtgacataggccacgccatgtgggcctcccagccatgtgctggtgctgtgtgggctgggagggcaggcaggggccg

SEQ ID NO: 26593 - DNA, 80 bp, synthetic construct
  source 1..80: mol_type = other DNA
cgagcctcccgggcctgcagcccgcaccccagaggggccacttcctccccacagtcaggcctgtgtgtcctctcaacgtg

SEQ ID NO: 26594 - DNA, 80 bp, synthetic construct; identical to SEQ ID NO: 10555
  source 1..80: mol_type = other DNA

SEQ ID NO: 26595 - DNA, 80 bp, synthetic construct
  source 1..80: mol_type = other DNA
acccggcttcagcgctccagctctacatgatgtttctccaggtgcacatgctgtttcttgcttcccgtgggtgccgtcac

SEQ ID NO: 26596 - DNA, 80 bp, synthetic construct
  source 1..80: mol_type = other DNA
caagctgcttatgatggtgacatgaagcctccacctctgagagtgtcggaggactggcccaggctgttcttgcaaatggg

SEQ ID NO: 26597 - DNA, 80 bp, synthetic construct
  source 1..80: mol_type = other DNA
gatgaggacaggtgcaccgcctgcggggagacactgggttttcacactctctgttgtatgtgcctcccctgccaaccctt

SEQ ID NO: 26598 - DNA, 80 bp, synthetic construct; identical to SEQ ID NO: 10556
  source 1..80: mol_type = other DNA

SEQ ID NO: 26599 - DNA, 80 bp, synthetic construct
  source 1..80: mol_type = other DNA
gcaagaaggaccgacccttgcctttcagatgcagaccaagatgcagaaaggcacccttctcaggccgcaggtgtccaggc

SEQ ID NO: 26600 - DNA, 80 bp, synthetic construct
  source 1..80: mol_type = other DNA
acctcgggcaccaatctctccccaccacaggggcctgtgcctgagatggtccctctacagaaatacctgctcctggcatg

SEQ ID NO: 26601 - DNA, 80 bp, synthetic construct; identical to SEQ ID NO: 10557
  source 1..80: mol_type = other DNA

SEQ ID NO: 26602 - DNA, 80 bp, synthetic construct
  source 1..80: mol_type = other DNA
tggccctgaccccagccttccctgtgcctgcagcaccggcagctgctgaaggacagcttcatggtggagctggtggaggg

SEQ ID NO: 26603 - DNA, 80 bp, synthetic construct
  source 1..80: mol_type = other DNA
tggtgatgtagctcgttacattccgtttctacttgggcacaatgccaggctccaggttaaagattgtcactagcaatctg

SEQ ID NO: 26604 - DNA, 80 bp, synthetic construct
  source 1..80: mol_type = other DNA
tctccccgagcctggtggtggctttccgagttatcctcggcataggcgtgcacacactcccctcctccctcctccctggg

SEQ ID NO: 26605 - DNA, 80 bp, synthetic construct
  source 1..80: mol_type = other DNA
gacgccagctagatctgtagtccctcaaactttacggccctgggggtggatttcagtcctgtcctgtcattgtgcagcct

SEQ ID NO: 26606 - DNA, 80 bp, synthetic construct; identical to SEQ ID NO: 10558
  source 1..80: mol_type = other DNA

SEQ ID NO: 26607 - DNA, 80 bp, synthetic construct
  source 1..80: mol_type = other DNA
gctggacgctttgaagatcaagatctcccagatcaagaatgacatccagagagagaaggtgcacaccaggggagcaaggg

SEQ ID NO: 26608 - DNA, 80 bp, synthetic construct
  source 1..80: mol_type = other DNA
tgagaacccccagctaaatggggagcaccataccagagcggctgccaacccaaccctccagaaaaatgaagggaactggt

SEQ ID NO: 26609 - DNA, 80 bp, synthetic construct
  source 1..80: mol_type = other DNA
ctgattttgtgttttcactggcatccccggggaaaacttaacctaggcaaacacctcctagtttttcggaaacacagcac

SEQ ID NO: 26610 - DNA, 80 bp, synthetic construct; identical to SEQ ID NO: 10559
  source 1..80: mol_type = other DNA

SEQ ID NO: 26611 - DNA, 80 bp, synthetic construct
  source 1..80: mol_type = other DNA
ttgccgtgtggttccattacatgggtgaagtactgagtcaccagagagaaagtcacagccagacagtggagggcttggag

SEQ ID NO: 26612 - DNA, 80 bp, synthetic construct
  source 1..80: mol_type = other DNA
tttttccagagatgtttgaagactgtaaaaatggtgaggacaagcccctcaatcaaaggttagccaggccagaggaggcg

SEQ ID NO: 26613 - DNA, 80 bp, synthetic construct; identical to SEQ ID NO: 10560
  source 1..80: mol_type = other DNA

SEQ ID NO: 26614 - DNA, 80 bp, synthetic construct
  source 1..80: mol_type = other DNA
gaaacccatggctcagcataggaagggccttcccatccaggttctgttgacggtcgtctggtcttctgctggcatctcca

SEQ ID NO: 26615 - DNA, 80 bp, synthetic construct
  source 1..80: mol_type = other DNA
gacttaattcctccaaaaaaggtttactgagcatgtcctgcagcttatgccatgccttgaccctgtaaaaaagctgtttc

SEQ ID NO: 26616 - DNA, 80 bp, synthetic construct
  source 1..80: mol_type = other DNA
ggcatctccccacagagggcgaacaagggcagcaaggctacggagaggctgaagaagaagctgtcggagcaggagtcact

SEQ ID NO: 26617 - DNA, 80 bp, synthetic construct
  source 1..80: mol_type = other DNA
ggcatgtccggcatggtgcatgcaagcacgcacattcctttgtctggggctttgggctgtagcccccaggttgagtggca

SEQ ID NO: 26618 - DNA, 80 bp, synthetic construct; identical to SEQ ID NO: 10561
  source 1..80: mol_type = other DNA

SEQ ID NO: 26619 - DNA, 80 bp, synthetic construct
  source 1..80: mol_type = other DNA
acctccatgtccctaagctgtgcccctctgccagcatcacaccctgacccatgtagttcgggtgagagatggtgtgccag

SEQ ID NO: 26620 - DNA, 80 bp, synthetic construct
  source 1..80: mol_type = other DNA
gataactgggtgtgttcttcttgcccaccctagagttacacgttcctgatctcctctgactatgagcgtgcagagtggag

SEQ ID NO: 26621 - DNA, 80 bp, synthetic construct; identical to SEQ ID NO: 10562
  source 1..80: mol_type = other DNA

SEQ ID NO: 26622 - DNA, 80 bp, synthetic construct
  source 1..80: mol_type = other DNA
ccatacaccgcacccccggcctgccccctagtcctttctgggaccctgccaccaccccattttcttggcctcccccattt

SEQ ID NO: 26623 - DNA, 80 bp, synthetic construct
  source 1..80: mol_type = other DNA
cctgtctggggcagccccttccttctctgggcacttccctctgtcagggcgctccttccttcgggtcctgcctggcagtg

SEQ ID NO: 26624 - DNA, 80 bp, synthetic construct
  source 1..80: mol_type = other DNA
gggggatcaaggatctccgggcagccctgccagtgcttgtgtcccagggtttcctgtcataacataggagccccagccat

SEQ ID NO: 26625 - DNA, 80 bp, synthetic construct; identical to SEQ ID NO: 10563
  source 1..80: mol_type = other DNA

SEQ ID NO: 26626 - DNA, 80 bp, synthetic construct
  source 1..80: mol_type = other DNA
gagggccaaggagcagattgaccaattggtgcacctcttttccaacctcccaggtttcagaagcttctccctgacatccg

SEQ ID NO: 26627 - DNA, 80 bp, synthetic construct
  source 1..80: mol_type = other DNA
gcacttttgatgggactagtggactttggttcagaaggaagagctatgcttgttagggcctcttgtctcctcccaggagt

SEQ ID NO: 26628 - DNA, 80 bp, synthetic construct
  source 1..80: mol_type = other DNA
ctccagctacctgccagccggcacttttggtcaagctgttttgcattcactgttgcacatatgctcagtcacacacacag

SEQ ID NO: 26629 - DNA, 80 bp, synthetic construct; identical to SEQ ID NO: 10564
  source 1..80: mol_type = other DNA

SEQ ID NO: 26630 - DNA, 80 bp, synthetic construct
  source 1..80: mol_type = other DNA
gagtctccggggctctatgggtttctgaatgtcatcgtccactcagccactggatttaagcagagttcaagtaagtactg

SEQ ID NO: 26631 - DNA, 80 bp, synthetic construct
  source 1..80: mol_type = other DNA
cgctgtggagtgtttgtgctggttgatgccttctgggtgtggaattgtttttcccggagtggcctctgccctctccccta

SEQ ID NO: 26632 - DNA, 80 bp, synthetic construct
  source 1..80: mol_type = other DNA
agcagatttggctgctctgtcgagctggatggatactactttttttttcctttccctctaagtgggggtctcccccagct

SEQ ID NO: 26633 - DNA, 80 bp, synthetic construct
  source 1..80: mol_type = other DNA
gatcgcttgagctcaggagttggagaccagcctgaccaacatggtgaaaccctgtgtctactaaaaatacaaagattagc

SEQ ID NO: 26634 - DNA, 80 bp, synthetic construct; identical to SEQ ID NO: 10565
  source 1..80: mol_type = other DNA

SEQ ID NO: 26635 - DNA, 80 bp, synthetic construct
  source 1..80: mol_type = other DNA
aattacatgacatgcagattgcaccttcataacataatctttctcctgggcccctgtctctggctgcctcataaacgctg

SEQ ID NO: 26636 - DNA, 80 bp, synthetic construct
  source 1..80: mol_type = other DNA
accttgcatccccaaaccaaacctattattcatggaccccaaacttgttcctcttatgtcctgtccctttgaggggcacc

SEQ ID NO: 26637 - DNA, 80 bp, synthetic construct; identical to SEQ ID NO: 10566
  source 1..80: mol_type = other DNA

SEQ ID NO: 26638 - DNA, 80 bp, synthetic construct
  source 1..80: mol_type = other DNA
taactctttgccccatagtacagcggggtctgctctgattgtaggggcttcccacatcccccaggatggctgccctctgc

SEQ ID NO: 26639 - DNA, 80 bp, synthetic construct
  source 1..80: mol_type = other DNA
agcgggcaggggcatcgcatgaggtgctggtgttcacgccagaccacaattaggtgtttaatttttaaaaagaaagttac

SEQ ID NO: 26640 - DNA, 80 bp, synthetic construct
  source 1..80: mol_type = other DNA
gaataaagcaaagacgcgcgtctacagggacacagctgagccaaactggaacgaggtgaggaactgattccacaagggcc

SEQ ID NO: 26641 - DNA, 80 bp, synthetic construct
  source 1..80: mol_type = other DNA
aaaaccttacccatccctgtcatcacaaagaagccacctattttgctggagaagtgtttggaaagagacttaaaaaggct

SEQ ID NO: 26642 - DNA, 80 bp, synthetic construct; identical to SEQ ID NO: 10567
  source 1..80: mol_type = other DNA

SEQ ID NO: 26643 - DNA, 80 bp, synthetic construct
  source 1..80: mol_type = other DNA
gccctgcaccttcgggagtaggggaatgattgcagagaggcccgtattgactaagtcccagatccatgagaggtgccatt

SEQ ID NO: 26644 - DNA, 80 bp, synthetic construct
  source 1..80: mol_type = other DNA
ggatggagcagtggggctggaacccaggtctcctttctcagcatccactactctttgatcattttagacatgttgcttga

SEQ ID NO: 26645 - DNA, 80 bp, synthetic construct
  source 1..80: mol_type = other DNA
atcgaagaagcctttgcagagaccaagagtgccacgacccagcagagacaacaagagagggtgccaggcagtgtgcaaaa

SEQ ID NO: 26646 - DNA, 80 bp, synthetic construct
  source 1..80: mol_type = other DNA
catgttcctggcgcacacacacacccaccccctcccctattcaggttcagaaattcctgctgcttgcttcttcccgcacc

SEQ ID NO: 26647 - DNA, 80 bp, synthetic construct; identical to SEQ ID NO: 10568
  source 1..80: mol_type = other DNA

SEQ ID NO: 26648 - DNA, 80 bp, synthetic construct
  source 1..80: mol_type = other DNA
atcattaccacccagagttcatagttgatgttaggtagggttcattcttggtgttacacatgttatgtgttctgacaaac

SEQ ID NO: 26649 - DNA, 80 bp, synthetic construct
  source 1..80: mol_type = other DNA
gatcttggcttactgcagcctccgcctcccggattcaagcaattctcgtgcctcagccttacaagtagctgggatcacag

SEQ ID NO: 26650 - DNA, 80 bp, synthetic construct; identical to SEQ ID NO: 10569
  source 1..80: mol_type = other DNA

SEQ ID NO: 26651 - DNA, 80 bp, synthetic construct
  source 1..80: mol_type = other DNA
gccccggttcagaggacccttcagccataacattgacccgtttgttcacactggacttcccttctcccttggggctgcag

SEQ ID NO: 26652 - DNA, 80 bp, synthetic construct
  source 1..80: mol_type = other DNA
cccgatgcatggcgtcctttttcatgcagcccctggggacactgagatggtcatggccttgcacccagggtggggtgggg

SEQ ID NO: 26653 - DNA, 80 bp, synthetic construct
  source 1..80: mol_type = other DNA
agttcctgcccggccttaggagaacccaaggtggaacagttagatggtgtcctaggctgaaattggcccatcctgtgcca

SEQ ID NO: 26654 - DNA, 80 bp, synthetic construct
  source 1..80: mol_type = other DNA
taatctggaagcccccaggtgagaccgagaatgtgtccatacaggaccagcaagggggccctggttcttaaggagactgc

SEQ ID NO: 26655 - DNA, 80 bp, synthetic construct; identical to SEQ ID NO: 10570
  source 1..80: mol_type = other DNA

SEQ ID NO: 26656 - DNA, 80 bp, synthetic construct
  source 1..80: mol_type = other DNA
gtgggcggatcacgaggtcaggagatcgagaccatcctggctaacaccgtgaaaccccgtctctactaaaaatacaaaaa

SEQ ID NO: 26657 - DNA, 80 bp, synthetic construct
  source 1..80: mol_type = other DNA
aaaaaaaaaaaaataccaagtgccaggaagaatgaagggagagggtggctcttccctgagtcacctgtcatctttgctga

SEQ ID NO: 26658 - DNA, 80 bp, synthetic construct
  source 1..80: mol_type = other DNA
cttggaagcttataagggaactcagtggctcagagcctcctggggctccctatactttgagatcaggtttaaaagcaaaa

SEQ ID NO: 26659 - DNA, 80 bp, synthetic construct; identical to SEQ ID NO: 10571
  source 1..80: mol_type = other DNA

SEQ ID NO: 26660 - DNA, 80 bp, synthetic construct
  source 1..80: mol_type = other DNA
cgaagtattttagcatcagtcaaatgacggtcatagtttgggtgatggtcacggctcaggttcttttttacacgtgcttg

SEQ ID NO: 26661 - DNA, 80 bp, synthetic construct
  source 1..80: mol_type = other DNA
gccccaccatgcctggctaagttgttttttgttttttgttttttttttttttttcgagacagagttttgctcttgttgcc

SEQ ID NO: 26662 - DNA, 80 bp, synthetic construct
  source 1..80: mol_type = other DNA
agctcatttgacactcaggagatgcttctctaacctgctcagaatcagggccctgggtattcagggaggtagagggagca

SEQ ID NO: 26663 - DNA, 80 bp, synthetic construct; identical to SEQ ID NO: 10572
  source 1..80: mol_type = other DNA

SEQ ID NO: 26664 - DNA, 80 bp, synthetic construct
  source 1..80: mol_type = other DNA
atgtcaggccatcttttgaaactcttttctgcaatgctactgaagtatttatgcacgtgacctgtgctcttctgtcagtc

SEQ ID NO: 26665 - DNA, 80 bp, synthetic construct
  source 1..80: mol_type = other DNA
ggctcaatgctgaagtcacttggatgagtggggacttgcagccaagaagcagggtaggggttgatggatggaaaatgatg

SEQ ID NO: 26666 - DNA, 80 bp, synthetic construct; identical to SEQ ID NO: 10573
  source 1..80: mol_type = other DNA

SEQ ID NO: 26667 - DNA, 80 bp, synthetic construct
  source 1..80: mol_type = other DNA
cctttttcctttccttttgcctttccttcttcttcggagtctcactgtcttgcccaggctggagtgcagcggtgccatct

SEQ ID NO: 26668 - DNA, 80 bp, synthetic construct
  source 1..80: mol_type = other DNA
ctgacctccagtggtccacccgccttggcctcccaaagtgctgggattataggcgtgagctactgcacccagcctcctca

SEQ ID NO: 26669 - DNA, 80 bp, synthetic construct
  source 1..80: mol_type = other DNA
tcggctcactgcaagctccgcctcctgggttcacgccattctcctgcctcagcctcccgagtagccgggactacaggcgc

SEQ ID NO: 26670 - DNA, 80 bp, synthetic construct
  source 1..80: mol_type = other DNA
cgtaagtttctctcctatgggcgcctctgccacatggaccatgtctcattcgtctcggaatgccccccaggcacatcaca

SEQ ID NO: 26671 - DNA, 80 bp, synthetic construct; identical to SEQ ID NO: 10574
  source 1..80: mol_type = other DNA

SEQ ID NO: 26672 - DNA, 80 bp, synthetic construct
  source 1..80: mol_type = other DNA
agtactgttacatgcactggaaattgctgagccaggcacctgccctctcacagatgaaggtgctgaagttcccaggggtg

SEQ ID NO: 26673 - DNA, 80 bp, synthetic construct
  source 1..80: mol_type = other DNA
ctgagaagtaattccttcctttttaaaaaaattgtaaaataagcacaatgtaaaatgtcccaggtgtttttaagtgtgca

SEQ ID NO: 26674 - DNA, 80 bp, synthetic construct; identical to SEQ ID NO: 10575
  source 1..80: mol_type = other DNA

SEQ ID NO: 26675 - DNA, 80 bp, synthetic construct
  source 1..80: mol_type = other DNA
ttccagtctgaggctggcatggtcagtgctgttgtgcacatggacataagatccacccaacttggtgttatctttgcatt

SEQ ID NO: 26676 - DNA, 80 bp, synthetic construct
  source 1..80: mol_type = other DNA
ctgctggcttgtacctggtcaggtgcccacataacccaggctggcagagaagtctgggaaactccagccagccagccaga

SEQ ID NO: 26677 - DNA, 80 bp, synthetic construct
  source 1..80: mol_type = other DNA
cagcaagacacataaatagagcaggagaaatgggagaagacaaaagtctatgacttgatagaatgttgccctctaaggag

SEQ ID NO: 26678 - DNA, 80 bp, synthetic construct
  source 1..80: mol_type = other DNA
gaccggcctgaccaacatggtgaaaccccgtctctactaaaaacacaaaaaaattagccaggcgcgatggcgcatgcctg

SEQ ID NO: 26679 - DNA, 80 bp, synthetic construct; identical to SEQ ID NO: 10576
  source 1..80: mol_type = other DNA

SEQ ID NO: 26680 - DNA, 80 bp, synthetic construct
  source 1..80: mol_type = other DNA
ccatgaatcttggatggatgttgatgccttcaccttgaaaaatccctccctgaagatacagattcaatgtcccctgctct

SEQ ID NO: 26681 - DNA, 80 bp, synthetic construct
  source 1..80: mol_type = other DNA
gcttctctgatctagaccatgaaggctggggagaggggtcttcttgttcttggggacccccccgccaggcatggcacaca

SEQ ID NO: 26682 - DNA, 80 bp, synthetic construct; identical to SEQ ID NO: 10577
  source 1..80: mol_type = other DNA

SEQ ID NO: 26683 - DNA, 80 bp, synthetic construct
  source 1..80: mol_type = other DNA
gagactcgggcaagtggttcctaaacccagctcatcagcaccattaaggggagcaaaaaaccagaccgggccaagccccc

SEQ ID NO: 26684 - DNA, 80 bp, synthetic construct
  source 1..80: mol_type = other DNA
gctgcaactgcctcacctcacgggagggtctctctacgcaacttctgagtcgaggtgcataagcagtgtgggggctgtag

SEQ ID NO: 26685 - DNA, 80 bp, synthetic construct
  source 1..80: mol_type = other DNA
gagaaagaggccaggctggtgtcgcagagcgccaatggcatagtcaccaccactcctccgacttacttcctcctgggatc

SEQ ID NO: 26686 - DNA, 80 bp, synthetic construct
  source 1..80: mol_type = other DNA
ctggagccagatagtgcctgctccatcgcctcctcacaaacgacagataaggatgagaacagcagcaaacgctgaccccc

SEQ ID NO: 26687 - DNA, 80 bp, synthetic construct; identical to SEQ ID NO: 10578
  source 1..80: mol_type = other DNA

SEQ ID NO: 26688 - DNA, 80 bp, synthetic construct
  source 1..80: mol_type = other DNA
tcaggtaaggcggataccgtcatgaaggcaccaagaatcctcatttgtatttcaaggattatctgagggccacgtaggtc

SEQ ID NO: 26689 - DNA, 80 bp, synthetic construct
  source 1..80: mol_type = other DNA
gggggtctcttgcagcaggaacacaaaatgagtgatgtttgttttgaaccaatatttggggaagatatgaagatgtaaac

SEQ ID NO: 26690 - DNA, 80 bp, synthetic construct; identical to SEQ ID NO: 10579
  source 1..80: mol_type = other DNA

SEQ ID NO: 26691 - DNA, 80 bp, synthetic construct
  source 1..80: mol_type = other DNA
gagtacagtggtgcaaccacactcagcacaaccttgatgtcccaggctcaagtgctcttcctaccttagcctctcaagta

SEQ ID NO: 26692 - DNA, 80 bp, synthetic construct
  source 1..80: mol_type = other DNA
cagacccaagccgatctgctttttgtctttagagatttgcccattcttcacatttcataaacgtggaatcatactagagt

SEQ ID NO: 26693 - DNA, 80 bp, synthetic construct
  source 1..80: mol_type = other DNA
tatttctgcatttactatttgacagacacttggatcatttctagtttgggctgttaaggttgatgcagccacgaacatgt

SEQ ID NO: 26694 - DNA, 80 bp, synthetic construct; identical to SEQ ID NO: 10580
  source 1..80: mol_type = other DNA

SEQ ID NO: 26695 - DNA, 80 bp, synthetic construct
  source 1..80: mol_type = other DNA
gtctctactaaaaatacaaaaattaaccgggcatggtggcaggtgcctgtaatcccagctcctcaggggctgaggcaaga

SEQ ID NO: 26696 - DNA, 80 bp, synthetic construct
  source 1..80: mol_type = other DNA
gcctgtaatctctctcctggtgaacacagaggttctctggtggtctcagcaaagacccacccccgggagtaggttatagt

SEQ ID NO: 26697 - DNA, 80 bp, synthetic construct
  source 1..80: mol_type = other DNA
tgagggtgggtgagaggatgtcctccggctgcccattggtgactcaatccagccacactgactacaaagcaagcagggca

SEQ ID NO: 26698 - DNA, 80 bp, synthetic construct
  source 1..80: mol_type = other DNA
accatctgccaggcccgctgaccatagtcattctttcaaggctcctgccttacccagtccagggggagaggagcagcaac

SEQ ID NO: 26699 - DNA, 80 bp, synthetic construct; identical to SEQ ID NO: 10581
  source 1..80: mol_type = other DNA

SEQ ID NO: 26700 - DNA, 80 bp, synthetic construct
  source 1..80: mol_type = other DNA
gaccgccgtgagagccagtgcctggaggccaacaccctggtcttcagtcactgggagtcacagagaggggcccgataaag

SEQ ID NO: 26701 - DNA, 80 bp, synthetic construct
  source 1..80: mol_type = other DNA
atcagaggcactgcatttgattattggggttacctgctgggagtggtgcagattttggacagtctggattgcttccagca

SEQ ID NO: 26702 - DNA, 80 bp, synthetic construct; identical to SEQ ID NO: 10582
  source 1..80: mol_type = other DNA

SEQ ID NO: 26703 - DNA, 80 bp, synthetic construct
  source 1..80: mol_type = other DNA
atgcaagagtcaccatccaccctggccatgatgcagggcctcctttggtacttccaccccagccgggcgggccggagccg

SEQ ID NO: 26704 - DNA, 80 bp, synthetic construct
  source 1..80: mol_type = other DNA
gcccagtgatggctgttctttgaaggaaaggtaagaatgtctcctgcttaacatgtttctgtgtttccagttacttggtt

SEQ ID NO: 26705 - DNA, 80 bp, synthetic construct
  source 1..80: mol_type = other DNA
gcttttgaaaattttttttttatagagacagggtctcactatattgcccaggctggtcttaaactcatgggctcaagtga

SEQ ID NO: 26706 - DNA, 80 bp, synthetic construct; identical to SEQ ID NO: 10583
  source 1..80: mol_type = other DNA

SEQ ID NO: 26707 - DNA, 80 bp, synthetic construct
  source 1..80: mol_type = other DNA
cagtaggacctagaaggggaggtgagaaggggtcaacccccaggtgtgcctgtggtgagccttcgtgctgagcaggtgca

SEQ ID NO: 26708 - DNA, 80 bp, synthetic construct
  source 1..80: mol_type = other DNA
cagcccctctctaggcctggcactgtgctcagcaccgtcgtgtgtgtgtatgtatatgtgcacgcatgtgaatgtgtgca

SEQ ID NO: 26709 - DNA, 80 bp, synthetic construct
  source 1..80: mol_type = other DNA
gtttctagctgtgtaaatcccaggtcccactcagattatgagtcagttctctgcaggtggaacccagggaggtgtttttt

SEQ ID NO: 26710 - DNA, 80 bp, synthetic construct
  source 1..80: mol_type = other DNA
cccagctaatttgttgtatttttagtagggacagggtttcaccatgttagccaggatggtctcaacctcccgacctcgtg

SEQ ID NO: 26711 - DNA, 80 bp, synthetic construct; identical to SEQ ID NO: 10584
  source 1..80: mol_type = other DNA

SEQ ID NO: 26712 - DNA, 80 bp, synthetic construct
  source 1..80: mol_type = other DNA
ccatgggactggtgtggcctgcaggctcctcccgccacaagctgttcatggtgcagggggagaacagtgtccacaattcc

SEQ ID NO: 26713 - DNA, 80 bp, synthetic construct
  source 1..80: mol_type = other DNA
gggaggagggggtggggaccccaggcagcagggctctgggagcagtggggccctgggttccaggggtgtctggcaggccc

SEQ ID NO: 26714 - DNA, 80 bp, synthetic construct
  source 1..80: mol_type = other DNA
ctggacccgcaggccctgcaggacagagactggcagcgcaccgtcatcgccatgaatggggtacgtgtccgtgggactct

SEQ ID NO: 26715 - DNA, 80 bp, synthetic construct; identical to SEQ ID NO: 10585
  source 1..80: mol_type = other DNA

SEQ ID NO: 26716 - DNA, 80 bp, synthetic construct
  source 1..80: mol_type = other DNA
tattctgtctttcctacttaatttttaattgttactaagaaagagaaagccaggcacagtgcacctatagtctcagctac

SEQ ID NO: 26717 - DNA, 80 bp, synthetic construct
  source 1..80: mol_type = other DNA
aaaaaaagcaagcaagcaagagaagcagcggggattttaggaggtgcttctgcagaaaccagtcgtttacatcatcttca

SEQ ID NO: 26718 - DNA, 80 bp, synthetic construct
  source 1..80: mol_type = other DNA
gccccttctccctactgtagatcgaagtaaagctctcggtcaagttcaacagcagggagttcagcttgaagaggatgccg

SEQ ID NO: 26719 - DNA, 80 bp, synthetic construct; identical to SEQ ID NO: 10586
  source 1..80: mol_type = other DNA

SEQ ID NO: 26720 - DNA, 80 bp, synthetic construct
  source 1..80: mol_type = other DNA
agcagttcatgcagacatagaccacttcctctgagaattcatttgcttccccaggatggaatctggctgggcctctgacc

SEQ ID NO: 26721 - DNA, 80 bp, synthetic construct
  source 1..80: mol_type = other DNA
ataagccctgctaatgagggggcttgcgaagcagctttgatgtgctggtaaatccaggtgcaaaacagaactcaagttaa

SEQ ID NO: 26722 - DNA, 80 bp, synthetic construct
  source 1..80: mol_type = other DNA
ggatgtgtgttaaggcccaggcccagggcaggggtcagggattctcctctcacacagcacgtgggtggcaggaccaacac

SEQ ID NO: 26723 - DNA, 80 bp, synthetic construct; identical to SEQ ID NO: 10587
  source 1..80: mol_type = other DNA

SEQ ID NO: 26724 - DNA, 80 bp, synthetic construct
  source 1..80: mol_type = other DNA
agatcgagcgccgaggcatggaggaggtgggcatctaccgcgtgtccggtgtggccacggacatccaggcactgaaggca

SEQ ID NO: 26725 - DNA, 80 bp, synthetic construct
  source 1..80: mol_type = other DNA
acaagagttgtagaaaaagcctctgtagaaaccagtttttaaaccatcctagccatgcatgccacttgctggggtaggcc

SEQ ID NO: 26726 - DNA, 80 bp, synthetic construct; identical to SEQ ID NO: 10588
  source 1..80: mol_type = other DNA

SEQ ID NO: 26727 - DNA, 80 bp, synthetic construct
  source 1..80: mol_type = other DNA
aggatgtaagcaccaatggccaattgggtccaaaggaagacaccggttcaaacactgaaaccaatcagattctcccacgg

SEQ ID NO: 26728 - DNA, 80 bp, synthetic construct
  source 1..80: mol_type = other DNA
atcaactctgcagacacagaaccatgcacagctcttgggaggagtcagatgagctgctcaaagcccaggagggacccgca

SEQ ID NO: 26729 - DNA, 80 bp, synthetic construct
  source 1..80: mol_type = other DNA
cgctgaagctgtacttccgtgagctgcccgagcccctcttcactgacgagttctaccccaacttcgcagagggcatcggt

SEQ ID NO: 26730 - DNA, 80 bp, synthetic construct; identical to SEQ ID NO: 10589
  source 1..80: mol_type = other DNA

SEQ ID NO: 26731 - DNA, 80 bp, synthetic construct
  source 1..80: mol_type = other DNA
gtgctggtgtgtgcagtacctgtggcctctgcatcacccttagggcaggtctgcctcccgggcccatgcacagaggacct

SEQ ID NO: 26732 - DNA, 80 bp, synthetic construct
  source 1..80: mol_type = other DNA
gggggtggtggcaggagttgtccaagggcagctctgcccatgagcagctgctctagcggctcctcctgctgctgtttgcc

SEQ ID NO: 26733 - DNA, 80 bp, synthetic construct
  source 1..80: mol_type = other DNA
gaacacctcgggagaggtctctggctcgttgtgaccccaaggagtaacccaccgccttctgcagctctttcagacccggt

SEQ ID NO: 26734 - DNA, 80 bp, synthetic construct; identical to SEQ ID NO: 10590
  source 1..80: mol_type = other DNA

SEQ ID NO: 26735 - DNA, 80 bp, synthetic construct
  source 1..80: mol_type = other DNA
tccttgtcctgggccactgagacccagaagtaccagggctggagtcagcttgcagcacagccagggtcgaggtcactccc

SEQ ID NO: 26736 - DNA, 80 bp, synthetic construct
  source 1..80: mol_type = other DNA
ccggccctccgagaaggagagcaagctccctgccaaccccagccagcctatcaccatgactgacagctggtccttggagg

SEQ ID NO: 26737 - DNA, 80 bp, synthetic construct
  source 1..80: mol_type = other DNA
atgggagtgatagtgggggcccaggccacctcctggtcctgctagtgcactttgctggaagcttaaaactacctcaagtg

SEQ ID NO: 26738 - DNA, 80 bp, synthetic construct
  source 1..80: mol_type = other DNA
atcctaggtatctgggaggctgacacaggaggatttcttgagcccaggagttagaggctgcagtgatccatgatggagcc

SEQ ID NO: 26739 - DNA, 80 bp, synthetic construct; identical to SEQ ID NO: 10591
  source 1..80: mol_type = other DNA

SEQ ID NO: 26740 - DNA, 80 bp, synthetic construct
  source 1..80: mol_type = other DNA
atccgtagagcgggaaccttcctgaggtgtccttgggccacccccaagtgttgggccatctgccaagagacagcgaccca

SEQ ID NO: 26741 - DNA, 80 bp, synthetic construct
  source 1..80: mol_type = other DNA
ccaggcctggccctgggagacagggtgaagggagtggtttttatgaacttaacttagagtctaaaagatttctactggat

SEQ ID NO: 26742 - DNA, 80 bp, synthetic construct; identical to SEQ ID NO: 10592
  source 1..80: mol_type = other DNA

SEQ ID NO: 26743 - DNA, 80 bp, synthetic construct
  source 1..80: mol_type = other DNA
cgatcctgaccgcccttccggcccacgctctcctgtttggcttccacaggcctggacttctctggcttctctgcccacac

SEQ ID NO: 26744 - DNA, 80 bp, synthetic construct
  source 1..80: mol_type = other DNA
atacttgaatatttgtaagttttatacatagtttctaatttttttccgaacagatccagatacctaataagatgctggaa

SEQ ID NO: 26745 - DNA, 80 bp, synthetic construct
  source 1..80: mol_type = other DNA
ggtggaggcacaggaccattcgctaccccatctgccgacacctgcgggggagcccaggcattctttgtaaaccctcctga

SEQ ID NO: 26746 - DNA, 80 bp, synthetic construct
  source 1..80: mol_type = other DNA
aggagaggatgcagctgcccagagggaagcaggatcacatttaaggaagtgtgtggggtccctggatgacaccagcaccc

SEQ ID NO: 26747 - DNA, 80 bp, synthetic construct; identical to SEQ ID NO: 10593
  source 1..80: mol_type = other DNA

SEQ ID NO: 26748 - DNA, 80 bp, synthetic construct
  source 1..80: mol_type = other DNA
tagaaaagccaaatccagccttgtctctgcctcctctggtctcatgatgtgcatctgttaccttgaaactggaaaccagt

SEQ ID NO: 26749 - DNA, 80 bp, synthetic construct
  source 1..80: mol_type = other DNA
ttgggtctacagctacgtcttacccacctcctgcctcaacagcctgtgtggtggcaaagccggtgtggggctggggaacg

SEQ ID NO: 26750 - DNA, 80 bp, synthetic construct; identical to SEQ ID NO: 10594
  source 1..80: mol_type = other DNA

SEQ ID NO: 26751 - DNA, 80 bp, synthetic construct
  source 1..80: mol_type = other DNA
tgaagacttctccatgcagtcaatctttattatagcagtattcgcatattcacatcaagtacatagaactttttttgcct

SEQ ID NO: 26752 - DNA, 80 bp, synthetic construct
  source 1..80: mol_type = other DNA
caaatttacatgagaaaaactccaaagtacaaatgaagggacctgagcaggaaagagaaccaaagtatcaggaagtgggt

SEQ ID NO: 26753 - DNA, 80 bp, synthetic construct
  source 1..80: mol_type = other DNA
gtatagagaggtctgtggacaattaaaaagtccccatcttttcactgggcacgccccagactccacgagaaccttttcaa

SEQ ID NO: 26754 - DNA, 80 bp, synthetic construct; identical to SEQ ID NO: 10595
  source 1..80: mol_type = other DNA

SEQ ID NO: 26755 - DNA, 80 bp, synthetic construct
  source 1..80: mol_type = other DNA
aggcagcaattgccatgttgaggaaaggatcagatgtacaaccaacaaatgagattaccacaaatacatatcactgtgat

SEQ ID NO: 26756 - DNA, 80 bp, synthetic construct
  source 1..80: mol_type = other DNA
agcacagagacatacacccctgtatgtaaactaacataacatgaagataaataagacataaaggctagccacttacgttg

SEQ ID NO: 26757 - DNA, 80 bp, synthetic construct
  source 1..80: mol_type = other DNA
aattacagtttatttcccaccctcacattaatttttccctatcctagatttactgccacctcaccccattttggtctctg

SEQ ID NO: 26758 - DNA, 80 bp, synthetic construct; identical to SEQ ID NO: 10596
  source 1..80: mol_type = other DNA

SEQ ID NO: 26759 - DNA, 80 bp, synthetic construct
  source 1..80: mol_type = other DNA
tcagagcacttctatctacagaattctttaaaaaaaaatgcacctctaaaaaatggatacactggcttacattggctgtg

SEQ ID NO: 26760 - DNA, 80 bp, synthetic construct
  source 1..80: mol_type = other DNA
ccccatgcattttttttttttaaagcactgttaccttaatttaagattttaggagttgggtttctgtccttttccacatt

SEQ ID NO: 26761 - DNA, 80 bp, synthetic construct
  source 1..80: mol_type = other DNA
ttaccagtatttttaattttaccagagctagcaacatggaccacagatatactggtgactccgctctcctctggccaagc

SEQ ID NO: 26762 - DNA, 80 bp, synthetic construct
  source 1..80: mol_type = other DNA
tttctctttcaatggtgaggaatgaaacaagatacaagaaccacagcatggaatatgttttcttttacatccaatggcca

SEQ ID NO: 26763 - DNA, 80 bp, synthetic construct; identical to SEQ ID NO: 10597
  source 1..80: mol_type = other DNA

SEQ ID NO: 26764 - DNA, 80 bp, synthetic construct
  source 1..80: mol_type = other DNA
gtataaaagttccatgctttgaagagcctatgggagtagaaaaagtttctctagaaatgtcactgaactatatttgcaac

SEQ ID NO: 26765 - DNA, 80 bp, synthetic construct
  source 1..80: mol_type = other DNA
actctaaaaattattaacacagctgagttaaaccagagtggctgctctcttcacaaatcactgatttctgctaaaatgtt

SEQ ID NO: 26766 - DNA, 80 bp, synthetic construct; identical to SEQ ID NO: 10598
  source 1..80: mol_type = other DNA

SEQ ID NO: 26767 - DNA, 80 bp, synthetic construct
  source 1..80: mol_type = other DNA
tatttaatttcatgcaattgactcaaggttaagattctgaaacgtacccctaaaccggttctggcaccactttcaacaac

SEQ ID NO: 26768 - DNA, 80 bp, synthetic construct
  source 1..80: mol_type = other DNA
taaataactattcattacctcattctgaagaggtagttttttgtagaggtcacctgaaccctgcaatgtggtttcgaact

SEQ ID NO: 26769 - DNA, 80 bp, synthetic construct
  source 1..80: mol_type = other DNA
gatgaaagtgctgtcaccgcaccaaaccagaagctaggaaatatttacaaagtttcaggttgacagtgctgcagtcttga

SEQ ID NO: 26770 - DNA, 80 bp, synthetic construct
  source 1..80: mol_type = other DNA
tcaggggtgagatattcgggaaccagaatttgacagctagacagaatcttcttttaaggtgcacattaacaacaaatgat

SEQ ID NO: 26771 - DNA, 80 bp, synthetic construct
  source 1..80: mol_type = other DNA
cacagttacaaacaatcctctgtagttgctctcaaatttttcagaaggcttcacctctccctaccaaaaataaaacacac

SEQ ID NO: 26772 - DNA, 80 bp, synthetic construct; identical to SEQ ID NO: 10599
  source 1..80: mol_type = other DNA

SEQ ID NO: 26773 - DNA, 80 bp, synthetic construct
  source 1..80: mol_type = other DNA
tattttttaaggtatctataaaaatctcaatatgctaagcctggctcctgggcacagcttcatttgagatcaagtctgct

SEQ ID NO: 26774 - DNA, 80 bp, synthetic construct; identical to SEQ ID NO: 10600
  source 1..80: mol_type = other DNA

SEQ ID NO: 26775 - DNA, 80 bp, synthetic construct
  source 1..80: mol_type = other DNA
gacactgccctgctgatgtaaaacttaaaaacaaatttgcttttcaaactgattaataacttaaggatcttttccatttt

SEQ ID NO: 26776 - DNA, 80 bp, synthetic construct
  source 1..80: mol_type = other DNA
tccttgatttattctgggtcttgtttaatttctttcaagtccttggctatagcttggttggtctgatttgatttgtgttc

SEQ ID NO: 26777 - DNA, 80 bp, synthetic construct
  source 1..80: mol_type = other DNA
taggttcttaatgaatgccagttctttctataaaaacaactgatgacagctttcccacaccctccctcagtcctaatatc

SEQ ID NO: 26778 - DNA, 80 bp, synthetic construct; identical to SEQ ID NO: 10601
  source 1..80: mol_type = other DNA

SEQ ID NO: 26779 - DNA, 80 bp, synthetic construct
  source 1..80: mol_type = other DNA
aattctggtgggaagtattgtttttttccaattcaattaaatctgaaaattattttctttttaataaaaatagaaaagaa

SEQ ID NO: 26780 - DNA, 80 bp, synthetic construct
  source 1..80: mol_type = other DNA
tggacaaagtagccgcataagtagttggtgactggaagagcataggaggaagatataaactgtatttcctgagaatttgc

SEQ ID NO: 26781 - DNA, 80 bp, synthetic construct
  source 1..80: mol_type = other DNA
aagatgcagcatgcccttttcctccataccaagacacatctactcaccactcagcctccatttaaataaaatagtttcct

SEQ ID NO: 26782 - DNA, 80 bp, synthetic construct
  source 1..80: mol_type = other DNA
cagaacaggaaagagaacgatgcttggtgattgaaactgccccatcagatgatcagccacaaattgatctggtggttaga

SEQ ID NO: 26783 - DNA, 80 bp, synthetic construct; identical to SEQ ID NO: 10602
  source 1..80: mol_type = other DNA

SEQ ID NO: 26784 - DNA, 80 bp, synthetic construct
  source 1..80: mol_type = other DNA
atggtggctacttgaaggctgcaaattctcctgtagagggaggacaagagctaattttaaaaaagtcatctcaaataacc

SEQ ID NO: 26785 - DNA, 80 bp, synthetic construct
  source 1..80: mol_type = other DNA
aaatagcaagtctgcagaattttccagttgggttttatgtatcatggttctgatcaagctgaaaacagttccaatgaaca

SEQ ID NO: 26786 - DNA, 80 bp, synthetic construct; identical to SEQ ID NO: 10603
  source 1..80: mol_type = other DNA

SEQ ID NO: 26787 - DNA, 80 bp, synthetic construct
  source 1..80: mol_type = other DNA
gaattttgcttttgttgcccaggctggagtgcaatggtgcaatctcggttcactgcaacctctacctcctgggttcaagt

SEQ ID NO: 26788 - DNA, 80 bp, synthetic construct
  source 1..80: mol_type = other DNA
gtgctgggattacaggtgtgagccactgcacccggccgccattatttttcatctaccattttgtccatagtttctacttg

SEQ ID NO: 26789 - DNA, 80 bp, synthetic construct
  source 1..80: mol_type = other DNA
ctcggctcactgcaagccctgcctcctgggctcatgccattctcctgcctcatcctccccagcagctgggactacaggca

SEQ ID NO: 26790 - DNA, 80 bp, synthetic construct
  source 1..80: mol_type = other DNA
atcactatttttcaatagcagcttctgatgaggatccaagcaatcacttatatgaatatactgtttaatccaggaataac

SEQ ID NO: 26791 - DNA, 80 bp, synthetic construct; identical to SEQ ID NO: 10604
  source 1..80: mol_type = other DNA

SEQ ID NO: 26792 - DNA, 80 bp, synthetic construct
  source 1..80: mol_type = other DNA
agacccagcagtccctaaacaactttcaacaattaacactttgttttcccaatctgaatacaactactaatgaactgcag

SEQ ID NO: 26793 - DNA, 80 bp, synthetic construct
  source 1..80: mol_type = other DNA
aaattaaattactaagaccttagagtaaaacatttggagtataatcataggaggctattatggtaacacactccagaaat

SEQ ID NO: 26794 - DNA, 80 bp, synthetic construct
  source 1..80: mol_type = other DNA
tctagccaaatcaaatctcattaaaggaagtcaatgtaaaaataagatttatagaaaagaaatctttatgaaaatgccta

SEQ ID NO: 26795 - DNA, 80 bp, synthetic construct; identical to SEQ ID NO: 10605
  source 1..80: mol_type = other DNA

SEQ ID NO: 26796 - DNA, 80 bp, synthetic construct
  source 1..80: mol_type = other DNA
cacacacacacgcacacaacttcagatgtttcctgttcattataatgattagaaatttcattttgttgaagtgtcatact

SEQ ID NO: 26797 - DNA, 80 bp, synthetic construct
  source 1..80: mol_type = other DNA
atacaaaaattagggccaggtgcagtggctcaagcctgtaatcccagcactttgggaggctgaggtgagcagatcacctg

SEQ ID NO: 26798 - DNA, 80 bp, synthetic construct
  source 1..80: mol_type = other DNA
gagctcacaccactgcactccagcctgggcaacagaatgagactctgtctcaaaaacaaaaaaattaccagggtgtggtg

SEQ ID NO: 26799 - DNA, 80 bp, synthetic construct; identical to SEQ ID NO: 10606
  source 1..80: mol_type = other DNA

SEQ ID NO: 26800 - DNA, 80 bp, synthetic construct
  source 1..80: mol_type = other DNA
aaatctctactattctacttcctacccgtcttctatttgaagagccaactctgcttgtgtgaagttatttgaagtgaaat

SEQ ID NO: 26801 - DNA, 80 bp, synthetic construct
  source 1..80: mol_type = other DNA
acccaggctggagtgcagtggtgcagtcttggctcactgcaacctctgcctcccgggttcaagcaattcttgtgcctcag

SEQ ID NO: 26802 - DNA, 80 bp, synthetic construct; identical to SEQ ID NO: 10607
  source 1..80: mol_type = other DNA

SEQ ID NO: 26803 - DNA, 80 bp, synthetic construct
  source 1..80: mol_type = other DNA
tatgttatgaaaagtaacagtttacttcttatccaaatcaatcactacttgacatttaaggagaaagtcaactgcagcca

SEQ ID NO: 26804 - DNA, 80 bp, synthetic construct
  source 1..80: mol_type = other DNA
cacgtcagcctcccgagtggctggggctacagttgtgcaccactatgcttggctaatttttaaatttttctgtagagaca

SEQ ID NO: 26805 - DNA, 80 bp, synthetic construct
  source 1..80: mol_type = other DNA
aaaaggatgagaaacattctggcatagacacatcgagtcttttaaattctttgagaaaacagtcacaggaaagatgaaat

SEQ ID NO: 26806 - DNA, 80 bp, synthetic construct; identical to SEQ ID NO: 10608
  source 1..80: mol_type = other DNA

SEQ ID NO: 26807 - DNA, 80 bp, synthetic construct
  source 1..80: mol_type = other DNA
gaaaataaataaactggaagcatctgattacatcctgtgatcctgaaactatttaaaatcaagaagacaaatctttttcc

SEQ ID NO: 26808 - DNA, 80 bp, synthetic construct
  source 1..80: mol_type = other DNA
cgagaccatcccggctaaaacggtgaaaccccgtctctactaaaaatacaaaaaattagccgggcgtagtggcgggcgcc

SEQ ID NO: 26809 - DNA, 80 bp, synthetic construct
  source 1..80: mol_type = other DNA
aaaaaggaaatcaactttaatttcaaaaaaaaaaaagagggctcaggttttaggaaaaaagcagtcacaaaagaacaaat

SEQ ID NO: 26810 - DNA, 80 bp, synthetic construct; identical to SEQ ID NO: 10609
  source 1..80: mol_type = other DNA

SEQ ID NO: 26811 - DNA, 80 bp, synthetic construct
  source 1..80: mol_type = other DNA
gagactagtaaagaaagaaaggaaaggtgtcagatgcagatgatgggagcctaggcaggatggcattgagaagaaaaaga

SEQ ID NO: 26812 - DNA, 80 bp, synthetic construct
  source 1..80: mol_type = other DNA
ctgaccttgtgcctcaaaatggccaaacatttggagcattccacaaagtcaattttgtaaaaactttgttagttacatgc

SEQ ID NO: 26813 - DNA, 80 bp, synthetic construct
  source 1..80: mol_type = other DNA
ttccttttcattttcttaactaaagtcatgaatcaattctgattcataatggcattacttatcttaagctacccaaatga

SEQ ID NO: 26814 - DNA, 80 bp, synthetic construct; identical to SEQ ID NO: 10610
  source 1..80: mol_type = other DNA

SEQ ID NO: 26815 - DNA, 80 bp, synthetic construct
  source 1..80: mol_type = other DNA
gaccaccacattacagtcattttctacacaacaaagtgtaagtactaaagaaccctaacaaatacttcataccattgaat

SEQ ID NO: 26816 - DNA, 80 bp, synthetic construct
  source 1..80: mol_type = other DNA
gtgtttggcaaccagaggtatctcaaagaaaaacacacctaaaagttctcacagaattctgtgaagattttttgcagggg

SEQ ID NO: 26817 - DNA, 80 bp, synthetic construct
  source 1..80: mol_type = other DNA
cccgctaaaaatccgaagttaagacattttactcatgtcaaacgtgccactcctcagcaatatttttggtcacctgcact

SEQ ID NO: 26818 - DNA, 80 bp, synthetic construct
  source 1..80: mol_type = other DNA
ttaaattctactgacttcctaaattagatctgttcagtttgccttatctaacccaggctaaccgactgccaacttctcac

SEQ ID NO: 26819 - DNA, 80 bp, synthetic construct; identical to SEQ ID NO: 10611
  source 1..80: mol_type = other DNA

SEQ ID NO: 26820 - DNA, 80 bp, synthetic construct
  source 1..80: mol_type = other DNA
ggaaacgcaccatatccccctgcctggatgggtgtttttggagaagcacaagcatatagactaaaatcctctgtttggaa

SEQ ID NO: 26821 - DNA, 80 bp, synthetic construct
  source 1..80: mol_type = other DNA
gaaagaagaatgaaaatctgggtggtataaatctttaagagtcccatcacactttacaagaaagcacctgaaatcttaca

SEQ ID NO: 26822 - DNA, 80 bp, synthetic construct; identical to SEQ ID NO: 10612
  source 1..80: mol_type = other DNA

SEQ ID NO: 26823 - DNA, 80 bp, synthetic construct
  source 1..80: mol_type = other DNA
ttataatccttgaaggcatacagcatgataatgcatgttcataatcatgaaacatgtttaaagggcttggcataatgcct

SEQ ID NO: 26824 - DNA, 80 bp, synthetic construct
  source 1..80: mol_type = other DNA
cctgggttcaagcgattctcctgcctcagcctcctgagtagctgggattacaggagcgcaccaccatgcccagctaaatt

SEQ ID NO: 26825 - DNA, 80 bp, synthetic construct
  source 1..80: mol_type = other DNA
ttaaaaagtaatctttatgatgattagtataagacaaagaagtaagcagttgcaaaaaattgtaaattccaagtataaca

SEQ ID NO: 26826 - DNA, 80 bp, synthetic construct
  source 1..80: mol_type = other DNA
gtggcgcgatctcagctcactgcaacctccgcctcccaggttcaagcgattctcctgcctcagcctcccgagtagctggg

SEQ ID NO: 26827 - DNA, 80 bp, synthetic construct; identical to SEQ ID NO: 10613
  source 1..80: mol_type = other DNA

SEQ ID NO: 26828 - DNA, 80 bp, synthetic construct
  source 1..80: mol_type = other DNA
agtagagtcagagtttctccatgttggtcaggctggtttcgaactcccaacctcaggtgatccgcctgcctcggcctccc

SEQ ID NO: 26829 - DNA, 80 bp, synthetic construct
  source 1..80: mol_type = other DNA
ggcaacatagtgagaatctatctctacaaccaccaccaccaccaccacaagaaattagctgggtgtggtgataggcacct

SEQ ID NO: 26830 - DNA, 80 bp, synthetic construct
  source 1..80: mol_type = other DNA
tctgtcttgttttctttttctctcaccaatatccatgtcatcaatacaaaactaacttaatcttaatgtctttttcttat

SEQ ID NO: 26831 - DNA, 80 bp, synthetic construct; identical to SEQ ID NO: 10614
  source 1..80: mol_type = other DNA

SEQ ID NO: 26832 - DNA, 80 bp, synthetic construct
  source 1..80: mol_type = other DNA
attccctttgcccattttctattgtttgttacttattgatttggaggagtcctttgtatattataaacatttactttttg

SEQ ID NO: 26833 - DNA, 80 bp, synthetic construct
  source 1..80: mol_type = other DNA
ttataaaacatatagatcttcagccatctaaaatttatgtggcatataacagtatggtgtgaaaagatatcctgtaacaa

SEQ ID NO: 26834 - DNA, 80 bp, synthetic construct
  source 1..80: mol_type = other DNA
ggatgtactttgcattattaatgtcaataaacattctaagtaagaacccgagcaccatgacgtgaaaagagaacatggga

SEQ ID NO: 26835 - DNA, 80 bp, synthetic construct; identical to SEQ ID NO: 10615
  source 1..80: mol_type = other DNA

SEQ ID NO: 26836 - DNA, 80 bp, synthetic construct
  source 1..80: mol_type = other DNA
aaggcctaagagttcatacatgaacactccagtaattatggtagcagggttactatgggaaatagcacttcccacttgaa

SEQ ID NO: 26837 - DNA, 80 bp, synthetic construct
  source 1..80: mol_type = other DNA
cattctgttgccctggctggaatgcagtggtgtcatctcagctcattacaatctccacctcctgggttcaagcgattctc

SEQ ID NO: 26838 - DNA, 80 bp, synthetic construct
  source 1..80: mol_type = other DNA
atttgtaagccacgacacctggccttagttacagttctttttgaaatttgttaacttaaggctttatccttccaatatgg

SEQ ID NO: 26839 - DNA, 80 bp, synthetic construct; identical to SEQ ID NO: 10616
  source 1..80: mol_type = other DNA

SEQ ID NO: 26840 - DNA, 80 bp, synthetic construct
  source 1..80: mol_type = other DNA
tgcaatgtgagtgcaaaagcggagaatccagctgtcttctttttgcaaagggatttgcaaaaaaagtaaaacaatacaac

SEQ ID NO: 26841 - DNA, 80 bp, synthetic construct
  source 1..80: mol_type = other DNA
ggggtcttcgataatttttaaatgtgtaaaagagttcaaagactgagaagtctgagaactgatggacaaatgcaaagtct

SEQ ID NO: 26842 - DNA, 80 bp, synthetic construct; identical to SEQ ID NO: 10617
  source 1..80: mol_type = other DNA

SEQ ID NO: 26843 - DNA, 80 bp, synthetic construct
  source 1..80: mol_type = other DNA
gttactccgtaccttactgagatctggagacaggtatcctcgtcccaccataaaaattatctggagagagaaaaaaaagg

SEQ ID NO: 26844 - DNA, 80 bp, synthetic construct
  source 1..80: mol_type = other DNA
agtgcaagctcaaatcttcatgatccttggactgtggcaaaggttctctaattgctcccctgcttttggtctctctttat

SEQ ID NO: 26845 - DNA, 80 bp, synthetic construct
  source 1..80: mol_type = other DNA
ttagcagtcgttttggcatctgcatcttaagcccttttattgtggaaacgctaatgggccacttggttatacaaaccaga

SEQ ID NO: 26846 - DNA, 80 bp, synthetic construct
  source 1..80: mol_type = other DNA
ggagtcttgggactcagggaggacagcctgagagaagggcttttggtcttagagggaataggtgcaacagggggagagta

SEQ ID NO: 26847 - DNA, 80 bp, synthetic construct; identical to SEQ ID NO: 10618
  source 1..80: mol_type = other DNA

SEQ ID NO: 26848 - DNA, 80 bp, synthetic construct
  source 1..80: mol_type = other DNA
gaaaggatctggagttcctatagtcatatattatggacagcaattcaggtattcttacttggctatcagtggaaaaggtg

SEQ ID NO: 26849 - DNA, 80 bp, synthetic construct
  source 1..80: mol_type = other DNA
taacaggatttgtagagaagactatcccaatacaaagctacttttaacttttttattgccgctgctcctactctgcttat

SEQ ID NO: 26850 - DNA, 80 bp, synthetic construct; identical to SEQ ID NO: 10619
  source 1..80: mol_type = other DNA

SEQ ID NO: 26851 - DNA, 80 bp, synthetic construct
  source 1..80: mol_type = other DNA
aattagctgggtgtggcggtatgtgcctgtagtcccagctacgtgggaggctgaggcaaggaattgattgaacccaggag

SEQ ID NO: 26852 - DNA, 80 bp, synthetic construct
  source 1..80: mol_type = other DNA
aagttaactgttcattaaggtgagtgataactttttgctagttgatcagccatgtcataggtctatagtctttaaattag

SEQ ID NO: 26853 - DNA, 80 bp, synthetic construct
  source 1..80: mol_type = other DNA
gttcaagagattctactgcctcagcctcccaagtagctgggattacaggtgcacaccaccatgcctggctaatgtttcca

SEQ ID NO: 26854 - DNA, 80 bp, synthetic construct; identical to SEQ ID NO: 10620
  source 1..80: mol_type = other DNA

SEQ ID NO: 26855 - DNA, 80 bp, synthetic construct; identical to SEQ ID NO: 10000
  source 1..80: mol_type = other DNA

SEQ ID NO: 26856 - DNA, 80 bp, synthetic construct
  source 1..80: mol_type = other DNA
tcaaaaccataacgacatatcatctcacaccagttagaatcacaatcattaaaaagtcaggaaacaacaggtgctggaga

SEQ ID NO: 26857 - DNA, 80 bp, synthetic construct
  source 1..80: mol_type = other DNA
catgctgctataaagacacatgcacacgtatgtttatagcggcactattcacaatagcaaagacttggaaccaacccaaa

SEQ ID NO: 26858 - DNA, 80 bp, synthetic construct
  source 1..80: mol_type = other DNA
accgcatattctcactcataggtgggaattgaacaatgagaacacgtggacacaggaaggggaacatcacactctgggga

SEQ ID NO: 26859 - DNA, 80 bp, synthetic construct; identical to SEQ ID NO: 10621
  source 1..80: mol_type = other DNA

SEQ ID NO: 26860 - DNA, 80 bp, synthetic construct
  source 1..80: mol_type = other DNA
gaatgagctcagatgattgagtgatatatagtatgtggtaaagaattaaccttgcccaaagagagagctagcctttgctc

SEQ ID NO: 26861 - DNA, 80 bp, synthetic construct
  source 1..80: mol_type = other DNA
ggaaactaaggtcagccccgcaggtggttaatcatatgactgaaccccaataaaaactctagactccaaggctcaggtga

SEQ ID NO: 26862 - DNA, 80 bp, synthetic construct
  source 1..80: mol_type = other DNA
tcattgtaataaactgtaactgtgaatgtaacagttgtcagtgagtcttgagcagctttcagtgagttttcagcaagtcc

SEQ ID NO: 26863 - DNA, 80 bp, synthetic construct; identical to SEQ ID NO: 10622
  source 1..80: mol_type = other DNA

SEQ ID NO: 26864 - DNA, 80 bp, synthetic construct
  source 1..80: mol_type = other DNA
taataatcagagcttgaagtcacaattttgtaaaattctaaatttaaatttatatacatacttttattgcagagatgtaa

SEQ ID NO: 26865 - DNA, 80 bp, synthetic construct
  source 1..80: mol_type = other DNA
attaatgaagagcttcagtattttttaataggcataaaatcggtatggtttttagattttgatgtatatatttcaaaaag

SEQ ID NO: 26866 - DNA, 80 bp, synthetic construct
  source 1..80: mol_type = other DNA
ggaggaatgtgagaaaaaaaatcaaagacaactctcatgtttttatacatcccacagaatttagttagtgcagagcagaa

SEQ ID NO: 26867 - DNA, 80 bp, synthetic construct; identical to SEQ ID NO: 10623
  source 1..80: mol_type = other DNA

SEQ ID NO: 26868 - DNA, 80 bp, synthetic construct
  source 1..80: mol_type = other DNA
aataatttgcctactgataagagactagtacttacttcctgtttcttcagatcttgtgcttagaacctagcaaccacgct

SEQ ID NO: 26869 - DNA, 80 bp, synthetic construct
  source 1..80: mol_type = other DNA
tgagccacttctgagtagatccttttaacaccccgtaaatctactctagtcaatacggtgtgaaacaggtaagaatcttc

SEQ ID NO: 26870 - DNA, 80 bp, synthetic construct
  source 1..80: mol_type = other DNA
tcttcaaagaagacacggcacttctactccaaggaacgaaagccataaaggtatagtcaatatacttaagtgagcacatt

SEQ ID NO: 26871 - DNA, 80 bp, synthetic construct; identical to SEQ ID NO: 10624
  source 1..80: mol_type = other DNA

SEQ ID NO: 26872 - DNA, 80 bp, synthetic construct
  source 1..80: mol_type = other DNA
gaggctgaggcagaagaatcgctaacatgggaggcagaggttgcagtgagctgagatcaggccactgcattccagcctgg

SEQ ID NO: 26873 - DNA, 80 bp, synthetic construct
  source 1..80: mol_type = other DNA
tgccacctcagactatgggtatgagagtctaggggaatggtattcacattgcatagtaaagaatattcctggattcttaa

SEQ ID NO: 26874 - DNA, 80 bp, synthetic construct
  source 1..80: mol_type = other DNA
tagactagggggtaatgaagcagaatgggggtagttgtaagaggacatcattcttttacctccttcttctccattaaata

SEQ ID NO: 26875 - DNA, 80 bp, synthetic construct; identical to SEQ ID NO: 10625
  source 1..80: mol_type = other DNA

SEQ ID NO: 26876 - DNA, 80 bp, synthetic construct
  source 1..80: mol_type = other DNA
gaaaagtgaacatggtacaggctgttatgctgtatgattgaataaataagactgtaaaagacagaggacatgaagcttgt

SEQ ID NO: 26877 - DNA, 80 bp, synthetic construct
  source 1..80: mol_type = other DNA
agatccaaagtcatgttgttacacactcaaagctaagactcaacattctaaagctatgaagtagttagaaaggccaacac

SEQ ID NO: 26878 - DNA, 80 bp, synthetic construct
  source 1..80: mol_type = other DNA
caataggtgaagtgagaaagctactcagagctagcaccaaaaagatagagctgagctcttgacaaaacagacaaatcact

SEQ ID NO: 26879 - DNA, 80 bp, synthetic construct
  source 1..80: mol_type = other DNA
caggtgattggaccctccccatttaattacaatctgctccagtttctccatttttaagcaaaatttccaggtgattctga

SEQ ID NO: 26880 - DNA, 80 bp, synthetic construct; identical to SEQ ID NO: 10626
  source 1..80: mol_type = other DNA

SEQ ID NO: 26881 - DNA, 80 bp, synthetic construct
  source 1..80: mol_type = other DNA
agtacctgttctgacagcacaatctgtgatacagtgaaaagtataatgcccagatgctatagtagcagagctcattcttc

SEQ ID NO: 26882 - DNA, 80 bp, synthetic construct
  source 1..80: mol_type = other DNA
ggtaacaaaaaatcaagaaatctatccttcacgcttacccaggagttaacacttattttctacaactggagccttgtata

SEQ ID NO: 26883 - DNA, 80 bp, synthetic construct
  source 1..80: mol_type = other DNA
ctgactgaaagctgtatggatttttatcttgcattctgatgacttctggtgcctgttagaacatacaaagaaaaatattc

SEQ ID NO: 26884 - DNA, 80 bp, synthetic construct; identical to SEQ ID NO: 10627
  source 1..80: mol_type = other DNA

SEQ ID NO: 26885 - DNA, 80 bp, synthetic construct
  source 1..80: mol_type = other DNA
gcacaactactgtagtaactgtcttacaatttaagttttcccattggtacaaacaacttttctcatctgaggacacctta

SEQ ID NO: 26886 - DNA, 80 bp, synthetic construct
  source 1..80: mol_type = other DNA
ttagtaaaagatggtataaagaatcttctggctgctgcttcttgggcaatgaaacaatcatatttgctacatttttacac

SEQ ID NO: 26887 - DNA, 80 bp, synthetic construct
  source 1..80: mol_type = other DNA
tgacaatgtcaatttgacagcaaaagtggtactaactctgcaaaaatgactgaaagacctgggacaagattcctggttat

SEQ ID NO: 26888 - DNA, 80 bp, synthetic construct; identical to SEQ ID NO: 10628
  source 1..80: mol_type = other DNA

SEQ ID NO: 26889 - DNA, 80 bp, synthetic construct
  source 1..80: mol_type = other DNA
atgtaataagcaagccagaatactgagaggctggtatggcaaaggtataatgttcaaagcctgaccaatttttgtgagag

SEQ ID NO: 26890 - DNA, 80 bp, synthetic construct
  source 1..80: mol_type = other DNA
ttttatctcacactgttgttggtagacagtttgatgaaaagttgcatgtcacctattttaagaaatgcatgacgaatctt

SEQ ID NO: 26891 - DNA, 80 bp, synthetic construct
  source 1..80: mol_type = other DNA
tgaccaaactcttctctcctatgatacggatgttccatatttgtttctgagggcagtatcaacccaggattggtttaaca

SEQ ID NO: 26892 - DNA, 80 bp, synthetic construct
  source 1..80: mol_type = other DNA
aaagtaaggacaaaactggagacttgattgagcctaactctcccacatagtcaaaaattaacatactttaaaagcacgtg

SEQ ID NO: 26893 - DNA, 80 bp, synthetic construct; identical to SEQ ID NO: 10629
  source 1..80: mol_type = other DNA

SEQ ID NO: 26894 - DNA, 80 bp, synthetic construct
  source 1..80: mol_type = other DNA
acttagaggaggttaagaaacttgcaggttaatggccaaatagggtaccagaatacagatcttctaagtccaatgtcccc

SEQ ID NO: 26895 - DNA, 80 bp, synthetic construct
  source 1..80: mol_type = other DNA
tttctgtttccagcagggtgcccgaaagtcttagtgcagattaagttatttaaagcttagaattgcactaagacttttgg

SEQ ID NO: 26896 - DNA, 80 bp, synthetic construct
  source 1..80: mol_type = other DNA
atgtttaccattaaaatttaatggagaaattaaactagtaattcatttaactactaaaataataacaagtagatgttaac

SEQ ID NO: 26897 - DNA, 80 bp, synthetic construct; identical to SEQ ID NO: 10630
  source 1..80: mol_type = other DNA

SEQ ID NO: 26898 - DNA, 80 bp, synthetic construct
  source 1..80: mol_type = other DNA
tatgactgagctttccacagcttgctgcaatgcacacaagtttttgttcccttcttttagaacttctctttcttcttttc

SEQ ID NO: 26899 - DNA, 80 bp, synthetic construct
  source 1..80: mol_type = other DNA
gattgcgaaacagcttctctgttaaaaggagtagttctcttagcaaaaccataataatggctgtggatcacacctgcctt

SEQ ID NO: 26900 - DNA, 80 bp, synthetic construct
  source 1..80: mol_type = other DNA
atacactgaaactggtttcaaaatattcgttttaagggttcatatttatttaagaataaaatatgaaacactgtttataa

SEQ ID NO: 26901 - DNA, 80 bp, synthetic construct; identical to SEQ ID NO: 10631
  source 1..80: mol_type = other DNA

SEQ ID NO: 26902 - DNA, 80 bp, synthetic construct
  source 1..80: mol_type = other DNA
ctgtgaggtcttcatgaagaaatatatctgaggtgtagtaagtaaaggaaaacagtagatctcattttcctatcagagca

SEQ ID NO: 26903 - DNA, 80 bp, synthetic construct
  source 1..80: mol_type = other DNA
gggcttgaaatgtgttaggatgaggtgagatgctttcctaagtttataggagaacctaaaactttcccattagattttag

SEQ ID NO: 26904 - DNA, 80 bp, synthetic construct
  source 1..80: mol_type = other DNA
tctcacctcattgttatataatttagagtcttcagttatatctcaactaccactgagcaaggtcagaggtctgaaaggga

SEQ ID NO: 26905 - DNA, 80 bp, synthetic construct
  source 1..80: mol_type = other DNA
aaaccaaaagcaggctgtggtatcctgctctcctatacatgcatgcacaatcctttattaattctctttacagtatatcg

SEQ ID NO: 26906 - DNA, 80 bp, synthetic construct; identical to SEQ ID NO: 10632
  source 1..80: mol_type = other DNA

SEQ ID NO: 26907 - DNA, 80 bp, synthetic construct
  source 1..80: mol_type = other DNA
accaatacaaacctttcactccagtcaagcctatttatccatgtcccttaaatataccttgatatttaatcccaccactg

SEQ ID NO: 26908 - DNA, 80 bp, synthetic construct
  source 1..80: mol_type = other DNA
atgtagtaattatcataataatggcttgattcatgtgttttttcaacgtgcctatgttcacttctatttggaatgtaaac

SEQ ID NO: 26909 - DNA, 80 bp, synthetic construct; identical to SEQ ID NO: 10633
  source 1..80: mol_type = other DNA

SEQ ID NO: 26910 - DNA, 80 bp, synthetic construct
  source 1..80: mol_type = other DNA
agtgccgagaacagtgcttggtatgtgtggtaagtattcaatacatgtctactgaatcaactacaataagatgcatataa

SEQ ID NO: 26911 - DNA, 80 bp, synthetic construct
  source 1..80: mol_type = other DNA
gaagatttgcaaataaccaagattattcatgctgtctcatcttcatttaaacgtcctcattcttcccaatatcaaaaatt

SEQ ID NO: 26912 - DNA, 80 bp, synthetic construct
  source 1..80: mol_type = other DNA
ttgtcactctttcactgaaagaaaatgttatttcggttataggtctcactgcttacaaagttctgcagtgacatacaaag

SEQ ID NO: 26913 - DNA, 80 bp, synthetic construct; identical to SEQ ID NO: 10634
  source 1..80: mol_type = other DNA

SEQ ID NO: 26914 - DNA, 80 bp, synthetic construct
  source 1..80: mol_type = other DNA
gaatatagcaagaatagagtagacagaaatgtaactggggagagtggggagagaaattttctgaccaggaaagcactaga

SEQ ID NO: 26915 - DNA, 80 bp, synthetic construct
  source 1..80: mol_type = other DNA
ttttatctcattgaataattctctttctgtaatccttctgtaacaaaagcagcaaagagtagaagtccaggtctgtagaa

SEQ ID NO: 26916 - DNA, 80 bp, synthetic construct
  source 1..80: mol_type = other DNA
gggggacactaaaacgtaatttcctaagcaccacccagttacaatggaaaatgccaaaaaaaaaacccaaacaaaaataa

SEQ ID NO: 26917 - DNA, 80 bp, synthetic construct
  source 1..80: mol_type = other DNA
ctccctctttccttggtaagatgttaaggagagcattacagttttacagaagtactaggaaagaacaaatatgctatcaa

SEQ ID NO: 26918 - DNA, 80 bp, synthetic construct; identical to SEQ ID NO: 10635
  source 1..80: mol_type = other DNA

SEQ ID NO: 26919 - DNA, 80 bp, synthetic construct
  source 1..80: mol_type = other DNA
tgcttcctgctgctgggtcaaaatttatgacaataaatagaatttttaaaaaagggcacaaaaaggattatattcaatta

SEQ ID NO: 26920 - DNA, 80 bp, synthetic construct
  source 1..80: mol_type = other DNA
gcaacctccacctcctaggttcaagtgattctcctgcctcagcctcctgagtagctgggactacaggcgcgcgccaccat

SEQ ID NO: 26921 - DNA, 80 bp, synthetic construct
  source 1..80: mol_type = other DNA
agacatggtctataatttcagattaaaactttagctttcactaaaaaagtcggttttttcttgcctgcttcatttttctt

SEQ ID NO: 26922 - DNA, 80 bp, synthetic construct; identical to SEQ ID NO: 10636
  source 1..80: mol_type = other DNA

SEQ ID NO: 26923 - DNA, 80 bp, synthetic construct
  source 1..80: mol_type = other DNA
agtctgctgccattttcaagtattttaaactcttggtaaaacacagaactgacctacttagacatttgcatgtcagccct

SEQ ID NO: 26924 - DNA, 80 bp, synthetic construct
  source 1..80: mol_type = other DNA
agccttccttatactttgatgccctctgctcccttattacaaccctggaaagtaagattaacgagaatggcattctgtta

SEQ ID NO: 26925 - DNA, 80 bp, synthetic construct
  source 1..80: mol_type = other DNA
ctctcttgcccaggctggagtacagtggcatgatcacagctcactgcagcctcaacctcctgggctcaagagatccaccc

SEQ ID NO: 26926 - DNA, 80 bp, synthetic construct; identical to SEQ ID NO: 10637
  source 1..80: mol_type = other DNA

SEQ ID NO: 26927 - DNA, 80 bp, synthetic construct
  source 1..80: mol_type = other DNA
tccgtcaccccagaaagtttcttcatacatttttgcgattagtaacaccccctttaggcttgggaaaccattgataatga

SEQ ID NO: 26928 - DNA, 80 bp, synthetic construct
  source 1..80: mol_type = other DNA
cactgtgttgttcctagtttgtggcaaatatgaagaagatgctgtattcatatacaagtctttgttgttgactgatggtt

SEQ ID NO: 26929 - DNA, 80 bp, synthetic construct; identical to SEQ ID NO: 10638
  source 1..80: mol_type = other DNA

SEQ ID NO: 26930 - DNA, 80 bp, synthetic construct
  source 1..80: mol_type = other DNA
caggcaagtaccaccacgtccagctaattttgtatttttagtagagatggggtttcaccattttggtcaagctggtcttg

SEQ ID NO: 26931 - DNA, 80 bp, synthetic construct
  source 1..80: mol_type = other DNA
tgagtagaagggtaatcaggagaatatgcctgaaagcagtgtttctcacactttaatatggacacgaatcatttggggat

SEQ ID NO: 26932 - DNA, 80 bp, synthetic construct
  source 1..80: mol_type = other DNA
aagtgtgtgatcaactgtatcagatgtttctgacaggtcaaataaactgtggactgagaattttactgctggatctagca

SEQ ID NO: 26933 - DNA, 80 bp, synthetic construct
  source 1..80: mol_type = other DNA
tactaaacatacaaaaattagctgggtgtggtggtgtgcacctgtaatcccagctacttgggagactaaggcaggagaat

SEQ ID NO: 26934 - DNA, 80 bp, synthetic construct; identical to SEQ ID NO: 10639
  source 1..80: mol_type = other DNA

SEQ ID NO: 26935 - DNA, 80 bp, synthetic construct
  source 1..80: mol_type = other DNA
aactatgtgaagaatgcagaagcctcaggagccgatgcgatcaactggaagaaagggtatcagtgatggaagatgaaatg

SEQ ID NO: 26936 - DNA, 80 bp, synthetic construct
  source 1..80: mol_type = other DNA
aggatattatccaggagaacttccccaatctagcaaggcaggccaatgttcagattcacgaaatacagagaacgccacaa

SEQ ID NO: 26937 - DNA, 80 bp, synthetic construct
  source 1..80: mol_type = other DNA
agccagaagagagtgggggccaatattcaacattcttaaagaaaacaattttcaacccagaatttcatatccagccaaac

SEQ ID NO: 26938 - DNA, 80 bp, synthetic construct; identical to SEQ ID NO: 10640
  source 1..80: mol_type = other DNA

SEQ ID NO: 26939 - DNA, 80 bp, synthetic construct
  source 1..80: mol_type = other DNA
gaggaagatctaccaagcaagtggaaaacaaaaaaaggcaggggttgcaatcctagtctctgataaaacagactttaaac

SEQ ID NO: 26940 - DNA, 80 bp, synthetic construct
  source 1..80: mol_type = other DNA
cacaataataatgggagactttaacatcccactgtcaacattagacagatcaacgcgacagaaagttaataaggacaccc

SEQ ID NO: 26941 - DNA, 80 bp, synthetic construct; identical to SEQ ID NO: 10641
  source 1..80: mol_type = other DNA

SEQ ID NO: 26942 - DNA, 80 bp, synthetic construct
  source 1..80: mol_type = other DNA
tatagcactaaatgcccacaagagaaagcaggaaagatccaaaattgccaccctaacatcacaattaaaagaactagaaa

SEQ ID NO: 26943 - DNA, 80 bp, synthetic construct
  source 1..80: mol_type = other DNA
tctcgcagaggggtatttggcagggtcataggacaatagtggagggaaggtcagcagataaacaagtgaacaaaggtctc

SEQ ID NO: 26944 - DNA, 80 bp, synthetic construct
  source 1..80: mol_type = other DNA
ggacacagcacatgtttcagagggcacagggttgggggtaaggtcacagatcaacaggatcacaaggcagaagaattttt

SEQ ID NO: 26945 - DNA, 80 bp, synthetic construct; identical to SEQ ID NO: 10642
  source 1..80: mol_type = other DNA

SEQ ID NO: 26946 - DNA, 80 bp, synthetic construct
  source 1..80: mol_type = other DNA
agctggctgggcagaggggctcctcacttcccagtaggggcggccgggcagaggcgcccctcacctcccggacgaggcag

SEQ ID NO: 26947 - DNA, 80 bp, synthetic construct
  source 1..80: mol_type = other DNA
aaggggatatcaccaccaatcccacagaaatacaaactaccatcagagaatactacaaacacctctatgcaaataaacta

SEQ ID NO: 26948 - DNA, 80 bp, synthetic construct
  source 1..80: mol_type = other DNA
aagctgaattctaccagagatacaaggaggaactggtaccattccttctgaaactattccaatcaatagaaaaagaggga

SEQ ID NO: 26949 - DNA, 80 bp, synthetic construct; identical to SEQ ID NO: 10643
  source 1..80: mol_type = other DNA

SEQ ID NO: 26950 - DNA, 80 bp, synthetic construct
  source 1..80: mol_type = other DNA
ccacagccaatatcatactgaatgggcaaaaactggaagcattccctttgaaaactggcacaagacagggatgccctctc

SEQ ID NO: 26951 - DNA, 80 bp, synthetic construct
  source 1..80: mol_type = other DNA
atctccttaagctgataagcaacttcagcaaagtcttgggatacaaaatcaatgtacaaaaaccacaagcattcttatac

SEQ ID NO: 26952 - DNA, 80 bp, synthetic construct
  source 1..80: mol_type = other DNA
acaaatggaagaacattccatgctcatgggtagaagaatcagttatcatgaaaatggccatattgcccaaggtaatttac

SEQ ID NO: 26953 - DNA, 80 bp, synthetic construct
  source 1..80: mol_type = other DNA
tatactacaaggctacagtaaccaaaacagcatggtactggtaccaaaacagagatatagatcaatggaacagaacagag

SEQ ID NO: 26954 - DNA, 80 bp, synthetic construct
  source 1..80: mol_type = other DNA
caaaaattaattcaagatggattaaagacttaaacgttagacctaaaaccataaaaaccctagaagaaaacctaggcatt

SEQ ID NO: 26955 - DNA, 80 bp, synthetic construct
  source 1..80: mol_type = other DNA
agaaaattttcgcaacctactcatctgacaaagggctaatatccagaatctacaaagaactcaaacaaatttacaagaaa

SEQ ID NO: 26956 - DNA, 80 bp, synthetic construct
  source 1..80: mol_type = other DNA
ttagaatggcaatcattaaaaagtcaggaaacaacaggtgctggagaggatatggagaaataggaacacttttacactgt

SEQ ID NO: 26957 - DNA, 80 bp, synthetic construct
  source 1..80: mol_type = other DNA
ttattgcggcactattcacaatagcaaagacttggaaccaacccaaatgtccaacaatgatagactggattaagaaaatg

SEQ ID NO: 26958 - DNA, 80 bp, synthetic construct; identical to SEQ ID NO: 10645
  source 1..80: mol_type = other DNA

SEQ ID NO: 26959 - DNA, 80 bp, synthetic construct
  source 1..80: mol_type = other DNA
aaatggaaagaatacccacacaccttccacatagattccacaaatgtcaacattctgccaaatgtgcataagaaagatgt

SEQ ID NO: 26960 - DNA, 80 bp, synthetic construct
  source 1..80: mol_type = other DNA
tttttgtagagacgggttttgccatgttgcctagggtggtctcaaactcctgggctcaagtgatccaccagcctcagcct

SEQ ID NO: 26961 - DNA, 80 bp, synthetic construct; identical to SEQ ID NO: 10646
  source 1..80: mol_type = other DNA

SEQ ID NO: 26962 - DNA, 80 bp, synthetic construct
  source 1..80: mol_type = other DNA
ttgctcagtctgatcttgaactcctgagctcaagcaatccacccgcctcagcttcccgaagtgttgggattacaggcatg

SEQ ID NO: 26963 - DNA, 80 bp, synthetic construct
  source 1..80: mol_type = other DNA
agtgataaggcagaagaacctggtatgaatgcaggcaggtgggtagatgtcataatggttacttccaactgtcttaaaga

SEQ ID NO: 26964 - DNA, 80 bp, synthetic construct
  source 1..80: mol_type = other DNA
tttcgaagggactgaataagttggggaagcaacatgctttaatggttaaaggaatacaccctggagctgaagtacctggg

SEQ ID NO: 26965 - DNA, 80 bp, synthetic construct; identical to SEQ ID NO: 10647
  source 1..80: mol_type = other DNA

SEQ ID NO: 26966 - DNA, 80 bp, synthetic construct
  source 1..80: mol_type = other DNA
atctcttgatggtggattactggtgctttttatttatgtttacattttctgaatttcctataatgattacatatttcctc

SEQ ID NO: 26967 - DNA, 80 bp, synthetic construct
  source 1..80: mol_type = other DNA
gtgtaatggtgttgagagttggtgggacctttaagaggcatttgggtctgggtcatgaggaatgccctcatgaaagcagg

SEQ ID NO: 26968 - DNA, 80 bp, synthetic construct
  source 1..80: mol_type = other DNA
ccatgcttggctaattaaaaaaaatttttttgtagagatgaggtcttactatgttgtccaggctggtctcaaactcctgg

SEQ ID NO: 26969 - DNA, 80 bp, synthetic construct; identical to SEQ ID NO: 10648
  source 1..80: mol_type = other DNA

SEQ ID NO: 26970 - DNA, 80 bp, synthetic construct
  source 1..80: mol_type = other DNA
agtgcagtggtgccatcttggctcactgcaacctccgtctcctgggttcaagcgattctgttgcctcagcctcccaagta

SEQ ID NO: 26971 - DNA, 80 bp, synthetic construct
  source 1..80: mol_type = other DNA
cgtgcttggccacctccagtcttttttcaaagtttgtacttgattcctggagataatcactatgttacttgatctttgct

SEQ ID NO: 26972 - DNA, 80 bp, synthetic construct
  source 1..80: mol_type = other DNA
tataatccacttttaactactatatacgattctactgtatgtaagtgccaatatgttatttatcaagtcttctcctgatg

SEQ ID NO: 26973 - DNA, 80 bp, synthetic construct
  source 1..80: mol_type = other DNA
tcaagtgatcctattaccctagtcttccaaagtgctgggattagaggcatgagccactgcatccagaccaatttttcact

SEQ ID NO: 26974 - DNA, 80 bp, synthetic construct; identical to SEQ ID NO: 10649
  source 1..80: mol_type = other DNA

SEQ ID NO: 26975 - DNA, 80 bp, synthetic construct
  source 1..80: mol_type = other DNA
tctatcttcaactgggttcacttatgagtaaaagaggcatgctcatcattgtttaaaacaaagtaaattgtaaggattta

SEQ ID NO: 26976 - DNA, 80 bp, synthetic construct
  source 1..80: mol_type = other DNA
cctggaatttctttagtaacagtattcttaagatatctgggtccttgggatgaatcaatgactggcaggtgaaaagatga

SEQ ID NO: 26977 - DNA, 80 bp, synthetic construct; identical to SEQ ID NO: 10650
  source 1..80: mol_type = other DNA

SEQ ID NO: 26978 - DNA, 80 bp, synthetic construct
  source 1..80: mol_type = other DNA
aaacctaggaatcagaaatagtttttcactgaggtacaaatggaagatataaccacacaggaaaaatgttacctatccat

SEQ ID NO: 26979 - DNA, 80 bp, synthetic construct
  source 1..80: mol_type = other DNA
ctgggctcaagtgatcctcccacctcagcctcccaagtaggtgagaacacaggtgcacaccatcacatccagctaatttt

SEQ ID NO: 26980 - DNA, 80 bp, synthetic construct
  source 1..80: mol_type = other DNA
gagttaactgcaaccttagcactttataaaatgaatccgtttgttcctattctgcttatatccagagactttagaatgaa

SEQ ID NO: 26981 - DNA, 80 bp, synthetic construct; identical to SEQ ID NO: 10651
  source 1..80: mol_type = other DNA

SEQ ID NO: 26982 - DNA, 80 bp, synthetic construct
  source 1..80: mol_type = other DNA
aaaacaaagccctcaagatgaaactatggttggcattcaagatgaacagtattggaaatagggaggaaaaattaggtatg

SEQ ID NO: 26983 - DNA, 80 bp, synthetic construct
  source 1..80: mol_type = other DNA
atgacccctaggaccatcctgtttgttctaacatctgtcagcctgattaaaacagattgtttaactacaacaacaacaac

SEQ ID NO: 26984 - DNA, 80 bp, synthetic construct
  source 1..80: mol_type = other DNA
ctctgtctctacaaaaaatacaaaaacatgagccaggtgtgatggtgcgcccttgtagtcccagctactagggagactga

SEQ ID NO: 26985 - DNA, 80 bp, synthetic construct; identical to SEQ ID NO: 10652
  source 1..80: mol_type = other DNA

SEQ ID NO: 26986 - DNA, 80 bp, synthetic construct
  source 1..80: mol_type = other DNA
ttccagtgtactgtaaatatcaacattttagcattttgttgctgctgttacatgaatgttccttagaaaacctctgttcc

SEQ ID NO: 26987 - DNA, 80 bp, synthetic construct
  source 1..80: mol_type = other DNA
ttccccaccaatatctagttatccagcgatactcttacttagactaagtgagggacttacaagctgcctggaggctttaa

SEQ ID NO: 26988 - DNA, 80 bp, synthetic construct
  source 1..80: mol_type = other DNA
ggaatcaaataaaaagagagggctggggaaatctcccttcatcatttagtaagcacacagtcatcaaatccccatgtttt

SEQ ID NO: 26989 - DNA, 80 bp, synthetic construct; identical to SEQ ID NO: 10653
  source 1..80: mol_type = other DNA

SEQ ID NO: 26990 - DNA, 80 bp, synthetic construct
  source 1..80: mol_type = other DNA
attcctctctgttatccccatccttatgtgtccatgctttaaaaaaaattcctttattacagttttagtggagttccagg

SEQ ID NO: 26991 - DNA, 80 bp, synthetic construct
  source 1..80: mol_type = other DNA
atcctccttggttaattttaaactggtactaaaaagtatactctgctggagggcttaaaacttggaattaatactttttc

SEQ ID NO: 26992 - DNA, 80 bp, synthetic construct
  source 1..80: mol_type = other DNA
atattttgaaaatatatcacctcttcactgactgttcttcagactgcagcactattccaatttgataatgttcttcttta

SEQ ID NO: 26993 - DNA, 80 bp, synthetic construct
  source 1..80: mol_type = other DNA
cctgggctcaagtgatcctcccaactcagcctagtgagtagctaggactacaggcaagtgccaccacaccttgctaaatt

SEQ ID NO: 26994 - DNA, 80 bp, synthetic construct; identical to SEQ ID NO: 10654
  source 1..80: mol_type = other DNA

SEQ ID NO: 26995 - DNA, 80 bp, synthetic construct
  source 1..80: mol_type = other DNA
gtggggataaaagacaagaaacaagtcagatggagctatgcgttataaagaaaatcaagcctatgggtatagagagtgac

SEQ ID NO: 26996 - DNA, 80 bp, synthetic construct
  source 1..80: mol_type = other DNA
gaaattgcaaagagaccagtggtgtgggaagagaataagcctttgtttctcactgaatgttcacaatctttgccatggtt

SEQ ID NO: 26997 - DNA, 80 bp, synthetic construct
  source 1..80: mol_type = other DNA
acaggcttgtgcctggctcattttgtatttttagtagagacggggtttctccatgttggtcaggctagtcttgaactccc

SEQ ID NO: 26998 - DNA, 80 bp, synthetic construct; identical to SEQ ID NO: 10655
  source 1..80: mol_type = other DNA

SEQ ID NO: 26999 - DNA, 80 bp, synthetic construct
  source 1..80: mol_type = other DNA
ttattctaattttgtaatgtaaaagtagcatagtggttatggggaaagaatactggattgggagtcagaaatcctgagtt

SEQ ID NO: 27000 - DNA, 80 bp, synthetic construct
  source 1..80: mol_type = other DNA
aattcagatcatatctatttttaaacttctcacagagctttcaaattcatattttactgagtttataattttcacctaag

SEQ ID NO: 27001 - DNA, 80 bp, synthetic construct
  source 1..80: mol_type = other DNA
ataaaataactccttaaattgcatagcaaaattcaacagataggaactcactctgaaatcctcaaaaagggtcagaatgc

SEQ ID NO: 27002 - DNA, 80 bp, synthetic construct; identical to SEQ ID NO: 10656
  source 1..80: mol_type = other DNA

SEQ ID NO: 27003 - DNA, 80 bp, synthetic construct
  source 1..80: mol_type = other DNA
acctttaaaacatcctcaatggtcttcaaaaataatttacaagacatttaacgaatggaacttactccatgccctgtgca

SEQ ID NO: 27004 - DNA, 80 bp, synthetic construct
  source 1..80: mol_type = other DNA
gaatagcccatgaagagtaggatattcacatgtcgtgttttcctgtacaaagaaatgtgacagtaaacattaaatgtcga

SEQ ID NO: 27005 - DNA, 80 bp, synthetic construct
  source 1..80: mol_type = other DNA
ttaaatatatctgacaggcaactagaggttgcttaaataccttcaactatgggaagttcatcactcagttgtagctgact

SEQ ID NO: 27006 - DNA, 80 bp, synthetic construct; identical to SEQ ID NO: 10657
  source 1..80: mol_type = other DNA

SEQ ID NO: 27007 - DNA, 80 bp, synthetic construct
  source 1..80: mol_type = other DNA
attaattcagtctaggactaagtattctatcagccataccatataacattgcatactacttaaaagaatgtggttaaaga

SEQ ID NO: 27008 - DNA, 80 bp, synthetic construct
  source 1..80: mol_type = other DNA
catttttgaaggcttgtaactgctgaggtgtaggtgctgtcacattcaacattttcactgccacatcacctaaaaggcaa

SEQ ID NO: 27009 - DNA, 80 bp, synthetic construct; identical to SEQ ID NO: 10658
  source 1..80: mol_type = other DNA

SEQ ID NO: 27010 - DNA, 80 bp, synthetic construct
  source 1..80: mol_type = other DNA
tataaaacttttttatcagagtagttaacatttttttcaaatttatggattacttatgatactttcaattaggaaaatga

SEQ ID NO: 27011 - DNA, 80 bp, synthetic construct
  source 1..80: mol_type = other DNA
ttaaaatcatcaaaaaaaaaaaactttatgtgaaacagctgtaacgtcaacactgccagtaggtgtttaaattggtacaa

SEQ ID NO: 27012 - DNA, 80 bp, synthetic construct
  source 1..80: mol_type = other DNA
actaaaaatgtttacagcaccagcatcaatcaaagccccaaactggaaacgatccaattgcaacagatgaaagaagaaat

SEQ ID NO: 27013 - DNA, 80 bp, synthetic construct; identical to SEQ ID NO: 10659
  source 1..80: mol_type = other DNA

SEQ ID NO: 27014 - DNA, 80 bp, synthetic construct
  source 1..80: mol_type = other DNA
atgtgcacttttatacacaggctgagtatcccttatccaaaatgcctgggaccagaagtgtctcaaatttcaaatttttt

SEQ ID NO: 27015 - DNA, 80 bp, synthetic construct
  source 1..80: mol_type = other DNA
acctggccaggtgtgctgcctcacacctgtaatcccagcactttggaaggccaaggtgggtggctcacctgaggtcagga

SEQ ID NO: 27016 - DNA, 80 bp, synthetic construct
  source 1..80: mol_type = other DNA
gtgccactgcactccagcctgggcgacagagcgagaccttgtctcaaaacaaaacaaaacaaacaaaaataaataaataa

SEQ ID NO: 27017 - DNA, 80 bp, synthetic construct; identical to SEQ ID NO: 10660
  source 1..80: mol_type = other DNA

SEQ ID NO: 27018 - DNA, 80 bp, synthetic construct
  source 1..80: mol_type = other DNA
agtagctgagattacaggcgcccaccaccaagcctggctaattttttgtatttttagtagagatgaggtttcactatgtt

SEQ ID NO: 27019 - DNA, 80 bp, synthetic construct
  source 1..80: mol_type = other DNA
acatactgctttgaaaaatttcatataccaaagacacctttctacatcaataaatgtacctctaccatgccattttaact

SEQ ID NO: 27020 - DNA, 80 bp, synthetic construct
  source 1..80: mol_type = other DNA
taatgatgtctattttttgaatttgcaattctttgataactagtaaggctgaacattttgtatatgtttactggccactt

SEQ ID NO: 27021 - DNA, 80 bp, synthetic construct
  source 1..80: mol_type = other DNA
cacacccagctaatttttgtatttttagtagagatggggtttcaccatgttggccagtatggtcttgatctcctgacctc

SEQ ID NO: 27022 - DNA, 80 bp, synthetic construct; identical to SEQ ID NO: 10661
  source 1..80: mol_type = other DNA

SEQ ID NO: 27023 - DNA, 80 bp, synthetic construct
  source 1..80: mol_type = other DNA
aacatatcctattatgacttgtcacaatgtcaccacattacatacttaccatgccactttcccttgtagactgttccaaa

SEQ ID NO: 27024 - DNA, 80 bp, synthetic construct
  source 1..80: mol_type = other DNA
ttaccttatgcctgagagggatacaggaagagatccccttaagaaaaattctctggaagaatagtagttaaaagtatgac

SEQ ID NO: 27025 - DNA, 80 bp, synthetic construct
  source 1..80: mol_type = other DNA
ccattaacttgtcatttacattaggtatttctcttaatgctgtccctctcccctccccctaccccatgacaggtcccagt

SEQ ID NO: 27026 - DNA, 80 bp, synthetic construct; identical to SEQ ID NO: 10662
  source 1..80: mol_type = other DNA

SEQ ID NO: 27027 - DNA, 80 bp, synthetic construct
  source 1..80: mol_type = other DNA
ataaaattactttggtagggtaaaagatcctcttattcaacaattagtagcaatactacggctaaacagtattcgttttt

SEQ ID NO: 27028 - DNA, 80 bp, synthetic construct
  source 1..80: mol_type = other DNA
tggaccagccttttcgtgccttctaatattagctttctctctttttccttactttagaacagaatactgttactcttcca

SEQ ID NO: 27029 - DNA, 80 bp, synthetic construct
  source 1..80: mol_type = other DNA
tgtgacttctaagaagaaagaattcagagaaaaaaagatatcatatactcttaccattcgattcctgtcttctgaggatg

SEQ ID NO: 27030 - DNA, 80 bp, synthetic construct; identical to SEQ ID NO: 10663
  source 1..80: mol_type = other DNA

SEQ ID NO: 27031 - DNA, 80 bp, synthetic construct
  source 1..80: mol_type = other DNA
ttaagatatctgatgatagacatagacacatactttatttactggtgcaaaatctaggagaaaaacaatctctctaaaac

SEQ ID NO: 27032 - DNA, 80 bp, synthetic construct
  source 1..80: mol_type = other DNA
ctcaacagccaatcaatattaaaaaaaaggaaatccccagatggaaacattttctaataatggccataatgttgaaaata

SEQ ID NO: 27033 - DNA, 80 bp, synthetic construct
  source 1..80: mol_type = other DNA
ggcatatttctcaagactttctgaaaaatctctgcctttgtaagtgagagctttgttaagtaagcgctatggcctctcag

SEQ ID NO: 27034 - DNA, 80 bp, synthetic construct; identical to SEQ ID NO: 10664
  source 1..80: mol_type = other DNA

SEQ ID NO: 27035 - DNA, 80 bp, synthetic construct
  source 1..80: mol_type = other DNA
cattatctcatatgcaattttctaaaataaaatggtatccacaatgtctattaagtagagcacaatccattttctacctt

SEQ ID NO: 27036 - DNA, 80 bp, synthetic construct
  source 1..80: mol_type = other DNA
tccatcccattctatggattttctgagaaacagcagggctgagagagcaaaaatctaaagcaccattactacattcagaa

SEQ ID NO: 27037 - DNA, 80 bp, synthetic construct
  source 1..80: mol_type = other DNA
ctccgcctcctgggttcaagcgattctccagcctcagcctcccaagtagctgggattacaggcatccgccatcatgccta

SEQ ID NO: 27038 - DNA, 80 bp, synthetic construct; identical to SEQ ID NO: 10665
  source 1..80: mol_type = other DNA

SEQ ID NO: 27039 - DNA, 80 bp, synthetic construct
  source 1..80: mol_type = other DNA
cagaatctgaaaaaaggccaaaagcctaataaaatctcataatagaagtttccattgacactttaattttcttaaaaacc

SEQ ID NO: 27040 - DNA, 80 bp, synthetic construct
  source 1..80: mol_type = other DNA
ggaaatctcaggtcaggattttcttgcttttaaaaatttatgacagacagcatacagaaagcttgtggcagtgagtacgt

SEQ ID NO: 27041 - DNA, 80 bp, synthetic construct; identical to SEQ ID NO: 10666
  source 1..80: mol_type = other DNA

SEQ ID NO: 27042 - DNA, 80 bp, synthetic construct
  source 1..80: mol_type = other DNA
agacagacacacagaagaaatgaaagaagtcatggggaataaacaagatgaattgaagcctgtttcataaaataattctg

SEQ ID NO: 27043 - DNA, 80 bp, synthetic construct
  source 1..80: mol_type = other DNA
atgtattaggcaaaattatcaaaagccacagctattaagacatacgaaagtcaaactggcagcaacattaattggcaggt

SEQ ID NO: 27044 - DNA, 80 bp, synthetic construct
  source 1..80: mol_type = other DNA
aaatattgttgagtctgggcttagatattttgaagataaagaaggtcacagtgaagaggtcaactctaagcatgataagc

SEQ ID NO: 27045 - DNA, 80 bp, synthetic construct
  source 1..80: mol_type = other DNA
atgtgctagagtgaatactagatgaaaattcagttggaaatctcaattcagtttctcatttgtgtatttactgacctaag

SEQ ID NO: 27046 - DNA, 80 bp, synthetic construct; identical to SEQ ID NO: 10667
  source 1..80: mol_type = other DNA

SEQ ID NO: 27047 - DNA, 80 bp, synthetic construct
  source 1..80: mol_type = other DNA
atcccagcactttgggaggccgaggcgggcggatcacgaggtcaggagatcgagaccatcctggctaacacggtgaaacc

SEQ ID NO: 27048 - DNA, 80 bp, synthetic construct
  source 1..80: mol_type = other DNA
cgagactccgtctcaaaaaaaaaaaaaaaaaaaaaaaagacttccttttatgtccagtcatcttttctactcatgttata

SEQ ID NO: 27049 - DNA, 80 bp, synthetic construct; identical to SEQ ID NO: 10668
  source 1..80: mol_type = other DNA

SEQ ID NO: 27050 - DNA, 80 bp, synthetic construct
  source 1..80: mol_type = other DNA
gcacttgccaatgtaaacctataatgaaacaattattagtcctaatcaaatgttgatgtccatttcaggccattcaaaac

SEQ ID NO: 27051 - DNA, 80 bp, synthetic construct
  source 1..80: mol_type = other DNA
gagcaacagaaagaataactaatggatgctgtgcttcataccgaggtaatgggataatctgtgtggcaaaccgctgtggc

SEQ ID NO: 27052 - DNA, 80 bp, synthetic construct
  source 1..80: mol_type = other DNA
tctacttctgggaacttttcttaaggaaataattcagaagaaaaagtgatatgcacaaagatgtttagtgcaacattatc

SEQ ID NO: 27053 - DNA, 80 bp, synthetic construct; identical to SEQ ID NO: 10669
  source 1..80: mol_type = other DNA

SEQ ID NO: 27054 - DNA, 80 bp, synthetic construct
  source 1..80: mol_type = other DNA
ttagtagagacggggtttcaccatgttggccaggctggtcttgaactcctgacctcaggtgatccgtccacctcagcctc

SEQ ID NO: 27055 - DNA, 80 bp, synthetic construct
  source 1..80: mol_type = other DNA
gagaccagcctggtcaacatggtgaaacaccatctctactaaaaatacaaaaattagacaggcatggtggcacgcgactg

SEQ ID NO: 27056 - DNA, 80 bp, synthetic construct
  source 1..80: mol_type = other DNA
tctttataacaacgatggtagtggggacagtcgctactggtaatgcaatttgggccttgatgggtagaacttgcattagt

SEQ ID NO: 27057 - DNA, 80 bp, synthetic construct
  source 1..80: mol_type = other DNA
attttctacagaaaaatcaaatacgtacctgaaaagaaggtgacaggagttatatggctactaacaaatataaaaatcct

SEQ ID NO: 27058 - DNA, 80 bp, synthetic construct; identical to SEQ ID NO: 10670
  source 1..80: mol_type = other DNA

SEQ ID NO: 27059 - DNA, 80 bp, synthetic construct
  source 1..80: mol_type = other DNA
atcatgttggccaggctggtcttgaactcctgacctcaggcgatccgcctgccttggcctcccaaagtgctgggattaca

SEQ ID NO: 27060 - DNA, 80 bp, synthetic construct
  source 1..80: mol_type = other DNA
gacaaaggccatatccctttcttttctgttgcatcagctctgaaactctccacaactatggattaaccaaattttgcttt

SEQ ID NO: 27061 - DNA, 80 bp, synthetic construct
  source 1..80: mol_type = other DNA
tgtagttccttctcttacttacatcccttcccttcatcataatagagaaaacaaaagccatcaaacaacttttctgctct

SEQ ID NO: 27062 - DNA, 80 bp, synthetic construct; identical to SEQ ID NO: 10671
  source 1..80: mol_type = other DNA

SEQ ID NO: 27063 - DNA, 80 bp, synthetic construct
  source 1..80: mol_type = other DNA
acttgaggtcaggagttcaggaccagcttggccaacatggcaaaaccctactaaaaatacaaaaattagctgggcatgat

SEQ ID NO: 27064 - DNA, 80 bp, synthetic construct
  source 1..80: mol_type = other DNA
acccgaaaaaccaaaaaaaattgtccctcaaccctgaatcaagctatcctcttttgtcattccttcacagccaagcttct

SEQ ID NO: 27065 - DNA, 80 bp, synthetic construct; identical to SEQ ID NO: 10672
  source 1..80: mol_type = other DNA

SEQ ID NO: 27066 - DNA, 80 bp, synthetic construct
  source 1..80: mol_type = other DNA
tgtatctctactcaaggtccttatatccaactgctactggatttctaaacctgaaagtcccacaggcatcttaaagtcaa

SEQ ID NO: 27067 - DNA, 80 bp, synthetic construct
  source 1..80: mol_type = other DNA
cctctactacaaaacagtatagtggttaagtgtaagagagaaaggccaggtttgaacccacttcagtaatttatcagcag

SEQ ID NO: 27068 - DNA, 80 bp, synthetic construct
  source 1..80: mol_type = other DNA
tagtagtcattttcaacatgattcctaagactcttaccactaattcactaattcatagtctccctccccaaaacacactc

SEQ ID NO: 27069 - DNA, 80 bp, synthetic construct
  source 1..80: mol_type = other DNA
cctctcccaatcaaaattcttcagattccctagcactgctttagatttcagagtaatacacaaagcctttcactgtagat

SEQ ID NO: 27070 - DNA, 80 bp, synthetic construct; identical to SEQ ID NO: 10673
  source 1..80: mol_type = other DNA

SEQ ID NO: 27071 - DNA, 80 bp, synthetic construct
  source 1..80: mol_type = other DNA
aaagagtttgcactttaccttgtaatcaacagtaagtcactaaaagttttggaacaagagaacagatgatgctagaagtg

SEQ ID NO: 27072 - DNA, 80 bp, synthetic construct
  source 1..80: mol_type = other DNA
aaaggtgataccctgtgactggttacgagagaggatgaaaaggcaagatacaaagatgacactctaaatgaagcccaaca

SEQ ID NO: 27073 - DNA, 80 bp, synthetic construct; identical to SEQ ID NO: 10674
  source 1..80: mol_type = other DNA

SEQ ID NO: 27074 - DNA, 80 bp, synthetic construct
  source 1..80: mol_type = other DNA
taaacacagaaaaaatcaagtttttgttggtcataatgccaagcttatgatagcacaaattgaaattcttttcttttgag

SEQ ID NO: 27075 - DNA, 80 bp, synthetic construct
  source 1..80: mol_type = other DNA
ggtagagatggggtctcactatgttgcctaggctggtctctaacttctgggtcaagcgttccacccatcttggcctccca

SEQ ID NO: 27076 - DNA, 80 bp, synthetic construct
  source 1..80: mol_type = other DNA
tttgaagatgacttttatagagatggtatcataagggaaaaaaatcagagtgactgtataacctggagtcagtgaaatat

SEQ ID NO: 27077 - DNA, 80 bp, synthetic construct; identical to SEQ ID NO: 10675
  source 1..80: mol_type = other DNA

SEQ ID NO: 27078 - DNA, 80 bp, synthetic construct
  source 1..80: mol_type = other DNA
ggactggtgagaatttggggcctggaaaaatgaagtcattggaagataagattcagagtaacgatataaaggtaataata

SEQ ID NO: 27079 - DNA, 80 bp, synthetic construct
  source 1..80: mol_type = other DNA
agaccactgattcttacctggaaaacactagggaaatttacttatggctagaaattacctgtggccatcaactgaagaag

SEQ ID NO: 27080 - DNA, 80 bp, synthetic construct
  source 1..80: mol_type = other DNA
gatcctcagagtgccaatatctctcatattctggattttttatcatgcccattattgataacagagacacaagagaatca

SEQ ID NO: 27081 - DNA, 80 bp, synthetic construct; identical to SEQ ID NO: 10676
  source 1..80: mol_type = other DNA

SEQ ID NO: 27082 - DNA, 80 bp, synthetic construct
  source 1..80: mol_type = other DNA
acacagctagaaagacaatgttgagggaataaaaagacacttttgtgagacgtgaggaatgggaaaaaaatatagtagga

SEQ ID NO: 27083 - DNA, 80 bp, synthetic construct
  source 1..80: mol_type = other DNA
ttaatgaaatgaatccacttagaattgatatgcaaataataaaatattatgtactaaaaaaaaattggtatcggctcaat

SEQ ID NO: 27084 - DNA, 80 bp, synthetic construct
  source 1..80: mol_type = other DNA
gagcaggaaaaagaatgcaaaaatgacattagtcaataaagttttagaaagggcactgactgactgacaaccatttacag

SEQ ID NO: 27085 - DNA, 80 bp, synthetic construct
  source 1..80: mol_type = other DNA
atagtaaaaccctgtctctactaaaaatacaaaaattagctgggtgtggtgttaagggcctgtaatcccagctactcagg

SEQ ID NO: 27086 - DNA, 80 bp, synthetic construct; identical to SEQ ID NO: 10677
  source 1..80: mol_type = other DNA

SEQ ID NO: 27087 - DNA, 80 bp, synthetic construct
  source 1..80: mol_type = other DNA
agaaactcaatttggtagttggtatctaatagttgtgtcttggtccaccaagtcaacttctctagctttcagggcaagta

SEQ ID NO: 27088 - DNA, 80 bp, synthetic construct
  source 1..80: mol_type = other DNA
gtcttctgattataatttgatttcccataaatctcttacaaaagaagagtgagtggtggcgcacacaacacaagaagtct

SEQ ID NO: 27089 - DNA, 80 bp, synthetic construct; identical to SEQ ID NO: 10678
  source 1..80: mol_type = other DNA

SEQ ID NO: 27090 - DNA, 80 bp, synthetic construct
  source 1..80: mol_type = other DNA
cctctcacaaatttatacattctacagcatttttaaaaagtagaaaaggaggtatctctcactttgtattcaaaactggg

SEQ ID NO: 27091 - DNA, 80 bp, synthetic construct
  source 1..80: mol_type = other DNA
tggcttctatctttacagagacaaccatatggagttatgtcataaaaacatcaggaaaatgacttacagacaagtttgaa

SEQ ID NO: 27092 - DNA, 80 bp, synthetic construct
  source 1..80: mol_type = other DNA
cctggatcattaccattataaaccttcagagaggccaagctaatttcattagggtgttttataactgctcacagaactgg

SEQ ID NO: 27093 - DNA, 80 bp, synthetic construct; identical to SEQ ID NO: 10679
  source 1..80: mol_type = other DNA

SEQ ID NO: 27094 - DNA, 80 bp, synthetic construct
  source 1..80: mol_type = other DNA
agatttctctaggtagaaatctgaagaaatggcattacactgtgaagagtgggaggaagtagggttaaaactgacaataa

SEQ ID NO: 27095 - DNA, 80 bp, synthetic construct
  source 1..80: mol_type = other DNA
atcctcctgactcctgagtagctgggactacaggcacccgccaccacgcccggctaattttgtttttgtatttttagtag

SEQ ID NO: 27096 - DNA, 80 bp, synthetic construct
  source 1..80: mol_type = other DNA
ttttttttttttttaaagcatgtgcttccagacgcagcctaaataacgctgccccaaattcaatgtgaaagagtacacag

SEQ ID NO: 27097 - DNA, 80 bp, synthetic construct; identical to SEQ ID NO: 10680
  source 1..80: mol_type = other DNA

SEQ ID NO: 27098 - DNA, 80 bp, synthetic construct
  source 1..80: mol_type = other DNA
agctaatttttttttttttgtatctttagtagagacagggtttcaccatgttggccaggctggtctcgaactcctgacct

SEQ ID NO: 27099 - DNA, 80 bp, synthetic construct
  source 1..80: mol_type = other DNA
cccttttccatacttctagcacttgaacttgtcttcactgcctctctcagttttcactaccaacaacatcctaggttggc

SEQ ID NO: 27100 - DNA, 80 bp, synthetic construct
  source 1..80: mol_type = other DNA
ctcaattccaagactctccataatctggttttacacatggtagttcttaagttagataaacctttcttcactagcttcta

SEQ ID NO: 27101 - DNA, 80 bp, synthetic construct
  source 1..80: mol_type = other DNA
tctagttcaaataccaccttcttcattaagttttcctgagcactctctttttcctcactattcttccttctgtaaacatg

SEQ ID NO: 27102 - DNA, 80 bp, synthetic construct; identical to SEQ ID NO: 10681
  source 1..80: mol_type = other DNA

SEQ ID NO: 27103 - DNA, 80 bp, synthetic construct
  source 1..80: mol_type = other DNA
agaaagcagttcaagaagcatgtcactgaagagcagaagtcaaatcatacccaatattgattttttcaggactgattctg

SEQ ID NO: 27104 - DNA, 80 bp, synthetic construct
  source 1..80: mol_type = other DNA
tttctaattaaccaggagatccaaaagaaagcggttcaagtagcatgtcgcccaagagcagaagtcaaaccatacccaat

SEQ ID NO: 27105 - DNA, 80 bp, synthetic construct; identical to SEQ ID NO: 10682
  source 1..80: mol_type = other DNA

SEQ ID NO: 27106 - DNA, 80 bp, synthetic construct
  source 1..80: mol_type = other DNA
atcatgctttatggttaaagaatgagaataaaaagtatctactgtaaattaggtgacattataatttacttaaagtacag

SEQ ID NO: 27107 - DNA, 80 bp, synthetic construct
  source 1..80: mol_type = other DNA
tttacatcttactcaaataaattgggggaagggagctgaatggggatgaaggagagagaggaagaatataaacgtaattt

SEQ ID NO: 27108 - DNA, 80 bp, synthetic construct
  source 1..80: mol_type = other DNA
aactgtatagctgaaccagcattacaatttgggagagaaatactgtccattccacatattattctctaactacacttaaa

SEQ ID NO: 27109 - DNA, 80 bp, synthetic construct
  source 1..80: mol_type = other DNA
ttctgtactacaacgctggtgaaatttataaccacatgtttgacagcggaaaccctggaaaagcagctttcgacaaaagt

SEQ ID NO: 27110 - DNA, 80 bp, synthetic construct; identical to SEQ ID NO: 10683
  source 1..80: mol_type = other DNA

SEQ ID NO: 27111 - DNA, 80 bp, synthetic construct
  source 1..80: mol_type = other DNA
gaagcctatactttaattatcatacaaagaagggaggttaagaaatgccgactggtgttgacggaacaagaaaggcatat

SEQ ID NO: 27112 - DNA, 80 bp, synthetic construct
  source 1..80: mol_type = other DNA
tatgatatctaaagttaataaagcaagaaattgtggctaaaagataattgcagtcatgtgtcacataatgacacttcagt

SEQ ID NO: 27113 - DNA, 80 bp, synthetic construct
  source 1..80: mol_type = other DNA
tggctctgtcgcccaggctggagtgctgtggcacgatctcggctcactgcaacctccacctcctggttcaagtgattctc

SEQ ID NO: 27114 - DNA, 80 bp, synthetic construct; identical to SEQ ID NO: 10684
  source 1..80: mol_type = other DNA

SEQ ID NO: 27115 - DNA, 80 bp, synthetic construct
  source 1..80: mol_type = other DNA
aaaagaaaaattttaaaactgtactgtagcctaagtgtacaatgtttatcataaaagtctacagtaacaaatagtaatgt

SEQ ID NO: 27116 - DNA, 80 bp, synthetic construct
  source 1..80: mol_type = other DNA
gtgttaaggttacctacagcattcagttcagtaacattccgtgcaggttattagcttagaagcaataggctctaccatat

SEQ ID NO: 27117 - DNA, 80 bp, synthetic construct; identical to SEQ ID NO: 10685
  source 1..80: mol_type = other DNA

SEQ ID NO: 27118 - DNA, 80 bp, synthetic construct
  source 1..80: mol_type = other DNA
aatcatatgaaaattgaaacagctcttcctaatcttactaaaaaaaataagaaacagaaaaatcacctaaaagacaataa

SEQ ID NO: 27119 - DNA, 80 bp, synthetic construct
  source 1..80: mol_type = other DNA
gtcaaaggcaaatgatgtagaacatgagtcacgtaacagaactgcactaggaagaatctatcccactaaagccagaaatt

SEQ ID NO: 27120 - DNA, 80 bp, synthetic construct
  source 1..80: mol_type = other DNA
caggttggagtacagtggcaggatctcggcccactgcaacctctgcctcctggtttcaagtgattctcctgcctcagcct

SEQ ID NO: 27121 - DNA, 80 bp, synthetic construct; identical to SEQ ID NO: 10686
  source 1..80: mol_type = other DNA

SEQ ID NO: 27122 - DNA, 80 bp, synthetic construct
  source 1..80: mol_type = other DNA
ggggggggtggttaatacttttaattacatgattgtaattatacaatttccactcttcaatattttgtataaaaccagtt

SEQ ID NO: 27123 - DNA, 80 bp, synthetic construct
  source 1..80: mol_type = other DNA
tgatattttacattatgactccatatataactgtattcatacaacactacttaccctgactatatacaacatgaattaga

SEQ ID NO: 27124 - DNA, 80 bp, synthetic construct
  source 1..80: mol_type = other DNA
agtctgcctcccaggctcaagttatcctcccacctcaggctgaatagccaaggctattggtgcacaccaccatgcccacc

SEQ ID NO: 27125 - DNA, 80 bp, synthetic construct
  source 1..80: mol_type = other DNA
acacattctgttccattaagaatagaaagttattgaaaatatttcaagaaaattacatcctgatatataatacattctgg

SEQ ID NO: 27126 - DNA, 80 bp, synthetic construct; identical to SEQ ID NO: 10687
  source 1..80: mol_type = other DNA

SEQ ID NO: 27127 - DNA, 80 bp, synthetic construct
  source 1..80: mol_type = other DNA
cagtcaaggtaatttgcatgcattaatttgtaaggtgtggggctgtgtgaaggaagacactgagtgtctgcagaaaaagg

SEQ ID NO: 27128 - DNA, 80 bp, synthetic construct
  source 1..80: mol_type = other DNA
aagaacacttttcctttctaagcagaacataggtttttgatcttgcctctatatggcactcagagcaatcattctaacac

SEQ ID NO: 27129 - DNA, 80 bp, synthetic construct; identical to SEQ ID NO: 10688
  source 1..80: mol_type = other DNA

SEQ ID NO: 27130 - DNA, 80 bp, synthetic construct
  source 1..80: mol_type = other DNA
gaaaatttattaaatcttctctctactctatggcagtgacactgtcttattcatttgtcatatccctaggtaagatatgg

SEQ ID NO: 27131 - DNA, 80 bp, synthetic construct
  source 1..80: mol_type = other DNA
ccttcctgaggcatcattttaatactattttctcacacttagcaacttaggtctttcttttatctcctcatattcaattt

SEQ ID NO: 27132 - DNA, 80 bp, synthetic construct
  source 1..80: mol_type = other DNA
cattaggtgtatcttacacttctcccaaaaaatgccttacagaaacacaaacatgatttcattattcactactaatggag

SEQ ID NO: 27133 - DNA, 80 bp, synthetic construct
  source 1..80: mol_type = other DNA
gaaaagtaagaaatgtattcctgattcagagacaacttttggcttctgcctgccattttaggggataagttctcaagttc

SEQ ID NO: 27134 - DNA, 80 bp, synthetic construct; identical to SEQ ID NO: 10689
  source 1..80: mol_type = other DNA

SEQ ID NO: 27135 - DNA, 80 bp, synthetic construct
  source 1..80: mol_type = other DNA
agatgtccgtgacatcctgttgaattaaaaaaaaataaggcaaagaatatcacatagcatggctctactttgatttaaga

SEQ ID NO: 27136 - DNA, 80 bp, synthetic construct
  source 1..80: mol_type = other DNA
cgtttgtgtacacagaaaaaagtttggaagacagaacaataatctgttaatctaaacaaatgttggcctctaggagggta

SEQ ID NO: 27137 - DNA, 80 bp, synthetic construct
  source 1..80: mol_type = other DNA
aatacaagtttttaaagaaaacaactgatttcaactcaggtaaaatgtcagttccaaaattactcatccatatttcacat

SEQ ID NO: 27138 - DNA, 80 bp, synthetic construct; identical to SEQ ID NO: 10690
  source 1..80: mol_type = other DNA

SEQ ID NO: 27139 - DNA, 80 bp, synthetic construct
  source 1..80: mol_type = other DNA
tgtatcactcttggacaaacagcagggtaaagagatgtactcttttcttcaagtcagctccagaaaagacctacaacagc

SEQ ID NO: 27140 - DNA, 80 bp, synthetic construct
  source 1..80: mol_type = other DNA
gggtcttggaacaatgttagacactttctgaaagaaaagtaggtcaatataaaatgttaattttgatataccttttgtga

SEQ ID NO: 27141 - DNA, 80 bp, synthetic construct
  source 1..80: mol_type = other DNA
atatggcctacagtatttcttcaggctaacttagtattattttaatactttttcctaaagtacactttcaattccctagg

SEQ ID NO: 27142 - DNA, 80 bp, synthetic construct; identical to SEQ ID NO: 10691
  source 1..80: mol_type = other DNA

SEQ ID NO: 27143 - DNA, 80 bp, synthetic construct
  source 1..80: mol_type = other DNA
aaagaagaagtaacagtatctgctacaatatacccaccaacgcagtatatccatcactgagcaataatagatgtcaatat

SEQ ID NO: 27144 - DNA, 80 bp, synthetic construct
  source 1..80: mol_type = other DNA
cccctgtttcctctgggaatattcccttctctagaaatccacatggtactagaaaagctatcaagggtcactacttttat

SEQ ID NO: 27145 - DNA, 80 bp, synthetic construct; identical to SEQ ID NO: 10692
  source 1..80: mol_type = other DNA

SEQ ID NO: 27146 - DNA, 80 bp, synthetic construct
  source 1..80: mol_type = other DNA
ctgaaggtgtagactacagtgaggcagtgtgaatacagaggacacagtttttattgggaggtgtaagaagaaggggaaat

SEQ ID NO: 27147 - DNA, 80 bp, synthetic construct
  source 1..80: mol_type = other DNA
tccagaaagcctaattaggatctatgaccagaaataacaggacgcagagggtagtgcaatataaccattaaaactatcca

SEQ ID NO: 27148 - DNA, 80 bp, synthetic construct; identical to SEQ ID NO: 10693
  source 1..80: mol_type = other DNA

SEQ ID NO: 27149 - DNA, 80 bp, synthetic construct
  source 1..80: mol_type = other DNA
aatgcatgcacctctccaactgaggttgaacagtgaagctttctcttgccttcttgtttcaattttcatactataaacaa

SEQ ID NO: 27150 - DNA, 80 bp, synthetic construct
  source 1..80: mol_type = other DNA
gcataagaaggctataatgtccctggcagagtaagtacatgtgttaggccagcttccttcaggcatgagttatagtaatg

SEQ ID NO: 27151 - DNA, 80 bp, synthetic construct
  source 1..80: mol_type = other DNA
aaagatatgaccacgaggtggcagtagcatgcatagctttattgggtgacattgacagatctgcaggcagaggatgtcct

SEQ ID NO: 27152 - DNA, 80 bp, synthetic construct; identical to SEQ ID NO: 10694
  source 1..80: mol_type = other DNA

SEQ ID NO: 27153 - DNA, 80 bp, synthetic construct
  source 1..80: mol_type = other DNA
taggtctcaacctgttgtaatggaagaaacaacctagaggccaatatacagaggggttttttggctcatttaaataataa

SEQ ID NO: 27154 - DNA, 80 bp, synthetic construct
  source 1..80: mol_type = other DNA
gcctatactaatgccaaaatttcctgactggtgaccgatctttagttttaaaccacatccaatgtatcctatcctatgtt

SEQ ID NO: 27155 - DNA, 80 bp, synthetic construct
  source 1..80: mol_type = other DNA
ggagagagagaaagacttctgagaatctaatgaaagcctcaaatgtgctctctgaaacaaaatttcatagggtttgtgga

SEQ ID NO: 27156 - DNA, 80 bp, synthetic construct; identical to SEQ ID NO: 10695
  source 1..80: mol_type = other DNA

SEQ ID NO: 27157 - DNA, 80 bp, synthetic construct
  source 1..80: mol_type = other DNA
cagatgaagaaatcaatggaacaaaacagaaagaccaaaatagaccctaacacataaagaaagtgcgaataagataaagg

SEQ ID NO: 27158 - DNA, 80 bp, synthetic construct
  source 1..80: mol_type = other DNA
gatcaaatatttaaatgctggaaggaagaaagggaaggagagtgaaacaaaccataaaagaactagaagaaagcatggca

SEQ ID NO: 27159 - DNA, 80 bp, synthetic construct
  source 1..80: mol_type = other DNA
tgaaaaatatatttgcaactcatttagcagatgtgttagcttcctgatacacaaagagctcctgaaaaattgagatgaag

SEQ ID NO: 27160 - DNA, 80 bp, synthetic construct
  source 1..80: mol_type = other DNA
tccaaaaaaaaattgataacatattctactggtatgaagctataaacagacatctcataattaagcaagatccatgaagc

SEQ ID NO: 27161 - DNA, 80 bp, synthetic construct; identical to SEQ ID NO: 10696
  source 1..80: mol_type = other DNA

SEQ ID NO: 27162 - DNA, 80 bp, synthetic construct
  source 1..80: mol_type = other DNA
ttgtacttatgtctatattttaaaaaccatgaaaatccatacatgcgtgtacacacatgcacatgcatgcggacgcatac

SEQ ID NO: 27163 - DNA, 80 bp, synthetic construct
  source 1..80: mol_type = other DNA
taggccagggtgaaaacaagatttctttatgcaaataccatatgaaagtataacctgtgtaaagggagggaggttgtctc

SEQ ID NO: 27164 - DNA, 80 bp, synthetic construct; identical to SEQ ID NO: 10697
  source 1..80: mol_type = other DNA

SEQ ID NO: 27165 - DNA, 80 bp, synthetic construct
  source 1..80: mol_type = other DNA
ctgaggtctggagttcaagaccagcctggccaacatggtgaaaccccatctctattaaaaacacaaaaattagccaggca

SEQ ID NO: 27166 - DNA, 80 bp, synthetic construct
  source 1..80: mol_type = other DNA
tcatataatttatactttatatataatgtatataatttatatataacataatttatatacaatatataacatatatatta

SEQ ID NO: 27167 - DNA, 80 bp, synthetic construct
  source 1..80: mol_type = other DNA
tgagatagtacattaatttggtagtttgttttacagtgcagacgattatatgccttaagtaagcttcatgatacagtaac

SEQ ID NO: 27168 - DNA, 80 bp, synthetic construct
  source 1..80: mol_type = other DNA
tacatcaattacattttttttttttttttgagacagagtctcgctctgtcgcccaggctgcagtgcagtggcgtgatctc

SEQ ID NO: 27169 - DNA, 80 bp, synthetic construct; identical to SEQ ID NO: 10698
  source 1..80: mol_type = other DNA

SEQ ID NO: 27170 - DNA, 80 bp, synthetic construct
  source 1..80: mol_type = other DNA
gggattacaggcatgtgccagcaagcccggctaatttttttgtattgttagtaaagacggggttttagtatgttcctcag

SEQ ID NO: 27171 - DNA, 80 bp, synthetic construct
  source 1..80: mol_type = other DNA
aaaaggaggatgtctataccacaaaaacttcagaaggtaaaagcaattttagaattaagcgtgcctcctggtcaggttga

SEQ ID NO: 27172 - DNA, 80 bp, synthetic construct
  source 1..80: mol_type = other DNA
tcactgttggcaaagaatacagtttattaggcgccaagaatgtcttggattccatagctgttttattgaaatttaaacac

SEQ ID NO: 27173 - DNA, 80 bp, synthetic construct; identical to SEQ ID NO: 10699
  source 1..80: mol_type = other DNA

SEQ ID NO: 27174 - DNA, 80 bp, synthetic construct
  source 1..80: mol_type = other DNA
taactagggcatgattttgaagcatcagtcagtattgccctatcttttccctttgccattcctgtaccttggataccatc

SEQ ID NO: 27175 - DNA, 80 bp, synthetic construct
  source 1..80: mol_type = other DNA
aaacaactcaaagatgttaaaattaatttagtagttttaggtaccgtttcagacttttcatcagacaacagacccacagc

SEQ ID NO: 27176 - DNA, 80 bp, synthetic construct
  source 1..80: mol_type = other DNA
taagtcaaattatccttgtttgtggataatatgatcttatatttggaaaaacctaaagactccaccaaaaaaacaattat

SEQ ID NO: 27177 - DNA, 80 bp, synthetic construct; identical to SEQ ID NO: 10700
  source 1..80: mol_type = other DNA

SEQ ID NO: 27178 - DNA, 80 bp, synthetic construct
  source 1..80: mol_type = other DNA
aatagccaaagcaaaaagaacaaaactggaagaatcacattacctcacttcaaattatactacaaagctatagtaaccaa

SEQ ID NO: 27179 - DNA, 80 bp, synthetic construct
  source 1..80: mol_type = other DNA
caggaattccactttcaggtttgtgacaccttgttatatgtgtacaaggagacaagcacaagaatgttcttattacagca

SEQ ID NO: 27180 - DNA, 80 bp, synthetic construct
  source 1..80: mol_type = other DNA
gtatgtgttaacatataaatacatacaccttgaaatcataattttgaataaaaaggacaagatgctgaccattacataca

SEQ ID NO: 27181 - DNA, 80 bp, synthetic construct; identical to SEQ ID NO: 10701
  source 1..80: mol_type = other DNA

SEQ ID NO: 27182 - DNA, 80 bp, synthetic construct
  source 1..80: mol_type = other DNA
ggttcaagcaattctcccgcctcagcctcccgagtagctgggattacaggtgtgcgccacaatgcctggctaatttttat

SEQ ID NO: 27183 - DNA, 80 bp, synthetic construct
  source 1..80: mol_type = other DNA
taaaaaaccttatgaacaatattttctaaatgctaaaccaaagtcaccaattttgaaatacctaaaacaggcaattatct

SEQ ID NO: 27184 - DNA, 80 bp, synthetic construct; identical to SEQ ID NO: 10702
  source 1..80: mol_type = other DNA

SEQ ID NO: 27185 - DNA, 80 bp, synthetic construct
  source 1..80: mol_type = other DNA
gatttctattattagagcattgttcaaaaacctttgtaattcttctcgtctcaggtcattggtatttatctatgaattgc

SEQ ID NO: 27186 - DNA, 80 bp, synthetic construct
  source 1..80: mol_type = other DNA
aaagacaaataataaacaagtttggcagtgatgtgaaaaaaacagaaccctcatgctcaagggaaagtaaaatggtgtag

SEQ ID NO: 27187 - DNA, 80 bp, synthetic construct
  source 1..80: mol_type = other DNA
taaacaaaatgtggtatatacagccaatggaatattactgagccataagaaggcatgaaggactgacacagggtacaatg

SEQ ID NO: 27188 - DNA, 80 bp, synthetic construct
  source 1..80: mol_type = other DNA
aacgggtacagtgtttatttttgggatgaaaaaatatttttaaatgaattatcacggccacagaactttgtgaatataca

SEQ ID NO: 27189 - DNA, 80 bp, synthetic construct; identical to SEQ ID NO: 10703
  source 1..80: mol_type = other DNA

SEQ ID NO: 27190 - DNA, 80 bp, synthetic construct
  source 1..80: mol_type = other DNA
attaagttatcgcaaagttttcagtgtgtatattctatgacccaataattatttcaaggtatttatcttccccaataaaa

SEQ ID NO: 27191 - DNA, 80 bp, synthetic construct
  source 1..80: mol_type = other DNA
ggcattatgtgaaataagggtatcaagtataaaagtaaaaggtcagtccctttttcttgtcccagggaatatccccatcc

SEQ ID NO: 27192 - DNA, 80 bp, synthetic construct; identical to SEQ ID NO: 10704
  source 1..80: mol_type = other DNA

SEQ ID NO: 27193 - DNA, 80 bp, synthetic construct
  source 1..80: mol_type = other DNA
aagtctttttttaagacagggactcactcagttgctcaggctggagtgcagcagcacaatcataccttactgaagcctca

SEQ ID NO: 27194 - DNA, 80 bp, synthetic construct
  source 1..80: mol_type = other DNA
gtgttgggattacaggcgcaagccactacacccagcgtctgaattacatttttttttttttttttttttttgagacagag

SEQ ID NO: 27195 - DNA, 80 bp, synthetic construct
  source 1..80: mol_type = other DNA
agagatgaggtttcaccatgttggccaggctggtctcgaactcctgacctcaagtgatcctcccgcctcaacctcccaaa

SEQ ID NO: 27196 - DNA, 80 bp, synthetic construct
  source 1..80: mol_type = other DNA
gctcggtatatatacatccaaaagaaaatgaatcattctacgaaaaaaccacatatttaacacagcactattcacaatag

SEQ ID NO: 27197 - DNA, 80 bp, synthetic construct; identical to SEQ ID NO: 10705
  source 1..80: mol_type = other DNA

SEQ ID NO: 27198 - DNA, 80 bp, synthetic construct
  source 1..80: mol_type = other DNA
tatttcatataatatttccacagtactatcagctttcttaaaggctattaaaaaacaaacaaacagatttatctaggtac

SEQ ID NO: 27199 - DNA, 80 bp, synthetic construct
  source 1..80: mol_type = other DNA
aaaggttccttgtgctcctatgtaaatcttccatcctgccatagtcctgtgcccaggcaaatacaaatctgttgtcacta

SEQ ID NO: 27200 - DNA, 80 bp, synthetic construct; identical to SEQ ID NO: 10706
  source 1..80: mol_type = other DNA

SEQ ID NO: 27201 - DNA, 80 bp, synthetic construct
  source 1..80: mol_type = other DNA
cagggtcttgctctttcacccaggctggagtgcaatggtgcacatagcacaatgtagcttttaactcctgggcacaagtg

SEQ ID NO: 27202 - DNA, 80 bp, synthetic construct
  source 1..80: mol_type = other DNA
gcactgagattacaggtgtgagccaccgtgtccagcctaacgttttacataactaccatactattatttcacaaaattat

SEQ ID NO: 27203 - DNA, 80 bp, synthetic construct
  source 1..80: mol_type = other DNA
aactaaaactctataaccattaaacaactccccagcaccccttcccccagcccctggcaagcaccattctactctgtgtc

SEQ ID NO: 27204 - DNA, 80 bp, synthetic construct
  source 1..80: mol_type = other DNA
acataccatattttgttcatccactcctctatcaacagaaatctgggttgcttctgcctttggctactatagtgaataat

SEQ ID NO: 27205 - DNA, 80 bp, synthetic construct; identical to SEQ ID NO: 10707
  source 1..80: mol_type = other DNA

SEQ ID NO: 27206 - DNA, 80 bp, synthetic construct
  source 1..80: mol_type = other DNA
ttttcatatgctcgtggccatctggatatcttcattaaagaaatgtctgttcaagtcctctgcccattttttaacaaggt

SEQ ID NO: 27207 - DNA, 80 bp, synthetic construct
  source 1..80: mol_type = other DNA
atcagaagttttaaattctgataatagtacaatttttccattttttcttgtgttccctgggcttttggcatcacggccaa

SEQ ID NO: 27208 - DNA, 80 bp, synthetic construct; identical to SEQ ID NO: 10708
  source 1..80: mol_type = other DNA

SEQ ID NO: 27209 - DNA, 80 bp, synthetic construct
  source 1..80: mol_type = other DNA
cttgagatacggtatgaattttaggacggactttctatttctgaggaaaaaaaaaaaaagcccgttgggattttgaaaag

SEQ ID NO: 27210 - DNA, 80 bp, synthetic construct
  source 1..80: mol_type = other DNA
gcgtcttctcatgcgtttattaccatccatatatctttgatgaaactgttcaaatcctttgtccgtttttaattgggttg

SEQ ID NO: 27211 - DNA, 80 bp, synthetic construct
  source 1..80: mol_type = other DNA
gcccagctaatttttgcatttttagtaaagatggggtttcaccatcttggccaggctggtcttgaactcccgacctcatg

SEQ ID NO: 27212 - DNA, 80 bp, synthetic construct; identical to SEQ ID NO: 10709
  source 1..80: mol_type = other DNA

SEQ ID NO: 27213 - DNA, 80 bp, synthetic construct
  source 1..80: mol_type = other DNA
ttcaagtagaacctatgaaaagtgaactccttctctggaaaggactttatggtgcatttgcccaagtcaacctaatcaaa

SEQ ID NO: 27214 - DNA, 80 bp, synthetic construct
  source 1..80: mol_type = other DNA
attctttggttttattatgtctatcctggattcaaattgtttgtccaactcagagattgtgcttcccaaatcgttagatt

SEQ ID NO: 27215 - DNA, 80 bp, synthetic construct
  source 1..80: mol_type = other DNA
aacctctcttttatattttctataactctctttcttcactttccagagttcactaattcattctttggctgggtttaatc

SEQ ID NO: 27216 - DNA, 80 bp, synthetic construct
  source 1..80: mol_type = other DNA
tatcttgctacatcctcaaatgagtatcagtatgttcactcttttttcctagagataactgtttcttttgaactttctac

SEQ ID NO: 27217 - DNA, 80 bp, synthetic construct; identical to SEQ ID NO: 10710
  source 1..80: mol_type = other DNA

SEQ ID NO: 27218 - DNA, 80 bp, synthetic construct
  source 1..80: mol_type = other DNA
atctcaaaaaagcgtgggtttgcgggggaagttgcagtcatcctaacactttactcctaaatacttatacatgtaattcc

SEQ ID NO: 27219 - DNA, 80 bp, synthetic construct
  source 1..80: mol_type = other DNA
gtgcacttggtcttgtacagtgtggaataatccccaacctttttattgtccaagacattaacttatcaaggagtctaggg

SEQ ID NO: 27220 - DNA, 80 bp, synthetic construct
  source 1..80: mol_type = other DNA
ttctacttggttctttcttaggagtctaaccctgctgttttaagtctgctaactcactgattgtagactgtttccttgca

SEQ ID NO: 27221 - DNA, 80 bp, synthetic construct; identical to SEQ ID NO: 10711
  source 1..80: mol_type = other DNA

SEQ ID NO: 27222 - DNA, 80 bp, synthetic construct
  source 1..80: mol_type = other DNA
gaatctgggttccaactacctttgtgacacaggctgaaggcccagtgttgtattcccacacattgatattcacatccttt

SEQ ID NO: 27223 - DNA, 80 bp, synthetic construct
  source 1..80: mol_type = other DNA
ctaaagcatgaaaccagccacagacaacatataaacagattagcattgttgtgttccaataacattttactgatggacac

SEQ ID NO: 27224 - DNA, 80 bp, synthetic construct
  source 1..80: mol_type = other DNA
caccacacccggccaattttgtatttatagtagagatgtgggtttcaccatgttggccaggctggtctagaactcctgac

SEQ ID NO: 27225 - DNA, 80 bp, synthetic construct; identical to SEQ ID NO: 10712
  source 1..80: mol_type = other DNA

SEQ ID NO: 27226 - DNA, 80 bp, synthetic construct
  source 1..80: mol_type = other DNA
agaataagtaagtaatatcagagtttccaacagctttccttttctcaattataatacctctcagaaaaaccttcaagtac

SEQ ID NO: 27227 - DNA, 80 bp, synthetic construct
  source 1..80: mol_type = other DNA
gatggagtactggcttggaagatacagttcttgtaaattttgacagatattatcaaagtgctttccaataagctgtgata

SEQ ID NO: 27228 - DNA, 80 bp, synthetic construct
  source 1..80: mol_type = other DNA
gactgactgcatctgaacagtgttcacatgctttactgttcatttggatttcatcttatacgaactgcctatttatatct

SEQ ID NO: 27229 - DNA, 80 bp, synthetic construct; identical to SEQ ID NO: 10713
  source 1..80: mol_type = other DNA

SEQ ID NO: 27230 - DNA, 80 bp, synthetic construct
  source 1..80: mol_type = other DNA
atctcttgattctgatagaatttacttttgtaagcagtctaagatgtgggcccaattttattttcttctacatatgccag

SEQ ID NO: 27231 - DNA, 80 bp, synthetic construct
  source 1..80: mol_type = other DNA
agtccctagatacccaaagtgtcttacttttaatattagcttggctattaacttccatcagatctttaatggccctgatc

SEQ ID NO: 27232 - DNA, 80 bp, synthetic construct; identical to SEQ ID NO: 10714
  source 1..80: mol_type = other DNA

SEQ ID NO: 27233 - DNA, 80 bp, synthetic construct
  source 1..80: mol_type = other DNA
gtttggcctttctgtttaacaaaagtcaacaatcatactttcaatttgcacaaactctgtggtcctctgaatgactcaat

SEQ ID NO: 27234 - DNA, 80 bp, synthetic construct
  source 1..80: mol_type = other DNA
cctgtacagttgtataggtccaacaaatggcaagtggtttattatgttgacaaactctgatattgtggtttataataata

SEQ ID NO: 27235 - DNA, 80 bp, synthetic construct
  source 1..80: mol_type = other DNA
aatttcctaggtggtaggagcatcttttgttccaacaaggtgagttttggtgggttcctgaatggaaggtggtcaaaaga

SEQ ID NO: 27236 - DNA, 80 bp, synthetic construct; identical to SEQ ID NO: 10715
  source 1..80: mol_type = other DNA

SEQ ID NO: 27237 - DNA, 80 bp, synthetic construct
  source 1..80: mol_type = other DNA
tgggaatccttgatttatagccagctggtcagaagtgtaagtcacaacctggaacttgggactagcatctcaagaggggg

SEQ ID NO: 27238 - DNA, 80 bp, synthetic construct
  source 1..80: mol_type = other DNA
gggaaaaacacccccacacatctagtcacaaaaatttgttgtgttgacagtatagtaggggaaagcagtttgttttccaa

SEQ ID NO: 27239 - DNA, 80 bp, synthetic construct
  source 1..80: mol_type = other DNA
acacagcagtcacatagaactctccaggcagaaattttgtttagaaaacgacttttagagctttttcatggaataaatgc

SEQ ID NO: 27240 - DNA, 80 bp, synthetic construct
  source 1..80: mol_type = other DNA
aggccatgacctttaaaaaattttttttgaattcagaatttcaatgtttttagttgaggtttgttttggttctccacagg

SEQ ID NO: 27241 - DNA, 80 bp, synthetic construct; identical to SEQ ID NO: 10716
  source 1..80: mol_type = other DNA

SEQ ID NO: 27242 - DNA, 80 bp, synthetic construct
  source 1..80: mol_type = other DNA
ggcaagtgtttagcgtgctatcttggactacaaatctaagtccactttaaaaaacataatctcattcttggtacttgatt

SEQ ID NO: 27243 - DNA, 80 bp, synthetic construct
  source 1..80: mol_type = other DNA
attatcctggctgagaagatgtatgtaaagtccttagcacagaacttggaacacagcatggcaaatgctcaaatagtaac

SEQ ID NO: 27244 - DNA, 80 bp, synthetic construct; identical to SEQ ID NO: 10717
  source 1..80: mol_type = other DNA

SEQ ID NO: 27245 - DNA, 80 bp, synthetic construct
  source 1..80: mol_type = other DNA
tataagctttagtgatacctgtaaatttctcttggcctctctcataaatatgaggaggctagttaaaccttttttttttt

SEQ ID NO: 27246 - DNA, 80 bp, synthetic construct
  source 1..80: mol_type = other DNA
tgtatttttagtagagccaaggtttcaccgtgtgttagccaggactgtctcgatctcctgacctcctgacctcgtgatct

SEQ ID NO: 27247 - DNA, 80 bp, synthetic construct
  source 1..80: mol_type = other DNA
acatttgtatacagaaactcacaaaattactaagttgagtggaacctggaaggaacaataccgtgatgaagagaagggaa

SEQ ID NO: 27248 - DNA, 80 bp, synthetic construct
  source 1..80: mol_type = other DNA
taagtggggcatccctggaaagatatgcttagtaattccccatcttaatgtgggaaaaataattttaattttattctacc

SEQ ID NO: 27249 - DNA, 80 bp, synthetic construct; identical to SEQ ID NO: 10718
  source 1..80: mol_type = other DNA

SEQ ID NO: 27250 - DNA, 80 bp, synthetic construct
  source 1..80: mol_type = other DNA
ttcagttgtatttggaatttttattgtcaaaagtaaccacagacatttaaaaagtagtgatgtatacagatgggttactt

SEQ ID NO: 27251 - DNA, 80 bp, synthetic construct
  source 1..80: mol_type = other DNA
aacatatcaatcacactgaacgttcaacatctgataatataactcagaaaggagatttctcaagggtgaagaatgagtct

SEQ ID NO: 27252 - DNA, 80 bp, synthetic construct
  source 1..80: mol_type = other DNA
actttgccaccaaataattacatatttttcattcctgtatgacatggatgcctctatttgcatgacctctgagtatgaag

SEQ ID NO: 27253 - DNA, 80 bp, synthetic construct; identical to SEQ ID NO: 10719
  source 1..80: mol_type = other DNA

SEQ ID NO: 27254 - DNA, 80 bp, synthetic construct
  source 1..80: mol_type = other DNA
aagagaatataaaattttagcctttgattataatcttttcaccagttgatagggttttaagtttcaaattacaaaataag

SEQ ID NO: 27255 - DNA, 80 bp, synthetic construct
  source 1..80: mol_type = other DNA
ccacttatatttaccttccaaatcatgtctaacgtaagataaaacactgtatcaaggaaaagtgttcctcccattaaaag

SEQ ID NO: 27256 - DNA, 80 bp, synthetic construct
  source 1..80: mol_type = other DNA
aatttaggacacagtaccagatctcactgttagtaccaaaacctccttaatagggtttagaagatgtgtaactgccacat

SEQ ID NO: 27257 - DNA, 80 bp, synthetic construct; identical to SEQ ID NO: 10720
  source 1..80: mol_type = other DNA

SEQ ID NO: 27258 - DNA, 80 bp, synthetic construct
  source 1..80: mol_type = other DNA
tactacaaacatttatgaaagagagaagcaaatattttaaaatggcctttcccgtctctcaaggagtttactgttgggca

SEQ ID NO: 27259 - DNA, 80 bp, synthetic construct
  source 1..80: mol_type = other DNA
gatgaagaaagtagggaggaaggaatcctctatatgggaaaaattctgtaacaaagagtttgttttttctgtaacaaagg

SEQ ID NO: 27260 - DNA, 80 bp, synthetic construct
  source 1..80: mol_type = other DNA
aaataggtaaagaaacaataaggctgaaaaggtgaaagggaatagattgtagagagtatatacgccatgctatcaagtct

SEQ ID NO: 27261 - DNA, 80 bp, synthetic construct; identical to SEQ ID NO: 10721
  source 1..80: mol_type = other DNA

SEQ ID NO: 27262 - DNA, 80 bp, synthetic construct
  source 1..80: mol_type = other DNA
agggctcagactacaaccacacataagacaaacacaattcctactctttgaagatcacataaatgcagtctggaacacaa

SEQ ID NO: 27263 - DNA, 80 bp, synthetic construct
  source 1..80: mol_type = other DNA
accaaaatgttagctttaatttttgaaagtatactgatccctccatgacagattataaactatcacttcaccacatctat

SEQ ID NO: 27264 - DNA, 80 bp, synthetic construct
  source 1..80: mol_type = other DNA
ctaaacctctcacctctaaaagcatttatttccattctacctttaagacccggagaagcatcacagtctttacaaaagca

SEQ ID NO: 27265 - DNA, 80 bp, synthetic construct; identical to SEQ ID NO: 10722
  source 1..80: mol_type = other DNA

SEQ ID NO: 27266 - DNA, 80 bp, synthetic construct
  source 1..80: mol_type = other DNA
tcaatttatggaacttagatttgcctggtccttcacactactgcctgaaaatcatgcttgtttttaacatcatattacag

SEQ ID NO: 27267 - DNA, 80 bp, synthetic construct
  source 1..80: mol_type = other DNA
acatctttccccattcttcttctactctcacttcagtgctaatattgggtgtttagggccttagtctaccattccctcag

SEQ ID NO: 27268 - DNA, 80 bp, synthetic construct; identical to SEQ ID NO: 10723
  source 1..80: mol_type = other DNA

SEQ ID NO: 27269 - DNA, 80 bp, synthetic construct
  source 1..80: mol_type = other DNA
cacaagtaaaacaaattattgtagagactaccacatagcaaaaatccaataaatatttgtattagtaataattgataacc

SEQ ID NO: 27270 - DNA, 80 bp, synthetic construct
  source 1..80: mol_type = other DNA
ttctcaaaatctcaatttttttttgtagaaactgacaagctgatcttaaaattcatatggaaatacaacggacttgaaat

SEQ ID NO: 27271 - DNA, 80 bp, synthetic construct
  source 1..80: mol_type = other DNA
ggaatgacttccaatgcatgaagggtttctttgtgggaatgataaaaatattttagaatcagatagtggtgacagttgtc

SEQ ID NO: 27272 - DNA, 80 bp, synthetic construct; identical to SEQ ID NO: 10724
  source 1..80: mol_type = other DNA

SEQ ID NO: 27273 - DNA, 80 bp, synthetic construct
  source 1..80: mol_type = other DNA
ttttctaagaaaaagtttaattatttttttctttcctcctcctccccacttcctacttagctctttagaaatgcaattat

SEQ ID NO: 27274 - DNA, 80 bp, synthetic construct
  source 1..80: mol_type = other DNA
atagtcccagcaacccaggaggctgaagcgggaggatcgcctgagcccaggaggtagaggctgcaatgagccgagatcat

SEQ ID NO: 27275 - DNA, 80 bp, synthetic construct
  source 1..80: mol_type = other DNA
aactctcacccgtcaggaagttgcctcaagaggtaatagttgatctacaaccaaaagtaagactgctagagttttcagcc

SEQ ID NO: 27276 - DNA, 80 bp, synthetic construct; identical to SEQ ID NO: 10725
  source 1..80: mol_type = other DNA

SEQ ID NO: 27277 - DNA, 80 bp, synthetic construct
  source 1..80: mol_type = other DNA
aaatagataaattggaattccatccacatttaaactttaaaatagataaattggaattccatccacatttaaacttttgt

SEQ ID NO: 27278 - DNA, 80 bp, synthetic construct
  source 1..80: mol_type = other DNA
gattgcttgagtccaggtgttcgagaccagcctgggcaacatggcaaatccccatctctacaaaaaatacaaaaattatc

SEQ ID NO: 27279 - DNA, 80 bp, synthetic construct
  source 1..80: mol_type = other DNA
caggctcaagcgatcctcccatctcagcctcccgggcaggtgggactacaggcatgcaccaccacgcctggataattttt

SEQ ID NO: 27280 - DNA, 80 bp, synthetic construct
  source 1..80: mol_type = other DNA
caaacccagtttttttaagtgggcaaaggatttgaatagacatttctccaaagaagatatacaaatggctaacaagaaca

SEQ ID NO: 27281 - DNA, 80 bp, synthetic construct; identical to SEQ ID NO: 10726
  source 1..80: mol_type = other DNA

SEQ ID NO: 27282 - DNA, 80 bp, synthetic construct
  source 1..80: mol_type = other DNA
atatatgtgtatgatgaaatattcagccataacaagaaatgaagtactgatacatactactacataaacaaactttggaa

SEQ ID NO: 27283 - DNA, 80 bp, synthetic construct
  source 1..80: mol_type = other DNA
ggagtgataaaaatgttttggaataagatagtggtgaatatagtaaaaaccactgaattacacagttttaaaaagttaat

SEQ ID NO: 27284 - DNA, 80 bp, synthetic construct
  source 1..80: mol_type = other DNA
caatgaaatcttacaaactgcccataaatgatatataatggactgttctgcattccacaggaagcatccagcttccagta

SEQ ID NO: 27285 - DNA, 80 bp, synthetic construct; identical to SEQ ID NO: 10727
  source 1..80: mol_type = other DNA

SEQ ID NO: 27286 - DNA, 80 bp, synthetic construct
  source 1..80: mol_type = other DNA
ctgtaggattcaaccataaattctgaagtagttaggactcagctgtagggtgattacagagacagtatcccttcatctct

SEQ ID NO: 27287 - DNA, 80 bp, synthetic construct
  source 1..80: mol_type = other DNA
gaggaaatgaagaaactctggggaacaacttttcagagtaaatttatcttttcttcctttggatgatggtagaaaaaagg

SEQ ID NO: 27288 - DNA, 80 bp, synthetic construct; identical to SEQ ID NO: 10728
  source 1..80: mol_type = other DNA

SEQ ID NO: 27289 - DNA, 80 bp, synthetic construct
  source 1..80: mol_type = other DNA
ttacttcaggaaatgtaagcatagtcactagtataggggtgatatgtgacctcattctagtcaatgagatataaaaggaa

SEQ ID NO: 27290 - DNA, 80 bp, synthetic construct
  source 1..80: mol_type = other DNA
tgctgtggtcttgacagaaaagctaaagggactatagcgattcaaccaagtatctgacaactgacctgtgtagaactagt

SEQ ID NO: 27291 - DNA, 80 bp, synthetic construct
  source 1..80: mol_type = other DNA
atggattgggatttattccttaatttttctcatgtttcctctaaaatttcccatctctctgcttttactctgctttctag

SEQ ID NO: 27292 - DNA, 80 bp, synthetic construct
  source 1..80: mol_type = other DNA
aggctgaggcgggcggatcacgaggtcaggagatcgagaccatcttggctaacacggtgaaacccagtctctactaaaaa

SEQ ID NO: 27293 - DNA, 80 bp, synthetic construct; identical to SEQ ID NO: 10729
  source 1..80: mol_type = other DNA

SEQ ID NO: 27294 - DNA, 80 bp, synthetic construct
  source 1..80: mol_type = other DNA
gcgctcaccattgctccatctgtaagggcgcacccttctatagacgtaacttgccttgctgagaattaaaaagaaaatta

SEQ ID NO: 27295 - DNA, 80 bp, synthetic construct
  source 1..80: mol_type = other DNA
tattctgttttctgcactgtttctgagtttctgttgaccatttctgctgctgtctttcctgttgacagctttctttaaat

SEQ ID NO: 27296 - DNA, 80 bp, synthetic construct
  source 1..80: mol_type = other DNA
tgagcacagtggcttgcacctgtaatcccaccactttgggaagccaaggcaggtggatcacttgaggtcaggagttcgag

SEQ ID NO: 27297 - DNA, 80 bp, synthetic construct; identical to SEQ ID NO: 10730
  source 1..80: mol_type = other DNA

SEQ ID NO: 27298 - DNA, 80 bp, synthetic construct
  source 1..80: mol_type = other DNA
ttttcgacaagggtgccaaggccattcagtcttttccacaaatgatgctgagaaaactgggtatccatatgcaaaagaac

SEQ ID NO: 27299 - DNA, 80 bp, synthetic construct
  source 1..80: mol_type = other DNA
atttggactaaaaaactataagcagagtaaaaagggaacccacacaatgggaaaaatatttgcaaattaaatatccaata

SEQ ID NO: 27300 - DNA, 80 bp, synthetic construct
  source 1..80: mol_type = other DNA
tcaggaaaatgcaaatcagcaccataataaggtatcacttcacgcacatgaggctatgttttttttgttttgccttgttt

SEQ ID NO: 27301 - DNA, 80 bp, synthetic construct; identical to SEQ ID NO: 10731
  source 1..80: mol_type = other DNA

SEQ ID NO: 27302 - DNA, 80 bp, synthetic construct
  source 1..80: mol_type = other DNA
atgcgatgccagtaggaatataaaacagggcaggtgctacagaaaaaggtgtggcaactccagaaaaaataatcataaaa

SEQ ID NO: 27303 - DNA, 80 bp, synthetic construct
  source 1..80: mol_type = other DNA
caagtgtccactgatggatgaatggataatcaaaatatggtaaatacatacaatgaatggattattattcagccttaaaa

SEQ ID NO: 27304 - DNA, 80 bp, synthetic construct
  source 1..80: mol_type = other DNA
gaaagtagaatggtggttgctacgaactagagaaagaaggaaatagagatttagtgtttaaaggctagagagtttcagtt

SEQ ID NO: 27305 - DNA, 80 bp, synthetic construct; identical to SEQ ID NO: 10732
  source 1..80: mol_type = other DNA

SEQ ID NO: 27306 - DNA, 80 bp, synthetic construct
  source 1..80: mol_type = other DNA
ccaacatggtgaaacctgtctccactaaaaatacaaaaattagtcgggagtcataacgcacacctgtaatcccagctact

SEQ ID NO: 27307 - DNA, 80 bp, synthetic construct
  source 1..80: mol_type = other DNA
tatatgttcattgtctatatatccatcccctcattaaaatataagcttaaaaaggcggagattgttggccattttttaaa

SEQ ID NO: 27308 - DNA, 80 bp, synthetic construct
  source 1..80: mol_type = other DNA
gtggtgcatgcctgtaatcccagctacttgggaggctgaggtaggaaaattgcttgaacctgggaggtggaggttgcagt

SEQ ID NO: 27309 - DNA, 80 bp, synthetic construct; identical to SEQ ID NO: 10733
  source 1..80: mol_type = other DNA

SEQ ID NO: 27310 - DNA, 80 bp, synthetic construct
  source 1..80: mol_type = other DNA
gataagaatctgttttaccacaagctaataatataacctgtgagttatggtctgatgtatgctgtcctactcagatttaa

SEQ ID NO: 27311 - DNA, 80 bp, synthetic construct
  source 1..80: mol_type = other DNA
aaagagcgagacaatgtcatgataaaggtagaataagatagagatcaagaacacagatttctgacttagatatctgcctt

SEQ ID NO: 27312 - DNA, 80 bp, synthetic construct; identical to SEQ ID NO: 10734
  source 1..80: mol_type = other DNA

SEQ ID NO: 27313 - DNA, 80 bp, synthetic construct
  source 1..80: mol_type = other DNA
gtacttgcttccttatgacacctttgatcagcctcctaataatatatgtatagaagatagcacaggctattaggaagtac

SEQ ID NO: 27314 - DNA, 80 bp, synthetic construct
  source 1..80: mol_type = other DNA
tcataaaatccttaagacttaactggcccttcaaaaagtaattaaattactaagttacaaatttagttcagaagtctttc

SEQ ID NO: 27315 - DNA, 80 bp, synthetic construct
  source 1..80: mol_type = other DNA
ccttaccacctagattctgtaacaccttgttggctgtggagtctgactgactacttaagaaaactaatgctaagaaagct

SEQ ID NO: 27316 - DNA, 80 bp, synthetic construct; identical to SEQ ID NO: 10735
  source 1..80: mol_type = other DNA

SEQ ID NO: 27317 - DNA, 80 bp, synthetic construct
  source 1..80: mol_type = other DNA
ctaaaaatagaaaaaattaggtggacgtggtaatgtgcgcctgtagtcccagctgctcaggaggctgaggcaggacaatc

SEQ ID NO: 27318 - DNA, 80 bp, synthetic construct
  source 1..80: mol_type = other DNA
ttcccccttagttctgatgttttctaaattataaaatacatgtttattttaacaagtgacacaaaacaagattaagaagt

SEQ ID NO: 27319 - DNA, 80 bp, synthetic construct
  source 1..80: mol_type = other DNA
tagatatgatactcaaaagcttacctccagatatattgatggtggattatgctccccaccaaatttgtccaatagggcct

SEQ ID NO: 27320 - DNA, 80 bp, synthetic construct; identical to SEQ ID NO: 10736
  source 1..80: mol_type = other DNA

SEQ ID NO: 27321 - DNA, 80 bp, synthetic construct
  source 1..80: mol_type = other DNA
tggtgagcagccttccatgtctcccttttactcatggaaaaaacattaagacatacatatatgaaatgtacacatataat

SEQ ID NO: 27322 - DNA, 80 bp, synthetic construct
  source 1..80: mol_type = other DNA
tggtatccaggggttaggtgggcatagacaattttaagagaatttccagatcctcaagttttatctgtatgctccctgat

SEQ ID NO: 27323 - DNA, 80 bp, synthetic construct
  source 1..80: mol_type = other DNA
aaatagggaaattccttgagagaaaagggggaaaaattaagagcaggaccatattttatcaatgaaacaaatttgtggca

SEQ ID NO: 27324 - DNA, 80 bp, synthetic construct; identical to SEQ ID NO: 10737
  source 1..80: mol_type = other DNA

SEQ ID NO: 27325 - DNA, 80 bp, synthetic construct
  source 1..80: mol_type = other DNA
taaaggacatttagattattccatttcctcaacatcaaacaatactccaacaaatagttctgaactgcttttcagagtaa

SEQ ID NO: 27326 - DNA, 80 bp, synthetic construct
  source 1..80: mol_type = other DNA
ctcaccaacacccagcacaatcacacttctaaacttttgccagtctgaaagggaaaaggcaatcatgttttaatttgtat

SEQ ID NO: 27327 - DNA, 80 bp, synthetic construct
  source 1..80: mol_type = other DNA
gttaaggtctttcaattgtttttcatgactcttgtcatataaagtcttgctactcaaagtgtgggtccacagaccagaag

SEQ ID NO: 27328 - DNA, 80 bp, synthetic construct; identical to SEQ ID NO: 10738
  source 1..80: mol_type = other DNA

SEQ ID NO: 27329 - DNA, 80 bp, synthetic construct
  source 1..80: mol_type = other DNA
catatgcatattaaagtctgagaagcagtgatagaggttccaaattgtttttccagtcaggtatttcaatgttttctttc

SEQ ID NO: 27330 - DNA, 80 bp, synthetic construct
  source 1..80: mol_type = other DNA
tgatgaagcccaaaatttaaaatccaactctaccttttcctctcaacaccagattcctaactgcctgctgaatatgtcta

SEQ ID NO: 27331 - DNA, 80 bp, synthetic construct
  source 1..80: mol_type = other DNA
ctttgagtaaaccaaaaacttcagcatcatccttgactcttttctcacatctgacaatccatttcaatccatctccaaat

SEQ ID NO: 27332 - DNA, 80 bp, synthetic construct
  source 1..80: mol_type = other DNA
ggccatgcatggtggctcacgcctgtaatctcagcactttgggaggctgagacgggaggatcgcaacatagtaggaccct

SEQ ID NO: 27333 - DNA, 80 bp, synthetic construct; identical to SEQ ID NO: 10739
  source 1..80: mol_type = other DNA

SEQ ID NO: 27334 - DNA, 80 bp, synthetic construct
  source 1..80: mol_type = other DNA
cttcccctaagatttctataaagtttgctgtcttaccaagttcattcatctctttatcccaatgtcaccttatcaatgaa

SEQ ID NO: 27335 - DNA, 80 bp, synthetic construct
  source 1..80: mol_type = other DNA
ttcccactccccaacagaatgaagtccaggagggcataggtttttgtcttattttttctgatttatccccagagcctaga

SEQ ID NO: 27336 - DNA, 80 bp, synthetic construct
  source 1..80: mol_type = other DNA
agactcccaagtagttgggactacaggcacgcagcagcacacctggctaatttttgtatttttagtagagatggggtttt

SEQ ID NO: 27337 - DNA, 80 bp, synthetic construct; identical to SEQ ID NO: 10740
  source 1..80: mol_type = other DNA

SEQ ID NO: 27338 - DNA, 80 bp, synthetic construct
  source 1..80: mol_type = other DNA
gagaaagtgggggaaaataatcagagatgagaaatgaagagaatgagctgattagaataaaattttcttgctggggtata

SEQ ID NO: 27339 - DNA, 80 bp, synthetic construct
  source 1..80: mol_type = other DNA
tggtggcgtgtgcctgtaatcccagctacccaggaggctgaggcaggagaatcactggaacccaggaggcggaggttgca

SEQ ID NO: 27340 - DNA, 80 bp, synthetic construct; identical to SEQ ID NO: 10741
  source 1..80: mol_type = other DNA

SEQ ID NO: 27341 - DNA, 80 bp, synthetic construct
  source 1..80: mol_type = other DNA
ttactaaaagatctcctctcctgttttaatctcttcagtagaccacagctattacagccaagcaagcttagtaaataact

SEQ ID NO: 27342 - DNA, 80 bp, synthetic construct
  source 1..80: mol_type = other DNA
ggaaggacatgaaggggagctatggcacaaaaaaaaaactacagccattggctcccctcatcccttaaagaaaatgtaat

SEQ ID NO: 27343 - DNA, 80 bp, synthetic construct
  source 1..80: mol_type = other DNA
cccagcactttgggaggctgaggcaggtggataacctgaggccaggagtttgagaccagcctggccaacaaggcaaaacc

SEQ ID NO: 27344 - DNA, 80 bp, synthetic construct
  source 1..80: mol_type = other DNA
gactatctctaaacaaacaaacaaacaaaacataaaataatccaaactgtgaagaaaggcatcaaactcttaaattaata

SEQ ID NO: 27345 - DNA, 80 bp, synthetic construct; identical to SEQ ID NO: 10742
  source 1..80: mol_type = other DNA

SEQ ID NO: 27346 - DNA, 80 bp, synthetic construct
  source 1..80: mol_type = other DNA
actctggaagaacagcaagcctaaagacaacacatataaagaagaagcatgaggaaactataaagacatgagttttgaat

SEQ ID NO: 27347 - DNA, 80 bp, synthetic construct
  source 1..80: mol_type = other DNA
aaatatgaaagacacgaagcacaaaatgagttaatctgggaggtaaacagggaatggggagatatttgaacagaagctgg

SEQ ID NO: 27348 - DNA, 80 bp, synthetic construct; identical to SEQ ID NO: 10743
  source 1..80: mol_type = other DNA

SEQ ID NO: 27349 - DNA, 80 bp, synthetic construct
  source 1..80: mol_type = other DNA
aataaaagggaattttactatagatgattaggtgatataaaaactcagcagagaaagatctgaagatgctacactgctga

SEQ ID NO: 27350 - DNA, 80 bp, synthetic construct
  source 1..80: mol_type = other DNA
tttccgacctccagaaatgtaagagagtacaccacatttgtggtgttgtaagtgaccaagtttgttgttatttattattg

SEQ ID NO: 27351 - DNA, 80 bp, synthetic construct
  source 1..80: mol_type = other DNA
gactacattaatgggggaaagggccagcattacagcatttcaaacctatctattattattcaagaagagagatctaggaa

SEQ ID NO: 27352 - DNA, 80 bp, synthetic construct
  source 1..80: mol_type = other DNA
aaaaattaaaagggtgggagagcagttgctcacactgtaggggattattacacccttagaaaactgaactttaaatgaaa

SEQ ID NO: 27353 - DNA, 80 bp, synthetic construct; identical to SEQ ID NO: 10744
  source 1..80: mol_type = other DNA

SEQ ID NO: 27354 - DNA, 80 bp, synthetic construct
  source 1..80: mol_type = other DNA
actgctacactgaaataatcaaatatagattgtggaacattctctaagacatttttcttctctttgaaagtcaaagcctt

SEQ ID NO: 27355 - DNA, 80 bp, synthetic construct
  source 1..80: mol_type = other DNA
tcttagtttagggatggaagatagctgcaagagacattcttgggacaaccatggaaatctgaacacatatcagatgtaag

SEQ ID NO: 27356 - DNA, 80 bp, synthetic construct; identical to SEQ ID NO: 10745
  source 1..80: mol_type = other DNA

SEQ ID NO: 27357 - DNA, 80 bp, synthetic construct
  source 1..80: mol_type = other DNA
cttttgtgacggaaacaacaaaataatgtgcaggtgcacaaaaggctactaagaagagagacagagtcagatgactctag

SEQ ID NO: 27358 - DNA, 80 bp, synthetic construct
  source 1..80: mol_type = other DNA
ttccacagtacatagttctagatgtgtctggccagtgcacacatctatatggggataacagaccttagggaattgtgtgt

SEQ ID NO: 27359 - DNA, 80 bp, synthetic construct
  source 1..80: mol_type = other DNA
gttccccttcacttgacaaagacctacataaatatccttttatgggaagattcaatattataatgatgtcaattttccac

SEQ ID NO: 27360 - DNA, 80 bp, synthetic construct
  source 1..80: mol_type = other DNA
aacctccgcctcctgggttcaagtgattctcctgcctcagcctcccaagtagctgggactacaggtgcacaccaccatgc

SEQ ID NO: 27361 - DNA, 80 bp, synthetic construct; identical to SEQ ID NO: 10746
  source 1..80: mol_type = other DNA

SEQ ID NO: 27362 - DNA, 80 bp, synthetic construct
  source 1..80: mol_type = other DNA
ggggaacagaacggactatataataaatatttccagggtaagtggccatccttttggaaaaggtcaactaatccaaaaga

SEQ ID NO: 27363 - DNA, 80 bp, synthetic construct
  source 1..80: mol_type = other DNA
agcaagaccccatctctagaaaaaaaaaaaaaaaagaaaaaaaagaaaattagttggatgcggtaccacatacttgtact

SEQ ID NO: 27364 - DNA, 80 bp, synthetic construct; identical to SEQ ID NO: 10747
  source 1..80: mol_type = other DNA

SEQ ID NO: 27365 - DNA, 80 bp, synthetic construct
  source 1..80: mol_type = other DNA
ctaagagagaaaaaatggcaaactggtacatctgtataacaaaataccacatattaagtcaaaacaaaaagctagcgcta

SEQ ID NO: 27366 - DNA, 80 bp, synthetic construct
  source 1..80: mol_type = other DNA
atgtaccttggtagaaaataaaggcgccttctgagagaacaaagaaaaggggttgtcatttacagagaaagttcacagtc

SEQ ID NO: 27367 - DNA, 80 bp, synthetic construct
  source 1..80: mol_type = other DNA
tgttaattcaggtggcataaataggaacagacagctatgaaagtcctaaagttactgggtgtataggttttccaggaatg

SEQ ID NO: 27368 - DNA, 80 bp, synthetic construct; identical to SEQ ID NO: 10748
  source 1..80: mol_type = other DNA

SEQ ID NO: 27369 - DNA, 80 bp, synthetic construct
  source 1..80: mol_type = other DNA
ttattatattattccctacactttactatatacttgaagtagaaaggaaaagtgggagggcgagagggaaagagggaaga

SEQ ID NO: 27370 - DNA, 80 bp, synthetic construct
  source 1..80: mol_type = other DNA
ctggaggaaagccagtcaatgaatacatgacacttgtagtcatttcccatttagaaaagaatcctagacctatgtaactg

SEQ ID NO: 27371 - DNA, 80 bp, synthetic construct
  source 1..80: mol_type = other DNA
gtaaataacagaagtagtattgataaagatcatagtagtgatatgtaacacaaagaaatgtcccagaaggtagagaggtt

SEQ ID NO: 27372 - DNA, 80 bp, synthetic construct; identical to SEQ ID NO: 10749
  source 1..80: mol_type = other DNA

SEQ ID NO: 27373 - DNA, 80 bp, synthetic construct
  source 1..80: mol_type = other DNA
gaacagagaatgactgctaataaatccaggggtttcatttttgagtgataaaaatattctacaatgtactgcggtgatgg

SEQ ID NO: 27374 - DNA, 80 bp, synthetic construct
  source 1..80: mol_type = other DNA
gcaaaaatgactgtgaatctggaattttacatccaggcaaactaccagtcaagcatgagggcaaatgaaaacctttttgg

SEQ ID NO: 27375 - DNA, 80 bp, synthetic construct
  source 1..80: mol_type = other DNA
acttctaagaattttaccaatctctcacaaaattggaaaaaaggagtaggcctctcgtcccagcatttataaagataaaa

SEQ ID NO: 27376 - DNA, 80 bp, synthetic construct; identical to SEQ ID NO: 10750
  source 1..80: mol_type = other DNA

SEQ ID NO: 27377 - DNA, 80 bp, synthetic construct
  source 1..80: mol_type = other DNA
caatctcatgtcaaattgtaatccccaatgttggaggtggggcctggttggaggtgactagatcatgggggtggatcttt

SEQ ID NO: 27378 - DNA, 80 bp, synthetic construct
  source 1..80: mol_type = other DNA
tcctgaggcctccccagaaggtgagcagatgccagtatcatgctttctgtagagcctgcagaaccgtgagccaattaaac

SEQ ID NO: 27379 - DNA, 80 bp, synthetic construct
  source 1..80: mol_type = other DNA
agagcagtatatattatagtacctctaattatcactctagtgaagaatggattacggtgcgccaagaatgaatgcaggga

SEQ ID NO: 27380 - DNA, 80 bp, synthetic construct
  source 1..80: mol_type = other DNA
gctactggattagacatggaggaagagtgagaaaaaactaagaattaaggctgattctgaaattctgatgtgtgcaacgg

SEQ ID NO: 27381 - DNA, 80 bp, synthetic construct; identical to SEQ ID NO: 10751
  source 1..80: mol_type = other DNA

SEQ ID NO: 27382 - DNA, 80 bp, synthetic construct
  source 1..80: mol_type = other DNA
tgtattggggctgggagataatagagcatgtttgtggctaaagggaatttaatcgaggggagaagaatgatatggaagac

SEQ ID NO: 27383 - DNA, 80 bp, synthetic construct
  source 1..80: mol_type = other DNA
cagtaaagtttgaagtgaattccacagataggagtgggagctgtgagaggtttgcaatgagtggaggaaatgaatttttt

SEQ ID NO: 27384 - DNA, 80 bp, synthetic construct
  source 1..80: mol_type = other DNA
gtagctgagattacaggcacacgccaccacacccagctaatttttgtatttttagtagaaacggggtttcaccatgttgg

SEQ ID NO: 27385 - DNA, 80 bp, synthetic construct; identical to SEQ ID NO: 10752
  source 1..80: mol_type = other DNA

SEQ ID NO: 27386 - DNA, 80 bp, synthetic construct
  source 1..80: mol_type = other DNA
aatggtaaaactgtaatcaggagccagacaagtgtctacatagatagaacccttttaagtcttttaaggaaaaggctgat

SEQ ID NO: 27387 - DNA, 80 bp, synthetic construct
  source 1..80: mol_type = other DNA
aggatcaaacatttttttctggctaattaaaagcagattaagccctaaagtttcagggatggcaggggaaaggaggggaa

SEQ ID NO: 27388 - DNA, 80 bp, synthetic construct
  source 1..80: mol_type = other DNA
aaggagctgtatttggagcaggatttaaattgaaggaaaatatgtgaaacaatagatgtagtgtaggttcaggactttta

SEQ ID NO: 27389 - DNA, 80 bp, synthetic construct; identical to SEQ ID NO: 10753
  source 1..80: mol_type = other DNA

SEQ ID NO: 27390 - DNA, 80 bp, synthetic construct
  source 1..80: mol_type = other DNA
tgggtaagcttagaggagactgatgaaatcacattcaagaaggctcacctgaggctagagaaataatagttaagatcaga

SEQ ID NO: 27391 - DNA, 80 bp, synthetic construct
  source 1..80: mol_type = other DNA
tctccatgcatctaggatggtacttataagactctcagagagttaagatgtatgctcactagttttatgtactttttcgt

SEQ ID NO: 27392 - DNA, 80 bp, synthetic construct
  source 1..80: mol_type = other DNA
ttctccataatataagattgctccagctttcaattccattttccctgtgccatatactccaataacaagtaggtgataaa

SEQ ID NO: 27393 - DNA, 80 bp, synthetic construct; identical to SEQ ID NO: 10754
  source 1..80: mol_type = other DNA

SEQ ID NO: 27394 - DNA, 80 bp, synthetic construct
  source 1..80: mol_type = other DNA
tctaggcaatgaagacagtgtaattaaactaaagtccctgacctcatagagcatacattctagttaagggaagataaacg

SEQ ID NO: 27395 - DNA, 80 bp, synthetic construct
  source 1..80: mol_type = other DNA
gaaacaagttcagcatgcaggtatgtaagagaaaactagttcaaacagaagggaaacaaatgcaaaaagcattaaggtag

SEQ ID NO: 27396 - DNA, 80 bp, synthetic construct
  source 1..80: mol_type = other DNA
atgacccaaagagaagcttaaaatgcaaatatgcaagtcttgtcctcttgtacaattgaacttgctcactctctcacctg

SEQ ID NO: 27397 - DNA, 80 bp, synthetic construct; identical to SEQ ID NO: 10755
  source 1..80: mol_type = other DNA

SEQ ID NO: 27398 - DNA, 80 bp, synthetic construct
  source 1..80: mol_type = other DNA
atatccattcagtggaattttacttggtaataaaaagaaacaaaatgctgatacattctataacatgaccaaaccttgga

SEQ ID NO: 27399 - DNA, 80 bp, synthetic construct
  source 1..80: mol_type = other DNA
ggggaatataaggattgggggagaatggctaagggtgtggggtttcttttagggctaatgaaaacattctaaaattaaat

SEQ ID NO: 27400 - DNA, 80 bp, synthetic construct; identical to SEQ ID NO: 10756
  source 1..80: mol_type = other DNA

SEQ ID NO: 27401 - DNA, 80 bp, synthetic construct
  source 1..80: mol_type = other DNA
ctacagtttataacctaagtcaaaggatgtaagagccaaaaatcaaaaagaatgaagaaggaacactgaggttgggagga

SEQ ID NO: 27402 - DNA, 80 bp, synthetic construct
  source 1..80: mol_type = other DNA
cttttacatgttctaagagacacctttcccccatccccttcttaacatctttgaattcagattctaccatacaattgatg

SEQ ID NO: 27403 - DNA, 80 bp, synthetic construct
  source 1..80: mol_type = other DNA
gccaggcatggtggcggacacccgtaattccagctactcaggaggctgaggcatgagaatcacttgaacctgggagacag

SEQ ID NO: 27404 - DNA, 80 bp, synthetic construct
  source 1..80: mol_type = other DNA
gctattcatgctgttgtcattcaactcagttatctgcattgttggtattacaaatgttggaattaactgccactttaaaa

SEQ ID NO: 27405 - DNA, 80 bp, synthetic construct; identical to SEQ ID NO: 10757
  source 1..80: mol_type = other DNA

SEQ ID NO: 27406 - DNA, 80 bp, synthetic construct
  source 1..80: mol_type = other DNA
agtgaaacgtatgacagtgatggagaacttcagctatcctgacatctgttgaaagtcttactctgattatttttatgaaa

SEQ ID NO: 27407 - DNA, 80 bp, synthetic construct
  source 1..80: mol_type = other DNA
ctcgttattattagtttagactatttacaatagatcttatctcttcataacagtaaaatgccctatctgcagagtaacac

SEQ ID NO: 27408 - DNA, 80 bp, synthetic construct
  source 1..80: mol_type = other DNA
acctagtctatcttccaactagtctactgtcagtttttagtttcctgaacactaaagcaaaagaggaaacggaaccacga

SEQ ID NO: 27409 - DNA, 80 bp, synthetic construct; identical to SEQ ID NO: 10758
  source 1..80: mol_type = other DNA

SEQ ID NO: 27410 - DNA, 80 bp, synthetic construct
  source 1..80: mol_type = other DNA
aggtactcgggagggtgacgcgggagaatggcgtgaatccgggaggcggagcttgcagtgagccgagatcgcgccactac

SEQ ID NO: 27411 - DNA, 80 bp, synthetic construct
  source 1..80: mol_type = other DNA
agaattatagtaaattctggccaccacagggacagaggctacacacatacacatattgagaagaagtacccatattctct

SEQ ID NO: 27412 - DNA, 80 bp, synthetic construct
  source 1..80: mol_type = other DNA
ccaagagcataaaaaacagacatgcaattgaatgaggagatgaactaaggcatcagaattattttgaagccaaaaagtat

SEQ ID NO: 27413 - DNA, 80 bp, synthetic construct; identical to SEQ ID NO: 10759
  source 1..80: mol_type = other DNA

SEQ ID NO: 27414 - DNA, 80 bp, synthetic construct
  source 1..80: mol_type = other DNA
aggagttcgagactagcctgaccaacatggtgaaccccgtttccactaaaagtacaaaattagccggttgtggtgtcaca

SEQ ID NO: 27415 - DNA, 80 bp, synthetic construct
  source 1..80: mol_type = other DNA
cacagaacaagcttgaaatttaaaatgtctgttgaaataaacctaaaaaaggagttaactagcaaaatggacaaagctaa

SEQ ID NO: 27416 - DNA, 80 bp, synthetic construct; identical to SEQ ID NO: 10760
  source 1..80: mol_type = other DNA

SEQ ID NO: 27417 - DNA, 80 bp, synthetic construct
  source 1..80: mol_type = other DNA
gagggatacaaaattaaacaaatcctgctaagttaaactcaaaaggaaataagaaagtaccaataaaattctaaggaata

SEQ ID NO: 27418 - DNA, 80 bp, synthetic construct
  source 1..80: mol_type = other DNA
aaaaccgtcaaaacaaccatttcagtgctctggacttcagctaaaggctgaacctgagtaagaacatcacagtctgtggc

SEQ ID NO: 27419 - DNA, 80 bp, synthetic construct
  source 1..80: mol_type = other DNA
tgcctagctatttttgtatctttagtacagacagggtttcaccatgttggccaggctggtcttgaactccagacctcagg

SEQ ID NO: 27420 - DNA, 80 bp, synthetic construct; identical to SEQ ID NO: 10761
  source 1..80: mol_type = other DNA

SEQ ID NO: 27421 - DNA, 80 bp, synthetic construct
  source 1..80: mol_type = other DNA
acatggtggcctgaagtttgaatatactccctgatacacagatagacacacaaagaaagaatagaaaccttactggcctt

SEQ ID NO: 27422 - DNA, 80 bp, synthetic construct
  source 1..80: mol_type = other DNA
gaaatatttgaacaaaacctctgacaaatctttagcttgacattaagctatggaaagacaggagcaacccctaggaagcc

SEQ ID NO: 27423 - DNA, 80 bp, synthetic construct; identical to SEQ ID NO: 10762
  source 1..80: mol_type = other DNA

SEQ ID NO: 27424 - DNA, 80 bp, synthetic construct
  source 1..80: mol_type = other DNA
aatttttgtattttcagtagagacggggtttcatcacgttggccaggatggcctcgatctcctgaccttgtgatctgccc

SEQ ID NO: 27425 - DNA, 80 bp, synthetic construct
  source 1..80: mol_type = other DNA
aaagagccaacattctgagagcagggagagaaccaggtctccaattgatgtagctgtggggattaaaataaaatgaacag

SEQ ID NO: 27426 - DNA, 80 bp, synthetic construct
  source 1..80: mol_type = other DNA
agtttttatgagatctggtcatttaaaagtatgtggcaccctccccatctcttgcttctgctccagccatgagagatatg

SEQ ID NO: 27427 - DNA, 80 bp, synthetic construct; identical to SEQ ID NO: 10763
  source 1..80: mol_type = other DNA

SEQ ID NO: 27428 - DNA, 80 bp, synthetic construct
  source 1..80: mol_type = other DNA
attcaaaaaggtcggtgaatccaaaaatggataaatacgtagaattccacactctcacacatcataaagtgttgaaaatg

SEQ ID NO: 27429 - DNA, 80 bp, synthetic construct
  source 1..80: mol_type = other DNA
tgcctcagccttcctagaagctgggattataggtgcccgcgaacacgcctggctaagttttttgtacttttagtacagac

SEQ ID NO: 27430 - DNA, 80 bp, synthetic construct
  source 1..80: mol_type = other DNA
tcttgaaaacagagaaaaacaatccataaaatataggggaacaccacttcaaatgacaacaggtttctcagcagaaacca

SEQ ID NO: 27431 - DNA, 80 bp, synthetic construct; identical to SEQ ID NO: 10764
  source 1..80: mol_type = other DNA

SEQ ID NO: 27432 - DNA, 80 bp, synthetic construct
  source 1..80: mol_type = other DNA
atagaaacgtaacatacagccaacaataagagaaaaggtggagagaagataaagagacctacgtagttttaacatttctt

SEQ ID NO: 27433 - DNA, 80 bp, synthetic construct
  source 1..80: mol_type = other DNA
gttgttcaaacaatctaaaagaatgcaggaaagacagagtaatggaaaacagaagcagctaacagaaaacaaattactaa

SEQ ID NO: 27434 - DNA, 80 bp, synthetic construct
  source 1..80: mol_type = other DNA
cataactaatatatatgcacctaataatggagcttcaaagaacatgaagtaaaaacttacagaacattacaaataggaaa

SEQ ID NO: 27435 - DNA, 80 bp, synthetic construct
  source 1..80: mol_type = other DNA
gtcaaatgcacatggaacactcaccaaaacagaccatattctgagtcataagacaaactttcacaagcttaaaaaaaaac

SEQ ID NO: 27436 - DNA, 80 bp, synthetic construct; identical to SEQ ID NO: 10765
  source 1..80: mol_type = other DNA

SEQ ID NO: 27437 - DNA, 80 bp, synthetic construct
  source 1..80: mol_type = other DNA
ctagtttcaaactcctaggctcaagtgatgctaccacctcagcctcccaaatagctggaattacaggcatgtgccaccaa

SEQ ID NO: 27438 - DNA, 80 bp, synthetic construct
  source 1..80: mol_type = other DNA
aatccatgagattgaaaacagaaaaaaatgttgaaaacaaaagcttgtttgttgaaaagaccaatacaatttacaaatct

SEQ ID NO: 27439 - DNA, 80 bp, synthetic construct
  source 1..80: mol_type = other DNA
ctcaaaaaccaaagaaaaacaaaactctcacaggataaaagatatctgaagatatcttttatattcacaagataaaacag

SEQ ID NO: 27440 - DNA, 80 bp, synthetic construct; identical to SEQ ID NO: 10766
  source 1..80: mol_type = other DNA

SEQ ID NO: 27441 - DNA, 80 bp, synthetic construct
  source 1..80: mol_type = other DNA
aatgctcaaaggacaatttatagcaataaatgtccacccctacctcacaccatattttaaaaaccctcaaaatgaataaa

SEQ ID NO: 27442 - DNA, 80 bp, synthetic construct
  source 1..80: mol_type = other DNA
ctgacaaatcattcttcaacaaaattaaaaccttttgtgcaatgaatattctcaagaaagtgaaaaaaacctacagaatg

SEQ ID NO: 27443 - DNA, 80 bp, synthetic construct; identical to SEQ ID NO: 10767
  source 1..80: mol_type = other DNA

SEQ ID NO: 27444 - DNA, 80 bp, synthetic construct
  source 1..80: mol_type = other DNA
cccagaaatatatataatcattatgtatccatttttttttcctttgagacggagtcttgctctgtcacccaggctggagt

SEQ ID NO: 27445 - DNA, 80 bp, synthetic construct
  source 1..80: mol_type = other DNA
aggctagtctcgaactcctgacttcaagtgatccacctgccttggcctcccaaagagccaggattacaagcatgagccac

SEQ ID NO: 27446 - DNA, 80 bp, synthetic construct
  source 1..80: mol_type = other DNA
gtgcaccaccacgcccagctaatttttgtattcttagtagagatggggtttcaccatgttggccaggatggtttcgatct

SEQ ID NO: 27447 - DNA, 80 bp, synthetic construct; identical to SEQ ID NO: 10768
  source 1..80: mol_type = other DNA

SEQ ID NO: 27448 - DNA, 80 bp, synthetic construct
  source 1..80: mol_type = other DNA
ctgcaacctctgcctcctgggttcaagcaattctcctgcctcagcctcccaagtagctgggattacaggtgcgtgccacc

SEQ ID NO: 27449 - DNA, 80 bp, synthetic construct
  source 1..80: mol_type = other DNA
caagacaacaatgaagtctgctgtgccgactgactttttttcacaaaagatttctctgaaccaggcaatatggtctgata

SEQ ID NO: 27450 - DNA, 80 bp, synthetic construct
  source 1..80: mol_type = other DNA
cactttctttgctcatctataagaagcaacttctcatttcttcaagttttaccatgacattgtagcaattcggtcacatc

SEQ ID NO: 27451 - DNA, 80 bp, synthetic construct; identical to SEQ ID NO: 10769
  source 1..80: mol_type = other DNA

SEQ ID NO: 27452 - DNA, 80 bp, synthetic construct
  source 1..80: mol_type = other DNA
gtgagactagcctgggaaacatagaccctgtctctattaaaaaaaaaaaaaaaattagctgggcatggtggtgcatgcct

SEQ ID NO: 27453 - DNA, 80 bp, synthetic construct
  source 1..80: mol_type = other DNA
tccttgtacatcatcagagctcttgggtgatcaggtatattatcaacgattagtaatatgttggaagggatctttttttc

SEQ ID NO: 27454 - DNA, 80 bp, synthetic construct
  source 1..80: mol_type = other DNA
agcactgacttcaacttaaagtcaccagctgcattagcctctagtaagagtcagcctgtcctttgaagctttaaagcctg

SEQ ID NO: 27455 - DNA, 80 bp, synthetic construct; identical to SEQ ID NO: 10770
  source 1..80: mol_type = other DNA

SEQ ID NO: 27456 - DNA, 80 bp, synthetic construct
  source 1..80: mol_type = other DNA
acttgaatacttagaggccattgtagagttattaattggcctaacttcaatattgttgtgtctcagggcatgcggaggct

SEQ ID NO: 27457 - DNA, 80 bp, synthetic construct
  source 1..80: mol_type = other DNA
gaaatattgcaagaattactaaaatgtgacacagagacacaaagtgagcatgtgctgttggaaaaatggcgctaacagac

SEQ ID NO: 27458 - DNA, 80 bp, synthetic construct
  source 1..80: mol_type = other DNA
caacctaatatttaaaatgtaagcaagttataggtccaaaactgtgtgtcactttagccaactttgagttcatctcaaat

SEQ ID NO: 27459 - DNA, 80 bp, synthetic construct; identical to SEQ ID NO: 10771
  source 1..80: mol_type = other DNA

SEQ ID NO: 27460 - DNA, 80 bp, synthetic construct
  source 1..80: mol_type = other DNA
tcacgcttgtaatgccagcactttgggaggccgaggcgggtggatcacctgaggtcaggagttggagaccaacctgacca

SEQ ID NO: 27461 - DNA, 80 bp, synthetic construct
  source 1..80: mol_type = other DNA
tggggaacaagagcgaaactccatctcaaaaaataaaataaaataaagtaaataaataaataaataaataaataaataaa

SEQ ID NO: 27462 - DNA, 80 bp, synthetic construct
  source 1..80: mol_type = other DNA
acattttaaccttgaaacatggaatcactcccaagatgctctaccttgtcttatcttactggatcctatttagtcacacc

SEQ ID NO: 27463 - DNA, 80 bp, synthetic construct
  source 1..80: mol_type = other DNA
tagttaattaatattattcaaacatttagtaaatgtgaggcactgctgtagtgccagacacataaaactctaccccatcc

SEQ ID NO: 27464 - DNA, 80 bp, synthetic construct; identical to SEQ ID NO: 10772
  source 1..80: mol_type = other DNA

SEQ ID NO: 27465 - DNA, 80 bp, synthetic construct
  source 1..80: mol_type = other DNA
ccagcttcataccaagaggaatttgaatccagatctatttcctacagtaataagaaataagatggtatttccaacaaagg

SEQ ID NO: 27466 - DNA, 80 bp, synthetic construct
  source 1..80: mol_type = other DNA
ctccatatttttaaaaattaaaaaatttttaaattaaaaaaattttttttaaaattagattcaaccaacacactcgttat

SEQ ID NO: 27467 - DNA, 80 bp, synthetic construct
  source 1..80: mol_type = other DNA
atctcttatatatatataagatatgtgtgtgtgtgtgtgtgtgtgtgtgtgtgtgtgtgtgtgtgtgtgtataaaaatat

SEQ ID NO: 27468 - DNA, 80 bp, synthetic construct; identical to SEQ ID NO: 10773
  source 1..80: mol_type = other DNA

SEQ ID NO: 27469 - DNA, 80 bp, synthetic construct
  source 1..80: mol_type = other DNA
acaaaagtgatctattttttaatgaaaaaaataaccacattttccaaaacaacaaaaaacaatgagagggcaaagtgtct

SEQ ID NO: 27470 - DNA, 80 bp, synthetic construct
  source 1..80: mol_type = other DNA
ccgattacagggacggattacaggcatgtgctaccacacccagctaccatatttttggtaaagacgaggtttcatcatgt

SEQ ID NO: 27471 - DNA, 80 bp, synthetic construct
  source 1..80: mol_type = other DNA
agatatctggattctcccaccttctgtattcaatttgttggaatatcatacatcctataactactacatactcacaagaa

SEQ ID NO: 27472 - DNA, 80 bp, synthetic construct; identical to SEQ ID NO: 10774
  source 1..80: mol_type = other DNA

SEQ ID NO: 27473 - DNA, 80 bp, synthetic construct
  source 1..80: mol_type = other DNA
tttgttaagtgtatgtgggagtaagagtattccagccatagtaaacaatcatcagtggcatcaaggtacaggaaatgttc

SEQ ID NO: 27474 - DNA, 80 bp, synthetic construct
  source 1..80: mol_type = other DNA
cctcacaccaccctttattagatgggcttggaataagtttattctaaatcttattctgctcatacttccttcacagggta

SEQ ID NO: 27475 - DNA, 80 bp, synthetic construct; identical to SEQ ID NO: 10775
  source 1..80: mol_type = other DNA

SEQ ID NO: 27476 - DNA, 80 bp, synthetic construct
  source 1..80: mol_type = other DNA
tattccttcttcctggaacactctttgcctagcacttttctaaactaagcacagcttcttcagatagtttaaatctcact

SEQ ID NO: 27477 - DNA, 80 bp, synthetic construct
  source 1..80: mol_type = other DNA
atctgattgcagagaccacatctaagcccaggacataagtaattttttaatgtagtttttattgttataaatggcttttg

SEQ ID NO: 27478 - DNA, 80 bp, synthetic construct
  source 1..80: mol_type = other DNA
cacaactaccctgtaaggtagcaaggaggaagccacagttttgagtaactgaccattccaaaacagaaagtttgaaaact

SEQ ID NO: 27479 - DNA, 80 bp, synthetic construct
  source 1..80: mol_type = other DNA
cccctatagtcaatgtaattatgtctagtggctagttaactgaaaaggtcagttaaatcagggaatcatgtgcaatggta

SEQ ID NO: 27480 - DNA, 80 bp, synthetic construct; identical to SEQ ID NO: 10776
  source 1..80: mol_type = other DNA

SEQ ID NO: 27481 - DNA, 80 bp, synthetic construct
  source 1..80: mol_type = other DNA
ttttgagatgtagggtttcactctgtgcccaggctggagtgcagtagtgtgatcacagctcaccgcaggctcaaactttt

SEQ ID NO: 27482 - DNA, 80 bp, synthetic construct
  source 1..80: mol_type = other DNA
ggttcaagtgattctcctgcctcagcctcccaagtagctgggactacaggcacatgccaccatgcctggctaattttttg

SEQ ID NO: 27483 - DNA, 80 bp, synthetic construct; identical to SEQ ID NO: 10777
  source 1..80: mol_type = other DNA

SEQ ID NO: 27484 - DNA, 80 bp, synthetic construct
  source 1..80: mol_type = other DNA
tgaagaaaacattattgctgctagaggggaaaaaatcaaagttaacactttccctactctactacaagctgcttgtcatc

SEQ ID NO: 27485 - DNA, 80 bp, synthetic construct
  source 1..80: mol_type = other DNA
ccaacgtggagaaaccctgtctctactaaaagtacaaaattagaagggtgcggtggcgggcacctgtaatcctagctact

SEQ ID NO: 27486 - DNA, 80 bp, synthetic construct
  source 1..80: mol_type = other DNA
aaattctaatctagtggtccttaaccagaagcaattttgcccctcaagacatttggaaatgtctcccggcatttttgatg

SEQ ID NO: 27487 - DNA, 80 bp, synthetic construct; identical to SEQ ID NO: 10778
  source 1..80: mol_type = other DNA

SEQ ID NO: 27488 - DNA, 80 bp, synthetic construct
  source 1..80: mol_type = other DNA
acgaaccttggcctaatggtatgttgtaacttgaaacattagctaaacttgaaacatcagcaaaaacccttcataatttt

SEQ ID NO: 27489 - DNA, 80 bp, synthetic construct
  source 1..80: mol_type = other DNA
aatttttaagtctggagactaccgacttaaaataacagaagctaacagatatcagtgtattaatgcaagcaagtttatta

SEQ ID NO: 27490 - DNA, 80 bp, synthetic construct
  source 1..80: mol_type = other DNA
ccaaaaggtataaggagagcaacacaagctgtccactgtggttaataatctcatgaaaacagatggttgtacattataca

SEQ ID NO: 27491 - DNA, 80 bp, synthetic construct; identical to SEQ ID NO: 10779
  source 1..80: mol_type = other DNA

SEQ ID NO: 27492 - DNA, 80 bp, synthetic construct
  source 1..80: mol_type = other DNA
cacagccctattatttgaatgatacaaacttcatagatttgaccagagaatcaaatggaatcctcagtgactggcacaaa

SEQ ID NO: 27493 - DNA, 80 bp, synthetic construct
  source 1..80: mol_type = other DNA
tcagccaataaatatctaccaaatccctgtatgtgctcaggctcatgctaggagttgaggatacagtggtgagcaagacg

SEQ ID NO: 27494 - DNA, 80 bp, synthetic construct
  source 1..80: mol_type = other DNA
aatgacttttcaatcttaacttcagattaaaaatcaccttggaagcttttaaaaatccagataccaaggcctcaccctca

SEQ ID NO: 27495 - DNA, 80 bp, synthetic construct
  source 1..80: mol_type = other DNA
gagagtaaaatgagattattttccacaattgcacaagattattaatgcagtctaagcaacagtttaagagtcataccaca

SEQ ID NO: 27496 - DNA, 80 bp, synthetic construct; identical to SEQ ID NO: 10780
  source 1..80: mol_type = other DNA

SEQ ID NO: 27497 - DNA, 80 bp, synthetic construct
  source 1..80: mol_type = other DNA
accctacaacaccatgatccttggatgcggaagtctcttatataaaaagggagggtatttgcatataacttactttccat

SEQ ID NO: 27498 - DNA, 80 bp, synthetic construct
  source 1..80: mol_type = other DNA
aacttgcagatatggagggccactgtagaagtggcattttgggtggggcaattctttgctgtgtaggacttttagtgcat

SEQ ID NO: 27499 - DNA, 80 bp, synthetic construct; identical to SEQ ID NO: 10781
  source 1..80: mol_type = other DNA

SEQ ID NO: 27500 - DNA, 80 bp, synthetic construct
  source 1..80: mol_type = other DNA
ggagttcaagaccagcctggccaacatggtgaaaccccatctctactaaaaatatttaaaaacaattagccaggtgtggt

SEQ ID NO: 27501 - DNA, 80 bp, synthetic construct
  source 1..80: mol_type = other DNA
ttctttactacagttcttctcaaccattactatgctaatatccaattatgaaatcccaaaaggggagctatataatatag

SEQ ID NO: 27502 - DNA, 80 bp, synthetic construct
  source 1..80: mol_type = other DNA
agaaactcaacaggttagacaaggaggaacatttaaagtttcccaaaattgtaaactatggaacctatctttgggagaac

SEQ ID NO: 27503 - DNA, 80 bp, synthetic construct; identical to SEQ ID NO: 10782
  source 1..80: mol_type = other DNA

SEQ ID NO: 27504 - DNA, 80 bp, synthetic construct
  source 1..80: mol_type = other DNA
gcagaacaaattaaaaatcaaatcatcgaacaggaatctatttgatgtccaacttcactatcagcctcacccatctcctg

SEQ ID NO: 27505 - DNA, 80 bp, synthetic construct
  source 1..80: mol_type = other DNA
cccaaaatggcaggaaggggaaaaaagacattaaaaatggaggagtgatgtattcccagggtagagaacacaacagattt

SEQ ID NO: 27506 - DNA, 80 bp, synthetic construct
  source 1..80: mol_type = other DNA
gcaagctctgcccccagggttcacaccattctcctgcctcagcctcctgagtagctagggctacaggcgcccgccaccat

SEQ ID NO: 27507 - DNA, 80 bp, synthetic construct
  source 1..80: mol_type = other DNA
caaagagcaggctcaaatagaagtactctactcaaagacaacaaggatgagtaataaaaagaaacaatccagcaaagggt

SEQ ID NO: 27508 - DNA, 80 bp, synthetic construct; identical to SEQ ID NO: 10783
  source 1..80: mol_type = other DNA

SEQ ID NO: 27509 - DNA, 80 bp, synthetic construct
  source 1..80: mol_type = other DNA
gtctgtagtcccagctaattgagaggccgagatgggaggatggcttgagcccaggaggcagaggttgcagtgagccaaga

SEQ ID NO: 27510 - DNA, 80 bp, synthetic construct
  source 1..80: mol_type = other DNA
cttcagaaatgaaggccacggtggaaacagaaagaaatggctgaagaagaaaaaaggaagccattcttggcagaaaaaac

SEQ ID NO: 27511 - DNA, 80 bp, synthetic construct; identical to SEQ ID NO: 10784
  source 1..80: mol_type = other DNA

SEQ ID NO: 27512 - DNA, 80 bp, synthetic construct
  source 1..80: mol_type = other DNA
cccataagagacaaagcccccaaagaaaaatataattaataatgtggaagaactgccttatcaacaaaatataaatgaga

SEQ ID NO: 27513 - DNA, 80 bp, synthetic construct
  source 1..80: mol_type = other DNA
gggcccagtggttacttaaagcctaatgaacttactttcgagaaacattttctttggtctgatataaaaactggccaaaa

SEQ ID NO: 27514 - DNA, 80 bp, synthetic construct
  source 1..80: mol_type = other DNA
aataaaatgtatccagtgacacaagagttgcttactcaaaactaggaagtctaccaatacaattacttacctaaatagat

SEQ ID NO: 27515 - DNA, 80 bp, synthetic construct
  source 1..80: mol_type = other DNA
attcttaaacttcatatagggtatctataaaaagtctgtaagtcaccaagcataacagaagcattctcactaaagacagg

SEQ ID NO: 27516 - DNA, 80 bp, synthetic construct; identical to SEQ ID NO: 10785
  source 1..80: mol_type = other DNA

SEQ ID NO: 27517 - DNA, 80 bp, synthetic construct
  source 1..80: mol_type = other DNA
ttacggctgaatagcattccatcggatgctatacaaccacattgtctttacccaatcttctgttgttgaactgattccat

SEQ ID NO: 27518 - DNA, 80 bp, synthetic construct; identical to SEQ ID NO: 10786
  source 1..80: mol_type = other DNA

SEQ ID NO: 27519 - DNA, 80 bp, synthetic construct
  source 1..80: mol_type = other DNA
aaataataccaatcctccacatccaaaaggatgaaaacattatgtagaaaactataaaccttttaaggaaaaaaaaacag

SEQ ID NO: 27520 - DNA, 80 bp, synthetic construct
  source 1..80: mol_type = other DNA
tgtaatcccagcactttgggaggccgaggcaggtggatcacctgaggtcaggagttcgagaccagcctgaccaatatggt

SEQ ID NO: 27521 - DNA, 80 bp, synthetic construct
  source 1..80: mol_type = other DNA
gagcgagactccatctcaaaaaaaaaaaaaaaaaaaggggtggggggggaagagacctataaacaaatgaagataaaaac

SEQ ID NO: 27522 - DNA, 80 bp, synthetic construct; identical to SEQ ID NO: 10787
  source 1..80: mol_type = other DNA

SEQ ID NO: 27523 - DNA, 80 bp, synthetic construct
  source 1..80: mol_type = other DNA
atgagaggttgctttacaaataagtgagaaaaagactgtgcacatatgtacaaatggtgttgggaaaataacatccccca

SEQ ID NO: 27524 - DNA, 80 bp, synthetic construct
  source 1..80: mol_type = other DNA
tgctctgtcgccaggctggagtgcagtggcacaatctcagctcatgcaacctctgcctcccgggttcaagcaattctcct

SEQ ID NO: 27525 - DNA, 80 bp, synthetic construct
  source 1..80: mol_type = other DNA
tgggatgacaggtgtgagccaccgcgcccagccaggaaagatttcttaaaaaaatcaaaatcaaaatcaaaataaataaa

SEQ ID NO: 27526 - DNA, 80 bp, synthetic construct; identical to SEQ ID NO: 10788
  source 1..80: mol_type = other DNA

SEQ ID NO: 27527 - DNA, 80 bp, synthetic construct
  source 1..80: mol_type = other DNA
atttgacatgatggataaagaagactatccatagcctaggcctcaatagagtgggaggcctgcctcttaaaaaagaaata

SEQ ID NO: 27528 - DNA, 80 bp, synthetic construct
  source 1..80: mol_type = other DNA
tacaaatggcatgtctataaacaatttaagaaaaaacccaaaggctaacatatgaaaacatactcaacctcactagtaat

SEQ ID NO: 27529 - DNA, 80 bp, synthetic construct
  source 1..80: mol_type = other DNA
aatagcattgccaattatcttaaaagtctcccatttgtccttaatcacatccactttctctcctccctgaggtagtcact

SEQ ID NO: 27530 - DNA, 80 bp, synthetic construct
  source 1..80: mol_type = other DNA
tgacttggttctaaggtatgactaatgtatttgtgagattcatacatattgatgcaggcaggagctgtttgtagtgtggt

SEQ ID NO: 27531 - DNA, 80 bp, synthetic construct; identical to SEQ ID NO: 10789
  source 1..80: mol_type = other DNA

SEQ ID NO: 27532 - DNA, 80 bp, synthetic construct
  source 1..80: mol_type = other DNA
agtctagggcaaacgcctaagagtgagtggtattgctggttataggatatcctattattttccaaaggatttttcccccc

SEQ ID NO: 27533 - DNA, 80 bp, synthetic construct
  source 1..80: mol_type = other DNA
ttcaaatgcctgctcaggattttttgccctttttccaatttggtgttctgtctttgtcttagaaatctataggaattttt

SEQ ID NO: 27534 - DNA, 80 bp, synthetic construct; identical to SEQ ID NO: 10790
  source 1..80: mol_type = other DNA

SEQ ID NO: 27535 - DNA, 80 bp, synthetic construct
  source 1..80: mol_type = other DNA
ctctcagtttcctgacccacagaactgtgagagaaatgttatttcaaactgctaagtcttcggtaattacacaacaatag

SEQ ID NO: 27536 - DNA, 80 bp, synthetic construct
  source 1..80: mol_type = other DNA
ggctagttttttgagtcttaagaaattcttctctgccttaaataatgtccctttatttttctaaaagctttcagggtttc

SEQ ID NO: 27537 - DNA, 80 bp, synthetic construct
  source 1..80: mol_type = other DNA
ctaatctgccacaagagcaggtgtccctccacctacccatatgtaagaatataaaattcatccatattatttagtattac

SEQ ID NO: 27538 - DNA, 80 bp, synthetic construct
  source 1..80: mol_type = other DNA
caacctcccgagtacctgggattacaggcgtgcaccatcacagccagctaattttggtatttttagtagagacggggttt

SEQ ID NO: 27539 - DNA, 80 bp, synthetic construct; identical to SEQ ID NO: 10791
  source 1..80: mol_type = other DNA

SEQ ID NO: 27540 - DNA, 80 bp, synthetic construct
  source 1..80: mol_type = other DNA
tggtagtcccagtacttaacctgtatttcaggaagtgttctattcaaaaccctagataccactacaagtggatctgaatg

SEQ ID NO: 27541 - DNA, 80 bp, synthetic construct
  source 1..80: mol_type = other DNA
aataaccaggatgagcagtgcctaccatagagcattaaaaatttgccgagtggaaaaaggaattaaagaagtcttcctac

SEQ ID NO: 27542 - DNA, 80 bp, synthetic construct
  source 1..80: mol_type = other DNA
atactcagtcttccaatccacactcagtacagggtatgtaccatttatttaggtggtctgtctctaaataaggtttaatt

SEQ ID NO: 27543 - DNA, 80 bp, synthetic construct; identical to SEQ ID NO: 10792
  source 1..80: mol_type = other DNA

SEQ ID NO: 27544 - DNA, 80 bp, synthetic construct
  source 1..80: mol_type = other DNA
tgactgtgaagtataaactgtacaggcatgcttcatcatattgtgctttgctttactgctcttagcggataatggttttt

SEQ ID NO: 27545 - DNA, 80 bp, synthetic construct
  source 1..80: mol_type = other DNA
ttctatgatcttcgatgttactattgtaattcttttggggtgccacgaaccacacccatataaggcagtgaacttcttca

SEQ ID NO: 27546 - DNA, 80 bp, synthetic construct
  source 1..80: mol_type = other DNA
ctcttgaaatcaaaagctagaaatgattaagcttagtgaagaaggcatgttgaaaggcaggcctcttgtaccaaacagcc

SEQ ID NO: 27547 - DNA, 80 bp, synthetic construct; identical to SEQ ID NO: 10793
  source 1..80: mol_type = other DNA

SEQ ID NO: 27548 - DNA, 80 bp, synthetic construct
  source 1..80: mol_type = other DNA
taggctggagtacaatggcatgatctcggctcaccgcaacctctgcctcccgggttcaagcgattctcctgcctcagcct

SEQ ID NO: 27549 - DNA, 80 bp, synthetic construct
  source 1..80: mol_type = other DNA
tgagccaccacgcctggcctaggacacgatgactcttattagaggctaatgcagctggtgactttaagttgaagccaatg

SEQ ID NO: 27550 - DNA, 80 bp, synthetic construct
  source 1..80: mol_type = other DNA
aaaagattccttctaacacattactactcattgacaatgtgcctggtcacccaagagctctgatggagagctacaagaag

SEQ ID NO: 27551 - DNA, 80 bp, synthetic construct; identical to SEQ ID NO: 10794
  source 1..80: mol_type = other DNA

SEQ ID NO: 27552 - DNA, 80 bp, synthetic construct
  source 1..80: mol_type = other DNA
aatttgaacaaatgggaagttacttcttatggatgagtaaaaaaagtggtttcttgacatgaactctactcttgctgaag

SEQ ID NO: 27553 - DNA, 80 bp, synthetic construct
  source 1..80: mol_type = other DNA
aatcttttgtgaaaagaagtcaactgatgtcgcaaacctcactgttgtcttaagaaactggcatagccatcctatccttc

SEQ ID NO: 27554 - DNA, 80 bp, synthetic construct; identical to SEQ ID NO: 10795
  source 1..80: mol_type = other DNA

SEQ ID NO: 27555 - DNA, 80 bp, synthetic construct
  source 1..80: mol_type = other DNA
ctctcagactggagtgcaatggcacgatctcggctcactgcaacctctgcctcctgggttcaagcaattcttctgtctca

SEQ ID NO: 27556 - DNA, 80 bp, synthetic construct
  source 1..80: mol_type = other DNA
gtgagccactgcgcctgaccagattatttccaagtattaatagttgctcaatttctaacatgaagctttaaaaattaccc

SEQ ID NO: 27557 - DNA, 80 bp, synthetic construct
  source 1..80: mol_type = other DNA
gtagaatgggttctatacacccactgggttaaacttgttcattgtgttatacaaatattttatatcctaactaacctgtc

SEQ ID NO: 27558 - DNA, 80 bp, synthetic construct; identical to SEQ ID NO: 10796
  source 1..80: mol_type = other DNA

SEQ ID NO: 27559 - DNA, 80 bp, synthetic construct
  source 1..80: mol_type = other DNA
aatccattttgtatttaatgtagctggtgatatgtttagatttaaatctacccatctttgtgctacttgtcctactggtt

SEQ ID NO: 27560 - DNA, 80 bp, synthetic construct
  source 1..80: mol_type = other DNA
gaccatcccggctaaaacggtgaaaccccgtctctactaaaaatacaaaaaattagccgggcgtagtggcgggcgcctgt

SEQ ID NO: 27561 - DNA, 80 bp, synthetic construct
  source 1..80: mol_type = other DNA
ttatcaaggtcaagtcaattaatactttctacctttctctctgacaatacaaaggtcttagaacccggccttcgcctgtc

SEQ ID NO: 27562 - DNA, 80 bp, synthetic construct; identical to SEQ ID NO: 10797
  source 1..80: mol_type = other DNA

SEQ ID NO: 27563 - DNA, 80 bp, synthetic construct
  source 1..80: mol_type = other DNA
aacgtttcttttaatacatccacatatttgccactctctttgctctttattccattttgcacctcagacttttatctaga

SEQ ID NO: 27564 - DNA, 80 bp, synthetic construct
  source 1..80: mol_type = other DNA
ctattgaaaagtcaaccatcagtccatagttgcttctttgaaaaacatctttttttctctctggctactttcaagacttt

SEQ ID NO: 27565 - DNA, 80 bp, synthetic construct
  source 1..80: mol_type = other DNA
tgtaccattctttctcctctctttccagagctctgattaaagaaattagatcttattctgtcttccatgtctctttacct

SEQ ID NO: 27566 - DNA, 80 bp, synthetic construct; identical to SEQ ID NO: 10798
  source 1..80: mol_type = other DNA

SEQ ID NO: 27567 - DNA, 80 bp, synthetic construct
  source 1..80: mol_type = other DNA
gaggtggggtttcactgtgttagccaggatggtctcaatctcctgacctcgtgatctgtcggcctcagcctcccaaagtg

SEQ ID NO: 27568 - DNA, 80 bp, synthetic construct
  source 1..80: mol_type = other DNA
aagtgaccctcccacctcagtctcccaaagtattgggattacaggcatgaaccaaagtaacttttttttttttttgagac

SEQ ID NO: 27569 - DNA, 80 bp, synthetic construct
  source 1..80: mol_type = other DNA
ggtgcacctcaccacacgtggctaatctttgtatttttagtagagacaaagtttcaccatgttggccaggctggtcttga

SEQ ID NO: 27570 - DNA, 80 bp, synthetic construct
  source 1..80: mol_type = other DNA
tgatatttgcaacatttgaagattttatagatctgtttctgctctcttcttattcacagtgccaattggatgcatgcttg

SEQ ID NO: 27571 - DNA, 80 bp, synthetic construct; identical to SEQ ID NO: 10799
  source 1..80: mol_type = other DNA

SEQ ID NO: 27572 - DNA, 80 bp, synthetic construct
  source 1..80: mol_type = other DNA
ggtcacaacttgaaaggtttatttttcttaatttccttttcctcctcctgctccattcaaccttccctgcaatcacatgg

SEQ ID NO: 27573 - DNA, 80 bp, synthetic construct
  source 1..80: mol_type = other DNA
aagcccaacttgtacagattggcaactgcctttagggcaaaagctacttcatccacttatttatttggattcttgtttat

SEQ ID NO: 27574 - DNA, 80 bp, synthetic construct; identical to SEQ ID NO: 10800
  source 1..80: mol_type = other DNA

SEQ ID NO: 27575 - DNA, 80 bp, synthetic construct
  source 1..80: mol_type = other DNA
tggtggcacatgcctgtaatcccagctacttgggaggctgaggcaggagaatcgcttgaacccgggaggcgaaggttttg

SEQ ID NO: 27576 - DNA, 80 bp, synthetic construct
  source 1..80: mol_type = other DNA
catatatacaacaagcactgtgactgtggcagttacaactgcagactgaagagtatttgcgtcaccaatacagcacaagt

SEQ ID NO: 27577 - DNA, 80 bp, synthetic construct
  source 1..80: mol_type = other DNA
ccaatattgtggtaactgaattcctgaaaatcttagtgtatattaaaggtgcctcagttacagtgagcctagatggtgcc

SEQ ID NO: 27578 - DNA, 80 bp, synthetic construct; identical to SEQ ID NO: 10801
  source 1..80: mol_type = other DNA

SEQ ID NO: 27579 - DNA, 80 bp, synthetic construct
  source 1..80: mol_type = other DNA
ttttgtcagcctatcactttttcctacaatccagtcccatctaattttgtcaaattttatttcatacaatttgctcaact

SEQ ID NO: 27580 - DNA, 80 bp, synthetic construct
  source 1..80: mol_type = other DNA
ttcccatgtcttcttgatctgttatccactttggtggttaatcacgtgctgccatatgcatgctttgtctcttcaattaa

SEQ ID NO: 27581 - DNA, 80 bp, synthetic construct
  source 1..80: mol_type = other DNA
cccagttctcagaccagtccttgaggtaatcttgtaacacccaattttttcagtcctaaaggggaaaaaatacacttttt

SEQ ID NO: 27582 - DNA, 80 bp, synthetic construct; identical to SEQ ID NO: 10802
  source 1..80: mol_type = other DNA

SEQ ID NO: 27583 - DNA, 80 bp, synthetic construct
  source 1..80: mol_type = other DNA
aaagacagaaatctagagaacaaaactgccatattctaggtgagttataactatgcagactaagagtaccgaaaaagaat

SEQ ID NO: 27584 - DNA, 80 bp, synthetic construct
  source 1..80: mol_type = other DNA
ttagttcctcagtcctgctatgcaaatttgaagtgcacagtagccacatagatacggctactgtctaccatattaagacg

SEQ ID NO: 27585 - DNA, 80 bp, synthetic construct
  source 1..80: mol_type = other DNA
aggacttggaaagaggttaagaaaagcttcctacaataaacggtaggtgaggtaagtctggaaggtttggagggtgggat

SEQ ID NO: 27586 - DNA, 80 bp, synthetic construct; identical to SEQ ID NO: 10803
  source 1..80: mol_type = other DNA

SEQ ID NO: 27587 - DNA, 80 bp, synthetic construct
  source 1..80: mol_type = other DNA
agttaggagactcataatgctgtctagacaactcataaaataacttaatattgccattagcctatagtcctggctactcg

SEQ ID NO: 27588 - DNA, 80 bp, synthetic construct
  source 1..80: mol_type = other DNA
aattgcccattaattttactatttgtctccagttcatttatgctcccatactgctgcggagctactttcacatatcccca

SEQ ID NO: 27589 - DNA, 80 bp, synthetic construct
  source 1..80: mol_type = other DNA
ctcctatagaaagccaatccttcctatttatacactaaatccctttccctcttacctcttctaagacagtgcttcagcaa

SEQ ID NO: 27590 - DNA, 80 bp, synthetic construct; identical to SEQ ID NO: 10804
  source 1..80: mol_type = other DNA

SEQ ID NO: 27591 - DNA, 80 bp, synthetic construct
  source 1..80: mol_type = other DNA
tgaatctactttcaaaacatccaaaatctgactacttctcagtatttctgctatcaccaatatggcctagataactgaaa

SEQ ID NO: 27592 - DNA, 80 bp, synthetic construct
  source 1..80: mol_type = other DNA
aatgcctcctcctcctttctcaaatttttgttcaaatacccccttctcaagtgaggcctaccctgacctccctatttaaa

SEQ ID NO: 27593 - DNA, 80 bp, synthetic construct
  source 1..80: mol_type = other DNA
taagggtagagacctttgttttgttttcaagtgtactactaagcacctagatcactacctggcatatagtaggcactcaa

SEQ ID NO: 27594 - DNA, 80 bp, synthetic construct
  source 1..80: mol_type = other DNA
ggctggagtgcagtggcgcgatcttggctcactgcaacctccgactccctgattgaagcgattctcttgcctcagcctcc

SEQ ID NO: 27595 - DNA, 80 bp, synthetic construct; identical to SEQ ID NO: 10805
  source 1..80: mol_type = other DNA

SEQ ID NO: 27596 - DNA, 80 bp, synthetic construct
  source 1..80: mol_type = other DNA
aatgtagttaacactgaaacagttctaggacaatcatcagtcagtcccacattaagaactgccaaaagtgttaactagag

SEQ ID NO: 27597 - DNA, 80 bp, synthetic construct
  source 1..80: mol_type = other DNA
tttcatagcactcctatgatctacttaacacatatggcctactagaagttcagtgcataccataaggagggggaggagga

SEQ ID NO: 27598 - DNA, 80 bp, synthetic construct
  source 1..80: mol_type = other DNA
gagatgaacattttctgtggctctagaataggaatataaagaccactctgaatcataatctcttccctatttgatgttct

SEQ ID NO: 27599 - DNA, 80 bp, synthetic construct; identical to SEQ ID NO: 10806
  source 1..80: mol_type = other DNA

SEQ ID NO: 27600 - DNA, 80 bp, synthetic construct
  source 1..80: mol_type = other DNA
ctactctggaggctgaggcaggagaatcacttgaacccgggggggggggggggcggaggttgcaatgagccgagatcaca

SEQ ID NO: 27601 - DNA, 80 bp, synthetic construct
  source 1..80: mol_type = other DNA
tttgcaaaataaatggtacaaggtaaaaaatacagtttaaaaatatcaagtcaattgagaaacaaccccaagcagtacat

SEQ ID NO: 27602 - DNA, 80 bp, synthetic construct
  source 1..80: mol_type = other DNA
acatatttagtgcaagaaaaaatataaaacaaaagtattccccaacttaaatataattaaagtatctttttttttttttt

SEQ ID NO: 27603 - DNA, 80 bp, synthetic construct
  source 1..80: mol_type = other DNA
tgggattacagacatgcgccaccatgcccggctaattttttgcatttttagtagagacggagtgtctccatgttggtcag

SEQ ID NO: 27604 - DNA, 80 bp, synthetic construct; identical to SEQ ID NO: 10807
  source 1..80: mol_type = other DNA

SEQ ID NO: 27605 - DNA, 80 bp, synthetic construct
  source 1..80: mol_type = other DNA
ccaaggattttttttaaaaactctgcaaggtgacccaacaaaactggaacgatactccttgcaacatggtcaaaacttag

SEQ ID NO: 27606 - DNA, 80 bp, synthetic construct
  source 1..80: mol_type = other DNA
taaccagtaaaaagctatcagtgcagtttaaaacaaagtaaaggggccctataggccccactgaaaaaggtagaaatatg

SEQ ID NO: 27607 - DNA, 80 bp, synthetic construct
  source 1..80: mol_type = other DNA
aactcttctaatgaagatggagaataacacattgtaaactagtatctttcacaacctaattgacactttcggtgactttt

SEQ ID NO: 27608 - DNA, 80 bp, synthetic construct; identical to SEQ ID NO: 10808
  source 1..80: mol_type = other DNA

SEQ ID NO: 27609 - DNA, 80 bp, synthetic construct
  source 1..80: mol_type = other DNA
ggtattagcctaagaaaacacacacagatcaataaaacagtagaatccaaaactcacaaacataagcaattgatttcaat

SEQ ID NO: 27610 - DNA, 80 bp, synthetic construct
  source 1..80: mol_type = other DNA
tctcctgcctcagcctcccaggtagctgggattgcaggtgcccaccaccatgctcggctaatttttgtatttttagtaga

SEQ ID NO: 27611 - DNA, 80 bp, synthetic construct
  source 1..80: mol_type = other DNA
aagggcacagagatcagaccagtgtttgccaggggctgagggtagaagatgaaactgagtgcaaagaggaactaggagct

SEQ ID NO: 27612 - DNA, 80 bp, synthetic construct; identical to SEQ ID NO: 10809
  source 1..80: mol_type = other DNA

SEQ ID NO: 27613 - DNA, 80 bp, synthetic construct
  source 1..80: mol_type = other DNA
ctggaacagagtcaaactcatttgtttaaatattgtctattagctacttctgagctactacagtattgttgaggaattgt

SEQ ID NO: 27614 - DNA, 80 bp, synthetic construct
  source 1..80: mol_type = other DNA
ttatgccagcacaaacctctcttccatacatagtagctctaaaatttttacagccataaaacccttttttcaaggaaact

SEQ ID NO: 27615 - DNA, 80 bp, synthetic construct
  source 1..80: mol_type = other DNA
gcattagattctcacaagaagcacacaatctagatccctcacatgcacagtttctgatagggttcacgctcctgccgctg

SEQ ID NO: 27616 - DNA, 80 bp, synthetic construct; identical to SEQ ID NO: 10810
  source 1..80: mol_type = other DNA

SEQ ID NO: 27617 - DNA, 80 bp, synthetic construct
  source 1..80: mol_type = other DNA
ccaggtactattatagatgaagattttaaaactacaaaacagacaaaaacagtttcacatatgcattagtgcaatttgga

SEQ ID NO: 27618 - DNA, 80 bp, synthetic construct
  source 1..80: mol_type = other DNA
caggcgcctgtagtcccagctactggggaggctgaggcaggagaaaggcagaaaggcgtgaacccgggaggcagagcttg

SEQ ID NO: 27619 - DNA, 80 bp, synthetic construct; identical to SEQ ID NO: 10811
  source 1..80: mol_type = other DNA

SEQ ID NO: 27620 - DNA, 80 bp, synthetic construct
  source 1..80: mol_type = other DNA
aacatggacacaaaaataatctcagagggtaggggggaaaaataattgcttaatgttagggtggagactgtattaaagag

SEQ ID NO: 27621 - DNA, 80 bp, synthetic construct
  source 1..80: mol_type = other DNA
accttatgattttaaaaagcagtacttgacaccttaaaaacagaaaagctcccaaataggcccacctattttgaattcag

SEQ ID NO: 27622 - DNA, 80 bp, synthetic construct
  source 1..80: mol_type = other DNA
cctactgccacatctgactttacagaataaccaatgtaagttaaaatagagaaacagaatgagtaaaggacttaaaacac

SEQ ID NO: 27623 - DNA, 80 bp, synthetic construct
  source 1..80: mol_type = other DNA
atgacacaaaatgttcactaggtattcagctaaattaacaacatcaaagtgtcaaagaaacaaaatgcacttctgcagtt

SEQ ID NO: 27624 - DNA, 80 bp, synthetic construct; identical to SEQ ID NO: 10812
  source 1..80: mol_type = other DNA

SEQ ID NO: 27625 - DNA, 80 bp, synthetic construct
  source 1..80: mol_type = other DNA
atggccaacatataaaatgactgacagataatattctaaacagaaaaaggagtgagtggatgcctaaagaagggagttca

SEQ ID NO: 27626 - DNA, 80 bp, synthetic construct
  source 1..80: mol_type = other DNA
accacttttcagggttatgatgcaatccaacctggtgtggcttgcaaagatgtattttaatacagtggacctcattataa

SEQ ID NO: 27627 - DNA, 80 bp, synthetic construct; identical to SEQ ID NO: 10813
  source 1..80: mol_type = other DNA

SEQ ID NO: 27628 - DNA, 80 bp, synthetic construct
  source 1..80: mol_type = other DNA
gaatattctattttgagcacctacaaagtattaatactacaaatacaggatgtgaaatttgttcattccccaacatattt

SEQ ID NO: 27629 - DNA, 80 bp, synthetic construct
  source 1..80: mol_type = other DNA
agtgttataaaagcattaaaaaagaacagatggaatacaccaaaatgtctatagtaataatatcttagtggcaaaattac

SEQ ID NO: 27630 - DNA, 80 bp, synthetic construct
  source 1..80: mol_type = other DNA
tctttccatgtaatttgcagtaaaagatccctttaagtgaatgtaaggaagacttcaaataaaagaccacagcacatttc

SEQ ID NO: 27631 - DNA, 80 bp, synthetic construct; identical to SEQ ID NO: 10814
  source 1..80: mol_type = other DNA

SEQ ID NO: 27632 - DNA, 80 bp, synthetic construct
  source 1..80: mol_type = other DNA
actaaatcagactcttcagggggtacagttccaaacaatctggccctttcaaataaaatagaagggtagagattttactt

SEQ ID NO: 27633 - DNA, 80 bp, synthetic construct
  source 1..80: mol_type = other DNA
tcaacaaaactacacatctattacagagtaaaataaaatccagaggcacctgtgcctggttaagacaaaggcatatccga

SEQ ID NO: 27634 - DNA, 80 bp, synthetic construct
  source 1..80: mol_type = other DNA
gtaccaaaagccaggaaacaaggcaaaatgaatggtaactggaaacaagggaaacagaataaactaggaaattgaagtag

SEQ ID NO: 27635 - DNA, 80 bp, synthetic construct
  source 1..80: mol_type = other DNA
tgggcatgtaacaaagatgatataaagagtagaaaacaaacattatcataaacaagctgatgctgaataaagcaagcata

SEQ ID NO: 27636 - DNA, 80 bp, synthetic construct; identical to SEQ ID NO: 10815
  source 1..80: mol_type = other DNA

SEQ ID NO: 27637 - DNA, 80 bp, synthetic construct
  source 1..80: mol_type = other DNA
aagaggctgactaatgcaaaaacaggctgagagaagcaaggactggagaggaaaaaggaaaaggaaaaaaataggacaaa

SEQ ID NO: 27638 - DNA, 80 bp, synthetic construct
  source 1..80: mol_type = other DNA
aacaagtagctccaaagtgtccaggaggatttgtgaagataacaacagacaacaatgttagggagtggtgagatcaagta

SEQ ID NO: 27639 - DNA, 80 bp, synthetic construct; identical to SEQ ID NO: 10816
  source 1..80: mol_type = other DNA

SEQ ID NO: 27640 - DNA, 80 bp, synthetic construct
  source 1..80: mol_type = other DNA
ccatgtaagaattacacgcgacagtaactcgggctgttgtctcagccccagcaactaacctatatcctccacgtcgaggc

SEQ ID NO: 27641 - DNA, 80 bp, synthetic construct
  source 1..80: mol_type = other DNA
gccattgtgtgtgtttacgtaggaaggcgctgcatgacggagagggacacgggggcgatgcccacctcccagcccgcgga

SEQ ID NO: 27642 - DNA, 80 bp, synthetic construct
  source 1..80: mol_type = other DNA
cgccggcgccggcgccggcctcgggctccatgtccccgttgaacagagcctggcccggctccgcgccgccaccaccgcca

SEQ ID NO: 27643 - DNA, 80 bp, synthetic construct
  source 1..80: mol_type = other DNA
gccgcgggcggagggcgcctgggccacctcaggtaccggcccgcggccccgggcgcagccgagcctgaggggattggggg

SEQ ID NO: 27644 - DNA, 80 bp, synthetic construct
  source 1..80: mol_type = other DNA
tggaagtgtttgctaccaagtttatttgcagtgttaacagcacaacatttacaaaacgtattttgtacaatcaagtcttc

SEQ ID NO: 27645 - DNA, 80 bp, synthetic construct
  source 1..80: mol_type = other DNA
atcacctcaaagaaagcaacagcttccttcctggtgggatctgtcattttatagatatgaaatattcatgccagaggtct

SEQ ID NO: 27646 - DNA, 80 bp, synthetic construct
  source 1..80: mol_type = other DNA
tgtctttggaaaccggttcttgaaaatcttctgctgttttagaacacattctttagaaatctagcaaatatatctcagac

SEQ ID NO: 27647 - DNA, 80 bp, synthetic construct
  source 1..80: mol_type = other DNA
ctgggattacaggtgtccaccaccatgaccggctaatttctgtatttttagtagagatggggtttcaccatgttggccag

SEQ ID NO: 27648 - DNA, 80 bp, synthetic construct; identical to SEQ ID NO: 10817
  source 1..80: mol_type = other DNA

SEQ ID NO: 27649 - DNA, 80 bp, synthetic construct; identical to SEQ ID NO: 10818
  source 1..80: mol_type = other DNA

SEQ ID NO: 27650 - DNA, 80 bp, synthetic construct
  source 1..80: mol_type = other DNA
gaaaggccactttgtaagctcattcttggggtcctgtggctctgtacctgtggctggctgcagtcagtagtggctgtggg

SEQ ID NO: 27651 - DNA, 80 bp, synthetic construct
  source 1..80: mol_type = other DNA
aggctctaatcaatcgactccagggtcctggttgtatgagttcttaggattaatgaggtagaagctaatttttttttttt

SEQ ID NO: 27652 - DNA, 80 bp, synthetic construct
  source 1..80: mol_type = other DNA
tatttttagtagagacgggggtttcacaatgttggccaggctgctctggaactcctgacctcaggtgatccacccacctt

SEQ ID NO: 27653 - DNA, 80 bp, synthetic construct
  source 1..80: mol_type = other DNA
attctcctgcctcagcctcccaagtagcagggattacaggtgcctgccaccatgccaggctaattgttttttcttttttt

SEQ ID NO: 27654 - DNA, 80 bp, synthetic construct; identical to SEQ ID NO: 10819
  source 1..80: mol_type = other DNA

SEQ ID NO: 27655 - DNA, 80 bp, synthetic construct
  source 1..80: mol_type = other DNA
taggagtgactcctggtgacagtgaaagcccacagcctctggcaactgtattaacatgaacttcaatctgttaaaggaaa

SEQ ID NO: 27656 - DNA, 80 bp, synthetic construct
  source 1..80: mol_type = other DNA
cacatatgcctggtggagttttatggtgatcatctccaagtggtggaattactgggattattttattgtttttgtgtaaa

SEQ ID NO: 27657 - DNA, 80 bp, synthetic construct
  source 1..80: mol_type = other DNA
acacccagctactttttaaatttgttgtacagatgaagtctccttatgttgcccaggctggtctcgaacttctaggctcc

SEQ ID NO: 27658 - DNA, 80 bp, synthetic construct; identical to SEQ ID NO: 10820
  source 1..80: mol_type = other DNA

SEQ ID NO: 27659 - DNA, 80 bp, synthetic construct
  source 1..80: mol_type = other DNA
gtggacaccctggatccccaggaaggaaagagcattcaaagtgtcaaagtaggactactggaactgtcacttcatcattt

SEQ ID NO: 27660 - DNA, 80 bp, synthetic construct
  source 1..80: mol_type = other DNA
ctaatttttttgtatttttggtagagacagggttttgccatgttgcccaggctggtctcaaactcctgggctcaacttca

SEQ ID NO: 27661 - DNA, 80 bp, synthetic construct; identical to SEQ ID NO: 10821
  source 1..80: mol_type = other DNA

SEQ ID NO: 27662 - DNA, 80 bp, synthetic construct
  source 1..80: mol_type = other DNA
caggatggtctcgatctcttgacctcgtgatctgcccacctcagcctcccaaagtgctgggattacaggcgtgagccacc

SEQ ID NO: 27663 - DNA, 80 bp, synthetic construct
  source 1..80: mol_type = other DNA
caggcatgctccaccaggcctggctactttttgtttttttttttttagtacagatggggtttcaccatgttggccaggct

SEQ ID NO: 27664 - DNA, 80 bp, synthetic construct
  source 1..80: mol_type = other DNA
tgggaaaaagagttagagggaaaaagtcttccctcagtatatttaatatgtgcagttctcaaatccttacccatccctta

SEQ ID NO: 27665 - DNA, 80 bp, synthetic construct; identical to SEQ ID NO: 10822
  source 1..80: mol_type = other DNA

SEQ ID NO: 27666 - DNA, 80 bp, synthetic construct
  source 1..80: mol_type = other DNA
cactgatatgccatgtactctggttatcagtctccataaggccacttggtataaggtttgatagtctctcaaataaaatg

SEQ ID NO: 27667 - DNA, 80 bp, synthetic construct
  source 1..80: mol_type = other DNA
tgttggtaactgataatcacggccactgaaaataccatacttggtggtaattactgtaaatgtcaagagatgggaagata

SEQ ID NO: 27668 - DNA, 80 bp, synthetic construct
  source 1..80: mol_type = other DNA
tgtgtacctggaaaatcagaactgcccaatgggctctgttggctgtgttcttcaagacattcatgtatgttgctctttcc

SEQ ID NO: 27669 - DNA, 80 bp, synthetic construct
  source 1..80: mol_type = other DNA
ataaaaatccaattgataactaataaagaggatggaaacaaaattacattgcagccaggttttcttgctgtcactcatct

SEQ ID NO: 27670 - DNA, 80 bp, synthetic construct; identical to SEQ ID NO: 10823
  source 1..80: mol_type = other DNA

SEQ ID NO: 27671 - DNA, 80 bp, synthetic construct
  source 1..80: mol_type = other DNA
ctcagctatttgggaggctgaggcaggagaatcacttgaacccgggaggtggaggttgcagtgagccgagatcgcgccat

SEQ ID NO: 27672 - DNA, 80 bp, synthetic construct
  source 1..80: mol_type = other DNA
actcctccttgatttttacctatccaaagatattttctcactaacatgttggcactaacagcagctcaacgccatctgaa

SEQ ID NO: 27673 - DNA, 80 bp, synthetic construct; identical to SEQ ID NO: 10824
  source 1..80: mol_type = other DNA

SEQ ID NO: 27674 - DNA, 80 bp, synthetic construct
  source 1..80: mol_type = other DNA
gagagagggacaggggaatggagagaaggaaaatctagttataaaagaatattggcttttattcaaaaaacagactttca

SEQ ID NO: 27675 - DNA, 80 bp, synthetic construct
  source 1..80: mol_type = other DNA
tccagaacactactggatttcagaagatcttcttgaagtgcatatgtagttgacctgcactctacaggcattctttgtca

SEQ ID NO: 27676 - DNA, 80 bp, synthetic construct
  source 1..80: mol_type = other DNA
agaggcttggatggctagaaactcaaagttattggctgaagtttgatgtttatccagacttggtacctcaagtactcact

SEQ ID NO: 27677 - DNA, 80 bp, synthetic construct
  source 1..80: mol_type = other DNA
caagcgattctcctgccttagcctcctgagtagctgggattacaggcgcgcaccaccacgcccggctaatttttgtattt

SEQ ID NO: 27678 - DNA, 80 bp, synthetic construct; identical to SEQ ID NO: 10825
  source 1..80: mol_type = other DNA

SEQ ID NO: 27679 - DNA, 80 bp, synthetic construct
  source 1..80: mol_type = other DNA
caatgttctatatctatgctaataaggtagccatgagtcacatatagttattgagcactggagatgtggttagggtgaat

SEQ ID NO: 27680 - DNA, 80 bp, synthetic construct
  source 1..80: mol_type = other DNA
aatttaaatttaaacagtcccatgtggctggtggcaacagtgtgggacagtgcaaattctcataaacacactggcatagg

SEQ ID NO: 27681 - DNA, 80 bp, synthetic construct; identical to SEQ ID NO: 10826
  source 1..80: mol_type = other DNA

SEQ ID NO: 27682 - DNA, 80 bp, synthetic construct
  source 1..80: mol_type = other DNA
gagacgcagtcttgcactgtcgcctgggctggagtgcaatggtgccatctcggctcactgcaacctccacctcctgggtt

SEQ ID NO: 27683 - DNA, 80 bp, synthetic construct
  source 1..80: mol_type = other DNA
caaagacaagtctgtttgttttaagggacagcatccatctgtgccactctcactacctgtatgaataaaccgcaccccca

SEQ ID NO: 27684 - DNA, 80 bp, synthetic construct
  source 1..80: mol_type = other DNA
gtttcgggcttggcgtagtggctcacgcctgtaatcccagcactttgggaggctgaggcaggcggatcacgaggtcaaga

SEQ ID NO: 27685 - DNA, 80 bp, synthetic construct; identical to SEQ ID NO: 10827
  source 1..80: mol_type = other DNA

SEQ ID NO: 27686 - DNA, 80 bp, synthetic construct
  source 1..80: mol_type = other DNA
gctacttaggaggctgaggcaggagaatcacttgaaccctggaggcagagattgcggtgagccaagatcacgccattgta

SEQ ID NO: 27687 - DNA, 80 bp, synthetic construct
  source 1..80: mol_type = other DNA
tgctattctgcatggaggaaaaaatccaaagcactagaatttctttttaaagaggggaagaatctggtgctaatactgcc

SEQ ID NO: 27688 - DNA, 80 bp, synthetic construct
  source 1..80: mol_type = other DNA
caggcttcatttgtgatcatgtcccaaagcagttttccttaggaaattacctctactggttccctcttaagtttctataa

SEQ ID NO: 27689 - DNA, 80 bp, synthetic construct
  source 1..80: mol_type = other DNA
gaatacaagagtgtgctacgacacccaattaatttttaaatttttttgtagagacagggtcttactatgttgcccaggct

SEQ ID NO: 27690 - DNA, 80 bp, synthetic construct; identical to SEQ ID NO: 10828
  source 1..80: mol_type = other DNA

SEQ ID NO: 27691 - DNA, 80 bp, synthetic construct
  source 1..80: mol_type = other DNA
tgttctgaaatgcctggtagtgcacacttgaaaaaggaagaaaagcagactgggaacatagcacttagggagctgagaaa

SEQ ID NO: 27692 - DNA, 80 bp, synthetic construct
  source 1..80: mol_type = other DNA
cttgggtctcatctgcaaagttgttagaatgctccattttttttccctccgtgaagccttcaacaacttttcaagaaact

SEQ ID NO: 27693 - DNA, 80 bp, synthetic construct; identical to SEQ ID NO: 10829
  source 1..80: mol_type = other DNA

SEQ ID NO: 27694 - DNA, 80 bp, synthetic construct
  source 1..80: mol_type = other DNA
agaatcacttgaacctgggagctggagactgcagtgagctgagattgcgccactgcactccagactggccaacagaatca

SEQ ID NO: 27695 - DNA, 80 bp, synthetic construct
  source 1..80: mol_type = other DNA
ggcccgaaaaataaattaacaaagaatttagacttggagctagacttcctgagttcaacttctagttccatcacttatta

SEQ ID NO: 27696 - DNA, 80 bp, synthetic construct
  source 1..80: mol_type = other DNA
tagctcatagagttgtcataaaattgttaattagttaaaacatggttgggcctttagagcagtcccagcataaagtgatc

SEQ ID NO: 27697 - DNA, 80 bp, synthetic construct; identical to SEQ ID NO: 10830
  source 1..80: mol_type = other DNA

SEQ ID NO: 27698 - DNA, 80 bp, synthetic construct
  source 1..80: mol_type = other DNA
aattttagctattattggctgggcacggtggctcacgcctatcccagcacttggggaggccaaggcgggaggatcacaag

SEQ ID NO: 27699 - DNA, 80 bp, synthetic construct
  source 1..80: mol_type = other DNA
gaaaagagcaaagtctttagattctcatctgcttaaagtcccagctcttccacttatcagctaagatctgaacccgagac

SEQ ID NO: 27700 - DNA, 80 bp, synthetic construct
  source 1..80: mol_type = other DNA
agcactgtgtatgtatgtaataagtcttacaaaatgaagcggcccatctctgcaaaggggagtggaatacagagtggtgg

SEQ ID NO: 27701 - DNA, 80 bp, synthetic construct; identical to SEQ ID NO: 10831
  source 1..80: mol_type = other DNA

SEQ ID NO: 27702 - DNA, 80 bp, synthetic construct
  source 1..80: mol_type = other DNA
gtggcaggcacctgtaatcccagctacttgggaggctgaggcaggagaatcttttgaatgcaggaggtggaggttgcagt

SEQ ID NO: 27703 - DNA, 80 bp, synthetic construct
  source 1..80: mol_type = other DNA
cacgaggtcaggagatcgagaccatcctggctaacacggtgaaaccccgtctctacttaaaatacaaaaaaattagccgg

SEQ ID NO: 27704 - DNA, 80 bp, synthetic construct
  source 1..80: mol_type = other DNA
acaaaaaaaccaaaaattagctgggcgtggtggcatgcacctgtagtcccagctactcgggaagctgaggcatgagaatt

SEQ ID NO: 27705 - DNA, 80 bp, synthetic construct; identical to SEQ ID NO: 10832
  source 1..80: mol_type = other DNA

SEQ ID NO: 27706 - DNA, 80 bp, synthetic construct
  source 1..80: mol_type = other DNA
aagaaagaaaaagaattgctgggcagagatttgaccaaaagcaagtaaaatcattctttttggtagaccaggtgaaatga

SEQ ID NO: 27707 - DNA, 80 bp, synthetic construct
  source 1..80: mol_type = other DNA
tcaaaacattcacttagcatttagattagactgctaatactgtgctgttataaaggtaactgaaaaattccctatctcct

SEQ ID NO: 27708 - DNA, 80 bp, synthetic construct
  source 1..80: mol_type = other DNA
aataaagaataatgagactggggagaaatttgaggaagaacgctcagaaacaattctgactgaaactcagattgtaggga

SEQ ID NO: 27709 - DNA, 80 bp, synthetic construct; identical to SEQ ID NO: 10833
  source 1..80: mol_type = other DNA

SEQ ID NO: 27710 - DNA, 80 bp, synthetic construct
  source 1..80: mol_type = other DNA
gtgcctgtaatcccagctactcgggaggctgaggcaggaaaatcacttgaaccgggaggcggaggttggagtgagctgag

SEQ ID NO: 27711 - DNA, 80 bp, synthetic construct
  source 1..80: mol_type = other DNA
cccatattccctaccatgccttcttcatctaatttaatattactaacaagatctattgttcaagccaaaacccaagtgtc

SEQ ID NO: 27712 - DNA, 80 bp, synthetic construct
  source 1..80: mol_type = other DNA
ataaaatctgaattccttaccaccaaatactatgtgatctggccctcatctatgaccttctcccattccttgtgtaatct

SEQ ID NO: 27713 - DNA, 80 bp, synthetic construct; identical to SEQ ID NO: 10834
  source 1..80: mol_type = other DNA

SEQ ID NO: 27714 - DNA, 80 bp, synthetic construct
  source 1..80: mol_type = other DNA
gtagagacagggtttctacctcagtgatctgtccgccttgacctcccaaagtgctgggattacaggaatgagccaccaca

SEQ ID NO: 27715 - DNA, 80 bp, synthetic construct
  source 1..80: mol_type = other DNA
cattattatttcttgagacaggagtcttgctctgtcgttcaggctggagtgcagtgatgcgatcttggctcactgtaact

SEQ ID NO: 27716 - DNA, 80 bp, synthetic construct
  source 1..80: mol_type = other DNA
gacctcaagtgatttgcctgccttggcttcccaaagtgctgggattataggcacgagccaccacacacgaccaacattgg

SEQ ID NO: 27717 - DNA, 80 bp, synthetic construct
  source 1..80: mol_type = other DNA
ctagtcgggtgtggtagcacgcgtgcctgtaataccagctactcaggaggccaaggcaggagaattgcttgaacccagga

SEQ ID NO: 27718 - DNA, 80 bp, synthetic construct; identical to SEQ ID NO: 10835
  source 1..80: mol_type = other DNA

SEQ ID NO: 27719 - DNA, 80 bp, synthetic construct
  source 1..80: mol_type = other DNA
acctgaatcctaccagggacttagttagtcttatttactgttgcattcctagtgcccagaacacagtaggctcccaataa

SEQ ID NO: 27720 - DNA, 80 bp, synthetic construct
  source 1..80: mol_type = other DNA
tcactgcaacctccgcctcccgggttcaagtgattctcctgcctcagcctccccagcagctaggattacaggcacatgcc

SEQ ID NO: 27721 - DNA, 80 bp, synthetic construct; identical to SEQ ID NO: 10836
  source 1..80: mol_type = other DNA

SEQ ID NO: 27722 - DNA, 80 bp, synthetic construct
  source 1..80: mol_type = other DNA
aagtgcaagagtgcaatggtatgatcatagctcactgcagccttgaactcctgggctcaagtgattcttctggcttagct

SEQ ID NO: 27723 - DNA, 80 bp, synthetic construct
  source 1..80: mol_type = other DNA
gtgagccactgcatctggactgcatattaatatgaagagcttttcttcaacaacagtgaacagttttctacaaaggtata

SEQ ID NO: 27724 - DNA, 80 bp, synthetic construct
  source 1..80: mol_type = other DNA
tgcaagtgggcccacttcttgttcttatgaatcttttctttccttttataaaactccttttcctttctcttttccccaaa

SEQ ID NO: 27725 - DNA, 80 bp, synthetic construct
  source 1..80: mol_type = other DNA
tcaagagattctcctgcctcagcctcctgagtagctggaactaaaggcgcatgccaccacgctgagtaattttttgtatt

SEQ ID NO: 27726 - DNA, 80 bp, synthetic construct; identical to SEQ ID NO: 10837
  source 1..80: mol_type = other DNA

SEQ ID NO: 27727 - DNA, 80 bp, synthetic construct
  source 1..80: mol_type = other DNA
ccacagtgcaggcctgcataattcttgatgatcctcattatcatggaaaatttgtgcattgttaaggaaagtggtgcatt

SEQ ID NO: 27728 - DNA, 80 bp, synthetic construct
  source 1..80: mol_type = other DNA
taaagagatcatagaaaagacaggttacatacagcagaagaacgtgctcttttcacggagatagagaggtcagcgattca

SEQ ID NO: 27729 - DNA, 80 bp, synthetic construct; identical to SEQ ID NO: 10838
  source 1..80: mol_type = other DNA

SEQ ID NO: 27730 - DNA, 80 bp, synthetic construct
  source 1..80: mol_type = other DNA
gactcagcatcagcaaaaaccttaggtgttaaacgttaggtgtaaaaatgcaattctgaggtgttaaagggaggagggga

SEQ ID NO: 27731 - DNA, 80 bp, synthetic construct
  source 1..80: mol_type = other DNA
agaagctaaagagcctcagttttttacactcccaagatcaatctggatttatgattctaaaacccctggtgacagaatca

SEQ ID NO: 27732 - DNA, 80 bp, synthetic construct
  source 1..80: mol_type = other DNA
ttcaaggaattaggaattatccatgtcaatagttttgattaatgtggacggagaacatctatattactagatggcaatat

SEQ ID NO: 27733 - DNA, 80 bp, synthetic construct; identical to SEQ ID NO: 10839
  source 1..80: mol_type = other DNA

SEQ ID NO: 27734 - DNA, 80 bp, synthetic construct
  source 1..80: mol_type = other DNA
ttattacacttaaaaacttcagttcatttgtagttcaaagcaaatgtattggctttgagtttaaagactgaactacttta

SEQ ID NO: 27735 - DNA, 80 bp, synthetic construct
  source 1..80: mol_type = other DNA
tgcccgccaccatgcccggctaattttttgtatttttactagagatggggtttcaccgtgttagccaggatggtctcgat

SEQ ID NO: 27736 - DNA, 80 bp, synthetic construct
  source 1..80: mol_type = other DNA
ttgtaataacttgttctggcacctggctccaatgaacactaccctctgaccctgtggtataattttcatgagtaagtgga

SEQ ID NO: 27737 - DNA, 80 bp, synthetic construct
  source 1..80: mol_type = other DNA
ggtcgggagtccaagaccagcctgactgacatggaaaaaccctgtctctactaaaaatacaaaattaggtatggtggtgc

SEQ ID NO: 27738 - DNA, 80 bp, synthetic construct; identical to SEQ ID NO: 10840
  source 1..80: mol_type = other DNA

SEQ ID NO: 27739 - DNA, 80 bp, synthetic construct
  source 1..80: mol_type = other DNA
tccgggtaacggttcttcagatacttgaagacagtgtcttatttccttaaatcttctcatttcttcttcaaaagacagta

SEQ ID NO: 27740 - DNA, 80 bp, synthetic construct
  source 1..80: mol_type = other DNA
cacttgctccagagcctctgcttgtgttaatacggcccagtttcaaataagcatttttagcagccctgaaatgtgtactc

SEQ ID NO: 27741 - DNA, 80 bp, synthetic construct; identical to SEQ ID NO: 10841
  source 1..80: mol_type = other DNA

SEQ ID NO: 27742 - DNA, 80 bp, synthetic construct
  source 1..80: mol_type = other DNA
caagtagctgggattacaggtgcacaccaccacgcccagccaatttatgtatttttagtagagactgggttttaccatat

SEQ ID NO: 27743 - DNA, 80 bp, synthetic construct
  source 1..80: mol_type = other DNA
gctccacctcaccagtgtagtcccagcaggtagataggagttaatagttgactatctcagctcaccaccctccaaacctt

SEQ ID NO: 27744 - DNA, 80 bp, synthetic construct
  source 1..80: mol_type = other DNA
agcctcctgagtagctgggattacaggtgcctgccaccacgcccacctaatttttatatttttagtagagacggggtttc

SEQ ID NO: 27745 - DNA, 80 bp, synthetic construct; identical to SEQ ID NO: 10842
  source 1..80: mol_type = other DNA

SEQ ID NO: 27746 - DNA, 80 bp, synthetic construct
  source 1..80: mol_type = other DNA
cagctaatttttttattttttagtagagacggggtttcaccatgctggccaggatggtctcgatctcctaatctcgtgat

SEQ ID NO: 27747 - DNA, 80 bp, synthetic construct
  source 1..80: mol_type = other DNA
aaagtgatgtggtgttttctggcaaacttgtacacgagcatctgaaattaaatcaaatattccattatcatgagttacct

SEQ ID NO: 27748 - DNA, 80 bp, synthetic construct
  source 1..80: mol_type = other DNA
aaaaaaaaaaaaaaaaaatagaataccagttatcctagctttaagtctctgtttttctcagaaagggtacatttaaaaaa

SEQ ID NO: 27749 - DNA, 80 bp, synthetic construct
  source 1..80: mol_type = other DNA
ggcgtggtggcgggcacctgtagtctcagctactcaggaggctgaggcaggagaatggcgtgaacccaggaagcagagct

SEQ ID NO: 27750 - DNA, 80 bp, synthetic construct; identical to SEQ ID NO: 10843
  source 1..80: mol_type = other DNA

SEQ ID NO: 27751 - DNA, 80 bp, synthetic construct
  source 1..80: mol_type = other DNA
ttcgattccctaagatcgtttctttgcatagtgacactctactgtactataaatttatcagcctacactttataagctga

SEQ ID NO: 27752 - DNA, 80 bp, synthetic construct
  source 1..80: mol_type = other DNA
cgatcaattctctcgtaagaaggcttagaaggggttcatgttcttccccaaagaaatttagagtcctctagctattatct

SEQ ID NO: 27753 - DNA, 80 bp, synthetic construct; identical to SEQ ID NO: 10844
  source 1..80: mol_type = other DNA

SEQ ID NO: 27754 - DNA, 80 bp, synthetic construct
  source 1..80: mol_type = other DNA
aattgctgaaatcccagccttgaaactgttcagttagaagagcaatgctgaactgctgaaaagatcatcttaatatgggc

SEQ ID NO: 27755 - DNA, 80 bp, synthetic construct
  source 1..80: mol_type = other DNA
agccacttgtagtctaatctgcagctcagaattgcctttgccaagaaagattagaccattttagccatctctaaaaagct

SEQ ID NO: 27756 - DNA, 80 bp, synthetic construct
  source 1..80: mol_type = other DNA
aattgctggtctggacatgggattatgagatgaaaacatttatagccatcactgtgcacttactcattgtatctaccagg

SEQ ID NO: 27757 - DNA, 80 bp, synthetic construct; identical to SEQ ID NO: 10845
  source 1..80: mol_type = other DNA

SEQ ID NO: 27758 - DNA, 80 bp, synthetic construct
  source 1..80: mol_type = other DNA
tcctgagtagctgggattataggcatgcgccaccacgcccggctaattgtgtatttttagtaaagatggggtttcttcat

SEQ ID NO: 27759 - DNA, 80 bp, synthetic construct
  source 1..80: mol_type = other DNA
tcaggatgtctgaaatccacaaatagcccaagcagaaacgaggttttactggtcttaatattttaatgggtatttttcca

SEQ ID NO: 27760 - DNA, 80 bp, synthetic construct
  source 1..80: mol_type = other DNA
cagtctgaatttagttaaatatgctggtaaattcacccatgtgagacaagggggagaaaaagatgccttctggggaataa

SEQ ID NO: 27761 - DNA, 80 bp, synthetic construct
  source 1..80: mol_type = other DNA
tcagaaattagtaatcgaaattaaattacacagaactgtgattgttttctagatttcttcctctaggttattaattgaca

SEQ ID NO: 27762 - DNA, 80 bp, synthetic construct; identical to SEQ ID NO: 10846
  source 1..80: mol_type = other DNA

SEQ ID NO: 27763 - DNA, 80 bp, synthetic construct
  source 1..80: mol_type = other DNA
cagattccaggtaaggggttccctctgaaaggaatgggagaagtttaatttacacaacgatgaatgttgaattacaaagt

SEQ ID NO: 27764 - DNA, 80 bp, synthetic construct
  source 1..80: mol_type = other DNA
caacaatgctagttttagaaatatatcctagggagataaaagatatatgcaaaggtttagtcataggaatagtataattt

SEQ ID NO: 27765 - DNA, 80 bp, synthetic construct; identical to SEQ ID NO: 10847
  source 1..80: mol_type = other DNA

SEQ ID NO: 27766 - DNA, 80 bp, synthetic construct
  source 1..80: mol_type = other DNA
gaggcagagcttgcagtgagctgagattgagccattgcattccagcctgggcaacagagcgagactccgtctcaaaaaaa

SEQ ID NO: 27767 - DNA, 80 bp, synthetic construct
  source 1..80: mol_type = other DNA
gtcaagaggtcgagaccagtctgaccaacatggagaaaccctgtctctactaaaaatacaaaaaattagccgggcgtggt

SEQ ID NO: 27768 - DNA, 80 bp, synthetic construct
  source 1..80: mol_type = other DNA
ttttttgagaagggtctcggtctgtcatccaggctgcagtgcagtggcacaaacatggctcacctgcagccttgacctcc

SEQ ID NO: 27769 - DNA, 80 bp, synthetic construct
  source 1..80: mol_type = other DNA
cccaggttcaagcgattctcctgcctcagcctcccgagtagctgggactacaggcataagccaccaagcctggctaattt

SEQ ID NO: 27770 - DNA, 80 bp, synthetic construct; identical to SEQ ID NO: 10848
  source 1..80: mol_type = other DNA

SEQ ID NO: 27771 - DNA, 80 bp, synthetic construct
  source 1..80: mol_type = other DNA
cagcctcggcaacataacaagacccgtgtctaaccccaccccaaattatcttttttattccctatattgtccaatttggg

SEQ ID NO: 27772 - DNA, 80 bp, synthetic construct
  source 1..80: mol_type = other DNA
taagcatagctaagtagaatgtatgagattcctaaaatgaccctaatgaacatggccaaataccacatttgatgccaaac

SEQ ID NO: 27773 - DNA, 80 bp, synthetic construct
  source 1..80: mol_type = other DNA
ggatttgactcattttctaataaaggactggcctaaaactttattctttggcctttggactcttgtctaacagttgaaat

SEQ ID NO: 27774 - DNA, 80 bp, synthetic construct; identical to SEQ ID NO: 10849
  source 1..80: mol_type = other DNA

SEQ ID NO: 27775 - DNA, 80 bp, synthetic construct
  source 1..80: mol_type = other DNA
cctgaaataatacatttagagtacaccaagactccctcatcctcaaaatcattagttaaaccattaattaaaatatagat

SEQ ID NO: 27776 - DNA, 80 bp, synthetic construct
  source 1..80: mol_type = other DNA
aaagtgtttgttccaatacagcagatgaaatattacctagatcttgccttggcaagtaagatgtttccgtcaaatcgtgt

SEQ ID NO: 27777 - DNA, 80 bp, synthetic construct; identical to SEQ ID NO: 10850
  source 1..80: mol_type = other DNA

SEQ ID NO: 27778 - DNA, 80 bp, synthetic construct
  source 1..80: mol_type = other DNA
tatgtcagggttgacatataacatggggttgggttggtctgaggcaccatatctcccagctgtttaaaagcaggtcagta

SEQ ID NO: 27779 - DNA, 80 bp, synthetic construct
  source 1..80: mol_type = other DNA
tgagtgacagagcaagactctgtcaagaaagaaaggaaaggaaagaaaggaaagaaaaggaaaggaaagaaagaaaagaa

SEQ ID NO: 27780 - DNA, 80 bp, synthetic construct
  source 1..80: mol_type = other DNA
agaaaggaggaaagaataaaagcaggtcagcaaatttttaccaaattactcactgccactcactctatacacaatattct

SEQ ID NO: 27781 - DNA, 80 bp, synthetic construct
  source 1..80: mol_type = other DNA
caaaagccagctataaaatattgttagaaaagcatacacacccagtaaatagttcctctgctcttccaagtgcttaggac

SEQ ID NO: 27782 - DNA, 80 bp, synthetic construct; identical to SEQ ID NO: 10851
  source 1..80: mol_type = other DNA

SEQ ID NO: 27783 - DNA, 80 bp, synthetic construct
  source 1..80: mol_type = other DNA
aaggaaaagaatagtactggactacatagtccagtactggactgctatacagccctgtgttaatagtggtgtaaatacac

SEQ ID NO: 27784 - DNA, 80 bp, synthetic construct
  source 1..80: mol_type = other DNA
cccagctactcaggaggctaaggtgggaggattgcttgagcctgaaaaacggaggatgcagtgagccatgactgcaccac

SEQ ID NO: 27785 - DNA, 80 bp, synthetic construct; identical to SEQ ID NO: 10852
  source 1..80: mol_type = other DNA

SEQ ID NO: 27786 - DNA, 80 bp, synthetic construct
  source 1..80: mol_type = other DNA
ataccacagcatctttacattgatgtttcttacctttccactcctggttctttatttttactggtagaactatctgcaga

SEQ ID NO: 27787 - DNA, 80 bp, synthetic construct
  source 1..80: mol_type = other DNA
tcaaaagcatcaatctatgatacacaaattggtttttaaacaagtatatcaggcagaattttataaacacaagcaatgca

SEQ ID NO: 27788 - DNA, 80 bp, synthetic construct
  source 1..80: mol_type = other DNA
caaatttttatctctgcagcaaaataaattatgcccaaatcccctcagacaataggaaagaaagagtaccggagagcaca

SEQ ID NO: 27789 - DNA, 80 bp, synthetic construct; identical to SEQ ID NO: 10853
  source 1..80: mol_type = other DNA

SEQ ID NO: 27790 - DNA, 80 bp, synthetic construct
  source 1..80: mol_type = other DNA
ccacctcctgggttcaagcgattctcctgcctcagccttcctagtagctgacattacaggtgcctgccaccacgcccagc

SEQ ID NO: 27791 - DNA, 80 bp, synthetic construct
  source 1..80: mol_type = other DNA
tactcctccaaatgtatcactttgtgccactgccttctaggaagtggcttaaaggcagaagtacttatttatttattttt

SEQ ID NO: 27792 - DNA, 80 bp, synthetic construct
  source 1..80: mol_type = other DNA
ccaactaattttgtatttttagtagagatggggtttctccatgttggtcacgctggtctcgaactcccgacctcaggtga

SEQ ID NO: 27793 - DNA, 80 bp, synthetic construct
  source 1..80: mol_type = other DNA
aatacagtggcatgatctcggctcactgcaacctctgcctccaggttcaagcgattctcctgccttagcctcccaagaag

SEQ ID NO: 27794 - DNA, 80 bp, synthetic construct; identical to SEQ ID NO: 10854
  source 1..80: mol_type = other DNA

SEQ ID NO: 27795 - DNA, 80 bp, synthetic construct
  source 1..80: mol_type = other DNA
acaaaagattgtattaattaaactgtttttttaagacactgggtagcctggggggaaataatcattgatttcctgagtta

SEQ ID NO: 27796 - DNA, 80 bp, synthetic construct
  source 1..80: mol_type = other DNA
taatgtgcaagttccaaggaaccatatcaaacggaattaaccattggaaagagttaaaaaagtggccaggtgatgtggct

SEQ ID NO: 27797 - DNA, 80 bp, synthetic construct
  source 1..80: mol_type = other DNA
gaggctgaggcggacattgtaatgagccgaaatcacaccattgcactccagcctgggcaacaaaagtgaaacttcatctc

SEQ ID NO: 27798 - DNA, 80 bp, synthetic construct; identical to SEQ ID NO: 10855
  source 1..80: mol_type = other DNA

SEQ ID NO: 27799 - DNA, 80 bp, synthetic construct
  source 1..80: mol_type = other DNA
ttgagcacattaaacactctaagagccaagacagcttcctgaaacgcgtgaaggaaaatgatcagaaaaagaaagaagcc

SEQ ID NO: 27800 - DNA, 80 bp, synthetic construct
  source 1..80: mol_type = other DNA
ctgtaaaaaaaaagaaaagtcattctatcaccagaacatttagcatataaattcctcttcttactacaatgggcctcatg

SEQ ID NO: 27801 - DNA, 80 bp, synthetic construct
  source 1..80: mol_type = other DNA
ggtttaggaaagtctaaatgcagagatccagagtccaagtttcagaatattattgtagttcctcttaaatcattccctca

SEQ ID NO: 27802 - DNA, 80 bp, synthetic construct; identical to SEQ ID NO: 10856
  source 1..80: mol_type = other DNA

SEQ ID NO: 27803 - DNA, 80 bp, synthetic construct
  source 1..80: mol_type = other DNA
caacaatattctttttactagaagttctggccaggtgccatggctcacacctgtaaccccagcactttgggaggctgagg

SEQ ID NO: 27804 - DNA, 80 bp, synthetic construct
  source 1..80: mol_type = other DNA
tcgagaggctgcagtgagctgtgattatgccactgccctccagcttgggcaacagagcaagaccctctctataaggtgag

SEQ ID NO: 27805 - DNA, 80 bp, synthetic construct
  source 1..80: mol_type = other DNA
atttgagtttcagttagactcacaccagatttagggagaaaaaggctcaaaacttatgttggtattaagttgtgatatcc

SEQ ID NO: 27806 - DNA, 80 bp, synthetic construct; identical to SEQ ID NO: 10857
  source 1..80: mol_type = other DNA

SEQ ID NO: 27807 - DNA, 80 bp, synthetic construct
  source 1..80: mol_type = other DNA
ttctgtataagtagcagacttgagttcctagaaagactccaagaaaggtcttaaagttcccagttggactgtggaacggg

SEQ ID NO: 27808 - DNA, 80 bp, synthetic construct
  source 1..80: mol_type = other DNA
ctagcatctcctatgtgtctgtttgtttgcccctatttaaaaatctgcctgatgtattgtctttccaattaaaaactcaa

SEQ ID NO: 27809 - DNA, 80 bp, synthetic construct
  source 1..80: mol_type = other DNA
aagcacttgactctattgcataattaggctttctgtgttgttcttttcttttccttttgaactaacaggagctctacatc

SEQ ID NO: 27810 - DNA, 80 bp, synthetic construct; identical to SEQ ID NO: 10858
  source 1..80: mol_type = other DNA

SEQ ID NO: 27811 - DNA, 80 bp, synthetic construct
  source 1..80: mol_type = other DNA
tgagcaaggatcataaaatgttggagctaggtccttactcttcagaaggagataaaggggaaggaaagaattttgcttaa

SEQ ID NO: 27812 - DNA, 80 bp, synthetic construct
  source 1..80: mol_type = other DNA
tgctggagctttatcaggttatgttgcatggtatccctctgcttcaaaaacgataaatggcaccaagaaaatgaaatact

SEQ ID NO: 27813 - DNA, 80 bp, synthetic construct; identical to SEQ ID NO: 10859
  source 1..80: mol_type = other DNA

SEQ ID NO: 27814 - DNA, 80 bp, synthetic construct
  source 1..80: mol_type = other DNA
ttagactgatgtaatgttgaaaaaagccctctatctatggcattttataaaaatacaacaaatataaaaatactatcagt

SEQ ID NO: 27815 - DNA, 80 bp, synthetic construct
  source 1..80: mol_type = other DNA
aagcgattctcccacctcagcctctcaagtagctggcattacaggtgcttgccaagacgcccggctaattttggtaattt

SEQ ID NO: 27816 - DNA, 80 bp, synthetic construct
  source 1..80: mol_type = other DNA
tcatgaatctatctgtttgctcagttaattagacaactatttactatctattaagcaccaggcgctgtcctagtactgag

SEQ ID NO: 27817 - DNA, 80 bp, synthetic construct; identical to SEQ ID NO: 10860
  source 1..80: mol_type = other DNA

SEQ ID NO: 27818 - DNA, 80 bp, synthetic construct
  source 1..80: mol_type = other DNA
ctgcctcagcctctcaagtagctgggattacaggcacctgttaccatgcccgactaatttttttttttttttttgagacg

SEQ ID NO: 27819 - DNA, 80 bp, synthetic construct
  source 1..80: mol_type = other DNA
agaaatggtgtttcaccgtgttagccaggatggtctggatctcctgaccacatgatcctcccgcctcggcctcccaaagt

SEQ ID NO: 27820 - DNA, 80 bp, synthetic construct
  source 1..80: mol_type = other DNA
tgtgcctggcttcaaaatatacatgtttaaaaatcacttttagaaggaacagcaatggttgccaaaaagtccagtggggg

SEQ ID NO: 27821 - DNA, 80 bp, synthetic construct
  source 1..80: mol_type = other DNA
aggaggtttttatgaccagaaaatgtattcctagcttcacaaaggtttctactgctactctaacactgctttgctgccaa

SEQ ID NO: 27822 - DNA, 80 bp, synthetic construct; identical to SEQ ID NO: 10861
  source 1..80: mol_type = other DNA

SEQ ID NO: 27823 - DNA, 80 bp, synthetic construct
  source 1..80: mol_type = other DNA
ctccttcaattagctctagccttctacttctactatgctgctctgatctctacttttaatacagctacattactgtagaa

SEQ ID NO: 27824 - DNA, 80 bp, synthetic construct
  source 1..80: mol_type = other DNA
gttccctaaaagccttgtttatcatgtctttttcttccataaagacccttagtgctccatcctggccatcacagtgaaac

SEQ ID NO: 27825 - DNA, 80 bp, synthetic construct; identical to SEQ ID NO: 10862
  source 1..80: mol_type = other DNA

SEQ ID NO: 27826 - DNA, 80 bp, synthetic construct
  source 1..80: mol_type = other DNA
gttgtgaaatatgagaagtaagggcaagtgggcagaatgtggctaattctaataagactcctgaaatgtgcagcagagca

SEQ ID NO: 27827 - DNA, 80 bp, synthetic construct
  source 1..80: mol_type = other DNA
tatttctaatgttcctactactacataataagcctaatccagatacaagctgaagtcttagcacaaatagtggctttatc

SEQ ID NO: 27828 - DNA, 80 bp, synthetic construct
  source 1..80: mol_type = other DNA
cacacacacacacagaagtccccaccaataatccatctcctatcgggaacagatgatctctcactacttgatttacattg

SEQ ID NO: 27829 - DNA, 80 bp, synthetic construct
  source 1..80: mol_type = other DNA
taggaggaagcttcccttaatcatatttgtctccctaatgcctagcagacagtaagcactcagcaagtgtttattaatga

SEQ ID NO: 27830 - DNA, 80 bp, synthetic construct; identical to SEQ ID NO: 10863
  source 1..80: mol_type = other DNA

SEQ ID NO: 27831 - DNA, 80 bp, synthetic construct
  source 1..80: mol_type = other DNA
ttagatgatgggtatattgacagagtcccaaacccacattcaaaaaggatcataggaattgcaaagagagaaaaggcctc

SEQ ID NO: 27832 - DNA, 80 bp, synthetic construct
  source 1..80: mol_type = other DNA
agaagataagccttctctaattgtagttctcatagcaatgcaagatttagattttaaaactggatatcacccagtgttgg

SEQ ID NO: 27833 - DNA, 80 bp, synthetic construct; identical to SEQ ID NO: 10864
  source 1..80: mol_type = other DNA

SEQ ID NO: 27834 - DNA, 80 bp, synthetic construct
  source 1..80: mol_type = other DNA
gagtttgagaccagcctggtcaacatggagaaaccctgtctctactaaaaatacaaagttagctgggcatggtggcacat

SEQ ID NO: 27835 - DNA, 80 bp, synthetic construct
  source 1..80: mol_type = other DNA
taatgatccagtaaaagctagattataatgcacagaattatctggatttcttgtttttgagacagggtctcaccatatca

SEQ ID NO: 27836 - DNA, 80 bp, synthetic construct
  source 1..80: mol_type = other DNA
ctaatttttttttttttcccagacaggggttgcccagaacagagtgcagtagcgtgatcacaactcactgcagccttgac

SEQ ID NO: 27837 - DNA, 80 bp, synthetic construct
  source 1..80: mol_type = other DNA
tgctaaccatttctggataacacaaattacaattaacttatcattttaatcattttaagtgtacagttcagtggcattat

SEQ ID NO: 27838 - DNA, 80 bp, synthetic construct; identical to SEQ ID NO: 10865
  source 1..80: mol_type = other DNA

SEQ ID NO: 27839 - DNA, 80 bp, synthetic construct
  source 1..80: mol_type = other DNA
ttctcaacttcatctaatctgacttcagaaagttcataaaaaaacatcattcacttactagcagctaaaagggtatttaa

SEQ ID NO: 27840 - DNA, 80 bp, synthetic construct
  source 1..80: mol_type = other DNA
tgtgtgtgtattctgcatagaaccctgtgctgggaatacaaagaaccaacctaattattagaagttgtcaatttagtggg

SEQ ID NO: 27841 - DNA, 80 bp, synthetic construct
  source 1..80: mol_type = other DNA
ttgaggtcaggagttcgagacgagcctggccaacatggtgaaaccctctctctactaaaaaaatacaaaaaaatgagctg

SEQ ID NO: 27842 - DNA, 80 bp, synthetic construct; identical to SEQ ID NO: 10866
  source 1..80: mol_type = other DNA

SEQ ID NO: 27843 - DNA, 80 bp, synthetic construct
  source 1..80: mol_type = other DNA
ttcactcttgttgcccaggctggagagcagcagcatgatctcagctcactgcaacctccgcctcctgggttcaagtgatt

SEQ ID NO: 27844 - DNA, 80 bp, synthetic construct
  source 1..80: mol_type = other DNA
tgggcaacatagtgagatgttgtctctagtaaaaacttaaaaattagctggaggtgttggtgggcgcctgtggtcccagc

SEQ ID NO: 27845 - DNA, 80 bp, synthetic construct
  source 1..80: mol_type = other DNA
aaaaaagaagaagagaaagaagtatccacaaaacagtgaaaggctagatggtctctattaggaagagaaccctatagtct

SEQ ID NO: 27846 - DNA, 80 bp, synthetic construct; identical to SEQ ID NO: 10867
  source 1..80: mol_type = other DNA

SEQ ID NO: 27847 - DNA, 80 bp, synthetic construct
  source 1..80: mol_type = other DNA
cagctaatttttgtatttttagtagatgtggggtttcaccatgttggccaggctggtctcaaacttctgacctgaggtga

SEQ ID NO: 27848 - DNA, 80 bp, synthetic construct
  source 1..80: mol_type = other DNA
gagttccatcaaggtgcttacagtctaatttaaggagacaatgaaccacaaacaattgtgccattaattcaaagagatga

SEQ ID NO: 27849 - DNA, 80 bp, synthetic construct; identical to SEQ ID NO: 10868
  source 1..80: mol_type = other DNA

SEQ ID NO: 27850 - DNA, 80 bp, synthetic construct
  source 1..80: mol_type = other DNA
cctagctgtgtgaaggacttttttctatgaaaagcaccttaggaggaacatgtttcaagtttaagaagcagttcctttaa

SEQ ID NO: 27851 - DNA, 80 bp, synthetic construct
  source 1..80: mol_type = other DNA
cttcatcatctgaaaccaattccttgtcactcagaccaactccctggctttcagactgatgcctcatttgtttggaagaa

SEQ ID NO: 27852 - DNA, 80 bp, synthetic construct
  source 1..80: mol_type = other DNA
tattcttcaatgataataaattctcctctgtgttcttagacagacactcggtagcaacggtgctatgcctagtagactga

SEQ ID NO: 27853 - DNA, 80 bp, synthetic construct
  source 1..80: mol_type = other DNA
gctctcctttctggacgcttttgctaaaaacagcagaactttccttaatgtcattttcagcaaaactagtatcttccttt

SEQ ID NO: 27854 - DNA, 80 bp, synthetic construct; identical to SEQ ID NO: 10869
  source 1..80: mol_type = other DNA

SEQ ID NO: 27855 - DNA, 80 bp, synthetic construct
  source 1..80: mol_type = other DNA
ttgtgctcactgtacttggaatgttctcatttcccatttctctttcaggtgacattgaatgttcctcaaagttttcctct

SEQ ID NO: 27856 - DNA, 80 bp, synthetic construct
  source 1..80: mol_type = other DNA
tactacatttggcattatcaactggcttatctttctgaccaaccacaggaaagcctgcagtgatattaactgtctgtaca

SEQ ID NO: 27857 - DNA, 80 bp, synthetic construct
  source 1..80: mol_type = other DNA
gctttgaaaccttgaatgtattctgcaaatactgagcatcaagttcactttcttccatttctatgcttgtttcccgactg

SEQ ID NO: 27858 - DNA, 80 bp, synthetic construct; identical to SEQ ID NO: 10870
  source 1..80: mol_type = other DNA

SEQ ID NO: 27859 - DNA, 80 bp, synthetic construct
  source 1..80: mol_type = other DNA
gtgcatttgttaacttcagctctgggaaagtatcgctgtcatgtcttttacttgtctgttcatttggcttgttactcttc

SEQ ID NO: 27860 - DNA, 80 bp, synthetic construct
  source 1..80: mol_type = other DNA
ctagttcaagcgcatgaatatgcctggtagaagacttcctcctcagcctattctttttaggtgcttttgaattgtggata

SEQ ID NO: 27861 - DNA, 80 bp, synthetic construct; identical to SEQ ID NO: 10871
  source 1..80: mol_type = other DNA

SEQ ID NO: 27862 - DNA, 80 bp, synthetic construct
  source 1..80: mol_type = other DNA
tcagttacatggcttaagttggggaggcttgccttcttccgataggttttcccaaatattttgtcttcaatattactctc

SEQ ID NO: 27863 - DNA, 80 bp, synthetic construct
  source 1..80: mol_type = other DNA
tgtgagtcatcagaacctaacagttcatcacttctggaaaaccactcattaactttctgaatgctgctatttagtgttat

SEQ ID NO: 27864 - DNA, 80 bp, synthetic construct
  source 1..80: mol_type = other DNA
ttatgttggctccttgctaagccaggctgtttgcttttattacagaattcagccttttctacattcattctgtctttagt

SEQ ID NO: 27865 - DNA, 80 bp, synthetic construct
  source 1..80: mol_type = other DNA
acgcttctcagtggtgttcaaatcattattactgggttgatgatgttcagtatttgttacatccgtctcagaaaattcac

SEQ ID NO: 27866 - DNA, 80 bp, synthetic construct; identical to SEQ ID NO: 10872
  source 1..80: mol_type = other DNA

SEQ ID NO: 27867 - DNA, 80 bp, synthetic construct
  source 1..80: mol_type = other DNA
aaaagcagattggccatcagaaaactggttctgatgtactctaaagattactggccattaagtctacttaatactctgtt

SEQ ID NO: 27868 - DNA, 80 bp, synthetic construct
  source 1..80: mol_type = other DNA
agtttgagaccagcctcggtaacatggtgaaaccccatctctataaaaccacaaaaaattaaccgggtgtggtggcatgc

SEQ ID NO: 27869 - DNA, 80 bp, synthetic construct
  source 1..80: mol_type = other DNA
cgaaagggcaacaatcagttacagaaggtcttattataggtacattagtctagtaccatttaaatctatcagaccatacc

SEQ ID NO: 27870 - DNA, 80 bp, synthetic construct; identical to SEQ ID NO: 10873
  source 1..80: mol_type = other DNA

SEQ ID NO: 27871 - DNA, 80 bp, synthetic construct
  source 1..80: mol_type = other DNA
tgctgggcacggtggctcaagcctgtaattccagcactttgggaggctgaggcgggtggaccacttgaggtcatgagttc

SEQ ID NO: 27872 - DNA, 80 bp, synthetic construct
  source 1..80: mol_type = other DNA
cctctgtactccagcctgggcaacagagcaagactctgtctcaaaaaaaaaaaaaaaaaagagagaaagaaagaaatgga

SEQ ID NO: 27873 - DNA, 80 bp, synthetic construct
  source 1..80: mol_type = other DNA
aaaaaaaaaaaaaaaacctgggtcaagcaataattcctaaggaaggtaggtaacatagttggggttgcttgtagtttatt

SEQ ID NO: 27874 - DNA, 80 bp, synthetic construct; identical to SEQ ID NO: 10874
  source 1..80: mol_type = other DNA

SEQ ID NO: 27875 - DNA, 80 bp, synthetic construct
  source 1..80: mol_type = other DNA
cagaaagaaagcaaacaaaaaactgtggggtatgcttagtacccggatgatgaaaaaaatctatacaccaaatcccaagt

SEQ ID NO: 27876 - DNA, 80 bp, synthetic construct
  source 1..80: mol_type = other DNA
ttcatagacaaaggttctctttgactcacctgcaataagttgccttattaacggtatcttcagaagaatcagatcctaaa

SEQ ID NO: 27877 - DNA, 80 bp, synthetic construct
  source 1..80: mol_type = other DNA
tacaatgctagttaagctagtatgtaatacagagaagtggttaaaggcatgggcttcgccaggcacagtggctctcacct

SEQ ID NO: 27878 - DNA, 80 bp, synthetic construct; identical to SEQ ID NO: 10875
  source 1..80: mol_type = other DNA

SEQ ID NO: 27879 - DNA, 80 bp, synthetic construct
  source 1..80: mol_type = other DNA
ttacaatgcctgttgtctaggaatttatgatcataaggggggaaaacagtaagtgttatgataaatagatggtggtgcct

SEQ ID NO: 27880 - DNA, 80 bp, synthetic construct
  source 1..80: mol_type = other DNA
gggagctcaaaagatggctatcctttttaattataaatatattctaaaagaaaatccaatttgagagcccagtttgaatt

SEQ ID NO: 27881 - DNA, 80 bp, synthetic construct
  source 1..80: mol_type = other DNA
ccaccacacccagctaatttaaaaaagaaatttttttgtagagatgaggtcttgctatgttgcccaggctggtctcaaac

SEQ ID NO: 27882 - DNA, 80 bp, synthetic construct; identical to SEQ ID NO: 10876
  source 1..80: mol_type = other DNA

SEQ ID NO: 27883 - DNA, 80 bp, synthetic construct
  source 1..80: mol_type = other DNA
ccgcaccggccaaaaatgtattattattttaaaaatagagacagggttcccctatgttggccaggctggtcttaaactcg

SEQ ID NO: 27884 - DNA, 80 bp, synthetic construct
  source 1..80: mol_type = other DNA
gcaacctctgcttcctgggttcaagcgattctcctgcctcagcctcctgagtagctgggattacaggcataagccaccac

SEQ ID NO: 27885 - DNA, 80 bp, synthetic construct
  source 1..80: mol_type = other DNA
ttaaaaggcttcctcatctagtacaatttatcttggaactaaatactgtagcaatccatcatgttttttcttattgctac

SEQ ID NO: 27886 - DNA, 80 bp, synthetic construct
  source 1..80: mol_type = other DNA
attctcctgcctcagcctcccgagtagctgggattacagttatgtgccaccacacctggctaattttttattttttggta

SEQ ID NO: 27887 - DNA, 80 bp, synthetic construct; identical to SEQ ID NO: 10877
  source 1..80: mol_type = other DNA

SEQ ID NO: 27888 - DNA, 80 bp, synthetic construct
  source 1..80: mol_type = other DNA
agttggacactgagactggtttcctgctaaacagtatggtaaagaacagtcaagcaattgttggccagttctgtgctttt

SEQ ID NO: 27889 - DNA, 80 bp, synthetic construct
  source 1..80: mol_type = other DNA
tggagcaggactgcttgaggccaggagttcaagaccagcataagcaacagagtgagacccagtctctacaaaataatagt

SEQ ID NO: 27890 - DNA, 80 bp, synthetic construct; identical to SEQ ID NO: 10878
  source 1..80: mol_type = other DNA

SEQ ID NO: 27891 - DNA, 80 bp, synthetic construct
  source 1..80: mol_type = other DNA
tacatatatatgtgtgtgtgtgtgtatatatatatataacatatatataacatatatatattatatatatataacatata

SEQ ID NO: 27892 - DNA, 80 bp, synthetic construct
  source 1..80: mol_type = other DNA
aggctagagtgcagtggcgtgatctcggcacactgcaacctccacctccctggttcagttgattctcctgcctcagcctc

SEQ ID NO: 27893 - DNA, 80 bp, synthetic construct
  source 1..80: mol_type = other DNA
gccaccgtgcctggccaataacatttttaaaaaggataaatgatgacaataaaaccccagcactcctaagaacatttagt

SEQ ID NO: 27894 - DNA, 80 bp, synthetic construct
  source 1..80: mol_type = other DNA
ggcgtgatctcggttcactgcaacctctgtctcctgggttcaagtgatcctcccacctcagcctcccaaggagctgggac

SEQ ID NO: 27895 - DNA, 80 bp, synthetic construct; identical to SEQ ID NO: 10879
  source 1..80: mol_type = other DNA

SEQ ID NO: 27896 - DNA, 80 bp, synthetic construct
  source 1..80: mol_type = other DNA
tacaggtgcaagctactacgcccagccccagaatgattactttttaagatctccatcattcatgcacatataagtaacaa

SEQ ID NO: 27897 - DNA, 80 bp, synthetic construct
  source 1..80: mol_type = other DNA
gcctcagcctcccaagtagctaggaccacaggtgcataccaccacgcccagctaagtttttttgttttttttttgagaca

SEQ ID NO: 27898 - DNA, 80 bp, synthetic construct; identical to SEQ ID NO: 10880
  source 1..80: mol_type = other DNA

SEQ ID NO: 27899 - DNA, 80 bp, synthetic construct
  source 1..80: mol_type = other DNA
caagtgattctccatcctcagcctctggagtagctgggattacaggcacgtgccaccacacccagctaatttttgtattt

SEQ ID NO: 27900 - DNA, 80 bp, synthetic construct
  source 1..80: mol_type = other DNA
agttctttttttttttgcaactagatcttgctttgccgcccacgctgaagtgcagtggagtgatcatagctcactgtagt

SEQ ID NO: 27901 - DNA, 80 bp, synthetic construct
  source 1..80: mol_type = other DNA
tcctcaagcctcctagtgctggaattacaggcgtgagccacggcacccagctacttttttttttttttaattgcagagac

SEQ ID NO: 27902 - DNA, 80 bp, synthetic construct; identical to SEQ ID NO: 10881
  source 1..80: mol_type = other DNA

SEQ ID NO: 27903 - DNA, 80 bp, synthetic construct
  source 1..80: mol_type = other DNA
cgtacccctgtagtcccaactactcaggaggctgaggcaggagaatcacttgaacctgggaggcggaggttgcagtgagc

SEQ ID NO: 27904 - DNA, 80 bp, synthetic construct
  source 1..80: mol_type = other DNA
ctggctgtaaggtctctctcttgattatatcaggtaccctgaccttctctgaactctaactgattagaacacttgtctaa

SEQ ID NO: 27905 - DNA, 80 bp, synthetic construct
  source 1..80: mol_type = other DNA
ccagcaatttggggagccgaggtgggtggatcacctgaggttaggagttcgagaccagcctggccaacatgatgaaaccc

SEQ ID NO: 27906 - DNA, 80 bp, synthetic construct; identical to SEQ ID NO: 10882
  source 1..80: mol_type = other DNA

SEQ ID NO: 27907 - DNA, 80 bp, synthetic construct
  source 1..80: mol_type = other DNA
agaaaccctatgtatgctctttgttgtgttaagacaatgcattaaggttacctgtgattttttttaaaaatcaaatttta

SEQ ID NO: 27908 - DNA, 80 bp, synthetic construct
  source 1..80: mol_type = other DNA
ttttctgtatcactaagaaagaaagcacacaaattaaacaaatgacacaccctcaatagtaaaatgttcccaatttcaga

SEQ ID NO: 27909 - DNA, 80 bp, synthetic construct
  source 1..80: mol_type = other DNA
tgagttttcatggacagcacttgagtgtcattcttgggatattcaacacttacactccaaacctgtgtcaagctgaaaag

SEQ ID NO: 27910 - DNA, 80 bp, synthetic construct; identical to SEQ ID NO: 10883
  source 1..80: mol_type = other DNA

SEQ ID NO: 27911 - DNA, 80 bp, synthetic construct
  source 1..80: mol_type = other DNA
agtgccacaatcatagctcactgcagcctcagacttctgtactcaagctatcctcccactatagcctcccaagtagctag

SEQ ID NO: 27912 - DNA, 80 bp, synthetic construct
  source 1..80: mol_type = other DNA
cctgctgagcttactgttcttaacatctgaaccctgcccaatccctcacttagttctgcctctcaaggatttctgtcaaa

SEQ ID NO: 27913 - DNA, 80 bp, synthetic construct
  source 1..80: mol_type = other DNA
taccaaacttaggaaaaacagtgttgagacagacaaaattactactctcatagaatttacattgtagcagaagagataca

SEQ ID NO: 27914 - DNA, 80 bp, synthetic construct
  source 1..80: mol_type = other DNA
aaattggccgggcatggtagcgtgtgcctgtagtcccagctatttgggaggctaaggcaggaagaggctgggagacagag

SEQ ID NO: 27915 - DNA, 80 bp, synthetic construct; identical to SEQ ID NO: 10884
  source 1..80: mol_type = other DNA

SEQ ID NO: 27916 - DNA, 80 bp, synthetic construct
  source 1..80: mol_type = other DNA
ccttttggttatatcattcttacataaaggacactgtgaaggccctttcttctggttgagaagtttcagcatgcaaaatc

SEQ ID NO: 27917 - DNA, 80 bp, synthetic construct
  source 1..80: mol_type = other DNA
tttggatgctgcataagcaaaaacctaaactacataagcaatgatctatgaaaactgaacttacatgcatatggcttact

SEQ ID NO: 27918 - DNA, 80 bp, synthetic construct; identical to SEQ ID NO: 10885
  source 1..80: mol_type = other DNA

SEQ ID NO: 27919 - DNA, 80 bp, synthetic construct
  source 1..80: mol_type = other DNA
ctgcctcagcctcccgagcagctgggactacaggcgcccagcaccatgcccggctaatttttttatttttagtagagacg

SEQ ID NO: 27920 - DNA, 80 bp, synthetic construct
  source 1..80: mol_type = other DNA
ctatcacccaggctggagggtagtgacacaatctcagctcactacaacctccacctcctaggctcaagcaattctcgtgc

SEQ ID NO: 27921 - DNA, 80 bp, synthetic construct
  source 1..80: mol_type = other DNA
ccgtgcccaggccaaagatgattaaatgggaaaataatactttttgtgtttttaacaaacagtgttgagacaaaagtata

SEQ ID NO: 27922 - DNA, 80 bp, synthetic construct; identical to SEQ ID NO: 10886
  source 1..80: mol_type = other DNA

SEQ ID NO: 27923 - DNA, 80 bp, synthetic construct
  source 1..80: mol_type = other DNA
caagaccagcctggccaacatggtgaaaccctgtctctactaaatattcaaaaattagctgggtgtggtggtggtgcact

SEQ ID NO: 27924 - DNA, 80 bp, synthetic construct
  source 1..80: mol_type = other DNA
caaaaaaaaaaaaaaggcattgggaattgtgagaaaagacacttagagaatattttttactagccaggtaatttaacatt

SEQ ID NO: 27925 - DNA, 80 bp, synthetic construct
  source 1..80: mol_type = other DNA
acacgcctgagtcccagctacttgggaggctgaggcatgagaatcactggaacccaggatggcagaggttgcaatgagct

SEQ ID NO: 27926 - DNA, 80 bp, synthetic construct
  source 1..80: mol_type = other DNA
aaaccctgtctctactaaaaatacaaaaattagccgggcatggtggcatatgcctgtaatcctggctactcaggaggctg

SEQ ID NO: 27927 - DNA, 80 bp, synthetic construct; identical to SEQ ID NO: 10887
  source 1..80: mol_type = other DNA

SEQ ID NO: 27928 - DNA, 80 bp, synthetic construct
  source 1..80: mol_type = other DNA
ccttatcttcatttttatagagtagaggcttgtcccagatcacacagtaattaagcaatgaaggttatattggatccaga

SEQ ID NO: 27929 - DNA, 80 bp, synthetic construct
  source 1..80: mol_type = other DNA
ggagacttgggtccttcttcgccgatatagatgcttcaagtaccatattgcactcaacaaaacaatgactctatagtttg

SEQ ID NO: 27930 - DNA, 80 bp, synthetic construct; identical to SEQ ID NO: 10888
  source 1..80: mol_type = other DNA

SEQ ID NO: 27931 - DNA, 80 bp, synthetic construct
  source 1..80: mol_type = other DNA
agctctgcctcctgggttcacgccattctcctgcctcagcctcctgagtagctgggactacaggtgcccgctaccacgcc

SEQ ID NO: 27932 - DNA, 80 bp, synthetic construct
  source 1..80: mol_type = other DNA
aaaaagaatacatgtataaaggttgttaactaaacttaaaagaaaatgaacttgtatatgacttgaaaagacagagctaa

SEQ ID NO: 27933 - DNA, 80 bp, synthetic construct
  source 1..80: mol_type = other DNA
gtgcacttacagtcccagctacttgggagactgaggtgataggatcgcttgagcctaggaggtcaaggcaacagtaagcc

SEQ ID NO: 27934 - DNA, 80 bp, synthetic construct; identical to SEQ ID NO: 10889
  source 1..80: mol_type = other DNA

SEQ ID NO: 27935 - DNA, 80 bp, synthetic construct
  source 1..80: mol_type = other DNA
tactaaaaatacaaaaattagccatgcatggtggtgcacgcctgtaatcccagctacttgggaggctgaggcaggagaat

SEQ ID NO: 27936 - DNA, 80 bp, synthetic construct
  source 1..80: mol_type = other DNA
gaaatattttctagattggtattattatctttttttataggcttcataaaagatttcagaactggctgggcaaggtggct

SEQ ID NO: 27937 - DNA, 80 bp, synthetic construct
  source 1..80: mol_type = other DNA
gaggctgaggcaggagatttgcttgaacccaggagatggaggtggcagtgagctgagatcatgccactgcactccagtct

SEQ ID NO: 27938 - DNA, 80 bp, synthetic construct
  source 1..80: mol_type = other DNA
actaaaaatacaaaaaaattagctgggcgtggtggcaggcgtctgtagtcccagctacttgggaggctgaggcaggagaa

SEQ ID NO: 27939 - DNA, 80 bp, synthetic construct; identical to SEQ ID NO: 10890
  source 1..80: mol_type = other DNA

SEQ ID NO: 27940 - DNA, 80 bp, synthetic construct
  source 1..80: mol_type = other DNA
gctagagtacagtggcacgatctcaactcactgcagcctctgcctcctgggttcaagaggttcctctgcctcagcctcct

SEQ ID NO: 27941 - DNA, 80 bp, synthetic construct
  source 1..80: mol_type = other DNA
cacacccggctttggacttttaattctaatataacattcaaaacacaatttaaaatatggctggcccatctctacaagaa

SEQ ID NO: 27942 - DNA, 80 bp, synthetic construct
  source 1..80: mol_type = other DNA
actccagcctgggtgtcagagggagacactgtctcaaagaaacaaacaaaaatatatatgtgtcacacacacacatatat

SEQ ID NO: 27943 - DNA, 80 bp, synthetic construct; identical to SEQ ID NO: 10891
  source 1..80: mol_type = other DNA

SEQ ID NO: 27944 - DNA, 80 bp, synthetic construct
  source 1..80: mol_type = other DNA
gtatttttagtagagatggggtttctctatgttggtcaggctggtcttgagctcctgacctcaggtgatccacctgcctt

SEQ ID NO: 27945 - DNA, 80 bp, synthetic construct
  source 1..80: mol_type = other DNA
cttacatcctttttctatttccaatcccttctgcctcctcttggaccttctctttcttgcaaatggcttcccatctttga

SEQ ID NO: 27946 - DNA, 80 bp, synthetic construct
  source 1..80: mol_type = other DNA
ctcccaggttcaagtgatacccctgccgcagcctaccaagtagctgggactacaggtacgtgccaccatgccaggctagt

SEQ ID NO: 27947 - DNA, 80 bp, synthetic construct; identical to SEQ ID NO: 10892
  source 1..80: mol_type = other DNA

SEQ ID NO: 27948 - DNA, 80 bp, synthetic construct
  source 1..80: mol_type = other DNA
gctgaagtcaggagtttgagagcagcctggccaacatggtgaaaaccctgtctcgactaaaaatacaaaaattagctggg

SEQ ID NO: 27949 - DNA, 80 bp, synthetic construct
  source 1..80: mol_type = other DNA
atagagtgaaacaccatctcaaaaaaaaaaaaagacagggtctcactctgtcatctaggctggagtgcagtggtgtgatc

SEQ ID NO: 27950 - DNA, 80 bp, synthetic construct
  source 1..80: mol_type = other DNA
catacagttcattccagaaagattctcatccagataaattgaaagccccagggctttaaaggttaatctttagctctctg

SEQ ID NO: 27951 - DNA, 80 bp, synthetic construct; identical to SEQ ID NO: 10893
  source 1..80: mol_type = other DNA

SEQ ID NO: 27952 - DNA, 80 bp, synthetic construct
  source 1..80: mol_type = other DNA
catagcttaacataaagaaaaggagaaagcccacttgttctactaaattacctactctactttttctgaaattcttttat

SEQ ID NO: 27953 - DNA, 80 bp, synthetic construct
  source 1..80: mol_type = other DNA
gggggaatgcataaggatatgcagaaatgaacagaaaggagaaactgggaaggctcaaacacaatgtgcttatttcaaaa

SEQ ID NO: 27954 - DNA, 80 bp, synthetic construct
  source 1..80: mol_type = other DNA
agttcgagaccagcctggccaatatggtgaaaccttatctctactaaaagtacaaaaattagccaagcatggtggcgggt

SEQ ID NO: 27955 - DNA, 80 bp, synthetic construct; identical to SEQ ID NO: 10894
  source 1..80: mol_type = other DNA

SEQ ID NO: 27956 - DNA, 80 bp, synthetic construct
  source 1..80: mol_type = other DNA
taatggagccacataacacattcaaacttacttgcaaaatatgtggtcacactttgtggagacaggttccttgatcaact

SEQ ID NO: 27957 - DNA, 80 bp, synthetic construct
  source 1..80: mol_type = other DNA
aaggcctcaagttcgttcaatatttattaaatgtctgctgtgtcaggaactgagaatacagcagagaatacgatccttac

SEQ ID NO: 27958 - DNA, 80 bp, synthetic construct
  source 1..80: mol_type = other DNA
tagttgataatagttcgtacgaattcatttccagtgatatatttttctgcactatcactgtgggtgcacatctcatcttt

SEQ ID NO: 27959 - DNA, 80 bp, synthetic construct; identical to SEQ ID NO: 10895
  source 1..80: mol_type = other DNA

SEQ ID NO: 27960 - DNA, 80 bp, synthetic construct
  source 1..80: mol_type = other DNA
tgagatggggttttgcttttgtagcccagactggcatgcaatggtgcgatctcggctcactgcaacctctgcctcccaag

SEQ ID NO: 27961 - DNA, 80 bp, synthetic construct
  source 1..80: mol_type = other DNA
agccccaagtgtcttctgatctataggtgtctcttactttttctcccttgtcatttatttttaaaattaggtcatttgac

SEQ ID NO: 27962 - DNA, 80 bp, synthetic construct
  source 1..80: mol_type = other DNA
ctttctggcaagaacactttacagatggtactgtgtactcttattagatcacttcagaagaggcatgatgtttggtttgt

SEQ ID NO: 27963 - DNA, 80 bp, synthetic construct; identical to SEQ ID NO: 10896
  source 1..80: mol_type = other DNA

SEQ ID NO: 27964 - DNA, 80 bp, synthetic construct
  source 1..80: mol_type = other DNA
acttgggaggccgaggcgggcggatcatgaggtcaggatttcgagaccagcctggccaacacagtgaaacgctgtctcta

SEQ ID NO: 27965 - DNA, 80 bp, synthetic construct
  source 1..80: mol_type = other DNA
tctcaaaataataataagcttaaaaataaaaacttcagaaaatacatcacccaagttcccatccctacctgtctatccac

SEQ ID NO: 27966 - DNA, 80 bp, synthetic construct
  source 1..80: mol_type = other DNA
taaagcctgctctcatagagctcatattctagtgtggtagacagttgatacggaattaaagaatacatgggaataagtgc

SEQ ID NO: 27967 - DNA, 80 bp, synthetic construct
  source 1..80: mol_type = other DNA
tcaggaaaggtttcactgaggtgagactagaggatagcttaataatgtaaagaaacacactatgcaacaattaggggaag

SEQ ID NO: 27968 - DNA, 80 bp, synthetic construct
  source 1..80: mol_type = other DNA
aagactatcagagaggtagctggtaacttctggtaggaacctataggctattttaaatctttagctttattctggtcttt

SEQ ID NO: 27969 - DNA, 80 bp, synthetic construct
  source 1..80: mol_type = other DNA
ccttggcctcccaaagtactgggattacaggagtgagccaccatgccagccatctttttaatttttaatgttaattaatt

SEQ ID NO: 27970 - DNA, 80 bp, synthetic construct
  source 1..80: mol_type = other DNA
gtgcagtggtgtggtcttggctcactgcaacctctgcctctcggattgaagtgattcttgtgcctcagcattccaagtag

SEQ ID NO: 27971 - DNA, 80 bp, synthetic construct
  source 1..80: mol_type = other DNA
taaatgtgaatttttgaaacggattttttggataaagtccaggcaagatatcaaagaacgactaacctggcagtgtgaca

SEQ ID NO: 27972 - DNA, 80 bp, synthetic construct; identical to SEQ ID NO: 10898
  source 1..80: mol_type = other DNA

SEQ ID NO: 27973 - DNA, 80 bp, synthetic construct
  source 1..80: mol_type = other DNA
ctcttgccattcaccctgccagactccttgggctattgcaagaataaaattaaatgctacttgggaaaatgcttcacaac

SEQ ID NO: 27974 - DNA, 80 bp, synthetic construct
  source 1..80: mol_type = other DNA
aagaaattctccgtaaaagaaaaattggattcagttatcataccagatggctttcattctcaccactgactcaattctga

SEQ ID NO: 27975 - DNA, 80 bp, synthetic construct; identical to SEQ ID NO: 10938
  source 1..80: mol_type = other DNA

SEQ ID NO: 27976 - DNA, 80 bp, synthetic construct
  source 1..80: mol_type = other DNA
taccaattgtcagaaatagctgccaatattgacttagaagacagcagaaggaattttagttcaagaaacctaaaacaggc

SEQ ID NO: 27977 - DNA, 80 bp, synthetic construct; identical to SEQ ID NO: 10899
  source 1..80: mol_type = other DNA

SEQ ID NO: 27978 - DNA, 80 bp, synthetic construct
  source 1..80: mol_type = other DNA
cttggggggccgaggcaggagaatggcgtgaacccgggaggcggagcttgcagtgagccgagatggcgccactgcactcc

SEQ ID NO: 27979 - DNA, 80 bp, synthetic construct
  source 1..80: mol_type = other DNA
tctctactaaaaatacaaaattagccggccacggtggcgtgcgcctataatcccagctactcaggaggctgaggcaggag

SEQ ID NO: 27980 - DNA, 80 bp, synthetic construct
  source 1..80: mol_type = other DNA
gaaggctgaggcgggtggatcacaaggtcaggagatcgagaccatcttggctaacatggtgaaaccccgtctctactaaa

SEQ ID NO: 27981 - DNA, 80 bp, synthetic construct; identical to SEQ ID NO: 10900
  source 1..80: mol_type = other DNA

SEQ ID NO: 27982 - DNA, 80 bp, synthetic construct
  source 1..80: mol_type = other DNA
ggaggttgtagtgagccgagattgtgccactgcactccagcctgggcaacaagagccaaagtctgtctcaaaaaaaaaaa

SEQ ID NO: 27983 - DNA, 80 bp, synthetic construct
  source 1..80: mol_type = other DNA
atgagaaagaacatcctatttttatgactctctcccatggaaatgaaacataaatgtatccaaatgccacactattgagg

SEQ ID NO: 27984 - DNA, 80 bp, synthetic construct; identical to SEQ ID NO: 10901
  source 1..80: mol_type = other DNA

SEQ ID NO: 27985 - DNA, 80 bp, synthetic construct
  source 1..80: mol_type = other DNA
gtttattatttatttgacaaatgtttattgagtggcaactaggtcccaagtaccgttctaactactgaacatacagatgt

SEQ ID NO: 27986 - DNA, 80 bp, synthetic construct
  source 1..80: mol_type = other DNA
gaagataaagtgtgtgctgggggtgtggtaattttaaataggggtgtctggaaatgaaaaggtggtatttcaatcaagat

SEQ ID NO: 27987 - DNA, 80 bp, synthetic construct
  source 1..80: mol_type = other DNA
agtggcttatgcctgtaatcctagcactttgggaggcccaggcgggtggatcacaaggtcaggagatcaagactatcctg

SEQ ID NO: 27988 - DNA, 80 bp, synthetic construct
  source 1..80: mol_type = other DNA
ccactgcactccagcctgggcaacagagcaagactccatctcaaaaaaagaaaaaaaaatacaaaaattagctgggcatg

SEQ ID NO: 27989 - DNA, 80 bp, synthetic construct; identical to SEQ ID NO: 10902
  source 1..80: mol_type = other DNA

SEQ ID NO: 27990 - DNA, 80 bp, synthetic construct
  source 1..80: mol_type = other DNA
acatgccactacgcccagctaatttttgtatttttagtggagagggggtttcaccatgttggccaggatggtctcgatct

SEQ ID NO: 27991 - DNA, 80 bp, synthetic construct
  source 1..80: mol_type = other DNA
gattcctgccccagtgcagaaccaatcaagacagagtccctgtctttcccggaccacaggatttgtgttgaaaaggagag

SEQ ID NO: 27992 - DNA, 80 bp, synthetic construct; identical to SEQ ID NO: 10903
  source 1..80: mol_type = other DNA

SEQ ID NO: 27993 - DNA, 80 bp, synthetic construct
  source 1..80: mol_type = other DNA
ggaaggttttagaataatacaaaccaaagaactaatgacaacgtcctttatttttaaagattctagaagttgctttttgt

SEQ ID NO: 27994 - DNA, 80 bp, synthetic construct
  source 1..80: mol_type = other DNA
ttagctttctccaatgtttctggttgttttctttttcttgcataaaaccaaaatcaacaacgaccaaaccaacaccaatc

SEQ ID NO: 27995 - DNA, 80 bp, synthetic construct
  source 1..80: mol_type = other DNA
tctcaatggcgcaaatggatccagttcttaagttctccctcccacaaaatcctgtctcctccccttcccagacatattcc

SEQ ID NO: 27996 - DNA, 80 bp, synthetic construct
  source 1..80: mol_type = other DNA
ctagcgattctcctgcctcagcctcctgagtagctggagcggcaccacgcccggctaatttttgtatttttagtagagac

SEQ ID NO: 27997 - DNA, 80 bp, synthetic construct; identical to SEQ ID NO: 10904
  source 1..80: mol_type = other DNA

SEQ ID NO: 27998 - DNA, 80 bp, synthetic construct
  source 1..80: mol_type = other DNA
cagcctgtcccccgtccaggaagtctcagcgagctcacgccgcgcagtcgcagttttaatttatctgtaattcccgcgct

SEQ ID NO: 27999 - DNA, 80 bp, synthetic construct
  source 1..80: mol_type = other DNA
attggccacccagtctgcccccggatgacgtaaaaggaaagagacggaagaggaagaattctacctgagtttgccataaa

SEQ ID NO: 28000 - DNA, 80 bp, synthetic construct; identical to SEQ ID NO: 10905
  source 1..80: mol_type = other DNA

SEQ ID NO: 28001 - DNA, 80 bp, synthetic construct
  source 1..80: mol_type = other DNA
gttatggactggagtgttatgttttcgtattttgaaagcagaaactaggccttaaaaagatacgtacaactctttaggga

SEQ ID NO: 28002 - DNA, 80 bp, synthetic construct
  source 1..80: mol_type = other DNA
gttatttttcgggttcagcttgcttttgccccgtctccgtcgacgcaatcgccaccagtcaatggggtggtcgttttgag

SEQ ID NO: 28003 - DNA, 80 bp, synthetic construct
  source 1..80: mol_type = other DNA
aggaagcagcctgggttagctaggggtggggtcacgtcacactaagagggtttggagaagttcaagggaggaatcctgca

SEQ ID NO: 28004 - DNA, 80 bp, synthetic construct; identical to SEQ ID NO: 10906
  source 1..80: mol_type = other DNA

SEQ ID NO: 28005 - DNA, 80 bp, synthetic construct
  source 1..80: mol_type = other DNA
ccccgggcagtcaggggcctagcacccgggccagcagctgcagagggtgcgccgggtcccccagcactgccggcccgcct

SEQ ID NO: 28006 - DNA, 80 bp, synthetic construct
  source 1..80: mol_type = other DNA
ccatcgactgcccaagggctgagaggagtgcaggcgcccggcacagccctgcgcaggatccactaggtgaagccagctgg

SEQ ID NO: 28007 - DNA, 80 bp, synthetic construct
  source 1..80: mol_type = other DNA
gctaaaggattgtaaatgcaccaatcagtgctctgtgtctagctcaaggtttgcaaatgcaccaatcagcactctgtgtc

SEQ ID NO: 28008 - DNA, 80 bp, synthetic construct
  source 1..80: mol_type = other DNA
tcaaaacggaccaattagctctctgtaaaatggaccaatcaacaggatgtgggtggggtcagataagggaataaaagcag

SEQ ID NO: 28009 - DNA, 80 bp, synthetic construct; identical to SEQ ID NO: 10907
  source 1..80: mol_type = other DNA

SEQ ID NO: 28010 - DNA, 80 bp, synthetic construct
  source 1..80: mol_type = other DNA
aatcttgctgctgctcactctttgggtccgcatagcatttatctgctggtaacaccgaccgcagaggtctgcagcttcac

SEQ ID NO: 28011 - DNA, 80 bp, synthetic construct
  source 1..80: mol_type = other DNA
ggaggtaactctgaacacgtccgaacatcagaaggaacaaactctggacacatcatctttaagaactgtaccactcaccg

SEQ ID NO: 28012 - DNA, 80 bp, synthetic construct
  source 1..80: mol_type = other DNA
tcttgggaacatggagtgctaggaaacgataactggaagactaggatgaaatctgcaagttaaaaaatgacactacccat

SEQ ID NO: 28013 - DNA, 80 bp, synthetic construct; identical to SEQ ID NO: 10908
  source 1..80: mol_type = other DNA

SEQ ID NO: 28014 - DNA, 80 bp, synthetic construct
  source 1..80: mol_type = other DNA
tgccaagacaaggtgagtcagtcacatggacttaacaataatgtcaattatgaaagctgaaggcctaggacccagctatc

SEQ ID NO: 28015 - DNA, 80 bp, synthetic construct
  source 1..80: mol_type = other DNA
ctcccacttcctgttttctcttagttggcccaccagctggaggagctccagaatatctaaattaatttccaattgtgtaa

SEQ ID NO: 28016 - DNA, 80 bp, synthetic construct
  source 1..80: mol_type = other DNA
gccattctcctgcctcagcctcccgagtagctgggactacaggcacccgccatcacgcccagctaattttttgtgttttt

SEQ ID NO: 28017 - DNA, 80 bp, synthetic construct; identical to SEQ ID NO: 10909
  source 1..80: mol_type = other DNA

SEQ ID NO: 28018 - DNA, 80 bp, synthetic construct
  source 1..80: mol_type = other DNA
agacttcagggtccttaaaataacagtcttaattgtagtgttttacagggcagtgcattacattgtcaaaaacagtacag

SEQ ID NO: 28019 - DNA, 80 bp, synthetic construct
  source 1..80: mol_type = other DNA
tgagccaccacaccgggccaattttttattttatttttgagacagagtctcgctctatcacccaggcgggagtgcagtgg

SEQ ID NO: 28020 - DNA, 80 bp, synthetic construct
  source 1..80: mol_type = other DNA
aactcctggactcaagcgatctgcctgcctctgcttcccaaaatcctgggattacagacatgagccactgtgcctggcct

SEQ ID NO: 28021 - DNA, 80 bp, synthetic construct; identical to SEQ ID NO: 10910
  source 1..80: mol_type = other DNA

SEQ ID NO: 28022 - DNA, 80 bp, synthetic construct
  source 1..80: mol_type = other DNA
gttttgctgatactctgggtgtgttgcagatattaaccctttgctgtgggttgtgatggttgtttgttgtcttctgattt

SEQ ID NO: 28023 - DNA, 80 bp, synthetic construct
  source 1..80: mol_type = other DNA
gctaggtgttcagaatagggatcttatttctccagtgatatgggctttaataattcgaagtagcgcttagctcatttgtg

SEQ ID NO: 28024 - DNA, 80 bp, synthetic construct; identical to SEQ ID NO: 10911
  source 1..80: mol_type = other DNA

SEQ ID NO: 28025 - DNA, 80 bp, synthetic construct
  source 1..80: mol_type = other DNA
tctttgctttgcttttctttttgttttgggacagagtctcactctgtcatccaggctgcagtgcagtggcgcaatctcag

SEQ ID NO: 28026 - DNA, 80 bp, synthetic construct
  source 1..80: mol_type = other DNA
ctcaagcaatccagcggcctcagcctcccaaagttatgggattacaggcatgagccattgtgcccagccaggatatcatc

SEQ ID NO: 28027 - DNA, 80 bp, synthetic construct
  source 1..80: mol_type = other DNA
aataaaattcaatttagaaatttctgtcttcagtgctatctcgaggggcctgtgaaaaatgctgactcggtggcagctgt

SEQ ID NO: 28028 - DNA, 80 bp, synthetic construct; identical to SEQ ID NO: 10912
  source 1..80: mol_type = other DNA

SEQ ID NO: 28029 - DNA, 80 bp, synthetic construct
  source 1..80: mol_type = other DNA
tgcccagctaattctttttttctttattttattttatttttttttttgagatggagtctcgctctgtcgcccaggctgga

SEQ ID NO: 28030 - DNA, 80 bp, synthetic construct
  source 1..80: mol_type = other DNA
tgttagccaggatggtctcgatcccctgacatcgtgatccgctgtcctcggtctcccaaagtgctgggattacaggcgtg

SEQ ID NO: 28031 - DNA, 80 bp, synthetic construct
  source 1..80: mol_type = other DNA
tctcctaggttagtcccagaggacagatttgaagtttgaaaacagaaagtaactgccaaaagggattatttagggcagag

SEQ ID NO: 28032 - DNA, 80 bp, synthetic construct
  source 1..80: mol_type = other DNA
ttctcctgtctggctttgaataactctgggtagtgctttaaatctaagctgacataccagtgggatgtgaactgtccttg

SEQ ID NO: 28033 - DNA, 80 bp, synthetic construct; identical to SEQ ID NO: 10913
  source 1..80: mol_type = other DNA

SEQ ID NO: 28034 - DNA, 80 bp, synthetic construct
  source 1..80: mol_type = other DNA
tcctttttcacttcctaccttcctccccacctctgggtgtaccctcccctgagctcagcctgtatttctatctgctggcc

SEQ ID NO: 28035 - DNA, 80 bp, synthetic construct
  source 1..80: mol_type = other DNA
gtaccttttttcttgtacaagtcacatgataatgtaaggggtttttttccccatctagagcctgcctggtgggctcatgg

SEQ ID NO: 28036 - DNA, 80 bp, synthetic construct; identical to SEQ ID NO: 10914
  source 1..80: mol_type = other DNA

SEQ ID NO: 28037 - DNA, 80 bp, synthetic construct
  source 1..80: mol_type = other DNA
tgaaaggatttccctactaaatcctttactttccactttgtttaaaatgagtttaacaccaagaaaatagttgtctctat

SEQ ID NO: 28038 - DNA, 80 bp, synthetic construct
  source 1..80: mol_type = other DNA
tatatttgaaagcagacactgggactctgacctttgcagagataaaagggatactttcctaacccagagaggccaaagga

SEQ ID NO: 28039 - DNA, 80 bp, synthetic construct
  source 1..80: mol_type = other DNA
tggccatggaatgaagcacaaaggagagcctgctagttcctaacccacgcctgaagacgccttaggcggttctgcggacc

SEQ ID NO: 28040 - DNA, 80 bp, synthetic construct; identical to SEQ ID NO: 10915
  source 1..80: mol_type = other DNA

SEQ ID NO: 28041 - DNA, 80 bp, synthetic construct
  source 1..80: mol_type = other DNA
gaaccttcccatggttcgcaggtcgcggtcttcggagccttcagcctcgtgagcccgaacagtccatagggcggcgccag

SEQ ID NO: 28042 - DNA, 80 bp, synthetic construct
  source 1..80: mol_type = other DNA
ggcgagaggccctgacctctggggtagggtggcagcgtccccttgaagatgcggtcccgcctcccatccccaggcgcccg

SEQ ID NO: 28043 - DNA, 80 bp, synthetic construct
  source 1..80: mol_type = other DNA
gaccaaggcgggagggtcacttgagaacaggagttcaaaaccagcctgggcaacaaagtgaggcccgtctctaacaaaga

SEQ ID NO: 28044 - DNA, 80 bp, synthetic construct; identical to SEQ ID NO: 10916
  source 1..80: mol_type = other DNA

SEQ ID NO: 28045 - DNA, 80 bp, synthetic construct
  source 1..80: mol_type = other DNA
tctgacaaagggctaatatccagaatctacaaagaacttaaacaaatttacaataaaaaatcaaacaaccccatcaaaaa

SEQ ID NO: 28046 - DNA, 80 bp, synthetic construct
  source 1..80: mol_type = other DNA
gaaacaacaggtgctggagaggatgtggagaaataggaacgcttttacgccattggtgggactgtaaactagttcaacca

SEQ ID NO: 28047 - DNA, 80 bp, synthetic construct
  source 1..80: mol_type = other DNA
agacttggaaccaacccaaatgtccatcaatgatagactggattaagaaaatgtggcacatatacaccataatatactat

SEQ ID NO: 28048 - DNA, 80 bp, synthetic construct
  source 1..80: mol_type = other DNA
catcacacaccagagcctattgtggggtggggggaggggggagggatagcattaggagatatccttaatgtaaatgacga

SEQ ID NO: 28049 - DNA, 80 bp, synthetic construct; identical to SEQ ID NO: 10917
  source 1..80: mol_type = other DNA

SEQ ID NO: 28050 - DNA, 80 bp, synthetic construct
  source 1..80: mol_type = other DNA
ggcatggtggtgagcacctgtattcccagctattcaggaggctgaggcaggagaatcatttgaacctggaaggcagaggt

SEQ ID NO: 28051 - DNA, 80 bp, synthetic construct
  source 1..80: mol_type = other DNA
tcaggagtttgagaccagtctgaccagcatggtgaaaccctgtctctactaaaaatacaaaaattagccgggcatggtgg

SEQ ID NO: 28052 - DNA, 80 bp, synthetic construct; identical to SEQ ID NO: 10918
  source 1..80: mol_type = other DNA

SEQ ID NO: 28053 - DNA, 80 bp, synthetic construct
  source 1..80: mol_type = other DNA
ctaggtctccaccatgtgactccaccgtagactccatgccttcttcttttgcaaagcctcggacacccaaacacctacca

SEQ ID NO: 28054 - DNA, 80 bp, synthetic construct
  source 1..80: mol_type = other DNA
gccagcagggtgctgccaataaaaggtagtcacgtggaatttggaatgtggaaaggaggtagaagtcatcctttcctccc

SEQ ID NO: 28055 - DNA, 80 bp, synthetic construct
  source 1..80: mol_type = other DNA
gaaagccagtggtacaaccccctccccacaaccttcaccacctctagcccctccaatgaaaagcactaattgcctatata

SEQ ID NO: 28056 - DNA, 80 bp, synthetic construct; identical to SEQ ID NO: 10919
  source 1..80: mol_type = other DNA

SEQ ID NO: 28057 - DNA, 80 bp, synthetic construct
  source 1..80: mol_type = other DNA
ggcacgatctcggctcactgcaacttccgcctcccaggtttacgccattcttctgcctcagcctcctgagtagctgggac

SEQ ID NO: 28058 - DNA, 80 bp, synthetic construct
  source 1..80: mol_type = other DNA
gtacccagtagtttttttggctcctctccctcctcccacccttcaccctcaggtagggcccagtgtctgttgttcccttc

SEQ ID NO: 28059 - DNA, 80 bp, synthetic construct
  source 1..80: mol_type = other DNA
cttttgttctaacgtttggtccttcaccttggttcctgacacaaggattcctaaatcccttggaattttctgcatgatag

SEQ ID NO: 28060 - DNA, 80 bp, synthetic construct
  source 1..80: mol_type = other DNA
aaagcctccagaaaaatccttgaaagacaggacatggagagctgctgggttggcgaacacatccatgtgccgggaggatg

SEQ ID NO: 28061 - DNA, 80 bp, synthetic construct
  source 1..80: mol_type = other DNA
tttcctgggttttgtgagctgttctagcaaatggtcaaacctgaggagggagttgtggggacctccaatttatagccagt

SEQ ID NO: 28062 - DNA, 80 bp, synthetic construct; identical to SEQ ID NO: 10920
  source 1..80: mol_type = other DNA

SEQ ID NO: 28063 - DNA, 80 bp, synthetic construct
  source 1..80: mol_type = other DNA
gtctaggagccctttgaggaaagggatgctgtcctagtcaactctttcccagcgccaggcacaacgtctggcatgttcca

SEQ ID NO: 28064 - DNA, 80 bp, synthetic construct
  source 1..80: mol_type = other DNA
ctttcatttagtagctgttggccttgtgtccacctttctgtggcactcaggtctcacttaagagctggccctctgagcta

SEQ ID NO: 28065 - DNA, 80 bp, synthetic construct
  source 1..80: mol_type = other DNA
gctcagacaaaactgctcaattgaggacaaactgggcaaaatagaatcttactttgggagtttttagaaatatggttggg

SEQ ID NO: 28066 - DNA, 80 bp, synthetic construct; identical to SEQ ID NO: 10921
  source 1..80: mol_type = other DNA

SEQ ID NO: 28067 - DNA, 80 bp, synthetic construct
  source 1..80: mol_type = other DNA
acaaaaaattagccaggtgtggtgacgggcacctgtagtcccagctacttgggaggctgaggcaggagaatggcgtgaac

SEQ ID NO: 28068 - DNA, 80 bp, synthetic construct
  source 1..80: mol_type = other DNA
tgcaaggatctctactcttggcttctttttttcttgagatggagtcttgctctgttgcccaggctggtgtgcagtggccc

SEQ ID NO: 28069 - DNA, 80 bp, synthetic construct
  source 1..80: mol_type = other DNA
aactcctgacctcaggtggtccacccacctcagcctcccaaagtgctggaattacaggcgtgagccactgtgcccagcct

SEQ ID NO: 28070 - DNA, 80 bp, synthetic construct; identical to SEQ ID NO: 10922
  source 1..80: mol_type = other DNA

SEQ ID NO: 28071 - DNA, 80 bp, synthetic construct
  source 1..80: mol_type = other DNA
cttccatggattgctgggctaaatcatataagactgtaaaatgcctaacccaggatttggcatcaagtaagcaaattgta

SEQ ID NO: 28072 - DNA, 80 bp, synthetic construct
  source 1..80: mol_type = other DNA
tacctcagcctcctgagtagctgggattacaggcatgtgccaccatgcccggctaatttttgtgtgtgtgtgtgtgtgtg

SEQ ID NO: 28073 - DNA, 80 bp, synthetic construct
  source 1..80: mol_type = other DNA
tatttatttatttattttattttttttggtagacacgggtttctccatgttggttaggctggtcttgaactcccaacctc

SEQ ID NO: 28074 - DNA, 80 bp, synthetic construct; identical to SEQ ID NO: 10923
  source 1..80: mol_type = other DNA

SEQ ID NO: 28075 - DNA, 80 bp, synthetic construct
  source 1..80: mol_type = other DNA
gttagcactgttctttacttcctattactgaactgccagcgttcatttgtgttcagttaggtagattaccaattcttgtt

SEQ ID NO: 28076 - DNA, 80 bp, synthetic construct
  source 1..80: mol_type = other DNA
agcgggggatggggagaggctagggcagtacacgtgaatggagaggtagccccaccagtatgttttctgaaatacagtcc

SEQ ID NO: 28077 - DNA, 80 bp, synthetic construct
  source 1..80: mol_type = other DNA
ctttgggaggctgaggcgggcagatcacaaggtcaggagatcgagaccatcctggctaagatggtgaaaccctgtctcta

SEQ ID NO: 28078 - DNA, 80 bp, synthetic construct; identical to SEQ ID NO: 10924
  source 1..80: mol_type = other DNA

SEQ ID NO: 28079 - DNA, 80 bp, synthetic construct
  source 1..80: mol_type = other DNA
gtatgtggtattatacttgatgaaccaggggagagggcaccaagaacaacgatatttaattgtaaaatctccaccctctg

SEQ ID NO: 28080 - DNA, 80 bp, synthetic construct
  source 1..80: mol_type = other DNA
ctgcctttgtggatgcgtgggccgccagcttcagtcctgcttttctttctgatggcccttgttatttatgcataaatatt

SEQ ID NO: 28081 - DNA, 80 bp, synthetic construct; identical to SEQ ID NO: 10925
  source 1..80: mol_type = other DNA

SEQ ID NO: 28082 - DNA, 80 bp, synthetic construct
  source 1..80: mol_type = other DNA
gcgaagccgaaaaaggcagcagcgaaggataaattttcagacacaaaagtgcaaaaaaagggaaaaggggagcaaaggga

SEQ ID NO: 28083 - DNA, 80 bp, synthetic construct
  source 1..80: mol_type = other DNA
tgaataccatagaccatgtcttatcagtggtccctgtctcccttctttacaattcagaggaattttttttctttcttttt

SEQ ID NO: 28084 - DNA, 80 bp, synthetic construct
  source 1..80: mol_type = other DNA
tttttgtatttttagtagagatggggtttcaccgcattagccaggatggtctcgatctcctgacctcgtgatccgcccgc

SEQ ID NO: 28085 - DNA, 80 bp, synthetic construct
  source 1..80: mol_type = other DNA
attttttggtacaaccagaaaattgtgtaggatattgaattatgggagactttgacagtctcgggtgtcagcttaacatt

SEQ ID NO: 28086 - DNA, 80 bp, synthetic construct; identical to SEQ ID NO: 10926
  source 1..80: mol_type = other DNA

SEQ ID NO: 28087 - DNA, 80 bp, synthetic construct
  source 1..80: mol_type = other DNA
atttgcttccaaattttaagctggaaagtcactgggataacttttaaaaagaattacagtacgtggctttttagattttt

SEQ ID NO: 28088 - DNA, 80 bp, synthetic construct
  source 1..80: mol_type = other DNA
ccctccaccatgcctggctaatttttcgtatttttagtagagacggggtttcactgtattagccaggatggtctcgatct

SEQ ID NO: 28089 - DNA, 80 bp, synthetic construct; identical to SEQ ID NO: 10927
  source 1..80: mol_type = other DNA

SEQ ID NO: 28090 - DNA, 80 bp, synthetic construct
  source 1..80: mol_type = other DNA
cccgtcgtttaccccgcatcactgttgaagatctcatcctcactggaagactccttgtcctgcagcctcatggctttttt

SEQ ID NO: 28091 - DNA, 80 bp, synthetic construct
  source 1..80: mol_type = other DNA
gagattacaggctgcgccaccgcgcccggctaattttgtatttttagtagcgacggggtttcttttttattttgagacag

SEQ ID NO: 28092 - DNA, 80 bp, synthetic construct
  source 1..80: mol_type = other DNA
gagacggggtttcactgtgttagccaggatggtctcgatctcctgacctcgtgatctgcccgcctcggcctcccaaagtg

SEQ ID NO: 28093 - DNA, 80 bp, synthetic construct; identical to SEQ ID NO: 10928
  source 1..80: mol_type = other DNA

SEQ ID NO: 28094 - DNA, 80 bp, synthetic construct
  source 1..80: mol_type = other DNA
gcctccaagaaggcccctggcctagcctgatgcccactatcagcaggaacaggcacgacaaactttccccttcctatccc

SEQ ID NO: 28095 - DNA, 80 bp, synthetic construct
  source 1..80: mol_type = other DNA
cagagttctaagctctcttctaattctaaaattctaatgtaaaaattgccagactagtggtggcgcaagcctgtaatccc

SEQ ID NO: 28096 - DNA, 80 bp, synthetic construct
  source 1..80: mol_type = other DNA
cgcatccatgtgaagagaccaccaaacaggctttgtgtgagcaatagttttttaatcacctggagtcagcaaaaggagat

SEQ ID NO: 28097 - DNA, 80 bp, synthetic construct
  source 1..80: mol_type = other DNA
tagggtggagcaggaacaaatcacaatggtggaatgtcatcagttaaggcaggaactggctatttcacgtttatggttct

SEQ ID NO: 28098 - DNA, 80 bp, synthetic construct; identical to SEQ ID NO: 10929
  source 1..80: mol_type = other DNA

SEQ ID NO: 28099 - DNA, 80 bp, synthetic construct
  source 1..80: mol_type = other DNA
atataaccaacacacatccccccgccaccacccaattaacttttttactttttttcccccccgagacagagtcttgccct

SEQ ID NO: 28100 - DNA, 80 bp, synthetic construct
  source 1..80: mol_type = other DNA
ttagtagagatggggtttcaccatgttagcgggtggaccttgtgatccgcccaccttggcctcccaaagtgctgggatta

SEQ ID NO: 28101 - DNA, 80 bp, synthetic construct; identical to SEQ ID NO: 10930
  source 1..80: mol_type = other DNA

SEQ ID NO: 28102 - DNA, 80 bp, synthetic construct
  source 1..80: mol_type = other DNA
gccactaccctcagtttcttttttttgtttttgagacggagtcttgctctgtcgcacagcctggagtgcagtggcatgat

SEQ ID NO: 28103 - DNA, 80 bp, synthetic construct
  source 1..80: mol_type = other DNA
ctgacctcaggtgatccacccacctcaagcctcccaaagtgctgggattataggcatgagccaccatgtccggcaagttt

SEQ ID NO: 28104 - DNA, 80 bp, synthetic construct
  source 1..80: mol_type = other DNA
tgtcactactacacctggctaaatgttgtatttttagtagagacagggtttcatcatgttggccaggctggtctcgaact

SEQ ID NO: 28105 - DNA, 80 bp, synthetic construct
  source 1..80: mol_type = other DNA
agtccagtctcatgatatttgccacccaatgtgctcatgtttcccaaaccagcatctcttctctagacccatcctctaat

SEQ ID NO: 28106 - DNA, 80 bp, synthetic construct; identical to SEQ ID NO: 10931
  source 1..80: mol_type = other DNA

SEQ ID NO: 28107 - DNA, 80 bp, synthetic construct
  source 1..80: mol_type = other DNA
gaggtgtcctttatgaggtatggcaagagtgaaggcttggcaaagggtggctgtgcccatcaaacacagacagtttatga

SEQ ID NO: 28108 - DNA, 80 bp, synthetic construct
  source 1..80: mol_type = other DNA
tcatttaaaatcacaggctggagaggcccagggactttgggtatctatttacatagccaagataacatcagattcaaatt

SEQ ID NO: 28109 - DNA, 80 bp, synthetic construct; identical to SEQ ID NO: 10932
  source 1..80: mol_type = other DNA

SEQ ID NO: 28110 - DNA, 80 bp, synthetic construct
  source 1..80: mol_type = other DNA
tgcagtggctcatgcctgtaatcccaacattttgggaggccaaggtagaaggattgcttgaggccaatagtttgaaacta

SEQ ID NO: 28111 - DNA, 80 bp, synthetic construct
  source 1..80: mol_type = other DNA
cactgtacctcagcctgggtgacagagcaataccctgtctcttaaaaaataaaaatatacatttttttctgtagtaattt

SEQ ID NO: 28112 - DNA, 80 bp, synthetic construct
  source 1..80: mol_type = other DNA
tggagccaagatttgaaatcagcaccaccacatactttcaaaatatgttgatggtgaattttggtttgtttacagctgtg

SEQ ID NO: 28113 - DNA, 80 bp, synthetic construct; identical to SEQ ID NO: 10933
  source 1..80: mol_type = other DNA

SEQ ID NO: 28114 - DNA, 80 bp, synthetic construct
  source 1..80: mol_type = other DNA
ctgggcgtggtggctcacacctgtaatcccagcactctgggaggctgaggtgggcggatcacaaggttaggagatcgaga

SEQ ID NO: 28115 - DNA, 80 bp, synthetic construct
  source 1..80: mol_type = other DNA
actgtactccagcactccagcctgggtgacagagcaagactccgtctcaaaaataaaaaaataaaaaaaaataagctggg

SEQ ID NO: 28116 - DNA, 80 bp, synthetic construct
  source 1..80: mol_type = other DNA
taaataaataaatggagaactccactggttaagagcgaagggaaggattacttctggatttaggagacgaactgctggac

SEQ ID NO: 28117 - DNA, 80 bp, synthetic construct
  source 1..80: mol_type = other DNA
aaaaagaaggagctgaagtcctttaaaaattaactgcctgtttttctgtggctagtgagccttatctctcctcctttccc

SEQ ID NO: 28118 - DNA, 80 bp, synthetic construct; identical to SEQ ID NO: 10934
  source 1..80: mol_type = other DNA

SEQ ID NO: 28119 - DNA, 80 bp, synthetic construct
  source 1..80: mol_type = other DNA
aacactttacagatggtactgtgtactcttattagatcacttcagaagacgcatgtttggtttgtgattactttgtaaaa

SEQ ID NO: 28120 - DNA, 80 bp, synthetic construct
  source 1..80: mol_type = other DNA
cgtctctactaaaaatacaaaaattagccaggcgtggtgtcccatgcctgtggtgccagctacttggaggctaaggcaga

SEQ ID NO: 28121 - DNA, 80 bp, synthetic construct
  source 1..80: mol_type = other DNA
gccggcagatcacgaggtcaggatttcgagaccagcctggccaacatggtgaaaccccatctctactaaaaatacaaaaa

SEQ ID NO: 28122 - DNA, 80 bp, synthetic construct; identical to SEQ ID NO: 10935
  source 1..80: mol_type = other DNA

SEQ ID NO: 28123 - DNA, 80 bp, synthetic construct
  source 1..80: mol_type = other DNA
ttaaagagaaaaaataagcagggtaaggggaaacaggtagtgtaatatgtatagggggtaggtgtacatggggggagtca

SEQ ID NO: 28124 - DNA, 80 bp, synthetic construct; identical to SEQ ID NO: 10897
  source 1..80: mol_type = other DNA

SEQ ID NO: 28125 - DNA, 80 bp, synthetic construct; identical to SEQ ID NO: 10936
  source 1..80: mol_type = other DNA

SEQ ID NO: 28126 - DNA, 80 bp, synthetic construct
  source 1..80: mol_type = other DNA
ctcccaaagtactgggattacaggagtgagccaccatgcccggccatctttttaatttttaatgttaattaatttttata

SEQ ID NO: 28127 - DNA, 80 bp, synthetic construct
  source 1..80: mol_type = other DNA
caggctggagtgcagtggtgtggtcttggctcactgcaacctctgcctctcggattgaagtgattcttgtgcctcagcct

SEQ ID NO: 28128 - DNA, 80 bp, synthetic construct
  source 1..80: mol_type = other DNA
acttagccctaaatgtgaacttttgaaatggattttttgggtaaagtccaggcaggacatcaaagaacaagtatcctggt

SEQ ID NO: 28129 - DNA, 80 bp, synthetic construct; identical to SEQ ID NO: 10937
  source 1..80: mol_type = other DNA

SEQ ID NO: 28130 - DNA, 80 bp, synthetic construct
  source 1..80: mol_type = other DNA
aaggatttagtaatactactcttgtaatcatggtgtttctgacgtagcacagggcagtgaaaagagaaacactgaactaa

SEQ ID NO: 28131 - DNA, 80 bp, synthetic construct
  source 1..80: mol_type = other DNA
ttccttctctgtcattcaccctgccagtctccttgggctattgcaagaataaaattaaatgctacttgggaaaatacttc

SEQ ID NO: 28132 - DNA, 80 bp, synthetic construct
  source 1..80: mol_type = other DNA
taagctacatttcaaagaaattctccgtaaaagaaaaattggattcagttatcataccagatggctttcattctcaccac

SEQ ID NO: 28133 - DNA, 80 bp, synthetic construct
  source 1..80: mol_type = other DNA
ttgaaggaagactgtgaaaagggaaaaggaaaaaaattaaaatgttccccttctaggtcctgatgagagtaaatgtttac

SEQ ID NO: 28134 - DNA, 80 bp, synthetic construct
  source 1..80: mol_type = other DNA
ggttgaaaaacaacaacccaccggggaacacattttagcaaattcttctgaaagtcaaaaatgttacagtcataggtaaa

SEQ ID NO: 28135 - DNA, 80 bp, synthetic construct
  source 1..80: mol_type = other DNA
tattaagacataactgcaaattgtgctatactgggtactgtattaaaaggaagtgaaatatggtccccatcctagaagtt

SEQ ID NO: 28136 - DNA, 80 bp, synthetic construct
  source 1..80: mol_type = other DNA
aagaatacaaaattagctgggcatggtggcacacgcctgtaatcctagctactcaggaggctcaggcaggagaagcactt

SEQ ID NO: 28137 - DNA, 80 bp, synthetic construct
  source 1..80: mol_type = other DNA
tcacctgaggctgggagtttgagaccagcctgatcaacatggagacaccccgtctctactaagaaatacaaaattagctg

SEQ ID NO: 28138 - DNA, 80 bp, synthetic construct
  source 1..80: mol_type = other DNA
attaatctaacagaaaataggaaaaaagcaatgaaaagctagaaaacatacaatagttgactgaaaataaaaatttagca

SEQ ID NO: 28139 - DNA, 80 bp, synthetic construct; identical to SEQ ID NO: 10939
  source 1..80: mol_type = other DNA

SEQ ID NO: 28140 - DNA, 80 bp, synthetic construct
  source 1..80: mol_type = other DNA
atgaaaaacaactttcataaagcacaaaagaaaatttccttgaatttacccttttttattgtgggtaagaggcaataggt

SEQ ID NO: 28141 - DNA, 80 bp, synthetic construct
  source 1..80: mol_type = other DNA
aactaggtcccaagtactgttttaactactgaatatacagatgtacataaacgaaacaaaaatctctgctgccctggagt

SEQ ID NO: 28142 - DNA, 80 bp, synthetic construct
  source 1..80: mol_type = other DNA
tttaaatagcggtgtctggaaatgaaaaggtggtatttcaatcaagattttcagaccatggctgggtgcagaggctcata

SEQ ID NO: 28143 - DNA, 80 bp, synthetic construct; identical to SEQ ID NO: 10940
  source 1..80: mol_type = other DNA

SEQ ID NO: 28144 - DNA, 80 bp, synthetic construct
  source 1..80: mol_type = other DNA
acctccctcccggacggggcggctggcctggcgggggctgacccccacctccctcccggacggggtggctgccgggctga

SEQ ID NO: 28145 - DNA, 80 bp, synthetic construct
  source 1..80: mol_type = other DNA
gctcctcacatcacagatacttgaaggcagcatgctcgttaagagtcatcaccactccctaatctcaagtacccagggac

SEQ ID NO: 28146 - DNA, 80 bp, synthetic construct
  source 1..80: mol_type = other DNA
ataaataaatgtgaacagtacagtccccttttccttttataaatgaagaaaaacaaaggctcactccaagagtcagactt

SEQ ID NO: 28147 - DNA, 80 bp, synthetic construct; identical to SEQ ID NO: 10941
  source 1..80: mol_type = other DNA

SEQ ID NO: 28148 - DNA, 80 bp, synthetic construct
  source 1..80: mol_type = other DNA
gggactacaggcacccgccaccacacctggctaatttttttgtatttttttagtagagatggggtttcacctgtagcagg

SEQ ID NO: 28149 - DNA, 80 bp, synthetic construct
  source 1..80: mol_type = other DNA
gagagggtcgtgatcgattgagcaagcaggaggtacgtgggtacgtgactgggggctgcacgcaccagtaattagattgg

SEQ ID NO: 28150 - DNA, 80 bp, synthetic construct
  source 1..80: mol_type = other DNA
tactttttctttctttggaggcagaaattgggcataagacaatatgaggggtggtctcctcccttattcccccactttga

SEQ ID NO: 28151 - DNA, 80 bp, synthetic construct; identical to SEQ ID NO: 10942
  source 1..80: mol_type = other DNA

SEQ ID NO: 28152 - DNA, 80 bp, synthetic construct
  source 1..80: mol_type = other DNA
ctgctagcaagtagtcgagagctaatctattttgatagatagcatttctcatctgagtttcttgctgggccagaatagtc

SEQ ID NO: 28153 - DNA, 80 bp, synthetic construct
  source 1..80: mol_type = other DNA
ttcaatttcttatagctatgcttttcacgggaagcatagacagggaagcccaggagttctcctgtttttatggacagtag

SEQ ID NO: 28154 - DNA, 80 bp, synthetic construct
  source 1..80: mol_type = other DNA
tggatttttctctgtgtggtttgaactccaccatgtagtcttcctacaggaagggtgaagtccttctccactcttgctat

SEQ ID NO: 28155 - DNA, 80 bp, synthetic construct
  source 1..80: mol_type = other DNA
gtgacagtgagagactgggctacatgctcggctaattgcaaaaacaaatttcttgtttttcctggaaattctgttattgg

SEQ ID NO: 28156 - DNA, 80 bp, synthetic construct; identical to SEQ ID NO: 10943
  source 1..80: mol_type = other DNA

SEQ ID NO: 28157 - DNA, 80 bp, synthetic construct
  source 1..80: mol_type = other DNA
tgacagcacaggcatcaaattttaaggtgacttgtttgggcacccctttttcttctgttttggctaacactttactcata

SEQ ID NO: 28158 - DNA, 80 bp, synthetic construct
  source 1..80: mol_type = other DNA
cagtacacttataataaccataaaataataggactgtagcaaccttttgtcctacctcagtgacttgatgtatacactgg

SEQ ID NO: 28159 - DNA, 80 bp, synthetic construct; identical to SEQ ID NO: 10944
  source 1..80: mol_type = other DNA

SEQ ID NO: 28160 - DNA, 80 bp, synthetic construct
  source 1..80: mol_type = other DNA
atttgtaaccaatgaggtcctttggtagtcattaaagttaccacagcatggggggcctttatattcaggttttcctaagg

SEQ ID NO: 28161 - DNA, 80 bp, synthetic construct
  source 1..80: mol_type = other DNA
ctctttctgacacatagagtgtaaagagttttgtcaggtcaggtagcctcagggctgggaccaacatgaggttttctttt

SEQ ID NO: 28162 - DNA, 80 bp, synthetic construct
  source 1..80: mol_type = other DNA
ctaaatagacatgagagtcgaaagacccataaggggcttctctcgctttacaatgtctttctttttttccttctggttga

SEQ ID NO: 28163 - DNA, 80 bp, synthetic construct; identical to SEQ ID NO: 10945
  source 1..80: mol_type = other DNA

SEQ ID NO: 28164 - DNA, 80 bp, synthetic construct
  source 1..80: mol_type = other DNA
ggaaaggggacaatctgggcctctggcctgccatgtgcacaagcataacaattgcttttgtttaacgtgcagatggaata

SEQ ID NO: 28165 - DNA, 80 bp, synthetic construct
  source 1..80: mol_type = other DNA
tccacagaacgttggaccaactacggcataaaaactctacatcaggggacaagactcctggttggcactggggtctttat

SEQ ID NO: 28166 - DNA, 80 bp, synthetic construct
  source 1..80: mol_type = other DNA
aattgacttggttatgttaataactagatggtcagcaatagcacgaggaaagaaagaagagtaatagaatagatgaaaag

SEQ ID NO: 28167 - DNA, 80 bp, synthetic construct; identical to SEQ ID NO: 10946
  source 1..80: mol_type = other DNA

SEQ ID NO: 28168 - DNA, 80 bp, synthetic construct
  source 1..80: mol_type = other DNA
tttagcacctatttttattagtttttaaaccaaagaaagccaaataccattttacatttaacagtgcttctcgtatgatt

SEQ ID NO: 28169 - DNA, 80 bp, synthetic construct
  source 1..80: mol_type = other DNA
gagcaggttggtgctttaagaaaaaacctgttatgcttttactttaatgtccagttcacagaaaaactggatgatacttc

SEQ ID NO: 28170 - DNA, 80 bp, synthetic construct
  source 1..80: mol_type = other DNA
tacttttcttatacaccttgcatataaactgttttttttttcaacagttttacattcaggaggcctagttacttttaaat

SEQ ID NO: 28171 - DNA, 80 bp, synthetic construct; identical to SEQ ID NO: 10947
  source 1..80: mol_type = other DNA

SEQ ID NO: 28172 - DNA, 80 bp, synthetic construct
  source 1..80: mol_type = other DNA
taataaaaagaaaaccttctaagtttgggattttaattatcctttgctattaataagaccttgttttgtctaaattagaa

SEQ ID NO: 28173 - DNA, 80 bp, synthetic construct
  source 1..80: mol_type = other DNA
tctatccttgactctctgtctgtctcttcctgtctcttcctctctctcttttcctcttttcctctctgtctctttccttt

SEQ ID NO: 28174 - DNA, 80 bp, synthetic construct
  source 1..80: mol_type = other DNA
tacctttgaaacaagggacctgtccaggcttccttctaatggccaacctacctctaatgctggccagtctatcttacaca

SEQ ID NO: 28175 - DNA, 80 bp, synthetic construct; identical to SEQ ID NO: 10948
  source 1..80: mol_type = other DNA

SEQ ID NO: 28176 - DNA, 80 bp, synthetic construct
  source 1..80: mol_type = other DNA
caaagtgccaataaaggcacgccatgggtgatcaggccatgcttccactcaaatggagtgggcaagtttcaaagactact

SEQ ID NO: 28177 - DNA, 80 bp, synthetic construct
  source 1..80: mol_type = other DNA
ggctggttggagtcccctgcagggatgttccacagggcaggtttaagccgcctaaggagctgccttgaccatccgccatt

SEQ ID NO: 28178 - DNA, 80 bp, synthetic construct
  source 1..80: mol_type = other DNA
ggctcacaactctaagggggtgcacgtgagagggtcgtgatcaattgagcaagcagggggtacgtgactgggggctgcat

SEQ ID NO: 28179 - DNA, 80 bp, synthetic construct
  source 1..80: mol_type = other DNA
tttctgccctttagtttttactttttctttctttggaggcagaaattgggcataagacaatatgaggggtggtctcctcc

SEQ ID NO: 28180 - DNA, 80 bp, synthetic construct; identical to SEQ ID NO: 10949
  source 1..80: mol_type = other DNA

SEQ ID NO: 28181 - DNA, 80 bp, synthetic construct
  source 1..80: mol_type = other DNA
aggtcaattctgttcatttgcataggagataatcatataggaatcccaaattaataccctcttctggtgacttaccagat

SEQ ID NO: 28182 - DNA, 80 bp, synthetic construct
  source 1..80: mol_type = other DNA
attttaaaataaggtaaattgggctgggcgtggtggctcacgcctgtaatcacagcacttagggaggccgaggcgggcgg

SEQ ID NO: 28183 - DNA, 80 bp, synthetic construct
  source 1..80: mol_type = other DNA
gttgcggtgagcccaaatcacgccattacactccagcctgggcaacaagagcgaagctccgtctcaaaaataaataaaat

SEQ ID NO: 28184 - DNA, 80 bp, synthetic construct; identical to SEQ ID NO: 10950
  source 1..80: mol_type = other DNA

SEQ ID NO: 28185 - DNA, 80 bp, synthetic construct
  source 1..80: mol_type = other DNA
ctgacgctcctctacttccctcttgcgctttctcaatagcacaaatggatccagttcttaagttctccctcccacaaaat

SEQ ID NO: 28186 - DNA, 80 bp, synthetic construct
  source 1..80: mol_type = other DNA
gccacccaggctggagtgcaatggcgcgatctcggctcactgcaacctccgcctcctgggttcaagcgattctcctgcct

SEQ ID NO: 28187 - DNA, 80 bp, synthetic construct; identical to SEQ ID NO: 10951
  source 1..80: mol_type = other DNA

SEQ ID NO: 28188 - DNA, 80 bp, synthetic construct
  source 1..80: mol_type = other DNA
ttcccccgcccgtcccccggagcatcccttgggcccctgtccctttcccggggctcttctaccttaacccagagcagagg

SEQ ID NO: 28189 - DNA, 80 bp, synthetic construct
  source 1..80: mol_type = other DNA
gcaaacaagccaggccaaaaagtttcaatatttacactggctgctttaataagggcattgatcttatcctccgtaaaggt

SEQ ID NO: 28190 - DNA, 80 bp, synthetic construct
  source 1..80: mol_type = other DNA
tgagggtctcaccccaacgcggccttagcttcctcggaaggaccgaacaccttggcggcagccgaggaaaggggttccac

SEQ ID NO: 28191 - DNA, 80 bp, synthetic construct
  source 1..80: mol_type = other DNA
ttgccagtgtcacaggcctggagattttaatgtcctgcaggtgggagtggccctaggccagacaggcactgaccaggcct

SEQ ID NO: 28192 - DNA, 80 bp, synthetic construct
  source 1..80: mol_type = other DNA
tagcccttctccaccccagcaacttccccacccccattggtcatgccagctctaagcccatgctgatgctgtgtgggcat

SEQ ID NO: 28193 - DNA, 80 bp, synthetic construct
  source 1..80: mol_type = other DNA
ttcagtagctctgttgccatgatctccacttcctctggttccatttggcaggcatctgccagggcctggcctgttgccat

SEQ ID NO: 28194 - DNA, 80 bp, synthetic construct
  source 1..80: mol_type = other DNA
ctcaatgcagccactgctgtgacccagcccctggctcaccttttggatcagcagggctgtagctggtgctgagcacctgg

SEQ ID NO: 28195 - DNA, 80 bp, synthetic construct; identical to SEQ ID NO: 10952
  source 1..80: mol_type = other DNA

SEQ ID NO: 28196 - DNA, 80 bp, synthetic construct
  source 1..80: mol_type = other DNA
gcagtcccttcagcatctccacacagggtttgctgtggggtcctgtatgcaagaaggggcaaggataagaggggctgctg

SEQ ID NO: 28197 - DNA, 80 bp, synthetic construct
  source 1..80: mol_type = other DNA
ccaatcaactccaggccaggcagggctgccccaactttactggccctggtcgctgttcttgaaggtttgggagaggggat

SEQ ID NO: 28198 - DNA, 80 bp, synthetic construct; identical to SEQ ID NO: 10953
  source 1..80: mol_type = other DNA

SEQ ID NO: 28199 - DNA, 80 bp, synthetic construct
  source 1..80: mol_type = other DNA
tgccctgcttcccccctggacaagtagctggtcctgatggttttcccattccagggcccagatgactgccattgtaacag

SEQ ID NO: 28200 - DNA, 80 bp, synthetic construct
  source 1..80: mol_type = other DNA
tctctgtctcttctgggaactccctttcatagtggacactgaaatggaagcaaggctgggtgaaccagagaaggctgcta

SEQ ID NO: 28201 - DNA, 80 bp, synthetic construct
  source 1..80: mol_type = other DNA
ctgactccactcctttgctcagttgctccctctaccctttctacattctgttcatcttccaaggcccagctgcagcctcc

SEQ ID NO: 28202 - DNA, 80 bp, synthetic construct; identical to SEQ ID NO: 10954
  source 1..80: mol_type = other DNA

SEQ ID NO: 28203 - DNA, 80 bp, synthetic construct
  source 1..80: mol_type = other DNA
tttcaggcatgcgccaccacacctgactaattttttgtgtgtttttagtagagacacggtttctccatgttggccaggca

SEQ ID NO: 28204 - DNA, 80 bp, synthetic construct
  source 1..80: mol_type = other DNA
cccagggctgatgcttctgtatttccacgttaccttgcaccatggtgacccaaaaaggtacatgcacccttcaaggcttg

SEQ ID NO: 28205 - DNA, 80 bp, synthetic construct
  source 1..80: mol_type = other DNA
gaagctttgcctgagcctagcccctaagttatgattgctgagaagttctccccctcatcctgctgttttttatgacactt

SEQ ID NO: 28206 - DNA, 80 bp, synthetic construct; identical to SEQ ID NO: 10955
  source 1..80: mol_type = other DNA

SEQ ID NO: 28207 - DNA, 80 bp, synthetic construct
  source 1..80: mol_type = other DNA
gattggggcacaaaggcaagcaaaagacaccctacaaatttggggtaccctcttccaatccaacctggaacctgctgaca

SEQ ID NO: 28208 - DNA, 80 bp, synthetic construct
  source 1..80: mol_type = other DNA
tcctccaagaagacaggtgactccatctcttccatctctatctcagcaaactggaggggtctctgattggccatgacggg

SEQ ID NO: 28209 - DNA, 80 bp, synthetic construct
  source 1..80: mol_type = other DNA
ggagacaaatcttataaggccaaaggaggatggactgagtggtgagatcaaaagaagaaaattcccacccttagaaagtt

SEQ ID NO: 28210 - DNA, 80 bp, synthetic construct; identical to SEQ ID NO: 10956
  source 1..80: mol_type = other DNA

SEQ ID NO: 28211 - DNA, 80 bp, synthetic construct
  source 1..80: mol_type = other DNA
atgtgggaaagagtgtgttgcatttgacacctctagtagatcaggtcattgattctgagtcccaggagaggtgggtggtg

SEQ ID NO: 28212 - DNA, 80 bp, synthetic construct
  source 1..80: mol_type = other DNA
agcctccaccatggctctctccagctcctcctcagcagccaggtctcctgagaccgtgcgacagatctcgggggctgcct

SEQ ID NO: 28213 - DNA, 80 bp, synthetic construct
  source 1..80: mol_type = other DNA
cctctgcttcccgggttcaagtgattctcctgcctcagcctcctgagtagctgggattataggcatgtgccaccactccc

SEQ ID NO: 28214 - DNA, 80 bp, synthetic construct; identical to SEQ ID NO: 10957
  source 1..80: mol_type = other DNA

SEQ ID NO: 28215 - DNA, 80 bp, synthetic construct
  source 1..80: mol_type = other DNA
ggttgagaagtgttcttactcagtacagtcttctagattggtgatctttattgattggatatgtcatatatatatagttg

SEQ ID NO: 28216 - DNA, 80 bp, synthetic construct
  source 1..80: mol_type = other DNA
aagtgtcaagatcgtgtcaaggaaagactgatgaactcttccagatggaagagatgaaagagataaggcaactcaatgca

SEQ ID NO: 28217 - DNA, 80 bp, synthetic construct
  source 1..80: mol_type = other DNA
atcacttgaggtcaggagtttgagaccagtctggccagcatagcgaaaccccatctctactaaaaatacaaaaagtagcc

SEQ ID NO: 28218 - DNA, 80 bp, synthetic construct; identical to SEQ ID NO: 10958
  source 1..80: mol_type = other DNA

SEQ ID NO: 28219 - DNA, 80 bp, synthetic construct
  source 1..80: mol_type = other DNA
taaaaatagccattgaaataaatttttgagcacagctcaaatgcatgtgtatttgggggttttataaattatgtgcatta

SEQ ID NO: 28220 - DNA, 80 bp, synthetic construct
  source 1..80: mol_type = other DNA
agtgcagtggtgcaatctcacctcactgcaacctctgcctcccaggttccagtgatgctcccgcctcaacctcccaaata

SEQ ID NO: 28221 - DNA, 80 bp, synthetic construct; identical to SEQ ID NO: 10959
  source 1..80: mol_type = other DNA

SEQ ID NO: 28222 - DNA, 80 bp, synthetic construct
  source 1..80: mol_type = other DNA
gctgggcacatgccgccacacctgactaatttttgtatttttggtagagatggggtttcgccgtgttggccaggctggtc

SEQ ID NO: 28223 - DNA, 80 bp, synthetic construct
  source 1..80: mol_type = other DNA
agcgccctggttctttttttgaggttgaaacatcttcaatcatggactacccagaactgtcttgacattttttcactctt

SEQ ID NO: 28224 - DNA, 80 bp, synthetic construct
  source 1..80: mol_type = other DNA
taatactcctcttggcgtttcatgaacttccggaagtgctcctggatgaggaatgtggcgtagaacttccccactgtcac

SEQ ID NO: 28225 - DNA, 80 bp, synthetic construct
  source 1..80: mol_type = other DNA
gcccgtgggatctacctaaggcatttatggaggatctggtccgttctcagattcccatggggctccttggagaagctccc

SEQ ID NO: 28226 - DNA, 80 bp, synthetic construct; identical to SEQ ID NO: 10960
  source 1..80: mol_type = other DNA

SEQ ID NO: 28227 - DNA, 80 bp, synthetic construct
  source 1..80: mol_type = other DNA
ggttttacaggctgtcatctcctgctcttcttccaaaatctttcaattccccaggcactgtggtctggcccaaatacccc

SEQ ID NO: 28228 - DNA, 80 bp, synthetic construct
  source 1..80: mol_type = other DNA
gatggacctgatacagctggagacttgagcttgatacagtgtgagccctgagcaagggctcagagacaatactgagaccc

SEQ ID NO: 28229 - DNA, 80 bp, synthetic construct
  source 1..80: mol_type = other DNA
ccctgtgccagcactggcccttctctggcccccagacacagctgaggagtgtgggaacagacccttgatgatctttgccc

SEQ ID NO: 28230 - DNA, 80 bp, synthetic construct; identical to SEQ ID NO: 10961
  source 1..80: mol_type = other DNA

SEQ ID NO: 28231 - DNA, 80 bp, synthetic construct
  source 1..80: mol_type = other DNA
ggggtgtcagctgaccaggacatcctttgtgaggggacagaatgatgagttgggtgacattgctgagacttcaggccctt

SEQ ID NO: 28232 - DNA, 80 bp, synthetic construct
  source 1..80: mol_type = other DNA
tcccaaagcccagagggggctgaatccttctcagcagggtcaccacgtccaggtgtttgattctccccctgcgggaggac

SEQ ID NO: 28233 - DNA, 80 bp, synthetic construct; identical to SEQ ID NO: 10962
  source 1..80: mol_type = other DNA

SEQ ID NO: 28234 - DNA, 80 bp, synthetic construct
  source 1..80: mol_type = other DNA
ttttcattggcaccgtgactcccagaatagacataaaacagaacaaccagggaggtcagatcaaaagacaagcatggcaa

SEQ ID NO: 28235 - DNA, 80 bp, synthetic construct
  source 1..80: mol_type = other DNA
tttggctcctgctgatggaggcactttaaagcacggttgctataggcaccaaacagacctgcactgtatcttggcaccat

SEQ ID NO: 28236 - DNA, 80 bp, synthetic construct
  source 1..80: mol_type = other DNA
ctcaggttcagagcaatgcaagagttagattcagtcagcctgggaggggcctgcgactctgcattttaatcaagctcagc

SEQ ID NO: 28237 - DNA, 80 bp, synthetic construct
  source 1..80: mol_type = other DNA
ctggagatactctgattctctgatctgagacctcagataaatgaagggggaaggagaagcccactcatactgaataaact

SEQ ID NO: 28238 - DNA, 80 bp, synthetic construct
  source 1..80: mol_type = other DNA
gtagtcaaaattgtccatgatgacagccacaaagaggttgatgacctgcaagagaagaaccaaggggtcccaacacagaa

SEQ ID NO: 28239 - DNA, 80 bp, synthetic construct; identical to SEQ ID NO: 10963
  source 1..80: mol_type = other DNA

SEQ ID NO: 28240 - DNA, 80 bp, synthetic construct
  source 1..80: mol_type = other DNA
tctccctgccccgcaggccctcagcatctcaccaggaaggcacagagcatgtagaagctgatgaagtagtagtatgcaaa

SEQ ID NO: 28241 - DNA, 80 bp, synthetic construct
  source 1..80: mol_type = other DNA
cagaagaggctcctgtcacctatctgctcctgcctggcccctcagaaggctggcagtcaggtggcagcagggtgtggaca

SEQ ID NO: 28242 - DNA, 80 bp, synthetic construct; identical to SEQ ID NO: 10964
  source 1..80: mol_type = other DNA

SEQ ID NO: 28243 - DNA, 80 bp, synthetic construct
  source 1..80: mol_type = other DNA
ctgttgaatgaagaatctcaatgcatccgaggtgcatatgcatgacatgtttgcatttttccagtaactgctacaacctg

SEQ ID NO: 28244 - DNA, 80 bp, synthetic construct
  source 1..80: mol_type = other DNA
ggtttggagttgaggtgcagagctggggcgaggtgggaatctctgcctgcacacggtgaggtgccggtctccttttcaca

SEQ ID NO: 28245 - DNA, 80 bp, synthetic construct
  source 1..80: mol_type = other DNA
cagcaggcctgcagcccaggatcctcggttgcaatccaagctctagctcctgtgccctggccaagcataggcccctgcgc

SEQ ID NO: 28246 - DNA, 80 bp, synthetic construct; identical to SEQ ID NO: 10965
  source 1..80: mol_type = other DNA

SEQ ID NO: 28247 - DNA, 80 bp, synthetic construct
  source 1..80: mol_type = other DNA
cgtgcctgaagagcagtagcacagcttgtgggaaggtctggaagttgttgttccggtttatttgggtcccatccaccaag

SEQ ID NO: 28248 - DNA, 80 bp, synthetic construct
  source 1..80: mol_type = other DNA
agccaaaaaaaacgggattattttctagatcaggtaaagttcttcttagcaagccaaagaaaagagggagggtagacccg

SEQ ID NO: 28249 - DNA, 80 bp, synthetic construct
  source 1..80: mol_type = other DNA
gcatctgacactccagccatccacgatcagggaggttgtccctccttctttctcacgagcaaggcagggagggcggaggg

SEQ ID NO: 28250 - DNA, 80 bp, synthetic construct
  source 1..80: mol_type = other DNA
ggcctgcagggcgggcgggagcgccagtcagtgtcttagggctccactgtgtgtctgcagccctgccctctgttagctcc

SEQ ID NO: 28251 - DNA, 80 bp, synthetic construct; identical to SEQ ID NO: 10966
  source 1..80: mol_type = other DNA

SEQ ID NO: 28252 - DNA, 80 bp, synthetic construct
  source 1..80: mol_type = other DNA
ttgggcacagggctctggggctgttcagctgggaggcagggaagaggacgtggggcaccaggcagcgtggtgaagcccac

SEQ ID NO: 28253 - DNA, 80 bp, synthetic construct
  source 1..80: mol_type = other DNA
tgcaaagatttcccaaagcttggctgctctattgccacaaactcaatgtggctactccccatcactcccaccctgcacac

SEQ ID NO: 28254 - DNA, 80 bp, synthetic construct; identical to SEQ ID NO: 10967
  source 1..80: mol_type = other DNA

SEQ ID NO: 28255 - DNA, 80 bp, synthetic construct
  source 1..80: mol_type = other DNA
caggcccatgcatgcaagtggcagggcaggagctggtgagcgtgccaggcaggctcgtgcagcctgaaattacaacgttc

SEQ ID NO: 28256 - DNA, 80 bp, synthetic construct
  source 1..80: mol_type = other DNA
gaagagacgtgtcagaaaggacagacacacagaagagttaaagagaaaaagaggcaggggctaaagaccccacatggctg

SEQ ID NO: 28257 - DNA, 80 bp, synthetic construct
  source 1..80: mol_type = other DNA
tttcttatgtgtttgggttatgtgatgctggggacgtccctaatgaaggcgcattggaagatgcctgctcattgtaaatg

SEQ ID NO: 28258 - DNA, 80 bp, synthetic construct
  source 1..80: mol_type = other DNA
tcttgaagagcaggtgggtaggtgtgtgggagcaatttcttcctgtttactcccttgggccacacttcatgagaagccct

SEQ ID NO: 28259 - DNA, 80 bp, synthetic construct; identical to SEQ ID NO: 10968
  source 1..80: mol_type = other DNA

SEQ ID NO: 28260 - DNA, 80 bp, synthetic construct
  source 1..80: mol_type = other DNA
aattacaatgaaaattgaataaaaccagaaatttggttcctcagttcctctagccacctttccagtgacaagtagacatg

SEQ ID NO: 28261 - DNA, 80 bp, synthetic construct
  source 1..80: mol_type = other DNA
caccaccaaagacactgttttgatatatccaggcttccgctacacagacctcagattttaagaagtaactatttttagtt

SEQ ID NO: 28262 - DNA, 80 bp, synthetic construct
  source 1..80: mol_type = other DNA
cacacacacacacacacacacacacacacacacactggttttgctcagagcccaccctgcccctcgctagctcagcgccc

SEQ ID NO: 28263 - DNA, 80 bp, synthetic construct; identical to SEQ ID NO: 10969
  source 1..80: mol_type = other DNA

SEQ ID NO: 28264 - DNA, 80 bp, synthetic construct
  source 1..80: mol_type = other DNA
gcccttgggtgacatcccaccatggctcagaaagaagaatgctcatctttctctcttttccactgtgtccctcccaggat

SEQ ID NO: 28265 - DNA, 80 bp, synthetic construct
  source 1..80: mol_type = other DNA
tccctgctcctttcatccccttcataaggcaggtcctgctgctgtttctcattccacctccaaaccctcatccccttggt

SEQ ID NO: 28266 - DNA, 80 bp, synthetic construct; identical to SEQ ID NO: 10970
  source 1..80: mol_type = other DNA

SEQ ID NO: 28267 - DNA, 80 bp, synthetic construct
  source 1..80: mol_type = other DNA
caagggcctcctgctcttcctcaaactcagcaagcaccatcctgctgcagggcctttgcactgctgtcgtgttctgccaa

SEQ ID NO: 28268 - DNA, 80 bp, synthetic construct
  source 1..80: mol_type = other DNA
gagattgatttatttattgccagtttgttccacaattttgttcactgctgtatctcaggcagcaagaatcatgcctggca

SEQ ID NO: 28269 - DNA, 80 bp, synthetic construct
  source 1..80: mol_type = other DNA
agcactttgggaggctgaggcaggtggatcacttgagcccaggacttggagaccagcctgggcaacacgaggagactcca

SEQ ID NO: 28270 - DNA, 80 bp, synthetic construct
  source 1..80: mol_type = other DNA
tctgcatgttcttatgcttccaataaactggaccactcagcatgccctgaaccttctttgcatttcctgcgctgtgcctc

SEQ ID NO: 28271 - DNA, 80 bp, synthetic construct; identical to SEQ ID NO: 10971
  source 1..80: mol_type = other DNA

SEQ ID NO: 28272 - DNA, 80 bp, synthetic construct
  source 1..80: mol_type = other DNA
cctgcctgatactcacgtcgatctcactgaggatgacatcaatgatgctgccaatgacaatcaggaagtcaaacacattc

SEQ ID NO: 28273 - DNA, 80 bp, synthetic construct
  source 1..80: mol_type = other DNA
ccactggtgctccagtgggctcccccaactccaacactcctctcccctttgctctttagttcccttcctccagagcagaa

SEQ ID NO: 28274 - DNA, 80 bp, synthetic construct; identical to SEQ ID NO: 10972
  source 1..80: mol_type = other DNA

SEQ ID NO: 28275 - DNA, 80 bp, synthetic construct
  source 1..80: mol_type = other DNA
ggccttgaaggccatgagcttgaggatcatctccagggtgaagatgatagtgaaggccacattgaggatgtctgagatgt

SEQ ID NO: 28276 - DNA, 80 bp, synthetic construct
  source 1..80: mol_type = other DNA
agctcagaaaactagaagctgctttagcaatcccctgagttccgccaaattttatgaacaccctccccctaccccaccac

SEQ ID NO: 28277 - DNA, 80 bp, synthetic construct
  source 1..80: mol_type = other DNA
ttagtcatttgggtacaggactgggaaagaagacccctggattccatagtccatgttatcactggctactagtgggaaac

SEQ ID NO: 28278 - DNA, 80 bp, synthetic construct; identical to SEQ ID NO: 10973
  source 1..80: mol_type = other DNA

SEQ ID NO: 28279 - DNA, 80 bp, synthetic construct
  source 1..80: mol_type = other DNA
cctagttacaccatcctatttatacagggcttaaggaatcagatgcttaatcgaggcttgataacgatgctgctaattat

SEQ ID NO: 28280 - DNA, 80 bp, synthetic construct
  source 1..80: mol_type = other DNA
ctttctcctccttctgtggtagctatctcctgtttgcagaattaccgtactatttttatgcttgaattacctccttaata

SEQ ID NO: 28281 - DNA, 80 bp, synthetic construct; identical to SEQ ID NO: 10974
  source 1..80: mol_type = other DNA

SEQ ID NO: 28282 - DNA, 80 bp, synthetic construct
  source 1..80: mol_type = other DNA
acacccacatccatgggattgacgggcaagtcaggagcagctgtggccaggggctgtggctgaggactgtgaactgttta

SEQ ID NO: 28283 - DNA, 80 bp, synthetic construct
  source 1..80: mol_type = other DNA
caagaagacccactctaccaacttgtattgcttcagtttggagatagggtagggtgcatggaggctagggcttggcatca

SEQ ID NO: 28284 - DNA, 80 bp, synthetic construct
  source 1..80: mol_type = other DNA
ctcctggaaggtgacaatgacgaagcccacaaagatgttcatcatgaagaaggcaatgaggatgatgtagatgatgaaga

SEQ ID NO: 28285 - DNA, 80 bp, synthetic construct; identical to SEQ ID NO: 10975
  source 1..80: mol_type = other DNA

SEQ ID NO: 28286 - DNA, 80 bp, synthetic construct
  source 1..80: mol_type = other DNA
caacataccatcaaaccatcagagagttggtgggtttgttggacgcctgccacaggtagcagtagcaccgtgggggctgc

SEQ ID NO: 28287 - DNA, 80 bp, synthetic construct
  source 1..80: mol_type = other DNA
cgcggtgacgcagctctatctgcatggggtccccgtccttgtacacgtagtagtagcccctgtggcagggaggcccagtc

SEQ ID NO: 28288 - DNA, 80 bp, synthetic construct
  source 1..80: mol_type = other DNA
aaggctgagcttccccagtttccagcttgaagggccgtcatccaccaacacacagtcccctgccctgtgatcgtcctgcc

SEQ ID NO: 28289 - DNA, 80 bp, synthetic construct; identical to SEQ ID NO: 10976
  source 1..80: mol_type = other DNA

SEQ ID NO: 28290 - DNA, 80 bp, synthetic construct
  source 1..80: mol_type = other DNA
agcctagatgctgccaagaccgagaaggcagtgcctcagaggggcatttactgagtgccccctgatgggctgaggggatg

SEQ ID NO: 28291 - DNA, 80 bp, synthetic construct
  source 1..80: mol_type = other DNA
gagcagcagagttggagcccagctgggctctgatgactcaacttgtctcagagtcaagcggggtcccatgtcccagccca

SEQ ID NO: 28292 - DNA, 80 bp, synthetic construct
  source 1..80: mol_type = other DNA
ccttttatctgtgtctcagattgggtccctgagcaacatgtttgaaggaaagtagtggatggctaggtcttttttttttt

SEQ ID NO: 28293 - DNA, 80 bp, synthetic construct
  source 1..80: mol_type = other DNA
ggtatgtgccatcatgcccagctaatttttgtatttttagtgagaaggggtttcaccatgttggtcaggctggttttgaa

SEQ ID NO: 28294 - DNA, 80 bp, synthetic construct; identical to SEQ ID NO: 10977
  source 1..80: mol_type = other DNA

SEQ ID NO: 28295 - DNA, 80 bp, synthetic construct
  source 1..80: mol_type = other DNA
acaccaaatgcccagtttactatggaaagcaaagcttgactctgctataatgtggaatgcacgtggtgtttccacagagt

SEQ ID NO: 28296 - DNA, 80 bp, synthetic construct
  source 1..80: mol_type = other DNA
ttgctcttgcttgtctggaagggacgtggaagccaaagggagggcagcggctcattcattccttcagggagcgtgtctgg

SEQ ID NO: 28297 - DNA, 80 bp, synthetic construct
  source 1..80: mol_type = other DNA
gcacgcagctggcagagtggccagacacaataaacactcccatccctcccgtccctccaggacagggaccaacaagacct

SEQ ID NO: 28298 - DNA, 80 bp, synthetic construct; identical to SEQ ID NO: 10978
  source 1..80: mol_type = other DNA

SEQ ID NO: 28299 - DNA, 80 bp, synthetic construct
  source 1..80: mol_type = other DNA
tgagggacatctttgtagggctaattcctagagaggaactgaatagctgtgttctcctaggaaaatgagaaaagtataag

SEQ ID NO: 28300 - DNA, 80 bp, synthetic construct
  source 1..80: mol_type = other DNA
ctggcaggatgggaggaagcgggcaagggtgggaagggagaagaatggctgtggggccctgggaggaggggcctccctcc

SEQ ID NO: 28301 - DNA, 80 bp, synthetic construct
  source 1..80: mol_type = other DNA
tttgagtctcaataatgtgttgtgttgcttgtgtatttaatttttaaaagagcttaagatagttgctgtcaggttttcat

SEQ ID NO: 28302 - DNA, 80 bp, synthetic construct; identical to SEQ ID NO: 10979
  source 1..80: mol_type = other DNA

SEQ ID NO: 28303 - DNA, 80 bp, synthetic construct
  source 1..80: mol_type = other DNA
tattctcatatggaaatctgtgcattcgaagacatctgttttcacaatgtggggctccttgtgcttgagagtgggcacca

SEQ ID NO: 28304 - DNA, 80 bp, synthetic construct
  source 1..80: mol_type = other DNA
acagaggggccaatggggactgggggtgcacccacagtaaccctgctagcccagttgaggaaaccccaggagtgcaagac

SEQ ID NO: 28305 - DNA, 80 bp, synthetic construct
  source 1..80: mol_type = other DNA
attcctctctggggctcctgcccgggccctctctcaccttcaaccccttggctctgttgatggctctgagtggtcggagc

SEQ ID NO: 28306 - DNA, 80 bp, synthetic construct; identical to SEQ ID NO: 10980
  source 1..80: mol_type = other DNA

SEQ ID NO: 28307 - DNA, 80 bp, synthetic construct
  source 1..80: mol_type = other DNA
gtcggggagggagggaccacttcctcctctctgcatctcctgccagtctctagaacagagcgctgcccacttcactggtg

SEQ ID NO: 28308 - DNA, 80 bp, synthetic construct
  source 1..80: mol_type = other DNA
cttgccgctgctcactcaagtcccatggagatgagggacacggccaccaccagcaggtccagcatgttgaagtaattgcg

SEQ ID NO: 28309 - DNA, 80 bp, synthetic construct; identical to SEQ ID NO: 10981
  source 1..80: mol_type = other DNA

SEQ ID NO: 28310 - DNA, 80 bp, synthetic construct
  source 1..80: mol_type = other DNA
ataaaacttctccttcctggaaagcttcttgggcaatcccctctgccttgtggtttgctaagtcaggctgaacaagccct

SEQ ID NO: 28311 - DNA, 80 bp, synthetic construct
  source 1..80: mol_type = other DNA
acaaatgcattttgcccttaaaatcgaacagggttgaaacctttcccagcattcagggacctatatgattttgtcttaat

SEQ ID NO: 28312 - DNA, 80 bp, synthetic construct
  source 1..80: mol_type = other DNA
caatgtccccagatctccttataatgcacttgctactgtctgtcctaggccgccctagctatctctacccagtgaaggcc

SEQ ID NO: 28313 - DNA, 80 bp, synthetic construct
  source 1..80: mol_type = other DNA
gggctcggctagcttctcctctcttagtttgtgaatgtgcacgcgggggctactgggtttcagttatagatgggttctcc

SEQ ID NO: 28314 - DNA, 80 bp, synthetic construct; identical to SEQ ID NO: 10982
  source 1..80: mol_type = other DNA

SEQ ID NO: 28315 - DNA, 80 bp, synthetic construct
  source 1..80: mol_type = other DNA
gccgccatgcctgcctaatttttgtacttttagtagagacagggtttcatcatgttggccaggctggtctgaaactcttg

SEQ ID NO: 28316 - DNA, 80 bp, synthetic construct
  source 1..80: mol_type = other DNA
ggaggctgaggtgggcggatcacaaggtcagcatatcaagaccatcccagccaacatggtgaaaccctgtctctgttaaa

SEQ ID NO: 28317 - DNA, 80 bp, synthetic construct; identical to SEQ ID NO: 10983
  source 1..80: mol_type = other DNA

SEQ ID NO: 28318 - DNA, 80 bp, synthetic construct
  source 1..80: mol_type = other DNA
gggctgccccacagccttcactcaccttgaggacaatctccacagtgaagacagaggtgaacccgatgtcaaagtgttta

SEQ ID NO: 28319 - DNA, 80 bp, synthetic construct
  source 1..80: mol_type = other DNA
ctgaactctaagaaactctgatgcttgtagccacatagaggatacagctgaaccctgggcaccagactgaggctggaggg

SEQ ID NO: 28320 - DNA, 80 bp, synthetic construct
  source 1..80: mol_type = other DNA
cctgcggacgaacatggaatacacctcctgctcctccctggccaggagagaagtgcagccctgcacctgcagggtcctct

SEQ ID NO: 28321 - DNA, 80 bp, synthetic construct; identical to SEQ ID NO: 10984
  source 1..80: mol_type = other DNA

SEQ ID NO: 28322 - DNA, 80 bp, synthetic construct
  source 1..80: mol_type = other DNA
aaacactgagtttctcatagtataactgtaggcatggagagtcagacagggttttttctagggcagggaagcagatgaga

SEQ ID NO: 28323 - DNA, 80 bp, synthetic construct
  source 1..80: mol_type = other DNA
tcctcgtcatcccctgtggggagagagagaggaattaggggtgtcttcccatgctttgctatgcccatggcttctgtgct

SEQ ID NO: 28324 - DNA, 80 bp, synthetic construct
  source 1..80: mol_type = other DNA
aagtggggcaaggagcaagcccaagtaactttgtggctgcatgttgtgtctcaaggctcgatccacacagcctcaaatat

SEQ ID NO: 28325 - DNA, 80 bp, synthetic construct; identical to SEQ ID NO: 10985
  source 1..80: mol_type = other DNA

SEQ ID NO: 28326 - DNA, 80 bp, synthetic construct
  source 1..80: mol_type = other DNA
cattccaagcacattcactgagtctcatgacctcaagaggaagctgagtacccgaaatcctcagctcccagggtgggaga

SEQ ID NO: 28327 - DNA, 80 bp, synthetic construct
  source 1..80: mol_type = other DNA
ggggttctcaaatccaccaagtcacattccaatttttctgttcccccgagaagctagaactcttattccttggaatgagt

SEQ ID NO: 28328 - DNA, 80 bp, synthetic construct; identical to SEQ ID NO: 10986
  source 1..80: mol_type = other DNA

SEQ ID NO: 28329 - DNA, 80 bp, synthetic construct
  source 1..80: mol_type = other DNA
gtcactgccatctaagaggtgataactgttagatgaaacaactcaaaatgagttattctaaaacacaaatattcattgct

SEQ ID NO: 28330 - DNA, 80 bp, synthetic construct
  source 1..80: mol_type = other DNA
gcttagagtcactggggcaaacagatgctaatcagctgattccataagtagacatacaagtagctgatcagctgatggga

SEQ ID NO: 28331 - DNA, 80 bp, synthetic construct
  source 1..80: mol_type = other DNA
tgtcctcttcttggtccagataaatgggatttctgcagcagtcactggctatttgcatttatgagatgtttgtggtttat

SEQ ID NO: 28332 - DNA, 80 bp, synthetic construct; identical to SEQ ID NO: 10987
  source 1..80: mol_type = other DNA

SEQ ID NO: 28333 - DNA, 80 bp, synthetic construct
  source 1..80: mol_type = other DNA
agatggcttatttgcacagaagggatgtctccggtgttctgatctccacatggaggggtacaggtagggacacacaagag

SEQ ID NO: 28334 - DNA, 80 bp, synthetic construct
  source 1..80: mol_type = other DNA
aaggaacacaatgactataacaatgaaaaagaagttgcggtttcccctcaatgagcatatactggagagcctgttagcgt

SEQ ID NO: 28335 - DNA, 80 bp, synthetic construct; identical to SEQ ID NO: 10988
  source 1..80: mol_type = other DNA

SEQ ID NO: 28336 - DNA, 80 bp, synthetic construct
  source 1..80: mol_type = other DNA
tggctctccctccagtcgtacgcagggagatgccctcacctggctgataactctcctacctccccaccctaccccacctg

SEQ ID NO: 28337 - DNA, 80 bp, synthetic construct
  source 1..80: mol_type = other DNA
ctgggagacccctgagttagaaaacccaaagtggaagccaaaccagaaagttctcagggatctgctgaacctgacaacac

SEQ ID NO: 28338 - DNA, 80 bp, synthetic construct
  source 1..80: mol_type = other DNA
ccatgtttaacgttggttgatagtgaatgggtggagtgtggctttgtactgggtttatacgagattcatagagtggaagc

SEQ ID NO: 28339 - DNA, 80 bp, synthetic construct
  source 1..80: mol_type = other DNA
aatcctccaaccagcagcatgggcaccaccggggagcctgttcgatgtagaactccaaccccgcccagaggcatagcgac

SEQ ID NO: 28340 - DNA, 80 bp, synthetic construct; identical to SEQ ID NO: 10989
  source 1..80: mol_type = other DNA

SEQ ID NO: 28341 - DNA, 80 bp, synthetic construct
  source 1..80: mol_type = other DNA
aatggccaggaagacattgagcaggatgtctgagcgggtttagctaaggagcctttggttgtaggtggaagggagcctgc

SEQ ID NO: 28342 - DNA, 80 bp, synthetic construct
  source 1..80: mol_type = other DNA
gagagtacccaggaaggagcctgaatcctgtggccttgaatcccatccgtttcctgtccagactggtcccagctcccaca

SEQ ID NO: 28343 - DNA, 80 bp, synthetic construct
  source 1..80: mol_type = other DNA
ccatccaccttaccctcatatctgctcctctcatctctcagcctgttctggctccgtccttctggtcccagcgctcagac

SEQ ID NO: 28344 - DNA, 80 bp, synthetic construct; identical to SEQ ID NO: 10990
  source 1..80: mol_type = other DNA

SEQ ID NO: 28345 - DNA, 80 bp, synthetic construct
  source 1..80: mol_type = other DNA
aggatgatgaagtaaatgcacacaagcatgccagggtaggacggcccgccgtaggccatgatcccattgtacatcattga

SEQ ID NO: 28346 - DNA, 80 bp, synthetic construct
  source 1..80: mol_type = other DNA
ggccagcccctgctatccccaaaacccctattccagctggggaatagtggctcacgcctgttacttatcactttgggagg

SEQ ID NO: 28347 - DNA, 80 bp, synthetic construct; identical to SEQ ID NO: 10991
  source 1..80: mol_type = other DNA

SEQ ID NO: 28348 - DNA, 80 bp, synthetic construct
  source 1..80: mol_type = other DNA
gacgatcacacactgcctttctcactggtacaaaagggaggtgtcactcatgaaatatgggccactccagagaggaatgt

SEQ ID NO: 28349 - DNA, 80 bp, synthetic construct
  source 1..80: mol_type = other DNA
tcgggagaaaaagctccccttatctgactttgccctgagacctgagtggcacatgaaagcacgcatccggactcccaggc

SEQ ID NO: 28350 - DNA, 80 bp, synthetic construct
  source 1..80: mol_type = other DNA
gacattgcactcaaccagcagatcagacaaggcttcctggagaaggtgatgcccaccttgatcttgaaggacaagaagca

SEQ ID NO: 28351 - DNA, 80 bp, synthetic construct
  source 1..80: mol_type = other DNA
atgacgatgaagaggaagagcagcagcagcagggaggcgatggagcggatggagttgagcagggatgccaccaggttgct

SEQ ID NO: 28352 - DNA, 80 bp, synthetic construct; identical to SEQ ID NO: 10992
  source 1..80: mol_type = other DNA

SEQ ID NO: 28353 - DNA, 80 bp, synthetic construct
  source 1..80: mol_type = other DNA
tgcaagcagatgaacctctctccacttccctcaccacctcacaaaggccctgatagtctgtgttcctccttctttcttat

SEQ ID NO: 28354 - DNA, 80 bp, synthetic construct
  source 1..80: mol_type = other DNA
aaaaaaaacagagaaatgagttcaaagtggggaagtgattcttttttcacagaaggaggttatttcaaggagggagggaa

SEQ ID NO: 28355 - DNA, 80 bp, synthetic construct
  source 1..80: mol_type = other DNA
cagcggagcacggagatgcccaggggtgtcatggcacccgactccaccagcaggatctccaggataccgctacacaccac

SEQ ID NO: 28356 - DNA, 80 bp, synthetic construct; identical to SEQ ID NO: 10993
  source 1..80: mol_type = other DNA

SEQ ID NO: 28357 - DNA, 80 bp, synthetic construct
  source 1..80: mol_type = other DNA
ccacatccagctagttttttgtatttttaatagagacagggtttcgtcatgttgcccaggctggtcttgaactcctgggc

SEQ ID NO: 28358 - DNA, 80 bp, synthetic construct
  source 1..80: mol_type = other DNA
acaggaagaggattttattactcttaattctactgaagttcattaagtctgctactctctcattcctatacacctccctc

SEQ ID NO: 28359 - DNA, 80 bp, synthetic construct; identical to SEQ ID NO: 10994
  source 1..80: mol_type = other DNA

SEQ ID NO: 28360 - DNA, 80 bp, synthetic construct
  source 1..80: mol_type = other DNA
ctctactaaaaatacaaaaagtagctgggtgtggtggcatgagcctgtagtcccagctactcgggaggctgaggcaagag

SEQ ID NO: 28361 - DNA, 80 bp, synthetic construct
  source 1..80: mol_type = other DNA
cccattttccctctatcttctatcctagctctctcctccctgtcaccgtcaaactcccgaaagttgtctatattgctctc

SEQ ID NO: 28362 - DNA, 80 bp, synthetic construct
  source 1..80: mol_type = other DNA
gcactgttgaccattctcttgctttttcaagcattctgtccttggtttctgtggtgccacatccttctgggtttcctcta

SEQ ID NO: 28363 - DNA, 80 bp, synthetic construct
  source 1..80: mol_type = other DNA
tttcctcagcaggcttgacctcaaactggggccttgaacattcctaggcactaataaaggtaataggtgttgccccaaac

SEQ ID NO: 28364 - DNA, 80 bp, synthetic construct; identical to SEQ ID NO: 10995
  source 1..80: mol_type = other DNA

SEQ ID NO: 28365 - DNA, 80 bp, synthetic construct
  source 1..80: mol_type = other DNA
gagtcattgaatgcttgatttgagtgatacccttgagtatacactctcccctggagatctggtgttatctaagaccacag

SEQ ID NO: 28366 - DNA, 80 bp, synthetic construct
  source 1..80: mol_type = other DNA
ctgctcatcctcccccactaccccaaatacttggtcattaaccattttctcagtaggtggcactactagccatttatctg

SEQ ID NO: 28367 - DNA, 80 bp, synthetic construct; identical to SEQ ID NO: 10996
  source 1..80: mol_type = other DNA

SEQ ID NO: 28368 - DNA, 80 bp, synthetic construct
  source 1..80: mol_type = other DNA
tccattgattgtacctgatgactctttctcagggtggctctgttccttatttggtttgcagtttttttttgttgttgttt

SEQ ID NO: 28369 - DNA, 80 bp, synthetic construct
  source 1..80: mol_type = other DNA
tactatcttagtttagaatccttggaccatgagaggtagtgtatattggaccccatacctatataaggcactgataggat

SEQ ID NO: 28370 - DNA, 80 bp, synthetic construct
  source 1..80: mol_type = other DNA
acctcatgcaggtccagggccctgtctccagccctgcacaggccttaggaacccagctgctacccattagggtttaggcc

SEQ ID NO: 28371 - DNA, 80 bp, synthetic construct
  source 1..80: mol_type = other DNA
tatgcagcagtgttacttgtttgtagtggggagggcactgagtttgtccaccgtgttgttggaactggtcagtcttttct

SEQ ID NO: 28372 - DNA, 80 bp, synthetic construct; identical to SEQ ID NO: 10997
  source 1..80: mol_type = other DNA

SEQ ID NO: 28373 - DNA, 80 bp, synthetic construct
  source 1..80: mol_type = other DNA
cctcccactctttctctctcttgctcctgctttcgccatgtgacatgcctgccctccctttgccttccatcacgattgta

SEQ ID NO: 28374 - DNA, 80 bp, synthetic construct
  source 1..80: mol_type = other DNA
aggctggagtgcagtggtgcaatctcggctcactgcaatctccaccttccaggttcaagcgattctcctgcctcagcctc

SEQ ID NO: 28375 - DNA, 80 bp, synthetic construct
  source 1..80: mol_type = other DNA
ccaccgcgcccggcctcaggtattttttttatagcaacacaagaatggcctaacacaaggcccccatgagcaaacacatg

SEQ ID NO: 28376 - DNA, 80 bp, synthetic construct; identical to SEQ ID NO: 10998
  source 1..80: mol_type = other DNA

SEQ ID NO: 28377 - DNA, 80 bp, synthetic construct
  source 1..80: mol_type = other DNA
ttgaacttgggtgcttagagttccaaattactagcaattttatgtccagtgatctgtgattggaataatctgcccggaca

SEQ ID NO: 28378 - DNA, 80 bp, synthetic construct
  source 1..80: mol_type = other DNA
taatttttagaaaaatgatgtcaatatctaattgacctcttctgcacaacctgtggtgccattggctgattttgacatca

SEQ ID NO: 28379 - DNA, 80 bp, synthetic construct
  source 1..80: mol_type = other DNA
gatgagaatcaccagccaatagaagaccttggacttcacgatgtcatggcacttccagcgaaagatgcggttccactgcc

SEQ ID NO: 28380 - DNA, 80 bp, synthetic construct; identical to SEQ ID NO: 10999
  source 1..80: mol_type = other DNA

SEQ ID NO: 28381 - DNA, 80 bp, synthetic construct
  source 1..80: mol_type = other DNA
aattaataatatctggggagggtgaggggaaatgagctttgacagtacaatctttttgggatgaattggcagcacttacc

SEQ ID NO: 28382 - DNA, 80 bp, synthetic construct
  source 1..80: mol_type = other DNA
gcaagtctatttctagagttcctttggcagaagtggtcatactcatccacaactgttccctgcagcactgtttgtatcgc

SEQ ID NO: 28383 - DNA, 80 bp, synthetic construct
  source 1..80: mol_type = other DNA
tcctttagtgtgtattatattcatttatttgacaaatatttggcaacacctcatatgtgctaggcactcttctagtccct

SEQ ID NO: 28384 - DNA, 80 bp, synthetic construct; identical to SEQ ID NO: 11000
  source 1..80: mol_type = other DNA

SEQ ID NO: 28385 - DNA, 80 bp, synthetic construct
  source 1..80: mol_type = other DNA
acactttccctcttccctcgcagaggtttccaacatgaatgacctcacccagctctgccctgatcagggtgaagtagcag

SEQ ID NO: 28386 - DNA, 80 bp, synthetic construct
  source 1..80: mol_type = other DNA
ctcagagcaggaactggccctattttcttaaaaaggctgcctttctaaaggattagacaagtgactctgaaaccactgag

SEQ ID NO: 28387 - DNA, 80 bp, synthetic construct; identical to SEQ ID NO: 11001
  source 1..80: mol_type = other DNA

SEQ ID NO: 28388 - DNA, 80 bp, synthetic construct
  source 1..80: mol_type = other DNA
tccaagagctaaagagcccactttatctgcaggggaggcgctatgaggatgggcagcaagtacctttgggaagagctctg

SEQ ID NO: 28389 - DNA, 80 bp, synthetic construct
  source 1..80: mol_type = other DNA
aaaccttctctgaagtcctcaacatccatgacctcgccctgcgtgatccagctcatgtagccccgaaggtcctcatctag

SEQ ID NO: 28390 - DNA, 80 bp, synthetic construct
  source 1..80: mol_type = other DNA
tgtgactggagcgctcctttttctggccccggggtgttgcctggggtccaggtgcccctcaaggtggctgagagacagcc

SEQ ID NO: 28391 - DNA, 80 bp, synthetic construct; identical to SEQ ID NO: 11002
  source 1..80: mol_type = other DNA

SEQ ID NO: 28392 - DNA, 80 bp, synthetic construct
  source 1..80: mol_type = other DNA
accacctgccccgcagggcaggaggaagaagacagcacaggggtagtctctgaggagctgcgcctggcagccaggagggg

SEQ ID NO: 28393 - DNA, 80 bp, synthetic construct
  source 1..80: mol_type = other DNA
aatgtgaaatgcacaaaataaaaccatagcatgacaaagaagccagttacagctaggcttcacttaatgactgggatgcg

SEQ ID NO: 28394 - DNA, 80 bp, synthetic construct
  source 1..80: mol_type = other DNA
tagagaaggtacagtaaagatacaatcttagcgcaccactgttgtggatgcagcccgtcattgactgaaatgtcatcatg

SEQ ID NO: 28395 - DNA, 80 bp, synthetic construct; identical to SEQ ID NO: 11003
  source 1..80: mol_type = other DNA

SEQ ID NO: 28396 - DNA, 80 bp, synthetic construct
  source 1..80: mol_type = other DNA
gcaggactggtctcaaagagaacagctctcattaataatgaccattagtatttagtgcttattttgtgctggactctgtt

SEQ ID NO: 28397 - DNA, 80 bp, synthetic construct
  source 1..80: mol_type = other DNA
taaagctcacacagccaccaagcagtagtgcagggatttaaatgtgggcattctagctccagagtctgtgtgcttaaccg

SEQ ID NO: 28398 - DNA, 80 bp, synthetic construct
  source 1..80: mol_type = other DNA
gaagggctcctgtgtgcctctcctctcttcctgctcaccaggaaggaagcgctcttggcccaactgagatgacagggaac

SEQ ID NO: 28399 - DNA, 80 bp, synthetic construct; identical to SEQ ID NO: 11004
  source 1..80: mol_type = other DNA

SEQ ID NO: 28400 - DNA, 80 bp, synthetic construct
  source 1..80: mol_type = other DNA
gccacgctgggatattgaggggacatttttcctaacctgaggactagtctggaagaacttttccagcctgaggactagga

SEQ ID NO: 28401 - DNA, 80 bp, synthetic construct
  source 1..80: mol_type = other DNA
ctcatagactctatctccagttgatttatttaaagccaagatttttcaaatgaacaacgtctgtgaccccggacaagtca

SEQ ID NO: 28402 - DNA, 80 bp, synthetic construct
  source 1..80: mol_type = other DNA
actaatccttggtatttgcaaagcatttgacagttttacaatccccccacccccacaataggcggcgtcatattgtggtt

SEQ ID NO: 28403 - DNA, 80 bp, synthetic construct
  source 1..80: mol_type = other DNA
tctagctcttaacaaacaccaaataaataatatactccaacaaagaaactcttactggagtgttgactgtgtgccgggca

SEQ ID NO: 28404 - DNA, 80 bp, synthetic construct; identical to SEQ ID NO: 11005
  source 1..80: mol_type = other DNA

SEQ ID NO: 28405 - DNA, 80 bp, synthetic construct
  source 1..80: mol_type = other DNA
acatattgtatcatggggatttccccataggatgctggggcacatacctgggaaccagaaagggacacacatcctgtata

SEQ ID NO: 28406 - DNA, 80 bp, synthetic construct
  source 1..80: mol_type = other DNA
cagtccatccctccatggtaatgcactggtacacggtgagcatggagaagccgaagttgtcgaagtgggtgatgccatgg

SEQ ID NO: 28407 - DNA, 80 bp, synthetic construct
  source 1..80: mol_type = other DNA
agaaggcaaagggaacatcagacaacagtagtaggtggacaacgacaggaggaaaggtgtataagagcaatttaagagaa

SEQ ID NO: 28408 - DNA, 80 bp, synthetic construct; identical to SEQ ID NO: 11006
  source 1..80: mol_type = other DNA

SEQ ID NO: 28409 - DNA, 80 bp, synthetic construct
  source 1..80: mol_type = other DNA
tcacatgttctgacttgagagttctgtctgggaggtgaaattggagaagctccaaaagcactgggctgagctttacaaga

SEQ ID NO: 28410 - DNA, 80 bp, synthetic construct
  source 1..80: mol_type = other DNA
tccttttgtgttcagagattagattggctcatcagaactggaacaccctgccttacccatatttatctatttaccatgta

SEQ ID NO: 28411 - DNA, 80 bp, synthetic construct
  source 1..80: mol_type = other DNA
gttgaaggtgtgatcaaaggtcacctcctatccatcctgataatgcttatgataggatgtagattgtggtggtgatggga

SEQ ID NO: 28412 - DNA, 80 bp, synthetic construct
  source 1..80: mol_type = other DNA
ttattctggtgagttcaatgccagggcttatggaggaggctaagtcccagtgagctgctggcagggtagagcagccagtc

SEQ ID NO: 28413 - DNA, 80 bp, synthetic construct; identical to SEQ ID NO: 11007
  source 1..80: mol_type = other DNA

SEQ ID NO: 28414 - DNA, 80 bp, synthetic construct
  source 1..80: mol_type = other DNA
catgaatatcaacagatcaaaacctatataaacaaaagctctctgaggtcctcagtaatttatatgagagaaaaggggtc

SEQ ID NO: 28415 - DNA, 80 bp, synthetic construct
  source 1..80: mol_type = other DNA
gctcagactaaagctaaaactatgcgacaggaaatgtacacatagaaattcaagcttatcccatgcctatgtctccatct

SEQ ID NO: 28416 - DNA, 80 bp, synthetic construct
  source 1..80: mol_type = other DNA
ccattctcaaggtcaacagatgtgggcggcaatggctgagctccgggctccttcaccaggtagggtggctcccccttctg

SEQ ID NO: 28417 - DNA, 80 bp, synthetic construct; identical to SEQ ID NO: 11008
  source 1..80: mol_type = other DNA

SEQ ID NO: 28418 - DNA, 80 bp, synthetic construct
  source 1..80: mol_type = other DNA
cggaggggtctgagcactcggaaggctctgagggccttgacatccaagccggctcctttgctgctcattggggctgtgtg

SEQ ID NO: 28419 - DNA, 80 bp, synthetic construct
  source 1..80: mol_type = other DNA
acggcaaatacgggtgcatcaactaacaaatgatctgatcatgcttatctggggaatttcacttaaaaggattctgacat

SEQ ID NO: 28420 - DNA, 80 bp, synthetic construct; identical to SEQ ID NO: 11009
  source 1..80: mol_type = other DNA

SEQ ID NO: 28421 - DNA, 80 bp, synthetic construct
  source 1..80: mol_type = other DNA
ctttcctactggcctcctcttcctctcttaatttactcaaatttccattatcctttgaagtctacctcaaattcctttgc

SEQ ID NO: 28422 - DNA, 80 bp, synthetic construct
  source 1..80: mol_type = other DNA
ttctattttctctactgagccaaaagtagcactggatggttagcaggtaaccaacaccatccttacggaactgaaggaca

SEQ ID NO: 28423 - DNA, 80 bp, synthetic construct
  source 1..80: mol_type = other DNA
ttaagtgagagggtacatgtaagcacatattaagtgcttgataaatgctattgttatcattacgtggtagttactcatgg

SEQ ID NO: 28424 - DNA, 80 bp, synthetic construct
  source 1..80: mol_type = other DNA
ccttataagaagaggaactctggacacacaaagagacaccaaggatgcacaggcacagaggagagactgtgtgaacccaa

SEQ ID NO: 28425 - DNA, 80 bp, synthetic construct; identical to SEQ ID NO: 11010
  source 1..80: mol_type = other DNA

SEQ ID NO: 28426 - DNA, 80 bp, synthetic construct
  source 1..80: mol_type = other DNA
ggctgctccatgcagtggttagcacaatgctggagtcccaccccacctctaagatgctggtggtggtggcagtgggcaca

SEQ ID NO: 28427 - DNA, 80 bp, synthetic construct
  source 1..80: mol_type = other DNA
gacaatgaggaagaaatactccagcttctcctgtgggagcaaacgtggtcacagcatgcctctgtgctctctgagtgcac

SEQ ID NO: 28428 - DNA, 80 bp, synthetic construct
  source 1..80: mol_type = other DNA
attccttcactgaggccttttctggccactaagtgtaatgcgagccatctccagcatttcatgttcctctcctctgctta

SEQ ID NO: 28429 - DNA, 80 bp, synthetic construct; identical to SEQ ID NO: 11011
  source 1..80: mol_type = other DNA

SEQ ID NO: 28430 - DNA, 80 bp, synthetic construct
  source 1..80: mol_type = other DNA
ccttaaaggccgtgacactattacgcagggtgagtggagtgtggggtacactgtgtgtggggaacacaggtaagaagctg

SEQ ID NO: 28431 - DNA, 80 bp, synthetic construct
  source 1..80: mol_type = other DNA
ttgtcaggactccaggctgaaactgctctccttgcagccatctgaaccctggcttggcagcttctaagagctctggcctc

SEQ ID NO: 28432 - DNA, 80 bp, synthetic construct
  source 1..80: mol_type = other DNA
gtatatatatacacacacatacagatctatcctgattggtgctctctggagttacacaagggggtctgtacccccacaac

SEQ ID NO: 28433 - DNA, 80 bp, synthetic construct; identical to SEQ ID NO: 11012
  source 1..80: mol_type = other DNA

SEQ ID NO: 28434 - DNA, 80 bp, synthetic construct
  source 1..80: mol_type = other DNA
tccccttcttccagaaaatggtaatgtgatgattaaaatgcaaagccatgccattctgtgaaagggcctgttgatggaga

SEQ ID NO: 28435 - DNA, 80 bp, synthetic construct
  source 1..80: mol_type = other DNA
ggtttcctgggagtcaggcacaccattaaggaaaaagtgtaagggaggagagtgaagtcaaggcagcatttacaatttca

SEQ ID NO: 28436 - DNA, 80 bp, synthetic construct
  source 1..80: mol_type = other DNA
gagcttgtcaggggctgtgggcttcagatgaggtcactcagtttcctcagcctgttagctccaaggcctgcctctttcca

SEQ ID NO: 28437 - DNA, 80 bp, synthetic construct; identical to SEQ ID NO: 11013
  source 1..80: mol_type = other DNA

SEQ ID NO: 28438 - DNA, 80 bp, synthetic construct
  source 1..80: mol_type = other DNA
gcagaagatgtatggtgtgacggttttcaccagctctgctgctttgggcaagttcctaagcttctgtgaacctcagtttc

SEQ ID NO: 28439 - DNA, 80 bp, synthetic construct
  source 1..80: mol_type = other DNA
ctgcctacactgtgttctattggtttccattatgttctattggttttcacagagctgttgtttgatgtcatgtctgtggg

SEQ ID NO: 28440 - DNA, 80 bp, synthetic construct
  source 1..80: mol_type = other DNA
ccaagccagaaacctccagggtctttctggactcctcctccctcttgctctccccgggtcccagtgtccagcaggtccgg

SEQ ID NO: 28441 - DNA, 80 bp, synthetic construct; identical to SEQ ID NO: 11014
  source 1..80: mol_type = other DNA

SEQ ID NO: 28442 - DNA, 80 bp, synthetic construct
  source 1..80: mol_type = other DNA
cagagtgtccctgaggcccactgtccaagtagacctcttgcctcttacaaccctctgaccccccacagggagcaccagct

SEQ ID NO: 28443 - DNA, 80 bp, synthetic construct
  source 1..80: mol_type = other DNA
ttctctgccccaagaacaggtgacattcccccatcagtaatagcatttgggcttgggggccagggtcactctccaaagaa

SEQ ID NO: 28444 - DNA, 80 bp, synthetic construct; identical to SEQ ID NO: 11015
  source 1..80: mol_type = other DNA

SEQ ID NO: 28445 - DNA, 80 bp, synthetic construct
  source 1..80: mol_type = other DNA
ctctcctgacctgaatataacatcattgagagcagggacttagctctgttcactgctgtgtcaactgcatctagaacagt

SEQ ID NO: 28446 - DNA, 80 bp, synthetic construct
  source 1..80: mol_type = other DNA
ggcattgagtaagcatttggaaaattctatggcaatctgcagccacttccatgcatgtgggtggactatagaccattctg

SEQ ID NO: 28447 - DNA, 80 bp, synthetic construct
  source 1..80: mol_type = other DNA
aagctctgctatagaatgcgtcatcctgcccagcacacaggaggctctcaggctatgtttgttgaataaatgaacaatgg

SEQ ID NO: 28448 - DNA, 80 bp, synthetic construct; identical to SEQ ID NO: 11016
  source 1..80: mol_type = other DNA

SEQ ID NO: 28449 - DNA, 80 bp, synthetic construct
  source 1..80: mol_type = other DNA
gaccgcacatcccctcaccctcccactgcctctattttcaggctgagtctgctatttccaagggtcagccagtcctgaat

SEQ ID NO: 28450 - DNA, 80 bp, synthetic construct
  source 1..80: mol_type = other DNA
tggcctggtcaggactccaggctcccaggctccccatgtgccccgctggagggttctgggatctacagagctcactgaaa

SEQ ID NO: 28451 - DNA, 80 bp, synthetic construct
  source 1..80: mol_type = other DNA
taaatctcactgggacagggaggcaatggactcatattcgttgttaactctttaaggcacgtgtgctgcatggaggcaag

SEQ ID NO: 28452 - DNA, 80 bp, synthetic construct; identical to SEQ ID NO: 11017
  source 1..80: mol_type = other DNA

SEQ ID NO: 28453 - DNA, 80 bp, synthetic construct
  source 1..80: mol_type = other DNA
ccctgggacccccaagaaagcaggacccagcctcgattcctgccttaagaagggtgcagaggacctataaccctgtcacc

SEQ ID NO: 28454 - DNA, 80 bp, synthetic construct
  source 1..80: mol_type = other DNA
cacctcagttgtggacggaggtttgctccggctgtgctgtttttcctgtttcacagaggttggaagtgagacttagaggg

SEQ ID NO: 28455 - DNA, 80 bp, synthetic construct
  source 1..80: mol_type = other DNA
aagatgacctgctgaggagtgagggaagtggctatgtttagcccaacgaacgctcacccaaatagacgtaactggaatgg

SEQ ID NO: 28456 - DNA, 80 bp, synthetic construct
  source 1..80: mol_type = other DNA
ctgagggtcccagtagggctctgcatgctcagggtgaagggggctgggagagaaagggagaccagtgctgtcttgggtaa

SEQ ID NO: 28457 - DNA, 80 bp, synthetic construct; identical to SEQ ID NO: 11018
  source 1..80: mol_type = other DNA

SEQ ID NO: 28458 - DNA, 80 bp, synthetic construct
  source 1..80: mol_type = other DNA
tctagtgagaaatgggctataataagttcttaaaaattcttatcttctctgccatgaatgaacatggctgaaggtggaga

SEQ ID NO: 28459 - DNA, 80 bp, synthetic construct
  source 1..80: mol_type = other DNA
acttccagggccttctgagatgtatctttcataaaatcaataatcagggaagaggaaaaaagagctaggatggaacaaaa

SEQ ID NO: 28460 - DNA, 80 bp, synthetic construct; identical to SEQ ID NO: 11019
  source 1..80: mol_type = other DNA

SEQ ID NO: 28461 - DNA, 80 bp, synthetic construct
  source 1..80: mol_type = other DNA
ggcccttgccatgacagctacattggtcctcaattcaagtgtcttcagaaagtgaagatgtaagctactctttgcaacat

SEQ ID NO: 28462 - DNA, 80 bp, synthetic construct
  source 1..80: mol_type = other DNA
ttcaaggatgtgtgtgaagaagacggtagtcccctggcctgggagtaaactctagataagaacagtctttcaccacaccc

SEQ ID NO: 28463 - DNA, 80 bp, synthetic construct
  source 1..80: mol_type = other DNA
gggcagggaaaggcctcggatcccagtgtcacagcagaggccagacactcttccttggttcaaggtgaataggtcacagg

SEQ ID NO: 28464 - DNA, 80 bp, synthetic construct
  source 1..80: mol_type = other DNA
aaaggaaggcccgacatatttccatcagcaagcaacaggaccaccaactcctccgtgttgcccagctcccactgagagtg

SEQ ID NO: 28465 - DNA, 80 bp, synthetic construct; identical to SEQ ID NO: 11020
  source 1..80: mol_type = other DNA

SEQ ID NO: 28466 - DNA, 80 bp, synthetic construct
  source 1..80: mol_type = other DNA
atgaacatttattgagcaactcttgtgtgccaggtcagacacgaggttgttgcactcatggatataacagtcctgaaaag

SEQ ID NO: 28467 - DNA, 80 bp, synthetic construct
  source 1..80: mol_type = other DNA
ggtgaagtcgtgccactgcactccagtctgggtgacagaggagacttggtctcaaaaaaaaaaaaaaaagaaagaaagat

SEQ ID NO: 28468 - DNA, 80 bp, synthetic construct
  source 1..80: mol_type = other DNA
ccagggagctagcaaagcttgggcaaaggctttcctccaaggctttcctccaaggcttctgttgttcagctattacagtg

SEQ ID NO: 28469 - DNA, 80 bp, synthetic construct; identical to SEQ ID NO: 11021
  source 1..80: mol_type = other DNA

SEQ ID NO: 28470 - DNA, 80 bp, synthetic construct
  source 1..80: mol_type = other DNA
cagaggcttaggctccagcctcgtggaggacgctgcagcaacttgaaccccaggaatgcgacaggggcctggtggagcct

SEQ ID NO: 28471 - DNA, 80 bp, synthetic construct
  source 1..80: mol_type = other DNA
taaagcaaagaaaggatgccatatctttgtaatatcatgttggagcattttataacaggcctggccaaggattatctaat

SEQ ID NO: 28472 - DNA, 80 bp, synthetic construct
  source 1..80: mol_type = other DNA
ttccagttgttgccaaatgtcctctggggcagaactacttcccctccccaatcccttgaaaaccactgacctaggaggga

SEQ ID NO: 28473 - DNA, 80 bp, synthetic construct; identical to SEQ ID NO: 11022
  source 1..80: mol_type = other DNA

SEQ ID NO: 28474 - DNA, 80 bp, synthetic construct
  source 1..80: mol_type = other DNA
agggtgaaatgagataatgtagcaaaagcaatcagtttatcatgtctgcccaacaattaggaagtctgataattgttttt

SEQ ID NO: 28475 - DNA, 80 bp, synthetic construct
  source 1..80: mol_type = other DNA
cctgcctcatgggcattcagtgtgataacacatataaggcattagaacagtgactgacaatatgcaagtaatcgataaat

SEQ ID NO: 28476 - DNA, 80 bp, synthetic construct; identical to SEQ ID NO: 11023
  source 1..80: mol_type = other DNA

SEQ ID NO: 28477 - DNA, 80 bp, synthetic construct
  source 1..80: mol_type = other DNA
aggtgagtgggcctgggctcaaaagcagattctagctccagaacccatttttataaccaccatgccataatgggctgatt

SEQ ID NO: 28478 - DNA, 80 bp, synthetic construct
  source 1..80: mol_type = other DNA
tcccacagacacagagcaggcagagtcagaggtgtacctctagccccaggaaacccgggccccaagtctattaccctcag

SEQ ID NO: 28479 - DNA, 80 bp, synthetic construct
  source 1..80: mol_type = other DNA
tgccaaagtgaggaaacctctgtcataaaatgcttggacctgcaaatccaattacccatcagtggacacaggcacctgta

SEQ ID NO: 28480 - DNA, 80 bp, synthetic construct; identical to SEQ ID NO: 11024
  source 1..80: mol_type = other DNA

SEQ ID NO: 28481 - DNA, 80 bp, synthetic construct
  source 1..80: mol_type = other DNA
cctctctgtctcttgcctccagccctttgcccacgtggcttcctctgcccagaatcccctctcccgcttggccttctaca

SEQ ID NO: 28482 - DNA, 80 bp, synthetic construct
  source 1..80: mol_type = other DNA
ctttctttcagcccctttctcagcctactgtggtgtcttttgattgctgttcagtgttgtgcagggcaagtgcagattgc

SEQ ID NO: 28483 - DNA, 80 bp, synthetic construct
  source 1..80: mol_type = other DNA
aatctctgcttcctgggaaacagtaagtacccagaatcggggagggccttggaggctcaacctcataggtcatttactga

SEQ ID NO: 28484 - DNA, 80 bp, synthetic construct
  source 1..80: mol_type = other DNA
tggcagaagtcaggaccttttgtgagccaaggttccaagcttgaggtgcatgtgccattgtcccaatggacttcacttac

SEQ ID NO: 28485 - DNA, 80 bp, synthetic construct; identical to SEQ ID NO: 11025
  source 1..80: mol_type = other DNA

SEQ ID NO: 28486 - DNA, 80 bp, synthetic construct
  source 1..80: mol_type = other DNA
tgatatccccagtatgtgccagggatgtgatagacactaaagatgcattcgttaaatgaatgagaaaggtcatgaataat

SEQ ID NO: 28487 - DNA, 80 bp, synthetic construct
  source 1..80: mol_type = other DNA
ttttctactctgactcctctcatctccctcttgctgggttttgtggacatgaacagtgaggacccctgagctcgaaggtg

SEQ ID NO: 28488 - DNA, 80 bp, synthetic construct; identical to SEQ ID NO: 11026
  source 1..80: mol_type = other DNA

SEQ ID NO: 28489 - DNA, 80 bp, synthetic construct
  source 1..80: mol_type = other DNA
acctcccaggctcaagcaatcctcccacttcagcctcccgagtagatggaacaagaggcatgcaccaccaggccccgcta

SEQ ID NO: 28490 - DNA, 80 bp, synthetic construct
  source 1..80: mol_type = other DNA
ggcagagtttttttacaaaagtagtcaatgtcacagggaactgaggcccaaaaatatgaaatcctgaagggtggggtaga

SEQ ID NO: 28491 - DNA, 80 bp, synthetic construct
  source 1..80: mol_type = other DNA
tcatagcaagcacacatttagaatcccagcttcccatcagctcaagatagattcccatggaaaccagcataaaggaaagg

SEQ ID NO: 28492 - DNA, 80 bp, synthetic construct; identical to SEQ ID NO: 11027
  source 1..80: mol_type = other DNA

SEQ ID NO: 28493 - DNA, 80 bp, synthetic construct
  source 1..80: mol_type = other DNA
accccatctcaactaaaaatatgaaaattatctgggcatggtggcaggcgcctgtaatcccagctacttgggaggctgag

SEQ ID NO: 28494 - DNA, 80 bp, synthetic construct
  source 1..80: mol_type = other DNA
atgtgggtgaccctgggtaatgtgcctaaactctctgaatatcagtctcctttgtcttttaaatgggtctaataatgtta

SEQ ID NO: 28495 - DNA, 80 bp, synthetic construct
  source 1..80: mol_type = other DNA
tctcatccataaaacagaatgaggtggggaggaggtaggacagcttaatttttgaatattccttccagccctggcatttt

SEQ ID NO: 28496 - DNA, 80 bp, synthetic construct; identical to SEQ ID NO: 11028
  source 1..80: mol_type = other DNA

SEQ ID NO: 28497 - DNA, 80 bp, synthetic construct
  source 1..80: mol_type = other DNA
ggaaacccattgagccactcagccagccctgcaggtggctggggatgcagggcctgcatcgtcagggagttgaaccaccg

SEQ ID NO: 28498 - DNA, 80 bp, synthetic construct
  source 1..80: mol_type = other DNA
tggcaaagatggtgagcaagatgatcgtctcgaagggcctggagccagggttaaggagagccctcgagtgaggcaaggga

SEQ ID NO: 28499 - DNA, 80 bp, synthetic construct
  source 1..80: mol_type = other DNA
ctctcctcaggaacaagtcactttcatgtagactccttggaatggcaaaggtctggtccctggctgagggctcctcagct

SEQ ID NO: 28500 - DNA, 80 bp, synthetic construct
  source 1..80: mol_type = other DNA
gaactcactgagtaggactgggaaggagagatggagagatgaatgctgaatttccagagccatgtgcacatgctggtgtg

SEQ ID NO: 28501 - DNA, 80 bp, synthetic construct; identical to SEQ ID NO: 11029
  source 1..80: mol_type = other DNA

SEQ ID NO: 28502 - DNA, 80 bp, synthetic construct
  source 1..80: mol_type = other DNA
caggggaacagggctgaccctgaccccaaactatctctacttgccccacgtttctcttgtccttccagttatccctcatt

SEQ ID NO: 28503 - DNA, 80 bp, synthetic construct
  source 1..80: mol_type = other DNA
catcattctccccaccagagcaaatgcaaacatagcatgagtttcaaagtccctgtccccagggtggcacgtctgagcta

SEQ ID NO: 28504 - DNA, 80 bp, synthetic construct; identical to SEQ ID NO: 11030
  source 1..80: mol_type = other DNA

SEQ ID NO: 28505 - DNA, 80 bp, synthetic construct
  source 1..80: mol_type = other DNA
ttcctcttcctcctcctcctcttcctcctcctcccccaccctcctcctcttcctcctcctcccccaccctcctcgtcttc

SEQ ID NO: 28506 - DNA, 80 bp, synthetic construct
  source 1..80: mol_type = other DNA
cacacccccccccacggcccgggccctgaaggatacttccattctacaatgctgatgcaggccttcctcagggggttctc

SEQ ID NO: 28507 - DNA, 80 bp, synthetic construct
  source 1..80: mol_type = other DNA
aatctggctttctcctgctcccccaccccagtgctttcccttccctgtgtccccaatgcccccgccttggggactaggct

SEQ ID NO: 28508 - DNA, 80 bp, synthetic construct; identical to SEQ ID NO: 11031
  source 1..80: mol_type = other DNA

SEQ ID NO: 28509 - DNA, 80 bp, synthetic construct
  source 1..80: mol_type = other DNA
aaaaagttactctcatctgctgcattggcctttcctgtaactccttccatcagaagtcttcccatccttccagattcagg

SEQ ID NO: 28510 - DNA, 80 bp, synthetic construct
  source 1..80: mol_type = other DNA
tttttcatgcatcttgtctccccagggacaggggttgggtcttatgctttcttcttatgctttcttctatatactgtgtg

SEQ ID NO: 28511 - DNA, 80 bp, synthetic construct
  source 1..80: mol_type = other DNA
caacatggtgaaaccccatctctactaaaaatacaaaaattagctggccatggtggtggacacctgtaatcccagctact

SEQ ID NO: 28512 - DNA, 80 bp, synthetic construct; identical to SEQ ID NO: 11032
  source 1..80: mol_type = other DNA

SEQ ID NO: 28513 - DNA, 80 bp, synthetic construct
  source 1..80: mol_type = other DNA
tcaaaggaaccttagaaattgctagatgaaacagccatttcttaagagacccagagaagttaatttgcccattagtccaa

SEQ ID NO: 28514 - DNA, 80 bp, synthetic construct
  source 1..80: mol_type = other DNA
aataggtgtcatggggaaagcttaaatgaagtaagcaaatttgttattttaaagtattttaacgtcatccttttgtttgc

SEQ ID NO: 28515 - DNA, 80 bp, synthetic construct
  source 1..80: mol_type = other DNA
tagaaaaaaaatccttttttcagtattcacaattcaatctgattaccactgtcaattcaaattaaggcacattttagtgt

SEQ ID NO: 28516 - DNA, 80 bp, synthetic construct
  source 1..80: mol_type = other DNA
aaaaatgcccctccaagagtaaaagaactgagtctctgctgccagttaaaagcgatagatatagtctgctgatgcattag

SEQ ID NO: 28517 - DNA, 80 bp, synthetic construct
  source 1..80: mol_type = other DNA
cgctattctcctgtcagcctcctgagtagctgggactacaggcgcccaccacaacgcccggctaatttttttgtattttt

SEQ ID NO: 28518 - DNA, 80 bp, synthetic construct; identical to SEQ ID NO: 11033
  source 1..80: mol_type = other DNA

SEQ ID NO: 28519 - DNA, 80 bp, synthetic construct
  source 1..80: mol_type = other DNA
ttgccattcaattcacttcaacacatgtttgtgtactaggagttggggaactagtgagcaaggcagatacagttcctgcc

SEQ ID NO: 28520 - DNA, 80 bp, synthetic construct
  source 1..80: mol_type = other DNA
gcacatgctatgctcaaaagaacatagctctgtttggacctaggggttggtagtaaggatggagaagcagataggtcctt

SEQ ID NO: 28521 - DNA, 80 bp, synthetic construct; identical to SEQ ID NO: 11034
  source 1..80: mol_type = other DNA

SEQ ID NO: 28522 - DNA, 80 bp, synthetic construct
  source 1..80: mol_type = other DNA
caactgaaatcagaaaggactagttattggagcaggaggaaaagcagaggagtgtagttataaagtcaaggaaataagac

SEQ ID NO: 28523 - DNA, 80 bp, synthetic construct
  source 1..80: mol_type = other DNA
ttctcttctggtctagctatcttagcaccttttagatatcaatccatgaatttctataagtgtcaaagcagaaggagatg

SEQ ID NO: 28524 - DNA, 80 bp, synthetic construct
  source 1..80: mol_type = other DNA
aggaccatgaagtcgatgacaccacgaggataaggactgagtctgttttcctcaatcctgcgttcccagtgattataaga

SEQ ID NO: 28525 - DNA, 80 bp, synthetic construct
  source 1..80: mol_type = other DNA
gctgacatatttttaatcatgtttaatcattaaaaacatgttcccttgtttttaatcagctggtgggacacaatcccggc

SEQ ID NO: 28526 - DNA, 80 bp, synthetic construct; identical to SEQ ID NO: 11035
  source 1..80: mol_type = other DNA

SEQ ID NO: 28527 - DNA, 80 bp, synthetic construct
  source 1..80: mol_type = other DNA
ttcctcagttagagatgaacctatctgtaccttaagggcttctttgatttacagatgcctggagcagtaaccagagtaga

SEQ ID NO: 28528 - DNA, 80 bp, synthetic construct
  source 1..80: mol_type = other DNA
tgagctgcatggggcgagtaattatagttgaacctcagagcactcactttcttcagttgaagactagaggaaaatgtctt

SEQ ID NO: 28529 - DNA, 80 bp, synthetic construct
  source 1..80: mol_type = other DNA
caattctcctgactcagcctcccgagtagctgggattacaggcatgcaccaccacgcctggctaattttgtatttttagt

SEQ ID NO: 28530 - DNA, 80 bp, synthetic construct; identical to SEQ ID NO: 11036
  source 1..80: mol_type = other DNA

SEQ ID NO: 28531 - DNA, 80 bp, synthetic construct
  source 1..80: mol_type = other DNA
ttttattttttttattctcacaggccatgccatcttgggcaagttaagtaactttgcggaacctcactttccttctctat

SEQ ID NO: 28532 - DNA, 80 bp, synthetic construct
  source 1..80: mol_type = other DNA
cgcatcaaagttcactagcctagtagcgttacttcaggacttctctagaggctgacttggtaactgctgtcagtaaaagc

SEQ ID NO: 28533 - DNA, 80 bp, synthetic construct; identical to SEQ ID NO: 11037
  source 1..80: mol_type = other DNA

SEQ ID NO: 28534 - DNA, 80 bp, synthetic construct
  source 1..80: mol_type = other DNA
ggaatcatacactgcctaaatcactgatttttcaaactttgaggtgtttaagtttgaaaagtttgcagaggcagtgccag

SEQ ID NO: 28535 - DNA, 80 bp, synthetic construct
  source 1..80: mol_type = other DNA
agctccctaagatgctggttcaataggtttctgaagagccacttcctttggaaaaaagtagaccagacctgtagactgca

SEQ ID NO: 28536 - DNA, 80 bp, synthetic construct
  source 1..80: mol_type = other DNA
tgctggcaagtagaaggcgcccactaagttgaatattaagtgtgcacgatttaaaaacaaaagcaatgatggaaagcaaa

SEQ ID NO: 28537 - DNA, 80 bp, synthetic construct
  source 1..80: mol_type = other DNA
taattacttgatttaaatttgactgcaaacttttgacttgttttggagcctggctatcccaggatgatagcccattttga

SEQ ID NO: 28538 - DNA, 80 bp, synthetic construct; identical to SEQ ID NO: 11038
  source 1..80: mol_type = other DNA

SEQ ID NO: 28539 - DNA, 80 bp, synthetic construct
  source 1..80: mol_type = other DNA
gacactccaggatgactctgttctctccaggatgactgacttgctagagcacatgctacagaaatttctagtagaaagtg

SEQ ID NO: 28540 - DNA, 80 bp, synthetic construct
  source 1..80: mol_type = other DNA
agcctcatccttaaaaggccattggtcacataaccaagagcaaggccctcagcagccatatggatggaagcaggttttct

SEQ ID NO: 28541 - DNA, 80 bp, synthetic construct
  source 1..80: mol_type = other DNA
aattaaaaagaaatattgcaaggtttgcaccaaccactttggcattttcttaggctcagccaaaaaggacattaactaag

SEQ ID NO: 28542 - DNA, 80 bp, synthetic construct; identical to SEQ ID NO: 11039
  source 1..80: mol_type = other DNA

SEQ ID NO: 28543 - DNA, 80 bp, synthetic construct
  source 1..80: mol_type = other DNA
gtctctactaaaaatacaaaaattacccagtcgtggtgacacatgcctgtaatcacagctacttgggaggctgaggcagg

SEQ ID NO: 28544 - DNA, 80 bp, synthetic construct
  source 1..80: mol_type = other DNA
gagacgagacagccaggctcaggtttaagtccctgatctgcctcttactaaccacaagtgggtagggaaaatctttaacc

SEQ ID NO: 28545 - DNA, 80 bp, synthetic construct
  source 1..80: mol_type = other DNA
aatacaaagagttgaaaaagcggagtacgcaagaataacttagtaacttgaagaggcagcagggattagattcagaatca

SEQ ID NO: 28546 - DNA, 80 bp, synthetic construct; identical to SEQ ID NO: 11040
  source 1..80: mol_type = other DNA

SEQ ID NO: 28547 - DNA, 80 bp, synthetic construct
  source 1..80: mol_type = other DNA
ttcttatctgtacaatggagaaggtgatatctagggttgcttatctgacttaaaaagtaagatgtgaacgtggttcttgg

SEQ ID NO: 28548 - DNA, 80 bp, synthetic construct
  source 1..80: mol_type = other DNA
tcaatgcataggacttaaatgatcaagacagcagcatctccatgctcagtgtgaggaggctgaggttaaacagctagtga

SEQ ID NO: 28549 - DNA, 80 bp, synthetic construct
  source 1..80: mol_type = other DNA
tgtcattaatccctgggctgcatgtagcaacctgctcaaatgctgcggagaactagctcatcaaaccatgaaggcaattc

SEQ ID NO: 28550 - DNA, 80 bp, synthetic construct; identical to SEQ ID NO: 11041
  source 1..80: mol_type = other DNA

SEQ ID NO: 28551 - DNA, 80 bp, synthetic construct
  source 1..80: mol_type = other DNA
ttctttgagggatggagaaggtaccatctggaagggaatggtgtggctttaataaatgaagggcctctgacacagccttt

SEQ ID NO: 28552 - DNA, 80 bp, synthetic construct
  source 1..80: mol_type = other DNA
tctaaatttaaagccctgggaccattttccatagtcacagtggtgggatttaatgtatcctgctctcagcttcaggatca

SEQ ID NO: 28553 - DNA, 80 bp, synthetic construct; identical to SEQ ID NO: 11042
  source 1..80: mol_type = other DNA

SEQ ID NO: 28554 - DNA, 80 bp, synthetic construct
  source 1..80: mol_type = other DNA
gctcaagcaatctgcccatttcggcctcccaaagtgctgggattacaggcatgagccaccgcgcccagccctgtacagtt

SEQ ID NO: 28555 - DNA, 80 bp, synthetic construct
  source 1..80: mol_type = other DNA
tggagaattctcaaaatacacgaggtcatttttcgttggcttcttaaacctctcgttagccacagtgaaacctgtgccat

SEQ ID NO: 28556 - DNA, 80 bp, synthetic construct
  source 1..80: mol_type = other DNA
ccgaaaaagacaggggcaagttcagtgaggttcgagcaggtgacacatgctccaactctccttacctcccagcaatccag

SEQ ID NO: 28557 - DNA, 80 bp, synthetic construct
  source 1..80: mol_type = other DNA
tatcagtataacagaaacctcacaatttaacagggcatgtggccagttagaagagtgagggattgaattattttctaaat

SEQ ID NO: 28558 - DNA, 80 bp, synthetic construct; identical to SEQ ID NO: 11043
  source 1..80: mol_type = other DNA

SEQ ID NO: 28559 - DNA, 80 bp, synthetic construct
  source 1..80: mol_type = other DNA
ggctcccaatatagagaccccttttctgtgggtgcgaggcctgtggagaggagaggggacaggtgggcctgaaacttcca

SEQ ID NO: 28560 - DNA, 80 bp, synthetic construct
  source 1..80: mol_type = other DNA
tcccattttatagatgaggaaccagggatggggaaggcaggtgacttgcccaagctcagtaataagaattcactcccact

SEQ ID NO: 28561 - DNA, 80 bp, synthetic construct; identical to SEQ ID NO: 11044
  source 1..80: mol_type = other DNA

SEQ ID NO: 28562 - DNA, 80 bp, synthetic construct
  source 1..80: mol_type = other DNA
atcttggagagcaccacacaaaactcactccacatcaagtacttaggaattaaatatgaatgctcattcttccaagttta

SEQ ID NO: 28563 - DNA, 80 bp, synthetic construct
  source 1..80: mol_type = other DNA
gtagctcactgcggccttgaactcctgggctcaagcgatcctcctgcctcaggctcctgcatagctaggactacaggtgc

SEQ ID NO: 28564 - DNA, 80 bp, synthetic construct
  source 1..80: mol_type = other DNA
ccctccctttctagtattgaatttccagatcataaacttcaaaactgatatttttatacaattaattgaagaatttgcat

SEQ ID NO: 28565 - DNA, 80 bp, synthetic construct; identical to SEQ ID NO: 11045
  source 1..80: mol_type = other DNA

SEQ ID NO: 28566 - DNA, 80 bp, synthetic construct
  source 1..80: mol_type = other DNA
tggttcaagcgattctactgcctcagcctcccgaatagctgggactacaggcgcgggtcaccacgcctggctaagttttg

SEQ ID NO: 28567 - DNA, 80 bp, synthetic construct
  source 1..80: mol_type = other DNA
gggggcacggtggcttatgcctgtaatcccagcactttgggaggctgaggcaaaaggatcacttgatcccaggagttcaa

SEQ ID NO: 28568 - DNA, 80 bp, synthetic construct
  source 1..80: mol_type = other DNA
ctgtactccagcctgggtgacagagtgagaccttgtctcaaaaataacatataataaaataaaagagtcacataagaaga

SEQ ID NO: 28569 - DNA, 80 bp, synthetic construct
  source 1..80: mol_type = other DNA
ctgccctaccgccagactttttgtgatccaagttagtaaactttcctcctttttttagtgcctttgggatctgttacttg

SEQ ID NO: 28570 - DNA, 80 bp, synthetic construct; identical to SEQ ID NO: 11046
  source 1..80: mol_type = other DNA

SEQ ID NO: 28571 - DNA, 80 bp, synthetic construct
  source 1..80: mol_type = other DNA
acatgataacaataacaaccatgtattgagtgagtgcttaactatgtgccaggctccacaccaggtggtttacacatatt

SEQ ID NO: 28572 - DNA, 80 bp, synthetic construct
  source 1..80: mol_type = other DNA
aaatccctggtcacccagctatttaaaggtagaacaaagatgtgaatctcagatgtgtgctatttctgaaaacacactta

SEQ ID NO: 28573 - DNA, 80 bp, synthetic construct
  source 1..80: mol_type = other DNA
tcactgccacctccacctcccaggttcaagcgattctcctgcctcagcctcctgagtagctgggattacaggtgcatgcc

SEQ ID NO: 28574 - DNA, 80 bp, synthetic construct; identical to SEQ ID NO: 11047
  source 1..80: mol_type = other DNA

SEQ ID NO: 28575 - DNA, 80 bp, synthetic construct
  source 1..80: mol_type = other DNA
atagtaaaaagactgataatgtttggtgttagtaacagtccaggggaagagatgctttaacaaaccattggtgggggagt

SEQ ID NO: 28576 - DNA, 80 bp, synthetic construct
  source 1..80: mol_type = other DNA
cacccacatggatcttcatgcagctattgcataattagtaacagcaaaatatgaggaaaaacccaaatgacatcagtagg

SEQ ID NO: 28577 - DNA, 80 bp, synthetic construct; identical to SEQ ID NO: 11048
  source 1..80: mol_type = other DNA

SEQ ID NO: 28578 - DNA, 80 bp, synthetic construct
  source 1..80: mol_type = other DNA
gcaaattagaacctagggtggacgtgaggcctgggccttgaaggtacttgtggttcctcagttgattgattctaatatgc

SEQ ID NO: 28579 - DNA, 80 bp, synthetic construct
  source 1..80: mol_type = other DNA
aattagagattgtttcctaccctatgcctccaagacatcagaatctcaaggaaaatgtgtcaccagtgacaatctctgct

SEQ ID NO: 28580 - DNA, 80 bp, synthetic construct
  source 1..80: mol_type = other DNA
tgggagggtggtttcccatgcacagccgctgatggagggactggagacattttatttggatgataaaagaatgagtgact

SEQ ID NO: 28581 - DNA, 80 bp, synthetic construct; identical to SEQ ID NO: 11049
  source 1..80: mol_type = other DNA

SEQ ID NO: 28582 - DNA, 80 bp, synthetic construct
  source 1..80: mol_type = other DNA
tttgatgtattcctcctttttgctgcagtacagtgttgaataactcctttaacgtggacgcattttctgaattcttgcat

SEQ ID NO: 28583 - DNA, 80 bp, synthetic construct
  source 1..80: mol_type = other DNA
ggatttgttcttattttcactttactttgtattttttcccctatgaaagctcccagaatcattcccttattcttgggttc

SEQ ID NO: 28584 - DNA, 80 bp, synthetic construct
  source 1..80: mol_type = other DNA
aggctggagtgcaatggcgaggtctctgctcactgcaactccgcctcccaggttcaaacaactctcctgcctcagcctcc

SEQ ID NO: 28585 - DNA, 80 bp, synthetic construct; identical to SEQ ID NO: 11050
  source 1..80: mol_type = other DNA

SEQ ID NO: 28586 - DNA, 80 bp, synthetic construct
  source 1..80: mol_type = other DNA
agggcttgtgtgcctgggttctttctctttggggatctggtagcctgtggaaatgagttgtgatcagctcctaccatcta

SEQ ID NO: 28587 - DNA, 80 bp, synthetic construct
  source 1..80: mol_type = other DNA
ttgtccatttttcagttggtttcaaactcaagtggaaaagagcaggggatgtttatggacctccttaaacatttatcttt

SEQ ID NO: 28588 - DNA, 80 bp, synthetic construct
  source 1..80: mol_type = other DNA
ttctgtgaggaaactgattaggctataaaaaagttcttttatccttgaattactgcattttctcctgcagtaattgcagg

SEQ ID NO: 28589 - DNA, 80 bp, synthetic construct; identical to SEQ ID NO: 11051
  source 1..80: mol_type = other DNA

SEQ ID NO: 28590 - DNA, 80 bp, synthetic construct
  source 1..80: mol_type = other DNA
ctggctcttatgctgaagactcttactccagaaagcctgggatgttaaatgaccgacttccgcggagttctgctcatggg

SEQ ID NO: 28591 - DNA, 80 bp, synthetic construct
  source 1..80: mol_type = other DNA
ctcccatgttggcagttgccccatttgcttttattcttctagactgtggcttctccatccttctttgtgagctacaattt

SEQ ID NO: 28592 - DNA, 80 bp, synthetic construct
  source 1..80: mol_type = other DNA
tcagtttgcactttgaaatgttctggaaggagacaaggactgtgaggggagaaaacggtaccaatttatacatttctgca

SEQ ID NO: 28593 - DNA, 80 bp, synthetic construct
  source 1..80: mol_type = other DNA
aagcttccttcagaacctcaaggccatagcccatgacacagtcacatcctggtttctattttgtctcttgaatctttcct

SEQ ID NO: 28594 - DNA, 80 bp, synthetic construct; identical to SEQ ID NO: 11052
  source 1..80: mol_type = other DNA

SEQ ID NO: 28595 - DNA, 80 bp, synthetic construct
  source 1..80: mol_type = other DNA
tttatgtggcccttcattttttatttattttgagcattttaagcctttgacctgcagaggctattttctaattttaaaat

SEQ ID NO: 28596 - DNA, 80 bp, synthetic construct
  source 1..80: mol_type = other DNA
tgctctaactttgtgtcagtataatactgaggcatcacattctttaatttcttaccatatatcaaaccatgctaagcact

SEQ ID NO: 28597 - DNA, 80 bp, synthetic construct
  source 1..80: mol_type = other DNA
aagcctgtctgacaccaaagtcgacatcactctgctggtgtttttcatattagggtttgccagtctctggggctcatgtt

SEQ ID NO: 28598 - DNA, 80 bp, synthetic construct; identical to SEQ ID NO: 11053
  source 1..80: mol_type = other DNA

SEQ ID NO: 28599 - DNA, 80 bp, synthetic construct
  source 1..80: mol_type = other DNA
aggcagtccattgtatgctgtgtgaaatatttgccaacttaacaacttgtcttagaaatcctagttagaatttattttag

SEQ ID NO: 28600 - DNA, 80 bp, synthetic construct
  source 1..80: mol_type = other DNA
tatttaattttcacctgctggcttgaagccaagtacatttattcacaattgaatccttttgacaggtccacatctctcag

SEQ ID NO: 28601 - DNA, 80 bp, synthetic construct; identical to SEQ ID NO: 11054
  source 1..80: mol_type = other DNA

SEQ ID NO: 28602 - DNA, 80 bp, synthetic construct
  source 1..80: mol_type = other DNA
aagatctctaatatcaagcacatattattttggggtccaacaagacagaagtgagcctggcagaactgatctaactttta

SEQ ID NO: 28603 - DNA, 80 bp, synthetic construct
  source 1..80: mol_type = other DNA
attttctttcctattgatattccctactttctaagagtgtgatttctttgtcatcatgccccagttctcttaggtcagac

SEQ ID NO: 28604 - DNA, 80 bp, synthetic construct
  source 1..80: mol_type = other DNA
atagtaagaccctgtctctatgaaacataaaaaaaaaaaaaaaattagttgagcacagtggcatatgcctgtggtttgag

SEQ ID NO: 28605 - DNA, 80 bp, synthetic construct
  source 1..80: mol_type = other DNA
gttttacttacatgtagtacaacatccacttctgtttactttgaagcactttctgtaggtggaacttagaagtatcttgt

SEQ ID NO: 28606 - DNA, 80 bp, synthetic construct; identical to SEQ ID NO: 11055
  source 1..80: mol_type = other DNA

SEQ ID NO: 28607 - DNA, 80 bp, synthetic construct
  source 1..80: mol_type = other DNA
cctccataatgcctcagtcaagaactcctaaactaagagctcccaatgagtagagtagccaataataacattaactatca

SEQ ID NO: 28608 - DNA, 80 bp, synthetic construct
  source 1..80: mol_type = other DNA
gaggcaaatttctcacaattttcctagtaaatctatttttttttgatatgggatctcactatgttgcccaagctggtctc

SEQ ID NO: 28609 - DNA, 80 bp, synthetic construct; identical to SEQ ID NO: 11056
  source 1..80: mol_type = other DNA

SEQ ID NO: 28610 - DNA, 80 bp, synthetic construct
  source 1..80: mol_type = other DNA
ttcaagaccagcctgggcaacatggcgaaacctcatctctaccaaaaaacaaacaaacaaataagaaacaccccaaatta

SEQ ID NO: 28611 - DNA, 80 bp, synthetic construct
  source 1..80: mol_type = other DNA
aaaaaaagggctctccagatctggctgggactcaaatttcaaattttcagcctcagttcctattaaatctcagtcttgaa

SEQ ID NO: 28612 - DNA, 80 bp, synthetic construct
  source 1..80: mol_type = other DNA
cttttatctccagctcaaacacccagttctttttatgatacaaccattatctcctcagctaactggccctgtggctgatt

SEQ ID NO: 28613 - DNA, 80 bp, synthetic construct
  source 1..80: mol_type = other DNA
aaataactgttgaaccaaagttagtcccaaaatacaagaacagagctctgaaagttgcagtgctgtttgttgaaattctg

SEQ ID NO: 28614 - DNA, 80 bp, synthetic construct; identical to SEQ ID NO: 11057
  source 1..80: mol_type = other DNA

SEQ ID NO: 28615 - DNA, 80 bp, synthetic construct
  source 1..80: mol_type = other DNA
tgattctatgaccctgctttagtctctccatccctctcaggcccagttgctcatctgaaaagtagaaatatgaatactat

SEQ ID NO: 28616 - DNA, 80 bp, synthetic construct
  source 1..80: mol_type = other DNA
attccagctggatggacttctgcctagctctgttacctgagttacaaataatcttaacttcacaaaagggaaaggaactt

SEQ ID NO: 28617 - DNA, 80 bp, synthetic construct; identical to SEQ ID NO: 11058
  source 1..80: mol_type = other DNA

SEQ ID NO: 28618 - DNA, 80 bp, synthetic construct
  source 1..80: mol_type = other DNA
gtttgtttgttttgttttttttgagacagggtctcgtgctgtcacccaggctggaatgctgtggtgtgatcaagactcac

SEQ ID NO: 28619 - DNA, 80 bp, synthetic construct
  source 1..80: mol_type = other DNA
aagagtggacaaatttaaaaggtgcttgtttgcaagctcatcaaaggaaataaatggcagatattgaccttttgcatgta

SEQ ID NO: 28620 - DNA, 80 bp, synthetic construct
  source 1..80: mol_type = other DNA
aacaagacaggcttatctttttagtacttattcatagtcctaattggaggtggaaaactagactcaatcaaggatgagca

SEQ ID NO: 28621 - DNA, 80 bp, synthetic construct; identical to SEQ ID NO: 11059
  source 1..80: mol_type = other DNA

SEQ ID NO: 28622 - DNA, 80 bp, synthetic construct
  source 1..80: mol_type = other DNA
tttaaaaaaatgaaatatattgctctcccctacccctcccagtttaaaaagtagatgttcatattggccaatttggaaaa

SEQ ID NO: 28623 - DNA, 80 bp, synthetic construct
  source 1..80: mol_type = other DNA
accttctgctagtacaaagggggagtagagactgggggtctaatgaccgcaagaagagaattagagacgcatgtttatct

SEQ ID NO: 28624 - DNA, 80 bp, synthetic construct
  source 1..80: mol_type = other DNA
gagaatatctgaggcctgacagctgttcacctctacacggtgaagaatcatgtgatttacattaaaagttgtgtttattc

SEQ ID NO: 28625 - DNA, 80 bp, synthetic construct
  source 1..80: mol_type = other DNA
cctgtttgaacaattaagcagcacactcctatcaaagtcaccacactttataacttatacatgtactatcaatgttagga

SEQ ID NO: 28626 - DNA, 80 bp, synthetic construct; identical to SEQ ID NO: 11060
  source 1..80: mol_type = other DNA

SEQ ID NO: 28627 - DNA, 80 bp, synthetic construct
  source 1..80: mol_type = other DNA
aattatcgttacctcttcctattggcaattagattattctagaatagttctgaacaaatatttgattcacccagccagtt

SEQ ID NO: 28628 - DNA, 80 bp, synthetic construct
  source 1..80: mol_type = other DNA
aactttctagtcctttctactaacttccttgtgaccttgagtaccttgagggcttcagtttcctcatttaacaaatgatg

SEQ ID NO: 28629 - DNA, 80 bp, synthetic construct; identical to SEQ ID NO: 11061
  source 1..80: mol_type = other DNA

SEQ ID NO: 28630 - DNA, 80 bp, synthetic construct
  source 1..80: mol_type = other DNA
taacccacagttcatatcttctgcttaaatgacagtgtccagagagaccataaaagacttgaatcaacacaatgccaaac

SEQ ID NO: 28631 - DNA, 80 bp, synthetic construct
  source 1..80: mol_type = other DNA
gttgtgactacacagcattttatcaattctagggaagtttaagataagctctgcctaagtggtttataaagccatgcagc

SEQ ID NO: 28632 - DNA, 80 bp, synthetic construct
  source 1..80: mol_type = other DNA
atcaaaaatgcctttgctgtccttggcgcttcccatcttctttggatcacaggaacaggattttacttctccttggctac

SEQ ID NO: 28633 - DNA, 80 bp, synthetic construct; identical to SEQ ID NO: 11062
  source 1..80: mol_type = other DNA

SEQ ID NO: 28634 - DNA, 80 bp, synthetic construct
  source 1..80: mol_type = other DNA
tgtcctagaagagaggagcatagcatctctaggcctttttctttacagtctgaatgctacaattctatcattccacaata

SEQ ID NO: 28635 - DNA, 80 bp, synthetic construct
  source 1..80: mol_type = other DNA
ccccttgcattaacactggagagcttgggcttggcattgactttcataagtaattgagagattgctgaaggcagtatgca

SEQ ID NO: 28636 - DNA, 80 bp, synthetic construct
  source 1..80: mol_type = other DNA
tggaaggaaacaaatttaccgcctataattagacttgggcaagaaccctttggggtgctttcttagaattgttctttatt

SEQ ID NO: 28637 - DNA, 80 bp, synthetic construct
  source 1..80: mol_type = other DNA
ataaggctctttagggtccgtgtgcacctcatttttcaagtggagctgtatttcattgttattagcatgcccttttatta

SEQ ID NO: 28638 - DNA, 80 bp, synthetic construct; identical to SEQ ID NO: 11063
  source 1..80: mol_type = other DNA

SEQ ID NO: 28639 - DNA, 80 bp, synthetic construct
  source 1..80: mol_type = other DNA
taggtaaaatcaattatatgactattcgccataggtagcaggtagtgctctccagagggaaatatgatggttacgagagc

SEQ ID NO: 28640 - DNA, 80 bp, synthetic construct
  source 1..80: mol_type = other DNA
aggaaaataccttttccatagttaccccatttatcttctaaagcttggtttgggatttagaagccggcgcccatgtttag

SEQ ID NO: 28641 - DNA, 80 bp, synthetic construct
  source 1..80: mol_type = other DNA
gcaacaagagaaataaattgtctaggtgcagaattcatcctggtataacttggaaacaattacattaacttgttgactga

SEQ ID NO: 28642 - DNA, 80 bp, synthetic construct; identical to SEQ ID NO: 11064
  source 1..80: mol_type = other DNA

SEQ ID NO: 28643 - DNA, 80 bp, synthetic construct
  source 1..80: mol_type = other DNA
gaagtttctctaatttttgtatggagataaatcaagcaatgcctattaagtacataggcacagtttttatttggggtaga

SEQ ID NO: 28644 - DNA, 80 bp, synthetic construct
  source 1..80: mol_type = other DNA
gtgtattcttgcaggaatatttttagttttgctagttctgtccttgtttctctgcctgtgactggtaactatctgttgaa

SEQ ID NO: 28645 - DNA, 80 bp, synthetic construct
  source 1..80: mol_type = other DNA
cttataaatggtcttgccctttgcctttcctattcatctatgagcatatttaggtgtccacaactctaagacgtaacttt

SEQ ID NO: 28646 - DNA, 80 bp, synthetic construct; identical to SEQ ID NO: 11065
  source 1..80: mol_type = other DNA

SEQ ID NO: 28647 - DNA, 80 bp, synthetic construct
  source 1..80: mol_type = other DNA
tgattttcattcctcagcctcccaagtagctgggattaagggcatgtaccaccacacccatggggtttcgccatgttggc

SEQ ID NO: 28648 - DNA, 80 bp, synthetic construct
  source 1..80: mol_type = other DNA
acagtattttataaatgaatccccagctttgatggatatattttctttaggatcactggtcaatattgcttcctttgata

SEQ ID NO: 28649 - DNA, 80 bp, synthetic construct
  source 1..80: mol_type = other DNA
aatatatccaaagattactcgtgctagatatttgcaaactctctttaacaaggtccagtttctttaattgattcactggc

SEQ ID NO: 28650 - DNA, 80 bp, synthetic construct; identical to SEQ ID NO: 11066
  source 1..80: mol_type = other DNA

SEQ ID NO: 28651 - DNA, 80 bp, synthetic construct
  source 1..80: mol_type = other DNA
tattttgggggtttgcacataaactgctgtgttttctgtcagattttctaatagcaaatggactgtggtgtttcctggag

SEQ ID NO: 28652 - DNA, 80 bp, synthetic construct
  source 1..80: mol_type = other DNA
aaggaagaaaaaacctctatgtattcatgtttcccacctctatcctccatagctatccttattgcttaaaatgtagctgg

SEQ ID NO: 28653 - DNA, 80 bp, synthetic construct; identical to SEQ ID NO: 11067
  source 1..80: mol_type = other DNA

SEQ ID NO: 28654 - DNA, 80 bp, synthetic construct
  source 1..80: mol_type = other DNA
aaaagatttgaagattctatgctgatgatctgctcaaattcttctggaggaagccccagaaagccaaggaaaaagtcaaa

SEQ ID NO: 28655 - DNA, 80 bp, synthetic construct
  source 1..80: mol_type = other DNA
cttgatttctctagtcctcacctgtagaacagggacaatgacgcccaactgaacaaacttctgatggaataaaatgcaat

SEQ ID NO: 28656 - DNA, 80 bp, synthetic construct
  source 1..80: mol_type = other DNA
ctggtgctggcattctgctgtccactcggccacgccctggctaatggcacgcatcacatctggatgtcggtgacacagct

SEQ ID NO: 28657 - DNA, 80 bp, synthetic construct; identical to SEQ ID NO: 11068
  source 1..80: mol_type = other DNA

SEQ ID NO: 28658 - DNA, 80 bp, synthetic construct
  source 1..80: mol_type = other DNA
ggcaaagtcggcatttggggaagtgaatgacgggtaagaagcaacgtgtcttggggagaatgtgtggaagactgttctca

SEQ ID NO: 28659 - DNA, 80 bp, synthetic construct
  source 1..80: mol_type = other DNA
atcaacacccgctggtatctgatgttacactctcctcacagacaggctgttctttccttactgaagagccttttaaatat

SEQ ID NO: 28660 - DNA, 80 bp, synthetic construct
  source 1..80: mol_type = other DNA
ctacccagatgttctctattagtcgtgaaatgtttagaaaggtaccttttatataacccaagctgccataggtgtctttt

SEQ ID NO: 28661 - DNA, 80 bp, synthetic construct
  source 1..80: mol_type = other DNA
gaaacagaaatagtcattttattgaaaaatggtcagtctgataaatcaatctttgatcctgtgtcagcaatgtcaaggct

SEQ ID NO: 28662 - DNA, 80 bp, synthetic construct; identical to SEQ ID NO: 11069
  source 1..80: mol_type = other DNA

SEQ ID NO: 28663 - DNA, 80 bp, synthetic construct
  source 1..80: mol_type = other DNA
caaaaataaataaataaattgcagaccaacgtacaaaggaaagcagcaaagttactcttcgcggggacggttgtgaacaa

SEQ ID NO: 28664 - DNA, 80 bp, synthetic construct
  source 1..80: mol_type = other DNA
ggaaataatacaaagtcacacgctttaggttctacaactcctgactggctgaattggcccgtcgatttaccttgaggcag

SEQ ID NO: 28665 - DNA, 80 bp, synthetic construct; identical to SEQ ID NO: 11070
  source 1..80: mol_type = other DNA

SEQ ID NO: 28666 - DNA, 80 bp, synthetic construct
  source 1..80: mol_type = other DNA
cccccgcgcccgtgcgcgtggacttaccaccatgaagagttgacctcgggggtgagccaggtcaagagcagagggagcca

SEQ ID NO: 28667 - DNA, 80 bp, synthetic construct
  source 1..80: mol_type = other DNA
tcgcgtctgcgacgagtggcgagactcgctgataaagtttcaaacgatgggcccagcgagcgataaaggccagcccggac

SEQ ID NO: 28668 - DNA, 80 bp, synthetic construct
  source 1..80: mol_type = other DNA
cacgggtgcatgaaatgatggcaagagatgtctggggatgaggtgaggcggggaagggggaacatcgctgcatggttacg

SEQ ID NO: 28669 - DNA, 80 bp, synthetic construct; identical to SEQ ID NO: 11071
  source 1..80: mol_type = other DNA

SEQ ID NO: 28670 - DNA, 80 bp, synthetic construct
  source 1..80: mol_type = other DNA
ctaacccagcagtatctgccaaagcacccaggaaagatgcagtttttacgcacacccagctcctctccggagctgcggag

SEQ ID NO: 28671 - DNA, 80 bp, synthetic construct
  source 1..80: mol_type = other DNA
cttgggcccgcgggtggagcattttgagcagtagctggcttgtagccgcgccgtttatcaccggaaaggaaggaagacca

SEQ ID NO: 28672 - DNA, 80 bp, synthetic construct
  source 1..80: mol_type = other DNA
atcggaaggacgggctctccctctctccagcccaccctcgggcctggactggccagagcgtcagccctcgccggcagcga

SEQ ID NO: 28673 - DNA, 80 bp, synthetic construct
  source 1..80: mol_type = other DNA
aaacaagcaccgcgccacccacgactcgggaagagcagggctcctcgccagggccgctccgtatcgctgggccgcgaccc

SEQ ID NO: 28674 - DNA, 80 bp, synthetic construct; identical to SEQ ID NO: 11072
  source 1..80: mol_type = other DNA

SEQ ID NO: 28675 - DNA, 80 bp, synthetic construct
  source 1..80: mol_type = other DNA
attatgatttgaaaccacctaaaaaactccaactcaagttccacccatctcagcacatcgtgtcctcacagctaaggggt

SEQ ID NO: 28676 - DNA, 80 bp, synthetic construct
  source 1..80: mol_type = other DNA
aaagctaattaaatccacgccagaggacttcatcctggggcaggaggaggaggagtgccacatgtctcacagagaagaaa

SEQ ID NO: 28677 - DNA, 80 bp, synthetic construct; identical to SEQ ID NO: 11073
  source 1..80: mol_type = other DNA

SEQ ID NO: 28678 - DNA, 80 bp, synthetic construct
  source 1..80: mol_type = other DNA
aataatgaagtaaattgcatatgacttcagcctagctatagcagatgatgaggtaaggaaagaaagggtcagagtgtctt

SEQ ID NO: 28679 - DNA, 80 bp, synthetic construct
  source 1..80: mol_type = other DNA
gtctattttcttagttagatccattgtttgtctaatctcccagggcagtgtaagagaactcatttacaactgagccatct

SEQ ID NO: 28680 - DNA, 80 bp, synthetic construct
  source 1..80: mol_type = other DNA
tatagtatcaatcgtttaaatctcagtgtgcctttaaattaatgtgcaccgaagttttttgcttccagccatgagagagt

SEQ ID NO: 28681 - DNA, 80 bp, synthetic construct
  source 1..80: mol_type = other DNA
tttttctgctgaagagaaaaacatttttctagaatgtaggaaggtagaatacaggcaaggcagtagtttcagttaaggag

SEQ ID NO: 28682 - DNA, 80 bp, synthetic construct; identical to SEQ ID NO: 11074
  source 1..80: mol_type = other DNA

SEQ ID NO: 28683 - DNA, 80 bp, synthetic construct
  source 1..80: mol_type = other DNA
gaatggtaagaaatcagacaggaccagggaaatttataagaatgaaacaacacccattaaaaaaaaaacaacatgataca

SEQ ID NO: 28684 - DNA, 80 bp, synthetic construct
  source 1..80: mol_type = other DNA
acaaaccaaccaacaaacccaacaaacaaatatggacaagtgaaaaacacacaaaagtgatctatacttaagagaaagca

SEQ ID NO: 28685 - DNA, 80 bp, synthetic construct
  source 1..80: mol_type = other DNA
acaatgaacaaatagagaatctcagcagaaaaatggaagccaaaagaaagaaatgaaaattcaaaaccccgttagtacag

SEQ ID NO: 28686 - DNA, 80 bp, synthetic construct; identical to SEQ ID NO: 11075
  source 1..80: mol_type = other DNA

SEQ ID NO: 28687 - DNA, 80 bp, synthetic construct
  source 1..80: mol_type = other DNA
aaatgaagtggaactcttctcttgcttcttattcttcacttaaccttaggaataagaaccacattgcatgaataagagca

SEQ ID NO: 28688 - DNA, 80 bp, synthetic construct
  source 1..80: mol_type = other DNA
cctagacaggatcacgatttcccagtggtacttttttttgctatccaaaagaaaactccacctttttttttgttagagtc

SEQ ID NO: 28689 - DNA, 80 bp, synthetic construct
  source 1..80: mol_type = other DNA
acgtggtttcgccatgttggccagtctggtcttcaactcctgacctcaggtgatctgcccaccttggcctcccaaagtgg

SEQ ID NO: 28690 - DNA, 80 bp, synthetic construct; identical to SEQ ID NO: 11076
  source 1..80: mol_type = other DNA

SEQ ID NO: 28691 - DNA, 80 bp, synthetic construct
  source 1..80: mol_type = other DNA
gggctgaggcaggagaatggcatgaacccaggaggtggagcttgcagtgagcccatatcacgccactgcactccagcctg

SEQ ID NO: 28692 - DNA, 80 bp, synthetic construct
  source 1..80: mol_type = other DNA
atccagaactagggagaagagaacagaagcagtgactgcaagtaagaattagatacatgggttgaggatctatctataat

SEQ ID NO: 28693 - DNA, 80 bp, synthetic construct
  source 1..80: mol_type = other DNA
aagagagaatgggactaaagaaatatttgaataactaccagttgagaattttccaaaactgatggaaggaatcaaaccac

SEQ ID NO: 28694 - DNA, 80 bp, synthetic construct; identical to SEQ ID NO: 11077
  source 1..80: mol_type = other DNA

SEQ ID NO: 28695 - DNA, 80 bp, synthetic construct
  source 1..80: mol_type = other DNA
gccagttatttaagctgaaggacaatgatccaagatggaattatggaatcagagtcccctgctggtttttgtgttagtga

SEQ ID NO: 28696 - DNA, 80 bp, synthetic construct
  source 1..80: mol_type = other DNA
tttgcaattccataattccatctgggctcattttaagtactactgaatggtggtgagtttcccattttgctttttttctg

SEQ ID NO: 28697 - DNA, 80 bp, synthetic construct
  source 1..80: mol_type = other DNA
tgggagctggcatggacagaaaagcatacaggaaaggtatctggattcaagtagtgtgaaagagatttctaacatactca

SEQ ID NO: 28698 - DNA, 80 bp, synthetic construct; identical to SEQ ID NO: 11078
  source 1..80: mol_type = other DNA

SEQ ID NO: 28699 - DNA, 80 bp, synthetic construct
  source 1..80: mol_type = other DNA
atgagaatcttgggaaaacagtcatataaagttgtatgtgaagtcctgtgcttaccctctaagttacgtacatgtggatt

SEQ ID NO: 28700 - DNA, 80 bp, synthetic construct
  source 1..80: mol_type = other DNA
tttgaaaactgaactaacatcagaaccagaacccacataaggctggtcagaatttgtggcctgaacccaattaggttgct

SEQ ID NO: 28701 - DNA, 80 bp, synthetic construct
  source 1..80: mol_type = other DNA
aagaactaggaaaattgcaactcaaatagaaaaagaccatcaagagacactactgcctaggtgacaaagatgttgaaatt

SEQ ID NO: 28702 - DNA, 80 bp, synthetic construct
  source 1..80: mol_type = other DNA
aatctatctcaatggatagaggtgataacaaaatggaggtgacagagaaagatgtgaatgaacttgaaaatagatcagtg

SEQ ID NO: 28703 - DNA, 80 bp, synthetic construct; identical to SEQ ID NO: 11079
  source 1..80: mol_type = other DNA

SEQ ID NO: 28704 - DNA, 80 bp, synthetic construct
  source 1..80: mol_type = other DNA
aagcagaagaaagtggaacatttttttaaagcactgataaaaagaaccatcaacccagtattctatacacaaagaaaata

SEQ ID NO: 28705 - DNA, 80 bp, synthetic construct
  source 1..80: mol_type = other DNA
gtaaatatctgaataaaagttacagactcttctagtcctctccagttctttaagaaggcagaaaaggggaaacaggattg

SEQ ID NO: 28706 - DNA, 80 bp, synthetic construct
  source 1..80: mol_type = other DNA
ggtatttggtaatagaaatgagacttaaaaaacagaagtggtataaacaggaaaacaggcaataatgcagttagaaccat

SEQ ID NO: 28707 - DNA, 80 bp, synthetic construct; identical to SEQ ID NO: 11080
  source 1..80: mol_type = other DNA

SEQ ID NO: 28708 - DNA, 80 bp, synthetic construct
  source 1..80: mol_type = other DNA
cacttcaaatacaattatacaagtaggtaaaaaggagaagtacacaaaaagataaatgacacaaacactaattaaaagaa

SEQ ID NO: 28709 - DNA, 80 bp, synthetic construct
  source 1..80: mol_type = other DNA
cgaagcaaaaatttgacagaactaaaaggaaaaaaacagacaaatgcacaattacagttagagatgtcaacattcctcac

SEQ ID NO: 28710 - DNA, 80 bp, synthetic construct
  source 1..80: mol_type = other DNA
tgcattattgtgaaactatatttaatatagattctaataagtcaagaatacatgttgtaatctcctgggtaaccactaaa

SEQ ID NO: 28711 - DNA, 80 bp, synthetic construct; identical to SEQ ID NO: 11081
  source 1..80: mol_type = other DNA

SEQ ID NO: 28712 - DNA, 80 bp, synthetic construct
  source 1..80: mol_type = other DNA
gcaggacctgcccagattcaagagagggagaagtaaactctgcttcttgataggagagtaacaaagtaacactaaaggag

SEQ ID NO: 28713 - DNA, 80 bp, synthetic construct
  source 1..80: mol_type = other DNA
tgaagtccaggaccttgtcatctaaatcaattacaaatgcagataaggctcctcaggtgctgatcctaaaatctttatga

SEQ ID NO: 28714 - DNA, 80 bp, synthetic construct
  source 1..80: mol_type = other DNA
tgcaaaaatagacccatatataggaccaacttcattttcagcaaaagtgccaagcaatttaatgaggaagaaaggagaat

SEQ ID NO: 28715 - DNA, 80 bp, synthetic construct; identical to SEQ ID NO: 11082
  source 1..80: mol_type = other DNA

SEQ ID NO: 28716 - DNA, 80 bp, synthetic construct
  source 1..80: mol_type = other DNA
ctatcttagaatcagtgaaattaaatgttaaggcaaaaaacattagtagagataaaaaggttgatgatatcatgataaag

SEQ ID NO: 28717 - DNA, 80 bp, synthetic construct
  source 1..80: mol_type = other DNA
ttgcttttggtaagtaatacaccaccccaaaatttagatgcttaaaacagcaatcacttgttagctcattatattgtggg

SEQ ID NO: 28718 - DNA, 80 bp, synthetic construct; identical to SEQ ID NO: 11083
  source 1..80: mol_type = other DNA

SEQ ID NO: 28719 - DNA, 80 bp, synthetic construct
  source 1..80: mol_type = other DNA
gatggacctgctatctcatttcaaggatatagattcaggtgggaaaatattttgtaaccatttttatagtctacatattg

SEQ ID NO: 28720 - DNA, 80 bp, synthetic construct
  source 1..80: mol_type = other DNA
agctaaaaaattattctcagcaaaaaaccaaagaactgctcttttataaaccccattttcaggccaaaactcagttaagc

SEQ ID NO: 28721 - DNA, 80 bp, synthetic construct
  source 1..80: mol_type = other DNA
agtgatatttagataaaaattctagctttaagtgtttacattagaaaagatgaacaatgtaaactaacgagttgtgcaca

SEQ ID NO: 28722 - DNA, 80 bp, synthetic construct; identical to SEQ ID NO: 11084
  source 1..80: mol_type = other DNA

SEQ ID NO: 28723 - DNA, 80 bp, synthetic construct
  source 1..80: mol_type = other DNA
aaaaatctgccaataaaacaccatactgtctgcagggaaaaaaattgaaaatctttcaatgtcatttaatacataaatac

SEQ ID NO: 28724 - DNA, 80 bp, synthetic construct
  source 1..80: mol_type = other DNA
ttattgcccaggctggagtgcagtggcatgttcttggcttactgcaatctctgcctcttgggttccagcgattttcctgt

SEQ ID NO: 28725 - DNA, 80 bp, synthetic construct
  source 1..80: mol_type = other DNA
tacaggcgtgagccactgtgcccagccaaaaacttttctaataattgaaaggaatctaacagacttacagcaaatgtatc

SEQ ID NO: 28726 - DNA, 80 bp, synthetic construct; identical to SEQ ID NO: 11085
  source 1..80: mol_type = other DNA

SEQ ID NO: 28727 - DNA, 80 bp, synthetic construct
  source 1..80: mol_type = other DNA
agatccacaagtacattagaaattaggtgtaggaaataggcaccacttcaaatcaaagggaaatgatggattattcaata

SEQ ID NO: 28728 - DNA, 80 bp, synthetic construct
  source 1..80: mol_type = other DNA
aacaaaaaacaccaatgacaaaaggtaagcagtagataagagatatttcaacatacgtaacagatacagataagtatttc

SEQ ID NO: 28729 - DNA, 80 bp, synthetic construct
  source 1..80: mol_type = other DNA
tgttgaatccatcagatagaagaaaatttaagtcagttaatattatgtgttggcaagtgcaggggtagtgaacactcttg

SEQ ID NO: 28730 - DNA, 80 bp, synthetic construct; identical to SEQ ID NO: 11086
  source 1..80: mol_type = other DNA

SEQ ID NO: 28731 - DNA, 80 bp, synthetic construct
  source 1..80: mol_type = other DNA
ttgtaggagggagctggtaaataaatatctagactgcactctccctcggatattctgctggggttcctcattggataaac

SEQ ID NO: 28732 - DNA, 80 bp, synthetic construct
  source 1..80: mol_type = other DNA
ccattgctaaatatagttaaagacattttgttgtgcatcaggacacatgtacgtatgcatagtacaatactgttgagaag

SEQ ID NO: 28733 - DNA, 80 bp, synthetic construct
  source 1..80: mol_type = other DNA
gaacagaatgaagcaacattagtataaccccatattagttgggagtgtctttagcaccactgacagaaaacttagctaca

SEQ ID NO: 28734 - DNA, 80 bp, synthetic construct
  source 1..80: mol_type = other DNA
tctagcatatatacaaggaaggttctttctgtctcactgttcttagcgtatggctccatcttatggctttgagatattta

SEQ ID NO: 28735 - DNA, 80 bp, synthetic construct; identical to SEQ ID NO: 11087
  source 1..80: mol_type = other DNA

SEQ ID NO: 28736 - DNA, 80 bp, synthetic construct
  source 1..80: mol_type = other DNA
gtttggccttatatacagtggtttctgcttctaacctgcaactgattgcacatctttgcatttgagtaggtacagttcgt

SEQ ID NO: 28737 - DNA, 80 bp, synthetic construct
  source 1..80: mol_type = other DNA
aaatatggcaatttgaaaaatctgactccttttctcacacagagtatcacttttggtgcaaggcactataacatatgctt

SEQ ID NO: 28738 - DNA, 80 bp, synthetic construct
  source 1..80: mol_type = other DNA
gagtttcgctctcattgcccaggctggagtgcaatggtacgatcttggctcactgcaacctccgcctcctgggttcaagc

SEQ ID NO: 28739 - DNA, 80 bp, synthetic construct; identical to SEQ ID NO: 11088
  source 1..80: mol_type = other DNA

SEQ ID NO: 28740 - DNA, 80 bp, synthetic construct
  source 1..80: mol_type = other DNA
gtaagtggtagagctgaaattggtacttggatctgtctggctccaagtctgcattaactataaaactctacaacaacttc

SEQ ID NO: 28741 - DNA, 80 bp, synthetic construct
  source 1..80: mol_type = other DNA
ggaagaaaatcctggtggagattagtatatgggacacattaggagtgctctggaaagcaatacctgtgcgaggaaaggca

SEQ ID NO: 28742 - DNA, 80 bp, synthetic construct; identical to SEQ ID NO: 11089
  source 1..80: mol_type = other DNA

SEQ ID NO: 28743 - DNA, 80 bp, synthetic construct
  source 1..80: mol_type = other DNA
accttttgtttccgtattttaagttcaatcttggtacaccagagctaaccatgtgtgttaattgtaatattaccactaat

SEQ ID NO: 28744 - DNA, 80 bp, synthetic construct
  source 1..80: mol_type = other DNA
ctgcaagctccgcctcccgggttcacgccattctcctgcctcagcctcccgagtagctgggactacaggcgcctgccacc

SEQ ID NO: 28745 - DNA, 80 bp, synthetic construct
  source 1..80: mol_type = other DNA
ttgtagtattaccactgaaaattctaggtgttttcatgctctatactggggttatgaactccatatgcaacaccaaaaat

SEQ ID NO: 28746 - DNA, 80 bp, synthetic construct; identical to SEQ ID NO: 11090
  source 1..80: mol_type = other DNA

SEQ ID NO: 28747 - DNA, 80 bp, synthetic construct
  source 1..80: mol_type = other DNA
ccaggatggagggcagtggtgcaatcatagcacactgcagccttgaactcctggactaaagcagtcctcccagctcagcc

SEQ ID NO: 28748 - DNA, 80 bp, synthetic construct
  source 1..80: mol_type = other DNA
attataggtatgagctatgtgcctggcctaagtatttaaattttctgatctctgatctcatataaaaaatgtaatatatg

SEQ ID NO: 28749 - DNA, 80 bp, synthetic construct
  source 1..80: mol_type = other DNA
tatgaggggttcagttttgtctaagcattgattcatgtacataaagcccctaatggctttgttctaattttaagaattcc

SEQ ID NO: 28750 - DNA, 80 bp, synthetic construct; identical to SEQ ID NO: 11091
  source 1..80: mol_type = other DNA

SEQ ID NO: 28751 - DNA, 80 bp, synthetic construct
  source 1..80: mol_type = other DNA
aacttgttaatttaatataaaatattgagaagataatctgaattcacaggtaaagaaatatagcattgttcaaatggttt

SEQ ID NO: 28752 - DNA, 80 bp, synthetic construct
  source 1..80: mol_type = other DNA
atcagtgacagagtgacttggagtgcaaaacagaaatcatcatggttatctgtgttctgaaagattaactatcatcatag

SEQ ID NO: 28753 - DNA, 80 bp, synthetic construct
  source 1..80: mol_type = other DNA
gtgttctggggcagacatccccttctcacacttcgagcactcacagttttttttgacatttcatagagcctacagcagca

SEQ ID NO: 28754 - DNA, 80 bp, synthetic construct
  source 1..80: mol_type = other DNA
aagttgcaatttagccctgcctcctagctgccatttttccctgctatcccctggattcatttttggactgataccctttt

SEQ ID NO: 28755 - DNA, 80 bp, synthetic construct
  source 1..80: mol_type = other DNA
aggccttcaaaattaacagtgtagccttgctttatgtatcatttatctagccctaatgtaatcttgtcaaacctaggtgg

SEQ ID NO: 28756 - DNA, 80 bp, synthetic construct; identical to SEQ ID NO: 11092
  source 1..80: mol_type = other DNA

SEQ ID NO: 28757 - DNA, 80 bp, synthetic construct
  source 1..80: mol_type = other DNA
gagactgtagcacttgaagccatgatccactgtcaccatatccccagccccaagccaaaacagcttagcagaagttccac

SEQ ID NO: 28758 - DNA, 80 bp, synthetic construct
  source 1..80: mol_type = other DNA
tgaagtgactaaattctggtgagtatggctgagaggttgagggatctctcctttcactgagcaccataggatgagaactc

SEQ ID NO: 28759 - DNA, 80 bp, synthetic construct
  source 1..80: mol_type = other DNA
cccagcacctagaatagtggctcagagattctgcctatgataagaagcagtccctaagaaaaaagtggctcaaaagctct

SEQ ID NO: 28760 - DNA, 80 bp, synthetic construct; identical to SEQ ID NO: 11093
  source 1..80: mol_type = other DNA

SEQ ID NO: 28761 - DNA, 80 bp, synthetic construct
  source 1..80: mol_type = other DNA
ggtcactatatatgcccaagactgctctctctgagaagaaacatcaaagacttcacaatttggggtaagtagacttcact

SEQ ID NO: 28762 - DNA, 80 bp, synthetic construct
  source 1..80: mol_type = other DNA
cacacataagaaaaagagtaggcaacagaaactaactgtgagaggggctaaatgtcatatttaacagacaaagacttcaa

SEQ ID NO: 28763 - DNA, 80 bp, synthetic construct
  source 1..80: mol_type = other DNA
ccaaaagggaattctgaaattgaaaaaagtacgataaatgaaatgtaaaaattcattacaatggctcaacagtcagtttg

SEQ ID NO: 28764 - DNA, 80 bp, synthetic construct; identical to SEQ ID NO: 11094
  source 1..80: mol_type = other DNA

SEQ ID NO: 28765 - DNA, 80 bp, synthetic construct
  source 1..80: mol_type = other DNA
gcatatttaaaatgctgaaaagaaaactctaaagacctgtcaatcaagaatcctctatctagcaaaactttatttcaaca

SEQ ID NO: 28766 - DNA, 80 bp, synthetic construct
  source 1..80: mol_type = other DNA
tctaaatctgttacttgtggcaggtatctgagttaccagcagcatatccttatgtgttcacagtaacttcaagtcttgcc

SEQ ID NO: 28767 - DNA, 80 bp, synthetic construct; identical to SEQ ID NO: 11095
  source 1..80: mol_type = other DNA

SEQ ID NO: 28768 - DNA, 80 bp, synthetic construct
  source 1..80: mol_type = other DNA
cattttgtcttttaatatgcatgcccaggaagttgcttctccctggtgtctgcattcagttaacactttaatgttaacag

SEQ ID NO: 28769 - DNA, 80 bp, synthetic construct
  source 1..80: mol_type = other DNA
gtcagggagaagagccttctcttgtctcgctaatgtctatctaactactgtaacaaatccacacaaaaaatacaaaatgg

SEQ ID NO: 28770 - DNA, 80 bp, synthetic construct
  source 1..80: mol_type = other DNA
aagtcagagggagcagggttgtattagagtaagaaaataacaatagatggtaacttgaacccacaggaacaaaagaagag

SEQ ID NO: 28771 - DNA, 80 bp, synthetic construct; identical to SEQ ID NO: 11096
  source 1..80: mol_type = other DNA

SEQ ID NO: 28772 - DNA, 80 bp, synthetic construct
  source 1..80: mol_type = other DNA
gttacattggaaaatattcacttaatgtaaaagaaagctgtaaaaaagaaataaagaaacagaaaagatatgaaacatat

SEQ ID NO: 28773 - DNA, 80 bp, synthetic construct
  source 1..80: mol_type = other DNA
atctactaatatgttctttatagaagacacaccagagattcaaagatacaaacaggtcgaaagtaaaaggatgataaaag

SEQ ID NO: 28774 - DNA, 80 bp, synthetic construct
  source 1..80: mol_type = other DNA
aataacaacagagtcccaaaataacgtgagacaaatgatgacagaaatgaaggaaggaatagttaactgaacaataatag

SEQ ID NO: 28775 - DNA, 80 bp, synthetic construct; identical to SEQ ID NO: 11097
  source 1..80: mol_type = other DNA

SEQ ID NO: 28776 - DNA, 80 bp, synthetic construct
  source 1..80: mol_type = other DNA
actttgggaggccgaggcgggtggatcagaaggtcaggagatggagaccatcctggccaacatggtgaaacctcgtctct

SEQ ID NO: 28777 - DNA, 80 bp, synthetic construct
  source 1..80: mol_type = other DNA
tctccaaaaaaaagaaaaaaaagaaaagaaaaagaaccaatgggtcaaggaagaaatcactggaaaaattagaaaataag

SEQ ID NO: 28778 - DNA, 80 bp, synthetic construct
  source 1..80: mol_type = other DNA
ataataaggattaaagcagtaattaaataaatgaataataagaataaaggaagtctccatagccaaaggttgttctttaa

SEQ ID NO: 28779 - DNA, 80 bp, synthetic construct; identical to SEQ ID NO: 11098
  source 1..80: mol_type = other DNA

SEQ ID NO: 28780 - DNA, 80 bp, synthetic construct
  source 1..80: mol_type = other DNA
aaaaacaagagggaacttttttttaactcattctattagttattatcctgataaaaccagataaagacattgtaagaaaa

SEQ ID NO: 28781 - DNA, 80 bp, synthetic construct
  source 1..80: mol_type = other DNA
aacgcaagactggtaacaccaaatcaacagactaaaggacaaaactgcatgattatgggaatagatgtaaaaacatttgg

SEQ ID NO: 28782 - DNA, 80 bp, synthetic construct
  source 1..80: mol_type = other DNA
ggatgtttgcttttgttacttctatttaacattgtactgcagggtctagccggggcaattaggcaagaaaatgtaatgaa

SEQ ID NO: 28783 - DNA, 80 bp, synthetic construct
  source 1..80: mol_type = other DNA
ttctatatagtagcaatgagcaaactgaaaatgaagttaagaaaacaatagcataagaaaaacatgcttaggaatacatt

SEQ ID NO: 28784 - DNA, 80 bp, synthetic construct; identical to SEQ ID NO: 11099
  source 1..80: mol_type = other DNA

SEQ ID NO: 28785 - DNA, 80 bp, synthetic construct
  source 1..80: mol_type = other DNA
atcttcaaggtcttagatctggcagtggattctaacatatgacatgaaaagctcaaacaacaggagaaaacaaatgagat

SEQ ID NO: 28786 - DNA, 80 bp, synthetic construct
  source 1..80: mol_type = other DNA
atgggcataggacttgaatcaacatttctccaaaaaagatatacaagtggccaatatgcacaggaaaaaatgctcattag

SEQ ID NO: 28787 - DNA, 80 bp, synthetic construct; identical to SEQ ID NO: 11100
  source 1..80: mol_type = other DNA

SEQ ID NO: 28788 - DNA, 80 bp, synthetic construct
  source 1..80: mol_type = other DNA
agtgaaaaaagtcagtcacaaaggaccacatattgtatgattccatttatatgaaatggccggaaatgaaaaatccataa

SEQ ID NO: 28789 - DNA, 80 bp, synthetic construct
  source 1..80: mol_type = other DNA
aatgaatgaattatctcaagaaagcttttaaaacaaaacattaaatgtgaacaaatacaagatcaagtgtacattttttt

SEQ ID NO: 28790 - DNA, 80 bp, synthetic construct
  source 1..80: mol_type = other DNA
gtatttttagtagagatggtttcaccatgctgcccaggttggtctcaaactcctgacctcaagtgatccgtctgccttgg

SEQ ID NO: 28791 - DNA, 80 bp, synthetic construct; identical to SEQ ID NO: 11101
  source 1..80: mol_type = other DNA

SEQ ID NO: 28792 - DNA, 80 bp, synthetic construct
  source 1..80: mol_type = other DNA
actgtagaatagctcaggcagatccttcaggaattatttcagaaggcactattattacagatgacagctgtatgcatgta

SEQ ID NO: 28793 - DNA, 80 bp, synthetic construct
  source 1..80: mol_type = other DNA
aaatagagacaagctcatagaataaggatataaagaaaatacttttgtacaattgtacaatacgttttgtgttttaagtt

SEQ ID NO: 28794 - DNA, 80 bp, synthetic construct
  source 1..80: mol_type = other DNA
caatgtcttaggctttcatatttactagccacttactcactgattcacccagagcaacttccagtcctgcaagcttcatt

SEQ ID NO: 28795 - DNA, 80 bp, synthetic construct; identical to SEQ ID NO: 11102
  source 1..80: mol_type = other DNA

SEQ ID NO: 28796 - DNA, 80 bp, synthetic construct
  source 1..80: mol_type = other DNA
atattaatggtcttctaattccaaatttactatcttacatgaaaactatccttactaataccagattttaaaactctctt

SEQ ID NO: 28797 - DNA, 80 bp, synthetic construct
  source 1..80: mol_type = other DNA
tcaagcaactcctggccagatcaggataaaatatttccagtatcctttattctttcccagtcaatacctacttctcagac

SEQ ID NO: 28798 - DNA, 80 bp, synthetic construct
  source 1..80: mol_type = other DNA
atagtttgttcttttttattactatgcagtattccattgtccaactattgtgttatttatctgttgcagttttgggctat

SEQ ID NO: 28799 - DNA, 80 bp, synthetic construct; identical to SEQ ID NO: 11103
  source 1..80: mol_type = other DNA

SEQ ID NO: 28800 - DNA, 80 bp, synthetic construct
  source 1..80: mol_type = other DNA
tcctttcctgattcttcctgtctcccttcctttgaattttggtatcctaggacctacccttcttctttgtctacattatt

SEQ ID NO: 28801 - DNA, 80 bp, synthetic construct
  source 1..80: mol_type = other DNA
tcccttctcatctctcctaattgtttttgtcttctcagagacttccttctttcggtaaatggcaactccattcttctggt

SEQ ID NO: 28802 - DNA, 80 bp, synthetic construct
  source 1..80: mol_type = other DNA
tttcattttccaatgttaattcaagctaccatcatcttgcacctggaatattgcagcagcctcctaactagtctcacagc

SEQ ID NO: 28803 - DNA, 80 bp, synthetic construct
  source 1..80: mol_type = other DNA
aaaaatgcgaaaaaaaattagccaggtgtggtggcaggcacctgcaatcccagctacttgggaggctgcggcagaattgc

SEQ ID NO: 28804 - DNA, 80 bp, synthetic construct; identical to SEQ ID NO: 11104
  source 1..80: mol_type = other DNA

SEQ ID NO: 28805 - DNA, 80 bp, synthetic construct
  source 1..80: mol_type = other DNA
cctgacacataagtgctcagtaaatatgtgagtgaatgaatgcatgagtgctggaaagagcatgggacttgaagttaaac

SEQ ID NO: 28806 - DNA, 80 bp, synthetic construct
  source 1..80: mol_type = other DNA
gcattcaaatggtaatctgtccatctctgtcctgagcctaagaaaccataatagttctttacagtataatcagtttattt

SEQ ID NO: 28807 - DNA, 80 bp, synthetic construct
  source 1..80: mol_type = other DNA
ttaaaatgaactgtgaaactacagtacgcagaatacggggcttttaattcttttctcagaaagcaaaaaatatttcaagt

SEQ ID NO: 28808 - DNA, 80 bp, synthetic construct; identical to SEQ ID NO: 11105
  source 1..80: mol_type = other DNA

SEQ ID NO: 28809 - DNA, 80 bp, synthetic construct
  source 1..80: mol_type = other DNA
gacctttacaaaaaaaatgtttgctgacctcttaactagaggaaacccagtatgcaagttctttttaaaaaatgattcta

SEQ ID NO: 28810 - DNA, 80 bp, synthetic construct
  source 1..80: mol_type = other DNA
acaaagagcactaaacacatcacttaaggatagtggcaagatgggacaagtaagcatgcttctctttgaaagatacttac

SEQ ID NO: 28811 - DNA, 80 bp, synthetic construct
  source 1..80: mol_type = other DNA
gtgcatagaattaaaactcagttgacaacatttgtatctgtggttcagggaagtctctaagggagacttactttaaatcc

SEQ ID NO: 28812 - DNA, 80 bp, synthetic construct; identical to SEQ ID NO: 11106
  source 1..80: mol_type = other DNA

SEQ ID NO: 28813 - DNA, 80 bp, synthetic construct
  source 1..80: mol_type = other DNA
atcttcacagtttgtcctaatatttgcgagatggtttggttttgtcagaagaaaaaaaatagtgacctacccagccaata

SEQ ID NO: 28814 - DNA, 80 bp, synthetic construct
  source 1..80: mol_type = other DNA
gcactgtgctgactgggagtgaaacactgtatgtgttaaaagaagtacctttagaacttctaagactcatttaaatgagg

SEQ ID NO: 28815 - DNA, 80 bp, synthetic construct; identical to SEQ ID NO: 11107
  source 1..80: mol_type = other DNA

SEQ ID NO: 28816 - DNA, 80 bp, synthetic construct
  source 1..80: mol_type = other DNA
atatagtatgtatgttccccaaagtattttacataaaaaattccaatgtactttgtactttcaacaccagtctctaattt

SEQ ID NO: 28817 - DNA, 80 bp, synthetic construct
  source 1..80: mol_type = other DNA
tattatgtaataatggagggggaaaaaagaaacaaaagaaagctcaatttatgaacactttacaaatcctgtacgattca

SEQ ID NO: 28818 - DNA, 80 bp, synthetic construct
  source 1..80: mol_type = other DNA
aaccactttttaaaaaaaaactccacattgtcaaaatttttcctatggaatattggcaaagaatgtaaagttatattgtg

SEQ ID NO: 28819 - DNA, 80 bp, synthetic construct; identical to SEQ ID NO: 11108
  source 1..80: mol_type = other DNA

SEQ ID NO: 28820 - DNA, 80 bp, synthetic construct
  source 1..80: mol_type = other DNA
tcccatggaagatttaaagtaaacatatatgtctgaaagacagtctttcattagaatcccattactgtaaatcattagtt

SEQ ID NO: 28821 - DNA, 80 bp, synthetic construct
  source 1..80: mol_type = other DNA
caaaaaagtgaatcattattatagcaaacctaaaacatgaaatttagcaaaaacgagaagatcagatgctactggtagaa

SEQ ID NO: 28822 - DNA, 80 bp, synthetic construct
  source 1..80: mol_type = other DNA
gtgtgtgtgcccactctgtgtgtatctgtgtgtgtgtgtttctgtgagagacagagagacagagagagagagagagagag

SEQ ID NO: 28823 - DNA, 80 bp, synthetic construct
  source 1..80: mol_type = other DNA
aaacatcctgtgctggagtgatgacataaatactttcaacatcagcaggaataatgacttccaaattctacagtgtaaat

SEQ ID NO: 28824 - DNA, 80 bp, synthetic construct; identical to SEQ ID NO: 11109
  source 1..80: mol_type = other DNA

SEQ ID NO: 28825 - DNA, 80 bp, synthetic construct
  source 1..80: mol_type = other DNA
ctctgaaataatataagcttaacaggcatgatagcatatttccaaatctggaagccttcataattccctaaatcaaatct

SEQ ID NO: 28826 - DNA, 80 bp, synthetic construct
  source 1..80: mol_type = other DNA
taaatagagaagggtcacgggaaaaaggtcttctatttagccaaagaacaatgaaaattctcttaacaggtatgcattat

SEQ ID NO: 28827 - DNA, 80 bp, synthetic construct; identical to SEQ ID NO: 11110
  source 1..80: mol_type = other DNA

SEQ ID NO: 28828 - DNA, 80 bp, synthetic construct
  source 1..80: mol_type = other DNA
agttcctttcctttgattcttctagatgagatataatttttgggtcatcagcaagttcaggatgtagcttgtgtagcaca

SEQ ID NO: 28829 - DNA, 80 bp, synthetic construct
  source 1..80: mol_type = other DNA
tattattttgtataatagaatttgcttcacaactttcttctcactttaaaagactccttttgggccaggcgcaatggcgc

SEQ ID NO: 28830 - DNA, 80 bp, synthetic construct
  source 1..80: mol_type = other DNA
tgggtgtggtggtgcatgcctgtagtcccagctactcaggaggctgaggcaggagaattgcttgaatctggaaggcggag

SEQ ID NO: 28831 - DNA, 80 bp, synthetic construct
  source 1..80: mol_type = other DNA
atttattaatacttggaacatgtatacaatctattttgaagaaaagaacttttttgataaaatattaatgaaaatgttaa

SEQ ID NO: 28832 - DNA, 80 bp, synthetic construct; identical to SEQ ID NO: 11111
  source 1..80: mol_type = other DNA

SEQ ID NO: 28833 - DNA, 80 bp, synthetic construct
  source 1..80: mol_type = other DNA
ggtatttcatccacaatcgtgtctctttaacagaaccaataaatacttcatttattttatctgtacatttacatgtaagt

SEQ ID NO: 28834 - DNA, 80 bp, synthetic construct
  source 1..80: mol_type = other DNA
gatacaaatatttaatagtatttggcacatcctgccaaactgtttttgaaagggcttgtgttctcacataagaatatcag

SEQ ID NO: 28835 - DNA, 80 bp, synthetic construct
  source 1..80: mol_type = other DNA
tgtgtatatttcttcctttggaaactgtcctttttcccacttgtctaagtgttccatttgttgctcttaccagaactgct

SEQ ID NO: 28836 - DNA, 80 bp, synthetic construct; identical to SEQ ID NO: 11112
  source 1..80: mol_type = other DNA

SEQ ID NO: 28837 - DNA, 80 bp, synthetic construct
  source 1..80: mol_type = other DNA
atgagcttgccaaatgcatttcctgaatatatgtatatataactttctatatggagattaatattagtaataacatttat

SEQ ID NO: 28838 - DNA, 80 bp, synthetic construct
  source 1..80: mol_type = other DNA
actttttctttcttttttttgagaaagtgtcttgttctgttgcccaggctggagtgcagtggtgcaatcatggctcactg

SEQ ID NO: 28839 - DNA, 80 bp, synthetic construct
  source 1..80: mol_type = other DNA
tctcaccatgctgctcaggctggtctcaaactcctggcctcaagcaattctcccacgtgggcctcccaaagtgttgggat

SEQ ID NO: 28840 - DNA, 80 bp, synthetic construct
  source 1..80: mol_type = other DNA
ttcaatacacggatcagtttaatttttggtctgactcattttctttttcttgaaggcaagaatacaaagttttaaaatca

SEQ ID NO: 28841 - DNA, 80 bp, synthetic construct; identical to SEQ ID NO: 11113
  source 1..80: mol_type = other DNA

SEQ ID NO: 28842 - DNA, 80 bp, synthetic construct
  source 1..80: mol_type = other DNA
tagctaatacagattaggtactgaaacaggcattgattataaaagaaaaacaaacctccaatcccgaggatcttaaagtt

SEQ ID NO: 28843 - DNA, 80 bp, synthetic construct
  source 1..80: mol_type = other DNA
ggatagatgttgttaatactattttatagtggagacatctaaaattcagggggaatgaatttagtatcacatgagaagga

SEQ ID NO: 28844 - DNA, 80 bp, synthetic construct
  source 1..80: mol_type = other DNA
agtacaggggtaaaggtcactaaggtgtaattaaaacacaaattattgaaaagtagtaagagaaaaggctggatataacc

SEQ ID NO: 28845 - DNA, 80 bp, synthetic construct; identical to SEQ ID NO: 11114
  source 1..80: mol_type = other DNA

SEQ ID NO: 28846 - DNA, 80 bp, synthetic construct
  source 1..80: mol_type = other DNA
atttggtggtgcatggtggggaaaacagtgggataaaagaaaacattatggcataataattaagaacacaggctcttgag

SEQ ID NO: 28847 - DNA, 80 bp, synthetic construct
  source 1..80: mol_type = other DNA
tagctggtgttcaagcaaacataattatgatgactgcaatggtgaggagacatgcgggtggcaacaaccagtaagtggta

SEQ ID NO: 28848 - DNA, 80 bp, synthetic construct
  source 1..80: mol_type = other DNA
aaccaagattcagtctttccttcaattgcgaaggtagcacagacacagtagtattagagatgtctccaacagaaatcaaa

SEQ ID NO: 28849 - DNA, 80 bp, synthetic construct; identical to SEQ ID NO: 11115
  source 1..80: mol_type = other DNA

SEQ ID NO: 28850 - DNA, 80 bp, synthetic construct
  source 1..80: mol_type = other DNA
aattaagtagatcattaatatcaagagttgacaagtgtattagatgacctttctggggagtcctttaacagtatctactg

SEQ ID NO: 28851 - DNA, 80 bp, synthetic construct
  source 1..80: mol_type = other DNA
gttcaagtgattctcatgcctcagccacctgagtagttgggattacaggtgtgtaccaccatgcccagctaatttttgta

SEQ ID NO: 28852 - DNA, 80 bp, synthetic construct; identical to SEQ ID NO: 11116
  source 1..80: mol_type = other DNA

SEQ ID NO: 28853 - DNA, 80 bp, synthetic construct
  source 1..80: mol_type = other DNA
tattctcttagctattaggctgaaaaaaatgaacaatttcactttaacagttttataaaatataaactttatatacataa

SEQ ID NO: 28854 - DNA, 80 bp, synthetic construct
  source 1..80: mol_type = other DNA
atctttactctagaaaacacagaacttagggtatatgacacatttctgccaaagcaacagcagtgattacttgtattttg

SEQ ID NO: 28855 - DNA, 80 bp, synthetic construct
  source 1..80: mol_type = other DNA
agaattatcattggaagtatcaactgatagcaggtatgtaattttagacaggtgattcacaaatatatatgcggaatata

SEQ ID NO: 28856 - DNA, 80 bp, synthetic construct
  source 1..80: mol_type = other DNA
tttcagagccactgaatatggatggacaaattgtacaaaacaaaactcaacagtgtgccatttacactatgtgaatggtg

SEQ ID NO: 28857 - DNA, 80 bp, synthetic construct; identical to SEQ ID NO: 11117
  source 1..80: mol_type = other DNA

SEQ ID NO: 28858 - DNA, 80 bp, synthetic construct
  source 1..80: mol_type = other DNA
gactgttcctccagcctactctcagaatgacaagatcactgttgctgagccatgatatagacgatcaggaaataaagtct

SEQ ID NO: 28859 - DNA, 80 bp, synthetic construct
  source 1..80: mol_type = other DNA
ctgtagaatatctggaaaagattaaaatcatcaacaatcttaccactcacagacaactgactggtactattttctctcag

SEQ ID NO: 28860 - DNA, 80 bp, synthetic construct
  source 1..80: mol_type = other DNA
ctatggatatatataactgacattgtgcttcacatgaccttttatattgtgccttttataattatcatgagtattttccc

SEQ ID NO: 28861 - DNA, 80 bp, synthetic construct; identical to SEQ ID NO: 11118
  source 1..80: mol_type = other DNA

SEQ ID NO: 28862 - DNA, 80 bp, synthetic construct
  source 1..80: mol_type = other DNA
ccaaggctggccttgaactcctgggctcaagttatcctcctgcctcagtctctcaagtagatgggactacaggcacaccc

SEQ ID NO: 28863 - DNA, 80 bp, synthetic construct
  source 1..80: mol_type = other DNA
cacattaccaggagattataatcaatcagttcaacttttcctgctgttagttttcttatgacttaatgactaatttcttc

SEQ ID NO: 28864 - DNA, 80 bp, synthetic construct
  source 1..80: mol_type = other DNA
ggattctgcacattctttacatttattaaatcccataaagtaaattcatataggcaaccctgccatcatacaaataagtt

SEQ ID NO: 28865 - DNA, 80 bp, synthetic construct; identical to SEQ ID NO: 11119
  source 1..80: mol_type = other DNA

SEQ ID NO: 28866 - DNA, 80 bp, synthetic construct
  source 1..80: mol_type = other DNA
ttaagaaattaggatcgtctatattatttcctggaatacttctctgaactccaaaataatgtgaaaatctattgtttgta

SEQ ID NO: 28867 - DNA, 80 bp, synthetic construct
  source 1..80: mol_type = other DNA
taatatatacaccaagctccttaggtcattctgataacttagccaggtaagggaaccactagcataaatcatggttacga

SEQ ID NO: 28868 - DNA, 80 bp, synthetic construct
  source 1..80: mol_type = other DNA
aaataaaatgattgtgatctcttaaatcaactaaaaaaagaaaacttagaaaagaatactaagctggtattaaaagtaag

SEQ ID NO: 28869 - DNA, 80 bp, synthetic construct; identical to SEQ ID NO: 11120
  source 1..80: mol_type = other DNA

SEQ ID NO: 28870 - DNA, 80 bp, synthetic construct
  source 1..80: mol_type = other DNA
tataaggtggtgttgctaagtgacataatttcaaaattatctagttggtggaatgaaaacaattattataggttatttcg

SEQ ID NO: 28871 - DNA, 80 bp, synthetic construct
  source 1..80: mol_type = other DNA
attctggaccttatatttctattaatgcagcctaacagtgctagctttccataactagtcatgtgacactgttaacctaa

SEQ ID NO: 28872 - DNA, 80 bp, synthetic construct
  source 1..80: mol_type = other DNA
taatgctctatgtctccatctagccaccagtcacatgtagctaccgaacccttgaaatcatacagtgtatattctctgac

SEQ ID NO: 28873 - DNA, 80 bp, synthetic construct; identical to SEQ ID NO: 11121
  source 1..80: mol_type = other DNA

SEQ ID NO: 28874 - DNA, 80 bp, synthetic construct
  source 1..80: mol_type = other DNA
aaagagaaaagacagaaatcgccaatataaagaatgaaatggggtattataacagatcccacagccatccaaagagtagc

SEQ ID NO: 28875 - DNA, 80 bp, synthetic construct
  source 1..80: mol_type = other DNA
ggggtattataacagatcccacagccatccaaagagtagctggaaatactaggggcaacttttggcttgataaattagaa

SEQ ID NO: 28876 - DNA, 80 bp, synthetic construct
  source 1..80: mol_type = other DNA
tacagaatgtttaaagaagagttaatgtcaattctacacaatctcttacagaaaataaaaggagggggaatacatcccaa

SEQ ID NO: 28877 - DNA, 80 bp, synthetic construct
  source 1..80: mol_type = other DNA
cacatgggattaatccaggtatgcaaggttggctcaatagttaaaaatctaacaaagtaaccatatcaacaggctaaaga

SEQ ID NO: 28878 - DNA, 80 bp, synthetic construct; identical to SEQ ID NO: 11122
  source 1..80: mol_type = other DNA

SEQ ID NO: 28879 - DNA, 80 bp, synthetic construct
  source 1..80: mol_type = other DNA
atgtacagtcgagacacaaaaatcaattgcacatggaaacaaataaaaagagaaataccattggcaattgtgccaaataa

SEQ ID NO: 28880 - DNA, 80 bp, synthetic construct
  source 1..80: mol_type = other DNA
gtttgagaccaactgtggcaacaaagtggagactctgtctctacaaaaaagttcaaaaattagccaggcatggtggtgca

SEQ ID NO: 28881 - DNA, 80 bp, synthetic construct
  source 1..80: mol_type = other DNA
acttttagagatatctgtgtttatgaattagtagaattaacatagctaaatgtcaattatacctaaattaatcaatagga

SEQ ID NO: 28882 - DNA, 80 bp, synthetic construct; identical to SEQ ID NO: 11123
  source 1..80: mol_type = other DNA

SEQ ID NO: 28883 - DNA, 80 bp, synthetic construct
  source 1..80: mol_type = other DNA
gtgctggggcaattatctatccccaggtgaaaaaaaaaatgaacctcagcctaaacctcataactttacaaaaatgaact

SEQ ID NO: 28884 - DNA, 80 bp, synthetic construct
  source 1..80: mol_type = other DNA
tcttaaactgttctttaacctgatactaaaaatatgccaaaagtactgttctgtaaagggaaaatttggtaacttagacc

SEQ ID NO: 28885 - DNA, 80 bp, synthetic construct
  source 1..80: mol_type = other DNA
aaaatgggcaaaagatactgttagaatttcaccacaaaaagtacacatatggcaaataagatataaaaggctgtttgaca

SEQ ID NO: 28886 - DNA, 80 bp, synthetic construct; identical to SEQ ID NO: 11124
  source 1..80: mol_type = other DNA

SEQ ID NO: 28887 - DNA, 80 bp, synthetic construct
  source 1..80: mol_type = other DNA
ttaaacaaactgtggtatatacataccatggaatactactcagcaataaaaaggaattaactattgtactgatacatgca

SEQ ID NO: 28888 - DNA, 80 bp, synthetic construct
  source 1..80: mol_type = other DNA
ttagatgtggctataaaggggtattatgagacagccctgtgttaagtacattgaacacggaagtagttacatgaagctat

SEQ ID NO: 28889 - DNA, 80 bp, synthetic construct
  source 1..80: mol_type = other DNA
tataaaagataccaatactgggcaaaactaggtacagaatgcatgggacttccctgtgtatctttgaaatatcccaataa

SEQ ID NO: 28890 - DNA, 80 bp, synthetic construct; identical to SEQ ID NO: 11125
  source 1..80: mol_type = other DNA

SEQ ID NO: 28891 - DNA, 80 bp, synthetic construct
  source 1..80: mol_type = other DNA
ttataaaaattgactttacaaagtacatctaatttcagaacacagtatcttccaaaatctattaccctgggaaaatgatg

SEQ ID NO: 28892 - DNA, 80 bp, synthetic construct
  source 1..80: mol_type = other DNA
cagatagctctccaaattgtatctcttctacctgtagttctttaagagcagccagaattttctgctggtctttactggta

SEQ ID NO: 28893 - DNA, 80 bp, synthetic construct
  source 1..80: mol_type = other DNA
atattggaaaaataacacacttctaaaaaatatgtttttcttataactgtgattgatgttagttacagcattagaatatt

SEQ ID NO: 28894 - DNA, 80 bp, synthetic construct
  source 1..80: mol_type = other DNA
gaattaggccctatctttgtttgtattctacctttagtgttaaactaaattttctatactggatttagttttgtagtatg

SEQ ID NO: 28895 - DNA, 80 bp, synthetic construct; identical to SEQ ID NO: 11126
  source 1..80: mol_type = other DNA

SEQ ID NO: 28896 - DNA, 80 bp, synthetic construct
  source 1..80: mol_type = other DNA
tctaatcaaggacacagtagaagatcaatcttttgtctatagccctggcattttaaaaagagagaagaaaaggatccaca

SEQ ID NO: 28897 - DNA, 80 bp, synthetic construct
  source 1..80: mol_type = other DNA
gagaagtaggcaaatgttcataagttagttacttgcttcactctgaagcaaattccaattttctagaggggacaggatat

SEQ ID NO: 28898 - DNA, 80 bp, synthetic construct
  source 1..80: mol_type = other DNA
tatgttttatgaatattttaaatttctgactgtatcacattaaaccaacatgtagttttactcaagatttctccaaatag

SEQ ID NO: 28899 - DNA, 80 bp, synthetic construct; identical to SEQ ID NO: 11127
  source 1..80: mol_type = other DNA

SEQ ID NO: 28900 - DNA, 80 bp, synthetic construct
  source 1..80: mol_type = other DNA
tacagaaacaaactaagggctcaggtgtatatgaaggttaggcagtgggtaaaaactgtttaatctcagattctaattta

SEQ ID NO: 28901 - DNA, 80 bp, synthetic construct
  source 1..80: mol_type = other DNA
ctgtcatatgttcaagtccaagaccatgtaaaaatacttccagatctccaaatgctgtatatgaactgtatacatttata

SEQ ID NO: 28902 - DNA, 80 bp, synthetic construct
  source 1..80: mol_type = other DNA
gatatatgaggagtataactcatctttccccaaatgaaaatatatgccagtatgtactccttgtgaaatttctgcacata

SEQ ID NO: 28903 - DNA, 80 bp, synthetic construct; identical to SEQ ID NO: 11128
  source 1..80: mol_type = other DNA

SEQ ID NO: 28904 - DNA, 80 bp, synthetic construct
  source 1..80: mol_type = other DNA
gttagtacataaaaatgaataaaaattttctaaaattctggagaacactaaaaacccagacatttaaaaatgcttgtaaa

SEQ ID NO: 28905 - DNA, 80 bp, synthetic construct
  source 1..80: mol_type = other DNA
gtgtcttctttagttagctgttgaagttttccttccaatggatttaaagtaaaagaaagtaagttgaagatctgaaaaaa

SEQ ID NO: 28906 - DNA, 80 bp, synthetic construct
  source 1..80: mol_type = other DNA
atatcacagttgtatatattttggggggtacatgcgatattttgatacacatatacaatgtataataaacaaatcagggt

SEQ ID NO: 28907 - DNA, 80 bp, synthetic construct; identical to SEQ ID NO: 11129
  source 1..80: mol_type = other DNA

SEQ ID NO: 28908 - DNA, 80 bp, synthetic construct
  source 1..80: mol_type = other DNA
tcaagtttggtgtcatctactctacatttaacaatgtaataaaataattttaagtttttgaattttcaaagtttggaaga

SEQ ID NO: 28909 - DNA, 80 bp, synthetic construct
  source 1..80: mol_type = other DNA
gcttggtttgatgattacatgacggaatctttggaattttacgtgctttcaaattcgggaactcagtgttacaaactctt

SEQ ID NO: 28910 - DNA, 80 bp, synthetic construct; identical to SEQ ID NO: 11130
  source 1..80: mol_type = other DNA

SEQ ID NO: 28911 - DNA, 80 bp, synthetic construct
  source 1..80: mol_type = other DNA
aagtgcttcttgtttcatagaagatgaatactctagcaaaataaagttctcattacctggctggaggaaagatacatatt

SEQ ID NO: 28912 - DNA, 80 bp, synthetic construct
  source 1..80: mol_type = other DNA
ggcatctttccatctttggtttgtagcattttattagctccaagttcaagcaacttcaaaactatatttttatgaccctg

SEQ ID NO: 28913 - DNA, 80 bp, synthetic construct
  source 1..80: mol_type = other DNA
acaatataatgtaaacatatttccaaagttgtaattgcaaagctgactgcaaagctcattgattttttaaaaccagtgtt

SEQ ID NO: 28914 - DNA, 80 bp, synthetic construct; identical to SEQ ID NO: 11131
  source 1..80: mol_type = other DNA

SEQ ID NO: 28915 - DNA, 80 bp, synthetic construct
  source 1..80: mol_type = other DNA
caaattcctaacctcaaatgatccgcctgcctcggcctcccaaagtgcagggattacaggtgtgagtcaccatacccttc

SEQ ID NO: 28916 - DNA, 80 bp, synthetic construct
  source 1..80: mol_type = other DNA
tgtaaaaatgtttctcacagtgtaaccattctcatcctgggtattaacttctgctccatgagcaacaaggagagcaacaa

SEQ ID NO: 28917 - DNA, 80 bp, synthetic construct
  source 1..80: mol_type = other DNA
aatgaaagcttttgctaaatcaggtgatttaaaaatccaaccttcctgcaagtaagtacaagtgaaagagatgacacttt

SEQ ID NO: 28918 - DNA, 80 bp, synthetic construct; identical to SEQ ID NO: 11132
  source 1..80: mol_type = other DNA

SEQ ID NO: 28919 - DNA, 80 bp, synthetic construct
  source 1..80: mol_type = other DNA
ataagtccaatagattaaccagcttaatattctcttaagagtactttctgggagaggatagtggtttctctgtagtttat

SEQ ID NO: 28920 - DNA, 80 bp, synthetic construct
  source 1..80: mol_type = other DNA
ttttaaaggaggtctgagactctgagcccaattttcctgagtcgtcctcaagatctgatttatacacaaagaactttgga

SEQ ID NO: 28921 - DNA, 80 bp, synthetic construct
  source 1..80: mol_type = other DNA
aacctaccaatagactatttctctgtaaggtttgttagcataaggttataccctgaaatctgaacacttcacacctatgt

SEQ ID NO: 28922 - DNA, 80 bp, synthetic construct
  source 1..80: mol_type = other DNA
tatcccttacatagtggcttcattagatagacaatctttatgaggtaaagattgaatttcctggataacttaagcaaaca

SEQ ID NO: 28923 - DNA, 80 bp, synthetic construct; identical to SEQ ID NO: 11133
  source 1..80: mol_type = other DNA

SEQ ID NO: 28924 - DNA, 80 bp, synthetic construct
  source 1..80: mol_type = other DNA
attaaccattcgaattcaaattcttcattacatctaaatccgaactgttgatgtctcatctccactgcacttacctgcat

SEQ ID NO: 28925 - DNA, 80 bp, synthetic construct
  source 1..80: mol_type = other DNA
tgatcacttttcatcacctcattagccactgcagtggtccaagacaacatcatctttctctgatttatattgccatagtc

SEQ ID NO: 28926 - DNA, 80 bp, synthetic construct
  source 1..80: mol_type = other DNA
agaagatcagtaaaattttcaaacctctagctagactgattaagcaaaacagagagaagaaacaagttaccagtatcaag

SEQ ID NO: 28927 - DNA, 80 bp, synthetic construct; identical to SEQ ID NO: 11134
  source 1..80: mol_type = other DNA

SEQ ID NO: 28928 - DNA, 80 bp, synthetic construct
  source 1..80: mol_type = other DNA
actcttataccaaaaccagagggtgccattataaggaaagaaaactataaaccaataatcttcactgaaaataaaaatgt

SEQ ID NO: 28929 - DNA, 80 bp, synthetic construct
  source 1..80: mol_type = other DNA
aatgcagaacaagtattttacaaaatccaacatttatttctaacaaaaacactcagcaacataggaatagatgagaactt

SEQ ID NO: 28930 - DNA, 80 bp, synthetic construct
  source 1..80: mol_type = other DNA
gaaaaagaaaaatggtaggcctccagatgggaaaaaaagcaaaattgtctttattcacagacagcatgatgtatatagaa

SEQ ID NO: 28931 - DNA, 80 bp, synthetic construct; identical to SEQ ID NO: 11135
  source 1..80: mol_type = other DNA

SEQ ID NO: 28932 - DNA, 80 bp, synthetic construct
  source 1..80: mol_type = other DNA
acccctccttgcctcctcccctttggattctctagtgtctatttttaactgagcatcccagcctcaaaatgcattttaaa

SEQ ID NO: 28933 - DNA, 80 bp, synthetic construct
  source 1..80: mol_type = other DNA
acagctcccacttaggggtagttatgaacagttaacctaccactaccaggccaaagtcaggatgaggcaaaccagacctt

SEQ ID NO: 28934 - DNA, 80 bp, synthetic construct
  source 1..80: mol_type = other DNA
tccaattgctagcatttgataaataaaattactttcctttcaccacatctcgtttctcctattcttggtttatgggcagc

SEQ ID NO: 28935 - DNA, 80 bp, synthetic construct; identical to SEQ ID NO: 11136
  source 1..80: mol_type = other DNA

SEQ ID NO: 28936 - DNA, 80 bp, synthetic construct
  source 1..80: mol_type = other DNA
ccaccttagcctcccaggtagctgagaccacaggcatgtgtcaccacacctgactaaattttttatttttgtagagatgg

SEQ ID NO: 28937 - DNA, 80 bp, synthetic construct
  source 1..80: mol_type = other DNA
tagaatggtttattttcctttgggtatatactcagtaatgggatggctgggtcaaatggtaattctagttttagttcttt

SEQ ID NO: 28938 - DNA, 80 bp, synthetic construct
  source 1..80: mol_type = other DNA
gtggcacaatcttggctcactgcaacctctgcctcctgggttcaagcgattctcctgcctcagcctcctgaatagctggg

SEQ ID NO: 28939 - DNA, 80 bp, synthetic construct; identical to SEQ ID NO: 11137
  source 1..80: mol_type = other DNA

SEQ ID NO: 28940 - DNA, 80 bp, synthetic construct
  source 1..80: mol_type = other DNA
atagtttgcaaatattttctcccattctgctgatagtttcttttgctgtgaagaagctctttagtttaattaggctccac

SEQ ID NO: 28941 - DNA, 80 bp, synthetic construct
  source 1..80: mol_type = other DNA
catatggtaagaggtagggatccagtttcattcttctgcatgtgggtatccggttttcccagtgccatttactgaatagg

SEQ ID NO: 28942 - DNA, 80 bp, synthetic construct
  source 1..80: mol_type = other DNA
aatgtgatgcctcaagctttgttctttttgcttagaattgctttggctgttcaggttcttttttggtttcatattttttt

SEQ ID NO: 28943 - DNA, 80 bp, synthetic construct
  source 1..80: mol_type = other DNA
ttttgtatttttagtagagactgagtttcaccatgttggtcaggctggtcttgaactgctgccgtcaggtgatctgtctg

SEQ ID NO: 28944 - DNA, 80 bp, synthetic construct; identical to SEQ ID NO: 11138
  source 1..80: mol_type = other DNA

SEQ ID NO: 28945 - DNA, 80 bp, synthetic construct
  source 1..80: mol_type = other DNA
attttttgcagttcttgtaaatggaactgcactcttgatttggttctcagcttgaacattataggtatatagaaatgctt

SEQ ID NO: 28946 - DNA, 80 bp, synthetic construct
  source 1..80: mol_type = other DNA
tcctctgaggaaatttcctctgtgctttctctgaatcacacaagtgctgatataaaggccttgtgttgtcacttttacca

SEQ ID NO: 28947 - DNA, 80 bp, synthetic construct
  source 1..80: mol_type = other DNA
tactgcaacctttgcctcccaggttcaagcaattctcctgcctcagcttcctgagtagctggaactacaggcgcatgcca

SEQ ID NO: 28948 - DNA, 80 bp, synthetic construct; identical to SEQ ID NO: 11139
  source 1..80: mol_type = other DNA

SEQ ID NO: 28949 - DNA, 80 bp, synthetic construct
  source 1..80: mol_type = other DNA
tagattttttattcctttttttagttctactagtttttgttctatgtatttaaaagccatgtatattaaaactatcttgt

SEQ ID NO: 28950 - DNA, 80 bp, synthetic construct
  source 1..80: mol_type = other DNA
tccactctaatgtaatgttttatttttaggtgtgacttcactagattttgcttttagccaatatgagagttactattact

SEQ ID NO: 28951 - DNA, 80 bp, synthetic construct; identical to SEQ ID NO: 11140
  source 1..80: mol_type = other DNA

SEQ ID NO: 28952 - DNA, 80 bp, synthetic construct
  source 1..80: mol_type = other DNA
tagaacaccaaacttattatatgatggaaatttaatacaaatttatcataaatactctcccccaccctggcccccctttt

SEQ ID NO: 28953 - DNA, 80 bp, synthetic construct
  source 1..80: mol_type = other DNA
agtggtgagccaagcctggccaagatggtcatttcttgacaggaattttcttgatatgtaaataatctcttctgtagtta

SEQ ID NO: 28954 - DNA, 80 bp, synthetic construct
  source 1..80: mol_type = other DNA
ctttcaatcctaccaatttgtcttcagttgggaaacattcttggtctttattgcttcaaacatagtctatcttccatgtt

SEQ ID NO: 28955 - DNA, 80 bp, synthetic construct; identical to SEQ ID NO: 11141
  source 1..80: mol_type = other DNA

SEQ ID NO: 28956 - DNA, 80 bp, synthetic construct
  source 1..80: mol_type = other DNA
gttgaatttgttgtccctgtttcatgacacctacattcttcagattttggtgatttttggttgtgcacctaccttctggt

SEQ ID NO: 28957 - DNA, 80 bp, synthetic construct
  source 1..80: mol_type = other DNA
aatattttaatagctttgtatctaaagctttctgtggaagggcaagactttagcatattctcagtttaagagcttgaatt

SEQ ID NO: 28958 - DNA, 80 bp, synthetic construct
  source 1..80: mol_type = other DNA
atcctagtcaagatgacaaccaacatccagccaacatgacgtgtatattcaatcttcttttattttacttggtgtagttt

SEQ ID NO: 28959 - DNA, 80 bp, synthetic construct
  source 1..80: mol_type = other DNA
accaagtatatattaatataatttaaaaattatgattttgttctccttttcctaataaaaaagatgtaatagtttaatta

SEQ ID NO: 28960 - DNA, 80 bp, synthetic construct; identical to SEQ ID NO: 11142
  source 1..80: mol_type = other DNA

SEQ ID NO: 28961 - DNA, 80 bp, synthetic construct
  source 1..80: mol_type = other DNA
gtgttagtatcacaatctgtgatgagataataatattcagtaacaaagaacagtaccatgcacaaagtaaattctcagtc

SEQ ID NO: 28962 - DNA, 80 bp, synthetic construct
  source 1..80: mol_type = other DNA
tgctgacattaatgcaaatgctgctagcttctccattaaacgtgtaatttgttttgtcttcagatatatgttttcgaaat

SEQ ID NO: 28963 - DNA, 80 bp, synthetic construct
  source 1..80: mol_type = other DNA
tagatgacatgaatcaatctgatcacagtatattattcatttactttgctgataacattaaatttgctaatacttcaagt

SEQ ID NO: 28964 - DNA, 80 bp, synthetic construct; identical to SEQ ID NO: 11143
  source 1..80: mol_type = other DNA

SEQ ID NO: 28965 - DNA, 80 bp, synthetic construct
  source 1..80: mol_type = other DNA
aaattatttaatttaataacaataattaaaatacctaaaagaattaaaaaatacctaccagacatggtggcacacaccta

SEQ ID NO: 28966 - DNA, 80 bp, synthetic construct
  source 1..80: mol_type = other DNA
aagatccaatatacaaaagattcttgttaatcagtaagaaacatgtgaaccaccaaacagcaaaactacaaagtacacag

SEQ ID NO: 28967 - DNA, 80 bp, synthetic construct
  source 1..80: mol_type = other DNA
tctcaagtactgttggagatagtgtaaatgttttcaattttttcagaagacgatttggtaacacctattgaggctggaga

SEQ ID NO: 28968 - DNA, 80 bp, synthetic construct
  source 1..80: mol_type = other DNA
aaaggatcagaggctactccccctacaagcctctctgttccactaagtctcaggtggaaagggaaagtgccatggattgg

SEQ ID NO: 28969 - DNA, 80 bp, synthetic construct; identical to SEQ ID NO: 11144
  source 1..80: mol_type = other DNA

SEQ ID NO: 28970 - DNA, 80 bp, synthetic construct
  source 1..80: mol_type = other DNA
ttcaacacgccaagaacctggatgtctcacgctcaaggcctatcttcccataacactatcacaattataaatacacatct

SEQ ID NO: 28971 - DNA, 80 bp, synthetic construct
  source 1..80: mol_type = other DNA
agtggaatattgtacagccactataaaagagagaagtatctctatacatactggcaggtatagtgctgatgaaacactgt

SEQ ID NO: 28972 - DNA, 80 bp, synthetic construct; identical to SEQ ID NO: 11145
  source 1..80: mol_type = other DNA

SEQ ID NO: 28973 - DNA, 80 bp, synthetic construct
  source 1..80: mol_type = other DNA
aactgaatattcatttttatgatcttcagttggctaactcctacttatccttcaaaactaagtttgaggctgggcgcagt

SEQ ID NO: 28974 - DNA, 80 bp, synthetic construct
  source 1..80: mol_type = other DNA
cttaggaggctgaggcaggaggatggcctgagcccaggaggtcgaggctgcagtgagccaggatcacaccattgcactcc

SEQ ID NO: 28975 - DNA, 80 bp, synthetic construct
  source 1..80: mol_type = other DNA
tcagttaagttttcccagtttttgttcctagagacactttctactacctctaatcttcctatattgtaaatgcctatagc

SEQ ID NO: 28976 - DNA, 80 bp, synthetic construct; identical to SEQ ID NO: 11146
  source 1..80: mol_type = other DNA

SEQ ID NO: 28977 - DNA, 80 bp, synthetic construct
  source 1..80: mol_type = other DNA
ctttacaatatgtaattgtatttcaataaaacttaaaaaaataaaagttggttaaaaagaataaagtttacgtacatgat

SEQ ID NO: 28978 - DNA, 80 bp, synthetic construct
  source 1..80: mol_type = other DNA
tatttgtcacgtctctgtactggggtaaaatggttggtcttcatgtcatatttttgcatatagttcggtattatctaatc

SEQ ID NO: 28979 - DNA, 80 bp, synthetic construct
  source 1..80: mol_type = other DNA
aaagctgataaaatacaaatatgcctggagacacagtagaaaaaccaaggttgccagaacaggagaagccaagctcctgg

SEQ ID NO: 28980 - DNA, 80 bp, synthetic construct
  source 1..80: mol_type = other DNA
aggccttcttatggtgatggggaactccaacacaaaaactggagttcaggtctactaaagcactgagaacttcaagaatc

SEQ ID NO: 28981 - DNA, 80 bp, synthetic construct; identical to SEQ ID NO: 11147
  source 1..80: mol_type = other DNA

SEQ ID NO: 28982 - DNA, 80 bp, synthetic construct
  source 1..80: mol_type = other DNA
gaagcaaacagacctgtaccaaagttttatataatatccagcattcaaccaaaagctaccaggcatcgtaaattgtagaa

SEQ ID NO: 28983 - DNA, 80 bp, synthetic construct
  source 1..80: mol_type = other DNA
atatagatgtaatggtttaaatctcaattggagaggagagagaatgaagaaaaagcagtatcttaagacatactgcctga

SEQ ID NO: 28984 - DNA, 80 bp, synthetic construct; identical to SEQ ID NO: 11148
  source 1..80: mol_type = other DNA

SEQ ID NO: 28985 - DNA, 80 bp, synthetic construct
  source 1..80: mol_type = other DNA
tttccacctagcaatcttcacctagcaacctccacttaaccccaaacaaagggtctctaatcccctgtacagcctgcatt

SEQ ID NO: 28986 - DNA, 80 bp, synthetic construct
  source 1..80: mol_type = other DNA
gtgcatctgccattcactccatctcagcatattcttgaatggccctcatatttttatcatgttttttttgagtgattttt

SEQ ID NO: 28987 - DNA, 80 bp, synthetic construct
  source 1..80: mol_type = other DNA
caaagactgtccttcagttgtcaaacaggtgacagggctgagcaccaaatggaactctgcacttaaggaactattgatgt

SEQ ID NO: 28988 - DNA, 80 bp, synthetic construct; identical to SEQ ID NO: 11149
  source 1..80: mol_type = other DNA

SEQ ID NO: 28989 - DNA, 80 bp, synthetic construct
  source 1..80: mol_type = other DNA
gaatttatatttgtttcattatgactttagtttgtttaaaggcctcatctttctctgtggaccagttccagtgagccccc

SEQ ID NO: 28990 - DNA, 80 bp, synthetic construct
  source 1..80: mol_type = other DNA
tagtcttacccaaccagatgacaccgaatatttaataaacctggacccttaaatgtctgtgctgcccatactccgtttgc

SEQ ID NO: 28991 - DNA, 80 bp, synthetic construct
  source 1..80: mol_type = other DNA
gtcattagaccctcacagatagtggggctatgtaaatatccttggggcaagatggtaaaggtccgttgttctcctttcta

SEQ ID NO: 28992 - DNA, 80 bp, synthetic construct
  source 1..80: mol_type = other DNA
attttaatttctggtaatgtattgttattttccaagtcccgtcaggtttttgcacaggccatacagggttgttgtatggg

SEQ ID NO: 28993 - DNA, 80 bp, synthetic construct; identical to SEQ ID NO: 11150
  source 1..80: mol_type = other DNA

SEQ ID NO: 28994 - DNA, 80 bp, synthetic construct
  source 1..80: mol_type = other DNA
atttatacctcattccccatcaccctttactatctattgctgttataggtccttggaaccgataggtgttaccatatatg

SEQ ID NO: 28995 - DNA, 80 bp, synthetic construct
  source 1..80: mol_type = other DNA
ggtggcattagattctcataggagtacgaaccctattgtgaactgcgcatgcgagagatctatgttgcatgctcctgatg

SEQ ID NO: 28996 - DNA, 80 bp, synthetic construct; identical to SEQ ID NO: 11151
  source 1..80: mol_type = other DNA

SEQ ID NO: 28997 - DNA, 80 bp, synthetic construct
  source 1..80: mol_type = other DNA
ttagcaggttgcctacatctattggcaaatcactctgataagccccttgactgtttccttttttttttttttgactcctt

SEQ ID NO: 28998 - DNA, 80 bp, synthetic construct
  source 1..80: mol_type = other DNA
cttttattctggcagtaaccaattcacttttgggatcgtgctgatttttagcataaatattaatagcatgtttcatcccc

SEQ ID NO: 28999 - DNA, 80 bp, synthetic construct
  source 1..80: mol_type = other DNA
tcaggaccaggtgctttgtgatggatgccattttattcatctcgaatctagagagtatagtattctctacccctacatcc

SEQ ID NO: 29000 - DNA, 80 bp, synthetic construct
  source 1..80: mol_type = other DNA
tggtggccaatgtacatgcagacagtatgggaacctctatggactcatcccagtcctcttcctccttcccactagagctc

SEQ ID NO: 29001 - DNA, 80 bp, synthetic construct; identical to SEQ ID NO: 11152
  source 1..80: mol_type = other DNA

SEQ ID NO: 29002 - DNA, 80 bp, synthetic construct
  source 1..80: mol_type = other DNA
tccatcaaggatagcagtcattgggcctcacatagatgtggatggccatcccagcgtttcccttgtggatttccttttcc

SEQ ID NO: 29003 - DNA, 80 bp, synthetic construct
  source 1..80: mol_type = other DNA
agacatacataaggtggtccaggagcaatgggctgattaggaaaactgcaactatttctaagaagtgtacaagttacaca

SEQ ID NO: 29004 - DNA, 80 bp, synthetic construct; identical to SEQ ID NO: 11153
  source 1..80: mol_type = other DNA

SEQ ID NO: 29005 - DNA, 80 bp, synthetic construct
  source 1..80: mol_type = other DNA
aaaatgatccctgattaaatccctgtttaaaatatgaaaatagaggatggaatgaagagagccataaagatgagtatgtg

SEQ ID NO: 29006 - DNA, 80 bp, synthetic construct
  source 1..80: mol_type = other DNA
cctgaccaacatggtgaaaccctgtctctattaaaaatacaaaattagccaggcgtggtggtccatgcctataatcccag

SEQ ID NO: 29007 - DNA, 80 bp, synthetic construct
  source 1..80: mol_type = other DNA
cacaaatacaggggtggaatgggcaaaaatgaggttaaaatattctaagattcctgcattgtccaggaattgttaaaagt

SEQ ID NO: 29008 - DNA, 80 bp, synthetic construct; identical to SEQ ID NO: 11154
  source 1..80: mol_type = other DNA

SEQ ID NO: 29009 - DNA, 80 bp, synthetic construct
  source 1..80: mol_type = other DNA
aattactacatacaaaggggtacacttcataaaggtaaaaggtcaatgcatcagggatataggaggcttaaaagatgtaa

SEQ ID NO: 29010 - DNA, 80 bp, synthetic construct
  source 1..80: mol_type = other DNA
tatgttttttcctatacatatgtgcctatgaaaaaatttaatttgcaaatcaggagcagtaagagataacaggaactaag

SEQ ID NO: 29011 - DNA, 80 bp, synthetic construct
  source 1..80: mol_type = other DNA
gtgacatagtgttaagctactttgaccttctgtaatgtatacacaatacattagaaggaggatcatctgcttctggtgat

SEQ ID NO: 29012 - DNA, 80 bp, synthetic construct
  source 1..80: mol_type = other DNA
ccatgctactctgccagtactttctcatgttcaccaactcaaaagctctctacaaatcctacagtttagggttttttatg

SEQ ID NO: 29013 - DNA, 80 bp, synthetic construct; identical to SEQ ID NO: 11155
  source 1..80: mol_type = other DNA

SEQ ID NO: 29014 - DNA, 80 bp, synthetic construct
  source 1..80: mol_type = other DNA
tgggttataaagaacatctcaacaaatttcaaagatctgaaataatatagaatatgttccttcaccatagtggaattcag

SEQ ID NO: 29015 - DNA, 80 bp, synthetic construct
  source 1..80: mol_type = other DNA
caatactgcataatgtagtaaacagcactaatgcagggtaggaaaaaaaaatgagtggttgccttctgggttcaggggat

SEQ ID NO: 29016 - DNA, 80 bp, synthetic construct; identical to SEQ ID NO: 11156
  source 1..80: mol_type = other DNA

SEQ ID NO: 29017 - DNA, 80 bp, synthetic construct
  source 1..80: mol_type = other DNA
caaaacatggcttttcaaagactgtgtgaaccacagttttgatatgctaacagctctaataagaacaggtaaaacaagga

SEQ ID NO: 29018 - DNA, 80 bp, synthetic construct
  source 1..80: mol_type = other DNA
ggtgtcagaaaagtcccttgctttattttaaataaaatattttagccagccaaaaagggataaagaaaaatgaattctac

SEQ ID NO: 29019 - DNA, 80 bp, synthetic construct
  source 1..80: mol_type = other DNA
cagttatttgaaaaactaccaggatgcataaaatttagcaaaatttgaaaacaaatatgtatacgagctaaaacactcat

SEQ ID NO: 29020 - DNA, 80 bp, synthetic construct
  source 1..80: mol_type = other DNA
ggaatggatgaggaccatatttctgactttgcttgttaatcatcctactgcttgttttaggaacatgcaaaattttcatt

SEQ ID NO: 29021 - DNA, 80 bp, synthetic construct; identical to SEQ ID NO: 11157
  source 1..80: mol_type = other DNA

SEQ ID NO: 29022 - DNA, 80 bp, synthetic construct
  source 1..80: mol_type = other DNA
gcaaggtcatgaagcttatagtaacaggacttgggacataaattctgagtccaagatcattcacaaataagtaatcttca

SEQ ID NO: 29023 - DNA, 80 bp, synthetic construct
  source 1..80: mol_type = other DNA
attacaaagaaagtatagcagggttttattcaagcatagcagagtttttttggagggattcttgttgagaatttctggtt

SEQ ID NO: 29024 - DNA, 80 bp, synthetic construct; identical to SEQ ID NO: 11158
  source 1..80: mol_type = other DNA

SEQ ID NO: 29025 - DNA, 80 bp, synthetic construct
  source 1..80: mol_type = other DNA
ctactaatcagtgtgtgttaacattattataatcaataagacttatcaaagggtagtctatttgatggagaattgagttc

SEQ ID NO: 29026 - DNA, 80 bp, synthetic construct
  source 1..80: mol_type = other DNA
gccaagagcttttcatcaactggctttcttcacctctatcctattttatgctttcaaaaggtccaggtagatttccaggt

SEQ ID NO: 29027 - DNA, 80 bp, synthetic construct
  source 1..80: mol_type = other DNA
atatataaaaggctaaaaacataaggaatgatgttcaaactaattaaaaatcagaaaaataacaaaactataacatgctc

SEQ ID NO: 29028 - DNA, 80 bp, synthetic construct
  source 1..80: mol_type = other DNA
ccttttgagcaattctacttctggaagtcttctacagaattaacgcgtaccaaggatattatcatcgttatggcaaacaa

SEQ ID NO: 29029 - DNA, 80 bp, synthetic construct; identical to SEQ ID NO: 11159
  source 1..80: mol_type = other DNA

SEQ ID NO: 29030 - DNA, 80 bp, synthetic construct
  source 1..80: mol_type = other DNA
aggaatattaagcagctaaaaaaatgggaggtaaacttattatgtactgacaaggaaagatcccaaacaagtgaaaagaa

SEQ ID NO: 29031 - DNA, 80 bp, synthetic construct
  source 1..80: mol_type = other DNA
aaagactcatgatttactacttggacttccatattattttaatatcttatgacaaaatgtcttgattatttacagggtta

SEQ ID NO: 29032 - DNA, 80 bp, synthetic construct
  source 1..80: mol_type = other DNA
agttactattgtaagccaaaattacatttttatctactaaactgctcctgtgacatttacaactaaatttatgttctgag

SEQ ID NO: 29033 - DNA, 80 bp, synthetic construct; identical to SEQ ID NO: 11160
  source 1..80: mol_type = other DNA

SEQ ID NO: 29034 - DNA, 80 bp, synthetic construct
  source 1..80: mol_type = other DNA
tgaagatttactatgtcaagtttcaattcatttgactgaaggccaccttgtttttcagacctacaggtgattaagctaaa

SEQ ID NO: 29035 - DNA, 80 bp, synthetic construct
  source 1..80: mol_type = other DNA
gtcacgctgtttaaactgttgtgaaaacatcctaaatatagacaagatgaagaatataaatacattctactggtggatcc

SEQ ID NO: 29036 - DNA, 80 bp, synthetic construct
  source 1..80: mol_type = other DNA
tgttacattgaaaggcacttaaatacttgagcaccaattttctgttctgtgaaaaataacataccatttatcagtgagtt

SEQ ID NO: 29037 - DNA, 80 bp, synthetic construct; identical to SEQ ID NO: 11161
  source 1..80: mol_type = other DNA

SEQ ID NO: 29038 - DNA, 80 bp, synthetic construct
  source 1..80: mol_type = other DNA
ttaaataagattttaaaaaagaagtttgcatgggaaggaaagaattacagagctgacacaaaaatagttataaataaact

SEQ ID NO: 29039 - DNA, 80 bp, synthetic construct
  source 1..80: mol_type = other DNA
gtgacctagagggaggatcagaagctataatccagaatatggcacaatgagactgaaaaatggaaaatgaaagatattga

SEQ ID NO: 29040 - DNA, 80 bp, synthetic construct; identical to SEQ ID NO: 11162
  source 1..80: mol_type = other DNA

SEQ ID NO: 29041 - DNA, 80 bp, synthetic construct
  source 1..80: mol_type = other DNA
atttaattatttatttttattataatttaagttctggggtacatttgtagagcatgcaggtttgttccattggtatacac

SEQ ID NO: 29042 - DNA, 80 bp, synthetic construct
  source 1..80: mol_type = other DNA
gagaacatgcagtgtttggttttctgttcttgtgttagtttgctgagaatgatggtttccagtttcatccatgtccctgc

SEQ ID NO: 29043 - DNA, 80 bp, synthetic construct
  source 1..80: mol_type = other DNA
tatagcagaataatttataatcctttgagtatatacctagtaatgggattgctgggtcaaatggtatttctagttctaga

SEQ ID NO: 29044 - DNA, 80 bp, synthetic construct
  source 1..80: mol_type = other DNA
gtatctctttatctgtggttttgctgtctgcagtaacctgaggaccaaaaatattaaataaaaaattcataacttttgaa

SEQ ID NO: 29045 - DNA, 80 bp, synthetic construct; identical to SEQ ID NO: 11163
  source 1..80: mol_type = other DNA

SEQ ID NO: 29046 - DNA, 80 bp, synthetic construct
  source 1..80: mol_type = other DNA
ggcataggaaaaaatacagtatttatagggtttggtagtatcaatgttttcaggcgtctactagggggtcttggaatgta

SEQ ID NO: 29047 - DNA, 80 bp, synthetic construct
  source 1..80: mol_type = other DNA
tggaaacaaccacagcatacaccaaacatgattctcaataaacaattcagtaggtaaaataaaggagtgggccaggcgca

SEQ ID NO: 29048 - DNA, 80 bp, synthetic construct
  source 1..80: mol_type = other DNA
ttgggaggctgaggcaagaatcacctgaacccggcagctggagattgcagggagcggagatctgacactgcactccagcc

SEQ ID NO: 29049 - DNA, 80 bp, synthetic construct; identical to SEQ ID NO: 11164
  source 1..80: mol_type = other DNA

SEQ ID NO: 29050 - DNA, 80 bp, synthetic construct
  source 1..80: mol_type = other DNA
gaaaaaatttatagtggtagaaacaagatccggatcacatggttgcttctggtggagagggaactggactggcaagagac

SEQ ID NO: 29051 - DNA, 80 bp, synthetic construct
  source 1..80: mol_type = other DNA
agaattccctcagtaccattcagcgagatttctaattagttaagtagaggaaattcaacagtttcttcttaatctttatt

SEQ ID NO: 29052 - DNA, 80 bp, synthetic construct
  source 1..80: mol_type = other DNA
cttatgaggtatttccacagaatggagaagagttcatgctactttacacatggaaactgagacttcaatctcaagcttag

SEQ ID NO: 29053 - DNA, 80 bp, synthetic construct; identical to SEQ ID NO: 11165
  source 1..80: mol_type = other DNA

SEQ ID NO: 29054 - DNA, 80 bp, synthetic construct
  source 1..80: mol_type = other DNA
tcaacagcctgaaagtaaattcatctgaagatctgtttttctccttgacatctgaagagtggttcccagatgtattgctg

SEQ ID NO: 29055 - DNA, 80 bp, synthetic construct
  source 1..80: mol_type = other DNA
tcccaccatgtcccctaatgctatccttcttataaaatttgcagcctaaaagcactttttgccataacttatcctctttt

SEQ ID NO: 29056 - DNA, 80 bp, synthetic construct
  source 1..80: mol_type = other DNA
gagagttgatcatataccaagctaaatcttgtgctctttcaaattcatctgctcatttaggattttcagttttgaaactg

SEQ ID NO: 29057 - DNA, 80 bp, synthetic construct; identical to SEQ ID NO: 11166
  source 1..80: mol_type = other DNA

SEQ ID NO: 29058 - DNA, 80 bp, synthetic construct
  source 1..80: mol_type = other DNA
gtcctaattccaaggtataaccagatccaaaagttacattttactaaggattataccatatatgacaggataaaagtttc

SEQ ID NO: 29059 - DNA, 80 bp, synthetic construct
  source 1..80: mol_type = other DNA
gcgtgcgtctctaatcctagctactcaggaggctaaggcaagagaatcatttgaacccaggaggcagaggttgcagtgag

SEQ ID NO: 29060 - DNA, 80 bp, synthetic construct
  source 1..80: mol_type = other DNA
aagaccagcctgggcaacatagtgaaaccccgtctctacaaaaatacaaaaattagccaactgtggtagtgtgtgcctgt

SEQ ID NO: 29061 - DNA, 80 bp, synthetic construct; identical to SEQ ID NO: 11167
  source 1..80: mol_type = other DNA

SEQ ID NO: 29062 - DNA, 80 bp, synthetic construct
  source 1..80: mol_type = other DNA
cccctgaaaggccaaatagaccttgcttgagaaccactacaactagactaaaatattatttttttaaatctcaacaaaga

SEQ ID NO: 29063 - DNA, 80 bp, synthetic construct
  source 1..80: mol_type = other DNA
aattctatttgtgctagacatttttgttagatgggctacttcctactcattttaaagattaaatgaaacacaaagagaga

SEQ ID NO: 29064 - DNA, 80 bp, synthetic construct
  source 1..80: mol_type = other DNA
ttgtcttctatgcatctaggcactattacatacatgttattacctagttaattcgtgaagtcttaagaaaatggaaacaa

SEQ ID NO: 29065 - DNA, 80 bp, synthetic construct; identical to SEQ ID NO: 11168
  source 1..80: mol_type = other DNA

SEQ ID NO: 29066 - DNA, 80 bp, synthetic construct
  source 1..80: mol_type = other DNA
tacctacaagcaacatttggatcagcatttcttgaaagtagtagttctacacacttcaagatctgttcctctgagccatg

SEQ ID NO: 29067 - DNA, 80 bp, synthetic construct
  source 1..80: mol_type = other DNA
tgcactctaaaactctataacctcttcccaaatctctcactcttagcaggtaactttgtcttccttcatcgaaagatgag

SEQ ID NO: 29068 - DNA, 80 bp, synthetic construct
  source 1..80: mol_type = other DNA
agagaacagaaagtggttaaggacatggacacagccacattgtctggatttgaacagtttttggttgattaaaatttgcc

SEQ ID NO: 29069 - DNA, 80 bp, synthetic construct; identical to SEQ ID NO: 11169
  source 1..80: mol_type = other DNA

SEQ ID NO: 29070 - DNA, 80 bp, synthetic construct
  source 1..80: mol_type = other DNA
ataagaacctagtatctgccctttgtatgtaacagggttattgtgggacacataaaaaactcatgtgtacattctgtgaa

SEQ ID NO: 29071 - DNA, 80 bp, synthetic construct
  source 1..80: mol_type = other DNA
tctcactctgttgtccaggctggagtgcagtagcatgatcataactcactgcaacctcgaactcctgggttcaagcagtc

SEQ ID NO: 29072 - DNA, 80 bp, synthetic construct; identical to SEQ ID NO: 11170
  source 1..80: mol_type = other DNA

SEQ ID NO: 29073 - DNA, 80 bp, synthetic construct
  source 1..80: mol_type = other DNA
atatgttaaaaataagtaatcaggaattcaatgtaataattaaactggatttgctcatatactcttgttcttcttacact

SEQ ID NO: 29074 - DNA, 80 bp, synthetic construct
  source 1..80: mol_type = other DNA
ttctttcaagaatttttcctttaaaaacaaccaaaaccttaaagatatataataacaaccagttataaagatactataac

SEQ ID NO: 29075 - DNA, 80 bp, synthetic construct
  source 1..80: mol_type = other DNA
gtaagcataatcatttaagttatctaaaacatcttacccttctcaaagcttgcattagcacctctgtccaaaaggacccg

SEQ ID NO: 29076 - DNA, 80 bp, synthetic construct
  source 1..80: mol_type = other DNA
ggagtccatccatactgaaagttggaatctacactaatgcctgtcaatataaaaacaagcttttaaaagcacactaccac

SEQ ID NO: 29077 - DNA, 80 bp, synthetic construct; identical to SEQ ID NO: 11171
  source 1..80: mol_type = other DNA

SEQ ID NO: 29078 - DNA, 80 bp, synthetic construct
  source 1..80: mol_type = other DNA
tccctcaaaaacctttaactttattcctaacactaaacttacccatgggtgactgataaaacatgaagctaaaaagacag

SEQ ID NO: 29079 - DNA, 80 bp, synthetic construct
  source 1..80: mol_type = other DNA
gacaatcagagcaagggcagtggagagagaaaggaaggaaaacaaaaggacatttcaaaggcagggtcatcagaatttaa

SEQ ID NO: 29080 - DNA, 80 bp, synthetic construct; identical to SEQ ID NO: 11172
  source 1..80: mol_type = other DNA

SEQ ID NO: 29081 - DNA, 80 bp, synthetic construct
  source 1..80: mol_type = other DNA
attgttttctcaatttattgagaatactgctcaaactgtgatagcaaagatagaaaggaaaagatgcaaagaaaaagaag

SEQ ID NO: 29082 - DNA, 80 bp, synthetic construct
  source 1..80: mol_type = other DNA
ggcgtggtggtgggtgcctgtagtctcagctacttgggaggccaaggcaggagaattgcgtgaacacacgaggcagagct

SEQ ID NO: 29083 - DNA, 80 bp, synthetic construct
  source 1..80: mol_type = other DNA
cacatattatgttccaggcatagtgcaaaaaaaggtaagtttcaaaaggatgaacacagtatatttatagagctcaaaaa

SEQ ID NO: 29084 - DNA, 80 bp, synthetic construct
  source 1..80: mol_type = other DNA
atagtacacagaataacaaaaactggagacatcttcaaatggttaaaagtggctgactcaaaatgtgcttttatttttag

SEQ ID NO: 29085 - DNA, 80 bp, synthetic construct; identical to SEQ ID NO: 11173
  source 1..80: mol_type = other DNA

SEQ ID NO: 29086 - DNA, 80 bp, synthetic construct
  source 1..80: mol_type = other DNA
agcctctatcacattcactgtacctagtcccactactcctaaggcaaattttcttttctaaaacaaatctctgcctattc

SEQ ID NO: 29087 - DNA, 80 bp, synthetic construct
  source 1..80: mol_type = other DNA
aatgtttacataattcctatgtgttctaagtcctttaaaagcgtattttaattctcccccttgccaacaaccctttgata

SEQ ID NO: 29088 - DNA, 80 bp, synthetic construct; identical to SEQ ID NO: 11174
  source 1..80: mol_type = other DNA

SEQ ID NO: 29089 - DNA, 80 bp, synthetic construct
  source 1..80: mol_type = other DNA
ggactacaggcgcccgccaccacgcccagctaattttttttgtgttttttagtagagacggggtttcactgtgttagcca

SEQ ID NO: 29090 - DNA, 80 bp, synthetic construct
  source 1..80: mol_type = other DNA
atacacaaaaaattcatgaagcccaggacagaattatgatgctttacataaagaaactgatgctctctggctgggggcgg

SEQ ID NO: 29091 - DNA, 80 bp, synthetic construct
  source 1..80: mol_type = other DNA
ctccggaggctgaggtgggagaatcacttgaatcccggcccccagatggaggttgcagtgagcgaagatggtgccactgc

SEQ ID NO: 29092 - DNA, 80 bp, synthetic construct; identical to SEQ ID NO: 11175
  source 1..80: mol_type = other DNA

SEQ ID NO: 29093 - DNA, 80 bp, synthetic construct
  source 1..80: mol_type = other DNA
cgcgcttgtagtcccagctactcaggagggtgaggcaggagaatcgcttgaacccgaaggtggagattgcagtgagccaa

SEQ ID NO: 29094 - DNA, 80 bp, synthetic construct
  source 1..80: mol_type = other DNA
cctcttgcttgaaggagggggaagaactgatggaagataaacagggtggcattccaaatgcaagcagagaggaagaaaat

SEQ ID NO: 29095 - DNA, 80 bp, synthetic construct
  source 1..80: mol_type = other DNA
atctaggagctcctggaccaatgaaacatctccgatggtcattgctttcttaaatttttctttcttttcttcaatgggta

SEQ ID NO: 29096 - DNA, 80 bp, synthetic construct; identical to SEQ ID NO: 11176
  source 1..80: mol_type = other DNA

SEQ ID NO: 29097 - DNA, 80 bp, synthetic construct
  source 1..80: mol_type = other DNA
aaccaggtgtggtcaagacaaggcctcctccgctacctgagacgtccggtcgagatacccaatctcccagccatcatcct

SEQ ID NO: 29098 - DNA, 80 bp, synthetic construct
  source 1..80: mol_type = other DNA
gccgtggaagcgctccagtctggagccctccagcgcaggcgcacagcggcgcgctgctctcctccctgccccgtccctcc

SEQ ID NO: 29099 - DNA, 80 bp, synthetic construct
  source 1..80: mol_type = other DNA
aaggaatgccttacttgtggcaggagcacactaggatttaacggcaagtaagactagactttccccgccatccttttcat

SEQ ID NO: 29100 - DNA, 80 bp, synthetic construct
  source 1..80: mol_type = other DNA
ctttacatttcatgtgatcttagatctcaccttagatttagaagcttcagaccatcaaaacacttccccgctatgaagtg

SEQ ID NO: 29101 - DNA, 80 bp, synthetic construct; identical to SEQ ID NO: 11177
  source 1..80: mol_type = other DNA

SEQ ID NO: 29102 - DNA, 80 bp, synthetic construct
  source 1..80: mol_type = other DNA
gtctttctaaatgcattcattcaataaatgctagggattacttagcacagccaagtgctactaggtttggggagacaacg

SEQ ID NO: 29103 - DNA, 80 bp, synthetic construct
  source 1..80: mol_type = other DNA
tgcagattgtaagtgcttcaaaagaaacaagtgtgctctgtttctggaatcaaaccacttttgtgtttcctgggggaatc

SEQ ID NO: 29104 - DNA, 80 bp, synthetic construct
  source 1..80: mol_type = other DNA
gaggtagattttagataggatagtcagaactgtgcagagtcgtaaataacaagccatataagagtgggagaatagagctt

SEQ ID NO: 29105 - DNA, 80 bp, synthetic construct
  source 1..80: mol_type = other DNA
tactgtcagggtcctgcaaattcagtgagtgcctttttaaattttgctcctgggtcacctcacttaccttagttcttgtc

SEQ ID NO: 29106 - DNA, 80 bp, synthetic construct; identical to SEQ ID NO: 11178
  source 1..80: mol_type = other DNA

SEQ ID NO: 29107 - DNA, 80 bp, synthetic construct
  source 1..80: mol_type = other DNA
aggcatccccaaattaacatattcaaaaccaagcagccaagtgtagctgttaagtggttagttggatattcatgtgtgga

SEQ ID NO: 29108 - DNA, 80 bp, synthetic construct
  source 1..80: mol_type = other DNA
aattctgaaaaagaagaataaagaaggaagaattgctctccttgatttcaagactcatgtgtagccttgatttcaggatt

SEQ ID NO: 29109 - DNA, 80 bp, synthetic construct
  source 1..80: mol_type = other DNA
tcttttcaacaaatagttgtgaagcaggtgaatatctttaggtaaaaaatgaacttcaacctaagtctcatgccttttac

SEQ ID NO: 29110 - DNA, 80 bp, synthetic construct
  source 1..80: mol_type = other DNA
gattggtaagtctgtactatctgaattagtttcctaggactaccaaaacaaattaccacaaactgggaggcttataacaa

SEQ ID NO: 29111 - DNA, 80 bp, synthetic construct; identical to SEQ ID NO: 11179
  source 1..80: mol_type = other DNA

SEQ ID NO: 29112 - DNA, 80 bp, synthetic construct
  source 1..80: mol_type = other DNA
agtaatgtgtgatattgatatcagagggtgatttcaggaggtagcatgacccattaggaggttactgtaattgtgaacta

SEQ ID NO: 29113 - DNA, 80 bp, synthetic construct
  source 1..80: mol_type = other DNA
tcttaatttcattttttatccaaagtcattcaggagcaggttgttcaatttctatgtagttgtgttgtgttgagtgaatc

SEQ ID NO: 29114 - DNA, 80 bp, synthetic construct; identical to SEQ ID NO: 11180
  source 1..80: mol_type = other DNA

SEQ ID NO: 29115 - DNA, 80 bp, synthetic construct
  source 1..80: mol_type = other DNA
aattgaacactaagattatgtgatgccctttttttgtttttttttttttgatctttgttggtttaaagtctattttgtca

SEQ ID NO: 29116 - DNA, 80 bp, synthetic construct
  source 1..80: mol_type = other DNA
tgtgtcttttaattggggtatttagcccatttacatttaaagttagtattgttatgtgtagatttgatcgtgtcatcatg

SEQ ID NO: 29117 - DNA, 80 bp, synthetic construct; identical to SEQ ID NO: 11181
  source 1..80: mol_type = other DNA

SEQ ID NO: 29118 - DNA, 80 bp, synthetic construct
  source 1..80: mol_type = other DNA
cattttgaccttggagaatctgatgattatgtgtcttggggatgatctgctcgtggagtatcttactggggttctctgca

SEQ ID NO: 29119 - DNA, 80 bp, synthetic construct
  source 1..80: mol_type = other DNA
gaggttttgttcattccttttcattcttttttctctattcctgtctgcctgtcttatctcagaatgatagtcttcaagct

SEQ ID NO: 29120 - DNA, 80 bp, synthetic construct
  source 1..80: mol_type = other DNA
agcttctttgcattaggttaaacatgttcctttagctcagcaaagttcattattacctaccttctgaagtttacttctgc

SEQ ID NO: 29121 - DNA, 80 bp, synthetic construct
  source 1..80: mol_type = other DNA
tcgaaactggaccctttgcttacaccacatacaaaaatcaactgaagatggattaatgacttaaatgtaaaacctaaaat

SEQ ID NO: 29122 - DNA, 80 bp, synthetic construct; identical to SEQ ID NO: 11182
  source 1..80: mol_type = other DNA

SEQ ID NO: 29123 - DNA, 80 bp, synthetic construct
  source 1..80: mol_type = other DNA
atatcatctcagccagtcagaatggcagttattaaaaagtcaaaaacaacagatgctggtgaggttgtggggaaaaataa

SEQ ID NO: 29124 - DNA, 80 bp, synthetic construct
  source 1..80: mol_type = other DNA
tgggcacgtgtatgttcattgcagcagtgttcacaatagcaaagacatggaatcaacctaaatgcccatcaatgatagac

SEQ ID NO: 29125 - DNA, 80 bp, synthetic construct
  source 1..80: mol_type = other DNA
taagtgggagctgaatgatgagaacacatggacacaaggtggggaacaacatacactggggcctgtcagagggtgggggt

SEQ ID NO: 29126 - DNA, 80 bp, synthetic construct; identical to SEQ ID NO: 11183
  source 1..80: mol_type = other DNA

SEQ ID NO: 29127 - DNA, 80 bp, synthetic construct
  source 1..80: mol_type = other DNA
actctcaagtttatatattgtgtgttcaaaagaccagccaacatttctcatttacatgttacagtgacataatccaaccc

SEQ ID NO: 29128 - DNA, 80 bp, synthetic construct
  source 1..80: mol_type = other DNA
agaacaagaaggaggaaaagtttttgaggaaacaggtaagttttgttctgcagagacacatctaaaaagctaaggaacat

SEQ ID NO: 29129 - DNA, 80 bp, synthetic construct; identical to SEQ ID NO: 11184
  source 1..80: mol_type = other DNA

SEQ ID NO: 29130 - DNA, 80 bp, synthetic construct
  source 1..80: mol_type = other DNA
atcctattgaggtatatgctatctcaattttacagaaggaattagaggcacagaaaggtaatgttatctgcccaatgtta

SEQ ID NO: 29131 - DNA, 80 bp, synthetic construct
  source 1..80: mol_type = other DNA
tcactgcagcctcgacctcctgagctcaagcaatcctcccacctcagcctcctgagtagctgggactacaggtgcatgcc

SEQ ID NO: 29132 - DNA, 80 bp, synthetic construct
  source 1..80: mol_type = other DNA
aggcataagccactgcaccaggctagtgattgctaacacttaaatagcacttccaagtgccttgacacttttctaaacac

SEQ ID NO: 29133 - DNA, 80 bp, synthetic construct; identical to SEQ ID NO: 11185
  source 1..80: mol_type = other DNA

SEQ ID NO: 29134 - DNA, 80 bp, synthetic construct
  source 1..80: mol_type = other DNA
tattcctggccagataagaaatcagtaatttggttttgtctgaagagatttgggaattcccccaagatgatttcctggag

SEQ ID NO: 29135 - DNA, 80 bp, synthetic construct
  source 1..80: mol_type = other DNA
caaagagggtgagaaaccagctgtatcacagtaataaatattactcagatttaggctcttcttcctagttcctgagtttt

SEQ ID NO: 29136 - DNA, 80 bp, synthetic construct
  source 1..80: mol_type = other DNA
gttgggatcctgaattcttaattttgactgagatctagtgagattagttgtctcttttggagataattttagaggcataa

SEQ ID NO: 29137 - DNA, 80 bp, synthetic construct; identical to SEQ ID NO: 11186
  source 1..80: mol_type = other DNA

SEQ ID NO: 29138 - DNA, 80 bp, synthetic construct
  source 1..80: mol_type = other DNA
atttcagagaaggcctctttgaggttttattgttattgtgatagaaagtttcatggctctgattttaccgttttaaaacg

SEQ ID NO: 29139 - DNA, 80 bp, synthetic construct
  source 1..80: mol_type = other DNA
ctggagataattttagccagccccagttgaaaccagttactatatgtcaaaatctttgagagtagagtccaggagttgat

SEQ ID NO: 29140 - DNA, 80 bp, synthetic construct
  source 1..80: mol_type = other DNA
ctttaaggaatatggttaggtcagagaacaaagcaaattcttaaagaggaaaacatttatcaggaaatgatgaagatgga

SEQ ID NO: 29141 - DNA, 80 bp, synthetic construct; identical to SEQ ID NO: 11187
  source 1..80: mol_type = other DNA

SEQ ID NO: 29142 - DNA, 80 bp, synthetic construct
  source 1..80: mol_type = other DNA
ttcataatgtaaagagtgctaattaaactctaaaatgaatgtaagtagagagtgagatatagattcacaatttgaatgat

SEQ ID NO: 29143 - DNA, 80 bp, synthetic construct
  source 1..80: mol_type = other DNA
atgctaacctttactccaataaaacattataattttgtaaactgtagtcctaatagactgctggggaagagcaataacac

SEQ ID NO: 29144 - DNA, 80 bp, synthetic construct
  source 1..80: mol_type = other DNA
ctcaacagatttaatgggctcttgaattaaagtagatagcaaaaaatggacttttagacagattagtcactacaagagag

SEQ ID NO: 29145 - DNA, 80 bp, synthetic construct; identical to SEQ ID NO: 11188
  source 1..80: mol_type = other DNA

SEQ ID NO: 29146 - DNA, 80 bp, synthetic construct
  source 1..80: mol_type = other DNA
aagcatgtttgtgttaaagacaagaaaaaggaaggaaaggatggacctgggtacatctgtctctttttatcaggaaagcc

SEQ ID NO: 29147 - DNA, 80 bp, synthetic construct
  source 1..80: mol_type = other DNA
gttttgaattaggcagccaacagtgactgccacaaattcatgtctttcttatgaaagccctatcaaagtggtacttttgt

SEQ ID NO: 29148 - DNA, 80 bp, synthetic construct
  source 1..80: mol_type = other DNA
gccacagacagatttaacactgagccttctcatgtgagtgatcttccatataacttccttacattctcatgaatgataca

SEQ ID NO: 29149 - DNA, 80 bp, synthetic construct
  source 1..80: mol_type = other DNA
tatacttctgatttcctcgtaaatcctttgagaaatagagagaggtaaatgtgattatttgcatttgatagttgggaata

SEQ ID NO: 29150 - DNA, 80 bp, synthetic construct; identical to SEQ ID NO: 11189
  source 1..80: mol_type = other DNA

SEQ ID NO: 29151 - DNA, 80 bp, synthetic construct
  source 1..80: mol_type = other DNA
aaattctgacacatttttatagctctattttataaaatgcattaccctgagtaattataaattatatgcaggaagtaatg

SEQ ID NO: 29152 - DNA, 80 bp, synthetic construct
  source 1..80: mol_type = other DNA
ttgtttttgctatactttatttttcttgaatatttatatttatgctttttgtttctatccacgctgttttttttttcctt

SEQ ID NO: 29153 - DNA, 80 bp, synthetic construct; identical to SEQ ID NO: 11190
  source 1..80: mol_type = other DNA

SEQ ID NO: 29154 - DNA, 80 bp, synthetic construct
  source 1..80: mol_type = other DNA
gaggagttctagggtatctttgctatctttgttcccagaagcaagatgcaatggagttcagaggccttttgtttgggcat

SEQ ID NO: 29155 - DNA, 80 bp, synthetic construct
  source 1..80: mol_type = other DNA
tcgatgaagaagggtatattcatctttgtccctagtgttcacatgattggctttctcagaaagtagtctttgcactatag

SEQ ID NO: 29156 - DNA, 80 bp, synthetic construct
  source 1..80: mol_type = other DNA
ctctttgtttttttcatcttgctcctcatcttcatcagagttgcctattcagagactttgagtaccagtgggaataaggt

SEQ ID NO: 29157 - DNA, 80 bp, synthetic construct; identical to SEQ ID NO: 11191
  source 1..80: mol_type = other DNA

SEQ ID NO: 29158 - DNA, 80 bp, synthetic construct
  source 1..80: mol_type = other DNA
ggggaggcctcacattcatggtggaaggcaaggaggagcaagtcacatcttacatggatggcagcaggcaaagagcttat

SEQ ID NO: 29159 - DNA, 80 bp, synthetic construct
  source 1..80: mol_type = other DNA
gggacacagagcttaaaccatatcaacaggtgaaggcacagaagtttggatagattaaaacaacttgccctaaatcaagg

SEQ ID NO: 29160 - DNA, 80 bp, synthetic construct
  source 1..80: mol_type = other DNA
cacgccattctcctgcctcagcctcccaagtagctgggactacaggcgcccgccactacgcccggctaattttttgtatt

SEQ ID NO: 29161 - DNA, 80 bp, synthetic construct; identical to SEQ ID NO: 11192
  source 1..80: mol_type = other DNA

SEQ ID NO: 29162 - DNA, 80 bp, synthetic construct
  source 1..80: mol_type = other DNA
agaagccacttccacccattctgggacccatgatggagtctgacctgcagggcttggcctgaggtcacttgcctctacag

SEQ ID NO: 29163 - DNA, 80 bp, synthetic construct
  source 1..80: mol_type = other DNA
caaggttgtagaaaatgtcagcttaactctagacaatagatttatgcagttattgctgccatagaatgctcttaaaacag

SEQ ID NO: 29164 - DNA, 80 bp, synthetic construct
  source 1..80: mol_type = other DNA
atatagatagggtgtttttgacatccaagaaaaattttagaaacatgtctctcataatttgttatgtggataacaaacat

SEQ ID NO: 29165 - DNA, 80 bp, synthetic construct; identical to SEQ ID NO: 11193
  source 1..80: mol_type = other DNA

SEQ ID NO: 29166 - DNA, 80 bp, synthetic construct
  source 1..80: mol_type = other DNA
ctatgtttggcttggatttgcaaccaggtctcttttgttccacaattgttcaacaaatatttcttgacaccaaactaggc

SEQ ID NO: 29167 - DNA, 80 bp, synthetic construct
  source 1..80: mol_type = other DNA
gccttgttaagcttaattacattttaatgggaatggccttaagagtcggatggcaggatccactcagtagcatgggaatg

SEQ ID NO: 29168 - DNA, 80 bp, synthetic construct
  source 1..80: mol_type = other DNA
gatcctgtctcttaaaaaaaaaaggctcttggatcaggggagggtgtgagggtggtggtggtcatggtggtgaaggtgag

SEQ ID NO: 29169 - DNA, 80 bp, synthetic construct; identical to SEQ ID NO: 11194
  source 1..80: mol_type = other DNA

SEQ ID NO: 29170 - DNA, 80 bp, synthetic construct
  source 1..80: mol_type = other DNA
ttctcttttccttaaacatgctagattctctcctattttaagtcctttggtgtagctgttccttctgtctgaaatgctct

SEQ ID NO: 29171 - DNA, 80 bp, synthetic construct
  source 1..80: mol_type = other DNA
ttaccaccttcactctccagcacaccttaccctactctacatactttcaaaattcatagtggttacgaccttctaacata

SEQ ID NO: 29172 - DNA, 80 bp, synthetic construct
  source 1..80: mol_type = other DNA
agctggcccaagttaatgccaatcacagatgtcacccctagacctgtacttgtatctttaacctagtctaatatacatca

SEQ ID NO: 29173 - DNA, 80 bp, synthetic construct
  source 1..80: mol_type = other DNA
aagtttggtcagctactgcaagggttcaaccatttttctctttctttccattctagttcccttatgctaagtgatatgac

SEQ ID NO: 29174 - DNA, 80 bp, synthetic construct; identical to SEQ ID NO: 11195
  source 1..80: mol_type = other DNA

SEQ ID NO: 29175 - DNA, 80 bp, synthetic construct
  source 1..80: mol_type = other DNA
ctcaattttatagataaggaacccaagagcagagaacttaaatacttgccaggtgtcacataggtaatagctatgtggtg

SEQ ID NO: 29176 - DNA, 80 bp, synthetic construct
  source 1..80: mol_type = other DNA
ctcttctgagagactatgtttcttccaattcctaccagcagatcctgaccaatgactcaatgatagagagttacaaaggg

SEQ ID NO: 29177 - DNA, 80 bp, synthetic construct; identical to SEQ ID NO: 11196
  source 1..80: mol_type = other DNA

SEQ ID NO: 29178 - DNA, 80 bp, synthetic construct
  source 1..80: mol_type = other DNA
gtaaatctgtatgatgaatgcatcttgtgatcgggttcggttgttcttacactctattcttttcatggacagtattctaa

SEQ ID NO: 29179 - DNA, 80 bp, synthetic construct
  source 1..80: mol_type = other DNA
tttgataacagaatactaggttccacgaaagagcatgtattttctttattccagagtattacgggttttacctctagctt

SEQ ID NO: 29180 - DNA, 80 bp, synthetic construct
  source 1..80: mol_type = other DNA
tttagcaagatgatattcacaaataactttatttttccaagcacacattaatattctaccattggctgactgaaatgtac

SEQ ID NO: 29181 - DNA, 80 bp, synthetic construct; identical to SEQ ID NO: 11197
  source 1..80: mol_type = other DNA

SEQ ID NO: 29182 - DNA, 80 bp, synthetic construct
  source 1..80: mol_type = other DNA
tataagattggaggaaatgctttattttatctagaaattgactaagaaaccaggaatgaagagttggaactgttgctttt

SEQ ID NO: 29183 - DNA, 80 bp, synthetic construct
  source 1..80: mol_type = other DNA
tgagaggccaggagagagaacagaaagaagagagttgaactttggtatggctaagtataagataaggtgtatgactagaa

SEQ ID NO: 29184 - DNA, 80 bp, synthetic construct
  source 1..80: mol_type = other DNA
tctagtggcattaaatatatttcagtggtattaagtatattcacaatattgtacagccatcagtatcatccgtttccaga

SEQ ID NO: 29185 - DNA, 80 bp, synthetic construct
  source 1..80: mol_type = other DNA
tgtctgatctgtgtcacttagcataatgttttcaaggttcatccatattgtagcatgtatcagaacctgattccttttta

SEQ ID NO: 29186 - DNA, 80 bp, synthetic construct; identical to SEQ ID NO: 11198
  source 1..80: mol_type = other DNA

SEQ ID NO: 29187 - DNA, 80 bp, synthetic construct
  source 1..80: mol_type = other DNA
ctgtttatctctactgttcagttgccaatcctgaacttcaaaaactatatgagggcagaggaaggtggtagaatagaagc

SEQ ID NO: 29188 - DNA, 80 bp, synthetic construct
  source 1..80: mol_type = other DNA
cgatgccacccctccctcatcccccagcagcagccagtgtggtgcagggagagaatttgtgtgctttggggagggaagag

SEQ ID NO: 29189 - DNA, 80 bp, synthetic construct
  source 1..80: mol_type = other DNA
cggcaagccttgccacagtgggcttaagtgccctgggatctaggtatactagaaaggctgtctagggcacaggactgcaa

SEQ ID NO: 29190 - DNA, 80 bp, synthetic construct; identical to SEQ ID NO: 11199
  source 1..80: mol_type = other DNA

SEQ ID NO: 29191 - DNA, 80 bp, synthetic construct
  source 1..80: mol_type = other DNA
agtgataaccttggagaatgccatgggccttgggctgtgagatgtgctggcttcaggggtgactcaacacgttcttaact

SEQ ID NO: 29192 - DNA, 80 bp, synthetic construct
  source 1..80: mol_type = other DNA
tagacctgccctgggtcagaagaggagcttgctgacctgaaggagaagtcccagacctggcaacattcaccgcaagctgg

SEQ ID NO: 29193 - DNA, 80 bp, synthetic construct
  source 1..80: mol_type = other DNA
gtacaatagaacatcaggtaaattgccaaggttttttgactccgatccctaggtcccagaccgcatctctggacttgccc

SEQ ID NO: 29194 - DNA, 80 bp, synthetic construct; identical to SEQ ID NO: 11200
  source 1..80: mol_type = other DNA

SEQ ID NO: 29195 - DNA, 80 bp, synthetic construct
  source 1..80: mol_type = other DNA
acaatgaggactgcaataaatatacctaactcttcaatacccaaatgctgacaaacatctataagcatcaacaacttcca

SEQ ID NO: 29196 - DNA, 80 bp, synthetic construct
  source 1..80: mol_type = other DNA
aacatgacctcaccaaatgaactaaataaggcactagggaccagtcctagtgcctagaagcagacatgtaacctttgaga

SEQ ID NO: 29197 - DNA, 80 bp, synthetic construct; identical to SEQ ID NO: 11201
  source 1..80: mol_type = other DNA

SEQ ID NO: 29198 - DNA, 80 bp, synthetic construct
  source 1..80: mol_type = other DNA
gagattttctgaaacctagagaaacatatcaacattcaagtacaataaagttatagaacaccaagcagatttaagccaaa

SEQ ID NO: 29199 - DNA, 80 bp, synthetic construct
  source 1..80: mol_type = other DNA
ggcagaacatatttaaagtgctgaaggaacaaaacttttattctaaatagtatatctagcaaaaatatcctttaagcatg

SEQ ID NO: 29200 - DNA, 80 bp, synthetic construct
  source 1..80: mol_type = other DNA
tagcaagcacacagaaacacaaagaatagtatgacatataattgtggtatgtaaacttctcttgacttctatagaaagac

SEQ ID NO: 29201 - DNA, 80 bp, synthetic construct; identical to SEQ ID NO: 11202
  source 1..80: mol_type = other DNA

SEQ ID NO: 29202 - DNA, 80 bp, synthetic construct
  source 1..80: mol_type = other DNA
tcaatagacatagagtggctgaaaaaaacaagacccagtgatctgttgtctacaagaaacacacttcacctataaagata

SEQ ID NO: 29203 - DNA, 80 bp, synthetic construct
  source 1..80: mol_type = other DNA
gcaagaggacataatgattgtaaatatatatgcacctaacacgtgcatatatatttacaatatatattaatagcatcgct

SEQ ID NO: 29204 - DNA, 80 bp, synthetic construct
  source 1..80: mol_type = other DNA
gaaaatcaacaaagaaacattggacttaatttgcactgtagaacaaatggacctaatagatatttacagaacatttcatc

SEQ ID NO: 29205 - DNA, 80 bp, synthetic construct
  source 1..80: mol_type = other DNA
taaaaggaattttggactatatagacacttggaaattaaacaatatgctcctgaatgcccagtgggtcagtgaagaaatt

SEQ ID NO: 29206 - DNA, 80 bp, synthetic construct; identical to SEQ ID NO: 11203
  source 1..80: mol_type = other DNA

SEQ ID NO: 29207 - DNA, 80 bp, synthetic construct
  source 1..80: mol_type = other DNA
catagaaattcaatgatcattagtggctactatgagcaactatgttccaataaattggaaaatctggaagaaatgaataa

SEQ ID NO: 29208 - DNA, 80 bp, synthetic construct
  source 1..80: mol_type = other DNA
aaagaagaactaataccaatcctactcaaactgctccaaaaaatggacaaagagagaatacttctaaactaattctgtga

SEQ ID NO: 29209 - DNA, 80 bp, synthetic construct; identical to SEQ ID NO: 11204
  source 1..80: mol_type = other DNA

SEQ ID NO: 29210 - DNA, 80 bp, synthetic construct
  source 1..80: mol_type = other DNA
aactgaaaggcttttctcttagatctggaacatgacaaagatgcccactttcaccactgttattcaaaatagtactggaa

SEQ ID NO: 29211 - DNA, 80 bp, synthetic construct
  source 1..80: mol_type = other DNA
gcatacaaaaatcaatagcatttctatatgtcatcagtgaacaatctgaaaaagaattcaaaaaagtaatcccatttaaa

SEQ ID NO: 29212 - DNA, 80 bp, synthetic construct
  source 1..80: mol_type = other DNA
gacccaaaatagccaaggctatcttgagcaaacaacaaaactggaggaatcacattacctgacttcaaattatactacag

SEQ ID NO: 29213 - DNA, 80 bp, synthetic construct; identical to SEQ ID NO: 11205
  source 1..80: mol_type = other DNA

SEQ ID NO: 29214 - DNA, 80 bp, synthetic construct
  source 1..80: mol_type = other DNA
tcacatcaagttacaaagcttctgcagagcaaaggaagcaacaaagtgaagagatgagataacccacagaacgggagaaa

SEQ ID NO: 29215 - DNA, 80 bp, synthetic construct
  source 1..80: mol_type = other DNA
tgctcagcatcactgatcaccagtgaaatgcaaataaaaattagacaatgagatatcatctcaccccagttaaaatggct

SEQ ID NO: 29216 - DNA, 80 bp, synthetic construct
  source 1..80: mol_type = other DNA
ctggtaggtatatacccaaaagaaaggaaattaatgtatcaaagagatagctgcactcctatatttgttgcatcattgtt

SEQ ID NO: 29217 - DNA, 80 bp, synthetic construct; identical to SEQ ID NO: 11206
  source 1..80: mol_type = other DNA

SEQ ID NO: 29218 - DNA, 80 bp, synthetic construct
  source 1..80: mol_type = other DNA
attttaaaataactaagggcataattggattgtttgtaacacaaaggataaatgcttgagaggattgataccctattttc

SEQ ID NO: 29219 - DNA, 80 bp, synthetic construct
  source 1..80: mol_type = other DNA
aggattttgctgttgcaggaactaacagatacataatttttcttctgaatagatgaaggtagaaaggcaaaatggttgga

SEQ ID NO: 29220 - DNA, 80 bp, synthetic construct
  source 1..80: mol_type = other DNA
actgtattatttaagaagtagaagtcatggagattgaaaatatagttgtaaataagggtttatataggttcacgtactct

SEQ ID NO: 29221 - DNA, 80 bp, synthetic construct; identical to SEQ ID NO: 11207
  source 1..80: mol_type = other DNA

SEQ ID NO: 29222 - DNA, 80 bp, synthetic construct
  source 1..80: mol_type = other DNA
agtgcagtggcaccatcttggttcactgcaacctccgactccctggttcaagtgattctcctgcctcagcctccctaata

SEQ ID NO: 29223 - DNA, 80 bp, synthetic construct
  source 1..80: mol_type = other DNA
taagccactgcggacagccagacatactgttttatgttgagagtatatcttcatccttttactttccagcctagggtctt

SEQ ID NO: 29224 - DNA, 80 bp, synthetic construct
  source 1..80: mol_type = other DNA
ataaagttcagattttgctcttaagatgcttatagatttctaacaggctacaaaagcacttgactataaaggaaaatatg

SEQ ID NO: 29225 - DNA, 80 bp, synthetic construct
  source 1..80: mol_type = other DNA
gaggtaacatacgagataacagaaaaatgagcagataaattgaactggtacttcacaaatgaatacattcagttggccaa

SEQ ID NO: 29226 - DNA, 80 bp, synthetic construct; identical to SEQ ID NO: 11208
  source 1..80: mol_type = other DNA

SEQ ID NO: 29227 - DNA, 80 bp, synthetic construct
  source 1..80: mol_type = other DNA
tgtagtaaggaaataactacctttatatacaataacatgaatgaatcccacaaacacaaatttagtgacagaagccagac

SEQ ID NO: 29228 - DNA, 80 bp, synthetic construct
  source 1..80: mol_type = other DNA
gagggaggcttctgttttgctgattttatactctatttcttgatctagtggtagctacttggatgtattcactttgtaaa

SEQ ID NO: 29229 - DNA, 80 bp, synthetic construct
  source 1..80: mol_type = other DNA
tcaaaaaaattaactttagaaggaaaaattggccctaggtgggtctaaaagttccagttacctaaaatgtagggctgcca

SEQ ID NO: 29230 - DNA, 80 bp, synthetic construct; identical to SEQ ID NO: 11209
  source 1..80: mol_type = other DNA

SEQ ID NO: 29231 - DNA, 80 bp, synthetic construct
  source 1..80: mol_type = other DNA
agagtctctttcacaaatggtaccactacaaacctcatgcttgtgcaaattttgaacctatgtagtaattcctgttttat

SEQ ID NO: 29232 - DNA, 80 bp, synthetic construct
  source 1..80: mol_type = other DNA
attagacccttttggacatggtcattcagtcaattatgactagtgctaatggaactcacatctagtccatgcttatttgg

SEQ ID NO: 29233 - DNA, 80 bp, synthetic construct
  source 1..80: mol_type = other DNA
tacaaaaattagccagccatcgtggtgggcacccgtaatcccagctcctcgggaggctgagacaggagaatcgcttgaac

SEQ ID NO: 29234 - DNA, 80 bp, synthetic construct; identical to SEQ ID NO: 11210
  source 1..80: mol_type = other DNA

SEQ ID NO: 29235 - DNA, 80 bp, synthetic construct
  source 1..80: mol_type = other DNA
tcacttttctcttttcaccagcagagggcaggtaaggaagagagaagaaaatactataaaagtatctcgtcctctattca

SEQ ID NO: 29236 - DNA, 80 bp, synthetic construct
  source 1..80: mol_type = other DNA
ttgtttataaaccaattataaattcagacttgaaaagtctgaatattctttatattttgaagtgataaaaatgtcccctt

SEQ ID NO: 29237 - DNA, 80 bp, synthetic construct
  source 1..80: mol_type = other DNA
tcaacatgcagagttgttaagcatggttttcagttttattaatcaagtaatgtatcttataaacataactgaaggaaact

SEQ ID NO: 29238 - DNA, 80 bp, synthetic construct; identical to SEQ ID NO: 11211
  source 1..80: mol_type = other DNA

SEQ ID NO: 29239 - DNA, 80 bp, synthetic construct
  source 1..80: mol_type = other DNA
tttttaactgtcaagcaaggttatgtattaggactccccttggtcatactaaggaatatttccaaatactggacaaaaat

SEQ ID NO: 29240 - DNA, 80 bp, synthetic construct
  source 1..80: mol_type = other DNA
cagcctctttactgattgcccatacgatgtcttccttttccactaggccaccatgtgtatttattctacttttttctttc

SEQ ID NO: 29241 - DNA, 80 bp, synthetic construct; identical to SEQ ID NO: 11212
  source 1..80: mol_type = other DNA

SEQ ID NO: 29242 - DNA, 80 bp, synthetic construct
  source 1..80: mol_type = other DNA
cctaatgctatccctccccactcccccaaccccacgacaggccatggtgtgtgatgttccccatcctgtgtccaagtgtt

SEQ ID NO: 29243 - DNA, 80 bp, synthetic construct
  source 1..80: mol_type = other DNA
tgtgcagtggccccttgtctttcaagatccattgtcaatgacattttctcctgaagacatatcttattcttaactggatg

SEQ ID NO: 29244 - DNA, 80 bp, synthetic construct
  source 1..80: mol_type = other DNA
catgatgtcctgcaactggcagagtcattcagagacaccagggctctttgtattttttcaggccctcagtatattaaaaa

SEQ ID NO: 29245 - DNA, 80 bp, synthetic construct; identical to SEQ ID NO: 11213
  source 1..80: mol_type = other DNA

SEQ ID NO: 29246 - DNA, 80 bp, synthetic construct
  source 1..80: mol_type = other DNA
ccaaaacgatgctatatataaatattatacaatgaatttctatttttatgtaatcatattattcagaaataaggttgaaa

SEQ ID NO: 29247 - DNA, 80 bp, synthetic construct
  source 1..80: mol_type = other DNA
caacccgtcatctacattaggtattaggtatttctactaatgctatccctctccttgctccccaccccccgacaggccct

SEQ ID NO: 29248 - DNA, 80 bp, synthetic construct
  source 1..80: mol_type = other DNA
tttttttatggctgcatagtattccatggtgtatatgtgtcacattttctttatccagtctatcattgatgggcacttgg

SEQ ID NO: 29249 - DNA, 80 bp, synthetic construct; identical to SEQ ID NO: 11214
  source 1..80: mol_type = other DNA

SEQ ID NO: 29250 - DNA, 80 bp, synthetic construct
  source 1..80: mol_type = other DNA
agaggaagtcagattgtctctgtttgcagatgacatgattgtatatttagaaaaccccattgtctcagccacaaaactcc

SEQ ID NO: 29251 - DNA, 80 bp, synthetic construct
  source 1..80: mol_type = other DNA
aacaagggatgtgaaggacctcttcaaggagaactacaaaccactgctcaaggaaataagagaggacacaaacaaatgga

SEQ ID NO: 29252 - DNA, 80 bp, synthetic construct
  source 1..80: mol_type = other DNA
cccatctagccaagacaatccttagcaaaaagaacaaagctggaggcatcatgctatctgacttcaaactatactacaag

SEQ ID NO: 29253 - DNA, 80 bp, synthetic construct
  source 1..80: mol_type = other DNA
gtgttgggaaaactggctagccatatgcagaaaactgaaactggaccccttccttacaccttataaaaaaattaagtcaa

SEQ ID NO: 29254 - DNA, 80 bp, synthetic construct; identical to SEQ ID NO: 11215
  source 1..80: mol_type = other DNA

SEQ ID NO: 29255 - DNA, 80 bp, synthetic construct
  source 1..80: mol_type = other DNA
cctgcactatgaggcacatgaaaagtcaaattgtattctccatgactctcctgagttagtaacaaagatgaatgcttcat

SEQ ID NO: 29256 - DNA, 80 bp, synthetic construct
  source 1..80: mol_type = other DNA
attctttgttattggacaatatagcttaattttgcatagttagaggtatgggatacctgaggagcataaatacatgaatt

SEQ ID NO: 29257 - DNA, 80 bp, synthetic construct
  source 1..80: mol_type = other DNA
tatgatataatctcattcccttagactagttagtagaatgatatgtttcaagccctactttgctaaattaacatgaaccc

SEQ ID NO: 29258 - DNA, 80 bp, synthetic construct; identical to SEQ ID NO: 11216
  source 1..80: mol_type = other DNA

SEQ ID NO: 29259 - DNA, 80 bp, synthetic construct
  source 1..80: mol_type = other DNA
atccataatagcactaaaggtttttctatgactggaagtaagttgtaatttgaataacccgtcctcacacctctttcgta

SEQ ID NO: 29260 - DNA, 80 bp, synthetic construct
  source 1..80: mol_type = other DNA
ataggattttatggaaaaaggtgaggacagtttcataaaacctaaggaaaaatttcaagaagacagtttgtacgtacaaa

SEQ ID NO: 29261 - DNA, 80 bp, synthetic construct
  source 1..80: mol_type = other DNA
tcatctctgcaaaaaataaacaaaattagctgggtgtggtggcacgtgcctgtagtcccagctacccaggagacttaggt

SEQ ID NO: 29262 - DNA, 80 bp, synthetic construct; identical to SEQ ID NO: 11217
  source 1..80: mol_type = other DNA

SEQ ID NO: 29263 - DNA, 80 bp, synthetic construct
  source 1..80: mol_type = other DNA
gcttgatttatatatataaccacatggaatttcatactgaagcccagcaaaacttccattatcctccacatccataattt

SEQ ID NO: 29264 - DNA, 80 bp, synthetic construct
  source 1..80: mol_type = other DNA
gtaatataactctcttgggactcaagggaacaaaccatacagtgtcttttgctaaatgccaaaaatcaagaagccagttg

SEQ ID NO: 29265 - DNA, 80 bp, synthetic construct
  source 1..80: mol_type = other DNA
aagaccagcctggccaagatggtgaaaccccgtctctacaaaaaatacaaaaattagccaggcgtggtggcgggcacctg

SEQ ID NO: 29266 - DNA, 80 bp, synthetic construct; identical to SEQ ID NO: 11218
  source 1..80: mol_type = other DNA

SEQ ID NO: 29267 - DNA, 80 bp, synthetic construct
  source 1..80: mol_type = other DNA
atagtgaaaaagtgtggtcatgggattggttagacctaattcaggactaccaatactagatgtgaggctataggcaggtg

SEQ ID NO: 29268 - DNA, 80 bp, synthetic construct
  source 1..80: mol_type = other DNA
ttatcctggatatatcgtgggtttgcttcatattggaaaacaagacagcaacaaagatccatgtttcattcttcagtgac

SEQ ID NO: 29269 - DNA, 80 bp, synthetic construct; identical to SEQ ID NO: 11219
  source 1..80: mol_type = other DNA

SEQ ID NO: 29270 - DNA, 80 bp, synthetic construct
  source 1..80: mol_type = other DNA
ggtcaactttgactacttccaaaatgctttttttgagtgaaatgttacacctctttgttagttcattgcaataatactta

SEQ ID NO: 29271 - DNA, 80 bp, synthetic construct
  source 1..80: mol_type = other DNA
aatgtttttctcgaatccaagtgtttttacactatacaataggagtagaaatttgtcaccactctgtggccaaactcact

SEQ ID NO: 29272 - DNA, 80 bp, synthetic construct
  source 1..80: mol_type = other DNA
tcctgttaataattgctacagatttttgaataattgcagaccagtttgatggtcctgggttggcataagtacatgaagat

SEQ ID NO: 29273 - DNA, 80 bp, synthetic construct; identical to SEQ ID NO: 11220
  source 1..80: mol_type = other DNA

SEQ ID NO: 29274 - DNA, 80 bp, synthetic construct
  source 1..80: mol_type = other DNA
ttttttaaaataaaaatttacagaaaaattatgacgatactacaaagaggttctgtacaaccccctcccagtttctctta

SEQ ID NO: 29275 - DNA, 80 bp, synthetic construct
  source 1..80: mol_type = other DNA
tttttaggttctttctcagctgacagagcaaagaaatatatgtgtgtatattaacctatgtgtacacatacatctatgat

SEQ ID NO: 29276 - DNA, 80 bp, synthetic construct
  source 1..80: mol_type = other DNA
ctatctgcttacctaatttctcatttccagtttatgtatacagtggcttcagaattattacatatagccctgtgggatac

SEQ ID NO: 29277 - DNA, 80 bp, synthetic construct
  source 1..80: mol_type = other DNA
tttcatatgttagtaacacagattctttttttgcagtctgcattccattttagggttccctcctctccaatctcctaaat

SEQ ID NO: 29278 - DNA, 80 bp, synthetic construct; identical to SEQ ID NO: 11221
  source 1..80: mol_type = other DNA

SEQ ID NO: 29279 - DNA, 80 bp, synthetic construct
  source 1..80: mol_type = other DNA
tgaagtatatcaatataccttggaacatgactgctagatagtatagtaagactatatttagctttgcaagaaactgccaa

SEQ ID NO: 29280 - DNA, 80 bp, synthetic construct
  source 1..80: mol_type = other DNA
ttttcatatgtttgtttcccatttgtatatcttctttagtatgtgtctgttcggatgttttgcttactttttttaaactg

SEQ ID NO: 29281 - DNA, 80 bp, synthetic construct; identical to SEQ ID NO: 11222
  source 1..80: mol_type = other DNA

SEQ ID NO: 29282 - DNA, 80 bp, synthetic construct
  source 1..80: mol_type = other DNA
caataaaactggttgagaagataatcattttaaaaaatcataatgaattatatgatacacattctattatttcatgagaa

SEQ ID NO: 29283 - DNA, 80 bp, synthetic construct
  source 1..80: mol_type = other DNA
atggaagctgttcttcccaccattttataaatgatgaaaccttagatcacactcagtggaagagttctaaagccctatgt

SEQ ID NO: 29284 - DNA, 80 bp, synthetic construct
  source 1..80: mol_type = other DNA
cctcaaattcattgttgtttgtatgagaacacatttaggtgatcggatacaagtatatagtttttcccagatgtttattt

SEQ ID NO: 29285 - DNA, 80 bp, synthetic construct; identical to SEQ ID NO: 11223
  source 1..80: mol_type = other DNA

SEQ ID NO: 29286 - DNA, 80 bp, synthetic construct
  source 1..80: mol_type = other DNA
tgaggggcatgagaagtgaagttcctgctttgctttgggtaaggaatctgcattgacaggggcttaagaacctgctctta

SEQ ID NO: 29287 - DNA, 80 bp, synthetic construct
  source 1..80: mol_type = other DNA
agtttgagtgggagtttgagtttcctcttagagaaacagaactgagtgaggcactttcattttttagtttcctagtacct

SEQ ID NO: 29288 - DNA, 80 bp, synthetic construct
  source 1..80: mol_type = other DNA
ctggagtgcaatggcgtgatcttggctcactgcaacctctgcctcccaggttcaagcgattctcctgcctcagcctcctg

SEQ ID NO: 29289 - DNA, 80 bp, synthetic construct
  source 1..80: mol_type = other DNA
cactgcgcccagccaaaattaatgctcttaacatgtaaaaagtaaagtgcagtggaactttggcacttatgcaagataat

SEQ ID NO: 29290 - DNA, 80 bp, synthetic construct; identical to SEQ ID NO: 11224
  source 1..80: mol_type = other DNA

SEQ ID NO: 29291 - DNA, 80 bp, synthetic construct
  source 1..80: mol_type = other DNA
ccactgcctggcacagagatggaacactataagctttccaaaaacatttgtggaatggaatcagaaagtcactttacttt

SEQ ID NO: 29292 - DNA, 80 bp, synthetic construct
  source 1..80: mol_type = other DNA
ccaggcttttttcaatgcttatgcaaacatgtatatgtgacctgtaggtctccttttacccagtttttggagtacaaata

SEQ ID NO: 29293 - DNA, 80 bp, synthetic construct
  source 1..80: mol_type = other DNA
tcaaagaggtaatttctgtttctaaacactagaaaaaggagaatatgaaggatctgactagtccattgtcacatgcccca

SEQ ID NO: 29294 - DNA, 80 bp, synthetic construct; identical to SEQ ID NO: 11225
  source 1..80: mol_type = other DNA

SEQ ID NO: 29295 - DNA, 80 bp, synthetic construct
  source 1..80: mol_type = other DNA
tttggggtcatctcaacacaccaaacagattctaactacactgaatctcaaaagaaatagaagtagtctttgtcaagcca

SEQ ID NO: 29296 - DNA, 80 bp, synthetic construct
  source 1..80: mol_type = other DNA
ctgaatctcaaaagaaatagaagtagtctttgtcaagccacagaaaagagcttgttcttctttcttctcctcctagacac

SEQ ID NO: 29297 - DNA, 80 bp, synthetic construct
  source 1..80: mol_type = other DNA
caaaagagttctatgtggtctagttacacagagatcacagtgattaactactcagctctggagccagacaactgggtttg

SEQ ID NO: 29298 - DNA, 80 bp, synthetic construct
  source 1..80: mol_type = other DNA
taacagacatttttttcttacaaagacggtaccatactaaacttaatttgctttttttgaaaaattatatttttaggtaa

SEQ ID NO: 29299 - DNA, 80 bp, synthetic construct
  source 1..80: mol_type = other DNA
tattttgccatcacttcatcagtgttgcctctcaacagcctttgaagcgaggagatgccagtcactgtctcagacacaag

SEQ ID NO: 29300 - DNA, 80 bp, synthetic construct
  source 1..80: mol_type = other DNA
gtggaagttaaagcaaatcagaaaggagtccctaaacctgtgaattcttgaattttagttttccaggtcaacaagccttc

SEQ ID NO: 29301 - DNA, 80 bp, synthetic construct
  source 1..80: mol_type = other DNA
tggagggaagatggtttttctttccaggtgaacttacatattgccttttctcagatatcagattatgagaataatacaat

SEQ ID NO: 29302 - DNA, 80 bp, synthetic construct; identical to SEQ ID NO: 11226
  source 1..80: mol_type = other DNA

SEQ ID NO: 29303 - DNA, 80 bp, synthetic construct
  source 1..80: mol_type = other DNA
ttgtttctagaaaagcttcagcaggaaaatgagaagagaacccataaaaaccataaaacatttcatgaatggtagcttta

SEQ ID NO: 29304 - DNA, 80 bp, synthetic construct
  source 1..80: mol_type = other DNA
cggaagacccatcagggtgccaaattccatctggacacagttacaaatacaccactgttgatgagctgaaaattagagca

SEQ ID NO: 29305 - DNA, 80 bp, synthetic construct
  source 1..80: mol_type = other DNA
gagaaattccaatgttcctgagaattctgatagcttttagagagttcagttttctgtagcattccattttgcaatcctat

SEQ ID NO: 29306 - DNA, 80 bp, synthetic construct; identical to SEQ ID NO: 11227
  source 1..80: mol_type = other DNA

SEQ ID NO: 29307 - DNA, 80 bp, synthetic construct
  source 1..80: mol_type = other DNA
cccaaatgtcagtagtactgaggtagagagaccctaacttaatctgttcaacaatcctatgaggtgattttttttttttt

SEQ ID NO: 29308 - DNA, 80 bp, synthetic construct
  source 1..80: mol_type = other DNA
gatcagaagcatgcaccaccacacctggctattttttttatttttttgtagagacaaggtcttactgtgttgcccaggct

SEQ ID NO: 29309 - DNA, 80 bp, synthetic construct
  source 1..80: mol_type = other DNA
acagagctaagtgtggtgccaggattgaaaacctagttctttattgctttagcacaagctatttccactatactctgtca

SEQ ID NO: 29310 - DNA, 80 bp, synthetic construct
  source 1..80: mol_type = other DNA
cattcatcttttgagcatcttcaaatatcccctttagaatgacattcaattattaggtcagtaaccccaagagaaaacgg

SEQ ID NO: 29311 - DNA, 80 bp, synthetic construct; identical to SEQ ID NO: 11228
  source 1..80: mol_type = other DNA

SEQ ID NO: 29312 - DNA, 80 bp, synthetic construct
  source 1..80: mol_type = other DNA
gcttttcttcccgataggagtgactatttcttttcttcttccacattttcaggttttagtgtacttgtgattgctaccca

SEQ ID NO: 29313 - DNA, 80 bp, synthetic construct
  source 1..80: mol_type = other DNA
attgtgaaagttcactctcatgatttctaatggtgaaacctggcagggtgactaatctttgacgagaaggttatcactta

SEQ ID NO: 29314 - DNA, 80 bp, synthetic construct; identical to SEQ ID NO: 11229
  source 1..80: mol_type = other DNA

SEQ ID NO: 29315 - DNA, 80 bp, synthetic construct
  source 1..80: mol_type = other DNA
catgaaacttgtttttcctcaggttcattatctgtaatatatagtgaatgaagaagtttcctgtcccatgaaggtgttgt

SEQ ID NO: 29316 - DNA, 80 bp, synthetic construct
  source 1..80: mol_type = other DNA
cctggcccattaatctctttcctgttcctgacatttcagagatacgtttaggatttcaatcatgaccttaagccacattt

SEQ ID NO: 29317 - DNA, 80 bp, synthetic construct
  source 1..80: mol_type = other DNA
gctgtaatgttttatgataaaaatctgtggtcttcctatgtacatgtgtgtgtacatgcttaaaatgcaatgttatagtt

SEQ ID NO: 29318 - DNA, 80 bp, synthetic construct
  source 1..80: mol_type = other DNA
tatataaatacatgagggatgatttgattagaagcagtattacacagtgataggagtaatggtttagaactagactcagg

SEQ ID NO: 29319 - DNA, 80 bp, synthetic construct; identical to SEQ ID NO: 11230
  source 1..80: mol_type = other DNA

SEQ ID NO: 29320 - DNA, 80 bp, synthetic construct
  source 1..80: mol_type = other DNA
acatgtctgggaaaagtcaatagtgaagacagagtctcacaattttttgtcataatggagagatgaaaacacaggtagag

SEQ ID NO: 29321 - DNA, 80 bp, synthetic construct
  source 1..80: mol_type = other DNA
aaaaaaaggtatgcttttgcccacggaagggcaaagcagagctatgaaaacctgctgaacacattctttattttcaacac

SEQ ID NO: 29322 - DNA, 80 bp, synthetic construct; identical to SEQ ID NO: 11231
  source 1..80: mol_type = other DNA

SEQ ID NO: 29323 - DNA, 80 bp, synthetic construct
  source 1..80: mol_type = other DNA
tgttttgctgactgagactaggaaatctataggagggcgggttagtttacattgttccttgtcattatcgctaaaacact

SEQ ID NO: 29324 - DNA, 80 bp, synthetic construct
  source 1..80: mol_type = other DNA
tcagtacgtgtcctaagatttctgtgccacccttggagttcactcacctaaacctgaaactaataaagcttggttctttt

SEQ ID NO: 29325 - DNA, 80 bp, synthetic construct
  source 1..80: mol_type = other DNA
cgggaaaaggaggaggaggaggaaggcaggctccggggaagctggtggcagcgggtcctgggtctggcggaccctgacgc

SEQ ID NO: 29326 - DNA, 80 bp, synthetic construct
  source 1..80: mol_type = other DNA
gcgcgcgagggagggaggctgggagtcagaatcgggaaagggaggtgcggggcggcgagggagcgaaggaggagaggagg

SEQ ID NO: 29327 - DNA, 80 bp, synthetic construct; identical to SEQ ID NO: 11232
  source 1..80: mol_type = other DNA

SEQ ID NO: 29328 - DNA, 80 bp, synthetic construct
  source 1..80: mol_type = other DNA
gggcgtgtgtatgggttgggtttggggtaaaggaataagcagtttttaaaaagatgcgctatcattcattgttttgaaag

SEQ ID NO: 29329 - DNA, 80 bp, synthetic construct
  source 1..80: mol_type = other DNA
agagatggaagaatgaactgaagctgattgaatagagagccacatctacttgcaactgaaaagttagaatctcaagactc

SEQ ID NO: 29330 - DNA, 80 bp, synthetic construct; identical to SEQ ID NO: 11233
  source 1..80: mol_type = other DNA

SEQ ID NO: 29331 - DNA, 80 bp, synthetic construct
  source 1..80: mol_type = other DNA
gccataggaatagataccgaagttatatccaactgacatttaataaattgtattcatagcctaatgtgatgagccacaga

SEQ ID NO: 29332 - DNA, 80 bp, synthetic construct
  source 1..80: mol_type = other DNA
tcctgttattatactggtgtgaatgaatgaataggtactgctctctcttgggacattacttgacacataattacccaatg

SEQ ID NO: 29333 - DNA, 80 bp, synthetic construct
  source 1..80: mol_type = other DNA
ttgaaggagagctcctccctgtggatgagagagaaggactttactctttggaattatctttttgtgttgatgttatccac

SEQ ID NO: 29334 - DNA, 80 bp, synthetic construct
  source 1..80: mol_type = other DNA
ataaattatagactttttttagcagagaactttgaggaacctaaatgccaaccagtctaaaaatgcagttttcagaagaa

SEQ ID NO: 29335 - DNA, 80 bp, synthetic construct; identical to SEQ ID NO: 11234
  source 1..80: mol_type = other DNA

SEQ ID NO: 29336 - DNA, 80 bp, synthetic construct
  source 1..80: mol_type = other DNA
gtaggctttggagtcagattattttgattcagatcctacatctactgtttagtagctctgttgcctgaggcaggtccctt

SEQ ID NO: 29337 - DNA, 80 bp, synthetic construct
  source 1..80: mol_type = other DNA
gatgctcaattcatctttgagtataattttgtgactctcaatctggatatgcaatgagtgggcctgtatgagaatttaat

SEQ ID NO: 29338 - DNA, 80 bp, synthetic construct; identical to SEQ ID NO: 11235
  source 1..80: mol_type = other DNA

SEQ ID NO: 29339 - DNA, 80 bp, synthetic construct
  source 1..80: mol_type = other DNA
aaaaattcaggtagttcatgactatcagagcaaacaagtacattaaattgaaacttttatgaaaataacatttatgaaat

SEQ ID NO: 29340 - DNA, 80 bp, synthetic construct
  source 1..80: mol_type = other DNA
cagtttgttcctctctgtctcttctctcatgccctgaatttttcatatttcgtttagttgtaagagtgtatatcaaaccg

SEQ ID NO: 29341 - DNA, 80 bp, synthetic construct
  source 1..80: mol_type = other DNA
ggatgtggggtctcctgtaaactctgcagttagtctcaagtaagaccaaagagtaaaatattgttaggatctaaggtgga

SEQ ID NO: 29342 - DNA, 80 bp, synthetic construct
  source 1..80: mol_type = other DNA
tttatatatcagaataggtatggtggttcaaaatagctatctaataaaaaccacactcctattctaaacatttgcctttg

SEQ ID NO: 29343 - DNA, 80 bp, synthetic construct; identical to SEQ ID NO: 11236
  source 1..80: mol_type = other DNA

SEQ ID NO: 29344 - DNA, 80 bp, synthetic construct
  source 1..80: mol_type = other DNA
cccaggctagagtgcagtgacacaatcataactcactgcaacctccacctcctgggctcaagtgagccttccatcttgcc

SEQ ID NO: 29345 - DNA, 80 bp, synthetic construct
  source 1..80: mol_type = other DNA
ctgggattacaggcgtaagccacctcaccctgtcagcctaaagacagtgcttaatgaagagaaatataagtgctttgagc

SEQ ID NO: 29346 - DNA, 80 bp, synthetic construct
  source 1..80: mol_type = other DNA
aaagctaaaattatggctaagccataaatatttttgcagtttgttgagggtgtttgtaaaagtgttgccaaggaagacca

SEQ ID NO: 29347 - DNA, 80 bp, synthetic construct; identical to SEQ ID NO: 11237
  source 1..80: mol_type = other DNA

SEQ ID NO: 29348 - DNA, 80 bp, synthetic construct
  source 1..80: mol_type = other DNA
ccctcaatagtcttttctatttatccttttgctgaccatgttttgttattacacagttgagatttttcagctgggaatct

SEQ ID NO: 29349 - DNA, 80 bp, synthetic construct
  source 1..80: mol_type = other DNA
tttaattttgcaaattttaaaaagttctcctttgttttgaagtttattcctatagttttttatatgctagttaaattatt

SEQ ID NO: 29350 - DNA, 80 bp, synthetic construct; identical to SEQ ID NO: 11238
  source 1..80: mol_type = other DNA

SEQ ID NO: 29351 - DNA, 80 bp, synthetic construct
  source 1..80: mol_type = other DNA
tttagcatgcagttatgtgttggttgtcaaaacgttaaaaacatctctgactcagcagcaattttggcaattttgatcct

SEQ ID NO: 29352 - DNA, 80 bp, synthetic construct
  source 1..80: mol_type = other DNA
tatttctgttggttctcttcagagctctagaatcaatttaccacatagttgtttcagtgtgaaattagcattacagagtg

SEQ ID NO: 29353 - DNA, 80 bp, synthetic construct
  source 1..80: mol_type = other DNA
gagctctgaaaaatcttttttcagagtttttcacagctgtattcaagttgcaaggcttgtcaactttgctatttttctgt

SEQ ID NO: 29354 - DNA, 80 bp, synthetic construct
  source 1..80: mol_type = other DNA
tccgtggaacaatttaataaagatttttttgtgatgttaatgagttcatggtgatcaaccctagagacctgtgtctattg

SEQ ID NO: 29355 - DNA, 80 bp, synthetic construct; identical to SEQ ID NO: 11239
  source 1..80: mol_type = other DNA

SEQ ID NO: 29356 - DNA, 80 bp, synthetic construct
  source 1..80: mol_type = other DNA
ctgtattctatgtgagacgttaagaaggtagaggtggccaagaaggaaattgttgctgcctttatggaacaaattatctg

SEQ ID NO: 29357 - DNA, 80 bp, synthetic construct
  source 1..80: mol_type = other DNA
ggaaaaatttaaacaggtagtgtggaggactgacaggataagtaagcatggcaccttcaaaatatcctgagaagttccct

SEQ ID NO: 29358 - DNA, 80 bp, synthetic construct; identical to SEQ ID NO: 11240
  source 1..80: mol_type = other DNA

SEQ ID NO: 29359 - DNA, 80 bp, synthetic construct
  source 1..80: mol_type = other DNA
agtggtgctgcttattgaatgagaaaatttaatcggagaagaaggcatggagcaggagtgcagacctatgtgactctact

SEQ ID NO: 29360 - DNA, 80 bp, synthetic construct
  source 1..80: mol_type = other DNA
gtgacagttttataaatatgtagagtgcccacttgtttggccttattgtggcatagtgtgacctgagagtgttaggaaga

SEQ ID NO: 29361 - DNA, 80 bp, synthetic construct
  source 1..80: mol_type = other DNA
tgcttttcacatcacgggacacaacatatgagagatcatagaaattcaatgtggtatgaaaatctgcttgggacttcaga

SEQ ID NO: 29362 - DNA, 80 bp, synthetic construct
  source 1..80: mol_type = other DNA
actttgagctttgttaaatatgcagagttctctttcttagcatggactacagaggtgcaactacctcctacctgacttca

SEQ ID NO: 29363 - DNA, 80 bp, synthetic construct; identical to SEQ ID NO: 11241
  source 1..80: mol_type = other DNA

SEQ ID NO: 29364 - DNA, 80 bp, synthetic construct
  source 1..80: mol_type = other DNA
aaacaacaataccaacacaaaagcatcactttttcgaccaaagaccattgctatacttttttgtgtaaagggctagatag

SEQ ID NO: 29365 - DNA, 80 bp, synthetic construct
  source 1..80: mol_type = other DNA
gcaatatgctttaaaagatacagtttttagtctttcttagtttaaaataaaatctagaaaaaattttaagtcttctataa

SEQ ID NO: 29366 - DNA, 80 bp, synthetic construct; identical to SEQ ID NO: 11242
  source 1..80: mol_type = other DNA

SEQ ID NO: 29367 - DNA, 80 bp, synthetic construct
  source 1..80: mol_type = other DNA
acaaatagcagtgacaataaaagataataactctcccataaatacaaagaaacagttaacctagtgctctaaagtaaagg

SEQ ID NO: 29368 - DNA, 80 bp, synthetic construct
  source 1..80: mol_type = other DNA
tagcaatacataaaggtatatatactcctgtgacctcagctgaattatttgcattggttgcatcccacaaggttgactct

SEQ ID NO: 29369 - DNA, 80 bp, synthetic construct
  source 1..80: mol_type = other DNA
gaaattatactgcctgtcctacaggtgaaggtgttatgaatgcagtttgtcactgtaactctattcatagctctgaaagg

SEQ ID NO: 29370 - DNA, 80 bp, synthetic construct
  source 1..80: mol_type = other DNA
ttttggaaaggctattgttaaattgatggtaaattctataaccaatatcaccttaaagcaagtacgcatgataaagtatt

SEQ ID NO: 29371 - DNA, 80 bp, synthetic construct; identical to SEQ ID NO: 11243
  source 1..80: mol_type = other DNA

SEQ ID NO: 29372 - DNA, 80 bp, synthetic construct
  source 1..80: mol_type = other DNA
aattcactgaaatatttctagagaacactaggtattggggctcatagtgtgaaaaccactgacttaattcttcccccatc

SEQ ID NO: 29373 - DNA, 80 bp, synthetic construct
  source 1..80: mol_type = other DNA
gaagaagcatgtactttggaatcagacagacctggctggaatcctaactctgtcacttattaacaatgtgatcttaggca

SEQ ID NO: 29374 - DNA, 80 bp, synthetic construct
  source 1..80: mol_type = other DNA
gtcaaggttctccagagaagtagaaccaatgatacacacacacacacacacacacacacacacacacacacacacaattt

SEQ ID NO: 29375 - DNA, 80 bp, synthetic construct; identical to SEQ ID NO: 11244
  source 1..80: mol_type = other DNA

SEQ ID NO: 29376 - DNA, 80 bp, synthetic construct
  source 1..80: mol_type = other DNA
tataattagcaccttttcatctttctgtctgggctctgagaaagtacctctcttctctaaatttatccctcctttcctat

SEQ ID NO: 29377 - DNA, 80 bp, synthetic construct
  source 1..80: mol_type = other DNA
tatgtccttaggcaattttatcgttgtgagaatactatagagtatacctacacaagcctagatgtcgtatagcctactac

SEQ ID NO: 29378 - DNA, 80 bp, synthetic construct; identical to SEQ ID NO: 11245
  source 1..80: mol_type = other DNA

SEQ ID NO: 29379 - DNA, 80 bp, synthetic construct
  source 1..80: mol_type = other DNA
agggccatgaggaagagtctattccatgcctttcccctaccttctggtggtttgctagaaatccttggcattccttgact

SEQ ID NO: 29380 - DNA, 80 bp, synthetic construct
  source 1..80: mol_type = other DNA
aagatcctatctctaaataaggtcacatccttaggtaccgggggttaggactcaaacatacctttttttggggaaacaca

SEQ ID NO: 29381 - DNA, 80 bp, synthetic construct
  source 1..80: mol_type = other DNA
gcagaggatgttaagtgatatgatacaggaacaatccaagaaggtcataagaaaaaggaccttttgctcttgagaggact

SEQ ID NO: 29382 - DNA, 80 bp, synthetic construct
  source 1..80: mol_type = other DNA
tctttaggactcagaaaaagagaagaaacattattaaagaattgtccctgaacaagtataggcaccctcacatttgcatt

SEQ ID NO: 29383 - DNA, 80 bp, synthetic construct; identical to SEQ ID NO: 11246
  source 1..80: mol_type = other DNA

SEQ ID NO: 29384 - DNA, 80 bp, synthetic construct
  source 1..80: mol_type = other DNA
atggggcgttggcagacaagtaaatacacattttgtggtaaaggctcaggtagaagaagtacaggatagaatagagcaca

SEQ ID NO: 29385 - DNA, 80 bp, synthetic construct
  source 1..80: mol_type = other DNA
catgcccagtgatggtaataggataatctttttaaaaattaagagccacctaataaatcaatagtttcattcagcgggag

SEQ ID NO: 29386 - DNA, 80 bp, synthetic construct
  source 1..80: mol_type = other DNA
cctataaaaattattttctccaaattatcatcatttgtgcttttaatgacctgattgcaaagatgaacattttgaattct

SEQ ID NO: 29387 - DNA, 80 bp, synthetic construct; identical to SEQ ID NO: 11247
  source 1..80: mol_type = other DNA

SEQ ID NO: 29388 - DNA, 80 bp, synthetic construct
  source 1..80: mol_type = other DNA
caggatgaaacttaaatcttgagtcatacaattgtgtctacatactgctccccaaaaagagaagtaaagaagatgctaac

SEQ ID NO: 29389 - DNA, 80 bp, synthetic construct
  source 1..80: mol_type = other DNA
gaaatcagctgccactgggaagtctgaatccaatgccatgatgttctttgaatccttctgagaaataatcatgtgtagcc

SEQ ID NO: 29390 - DNA, 80 bp, synthetic construct
  source 1..80: mol_type = other DNA
aaatcaccagctttgtcattgtgatgcagcatcagtttcagtattatccttggagtattaattcttaatcatcttcatct

SEQ ID NO: 29391 - DNA, 80 bp, synthetic construct; identical to SEQ ID NO: 11248
  source 1..80: mol_type = other DNA

SEQ ID NO: 29392 - DNA, 80 bp, synthetic construct
  source 1..80: mol_type = other DNA
cagaataacaatgatggctcggaaaaatatgggtatttctgtcaaaggacagagaaacctagtagagagtatttactttg

SEQ ID NO: 29393 - DNA, 80 bp, synthetic construct
  source 1..80: mol_type = other DNA
cactcatgtgatttctattttgttcctatattaggccaaggagaggtggaacttgttttcctttttccctctcagctacg

SEQ ID NO: 29394 - DNA, 80 bp, synthetic construct
  source 1..80: mol_type = other DNA
gccagtaacccagtggcatttctactataaaatcttaaggccaatccatttccccttttccttattttcttggtttcaaa

SEQ ID NO: 29395 - DNA, 80 bp, synthetic construct; identical to SEQ ID NO: 11249
  source 1..80: mol_type = other DNA

SEQ ID NO: 29396 - DNA, 80 bp, synthetic construct
  source 1..80: mol_type = other DNA
ctttgaaatccaagtcatgtgagtgaattagatacagctgttagaagtggcctttcaatgccaatggtacacattccttg

SEQ ID NO: 29397 - DNA, 80 bp, synthetic construct
  source 1..80: mol_type = other DNA
gtgcatgtcaccagtccttagatctcatgaaatatgcatgaaatcttaaatcacttgctgtagccacccagccattgaca

SEQ ID NO: 29398 - DNA, 80 bp, synthetic construct
  source 1..80: mol_type = other DNA
aattcatattcaaaacaacttacccatttaaagcatacaatccaatgattttttagtatcttcaaagagttgcctatcac

SEQ ID NO: 29399 - DNA, 80 bp, synthetic construct; identical to SEQ ID NO: 11250
  source 1..80: mol_type = other DNA

SEQ ID NO: 29400 - DNA, 80 bp, synthetic construct
  source 1..80: mol_type = other DNA
atgactgtctaatttataattttctttagagacagggtcttgttatgttgtctaggctgctctcaaactccagggctcaa

SEQ ID NO: 29401 - DNA, 80 bp, synthetic construct
  source 1..80: mol_type = other DNA
attcttgtctattataaataatggtgctatgaacatttgtgtacaagtttttgtgcagacatccattttcctttcttttg

SEQ ID NO: 29402 - DNA, 80 bp, synthetic construct; identical to SEQ ID NO: 11251
  source 1..80: mol_type = other DNA

SEQ ID NO: 29403 - DNA, 80 bp, synthetic construct
  source 1..80: mol_type = other DNA
ttctggtgttgtatctaagtgtatgctactttaaaaaattagttgtaatatggcaaattggatacatgtgtaggctttgg

SEQ ID NO: 29404 - DNA, 80 bp, synthetic construct
  source 1..80: mol_type = other DNA
ctgtaagttggagatattaccaagacctacctcttgaattgttgtggggatcagatgaaataatgtatgtgaaatattta

SEQ ID NO: 29405 - DNA, 80 bp, synthetic construct
  source 1..80: mol_type = other DNA
gaatttggctctcatgaacatcaggaatagtggtcatggtagttattatctccagcaggaactgtagctgagagatcttc

SEQ ID NO: 29406 - DNA, 80 bp, synthetic construct; identical to SEQ ID NO: 11252
  source 1..80: mol_type = other DNA

SEQ ID NO: 29407 - DNA, 80 bp, synthetic construct
  source 1..80: mol_type = other DNA
gcattataattacacataccttttctttaatgaaaaagaattctttccttccaaagttatgcatgctattgttaaacatt

SEQ ID NO: 29408 - DNA, 80 bp, synthetic construct
  source 1..80: mol_type = other DNA
ttaatgtttggattcattaggtacgaagttagcaaattaatttccattagggtgcctgtatggttgtaaatcctggacct

SEQ ID NO: 29409 - DNA, 80 bp, synthetic construct
  source 1..80: mol_type = other DNA
gaacttctccaagtcccttggtaaaattaagcctcatgaacaattaactcaaatatacacaaggcttgtctttagcgagc

SEQ ID NO: 29410 - DNA, 80 bp, synthetic construct
  source 1..80: mol_type = other DNA
gcctacaagttttacacaggactttagagagctggatagtatcactttgtcaagtcctacttttactatgattctttgag

SEQ ID NO: 29411 - DNA, 80 bp, synthetic construct; identical to SEQ ID NO: 11253
  source 1..80: mol_type = other DNA

SEQ ID NO: 29412 - DNA, 80 bp, synthetic construct
  source 1..80: mol_type = other DNA
tctacacaaactagagtaattgctattaattcctcaagtgttaattatttcatgcaaaaaggaaaaaggctattagtctt

SEQ ID NO: 29413 - DNA, 80 bp, synthetic construct
  source 1..80: mol_type = other DNA
gacttgaaaagatctgatatccatgaccttcatctgaagttttggcagatgaaaatgtcagatgcgtcttttggattaat

SEQ ID NO: 29414 - DNA, 80 bp, synthetic construct
  source 1..80: mol_type = other DNA
gaattacaagtcactctatacaaaaattggaatttttgtcctaagaaatgaaatttactatagtttcatctgtgtgtgtg

SEQ ID NO: 29415 - DNA, 80 bp, synthetic construct; identical to SEQ ID NO: 11254
  source 1..80: mol_type = other DNA

SEQ ID NO: 29416 - DNA, 80 bp, synthetic construct
  source 1..80: mol_type = other DNA
agagctttgaacaaaatttctaagtagaccaatgtaaaagtctgtcgtcaatatgtagtggctatgaatggaggttatga

SEQ ID NO: 29417 - DNA, 80 bp, synthetic construct
  source 1..80: mol_type = other DNA
ctttttggttattccaggtgtgtctgctttgtctcatgaaacacctggatgatcactgatttctagtggaagaaatgctg

SEQ ID NO: 29418 - DNA, 80 bp, synthetic construct; identical to SEQ ID NO: 11255
  source 1..80: mol_type = other DNA

SEQ ID NO: 29419 - DNA, 80 bp, synthetic construct
  source 1..80: mol_type = other DNA
ccatgcctggctaattttttttgtatttttagtagagatggggtttctccatgttggtcaggctggtctcgaactcctta

SEQ ID NO: 29420 - DNA, 80 bp, synthetic construct
  source 1..80: mol_type = other DNA
aaatatttccttaagatgactctgtggtcattgttgggcagcataagcttaatggattttagttatcataatttacctta

SEQ ID NO: 29421 - DNA, 80 bp, synthetic construct
  source 1..80: mol_type = other DNA
tggtttgatgatgctaggctatggcattcttgctaatcaaaacgatgtgtcatggtgtaacataacttattaaaatgggc

SEQ ID NO: 29422 - DNA, 80 bp, synthetic construct
  source 1..80: mol_type = other DNA
attgtgttactttgaactgaactggccatttatgggaaaggtcactgggttgtaaataaggaccaaaagagttacgttta

SEQ ID NO: 29423 - DNA, 80 bp, synthetic construct; identical to SEQ ID NO: 11256
  source 1..80: mol_type = other DNA

SEQ ID NO: 29424 - DNA, 80 bp, synthetic construct
  source 1..80: mol_type = other DNA
aaaagtattaaaaactcaaaagttggctgggcgcactggctcacgtctgtaatcccagcactttgggagaccgaggcagg

SEQ ID NO: 29425 - DNA, 80 bp, synthetic construct
  source 1..80: mol_type = other DNA
gaggttgtggtgagctgagattgcgccattgcgctccagcctgggcaacaagagtgaaactctgtctcaaaaaaaaaaaa

SEQ ID NO: 29426 - DNA, 80 bp, synthetic construct
  source 1..80: mol_type = other DNA
ttcattgtactatattctaatatgcaactgtgtatcccttcccaactctgtgttcaatgactttatatttggttgcttta

SEQ ID NO: 29427 - DNA, 80 bp, synthetic construct; identical to SEQ ID NO: 11257
  source 1..80: mol_type = other DNA

SEQ ID NO: 29428 - DNA, 80 bp, synthetic construct
  source 1..80: mol_type = other DNA
gtttatgaaggcactttggaaagcgctaaatacacgggtttttattagtagtaaacacttacttcacctttttcacttct

SEQ ID NO: 29429 - DNA, 80 bp, synthetic construct
  source 1..80: mol_type = other DNA
agatgatgtccactgaagaccttgcatgatcatggcattcattttcctgctgtattcagactggcctcaactattttctt

SEQ ID NO: 29430 - DNA, 80 bp, synthetic construct
  source 1..80: mol_type = other DNA
gtaaggaataattgatgaagttacttaaccttagagccctaattcagttaagttttaatgaaggacaagttgtagagata

SEQ ID NO: 29431 - DNA, 80 bp, synthetic construct; identical to SEQ ID NO: 11258
  source 1..80: mol_type = other DNA

SEQ ID NO: 29432 - DNA, 80 bp, synthetic construct
  source 1..80: mol_type = other DNA
ttcaattttacctgagaaagctctcgtgctctcgaattttatttagaaatttctctttgtacatgattgatttcacaatc

SEQ ID NO: 29433 - DNA, 80 bp, synthetic construct
  source 1..80: mol_type = other DNA
attattatttattgatgcctagagggcagatgagtgtagctgctatggagtgaggagacaaaacataagaaagttatgat

SEQ ID NO: 29434 - DNA, 80 bp, synthetic construct
  source 1..80: mol_type = other DNA
attaagtgcatgtcttattcagagtttttttatatttgaaatggaagaggctggacttcagtaatttgctataaactgct

SEQ ID NO: 29435 - DNA, 80 bp, synthetic construct
  source 1..80: mol_type = other DNA
agtgacagtcacattagttcagagatattgatgttttatacaggtgtagcctgtaagagatgaagcctggtatttataga

SEQ ID NO: 29436 - DNA, 80 bp, synthetic construct; identical to SEQ ID NO: 11259
  source 1..80: mol_type = other DNA

SEQ ID NO: 29437 - DNA, 80 bp, synthetic construct
  source 1..80: mol_type = other DNA
aagatgagaggattgcttgagaccaggagtttgataccagcctgggcaacatagcaagatgttatctctacacaaaataa

SEQ ID NO: 29438 - DNA, 80 bp, synthetic construct
  source 1..80: mol_type = other DNA
aaaaaaaaaaaaaaggaacatctcattttcacactgaaatgttgactgaaatcattaaacaataaaatcataaaagaaaa

SEQ ID NO: 29439 - DNA, 80 bp, synthetic construct
  source 1..80: mol_type = other DNA
aatacaaatgtactccctgggaagtcttaaggtaatggctactggttatcaaacaaatgtaaaaattgtatatttttgag

SEQ ID NO: 29440 - DNA, 80 bp, synthetic construct; identical to SEQ ID NO: 11260
  source 1..80: mol_type = other DNA

SEQ ID NO: 29441 - DNA, 80 bp, synthetic construct
  source 1..80: mol_type = other DNA
gctggttttattttctcagaccggaccagctttctacataaagtgggtccctggttagaactctttgctcctatctttaa

SEQ ID NO: 29442 - DNA, 80 bp, synthetic construct
  source 1..80: mol_type = other DNA
tgccaacagcacaggcctgatgccagataaaagggtgagtgaagggggataaaaaataagacatagctactaaattattg

SEQ ID NO: 29443 - DNA, 80 bp, synthetic construct; identical to SEQ ID NO: 11261
  source 1..80: mol_type = other DNA

SEQ ID NO: 29444 - DNA, 80 bp, synthetic construct
  source 1..80: mol_type = other DNA
tggctagcattacatagaaacctgtagcattgctggagagataaaatatataaacataatccattgcaggtatattgaca

SEQ ID NO: 29445 - DNA, 80 bp, synthetic construct
  source 1..80: mol_type = other DNA
caatgcctggctaatttttgtattttagtagatgtggagtttcgccatgttggccaggctggtcttgaactcctgacctc

SEQ ID NO: 29446 - DNA, 80 bp, synthetic construct
  source 1..80: mol_type = other DNA
agatagagaacatgaatctgaatttgcagaattatctggcttaacatttttttctttccagttttcactgtatcccccat

SEQ ID NO: 29447 - DNA, 80 bp, synthetic construct; identical to SEQ ID NO: 11262
  source 1..80: mol_type = other DNA

SEQ ID NO: 29448 - DNA, 80 bp, synthetic construct
  source 1..80: mol_type = other DNA
taaaacttcttcccttctgatctgggcctggtatgtggtcctactagaaccacatcacctactcttggtgctaacaattt

SEQ ID NO: 29449 - DNA, 80 bp, synthetic construct
  source 1..80: mol_type = other DNA
ggtttccaccatgttcctaaaactacattgcccagggtcactagagacctcttatgaaatataacaacacctttctacat

SEQ ID NO: 29450 - DNA, 80 bp, synthetic construct
  source 1..80: mol_type = other DNA
ggaggttagctctgtgtgtgagagaaaggtggagaagcatgtggggagggaaatagatgggaaaaggtaattaggcttta

SEQ ID NO: 29451 - DNA, 80 bp, synthetic construct
  source 1..80: mol_type = other DNA
ggagtgtagtggtgtgatctcagctcactgcaaactctgcctcctgggttcaagcgaatctcagtctcctgagtagctgg

SEQ ID NO: 29452 - DNA, 80 bp, synthetic construct; identical to SEQ ID NO: 11263
  source 1..80: mol_type = other DNA

SEQ ID NO: 29453 - DNA, 80 bp, synthetic construct
  source 1..80: mol_type = other DNA
tacaatcagctggtgttcctatagtatttaaaagaaaacagaaagtttactagatttcagccagttttcagactatttaa

SEQ ID NO: 29454 - DNA, 80 bp, synthetic construct
  source 1..80: mol_type = other DNA
cagaaaaagccacctgacattttaacttgtttttgatttgacagtgaaatcttataaatctgccacagttctaaaccaat

SEQ ID NO: 29455 - DNA, 80 bp, synthetic construct; identical to SEQ ID NO: 11264
  source 1..80: mol_type = other DNA

SEQ ID NO: 29456 - DNA, 80 bp, synthetic construct
  source 1..80: mol_type = other DNA
ggatagagagctggcttcaaagaaaaatcctaaactcattaatgcccttcggcgatgttttttctggagatttatgttct

SEQ ID NO: 29457 - DNA, 80 bp, synthetic construct
  source 1..80: mol_type = other DNA
taaaactctagtaaggataagtaaaaatcctttggaactaaaatgtcctggaacacgggtggcaatttacaatctcaatg

SEQ ID NO: 29458 - DNA, 80 bp, synthetic construct
  source 1..80: mol_type = other DNA
attactggtgcctttattttgctgtattcaacaggagagtgtcaggagacaatgtcagcagaattaggtcaaatgcagct

SEQ ID NO: 29459 - DNA, 80 bp, synthetic construct
  source 1..80: mol_type = other DNA
catctcatcagtgtgaaaagttgcacacctgaaaatccaggctttgtggtgtttaagtgccttgtatgttccccagttgc

SEQ ID NO: 29460 - DNA, 80 bp, synthetic construct; identical to SEQ ID NO: 11265
  source 1..80: mol_type = other DNA

SEQ ID NO: 29461 - DNA, 80 bp, synthetic construct
  source 1..80: mol_type = other DNA
tatggaaatctgaaaccatttgggcatttgggggtaaaaagtattttattagtaaatttaaatgaggtagctggataatt

SEQ ID NO: 29462 - DNA, 80 bp, synthetic construct
  source 1..80: mol_type = other DNA
tttgctggttgctttgaatcagggtatggagtacagttcactctgatcctatcatataaatcatgtaagtatataacatt

SEQ ID NO: 29463 - DNA, 80 bp, synthetic construct; identical to SEQ ID NO: 11266
  source 1..80: mol_type = other DNA

SEQ ID NO: 29464 - DNA, 80 bp, synthetic construct
  source 1..80: mol_type = other DNA
ggtctttatgcagattattttacttaattttcctagtaactccatggagcaaaaattatctctaatttatataacaggaa

SEQ ID NO: 29465 - DNA, 80 bp, synthetic construct
  source 1..80: mol_type = other DNA
tactcaacagaatggtgactctagtaaccagccttggttctgctgagcttctctgcgtcttctcaggagacacaggctac

SEQ ID NO: 29466 - DNA, 80 bp, synthetic construct
  source 1..80: mol_type = other DNA
atccacccaagaaccagtcatgctaagggccaaacctatagacaaaaaaagggataggagaatggagtatgtatggagaa

SEQ ID NO: 29467 - DNA, 80 bp, synthetic construct; identical to SEQ ID NO: 11267
  source 1..80: mol_type = other DNA

SEQ ID NO: 29468 - DNA, 80 bp, synthetic construct
  source 1..80: mol_type = other DNA
tcacccttgtcatagagaaaaaaccacgctgacaccatgcagttttaaatagtgagaaatttgcaaattgttagatctta

SEQ ID NO: 29469 - DNA, 80 bp, synthetic construct
  source 1..80: mol_type = other DNA
cttacaccagtgccttcctatttatggtattatttatgggtatttcttcttttctttcactgagcaaggataaatgagcc

SEQ ID NO: 29470 - DNA, 80 bp, synthetic construct
  source 1..80: mol_type = other DNA
taactgtgaaaggttaaaaaaaaggaggtgccatcatgaaggagctaatctttctgaagtactgctgtagttttaaatat

SEQ ID NO: 29471 - DNA, 80 bp, synthetic construct
  source 1..80: mol_type = other DNA
ggcaaatcacaaggtcaggagtttgagaccagcctggccaatatggtgaaaccctgtctctactaaaagtacaaaaatca

SEQ ID NO: 29472 - DNA, 80 bp, synthetic construct; identical to SEQ ID NO: 11268
  source 1..80: mol_type = other DNA

SEQ ID NO: 29473 - DNA, 80 bp, synthetic construct
  source 1..80: mol_type = other DNA
tgtcagtgcagcctaggtcagactaccttttttcattaaacctcacaaaattaaaggacatacaggagaagtcctggtac

SEQ ID NO: 29474 - DNA, 80 bp, synthetic construct
  source 1..80: mol_type = other DNA
ccccctaaaggtttgctgaaatattactgacaggaggcagattgataagaggaaaagcacataaatgtatttgacatgta

SEQ ID NO: 29475 - DNA, 80 bp, synthetic construct; identical to SEQ ID NO: 11269
  source 1..80: mol_type = other DNA

SEQ ID NO: 29476 - DNA, 80 bp, synthetic construct
  source 1..80: mol_type = other DNA
gcaggtgtcagattctcagttaatctctcctagatttgaaaaaaaaaaaaaaggtctagaaagggagagcctggctgcac

SEQ ID NO: 29477 - DNA, 80 bp, synthetic construct
  source 1..80: mol_type = other DNA
ctcgggaattctgtgcatagagagcctgtggcttaggcactttgatttatgtatatctcttcctgtgattggctatctag

SEQ ID NO: 29478 - DNA, 80 bp, synthetic construct
  source 1..80: mol_type = other DNA
aatctcctatgtcctgaatattttaccccatcctaaactccatctctaacacagatgcactttcttgtgctgcctactgc

SEQ ID NO: 29479 - DNA, 80 bp, synthetic construct
  source 1..80: mol_type = other DNA
catcagcatgatcacttaatgatttgacttttgctagatctaaggtgaggaaattggagagtggtatccataggaagaac

SEQ ID NO: 29480 - DNA, 80 bp, synthetic construct; identical to SEQ ID NO: 11270
  source 1..80: mol_type = other DNA

SEQ ID NO: 29481 - DNA, 80 bp, synthetic construct
  source 1..80: mol_type = other DNA
gatgggcatttgggttggttccatgtctttgctattgtaaatagttctgcagtaaacatatatgtccatgtgtctttata

SEQ ID NO: 29482 - DNA, 80 bp, synthetic construct
  source 1..80: mol_type = other DNA
ccacagcctcaccagcatctattgtttcctaacattttaataactgctattctgactggcatgagatggtatctcattgt

SEQ ID NO: 29483 - DNA, 80 bp, synthetic construct
  source 1..80: mol_type = other DNA
ctggaaattagatctttgtcagatggatagattgcaaaaattttctcccattttgtaggttgcctgttcactctgatgat

SEQ ID NO: 29484 - DNA, 80 bp, synthetic construct
  source 1..80: mol_type = other DNA
ttgggttttacatttaagtctttaatacatcttgagttaatttttgtataaggtataaggaaggggtccagtttcagttt

SEQ ID NO: 29485 - DNA, 80 bp, synthetic construct; identical to SEQ ID NO: 11271
  source 1..80: mol_type = other DNA

SEQ ID NO: 29486 - DNA, 80 bp, synthetic construct
  source 1..80: mol_type = other DNA
aatattgattctttctatccgtaaggacgacactttttccatttgtttgtgttctctcttatttccttgagcagtggttt

SEQ ID NO: 29487 - DNA, 80 bp, synthetic construct
  source 1..80: mol_type = other DNA
attttggaaccaaatctattttcaaattagaaattgcttgtgataatggttttgcaacttagactggatatgagacgatg

SEQ ID NO: 29488 - DNA, 80 bp, synthetic construct
  source 1..80: mol_type = other DNA
gcactaagtatgcattgtttccaaaggttcagcattttttttttgttaactctgctgggatctgctttatgcactgataa

SEQ ID NO: 29489 - DNA, 80 bp, synthetic construct; identical to SEQ ID NO: 11272
  source 1..80: mol_type = other DNA

SEQ ID NO: 29490 - DNA, 80 bp, synthetic construct
  source 1..80: mol_type = other DNA
ttataacagtttgtttttgatttagggttatcagtgagggtggcggtggggaggggactttggagtctaactgtctagtt

SEQ ID NO: 29491 - DNA, 80 bp, synthetic construct
  source 1..80: mol_type = other DNA
cacagttttgccagctactagccatgtgattttgggtaggttacttaaattctcttcatctcaatttcattattgtaaag

SEQ ID NO: 29492 - DNA, 80 bp, synthetic construct; identical to SEQ ID NO: 11273
  source 1..80: mol_type = other DNA

SEQ ID NO: 29493 - DNA, 80 bp, synthetic construct
  source 1..80: mol_type = other DNA
atccatgttcctgcaaggacatgaactcatccttttttatggctgtatagtattccatggtatatatgtgccacattttc

SEQ ID NO: 29494 - DNA, 80 bp, synthetic construct
  source 1..80: mol_type = other DNA
tttctggttctagattcttgaggaatcgccacactgtcttccacaatggttgaattaatttacactcccaccaacagtgt

SEQ ID NO: 29495 - DNA, 80 bp, synthetic construct
  source 1..80: mol_type = other DNA
gcataaatgtcttcttttgagaagtgtctgttcatatcctttccccactttttgatggggttgtttttttcctgtaaatt

SEQ ID NO: 29496 - DNA, 80 bp, synthetic construct; identical to SEQ ID NO: 11274
  source 1..80: mol_type = other DNA

SEQ ID NO: 29497 - DNA, 80 bp, synthetic construct
  source 1..80: mol_type = other DNA
cattattataatatataatacaatatatattataattataattgtatataacatatgttatataataatatagtaatatt

SEQ ID NO: 29498 - DNA, 80 bp, synthetic construct
  source 1..80: mol_type = other DNA
tagacttaaatatatagagcaataataggttagaaaatagcaaacatgtatatataaacatatatacatatagaaaacat

SEQ ID NO: 29499 - DNA, 80 bp, synthetic construct
  source 1..80: mol_type = other DNA
tgcacccagtccagtccctgtctttttaaatagactctctacctaagtgcacaaatactcattatttacatttagttatt

SEQ ID NO: 29500 - DNA, 80 bp, synthetic construct; identical to SEQ ID NO: 11275
  source 1..80: mol_type = other DNA

SEQ ID NO: 29501 - DNA, 80 bp, synthetic construct
  source 1..80: mol_type = other DNA
ataaacaattgtggcaaaatgaaggaaatatttaaaaacaaacctcttaattcttcagtggattaagcgtgaatatgttt

SEQ ID NO: 29502 - DNA, 80 bp, synthetic construct
  source 1..80: mol_type = other DNA
cagcattcattgtatcctatgatgggttctgagtgtaggtgtatttgctttcttccattttttgtatgcatgttttcttt

SEQ ID NO: 29503 - DNA, 80 bp, synthetic construct
  source 1..80: mol_type = other DNA
cataatgtgcatattaatctgcttctccctttaatgtgttgtgaatgcctttccatgtcattagatgtttttctacctag

SEQ ID NO: 29504 - DNA, 80 bp, synthetic construct; identical to SEQ ID NO: 11276
  source 1..80: mol_type = other DNA

SEQ ID NO: 29505 - DNA, 80 bp, synthetic construct
  source 1..80: mol_type = other DNA
tatgcatttatatttctttttgtgtgtgtgaattgcctttcatgttctttgtgtgtttttattttgttgtatttgtctct

SEQ ID NO: 29506 - DNA, 80 bp, synthetic construct
  source 1..80: mol_type = other DNA
attcttttataaaggcccatgccacccaaatattatgtaagcatgcatctatgtttttattacttcatcttttacattta

SEQ ID NO: 29507 - DNA, 80 bp, synthetic construct
  source 1..80: mol_type = other DNA
tggacatgttcctggacttttgagataaatcagtctatttctttgtcatgtcacatattattatggctttatgatttaat

SEQ ID NO: 29508 - DNA, 80 bp, synthetic construct; identical to SEQ ID NO: 11277
  source 1..80: mol_type = other DNA

SEQ ID NO: 29509 - DNA, 80 bp, synthetic construct
  source 1..80: mol_type = other DNA
actctccatttatttgagacttttaaaatatgtcccaataatgttttgtgagatgtatattttaagatatatatcttatt

SEQ ID NO: 29510 - DNA, 80 bp, synthetic construct
  source 1..80: mol_type = other DNA
attctatgctgataatacttcttgcttctttccaatatttgtacctcgatcatttttcttgttgagttgtattagctaga

SEQ ID NO: 29511 - DNA, 80 bp, synthetic construct
  source 1..80: mol_type = other DNA
ttaagaacatttattggaaacatattgaaattttatcagattccttttcagttgttactgagataatcataggttcttct

SEQ ID NO: 29512 - DNA, 80 bp, synthetic construct; identical to SEQ ID NO: 11278
  source 1..80: mol_type = other DNA

SEQ ID NO: 29513 - DNA, 80 bp, synthetic construct
  source 1..80: mol_type = other DNA
tcacctgaactttccttcatggtttgaatatctagaaaaagcagactttcctatctctagactaaacatttgatcctatc

SEQ ID NO: 29514 - DNA, 80 bp, synthetic construct
  source 1..80: mol_type = other DNA
ataggagacatttttagtcttccaaattttccctgggaggctgatctaaattgagtcacaaaattgttcccaccaggaat

SEQ ID NO: 29515 - DNA, 80 bp, synthetic construct
  source 1..80: mol_type = other DNA
gactctgcagactcagatcatataatcagagatgttagcactggaggggacatcacaattagctttctccacctcttagt

SEQ ID NO: 29516 - DNA, 80 bp, synthetic construct; identical to SEQ ID NO: 11279
  source 1..80: mol_type = other DNA

SEQ ID NO: 29517 - DNA, 80 bp, synthetic construct
  source 1..80: mol_type = other DNA
tgtctctgaaaatactctgagtaatggagtacagtcagctttcttgtaccaagaatatagggactatgtttctcccagtc

SEQ ID NO: 29518 - DNA, 80 bp, synthetic construct
  source 1..80: mol_type = other DNA
tattaaagaacatgatgcttaaaacagattagggaaaactatagaaggggtggggtttcggagtgctaattttgtccttg

SEQ ID NO: 29519 - DNA, 80 bp, synthetic construct
  source 1..80: mol_type = other DNA
cagagtaatgctaccagttctttgtgaaatagctactgttgttcaaaggatgactatgtcctcttcggttgaggaaagat

SEQ ID NO: 29520 - DNA, 80 bp, synthetic construct; identical to SEQ ID NO: 11280
  source 1..80: mol_type = other DNA

SEQ ID NO: 29521 - DNA, 80 bp, synthetic construct
  source 1..80: mol_type = other DNA
gcgcccgcctccacgcccagctaaattttttgtatttttagtagagacgaggtttcactgtgttagccaggacggtcttg

SEQ ID NO: 29522 - DNA, 80 bp, synthetic construct
  source 1..80: mol_type = other DNA
aaaaattcagcaaataagtctgttgtggtagggaaaagtctattgtgatctggaaaatataatggagaaatccagtggaa

SEQ ID NO: 29523 - DNA, 80 bp, synthetic construct
  source 1..80: mol_type = other DNA
taaaatatttgcatacttgctttgcaatgtattgtttatcagtagttctatattctttgagatagtctatccagtctttc

SEQ ID NO: 29524 - DNA, 80 bp, synthetic construct; identical to SEQ ID NO: 11281
  source 1..80: mol_type = other DNA

SEQ ID NO: 29525 - DNA, 80 bp, synthetic construct
  source 1..80: mol_type = other DNA
aaaatattgatctaaaataattttaaggattaaatattgccattgtaagcatactatgagcaattatgtttgtaatgcag

SEQ ID NO: 29526 - DNA, 80 bp, synthetic construct
  source 1..80: mol_type = other DNA
ttgtaaaaaacatccagggcagcactttcactgattgcagtagcttaggagtgaaaaacaacacaactgctccaatgtat

SEQ ID NO: 29527 - DNA, 80 bp, synthetic construct
  source 1..80: mol_type = other DNA
aaatttaaaaacctcaaaaaccattcttctttgatatatattctaaagatgaacatatatgtaatagaagtacaaaacat

SEQ ID NO: 29528 - DNA, 80 bp, synthetic construct; identical to SEQ ID NO: 11282
  source 1..80: mol_type = other DNA

SEQ ID NO: 29529 - DNA, 80 bp, synthetic construct
  source 1..80: mol_type = other DNA
gcttggtgcagagctgagttcaattcctgggtatccttgttgactttctgtctcgttgatctgtctaatgttgacagtgg

SEQ ID NO: 29530 - DNA, 80 bp, synthetic construct
  source 1..80: mol_type = other DNA
ccttctttgtctcttttgatctttgttggtttaaagtctgttttatcagagactaggattgcaacccctgcctttttttg

SEQ ID NO: 29531 - DNA, 80 bp, synthetic construct
  source 1..80: mol_type = other DNA
atatttaaagttaatattgttatgtgtgaatttgatcctgtcattatgatgttagctggtgattttgctcattagttgat

SEQ ID NO: 29532 - DNA, 80 bp, synthetic construct; identical to SEQ ID NO: 11283
  source 1..80: mol_type = other DNA

SEQ ID NO: 29533 - DNA, 80 bp, synthetic construct
  source 1..80: mol_type = other DNA
gcagtgtgtagagggaaatttatagcactaaatgcctacaagagaaagcaggaaagatccaaaattgacaccctaacatc

SEQ ID NO: 29534 - DNA, 80 bp, synthetic construct
  source 1..80: mol_type = other DNA
attgatagaccgctagcaagactaataaagaaaaaaagagagaagaatcaaatagacacaataaaaaatgataaagggga

SEQ ID NO: 29535 - DNA, 80 bp, synthetic construct
  source 1..80: mol_type = other DNA
ataacaggctctgaaattgtggcaataatcaatagtttaccaaccaaaaagagtccaggaccagatggattcacagccga

SEQ ID NO: 29536 - DNA, 80 bp, synthetic construct; identical to SEQ ID NO: 12286
  source 1..80: mol_type = other DNA

SEQ ID NO: 29537 - DNA, 80 bp, synthetic construct
  source 1..80: mol_type = other DNA
atgctaaaaactctcaataaattaggtattgatgggacgtatttcaaaataataagagctatctatgacaaacccacagc

SEQ ID NO: 29538 - DNA, 80 bp, synthetic construct
  source 1..80: mol_type = other DNA
gaggaagtcaaattgtccctgtttgcagacgacatgattgtttatctagaaaaccccatcgtctcagcccaaaatctcct

SEQ ID NO: 29539 - DNA, 80 bp, synthetic construct
  source 1..80: mol_type = other DNA
cttacaagggatgtgaaggacctcttcaaggagaactacaaaccactgctcaaggaaataaaagaggacacaaacaaatg

SEQ ID NO: 29540 - DNA, 80 bp, synthetic construct
  source 1..80: mol_type = other DNA
agagcccgcatcgccaagtcaatcgtaagccaaaagaacaaagctggaggcatcacgctacctgacttcaaactatacta

SEQ ID NO: 29541 - DNA, 80 bp, synthetic construct
  source 1..80: mol_type = other DNA
aataaatggtgctgggaaaactggctagccatatgtagaaagctgaaactggatcccttccttacaccttatacaaaaat

SEQ ID NO: 29542 - DNA, 80 bp, synthetic construct
  source 1..80: mol_type = other DNA
ctaattaaactaaagagcttctgcaaagcaaaagaaactaccatcagagtgaacaggcaacctacaacatgggagaaaat

SEQ ID NO: 29543 - DNA, 80 bp, synthetic construct
  source 1..80: mol_type = other DNA
aagaaatgctcatcatcactggccatcagagaaatgcaaatcaaaaccactatgagatatcatctcacaccagttagaat

SEQ ID NO: 29544 - DNA, 80 bp, synthetic construct
  source 1..80: mol_type = other DNA
gccatcccattactgggtatatacccaaaggactataaatcatgctgctataaagacacatgcacacgtatgtttattgc

SEQ ID NO: 29545 - DNA, 80 bp, synthetic construct
  source 1..80: mol_type = other DNA
atcattctcagtaaactatcgcaagaacaaaaaaccaaacaccgcatattctcactcataggtgggaattgaacaatgag

SEQ ID NO: 29546 - DNA, 80 bp, synthetic construct
  source 1..80: mol_type = other DNA
acaatgtgcacatgtaccctaaaacttagagtataaaaaaaaaaaaaaaaaaagtttgaatgttttcttgcattcagagc

SEQ ID NO: 29547 - DNA, 80 bp, synthetic construct; identical to SEQ ID NO: 11286
  source 1..80: mol_type = other DNA

SEQ ID NO: 29548 - DNA, 80 bp, synthetic construct
  source 1..80: mol_type = other DNA
cccttttgaagccaatgtaacaagatgggtaagaattagacctcctgagttcaaaatccctggattcagatctattcctg

SEQ ID NO: 29549 - DNA, 80 bp, synthetic construct
  source 1..80: mol_type = other DNA
tgaggctgctggcaaaactccttccccaaagtccattcctattgctgactgagaagggactagcattggaagtggctgat

SEQ ID NO: 29550 - DNA, 80 bp, synthetic construct; identical to SEQ ID NO: 11287
  source 1..80: mol_type = other DNA

SEQ ID NO: 29551 - DNA, 80 bp, synthetic construct
  source 1..80: mol_type = other DNA
tttatggccactattcactgtttaacttaaaatacctcatatgtaaacttgtctcccactgttgctataacaaatcccaa

SEQ ID NO: 29552 - DNA, 80 bp, synthetic construct
  source 1..80: mol_type = other DNA
tgtttttccccttttgtaggaagtcaccaaagcagtacagcctctcttactgggaagaatcatagcttcctatgacccgg

SEQ ID NO: 29553 - DNA, 80 bp, synthetic construct
  source 1..80: mol_type = other DNA
acttccttgcacaggccccatggcacatatattctgtatcgtacatgttttaatgtcataaattaggtagtgagctggta

SEQ ID NO: 29554 - DNA, 80 bp, synthetic construct
  source 1..80: mol_type = other DNA
cttctgtaaactgcctctgttgtagttttttttttctcctaatcatgttatcatttttttggaatccatggtttcctgtt

SEQ ID NO: 29555 - DNA, 80 bp, synthetic construct; identical to SEQ ID NO: 11288
  source 1..80: mol_type = other DNA

SEQ ID NO: 29556 - DNA, 80 bp, synthetic construct
  source 1..80: mol_type = other DNA
caaggttgtttcaaaggcatgtgcttgcatcatcctgattcactaccatgtgttactaacttggatctgcaaagtcatta

SEQ ID NO: 29557 - DNA, 80 bp, synthetic construct
  source 1..80: mol_type = other DNA
ctgcctctagcaaataacccataacacttctaagatatacctgcaaggtcaattgtgttgtaaaaccttgataaccatac

SEQ ID NO: 29558 - DNA, 80 bp, synthetic construct; identical to SEQ ID NO: 11289
  source 1..80: mol_type = other DNA

SEQ ID NO: 29559 - DNA, 80 bp, synthetic construct
  source 1..80: mol_type = other DNA
gatttaaaaagtacagaacatggtgtgaacactgcttcaaaatttctaaaataggtaaatcacgatctctaaactggagg

SEQ ID NO: 29560 - DNA, 80 bp, synthetic construct
  source 1..80: mol_type = other DNA
ggtgctttcagacccagctgcattgataaaaagttaggtggtattgtatctgtcttcctttctcaatgttgcatatctgt

SEQ ID NO: 29561 - DNA, 80 bp, synthetic construct
  source 1..80: mol_type = other DNA
tgttttgtcctcatggccaggatatgtgggacctttcctacaatgttccaaagtttgtaatagagctcttctctgctttg

SEQ ID NO: 29562 - DNA, 80 bp, synthetic construct; identical to SEQ ID NO: 11290
  source 1..80: mol_type = other DNA

SEQ ID NO: 29563 - DNA, 80 bp, synthetic construct
  source 1..80: mol_type = other DNA
tttctacttccttaactcatctatcatattatatttagttatttatatactaggtcgccttgaagaagggattgtgtttt

SEQ ID NO: 29564 - DNA, 80 bp, synthetic construct
  source 1..80: mol_type = other DNA
ctctggttttccataatcataattaatttgtcaactttataattttaattaagtaaatttaattggtagataaataagta

SEQ ID NO: 29565 - DNA, 80 bp, synthetic construct
  source 1..80: mol_type = other DNA
gagttagtataggactacatgaaaaattcaaggccaaggcttaatttcaaatttcactgcctttggctctatcttttaaa

SEQ ID NO: 29566 - DNA, 80 bp, synthetic construct
  source 1..80: mol_type = other DNA
tttctgcctagatgctgggaaataaaacaactagaagcatgccagtataatattgactgttgaaagaaacatttatgaac

SEQ ID NO: 29567 - DNA, 80 bp, synthetic construct; identical to SEQ ID NO: 11291
  source 1..80: mol_type = other DNA

SEQ ID NO: 29568 - DNA, 80 bp, synthetic construct
  source 1..80: mol_type = other DNA
tagcagagcaccattctggggtctggtagaaccacccaactcaaaggcaccttagcctgttgttaataagatttttcaaa

SEQ ID NO: 29569 - DNA, 80 bp, synthetic construct
  source 1..80: mol_type = other DNA
gtccttgggacagataatgtgttttatttatctttgcatatccattacttaaaacagcattggacccacagctggtacaa

SEQ ID NO: 29570 - DNA, 80 bp, synthetic construct; identical to SEQ ID NO: 11292
  source 1..80: mol_type = other DNA

SEQ ID NO: 29571 - DNA, 80 bp, synthetic construct
  source 1..80: mol_type = other DNA
tgtgctcagaaccacgaagtgtttgatcatataagctccttttacttgctttctttcatatatgattgttagtttctagg

SEQ ID NO: 29572 - DNA, 80 bp, synthetic construct
  source 1..80: mol_type = other DNA
tagtccttgccctttttcaggctgggctagggagaatgatgatgaagtacaggtagcaacctattttcataacttgaaag

SEQ ID NO: 29573 - DNA, 80 bp, synthetic construct
  source 1..80: mol_type = other DNA
gctcactgcactgcaacttctgcctcccaggctcaagcaattctcctgcctcagcctccggagtagctgggattagaggc

SEQ ID NO: 29574 - DNA, 80 bp, synthetic construct
  source 1..80: mol_type = other DNA
atactttttaagatggtgtaaatattactttctgtatcaatggtacattttttacttgtcagtctctagaatttctttat

SEQ ID NO: 29575 - DNA, 80 bp, synthetic construct; identical to SEQ ID NO: 11293
  source 1..80: mol_type = other DNA

SEQ ID NO: 29576 - DNA, 80 bp, synthetic construct
  source 1..80: mol_type = other DNA
tcataagggatagagatagcatatggaatgagtctgtacagcgtctggcacataggaggcatttaccaaacagtagttat

SEQ ID NO: 29577 - DNA, 80 bp, synthetic construct
  source 1..80: mol_type = other DNA
tgggaagatcagtgaaagacttgtgattacctcagaaatgattgaaaatatccaatctgttaaggcatactgctgggaag

SEQ ID NO: 29578 - DNA, 80 bp, synthetic construct; identical to SEQ ID NO: 11294
  source 1..80: mol_type = other DNA

SEQ ID NO: 29579 - DNA, 80 bp, synthetic construct
  source 1..80: mol_type = other DNA
ttaaaacaattatcaagatactgaaggctgattggtaactcacatggaactgggagagtatacaattctgaaccaaatag

SEQ ID NO: 29580 - DNA, 80 bp, synthetic construct
  source 1..80: mol_type = other DNA
cagttcaagtaatgaaagctacctcctgagatagaatcagtacttggcacctatctctagtgttctttcacctcatataa

SEQ ID NO: 29581 - DNA, 80 bp, synthetic construct
  source 1..80: mol_type = other DNA
aaaaaaggttctaggagactcagtgaaagttgatacactgttcaaggaacaaataatttcagcacatgggaatttcacag

SEQ ID NO: 29582 - DNA, 80 bp, synthetic construct
  source 1..80: mol_type = other DNA
atagaaaaagagtatttatttcccaaacattattgctcacctgtttttgttatgcctttcaagataaatccaggaaagga

SEQ ID NO: 29583 - DNA, 80 bp, synthetic construct; identical to SEQ ID NO: 11295
  source 1..80: mol_type = other DNA

SEQ ID NO: 29584 - DNA, 80 bp, synthetic construct
  source 1..80: mol_type = other DNA
atgggacagcaagagttgctcctactcaagagagcaaatataatgttctggaagagattggcagaattcacatcaaagga

SEQ ID NO: 29585 - DNA, 80 bp, synthetic construct
  source 1..80: mol_type = other DNA
ttatggagaatctactttctgggtgattcttacaaatgttcttggatctatttttttttcttatagtacctattcttccc

SEQ ID NO: 29586 - DNA, 80 bp, synthetic construct
  source 1..80: mol_type = other DNA
tgaggagaaaggacacacattgtaaattcaaatatagacctctactgtgctatttaatcttggtaacaactccacaaagg

SEQ ID NO: 29587 - DNA, 80 bp, synthetic construct; identical to SEQ ID NO: 11296
  source 1..80: mol_type = other DNA

SEQ ID NO: 29588 - DNA, 80 bp, synthetic construct
  source 1..80: mol_type = other DNA
ccctcttagttctgcacttgagaatgagaatagcttttctgaattatacaaggaagaagaactaatgcccaaatgccagg

SEQ ID NO: 29589 - DNA, 80 bp, synthetic construct
  source 1..80: mol_type = other DNA
agtgttgtcctctgcactccctgttttctgtctgctggagcactgaagcctcacatatgtattaaaaaaataatttccat

SEQ ID NO: 29590 - DNA, 80 bp, synthetic construct; identical to SEQ ID NO: 11297
  source 1..80: mol_type = other DNA

SEQ ID NO: 29591 - DNA, 80 bp, synthetic construct
  source 1..80: mol_type = other DNA
ttgttctcatttccatacttaattacttaaaacaccaaccaaccaacaagcaaaaaatgattagtctaactaatattaca

SEQ ID NO: 29592 - DNA, 80 bp, synthetic construct
  source 1..80: mol_type = other DNA
acaggtcatatgatgtggagccaggttaaaaatataggcagaaagactctagagaccatgctcagatcttccattccaag

SEQ ID NO: 29593 - DNA, 80 bp, synthetic construct
  source 1..80: mol_type = other DNA
cttcttctcagggttctttgtggtgtttttatctgtgcttccctatgcactaatcaaaggaatcatcctccggaaaatat

SEQ ID NO: 29594 - DNA, 80 bp, synthetic construct; identical to SEQ ID NO: 11298
  source 1..80: mol_type = other DNA

SEQ ID NO: 29595 - DNA, 80 bp, synthetic construct
  source 1..80: mol_type = other DNA
catttctctggacagtatgatggatgagagtggcattttatgccaaattaccttaaaatcccaataatactgatgtagct

SEQ ID NO: 29596 - DNA, 80 bp, synthetic construct
  source 1..80: mol_type = other DNA
aataaaaatgagagagaagggtgagccactcttaggtagttctggcattatttaatctaggccagaggttgcaaatggtg

SEQ ID NO: 29597 - DNA, 80 bp, synthetic construct
  source 1..80: mol_type = other DNA
cacacactcatgtgtgcagcctcttttgaagaattggaataactagtcaactgcgtcctccttttccacaagctgtgaca

SEQ ID NO: 29598 - DNA, 80 bp, synthetic construct; identical to SEQ ID NO: 11299
  source 1..80: mol_type = other DNA

SEQ ID NO: 29599 - DNA, 80 bp, synthetic construct
  source 1..80: mol_type = other DNA
accaaaagagaggtagagaggagcagagaagaaaatgaagaagcaaggcaaggaccaggctttttcattatttcttatgg

SEQ ID NO: 29600 - DNA, 80 bp, synthetic construct
  source 1..80: mol_type = other DNA
agttatataccttcacatgcttccttaacccacagaagtgatgctaatgaggcccttaataaggagcgtgctattaagat

SEQ ID NO: 29601 - DNA, 80 bp, synthetic construct
  source 1..80: mol_type = other DNA
catatgtttagagagtatatttcaaatatgatgaatcctagtgcttggcaaattaactttagaacactaataaaattatt

SEQ ID NO: 29602 - DNA, 80 bp, synthetic construct; identical to SEQ ID NO: 11300
  source 1..80: mol_type = other DNA

SEQ ID NO: 29603 - DNA, 80 bp, synthetic construct
  source 1..80: mol_type = other DNA
aatgatgatataactggtagaactggaaggaggatcactcacttattttctagattaagaagtagaggaatggccaggtg

SEQ ID NO: 29604 - DNA, 80 bp, synthetic construct
  source 1..80: mol_type = other DNA
gaggttgcagtgagctaagatcacgccactgcactccagcctgggcaacaaggcgagactctgtctgaaaaagaaaaaaa

SEQ ID NO: 29605 - DNA, 80 bp, synthetic construct
  source 1..80: mol_type = other DNA
ttctgtgtaatctaagtcaagttactgaactttgtgggccctctggctctccatgtgtaaaatggagaatattaatattt

SEQ ID NO: 29606 - DNA, 80 bp, synthetic construct
  source 1..80: mol_type = other DNA
tcaataaacattagcttctctgattgcaagttccagtctaaagtgctttatatataccagccaataaaaggatgcgagag

SEQ ID NO: 29607 - DNA, 80 bp, synthetic construct; identical to SEQ ID NO: 11301
  source 1..80: mol_type = other DNA

SEQ ID NO: 29608 - DNA, 80 bp, synthetic construct
  source 1..80: mol_type = other DNA
gtcggcatgaaggaaaaatatgcagtttgacattttctactactttcaggtcattattttcctactctggtgcaaaaacc

SEQ ID NO: 29609 - DNA, 80 bp, synthetic construct
  source 1..80: mol_type = other DNA
aaaatggaggcttcaaaaagtttagggacttggctcagctcacacaactggcaaggactgaaaatggattttagtcccaa

SEQ ID NO: 29610 - DNA, 80 bp, synthetic construct; identical to SEQ ID NO: 11302
  source 1..80: mol_type = other DNA

SEQ ID NO: 29611 - DNA, 80 bp, synthetic construct
  source 1..80: mol_type = other DNA
ttgcactctgaaatctctttctcagcttggaatttcctaatcttccaactgtttgagtcttttaattctacatttactgc

SEQ ID NO: 29612 - DNA, 80 bp, synthetic construct
  source 1..80: mol_type = other DNA
ctttatcagttttggagaaggaagtgctatctgggtaacagtagtgctatctgttgactctagtcaactgtaagttttat

SEQ ID NO: 29613 - DNA, 80 bp, synthetic construct
  source 1..80: mol_type = other DNA
agccttgtctcccacaatacatggagaaaatagaggccaccgtcatatttgaatgtttccaacttctctcttcacctttg

SEQ ID NO: 29614 - DNA, 80 bp, synthetic construct
  source 1..80: mol_type = other DNA
gtttaaatattttcaagttaaacaatttctttcctgactttcgctcacgcaacctcatgcccaaaaccttatcactcttc

SEQ ID NO: 29615 - DNA, 80 bp, synthetic construct; identical to SEQ ID NO: 11303
  source 1..80: mol_type = other DNA

SEQ ID NO: 29616 - DNA, 80 bp, synthetic construct
  source 1..80: mol_type = other DNA
atgatgaaaggcatgtctcacatggaggcagataagagcatagaacttgtgcagggaaacttccctttattaaaccacca

SEQ ID NO: 29617 - DNA, 80 bp, synthetic construct
  source 1..80: mol_type = other DNA
ctccttctggctttttatgttctccgtgggtgacctctctcaggctcaagtgataaccaatgtgctgatgactctcaaat

SEQ ID NO: 29618 - DNA, 80 bp, synthetic construct; identical to SEQ ID NO: 11304
  source 1..80: mol_type = other DNA

SEQ ID NO: 29619 - DNA, 80 bp, synthetic construct
  source 1..80: mol_type = other DNA
ctagctagggcagagctaaaatgtcaggctaggcttctgtgactccaaagccctttctcacttagcatatcatcacttat

SEQ ID NO: 29620 - DNA, 80 bp, synthetic construct
  source 1..80: mol_type = other DNA
agacacacaccaccatgcctagctaattttattttattttattttattttttgagacagagtctcactctgtcacccagg

SEQ ID NO: 29621 - DNA, 80 bp, synthetic construct
  source 1..80: mol_type = other DNA
gccaggcttgtcttgaactcctgacctcgtgatccactcgcctcggcctcccaaagtgctgggattacaggtgtgagcca

SEQ ID NO: 29622 - DNA, 80 bp, synthetic construct
  source 1..80: mol_type = other DNA
atatgatttttagtatatgtaaatatacatatttattaaatgtaaatataaatataaatgtgtggagtgatatccattga

SEQ ID NO: 29623 - DNA, 80 bp, synthetic construct; identical to SEQ ID NO: 11305
  source 1..80: mol_type = other DNA

SEQ ID NO: 29624 - DNA, 80 bp, synthetic construct
  source 1..80: mol_type = other DNA
tgagttggttgttctcttgaatgtactgccatatgacgtggtgtgatttcaattgtagcaccaagctcattgcaatatta

SEQ ID NO: 29625 - DNA, 80 bp, synthetic construct
  source 1..80: mol_type = other DNA
actaaaagcagtagttttcaagcatgattgtttatgtatgccttaaaagaattttgaaaacctatgtacccctgacacac

SEQ ID NO: 29626 - DNA, 80 bp, synthetic construct
  source 1..80: mol_type = other DNA
taagtatgctatacatggatttcttcaaaaccctgaagctgcagtttcagtgcattcaatttatggaaaagaaattaatt

SEQ ID NO: 29627 - DNA, 80 bp, synthetic construct
  source 1..80: mol_type = other DNA
tcccctacttatttctgcaatttgactctaagaatagataggacatgtagattgccttaggtttgaaatctgggtgaaat

SEQ ID NO: 29628 - DNA, 80 bp, synthetic construct; identical to SEQ ID NO: 11306
  source 1..80: mol_type = other DNA

SEQ ID NO: 29629 - DNA, 80 bp, synthetic construct
  source 1..80: mol_type = other DNA
actttgatttgaagaccactatgctaaagcttcccacgggggcaatagtgaggcaaggaatttttaaaagggaattactt

SEQ ID NO: 29630 - DNA, 80 bp, synthetic construct
  source 1..80: mol_type = other DNA
gctgtgtgactttagtcatttaactgctgagtcacagtctacagctttgaaagaggaggattataaaatctatctcatgt

SEQ ID NO: 29631 - DNA, 80 bp, synthetic construct; identical to SEQ ID NO: 11307
  source 1..80: mol_type = other DNA

SEQ ID NO: 29632 - DNA, 80 bp, synthetic construct
  source 1..80: mol_type = other DNA
aacaatagaaaaacttctaatggtgatgacagcctcttcttcagtaatttctcacttcttggtactcctgtcctgaaaga

SEQ ID NO: 29633 - DNA, 80 bp, synthetic construct
  source 1..80: mol_type = other DNA
tcttacatgagcattaggagaatgtatgggtgtagtgtcttgtataatagaaattgttccactgataatttactctagtt

SEQ ID NO: 29634 - DNA, 80 bp, synthetic construct
  source 1..80: mol_type = other DNA
agagctggtccaggaaaatcatgacttacattttgccttagtaaccacataaacaaaaggtctccatttttgttaacatt

SEQ ID NO: 29635 - DNA, 80 bp, synthetic construct
  source 1..80: mol_type = other DNA
gagatacatctgaaaaaatagtagattagaaagaaaaaacagcaaaaggaccaaaactttattgtcaggagaagactttg

SEQ ID NO: 29636 - DNA, 80 bp, synthetic construct; identical to SEQ ID NO: 11308
  source 1..80: mol_type = other DNA

SEQ ID NO: 29637 - DNA, 80 bp, synthetic construct
  source 1..80: mol_type = other DNA
gcagtgctgctgctgtaggtaaaaatgttaatgaaaatagaaattaagaaagactcctgaaaggcaattatttatcaata

SEQ ID NO: 29638 - DNA, 80 bp, synthetic construct
  source 1..80: mol_type = other DNA
gagtccaggagtttgagaccagcgtgggcaacatggcaaaccccacctctacaaaaaacacaaacaaaagaaaatagctg

SEQ ID NO: 29639 - DNA, 80 bp, synthetic construct; identical to SEQ ID NO: 11309
  source 1..80: mol_type = other DNA

SEQ ID NO: 29640 - DNA, 80 bp, synthetic construct
  source 1..80: mol_type = other DNA
tatgaaaaggtagtaattgtgtttcatagaatttttaaaattaattctgcgtatgtcttcaagatcaattctatgataga

SEQ ID NO: 29641 - DNA, 80 bp, synthetic construct
  source 1..80: mol_type = other DNA
ccttgggaatatttaaacacttctgagaaacggagtttactaactcaatctaggaggctgccttttagtagtattaggaa

SEQ ID NO: 29642 - DNA, 80 bp, synthetic construct
  source 1..80: mol_type = other DNA
taacttacccaaatatgtttgcagagatcttatgtaaagctcttcattataacactgctttcaggagccaaaaattgggt

SEQ ID NO: 29643 - DNA, 80 bp, synthetic construct
  source 1..80: mol_type = other DNA
ccaataaaaggtttgttaaagaatgactgtgacggatgtatatgatatactcttaagtgaataaagagttacaaaatgtt

SEQ ID NO: 29644 - DNA, 80 bp, synthetic construct; identical to SEQ ID NO: 11310
  source 1..80: mol_type = other DNA

SEQ ID NO: 29645 - DNA, 80 bp, synthetic construct
  source 1..80: mol_type = other DNA
gaagcaatattagtatagaattttgcatcactggatgcccttgactgaaagctggcttatggcatctcaccagtgtgtgg

SEQ ID NO: 29646 - DNA, 80 bp, synthetic construct
  source 1..80: mol_type = other DNA
agtgctgttgctgacaattcctgacaccaccttgtctctattattgatcattgcctcactatggtactgagttttagctt

SEQ ID NO: 29647 - DNA, 80 bp, synthetic construct
  source 1..80: mol_type = other DNA
acacacatatatatatgacactatacatgatttattttatttaatttttaaaattttattctttttagagattaggtctt

SEQ ID NO: 29648 - DNA, 80 bp, synthetic construct; identical to SEQ ID NO: 11311
  source 1..80: mol_type = other DNA

SEQ ID NO: 29649 - DNA, 80 bp, synthetic construct
  source 1..80: mol_type = other DNA
aattaaaatatataaaaagttgaaaattattcctttctttactgtctctcatctgtccattttccattctcctgcattcc

SEQ ID NO: 29650 - DNA, 80 bp, synthetic construct
  source 1..80: mol_type = other DNA
caatatgcagagttttgcttcttgcttttcccactatcttggacaactttccatattcaaagcacagaggacttgcacat

SEQ ID NO: 29651 - DNA, 80 bp, synthetic construct
  source 1..80: mol_type = other DNA
cttagagagaccctcacaccttagagagaccctcacccctttctgccatgtgagaacacagcaggaagacagctggctat

SEQ ID NO: 29652 - DNA, 80 bp, synthetic construct
  source 1..80: mol_type = other DNA
cacacacatgcacacacatttaaatagatgcatagtattctatcatatggatggatattctatgatataatgaatcacta

SEQ ID NO: 29653 - DNA, 80 bp, synthetic construct; identical to SEQ ID NO: 11312
  source 1..80: mol_type = other DNA

SEQ ID NO: 29654 - DNA, 80 bp, synthetic construct
  source 1..80: mol_type = other DNA
agtggcctttaaacattgaaaggtaacatttgaacaaagacttgcaggaggtgagggattagggaatgcagactctggga

SEQ ID NO: 29655 - DNA, 80 bp, synthetic construct; identical to SEQ ID NO: 11313
  source 1..80: mol_type = other DNA

SEQ ID NO: 29656 - DNA, 80 bp, synthetic construct
  source 1..80: mol_type = other DNA
atccaggtagtagtggaagtagtatagtaggaagtgatcagattcaggacatgctttgaaggaagatccaataggattaa

SEQ ID NO: 29657 - DNA, 80 bp, synthetic construct
  source 1..80: mol_type = other DNA
tgaaatgcctatttgacatccaaatagagatgttagttggatgtacaagtctagtttcaaggaagagggggctggtagtg

SEQ ID NO: 29658 - DNA, 80 bp, synthetic construct
  source 1..80: mol_type = other DNA
caataaaataaaagtctgagaagacaaagctagtgaatgaatgtggtatcccggaacccaactgatgtcaagcagaaggg

SEQ ID NO: 29659 - DNA, 80 bp, synthetic construct; identical to SEQ ID NO: 11314
  source 1..80: mol_type = other DNA

SEQ ID NO: 29660 - DNA, 80 bp, synthetic construct
  source 1..80: mol_type = other DNA
gaatgcataaaatatatgtagacactagcctattttatcatttgctactataaaatatacacaatctattataaaaagtt

SEQ ID NO: 29661 - DNA, 80 bp, synthetic construct
  source 1..80: mol_type = other DNA
cctgttgctattacggtaagctcaagcattgtggatagccatttaaaacaccacgtgatgctaatcatctccgtgtgagc

SEQ ID NO: 29662 - DNA, 80 bp, synthetic construct
  source 1..80: mol_type = other DNA
gtctgcagctacagttgcctgcaatttcgagataaatgaacccagtataaagactgttgtaacaaaagaaaagaaaatgt

SEQ ID NO: 29663 - DNA, 80 bp, synthetic construct; identical to SEQ ID NO: 11315
  source 1..80: mol_type = other DNA

SEQ ID NO: 29664 - DNA, 80 bp, synthetic construct
  source 1..80: mol_type = other DNA
gctcaagcaattctcctgcctcaccctcccaagtagctgggactacaggcacgcacaaccacactcagctaatttttgta

SEQ ID NO: 29665 - DNA, 80 bp, synthetic construct
  source 1..80: mol_type = other DNA
acttgtcttcttttcccctgattctgtttaaatagcactggagttacctgttttgaattttttttccaagcggtccctta

SEQ ID NO: 29666 - DNA, 80 bp, synthetic construct
  source 1..80: mol_type = other DNA
ctcccaagtagctgggactacaggcgcccgccactacgcccggctaattttttgtatttttagtagagacggggtttcac

SEQ ID NO: 29667 - DNA, 80 bp, synthetic construct; identical to SEQ ID NO: 11316
  source 1..80: mol_type = other DNA

SEQ ID NO: 29668 - DNA, 80 bp, synthetic construct
  source 1..80: mol_type = other DNA
gatgtttgacgcttttttaaaaagctgtgcattttcctctgggtaatactttagctgtatattatgtattctgatatata

SEQ ID NO: 29669 - DNA, 80 bp, synthetic construct
  source 1..80: mol_type = other DNA
gaatttttatcatttttgtgtatccagtaaatagtcaatatttgtacttgctctctgaccacataaaagaatatattcgt

SEQ ID NO: 29670 - DNA, 80 bp, synthetic construct
  source 1..80: mol_type = other DNA
gttattccttataggttctgtaatttttgcttcaagaatattgctttttaaatttaatatatagatacttataattacac

SEQ ID NO: 29671 - DNA, 80 bp, synthetic construct
  source 1..80: mol_type = other DNA
ttagttagcataaagttaggtttgtctttaatttcacctgaagtcttttcctcttaatagatgggttaagccaactgaaa

SEQ ID NO: 29672 - DNA, 80 bp, synthetic construct; identical to SEQ ID NO: 11317
  source 1..80: mol_type = other DNA

SEQ ID NO: 29673 - DNA, 80 bp, synthetic construct
  source 1..80: mol_type = other DNA
agtggctatacttaatactaataactttatgttaaatttttcattctatgtgactctagttcactaatatgagctctgat

SEQ ID NO: 29674 - DNA, 80 bp, synthetic construct
  source 1..80: mol_type = other DNA
ggaggcagaacttgcagtgagccgagatcgcgccactgcactctagcctgggtgacagagtgagactctgtctctaaata

SEQ ID NO: 29675 - DNA, 80 bp, synthetic construct
  source 1..80: mol_type = other DNA
taaatgataccttttgactttcagcttttcttaataaagcaatcagcaaatttcctttacactccacacttataccccat

SEQ ID NO: 29676 - DNA, 80 bp, synthetic construct; identical to SEQ ID NO: 11318
  source 1..80: mol_type = other DNA

SEQ ID NO: 29677 - DNA, 80 bp, synthetic construct
  source 1..80: mol_type = other DNA
tactaacctttcccattcttcctccaaacctattccaactatctgaatcatgtgccccttctctgtgaacctctatcata

SEQ ID NO: 29678 - DNA, 80 bp, synthetic construct
  source 1..80: mol_type = other DNA
tggaggcaagtgaatcctgagcgtgatttgataatgacctaataatgatgggttttatttccagacttcacttctaatgg

SEQ ID NO: 29679 - DNA, 80 bp, synthetic construct; identical to SEQ ID NO: 11319
  source 1..80: mol_type = other DNA

SEQ ID NO: 29680 - DNA, 80 bp, synthetic construct
  source 1..80: mol_type = other DNA
ttgatcacaataaatgcattttatgaaatggtgagaattttgttcactcattagtgagacaaacgtcctcaatggttatt

SEQ ID NO: 29681 - DNA, 80 bp, synthetic construct
  source 1..80: mol_type = other DNA
gcctaatggaatgagcattgatctgccagcagagaattagaggggtaaaattgtgaagatattgtatccctggctttgaa

SEQ ID NO: 29682 - DNA, 80 bp, synthetic construct
  source 1..80: mol_type = other DNA
agtattccaagagaaaccagtatatggatcttgtgctgttcactatgtaaattgtgtgatggtgggttcagtagttattg

SEQ ID NO: 29683 - DNA, 80 bp, synthetic construct
  source 1..80: mol_type = other DNA
taaaatacagtatccaaaaaaatggaaaagggcaaaccgtggattagatagaaatggcaattcttataaaaagggttgca

SEQ ID NO: 29684 - DNA, 80 bp, synthetic construct; identical to SEQ ID NO: 11320
  source 1..80: mol_type = other DNA

SEQ ID NO: 29685 - DNA, 80 bp, synthetic construct
  source 1..80: mol_type = other DNA
atttacttacgagtggaaaagttgcggaaggtgccttacagactttttttttgcgttaagtatgtgttttcccataggaa

SEQ ID NO: 29686 - DNA, 80 bp, synthetic construct
  source 1..80: mol_type = other DNA
ggaataccaaattgaataagacatagtctatttttctgaagggtttatagcagagtcccctgtgttaataatgaaggagt

SEQ ID NO: 29687 - DNA, 80 bp, synthetic construct; identical to SEQ ID NO: 11321
  source 1..80: mol_type = other DNA

SEQ ID NO: 29688 - DNA, 80 bp, synthetic construct
  source 1..80: mol_type = other DNA
tattaagacttgctttattttatacagtgtactaggagctggagatgaaaatatgtgtagaacatgaatcatatacttcg

SEQ ID NO: 29689 - DNA, 80 bp, synthetic construct
  source 1..80: mol_type = other DNA
atgtcctctgatggaatgattcaccatgcaattctaagggtgacaagaatgaaagttagggccttgaagaaatattttga

SEQ ID NO: 29690 - DNA, 80 bp, synthetic construct
  source 1..80: mol_type = other DNA
acacaacgtcttgtacaaagtagccattcagtagagactagcttgtattatctccctttgaggtaaagaaaactgttaga

SEQ ID NO: 29691 - DNA, 80 bp, synthetic construct
  source 1..80: mol_type = other DNA
taggagaaatacccctgagagacagttcttattagtgactactgtgcagaaaagatggaggttggtgtaattaaggagaa

SEQ ID NO: 29692 - DNA, 80 bp, synthetic construct; identical to SEQ ID NO: 11322
  source 1..80: mol_type = other DNA

SEQ ID NO: 29693 - DNA, 80 bp, synthetic construct
  source 1..80: mol_type = other DNA
tgggtatgaaatgacaactttattgtctttcctgtcaaagaacttgtaggctggttgggggaaagagaccatttcaatat

SEQ ID NO: 29694 - DNA, 80 bp, synthetic construct
  source 1..80: mol_type = other DNA
aatgtattttggacagaggaaattgtatgaacagaaacacagaacatgaaactacttggttggtgcagggtatcatcagc

SEQ ID NO: 29695 - DNA, 80 bp, synthetic construct
  source 1..80: mol_type = other DNA
agaattaaggtggacgtgattagaagctttgtgaatagcagaaagaacatagattttgaaagctggcagacgtaggttac

SEQ ID NO: 29696 - DNA, 80 bp, synthetic construct; identical to SEQ ID NO: 11323
  source 1..80: mol_type = other DNA

SEQ ID NO: 29697 - DNA, 80 bp, synthetic construct
  source 1..80: mol_type = other DNA
ataagagaaactgggagggaagacaggtagaaatgctatggggttaggaaggaagaatgcagaggtggattacttagaat

SEQ ID NO: 29698 - DNA, 80 bp, synthetic construct
  source 1..80: mol_type = other DNA
tcagatttttatttcaaagtatccctgagtccctgttcccttttttgtcctgctgacttttggaactgatttaggcttcc

SEQ ID NO: 29699 - DNA, 80 bp, synthetic construct
  source 1..80: mol_type = other DNA
ttattttctatacaactacatggtcaattccttgaaaatatcaactccaaaatctttattttggtatactccacgtagca

SEQ ID NO: 29700 - DNA, 80 bp, synthetic construct; identical to SEQ ID NO: 11324
  source 1..80: mol_type = other DNA

SEQ ID NO: 29701 - DNA, 80 bp, synthetic construct
  source 1..80: mol_type = other DNA
ggaggagttttgatcataagaacttgaaatacctacagaatccttgatggttaagcagctggtgccagcacaagaatccc

SEQ ID NO: 29702 - DNA, 80 bp, synthetic construct
  source 1..80: mol_type = other DNA
ttgttcaactctaatgtctgcaaagcacttgcgtatgtaatgatgctcagtgtcataggagcaggcaggtaagtgtaaat

SEQ ID NO: 29703 - DNA, 80 bp, synthetic construct; identical to SEQ ID NO: 11325
  source 1..80: mol_type = other DNA

SEQ ID NO: 29704 - DNA, 80 bp, synthetic construct
  source 1..80: mol_type = other DNA
tgcccattaacttatcctaccatttttcttcccctgtgtccaaaccacctttagaatctcctaaatatttgtagctattg

SEQ ID NO: 29705 - DNA, 80 bp, synthetic construct
  source 1..80: mol_type = other DNA
acactgttctcttgcctttttaatttccagactaccacttctcctgcacttgacaataccgcagtctaccacgtagtccc

SEQ ID NO: 29706 - DNA, 80 bp, synthetic construct
  source 1..80: mol_type = other DNA
gagaaggaggtcagagctttaggatatataattggtctccacaaagttgttgtgatacttttggaaccacgtaatggtct

SEQ ID NO: 29707 - DNA, 80 bp, synthetic construct; identical to SEQ ID NO: 11326
  source 1..80: mol_type = other DNA

SEQ ID NO: 29708 - DNA, 80 bp, synthetic construct
  source 1..80: mol_type = other DNA
aacttgaaacttagcctttgaatggtcaatccaccactgtaggagaatttatgaatgttcagttgagagaactgaaaata

SEQ ID NO: 29709 - DNA, 80 bp, synthetic construct
  source 1..80: mol_type = other DNA
cctactaaaacacacacacacacacacacacacacacacacacacactagccaggcgtggtggtgcacgtttgtagtcca

SEQ ID NO: 29710 - DNA, 80 bp, synthetic construct
  source 1..80: mol_type = other DNA
cttaaacaagaataaacatcactaaatgactgtaccttgaactacctgtaattttctcctgataggtaattaagcttcaa

SEQ ID NO: 29711 - DNA, 80 bp, synthetic construct; identical to SEQ ID NO: 11327
  source 1..80: mol_type = other DNA

SEQ ID NO: 29712 - DNA, 80 bp, synthetic construct
  source 1..80: mol_type = other DNA
gttcttatgtctctaaaaccaaaatagccctaagtctgtccctcccagtaagatttgggccagtcaatggaacagtaata

SEQ ID NO: 29713 - DNA, 80 bp, synthetic construct
  source 1..80: mol_type = other DNA
taaaagccatactgtatcatgacatatatatgcccgatgtttcgaccctcttgaagaattgagattctcgactctacact

SEQ ID NO: 29714 - DNA, 80 bp, synthetic construct
  source 1..80: mol_type = other DNA
ccatctgcagatgatcatgtcattaggcttctgactctatagccatagaaaaatattcatgaagacctttcaggaaggga

SEQ ID NO: 29715 - DNA, 80 bp, synthetic construct; identical to SEQ ID NO: 11328
  source 1..80: mol_type = other DNA

SEQ ID NO: 29716 - DNA, 80 bp, synthetic construct
  source 1..80: mol_type = other DNA
agctttcattctagtagagaagatgaaaaccagtacagtttggtaagttagatgatattggttaatgtagggttcttatg

SEQ ID NO: 29717 - DNA, 80 bp, synthetic construct
  source 1..80: mol_type = other DNA
gagaacattccagaaagagaacaaaatgtacgaggcctgatgccaagagagaacattcattgcattggggaactatagtc

SEQ ID NO: 29718 - DNA, 80 bp, synthetic construct
  source 1..80: mol_type = other DNA
atatgctccagtaagaagactgaactttacactgggggccatgggactcactgaatggcattaaatttgagagtggtcat

SEQ ID NO: 29719 - DNA, 80 bp, synthetic construct; identical to SEQ ID NO: 11329
  source 1..80: mol_type = other DNA

SEQ ID NO: 29720 - DNA, 80 bp, synthetic construct
  source 1..80: mol_type = other DNA
tgaaatgactgccatagtcaagctcattaacatatccatcactcacataattaacattttgtgtgtatgcagtgagaaca

SEQ ID NO: 29721 - DNA, 80 bp, synthetic construct
  source 1..80: mol_type = other DNA
caagtttccatcttggtcagttgggtggatagtagtactatctgccgaggcaggttggtagggtgaaaacaatgtgttcc

SEQ ID NO: 29722 - DNA, 80 bp, synthetic construct
  source 1..80: mol_type = other DNA
agtataagaagactggactgaggacagatttccaaggaatttcaatacttaagaggtacgcagagaaaagaggggctgtg

SEQ ID NO: 29723 - DNA, 80 bp, synthetic construct
  source 1..80: mol_type = other DNA
tttggagaggccaagtaagattcctaagtacccattggatcaaggtccttaatcttacaaaaacttatgcaaatcaataa

SEQ ID NO: 29724 - DNA, 80 bp, synthetic construct; identical to SEQ ID NO: 11330
  source 1..80: mol_type = other DNA

SEQ ID NO: 29725 - DNA, 80 bp, synthetic construct
  source 1..80: mol_type = other DNA
ttgagttactgctgtgtggcaagcatcattctacaaacagagggcacagtgataagcaagccagtttgtactctcgtgta

SEQ ID NO: 29726 - DNA, 80 bp, synthetic construct
  source 1..80: mol_type = other DNA
ctccttcatccatgctgccatttctcttggtttacggttccagtatagtactcatcacattattactatagagccatcca

SEQ ID NO: 29727 - DNA, 80 bp, synthetic construct; identical to SEQ ID NO: 11331
  source 1..80: mol_type = other DNA

SEQ ID NO: 29728 - DNA, 80 bp, synthetic construct
  source 1..80: mol_type = other DNA
aaagagggaatgtttaagagacttgtttaagatcacatgtctcataattggtgggaccagcaatacaatccaaatctaac

SEQ ID NO: 29729 - DNA, 80 bp, synthetic construct
  source 1..80: mol_type = other DNA
ttaattatggtgtagcagtattattaaactatcaagactataaattttctatttgtaaaggagattatgataccaaagat

SEQ ID NO: 29730 - DNA, 80 bp, synthetic construct
  source 1..80: mol_type = other DNA
aggaaatttttttccagatcttctcccaaattatcttcatctttttcctctccccttgggaaagaatctcttcatgcctc

SEQ ID NO: 29731 - DNA, 80 bp, synthetic construct; identical to SEQ ID NO: 11332
  source 1..80: mol_type = other DNA

SEQ ID NO: 29732 - DNA, 80 bp, synthetic construct
  source 1..80: mol_type = other DNA
ttgggcatttctaagtggtcagacttagaggagatagttaaggaattagcagctgctaaatgccaattcttagaccagtt

SEQ ID NO: 29733 - DNA, 80 bp, synthetic construct
  source 1..80: mol_type = other DNA
tattatttccgaacctaccccaaacaccttaaatcactgcattctatagccattcttttaaaaatgcttgagttattagt

SEQ ID NO: 29734 - DNA, 80 bp, synthetic construct
  source 1..80: mol_type = other DNA
attatattagtgctttttgtactttttgttgggtgtagtaaaaattgcattcgaatttgagttttctgctatatatttgg

SEQ ID NO: 29735 - DNA, 80 bp, synthetic construct
  source 1..80: mol_type = other DNA
gcctcctgagtagctgggactacaggcacctgccaccaggtccagctaatttttgtatttttagtagaaatggggttttg

SEQ ID NO: 29736 - DNA, 80 bp, synthetic construct; identical to SEQ ID NO: 11333
  source 1..80: mol_type = other DNA

SEQ ID NO: 29737 - DNA, 80 bp, synthetic construct
  source 1..80: mol_type = other DNA
tttataatactcttggctctcttacgttctctcacacactctactcttcccttcctctgttctttctacttgttccctct

SEQ ID NO: 29738 - DNA, 80 bp, synthetic construct
  source 1..80: mol_type = other DNA
ctttacccaaccaagcttcttaccctcctcccttaccacaagcatctatattgtcaaggttgttataaagagtaataagc

SEQ ID NO: 29739 - DNA, 80 bp, synthetic construct
  source 1..80: mol_type = other DNA
caatatagcaacaccctatatcattgccctttgtatgtgcaaatcagagttaataagctttatattagcaattactcctt

SEQ ID NO: 29740 - DNA, 80 bp, synthetic construct; identical to SEQ ID NO: 11334
  source 1..80: mol_type = other DNA

SEQ ID NO: 29741 - DNA, 80 bp, synthetic construct
  source 1..80: mol_type = other DNA
caaaatgcagatagattaccctgtccaaattctcctgagtaagagtaggtgaaacatttttaaataagctccccaggtga

SEQ ID NO: 29742 - DNA, 80 bp, synthetic construct
  source 1..80: mol_type = other DNA
tttgaaagaaaggtttttcagggccctttcaacaataaaattaattgaacacaatattaaaactctatatttgatttaag

SEQ ID NO: 29743 - DNA, 80 bp, synthetic construct; identical to SEQ ID NO: 11335
  source 1..80: mol_type = other DNA

SEQ ID NO: 29744 - DNA, 80 bp, synthetic construct
  source 1..80: mol_type = other DNA
tgttaaatcaaatagagaaagccaaacactaataatgtggttacaaatgaacaataaattaggtaatcagaacaggtaca

SEQ ID NO: 29745 - DNA, 80 bp, synthetic construct
  source 1..80: mol_type = other DNA
tacacatttctctttatataaatgtttcagtccagaaaaggaggccaaatacattagctcagaacatcaaatcttctcag

SEQ ID NO: 29746 - DNA, 80 bp, synthetic construct
  source 1..80: mol_type = other DNA
catcattctttcacaaaacccccagctttagacaatcgctattatgaatttgacatgtactattccaatccattcccata

SEQ ID NO: 29747 - DNA, 80 bp, synthetic construct
  source 1..80: mol_type = other DNA
gtatgtagaattctatttcattcttttttcattgttgttttgtacccataacgtgtcacattttatttataccttctgtt

SEQ ID NO: 29748 - DNA, 80 bp, synthetic construct; identical to SEQ ID NO: 11336
  source 1..80: mol_type = other DNA

SEQ ID NO: 29749 - DNA, 80 bp, synthetic construct
  source 1..80: mol_type = other DNA
tcctttaccaattatctttttggtaagttattgtggtggccatgagatgtgccttacagaggccttgctagagggaatgt

SEQ ID NO: 29750 - DNA, 80 bp, synthetic construct
  source 1..80: mol_type = other DNA
tatgagacttctttagtggctgatttttggctcataaatgactttgccaaaccttccttagactgctcagtgttctaaca

SEQ ID NO: 29751 - DNA, 80 bp, synthetic construct; identical to SEQ ID NO: 11337
  source 1..80: mol_type = other DNA

SEQ ID NO: 29752 - DNA, 80 bp, synthetic construct
  source 1..80: mol_type = other DNA
gttaagaatctaattttattgtttttcattggaaagccatttgtcccaagataattttttagtagtccctccttccccta

SEQ ID NO: 29753 - DNA, 80 bp, synthetic construct
  source 1..80: mol_type = other DNA
tatttagaaaagcgtcagaattgaacatgtacatacattttgcttgtcattattccctaaacaatatagtataacaacta

SEQ ID NO: 29754 - DNA, 80 bp, synthetic construct
  source 1..80: mol_type = other DNA
ttccccacagatgccaaggcacaactgtatttattctatcatctacttgtttaatctcacatcagtatctacttttgaaa

SEQ ID NO: 29755 - DNA, 80 bp, synthetic construct; identical to SEQ ID NO: 11338
  source 1..80: mol_type = other DNA

SEQ ID NO: 29756 - DNA, 80 bp, synthetic construct
  source 1..80: mol_type = other DNA
tgaacagataagaaaatggatgacaggagaacagaaacgcatgactgtcagagaagtcattggagactttacagaggaaa

SEQ ID NO: 29757 - DNA, 80 bp, synthetic construct
  source 1..80: mol_type = other DNA
aggagtgctgggaggtgaggctgaagaaataagctaggaaatgtctttttatgccattttttaaagtttggactttattc

SEQ ID NO: 29758 - DNA, 80 bp, synthetic construct
  source 1..80: mol_type = other DNA
gaaaaaaagggctttcctgaattttgcagtcatgggatatatgataagcattcttgatttatcatcttcaatcctgttac

SEQ ID NO: 29759 - DNA, 80 bp, synthetic construct; identical to SEQ ID NO: 11339
  source 1..80: mol_type = other DNA

SEQ ID NO: 29760 - DNA, 80 bp, synthetic construct
  source 1..80: mol_type = other DNA
ccccttttacttatgcaggataccaagtctatcttagcaccataatagtgaatgataggaatcaagctctatgaatacat

SEQ ID NO: 29761 - DNA, 80 bp, synthetic construct
  source 1..80: mol_type = other DNA
tttgaactatgcaggtccacttacacgtattttttttttccgtttctgacacccctaaggcaacaaggccaactcctccc

SEQ ID NO: 29762 - DNA, 80 bp, synthetic construct
  source 1..80: mol_type = other DNA
tattgctagttaagtttctggtagttacaagttatatgtgggtgttcgactgcatggggagtcagcaccccaaccctcat

SEQ ID NO: 29763 - DNA, 80 bp, synthetic construct; identical to SEQ ID NO: 11340
  source 1..80: mol_type = other DNA

SEQ ID NO: 29764 - DNA, 80 bp, synthetic construct
  source 1..80: mol_type = other DNA
tttttaacagttgctttgcttcttctttcaaagtcatacttcaacaaagttgctattgaatatgtctgactaaacatgtt

SEQ ID NO: 29765 - DNA, 80 bp, synthetic construct
  source 1..80: mol_type = other DNA
ttataagacatatatggagaaaattcaattgaataaaccgttattgaagtatataaaataagatctggatgaatagaaag

SEQ ID NO: 29766 - DNA, 80 bp, synthetic construct
  source 1..80: mol_type = other DNA
gagtgcatgctttgtagacaaattgccttagttagaatcctggctctatcatctattagctatgttatctttgggataac

SEQ ID NO: 29767 - DNA, 80 bp, synthetic construct; identical to SEQ ID NO: 11341
  source 1..80: mol_type = other DNA

SEQ ID NO: 29768 - DNA, 80 bp, synthetic construct
  source 1..80: mol_type = other DNA
taaatcatgcttgctattcaagtaaaagaaaatgaggttagattcatgtctcataccaaatataaccataaattatacct

SEQ ID NO: 29769 - DNA, 80 bp, synthetic construct
  source 1..80: mol_type = other DNA
tttcaagcagatataatgatttcatgaaatgttaactgtgcacatgatagatggtctatggatagtgcaaaagaaaaaga

SEQ ID NO: 29770 - DNA, 80 bp, synthetic construct
  source 1..80: mol_type = other DNA
aaaatacaaattaaaatggcaaattagcaaaaattgaggtgtgattatattaatatctgttggtggtggtgattatgggg

SEQ ID NO: 29771 - DNA, 80 bp, synthetic construct; identical to SEQ ID NO: 11342
  source 1..80: mol_type = other DNA

SEQ ID NO: 29772 - DNA, 80 bp, synthetic construct
  source 1..80: mol_type = other DNA
agcaagtgaattcaagcacagaagtgcttgaaggcaggtttcataaatctactttcttacagtatcctgatattgactta

SEQ ID NO: 29773 - DNA, 80 bp, synthetic construct
  source 1..80: mol_type = other DNA
gattagtcatcctaaaagcaagatacattttctcagaaaagacaaggtaaagaacttgtatatcctccctcaattcgttt

SEQ ID NO: 29774 - DNA, 80 bp, synthetic construct
  source 1..80: mol_type = other DNA
cctttagtttaaaatcacatggctacatacataccaacttcaacaatagtacatctggcaaggtcatgcaaacctgggac

SEQ ID NO: 29775 - DNA, 80 bp, synthetic construct
  source 1..80: mol_type = other DNA
tggtagaatggggcatattatcacatcaggtaaacactctattcaaggataaatggaaatgaatgtcatatatagatcat

SEQ ID NO: 29776 - DNA, 80 bp, synthetic construct; identical to SEQ ID NO: 11343
  source 1..80: mol_type = other DNA

SEQ ID NO: 29777 - DNA, 80 bp, synthetic construct
  source 1..80: mol_type = other DNA
gtagctaggactactacaggtgtgtgccaccatacctggctaaattttgcattttttgtggggacagggtttcactatgt

SEQ ID NO: 29778 - DNA, 80 bp, synthetic construct
  source 1..80: mol_type = other DNA
catagttagcactctttatgaaacataaactattatttgacccaggtttttgttagaggaattgagtcagagagctgtta

SEQ ID NO: 29779 - DNA, 80 bp, synthetic construct; identical to SEQ ID NO: 11344
  source 1..80: mol_type = other DNA

SEQ ID NO: 29780 - DNA, 80 bp, synthetic construct
  source 1..80: mol_type = other DNA
agtgttgaaaagaccaggcattgggacacacaacactactcttaaaataaaaaaagaatcagagtagcttgtggttataa

SEQ ID NO: 29781 - DNA, 80 bp, synthetic construct
  source 1..80: mol_type = other DNA
gataagactaaaaggagggctgtttctggtctttggaggaatttgatattccattcgatctgagtgtgcaaagcctgagt

SEQ ID NO: 29782 - DNA, 80 bp, synthetic construct
  source 1..80: mol_type = other DNA
cagcctcttaattattgtcttaaaaaattggtataatgaaattgcatttgtagtctttggacatttaaatccagaaggga

SEQ ID NO: 29783 - DNA, 80 bp, synthetic construct; identical to SEQ ID NO: 11345
  source 1..80: mol_type = other DNA

SEQ ID NO: 29784 - DNA, 80 bp, synthetic construct
  source 1..80: mol_type = other DNA
tatccacttgttgattgataggcatttaggttggacccatattttcgcaattatgaattgtactgctgtaaacatgagtg

SEQ ID NO: 29785 - DNA, 80 bp, synthetic construct
  source 1..80: mol_type = other DNA
aactgttccattttcagcacatccatgccaacatctattattttttgactttttaattgtggctattcttgcaggagtaa

SEQ ID NO: 29786 - DNA, 80 bp, synthetic construct
  source 1..80: mol_type = other DNA
tgtttgagttccttgtagatcctggatactagtcctttatcggatgcatagtttatgaatattctttcccactctgtagg

SEQ ID NO: 29787 - DNA, 80 bp, synthetic construct; identical to SEQ ID NO: 11346
  source 1..80: mol_type = other DNA

SEQ ID NO: 29788 - DNA, 80 bp, synthetic construct
  source 1..80: mol_type = other DNA
cattgtctacttgcctatttgtgtaccagtaccaggctgttttagtaactatagccttgtagtataatttgaagtcgggt

SEQ ID NO: 29789 - DNA, 80 bp, synthetic construct
  source 1..80: mol_type = other DNA
agtatggtcattttcatagtattgattctacccatccatgagcatgggatgtgtttccatttgtttgtgtcacctgtgat

SEQ ID NO: 29790 - DNA, 80 bp, synthetic construct
  source 1..80: mol_type = other DNA
cagcttggttgttgtcagcagggacattttctaaagtatagactgtagttccttatcttctatctgtttcttactgtccc

SEQ ID NO: 29791 - DNA, 80 bp, synthetic construct; identical to SEQ ID NO: 11347
  source 1..80: mol_type = other DNA

SEQ ID NO: 29792 - DNA, 80 bp, synthetic construct
  source 1..80: mol_type = other DNA
aaactgtaataattctagcaacctcctgctttttaataatgtattagaaaatttgcctctttttcaaaagcctacagtga

SEQ ID NO: 29793 - DNA, 80 bp, synthetic construct
  source 1..80: mol_type = other DNA
tagcctcgaattcctgggttcaagcaatcctcctccctcaccctcctgagtagctggggctacaggtgcatgctaccatg

SEQ ID NO: 29794 - DNA, 80 bp, synthetic construct
  source 1..80: mol_type = other DNA
aagagaatacgatttgaaaaaggaaaaatgtgaggcaggagagaagaaatacacacacgagctgttttgtaattgctgta

SEQ ID NO: 29795 - DNA, 80 bp, synthetic construct
  source 1..80: mol_type = other DNA
tcttgttatttggatggaatcctaggtatgtggtccagttcatgagttgaacaaaagcatgctcatttaggccaggtaga

SEQ ID NO: 29796 - DNA, 80 bp, synthetic construct; identical to SEQ ID NO: 11348
  source 1..80: mol_type = other DNA

SEQ ID NO: 29797 - DNA, 80 bp, synthetic construct
  source 1..80: mol_type = other DNA
tatagataatattggattatttctggattgtgaaagaagaaggaagaagcatatggaagagaagttttagtagaggggag

SEQ ID NO: 29798 - DNA, 80 bp, synthetic construct
  source 1..80: mol_type = other DNA
actacctatctaactcttcgcattcttgaagtctcagaccaaatcccatcggtttgaaagcctctagggtattctatcta

SEQ ID NO: 29799 - DNA, 80 bp, synthetic construct
  source 1..80: mol_type = other DNA
gactattttgcataaattccagtcttcttttacaatgcctagaatgattgttaccacagaaatattcattacctgggaga

SEQ ID NO: 29800 - DNA, 80 bp, synthetic construct; identical to SEQ ID NO: 11349
  source 1..80: mol_type = other DNA

SEQ ID NO: 29801 - DNA, 80 bp, synthetic construct
  source 1..80: mol_type = other DNA
ttaaaaattacagaaaaatttacatctaaaatttcagcaatgttgtttttgaccaactaaataaattgcatttgaaataa

SEQ ID NO: 29802 - DNA, 80 bp, synthetic construct
  source 1..80: mol_type = other DNA
aaagacaatatagttcttggagaaggtggaatcacactgagtggaggtcaacgagcaagaatttctttagcaaggtgaat

SEQ ID NO: 29803 - DNA, 80 bp, synthetic construct
  source 1..80: mol_type = other DNA
gtatagtatccagatttggtagagattatggttactcagaatctgtgcccgtatcttggtgtcagtgtatttgtttgcct

SEQ ID NO: 29804 - DNA, 80 bp, synthetic construct; identical to SEQ ID NO: 11350
  source 1..80: mol_type = other DNA

SEQ ID NO: 29805 - DNA, 80 bp, synthetic construct
  source 1..80: mol_type = other DNA
caaatgcattaacattgttgggggaggaggtcccttagtagaaacactcttggtccaagcattttaaagctgtcaaagag

SEQ ID NO: 29806 - DNA, 80 bp, synthetic construct
  source 1..80: mol_type = other DNA
attgactcattgatgttttggctcctttcccttactttctgttgctttccaaaagctgagacaggaaactaaccctaact

SEQ ID NO: 29807 - DNA, 80 bp, synthetic construct
  source 1..80: mol_type = other DNA
taattgaggctgttagatgttaacttgccaaaagccatacaggaaaatggtagagtcacagtttgaaccaggtccttttg

SEQ ID NO: 29808 - DNA, 80 bp, synthetic construct
  source 1..80: mol_type = other DNA
gatagagtatatggcttctagacatccaacatagaactgagtttgtgttatcagtttaagatttggttttgctgtaaggt

SEQ ID NO: 29809 - DNA, 80 bp, synthetic construct; identical to SEQ ID NO: 11351
  source 1..80: mol_type = other DNA

SEQ ID NO: 29810 - DNA, 80 bp, synthetic construct
  source 1..80: mol_type = other DNA
aaacagagaatcctatgtacttgagatataagtaaggttactatcaatcacacctgaaaaatttaaatgttatgaagaaa

SEQ ID NO: 29811 - DNA, 80 bp, synthetic construct
  source 1..80: mol_type = other DNA
ttggaacttttatgaatatgatatagagactgaaactacaaggaacaaaatgcaatatcaattatacagttgtggcagca

SEQ ID NO: 29812 - DNA, 80 bp, synthetic construct; identical to SEQ ID NO: 11352
  source 1..80: mol_type = other DNA

SEQ ID NO: 29813 - DNA, 80 bp, synthetic construct
  source 1..80: mol_type = other DNA
tcagtttgtgacttttgctagtttatgccacttacagttagcaaaatcacttcagcagttcttggaatgttgtgaaaagt

SEQ ID NO: 29814 - DNA, 80 bp, synthetic construct
  source 1..80: mol_type = other DNA
cgatgtggtgaccatattgtaatgcatgtagtgaactgtttaaggcaaatcatctacactagatgaccaggaaatagaga

SEQ ID NO: 29815 - DNA, 80 bp, synthetic construct
  source 1..80: mol_type = other DNA
aataaaagaaagacagactgtcccatcatagattgcattttacctcttgagaaatatgttcaccattgttggtatggcag

SEQ ID NO: 29816 - DNA, 80 bp, synthetic construct
  source 1..80: mol_type = other DNA
gggccaggattcaagattacttccattaaaaccttttctcaccgcctcatgctaaaccagtttctctcattgctatactg

SEQ ID NO: 29817 - DNA, 80 bp, synthetic construct; identical to SEQ ID NO: 11353
  source 1..80: mol_type = other DNA

SEQ ID NO: 29818 - DNA, 80 bp, synthetic construct
  source 1..80: mol_type = other DNA
taaaaataaagactttaagcaataaagatgtatatgtatataaaatggctgggttattcctagaagtacctttcttagaa

SEQ ID NO: 29819 - DNA, 80 bp, synthetic construct
  source 1..80: mol_type = other DNA
ctaaaaaaactgatatgtcttagatgattctagtcaggatttacttctagaatagattaaaattctatttgaggagagtc

SEQ ID NO: 29820 - DNA, 80 bp, synthetic construct
  source 1..80: mol_type = other DNA
aaagaaatgaagtacaaatctctagggaccttaaagatcatctaataatttcctcattttctagataaataaactgagag

SEQ ID NO: 29821 - DNA, 80 bp, synthetic construct
  source 1..80: mol_type = other DNA
gaatcatttaaaatataataaaattgtatgatagagattatatgcaataaaacattaacaaaatgctaaaatacgagaca

SEQ ID NO: 29822 - DNA, 80 bp, synthetic construct; identical to SEQ ID NO: 11354
  source 1..80: mol_type = other DNA

SEQ ID NO: 29823 - DNA, 80 bp, synthetic construct
  source 1..80: mol_type = other DNA
atcaactctatacgaaaattttccattgtgcaaaagactcccttacaaatgaatggcatcgaagaggattctgatgagcc

SEQ ID NO: 29824 - DNA, 80 bp, synthetic construct
  source 1..80: mol_type = other DNA
cgaaagacaacagcatccacacgaaaagtgtcactggcccctcaggcaaacttgactgaactggatatatattcaagaag

SEQ ID NO: 29825 - DNA, 80 bp, synthetic construct
  source 1..80: mol_type = other DNA
aacgaagaagacttaaaggtaggtatacatcgcttgggggtatttcaccccacagaatgcaattgagtagaatgcaatat

SEQ ID NO: 29826 - DNA, 80 bp, synthetic construct
  source 1..80: mol_type = other DNA
tctttttgcaatggacatatctcttcccataaaatgggaaaggatttagtttttggtcctctactaagccagtgataact

SEQ ID NO: 29827 - DNA, 80 bp, synthetic construct; identical to SEQ ID NO: 11355
  source 1..80: mol_type = other DNA

SEQ ID NO: 29828 - DNA, 80 bp, synthetic construct
  source 1..80: mol_type = other DNA
aggagagtttttgttgttttagtagaaaacttaatgccttggatgaaatgagccatgggcagggttgtaatgaattgata

SEQ ID NO: 29829 - DNA, 80 bp, synthetic construct
  source 1..80: mol_type = other DNA
gtgtaattttagtatttctaaactttatgaaggtttcctaaatgataattcatctatatagtgtttttttgtgtgtttgt

SEQ ID NO: 29830 - DNA, 80 bp, synthetic construct
  source 1..80: mol_type = other DNA
taatttttgtatttttagtagagaaggggtttcatcatgttgaccaggctggtcttgaactcctgaccttgtgatccacc

SEQ ID NO: 29831 - DNA, 80 bp, synthetic construct; identical to SEQ ID NO: 11356
  source 1..80: mol_type = other DNA

SEQ ID NO: 29832 - DNA, 80 bp, synthetic construct
  source 1..80: mol_type = other DNA
cataggagcccttctttgtgattcatagcactttcccatgagttttgttgattttgtgagaaacaaaactctttttcctt

SEQ ID NO: 29833 - DNA, 80 bp, synthetic construct
  source 1..80: mol_type = other DNA
atgagctttcagtctattggaagacctttatagctagaagtatactgaactgtacttgtccatggacccctgaagaaaca

SEQ ID NO: 29834 - DNA, 80 bp, synthetic construct
  source 1..80: mol_type = other DNA
ctcatttttaataaagctgtgttgctccagtagacattattctggctatagaatgacatcatacatggcatttataatga

SEQ ID NO: 29835 - DNA, 80 bp, synthetic construct; identical to SEQ ID NO: 11357
  source 1..80: mol_type = other DNA

SEQ ID NO: 29836 - DNA, 80 bp, synthetic construct
  source 1..80: mol_type = other DNA
cacatgtatacatgtataagtatgcatatatacacacatatatcactatatgtatatatgtatatattacatatatttgt

SEQ ID NO: 29837 - DNA, 80 bp, synthetic construct
  source 1..80: mol_type = other DNA
taagagattcgaaagctcaaagtagaaggcttttatttggattgaaattaaacaattagaatcactgttgatattttatt

SEQ ID NO: 29838 - DNA, 80 bp, synthetic construct; identical to SEQ ID NO: 11358
  source 1..80: mol_type = other DNA

SEQ ID NO: 29839 - DNA, 80 bp, synthetic construct
  source 1..80: mol_type = other DNA
tatctctaaataaataaataagtaaataaataaacagcaacaacaaaaacactcaaagcaaatctgtactaaattttgaa

SEQ ID NO: 29840 - DNA, 80 bp, synthetic construct
  source 1..80: mol_type = other DNA
gctccctcagcttgcggggaggtgtggagggagaggcgctgggggaactggggctgcgggtgccttgtgggccagcgcga

SEQ ID NO: 29841 - DNA, 80 bp, synthetic construct
  source 1..80: mol_type = other DNA
gcagcctgccatgcctgagcctccccccaacctgccgctgcagtgggctcctgcgtggcccaagcctcctgacgagcacc

SEQ ID NO: 29842 - DNA, 80 bp, synthetic construct
  source 1..80: mol_type = other DNA
tttatgtctagctaagggattgtaaatacaccaatcagcactctgtatctagctcaaggtttgtaaacacaccaatcagc

SEQ ID NO: 29843 - DNA, 80 bp, synthetic construct; identical to SEQ ID NO: 11359
  source 1..80: mol_type = other DNA

SEQ ID NO: 29844 - DNA, 80 bp, synthetic construct
  source 1..80: mol_type = other DNA
agtggcaacctgctggggtctgtagaagctttgttcttttgttctttgcaataaattttgctactgctcactttttgggt

SEQ ID NO: 29845 - DNA, 80 bp, synthetic construct
  source 1..80: mol_type = other DNA
gaacaaactcaggacacgcggcctttaagaactataacactcactgcaagggtccttggcttcattctcgaagtcagtga

SEQ ID NO: 29846 - DNA, 80 bp, synthetic construct; identical to SEQ ID NO: 11360
  source 1..80: mol_type = other DNA

SEQ ID NO: 29847 - DNA, 80 bp, synthetic construct
  source 1..80: mol_type = other DNA
aaatcacacacttgcttacagaaattttgttgtcttcaatgtccccattgtggtttctttaccaagcctctactgttctt

SEQ ID NO: 29848 - DNA, 80 bp, synthetic construct
  source 1..80: mol_type = other DNA
ggcagggagcatcagtgggtgatgtggctgggaggctgaatggagagcatttgttcttcagttatctatagaaggcagct

SEQ ID NO: 29849 - DNA, 80 bp, synthetic construct
  source 1..80: mol_type = other DNA
caccatatgggcacaacaaaacacatctgtggcttggattcagcttgtgaatgattactgcagatatttattctagagga

SEQ ID NO: 29850 - DNA, 80 bp, synthetic construct; identical to SEQ ID NO: 11361
  source 1..80: mol_type = other DNA

SEQ ID NO: 29851 - DNA, 80 bp, synthetic construct
  source 1..80: mol_type = other DNA
tggtaatacatgttatttgccctgctgttgtaaataaacaaaccaaatggaggcttgatgcaagatgcagtgtagcatag

SEQ ID NO: 29852 - DNA, 80 bp, synthetic construct
  source 1..80: mol_type = other DNA
atacatcatgattatgaaacacttaatgtagggcttgctacataatgagcaaggtttgttgctgttatcattaatatcct

SEQ ID NO: 29853 - DNA, 80 bp, synthetic construct
  source 1..80: mol_type = other DNA
ttaaaatttaccacattaatgtctgccagtcatgccaaatgaccaacatgaatgtgaataaaactcagtctgtgcccatt

SEQ ID NO: 29854 - DNA, 80 bp, synthetic construct; identical to SEQ ID NO: 11362
  source 1..80: mol_type = other DNA

SEQ ID NO: 29855 - DNA, 80 bp, synthetic construct
  source 1..80: mol_type = other DNA
caattgatattgcccttttctggaaaagaaataatgtaatatatgatgaatagttttggccagtatcctctagaccttgc

SEQ ID NO: 29856 - DNA, 80 bp, synthetic construct
  source 1..80: mol_type = other DNA
ttttagactaagctcctttatgataccagtgtgcccatttctcattaccattgaaatgtctcatgagcatgtcacattct

SEQ ID NO: 29857 - DNA, 80 bp, synthetic construct
  source 1..80: mol_type = other DNA
aatccaattgagagccttctactcatgaccagagaacctaaagaaaggttaagatacatttattccttggtgtaagtgat

SEQ ID NO: 29858 - DNA, 80 bp, synthetic construct
  source 1..80: mol_type = other DNA
ttgttagcacttaccattttggaaagagagtgactctacttttgtatttggtaacattttccctactacagggcagtatc

SEQ ID NO: 29859 - DNA, 80 bp, synthetic construct; identical to SEQ ID NO: 11363
  source 1..80: mol_type = other DNA

SEQ ID NO: 29860 - DNA, 80 bp, synthetic construct
  source 1..80: mol_type = other DNA
tgactaatagtaataattttagggcagctttatgacagttggtttatgttttagggtgtcatttgacttgtgaagcattg

SEQ ID NO: 29861 - DNA, 80 bp, synthetic construct
  source 1..80: mol_type = other DNA
aaatgaaatgacagaacttgcttactcaattgcttctatatacaccaaatatttttttaaagtattatgttaagtccttg

SEQ ID NO: 29862 - DNA, 80 bp, synthetic construct
  source 1..80: mol_type = other DNA
accttcaaagaatgttggcaatgccagcattattaacactcctctagttagaacaaagaggaaatgtaataacaaaacat

SEQ ID NO: 29863 - DNA, 80 bp, synthetic construct; identical to SEQ ID NO: 11364
  source 1..80: mol_type = other DNA

SEQ ID NO: 29864 - DNA, 80 bp, synthetic construct
  source 1..80: mol_type = other DNA
ggtataaaataagacttgttgatatcttattccaagcatatttgtttctctcctatttatttttattctgtgttcatttc

SEQ ID NO: 29865 - DNA, 80 bp, synthetic construct
  source 1..80: mol_type = other DNA
aaaagaactacaaaaatcacagttgtttaaaaaggttttttgtttgtttatatatggtgcagaacatttgttccttagcc

SEQ ID NO: 29866 - DNA, 80 bp, synthetic construct; identical to SEQ ID NO: 11365
  source 1..80: mol_type = other DNA

SEQ ID NO: 29867 - DNA, 80 bp, synthetic construct
  source 1..80: mol_type = other DNA
gccactgtgcctggcctgaaactcataattcatttccattaatattaatctcaccttttccaataattaattgatttcac

SEQ ID NO: 29868 - DNA, 80 bp, synthetic construct
  source 1..80: mol_type = other DNA
agctgtgatcttggctttcttgtgaggttcaatagtttctattgagtaaaggagagaaatggcagagaatttacttcagt

SEQ ID NO: 29869 - DNA, 80 bp, synthetic construct
  source 1..80: mol_type = other DNA
tgtgggcatgggaggaataggtgaagatgttagaaaaaaaatcaactgtgtcttgttccattccaggtggctgcttcttt

SEQ ID NO: 29870 - DNA, 80 bp, synthetic construct; identical to SEQ ID NO: 11366
  source 1..80: mol_type = other DNA

SEQ ID NO: 29871 - DNA, 80 bp, synthetic construct
  source 1..80: mol_type = other DNA
aaattgtgagcatgtgcagctcctgcagtttctaaagaatatagttctgttcagtttctgtgaaacacaataaaaatatt

SEQ ID NO: 29872 - DNA, 80 bp, synthetic construct
  source 1..80: mol_type = other DNA
tatttagactcaagtttagttccatttacatgtattggaaattcagtaagtaactttggctgccaaataacgatttccta

SEQ ID NO: 29873 - DNA, 80 bp, synthetic construct
  source 1..80: mol_type = other DNA
ccactggtgcatactctaatcacagtgtcgaaaattttacaccacaaaatgttacattctgttcttcaagcacctatgtc

SEQ ID NO: 29874 - DNA, 80 bp, synthetic construct
  source 1..80: mol_type = other DNA
aggcatgtgccctttgttgaacctccatttgactggcatgcacatgtctcagatattataggttatcatatattgttgct

SEQ ID NO: 29875 - DNA, 80 bp, synthetic construct; identical to SEQ ID NO: 11367
  source 1..80: mol_type = other DNA

SEQ ID NO: 29876 - DNA, 80 bp, synthetic construct
  source 1..80: mol_type = other DNA
gggggatcccaaatgtattttaaaactatttttatatcatcatatttgaagtaatagaaagtcagagtagcagaataaag

SEQ ID NO: 29877 - DNA, 80 bp, synthetic construct
  source 1..80: mol_type = other DNA
atgaaaagatgagtaaggcacagttcttgccctggagaaggtcacaggtgagaggaggagttgacacagaaacatttgat

SEQ ID NO: 29878 - DNA, 80 bp, synthetic construct
  source 1..80: mol_type = other DNA
ttgccgcatttgcatatactcatcaccatcctctgttttggagctaagaattttagactcaagatgtctaattaagttga

SEQ ID NO: 29879 - DNA, 80 bp, synthetic construct; identical to SEQ ID NO: 11368
  source 1..80: mol_type = other DNA

SEQ ID NO: 29880 - DNA, 80 bp, synthetic construct
  source 1..80: mol_type = other DNA
aagctcctcattccctttaacgctgttcatagttggttccaaaccatttgaaatataataagcaccaggatggttttttc

SEQ ID NO: 29881 - DNA, 80 bp, synthetic construct
  source 1..80: mol_type = other DNA
tttttgcttggggtatgggtgatacaaaataaatgtggcatgaacccactgacctctagcaatttataacctagaaaaag

SEQ ID NO: 29882 - DNA, 80 bp, synthetic construct; identical to SEQ ID NO: 11369
  source 1..80: mol_type = other DNA

SEQ ID NO: 29883 - DNA, 80 bp, synthetic construct
  source 1..80: mol_type = other DNA
tactaggtaggtgggttgaggccaaattatgcaaggcattaaatattaaactaggaattttggactttatcctgcagttt

SEQ ID NO: 29884 - DNA, 80 bp, synthetic construct
  source 1..80: mol_type = other DNA
cttattcacctcagtaatttcagtgcctagcattgtgcctggtacaaagtggacacttgtatataaccttttttaattga

SEQ ID NO: 29885 - DNA, 80 bp, synthetic construct
  source 1..80: mol_type = other DNA
tcaaaaaggtatggaagtcagaggagaaggagacccctatgttatagaatacaaatggaagggaaatgatgacaacagta

SEQ ID NO: 29886 - DNA, 80 bp, synthetic construct
  source 1..80: mol_type = other DNA
acaataacttgaacacataattatttagaatgtttggaaagaaacaaaaatttctaagtctatctgattctatttgctaa

SEQ ID NO: 29887 - DNA, 80 bp, synthetic construct; identical to SEQ ID NO: 11370
  source 1..80: mol_type = other DNA

SEQ ID NO: 29888 - DNA, 80 bp, synthetic construct
  source 1..80: mol_type = other DNA
tgaggcaatcccacatttagatgtaatagctgtctacttgggagtgatttgagaggcacaaaggaccatctttcccaaaa

SEQ ID NO: 29889 - DNA, 80 bp, synthetic construct
  source 1..80: mol_type = other DNA
cattcccccacagtaaggaccataaggaagggacagaagcaaagataagttttagaacaaaagagaggggaaagaaaaaa

SEQ ID NO: 29890 - DNA, 80 bp, synthetic construct
  source 1..80: mol_type = other DNA
aaggggagtggaggaggtgaaagtgaccttgggacattaggtctccataagtgacaggatttaaggagtgttgtaagctg

SEQ ID NO: 29891 - DNA, 80 bp, synthetic construct; identical to SEQ ID NO: 11371
  source 1..80: mol_type = other DNA

SEQ ID NO: 29892 - DNA, 80 bp, synthetic construct
  source 1..80: mol_type = other DNA
tactgtcccaagtgaactttggcattttggatatccttcagttgttctgtttaaagatataacttagaagcagctgatgg

SEQ ID NO: 29893 - DNA, 80 bp, synthetic construct
  source 1..80: mol_type = other DNA
tgtgaaagtatttgccaatggtgcctcttgataattatttgaggctcacttcagaactcctctggaagggttaattttta

SEQ ID NO: 29894 - DNA, 80 bp, synthetic construct
  source 1..80: mol_type = other DNA
tcagcctccagagtagctgggattacaggcgcgcaccaccatgcctggataatttttgtattattactagagatggggtt

SEQ ID NO: 29895 - DNA, 80 bp, synthetic construct; identical to SEQ ID NO: 11372
  source 1..80: mol_type = other DNA

SEQ ID NO: 29896 - DNA, 80 bp, synthetic construct
  source 1..80: mol_type = other DNA
agcagatctgttgcacaaaataaagcatacctataaattttctttttttaaaaaaaagtctctgttcactctattttcta

SEQ ID NO: 29897 - DNA, 80 bp, synthetic construct
  source 1..80: mol_type = other DNA
attttatacctgttgattagtatctccccatttccctctctcccctgtcctgttacccatggttctgttctttgcttctt

SEQ ID NO: 29898 - DNA, 80 bp, synthetic construct
  source 1..80: mol_type = other DNA
attttctacagattcccactattttaccttgagcagacacttatcttgaagggtctcagatttgtcacttgtagaatggg

SEQ ID NO: 29899 - DNA, 80 bp, synthetic construct
  source 1..80: mol_type = other DNA
tggttttttttaatcctttctgcagacagttactttatactttattcaaatggattattgtgaagtacatgttagcggac

SEQ ID NO: 29900 - DNA, 80 bp, synthetic construct; identical to SEQ ID NO: 11373
  source 1..80: mol_type = other DNA

SEQ ID NO: 29901 - DNA, 80 bp, synthetic construct
  source 1..80: mol_type = other DNA
catagagcctatgaaaaatgtacttgcaaatggctactttctgactaggaatagaatggggagagtatttagtccaacaa

SEQ ID NO: 29902 - DNA, 80 bp, synthetic construct; identical to SEQ ID NO: 12701
  source 1..80: mol_type = other DNA

SEQ ID NO: 29903 - DNA, 80 bp, synthetic construct
  source 1..80: mol_type = other DNA
aaaagtttgaggtgtttaaagtatgcaaaaaaaaaaaaagaaataaatcactgacacactttgtccactttgcaatgtga

SEQ ID NO: 29904 - DNA, 80 bp, synthetic construct; identical to SEQ ID NO: 11374
  source 1..80: mol_type = other DNA

SEQ ID NO: 29905 - DNA, 80 bp, synthetic construct
  source 1..80: mol_type = other DNA
cattttggttttaaaataggtatatagaatcttaccacagttggtgtacaggacattcatttataataaacttatatcag

SEQ ID NO: 29906 - DNA, 80 bp, synthetic construct
  source 1..80: mol_type = other DNA
agggaatcacattttgcagtgacagccttagtgtgggtgcattttcaggcaatactttttcagtatatttctgctttgta

SEQ ID NO: 29907 - DNA, 80 bp, synthetic construct
  source 1..80: mol_type = other DNA
gttcccatctctggtagccaagtaaaaaaagagggtaactcattaataaaataacaaatcatatctattcaaagaatggc

SEQ ID NO: 29908 - DNA, 80 bp, synthetic construct; identical to SEQ ID NO: 11375
  source 1..80: mol_type = other DNA

SEQ ID NO: 29909 - DNA, 80 bp, synthetic construct
  source 1..80: mol_type = other DNA
tttaagtaaaaaattttcaatgaataaaatgctgcattctataggttatcaatttttgatatctttagagtttagtaatt

SEQ ID NO: 29910 - DNA, 80 bp, synthetic construct
  source 1..80: mol_type = other DNA
ttttcacagttttaaaaaccgatgcacacagattgtcagatagcaattctgtgattgaaggggaaatatgtcacctcttc

SEQ ID NO: 29911 - DNA, 80 bp, synthetic construct
  source 1..80: mol_type = other DNA
atctaattgtgagttttacacaaagaaaaactgtcacagaaaagaaagacagtgtcacatttttcaaaagaaaaagaaga

SEQ ID NO: 29912 - DNA, 80 bp, synthetic construct; identical to SEQ ID NO: 11376
  source 1..80: mol_type = other DNA

SEQ ID NO: 29913 - DNA, 80 bp, synthetic construct
  source 1..80: mol_type = other DNA
ctgggtccattcctttttgtggttgcttcattcctttctctctctgaagactggtttttctggtctaccagggctatgcc

SEQ ID NO: 29914 - DNA, 80 bp, synthetic construct
  source 1..80: mol_type = other DNA
cctttgttgttctctcagctagggcagtgggaaatgactctatgaaaggaatatacatgggcaggcaaatgtactaatcc

SEQ ID NO: 29915 - DNA, 80 bp, synthetic construct
  source 1..80: mol_type = other DNA
ttattaggggcaataatcaaaacatttaacaatcattatagtacagaacttaccaatcaaatcagatgctcagccggagt

SEQ ID NO: 29916 - DNA, 80 bp, synthetic construct; identical to SEQ ID NO: 11377
  source 1..80: mol_type = other DNA

SEQ ID NO: 29917 - DNA, 80 bp, synthetic construct
  source 1..80: mol_type = other DNA
ggggtctagataaatcttgcctatatgaaaataatttaatactacatgcagatatatgctgtgtatattatgccttctgt

SEQ ID NO: 29918 - DNA, 80 bp, synthetic construct
  source 1..80: mol_type = other DNA
gagaatttctatggccataatactgaacacatgaattttaattagctgtcctctttagccctaaaaaaaaaattactgta

SEQ ID NO: 29919 - DNA, 80 bp, synthetic construct; identical to SEQ ID NO: 11378
  source 1..80: mol_type = other DNA

SEQ ID NO: 29920 - DNA, 80 bp, synthetic construct
  source 1..80: mol_type = other DNA
cctacccattaccaacaacacctccaataccagtaacattttttaaaaagggcaacactttcctaatattcaatcgctct

SEQ ID NO: 29921 - DNA, 80 bp, synthetic construct
  source 1..80: mol_type = other DNA
cacagaagagagaaataacatgaggttcatttacgtcttttgtgcatctataggagaaggagaaggaagagttggtatta

SEQ ID NO: 29922 - DNA, 80 bp, synthetic construct
  source 1..80: mol_type = other DNA
ccgtatattgagcttaagaaataaaacattacagataaattgagggtcactgtgtatctgtcattaaatccttatctctt

SEQ ID NO: 29923 - DNA, 80 bp, synthetic construct
  source 1..80: mol_type = other DNA
aagtctgttgtactgatatatatccccatcaagagagtacaagaattctcatagctatgtatcttcaacaacacttggtg

SEQ ID NO: 29924 - DNA, 80 bp, synthetic construct; identical to SEQ ID NO: 11379
  source 1..80: mol_type = other DNA

SEQ ID NO: 29925 - DNA, 80 bp, synthetic construct
  source 1..80: mol_type = other DNA
acctttcttattcctaaagtgtttatcattgccttctgtctttctgcttgataaatattgccacacatttgtatacttta

SEQ ID NO: 29926 - DNA, 80 bp, synthetic construct
  source 1..80: mol_type = other DNA
catttactcatttttgtttaaaaaatcaaatgcatatttttcaatcagactatatggttggtctggatagcttcatcatt

SEQ ID NO: 29927 - DNA, 80 bp, synthetic construct
  source 1..80: mol_type = other DNA
gagacagtgttcatgttcccaaaccacacacatttattcagctataaaatttgtatgatcaactcctgtcagaacaaaca

SEQ ID NO: 29928 - DNA, 80 bp, synthetic construct; identical to SEQ ID NO: 11380
  source 1..80: mol_type = other DNA

SEQ ID NO: 29929 - DNA, 80 bp, synthetic construct
  source 1..80: mol_type = other DNA
caccatgggtgtgtacaattcctttgtccttgctgtattaattttcttggtttacatagtagcctctacacattgatgtc

SEQ ID NO: 29930 - DNA, 80 bp, synthetic construct
  source 1..80: mol_type = other DNA
ctccatgaaagtttctgtaaggtattttcattcctctagtttttcacatgtgcatcctggctttgtgacctgtgctttga

SEQ ID NO: 29931 - DNA, 80 bp, synthetic construct; identical to SEQ ID NO: 11381
  source 1..80: mol_type = other DNA

SEQ ID NO: 29932 - DNA, 80 bp, synthetic construct
  source 1..80: mol_type = other DNA
tcagcatatgttgagagtaggaaatagataggactatgccctcaaattttacgtttatatgatgttaatcctaaaggtcc

SEQ ID NO: 29933 - DNA, 80 bp, synthetic construct
  source 1..80: mol_type = other DNA
ttacccatctggcctagtttagacaaaaacacagagtcaaatgtcaacagaattctgaagttataaaaatgacagtgtgg

SEQ ID NO: 29934 - DNA, 80 bp, synthetic construct
  source 1..80: mol_type = other DNA
accttttttattagattttcctacgaaattccttattatattccctaagatagctttttcccaccttcttcttccttctc

SEQ ID NO: 29935 - DNA, 80 bp, synthetic construct; identical to SEQ ID NO: 11382
  source 1..80: mol_type = other DNA

SEQ ID NO: 29936 - DNA, 80 bp, synthetic construct
  source 1..80: mol_type = other DNA
acaacctacttcattttatttccatcagccccataactcaggatcaacatcttgccagagccaatttccttgtctccctt

SEQ ID NO: 29937 - DNA, 80 bp, synthetic construct
  source 1..80: mol_type = other DNA
cagctatatctcagccctgttctactgacactctctagctgttattttctaaacccatgtttcagaaaccatatcttgat

SEQ ID NO: 29938 - DNA, 80 bp, synthetic construct
  source 1..80: mol_type = other DNA
gaacctgggaggtggaggtttcagtgagccgagatcctgccactgcactccagcctgagcaatagaggagactccgtctc

SEQ ID NO: 29939 - DNA, 80 bp, synthetic construct; identical to SEQ ID NO: 11383
  source 1..80: mol_type = other DNA

SEQ ID NO: 29940 - DNA, 80 bp, synthetic construct
  source 1..80: mol_type = other DNA
taatttaataattcctattggaacaccccatgttaggggatttccagttatttcaattgatatctcaatgttttaaagat

SEQ ID NO: 29941 - DNA, 80 bp, synthetic construct
  source 1..80: mol_type = other DNA
agttgttattgctaaagcaattatcttacatcttttcctccaaaacaaagttatgtgctggtttattttctttgtactca

SEQ ID NO: 29942 - DNA, 80 bp, synthetic construct
  source 1..80: mol_type = other DNA
tcacactcataatcacattgttggaaagaagccattgacaattcagtttgtttcacaactgtctatcacatagtgagcac

SEQ ID NO: 29943 - DNA, 80 bp, synthetic construct; identical to SEQ ID NO: 11384
  source 1..80: mol_type = other DNA

SEQ ID NO: 29944 - DNA, 80 bp, synthetic construct
  source 1..80: mol_type = other DNA
tttgtccttttactgcctgtgtttgttttgggttccagtaaagatcaagtgactgattgtaccatgaccaacaagaagcc

SEQ ID NO: 29945 - DNA, 80 bp, synthetic construct
  source 1..80: mol_type = other DNA
ccttatttttctgttttcacaaatttttgtggtatattttcctctcatgacctctgtctcaagacttctttccatccatc

SEQ ID NO: 29946 - DNA, 80 bp, synthetic construct
  source 1..80: mol_type = other DNA
aaatgaaacagtttgatgagaagttttctaaggttccttcaagctttgacaatctctctcttctggatctttttcccatg

SEQ ID NO: 29947 - DNA, 80 bp, synthetic construct
  source 1..80: mol_type = other DNA
ttgtcagagctgatcaaagaactctgaaccagtgtgttactagaactaacaaagaaaatgccattatgatgttctagagt

SEQ ID NO: 29948 - DNA, 80 bp, synthetic construct; identical to SEQ ID NO: 11385
  source 1..80: mol_type = other DNA

SEQ ID NO: 29949 - DNA, 80 bp, synthetic construct
  source 1..80: mol_type = other DNA
gctgaggcaggagaatcgattgaacccgggagatggaggttgcagggagctgagatagctccactgcactccagcctggt

SEQ ID NO: 29950 - DNA, 80 bp, synthetic construct
  source 1..80: mol_type = other DNA
gtgtatcaagcaagacttgtgaaccactgaactacatgctaagactcattttagctctgattttctgtgagtcatagcag

SEQ ID NO: 29951 - DNA, 80 bp, synthetic construct; identical to SEQ ID NO: 11386
  source 1..80: mol_type = other DNA

SEQ ID NO: 29952 - DNA, 80 bp, synthetic construct
  source 1..80: mol_type = other DNA
ttggattcctctttttgcaaattcttttgaaatattttcagtggaagctacatagatccaattgtattcaccaagctaga

SEQ ID NO: 29953 - DNA, 80 bp, synthetic construct
  source 1..80: mol_type = other DNA
ttggtgttaacttgggatatgccttttgtcatgttgcaaatagattttgtttctgttttgtgaagatcaccatctctgtc

SEQ ID NO: 29954 - DNA, 80 bp, synthetic construct
  source 1..80: mol_type = other DNA
catggcatttgactgactttttatgtgctctagtcatgtaagtaatagatgtggaaacatagaccagagtttcaagaaca

SEQ ID NO: 29955 - DNA, 80 bp, synthetic construct
  source 1..80: mol_type = other DNA
aagcatagtttttgcctactgggaaggatttatgatttaaaagccctaaatctccccttttatgtacttcatacttagaa

SEQ ID NO: 29956 - DNA, 80 bp, synthetic construct; identical to SEQ ID NO: 11387
  source 1..80: mol_type = other DNA

SEQ ID NO: 29957 - DNA, 80 bp, synthetic construct
  source 1..80: mol_type = other DNA
gtaaggctgagatcaggctgtgaagctatctttttgtcaagactgtcataattccaaaacactttgttcttctaatgctt

SEQ ID NO: 29958 - DNA, 80 bp, synthetic construct
  source 1..80: mol_type = other DNA
aatttgggctaaactctaatatacagaggtctgcacaacttatgtcaagtattcttccccacaaatgaagaatggggttc

SEQ ID NO: 29959 - DNA, 80 bp, synthetic construct
  source 1..80: mol_type = other DNA
actgttttctgtgcacaggaagcagcaggctggggttaaggagtttgccaatccagtcattctgataattgctgaatatg

SEQ ID NO: 29960 - DNA, 80 bp, synthetic construct; identical to SEQ ID NO: 11388
  source 1..80: mol_type = other DNA

SEQ ID NO: 29961 - DNA, 80 bp, synthetic construct
  source 1..80: mol_type = other DNA
ccactagatggggagggatgttttgaactgtccattgtttgactataacaaggaacgctttgaacgaggttactatcata

SEQ ID NO: 29962 - DNA, 80 bp, synthetic construct
  source 1..80: mol_type = other DNA
ttttttaagagttccccaaattacttaagcttcaggctccacaaaacctggatctacccctggtagcagctatgaatctt

SEQ ID NO: 29963 - DNA, 80 bp, synthetic construct; identical to SEQ ID NO: 11389
  source 1..80: mol_type = other DNA

SEQ ID NO: 29964 - DNA, 80 bp, synthetic construct
  source 1..80: mol_type = other DNA
tatatcaagccatctgtgcatagacattccaagcaaccatgttcactctactgctcccatgtcatgcaaggcacaggaag

SEQ ID NO: 29965 - DNA, 80 bp, synthetic construct
  source 1..80: mol_type = other DNA
cccatttatggaccccatttatggggtgaggagagtgactgcttctaatccatcataatttttgtctatggctactgttt

SEQ ID NO: 29966 - DNA, 80 bp, synthetic construct
  source 1..80: mol_type = other DNA
ttgaaacttaaatgatcagaattgatttgttctgctctggttctgatgtggcctctccttccagaggtactggaggtaga

SEQ ID NO: 29967 - DNA, 80 bp, synthetic construct; identical to SEQ ID NO: 11390
  source 1..80: mol_type = other DNA

SEQ ID NO: 29968 - DNA, 80 bp, synthetic construct
  source 1..80: mol_type = other DNA
gtcacatttgacattagaagttctggattcaccctctatggtgagcttcactaatggagaatgtaatttgcaatgctcaa

SEQ ID NO: 29969 - DNA, 80 bp, synthetic construct
  source 1..80: mol_type = other DNA
gttaaatgttttatagattgtttggaagtattaaaatgtgaaggatttttgttatatagtgtctttcctatcttgcttaa

SEQ ID NO: 29970 - DNA, 80 bp, synthetic construct
  source 1..80: mol_type = other DNA
taactacatctctggcagtttcatctcaatagtagttgtaattttatctcccagaccttattatagactagcagctctct

SEQ ID NO: 29971 - DNA, 80 bp, synthetic construct; identical to SEQ ID NO: 11391
  source 1..80: mol_type = other DNA

SEQ ID NO: 29972 - DNA, 80 bp, synthetic construct
  source 1..80: mol_type = other DNA
gcaatacagttagaattgctaagatggaattttaacgttcaattaaggatctatctctaaactcctctgctttatccacc

SEQ ID NO: 29973 - DNA, 80 bp, synthetic construct
  source 1..80: mol_type = other DNA
tgtaaaggaaagctagttaagtttttgactgaataaagccagcatcaataattactagtaagactaaaaataagagcagt

SEQ ID NO: 29974 - DNA, 80 bp, synthetic construct
  source 1..80: mol_type = other DNA
atgtattgttcaaatatatattgggtacttattatatgccaagttgtttttaaaatcacattccaaattcccgtaagtca

SEQ ID NO: 29975 - DNA, 80 bp, synthetic construct
  source 1..80: mol_type = other DNA
atgcaattatattttccttagcactaaaaatgaatatttaagtaatttatattaaaagtgtaattatttaactgcagatg

SEQ ID NO: 29976 - DNA, 80 bp, synthetic construct; identical to SEQ ID NO: 11392
  source 1..80: mol_type = other DNA

SEQ ID NO: 29977 - DNA, 80 bp, synthetic construct
  source 1..80: mol_type = other DNA
tatatccaattatttcctgttagttcattgaaaagcccgacaaataaccaagtgacaaatagcaagtgttgcattttaca

SEQ ID NO: 29978 - DNA, 80 bp, synthetic construct
  source 1..80: mol_type = other DNA
gccaacagaaggtaaacctaccaagtcaaccaaaccatacaagaatggccaactctcgaaagttatgattattgagaatt

SEQ ID NO: 29979 - DNA, 80 bp, synthetic construct
  source 1..80: mol_type = other DNA
gactgtgttcagtaagtgaatcccagtagcctgaagcaatgtgttagcagaatctatttgtaacattattattgtacagt

SEQ ID NO: 29980 - DNA, 80 bp, synthetic construct
  source 1..80: mol_type = other DNA
cttgaaaatgtcttccaaaaatatcttattgctgactccatctattgtcttaaattttatctaagttccattctgccaaa

SEQ ID NO: 29981 - DNA, 80 bp, synthetic construct; identical to SEQ ID NO: 11393
  source 1..80: mol_type = other DNA

SEQ ID NO: 29982 - DNA, 80 bp, synthetic construct
  source 1..80: mol_type = other DNA
ctctctgtggttaattgcaaacacagatacaaaaatatagagagagatacagttagtaaagatgttaggtcaccgttact

SEQ ID NO: 29983 - DNA, 80 bp, synthetic construct
  source 1..80: mol_type = other DNA
tggcttaaaacagaacaccataggtattcatatcagtgaataccataggtagctgaaagtgttttttcctggggtcgcca

SEQ ID NO: 29984 - DNA, 80 bp, synthetic construct
  source 1..80: mol_type = other DNA
ctttgctgatgctcatttgtccactaaattaaactcaagcaagccctagtaaagtaatagaatttgtggagtcctcatta

SEQ ID NO: 29985 - DNA, 80 bp, synthetic construct; identical to SEQ ID NO: 11394
  source 1..80: mol_type = other DNA

SEQ ID NO: 29986 - DNA, 80 bp, synthetic construct
  source 1..80: mol_type = other DNA
tgagcaaaggagcttggctttatagacccaaaaaaagggccaaaggaagcagaaacaaagaacaataagagaattggtca

SEQ ID NO: 29987 - DNA, 80 bp, synthetic construct
  source 1..80: mol_type = other DNA
tcttagaaggccggataacaactgagttttgctttggtgaacatgggtgactccatttttacttttagtctggtctgttg

SEQ ID NO: 29988 - DNA, 80 bp, synthetic construct
  source 1..80: mol_type = other DNA
ggcagaaatgattgcttttattttccacaatggaggaaactgaggttcaattaagtgagtaaggaagcagggatcttaaa

SEQ ID NO: 29989 - DNA, 80 bp, synthetic construct; identical to SEQ ID NO: 11395
  source 1..80: mol_type = other DNA

SEQ ID NO: 29990 - DNA, 80 bp, synthetic construct
  source 1..80: mol_type = other DNA
ccaaaatccttgaaatgcccttgaataagagatatccaggtaaatgctatgggaattcagaggaggaagcagttagtatc

SEQ ID NO: 29991 - DNA, 80 bp, synthetic construct
  source 1..80: mol_type = other DNA
ccttagttctattaaaaacccgggttcttgtcacatgatccggaaaatttaggcacacagatacattgaagcatgagtag

SEQ ID NO: 29992 - DNA, 80 bp, synthetic construct
  source 1..80: mol_type = other DNA
ttagtgtgcatgtggggctccagtccacggtgggcatgcccagacaagccttgggcaggttccctcatctgtgcaaaagc

SEQ ID NO: 29993 - DNA, 80 bp, synthetic construct; identical to SEQ ID NO: 11396
  source 1..80: mol_type = other DNA

SEQ ID NO: 29994 - DNA, 80 bp, synthetic construct
  source 1..80: mol_type = other DNA
gaggcactgtgcccaacctccaattttggattttgagagctaaagcaatatagtcgaaaactcagataatccaggtagat

SEQ ID NO: 29995 - DNA, 80 bp, synthetic construct
  source 1..80: mol_type = other DNA
atcaagcccctatcaaccataccccagtttctatttatgaagtggcttttgggaagtccctaaagacaggagtggggaaa

SEQ ID NO: 29996 - DNA, 80 bp, synthetic construct
  source 1..80: mol_type = other DNA
atgtaatgaagccacccgataagccttaactggaactttttggagagcctccaggctggtgaagacattgaggtgctcag

SEQ ID NO: 29997 - DNA, 80 bp, synthetic construct; identical to SEQ ID NO: 11397
  source 1..80: mol_type = other DNA

SEQ ID NO: 29998 - DNA, 80 bp, synthetic construct
  source 1..80: mol_type = other DNA
tggtgtcagaagtattgtcagtaggatagggaaaacagtttgttttctttttttagtggtctttggtcatctttaagagc

SEQ ID NO: 29999 - DNA, 80 bp, synthetic construct
  source 1..80: mol_type = other DNA
taccacgtaagaacttatgagaaatgttcattcttgggccccaacaaagaattaaaaattctgagggtgtgaacggggtc

SEQ ID NO: 30000 - DNA, 80 bp, synthetic construct
  source 1..80: mol_type = other DNA
tctagacaagcctgggcaacatggcaaaatgctgtctccacaaaaatcacaaaaattaggtgggcgtgtgttgtgtgcct

SEQ ID NO: 30001 - DNA, 80 bp, synthetic construct; identical to SEQ ID NO: 11398
  source 1..80: mol_type = other DNA

SEQ ID NO: 30002 - DNA, 80 bp, synthetic construct
  source 1..80: mol_type = other DNA
actatcttttccaagataggaggaaaggagataagtggaattaaagagaacctttgagcacagagttgggaaactgaagg

SEQ ID NO: 30003 - DNA, 80 bp, synthetic construct
  source 1..80: mol_type = other DNA
agctaaacccatgaaacttgagtagtttcagttatctgacttttttcttctcttttgatacagtgttggctattctgggt

SEQ ID NO: 30004 - DNA, 80 bp, synthetic construct
  source 1..80: mol_type = other DNA
tccatttgtttgattctttgatttcttttatcagaatttagttttcctcatatagtcttttaaaatattttgttatattt

SEQ ID NO: 30005 - DNA, 80 bp, synthetic construct; identical to SEQ ID NO: 11399
  source 1..80: mol_type = other DNA

SEQ ID NO: 30006 - DNA, 80 bp, synthetic construct
  source 1..80: mol_type = other DNA
tcttatcattaagtatgattttagctggagggtttttgtagaagttttttttttttaagttgaagaagtctccttctatt

SEQ ID NO: 30007 - DNA, 80 bp, synthetic construct
  source 1..80: mol_type = other DNA
agattaatcccgtttggttgtggtatataattatttgtatacatgttgagttcgatttgctaatactttttgagaatttt

SEQ ID NO: 30008 - DNA, 80 bp, synthetic construct
  source 1..80: mol_type = other DNA
tttaaatattttgtggaattcaccagtgaacccatctggacctggtgctttctgttttggaaggtcattaattattttaa

SEQ ID NO: 30009 - DNA, 80 bp, synthetic construct; identical to SEQ ID NO: 11400
  source 1..80: mol_type = other DNA

SEQ ID NO: 30010 - DNA, 80 bp, synthetic construct
  source 1..80: mol_type = other DNA
ttcttttgctagttatccaaggtggaagcttatattgttaagatccttttgcattcttatgcattcaatgatgtaaattt

SEQ ID NO: 30011 - DNA, 80 bp, synthetic construct
  source 1..80: mol_type = other DNA
agctatctttctgttattgatttctagtttaattccattgtggtctgagagcatatattgtataattttaatttttataa

SEQ ID NO: 30012 - DNA, 80 bp, synthetic construct
  source 1..80: mol_type = other DNA
ccttactgattttccacctgctagatctgtccattctttgcagagggacactgaagtctccaactctagtagtgaatatt

SEQ ID NO: 30013 - DNA, 80 bp, synthetic construct; identical to SEQ ID NO: 11401
  source 1..80: mol_type = other DNA

SEQ ID NO: 30014 - DNA, 80 bp, synthetic construct
  source 1..80: mol_type = other DNA
tattactgttttctgtctgttacactacttgttctttgtttatatttttattgtctactctttttctttccattgtggtt

SEQ ID NO: 30015 - DNA, 80 bp, synthetic construct
  source 1..80: mol_type = other DNA
agtaccttttaataataaaacactcccagttccaccttccagtctcttgtattatagctataatttagttcacttacata

SEQ ID NO: 30016 - DNA, 80 bp, synthetic construct
  source 1..80: mol_type = other DNA
attttccttttctctcttcagcttctttgaacatttcttaccagccagacctactgacaacaattttccccaatttttgt

SEQ ID NO: 30017 - DNA, 80 bp, synthetic construct; identical to SEQ ID NO: 11402
  source 1..80: mol_type = other DNA

SEQ ID NO: 30018 - DNA, 80 bp, synthetic construct
  source 1..80: mol_type = other DNA
ttgaacatgatatgcctttctttttgaacatgatatgcctttgtgtcggattttttttggcattattctgcttggttttc

SEQ ID NO: 30019 - DNA, 80 bp, synthetic construct
  source 1..80: mol_type = other DNA
attacatgtatgttacagtttttgtagtcatcccgctgttttggatattctgtttttttcagtttttttttccttcgcat

SEQ ID NO: 30020 - DNA, 80 bp, synthetic construct
  source 1..80: mol_type = other DNA
catcaaaggcattttacatttttattacagaatttttgacctatagaatttcttttgattccatctttgaatctccattt

SEQ ID NO: 30021 - DNA, 80 bp, synthetic construct
  source 1..80: mol_type = other DNA
tgattctcctcctcagcctcccaagtagctgggattacaggtgcctgccaccatgcctgagtaatttttgtatttttagt

SEQ ID NO: 30022 - DNA, 80 bp, synthetic construct; identical to SEQ ID NO: 11403
  source 1..80: mol_type = other DNA

SEQ ID NO: 30023 - DNA, 80 bp, synthetic construct
  source 1..80: mol_type = other DNA
gtgcgcctgcagcttggaagcacttgtgaagtgttttttcaccccttttggtgggacatagtgactagtgtgagcgggag

SEQ ID NO: 30024 - DNA, 80 bp, synthetic construct
  source 1..80: mol_type = other DNA
aaaccctgataggttaggcatggtaaaatagtctcttttgagggcaggcattgttataagaatagaatgctctggggcca

SEQ ID NO: 30025 - DNA, 80 bp, synthetic construct
  source 1..80: mol_type = other DNA
ccagctactcaggaggctgaggcaggagaactgcttgaacccagtaagtggaggttacagtgacccaagattgtgccact

SEQ ID NO: 30026 - DNA, 80 bp, synthetic construct; identical to SEQ ID NO: 11404
  source 1..80: mol_type = other DNA

SEQ ID NO: 30027 - DNA, 80 bp, synthetic construct
  source 1..80: mol_type = other DNA
tatttttcagtgtgctctgctttttacttgttacgatgaagccaaccactttcagaatttctacaaaccagatcagaatc

SEQ ID NO: 30028 - DNA, 80 bp, synthetic construct
  source 1..80: mol_type = other DNA
atagcttatatctacttctaggttatatgcttccttagaataggaattgattcttaaaatgtcgttctgctcacgcctgt

SEQ ID NO: 30029 - DNA, 80 bp, synthetic construct
  source 1..80: mol_type = other DNA
gtggtggccatctgtaatcccagctactagggaagctaaggcatgagaatcacttgaacctgggaggtggaggttgcagt

SEQ ID NO: 30030 - DNA, 80 bp, synthetic construct; identical to SEQ ID NO: 11405
  source 1..80: mol_type = other DNA

SEQ ID NO: 30031 - DNA, 80 bp, synthetic construct
  source 1..80: mol_type = other DNA
atggtgaagaggtgaaaagaataaatattctgtgcagaaaaattattcagtcttcatgtgaaaacactttgtccatagca

SEQ ID NO: 30032 - DNA, 80 bp, synthetic construct
  source 1..80: mol_type = other DNA
aaatagttttttcttaaaaccttttgactttttatctaaattgtaatagccagagcaccttcccacaactagaatatctc

SEQ ID NO: 30033 - DNA, 80 bp, synthetic construct
  source 1..80: mol_type = other DNA
acagtactggatagtcctctgattaaatagatatttgatagtactttaaggtctatacttttggatgaacttaactgctt

SEQ ID NO: 30034 - DNA, 80 bp, synthetic construct; identical to SEQ ID NO: 11406
  source 1..80: mol_type = other DNA

SEQ ID NO: 30035 - DNA, 80 bp, synthetic construct
  source 1..80: mol_type = other DNA
gcgagtaagacaccctgaaaggaaatgttctattcatggtacaatgcaattacagctagcaccaaattcaacactgttta

SEQ ID NO: 30036 - DNA, 80 bp, synthetic construct
  source 1..80: mol_type = other DNA
gtactctagccttattcaacagatcactgagaagcctggaaaaacaaatcccggaaactaattattatgtgccagttata

SEQ ID NO: 30037 - DNA, 80 bp, synthetic construct
  source 1..80: mol_type = other DNA
ttaaagctaaaccaaagatttacaaattgcctcttcatccagtctttcccaacctaaaaactgagttctctaaaaatttt

SEQ ID NO: 30038 - DNA, 80 bp, synthetic construct; identical to SEQ ID NO: 11407
  source 1..80: mol_type = other DNA

SEQ ID NO: 30039 - DNA, 80 bp, synthetic construct
  source 1..80: mol_type = other DNA
tgctcataaatccatccattcttccatctggctatcccttagtcaattcaaataaatatttatggggcactttgggtaag

SEQ ID NO: 30040 - DNA, 80 bp, synthetic construct
  source 1..80: mol_type = other DNA
tgattgatctgattttctcagttgtctgagaacaaacatttgtgaaaatctcattgtagagttcttacgatggatagggg

SEQ ID NO: 30041 - DNA, 80 bp, synthetic construct
  source 1..80: mol_type = other DNA
gtggtcccttcactggttctggtttacaaacttacttttctatgatgacatagtatagaaattgagagtgaatatttaga

SEQ ID NO: 30042 - DNA, 80 bp, synthetic construct; identical to SEQ ID NO: 11408
  source 1..80: mol_type = other DNA

SEQ ID NO: 30043 - DNA, 80 bp, synthetic construct
  source 1..80: mol_type = other DNA
gtaacaagaataattttctttcttttccttactatacattttgctttctgaaattcccttctcgccaatccaggtgaatg

SEQ ID NO: 30044 - DNA, 80 bp, synthetic construct
  source 1..80: mol_type = other DNA
aaatattagaactatttcagattaatttttaagtcgtatccactttgggtactagatcaaattgcaggtctctgcttctg

SEQ ID NO: 30045 - DNA, 80 bp, synthetic construct
  source 1..80: mol_type = other DNA
ccaaggttgtttgtctccatatatcaacattggtcaggattgaaagtgtgcaacaaggtttgaatgaataagtgaaaatc

SEQ ID NO: 30046 - DNA, 80 bp, synthetic construct; identical to SEQ ID NO: 11409
  source 1..80: mol_type = other DNA

SEQ ID NO: 30047 - DNA, 80 bp, synthetic construct
  source 1..80: mol_type = other DNA
ctccagtgcagttttctcataggcagaaaagatgtctctaaaagtttggaattctcaaattctggttattgaaatgttca

SEQ ID NO: 30048 - DNA, 80 bp, synthetic construct
  source 1..80: mol_type = other DNA
gttgagaaatgctttgcgagacataacagatgctcctgaaataacaaacacttggaatcatgaggtagtggaattgaaaa

SEQ ID NO: 30049 - DNA, 80 bp, synthetic construct
  source 1..80: mol_type = other DNA
cttagtatcattctacgaattagaatgtgttactgtgtaagagcacttcttgtatatgagagaaatagcaacagttccag

SEQ ID NO: 30050 - DNA, 80 bp, synthetic construct; identical to SEQ ID NO: 11410
  source 1..80: mol_type = other DNA

SEQ ID NO: 30051 - DNA, 80 bp, synthetic construct
  source 1..80: mol_type = other DNA
actaaatattgtaactgctcaactggtgcttttaatttatttgtctagactttgtcatgttgccagaagctttatcctgg

SEQ ID NO: 30052 - DNA, 80 bp, synthetic construct
  source 1..80: mol_type = other DNA
aatgttgaaaagcgaaaaagaactggttgatagagaagtgttgttattcagtagaacctaagtcttgtggtcccattttt

SEQ ID NO: 30053 - DNA, 80 bp, synthetic construct; identical to SEQ ID NO: 11411
  source 1..80: mol_type = other DNA

SEQ ID NO: 30054 - DNA, 80 bp, synthetic construct
  source 1..80: mol_type = other DNA
tctggggctggctctcagtatcacaaagatgtctgtaaacagaatatgctatttcttctttgtgacaaattttgaacatt

SEQ ID NO: 30055 - DNA, 80 bp, synthetic construct
  source 1..80: mol_type = other DNA
aattaaaaatccaaagaaaattatgtttgtttgcttttctgtttttttcttccttccaactccgagactttgcaagggca

SEQ ID NO: 30056 - DNA, 80 bp, synthetic construct
  source 1..80: mol_type = other DNA
tcctgagacatcagctgtggaatcacaacacgtcattagttttggcaggtccttgcaggtgttttgttttgttttattaa

SEQ ID NO: 30057 - DNA, 80 bp, synthetic construct
  source 1..80: mol_type = other DNA
gtcatgaagaggagacaatgaggctaatcatgagagccccattggtttaggcaattagaacaacaagatctaaaatggtt

SEQ ID NO: 30058 - DNA, 80 bp, synthetic construct; identical to SEQ ID NO: 11412
  source 1..80: mol_type = other DNA

SEQ ID NO: 30059 - DNA, 80 bp, synthetic construct
  source 1..80: mol_type = other DNA
tctgtcacagtgaggtcccaatccaacctatgagcttcaaatgaaaagttcaaaattacactcattgtcataagtcagag

SEQ ID NO: 30060 - DNA, 80 bp, synthetic construct
  source 1..80: mol_type = other DNA
ttcctttttttctacttctactgcagtgccttcctcatcttttcccttgcatccctccattatatgagtcatacaaatta

SEQ ID NO: 30061 - DNA, 80 bp, synthetic construct
  source 1..80: mol_type = other DNA
tttccacttagcattgtaaatacttgcaggtatcctagttaagaaagcaaggtttaaacacaaaatcatcaccaattaaa

SEQ ID NO: 30062 - DNA, 80 bp, synthetic construct; identical to SEQ ID NO: 11413
  source 1..80: mol_type = other DNA

SEQ ID NO: 30063 - DNA, 80 bp, synthetic construct
  source 1..80: mol_type = other DNA
ggtggttgttattattttttatagttccttgagcaaaagaaataatgtccccatcttagtataatattggaggtatatac

SEQ ID NO: 30064 - DNA, 80 bp, synthetic construct
  source 1..80: mol_type = other DNA
atgagaactagaaaaagctgaggggcaaaaggtcagaggaggccacaagttagggagtattaggaaaaagaagttaatac

SEQ ID NO: 30065 - DNA, 80 bp, synthetic construct; identical to SEQ ID NO: 11414
  source 1..80: mol_type = other DNA

SEQ ID NO: 30066 - DNA, 80 bp, synthetic construct
  source 1..80: mol_type = other DNA
aggaaacaataatttggatattttacatgcaatcatttatatgcaaatatatgtaaatattacaaaattattctctattt

SEQ ID NO: 30067 - DNA, 80 bp, synthetic construct
  source 1..80: mol_type = other DNA
ggctccagtgatcctcccacctcagtctcttgggtaggtggattacaggcccacactaccatgcccagctgtattagtcc

SEQ ID NO: 30068 - DNA, 80 bp, synthetic construct
  source 1..80: mol_type = other DNA
gcaggcatgttacacgacgaatcaggagcaagacaaagtgagggaggaggtgccacacactttgaaatgagcagatctca

SEQ ID NO: 30069 - DNA, 80 bp, synthetic construct
  source 1..80: mol_type = other DNA
aaaaaaaaaaaaaaattttttttttaagacatggtcttactatgttctacaggctggtcttaaactcctggcctcaagtg

SEQ ID NO: 30070 - DNA, 80 bp, synthetic construct; identical to SEQ ID NO: 11415
  source 1..80: mol_type = other DNA

SEQ ID NO: 30071 - DNA, 80 bp, synthetic construct
  source 1..80: mol_type = other DNA
caaagccaaacagcactgtatgcttaaagaaaaacagtcacacttcccacttatgtaatttatattacatccagtcacca

SEQ ID NO: 30072 - DNA, 80 bp, synthetic construct
  source 1..80: mol_type = other DNA
caccgggtgagtaatggtgctcttatttttctctgggtctcaagaagtgctctttatgacatatatggcattaaataaat

SEQ ID NO: 30073 - DNA, 80 bp, synthetic construct; identical to SEQ ID NO: 11416
  source 1..80: mol_type = other DNA

SEQ ID NO: 30074 - DNA, 80 bp, synthetic construct
  source 1..80: mol_type = other DNA
cttacttcagtatctaacactagacagtaaactgtagacaaaagacctacagaatttctgaatggtatcaaattcaccac

SEQ ID NO: 30075 - DNA, 80 bp, synthetic construct
  source 1..80: mol_type = other DNA
ccatttcccaagcaattataaagaacgatcaaaattttaatgggttgttagtattatttctttaaagattgtgatactga

SEQ ID NO: 30076 - DNA, 80 bp, synthetic construct
  source 1..80: mol_type = other DNA
atctgtgtgtatatatacatatgtatatatacctacatacatatgtacatatacatacatgcatatatctgtacatatat

SEQ ID NO: 30077 - DNA, 80 bp, synthetic construct
  source 1..80: mol_type = other DNA
atatcagtccatttatttattcaggaagaatttattgagcatatattatgaacacagcttttgctaaggacagggtatgc

SEQ ID NO: 30078 - DNA, 80 bp, synthetic construct; identical to SEQ ID NO: 11417
  source 1..80: mol_type = other DNA

SEQ ID NO: 30079 - DNA, 80 bp, synthetic construct
  source 1..80: mol_type = other DNA
tagtggaaaacctttgaaggtttgttaaaaggtcaatgaaatgttctaatttctgttgtagtgaattgctttgattgctg

SEQ ID NO: 30080 - DNA, 80 bp, synthetic construct
  source 1..80: mol_type = other DNA
aggtaccatacactgagatgggaaagcctaggggtagagtagctttgagaagaaaggtagcatttccccatttcataaaa

SEQ ID NO: 30081 - DNA, 80 bp, synthetic construct
  source 1..80: mol_type = other DNA
cctccatgataatgccattattccgtttcaaattgtgtgcttccattggatgtgtgagtctccttgaaagttataatgag

SEQ ID NO: 30082 - DNA, 80 bp, synthetic construct; identical to SEQ ID NO: 11418
  source 1..80: mol_type = other DNA

SEQ ID NO: 30083 - DNA, 80 bp, synthetic construct
  source 1..80: mol_type = other DNA
gtacgtaataggatttacctcatgaggttgacatgaagattgaaagaggtaacatatagaatgagcctgtcccaggacat

SEQ ID NO: 30084 - DNA, 80 bp, synthetic construct
  source 1..80: mol_type = other DNA
cacccttttggaggagataactgttctgtagcaggtaatatattgtttgatacttggttaacccttacaattatcatttc

SEQ ID NO: 30085 - DNA, 80 bp, synthetic construct
  source 1..80: mol_type = other DNA
tcagcactgcttcttgtttaattctctttagtttttcagaattctccaataatgacctttgtctactctcttcagtttat

SEQ ID NO: 30086 - DNA, 80 bp, synthetic construct; identical to SEQ ID NO: 11419
  source 1..80: mol_type = other DNA

SEQ ID NO: 30087 - DNA, 80 bp, synthetic construct
  source 1..80: mol_type = other DNA
tttcaaggcaattggtaaaaactacacttcaagaaatttcattcttaattccccttagtggatgttattaaccaaaggca

SEQ ID NO: 30088 - DNA, 80 bp, synthetic construct
  source 1..80: mol_type = other DNA
cagaattaagtagacggtgatctggtaagtagatgtttcagggtaacagctgtgcaatgctccatgcagggaattagatt

SEQ ID NO: 30089 - DNA, 80 bp, synthetic construct
  source 1..80: mol_type = other DNA
gcataagttaaagaaattttaaaatcccttaggaagctaggcttatcagagaaatccaaggaaatacattaacaaactag

SEQ ID NO: 30090 - DNA, 80 bp, synthetic construct; identical to SEQ ID NO: 11420
  source 1..80: mol_type = other DNA

SEQ ID NO: 30091 - DNA, 80 bp, synthetic construct
  source 1..80: mol_type = other DNA
agaaagtatttattttttctggaacatttagaaaaaacttggatccctatgaacagtggagtgatcaagaaatatggaaa

SEQ ID NO: 30092 - DNA, 80 bp, synthetic construct
  source 1..80: mol_type = other DNA
caactttaaaatggagtaccctaacatacctggagcaacaggtacttttgactggacctacccctaactgaaatgatttt

SEQ ID NO: 30093 - DNA, 80 bp, synthetic construct; identical to SEQ ID NO: 11421
  source 1..80: mol_type = other DNA

SEQ ID NO: 30094 - DNA, 80 bp, synthetic construct
  source 1..80: mol_type = other DNA
catgagggctttgttctcatgacctaatcacctcccacatgtcctacattctaatactatcaccttgggggttaggattt

SEQ ID NO: 30095 - DNA, 80 bp, synthetic construct
  source 1..80: mol_type = other DNA
ggctaaagtccaaggtttcatctaaatatcagctaaatcagcacaaacagctaaatcaggtagagtgggacttaaggtgt

SEQ ID NO: 30096 - DNA, 80 bp, synthetic construct
  source 1..80: mol_type = other DNA
aaaactttaaggcttgagaataatttgctttgctttgcctccaggctcactggggtggtgtcttacctctggacacactg

SEQ ID NO: 30097 - DNA, 80 bp, synthetic construct; identical to SEQ ID NO: 11422
  source 1..80: mol_type = other DNA

SEQ ID NO: 30098 - DNA, 80 bp, synthetic construct
  source 1..80: mol_type = other DNA
tataatttccataatctccatgtgttgagggagggacctggtgagaggtgactggatcatgggcatggttttcccatgct

SEQ ID NO: 30099 - DNA, 80 bp, synthetic construct
  source 1..80: mol_type = other DNA
ctgtgagtcaattaaacctcttttctttataaattacccagtctctttacagcaatgtgaaaatgtgctaatacaggagc

SEQ ID NO: 30100 - DNA, 80 bp, synthetic construct
  source 1..80: mol_type = other DNA
cattcttccattgtcttggactataaattctggcttctgtttaggtggctgactaatatccccactgtctgaatgcatag

SEQ ID NO: 30101 - DNA, 80 bp, synthetic construct
  source 1..80: mol_type = other DNA
ttccattttaaagtcatttctcatcttgaattttactatgagcagtcaagagtaactaagctgctccttcaactttgctt

SEQ ID NO: 30102 - DNA, 80 bp, synthetic construct; identical to SEQ ID NO: 11423
  source 1..80: mol_type = other DNA

SEQ ID NO: 30103 - DNA, 80 bp, synthetic construct
  source 1..80: mol_type = other DNA
ttaccttgttccaaagctgcttccacattgagtatttgttacagcagtacccagatcccagtaccaatattctgtcttag

SEQ ID NO: 30104 - DNA, 80 bp, synthetic construct
  source 1..80: mol_type = other DNA
tcctcacagatggctgtgttctcactgtgttgttacatggcagaagagtgggcaggctagctctctgggatgtcttttat

SEQ ID NO: 30105 - DNA, 80 bp, synthetic construct; identical to SEQ ID NO: 11424
  source 1..80: mol_type = other DNA

SEQ ID NO: 30106 - DNA, 80 bp, synthetic construct
  source 1..80: mol_type = other DNA
gaaacaggtttagcataaaacagtgatgctcattctagaacacctgcaaatgacaatagttttctttcgaagtcgccagg

SEQ ID NO: 30107 - DNA, 80 bp, synthetic construct
  source 1..80: mol_type = other DNA
caacaggtggttcattatacttgagagcattatacagaggaatttgatggggaggagagctggagaaattctcgaaattc

SEQ ID NO: 30108 - DNA, 80 bp, synthetic construct
  source 1..80: mol_type = other DNA
ttgtggcagaataggatcaggggacctaaaatgttgagcctcaaaggtcttcttagagaacaactgtattccactattag

SEQ ID NO: 30109 - DNA, 80 bp, synthetic construct; identical to SEQ ID NO: 11425
  source 1..80: mol_type = other DNA

SEQ ID NO: 30110 - DNA, 80 bp, synthetic construct
  source 1..80: mol_type = other DNA
ggagggaagacattagcctttataaaatctgcaagtattgccaaatcaaaataaaatttacaggaaagcaggatcataaa

SEQ ID NO: 30111 - DNA, 80 bp, synthetic construct
  source 1..80: mol_type = other DNA
gtctaactttaatgtcatgagtgctttgagtagtagtgctaagtttttgttgagtagtagtgtgcttttttgattagtag

SEQ ID NO: 30112 - DNA, 80 bp, synthetic construct
  source 1..80: mol_type = other DNA
gtgtgtcaaacactaaactggacaggacattatgacaaaagtgcaaagcaggactttccggggcaaaccaggatgtatgt

SEQ ID NO: 30113 - DNA, 80 bp, synthetic construct; identical to SEQ ID NO: 11426
  source 1..80: mol_type = other DNA

SEQ ID NO: 30114 - DNA, 80 bp, synthetic construct
  source 1..80: mol_type = other DNA
aagggaagggaagagagtttctaaaatctagaacttggatagtttaatttacctatcccaaaacagcttaggcccagaca

SEQ ID NO: 30115 - DNA, 80 bp, synthetic construct
  source 1..80: mol_type = other DNA
gggcccagcgcagtgcctggcaaatatgggtactaagtaaaagtaactataatcatgtttttttaatctggacttcactt

SEQ ID NO: 30116 - DNA, 80 bp, synthetic construct
  source 1..80: mol_type = other DNA
ttatctgcctattcccagagctttccacctgatatctcagcacatgaaaagcaccttatgtcaataagtgagttccttcc

SEQ ID NO: 30117 - DNA, 80 bp, synthetic construct
  source 1..80: mol_type = other DNA
gaaatatattcacttttcttcatttccacctgacaccactattaacacttgcacaaatttctgaggttcctggctcattt

SEQ ID NO: 30118 - DNA, 80 bp, synthetic construct; identical to SEQ ID NO: 11427
  source 1..80: mol_type = other DNA

SEQ ID NO: 30119 - DNA, 80 bp, synthetic construct
  source 1..80: mol_type = other DNA
tctcggtttcctaggtgtaccctataactccacccctttcatagcatttctcactctggctggagatttaccttttaact

SEQ ID NO: 30120 - DNA, 80 bp, synthetic construct
  source 1..80: mol_type = other DNA
tcatggaaatagccttgtgattgatacacagcaggtattaccatcctcactttagaatgaggactcagagccttgagatg

SEQ ID NO: 30121 - DNA, 80 bp, synthetic construct
  source 1..80: mol_type = other DNA
tttccatccttactcattgatagtaaggttagttattttagaaaacaagctaaatagcagaaatagtggccttttaagtt

SEQ ID NO: 30122 - DNA, 80 bp, synthetic construct; identical to SEQ ID NO: 11428
  source 1..80: mol_type = other DNA

SEQ ID NO: 30123 - DNA, 80 bp, synthetic construct
  source 1..80: mol_type = other DNA
tcacagcagtttgggaagtacatactatttattagctcatcagcatgaagctggaaaattctttttcctaaagttcttta

SEQ ID NO: 30124 - DNA, 80 bp, synthetic construct
  source 1..80: mol_type = other DNA
taaagtttgtactttttttaatttattgaaaaatggtttctaatgatagtattaacaagattatattgggggcaggacgc

SEQ ID NO: 30125 - DNA, 80 bp, synthetic construct
  source 1..80: mol_type = other DNA
cttgggaggctgaggcaggagaattgtttgaacctgggagtcggaggttgcagtgagcccagatcgcaccactgcactcc

SEQ ID NO: 30126 - DNA, 80 bp, synthetic construct; identical to SEQ ID NO: 11429
  source 1..80: mol_type = other DNA

SEQ ID NO: 30127 - DNA, 80 bp, synthetic construct
  source 1..80: mol_type = other DNA
ttacatccaaaagatccgtaggagaattcttatcagcacatgtgattggtaacaataactttgtacttttcaaaaacaat

SEQ ID NO: 30128 - DNA, 80 bp, synthetic construct
  source 1..80: mol_type = other DNA
tactatacttcacagtgaataaaacagtgagataggaatattgcaaaatgtcccctgtgttggtcagtcttagtgtcatt

SEQ ID NO: 30129 - DNA, 80 bp, synthetic construct; identical to SEQ ID NO: 11430
  source 1..80: mol_type = other DNA

SEQ ID NO: 30130 - DNA, 80 bp, synthetic construct
  source 1..80: mol_type = other DNA
ccatgtccttggagttgcccaggctccaataatactaataattactgtacattaggtacttaccatgtgccatattctgt

SEQ ID NO: 30131 - DNA, 80 bp, synthetic construct
  source 1..80: mol_type = other DNA
tatcatcagcaaatgagctgaggagggcagattcaaagctgattgtgtttgactctagagctgcagtcttaagccagacc

SEQ ID NO: 30132 - DNA, 80 bp, synthetic construct
  source 1..80: mol_type = other DNA
gcaaagtgatatgtcttagataacattttacaatggcagagcttaagccagtgctcagtcattcattcatcctcaagttt

SEQ ID NO: 30133 - DNA, 80 bp, synthetic construct; identical to SEQ ID NO: 11431
  source 1..80: mol_type = other DNA

SEQ ID NO: 30134 - DNA, 80 bp, synthetic construct
  source 1..80: mol_type = other DNA
ggaggagaactaccataggatttaaaacagaaatgatatggtcaaacctacatcttaggaagatccctggggtgtttgta

SEQ ID NO: 30135 - DNA, 80 bp, synthetic construct
  source 1..80: mol_type = other DNA
taacttataggtggtcatcaataccctgaaaatgactgggatctcagaggagagtctggagagttggaaatgacaaagac

SEQ ID NO: 30136 - DNA, 80 bp, synthetic construct
  source 1..80: mol_type = other DNA
tcttgagatttctagatgactaaatgggcagatgttgaatgatagctaaaggagaacccagaaacaagggagggattttg

SEQ ID NO: 30137 - DNA, 80 bp, synthetic construct; identical to SEQ ID NO: 11432
  source 1..80: mol_type = other DNA

SEQ ID NO: 30138 - DNA, 80 bp, synthetic construct
  source 1..80: mol_type = other DNA
ctaccccaatatcaaagaggcttaaaatctcctggtcgtgtgatgggcacacagttaattttttgtgaacaaacacagtg

SEQ ID NO: 30139 - DNA, 80 bp, synthetic construct
  source 1..80: mol_type = other DNA
caagggcaggagacaatcatctgtatatctctttggccttcatacactcaggagtacttgccaaaaataaacatttaatg

SEQ ID NO: 30140 - DNA, 80 bp, synthetic construct
  source 1..80: mol_type = other DNA
aaaaaagcctttgactctaatacagccctcatattctaccccaatatctaagaggctttatatctcctagtgttgtacca

SEQ ID NO: 30141 - DNA, 80 bp, synthetic construct; identical to SEQ ID NO: 11433
  source 1..80: mol_type = other DNA

SEQ ID NO: 30142 - DNA, 80 bp, synthetic construct
  source 1..80: mol_type = other DNA
tattgttttcttactactttttgggatacctggcacgtaatagacactcattgaaagtttcctaatgaatgaagtacaaa

SEQ ID NO: 30143 - DNA, 80 bp, synthetic construct
  source 1..80: mol_type = other DNA
tgagtgtttttaactctgtggtatctgaactatcttctctaactgcaggttgggctcagatctgtgatagaacagtttcc

SEQ ID NO: 30144 - DNA, 80 bp, synthetic construct
  source 1..80: mol_type = other DNA
ttacttaatagcacagtgggaacagaatcattatgcctgcttcatggtgacacatatttctattaggctgtcatgtctgc

SEQ ID NO: 30145 - DNA, 80 bp, synthetic construct; identical to SEQ ID NO: 11434
  source 1..80: mol_type = other DNA

SEQ ID NO: 30146 - DNA, 80 bp, synthetic construct
  source 1..80: mol_type = other DNA
tagagtctaccccatggttgaaaagctgattgtggctaacgctatatcaacattatgtgaaaagaacttaaagaaataag

SEQ ID NO: 30147 - DNA, 80 bp, synthetic construct
  source 1..80: mol_type = other DNA
aactctaaaacaagcatttgctgattgcacagtaattctctgtgaacacaggatagaagcaatgctggaatgccaacaat

SEQ ID NO: 30148 - DNA, 80 bp, synthetic construct
  source 1..80: mol_type = other DNA
tatcatacagccatccagctttactcaaaatagctgcacaagtttttcactttgatctgagccatgtggtgaggttgaaa

SEQ ID NO: 30149 - DNA, 80 bp, synthetic construct; identical to SEQ ID NO: 11435
  source 1..80: mol_type = other DNA

SEQ ID NO: 30150 - DNA, 80 bp, synthetic construct
  source 1..80: mol_type = other DNA
tttttctagccatgatttgggttcaggtagtacctttctcaaccaccttctcactgttcttaaaaaaactgtcacatggc

SEQ ID NO: 30151 - DNA, 80 bp, synthetic construct
  source 1..80: mol_type = other DNA
tttacaaattccctatggtttagtcacaaggaagttctgaggatgatgtatcacgtcatttctgttcaggcttttgagcc

SEQ ID NO: 30152 - DNA, 80 bp, synthetic construct
  source 1..80: mol_type = other DNA
gaatctaagtaaagtcctctattgtctgatcttggatttgctcaacctgaacaagccaaggaggtgtattaaactcaggc

SEQ ID NO: 30153 - DNA, 80 bp, synthetic construct
  source 1..80: mol_type = other DNA
tcttccagctgctgagtagaaaatcacaactaatttcacagatggtagaacctccttagagcaaaaggacacagcagtta

SEQ ID NO: 30154 - DNA, 80 bp, synthetic construct; identical to SEQ ID NO: 11436
  source 1..80: mol_type = other DNA

SEQ ID NO: 30155 - DNA, 80 bp, synthetic construct
  source 1..80: mol_type = other DNA
tgggacagtcacctcatggaattggagctcgtggaacagttacctctgcctcagaaaacaaggatgaattaagttttttt

SEQ ID NO: 30156 - DNA, 80 bp, synthetic construct
  source 1..80: mol_type = other DNA
tgctagtaattggaaaggcagctctaaatgtcaatcagcctagttgatcagcttattgtctagtgaaactcgttaatttg

SEQ ID NO: 30157 - DNA, 80 bp, synthetic construct
  source 1..80: mol_type = other DNA
tcatttccaagcaagtattagaataccacaggaaccacaagactgcacatcaaaatatgccccattcaacatctagtgag

SEQ ID NO: 30158 - DNA, 80 bp, synthetic construct; identical to SEQ ID NO: 11437
  source 1..80: mol_type = other DNA

SEQ ID NO: 30159 - DNA, 80 bp, synthetic construct
  source 1..80: mol_type = other DNA
atgctgtctacactaagagagaatgagagacacactgaagaagcaccaatcatgaattagttttatatgcttctgtttta

SEQ ID NO: 30160 - DNA, 80 bp, synthetic construct
  source 1..80: mol_type = other DNA
tatgaaatattatgttaaaactgggacaggggagaacctagggtgatattaaccaggggccatgaatcaccttttggtct

SEQ ID NO: 30161 - DNA, 80 bp, synthetic construct
  source 1..80: mol_type = other DNA
ggtacactgccttctcaactccaaactgactcttaagaagactgcattatatttattactgtaagaaaatatcacttgtc

SEQ ID NO: 30162 - DNA, 80 bp, synthetic construct
  source 1..80: mol_type = other DNA
ttagatatagcctcttttgagaattcacatgaattagaacacacatttttagttatctgtttaaactatggtaaaatata

SEQ ID NO: 30163 - DNA, 80 bp, synthetic construct; identical to SEQ ID NO: 11438
  source 1..80: mol_type = other DNA

SEQ ID NO: 30164 - DNA, 80 bp, synthetic construct
  source 1..80: mol_type = other DNA
tggatgcctgaaatcactgatagcactgaacctgattactgtgtttattcctatacatacacacatacatatgataacat

SEQ ID NO: 30165 - DNA, 80 bp, synthetic construct
  source 1..80: mol_type = other DNA
aaaccttggatagggggaccactctataaatatgtaccacatttttcctcacccattcatccatcactggctacttggtt

SEQ ID NO: 30166 - DNA, 80 bp, synthetic construct
  source 1..80: mol_type = other DNA
aggcttatagaacacaaaagatttatattctgcaagtgtccatctatttcttttaaagcttattcaaaaagtggtagcta

SEQ ID NO: 30167 - DNA, 80 bp, synthetic construct; identical to SEQ ID NO: 11439
  source 1..80: mol_type = other DNA

SEQ ID NO: 30168 - DNA, 80 bp, synthetic construct
  source 1..80: mol_type = other DNA
acaaaaagtatggagagttcacatataacttctccatacatgatagcctcccccattcaacatcccacactaaagtagta

SEQ ID NO: 30169 - DNA, 80 bp, synthetic construct
  source 1..80: mol_type = other DNA
cgtaacttcacaatcttgtgtgatagcctcatccataaaccaggttcccacaatgatagaaggccacatatctccccaaa

SEQ ID NO: 30170 - DNA, 80 bp, synthetic construct; identical to SEQ ID NO: 11440
  source 1..80: mol_type = other DNA

SEQ ID NO: 30171 - DNA, 80 bp, synthetic construct
  source 1..80: mol_type = other DNA
ctggcttgtgttcttcctgggtgcatctgcaaactttggctaaacaaacctctatcgattaagacacctgcctcagtcac

SEQ ID NO: 30172 - DNA, 80 bp, synthetic construct
  source 1..80: mol_type = other DNA
cactgcccaaaaaatactttgtgctctgcatattcattcccctttctcccctaacttttggcaaccactgacctttttat

SEQ ID NO: 30173 - DNA, 80 bp, synthetic construct
  source 1..80: mol_type = other DNA
tctattgtcagatgtaccacagtttattcattgacctactaaaggacatcttggttgcttcaacgttttggcaattttca

SEQ ID NO: 30174 - DNA, 80 bp, synthetic construct
  source 1..80: mol_type = other DNA
cagtcccaccagtaacgaatgggagttgtggttgctccttatcattgccagcatttggtgtcctcggcgttttagaattt

SEQ ID NO: 30175 - DNA, 80 bp, synthetic construct; identical to SEQ ID NO: 11441
  source 1..80: mol_type = other DNA

SEQ ID NO: 30176 - DNA, 80 bp, synthetic construct
  source 1..80: mol_type = other DNA
taatatctaccatatttattcctgttttctgtttgtttcctttgttctttattcctatttttactttccccatttttttg

SEQ ID NO: 30177 - DNA, 80 bp, synthetic construct
  source 1..80: mol_type = other DNA
agtgacctatgtgcctttaaataacaatattccatttcatatcagtgcaagtaccttaaattacaaatttctagcttctg

SEQ ID NO: 30178 - DNA, 80 bp, synthetic construct
  source 1..80: mol_type = other DNA
tattgaagtcttgattttggggctttacttgtccctgtctatgcccactcctatctgacacacactttcttaatttattt

SEQ ID NO: 30179 - DNA, 80 bp, synthetic construct; identical to SEQ ID NO: 11442
  source 1..80: mol_type = other DNA

SEQ ID NO: 30180 - DNA, 80 bp, synthetic construct
  source 1..80: mol_type = other DNA
acattggagcatgagaactccaaattgttaggttaggaattagaagctgttcccagtgtgtagagctaagagacccaagt

SEQ ID NO: 30181 - DNA, 80 bp, synthetic construct
  source 1..80: mol_type = other DNA
tttatccttaattccatacaatgggaatattcaattgctctttaatcactcagtattgatagggacagggggcagagaaa

SEQ ID NO: 30182 - DNA, 80 bp, synthetic construct; identical to SEQ ID NO: 11443
  source 1..80: mol_type = other DNA

SEQ ID NO: 30183 - DNA, 80 bp, synthetic construct
  source 1..80: mol_type = other DNA
cattttttctggacgccagacaagagcttggaggccacgagtatggatacaaaaggctgtcacactggctgtttgccctt

SEQ ID NO: 30184 - DNA, 80 bp, synthetic construct
  source 1..80: mol_type = other DNA
cagagtttgctactgccggcacctgaaagcggttggctggttcctgcactcgctcgttctggttcctgcacttattcatt

SEQ ID NO: 30185 - DNA, 80 bp, synthetic construct
  source 1..80: mol_type = other DNA
ttaagaacattatgaaaggtggtcaacaactttataagtgaatatgctaatgctggccttaattctaaaatgctacttgg

SEQ ID NO: 30186 - DNA, 80 bp, synthetic construct; identical to SEQ ID NO: 11444
  source 1..80: mol_type = other DNA

SEQ ID NO: 30187 - DNA, 80 bp, synthetic construct
  source 1..80: mol_type = other DNA
ttgacaaatattgacacaaatacttatagaagcaatttaaaaatctaccttgcaattaatccttatgaaatttaagtcat

SEQ ID NO: 30188 - DNA, 80 bp, synthetic construct
  source 1..80: mol_type = other DNA
tttgccttttcattggcagcaggtgccatgggcttattcatattctaaaagagaagttgtgtgagcaaatttgtcatcat

SEQ ID NO: 30189 - DNA, 80 bp, synthetic construct
  source 1..80: mol_type = other DNA
ttgcatttgaaccaagcaatgttgacaggctattgagccacagaagttaaacattccaagtgagcctgagacgaccatta

SEQ ID NO: 30190 - DNA, 80 bp, synthetic construct; identical to SEQ ID NO: 11445
  source 1..80: mol_type = other DNA

SEQ ID NO: 30191 - DNA, 80 bp, synthetic construct
  source 1..80: mol_type = other DNA
aatataggtagtcctcatgttgcacattaatatggcactatgaaaatcaccatgcaagataatttaaataattaatgggg

SEQ ID NO: 30192 - DNA, 80 bp, synthetic construct
  source 1..80: mol_type = other DNA
agtagtttgagcaatacttggtttcttttggttatgtaacttgcaatatgaagaaagcatcttttctatgcctgggcaag

SEQ ID NO: 30193 - DNA, 80 bp, synthetic construct
  source 1..80: mol_type = other DNA
agtttgtttaaggtaatgatttttgctgatgtcacctcctctggggcatctgacaggcattcctgctaggtcaacctata

SEQ ID NO: 30194 - DNA, 80 bp, synthetic construct
  source 1..80: mol_type = other DNA
gctctcttttggcccttttgccttctgccatgggatgacacagcacaaaaaccctcaccagatgctgaccccttgatact

SEQ ID NO: 30195 - DNA, 80 bp, synthetic construct; identical to SEQ ID NO: 11446
  source 1..80: mol_type = other DNA

SEQ ID NO: 30196 - DNA, 80 bp, synthetic construct
  source 1..80: mol_type = other DNA
ataaacgctgctgcttttgctgtatgtgcttagggccattttcagagactttaaatgattgataattgttaccagtaatg

SEQ ID NO: 30197 - DNA, 80 bp, synthetic construct
  source 1..80: mol_type = other DNA
gtataattctcattttgttcttcacacaatctctgtgaaggaggttctaagaactaagaggcttagagagggtaaggatc

SEQ ID NO: 30198 - DNA, 80 bp, synthetic construct; identical to SEQ ID NO: 11447
  source 1..80: mol_type = other DNA

SEQ ID NO: 30199 - DNA, 80 bp, synthetic construct
  source 1..80: mol_type = other DNA
gtataataacaaggggtgagattgtcttaaatctgcagtttcttgatctgtttagtgggctactataggttactgcagga

SEQ ID NO: 30200 - DNA, 80 bp, synthetic construct
  source 1..80: mol_type = other DNA
ggaaagggcatgggaaattcttaccattggcagtgtcggggaggaaaaaatgcatacttcttacccatttagtttatttt

SEQ ID NO: 30201 - DNA, 80 bp, synthetic construct
  source 1..80: mol_type = other DNA
tttggggcttttgcggggttgtggaggcaaattttgggaaggcgaggagaggaaatgtatgatcaataaatgttgccttg

SEQ ID NO: 30202 - DNA, 80 bp, synthetic construct
  source 1..80: mol_type = other DNA
agcttttcctgtattggctgattctcagttttttttagctcaaaatgatcaatatgccgaagtggcatgttctgaaatga

SEQ ID NO: 30203 - DNA, 80 bp, synthetic construct; identical to SEQ ID NO: 11448
  source 1..80: mol_type = other DNA

SEQ ID NO: 30204 - DNA, 80 bp, synthetic construct
  source 1..80: mol_type = other DNA
cagaggtgctcattaaaaaagaggaggggacatcaagcgagaattcttaatcagacattcaacaaattgagggtcgtcta

SEQ ID NO: 30205 - DNA, 80 bp, synthetic construct
  source 1..80: mol_type = other DNA
catcatcaaaaagtcattagtatggtggcaattgagcagaaacatgaaggaagtgaggaagtcagctgtgtgggtgtctt

SEQ ID NO: 30206 - DNA, 80 bp, synthetic construct; identical to SEQ ID NO: 11449
  source 1..80: mol_type = other DNA

SEQ ID NO: 30207 - DNA, 80 bp, synthetic construct
  source 1..80: mol_type = other DNA
tgctgatgaattgtatatactgtaggagaaggagaggactcaaggatgatgtgaaagatttcagtctgaggagttttaag

SEQ ID NO: 30208 - DNA, 80 bp, synthetic construct
  source 1..80: mol_type = other DNA
gttatcaaaatggagattgtatttaacacgagtgtgaactagattcttgttacttgcaccatcaacatcacctgggagct

SEQ ID NO: 30209 - DNA, 80 bp, synthetic construct
  source 1..80: mol_type = other DNA
tgagacaatctatctctggaggccttggaaaagagctggagactgagatgatataggaaaggggaatttagagagaatag

SEQ ID NO: 30210 - DNA, 80 bp, synthetic construct; identical to SEQ ID NO: 11450
  source 1..80: mol_type = other DNA

SEQ ID NO: 30211 - DNA, 80 bp, synthetic construct
  source 1..80: mol_type = other DNA
cacccaggaatttgagaccccatttctacaaactgaaaaaaaaattagccaggcatgatggcatgtgcctgtggtcccag

SEQ ID NO: 30212 - DNA, 80 bp, synthetic construct
  source 1..80: mol_type = other DNA
aaaaaaggtgagagaagtaacatcctactggcatagtggatatatagataacaaattaaggggtggggcatttggtggag

SEQ ID NO: 30213 - DNA, 80 bp, synthetic construct
  source 1..80: mol_type = other DNA
ttgttctatacatcccttctgaagcacatatatatcctttccctatggtgtataagcccggggtatggaaagtaagagtg

SEQ ID NO: 30214 - DNA, 80 bp, synthetic construct; identical to SEQ ID NO: 11451
  source 1..80: mol_type = other DNA

SEQ ID NO: 30215 - DNA, 80 bp, synthetic construct
  source 1..80: mol_type = other DNA
gatttaaggggaataacatatgaactgtcacttaagacagttcccccaacgttttaaagccatggcacacataaaaaatg

SEQ ID NO: 30216 - DNA, 80 bp, synthetic construct
  source 1..80: mol_type = other DNA
gctctgaaagaagagatgggaatgaataaagcagacaggcagaaaggtagtcagatagcaggaaataccttatgtgagtg

SEQ ID NO: 30217 - DNA, 80 bp, synthetic construct
  source 1..80: mol_type = other DNA
agcaagtatgacagagaggggatgagggagttgaggagagatgccaagtgtagactaattatgatcatgtaatataaact

SEQ ID NO: 30218 - DNA, 80 bp, synthetic construct; identical to SEQ ID NO: 11452
  source 1..80: mol_type = other DNA

SEQ ID NO: 30219 - DNA, 80 bp, synthetic construct
  source 1..80: mol_type = other DNA
agcaaatttagtagcaaattttgttgtataaccccaacaaattgacatgactatgaaaagaagggccagtgtagtctggt

SEQ ID NO: 30220 - DNA, 80 bp, synthetic construct
  source 1..80: mol_type = other DNA
ctggaaaaactgtgttccccaaagggagccaggttttcattaggaccatgtggtgaaagaactgtttaaagatgcaggaa

SEQ ID NO: 30221 - DNA, 80 bp, synthetic construct
  source 1..80: mol_type = other DNA
gaaaactgctgctttatggatactggagagcaaacaactccagatagcttcagtgttttctacccaagcaactacaggtt

SEQ ID NO: 30222 - DNA, 80 bp, synthetic construct; identical to SEQ ID NO: 11453
  source 1..80: mol_type = other DNA

SEQ ID NO: 30223 - DNA, 80 bp, synthetic construct
  source 1..80: mol_type = other DNA
tcctgcctcagcctcccgagtagctggtattacaggtgtacaccactacgcccaggtaattttgtgtttttagtagagac

SEQ ID NO: 30224 - DNA, 80 bp, synthetic construct
  source 1..80: mol_type = other DNA
cttaatcctctgtcttaagacaatttatcctggaaaaatgattatccattttcttcaagtctctctccataaaacctctt

SEQ ID NO: 30225 - DNA, 80 bp, synthetic construct
  source 1..80: mol_type = other DNA
tggtgtcctgaatgccctttagacctgatctttatgaatcaccatgatatttctatttcctatgacctgtgtgatttttg

SEQ ID NO: 30226 - DNA, 80 bp, synthetic construct
  source 1..80: mol_type = other DNA
tggattactcatttcagagttcagttacccagaaaccacctacttctatgcctacaataagaagcaaacaagaggttttt

SEQ ID NO: 30227 - DNA, 80 bp, synthetic construct; identical to SEQ ID NO: 11454
  source 1..80: mol_type = other DNA

SEQ ID NO: 30228 - DNA, 80 bp, synthetic construct
  source 1..80: mol_type = other DNA
acaattgggtcggcttttgatctctcactataatgctctacaactggacatggttaccaagtcgcttctgtgatggtcag

SEQ ID NO: 30229 - DNA, 80 bp, synthetic construct
  source 1..80: mol_type = other DNA
ctgtggctagcgtaacagatttatgttttactcatagctcgtgacaatgcaggcagggatgagcccatttgaatcaccat

SEQ ID NO: 30230 - DNA, 80 bp, synthetic construct; identical to SEQ ID NO: 11455
  source 1..80: mol_type = other DNA

SEQ ID NO: 30231 - DNA, 80 bp, synthetic construct
  source 1..80: mol_type = other DNA
tacaactgcacatacaaacttcaagaattccaggcaatcctaaaggttttcctgggccaagcctctgtgcagaggtatgt

SEQ ID NO: 30232 - DNA, 80 bp, synthetic construct
  source 1..80: mol_type = other DNA
aagttggttattttaagtcaaatccactcacctttcaatataatcagtaaccttcatagcttggggctgcctgggcttca

SEQ ID NO: 30233 - DNA, 80 bp, synthetic construct
  source 1..80: mol_type = other DNA
taccaaaactaacatgtagaaaataaactttatttcacccaagagttcagttcactgacatcgaaaggcttcagagattt

SEQ ID NO: 30234 - DNA, 80 bp, synthetic construct; identical to SEQ ID NO: 11456
  source 1..80: mol_type = other DNA

SEQ ID NO: 30235 - DNA, 80 bp, synthetic construct
  source 1..80: mol_type = other DNA
aaaaaaacaaaacaaaaaacaaaacaaaacaaaaaaacctggctgggcatggtggctcacgtctgtaatcccagcacttt

SEQ ID NO: 30236 - DNA, 80 bp, synthetic construct
  source 1..80: mol_type = other DNA
tgaacctaggaaacggaggttgcagtgagctgagatcatgccactgcactccagcctgggcaacagagccagactctgtc

SEQ ID NO: 30237 - DNA, 80 bp, synthetic construct
  source 1..80: mol_type = other DNA
taaaacaaaagtgacaatacccctatgaaggagaccaggtcaacataaccggctggcatcatgtttatcttctcagcatt

SEQ ID NO: 30238 - DNA, 80 bp, synthetic construct
  source 1..80: mol_type = other DNA
acttccattaaattatcttgtcagttctcactaaattttcttttcacagctcttgctgtctgggttataaaaacccatgg

SEQ ID NO: 30239 - DNA, 80 bp, synthetic construct; identical to SEQ ID NO: 11457
  source 1..80: mol_type = other DNA

SEQ ID NO: 30240 - DNA, 80 bp, synthetic construct
  source 1..80: mol_type = other DNA
caaactacttcttattttcaaaaccagtttgatttcctctgacaaaccatcaggccagtgtgactttgcatcactggatt

SEQ ID NO: 30241 - DNA, 80 bp, synthetic construct
  source 1..80: mol_type = other DNA
ctccattccttgttactgggttaatgtcattataatgggagtaagttaatcagccagggagtgagttcctgataaaaaga

SEQ ID NO: 30242 - DNA, 80 bp, synthetic construct; identical to SEQ ID NO: 11458
  source 1..80: mol_type = other DNA

SEQ ID NO: 30243 - DNA, 80 bp, synthetic construct
  source 1..80: mol_type = other DNA
gagaaaaatacaaagaaatgccatttcctaggtttgattcgggcatcttcatttctaaaattaactattcctgagttctg

SEQ ID NO: 30244 - DNA, 80 bp, synthetic construct
  source 1..80: mol_type = other DNA
gggaaggaacctcccagaaaagtccaggcagaacttacaagtttgagccatatgaaacaggtaatatttgaccatttttg

SEQ ID NO: 30245 - DNA, 80 bp, synthetic construct
  source 1..80: mol_type = other DNA
gttttctcttcctccatccttctgcaatatcaaaaaatatctttaagtattcaagagacgtgaacattattcctattctc

SEQ ID NO: 30246 - DNA, 80 bp, synthetic construct
  source 1..80: mol_type = other DNA
ttctcccacctcagcctcctgagtagctaggaccacaggtatgtgctgccacactaggcttttttttttttttttttttt

SEQ ID NO: 30247 - DNA, 80 bp, synthetic construct; identical to SEQ ID NO: 11459
  source 1..80: mol_type = other DNA

SEQ ID NO: 30248 - DNA, 80 bp, synthetic construct
  source 1..80: mol_type = other DNA
gtaggccacataatcctcatcccttacggaatgctgtttagtgagtgttatacctgtctaggcatgtttcttgttacact

SEQ ID NO: 30249 - DNA, 80 bp, synthetic construct
  source 1..80: mol_type = other DNA
aacttcaaatttcttcagacaaaggtccaacaggccagacaagctcatggctagttccttgacctgaacaatcttgttat

SEQ ID NO: 30250 - DNA, 80 bp, synthetic construct
  source 1..80: mol_type = other DNA
gtattagcttcctgggctgttgtgacaagggaccacaatctagatagattaaaaagcagttattctctcacagttttgaa

SEQ ID NO: 30251 - DNA, 80 bp, synthetic construct; identical to SEQ ID NO: 11460
  source 1..80: mol_type = other DNA

SEQ ID NO: 30252 - DNA, 80 bp, synthetic construct
  source 1..80: mol_type = other DNA
attcacaagtttggatagacatgaatttggggcatactattcacctccgtgcaagtagtcttgaagatttgcttctaaat

SEQ ID NO: 30253 - DNA, 80 bp, synthetic construct
  source 1..80: mol_type = other DNA
acaaatacagattaaaagtctatcatgtgttctgagcagtactggggccaaaataatgaaccagagggacaaggtccctg

SEQ ID NO: 30254 - DNA, 80 bp, synthetic construct
  source 1..80: mol_type = other DNA
ctgaccaagtgacagtcactgagaatgaaaaagtgaaaagagtaaagtccatgtcttcatagaacttacattctattggt

SEQ ID NO: 30255 - DNA, 80 bp, synthetic construct; identical to SEQ ID NO: 11461
  source 1..80: mol_type = other DNA

SEQ ID NO: 30256 - DNA, 80 bp, synthetic construct
  source 1..80: mol_type = other DNA
tgaatgtacttgaattttaaagggagaccctctggcgacggtgtgagtactggactgtaggggacaatgggtggagaagg

SEQ ID NO: 30257 - DNA, 80 bp, synthetic construct
  source 1..80: mol_type = other DNA
gctcatatgtgaatgactagaaatcgccagccttgtgaagatcttggaagatattttcaagtagaagcaaaaattggaaa

SEQ ID NO: 30258 - DNA, 80 bp, synthetic construct
  source 1..80: mol_type = other DNA
ctgagagtactagaagaaagagtctctgtccatagcttgctggcgcctgctattttgtatggtataacattacccaatgt

SEQ ID NO: 30259 - DNA, 80 bp, synthetic construct; identical to SEQ ID NO: 11462
  source 1..80: mol_type = other DNA

SEQ ID NO: 30260 - DNA, 80 bp, synthetic construct
  source 1..80: mol_type = other DNA
taaagtataatacacaaaatataaaattatttttaaaaactcaccatggtggctgggtgcagtggctctcgcctataatc

SEQ ID NO: 30261 - DNA, 80 bp, synthetic construct
  source 1..80: mol_type = other DNA
cctttgaacccgggagggcggagcttgcagtaaactgagatcttgctactgcactccagcctgggagacagagcgagact

SEQ ID NO: 30262 - DNA, 80 bp, synthetic construct
  source 1..80: mol_type = other DNA
gaacatagtttctcaaagttgaacaaatgttctgtatcttaaaaagtgtctgtcttctatcattttggtgtgtacctaca

SEQ ID NO: 30263 - DNA, 80 bp, synthetic construct; identical to SEQ ID NO: 11463
  source 1..80: mol_type = other DNA

SEQ ID NO: 30264 - DNA, 80 bp, synthetic construct
  source 1..80: mol_type = other DNA
tcagaaatacctgaattttaactccagccttgtcccttcctggtagaacaagttttgtgtggctttggaaaattaatcta

SEQ ID NO: 30265 - DNA, 80 bp, synthetic construct
  source 1..80: mol_type = other DNA
ggattagtgagtttaaagtgcttatttgcatggttggcctaggtgttgttcttcaaaaaggactaattctagactctgct

SEQ ID NO: 30266 - DNA, 80 bp, synthetic construct
  source 1..80: mol_type = other DNA
aaaccccatctctactaaaaaagaatacaaaaaatttagctgggcatagtggcgggcgcctgtaatcccagctacttggg

SEQ ID NO: 30267 - DNA, 80 bp, synthetic construct; identical to SEQ ID NO: 11464
  source 1..80: mol_type = other DNA

SEQ ID NO: 30268 - DNA, 80 bp, synthetic construct
  source 1..80: mol_type = other DNA
ggtgacaagcagaagagattaggttgtcctttgatttgttgatacacatgccacgctgtcagatgatatttgagattatg

SEQ ID NO: 30269 - DNA, 80 bp, synthetic construct
  source 1..80: mol_type = other DNA
tgcaagacctgacctctctggcatttacagaagatcctccttatccatggtttcgctttccataatttcagtaatgtgag

SEQ ID NO: 30270 - DNA, 80 bp, synthetic construct
  source 1..80: mol_type = other DNA
tcataggtatgtatgtatagaaaaaacgtatatagggttcagtactatattccatttgaggcatccattgggggtcttgg

SEQ ID NO: 30271 - DNA, 80 bp, synthetic construct; identical to SEQ ID NO: 11465
  source 1..80: mol_type = other DNA

SEQ ID NO: 30272 - DNA, 80 bp, synthetic construct
  source 1..80: mol_type = other DNA
tagaaactactatccacgcacttcctaatttttagagggacagaataagggtgatttgcatgtttgtctttactctcctg

SEQ ID NO: 30273 - DNA, 80 bp, synthetic construct
  source 1..80: mol_type = other DNA
atcagcatataagtggttaaaccatgggagtggatgagatccctcaggaaaattgcattgagttgaagaggaggtgtcaa

SEQ ID NO: 30274 - DNA, 80 bp, synthetic construct
  source 1..80: mol_type = other DNA
agaaagcctttatgggggcaggaggagcctgatcagtaatgtcgaatagaacagacactatataatcgaaggctttaaca

SEQ ID NO: 30275 - DNA, 80 bp, synthetic construct; identical to SEQ ID NO: 11466
  source 1..80: mol_type = other DNA

SEQ ID NO: 30276 - DNA, 80 bp, synthetic construct
  source 1..80: mol_type = other DNA
caacccaaatgcccatcaacgatagactggataaaatgtggtacacatacaccatggaatactatgcagccataaaaagg

SEQ ID NO: 30277 - DNA, 80 bp, synthetic construct
  source 1..80: mol_type = other DNA
atgtgaactcatagactcagagaggggtaaaacacacactggggcctgttgtggggggtggggataaagagagggagagt

SEQ ID NO: 30278 - DNA, 80 bp, synthetic construct
  source 1..80: mol_type = other DNA
attaccttttgcttctgaagaccagacggtcattggtgattttaggaagagcattttcactaatagagtgggcatagagc

SEQ ID NO: 30279 - DNA, 80 bp, synthetic construct
  source 1..80: mol_type = other DNA
gaaggcaaccaagtagatcattgagggagcaaagtcctggagtaattgtataggtgaaagggaaaagtctcatcttatta

SEQ ID NO: 30280 - DNA, 80 bp, synthetic construct; identical to SEQ ID NO: 11467
  source 1..80: mol_type = other DNA

SEQ ID NO: 30281 - DNA, 80 bp, synthetic construct
  source 1..80: mol_type = other DNA
tctggacatctgagcagtgcgctttcatggtaaaaccctgatataactggctgatctggatgtgcagaaatgagaacagg

SEQ ID NO: 30282 - DNA, 80 bp, synthetic construct
  source 1..80: mol_type = other DNA
ggtctcattgagaatgggtcctgtaagggactgtgatgtgttgtggcattaacatggcatgactatgattttcctctaga

SEQ ID NO: 30283 - DNA, 80 bp, synthetic construct; identical to SEQ ID NO: 11468
  source 1..80: mol_type = other DNA

SEQ ID NO: 30284 - DNA, 80 bp, synthetic construct
  source 1..80: mol_type = other DNA
aggtaaaagagaggacagactcaaagactttatggaggtggcttggtttgggattcataaagtgggtataattgtgacag

SEQ ID NO: 30285 - DNA, 80 bp, synthetic construct
  source 1..80: mol_type = other DNA
aaatacaactgggtaaattatgttgttcatataacctagaagttttggggccctctcccctgtttctcaagcataactga

SEQ ID NO: 30286 - DNA, 80 bp, synthetic construct
  source 1..80: mol_type = other DNA
gtacatggtagtgttagagcaaggtcttagttatttgcttagttttctcacctgccagtgagtttgtaaatcacagtcaa

SEQ ID NO: 30287 - DNA, 80 bp, synthetic construct
  source 1..80: mol_type = other DNA
atggaattgtaatatggaataatattttcacacctcagtaatccataatgagttcctcttccacctttccagttacttgg

SEQ ID NO: 30288 - DNA, 80 bp, synthetic construct; identical to SEQ ID NO: 11469
  source 1..80: mol_type = other DNA

SEQ ID NO: 30289 - DNA, 80 bp, synthetic construct
  source 1..80: mol_type = other DNA
tgcttagatgcttcatgattagtaatttttgtatcctttctggaggttttttgctctccatttggtggtaaactctggta

SEQ ID NO: 30290 - DNA, 80 bp, synthetic construct
  source 1..80: mol_type = other DNA
gaattatgaagatgtgtttatccttccaagcagcagtctgggttgttgccacttgaaaaaaaaatacggtctattggagt

SEQ ID NO: 30291 - DNA, 80 bp, synthetic construct; identical to SEQ ID NO: 11470
  source 1..80: mol_type = other DNA

SEQ ID NO: 30292 - DNA, 80 bp, synthetic construct
  source 1..80: mol_type = other DNA
ttggcttacaattctcagagactctggctgtctgcatacagaggccattcagagctccatttcaacaagcaattgcatat

SEQ ID NO: 30293 - DNA, 80 bp, synthetic construct
  source 1..80: mol_type = other DNA
gggtaattgatttccccgtggttgcaagaagttcacataacattattcaatcatctctcaagtttgcttgtgattgctaa

SEQ ID NO: 30294 - DNA, 80 bp, synthetic construct
  source 1..80: mol_type = other DNA
tataacacaagccttaataactccatcctcttcctctccaactcctctcttagagacccttgtaattaatttaggtaaat

SEQ ID NO: 30295 - DNA, 80 bp, synthetic construct; identical to SEQ ID NO: 11471
  source 1..80: mol_type = other DNA

SEQ ID NO: 30296 - DNA, 80 bp, synthetic construct
  source 1..80: mol_type = other DNA
atatcattgccatatgaagagggaaacaattgtgtgtggcctatgaaaaaggtgttaccatccctggattgcaatttttt

SEQ ID NO: 30297 - DNA, 80 bp, synthetic construct
  source 1..80: mol_type = other DNA
aatttttgtattttcagtagagacgggctttcgccatgttggccaggatggtttcgatctcttgacctcgtgatctgccc

SEQ ID NO: 30298 - DNA, 80 bp, synthetic construct
  source 1..80: mol_type = other DNA
atcaattttagaatcacctcaagaagaaaacccattccctttaactatcagcccctgtcctttctatctcccccagtcct

SEQ ID NO: 30299 - DNA, 80 bp, synthetic construct
  source 1..80: mol_type = other DNA
ttttcttaacatgtgttctctagcttggatttctcccttttctagatcattgatgtggagaaatagacactgggtcctgt

SEQ ID NO: 30300 - DNA, 80 bp, synthetic construct; identical to SEQ ID NO: 11472
  source 1..80: mol_type = other DNA

SEQ ID NO: 30301 - DNA, 80 bp, synthetic construct
  source 1..80: mol_type = other DNA
ttttcaataaaaaggcaaatacctaagtgccctgaagaagtttgagacttagataccaattcaaaattcaagaattatga

SEQ ID NO: 30302 - DNA, 80 bp, synthetic construct
  source 1..80: mol_type = other DNA
tagggtagactcttttttcagcttgttcatgagtgatagatactctgggaaggtggacacttttctcagtcgaagggagg

SEQ ID NO: 30303 - DNA, 80 bp, synthetic construct
  source 1..80: mol_type = other DNA
gacattcaaatgactaatctcaagtctgcccccaaggtactgtataattctatgattctgggcttcatttttgaaaagtc

SEQ ID NO: 30304 - DNA, 80 bp, synthetic construct; identical to SEQ ID NO: 11473
  source 1..80: mol_type = other DNA

SEQ ID NO: 30305 - DNA, 80 bp, synthetic construct
  source 1..80: mol_type = other DNA
tcaaaggatgggaaggaagatagtgttgtggtcattccacagaggaagttagaactgcacatccaaaatttggttcagat

SEQ ID NO: 30306 - DNA, 80 bp, synthetic construct
  source 1..80: mol_type = other DNA
gacttggggttttatgtggtggagtagtgtggctggagagagagttgtcttgtgtaagctggggcttatttggtttgaat

SEQ ID NO: 30307 - DNA, 80 bp, synthetic construct
  source 1..80: mol_type = other DNA
tctgaggtaaaagctttttcctattttttagaaggtgtataattttggctcttctgcttagctctaccatccattttgag

SEQ ID NO: 30308 - DNA, 80 bp, synthetic construct; identical to SEQ ID NO: 11474
  source 1..80: mol_type = other DNA

SEQ ID NO: 30309 - DNA, 80 bp, synthetic construct
  source 1..80: mol_type = other DNA
aaaaatcggaagtttttttgcaacttctgcaaaggttatcaaaaaccatcaaaggagattgctttgaatctatgaattat

SEQ ID NO: 30310 - DNA, 80 bp, synthetic construct
  source 1..80: mol_type = other DNA
atttcttaattttgatgctattataaatatcttaaattacagtttgctagtatgtggaattacaatttatttttatatat

SEQ ID NO: 30311 - DNA, 80 bp, synthetic construct; identical to SEQ ID NO: 11475
  source 1..80: mol_type = other DNA

SEQ ID NO: 30312 - DNA, 80 bp, synthetic construct
  source 1..80: mol_type = other DNA
ctcctgtgtttcacctttgttttagaaagatattttcactagataaagtttttaggttgacagtgtttttcttccagcac

SEQ ID NO: 30313 - DNA, 80 bp, synthetic construct
  source 1..80: mol_type = other DNA
aaatccatgccccagcagtggtcagctagcattctaaagaggaatgctgaggcagctaccacaaacacttctctaacttt

SEQ ID NO: 30314 - DNA, 80 bp, synthetic construct
  source 1..80: mol_type = other DNA
agagactagaacataagcatcaaaggaacccaagcaccttctgcaaggcagaaggggttcggtgggtatgaaatgatgga

SEQ ID NO: 30315 - DNA, 80 bp, synthetic construct; identical to SEQ ID NO: 11476
  source 1..80: mol_type = other DNA

SEQ ID NO: 30316 - DNA, 80 bp, synthetic construct
  source 1..80: mol_type = other DNA
gaacttgaactgaaatgggttcttggttaggctaggacaccaccattatatcatgatgatcatatttttatagttcttgt

SEQ ID NO: 30317 - DNA, 80 bp, synthetic construct
  source 1..80: mol_type = other DNA
tcagctaggactagccaaatgaaatgtctctttaccaaaatgctcatcttcagcctgtgttgcttttttgcactcgtgtc

SEQ ID NO: 30318 - DNA, 80 bp, synthetic construct
  source 1..80: mol_type = other DNA
actaaatgcaggattctgattccattccctcagcatttgggcaggaaaagaaatctcaactatttgagatgtgcctgatg

SEQ ID NO: 30319 - DNA, 80 bp, synthetic construct
  source 1..80: mol_type = other DNA
atgtaagatatcacattctaataatgtaattcagaaataagagaaggatagcgtagcaggaacaccacaccttgcctctc

SEQ ID NO: 30320 - DNA, 80 bp, synthetic construct; identical to SEQ ID NO: 11477
  source 1..80: mol_type = other DNA

SEQ ID NO: 30321 - DNA, 80 bp, synthetic construct
  source 1..80: mol_type = other DNA
cttagcacagaggtctgaaagtcaaataaacttggtcaggctgttttctcttcctaaagagaataaaaggcccccaatca

SEQ ID NO: 30322 - DNA, 80 bp, synthetic construct
  source 1..80: mol_type = other DNA
tcctgcatagattttggttaggattgctttaaatctgtagatttggagattttcaaaaatatagtacattattattatta

SEQ ID NO: 30323 - DNA, 80 bp, synthetic construct; identical to SEQ ID NO: 11478
  source 1..80: mol_type = other DNA

SEQ ID NO: 30324 - DNA, 80 bp, synthetic construct
  source 1..80: mol_type = other DNA
gctagagtgcagtggcatgatcttggctcacagcaacctccacctcctgggctcaagccatcctcccaactcagcctccc

SEQ ID NO: 30325 - DNA, 80 bp, synthetic construct
  source 1..80: mol_type = other DNA
gagccaccatgcctagcctttaactgaaattgtgtaccctttgagcaataccttcccaatctcctctccattctactctc

SEQ ID NO: 30326 - DNA, 80 bp, synthetic construct
  source 1..80: mol_type = other DNA
attttgtatgtatgccatattttctttatccactcatctgttgatggacactgaggatgattccatatcttggaagttgt

SEQ ID NO: 30327 - DNA, 80 bp, synthetic construct
  source 1..80: mol_type = other DNA
agtctcgctctgttgccaggctggagtgcagtgatgcaatcttggctcactgcaacctctgcctcccaggttcaaacaat

SEQ ID NO: 30328 - DNA, 80 bp, synthetic construct; identical to SEQ ID NO: 11479
  source 1..80: mol_type = other DNA

SEQ ID NO: 30329 - DNA, 80 bp, synthetic construct
  source 1..80: mol_type = other DNA
gcattttttcatatccctgttgccttctcttgagaaatatctattcaggtcttttgcccacttaattgggttgttttctt

SEQ ID NO: 30330 - DNA, 80 bp, synthetic construct
  source 1..80: mol_type = other DNA
tatttttccataagaagagttgccagtgctgtttaccctggctgctacataccctgatccctgaagaccgtttcttgaac

SEQ ID NO: 30331 - DNA, 80 bp, synthetic construct; identical to SEQ ID NO: 11480
  source 1..80: mol_type = other DNA

SEQ ID NO: 30332 - DNA, 80 bp, synthetic construct
  source 1..80: mol_type = other DNA
tttctttctaggaggcagaaaaaccttctgaatttttaccatgatgacattaaagccagagatgttaagtgtcattgtag

SEQ ID NO: 30333 - DNA, 80 bp, synthetic construct
  source 1..80: mol_type = other DNA
acatacatattcatggtcaaatccaggctaatagaggatatctattcactcatttcctcctttgacacctgtagaatgtt

SEQ ID NO: 30334 - DNA, 80 bp, synthetic construct
  source 1..80: mol_type = other DNA
tgttcactaaggattaactgctcacaaaaactgtatttgtgaaaaattgaccttgtctatccaaattggctacttctaat

SEQ ID NO: 30335 - DNA, 80 bp, synthetic construct; identical to SEQ ID NO: 11481
  source 1..80: mol_type = other DNA

SEQ ID NO: 30336 - DNA, 80 bp, synthetic construct
  source 1..80: mol_type = other DNA
ggtttgctgcacccatcaacccgtcatctacattaggtatttctcctaatgctctctctaccctagccccccacccaccg

SEQ ID NO: 30337 - DNA, 80 bp, synthetic construct
  source 1..80: mol_type = other DNA
tttttatggctgcatagtattccacagtgtatatgtgccacatttctttatccagtttgtcactggtgggcatttggggt

SEQ ID NO: 30338 - DNA, 80 bp, synthetic construct
  source 1..80: mol_type = other DNA
ccttttttaatgtatattactataaacttccctcataaaactggtttgccgcaccccgtaaggtttggtatggtgtttcc

SEQ ID NO: 30339 - DNA, 80 bp, synthetic construct
  source 1..80: mol_type = other DNA
ctggtttgccgcaccccgtaaggtttggtatggtgtttccatttttgtctcaagacattttaaatttgccttttaattta

SEQ ID NO: 30340 - DNA, 80 bp, synthetic construct; identical to SEQ ID NO: 11482
  source 1..80: mol_type = other DNA

SEQ ID NO: 30341 - DNA, 80 bp, synthetic construct
  source 1..80: mol_type = other DNA
agatattgattacttattttatgaatgtgtgaggcaactaggaaggctttactgcgttatctaacactcatggacaacct

SEQ ID NO: 30342 - DNA, 80 bp, synthetic construct
  source 1..80: mol_type = other DNA
tctactaaaaataaaaaattagctgagcgtggtggtgcatgcctgcaatctcagctacttggaggttgaggctggagaat

SEQ ID NO: 30343 - DNA, 80 bp, synthetic construct
  source 1..80: mol_type = other DNA
catgccacacagctaataaatggcagtgcttaattcatccccaaggctgtttaccaccaaagactatatgacccctcaat

SEQ ID NO: 30344 - DNA, 80 bp, synthetic construct; identical to SEQ ID NO: 11483
  source 1..80: mol_type = other DNA

SEQ ID NO: 30345 - DNA, 80 bp, synthetic construct
  source 1..80: mol_type = other DNA
gttctaaatgtcctttttagacatcttgcagtctgccctcaattacaaaaagtgcatttgttgaatgttactgacagtca

SEQ ID NO: 30346 - DNA, 80 bp, synthetic construct
  source 1..80: mol_type = other DNA
ctaagcaggtgtatgtgagcaggaaaaaaaccacattagagccacctgaatctagatatgatctatgattttgacagcat

SEQ ID NO: 30347 - DNA, 80 bp, synthetic construct
  source 1..80: mol_type = other DNA
tgattcttggtacaaaatcatacttctttggtatttatgaaaaaaaaggaaggtgttttaactctgagcacccaattcct

SEQ ID NO: 30348 - DNA, 80 bp, synthetic construct
  source 1..80: mol_type = other DNA
cagcaaaatgatttcatgaaatcaatattttattcagtgtcaaagcatcttaactgaattgtgtaagtaattttgtctgt

SEQ ID NO: 30349 - DNA, 80 bp, synthetic construct; identical to SEQ ID NO: 11484
  source 1..80: mol_type = other DNA

SEQ ID NO: 30350 - DNA, 80 bp, synthetic construct
  source 1..80: mol_type = other DNA
atctaagccaactttgtacttttttgctacttttttgtagcatgtatgcagtatgatttctggacttccttaaatataca

SEQ ID NO: 30351 - DNA, 80 bp, synthetic construct
  source 1..80: mol_type = other DNA
gcaacaaaatgttggttataaatacattctttacaaaaaaaaattgaatagtggtcccgcactcataatttatattacag

SEQ ID NO: 30352 - DNA, 80 bp, synthetic construct; identical to SEQ ID NO: 11485
  source 1..80: mol_type = other DNA

SEQ ID NO: 30353 - DNA, 80 bp, synthetic construct
  source 1..80: mol_type = other DNA
acccctgcctcctctttgagcaaatgtacaggagtttctctctaaaactataggttctcgtgaaaaatcaaaagaaaatg

SEQ ID NO: 30354 - DNA, 80 bp, synthetic construct
  source 1..80: mol_type = other DNA
tccttaccaacagaaacttcacaaaattacaggcatgaggaaatcaccaaattggagtagtcccatttgtaggtagctct

SEQ ID NO: 30355 - DNA, 80 bp, synthetic construct
  source 1..80: mol_type = other DNA
taggccactcaagatcttccatacttggaagctgcatgttctcatttctctaatgtttcagaaatcctgtgattacctgg

SEQ ID NO: 30356 - DNA, 80 bp, synthetic construct; identical to SEQ ID NO: 11486
  source 1..80: mol_type = other DNA

SEQ ID NO: 30357 - DNA, 80 bp, synthetic construct
  source 1..80: mol_type = other DNA
ttggctgggccctattaccagagattcatatttaatagttctggggtgtggcatggacatacgattttaaaaaatcttgc

SEQ ID NO: 30358 - DNA, 80 bp, synthetic construct
  source 1..80: mol_type = other DNA
gctccgcctcctgtcagatcagcagcattagattctcatagtagtacaaaccctcttgtgaattgtgcaagtgaggggtc

SEQ ID NO: 30359 - DNA, 80 bp, synthetic construct
  source 1..80: mol_type = other DNA
tagccctctataagtcacacattgataatctttcccttcagagtatttcaagctctaagtatttcccaaagttctttctt

SEQ ID NO: 30360 - DNA, 80 bp, synthetic construct; identical to SEQ ID NO: 11487
  source 1..80: mol_type = other DNA

SEQ ID NO: 30361 - DNA, 80 bp, synthetic construct
  source 1..80: mol_type = other DNA
cccaacacaacatgttcattaaactacccctaaatcaccaaagtgaaatctcttggggtcagattttcagactcagctaa

SEQ ID NO: 30362 - DNA, 80 bp, synthetic construct
  source 1..80: mol_type = other DNA
ctgcaagaagctagcttagaaaggcaagagcttcctgataaaacaaaaaacagatgggctcggttttaactacgtccgag

SEQ ID NO: 30363 - DNA, 80 bp, synthetic construct
  source 1..80: mol_type = other DNA
aaatgagaagttacattgcttgtcatgagttggatggtgatagtcacaactgtaaaaacagtgcaggtaccaggatccaa

SEQ ID NO: 30364 - DNA, 80 bp, synthetic construct
  source 1..80: mol_type = other DNA
gtagtattcagaaaacatgaaatatggcattataataaggataacagttagttgctatacagaatctggtggtgagggga

SEQ ID NO: 30365 - DNA, 80 bp, synthetic construct; identical to SEQ ID NO: 11488
  source 1..80: mol_type = other DNA

SEQ ID NO: 30366 - DNA, 80 bp, synthetic construct
  source 1..80: mol_type = other DNA
ttaggagcaggagagttacaggtgtttaatgcttcctgggctaaaacccccgaattatctgtattaaatgtataacgttt

SEQ ID NO: 30367 - DNA, 80 bp, synthetic construct
  source 1..80: mol_type = other DNA
cagcatctactagaagctaagaagatattgtaattcctctagatgggaaagttaggggcaggaggaaaagaacaacatgt

SEQ ID NO: 30368 - DNA, 80 bp, synthetic construct; identical to SEQ ID NO: 11489
  source 1..80: mol_type = other DNA

SEQ ID NO: 30369 - DNA, 80 bp, synthetic construct
  source 1..80: mol_type = other DNA
tgtaagaatcaccagggacctttaaaaaacccattgtccaggcttcccctcagactagagtccaggccctgaagttaaaa

SEQ ID NO: 30370 - DNA, 80 bp, synthetic construct
  source 1..80: mol_type = other DNA
ggcctgctaaatgccacttgattagtaaacccaattactctcccttactgttagagcagtgaggagttatattgttgcaa

SEQ ID NO: 30371 - DNA, 80 bp, synthetic construct
  source 1..80: mol_type = other DNA
cagaagaaactgggcatctaacccagaaataccagctgagtaggagaagagaaaaggcatcagccagtcaaggtttcaga

SEQ ID NO: 30372 - DNA, 80 bp, synthetic construct; identical to SEQ ID NO: 11490
  source 1..80: mol_type = other DNA

SEQ ID NO: 30373 - DNA, 80 bp, synthetic construct
  source 1..80: mol_type = other DNA
gacaccctggccaccgccgcgcggacaccctcacgaggacaccccggccgcgcggacacctaccgcggggacgccccgac

SEQ ID NO: 30374 - DNA, 80 bp, synthetic construct
  source 1..80: mol_type = other DNA
cgccggaccggggcgggtccagtcccgggcgggccgtcgcgggagaggtgagagcgctggctagaccggggccgaatgcg

SEQ ID NO: 30375 - DNA, 80 bp, synthetic construct
  source 1..80: mol_type = other DNA
tctttggaccggggtggggtccccagactccttgtggaaagctgaggttgaagatctgtgctgtgatgaggggctccaga

SEQ ID NO: 30376 - DNA, 80 bp, synthetic construct
  source 1..80: mol_type = other DNA
ttgcaggaggcctgggggagggtctgtggagccccagactcagagggccttggtgacttctccaacaggctccctgttgg

SEQ ID NO: 30377 - DNA, 80 bp, synthetic construct; identical to SEQ ID NO: 11491
  source 1..80: mol_type = other DNA

SEQ ID NO: 30378 - DNA, 80 bp, synthetic construct
  source 1..80: mol_type = other DNA
gtggggactcagtagagttagggaaacagaaaatcaccaaaactgggaagggagggttggcccctgtgaaaccaactgat

SEQ ID NO: 30379 - DNA, 80 bp, synthetic construct
  source 1..80: mol_type = other DNA
aacttctcaggcaggcactttagagggggctaggatcgttctgggaatgtggccttgagctgttaggagctatgttagtg

SEQ ID NO: 30380 - DNA, 80 bp, synthetic construct
  source 1..80: mol_type = other DNA
gttctgtgttgtgttcataaactaccagcgggaccatctgttgagacttggtagcaaaggatttttgctggatgatgcaa

SEQ ID NO: 30381 - DNA, 80 bp, synthetic construct
  source 1..80: mol_type = other DNA
ctgggcaacataaagaccccatctctacaaaaaatttaaaaattagcccggcgtggtggcatgggcctatagttccagct

SEQ ID NO: 30382 - DNA, 80 bp, synthetic construct; identical to SEQ ID NO: 11492
  source 1..80: mol_type = other DNA

SEQ ID NO: 30383 - DNA, 80 bp, synthetic construct
  source 1..80: mol_type = other DNA
cagcagctccaggcacaaaggctgcccctggagaatctgttgtggttctgagttctttcaagtttatatcaagttttccg

SEQ ID NO: 30384 - DNA, 80 bp, synthetic construct
  source 1..80: mol_type = other DNA
gaaatgtcagtctgaagagagtggtaggtagccagatactgaaggaaagtagatgggaggatttggtaagggctgacgtg

SEQ ID NO: 30385 - DNA, 80 bp, synthetic construct; identical to SEQ ID NO: 11493
  source 1..80: mol_type = other DNA

SEQ ID NO: 30386 - DNA, 80 bp, synthetic construct
  source 1..80: mol_type = other DNA
tcaggagatcgagaccatcctggctaacacggtgaaaccccatctctactaaaaatacaaaattagccaggcgtggtggc

SEQ ID NO: 30387 - DNA, 80 bp, synthetic construct
  source 1..80: mol_type = other DNA
tacaaaagacagtgaactagactaggatctgataactcccaagggggtgttatatttctccactgaagcatagcatttct

SEQ ID NO: 30388 - DNA, 80 bp, synthetic construct
  source 1..80: mol_type = other DNA
atagggaatcttagattgagctttttaaagcctttcgaggttaggaagccaagccaagaacttccaaccagacttcacct

SEQ ID NO: 30389 - DNA, 80 bp, synthetic construct; identical to SEQ ID NO: 11494
  source 1..80: mol_type = other DNA

SEQ ID NO: 30390 - DNA, 80 bp, synthetic construct
  source 1..80: mol_type = other DNA
actcaataatagtttctgatttttggaggggtcaggccggaagaaaaagataattgcttcaattttgtttagagaagtat

SEQ ID NO: 30391 - DNA, 80 bp, synthetic construct
  source 1..80: mol_type = other DNA
ttctcctgcctcagcctcccgagtagctgggactacaggtgcctgccaccacgcccggctaattttttgtgtttttagta

SEQ ID NO: 30392 - DNA, 80 bp, synthetic construct
  source 1..80: mol_type = other DNA
gccaacaatattctgaacaaaagtcataaaaagactgtaatcatccttcagcagtttactcagttgcatgcaggtactga

SEQ ID NO: 30393 - DNA, 80 bp, synthetic construct
  source 1..80: mol_type = other DNA
ccaacgtggctatatcacttgaagtcaggagttcgagaccagcttggccaacatggtgaaaccctgtctctaccaaaaaa

SEQ ID NO: 30394 - DNA, 80 bp, synthetic construct; identical to SEQ ID NO: 11495
  source 1..80: mol_type = other DNA

SEQ ID NO: 30395 - DNA, 80 bp, synthetic construct
  source 1..80: mol_type = other DNA
gatgaagcactttgccctgtagctgattgcaagagatttcaggaaagcatcagagtaaaactctaatgacaaaagactta

SEQ ID NO: 30396 - DNA, 80 bp, synthetic construct
  source 1..80: mol_type = other DNA
tgggaactttatacaatatctggaatccttatattaacatttaccaatatgcatgtaactcaaggaagtttaaatagcat

SEQ ID NO: 30397 - DNA, 80 bp, synthetic construct
  source 1..80: mol_type = other DNA
gattacaggtgtgcaccatcacacccagctaatttttgtatttttagtagagatggggtttcgccacactggccaggctg

SEQ ID NO: 30398 - DNA, 80 bp, synthetic construct; identical to SEQ ID NO: 11496
  source 1..80: mol_type = other DNA

SEQ ID NO: 30399 - DNA, 80 bp, synthetic construct
  source 1..80: mol_type = other DNA
ttccctgtttggcagccgaggcggacagcgagaggagacagcttatgtcattatttctgtatttcagagacctttagtac

SEQ ID NO: 30400 - DNA, 80 bp, synthetic construct
  source 1..80: mol_type = other DNA
agcagagtcttctctaactcccacagggaaagggagacttcctttcccggtctgctaagtaacgggtgctttttctaggc

SEQ ID NO: 30401 - DNA, 80 bp, synthetic construct
  source 1..80: mol_type = other DNA
ttatcactgtatggcctggtttctcctaggttataattgtagagcgaagattattataatattggaataaagagtaattg

SEQ ID NO: 30402 - DNA, 80 bp, synthetic construct; identical to SEQ ID NO: 11497
  source 1..80: mol_type = other DNA

SEQ ID NO: 30403 - DNA, 80 bp, synthetic construct
  source 1..80: mol_type = other DNA
caaaacaaaaagttgaaaaattagctgggcatggtggtacatgtctgtagtcccatgtactctgaagactgaggcgggag

SEQ ID NO: 30404 - DNA, 80 bp, synthetic construct
  source 1..80: mol_type = other DNA
gatcacctgagatcaggagttcaagaccaggctggccaacatggcaaaaccccacctgtactaaaaatacaaaaattagc

SEQ ID NO: 30405 - DNA, 80 bp, synthetic construct; identical to SEQ ID NO: 11498
  source 1..80: mol_type = other DNA

SEQ ID NO: 30406 - DNA, 80 bp, synthetic construct
  source 1..80: mol_type = other DNA
ctcaccctcccaagtagctgggactacaggcatgtaccaccatgccaggctaataatttttgagtttttttatagaaaca

SEQ ID NO: 30407 - DNA, 80 bp, synthetic construct
  source 1..80: mol_type = other DNA
atcctatcttcctcccatactttgtataggaaattgtttccctcattcttattgtttctaggagttttgttttcatatat

SEQ ID NO: 30408 - DNA, 80 bp, synthetic construct
  source 1..80: mol_type = other DNA
gagattacaggcatgagtcaccacgcccggccataacttgtattttacaagtaaaactgggaagaagacaattggaaatt

SEQ ID NO: 30409 - DNA, 80 bp, synthetic construct; identical to SEQ ID NO: 11499
  source 1..80: mol_type = other DNA

SEQ ID NO: 30410 - DNA, 80 bp, synthetic construct
  source 1..80: mol_type = other DNA
ttttatatattttttcttttcttttcttttcttttttttttttttttttttttctgtagagacaaggtcttgctgtgttg

SEQ ID NO: 30411 - DNA, 80 bp, synthetic construct
  source 1..80: mol_type = other DNA
tgaggggaaggctttctacctgtatttgtggataagacctttacgacttgttttgccctgatggatgactacatgtttcc

SEQ ID NO: 30412 - DNA, 80 bp, synthetic construct
  source 1..80: mol_type = other DNA
gggggtgtctccttcaagagaaagtagggaagtatggaggtgataggaagggagaggcctgagaggagctagtttgggga

SEQ ID NO: 30413 - DNA, 80 bp, synthetic construct; identical to SEQ ID NO: 11500
  source 1..80: mol_type = other DNA

SEQ ID NO: 30414 - DNA, 80 bp, synthetic construct
  source 1..80: mol_type = other DNA
gggcgaatcacgaggtcaggagatcaagaccatcctggctaacacggtgaaaccccatctctactaaaaatacaaaaaat

SEQ ID NO: 30415 - DNA, 80 bp, synthetic construct
  source 1..80: mol_type = other DNA
aaaaaaagcctgggactcttagcgcctcagagccttactcagaatcataaaatcattagaagcaatgtctgtcctcactg

SEQ ID NO: 30416 - DNA, 80 bp, synthetic construct
  source 1..80: mol_type = other DNA
tcctggcccctgatcacagagaaacacagctggacattaaagtggtgaggacggaaattataatatttggtgaccagtga

SEQ ID NO: 30417 - DNA, 80 bp, synthetic construct; identical to SEQ ID NO: 11501
  source 1..80: mol_type = other DNA

SEQ ID NO: 30418 - DNA, 80 bp, synthetic construct
  source 1..80: mol_type = other DNA
ggagtttaagaccagcctgggcaacatagcaagacgctgtctctacaaaaataatttttaaaaaattagccaggcactgc

SEQ ID NO: 30419 - DNA, 80 bp, synthetic construct
  source 1..80: mol_type = other DNA
gaccctgtctttaaaaacaaaaaggccaggcaggtgcggtggctcatgcctgtaatcccagcactttgggaggccaaggc

SEQ ID NO: 30420 - DNA, 80 bp, synthetic construct
  source 1..80: mol_type = other DNA
ggagcttgcagtgagccgagattgcgccactgcactctagcctgggagacagagcaagactccgtctcaaaacaaaacaa

SEQ ID NO: 30421 - DNA, 80 bp, synthetic construct
  source 1..80: mol_type = other DNA
tgaaaccttgtctctactaaaaatacaaaaattagctaggcgtggtggtgtgagcctataatcccagctactcaggaggc

SEQ ID NO: 30422 - DNA, 80 bp, synthetic construct; identical to SEQ ID NO: 11502
  source 1..80: mol_type = other DNA

SEQ ID NO: 30423 - DNA, 80 bp, synthetic construct
  source 1..80: mol_type = other DNA
aggtcagattccactcacatccagtgcggtctggatgcaggcctggcccagagcctggtccagatgctggggctttgttt

SEQ ID NO: 30424 - DNA, 80 bp, synthetic construct
  source 1..80: mol_type = other DNA
gcccggctcattttttgcatttttagtggaaacagagtttcaccatgttggccaggatggtctccaactccagaccttgt

SEQ ID NO: 30425 - DNA, 80 bp, synthetic construct; identical to SEQ ID NO: 11503
  source 1..80: mol_type = other DNA

SEQ ID NO: 30426 - DNA, 80 bp, synthetic construct
  source 1..80: mol_type = other DNA
atgtgcgaccaccatgcaggtctggcccatggaagggaggggagggggccccgacggggccacagtaaaggagtggaggg

SEQ ID NO: 30427 - DNA, 80 bp, synthetic construct
  source 1..80: mol_type = other DNA
tgtgcagtccgtgtgaaagccttccctttagctattaggtattgagtcaaaaaaaaaaaaagccttcccctgagcctggg

SEQ ID NO: 30428 - DNA, 80 bp, synthetic construct
  source 1..80: mol_type = other DNA
atgagagcagccacggacaatgtctgtgcaattgtgcgttttttgttttgttttgttttgagatggagtcccactcttgt

SEQ ID NO: 30429 - DNA, 80 bp, synthetic construct
  source 1..80: mol_type = other DNA
ccatgttggtcaggctgttcttgaactcctgacctcaggtgatccacccgcctcagcctcccaaaatgctgggattacag

SEQ ID NO: 30430 - DNA, 80 bp, synthetic construct; identical to SEQ ID NO: 11504
  source 1..80: mol_type = other DNA

SEQ ID NO: 30431 - DNA, 80 bp, synthetic construct
  source 1..80: mol_type = other DNA
agtagctgcagctataggcacaccaccatgcctggctcaatgggtattttgtggccattaaacttctggtcattccttta

SEQ ID NO: 30432 - DNA, 80 bp, synthetic construct
  source 1..80: mol_type = other DNA
ggcctgtctctacgcacctgtactggctctccctggattactggatcgcagtcgaatcccctgccagaatcctggtcccc

SEQ ID NO: 30433 - DNA, 80 bp, synthetic construct
  source 1..80: mol_type = other DNA
gacctgtgtgccgagcagagctgccccgtgtgtaaacgcttagaactggcctccttcctgccatctgtgtcctgtttgtc

SEQ ID NO: 30434 - DNA, 80 bp, synthetic construct; identical to SEQ ID NO: 11505
  source 1..80: mol_type = other DNA

SEQ ID NO: 30435 - DNA, 80 bp, synthetic construct
  source 1..80: mol_type = other DNA
agaccaaagtgtcaatcactcttctgacagaggtgatagcagaatgaaaaactgatggaccccagatctttgcaaagaga

SEQ ID NO: 30436 - DNA, 80 bp, synthetic construct
  source 1..80: mol_type = other DNA
cctgcctcagcctcctgagtaaccaggactacaggcacacaccaccacgcccagctaatttttgttatttttagcagaga

SEQ ID NO: 30437 - DNA, 80 bp, synthetic construct
  source 1..80: mol_type = other DNA
ctcagcctcctgagtagctgggactaacaggtgcttgccaccaagcctggctaatttttgtatttttagtagagacaggg

SEQ ID NO: 30438 - DNA, 80 bp, synthetic construct; identical to SEQ ID NO: 11506
  source 1..80: mol_type = other DNA

SEQ ID NO: 30439 - DNA, 80 bp, synthetic construct
  source 1..80: mol_type = other DNA
atatttatggaaaacattcctgtcttttttttttttttgagacggagtctcactctgttacccaggctggagtgcagtgg

SEQ ID NO: 30440 - DNA, 80 bp, synthetic construct
  source 1..80: mol_type = other DNA
cgatctcctgacctcgtgatctgcccgccccggcctcccaaagtgctgggattacaggcatgagccaccgcgcccggcca

SEQ ID NO: 30441 - DNA, 80 bp, synthetic construct; identical to SEQ ID NO: 11507
  source 1..80: mol_type = other DNA

SEQ ID NO: 30442 - DNA, 80 bp, synthetic construct
  source 1..80: mol_type = other DNA
cacacgtgcatctgcatgtggcgtgcatgtggcaagcatgtgcaggtgctgtgtgggcacgatcatgcctgccctctact

SEQ ID NO: 30443 - DNA, 80 bp, synthetic construct
  source 1..80: mol_type = other DNA
tgaatcatacctcattgtatggctctaccatgttttattatccattcaggtgctaacggatggaagggttgtttctacct

SEQ ID NO: 30444 - DNA, 80 bp, synthetic construct
  source 1..80: mol_type = other DNA
gttggccattgtggatgatgttgctatgcatattggggtacgagtatctggtttagtccctgttttcaattcttggtata

SEQ ID NO: 30445 - DNA, 80 bp, synthetic construct
  source 1..80: mol_type = other DNA
ctggagtgcagtggcaggatcacagccctgtgcagcctcaacctcctgggctcaggtgatcctcccgcctcagcctccca

SEQ ID NO: 30446 - DNA, 80 bp, synthetic construct; identical to SEQ ID NO: 11508
  source 1..80: mol_type = other DNA

SEQ ID NO: 30447 - DNA, 80 bp, synthetic construct
  source 1..80: mol_type = other DNA
tatcgagaccccacctccactccatctctaccaaaaaaaaaaaaaaaaaaaagctgggtgtgcggtggtgcacatctgtc

SEQ ID NO: 30448 - DNA, 80 bp, synthetic construct
  source 1..80: mol_type = other DNA
agcagagagaattcccctcggtcctccggcctgcaccccaccgccccccaccacaggggcattcaaaactgtctttttgc

SEQ ID NO: 30449 - DNA, 80 bp, synthetic construct; identical to SEQ ID NO: 11509
  source 1..80: mol_type = other DNA

SEQ ID NO: 30450 - DNA, 80 bp, synthetic construct
  source 1..80: mol_type = other DNA
ggcgtggtcccaaagtcaattggatgtggtcccgcgtccctcccggcccagtgggcggggcctccccttctggggcctcc

SEQ ID NO: 30451 - DNA, 80 bp, synthetic construct
  source 1..80: mol_type = other DNA
tcacactcacaagggaatcccagcgctcttctcctctggcggttgctggagggccttgtgaggtggccgtgggcactgta

SEQ ID NO: 30452 - DNA, 80 bp, synthetic construct
  source 1..80: mol_type = other DNA
ttgagcacttccccagcccccatggctcttggccattggaccccagttggccacagagccgcgggcaggtgggacaggcg

SEQ ID NO: 30453 - DNA, 80 bp, synthetic construct
  source 1..80: mol_type = other DNA
ttatgaacagacagacctagagattagagattcaaaagccaaattcttacacaattcaagtattaacgcagatttggatt

SEQ ID NO: 30454 - DNA, 80 bp, synthetic construct; identical to SEQ ID NO: 11510
  source 1..80: mol_type = other DNA

SEQ ID NO: 30455 - DNA, 80 bp, synthetic construct
  source 1..80: mol_type = other DNA
cctgtgggtcatggcacgtcctgccccgctgggaaacacagtgggccacgggtttccctgcaggcctgggacccttccca

SEQ ID NO: 30456 - DNA, 80 bp, synthetic construct
  source 1..80: mol_type = other DNA
ttcctgtgagctgcatgttggccactgtgacctatctgtctcatcatctttttcttactggtttgtgtatgttcttggta

SEQ ID NO: 30457 - DNA, 80 bp, synthetic construct
  source 1..80: mol_type = other DNA
agcccacagggcagtgtggacagggaccaggagactgcccctggggtccctggctgggggacactagtagggatgtccct

SEQ ID NO: 30458 - DNA, 80 bp, synthetic construct; identical to SEQ ID NO: 11511
  source 1..80: mol_type = other DNA

SEQ ID NO: 30459 - DNA, 80 bp, synthetic construct
  source 1..80: mol_type = other DNA
acatgtccactctgcctgtgtaaataggccacatggcctgaaatcccctagaagcctggtgtccgcatgacctcccccta

SEQ ID NO: 30460 - DNA, 80 bp, synthetic construct
  source 1..80: mol_type = other DNA
tgggagcccagggccccatcccagaaagacctctgagtgagcacaggggccctagaagaagtttccttgtgtccttcccg

SEQ ID NO: 30461 - DNA, 80 bp, synthetic construct; identical to SEQ ID NO: 11512
  source 1..80: mol_type = other DNA

SEQ ID NO: 30462 - DNA, 80 bp, synthetic construct
  source 1..80: mol_type = other DNA
caccatacagcctctcctttggccacccgtgactacccccaactccgggccatggggcttccctacccctgggtgtcctc

SEQ ID NO: 30463 - DNA, 80 bp, synthetic construct
  source 1..80: mol_type = other DNA
ccgagggcaccagagggcacgagaaggctggctccctggcgctgacacgtcaggcaactgaggcacaaggctggcatttc

SEQ ID NO: 30464 - DNA, 80 bp, synthetic construct
  source 1..80: mol_type = other DNA
cctggtgctgctggtggtgctgctgctgcttctgaggcactggggctggggcctgtgccttatcggctggaacgagttca

SEQ ID NO: 30465 - DNA, 80 bp, synthetic construct
  source 1..80: mol_type = other DNA
gaaaggtggggtccgggccagcaggtgctcagctctgggacagggacccaggaccaggcatcaaagcccttacaggagaa

SEQ ID NO: 30466 - DNA, 80 bp, synthetic construct; identical to SEQ ID NO: 11513
  source 1..80: mol_type = other DNA

SEQ ID NO: 30467 - DNA, 80 bp, synthetic construct
  source 1..80: mol_type = other DNA
gggtggaaaagatagggaccagcgtgagcatagaggctaagggaccatgggagctccaagcgcgctcacagtggggacca

SEQ ID NO: 30468 - DNA, 80 bp, synthetic construct
  source 1..80: mol_type = other DNA
gtgctcacctctcctccgtccccaaccctgcacaggcaagatcgtggacgccgtgattcaggagcaccagccctccgtgc

SEQ ID NO: 30469 - DNA, 80 bp, synthetic construct
  source 1..80: mol_type = other DNA
tgacccgttgtcagacctggaaaaagggccggctgtgggcagggagggcatgcgcactttgtcctccccaccaggtgttc

SEQ ID NO: 30470 - DNA, 80 bp, synthetic construct; identical to SEQ ID NO: 11514
  source 1..80: mol_type = other DNA

SEQ ID NO: 30471 - DNA, 80 bp, synthetic construct
  source 1..80: mol_type = other DNA
tgaagaagaagtatgatgtggacacactggacatggtcttcctcgaccactggaaggaccggtacctgccggacacgctt

SEQ ID NO: 30472 - DNA, 80 bp, synthetic construct
  source 1..80: mol_type = other DNA
gactgaggaggccctgtggtgggtggagatgggtggggagctgggccaggggcctggctgggtggcctgttgggaactgg

SEQ ID NO: 30473 - DNA, 80 bp, synthetic construct; identical to SEQ ID NO: 11515
  source 1..80: mol_type = other DNA

SEQ ID NO: 30474 - DNA, 80 bp, synthetic construct
  source 1..80: mol_type = other DNA
gctctgtgatcctccactgggcttgggacacccaccctcacggcctccccacctggtgctcgctcacctgcagctctccc

SEQ ID NO: 30475 - DNA, 80 bp, synthetic construct
  source 1..80: mol_type = other DNA
gggagtcagggcacacaggactttgggcaggtgaggatgaggttagacctgtcttctggagctgggctcaggggctcatg

SEQ ID NO: 30476 - DNA, 80 bp, synthetic construct
  source 1..80: mol_type = other DNA
ggctcactgcaacctccacctcttgggttcaagcgattaccctgccttagcctcctgagtagctgggactacaggcgcgc

SEQ ID NO: 30477 - DNA, 80 bp, synthetic construct; identical to SEQ ID NO: 11516
  source 1..80: mol_type = other DNA

SEQ ID NO: 30478 - DNA, 80 bp, synthetic construct
  source 1..80: mol_type = other DNA
atgatgctggcaattgggtattgatggcagagagctggcactcagccagatgggcttcacttgggcaggaaagacaccca

SEQ ID NO: 30479 - DNA, 80 bp, synthetic construct
  source 1..80: mol_type = other DNA
aaagaagcaaagtcatgaagtgggaagtcatgaattgggaatgggtgtccttgttaaacgcacatctgcacactcagggc

SEQ ID NO: 30480 - DNA, 80 bp, synthetic construct
  source 1..80: mol_type = other DNA
tccaccgggctgctgtagtcaccaagtccagcccatgcccaaaggaagaggaatgagttcccccttaaaaaaaaaaaaaa

SEQ ID NO: 30481 - DNA, 80 bp, synthetic construct; identical to SEQ ID NO: 11517
  source 1..80: mol_type = other DNA

SEQ ID NO: 30482 - DNA, 80 bp, synthetic construct
  source 1..80: mol_type = other DNA
ctcagcatagtgtcacctgctcctctgacactgtcgcttctccacggcattagattttcagtcctgctcagacgctgatg

SEQ ID NO: 30483 - DNA, 80 bp, synthetic construct
  source 1..80: mol_type = other DNA
cttccctccttctttcctgtttaactcgtgcaggtgcagtggtctggtgtctttcagtccgctgacgtcttctgtatccc

SEQ ID NO: 30484 - DNA, 80 bp, synthetic construct
  source 1..80: mol_type = other DNA
tttcagctgacattgctaggacatttttttttttttctaaatgaaaacacatcatgattcatggtggtacttcctgctca

SEQ ID NO: 30485 - DNA, 80 bp, synthetic construct
  source 1..80: mol_type = other DNA
ccatcccagaggcatgtggggtcggataccagtgtttcaaggcacctgcctgcaaattgattttattatactttagatgt

SEQ ID NO: 30486 - DNA, 80 bp, synthetic construct; identical to SEQ ID NO: 11518
  source 1..80: mol_type = other DNA

SEQ ID NO: 30487 - DNA, 80 bp, synthetic construct
  source 1..80: mol_type = other DNA
aaggggcaggcttgttgatgggaggtctgccccacctcagccctgcagggtcaccctggtcaggccaatattgtctccag

SEQ ID NO: 30488 - DNA, 80 bp, synthetic construct
  source 1..80: mol_type = other DNA
atggatacaggagttgatgagagaaaggtccctgtcctcacggggcccatgttctgaaggtggcacccaagtcttgtaca

SEQ ID NO: 30489 - DNA, 80 bp, synthetic construct
  source 1..80: mol_type = other DNA
tgcaggaatgtggcctgctgcggaaggggacagtgctactggctgacaacgtgatctgcccaggtgcgccagacttccta

SEQ ID NO: 30490 - DNA, 80 bp, synthetic construct; identical to SEQ ID NO: 11519
  source 1..80: mol_type = other DNA

SEQ ID NO: 30491 - DNA, 80 bp, synthetic construct
  source 1..80: mol_type = other DNA
tctaaatatttagatataactcgacttagtacatccttctcaactgccattcccctgctgcccttgacttgggcaccaaa

SEQ ID NO: 30492 - DNA, 80 bp, synthetic construct
  source 1..80: mol_type = other DNA
gactgccggcctgggaaacgaagaggagtcagccagcattcacacctttctgaccaagcaggcgctggggacaggtggac

SEQ ID NO: 30493 - DNA, 80 bp, synthetic construct; identical to SEQ ID NO: 11520
  source 1..80: mol_type = other DNA

SEQ ID NO: 30494 - DNA, 80 bp, synthetic construct
  source 1..80: mol_type = other DNA
attctactcctgggctcaaggcctggctagcccccagccagcccactcctatggatagacagaccagtgagcccaagtgg

SEQ ID NO: 30495 - DNA, 80 bp, synthetic construct
  source 1..80: mol_type = other DNA
gaagccagccacttgtgccagacctgagtggcagaaagcaaaaagttcctttgctgctttaatttttaaattttcttaca

SEQ ID NO: 30496 - DNA, 80 bp, synthetic construct
  source 1..80: mol_type = other DNA
taggatttctgaacaatatctttatttagctcaggtagttgttcttacacatttttggatacctgggttagaattttccc

SEQ ID NO: 30497 - DNA, 80 bp, synthetic construct; identical to SEQ ID NO: 11521
  source 1..80: mol_type = other DNA

SEQ ID NO: 30498 - DNA, 80 bp, synthetic construct
  source 1..80: mol_type = other DNA
agaggaatgtgatgttcccaggaactgtgtcctagacccatagggtcagattgctcagcctagttcaagcagtgagacta

SEQ ID NO: 30499 - DNA, 80 bp, synthetic construct
  source 1..80: mol_type = other DNA
cttccagagagttcttcagagcttctcagaggcctaaggacctcctaaccctagcaggcctcctggctcaagcacaactt

SEQ ID NO: 30500 - DNA, 80 bp, synthetic construct
  source 1..80: mol_type = other DNA
aaccttagaccacataggccagcctgctggtctggctgcccaaccagaccaggtagacagagtctaggcctcagggctct

SEQ ID NO: 30501 - DNA, 80 bp, synthetic construct
  source 1..80: mol_type = other DNA
aatggtctcaccgatacacttccgcttgcccatgccaaagataatcaccttctcacttaacaccttgtcgatagcaccat

SEQ ID NO: 30502 - DNA, 80 bp, synthetic construct; identical to SEQ ID NO: 11522
  source 1..80: mol_type = other DNA

SEQ ID NO: 30503 - DNA, 80 bp, synthetic construct
  source 1..80: mol_type = other DNA
atggttgatctgccactggtttacaaagacacaacgccccttggggatgtaaaagcctttcaaacttgtgtctcttgttg

SEQ ID NO: 30504 - DNA, 80 bp, synthetic construct
  source 1..80: mol_type = other DNA
tgaaggggacgaaggaagagtgtcggaaggtctccaggatgaaggcctccatatagggcagatgggatctgtcagagagc

SEQ ID NO: 30505 - DNA, 80 bp, synthetic construct; identical to SEQ ID NO: 11523
  source 1..80: mol_type = other DNA

SEQ ID NO: 30506 - DNA, 80 bp, synthetic construct
  source 1..80: mol_type = other DNA
ctgtctgtgatgtcccggatgtggcccttaggtagggaaagtccacaggtgagcaagatctcaaacccagagctacctct

SEQ ID NO: 30507 - DNA, 80 bp, synthetic construct
  source 1..80: mol_type = other DNA
tgtactgttatcatctggatgtgctctttatcttctttctattatgaggccaggagatgaactctttaactcttcctggc

SEQ ID NO: 30508 - DNA, 80 bp, synthetic construct
  source 1..80: mol_type = other DNA
tgagaacttgccaagccccatgcagttcctcttacctttgacctcccaggccctgatgccatctgcttcccaccacccac

SEQ ID NO: 30509 - DNA, 80 bp, synthetic construct; identical to SEQ ID NO: 11524
  source 1..80: mol_type = other DNA

SEQ ID NO: 30510 - DNA, 80 bp, synthetic construct
  source 1..80: mol_type = other DNA
agaaacttttcaggccattctgggccaggcgccggcgggcagcccacactggtccagagtctgggctgaaggacatgctc

SEQ ID NO: 30511 - DNA, 80 bp, synthetic construct
  source 1..80: mol_type = other DNA
tccttgacagtgccaggtgcgggttctttcccagggtcagcatgtgcccaatcagaggccagccccatggccctggtgga

SEQ ID NO: 30512 - DNA, 80 bp, synthetic construct
  source 1..80: mol_type = other DNA
ggaagaaaaaaagtcaagccgtcagattgggggatgagaaaagccaatatctagagtgtcagggaaaggggaaacctttc

SEQ ID NO: 30513 - DNA, 80 bp, synthetic construct
  source 1..80: mol_type = other DNA
ccaaggtcacacagccagaaagtgttggatgcagactcccaagccaagttgcctaattccagaacgctttctcttaactg

SEQ ID NO: 30514 - DNA, 80 bp, synthetic construct; identical to SEQ ID NO: 11525
  source 1..80: mol_type = other DNA

SEQ ID NO: 30515 - DNA, 80 bp, synthetic construct
  source 1..80: mol_type = other DNA
tgaagagtggtcagatcaatgaaggaattttcccagaaccctcagttctctgctgctcaatcccaggatgcaggaaatcc

SEQ ID NO: 30516 - DNA, 80 bp, synthetic construct
  source 1..80: mol_type = other DNA
ttttggctcaattctcaatgaatgaacagtttggacctcccccttttgcaggttaccagagagcagagaataaatggaag

SEQ ID NO: 30517 - DNA, 80 bp, synthetic construct; identical to SEQ ID NO: 11526
  source 1..80: mol_type = other DNA

SEQ ID NO: 30518 - DNA, 80 bp, synthetic construct
  source 1..80: mol_type = other DNA
ggttcctaccacaagtattatagtggagggaggcttcctggaggggctaaatatcaaagcacactagatccctgagtcaa

SEQ ID NO: 30519 - DNA, 80 bp, synthetic construct
  source 1..80: mol_type = other DNA
tcaccctgattgtctcccagcaaaggacaaagaagatggtcaatgagataggaaaggcctgggactcctgcacagatctg

SEQ ID NO: 30520 - DNA, 80 bp, synthetic construct
  source 1..80: mol_type = other DNA
gtcatcagaaagcctgagggaggggctgcacatattccagcctgccaggtggccttgatggggaagccccagggtaggca

SEQ ID NO: 30521 - DNA, 80 bp, synthetic construct; identical to SEQ ID NO: 11527
  source 1..80: mol_type = other DNA

SEQ ID NO: 30522 - DNA, 80 bp, synthetic construct
  source 1..80: mol_type = other DNA
atctcaagcacctgcctctacaggtacctttcttgggaccaatttacaatctctgggatccccaactatagaacctggaa

SEQ ID NO: 30523 - DNA, 80 bp, synthetic construct
  source 1..80: mol_type = other DNA
caagggcagccctggccctggctgaagcccaaccccaacctccaagactgtgagaggatggggactcatccctggaggag

SEQ ID NO: 30524 - DNA, 80 bp, synthetic construct
  source 1..80: mol_type = other DNA
gactctttggtacaatacccagcatgcatgctgtgccaggggctgacaagggtgctgtccttggcttccccattttggag

SEQ ID NO: 30525 - DNA, 80 bp, synthetic construct; identical to SEQ ID NO: 11528
  source 1..80: mol_type = other DNA

SEQ ID NO: 30526 - DNA, 80 bp, synthetic construct; identical to SEQ ID NO: 11529
  source 1..80: mol_type = other DNA

SEQ ID NO: 30527 - DNA, 80 bp, synthetic construct
  source 1..80: mol_type = other DNA
acctccaccctcatcactgatggccagagcttgaccttcagcacagactctggaccggtgtgggctgcccgccggcgcct

SEQ ID NO: 30528 - DNA, 80 bp, synthetic construct
  source 1..80: mol_type = other DNA
gtggtgtcagtggccaacgtcattggtgccatgtgcttcggacagcacttccctgagagtagcgatgagatgctcagcct

SEQ ID NO: 30529 - DNA, 80 bp, synthetic construct
  source 1..80: mol_type = other DNA
caggactttgacaaggtgagcccggggtgcaggtggcaaggggcaccttgcagggcctgggtgcagcccctccctcccag

SEQ ID NO: 30530 - DNA, 80 bp, synthetic construct; identical to SEQ ID NO: 11530
  source 1..80: mol_type = other DNA

SEQ ID NO: 30531 - DNA, 80 bp, synthetic construct
  source 1..80: mol_type = other DNA
cagctcctgctgcaagctgcaaccccctgcctagagaccaagttgggaggataggggggtacccagccaccaggtacagg

SEQ ID NO: 30532 - DNA, 80 bp, synthetic construct
  source 1..80: mol_type = other DNA
gattgtcaaccttgtcaatgacatctttggagcaggtaggaaccagaaccttgcccctccatccaacaatgcctgctgtt

SEQ ID NO: 30533 - DNA, 80 bp, synthetic construct
  source 1..80: mol_type = other DNA
cttcagtttccccatctgaacaataaggtgttctctggcctgtaagtctaggcccctataattccagcagctaattctga

SEQ ID NO: 30534 - DNA, 80 bp, synthetic construct
  source 1..80: mol_type = other DNA
cacggttcaggatttgacacagtcaccacagccatctcctggagcctcatgtaccttgtgaccaagcctgagatacagag

SEQ ID NO: 30535 - DNA, 80 bp, synthetic construct; identical to SEQ ID NO: 11531
  source 1..80: mol_type = other DNA

SEQ ID NO: 30536 - DNA, 80 bp, synthetic construct
  source 1..80: mol_type = other DNA
caggtgaggcctgccggttctgccctcccacctctaaagtgcttgccatgttttctcttcctggcttctcagccctggcc

SEQ ID NO: 30537 - DNA, 80 bp, synthetic construct
  source 1..80: mol_type = other DNA
cagtcaggtcggcctcaccctcacaagcatgaccctattggcctccaatcttgctaacgctgaaccttctgcctggaata

SEQ ID NO: 30538 - DNA, 80 bp, synthetic construct; identical to SEQ ID NO: 11532
  source 1..80: mol_type = other DNA

SEQ ID NO: 30539 - DNA, 80 bp, synthetic construct
  source 1..80: mol_type = other DNA
agagaagtttagtaaatacttgctgaagttaaagaacaggacgcaaggaagagggaggatgtttctacctcttccctgtt

SEQ ID NO: 30540 - DNA, 80 bp, synthetic construct
  source 1..80: mol_type = other DNA
tacatccccaagaaatgctgtgtcttcgtaaaccagtggcaggtcaaccatgacccgtgagtacatacccctcacgaaaa

SEQ ID NO: 30541 - DNA, 80 bp, synthetic construct
  source 1..80: mol_type = other DNA
atgaaaggaggggacctcaattgctatagtctgctctaagtgacgatatttacaaaagtttcacaaactttagtgcacag

SEQ ID NO: 30542 - DNA, 80 bp, synthetic construct
  source 1..80: mol_type = other DNA
acatggtggtgcgcctataatcccagctactccagaggctgaggcaggagaattgcttgaactctggaggtagaggctgc

SEQ ID NO: 30543 - DNA, 80 bp, synthetic construct; identical to SEQ ID NO: 11533
  source 1..80: mol_type = other DNA

SEQ ID NO: 30544 - DNA, 80 bp, synthetic construct
  source 1..80: mol_type = other DNA
ggacatactgttgaggccccttaggaggcatattttgagtaggatgaagaaacgtatgtctttctttcttcctttcactt

SEQ ID NO: 30545 - DNA, 80 bp, synthetic construct
  source 1..80: mol_type = other DNA
aatattaaaaggcactatctttaaggctggtcattttagagagagctttgtaaaagaaataagcatcaggccaggtgtgg

SEQ ID NO: 30546 - DNA, 80 bp, synthetic construct
  source 1..80: mol_type = other DNA
gcttgagctcatgagtctgagaccagtgaaaccccgtctctgcaaaaaaaaaaaaaaaaaaaaatacaaaaattagccgg

SEQ ID NO: 30547 - DNA, 80 bp, synthetic construct; identical to SEQ ID NO: 11534
  source 1..80: mol_type = other DNA

SEQ ID NO: 30548 - DNA, 80 bp, synthetic construct
  source 1..80: mol_type = other DNA
gaagatgatgctgtttggcatgggcaagcgccggtgtatcggggaagtcctggccaagtgggagatcttcctcttcctgg

SEQ ID NO: 30549 - DNA, 80 bp, synthetic construct
  source 1..80: mol_type = other DNA
agcccttgtttctcttcctttctttttttaaaaaatagcagctttagccaagtgcagggcctgtaatcccagcattttag

SEQ ID NO: 30550 - DNA, 80 bp, synthetic construct
  source 1..80: mol_type = other DNA
atatatacatatatatatagcagctttatggagatataattcttatgccatataattcaccttctttttttttttttgtc

SEQ ID NO: 30551 - DNA, 80 bp, synthetic construct; identical to SEQ ID NO: 11535
  source 1..80: mol_type = other DNA

SEQ ID NO: 30552 - DNA, 80 bp, synthetic construct
  source 1..80: mol_type = other DNA
gccagctaatttttgtatttttagtagagacgaggtttcactgtgttggccaggatggtctccatctcttgacctcgtga

SEQ ID NO: 30553 - DNA, 80 bp, synthetic construct
  source 1..80: mol_type = other DNA
ctccagcctcagcctcccaagtagctgagactacaggcacacaccaccacgcctggctaatttttgtatttttagtagag

SEQ ID NO: 30554 - DNA, 80 bp, synthetic construct
  source 1..80: mol_type = other DNA
cacccattagcagtccctccacatttccccctagcctgcctcccctgcctcaccagccctggcaactgctaatctacttt

SEQ ID NO: 30555 - DNA, 80 bp, synthetic construct
  source 1..80: mol_type = other DNA
tcagggctgcttctggtgaccttgctggcctgcctgactgtgatggtcttgatgtcagtctggcggcagaggaagagcag

SEQ ID NO: 30556 - DNA, 80 bp, synthetic construct
  source 1..80: mol_type = other DNA
gtgtggaccagagtcttaggaaagggagtcttggagtttcagcatcagggtcctagcaggaaagacaggatcttgggatg

SEQ ID NO: 30557 - DNA, 80 bp, synthetic construct
  source 1..80: mol_type = other DNA
tcgtggtgctgtgcggacatgatgccgtcaaggaggctctggtggaccaggctgaggagttcagcgggcgaggcgagcag

SEQ ID NO: 30558 - DNA, 80 bp, synthetic construct; identical to SEQ ID NO: 11536
  source 1..80: mol_type = other DNA

SEQ ID NO: 30559 - DNA, 80 bp, synthetic construct
  source 1..80: mol_type = other DNA
tcccacttcttcctctgtcttaggatttcagggtattcctacttccacatctccagcctccaactcctggtaattgtctg

SEQ ID NO: 30560 - DNA, 80 bp, synthetic construct
  source 1..80: mol_type = other DNA
gtatccccgtatccctctgtttctctgcatctgtctgtctggcctttctgcttctcttctgattctcttattctttctac

SEQ ID NO: 30561 - DNA, 80 bp, synthetic construct
  source 1..80: mol_type = other DNA
ccacccttggggagccccttggagctggtccgctcctgctcccgccgccccctgacctctctccacccccgcgttcacct

SEQ ID NO: 30562 - DNA, 80 bp, synthetic construct
  source 1..80: mol_type = other DNA
gtaggggaccccgagtgcgagggcgggaacccgcgctttctgcctggggatggggactaggtggggaaaggggcccgcac

SEQ ID NO: 30563 - DNA, 80 bp, synthetic construct
  source 1..80: mol_type = other DNA
agtctccaatgtcatcagctccattgtctttggggaccgctttgactatgaggacaaagagttcctgtcactgttgcgca

SEQ ID NO: 30564 - DNA, 80 bp, synthetic construct
  source 1..80: mol_type = other DNA
ctcaaaatcagtccccgatattggacaactggacggttgcaccagaacccaggagggatgcccaatacccagtctccaag

SEQ ID NO: 30565 - DNA, 80 bp, synthetic construct
  source 1..80: mol_type = other DNA
tgggcacatgttcccatccccaacttaccgtaatttgtaacaggtgctccctacccagttcttctgaatattttaacacc

SEQ ID NO: 30566 - DNA, 80 bp, synthetic construct
  source 1..80: mol_type = other DNA
aacatggacaggtgccctaaccaataccctaaacacataaatatctagatagattattccctgacacccaaataagtgtt

SEQ ID NO: 30567 - DNA, 80 bp, synthetic construct
  source 1..80: mol_type = other DNA
agtatctggacagctgtctccaaccaagtccacttgaatgcctaaatacctagacaggtgccactcacctcataccagcc

SEQ ID NO: 30568 - DNA, 80 bp, synthetic construct; identical to SEQ ID NO: 11538
  source 1..80: mol_type = other DNA

SEQ ID NO: 30569 - DNA, 80 bp, synthetic construct
  source 1..80: mol_type = other DNA
aggacttcatcgccaagaaggtggagcacaaccagcgcacgctggatcccaattccccacgggacttcatcgactccttt

SEQ ID NO: 30570 - DNA, 80 bp, synthetic construct
  source 1..80: mol_type = other DNA
cgaggcaggtggatcacctgaggtcaggagttcgagaccagcctggccaacatggtgaaaccccgtctctactaaaaata

SEQ ID NO: 30571 - DNA, 80 bp, synthetic construct; identical to SEQ ID NO: 11539
  source 1..80: mol_type = other DNA

SEQ ID NO: 30572 - DNA, 80 bp, synthetic construct
  source 1..80: mol_type = other DNA
gagagtttaagtgtcttaactgaggtcacacagtgaggaagccatggtcccccaagctcaaaccctggtctctctgagcc

SEQ ID NO: 30573 - DNA, 80 bp, synthetic construct
  source 1..80: mol_type = other DNA
gggagaaaggatcaagggagggattcctccacagtaagtttcaagatttttagggaagaaataggatgctgttgcttaaa

SEQ ID NO: 30574 - DNA, 80 bp, synthetic construct
  source 1..80: mol_type = other DNA
aaaaactctttttttctgactcttcatcttgccatctctgtactactttctcttcgtctcccctcatccttctctttcca

SEQ ID NO: 30575 - DNA, 80 bp, synthetic construct; identical to SEQ ID NO: 11540
  source 1..80: mol_type = other DNA

SEQ ID NO: 30576 - DNA, 80 bp, synthetic construct
  source 1..80: mol_type = other DNA
gctaagttgacaattaaaggatagatgatcagtgaggtaaagaaggtgagaaggaagagcattttgggcaaagccagcag

SEQ ID NO: 30577 - DNA, 80 bp, synthetic construct
  source 1..80: mol_type = other DNA
aggagaagaaccccaacacagagttctacttgaagaacctggtgatgaccaccctgaacctcttctttgcgggcactgag

SEQ ID NO: 30578 - DNA, 80 bp, synthetic construct
  source 1..80: mol_type = other DNA
gacgtgccttgctgtccagagacaggacaatattcagctgataggcatcagctgagtctcattagctattaaaatattga

SEQ ID NO: 30579 - DNA, 80 bp, synthetic construct; identical to SEQ ID NO: 11541
  source 1..80: mol_type = other DNA

SEQ ID NO: 30580 - DNA, 80 bp, synthetic construct
  source 1..80: mol_type = other DNA
aagatttggagacatgctccccatgggtttggcccacagggtcaacaaggacaccaagtttcgggatttcttcctcccta

SEQ ID NO: 30581 - DNA, 80 bp, synthetic construct
  source 1..80: mol_type = other DNA
cacttagacagtcctgagtcctgcatctcgccagactctttgtgtcaggagaatacaccccatgttcccaaacttcctgt

SEQ ID NO: 30582 - DNA, 80 bp, synthetic construct
  source 1..80: mol_type = other DNA
ggtccccaactcctccatgcctgccactcccctcacctggggcaccctagttccccctgcagcccctgtgtactttcacc

SEQ ID NO: 30583 - DNA, 80 bp, synthetic construct
  source 1..80: mol_type = other DNA
agagtgatgcttttgtgcccttttccatcggtaagagaccactgtttgctgccaggccacggctcacaccagcaggggcc

SEQ ID NO: 30584 - DNA, 80 bp, synthetic construct; identical to SEQ ID NO: 11542
  source 1..80: mol_type = other DNA

SEQ ID NO: 30585 - DNA, 80 bp, synthetic construct
  source 1..80: mol_type = other DNA
atatcaatattggttcaccattgttatatctcttatagaaggaaactgaagctcagggaggatcggagtctcctctgaaa

SEQ ID NO: 30586 - DNA, 80 bp, synthetic construct
  source 1..80: mol_type = other DNA
ctctttctcttcttcaccaccatcatgcagaactttcgcttcaagtcccctcagtcgcctaaggatatcgacgtgtcccc

SEQ ID NO: 30587 - DNA, 80 bp, synthetic construct; identical to SEQ ID NO: 11543
  source 1..80: mol_type = other DNA

SEQ ID NO: 30588 - DNA, 80 bp, synthetic construct
  source 1..80: mol_type = other DNA
tcaggaaataagagctgctattattactactcttcatagcataatgtaagggtttccttcctctcatcccagctcggaag

SEQ ID NO: 30589 - DNA, 80 bp, synthetic construct; identical to SEQ ID NO: 11544
  source 1..80: mol_type = other DNA

SEQ ID NO: 30590 - DNA, 80 bp, synthetic construct
  source 1..80: mol_type = other DNA
ttcagaggaggctctgatcctccctgagcctcaatttctttctataagagatgtaacaatggtgaaccaatattgatata

SEQ ID NO: 30591 - DNA, 80 bp, synthetic construct
  source 1..80: mol_type = other DNA
cctttttagggatctgaggaatctgctgtgtgaccctagagaaatacatctacggggaaagatgtttcctttcattttac

SEQ ID NO: 30592 - DNA, 80 bp, synthetic construct
  source 1..80: mol_type = other DNA
agcaaacagtggtctcttaccgatggaaaagggcacaaaagcatcactcttcttaaactgccccttctcattcaggaagt

SEQ ID NO: 30593 - DNA, 80 bp, synthetic construct; identical to SEQ ID NO: 11545
  source 1..80: mol_type = other DNA

SEQ ID NO: 30594 - DNA, 80 bp, synthetic construct
  source 1..80: mol_type = other DNA
tttcttaagataggaagtttgggaacatgtgtttgattctcctgacacaaagagtctggagagatgcaggactcaggagt

SEQ ID NO: 30595 - DNA, 80 bp, synthetic construct
  source 1..80: mol_type = other DNA
aggaagaaatcccgaaacttggtgtcctttttgactctgcgggccaaactcatggggatcacgtctccaaatctttggat

SEQ ID NO: 30596 - DNA, 80 bp, synthetic construct
  source 1..80: mol_type = other DNA
gaaatgatagtccgaataggcaaaatggggtggatgatatggctccgcctatgagacggaagtagagcattcataacaga

SEQ ID NO: 30597 - DNA, 80 bp, synthetic construct; identical to SEQ ID NO: 11546
  source 1..80: mol_type = other DNA

SEQ ID NO: 30598 - DNA, 80 bp, synthetic construct
  source 1..80: mol_type = other DNA
gtgcccccaatgaagaggttcaacgtggtcatcaccaggtttttcaagtagaactccgtgttggggttcttctcctcctg

SEQ ID NO: 30599 - DNA, 80 bp, synthetic construct
  source 1..80: mol_type = other DNA
tggctttgcccaaaatgctcttccttctcaccttctttaccttgctgaccatctgtccttcaattatcaacttagctgtc

SEQ ID NO: 30600 - DNA, 80 bp, synthetic construct
  source 1..80: mol_type = other DNA
ctttttaaacaattaattaattttttttgacacagggcctcattctgtcacccagactggagtgcaatgccgtgatcttg

SEQ ID NO: 30601 - DNA, 80 bp, synthetic construct
  source 1..80: mol_type = other DNA
attacaggctgttagccacggcacccagccaattgtgaggattattatgatgagggttaatttgaatgggcctgtgtcat

SEQ ID NO: 30602 - DNA, 80 bp, synthetic construct; identical to SEQ ID NO: 11547
  source 1..80: mol_type = other DNA

SEQ ID NO: 30603 - DNA, 80 bp, synthetic construct
  source 1..80: mol_type = other DNA
ggataggaacttatatctaagttttcaggaaggttaggtaccagggccacggtctagtaatttaggtgagaagaactgag

SEQ ID NO: 30604 - DNA, 80 bp, synthetic construct
  source 1..80: mol_type = other DNA
tcacctgtctaggtatttaggcattcaagtaggcttggttggagacagctgtccagatacttactgggtctggattgggg

SEQ ID NO: 30605 - DNA, 80 bp, synthetic construct; identical to SEQ ID NO: 11548
  source 1..80: mol_type = other DNA

SEQ ID NO: 30606 - DNA, 80 bp, synthetic construct
  source 1..80: mol_type = other DNA
atattcagaagaactgggtagggagcatctgttagaaattacggtaagttggggatgggaacacgtgcccaggtgagaga

SEQ ID NO: 30607 - DNA, 80 bp, synthetic construct; identical to SEQ ID NO: 11537
  source 1..80: mol_type = other DNA

SEQ ID NO: 30608 - DNA, 80 bp, synthetic construct
  source 1..80: mol_type = other DNA
gtgggatcgatattggcgcctgcgggtatggcgggagaagggggttggggagagagtcaactcagaggtctgaggagagt

SEQ ID NO: 30609 - DNA, 80 bp, synthetic construct; identical to SEQ ID NO: 11549
  source 1..80: mol_type = other DNA

SEQ ID NO: 30610 - DNA, 80 bp, synthetic construct
  source 1..80: mol_type = other DNA
caagggtggaggagagagggagtagggtgggagagagatggattcagcgccattgcccagcagagctgcaaactcagtca

SEQ ID NO: 30611 - DNA, 80 bp, synthetic construct
  source 1..80: mol_type = other DNA
agagagagaccaggtttaaagaataagacaatcagaaaagaaacagaaaggccagacagagagatgcacatagaaacaga

SEQ ID NO: 30612 - DNA, 80 bp, synthetic construct
  source 1..80: mol_type = other DNA
aagagagaaaaatattgagatagaaacagagagggtctggaaggaagagagactgttaccaggagatggaggctgaagat

SEQ ID NO: 30613 - DNA, 80 bp, synthetic construct
  source 1..80: mol_type = other DNA
gtggaagtaggaataccctgaaatcctaagacagaggaagaagtgagaaagggatgcggagagatgagaaacacagagaa

SEQ ID NO: 30614 - DNA, 80 bp, synthetic construct; identical to SEQ ID NO: 11550
  source 1..80: mol_type = other DNA

SEQ ID NO: 30615 - DNA, 80 bp, synthetic construct
  source 1..80: mol_type = other DNA
gctcgcctcgcccgctgaactcctcagcctggtccaccagagcctccctgacggcatcatgtccacacagcaccacgacc

SEQ ID NO: 30616 - DNA, 80 bp, synthetic construct
  source 1..80: mol_type = other DNA
ggagctggacatcccaagatcctgtctttctgatgctgaaactccaaaactccatttcctaagactctggtccacactgg

SEQ ID NO: 30617 - DNA, 80 bp, synthetic construct
  source 1..80: mol_type = other DNA
cttccccttgctcttcctctgctgccaaacagacatcaagaccattacagtcaggcagaccagcaaggccaccagaagca

SEQ ID NO: 30618 - DNA, 80 bp, synthetic construct
  source 1..80: mol_type = other DNA
gtgcagggcagtcagaccaggaccatggaactcagcgtcctcctcttccttgcactcctcacaggactcttgctactcct

SEQ ID NO: 30619 - DNA, 80 bp, synthetic construct; identical to SEQ ID NO: 11551
  source 1..80: mol_type = other DNA

SEQ ID NO: 30620 - DNA, 80 bp, synthetic construct
  source 1..80: mol_type = other DNA
gaaaaaggaggtgacatacagaaacagcctgattggccacagatcacagcttgccttacttggtcacaatctgagcagtt

SEQ ID NO: 30621 - DNA, 80 bp, synthetic construct
  source 1..80: mol_type = other DNA
gaccagcctggccaacatggtgaaaccttgtctctactaaaaatacaaatattagctgggcatagtgatgcgtgcctgta

SEQ ID NO: 30622 - DNA, 80 bp, synthetic construct
  source 1..80: mol_type = other DNA
ttgcagttcactctacagagagagctttaggtcaaatttaatttaattaaacaattctccccttttggtcagcctcaaaa

SEQ ID NO: 30623 - DNA, 80 bp, synthetic construct; identical to SEQ ID NO: 11552
  source 1..80: mol_type = other DNA

SEQ ID NO: 30624 - DNA, 80 bp, synthetic construct
  source 1..80: mol_type = other DNA
gctaatttttgtattttttgtagagacagggttttgccatgttgcccagactggtcttaaactcctgggctcaagcaatc

SEQ ID NO: 30625 - DNA, 80 bp, synthetic construct
  source 1..80: mol_type = other DNA
ggaatgtggacttgggggtatagataaggtccactgtccacagagagaagaaaggctgttaatagtctcttttaacttga

SEQ ID NO: 30626 - DNA, 80 bp, synthetic construct
  source 1..80: mol_type = other DNA
attcatttgtagttggcctggtaacatatagtatcctggagacccactagaagaaacattaagagtagaaaagtttggga

SEQ ID NO: 30627 - DNA, 80 bp, synthetic construct; identical to SEQ ID NO: 11553
  source 1..80: mol_type = other DNA

SEQ ID NO: 30628 - DNA, 80 bp, synthetic construct
  source 1..80: mol_type = other DNA
gcttgcaaaccaactgctagctgcacctgtaaacacatatctgtttctttcccctgagaaatgtccttagtgtatttgtg

SEQ ID NO: 30629 - DNA, 80 bp, synthetic construct
  source 1..80: mol_type = other DNA
ttaagcgtttttgttgccacaaatgttctcatctcagtttggagagtggcttctacccatctgaactccttggaggttca

SEQ ID NO: 30630 - DNA, 80 bp, synthetic construct
  source 1..80: mol_type = other DNA
atttcagttattgactgttttggcttttaactatgggaggtattaggaaactctcagggaaacaatttggaaagcagcag

SEQ ID NO: 30631 - DNA, 80 bp, synthetic construct; identical to SEQ ID NO: 11554
  source 1..80: mol_type = other DNA

SEQ ID NO: 30632 - DNA, 80 bp, synthetic construct
  source 1..80: mol_type = other DNA
tccagtaacattacacacgcaattgcccacacccccataggtagtccccaggtcttgcatacgggatgcctggaagcaaa

SEQ ID NO: 30633 - DNA, 80 bp, synthetic construct
  source 1..80: mol_type = other DNA
caatgatgtctagaatatcaagatatagctttccactcctcctttggggtttctgggtgattctcattgggaacatgaag

SEQ ID NO: 30634 - DNA, 80 bp, synthetic construct
  source 1..80: mol_type = other DNA
gggaaagggttaggacagcaagaaatggggaagaaaggataaaagataatgctttcatgatggaagagaaatcttgatcc

SEQ ID NO: 30635 - DNA, 80 bp, synthetic construct; identical to SEQ ID NO: 11555
  source 1..80: mol_type = other DNA

SEQ ID NO: 30636 - DNA, 80 bp, synthetic construct
  source 1..80: mol_type = other DNA
ttccaaagggcccaacctctaaattctagatcatgaaaggtctggttgtcatcaaccgatgtgtcatcaatgactcattt

SEQ ID NO: 30637 - DNA, 80 bp, synthetic construct
  source 1..80: mol_type = other DNA
gtggatctgattgccatcaatcaataatacctgagaccaagggactccaatcaattcagcatgctttgcctaatgatatt

SEQ ID NO: 30638 - DNA, 80 bp, synthetic construct
  source 1..80: mol_type = other DNA
cgaacaaaggcttttcctacttttaaacatattaaggtgggaactacatgaggcaggaagccagtttcagaagtgagaaa

SEQ ID NO: 30639 - DNA, 80 bp, synthetic construct
  source 1..80: mol_type = other DNA
agagagaagacaggctgttaatattctcttttaacttgaatgtaaggtgtggtcatactttgcagcaaccttaagaggat

SEQ ID NO: 30640 - DNA, 80 bp, synthetic construct
  source 1..80: mol_type = other DNA
accacttgtctagtgaaacaagtacctctgtcactggagagttctccaggaatgcccagtaaggaaatacattttctaat

SEQ ID NO: 30641 - DNA, 80 bp, synthetic construct; identical to SEQ ID NO: 11556
  source 1..80: mol_type = other DNA

SEQ ID NO: 30642 - DNA, 80 bp, synthetic construct
  source 1..80: mol_type = other DNA
gagtgcatgcttcacattggaattacagactctaaagtacaaattttaatacaatgagttgcaatttatgcttctctaat

SEQ ID NO: 30643 - DNA, 80 bp, synthetic construct
  source 1..80: mol_type = other DNA
tatgagccacaggtatagaatttcactcttctctgccatcctctgttacatcctgggtacctgcctgccactgaaagaat

SEQ ID NO: 30644 - DNA, 80 bp, synthetic construct; identical to SEQ ID NO: 11557
  source 1..80: mol_type = other DNA

SEQ ID NO: 30645 - DNA, 80 bp, synthetic construct
  source 1..80: mol_type = other DNA
caatggtctttttaatgataccaagtacagagtatatatgccaatactactatgaatttttaaattatttgctcagacag

SEQ ID NO: 30646 - DNA, 80 bp, synthetic construct
  source 1..80: mol_type = other DNA
atacaaggtaattggtcacagactctcaaattatgaaacatttagatttttcaggggaatgacatggagggagccaagga

SEQ ID NO: 30647 - DNA, 80 bp, synthetic construct
  source 1..80: mol_type = other DNA
agacctggctctacaaaaaagttttaaaaatttagccaggcatggtggcatgtgcctgtagtcccagctacttgggagac

SEQ ID NO: 30648 - DNA, 80 bp, synthetic construct; identical to SEQ ID NO: 11558
  source 1..80: mol_type = other DNA

SEQ ID NO: 30649 - DNA, 80 bp, synthetic construct
  source 1..80: mol_type = other DNA
taaaatgagttttctttctttcttttttattattattatactttaagttttagggtacatgtgcacattgtgcaggttag

SEQ ID NO: 30650 - DNA, 80 bp, synthetic construct
  source 1..80: mol_type = other DNA
caattcccacctatgagtgagaatatgtggtgtttggtttttttgttcttgcgatagtttactgagaatgatgatttcca

SEQ ID NO: 30651 - DNA, 80 bp, synthetic construct
  source 1..80: mol_type = other DNA
catacatgtgcatgtgtctttatagcagcatgatttatagtcctttgggtatatacccagtaatgggatggctgggtcaa

SEQ ID NO: 30652 - DNA, 80 bp, synthetic construct; identical to SEQ ID NO: 11559
  source 1..80: mol_type = other DNA

SEQ ID NO: 30653 - DNA, 80 bp, synthetic construct
  source 1..80: mol_type = other DNA
tttgtaggttgcctgttcactctgatggtagtttcttttgctgtgcagaagctctttagtttaattagatcccatttgtc

SEQ ID NO: 30654 - DNA, 80 bp, synthetic construct
  source 1..80: mol_type = other DNA
aaaatgagttttcaaaaggatctttgtggctaccttattagttcatagaaagtggaggcttgtctggaatgatattaaag

SEQ ID NO: 30655 - DNA, 80 bp, synthetic construct; identical to SEQ ID NO: 11560
  source 1..80: mol_type = other DNA

SEQ ID NO: 30656 - DNA, 80 bp, synthetic construct
  source 1..80: mol_type = other DNA
ggatgtgggtgggtcatcttggttaatgtcagtgcaagaacggtgtctgctcctcattattggggttccttagctattca

SEQ ID NO: 30657 - DNA, 80 bp, synthetic construct
  source 1..80: mol_type = other DNA
aggcctgtgaggtatcagcacagtgctgaacatagtacctggtacacaataggcatttagtaaatatgtgaacaggaaca

SEQ ID NO: 30658 - DNA, 80 bp, synthetic construct
  source 1..80: mol_type = other DNA
cctattgttttcttttcatcattttccatgtgtgacaagagtatcacgcaatcatgtgaatcaatggacttagttttctc

SEQ ID NO: 30659 - DNA, 80 bp, synthetic construct
  source 1..80: mol_type = other DNA
gctgaagcaggtggatcaactgaggtcgggagttcgagaccaacctgaccaacatggagaaaccctgtctgtactaaaaa

SEQ ID NO: 30660 - DNA, 80 bp, synthetic construct; identical to SEQ ID NO: 11561
  source 1..80: mol_type = other DNA

SEQ ID NO: 30661 - DNA, 80 bp, synthetic construct
  source 1..80: mol_type = other DNA
ataaagttgtgaggcttcacacactccctaaaactctttcataaaccttccaaggatcctctaggtattcacgaccatct

SEQ ID NO: 30662 - DNA, 80 bp, synthetic construct
  source 1..80: mol_type = other DNA
gtatgcattgagtcacagttttctcttccgtcagttaagatcatgacaatgagaatgtgtgcccctaaggtggttgtgag

SEQ ID NO: 30663 - DNA, 80 bp, synthetic construct
  source 1..80: mol_type = other DNA
gacaagacatacgaggtcactgcgcttatggacattccattggcagagacagataagcaaaaaataaacagataaggaaa

SEQ ID NO: 30664 - DNA, 80 bp, synthetic construct; identical to SEQ ID NO: 11562
  source 1..80: mol_type = other DNA

SEQ ID NO: 30665 - DNA, 80 bp, synthetic construct
  source 1..80: mol_type = other DNA
aggccttggtgagcacgtggatattaattattttacattttagtggggttaccctggcttgtggggcagtgaaacaattg

SEQ ID NO: 30666 - DNA, 80 bp, synthetic construct
  source 1..80: mol_type = other DNA
cacaaactgaacatactcatgtaattgacatgcaggccaagtagcaagaatgccccgaaaccctgcaccctgttcttttc

SEQ ID NO: 30667 - DNA, 80 bp, synthetic construct
  source 1..80: mol_type = other DNA
gggctcaagcaattctctcgtctcagcctcccgagtagctgggactacaggtgagagccaccatgcctggctaatttttg

SEQ ID NO: 30668 - DNA, 80 bp, synthetic construct; identical to SEQ ID NO: 11563
  source 1..80: mol_type = other DNA

SEQ ID NO: 30669 - DNA, 80 bp, synthetic construct
  source 1..80: mol_type = other DNA
attaagaaagcttctgtgaatattttgttcattttttggtgaacacacatacacatttttgctgggcatgtacctgggag

SEQ ID NO: 30670 - DNA, 80 bp, synthetic construct
  source 1..80: mol_type = other DNA
atactctttttttttcctatacaatcacattatatagggagggtggtatacacagtgcagacatggtggacaaaggatga

SEQ ID NO: 30671 - DNA, 80 bp, synthetic construct
  source 1..80: mol_type = other DNA
accacagatcataagaagtatgcggtgggggtgatattcatcgtattttatcaaccatctttactgtttagggcacaagc

SEQ ID NO: 30672 - DNA, 80 bp, synthetic construct; identical to SEQ ID NO: 11564
  source 1..80: mol_type = other DNA

SEQ ID NO: 30673 - DNA, 80 bp, synthetic construct
  source 1..80: mol_type = other DNA
gtatgtaagtattttgatagttttacaaatgaggtgtatgctgactaacagccacccctggtgtggatgtgattggcagt

SEQ ID NO: 30674 - DNA, 80 bp, synthetic construct
  source 1..80: mol_type = other DNA
tggtgagagcctcagaggcactgggagggggcgggtggggggtgcatcagggaagggagtatatgggaggaagaaggact

SEQ ID NO: 30675 - DNA, 80 bp, synthetic construct
  source 1..80: mol_type = other DNA
aggaggaggctcagtgtctgatagaggagcttcggaaatccaagggtgagtcctgggggatgaataggaaagaaagacaa

SEQ ID NO: 30676 - DNA, 80 bp, synthetic construct; identical to SEQ ID NO: 11565
  source 1..80: mol_type = other DNA

SEQ ID NO: 30677 - DNA, 80 bp, synthetic construct
  source 1..80: mol_type = other DNA
ctcaggaggctaaggtgggactacaggatcacttgagcccaggaggttgaggttgcagtgagctgtgattgtaccactgc

SEQ ID NO: 30678 - DNA, 80 bp, synthetic construct
  source 1..80: mol_type = other DNA
aaaaaactacagacatttaacaaataatgaactgtgttttccttgccctgggtgaagtgctgatgagctggcagtgagca

SEQ ID NO: 30679 - DNA, 80 bp, synthetic construct; identical to SEQ ID NO: 11566
  source 1..80: mol_type = other DNA

SEQ ID NO: 30680 - DNA, 80 bp, synthetic construct
  source 1..80: mol_type = other DNA
tttgaggccagcagttcaaaaccagcctggccaacatggtgaaaccccatctgtgctaaaaatacaaaaattagccaggc

SEQ ID NO: 30681 - DNA, 80 bp, synthetic construct
  source 1..80: mol_type = other DNA
taaaataaagaacggcaggggggagacaaatatacacacagagagacagaaagaaacaaaggcaaagagaaattgaggca

SEQ ID NO: 30682 - DNA, 80 bp, synthetic construct
  source 1..80: mol_type = other DNA
gtatacaggtatcacttaacaagtacagaataattcccagaagactggagagccctagatgtggaaagaagagattaagg

SEQ ID NO: 30683 - DNA, 80 bp, synthetic construct
  source 1..80: mol_type = other DNA
tcctgggcccatgtgatcctcccacttcagcccctggactatttcaactgggactacaggcatgtgccaccatgtctagc

SEQ ID NO: 30684 - DNA, 80 bp, synthetic construct; identical to SEQ ID NO: 11567
  source 1..80: mol_type = other DNA

SEQ ID NO: 30685 - DNA, 80 bp, synthetic construct
  source 1..80: mol_type = other DNA
ccatctataaactggagctaataatcaaattgcatctgcctcacattgttgtagtgagagttcaatggaattacgcgtga

SEQ ID NO: 30686 - DNA, 80 bp, synthetic construct
  source 1..80: mol_type = other DNA
accttcctcttccagtccattaccgccaacatcatctgctccatcgtctttggaaaacgattccactaccaagatcaaga

SEQ ID NO: 30687 - DNA, 80 bp, synthetic construct
  source 1..80: mol_type = other DNA
gcttatccttggaagaaacgcagacatgtgaagaatcagggacatggagacctggagggaggagagacggtgagacaggg

SEQ ID NO: 30688 - DNA, 80 bp, synthetic construct; identical to SEQ ID NO: 11568
  source 1..80: mol_type = other DNA

SEQ ID NO: 30689 - DNA, 80 bp, synthetic construct
  source 1..80: mol_type = other DNA
gtggcacaatctcagctcactgcaacttccacctccctggttcaagcaattcccctgcctcagcctcctgtagctgggat

SEQ ID NO: 30690 - DNA, 80 bp, synthetic construct
  source 1..80: mol_type = other DNA
agactgcttctggttcttctgtatccttgcttctcagtctttggtaaagctctccacctaaagaaaatgaaggataaatg

SEQ ID NO: 30691 - DNA, 80 bp, synthetic construct; identical to SEQ ID NO: 11569
  source 1..80: mol_type = other DNA

SEQ ID NO: 30692 - DNA, 80 bp, synthetic construct
  source 1..80: mol_type = other DNA
ccaccacacccagctaatttttttgtatttttagtagagatggtgtttcaccatgtcggccaggctggtcaacatagcta

SEQ ID NO: 30693 - DNA, 80 bp, synthetic construct
  source 1..80: mol_type = other DNA
cccaccgagaaccacagagaaaagtctggaaggagacccaccagacagttaacaatggttatctctagaaggagagatta

SEQ ID NO: 30694 - DNA, 80 bp, synthetic construct
  source 1..80: mol_type = other DNA
gtcagcaggcttatcttgtgtaagaatcattttattaatatctgacacagcaagggagatgaggagaggtgggaagaggg

SEQ ID NO: 30695 - DNA, 80 bp, synthetic construct; identical to SEQ ID NO: 11570
  source 1..80: mol_type = other DNA

SEQ ID NO: 30696 - DNA, 80 bp, synthetic construct
  source 1..80: mol_type = other DNA
cttgaaatactttcctggggcacacaggcaagtttacaaaaacctgcaggaaatcaatgcttacattggccacagtgtgg

SEQ ID NO: 30697 - DNA, 80 bp, synthetic construct
  source 1..80: mol_type = other DNA
gaatagggaaagggaggagagaacatgaggaaggaaagaaagatgaggtgaaaggagggagaaaatagggaggaggaact

SEQ ID NO: 30698 - DNA, 80 bp, synthetic construct
  source 1..80: mol_type = other DNA
catcaaagagatgtggagagagatagaaacagagttaggaagactaaagagaggctgagagagatgagttagagatacgc

SEQ ID NO: 30699 - DNA, 80 bp, synthetic construct; identical to SEQ ID NO: 11571
  source 1..80: mol_type = other DNA

SEQ ID NO: 30700 - DNA, 80 bp, synthetic construct
  source 1..80: mol_type = other DNA
ccaattctgttggtggatgcatggatgcatgaagaatctgtccatgcgttctcccactgttttcttccatcacttaagga

SEQ ID NO: 30701 - DNA, 80 bp, synthetic construct
  source 1..80: mol_type = other DNA
tgccaccacacccggctaattttttgtgtttttagtagagatggggtttaaccatgttagccaggatggtctcgatctcc

SEQ ID NO: 30702 - DNA, 80 bp, synthetic construct; identical to SEQ ID NO: 11572
  source 1..80: mol_type = other DNA

SEQ ID NO: 30703 - DNA, 80 bp, synthetic construct
  source 1..80: mol_type = other DNA
tggattacttgatccacaagttgatcctttgaaacagtggtatgttgatggactatttgtcattgattcattggctcatt

SEQ ID NO: 30704 - DNA, 80 bp, synthetic construct
  source 1..80: mol_type = other DNA
atccagcctttcatttactcctttatttactcatacttcactaatttaattattcacttgctcttccataaatctagcca

SEQ ID NO: 30705 - DNA, 80 bp, synthetic construct
  source 1..80: mol_type = other DNA
ctattgattgattgattgatgtttttatccagttgttcatgaattcatctattgttctattacactgttatatacctgag

SEQ ID NO: 30706 - DNA, 80 bp, synthetic construct; identical to SEQ ID NO: 11573
  source 1..80: mol_type = other DNA

SEQ ID NO: 30707 - DNA, 80 bp, synthetic construct
  source 1..80: mol_type = other DNA
gcagtggcatgatctcggctcactgcaacctccacctcctgggttcaagtgattctcctgcctcagcctcctgagtagct

SEQ ID NO: 30708 - DNA, 80 bp, synthetic construct
  source 1..80: mol_type = other DNA
gcctggcctgaaatgcctctttaaaatgagattcattggtcttcttttctgtacagagagagtctacagggagattgaac

SEQ ID NO: 30709 - DNA, 80 bp, synthetic construct
  source 1..80: mol_type = other DNA
ggcatcctggattctcttaatccccgaactcaaccttttgttagctccttaattgagtcccgttgtttttgttttttgta

SEQ ID NO: 30710 - DNA, 80 bp, synthetic construct; identical to SEQ ID NO: 11574
  source 1..80: mol_type = other DNA

SEQ ID NO: 30711 - DNA, 80 bp, synthetic construct
  source 1..80: mol_type = other DNA
aaggcacatcttggcaagcaggaccttgggcaagtattttaacatctctaaacctcagtgagttcattttcttaaaaaga

SEQ ID NO: 30712 - DNA, 80 bp, synthetic construct
  source 1..80: mol_type = other DNA
aaatgaatgaatgcctgcaacatgcttagaactgcctggcacaaaggacatgctcacaagggcaattattattataatta

SEQ ID NO: 30713 - DNA, 80 bp, synthetic construct
  source 1..80: mol_type = other DNA
ttccaggcaaaggaaacagcaaggacaaaggccaaaggtagaaacgtgatatggcaccattgagaacctataggaagtcc

SEQ ID NO: 30714 - DNA, 80 bp, synthetic construct
  source 1..80: mol_type = other DNA
tttggctggttaaaagaaaaactttagacaaattaaacttagcagagtctatctgaacaaagaaacaattcatgaattgg

SEQ ID NO: 30715 - DNA, 80 bp, synthetic construct; identical to SEQ ID NO: 11575
  source 1..80: mol_type = other DNA

SEQ ID NO: 30716 - DNA, 80 bp, synthetic construct
  source 1..80: mol_type = other DNA
tacagtgacctccttccacattttatcttcaatgaaaattgggaacatgtgtggtgatggcttgaatgtcaatgtcttct

SEQ ID NO: 30717 - DNA, 80 bp, synthetic construct
  source 1..80: mol_type = other DNA
ttcaagtgattctcctgcctcagcctcccgagtacctgaaactacgggcgcatgccaccatgcctggctattttttttta

SEQ ID NO: 30718 - DNA, 80 bp, synthetic construct; identical to SEQ ID NO: 11576
  source 1..80: mol_type = other DNA

SEQ ID NO: 30719 - DNA, 80 bp, synthetic construct
  source 1..80: mol_type = other DNA
aagaggagagagagtaggaaaaggaaggaggaggggagaaaggagggaaaggagagaaacagaataagagataggaaaaa

SEQ ID NO: 30720 - DNA, 80 bp, synthetic construct
  source 1..80: mol_type = other DNA
atggagataggaagttaagcaagatggaagaaagccaaaaaaaggagaggaaaagaagaaaagctgtgtctgacaggtat

SEQ ID NO: 30721 - DNA, 80 bp, synthetic construct
  source 1..80: mol_type = other DNA
ttgtgaaaaatgttaggtcacacaaagagttacagaagaacaggcccagagacctgcctgtttctaagctcatgtcaccc

SEQ ID NO: 30722 - DNA, 80 bp, synthetic construct
  source 1..80: mol_type = other DNA
ggctccctttgtctctgcctgagctttttccagcaccctttgttcttatttttctcccaatctgtggtttagaatctact

SEQ ID NO: 30723 - DNA, 80 bp, synthetic construct; identical to SEQ ID NO: 11577
  source 1..80: mol_type = other DNA

SEQ ID NO: 30724 - DNA, 80 bp, synthetic construct
  source 1..80: mol_type = other DNA
atactctgtgggtttcaccaaccctttggaactgtaacagaagctagaaactctcttatataaaaatgaacatggcgccg

SEQ ID NO: 30725 - DNA, 80 bp, synthetic construct
  source 1..80: mol_type = other DNA
aagaaattagccaggcgtggtggcaggtgcctgtaatcccagctacttggtaggctgaggcacaagaatcatttgaacca

SEQ ID NO: 30726 - DNA, 80 bp, synthetic construct; identical to SEQ ID NO: 11578
  source 1..80: mol_type = other DNA

SEQ ID NO: 30727 - DNA, 80 bp, synthetic construct
  source 1..80: mol_type = other DNA
ctccatggccagccccgtggccccagaagacatcgatctgacaccccaggagtgtggtgtgggcaaaatacccccaacat

SEQ ID NO: 30728 - DNA, 80 bp, synthetic construct
  source 1..80: mol_type = other DNA
caccagttgtctgaggtcacattgcaagtgagtgcaggagtgagattatcgaaaattataatatacaaaatcatatatat

SEQ ID NO: 30729 - DNA, 80 bp, synthetic construct
  source 1..80: mol_type = other DNA
ttggctaatttttgtatttttagtagagatggggtttcactgtgtaggccaggctggtctcgaactcctgaactcaagtg

SEQ ID NO: 30730 - DNA, 80 bp, synthetic construct; identical to SEQ ID NO: 11579
  source 1..80: mol_type = other DNA

SEQ ID NO: 30731 - DNA, 80 bp, synthetic construct
  source 1..80: mol_type = other DNA
ctcctagctccaaatgttttcattatctctcccccaacaaaacccatacctatcaagctgtcactccccataccccattc

SEQ ID NO: 30732 - DNA, 80 bp, synthetic construct
  source 1..80: mol_type = other DNA
ttgttcactgcaacctctgccttccaagatcaagagattctccagtctcagctcccaagtagctgggattacaggcatgt

SEQ ID NO: 30733 - DNA, 80 bp, synthetic construct
  source 1..80: mol_type = other DNA
gaatgctatttttgaggttcatgcctgttgtagaccacagtcacacactgctgtagtcttccccagtcctcattcccagc

SEQ ID NO: 30734 - DNA, 80 bp, synthetic construct; identical to SEQ ID NO: 11580
  source 1..80: mol_type = other DNA

SEQ ID NO: 30735 - DNA, 80 bp, synthetic construct
  source 1..80: mol_type = other DNA
agagtcagaatcacaggtggattagtagggagtgttataaaagccttgaagtgaaagcccgcagttgtcttactaagaag

SEQ ID NO: 30736 - DNA, 80 bp, synthetic construct
  source 1..80: mol_type = other DNA
gagcaaatccttaaccaatgtaagtatgctttatgttcctccagtaatgtacaaggtgtatttaacctcacaattcttaa

SEQ ID NO: 30737 - DNA, 80 bp, synthetic construct; identical to SEQ ID NO: 11581
  source 1..80: mol_type = other DNA

SEQ ID NO: 30738 - DNA, 80 bp, synthetic construct
  source 1..80: mol_type = other DNA
atgttctgtagattcatccatgccgtcataaataagaatattttttcctctttaaaaggctgaatagcatttcattgtac

SEQ ID NO: 30739 - DNA, 80 bp, synthetic construct
  source 1..80: mol_type = other DNA
tggatcatctgatagttctatttttgttttttttaggaacatccatactgttttctcaaatcacaatgctaatttacata

SEQ ID NO: 30740 - DNA, 80 bp, synthetic construct
  source 1..80: mol_type = other DNA
tcttggccatttgtatgtctttttttgaaaaatgtctactcaaatcctttgcccatttaattaattaattaattaattaa

SEQ ID NO: 30741 - DNA, 80 bp, synthetic construct
  source 1..80: mol_type = other DNA
tgctttgtagagatgtggtctcattatgttgtccaggctggtcttgaactcttgggctcaagcaatccacccacctttgt

SEQ ID NO: 30742 - DNA, 80 bp, synthetic construct; identical to SEQ ID NO: 11582
  source 1..80: mol_type = other DNA

SEQ ID NO: 30743 - DNA, 80 bp, synthetic construct
  source 1..80: mol_type = other DNA
aatcaattgattatagatgtgtgggcttatttcagggttctctacgcttttcctttaatcagtgtgtctatttttatgct

SEQ ID NO: 30744 - DNA, 80 bp, synthetic construct
  source 1..80: mol_type = other DNA
atgagattaaaattttgatagggattgcactgaatctgtatattgctttgggtaatatggacatttttccactattagtt

SEQ ID NO: 30745 - DNA, 80 bp, synthetic construct
  source 1..80: mol_type = other DNA
aagtattttattttttgatgctactataaattaattgttctcttaatttcttttttagatattttgttgctagtgtataa

SEQ ID NO: 30746 - DNA, 80 bp, synthetic construct; identical to SEQ ID NO: 11583
  source 1..80: mol_type = other DNA

SEQ ID NO: 30747 - DNA, 80 bp, synthetic construct
  source 1..80: mol_type = other DNA
atgtcacatagaaacttctgtattactggaggccagttattaaaggttatatgttataggaacattcctcagcattcctc

SEQ ID NO: 30748 - DNA, 80 bp, synthetic construct
  source 1..80: mol_type = other DNA
aaaggcctgctgctttctttgcttcacagtcatttgctatatttttttgcctgaaggaaaatggtagtggaagtgttttg

SEQ ID NO: 30749 - DNA, 80 bp, synthetic construct
  source 1..80: mol_type = other DNA
ttcatcataaacataaacgaatgaaagaaagaattaattagtcagggccatctgggtggtaacagaatatttatggcctc

SEQ ID NO: 30750 - DNA, 80 bp, synthetic construct
  source 1..80: mol_type = other DNA
accagtggatctcaaagtgggctgggcagtagaatcatttgggtgatttaaaaaggtgtagattttttagtattgatgac

SEQ ID NO: 30751 - DNA, 80 bp, synthetic construct; identical to SEQ ID NO: 11584
  source 1..80: mol_type = other DNA

SEQ ID NO: 30752 - DNA, 80 bp, synthetic construct
  source 1..80: mol_type = other DNA
agctgtatttgacagaataatcataacaacattatgatgataatatcagtctgaatcacggacaatatatagaccaaata

SEQ ID NO: 30753 - DNA, 80 bp, synthetic construct
  source 1..80: mol_type = other DNA
aagaggaagttttccagtggctgaaaaagttaacaaaggacttggtaaatgtgcatgtatcgtgtgtatgtgtacatgtg

SEQ ID NO: 30754 - DNA, 80 bp, synthetic construct; identical to SEQ ID NO: 11585
  source 1..80: mol_type = other DNA

SEQ ID NO: 30755 - DNA, 80 bp, synthetic construct
  source 1..80: mol_type = other DNA
tttttagattgatacataacttttatgcatatttatggggtacatgtaatattttgttacatgcacagaatgtgtaatga

SEQ ID NO: 30756 - DNA, 80 bp, synthetic construct
  source 1..80: mol_type = other DNA
agatctttcatgatagtggttgtcagtcctcatatggagggtggaggtttgaagcagagagccaagggaggttttgtgca

SEQ ID NO: 30757 - DNA, 80 bp, synthetic construct
  source 1..80: mol_type = other DNA
tttttcccaaagtgtaattgtgggttatctattctagaacatttcaccaggaatacttgtggcacagacatagtgggaat

SEQ ID NO: 30758 - DNA, 80 bp, synthetic construct
  source 1..80: mol_type = other DNA
atttctaccataatgatgcttatctatggttttaagagactaggcatctttagtgtagcttttatcaattttaatttccc

SEQ ID NO: 30759 - DNA, 80 bp, synthetic construct; identical to SEQ ID NO: 11586
  source 1..80: mol_type = other DNA

SEQ ID NO: 30760 - DNA, 80 bp, synthetic construct
  source 1..80: mol_type = other DNA
actctccagagccagagtcccatccaccttctttaccaaactctcacacatgaatccaatacagttgtccctccttatca

SEQ ID NO: 30761 - DNA, 80 bp, synthetic construct
  source 1..80: mol_type = other DNA
catgttctgtacagatgcttgtttttgctctgaatattttttatttggggttggttgaatccatgatacaccatggatac

SEQ ID NO: 30762 - DNA, 80 bp, synthetic construct
  source 1..80: mol_type = other DNA
agcccacagaaattgttcaaactatctattcccaggcttactcagtctaccctccctatctcactcatttcttcctgtga

SEQ ID NO: 30763 - DNA, 80 bp, synthetic construct; identical to SEQ ID NO: 11587
  source 1..80: mol_type = other DNA

SEQ ID NO: 30764 - DNA, 80 bp, synthetic construct
  source 1..80: mol_type = other DNA
aatgtaacaaactaccaacagagaatactataaacacctctatgcaaataaactaggaaatctagaagaaatggataaat

SEQ ID NO: 30765 - DNA, 80 bp, synthetic construct
  source 1..80: mol_type = other DNA
ggtaccattccttctgaaactattccaatcaatagaaaaagagggaatcctctctaactcattttatgagggcagcatca

SEQ ID NO: 30766 - DNA, 80 bp, synthetic construct
  source 1..80: mol_type = other DNA
gggatgcaaggctggtccaacatatgaaaatcaataaaagtaatccagtatataaacagaaccaaagacaaaaaccacat

SEQ ID NO: 30767 - DNA, 80 bp, synthetic construct; identical to SEQ ID NO: 11588
  source 1..80: mol_type = other DNA

SEQ ID NO: 30768 - DNA, 80 bp, synthetic construct
  source 1..80: mol_type = other DNA
aggatacaaaataaatgtgcaaaattcacaagcattcttatacaccaatagcagacaaacagagagccaaatcatgagtg

SEQ ID NO: 30769 - DNA, 80 bp, synthetic construct
  source 1..80: mol_type = other DNA
aatgaatatcatgaaaatggccataccacccaaggtaatttatagattcaatgtcatccccatcaagctaacaatgactt

SEQ ID NO: 30770 - DNA, 80 bp, synthetic construct
  source 1..80: mol_type = other DNA
ctggtaccaaaacagagatatagaccaatggaacagaacagagccctcagaagtaatgctgcatatctacaactatctga

SEQ ID NO: 30771 - DNA, 80 bp, synthetic construct; identical to SEQ ID NO: 11589
  source 1..80: mol_type = other DNA

SEQ ID NO: 30772 - DNA, 80 bp, synthetic construct
  source 1..80: mol_type = other DNA
aatatccagaatcacaatgaactcaaacaaatttacaagaaaaaaaaaagatccccatcaaaaagtgggcaaaggatatg

SEQ ID NO: 30773 - DNA, 80 bp, synthetic construct
  source 1..80: mol_type = other DNA
tggagaggatgtggagaaataggaacacttttacactgttggtgggactgtaaactagtttaaccattgtggaagtcagt

SEQ ID NO: 30774 - DNA, 80 bp, synthetic construct
  source 1..80: mol_type = other DNA
cccaagtgtccaacaacgatagactggattaagaaaatgtggcacatatacaccatggaatactatgcagccataaaaaa

SEQ ID NO: 30775 - DNA, 80 bp, synthetic construct; identical to SEQ ID NO: 11590
  source 1..80: mol_type = other DNA

SEQ ID NO: 30776 - DNA, 80 bp, synthetic construct
  source 1..80: mol_type = other DNA
gtaccatcccttttggtactgtcctcatgatagcaagtgagttttcatgaaatctaaagtgtgtagcacctcccacctcc

SEQ ID NO: 30777 - DNA, 80 bp, synthetic construct
  source 1..80: mol_type = other DNA
acagcctaatatacttccccacatgaagtgaaaggaaagaccagaaaccagattttcactacatcatgttcatatgcatg

SEQ ID NO: 30778 - DNA, 80 bp, synthetic construct; identical to SEQ ID NO: 11591
  source 1..80: mol_type = other DNA

SEQ ID NO: 30779 - DNA, 80 bp, synthetic construct
  source 1..80: mol_type = other DNA
gtatcagggagataataaaaatcagggtaatttgtaatccaagctgaaaatcagctttcctctatagtaatttattgatt

SEQ ID NO: 30780 - DNA, 80 bp, synthetic construct
  source 1..80: mol_type = other DNA
atttcttagagcaggaaattccttttttttctttgaatattgaaataaggaaataaaaggactccatctgtcaatttaac

SEQ ID NO: 30781 - DNA, 80 bp, synthetic construct
  source 1..80: mol_type = other DNA
cctgaattttcccataccctttctgtctttagtctccccctctgctggtactacacacagttactttaactactcgttat

SEQ ID NO: 30782 - DNA, 80 bp, synthetic construct
  source 1..80: mol_type = other DNA
catcttgggtcagaattgtgtaaagaaaggcagtgcggtaaatgcagtatttggaaaaccattattaaacaagctagggt

SEQ ID NO: 30783 - DNA, 80 bp, synthetic construct; identical to SEQ ID NO: 11592
  source 1..80: mol_type = other DNA

SEQ ID NO: 30784 - DNA, 80 bp, synthetic construct
  source 1..80: mol_type = other DNA
ttctgggatatgtgtgcagaatgggcaggtttgtcacatgggtatacatgtgccatggtggtttgctgcacccattaacc

SEQ ID NO: 30785 - DNA, 80 bp, synthetic construct
  source 1..80: mol_type = other DNA
tgtgttagtttgctgagaatgatggtttccagcttcatccatgtcccggccaaggacatgaactctctcagcatttgctt

SEQ ID NO: 30786 - DNA, 80 bp, synthetic construct
  source 1..80: mol_type = other DNA
gcagcacaatgagcatgagccaaagcagggtgaggcattgcctcacccgggaagcacaaggggtcagggaattccctttc

SEQ ID NO: 30787 - DNA, 80 bp, synthetic construct; identical to SEQ ID NO: 11593
  source 1..80: mol_type = other DNA

SEQ ID NO: 30788 - DNA, 80 bp, synthetic construct
  source 1..80: mol_type = other DNA
gagtagtggttctcccagcacacagctggagatctgagaacggacagactgcgtcttaagtgggtccctgaccccccagt

SEQ ID NO: 30789 - DNA, 80 bp, synthetic construct
  source 1..80: mol_type = other DNA
aggtctggagtggatctccagcaaactccaacagacctgcagctgagggtcttgactgttagaaggaaaactaacaaata

SEQ ID NO: 30790 - DNA, 80 bp, synthetic construct
  source 1..80: mol_type = other DNA
aacagaacaaagctggacagagaatgactttgacgagttgagagaagaagacttcagacgatcaaactactccaagctaa

SEQ ID NO: 30791 - DNA, 80 bp, synthetic construct; identical to SEQ ID NO: 11594
  source 1..80: mol_type = other DNA

SEQ ID NO: 30792 - DNA, 80 bp, synthetic construct
  source 1..80: mol_type = other DNA
agcaaggcaggccaatattcaaattcaggaaatacagagaatgccacaaagatactcctcgggaagagcaactccaagac

SEQ ID NO: 30793 - DNA, 80 bp, synthetic construct; identical to SEQ ID NO: 12253
  source 1..80: mol_type = other DNA

SEQ ID NO: 30794 - DNA, 80 bp, synthetic construct
  source 1..80: mol_type = other DNA
caactaacgagcaaaataaccaactaacatcataatgacaggatcaaattcacacataacaatattaaccttaaatgtaa

SEQ ID NO: 30795 - DNA, 80 bp, synthetic construct
  source 1..80: mol_type = other DNA
aggaaaggcaggggttgcaatcctagtctctgataaaacagactttaaaccaacaaagatcaaaagagacaaacaaggcc

SEQ ID NO: 30796 - DNA, 80 bp, synthetic construct; identical to SEQ ID NO: 11595
  source 1..80: mol_type = other DNA

SEQ ID NO: 30797 - DNA, 80 bp, synthetic construct
  source 1..80: mol_type = other DNA
ccatggtgcaatcaaactagaactcaggattaagaaactcactcaaaacccctcaactacatggaaactgaacaaactgc

SEQ ID NO: 30798 - DNA, 80 bp, synthetic construct
  source 1..80: mol_type = other DNA
gaaagatctaaaaatgacatgctaacatcacaatttaaaaaactagagaagcaagagcaaacacattcaaaagctagcag

SEQ ID NO: 30799 - DNA, 80 bp, synthetic construct; identical to SEQ ID NO: 11596
  source 1..80: mol_type = other DNA

SEQ ID NO: 30800 - DNA, 80 bp, synthetic construct
  source 1..80: mol_type = other DNA
ttcaggaccagatggactcacagctgaattctatcataggtacaaggaggagctggtaccattccttctgaaactattcc

SEQ ID NO: 30801 - DNA, 80 bp, synthetic construct
  source 1..80: mol_type = other DNA
aatccagcagcacatcaaaaagcttatccactatgatgaagtgggcttcatccctgggatgcaaggctggttcaacatac

SEQ ID NO: 30802 - DNA, 80 bp, synthetic construct
  source 1..80: mol_type = other DNA
aagagctatctatgacaaacccaaagctgatcataccgaatgggcacaaactggaagcattccctttgaaaacaggcaca

SEQ ID NO: 30803 - DNA, 80 bp, synthetic construct
  source 1..80: mol_type = other DNA
cattgtctcagcccaaaatctccttaagctgacaagcaacttcagcaaggtctcaggatacaaaataaatgtgcaaaatt

SEQ ID NO: 30804 - DNA, 80 bp, synthetic construct; identical to SEQ ID NO: 11597
  source 1..80: mol_type = other DNA

SEQ ID NO: 30805 - DNA, 80 bp, synthetic construct
  source 1..80: mol_type = other DNA
actacctgacttcaaactatactacaaggctacagtaagcaaaacagcatggtactgctaccaaaacagagatatagacc

SEQ ID NO: 30806 - DNA, 80 bp, synthetic construct
  source 1..80: mol_type = other DNA
cttccttacaccttatagaacaattcaagatggattcaatacttaaatgttagacctaaaaccataaaaaccgtagaaga

SEQ ID NO: 30807 - DNA, 80 bp, synthetic construct
  source 1..80: mol_type = other DNA
ctacagaatgggagaaaatttttgcaatctactcatctgacaaaaggctaatatccagaatctacaatgaactcaaacta

SEQ ID NO: 30808 - DNA, 80 bp, synthetic construct; identical to SEQ ID NO: 11598
  source 1..80: mol_type = other DNA

SEQ ID NO: 30809 - DNA, 80 bp, synthetic construct
  source 1..80: mol_type = other DNA
catatgtttattgtggcattattcacaatagcaaagacttggaaccacaccaaatatccaacaatgatagattggattaa

SEQ ID NO: 30810 - DNA, 80 bp, synthetic construct
  source 1..80: mol_type = other DNA
aattgaacagtgagaacacacggacacgggaaggggaacatcacacactggggcctgttgtggggcggggaaagggggag

SEQ ID NO: 30811 - DNA, 80 bp, synthetic construct; identical to SEQ ID NO: 11599
  source 1..80: mol_type = other DNA

SEQ ID NO: 30812 - DNA, 80 bp, synthetic construct
  source 1..80: mol_type = other DNA
gaaaaattgcactcactgggcagtggcattacagaaacaggcttaatttggattaatctttctgtaaatctgtattgaga

SEQ ID NO: 30813 - DNA, 80 bp, synthetic construct
  source 1..80: mol_type = other DNA
gtgggcaacctaacctttctctctggctgccctcaatattttttccgtcatttcaaccttggtgcatatgatgattgtgt

SEQ ID NO: 30814 - DNA, 80 bp, synthetic construct
  source 1..80: mol_type = other DNA
ccaatcaaacatatgtttggtcttttcacttagtcccatatttcctggaggctttgttcgctccttttcattcttttttc

SEQ ID NO: 30815 - DNA, 80 bp, synthetic construct; identical to SEQ ID NO: 11600
  source 1..80: mol_type = other DNA

SEQ ID NO: 30816 - DNA, 80 bp, synthetic construct
  source 1..80: mol_type = other DNA
ttttcctcatcttcatggatttatctacctttggtctttgctgttggtgaccttcggatggagtttttgcatggtcgtcc

SEQ ID NO: 30817 - DNA, 80 bp, synthetic construct
  source 1..80: mol_type = other DNA
gtatcaccagcagcggctgcagaacagcaaagattgctgcctgctccttcctctggaagcttcatcctggtggggcacca

SEQ ID NO: 30818 - DNA, 80 bp, synthetic construct
  source 1..80: mol_type = other DNA
agagcttgagggctaggctgggagatctgctgctctcttcagggccatcaggcagaaacgtttaagtctgctgaagctgg

SEQ ID NO: 30819 - DNA, 80 bp, synthetic construct
  source 1..80: mol_type = other DNA
gggcactgcccagactcatcttcccagaggttttgtttacactgtgaggggaaaaccgcctactcacacctcagtaatgg

SEQ ID NO: 30820 - DNA, 80 bp, synthetic construct; identical to SEQ ID NO: 11601
  source 1..80: mol_type = other DNA

SEQ ID NO: 30821 - DNA, 80 bp, synthetic construct
  source 1..80: mol_type = other DNA
gtagtatctgggctggatagcactgtccctcatggcttcccttggctaggggagggagttccccaacccgttgtgcttcc

SEQ ID NO: 30822 - DNA, 80 bp, synthetic construct
  source 1..80: mol_type = other DNA
ttatttggccatcttgccccaatcccagtccagaactttgtatgtaccaagctgtgaagtgaatgtttgaaaactggaaa

SEQ ID NO: 30823 - DNA, 80 bp, synthetic construct
  source 1..80: mol_type = other DNA
gtcttttctttagcgtatgttcagctaattttgacagaaattttcttgaatgtggagaggcaaaaaagagacatagaaaa

SEQ ID NO: 30824 - DNA, 80 bp, synthetic construct; identical to SEQ ID NO: 11602
  source 1..80: mol_type = other DNA

SEQ ID NO: 30825 - DNA, 80 bp, synthetic construct
  source 1..80: mol_type = other DNA
tttgccctaggtagctttgggttgttcatttgtcttaggagatttttgagaaatgtccattgcttttccatcctgagtga

SEQ ID NO: 30826 - DNA, 80 bp, synthetic construct
  source 1..80: mol_type = other DNA
caagatcactgccaagctgatgagggaggtggtacaagtgcaaataaacataccacaaagcttacatatgcatcatggaa

SEQ ID NO: 30827 - DNA, 80 bp, synthetic construct
  source 1..80: mol_type = other DNA
ttcataagtgggagctgaacaaggagaacacatggacccagggaggggaacaacacacactagggcctgtccggggtgtt

SEQ ID NO: 30828 - DNA, 80 bp, synthetic construct; identical to SEQ ID NO: 11603
  source 1..80: mol_type = other DNA

SEQ ID NO: 30829 - DNA, 80 bp, synthetic construct
  source 1..80: mol_type = other DNA
gtgagtggttgaacactacagcttgcccatatcttagcattgtggcattaacatctgggaaagatagatgatttctttat

SEQ ID NO: 30830 - DNA, 80 bp, synthetic construct
  source 1..80: mol_type = other DNA
gcacacactcaatggaaatccaagtcccttgttgaaaagctggcattactcacaggcttttcctctaattcacacctaga

SEQ ID NO: 30831 - DNA, 80 bp, synthetic construct; identical to SEQ ID NO: 11604
  source 1..80: mol_type = other DNA

SEQ ID NO: 30832 - DNA, 80 bp, synthetic construct
  source 1..80: mol_type = other DNA
ctaggagtagaaatagcagggaatggctttgtgatctatttcatgttgttcaaatttccttaccctctgttcttatctgt

SEQ ID NO: 30833 - DNA, 80 bp, synthetic construct
  source 1..80: mol_type = other DNA
ctaacttaaatctttctatcagtatagaggactactttgtacgtataatcaaatgctcctcttacagagggagataattt

SEQ ID NO: 30834 - DNA, 80 bp, synthetic construct
  source 1..80: mol_type = other DNA
ttttgcttacattaaaagttatgtattggagagaataaaagaacatcaagaatccctggacatgaacagtgctcgggact

SEQ ID NO: 30835 - DNA, 80 bp, synthetic construct
  source 1..80: mol_type = other DNA
tataacgattgcttaaatagtgaggcaagaaacacttcatgagcactttatgtacttaccatgtgtatagatctggatga

SEQ ID NO: 30836 - DNA, 80 bp, synthetic construct; identical to SEQ ID NO: 11605
  source 1..80: mol_type = other DNA

SEQ ID NO: 30837 - DNA, 80 bp, synthetic construct
  source 1..80: mol_type = other DNA
ccttaactgaatggaaccaaaagtaaatccggacaaatatggaattggaggtgtctgtaagctgcagacctgaatgctgg

SEQ ID NO: 30838 - DNA, 80 bp, synthetic construct
  source 1..80: mol_type = other DNA
ggtcaaaaacttgctacaagacatttcatatatttgaagttcagcttgctgaaagtgtgggctacagaaacagattctga

SEQ ID NO: 30839 - DNA, 80 bp, synthetic construct
  source 1..80: mol_type = other DNA
tcagatggtgaatttgaatagtggtagggtcaatatggaaactgtgaggaaggtaatatagatgcttcaggacactaagg

SEQ ID NO: 30840 - DNA, 80 bp, synthetic construct; identical to SEQ ID NO: 11606
  source 1..80: mol_type = other DNA

SEQ ID NO: 30841 - DNA, 80 bp, synthetic construct
  source 1..80: mol_type = other DNA
gacactatatgagttctccatttttgtacacatttaggggggtttccttaatgctatgaattgtctccattaattccagg

SEQ ID NO: 30842 - DNA, 80 bp, synthetic construct
  source 1..80: mol_type = other DNA
taccctcatacattttaaatacaattcaacagttttagtatttttcacagagctgtgcagccaccaccacaaccaatttc

SEQ ID NO: 30843 - DNA, 80 bp, synthetic construct
  source 1..80: mol_type = other DNA
gacttctgtcacttagcacaatgttttcaaggttcattgacatagcatgtatcagtacctcattcctttatgtggtcaaa

SEQ ID NO: 30844 - DNA, 80 bp, synthetic construct; identical to SEQ ID NO: 11607
  source 1..80: mol_type = other DNA

SEQ ID NO: 30845 - DNA, 80 bp, synthetic construct
  source 1..80: mol_type = other DNA
atctttttgattccagccatcccagtggggttgaggtggttccatgtggtttggtttgcattttcctgacatcaaataat

SEQ ID NO: 30846 - DNA, 80 bp, synthetic construct
  source 1..80: mol_type = other DNA
tatattctagataaaagtcccatatcagatgttattaaagatattttctcccattttgtcaagtgtctttcactttctta

SEQ ID NO: 30847 - DNA, 80 bp, synthetic construct
  source 1..80: mol_type = other DNA
ttaactattacatttaggtctaagatccactctgagtcaatttttgattatagtgtgaggtatgggtacaacttcattct

SEQ ID NO: 30848 - DNA, 80 bp, synthetic construct; identical to SEQ ID NO: 11608
  source 1..80: mol_type = other DNA

SEQ ID NO: 30849 - DNA, 80 bp, synthetic construct
  source 1..80: mol_type = other DNA
cctcctgaatagctgggattacaggcatgtgccactatggccagataatttattgtatttttagcagagacagcctttcg

SEQ ID NO: 30850 - DNA, 80 bp, synthetic construct
  source 1..80: mol_type = other DNA
ttcccaagattgttttggttcttagctattttggttgtgtagagttccccatgaattttatggtaatcttgtccatttct

SEQ ID NO: 30851 - DNA, 80 bp, synthetic construct
  source 1..80: mol_type = other DNA
gtcagctagcttaattttgataggctatttgtacataaccactgatttttcaaattcacttaaacagaaggaaatattag

SEQ ID NO: 30852 - DNA, 80 bp, synthetic construct; identical to SEQ ID NO: 11609
  source 1..80: mol_type = other DNA

SEQ ID NO: 30853 - DNA, 80 bp, synthetic construct
  source 1..80: mol_type = other DNA
gtcaataatttagactgtcccattgttatggtcaattttgtgttacatatttccctcatcttaaaccagccttagttgcc

SEQ ID NO: 30854 - DNA, 80 bp, synthetic construct
  source 1..80: mol_type = other DNA
attgcccttactctctccttcatcctgtataggtggttaatgtccaaactctctgtcttcatgtctgtagtgtctcttca

SEQ ID NO: 30855 - DNA, 80 bp, synthetic construct
  source 1..80: mol_type = other DNA
taatcttggatatgttaccatgttatcttttgcacatttccgagttcataatgagtctgcaggcaatattgagtgtgact

SEQ ID NO: 30856 - DNA, 80 bp, synthetic construct; identical to SEQ ID NO: 11610
  source 1..80: mol_type = other DNA

SEQ ID NO: 30857 - DNA, 80 bp, synthetic construct
  source 1..80: mol_type = other DNA
tgtccaatatgaacacttttttttttctgaattttattcttttttgttttagaggcagaatcttgccccattgcccaggc

SEQ ID NO: 30858 - DNA, 80 bp, synthetic construct
  source 1..80: mol_type = other DNA
ggttgcctaggctagtcttgaacttctgggctcaagcgatcctcccatcttggcctcccaaagtgctgggattacaggca

SEQ ID NO: 30859 - DNA, 80 bp, synthetic construct
  source 1..80: mol_type = other DNA
cagatttactcctccattctaacaggctttataccctttgactatcatctccccctttccccccgcccccaagccctctg

SEQ ID NO: 30860 - DNA, 80 bp, synthetic construct
  source 1..80: mol_type = other DNA
tttaaggctgaatagtattctattgtgtatatataccacattttctttatccatttatctgttgatgggcacttaggctg

SEQ ID NO: 30861 - DNA, 80 bp, synthetic construct; identical to SEQ ID NO: 11611
  source 1..80: mol_type = other DNA

SEQ ID NO: 30862 - DNA, 80 bp, synthetic construct
  source 1..80: mol_type = other DNA
tatttgcccatttcttaattggattatttgttttctttctatagagttgtttaagttccacatatatgtgcatgcatgtc

SEQ ID NO: 30863 - DNA, 80 bp, synthetic construct
  source 1..80: mol_type = other DNA
gtatacatgtgccatgtaggtgtgctgcacccattaactcatcatttacattaggtatatctcttaatgctatccctccc

SEQ ID NO: 30864 - DNA, 80 bp, synthetic construct; identical to SEQ ID NO: 11612
  source 1..80: mol_type = other DNA

SEQ ID NO: 30865 - DNA, 80 bp, synthetic construct
  source 1..80: mol_type = other DNA
agttctagatccttgaggaattgccacactgtcttccacagtggttgaactagtttaaagtcccaccaacagtgtgtaaa

SEQ ID NO: 30866 - DNA, 80 bp, synthetic construct
  source 1..80: mol_type = other DNA
aaatgtcttcttttgagaagtgtctgttcatatacttcacccactttgtgatggggttgttttttttcttgtaaatttgt

SEQ ID NO: 30867 - DNA, 80 bp, synthetic construct
  source 1..80: mol_type = other DNA
ttgttgccattgcttttggtgttttagacatgaagtccttgcccatgcctatgtcctgaatggtattgcctaggttttct

SEQ ID NO: 30868 - DNA, 80 bp, synthetic construct
  source 1..80: mol_type = other DNA
tcttgtttttgtcaggtttgtcaaagatcagatggttgtagatgtgcggtattatttctgatggctctgttctgttccat

SEQ ID NO: 30869 - DNA, 80 bp, synthetic construct; identical to SEQ ID NO: 11613
  source 1..80: mol_type = other DNA

SEQ ID NO: 30870 - DNA, 80 bp, synthetic construct
  source 1..80: mol_type = other DNA
tctttgaagcaattgtgaatgggagttcactcatgatttggcactctgtttgtctgttattggtgtataagaatacttgt

SEQ ID NO: 30871 - DNA, 80 bp, synthetic construct
  source 1..80: mol_type = other DNA
atttctttctcctgcctgattactctggccagaacttccaacagtatgttgaatagaagtggtgagagagggcatccctg

SEQ ID NO: 30872 - DNA, 80 bp, synthetic construct
  source 1..80: mol_type = other DNA
aggccttttctgcatgtagtattgagataatcatgtggtttttgtctttggttctgtttatatgctggattacatttatt

SEQ ID NO: 30873 - DNA, 80 bp, synthetic construct; identical to SEQ ID NO: 11614
  source 1..80: mol_type = other DNA

SEQ ID NO: 30874 - DNA, 80 bp, synthetic construct
  source 1..80: mol_type = other DNA
gcttcttcctggtttagtcttgggagagtgtatgtgtcgagaaatttatccatttcttctagattttctaatttatttgc

SEQ ID NO: 30875 - DNA, 80 bp, synthetic construct
  source 1..80: mol_type = other DNA
aaccagctcctggattcattgattttttgaagggtttttgtgtctctatctccttcagttctgctctgatcttagttatt

SEQ ID NO: 30876 - DNA, 80 bp, synthetic construct
  source 1..80: mol_type = other DNA
tctggtatgttgtgtctttgttctcattggtttcaagaacatctttatttctgccttcatttcattatgtacccagtagt

SEQ ID NO: 30877 - DNA, 80 bp, synthetic construct; identical to SEQ ID NO: 11615
  source 1..80: mol_type = other DNA

SEQ ID NO: 30878 - DNA, 80 bp, synthetic construct
  source 1..80: mol_type = other DNA
atgaatctgggtgctcctgtattgggtgcatatatatttaggatagttagctcttcttgttgaattgatccctttaccat

SEQ ID NO: 30879 - DNA, 80 bp, synthetic construct
  source 1..80: mol_type = other DNA
caggtctcctgaatacagcacactgaggagtcttgactctttatccagtttgctagtctgtgtcttttaatcagtgcatt

SEQ ID NO: 30880 - DNA, 80 bp, synthetic construct
  source 1..80: mol_type = other DNA
ctttccatgtttagtgcttccttctggtgctcttgtagggcaggcatggtggtgacaaaatctctcagggtttgcttgtc

SEQ ID NO: 30881 - DNA, 80 bp, synthetic construct; identical to SEQ ID NO: 11616
  source 1..80: mol_type = other DNA

SEQ ID NO: 30882 - DNA, 80 bp, synthetic construct
  source 1..80: mol_type = other DNA
atgtgtccatttttatgccagtaccatgctgttttaattactattaatttgtagtatagcttgaaatcaggtaatgtgat

SEQ ID NO: 30883 - DNA, 80 bp, synthetic construct
  source 1..80: mol_type = other DNA
atggacattttaacaatatcaactcttccaatccatgcatatggtatctcttttttatttgtgtcttcttcattttttta

SEQ ID NO: 30884 - DNA, 80 bp, synthetic construct
  source 1..80: mol_type = other DNA
gattttgtatcctgcaactttactgaatttaattatcagttctaagagttttttggtgatgtgtttaaggttttctgtat

SEQ ID NO: 30885 - DNA, 80 bp, synthetic construct; identical to SEQ ID NO: 11617
  source 1..80: mol_type = other DNA

SEQ ID NO: 30886 - DNA, 80 bp, synthetic construct
  source 1..80: mol_type = other DNA
ctggaagtgcttgtgcactaatataatactggtactttttccagtggtctagagagagactcctgtatacttagtcctct

SEQ ID NO: 30887 - DNA, 80 bp, synthetic construct
  source 1..80: mol_type = other DNA
aattgtatggtgtagtgcctgggtgaggttggtgctgtagctttttcttcccagtctatgtggatattttctttgttgct

SEQ ID NO: 30888 - DNA, 80 bp, synthetic construct
  source 1..80: mol_type = other DNA
tccttgggtggaagaagagactggagcctcctattctgcaatgtccctattgtgacactgagaattgcaaacccttgatt

SEQ ID NO: 30889 - DNA, 80 bp, synthetic construct; identical to SEQ ID NO: 11618
  source 1..80: mol_type = other DNA

SEQ ID NO: 30890 - DNA, 80 bp, synthetic construct
  source 1..80: mol_type = other DNA
ttttttgatttttatttttttttttgagaggagtttcactctgtcacccaggatagagtgcagtggtgtgatctcggctc

SEQ ID NO: 30891 - DNA, 80 bp, synthetic construct
  source 1..80: mol_type = other DNA
aggtgactgcctgtcttggcctcccaaagtgctgggattacaggcatgtgccaccatgcctggccaagtttttgattttt

SEQ ID NO: 30892 - DNA, 80 bp, synthetic construct
  source 1..80: mol_type = other DNA
tctatatcacctctaccttcatatatgtgttttgagtaaaaaggagagaaagtgccatcaacaggtacctgcttatatgt

SEQ ID NO: 30893 - DNA, 80 bp, synthetic construct; identical to SEQ ID NO: 11619
  source 1..80: mol_type = other DNA

SEQ ID NO: 30894 - DNA, 80 bp, synthetic construct
  source 1..80: mol_type = other DNA
aacagtctgaatttactgttgaaagcttgatagccactgtaactgatatgtttggggctggaacagagacaacgagcacc

SEQ ID NO: 30895 - DNA, 80 bp, synthetic construct
  source 1..80: mol_type = other DNA
gtgccattggctctaagttgtctaaatatgatgaagggataagaatgagacaaatttgcacaatagggaagagggactga

SEQ ID NO: 30896 - DNA, 80 bp, synthetic construct; identical to SEQ ID NO: 11620
  source 1..80: mol_type = other DNA

SEQ ID NO: 30897 - DNA, 80 bp, synthetic construct
  source 1..80: mol_type = other DNA
tcagcctcctgagtagctgggattacaggtgtacccaccacacctggctaattattttgtatttttagtagagacggggt

SEQ ID NO: 30898 - DNA, 80 bp, synthetic construct
  source 1..80: mol_type = other DNA
ggacagtaaagacagaaactctttttatttttaatttttattattggcaattcttttgtggttggtttgatgccattttt

SEQ ID NO: 30899 - DNA, 80 bp, synthetic construct
  source 1..80: mol_type = other DNA
cccacctttccaccttttggactctccagtgtctattattccactctgtatgtctctgtgtacccattgtttagctccca

SEQ ID NO: 30900 - DNA, 80 bp, synthetic construct
  source 1..80: mol_type = other DNA
agaatactagatgcagatttttaaatcccacacataacaattttaatccattcatctgttgatggatgcttgggttgatt

SEQ ID NO: 30901 - DNA, 80 bp, synthetic construct; identical to SEQ ID NO: 11621
  source 1..80: mol_type = other DNA

SEQ ID NO: 30902 - DNA, 80 bp, synthetic construct
  source 1..80: mol_type = other DNA
tatttatctatgagcagattctggctctgcataacatattagccacacacttgtttttctggggtcagaatcacactgaa

SEQ ID NO: 30903 - DNA, 80 bp, synthetic construct
  source 1..80: mol_type = other DNA
gttgctatagtccccataaggctgagtattcaaaagaaccaagacccaaagaacatagagggagaatgaggcagaaaaca

SEQ ID NO: 30904 - DNA, 80 bp, synthetic construct; identical to SEQ ID NO: 11622
  source 1..80: mol_type = other DNA

SEQ ID NO: 30905 - DNA, 80 bp, synthetic construct
  source 1..80: mol_type = other DNA
cagagataaattaggtcacctgtgaaggatcaggaatcagaatggcattagaattctcaagagcagctgtcatcttgtgt

SEQ ID NO: 30906 - DNA, 80 bp, synthetic construct
  source 1..80: mol_type = other DNA
tagagaatattttccatccaaatgtctgaaaccaattcaggggaaatcatgggctgcagggatcaggagatctcatgtag

SEQ ID NO: 30907 - DNA, 80 bp, synthetic construct
  source 1..80: mol_type = other DNA
gagtttgaaacatttctgagcatttgcagtaattctaaattggcatatgaaaattagaattgaaatggacacacaagtcc

SEQ ID NO: 30908 - DNA, 80 bp, synthetic construct; identical to SEQ ID NO: 11623
  source 1..80: mol_type = other DNA

SEQ ID NO: 30909 - DNA, 80 bp, synthetic construct
  source 1..80: mol_type = other DNA
gagagaatatcatttcaagtttcaaataaacatatgcacacaatacacaaatccatccatacatatagatctgttagtag

SEQ ID NO: 30910 - DNA, 80 bp, synthetic construct
  source 1..80: mol_type = other DNA
atgtaggtggttacagatttatcttaatacttagcttgtaggagagttggatgtatctataatgtagtaatttcttccct

SEQ ID NO: 30911 - DNA, 80 bp, synthetic construct
  source 1..80: mol_type = other DNA
tacaacaaatgtgccattttcctccttttccatcatttcttacttgtgtcttatcagctaaagtccaggaagagattgaa

SEQ ID NO: 30912 - DNA, 80 bp, synthetic construct; identical to SEQ ID NO: 11624
  source 1..80: mol_type = other DNA

SEQ ID NO: 30913 - DNA, 80 bp, synthetic construct
  source 1..80: mol_type = other DNA
gtggctattctcaggttgtttacatttccaagtaagtgttgaaagtatcattttgtcaatttcccaaaacactgtgctgg

SEQ ID NO: 30914 - DNA, 80 bp, synthetic construct
  source 1..80: mol_type = other DNA
tcatgtattacgttttttttctgaaatgatatttctatgtaattgtaagttgtgtatttaatatataatataaaatatat

SEQ ID NO: 30915 - DNA, 80 bp, synthetic construct
  source 1..80: mol_type = other DNA
tatactttaaaaaaaatgccttttccatttctttgtttctggtacatggaaatataattgactttattattttgatgacc

SEQ ID NO: 30916 - DNA, 80 bp, synthetic construct; identical to SEQ ID NO: 11625
  source 1..80: mol_type = other DNA

SEQ ID NO: 30917 - DNA, 80 bp, synthetic construct
  source 1..80: mol_type = other DNA
gtcctgtctatagatataatatatatattagttaaaatacacacaaatgtgcacacagagacatacacagctgggtttta

SEQ ID NO: 30918 - DNA, 80 bp, synthetic construct
  source 1..80: mol_type = other DNA
cttttctcccttctctattctttttgtgctcacttagttctgtctttggagtgactcataaattttggttaagtgccagt

SEQ ID NO: 30919 - DNA, 80 bp, synthetic construct
  source 1..80: mol_type = other DNA
tttattatactttaagttctgggatacatgtgcagaatgtgcagttttgttacataggtatacacgtgccatggtggttc

SEQ ID NO: 30920 - DNA, 80 bp, synthetic construct
  source 1..80: mol_type = other DNA
tctgatcttgtgatagtttgctgagaatgatggtttccagcttcatcaatgtccctgcaaaggacatgaagtcatcattt

SEQ ID NO: 30921 - DNA, 80 bp, synthetic construct; identical to SEQ ID NO: 11626
  source 1..80: mol_type = other DNA

SEQ ID NO: 30922 - DNA, 80 bp, synthetic construct
  source 1..80: mol_type = other DNA
attgccatcttatagggaagagggaattctgaatgtctgtattgtgccatatggaatccactagccacaggtacctattg

SEQ ID NO: 30923 - DNA, 80 bp, synthetic construct
  source 1..80: mol_type = other DNA
aatatctcattctcaattatgtaatattaaaagcctgagtagttaaaaaccatttaaggtgggtgtaatttcatttggct

SEQ ID NO: 30924 - DNA, 80 bp, synthetic construct
  source 1..80: mol_type = other DNA
gctggaggccagcctgagcaacatagtgaaactctatctctacaaaaaataaaaaaattagctgggtgtagtggcatgtg

SEQ ID NO: 30925 - DNA, 80 bp, synthetic construct; identical to SEQ ID NO: 11627
  source 1..80: mol_type = other DNA

SEQ ID NO: 30926 - DNA, 80 bp, synthetic construct
  source 1..80: mol_type = other DNA
tctatctacctatgtaatctaatctgtcacatttaacacctaagtacttcagtatataattcccaaaaacaaggactttc

SEQ ID NO: 30927 - DNA, 80 bp, synthetic construct
  source 1..80: mol_type = other DNA
gatggacttcctgtagtccagtcaaggaacaagcttttaatttggttatcttgttttgttaatccttcttcatcacgaac

SEQ ID NO: 30928 - DNA, 80 bp, synthetic construct; identical to SEQ ID NO: 11628
  source 1..80: mol_type = other DNA

SEQ ID NO: 30929 - DNA, 80 bp, synthetic construct
  source 1..80: mol_type = other DNA
atttatccttccttctgtgttttttaggttggattcatctctgatgaagagttcccccacgtgttttaactaaaagaaac

SEQ ID NO: 30930 - DNA, 80 bp, synthetic construct
  source 1..80: mol_type = other DNA
agatagaaccaccatgtacacagggaaaagagcacaaaaattcaactgatacagaacaacaactgaaagtcacaattacc

SEQ ID NO: 30931 - DNA, 80 bp, synthetic construct
  source 1..80: mol_type = other DNA
agtctcctcctaacaggaccaactctatctaaaagttgcttacgagtaacttgaatcttgtgtaatagtctgcatctcac

SEQ ID NO: 30932 - DNA, 80 bp, synthetic construct
  source 1..80: mol_type = other DNA
aaatataggcaatggctgctcaataagaattttaagttccgaataccacatataggtagacaccagtgtgcaagttgatg

SEQ ID NO: 30933 - DNA, 80 bp, synthetic construct; identical to SEQ ID NO: 11629
  source 1..80: mol_type = other DNA

SEQ ID NO: 30934 - DNA, 80 bp, synthetic construct
  source 1..80: mol_type = other DNA
aatcttgggacattcttctgaaaactaggtgtccagtggctaagagaactcaatttcaagcacttctgaaaggaacacca

SEQ ID NO: 30935 - DNA, 80 bp, synthetic construct
  source 1..80: mol_type = other DNA
agaaaataggaatgctaaatcctaggaagcctgtaacaatctacaactggtccaagttgaagacaaaactgtccaaacaa

SEQ ID NO: 30936 - DNA, 80 bp, synthetic construct; identical to SEQ ID NO: 11630
  source 1..80: mol_type = other DNA

SEQ ID NO: 30937 - DNA, 80 bp, synthetic construct
  source 1..80: mol_type = other DNA
atgacaattcatttctcttttcaagggaaatcacaaaacaggtgaacaaccaagtcaagggtggtttttctgtttgataa

SEQ ID NO: 30938 - DNA, 80 bp, synthetic construct
  source 1..80: mol_type = other DNA
tttttaatagccacagggatctctttcccagttccaaagaggaattaatgaagaccaggtatgtttagaggcttctattt

SEQ ID NO: 30939 - DNA, 80 bp, synthetic construct
  source 1..80: mol_type = other DNA
ctagaaaactctgaagactcttccaaaagggcctctggaagggataaatgaccagtaaagtttcaggatacaaaataaat

SEQ ID NO: 30940 - DNA, 80 bp, synthetic construct; identical to SEQ ID NO: 11631
  source 1..80: mol_type = other DNA

SEQ ID NO: 30941 - DNA, 80 bp, synthetic construct
  source 1..80: mol_type = other DNA
aagtgcctgtagtcccagctacttgggaggctgaggcaggagaatggcgtgaacccggaaggtggagcttgcagtgagca

SEQ ID NO: 30942 - DNA, 80 bp, synthetic construct
  source 1..80: mol_type = other DNA
caaaaaagcctgaatagccaaaacaaacctaagcaaaaagaacaaagctggagtcgtcacgctaccagacttcaaactat

SEQ ID NO: 30943 - DNA, 80 bp, synthetic construct
  source 1..80: mol_type = other DNA
attcaataaatgatgctgggatggcaggctagccatatgcagaatgaaactggaccccatcctttcaccatatataaata

SEQ ID NO: 30944 - DNA, 80 bp, synthetic construct
  source 1..80: mol_type = other DNA
aaaattgataatttagttacaaattaaactaaagagcttctgcataacaaaagtaactattaacaaagtaaacagacaac

SEQ ID NO: 30945 - DNA, 80 bp, synthetic construct; identical to SEQ ID NO: 11632
  source 1..80: mol_type = other DNA

SEQ ID NO: 30946 - DNA, 80 bp, synthetic construct
  source 1..80: mol_type = other DNA
gatccagcaatcccattactggatatatttccaaaagaaaataaatcattctactaaaaagacatgtgaacttgtatatt

SEQ ID NO: 30947 - DNA, 80 bp, synthetic construct
  source 1..80: mol_type = other DNA
gagtgaattaacgcaggaacagaaaaccaaatattgtacgttctcacaaggaggagttaaacatcagtactcatggacat

SEQ ID NO: 30948 - DNA, 80 bp, synthetic construct
  source 1..80: mol_type = other DNA
aaacaacaacaaaaaaggtaatccatgtgtgaggtgtgtgaaaactgaagtgatgaaatacagcagcaagtggggatgta

SEQ ID NO: 30949 - DNA, 80 bp, synthetic construct; identical to SEQ ID NO: 11633
  source 1..80: mol_type = other DNA

SEQ ID NO: 30950 - DNA, 80 bp, synthetic construct
  source 1..80: mol_type = other DNA
gaccctggccactttctggataagagtggcaactttaagaaaagtgactacttcatgcctttctcagcaggtaatagata

SEQ ID NO: 30951 - DNA, 80 bp, synthetic construct
  source 1..80: mol_type = other DNA
gccaggttagtggggctttggggagttgatccagtttttcaaactgaaaaagctagaatgtaggttaatttaattctgcc

SEQ ID NO: 30952 - DNA, 80 bp, synthetic construct
  source 1..80: mol_type = other DNA
ctgagagcagagaatgggctcttaagaggctcactcctgatttagagaagtagacaagtaaacagatcattgtaatctag

SEQ ID NO: 30953 - DNA, 80 bp, synthetic construct
  source 1..80: mol_type = other DNA
cacttttacagaggtaatggaccatagtagcaggacattttctgtagatctagggggtcagaacctaccaacaaatttca

SEQ ID NO: 30954 - DNA, 80 bp, synthetic construct; identical to SEQ ID NO: 11634
  source 1..80: mol_type = other DNA

SEQ ID NO: 30955 - DNA, 80 bp, synthetic construct
  source 1..80: mol_type = other DNA
cagaaatcataaagaggaaatgacatggggcatagcttctgaaggaagcataggagtagagctttttaggcagatgtgac

SEQ ID NO: 30956 - DNA, 80 bp, synthetic construct
  source 1..80: mol_type = other DNA
aacagaatgtgaagagtcaggtcaagccatttggcctttatcccataggacagatgggtgttgtttaaagttgtaaaatg

SEQ ID NO: 30957 - DNA, 80 bp, synthetic construct; identical to SEQ ID NO: 11635
  source 1..80: mol_type = other DNA

SEQ ID NO: 30958 - DNA, 80 bp, synthetic construct
  source 1..80: mol_type = other DNA
agccatccttccagtcattctgccttcgatccatccatctatttaatcatttatcaaatagttactgcatactctttgtg

SEQ ID NO: 30959 - DNA, 80 bp, synthetic construct
  source 1..80: mol_type = other DNA
tattgacatcacccccattgccaatgcatttggtcgtgtgccacccttgtaccagctctgcttcattcctgtctgaagaa

SEQ ID NO: 30960 - DNA, 80 bp, synthetic construct
  source 1..80: mol_type = other DNA
gagtttcttgggtcacttcctaaatatatctgctattctccatactctgtatcacttgtattgaccaccacatatgctaa

SEQ ID NO: 30961 - DNA, 80 bp, synthetic construct; identical to SEQ ID NO: 11636
  source 1..80: mol_type = other DNA

SEQ ID NO: 30962 - DNA, 80 bp, synthetic construct
  source 1..80: mol_type = other DNA
tgcttttgtgttactgtaaacacaagatcaagatttggataatctttttcctttgtgtttccaacttagatcatgtctaa

SEQ ID NO: 30963 - DNA, 80 bp, synthetic construct
  source 1..80: mol_type = other DNA
gtcttaacaagaggagaaggcttcaatggatccttttgtggtccttgtgctctgtctctcatgtttgcttctcctttcaa

SEQ ID NO: 30964 - DNA, 80 bp, synthetic construct; identical to SEQ ID NO: 11767
  source 1..80: mol_type = other DNA

SEQ ID NO: 30965 - DNA, 80 bp, synthetic construct
  source 1..80: mol_type = other DNA
aaatgttgtgttccttctttatttcatagccatttgctagaatttttggctgagggtaaacagtaagggaagtgtttgtt

SEQ ID NO: 30966 - DNA, 80 bp, synthetic construct; identical to SEQ ID NO: 11637
  source 1..80: mol_type = other DNA

SEQ ID NO: 30967 - DNA, 80 bp, synthetic construct
  source 1..80: mol_type = other DNA
cagtgttaatatgatatgtgaatacacctcattgtgtagttattagcatatacagagagtaaagggctgcgattagtata

SEQ ID NO: 30968 - DNA, 80 bp, synthetic construct
  source 1..80: mol_type = other DNA
catcactttcagggagagcagtgtttgaaggccccgtgttattagtatgcttttgtgtctggaactggttctttccagtg

SEQ ID NO: 30969 - DNA, 80 bp, synthetic construct; identical to SEQ ID NO: 11638
  source 1..80: mol_type = other DNA

SEQ ID NO: 30970 - DNA, 80 bp, synthetic construct
  source 1..80: mol_type = other DNA
cgctgctggctcaggtgggcagcttttattcccttatttggccccacccatgtcctgctgattggcccattttacagagt

SEQ ID NO: 30971 - DNA, 80 bp, synthetic construct
  source 1..80: mol_type = other DNA
tggtgtgtttacaatcctttagctagacagaaaagttctccaagtccctacctgacccagaagcccagccggcttcacct

SEQ ID NO: 30972 - DNA, 80 bp, synthetic construct
  source 1..80: mol_type = other DNA
tccaggtgtccttggaaggagttgttagttgagctcatttggggttccatttgtaagaccatctgtagcttgatggcgtt

SEQ ID NO: 30973 - DNA, 80 bp, synthetic construct; identical to SEQ ID NO: 11639
  source 1..80: mol_type = other DNA

SEQ ID NO: 30974 - DNA, 80 bp, synthetic construct
  source 1..80: mol_type = other DNA
taatgaagtagataaactggctattctggttcctgtagcagtagccattcctaaccctataagtagggatattagttgta

SEQ ID NO: 30975 - DNA, 80 bp, synthetic construct
  source 1..80: mol_type = other DNA
ttggctgggtagacacaactggttgtgtatgttaaaaaggtgtgtgtttgttgttttcattttcccatactcctagagta

SEQ ID NO: 30976 - DNA, 80 bp, synthetic construct
  source 1..80: mol_type = other DNA
gtgggggagctgctgcaggggatccaggggtgaatggtcatgcagggagtatgtttgccattacaaagcctggactgttt

SEQ ID NO: 30977 - DNA, 80 bp, synthetic construct
  source 1..80: mol_type = other DNA
cctgataacaggttgcattgcattcatacaggggcttggaaagttaagatggtatttgtagttacaaggctgtgtatggg

SEQ ID NO: 30978 - DNA, 80 bp, synthetic construct; identical to SEQ ID NO: 11640
  source 1..80: mol_type = other DNA

SEQ ID NO: 30979 - DNA, 80 bp, synthetic construct
  source 1..80: mol_type = other DNA
agatggtgctctggaagatgagatcattttatccaggccgagtaaaaggtaggagtaaattgctgtcagaaggaaggaag

SEQ ID NO: 30980 - DNA, 80 bp, synthetic construct
  source 1..80: mol_type = other DNA
tgtaggttttcacttatcttttttaaggaggaaggggtttttcttcaggatcggtggtaggagcctttttagtctgggat

SEQ ID NO: 30981 - DNA, 80 bp, synthetic construct; identical to SEQ ID NO: 11641
  source 1..80: mol_type = other DNA

SEQ ID NO: 30982 - DNA, 80 bp, synthetic construct
  source 1..80: mol_type = other DNA
tgtgaaaaaaggccatccatacagcatttcatttggactgagccccattttgtgagaatttcggattctcaacaaggtca

SEQ ID NO: 30983 - DNA, 80 bp, synthetic construct
  source 1..80: mol_type = other DNA
cctaagttattatggctttaaaagccagaccattgtcactctgtaagctttggggaagccaaaatctaggaattatttca

SEQ ID NO: 30984 - DNA, 80 bp, synthetic construct
  source 1..80: mol_type = other DNA
ctattctttgttccccccaaaggggccctatgatggaccaagggattattcttttggcacacctcagaggctttgactac

SEQ ID NO: 30985 - DNA, 80 bp, synthetic construct
  source 1..80: mol_type = other DNA
gctgaggggagagaaaactatgcccctgtgaaagttcccattctgtttcagtcagggaatactggggcttaatctcttgg

SEQ ID NO: 30986 - DNA, 80 bp, synthetic construct; identical to SEQ ID NO: 11642
  source 1..80: mol_type = other DNA

SEQ ID NO: 30987 - DNA, 80 bp, synthetic construct
  source 1..80: mol_type = other DNA
tacagttacaccactaactttgccataacctgcccttcatatcccattctccacaaatgaacttccttcggtatataggt

SEQ ID NO: 30988 - DNA, 80 bp, synthetic construct
  source 1..80: mol_type = other DNA
ctcaaggagtagcacctgatatctaagtaggcagttgtctgataaccataaacttcctttggcacctagtatgccattta

SEQ ID NO: 30989 - DNA, 80 bp, synthetic construct
  source 1..80: mol_type = other DNA
ttcacgagtctgagtaaggactccaagaggtatccctgctctctctgtgacgtataaagagttttgtcctgtgggaaggc

SEQ ID NO: 30990 - DNA, 80 bp, synthetic construct; identical to SEQ ID NO: 11643
  source 1..80: mol_type = other DNA

SEQ ID NO: 30991 - DNA, 80 bp, synthetic construct
  source 1..80: mol_type = other DNA
agctaaaagtaaatcatccacgtactgaaggaacagagtgcctggacctgagaagtggcctagatcttgggccagtacct

SEQ ID NO: 30992 - DNA, 80 bp, synthetic construct
  source 1..80: mol_type = other DNA
ttctgcttcctctggtatttgacagagcagggtttaggggttgggtacaactggatatagaggaattactgcctcattga

SEQ ID NO: 30993 - DNA, 80 bp, synthetic construct; identical to SEQ ID NO: 11644
  source 1..80: mol_type = other DNA

SEQ ID NO: 30994 - DNA, 80 bp, synthetic construct
  source 1..80: mol_type = other DNA
tgaaaagagcaaagtctcccaattacaactgaggaggtgggagaaatacctggttacaggctgtcccaggatttctcaga

SEQ ID NO: 30995 - DNA, 80 bp, synthetic construct
  source 1..80: mol_type = other DNA
tgagtcctgttgttggatcatctggttgggggcttctggcccagagaaccattgcactctggggaagtgtgccttccagt

SEQ ID NO: 30996 - DNA, 80 bp, synthetic construct
  source 1..80: mol_type = other DNA
agggccatgactaaggctgtgacctttctctgatctcagttttccttttgggcctgttcctcttggtacctattatagaa

SEQ ID NO: 30997 - DNA, 80 bp, synthetic construct; identical to SEQ ID NO: 11645
  source 1..80: mol_type = other DNA

SEQ ID NO: 30998 - DNA, 80 bp, synthetic construct
  source 1..80: mol_type = other DNA
ttctatcatttacttgactaagatactaggtctctccaaactctcaggctgcagctaaagccacattcttttcattaaag

SEQ ID NO: 30999 - DNA, 80 bp, synthetic construct
  source 1..80: mol_type = other DNA
cccaggttgggccaaatttacctccccctacagcttgaagggggcataactgatagcccggggttttttgtggtcctttg

SEQ ID NO: 31000 - DNA, 80 bp, synthetic construct
  source 1..80: mol_type = other DNA
atgaaaagaaagcttggatataaggtatttcactccatttggctttcctcttacagaaatggtcaagttgcaggatagca

SEQ ID NO: 31001 - DNA, 80 bp, synthetic construct; identical to SEQ ID NO: 11646
  source 1..80: mol_type = other DNA

SEQ ID NO: 31002 - DNA, 80 bp, synthetic construct
  source 1..80: mol_type = other DNA
aaggaggactgaggaaggtcggatttagtggcccttaccaatgcattcttgaaaacgtgtacccctgcctgtcctcgtag

SEQ ID NO: 31003 - DNA, 80 bp, synthetic construct
  source 1..80: mol_type = other DNA
gggagggaagggatctccagagttggaagtgtgatgccttttgtcctcatttatatgaacaggaaggatagaatttctga

SEQ ID NO: 31004 - DNA, 80 bp, synthetic construct
  source 1..80: mol_type = other DNA
tggagtttatactagaaatcattcatgtaggagaaactagaaaagcaccagagacaggcagtggtttttagaagcgggac

SEQ ID NO: 31005 - DNA, 80 bp, synthetic construct; identical to SEQ ID NO: 11647
  source 1..80: mol_type = other DNA

SEQ ID NO: 31006 - DNA, 80 bp, synthetic construct
  source 1..80: mol_type = other DNA
gcgcaaccttggctcgctgcaagctccgcttcctgggttcatgccattctcctgcctcagcctcccgagtagctgggact

SEQ ID NO: 31007 - DNA, 80 bp, synthetic construct
  source 1..80: mol_type = other DNA
attggtcacttttaactggctgacaggtgcccagtatttagcccctgaattctaaggaaaaataggacagaacagcaagt

SEQ ID NO: 31008 - DNA, 80 bp, synthetic construct
  source 1..80: mol_type = other DNA
agctgcggacccacatggtgagtgttacagttcttaaagatggtgtgtctggagtttgttccttcagatgttcagatgtg

SEQ ID NO: 31009 - DNA, 80 bp, synthetic construct
  source 1..80: mol_type = other DNA
acagaccttctcagtgagtgttactgctcttaaaggtggtgtgtcgagttgttcattcctcctggtgggtttgtggtctt

SEQ ID NO: 31010 - DNA, 80 bp, synthetic construct; identical to SEQ ID NO: 11648
  source 1..80: mol_type = other DNA

SEQ ID NO: 31011 - DNA, 80 bp, synthetic construct
  source 1..80: mol_type = other DNA
ccattttacagagtgctgattgttccattttacagagtgctgattggtgtgtttacaaacttttagctagacacagagca

SEQ ID NO: 31012 - DNA, 80 bp, synthetic construct
  source 1..80: mol_type = other DNA
gttgtgtacttgtttgtagttggaatttgcaaggcagaataatagggatgaggttagtccatgggtaattattagggcag

SEQ ID NO: 31013 - DNA, 80 bp, synthetic construct
  source 1..80: mol_type = other DNA
ttgttatgattattcctcatagggatagtatgagggaggaataagctataaactctgttaaggggttaaggattagggtg

SEQ ID NO: 31014 - DNA, 80 bp, synthetic construct
  source 1..80: mol_type = other DNA
tgttggaccaggaaattgttagttcttgaagctgggtatttgtcttaaggtagacacaagagtgctgataaatttctcaa

SEQ ID NO: 31015 - DNA, 80 bp, synthetic construct; identical to SEQ ID NO: 11649
  source 1..80: mol_type = other DNA

SEQ ID NO: 31016 - DNA, 80 bp, synthetic construct
  source 1..80: mol_type = other DNA
ttagtaaatggacaaaacagtgacttcatttgctgttaactgtatctccttttctagctctcaaaaatctatggccctgt

SEQ ID NO: 31017 - DNA, 80 bp, synthetic construct; identical to SEQ ID NO: 11770
  source 1..80: mol_type = other DNA

SEQ ID NO: 31018 - DNA, 80 bp, synthetic construct
  source 1..80: mol_type = other DNA
agcaatggaaagagatggaaggagatccggcgtttctccctcatgacgctgcggaattttgggatggggaagaggagcat

SEQ ID NO: 31019 - DNA, 80 bp, synthetic construct
  source 1..80: mol_type = other DNA
ttggaaacatttcaggggtggccagatcttttatttggagtcctggttgttagctcatgtgaagcagggtttgaagctga

SEQ ID NO: 31020 - DNA, 80 bp, synthetic construct
  source 1..80: mol_type = other DNA
aagagttaaagagcagtgtttttcccattatctattccagaacatgtcaccagagaatacttgacaagtggacatggtgg

SEQ ID NO: 31021 - DNA, 80 bp, synthetic construct; identical to SEQ ID NO: 11771
  source 1..80: mol_type = other DNA

SEQ ID NO: 31022 - DNA, 80 bp, synthetic construct
  source 1..80: mol_type = other DNA
aatttttattccttaagtataatttggctctgtttcattttgcttatctctttccaatcatatttatgaaattttggctt

SEQ ID NO: 31023 - DNA, 80 bp, synthetic construct; identical to SEQ ID NO: 11651
  source 1..80: mol_type = other DNA

SEQ ID NO: 31024 - DNA, 80 bp, synthetic construct
  source 1..80: mol_type = other DNA
caccactcctattcaacatagctttggaagttctcaccagggcaatcaggcaagagaaagaaataaatggtattgaaata

SEQ ID NO: 31025 - DNA, 80 bp, synthetic construct
  source 1..80: mol_type = other DNA
ccaataatagacaagcagacagtcaaataatgagtgaactcccattcacaattgctacaaagagaataaaatggctagaa

SEQ ID NO: 31026 - DNA, 80 bp, synthetic construct
  source 1..80: mol_type = other DNA
ggttcaatgctattcccatcaagctgccattgagtttcttcacagaactagaaaaaactactttaaatttcatatggaac

SEQ ID NO: 31027 - DNA, 80 bp, synthetic construct; identical to SEQ ID NO: 11652
  source 1..80: mol_type = other DNA

SEQ ID NO: 31028 - DNA, 80 bp, synthetic construct
  source 1..80: mol_type = other DNA
ccattcaggacataagcatgggcaaagacttcatgactaaaacaccaaaagcaatggcaacaaaagccaaaattgacaaa

SEQ ID NO: 31029 - DNA, 80 bp, synthetic construct
  source 1..80: mol_type = other DNA
caacaacaacaaaaaaaaactgctgggtctgtcctgcagaccctggccaatggatgaaatgagtactcatatacaggtat

SEQ ID NO: 31030 - DNA, 80 bp, synthetic construct
  source 1..80: mol_type = other DNA
acatcaagaatggatgatcaaaggtcagttcctggtcaacataagtaaacaagcctgttcaagatgacttccccttccct

SEQ ID NO: 31031 - DNA, 80 bp, synthetic construct
  source 1..80: mol_type = other DNA
atcaaaaagtaggtgaaggatatcaacagacacttctcaaaagaagacatttatgtggccaacaaacatatgaaaaaaag

SEQ ID NO: 31032 - DNA, 80 bp, synthetic construct; identical to SEQ ID NO: 11653
  source 1..80: mol_type = other DNA

SEQ ID NO: 31033 - DNA, 80 bp, synthetic construct
  source 1..80: mol_type = other DNA
tactatgcagccattaaaaagaatgagttcatgtcctttgcagggacatggatgaagctggaaaccaccatcctcagcaa

SEQ ID NO: 31034 - DNA, 80 bp, synthetic construct
  source 1..80: mol_type = other DNA
gcatgtggagcttaaaacctagatgacaggttcatagatgcagcaaaccaccatggcacatgtatacctatgtaacaaat

SEQ ID NO: 31035 - DNA, 80 bp, synthetic construct; identical to SEQ ID NO: 11654
  source 1..80: mol_type = other DNA

SEQ ID NO: 31036 - DNA, 80 bp, synthetic construct
  source 1..80: mol_type = other DNA
gccaggctgaagtgcacttgtgtgatatcagctcactgcaacctctgcctcctggattcaagtgattctcctgcctcagc

SEQ ID NO: 31037 - DNA, 80 bp, synthetic construct
  source 1..80: mol_type = other DNA
tgagccagtgtgccctatctaatttacttttccttgtttgccttatctgggatttacatttcaaataacaagtttttgtt

SEQ ID NO: 31038 - DNA, 80 bp, synthetic construct
  source 1..80: mol_type = other DNA
tgagctatttgttgtaatataaaaagctttgaaatccccaactattctcaccctttctatctcagtgctttgttgtctac

SEQ ID NO: 31039 - DNA, 80 bp, synthetic construct
  source 1..80: mol_type = other DNA
gcaaccattatttaaccagctaggctgtaattgttaattcgagattaatgtaaaagtgatgtgttgattttatgcatgcc

SEQ ID NO: 31040 - DNA, 80 bp, synthetic construct; identical to SEQ ID NO: 11655
  source 1..80: mol_type = other DNA

SEQ ID NO: 31041 - DNA, 80 bp, synthetic construct
  source 1..80: mol_type = other DNA
aaattctatattgaccaagccctgaagtacatttttgaatactacagtcttgcctagacagccatggggtgaatatctgg

SEQ ID NO: 31042 - DNA, 80 bp, synthetic construct
  source 1..80: mol_type = other DNA
tcactccatggacatccaggcactttggagtcttccattactcacaaggcttgtccttcaattcacactttgtcatattg

SEQ ID NO: 31043 - DNA, 80 bp, synthetic construct
  source 1..80: mol_type = other DNA
attgtttttttggtgtatgaaccataaacagacatcacacttttaccctgtgctgaattggcatgttttatactctgcct

SEQ ID NO: 31044 - DNA, 80 bp, synthetic construct; identical to SEQ ID NO: 11656
  source 1..80: mol_type = other DNA

SEQ ID NO: 31045 - DNA, 80 bp, synthetic construct
  source 1..80: mol_type = other DNA
tctttctcaaatcttgtataatcagagaattactacacatgtacaataaaaatttccccatcaagatatacaatatattt

SEQ ID NO: 31046 - DNA, 80 bp, synthetic construct
  source 1..80: mol_type = other DNA
aaaaaccttgcttttatggaaagtgatattttggagaaagtaaaagaacaccaagaatcgatggacatcaacaaccctcg

SEQ ID NO: 31047 - DNA, 80 bp, synthetic construct
  source 1..80: mol_type = other DNA
ggactttattgattgcttcctgatcaaaatggagaaggtaaaatgttaacaaaagcttagttatgtgactgcttgcgtat

SEQ ID NO: 31048 - DNA, 80 bp, synthetic construct; identical to SEQ ID NO: 11657
  source 1..80: mol_type = other DNA

SEQ ID NO: 31049 - DNA, 80 bp, synthetic construct
  source 1..80: mol_type = other DNA
aacaatgagataccatctcatgccagttagaatggcgatcattaaaaagtcaggatataacagatgctgaagaggatgtg

SEQ ID NO: 31050 - DNA, 80 bp, synthetic construct
  source 1..80: mol_type = other DNA
ttataaagacacatgtacacatttgtttattgtgccactattcacaatagccaagacttggaatcaacccaaatgtacat

SEQ ID NO: 31051 - DNA, 80 bp, synthetic construct
  source 1..80: mol_type = other DNA
ttctcactcataagtggcagttgaacaatgagaacacatagacacaggatgaggaacatcacacactggggcctgtcaag

SEQ ID NO: 31052 - DNA, 80 bp, synthetic construct; identical to SEQ ID NO: 11658
  source 1..80: mol_type = other DNA

SEQ ID NO: 31053 - DNA, 80 bp, synthetic construct
  source 1..80: mol_type = other DNA
aatatttgcagtgagagtcagaagaggggtttcagatgggttggaatgctttacatggaggtgtagaggtgtgtgatgga

SEQ ID NO: 31054 - DNA, 80 bp, synthetic construct
  source 1..80: mol_type = other DNA
ttgtcttgacaaccttgtcaaaacccaattgactataaatgtgtgaagggttttttttggggggctctcaattctactcc

SEQ ID NO: 31055 - DNA, 80 bp, synthetic construct
  source 1..80: mol_type = other DNA
caatactgttttcactattctgggtcccttgaatcttcatatgaaatttaggatcaacttgtcaatttcttcaaaggagc

SEQ ID NO: 31056 - DNA, 80 bp, synthetic construct; identical to SEQ ID NO: 11659
  source 1..80: mol_type = other DNA

SEQ ID NO: 31057 - DNA, 80 bp, synthetic construct
  source 1..80: mol_type = other DNA
cgtgttatggatatataaagaattcatagcatatgcaaccttttatttctgggtccttacacttacaatgttttggaggc

SEQ ID NO: 31058 - DNA, 80 bp, synthetic construct
  source 1..80: mol_type = other DNA
gtgtatgtttctttatgggcatgttttcatcattcttgggtgtattctcaggagttgatttgctgggtcaaatggtaatt

SEQ ID NO: 31059 - DNA, 80 bp, synthetic construct
  source 1..80: mol_type = other DNA
atctcattatttatttatttatttatttattttgagacagagtctcactctgttgcctaggctcgagtgcagtagcatga

SEQ ID NO: 31060 - DNA, 80 bp, synthetic construct
  source 1..80: mol_type = other DNA
tggcatccctaagtgctgggattacaggtgtgagccaccatgcccagctctcattgtggttttaacttgtatttaatgac

SEQ ID NO: 31061 - DNA, 80 bp, synthetic construct; identical to SEQ ID NO: 11660
  source 1..80: mol_type = other DNA

SEQ ID NO: 31062 - DNA, 80 bp, synthetic construct
  source 1..80: mol_type = other DNA
tcagttatatttttcatttggagtgaggtagggtaggtcccagctacattcttttgtattttgtcatccaattgactcat

SEQ ID NO: 31063 - DNA, 80 bp, synthetic construct
  source 1..80: mol_type = other DNA
ctaggcacccttgatgaaagtaaattggccacagatgtttaggtttatttcttgatttcagttttattccattggtcttg

SEQ ID NO: 31064 - DNA, 80 bp, synthetic construct; identical to SEQ ID NO: 11661
  source 1..80: mol_type = other DNA

SEQ ID NO: 31065 - DNA, 80 bp, synthetic construct
  source 1..80: mol_type = other DNA
ttggccagccttccctgcccactatgtaaatgccacacctgattgagccaatctttgggccctatataaatcagacactg

SEQ ID NO: 31066 - DNA, 80 bp, synthetic construct
  source 1..80: mol_type = other DNA
tttcctggggtacgatgacaaacctgagggtatatatcccaggtaatgtagctgcttcatcaccatgtagttgcatatga

SEQ ID NO: 31067 - DNA, 80 bp, synthetic construct
  source 1..80: mol_type = other DNA
atattcttttttcctcttttgcaagggtctggtttagtttgaaaggcaagtttaccttaaattttgtatttagttatgat

SEQ ID NO: 31068 - DNA, 80 bp, synthetic construct
  source 1..80: mol_type = other DNA
tagtgagaatagtacccaataggtagtttttcagctcttgcctttatatctctctaccatctatagtaattcccagtgtg

SEQ ID NO: 31069 - DNA, 80 bp, synthetic construct; identical to SEQ ID NO: 11662
  source 1..80: mol_type = other DNA

SEQ ID NO: 31070 - DNA, 80 bp, synthetic construct
  source 1..80: mol_type = other DNA
tataagttttcccttttttctgcagccttaccaacatctgttattttttggctttttaatcatatccattctgactggta

SEQ ID NO: 31071 - DNA, 80 bp, synthetic construct
  source 1..80: mol_type = other DNA
attgtctaagtaccttatagattctcgctattggaccattgttagaatcacagtttgcaaatattttgtccccattctgt

SEQ ID NO: 31072 - DNA, 80 bp, synthetic construct
  source 1..80: mol_type = other DNA
tttttttctataggattgttagtttgatgttttaaacttagatcattaatccatttcgagttaatttttgtatatggtgc

SEQ ID NO: 31073 - DNA, 80 bp, synthetic construct; identical to SEQ ID NO: 11663
  source 1..80: mol_type = other DNA

SEQ ID NO: 31074 - DNA, 80 bp, synthetic construct
  source 1..80: mol_type = other DNA
gcccctttgttagctgtattcctaggttccattccacccccaccccccactatggctattttaaatgggatggcattctt

SEQ ID NO: 31075 - DNA, 80 bp, synthetic construct
  source 1..80: mol_type = other DNA
ttctttagggttttctaggcctgagatgggtcttctaggtctgagatggagcttctatatctactagtaaaagattagcc

SEQ ID NO: 31076 - DNA, 80 bp, synthetic construct
  source 1..80: mol_type = other DNA
tttctcctaatgctatccctccctgtgtccatgtgttctcattgttcatttcccacttatgagtgagaacacacagtgtt

SEQ ID NO: 31077 - DNA, 80 bp, synthetic construct; identical to SEQ ID NO: 11664
  source 1..80: mol_type = other DNA

SEQ ID NO: 31078 - DNA, 80 bp, synthetic construct
  source 1..80: mol_type = other DNA
aacatctgttgtttcctgacttttaatgttcgccattctaactggcatgtgatggtatctcattgtggttttgatttgca

SEQ ID NO: 31079 - DNA, 80 bp, synthetic construct
  source 1..80: mol_type = other DNA
gttgccctttgtcagatggatagattgcaaaaattttctcccattctctaggtggcctgttcactctgacgatagtttct

SEQ ID NO: 31080 - DNA, 80 bp, synthetic construct
  source 1..80: mol_type = other DNA
ttatgtttaagtctttaatccatcttgaattaatttttgtataacttgtaagaaagggatccagtttcagctttctccat

SEQ ID NO: 31081 - DNA, 80 bp, synthetic construct; identical to SEQ ID NO: 11665
  source 1..80: mol_type = other DNA

SEQ ID NO: 31082 - DNA, 80 bp, synthetic construct
  source 1..80: mol_type = other DNA
tcttcctatccatgagcatggaatgttcttgcatttgtttgtgtcctcttttatttcgttgagcagtggtttgtagttct

SEQ ID NO: 31083 - DNA, 80 bp, synthetic construct
  source 1..80: mol_type = other DNA
ctgagactttgctgaagttacttaacaatttaaggggttttgggctgagacaatggggatttcctaaatataaaatcatg

SEQ ID NO: 31084 - DNA, 80 bp, synthetic construct
  source 1..80: mol_type = other DNA
cttccagtttttgcccattcagtatgatattggctgtgggtttgtcataaatagctcttattattttgaaatatgttcta

SEQ ID NO: 31085 - DNA, 80 bp, synthetic construct; identical to SEQ ID NO: 11666
  source 1..80: mol_type = other DNA

SEQ ID NO: 31086 - DNA, 80 bp, synthetic construct
  source 1..80: mol_type = other DNA
ggaatagtttcagaaggaatggcaccagttcctctttgtacctctggtggaattcagctgtgaatccctctggttctgga

SEQ ID NO: 31087 - DNA, 80 bp, synthetic construct
  source 1..80: mol_type = other DNA
gtttatagtaatctctgatggtagtttgtatttctgtgggatcagtggtgatatcccctttatcattttttattgtgtct

SEQ ID NO: 31088 - DNA, 80 bp, synthetic construct; identical to SEQ ID NO: 11667
  source 1..80: mol_type = other DNA

SEQ ID NO: 31089 - DNA, 80 bp, synthetic construct
  source 1..80: mol_type = other DNA
agcaggttgttcagtttccatgtagttgagcagttttgagtgagtttcttaatcctgagttctagtttgattgcaccgtg

SEQ ID NO: 31090 - DNA, 80 bp, synthetic construct
  source 1..80: mol_type = other DNA
tccacttggtgcagagctgagttcaattcctggatatccttattaactttctgtctcgatctgtcaaatgttgacagtgg

SEQ ID NO: 31091 - DNA, 80 bp, synthetic construct
  source 1..80: mol_type = other DNA
cctagtttgtctcttttgatctttgttggttaaagtctgttttatcagagactaggattgcaacccctgcatttttttgc

SEQ ID NO: 31092 - DNA, 80 bp, synthetic construct; identical to SEQ ID NO: 11668
  source 1..80: mol_type = other DNA

SEQ ID NO: 31093 - DNA, 80 bp, synthetic construct
  source 1..80: mol_type = other DNA
cttcgtttatgaagcttaatttggctggatatgaaattctgggttgaaaactcttttctttaagaatgttgaatattggc

SEQ ID NO: 31094 - DNA, 80 bp, synthetic construct
  source 1..80: mol_type = other DNA
ctcttctcgaggagtatctttgtggcattttctgtatttcctgaatgtgaatgttggcctctcttgctaggttggggaag

SEQ ID NO: 31095 - DNA, 80 bp, synthetic construct
  source 1..80: mol_type = other DNA
cttctagcttcatttcattcatttgatcttcagtctctgataccctttcttccactagattgaatcggctactgaagctt

SEQ ID NO: 31096 - DNA, 80 bp, synthetic construct
  source 1..80: mol_type = other DNA
gtttgttattaccgatcatctgaagccttcttctctcaactcgtgaaagtcattctctgtccagctatcttctgttgctg

SEQ ID NO: 31097 - DNA, 80 bp, synthetic construct; identical to SEQ ID NO: 11669
  source 1..80: mol_type = other DNA

SEQ ID NO: 31098 - DNA, 80 bp, synthetic construct
  source 1..80: mol_type = other DNA
ggagccaggtacccacttgaggaggcagtctgtccattctcagatttcaaacttcctgttgggagaaacaccactttctt

SEQ ID NO: 31099 - DNA, 80 bp, synthetic construct
  source 1..80: mol_type = other DNA
actcaagcctcagaagtggtggacgcccatcccccagccttgctgccaccttgcattttgatctcagactgctgtgctag

SEQ ID NO: 31100 - DNA, 80 bp, synthetic construct; identical to SEQ ID NO: 11670
  source 1..80: mol_type = other DNA

SEQ ID NO: 31101 - DNA, 80 bp, synthetic construct
  source 1..80: mol_type = other DNA
ttcctatccaagagcatggaatattttttccatttctttgtgtcctcttttattttgttgagcagtggttggtagttctc

SEQ ID NO: 31102 - DNA, 80 bp, synthetic construct
  source 1..80: mol_type = other DNA
gagactttgctgaagttgcttatcagcttaaggagattttgggctgagacgatggtttttctaaatacacaatcatgtca

SEQ ID NO: 31103 - DNA, 80 bp, synthetic construct
  source 1..80: mol_type = other DNA
gtaaatatatatatatttttatactttaagttgtagggtacatgtgcacaatgtgcaggtttgttacatatgtatacatg

SEQ ID NO: 31104 - DNA, 80 bp, synthetic construct
  source 1..80: mol_type = other DNA
agaacatacggtgtttggttttttctccttgccatagtttgctgagaatgatggtttccagcttcatccatgtccctaca

SEQ ID NO: 31105 - DNA, 80 bp, synthetic construct; identical to SEQ ID NO: 11671
  source 1..80: mol_type = other DNA

SEQ ID NO: 31106 - DNA, 80 bp, synthetic construct
  source 1..80: mol_type = other DNA
ttgtggttttgatttgcagttctctgatggccaatgatgatgaacattttttcatgtgtcttttggctgcataaatgtct

SEQ ID NO: 31107 - DNA, 80 bp, synthetic construct
  source 1..80: mol_type = other DNA
tgatggtagtttcttttgctgtgcagaatctctttagtttagttagatcccatttgtcaattttggcttttgttgccatt

SEQ ID NO: 31108 - DNA, 80 bp, synthetic construct; identical to SEQ ID NO: 11672
  source 1..80: mol_type = other DNA

SEQ ID NO: 31109 - DNA, 80 bp, synthetic construct
  source 1..80: mol_type = other DNA
tttgttcttttggcttaggattgacttggcaatgtgggctcttttttatttccacaagatctttaaagtagctttttcca

SEQ ID NO: 31110 - DNA, 80 bp, synthetic construct
  source 1..80: mol_type = other DNA
tttgtagttctccttgaagaggtccttaacatcactcctaagttggattcttaggtattttactctctttgaagcagttg

SEQ ID NO: 31111 - DNA, 80 bp, synthetic construct
  source 1..80: mol_type = other DNA
atcatgtcatctgcaaacagggacaatttgacttcctcttttcctaattgattacccttaatttctttctcctacctgat

SEQ ID NO: 31112 - DNA, 80 bp, synthetic construct
  source 1..80: mol_type = other DNA
gtcccatcaatacctaatttattgagagtttttagcatgacgggttattgaattttgttgaaggccttttctgtatctat

SEQ ID NO: 31113 - DNA, 80 bp, synthetic construct; identical to SEQ ID NO: 11673
  source 1..80: mol_type = other DNA

SEQ ID NO: 31114 - DNA, 80 bp, synthetic construct
  source 1..80: mol_type = other DNA
gctattaattattgccttaatttcatagcctgttattaatctattcagagtttcaaattcttcctggtttagtcttggga

SEQ ID NO: 31115 - DNA, 80 bp, synthetic construct
  source 1..80: mol_type = other DNA
tttcttctttattagtcttcctagtggtctatcagttttgttgatcttttcaaaatatcagctcctggattcattgattt

SEQ ID NO: 31116 - DNA, 80 bp, synthetic construct
  source 1..80: mol_type = other DNA
catatttagtgctataaatttccgtctacacactgctttaaatgtgtcccagagattctagtatattgcatgtttgttct

SEQ ID NO: 31117 - DNA, 80 bp, synthetic construct; identical to SEQ ID NO: 11674
  source 1..80: mol_type = other DNA

SEQ ID NO: 31118 - DNA, 80 bp, synthetic construct
  source 1..80: mol_type = other DNA
tgccattattattgtgtgggagcctaagtctttgtaggtctctaaggacctgctttatgaatctgggtgctcctgtattg

SEQ ID NO: 31119 - DNA, 80 bp, synthetic construct
  source 1..80: mol_type = other DNA
tgtctatttgcttggtagatcttcctccatccctttattttgagcctatttgtgtctctgcatgtgagatgcatctcctg

SEQ ID NO: 31120 - DNA, 80 bp, synthetic construct
  source 1..80: mol_type = other DNA
agtttttttcatagcattgatggtctttacaatttagcatgtttttgtagtggctcgtatggtttgttcctttccatgtt

SEQ ID NO: 31121 - DNA, 80 bp, synthetic construct; identical to SEQ ID NO: 11675
  source 1..80: mol_type = other DNA

SEQ ID NO: 31122 - DNA, 80 bp, synthetic construct
  source 1..80: mol_type = other DNA
tggggaagttcttcacttcctgaagagtgttttccaacttggttccattctccctatcactttctggtacaccaatcaaa

SEQ ID NO: 31123 - DNA, 80 bp, synthetic construct
  source 1..80: mol_type = other DNA
attgaagcttctgcatgcatcatgaagttctcattccatggtttttggttccatcaggtcatttaaggtcttctctacac

SEQ ID NO: 31124 - DNA, 80 bp, synthetic construct
  source 1..80: mol_type = other DNA
ctttgctagtgaggagctgtaatcccttgaggaggagaggcactctggtttttagaattttcagcttttctgctctggtc

SEQ ID NO: 31125 - DNA, 80 bp, synthetic construct; identical to SEQ ID NO: 11676
  source 1..80: mol_type = other DNA

SEQ ID NO: 31126 - DNA, 80 bp, synthetic construct
  source 1..80: mol_type = other DNA
caaacgccatggtgggagaagcactgctctcttcagagctgtcagatagggatgtttaagtctgcagaagttgtctgctg

SEQ ID NO: 31127 - DNA, 80 bp, synthetic construct
  source 1..80: mol_type = other DNA
aagttgatcttagactgctgtgctagcagtgaacaaggctccatgggcatgggacccactgagccaggcacgggagagaa

SEQ ID NO: 31128 - DNA, 80 bp, synthetic construct; identical to SEQ ID NO: 11677
  source 1..80: mol_type = other DNA

SEQ ID NO: 31129 - DNA, 80 bp, synthetic construct
  source 1..80: mol_type = other DNA
tttccctctacacaatgctttaaatgtgtctcagagattctgtttcattatttctttgttctcattggtttcaaagaaca

SEQ ID NO: 31130 - DNA, 80 bp, synthetic construct
  source 1..80: mol_type = other DNA
tttcatttgctcaggagtgttttacttctagttatgtgatcaattttagactaagtgttatgtggtgctgataagaatgt

SEQ ID NO: 31131 - DNA, 80 bp, synthetic construct
  source 1..80: mol_type = other DNA
gtctaagtctctttttaggtctgtaagaacttggtttatgaatctggatgcccctgtattgggtgcatataatttaggat

SEQ ID NO: 31132 - DNA, 80 bp, synthetic construct; identical to SEQ ID NO: 11678
  source 1..80: mol_type = other DNA

SEQ ID NO: 31133 - DNA, 80 bp, synthetic construct
  source 1..80: mol_type = other DNA
cagagcactgatttgtgttttttacagagcgctgattggtgcattttacaatccttttgtaaaacagaaaagttttccaa

SEQ ID NO: 31134 - DNA, 80 bp, synthetic construct
  source 1..80: mol_type = other DNA
tcttcctccatccctttattttgagcctatgggtgtctctgcatgtgagatgggtctcctgaatacagcacaccaatagg

SEQ ID NO: 31135 - DNA, 80 bp, synthetic construct
  source 1..80: mol_type = other DNA
atgatctttacaatttggtgtgtttttgcagtggctggtaccaatttttcctttccatatttagtgcttccttcatggat

SEQ ID NO: 31136 - DNA, 80 bp, synthetic construct; identical to SEQ ID NO: 11679
  source 1..80: mol_type = other DNA

SEQ ID NO: 31137 - DNA, 80 bp, synthetic construct
  source 1..80: mol_type = other DNA
gtttcttcttatttggagaggcaaccccttctgatttttgaatttttgttttctgcagatagaattgttttctctcccta

SEQ ID NO: 31138 - DNA, 80 bp, synthetic construct
  source 1..80: mol_type = other DNA
tccatagctgtgtttacttctgtgggtagttttatatcggcctgtgcagtttgacatacatgtcagtagatgggacttgt

SEQ ID NO: 31139 - DNA, 80 bp, synthetic construct
  source 1..80: mol_type = other DNA
tggactgggcagtcttatctagtttccctaatgacaggcactagcaccagcactgagaaataatccagtgggcagacttg

SEQ ID NO: 31140 - DNA, 80 bp, synthetic construct; identical to SEQ ID NO: 11680
  source 1..80: mol_type = other DNA

SEQ ID NO: 31141 - DNA, 80 bp, synthetic construct
  source 1..80: mol_type = other DNA
tggctcagggtgctgatccaggtgagaaatgctctaaatgcttagcagtctgcctgggtgtggagcacagagggtccttc

SEQ ID NO: 31142 - DNA, 80 bp, synthetic construct
  source 1..80: mol_type = other DNA
cagaccatttccaggtcaccaagctagtcctggctgtaaatgtcatcacccaggagaactgctgtagcagctctccttcc

SEQ ID NO: 31143 - DNA, 80 bp, synthetic construct
  source 1..80: mol_type = other DNA
agaatgattgactttttatgctcccatattaaaagcagcatcttgctcttggtcccaggtatgggaaaatgtgtgcagct

SEQ ID NO: 31144 - DNA, 80 bp, synthetic construct; identical to SEQ ID NO: 11681
  source 1..80: mol_type = other DNA

SEQ ID NO: 31145 - DNA, 80 bp, synthetic construct
  source 1..80: mol_type = other DNA
agtcttttattttcttgattattgttttctttgtgtattgtatgagatttttctatatatagaaacatgttatcttgaac

SEQ ID NO: 31146 - DNA, 80 bp, synthetic construct
  source 1..80: mol_type = other DNA
agcctttcaaaatttagtatgccttagctttgcagttttcataaatatgctttattatggtaagggagttttatttatag

SEQ ID NO: 31147 - DNA, 80 bp, synthetic construct
  source 1..80: mol_type = other DNA
ttattgtgtgtaatcttttaaattttgtaaaaaatgttgtggcaaaatacacaaaaaagtttctgtattaatcattttaa

SEQ ID NO: 31148 - DNA, 80 bp, synthetic construct
  source 1..80: mol_type = other DNA
tggccgggcattgtagatcatgcctgtaatcccagcactttgggaggttgaggtgggcagatttcatgagctcaggagtt

SEQ ID NO: 31149 - DNA, 80 bp, synthetic construct; identical to SEQ ID NO: 11682
  source 1..80: mol_type = other DNA

SEQ ID NO: 31150 - DNA, 80 bp, synthetic construct
  source 1..80: mol_type = other DNA
tgtgacaagaaatgttgtagaaccccacccccacctcaaatgataactgtacatttctcctttccaccgtcccgtggcaa

SEQ ID NO: 31151 - DNA, 80 bp, synthetic construct; identical to SEQ ID NO: 11795
  source 1..80: mol_type = other DNA

SEQ ID NO: 31152 - DNA, 80 bp, synthetic construct
  source 1..80: mol_type = other DNA
gtggtaattctatttctaattctcgaacgtcttaatgtttttcttaacagctgcaccattttacattacattcccatcag

SEQ ID NO: 31153 - DNA, 80 bp, synthetic construct
  source 1..80: mol_type = other DNA
tataataatgcaaatgtataatagtaaaaaatatattataaatacgttaccataaatttatattatataacatatataaa

SEQ ID NO: 31154 - DNA, 80 bp, synthetic construct; identical to SEQ ID NO: 11683
  source 1..80: mol_type = other DNA

SEQ ID NO: 31155 - DNA, 80 bp, synthetic construct
  source 1..80: mol_type = other DNA
tctctatttctgtgagattaactttcttagctaccatataagaataagaacatgcgttatttatctttccatgccaggct

SEQ ID NO: 31156 - DNA, 80 bp, synthetic construct
  source 1..80: mol_type = other DNA
tcttggctatggtgaatagtgctttaagtaaatatggaagtataactatctccttgatataacagtatcttttcatctgg

SEQ ID NO: 31157 - DNA, 80 bp, synthetic construct
  source 1..80: mol_type = other DNA
atcatggcagtactaatttacattatcaataagtttttgagttctctttctctgcgtcctcaccagcgttggctgtcttt

SEQ ID NO: 31158 - DNA, 80 bp, synthetic construct
  source 1..80: mol_type = other DNA
gtctcttttgggagacgcctgttcagtttatttacccatattttaattgtagtatttgtttttttgtttctgttgaattg

SEQ ID NO: 31159 - DNA, 80 bp, synthetic construct; identical to SEQ ID NO: 11684
  source 1..80: mol_type = other DNA

SEQ ID NO: 31160 - DNA, 80 bp, synthetic construct
  source 1..80: mol_type = other DNA
gactgttctttcatcagtgaatgttcttggtgccttgtcaataatgtttgctataaaggcatggaataatttctgtgttc

SEQ ID NO: 31161 - DNA, 80 bp, synthetic construct
  source 1..80: mol_type = other DNA
atatatttgatgggtacatgagatcttttgatataaaaatgccatgtgtaataatcacattatggaagatggtttatcta

SEQ ID NO: 31162 - DNA, 80 bp, synthetic construct; identical to SEQ ID NO: 11685
  source 1..80: mol_type = other DNA

SEQ ID NO: 31163 - DNA, 80 bp, synthetic construct
  source 1..80: mol_type = other DNA
gaatctcatttttttaaatggctgtatagtactccgttgtgtatatgtaccacgttttctttatccactcatccattgat

SEQ ID NO: 31164 - DNA, 80 bp, synthetic construct
  source 1..80: mol_type = other DNA
aacctccaaatcttgctccatagtaattgtatgaatttaaatttccacaaaaaatatatgagggttcctttttcttcaca

SEQ ID NO: 31165 - DNA, 80 bp, synthetic construct
  source 1..80: mol_type = other DNA
aaacgtctattcaaatcttttgcccactttaaaactaaattattagatttgttcctagagagttgtttgagctccttata

SEQ ID NO: 31166 - DNA, 80 bp, synthetic construct; identical to SEQ ID NO: 11686
  source 1..80: mol_type = other DNA

SEQ ID NO: 31167 - DNA, 80 bp, synthetic construct
  source 1..80: mol_type = other DNA
tattttgagatacattccatcaaaatctagtttattgagagtttttagcatgaaggggagttgaattttgtcaaaggcct

SEQ ID NO: 31168 - DNA, 80 bp, synthetic construct
  source 1..80: mol_type = other DNA
aacttctgcctttcagattcaagtgtttctcctgccttagccccctgaatagctggaattacagaggctgccaccacgcc

SEQ ID NO: 31169 - DNA, 80 bp, synthetic construct
  source 1..80: mol_type = other DNA
gttgaacgagccttgcatcccagggatgaagccaacttgatcgtggtggataagctttttgaagtgctgctggattcagt

SEQ ID NO: 31170 - DNA, 80 bp, synthetic construct
  source 1..80: mol_type = other DNA
agtactttcagaaggaatggtaccagctcctctttgtacctctggtagaattcggctgtgaatccttcaggtcctgggct

SEQ ID NO: 31171 - DNA, 80 bp, synthetic construct
  source 1..80: mol_type = other DNA
tttatagtattctctgatggtagtttgtatttctgtaggatcagtggtgatatcccctttatcatttttttgttctctct

SEQ ID NO: 31172 - DNA, 80 bp, synthetic construct
  source 1..80: mol_type = other DNA
gctaggtttgaatttgtttgctcttggttttctagttcttttaaatgtgatgttagggtgttgattttagatctttcctg

SEQ ID NO: 31173 - DNA, 80 bp, synthetic construct
  source 1..80: mol_type = other DNA
gttgttcagtttccatgtagttgtgcagttttgagtgagtttcttaatcccgagttttaatttgatggcactgtggtcta

SEQ ID NO: 31174 - DNA, 80 bp, synthetic construct
  source 1..80: mol_type = other DNA
ttggtccagagcttagttcaagtcctggagatccttgttaaatttctgtctcattgatctgtctaatattgacagtgggg

SEQ ID NO: 31175 - DNA, 80 bp, synthetic construct
  source 1..80: mol_type = other DNA
cccctttttttaatctttgttggtttaaagtgtgttttatcagagactaggattgcaacccctgctttgttttgctttcc

SEQ ID NO: 31176 - DNA, 80 bp, synthetic construct; identical to SEQ ID NO: 11688
  source 1..80: mol_type = other DNA

SEQ ID NO: 31177 - DNA, 80 bp, synthetic construct
  source 1..80: mol_type = other DNA
cctttgcctatgaagcttaatttagctggatatgaaattctgggttgaaaattcttttctttaagaatgttgaatattgg

SEQ ID NO: 31178 - DNA, 80 bp, synthetic construct
  source 1..80: mol_type = other DNA
ccttcttgaggagtatcattgtgggtgttttctgtatttcctgaatttgaatgttggtctgtcttgctagattgtggaag

SEQ ID NO: 31179 - DNA, 80 bp, synthetic construct
  source 1..80: mol_type = other DNA
cttcacattttatttcattaagttgatcttgaatctctgatatcctttcttctgctttatcaatttggctattgatattt

SEQ ID NO: 31180 - DNA, 80 bp, synthetic construct; identical to SEQ ID NO: 11689
  source 1..80: mol_type = other DNA

SEQ ID NO: 31181 - DNA, 80 bp, synthetic construct
  source 1..80: mol_type = other DNA
ctattcctttctgtttgctagtttttttcctaacagtcaggcccttctgctgcaggtctgctggagtttgcttgaggtcc

SEQ ID NO: 31182 - DNA, 80 bp, synthetic construct
  source 1..80: mol_type = other DNA
ctgctgttctctttagagccagcaggcaggaacatttaagtctgccgaagctgcacccactgccaccccttcttccaggt

SEQ ID NO: 31183 - DNA, 80 bp, synthetic construct
  source 1..80: mol_type = other DNA
tggaggctttgtttacactgtgaggggaaaaccacctactcaagcctcaacaatggcagactcccctcaacacccccccc

SEQ ID NO: 31184 - DNA, 80 bp, synthetic construct
  source 1..80: mol_type = other DNA
gacttgctggtgttacagcaccactggggcataaaaaaaacccctccagctatcttggtgtctgcccagatgaccaccca

SEQ ID NO: 31185 - DNA, 80 bp, synthetic construct; identical to SEQ ID NO: 11690
  source 1..80: mol_type = other DNA

SEQ ID NO: 31186 - DNA, 80 bp, synthetic construct
  source 1..80: mol_type = other DNA
gaattccttttttgaatatttgtgaatttttttcattgaggtctgttatttgagagttattatgtccctttggtggtgcc

SEQ ID NO: 31187 - DNA, 80 bp, synthetic construct
  source 1..80: mol_type = other DNA
tgatagatgcattgtgatagtatctgtgtagtttctctagctatggccaatatcagcaataattttgggtgcctcagtgg

SEQ ID NO: 31188 - DNA, 80 bp, synthetic construct
  source 1..80: mol_type = other DNA
cagcggcattggtgctgggttacaagtacagatccttgaagttgtcatagaagcatcattctagactcagggtcttttaa

SEQ ID NO: 31189 - DNA, 80 bp, synthetic construct
  source 1..80: mol_type = other DNA
tgcaggaaaatgccgtggcctgcctctgatgtagaaggggtgctctttagatttgagcccagcaagtagaatatggctac

SEQ ID NO: 31190 - DNA, 80 bp, synthetic construct
  source 1..80: mol_type = other DNA
accaagggagaggactgtctttgtctacacatgttgagagaatctagtctatttcagtggtgttaactacacaatgttta

SEQ ID NO: 31191 - DNA, 80 bp, synthetic construct
  source 1..80: mol_type = other DNA
tttccccttattgttgtcaattctgcatcacatcaacaccccagccctaattcaaactaagtattcctcatccattgctt

SEQ ID NO: 31192 - DNA, 80 bp, synthetic construct
  source 1..80: mol_type = other DNA
gcactacttgcattctagaaaaagttgtctgttgcctcccatatagattacaatactgtgggcccatcttgtcattgtaa

SEQ ID NO: 31193 - DNA, 80 bp, synthetic construct
  source 1..80: mol_type = other DNA
tttctgacagaagaagataattgcagactcttgtttcaggctcatagtatctaatgatatggccctaattttcctatttt

SEQ ID NO: 31194 - DNA, 80 bp, synthetic construct
  source 1..80: mol_type = other DNA
agtcagctaactgcagagtctgacaaatggaatttttaagcaagcatggaataagggggtaggaaataaagtttgggcca

SEQ ID NO: 31195 - DNA, 80 bp, synthetic construct; identical to SEQ ID NO: 11692
  source 1..80: mol_type = other DNA

SEQ ID NO: 31196 - DNA, 80 bp, synthetic construct
  source 1..80: mol_type = other DNA
agtgctaattagagagctgttagagaaaatataagtggtaacagattaacaaactataccaaacagcaggctatttataa

SEQ ID NO: 31197 - DNA, 80 bp, synthetic construct
  source 1..80: mol_type = other DNA
atatgtatacatgtgccatcctggtgcgctgcacccactaactcgtcatctagccttaggtatatctcccaatgctatcc

SEQ ID NO: 31198 - DNA, 80 bp, synthetic construct
  source 1..80: mol_type = other DNA
atccatgtccctacaaaggatatgaactcatcattttttatggctgcatagtattccatggtgtatatgtgccacatttt

SEQ ID NO: 31199 - DNA, 80 bp, synthetic construct; identical to SEQ ID NO: 11693
  source 1..80: mol_type = other DNA

SEQ ID NO: 31200 - DNA, 80 bp, synthetic construct
  source 1..80: mol_type = other DNA
gctgcataaatgtcttcttttgagaagtgtctgttcatgtcctttgcccactttttgatggggttgtttgtttttttctt

SEQ ID NO: 31201 - DNA, 80 bp, synthetic construct
  source 1..80: mol_type = other DNA
attttgtcttttgttgccattgcttttggtgttttggacatgaagttcttgcccatgcctatgtcctgaatggtaatgcc

SEQ ID NO: 31202 - DNA, 80 bp, synthetic construct
  source 1..80: mol_type = other DNA
gtctctactaaaaatacaaaaaattagccgggcgtagtggcgggcacctgtagtcccagctacttgggaggctgaggcag

SEQ ID NO: 31203 - DNA, 80 bp, synthetic construct
  source 1..80: mol_type = other DNA
gggatccagtttcagctttctacatatggctagccagttttcccagcaccatttattaaatagggaatcctttccccatt

SEQ ID NO: 31204 - DNA, 80 bp, synthetic construct; identical to SEQ ID NO: 11694
  source 1..80: mol_type = other DNA

SEQ ID NO: 31205 - DNA, 80 bp, synthetic construct
  source 1..80: mol_type = other DNA
ttccttgagcagtggtttgtagttctccttgaagaggtccttcacatcccttgtaagttggattcctaggtattttattc

SEQ ID NO: 31206 - DNA, 80 bp, synthetic construct
  source 1..80: mol_type = other DNA
ggggttttctagataaacaatcatgtcgtctgcaaacagggacaatttgacttcctcttttcctaattgaatccccttta

SEQ ID NO: 31207 - DNA, 80 bp, synthetic construct
  source 1..80: mol_type = other DNA
ctcagaccacagtgcaatcaaactagaactcaggattaagaatctcactcaaaactgctcaactacatggaaactgaaca

SEQ ID NO: 31208 - DNA, 80 bp, synthetic construct
  source 1..80: mol_type = other DNA
aaagcaggaaagatccaaaattgacaccctaacatcacaattaaaagaactagaaaagcaagagcaaacacattcaaaag

SEQ ID NO: 31209 - DNA, 80 bp, synthetic construct; identical to SEQ ID NO: 11695
  source 1..80: mol_type = other DNA

SEQ ID NO: 31210 - DNA, 80 bp, synthetic construct
  source 1..80: mol_type = other DNA
caaaaagagtccgggaccagatggattcacagccgaattctaccagaggtacaaggaggaactggtaccattccttctga

SEQ ID NO: 31211 - DNA, 80 bp, synthetic construct
  source 1..80: mol_type = other DNA
ggcaaaccgaatccagcagcacatcaaaaagcttatccaccatgatcaagtgggcttcatccctgggatgcaaggctggt

SEQ ID NO: 31212 - DNA, 80 bp, synthetic construct
  source 1..80: mol_type = other DNA
caaaataataagagctatctatgacaaacccacagccaatatcatactgaatgggcaaaaactggaagcattccctttga

SEQ ID NO: 31213 - DNA, 80 bp, synthetic construct
  source 1..80: mol_type = other DNA
tcaaatcattcctaggaaaagcaaaaccaacagtctgaattcactattgaaaacttggtaatcactgcagctgacttact

SEQ ID NO: 31214 - DNA, 80 bp, synthetic construct; identical to SEQ ID NO: 11696
  source 1..80: mol_type = other DNA

SEQ ID NO: 31215 - DNA, 80 bp, synthetic construct
  source 1..80: mol_type = other DNA
taaaaatacaaaacgtagccgggcattgtggcacaccactgtaatcccagctacttgggggctgaggcatgggaatcgct

SEQ ID NO: 31216 - DNA, 80 bp, synthetic construct
  source 1..80: mol_type = other DNA
aggacatctttgcacagtagaggaagataactgagagaaatgaagacagcatggcagtttcaaaagcaatagagctctgg

SEQ ID NO: 31217 - DNA, 80 bp, synthetic construct
  source 1..80: mol_type = other DNA
gctggagtagggaaaatggaaactcttcttattgaaggataaatggtaatcctagaaatgtagtgaggctgcctgaaaaa

SEQ ID NO: 31218 - DNA, 80 bp, synthetic construct; identical to SEQ ID NO: 11697
  source 1..80: mol_type = other DNA

SEQ ID NO: 31219 - DNA, 80 bp, synthetic construct
  source 1..80: mol_type = other DNA
ttactaacctataacgttctagaagattttttcaacttttttttatagattaaagggtaaaaatacagatttgttacatg

SEQ ID NO: 31220 - DNA, 80 bp, synthetic construct
  source 1..80: mol_type = other DNA
ttcaatgtttacttcccatttataagtgagaacaggtggtatttggttttctgttcttgtattagattgcttaggataat

SEQ ID NO: 31221 - DNA, 80 bp, synthetic construct
  source 1..80: mol_type = other DNA
tcaattccacatgactggaaaggcctcacaataagtctctgatagcaagacttatttactatcacaagaacagcatggga

SEQ ID NO: 31222 - DNA, 80 bp, synthetic construct; identical to SEQ ID NO: 11698
  source 1..80: mol_type = other DNA

SEQ ID NO: 31223 - DNA, 80 bp, synthetic construct
  source 1..80: mol_type = other DNA
ctcaccagcatctcttgtttttggactttttaatattaataattgccattctgactggtgtgagatggtacctccttgtg

SEQ ID NO: 31224 - DNA, 80 bp, synthetic construct
  source 1..80: mol_type = other DNA
tagatttgggatattagctgtttgagccctttaagctatgtagagtacaggcaatagtcaataaagctttaacaaatttc

SEQ ID NO: 31225 - DNA, 80 bp, synthetic construct; identical to SEQ ID NO: 11699
  source 1..80: mol_type = other DNA

SEQ ID NO: 31226 - DNA, 80 bp, synthetic construct
  source 1..80: mol_type = other DNA
aaaagacatgaggtgtaggctagaaaggcagatttggtaagggtccacaccttcaattcagagacttaaagctcttttat

SEQ ID NO: 31227 - DNA, 80 bp, synthetic construct
  source 1..80: mol_type = other DNA
gaatgaaatgaaaacatactctgctagacacagggtcatggaatttcaggacaccagaattaaagggaaaatcacaaaaa

SEQ ID NO: 31228 - DNA, 80 bp, synthetic construct
  source 1..80: mol_type = other DNA
gagaatgtgcttaattcaaatgcctgaagcctagttatagaaagtcctgagctccagcaatcagacctcatataggacaa

SEQ ID NO: 31229 - DNA, 80 bp, synthetic construct
  source 1..80: mol_type = other DNA
gagagtttccaataactaaaaaggagtttcaaacatctgcctgaacatttgtaagtatttctaacttgggaaacagaaaa

SEQ ID NO: 31230 - DNA, 80 bp, synthetic construct
  source 1..80: mol_type = other DNA
aagcagtgtggaaaaattagtgtgtctatctgagggtgtgttcaaatatgaggtgaacatggagattaaaattttcatct

SEQ ID NO: 31231 - DNA, 80 bp, synthetic construct
  source 1..80: mol_type = other DNA
tgcagactctcacacacacaagcacagctgcacaaatacacagttatatatatgcgtaaatctgttagcataacttaatg

SEQ ID NO: 31232 - DNA, 80 bp, synthetic construct
  source 1..80: mol_type = other DNA
atgtacacatgtgccatgctggtgcacggcacccactaactcgtcatctagcattaggtatatctcccgatgctatccct

SEQ ID NO: 31233 - DNA, 80 bp, synthetic construct
  source 1..80: mol_type = other DNA
gctgcatagtattccatggtgtatatgtgccacattttcttaatccagtctatcattgttggacatttgggttggttcca

SEQ ID NO: 31234 - DNA, 80 bp, synthetic construct
  source 1..80: mol_type = other DNA
cacaatggttgaactagtttacagtcccaccaacagtgtaaaagtgttcctatttctccacatcctctccagcacctgtt

SEQ ID NO: 31235 - DNA, 80 bp, synthetic construct
  source 1..80: mol_type = other DNA
tttgcccactttttgatggggttgtttgtttttttcttgtaaatttgtttgagttcattgtagattctggatattagccc

SEQ ID NO: 31236 - DNA, 80 bp, synthetic construct
  source 1..80: mol_type = other DNA
aagtccttgcccatgcctatgtcctgaatggtaatgcctaggttttcttctagggtttttatggttttaggtctaacgtt

SEQ ID NO: 31237 - DNA, 80 bp, synthetic construct; identical to SEQ ID NO: 10644
  source 1..80: mol_type = other DNA

SEQ ID NO: 31238 - DNA, 80 bp, synthetic construct; identical to SEQ ID NO: 11702
  source 1..80: mol_type = other DNA

SEQ ID NO: 31239 - DNA, 80 bp, synthetic construct
  source 1..80: mol_type = other DNA
atgatttggcactctgtttgtctattgttggtgtataagaatgcttgtgatttttgtacattgattttgtatcctgagac

SEQ ID NO: 31240 - DNA, 80 bp, synthetic construct
  source 1..80: mol_type = other DNA
acttccaacactatgttgaataggagtggcaagagaaggcatccctgtcttgtgccagttttcaaagggaatgcttccag

SEQ ID NO: 31241 - DNA, 80 bp, synthetic construct
  source 1..80: mol_type = other DNA
atgtggtttttgtctttggttctgtttatatgctggattacatttattgatttgcgtatattgaaccagccttgcatccc

SEQ ID NO: 31242 - DNA, 80 bp, synthetic construct; identical to SEQ ID NO: 11703
  source 1..80: mol_type = other DNA

SEQ ID NO: 31243 - DNA, 80 bp, synthetic construct
  source 1..80: mol_type = other DNA
gtgtcgaggaatgtatccatttcttctagattttctagtttatttgcatagaggtgtttgtagtattctctgatggtagt

SEQ ID NO: 31244 - DNA, 80 bp, synthetic construct
  source 1..80: mol_type = other DNA
ggtcttttgtgtgtctctttccttcagttctgctttgattttagttatttgttgccttctgctagcatttgaatgtgttt

SEQ ID NO: 31245 - DNA, 80 bp, synthetic construct; identical to SEQ ID NO: 12285
  source 1..80: mol_type = other DNA

SEQ ID NO: 31246 - DNA, 80 bp, synthetic construct
  source 1..80: mol_type = other DNA
tgaaaaaatgtatattctgttgatttggggtggagagttctgtagatgcctattaggtccgcttggtgcagacctgagtt

SEQ ID NO: 31247 - DNA, 80 bp, synthetic construct; identical to SEQ ID NO: 11704
  source 1..80: mol_type = other DNA

SEQ ID NO: 31248 - DNA, 80 bp, synthetic construct
  source 1..80: mol_type = other DNA
tcttgactctttatccaatttgcaagtctgtgtcttttaattggagcatttagtccatttacatttaaagttaatattgt

SEQ ID NO: 31249 - DNA, 80 bp, synthetic construct
  source 1..80: mol_type = other DNA
tcttgtaaggcaggcctggtggtgacaaaatctctcagcatttgcttgtctgtaaaggattttatttctccttcacttat

SEQ ID NO: 31250 - DNA, 80 bp, synthetic construct
  source 1..80: mol_type = other DNA
ctggctgcccttaacattttttccttcatttcaactttggtgaaactgacaattatgtgtcttggagttgctcttcttga

SEQ ID NO: 31251 - DNA, 80 bp, synthetic construct; identical to SEQ ID NO: 11705
  source 1..80: mol_type = other DNA

SEQ ID NO: 31252 - DNA, 80 bp, synthetic construct
  source 1..80: mol_type = other DNA
tttttttcaaagttttcaacttctttgcctttggtttgaatgtccttccatagctcagagtaatttgatcgtctgaagcc

SEQ ID NO: 31253 - DNA, 80 bp, synthetic construct
  source 1..80: mol_type = other DNA
ctttgatgatggtgatgtgcagatgggtttttggtgtggatgtcctttctgtttgttagttttccttctaacagacagga

SEQ ID NO: 31254 - DNA, 80 bp, synthetic construct
  source 1..80: mol_type = other DNA
accactgctctcttcaaagctgtcagacagggacatttaagtctgcagaggttactgctgtctttttgtttgtctgtgcc

SEQ ID NO: 31255 - DNA, 80 bp, synthetic construct; identical to SEQ ID NO: 11706
  source 1..80: mol_type = other DNA

SEQ ID NO: 31256 - DNA, 80 bp, synthetic construct
  source 1..80: mol_type = other DNA
gggtgcacgcacccactgacctgcgcccactgtctggcactccctagtgagatgaaccgggtacctcagatggaaatgca

SEQ ID NO: 31257 - DNA, 80 bp, synthetic construct
  source 1..80: mol_type = other DNA
ttttttatatttatgggtacagagtaggtatatattaatatgtttgtggggtacaggagatgttttgatacaggcatgca

SEQ ID NO: 31258 - DNA, 80 bp, synthetic construct
  source 1..80: mol_type = other DNA
tcatccctacttcccttctcaccccccacttccctttcaagtatctggtagccatccttctacactttatgtccattagt

SEQ ID NO: 31259 - DNA, 80 bp, synthetic construct
  source 1..80: mol_type = other DNA
tgtgtatatgtactacattttctttatacatttgtctgttgatggatatttaggttgtttcaaagtcttagccattgtaa

SEQ ID NO: 31260 - DNA, 80 bp, synthetic construct; identical to SEQ ID NO: 11707
  source 1..80: mol_type = other DNA

SEQ ID NO: 31261 - DNA, 80 bp, synthetic construct
  source 1..80: mol_type = other DNA
aaatcttttgcccacttgtggacttgattattagatttttttctatagagttacttaagttccttatatattctggttat

SEQ ID NO: 31262 - DNA, 80 bp, synthetic construct
  source 1..80: mol_type = other DNA
ctcaagaaatttttgcctagaccaatgtcctggagatgttttctagtattttcctatagtattttcacagtttgaggtct

SEQ ID NO: 31263 - DNA, 80 bp, synthetic construct
  source 1..80: mol_type = other DNA
gttcttatgcttctaataaagccatacacaagaccgggtaatttataaagggaagatgtttaatggactcacagttccac

SEQ ID NO: 31264 - DNA, 80 bp, synthetic construct; identical to SEQ ID NO: 11708
  source 1..80: mol_type = other DNA

SEQ ID NO: 31265 - DNA, 80 bp, synthetic construct
  source 1..80: mol_type = other DNA
taagtgagataatgtgattcctccagttttgttttttttgcttatgatagttttgactattctgggtcttttgtgggtcc

SEQ ID NO: 31266 - DNA, 80 bp, synthetic construct
  source 1..80: mol_type = other DNA
tctcttaaaactctttcctcagtgctttatagttttcattacagagatctttcagttctttggttaaattaattcctagg

SEQ ID NO: 31267 - DNA, 80 bp, synthetic construct; identical to SEQ ID NO: 11809
  source 1..80: mol_type = other DNA

SEQ ID NO: 31268 - DNA, 80 bp, synthetic construct
  source 1..80: mol_type = other DNA
atagctttttttatgttgaggtatgttccttctatctcaagtgtttttttttctttttttttattatactttaagattta

SEQ ID NO: 31269 - DNA, 80 bp, synthetic construct; identical to SEQ ID NO: 11709
  source 1..80: mol_type = other DNA

SEQ ID NO: 31270 - DNA, 80 bp, synthetic construct
  source 1..80: mol_type = other DNA
gtattgttgaatgtggtttcctagtattttgttgaggattgttgcatcagtattcatcaggtgtattggcctgtagtttt

SEQ ID NO: 31271 - DNA, 80 bp, synthetic construct
  source 1..80: mol_type = other DNA
atcaagtcttggggttttccttattgggataatttttattacaggtttgatcttggtactggtcattgcatgttcaggtt

SEQ ID NO: 31272 - DNA, 80 bp, synthetic construct
  source 1..80: mol_type = other DNA
ttgtttttatttatttgaaacttcttttttttcttagtctggctaaaaacttgtcaattttgtttaatttctcaaagaaa

SEQ ID NO: 31273 - DNA, 80 bp, synthetic construct
  source 1..80: mol_type = other DNA
agctcccatacaaagggaggggacccaaagggggttgccattgctggctcaaatgcctgggtttatatcccaatcattgt

SEQ ID NO: 31274 - DNA, 80 bp, synthetic construct; identical to SEQ ID NO: 11710
  source 1..80: mol_type = other DNA

SEQ ID NO: 31275 - DNA, 80 bp, synthetic construct
  source 1..80: mol_type = other DNA
ttagccatggactgcatctggggctccatttgaagaatgatttgtagttttacagcttcaattctggaagagacacactt

SEQ ID NO: 31276 - DNA, 80 bp, synthetic construct
  source 1..80: mol_type = other DNA
tttggtgaagggttttaagtaattcccattggttagctgcaggcaaatgtaattttccttttttggtggctagccatccc

SEQ ID NO: 31277 - DNA, 80 bp, synthetic construct; identical to SEQ ID NO: 11711
  source 1..80: mol_type = other DNA

SEQ ID NO: 31278 - DNA, 80 bp, synthetic construct
  source 1..80: mol_type = other DNA
aattctagtgcccgagtgagggctattagttctgccagctgagcactagttcctggtgtgaggagattactttcaagtat

SEQ ID NO: 31279 - DNA, 80 bp, synthetic construct
  source 1..80: mol_type = other DNA
tctatcttttctttattatttggaagaaatgtggctcagttaagagttgcacaagcacgcagttgcagcactggctcttc

SEQ ID NO: 31280 - DNA, 80 bp, synthetic construct
  source 1..80: mol_type = other DNA
ttaacttcttcagatactaagcctgctactgctgccactacctgtaaaccatgaggccaaccctttgccactacatcagt

SEQ ID NO: 31281 - DNA, 80 bp, synthetic construct; identical to SEQ ID NO: 11712
  source 1..80: mol_type = other DNA

SEQ ID NO: 31282 - DNA, 80 bp, synthetic construct
  source 1..80: mol_type = other DNA
ctaagcatttaacctgctgtgagcagagctgagcctttggtttggaaatcttgtagccacaggtagtgaggaaatttaag

SEQ ID NO: 31283 - DNA, 80 bp, synthetic construct
  source 1..80: mol_type = other DNA
aaacagtccaggtgagttgagatgttgggtttcaaagatcttcaaaggcaaacaagaattgagagtcaggatgtacaggg

SEQ ID NO: 31284 - DNA, 80 bp, synthetic construct
  source 1..80: mol_type = other DNA
ataatcctagatatttcactaacctccactgtccattgggtttctgtactcctaaaattggagtattgcaggggctattg

SEQ ID NO: 31285 - DNA, 80 bp, synthetic construct
  source 1..80: mol_type = other DNA
cttctgttgcctagactttaggattaattccttcctcaagcaggggacaaccaatgggtgttccttctcctatgttcagg

SEQ ID NO: 31286 - DNA, 80 bp, synthetic construct; identical to SEQ ID NO: 11713
  source 1..80: mol_type = other DNA

SEQ ID NO: 31287 - DNA, 80 bp, synthetic construct
  source 1..80: mol_type = other DNA
ggattcccttgacataaggggcatggacgagggggcagcttacttctacttggacaatcttttttaaagtgtccttgtag

SEQ ID NO: 31288 - DNA, 80 bp, synthetic construct
  source 1..80: mol_type = other DNA
atcattgaataattcatagtcttcctagttttccttagtccttctagcacgtaagttagcaaatgtctgtggcaccaatc

SEQ ID NO: 31289 - DNA, 80 bp, synthetic construct
  source 1..80: mol_type = other DNA
tcatttggggttagtgtctgatttagcagtaacattgcatctctccatgtcagatcaaaggattgccctaacccttataa

SEQ ID NO: 31290 - DNA, 80 bp, synthetic construct; identical to SEQ ID NO: 11714
  source 1..80: mol_type = other DNA

SEQ ID NO: 31291 - DNA, 80 bp, synthetic construct
  source 1..80: mol_type = other DNA
ctccatttgcctttttcctacaaaagaggtctagctgtaagatggtgttataatttatacttccctcaggaggccaggtt

SEQ ID NO: 31292 - DNA, 80 bp, synthetic construct
  source 1..80: mol_type = other DNA
agaacatagggaagccaacacccctagtcattttctgatgagcataagtcctagagcatcctctatggtcctaatgctta

SEQ ID NO: 31293 - DNA, 80 bp, synthetic construct; identical to SEQ ID NO: 11715
  source 1..80: mol_type = other DNA

SEQ ID NO: 31294 - DNA, 80 bp, synthetic construct
  source 1..80: mol_type = other DNA
taacaacccagctgccccatcaacatgcattcgcataaacaacagttcttatgcaaatttgtttcagagagggtgtattg

SEQ ID NO: 31295 - DNA, 80 bp, synthetic construct
  source 1..80: mol_type = other DNA
aggttttttcctcagtcacctgggaggaaccatctatcatcctgtcctgaagggagttcctcctatgtctggtcggactg

SEQ ID NO: 31296 - DNA, 80 bp, synthetic construct
  source 1..80: mol_type = other DNA
actaagaataactctgaactggtgaggtgtgctcacaatgaggtttcctctaaaagttacttttctacttttagttaagt

SEQ ID NO: 31297 - DNA, 80 bp, synthetic construct; identical to SEQ ID NO: 11716
  source 1..80: mol_type = other DNA

SEQ ID NO: 31298 - DNA, 80 bp, synthetic construct
  source 1..80: mol_type = other DNA
ttagagatacaacttgctagaggaaatgaaagtctgaaacattagtacctaggaggcagggatcagaggaagtagattca

SEQ ID NO: 31299 - DNA, 80 bp, synthetic construct
  source 1..80: mol_type = other DNA
acaacagctttctgcctctagtcagccctcagcttccccaagaaaattggaagtggaagctggctccaggcagaccaaca

SEQ ID NO: 31300 - DNA, 80 bp, synthetic construct
  source 1..80: mol_type = other DNA
tggtccaatattaccgctttggatgtccctttgttgtcaccaaaatgttaccaagggggtccttgctcacagagctccca

SEQ ID NO: 31301 - DNA, 80 bp, synthetic construct; identical to SEQ ID NO: 11717
  source 1..80: mol_type = other DNA

SEQ ID NO: 31302 - DNA, 80 bp, synthetic construct
  source 1..80: mol_type = other DNA
acagacacagaccagaagagtgcagttgcaagatttaatagagtgaaaacagagctcccatacaaagggaggggacccaa

SEQ ID NO: 31303 - DNA, 80 bp, synthetic construct
  source 1..80: mol_type = other DNA
tatgttatgtttccattatcatttgtttcaagaaatttctgaatttcctttttaatctcttcatggacccactggccatt

SEQ ID NO: 31304 - DNA, 80 bp, synthetic construct
  source 1..80: mol_type = other DNA
attcttgataacaatccatgtgctgtggaaaagaatgtgtatctgtagcagttggatgaaatattctgcaaatatctatt

SEQ ID NO: 31305 - DNA, 80 bp, synthetic construct; identical to SEQ ID NO: 11718
  source 1..80: mol_type = other DNA

SEQ ID NO: 31306 - DNA, 80 bp, synthetic construct
  source 1..80: mol_type = other DNA
tttttttttttttaggcaacagattaataggtcttgtttcttcatctagtcagtttgtcttttgattggaaattttagtc

SEQ ID NO: 31307 - DNA, 80 bp, synthetic construct
  source 1..80: mol_type = other DNA
tgcctagcttaaggcacagttacacatttgtgcatctgtagcagtcctctctttaagttacacatacttccagcactata

SEQ ID NO: 31308 - DNA, 80 bp, synthetic construct
  source 1..80: mol_type = other DNA
tcatgtacccctgaattgctagaacaaatgttccatttctctccttttccatcagttcttacttgtgtcttgtcagctaa

SEQ ID NO: 31309 - DNA, 80 bp, synthetic construct
  source 1..80: mol_type = other DNA
ttcagaaactacctcattcccaaggtaagtttgtttctcctacactgcaactccatgttcttttattcctcaaattcaca

SEQ ID NO: 31310 - DNA, 80 bp, synthetic construct; identical to SEQ ID NO: 11719
  source 1..80: mol_type = other DNA

SEQ ID NO: 31311 - DNA, 80 bp, synthetic construct
  source 1..80: mol_type = other DNA
ctttctttattttcccaggaatgttgtgattttgttgtcatggcttgcaagtctttggtttttcctagataattaatatt

SEQ ID NO: 31312 - DNA, 80 bp, synthetic construct
  source 1..80: mol_type = other DNA
gtgaacagtacactgtatctgtgttaatattgttttatttcttactttccaattcttgtgggcttaatttctctttattg

SEQ ID NO: 31313 - DNA, 80 bp, synthetic construct
  source 1..80: mol_type = other DNA
atcagattagggaagtttgccctcacatatatatagaaataaatataaatagaaataagtatgcacatagagatgaattt

SEQ ID NO: 31314 - DNA, 80 bp, synthetic construct
  source 1..80: mol_type = other DNA
ccccgtctccacttttcttcttgtgatcacttagttgtatctttgaaatgcctaataacttttggttaaataccagatgt

SEQ ID NO: 31315 - DNA, 80 bp, synthetic construct
  source 1..80: mol_type = other DNA
agctctctgaggttctcctacctctggaatcttgagaccaatttttgtcttggcagctttacaattgccttctatcacat

SEQ ID NO: 31316 - DNA, 80 bp, synthetic construct
  source 1..80: mol_type = other DNA
tcactttttgaagaagacagaattgttaatttaccaagagattatggggcttaccctgaggtcactgatttagtacaaga

SEQ ID NO: 31317 - DNA, 80 bp, synthetic construct
  source 1..80: mol_type = other DNA
aattaatgagaaatatactgaagaatcaggatgagtcgccagtctcccaatccactgcatcagctttggtgacctgttga

SEQ ID NO: 31318 - DNA, 80 bp, synthetic construct; identical to SEQ ID NO: 11721
  source 1..80: mol_type = other DNA

SEQ ID NO: 31319 - DNA, 80 bp, synthetic construct
  source 1..80: mol_type = other DNA
tctgttgcaatccttgacatctgctattgtagcatgaaagcagtcatagacaatgtacaaatgaatatcttccaattttt

SEQ ID NO: 31320 - DNA, 80 bp, synthetic construct
  source 1..80: mol_type = other DNA
gtgcagagagtattgtttattgatgcccaatataagactttcctgtccagtagaattttctgcaaagatgctcgattgat

SEQ ID NO: 31321 - DNA, 80 bp, synthetic construct
  source 1..80: mol_type = other DNA
ctataaatttctatttattcaagtaacatttgttgaaataaatctgctttggtatcttaaaaacattttaatatagtact

SEQ ID NO: 31322 - DNA, 80 bp, synthetic construct
  source 1..80: mol_type = other DNA
atatatctactttgatatctgtctatccatctatctagacctcaatactgcagtatatgtagcccaataacaatggtttt

SEQ ID NO: 31323 - DNA, 80 bp, synthetic construct; identical to SEQ ID NO: 11722
  source 1..80: mol_type = other DNA

SEQ ID NO: 31324 - DNA, 80 bp, synthetic construct
  source 1..80: mol_type = other DNA
actttggcaagaaaactacatagtactttgactattccactgaatcacagtggtgaggcagaggcacataatgttacata

SEQ ID NO: 31325 - DNA, 80 bp, synthetic construct
  source 1..80: mol_type = other DNA
cagaacaccctgtttccaaagtcacacatccaatagttttatctttcattgatgatccttgcctggcctgatgatcttga

SEQ ID NO: 31326 - DNA, 80 bp, synthetic construct
  source 1..80: mol_type = other DNA
atgtgccatgctggtgtgctgcacccattaactcgtcatttagcattaggtatatctcctaatgctatctttctgtattt

SEQ ID NO: 31327 - DNA, 80 bp, synthetic construct; identical to SEQ ID NO: 11723
  source 1..80: mol_type = other DNA

SEQ ID NO: 31328 - DNA, 80 bp, synthetic construct
  source 1..80: mol_type = other DNA
aaacagtccctggtgtgtgatgttccccttcctgtgtccatgtgttctcattgttcaattcccacctatgagtgagaata

SEQ ID NO: 31329 - DNA, 80 bp, synthetic construct
  source 1..80: mol_type = other DNA
tggatatttgggttgattccaagtcgttgctattgtgagtagtgctgcaataaatatacgtgtgcatgtgtctttatagt

SEQ ID NO: 31330 - DNA, 80 bp, synthetic construct
  source 1..80: mol_type = other DNA
acatcctctcctgcacctgttgtttcctgactttttaatgatcgccattctaactggtgtgagatggtatctcattgtgg

SEQ ID NO: 31331 - DNA, 80 bp, synthetic construct; identical to SEQ ID NO: 11724
  source 1..80: mol_type = other DNA

SEQ ID NO: 31332 - DNA, 80 bp, synthetic construct
  source 1..80: mol_type = other DNA
atggttttaggtctaacatttaagtctttgatccatcttgaattaatttttgtataaggtgtaaagaagggatccagttt

SEQ ID NO: 31333 - DNA, 80 bp, synthetic construct
  source 1..80: mol_type = other DNA
ctgttttggtaccagtaccatgctgttttggttactgtagccttgtagtatagtttgaagtcaggtagtgtgatgcctcc

SEQ ID NO: 31334 - DNA, 80 bp, synthetic construct; identical to SEQ ID NO: 11725
  source 1..80: mol_type = other DNA

SEQ ID NO: 31335 - DNA, 80 bp, synthetic construct
  source 1..80: mol_type = other DNA
tgattttgtatcctgagactttgctgaagttgtttatcagcttaaggagattttgggctgagacgatggggttgtctaga

SEQ ID NO: 31336 - DNA, 80 bp, synthetic construct
  source 1..80: mol_type = other DNA
gtcatagtctacacataagatttgtgaaaactgaagtgatgaaatagagcagcaggagtggacaggcactaaagcccaag

SEQ ID NO: 31337 - DNA, 80 bp, synthetic construct
  source 1..80: mol_type = other DNA
cttgatgaaaaggacagattcagaaggttgcacccaagtacgcaagtactcagtacttcaaatgtggttgtgggcatttt

SEQ ID NO: 31338 - DNA, 80 bp, synthetic construct
  source 1..80: mol_type = other DNA
aaattttattatcattatactttaagttttagggtacatgtgcacaatgtgcaggtttgttacatatgtatacatgtgcc

SEQ ID NO: 31339 - DNA, 80 bp, synthetic construct; identical to SEQ ID NO: 11726
  source 1..80: mol_type = other DNA

SEQ ID NO: 31340 - DNA, 80 bp, synthetic construct
  source 1..80: mol_type = other DNA
tttacagctcagttcacctatgtctcttgtttctagggcacaaccatattaacttccctcacttctgtgctacatgacaa

SEQ ID NO: 31341 - DNA, 80 bp, synthetic construct
  source 1..80: mol_type = other DNA
tgtgtttcagggtacaagataacttttttgatcagttggaacttacatgtgccttctctgcagtggtacagttactcttt

SEQ ID NO: 31342 - DNA, 80 bp, synthetic construct
  source 1..80: mol_type = other DNA
actgaggtactcaagaactcctcctggaagataaaactaattacattttcctcactagccatgaggaagttatctcactc

SEQ ID NO: 31343 - DNA, 80 bp, synthetic construct; identical to SEQ ID NO: 11727
  source 1..80: mol_type = other DNA

SEQ ID NO: 31344 - DNA, 80 bp, synthetic construct
  source 1..80: mol_type = other DNA
attggctctaaataaaggatattaaaacctttgccaaataaccatggatgggatcagggggacattaagaatgtagcagg

SEQ ID NO: 31345 - DNA, 80 bp, synthetic construct
  source 1..80: mol_type = other DNA
tagataccaagataacaaggaaagaaaccttccttcaagcattcacatttagcacatgtatcagtccattctttcattgc

SEQ ID NO: 31346 - DNA, 80 bp, synthetic construct
  source 1..80: mol_type = other DNA
ggagagagagagcaaagaggaaaggctacacacttttaaacaaccagatctcatgagaactcactcactatcatgagaac

SEQ ID NO: 31347 - DNA, 80 bp, synthetic construct; identical to SEQ ID NO: 11728
  source 1..80: mol_type = other DNA

SEQ ID NO: 31348 - DNA, 80 bp, synthetic construct
  source 1..80: mol_type = other DNA
cccctctgtatcctcatgtggcagaagcacaaaaaaagcaaaaggggagaaatggctcccttgcatctcttggtgttatt

SEQ ID NO: 31349 - DNA, 80 bp, synthetic construct
  source 1..80: mol_type = other DNA
atagcacatttttcaatggaagcatgaacatgatgttgaggaatcccagggaaacgaacattttcttgctcagtgagatg

SEQ ID NO: 31350 - DNA, 80 bp, synthetic construct
  source 1..80: mol_type = other DNA
gtgaagagtgtaaaatgtgatacggatcatcagactggaaacagaatgtgagggtccaggtcaagctatttggatcttat

SEQ ID NO: 31351 - DNA, 80 bp, synthetic construct
  source 1..80: mol_type = other DNA
ccttctcagttcaacccactggacaggtaatgtatgtttctcaagaaagattttaatgaattgcttggcatgtagctgac

SEQ ID NO: 31352 - DNA, 80 bp, synthetic construct; identical to SEQ ID NO: 11729
  source 1..80: mol_type = other DNA

SEQ ID NO: 31353 - DNA, 80 bp, synthetic construct
  source 1..80: mol_type = other DNA
cagaactttaacctgaaatctctgattgacccaaaggaccttgacacaactcctgttgtcaatggatttgcttctgtccc

SEQ ID NO: 31354 - DNA, 80 bp, synthetic construct
  source 1..80: mol_type = other DNA
gtgaacattcagcctccattaaaaaagtttcactgtgcaaatatatctgctattccccatactctataatagttacattg

SEQ ID NO: 31355 - DNA, 80 bp, synthetic construct
  source 1..80: mol_type = other DNA
ttcctttgtgcataatgcaggtgacaaattaaagaaaatagagttccaggaggccatgctggttctcaaaacgataagga

SEQ ID NO: 31356 - DNA, 80 bp, synthetic construct; identical to SEQ ID NO: 11730
  source 1..80: mol_type = other DNA

SEQ ID NO: 31357 - DNA, 80 bp, synthetic construct
  source 1..80: mol_type = other DNA
gattacagacacgtgccaccatgcctggctaatttttttgtatttttagtacagacagggtttcaccatgttagccagga

SEQ ID NO: 31358 - DNA, 80 bp, synthetic construct
  source 1..80: mol_type = other DNA
cttagaatgaagtaatgaagtataaatatatgctttcatattgctgctcatgtgttttgtcatgcttctctcttcaaaca

SEQ ID NO: 31359 - DNA, 80 bp, synthetic construct
  source 1..80: mol_type = other DNA
ggtgcctaccaccacaccaggctaatttttgtatttttagtagagacagggtttcactatgtgggccaggctagtcttga

SEQ ID NO: 31360 - DNA, 80 bp, synthetic construct; identical to SEQ ID NO: 11731
  source 1..80: mol_type = other DNA

SEQ ID NO: 31361 - DNA, 80 bp, synthetic construct
  source 1..80: mol_type = other DNA
tcatctcctagaacaagctacttacaatttggaatacatttaaagataatatatgggtacagatgtacatgtacatctat

SEQ ID NO: 31362 - DNA, 80 bp, synthetic construct
  source 1..80: mol_type = other DNA
aaaacttgctattttcctaccaagtaatatgccagcaaaacctctaaggtgatagaaacataggcaaataattcagagag

SEQ ID NO: 31363 - DNA, 80 bp, synthetic construct; identical to SEQ ID NO: 11732
  source 1..80: mol_type = other DNA

SEQ ID NO: 31364 - DNA, 80 bp, synthetic construct
  source 1..80: mol_type = other DNA
gaaacccaccagtgtaatctcttcatgtccagacattatttagcctaccatactattattatacccatttgaacaaccaa

SEQ ID NO: 31365 - DNA, 80 bp, synthetic construct
  source 1..80: mol_type = other DNA
taaaatacatatttcatatgagaagagaactttatttggctcactaatgaataccagccacctgaaacactgtttagaag

SEQ ID NO: 31366 - DNA, 80 bp, synthetic construct
  source 1..80: mol_type = other DNA
tgaaccagcaattaataacactttttatttagcacattcacaaaagaaatggatctaaattatcattcattaatcacttt

SEQ ID NO: 31367 - DNA, 80 bp, synthetic construct
  source 1..80: mol_type = other DNA
ttgagtgaatgggaagatttgatgagaggtcagagaagacataatagtgggaatgtccttgataaaaaaagagttgcagg

SEQ ID NO: 31368 - DNA, 80 bp, synthetic construct
  source 1..80: mol_type = other DNA
gttagaaataaaaatagctccatgcgggcaagtccttctcctgcacaaattcgttttcctgaagataacaaagaaaggaa

SEQ ID NO: 31369 - DNA, 80 bp, synthetic construct
  source 1..80: mol_type = other DNA
ggatggatgacatgatggattgattaatggatggtgggacaaacaaatgtacaaaaagagatatatttgctatctgtcta

SEQ ID NO: 31370 - DNA, 80 bp, synthetic construct; identical to SEQ ID NO: 11733
  source 1..80: mol_type = other DNA

SEQ ID NO: 31371 - DNA, 80 bp, synthetic construct
  source 1..80: mol_type = other DNA
ttcctcaacagcatactcatgctttcattaaagcacagattaccaggaatcgtaattctgtatttatttatctattgtgg

SEQ ID NO: 31372 - DNA, 80 bp, synthetic construct
  source 1..80: mol_type = other DNA
tatatgatcatgattggaagaagacagggtgctctggaatcactgcaaaataacctcttagcttatgtaacctcttagct

SEQ ID NO: 31373 - DNA, 80 bp, synthetic construct; identical to SEQ ID NO: 11734
  source 1..80: mol_type = other DNA

SEQ ID NO: 31374 - DNA, 80 bp, synthetic construct
  source 1..80: mol_type = other DNA
agctcttgggtgccttagtgatgtatctagtggcagagttcagtcaaaccaagatgttcattttctcaattgggaacaac

SEQ ID NO: 31375 - DNA, 80 bp, synthetic construct
  source 1..80: mol_type = other DNA
ccagaggaggtgccatgtaaattccaactaattccaaaaagttctctctttcctttaaatacaaatggaaacgagtttct

SEQ ID NO: 31376 - DNA, 80 bp, synthetic construct; identical to SEQ ID NO: 11735
  source 1..80: mol_type = other DNA

SEQ ID NO: 31377 - DNA, 80 bp, synthetic construct
  source 1..80: mol_type = other DNA
tggatgcccttttctggcctcatttgccgctctatttcatcacttcaaatttgacacatcttgtattttgattatgtaga

SEQ ID NO: 31378 - DNA, 80 bp, synthetic construct
  source 1..80: mol_type = other DNA
gccatgctacagattaattttagcttaaaacactgaaaagatgatgaaattacaaagattatcactttgcaacaattcaa

SEQ ID NO: 31379 - DNA, 80 bp, synthetic construct
  source 1..80: mol_type = other DNA
tacaaccttattatgtggggaacttagcatgaccaataatgacatatgtgacatttcatgctcccacctcatcaatgtga

SEQ ID NO: 31380 - DNA, 80 bp, synthetic construct; identical to SEQ ID NO: 11736
  source 1..80: mol_type = other DNA

SEQ ID NO: 31381 - DNA, 80 bp, synthetic construct
  source 1..80: mol_type = other DNA
ccttgtattgagaaagaaaaacctcttctggttgtgtgctttgatgaaaactgtggattgtagtcctaatccttgtaaaa

SEQ ID NO: 31382 - DNA, 80 bp, synthetic construct
  source 1..80: mol_type = other DNA
attgtgtagtttatagcatagcaactaaaacatctggatgaatacagaaaccatgtgatagacagcattgtaaagctgca

SEQ ID NO: 31383 - DNA, 80 bp, synthetic construct
  source 1..80: mol_type = other DNA
ctgaatcaggacaggaggtgttgtcattataattgcctatgagaggggaatgaatacattctggaaaaagataaatgttc

SEQ ID NO: 31384 - DNA, 80 bp, synthetic construct; identical to SEQ ID NO: 11737
  source 1..80: mol_type = other DNA

SEQ ID NO: 31385 - DNA, 80 bp, synthetic construct
  source 1..80: mol_type = other DNA
ataaaaatgagagaagagaaaaaacttccctaatctgataaaggatatctactaaaatcttaaagatttctgataaagaa

SEQ ID NO: 31386 - DNA, 80 bp, synthetic construct
  source 1..80: mol_type = other DNA
gtttcccttactgcacaacttttctccaaagtgtttgtcttttagaacagccagaaggaagttactggcttttaaaaaat

SEQ ID NO: 31387 - DNA, 80 bp, synthetic construct
  source 1..80: mol_type = other DNA
gcgcctgtagtcccagctactcgggaggctgaggcaggagaatggcgtgaacccgggaagcggagcttgcagtgagccga

SEQ ID NO: 31388 - DNA, 80 bp, synthetic construct; identical to SEQ ID NO: 11738
  source 1..80: mol_type = other DNA

SEQ ID NO: 31389 - DNA, 80 bp, synthetic construct
  source 1..80: mol_type = other DNA
attcttatactctaccccccagcagatcagaaatgaaataaggatgccctctatcaccaattctgttcaatgctaacctg

SEQ ID NO: 31390 - DNA, 80 bp, synthetic construct
  source 1..80: mol_type = other DNA
gaaagttgttagatataaggtcatcagaatagtataattgaatacaattacttataccaattacaaagaaataaaaaaaa

SEQ ID NO: 31391 - DNA, 80 bp, synthetic construct
  source 1..80: mol_type = other DNA
tgaacatgttaagtctttccatatcgaactacacaatgaatgtcactttgataaaaatctcagaagagtgttttgggaaa

SEQ ID NO: 31392 - DNA, 80 bp, synthetic construct; identical to SEQ ID NO: 11739
  source 1..80: mol_type = other DNA

SEQ ID NO: 31393 - DNA, 80 bp, synthetic construct
  source 1..80: mol_type = other DNA
atgatcaatctcttcctggactttagctgacaagacacaagaaagaactgatggaaacgaagatatatggaacatttgtc

SEQ ID NO: 31394 - DNA, 80 bp, synthetic construct
  source 1..80: mol_type = other DNA
ccagccatataaaaagaattaccataatatagatacataccactctcctacaaactagtcattacagtgcataagtacat

SEQ ID NO: 31395 - DNA, 80 bp, synthetic construct
  source 1..80: mol_type = other DNA
ggttttataaatatatttgtgtgtgcggtggtggagcaggggcagtgatgcaattagcaatggtactgtcttcattcttc

SEQ ID NO: 31396 - DNA, 80 bp, synthetic construct; identical to SEQ ID NO: 11740
  source 1..80: mol_type = other DNA

SEQ ID NO: 31397 - DNA, 80 bp, synthetic construct
  source 1..80: mol_type = other DNA
acacacatacacattcttccttggttctttagttaaatcacaattttctattcttcaagttagagtatttgcacatgttt

SEQ ID NO: 31398 - DNA, 80 bp, synthetic construct
  source 1..80: mol_type = other DNA
tacatgaggtctcctgattcctggcacccattatttcttctgacttagtttcagacatgagatggagcacaacccccagt

SEQ ID NO: 31399 - DNA, 80 bp, synthetic construct
  source 1..80: mol_type = other DNA
attttccctttacttctggtgctctgaaattccatgactttgtgtcctgtgatggatgttttaatttcattcactctgct

SEQ ID NO: 31400 - DNA, 80 bp, synthetic construct; identical to SEQ ID NO: 11741
  source 1..80: mol_type = other DNA

SEQ ID NO: 31401 - DNA, 80 bp, synthetic construct
  source 1..80: mol_type = other DNA
ttggctcttggtgcctccaaatactgaaccttatgagaatcacagtgacacagattagcttctcctcttgataaatcttc

SEQ ID NO: 31402 - DNA, 80 bp, synthetic construct
  source 1..80: mol_type = other DNA
aaatttcagtgggatcctgacacagggaaaaaggtatgttatctgctgcaaagcaggaactatttaaatgtaaattctaa

SEQ ID NO: 31403 - DNA, 80 bp, synthetic construct
  source 1..80: mol_type = other DNA
tctgcttaaatagaaacacctttgtaagagactaacttttagattacttcccagactggaatttatgtcaggatgcctca

SEQ ID NO: 31404 - DNA, 80 bp, synthetic construct
  source 1..80: mol_type = other DNA
gctctccttaccacaaattacctttgctgaaatccagacacttcatcagtgctttacttattttgctactgccatactgt

SEQ ID NO: 31405 - DNA, 80 bp, synthetic construct; identical to SEQ ID NO: 11742
  source 1..80: mol_type = other DNA

SEQ ID NO: 31406 - DNA, 80 bp, synthetic construct
  source 1..80: mol_type = other DNA
atcagctacagtgccaaccaagttttcaatattgaattctgacttttggttgtccttttcctagaagtgatttcatgcaa

SEQ ID NO: 31407 - DNA, 80 bp, synthetic construct
  source 1..80: mol_type = other DNA
tcctgacagacctacaagttccattcatgaaatcattcgctgcttaggttagtcacacagaatatttctttccccagaaa

SEQ ID NO: 31408 - DNA, 80 bp, synthetic construct
  source 1..80: mol_type = other DNA
tcctatttcattgcatggcaaaaagtagaagggcaagaaagggtaagagtgagagcaattggggggggcacactcacatt

SEQ ID NO: 31409 - DNA, 80 bp, synthetic construct; identical to SEQ ID NO: 11743
  source 1..80: mol_type = other DNA

SEQ ID NO: 31410 - DNA, 80 bp, synthetic construct
  source 1..80: mol_type = other DNA
ggcacttgactctctcatgcttcagggctaccatattatttctagtctagcccactataagacttcttgtatttgagata

SEQ ID NO: 31411 - DNA, 80 bp, synthetic construct
  source 1..80: mol_type = other DNA
tgatgttatcctgataataagtgagttcacataagatctggttttttaaaactgtttccccaacttgcttctcctcttgc

SEQ ID NO: 31412 - DNA, 80 bp, synthetic construct
  source 1..80: mol_type = other DNA
tctttatagaaatgcaagaacagcctaacacattcatttttatgatttttttattatttgtaagtgaacacaattttagt

SEQ ID NO: 31413 - DNA, 80 bp, synthetic construct; identical to SEQ ID NO: 11744
  source 1..80: mol_type = other DNA

SEQ ID NO: 31414 - DNA, 80 bp, synthetic construct
  source 1..80: mol_type = other DNA
gcaatgcaaatgccaaggccaagggactaatcgaataaagttctcataaattgaaagtgtgaatacacctacaataagaa

SEQ ID NO: 31415 - DNA, 80 bp, synthetic construct
  source 1..80: mol_type = other DNA
agggaccttgtgtgaacaaggtaatatcctcgagaagtctcaaaaccacagcctactccagtacttgtgctcatgaaggc

SEQ ID NO: 31416 - DNA, 80 bp, synthetic construct
  source 1..80: mol_type = other DNA
ttgtgagttgtagattctttcttcttatgaattgaccaataagctccattgctctctctttaacagtccatttggcttat

SEQ ID NO: 31417 - DNA, 80 bp, synthetic construct
  source 1..80: mol_type = other DNA
attgaacattgacatctttgtcagccaactggaaatctctgatgcctcaggctgtggaaaggtttgagagatgtacagtg

SEQ ID NO: 31418 - DNA, 80 bp, synthetic construct; identical to SEQ ID NO: 11745
  source 1..80: mol_type = other DNA

SEQ ID NO: 31419 - DNA, 80 bp, synthetic construct
  source 1..80: mol_type = other DNA
tgtgggatttgtgcttggctgatattacccaggggaacatgtagaagaatgaaatatgattcttatatctcaccacatac

SEQ ID NO: 31420 - DNA, 80 bp, synthetic construct
  source 1..80: mol_type = other DNA
cctaattaaactaaagagcttctgcacagtaaaagaaatgacaagcagagtaaacatacaacctacagaatgggagaaaa

SEQ ID NO: 31421 - DNA, 80 bp, synthetic construct
  source 1..80: mol_type = other DNA
tgacagaattgaatgcttcattgattattccccaagcaaagacatcagtttaacagctatctacacaaaatgtaccttca

SEQ ID NO: 31422 - DNA, 80 bp, synthetic construct; identical to SEQ ID NO: 11746
  source 1..80: mol_type = other DNA

SEQ ID NO: 31423 - DNA, 80 bp, synthetic construct
  source 1..80: mol_type = other DNA
agcctcatcactgtggactatagggctctgggatggtaaataaacctgaaaggcagtgttggctacaagtactgtaactt

SEQ ID NO: 31424 - DNA, 80 bp, synthetic construct
  source 1..80: mol_type = other DNA
ccaagctgcacagttttcacttccaaaagaaactgctttcttctgcttgaggagtggggggcttgaatagctagcagcaa

SEQ ID NO: 31425 - DNA, 80 bp, synthetic construct
  source 1..80: mol_type = other DNA
gagtgaaatataaagtcgactttgtcttgcaactaggtactagcttgatcacaggagggtagagcaccaagtgcactcct

SEQ ID NO: 31426 - DNA, 80 bp, synthetic construct
  source 1..80: mol_type = other DNA
acaatagaacaccaaatagacttctaaggtttttgactctagtccctggcttctgggtggtacctctggacatgcctggg

SEQ ID NO: 31427 - DNA, 80 bp, synthetic construct; identical to SEQ ID NO: 11747
  source 1..80: mol_type = other DNA

SEQ ID NO: 31428 - DNA, 80 bp, synthetic construct
  source 1..80: mol_type = other DNA
atacagcttagatcacaacacttaactcatttcccatttattaaaaaaagtgcagttcactgctggtgcagtattctagg

SEQ ID NO: 31429 - DNA, 80 bp, synthetic construct
  source 1..80: mol_type = other DNA
aagcctaacaagaaggatgtgtacaaaaaaaaccccagactacaaagacaacaaaaatacctaactctagaatgcccagc

SEQ ID NO: 31430 - DNA, 80 bp, synthetic construct; identical to SEQ ID NO: 11748
  source 1..80: mol_type = other DNA

SEQ ID NO: 31431 - DNA, 80 bp, synthetic construct
  source 1..80: mol_type = other DNA
aaaaacaatgaagcacacctacaggatctagaaaatagtctcaaaatgcaaatctaagagttattggccttaaagaggag

SEQ ID NO: 31432 - DNA, 80 bp, synthetic construct
  source 1..80: mol_type = other DNA
cccaaagatgtcctgaattgtattgcccagattttctgctagggtttttatagttttggagcttacatttaagtcattaa

SEQ ID NO: 31433 - DNA, 80 bp, synthetic construct
  source 1..80: mol_type = other DNA
aaaagtggtactaagaataaagttaatagctgtaagtgtcaactatcaaaatagaagaaaaacatcaaataaacaaccta

SEQ ID NO: 31434 - DNA, 80 bp, synthetic construct
  source 1..80: mol_type = other DNA
ctgacaaacctttagccagactaaggaaaaatatgacatgatccaaataagtcagagatgaaaaagaaggcattacaact

SEQ ID NO: 31435 - DNA, 80 bp, synthetic construct; identical to SEQ ID NO: 11749
  source 1..80: mol_type = other DNA

SEQ ID NO: 31436 - DNA, 80 bp, synthetic construct
  source 1..80: mol_type = other DNA
tgcaaaaatcctcaagaaaatagctgcaaaccaaattaatgaatacattaaagagctcactcatcacaaccaagtgggat

SEQ ID NO: 31437 - DNA, 80 bp, synthetic construct
  source 1..80: mol_type = other DNA
cagggtatagaaggaacatacctcaccatagtaaaagctatctacaaaagaccaacagctagtaacatactaaataggga

SEQ ID NO: 31438 - DNA, 80 bp, synthetic construct
  source 1..80: mol_type = other DNA
agagaatataatcttatatttaaaaaaacataaagactccactaaaaaactatgagaaataataaacaaattccgtaaag

SEQ ID NO: 31439 - DNA, 80 bp, synthetic construct; identical to SEQ ID NO: 11750
  source 1..80: mol_type = other DNA

SEQ ID NO: 31440 - DNA, 80 bp, synthetic construct
  source 1..80: mol_type = other DNA
aatagcaaagacttggaaccaacccaaatgcccatcagtgatagactagataaagaaaatatggcacatatgcaccatgg

SEQ ID NO: 31441 - DNA, 80 bp, synthetic construct
  source 1..80: mol_type = other DNA
tcatgcggggcttaaaacctagatgacaggttgatgggtgcagcaaaccaccatggcacatgtatacctatgtaacaaac

SEQ ID NO: 31442 - DNA, 80 bp, synthetic construct; identical to SEQ ID NO: 11751
  source 1..80: mol_type = other DNA

SEQ ID NO: 31443 - DNA, 80 bp, synthetic construct
  source 1..80: mol_type = other DNA
agaaaggaaaaatctaacaagatagaccatctgaatagaagctgagaaagcataagacaaaattcaatacttttcctgat

SEQ ID NO: 31444 - DNA, 80 bp, synthetic construct
  source 1..80: mol_type = other DNA
gggaaaagatccaagtatatccaatttcactactgctattcagcatagcacttaaggtcctagccaaaacaattagacaa

SEQ ID NO: 31445 - DNA, 80 bp, synthetic construct
  source 1..80: mol_type = other DNA
tgaaaataaaatcaaggaaatagttacatttgcaatagcatcaaaagggccaaaagccctgagaacctataatcaagaag

SEQ ID NO: 31446 - DNA, 80 bp, synthetic construct
  source 1..80: mol_type = other DNA
ataataatgaaagacttaaaattgttaagatggcaatgcttccaaaagtaatctaaagattgaatgtaatcactgtcaca

SEQ ID NO: 31447 - DNA, 80 bp, synthetic construct; identical to SEQ ID NO: 11752
  source 1..80: mol_type = other DNA

SEQ ID NO: 31448 - DNA, 80 bp, synthetic construct
  source 1..80: mol_type = other DNA
aacttaaatgtgaactaaaactatacaattcttagaataaaacatcggttaaatattaatgccttcagaattggaagtgg

SEQ ID NO: 31449 - DNA, 80 bp, synthetic construct
  source 1..80: mol_type = other DNA
aatgcccagaatccataaacaattacctacagttcaacaacaaatgacaagcaacccagtatagaaataagcaaagggcc

SEQ ID NO: 31450 - DNA, 80 bp, synthetic construct
  source 1..80: mol_type = other DNA
gctcctagctacttgggaggctgaggtaggagaatcacttgagaccaagagtcagaggttgcagtgagccaagatgacag

SEQ ID NO: 31451 - DNA, 80 bp, synthetic construct; identical to SEQ ID NO: 11753
  source 1..80: mol_type = other DNA

SEQ ID NO: 31452 - DNA, 80 bp, synthetic construct
  source 1..80: mol_type = other DNA
catatgtgtacatgaaaatggaatattattgaaccacacaaaacaacaaagtactatcacatgctaaatcttagttgacc

SEQ ID NO: 31453 - DNA, 80 bp, synthetic construct; identical to SEQ ID NO: 11754
  source 1..80: mol_type = other DNA

SEQ ID NO: 31454 - DNA, 80 bp, synthetic construct
  source 1..80: mol_type = other DNA
gttttgtggtcatttttatacccacttttaattgcatgcatattaagggacagtttgtgcaaggaaggggtcctatcttt

SEQ ID NO: 31455 - DNA, 80 bp, synthetic construct
  source 1..80: mol_type = other DNA
ctctggagttgactcccacctcctacctcagttgcacagtattgtaattaaacaaaataccattaaagtgtacactttaa

SEQ ID NO: 31456 - DNA, 80 bp, synthetic construct
  source 1..80: mol_type = other DNA
aaaaagcccaaatagtcttgaaaaaagctttgaggactcatactttttgatttgaaaacttgacacaaaactacagtaat

SEQ ID NO: 31457 - DNA, 80 bp, synthetic construct; identical to SEQ ID NO: 11755
  source 1..80: mol_type = other DNA

SEQ ID NO: 31458 - DNA, 80 bp, synthetic construct
  source 1..80: mol_type = other DNA
tatgtcaatgtgcagggcatacaggaagcccatttatgataagccattcttttccattgtcacataatctatgtgcaata

SEQ ID NO: 31459 - DNA, 80 bp, synthetic construct
  source 1..80: mol_type = other DNA
gagggtctatgcattctagccattggacaattttgtattttccatgatgtttagtgcaggcccataaatacaataagtaa

SEQ ID NO: 31460 - DNA, 80 bp, synthetic construct
  source 1..80: mol_type = other DNA
cgaggattgttaacatccagtgatgcttggtgttcttttactttctccctaatgtaacttcgtgtaagagcaacattttt

SEQ ID NO: 31461 - DNA, 80 bp, synthetic construct; identical to SEQ ID NO: 11756
  source 1..80: mol_type = other DNA

SEQ ID NO: 31462 - DNA, 80 bp, synthetic construct
  source 1..80: mol_type = other DNA
tctcattgttcaattcccacctatgaatgagaatatgcagtgtttggtttttttgtccttgtgatagtatgctgagaacg

SEQ ID NO: 31463 - DNA, 80 bp, synthetic construct
  source 1..80: mol_type = other DNA
cacaataaacatacgtgtgcatgtgtctttaaagcagcatgacttataatccttagggtatatacccagtaatgggatgg

SEQ ID NO: 31464 - DNA, 80 bp, synthetic construct
  source 1..80: mol_type = other DNA
cattctaactggtgtgaaatggtatctcattgtggttttgatttgcatttctctgatggccagtgatgatgagcattttt

SEQ ID NO: 31465 - DNA, 80 bp, synthetic construct; identical to SEQ ID NO: 11757
  source 1..80: mol_type = other DNA

SEQ ID NO: 31466 - DNA, 80 bp, synthetic construct
  source 1..80: mol_type = other DNA
atttttgtataaggtgtaaggaagggatccagtttcagctttctacatgtggctagccagttttcccagcaacatttgtt

SEQ ID NO: 31467 - DNA, 80 bp, synthetic construct
  source 1..80: mol_type = other DNA
tagaatagtttgaagtcaggtagcctgatgcctccagctttgttcttttggcttaggattgacttgacaatgcgggctct

SEQ ID NO: 31468 - DNA, 80 bp, synthetic construct
  source 1..80: mol_type = other DNA
atttgtttgtagcctcttttattttgttgagcagttgtttgtagttctccttgaagaggtccttcacgtcccttgtaagt

SEQ ID NO: 31469 - DNA, 80 bp, synthetic construct
  source 1..80: mol_type = other DNA
ggagattttgggctgagatgatggggttttctagatatacagtcatgtcatctgcaaacagggacaatttgagttcctct

SEQ ID NO: 31470 - DNA, 80 bp, synthetic construct; identical to SEQ ID NO: 11758
  source 1..80: mol_type = other DNA

SEQ ID NO: 31471 - DNA, 80 bp, synthetic construct
  source 1..80: mol_type = other DNA
aagctttttatgtgctgctggattcagtttgccgtaatttattgaggattcttgcattgatgttcatcagggatattggt

SEQ ID NO: 31472 - DNA, 80 bp, synthetic construct
  source 1..80: mol_type = other DNA
ctgtgaatccacctggtcctggactttttttggttggtaagctgttaattattgcctcaatttcagagcctgttattggt

SEQ ID NO: 31473 - DNA, 80 bp, synthetic construct; identical to SEQ ID NO: 11759
  source 1..80: mol_type = other DNA

SEQ ID NO: 31474 - DNA, 80 bp, synthetic construct
  source 1..80: mol_type = other DNA
agggtgtcaattttagatctttcctgctttctcttgtgggtatttagtgctataaatttccctctacacactgcattaaa

SEQ ID NO: 31475 - DNA, 80 bp, synthetic construct
  source 1..80: mol_type = other DNA
agttctagtttgattgcgctgtggtctgagagacaatttgttgtaatttctgttcttttacatctgctgaggagtgcttt

SEQ ID NO: 31476 - DNA, 80 bp, synthetic construct
  source 1..80: mol_type = other DNA
gttgatctgtctaatgttgacagtggggtgttaaagtctcccattattgttgtgtgggagtctaagtctctttataggtc

SEQ ID NO: 31477 - DNA, 80 bp, synthetic construct
  source 1..80: mol_type = other DNA
aggattgcaacccctgcctttttttgttttccatttgcttgatagatcttcctccttccctttattttgagcctatgtgc

SEQ ID NO: 31478 - DNA, 80 bp, synthetic construct; identical to SEQ ID NO: 11760
  source 1..80: mol_type = other DNA

SEQ ID NO: 31479 - DNA, 80 bp, synthetic construct
  source 1..80: mol_type = other DNA
aaaattcttttctttaagaatgttgaatattggccaccactctcttctggcttgtagagtttctgccgagagatccgctg

SEQ ID NO: 31480 - DNA, 80 bp, synthetic construct
  source 1..80: mol_type = other DNA
ttgaatgttagcctgccttcctaggttggggaagttctcctggataataccctgcagagtgttttccaactcagttccat

SEQ ID NO: 31481 - DNA, 80 bp, synthetic construct
  source 1..80: mol_type = other DNA
ttcttccatttgattgaatcaactactgaagcttgtgcatgtgtcacgtagttctcctgccatggttttcagctccatca

SEQ ID NO: 31482 - DNA, 80 bp, synthetic construct; identical to SEQ ID NO: 11761
  source 1..80: mol_type = other DNA

SEQ ID NO: 31483 - DNA, 80 bp, synthetic construct
  source 1..80: mol_type = other DNA
cactccagaccctgtttgcctgggtatcagcagcagaggctgcagaacagcaaatattgctgaacagcaaatgttgctgc

SEQ ID NO: 31484 - DNA, 80 bp, synthetic construct
  source 1..80: mol_type = other DNA
gagaaccactactctctttaaagctgtcagacagggacatttaagtgtgcagaggtttctgctgccttttgttcagctat

SEQ ID NO: 31485 - DNA, 80 bp, synthetic construct
  source 1..80: mol_type = other DNA
ctcagactgctgtgctggcaatgagtgaggcttcgtgggcatgggaccctccaagccaggtgcaggatataatctcctgg

SEQ ID NO: 31486 - DNA, 80 bp, synthetic construct; identical to SEQ ID NO: 11762
  source 1..80: mol_type = other DNA

SEQ ID NO: 31487 - DNA, 80 bp, synthetic construct
  source 1..80: mol_type = other DNA
agggtgagaaaattctgatctttataatcaaatcgtttctggaaaacaacggagcagatcacattgcagggagcacagcc

SEQ ID NO: 31488 - DNA, 80 bp, synthetic construct
  source 1..80: mol_type = other DNA
atgagttgagcattacaggctagctaaacaatgtcatttcgcatgtggttattcacatccactgcctttatttaaactct

SEQ ID NO: 31489 - DNA, 80 bp, synthetic construct
  source 1..80: mol_type = other DNA
agctgaaagtataatgtgctgaaccaatgggaataaagttagggagattgtgggtgaattcatgtgttttagggaacaaa

SEQ ID NO: 31490 - DNA, 80 bp, synthetic construct
  source 1..80: mol_type = other DNA
ctttttatttattttttcaatttgtaaaaaatgaatttccttcctttggaaataatgtttatcatttccaatcatcttcc

SEQ ID NO: 31491 - DNA, 80 bp, synthetic construct
  source 1..80: mol_type = other DNA
cggtgaaggaatctctaaaatgaaattgctgtaaccaagtgactagtgaacataaatggaaagggtgcccaaattcacat

SEQ ID NO: 31492 - DNA, 80 bp, synthetic construct
  source 1..80: mol_type = other DNA
ctataggtcctaaataagagtgacacgaaatgaaagggttgtgaataaagttggaacattgaacaacaagaaacctgctg

SEQ ID NO: 31493 - DNA, 80 bp, synthetic construct
  source 1..80: mol_type = other DNA
gtgtgtgtgtgtgtgtgtttctcaggtacaatctgatatccaggtttttttttttttactgcatttgggagagtgaattt

SEQ ID NO: 31494 - DNA, 80 bp, synthetic construct
  source 1..80: mol_type = other DNA
caggggaaaaaagatgacaaaactgaaaacatagccaaattacatttaaagaagacaggataaagagtttttcataatag

SEQ ID NO: 31495 - DNA, 80 bp, synthetic construct; identical to SEQ ID NO: 11763
  source 1..80: mol_type = other DNA

SEQ ID NO: 31496 - DNA, 80 bp, synthetic construct
  source 1..80: mol_type = other DNA
tctggtggaggtaatgcagatttatgctatgggggaaaccttctttaactcttcaaaaatgaactcaagacccttattta

SEQ ID NO: 31497 - DNA, 80 bp, synthetic construct
  source 1..80: mol_type = other DNA
gggctgacaaccaggatgcgcaatgaagacctggccacccctgaaatgtttccaaggacgtcactagtgaagacaggtaa

SEQ ID NO: 31498 - DNA, 80 bp, synthetic construct
  source 1..80: mol_type = other DNA
tctctttccattgctggaaatgattcctaataaaaaaaggggcagaaactgggagaattcacagccaaggaagaaagtgc

SEQ ID NO: 31499 - DNA, 80 bp, synthetic construct
  source 1..80: mol_type = other DNA
tccagaaaactcctctccattatcaatcagggcttccttcactgcctcatatccatgaaacaccactatgggattcatgc

SEQ ID NO: 31500 - DNA, 80 bp, synthetic construct; identical to SEQ ID NO: 11764
  source 1..80: mol_type = other DNA

SEQ ID NO: 31501 - DNA, 80 bp, synthetic construct
  source 1..80: mol_type = other DNA
tcagagtcccacaggtaatatgtagaagctccaaactggaatctctgctaatttaaactgatgcttgagcaattaatcaa

SEQ ID NO: 31502 - DNA, 80 bp, synthetic construct
  source 1..80: mol_type = other DNA
aactgctggtattaccaatatggaacgatgaagcaccacaaagttagaatcaggacattcagcatctcctggaagaacaa

SEQ ID NO: 31503 - DNA, 80 bp, synthetic construct
  source 1..80: mol_type = other DNA
tgccctgaacccacagatatttatttcacatcagccatcaaatgaatcttcagagaagttcaattttcatgaccattctg

SEQ ID NO: 31504 - DNA, 80 bp, synthetic construct; identical to SEQ ID NO: 11765
  source 1..80: mol_type = other DNA

SEQ ID NO: 31505 - DNA, 80 bp, synthetic construct
  source 1..80: mol_type = other DNA
gcacctgtagtcccagttactcgggggaggctgaggcaggagaatggtgtgaacctgggaggcagagcttgcagtgagtg

SEQ ID NO: 31506 - DNA, 80 bp, synthetic construct
  source 1..80: mol_type = other DNA
taaaaatagcagtcaaataacttaccctttgcaattggctggaggaacataaggcagacttacattggtgaaagatttgc

SEQ ID NO: 31507 - DNA, 80 bp, synthetic construct; identical to SEQ ID NO: 11766
  source 1..80: mol_type = other DNA

SEQ ID NO: 31508 - DNA, 80 bp, synthetic construct
  source 1..80: mol_type = other DNA
gtcttaacaagaagagaaggcttcaatggattctcttgtggtccttgtgctctgtctctcatgtttgcttctcctttcac

SEQ ID NO: 31509 - DNA, 80 bp, synthetic construct
  source 1..80: mol_type = other DNA
ccccactcctctcccagtgattggaaatatcctacagataggtattaaggacatcagcaaatccttaaccaatgtaagta

SEQ ID NO: 31510 - DNA, 80 bp, synthetic construct
  source 1..80: mol_type = other DNA
gttgccttttccagtctgtcagtgtcagaaatagtggaatgaaaccatgtattttgtgagtagagaaagatttgggtctt

SEQ ID NO: 31511 - DNA, 80 bp, synthetic construct
  source 1..80: mol_type = other DNA
caggtggatcggcaggttgagaaataatagacacacaagatagtgaaagctgggtccaggggggtcaccgccttctggtc

SEQ ID NO: 31512 - DNA, 80 bp, synthetic construct
  source 1..80: mol_type = other DNA
agtacatttgtatgtagaagtacagtatacggagataagaatttacaatatagtgtgtgcgtcagtaatttctaacagag

SEQ ID NO: 31513 - DNA, 80 bp, synthetic construct; identical to SEQ ID NO: 11768
  source 1..80: mol_type = other DNA

SEQ ID NO: 31514 - DNA, 80 bp, synthetic construct
  source 1..80: mol_type = other DNA
cattctggcagtccagcctggcactgtccttacacaatcctgcatgcaattttgtatttacaataatcgggagcatttca

SEQ ID NO: 31515 - DNA, 80 bp, synthetic construct
  source 1..80: mol_type = other DNA
tgttgtaaaggaaataactgtgggttcaggaccagcaaaagcagataagtggtagaaaagaagttatagacttccatttt

SEQ ID NO: 31516 - DNA, 80 bp, synthetic construct
  source 1..80: mol_type = other DNA
gaacacccctcgttgtgtaataattaccatatacagagagtaaagggctgcaattagtatattaagtcttataagcatga

SEQ ID NO: 31517 - DNA, 80 bp, synthetic construct; identical to SEQ ID NO: 11769
  source 1..80: mol_type = other DNA

SEQ ID NO: 31518 - DNA, 80 bp, synthetic construct
  source 1..80: mol_type = other DNA
gctataaactctgttagggggttaagaattaaggtgatttgtataatcctatagccatctaattttaggagtactgctgt

SEQ ID NO: 31519 - DNA, 80 bp, synthetic construct
  source 1..80: mol_type = other DNA
ttaaggtagactcgaaagtgctgataaatttctcaagcatcagtgtttgaataagcggagtttcaaattttggtctgctg

SEQ ID NO: 31520 - DNA, 80 bp, synthetic construct
  source 1..80: mol_type = other DNA
ttcaagaaattctcctgcctcagtcccccaagtagctagcattacaggcatgcaccaccatgctcagctaatttttgtat

SEQ ID NO: 31521 - DNA, 80 bp, synthetic construct
  source 1..80: mol_type = other DNA
ttgatgtgagtattaattgtaatctgcatagcaattgtctgaccattgccttgaacatcacaggccatctgagtggcaag

SEQ ID NO: 31522 - DNA, 80 bp, synthetic construct
  source 1..80: mol_type = other DNA
ctctcaaaggtctatggccctgtgttcactctgtattttggcctgaaacccatagtggtgctgcatggatatgaagcagt

SEQ ID NO: 31523 - DNA, 80 bp, synthetic construct
  source 1..80: mol_type = other DNA
cttcctctttcttgcctgggatctccctcctagtttcgtttctcttcctgttaggaattgttttcagcaatggaaagaaa

SEQ ID NO: 31524 - DNA, 80 bp, synthetic construct; identical to SEQ ID NO: 11650
  source 1..80: mol_type = other DNA

SEQ ID NO: 31525 - DNA, 80 bp, synthetic construct
  source 1..80: mol_type = other DNA
aatatagattttgagttcattttttgaaagagttaaagagcagtgtttttcccattacctattccagaacatgtcaccag

SEQ ID NO: 31526 - DNA, 80 bp, synthetic construct
  source 1..80: mol_type = other DNA
agtaatgacattctacagtttttattgcttaggcatatcttagtgcagttctcatcaattattatttctctgtaaacaca

SEQ ID NO: 31527 - DNA, 80 bp, synthetic construct
  source 1..80: mol_type = other DNA
ctgcattccctatgtatgatttggctctgtttcagttttgcttatctctttccaaccatatttatgaaattttggcttag

SEQ ID NO: 31528 - DNA, 80 bp, synthetic construct
  source 1..80: mol_type = other DNA
cacacaaactaacagatttccaactgttcaatgcctggccattcattcagagtacttttgattaaagtcactatttaggg

SEQ ID NO: 31529 - DNA, 80 bp, synthetic construct
  source 1..80: mol_type = other DNA
cgtgatgccccctaaaccacaaaaccagcaagttttcattagtgattttcaaaagcggaaggaatgtgtgaatagggtgt

SEQ ID NO: 31530 - DNA, 80 bp, synthetic construct; identical to SEQ ID NO: 11772
  source 1..80: mol_type = other DNA

SEQ ID NO: 31531 - DNA, 80 bp, synthetic construct
  source 1..80: mol_type = other DNA
gctctgttctgctcagcccacaggcagccagacttcaaggttatctcacttgttccctgaacatcgctgttatcctgttt

SEQ ID NO: 31532 - DNA, 80 bp, synthetic construct
  source 1..80: mol_type = other DNA
ggaagtggtaagtgtccatgaaattttcacaatttatgttcagagattgcagtaaagacaggtgtaagaaattataaaag

SEQ ID NO: 31533 - DNA, 80 bp, synthetic construct
  source 1..80: mol_type = other DNA
ataagagctatttatgacaaacccatagccaatatcatattgaatgggcaaaagctggaagcattccctttgaaaaccag

SEQ ID NO: 31534 - DNA, 80 bp, synthetic construct; identical to SEQ ID NO: 11773
  source 1..80: mol_type = other DNA

SEQ ID NO: 31535 - DNA, 80 bp, synthetic construct
  source 1..80: mol_type = other DNA
gtgacacaaatggaaaaaaattccgtgctcatgaatagaaagaatcaatactgtgaaaatagccatactgcccaaagtaa

SEQ ID NO: 31536 - DNA, 80 bp, synthetic construct
  source 1..80: mol_type = other DNA
acaatactacaaggctacagtaaccaaacagcatggtactgggaaaactggctagccatatgcagaaaacagaaactgga

SEQ ID NO: 31537 - DNA, 80 bp, synthetic construct
  source 1..80: mol_type = other DNA
acaaaagccaaaattgacaaatgggatctaattaaactacagtgcttctgcacagccaaagaaactgcatcagagtcaac

SEQ ID NO: 31538 - DNA, 80 bp, synthetic construct; identical to SEQ ID NO: 11774
  source 1..80: mol_type = other DNA

SEQ ID NO: 31539 - DNA, 80 bp, synthetic construct
  source 1..80: mol_type = other DNA
tagaaattccacttgactcagcaatcccattactgggtatatgcccaaaggattataaaccattctactataatgacaca

SEQ ID NO: 31540 - DNA, 80 bp, synthetic construct
  source 1..80: mol_type = other DNA
atggatgaagctggaaatcatcatcctcagcaactaacacaggaacagaaaaccaaactccacatgtttgcactcataaa

SEQ ID NO: 31541 - DNA, 80 bp, synthetic construct
  source 1..80: mol_type = other DNA
ccatggcacatgtatacctctgtaacaaacctgcacgctctgcacatgtatcctggaacttaaagtaaaataaaagaaaa

SEQ ID NO: 31542 - DNA, 80 bp, synthetic construct; identical to SEQ ID NO: 11775
  source 1..80: mol_type = other DNA

SEQ ID NO: 31543 - DNA, 80 bp, synthetic construct
  source 1..80: mol_type = other DNA
ggaacctgtctctactaaatatacaaaattagctggatgtggtggcacatgcctgtaatcccagctacctgggaagctca

SEQ ID NO: 31544 - DNA, 80 bp, synthetic construct
  source 1..80: mol_type = other DNA
ttttaacaaactaatctatgttaatttgatattagtttgttaacataacaaactaataatatgttaggcatattattcat

SEQ ID NO: 31545 - DNA, 80 bp, synthetic construct
  source 1..80: mol_type = other DNA
tcttgccctttccatctcagtgccttgctgtctactgactttgcagactgatgtgattccctctgaaacatgaattatta

SEQ ID NO: 31546 - DNA, 80 bp, synthetic construct
  source 1..80: mol_type = other DNA
cttttttgctgttaagggaatttgtaggtaagataatttctaaactactattatctgttaacaaatacagtgttttatat

SEQ ID NO: 31547 - DNA, 80 bp, synthetic construct; identical to SEQ ID NO: 11776
  source 1..80: mol_type = other DNA

SEQ ID NO: 31548 - DNA, 80 bp, synthetic construct
  source 1..80: mol_type = other DNA
ctgatttctaagcccattagctccctcatcaatgttttttctgctaaactccaaagccctgtttctgtaaagtactttgt

SEQ ID NO: 31549 - DNA, 80 bp, synthetic construct
  source 1..80: mol_type = other DNA
ttgggaccatagaagctgccaagaaacactgaatagggcaggggtgtttgatatctcagttgggatcctagctgatgaga

SEQ ID NO: 31550 - DNA, 80 bp, synthetic construct
  source 1..80: mol_type = other DNA
gaatttgaagtatctttgagcccctcccacttctaaaatactaattccatttcagaggctgcttgatagaaatcaatata

SEQ ID NO: 31551 - DNA, 80 bp, synthetic construct; identical to SEQ ID NO: 11777
  source 1..80: mol_type = other DNA

SEQ ID NO: 31552 - DNA, 80 bp, synthetic construct
  source 1..80: mol_type = other DNA
tttctcttagatctgcaataatttttctcctatcattgattacttcccgggaactcacaacaaattacttaaaaacgttg

SEQ ID NO: 31553 - DNA, 80 bp, synthetic construct
  source 1..80: mol_type = other DNA
aaaagcttagttatgtgactgcttgtgaatttgtgatttgttgactagttctgtgtttactaaggatgtttaactggtca

SEQ ID NO: 31554 - DNA, 80 bp, synthetic construct
  source 1..80: mol_type = other DNA
taaaggggagatcaccactgagcccacagaaatataaactaccatcagagaatagtataaacacctctatgctaataaac

SEQ ID NO: 31555 - DNA, 80 bp, synthetic construct; identical to SEQ ID NO: 11778
  source 1..80: mol_type = other DNA

SEQ ID NO: 31556 - DNA, 80 bp, synthetic construct
  source 1..80: mol_type = other DNA
aaagcttatccaccatgatcaagtagccttcatccctgagatgcaaggctgtttcaatatttgcaaatcaataaatgtaa

SEQ ID NO: 31557 - DNA, 80 bp, synthetic construct
  source 1..80: mol_type = other DNA
cccacagccaatatcatattgaatgggcagaagctggaaggattccctttgaaaaccagcacaagacaaggatgccctct

SEQ ID NO: 31558 - DNA, 80 bp, synthetic construct
  source 1..80: mol_type = other DNA
tctcaagttgataagcaacttcagtatagtctcaggttataaaatcaatgtgcaaaaatcacaaccatttctatacacca

SEQ ID NO: 31559 - DNA, 80 bp, synthetic construct; identical to SEQ ID NO: 11779
  source 1..80: mol_type = other DNA

SEQ ID NO: 31560 - DNA, 80 bp, synthetic construct
  source 1..80: mol_type = other DNA
agatgtggagaaataggaatgcttttacaccgttagtgggagtgtaaattagttcaaccattatggaagacagtgtgctg

SEQ ID NO: 31561 - DNA, 80 bp, synthetic construct
  source 1..80: mol_type = other DNA
tgctgatgaatgacagtctggataaagaaaatgtggcacatatacaccatggaatacagtgctgccataaaaaaggatga

SEQ ID NO: 31562 - DNA, 80 bp, synthetic construct
  source 1..80: mol_type = other DNA
tgtcagggggtgggggacttggggagggatagcattagaagaaatacctaatgtggatgacaggttgatgggtgcagcaa

SEQ ID NO: 31563 - DNA, 80 bp, synthetic construct
  source 1..80: mol_type = other DNA
gccctgtgatgaagatgggtgtcattattgcacacagtttatttgagaatgggaaagaatgacttaacctaggtgggttt

SEQ ID NO: 31564 - DNA, 80 bp, synthetic construct; identical to SEQ ID NO: 11780
  source 1..80: mol_type = other DNA

SEQ ID NO: 31565 - DNA, 80 bp, synthetic construct
  source 1..80: mol_type = other DNA
cttggcaaccttgtcaaaatccaattgactataaatgtgtgaaaggtttttttctgtgtgctctcaattgtactccattg

SEQ ID NO: 31566 - DNA, 80 bp, synthetic construct
  source 1..80: mol_type = other DNA
agaatacacttgtcaattttctcaaaggagccaatggggattttgacacgattgcattaaatcagtagatcagggaatta

SEQ ID NO: 31567 - DNA, 80 bp, synthetic construct; identical to SEQ ID NO: 11781
  source 1..80: mol_type = other DNA

SEQ ID NO: 31568 - DNA, 80 bp, synthetic construct
  source 1..80: mol_type = other DNA
tattcatctgtttatggacatttgcattgtttccaacctttggctcttatagataatcttgctttgatcatttgtgtatg

SEQ ID NO: 31569 - DNA, 80 bp, synthetic construct
  source 1..80: mol_type = other DNA
tgtggcattttatattccttccagcaatgtagaaggatttctattttccacatagttgctaatacttgtaactttctgta

SEQ ID NO: 31570 - DNA, 80 bp, synthetic construct
  source 1..80: mol_type = other DNA
ctcctgcctcagcccccagagtagctgggattacaggcatgtgtcaccatacctggttaattgttatatttttggtagag

SEQ ID NO: 31571 - DNA, 80 bp, synthetic construct
  source 1..80: mol_type = other DNA
cttttaatatattattacccatttgtatatcttctttggataaatgccattcaagtacattttctgtttaaattaagttg

SEQ ID NO: 31572 - DNA, 80 bp, synthetic construct; identical to SEQ ID NO: 11782
  source 1..80: mol_type = other DNA

SEQ ID NO: 31573 - DNA, 80 bp, synthetic construct
  source 1..80: mol_type = other DNA
actctttcctcagattgaatggtctaggcacccttgatgaaagtaaatttgccatagatctttaggtttatttcgtgatt

SEQ ID NO: 31574 - DNA, 80 bp, synthetic construct
  source 1..80: mol_type = other DNA
catacacaaggaagctggaaacttgcacgagtgaaagctggtagtaaagaactacctgtgaccaggcaagttcaaaatgg

SEQ ID NO: 31575 - DNA, 80 bp, synthetic construct; identical to SEQ ID NO: 11783
  source 1..80: mol_type = other DNA

SEQ ID NO: 31576 - DNA, 80 bp, synthetic construct
  source 1..80: mol_type = other DNA
aactttcccatttctggaaaaaagaccattggtattgtggtagggattgcctgagtttttagatcactttgaggagtact

SEQ ID NO: 31577 - DNA, 80 bp, synthetic construct
  source 1..80: mol_type = other DNA
tcttctgttgcaagggtctggtttagtttaaaaggcaagtttatcttaaatttttttatttagttatgaccattgaggat

SEQ ID NO: 31578 - DNA, 80 bp, synthetic construct
  source 1..80: mol_type = other DNA
atccatgaactcgtcatttacattaggtatatctcctaatgctatccctccccactctgccaccccacaacaggccccag

SEQ ID NO: 31579 - DNA, 80 bp, synthetic construct; identical to SEQ ID NO: 11784
  source 1..80: mol_type = other DNA

SEQ ID NO: 31580 - DNA, 80 bp, synthetic construct
  source 1..80: mol_type = other DNA
gacttccacaatggttgaactagtttacagtcccaccaacagtgtaaaagtgttcctatttctccacatcctctccagca

SEQ ID NO: 31581 - DNA, 80 bp, synthetic construct
  source 1..80: mol_type = other DNA
atatcttttgcccactttttgatggggttgtttgttttttatcttgtaaatttgtttgagttctctgtagatcctggata

SEQ ID NO: 31582 - DNA, 80 bp, synthetic construct
  source 1..80: mol_type = other DNA
gacaagaagtccttgcccatgcctatgtcctgaatagtattgcctaggttttcttctagggtttttatggttttaagtct

SEQ ID NO: 31583 - DNA, 80 bp, synthetic construct
  source 1..80: mol_type = other DNA
atcagatagttgtagatatgtggccttatttctgagggctctgttctgttccattggtctacatctctgttttggtacca

SEQ ID NO: 31584 - DNA, 80 bp, synthetic construct; identical to SEQ ID NO: 11785
  source 1..80: mol_type = other DNA

SEQ ID NO: 31585 - DNA, 80 bp, synthetic construct
  source 1..80: mol_type = other DNA
gctctctgtttgtctgttattggtgtataagaatgcttgtgatttttgcacattgattttgtatcctgagactttgctga

SEQ ID NO: 31586 - DNA, 80 bp, synthetic construct
  source 1..80: mol_type = other DNA
cactgtgttgaataggagtggtgagagagggcatccctgacttgtgccagttttcaaagggattacttccagtttttgtc

SEQ ID NO: 31587 - DNA, 80 bp, synthetic construct
  source 1..80: mol_type = other DNA
gtcattgattctgtttatatgctggattacatttattgatttgcctatgttgtaccagccttgcatcccagggatgaagc

SEQ ID NO: 31588 - DNA, 80 bp, synthetic construct; identical to SEQ ID NO: 11786
  source 1..80: mol_type = other DNA

SEQ ID NO: 31589 - DNA, 80 bp, synthetic construct
  source 1..80: mol_type = other DNA
tatccatttcttccagattttctagtttatttttgtacaggtgtttatagtattctctgatggtagtttgtatttctgtg

SEQ ID NO: 31590 - DNA, 80 bp, synthetic construct
  source 1..80: mol_type = other DNA
tgtaattgagtttccattgtttccatggaatgcaaaaattccatgttttgagtgagtttcttaatcctgagttctagttt

SEQ ID NO: 31591 - DNA, 80 bp, synthetic construct; identical to SEQ ID NO: 11787
  source 1..80: mol_type = other DNA

SEQ ID NO: 31592 - DNA, 80 bp, synthetic construct
  source 1..80: mol_type = other DNA
taggatagttagctgttcttgttgaattgatccctttacctttatgtaatggccttctttgtcccttttgttctttgttg

SEQ ID NO: 31593 - DNA, 80 bp, synthetic construct
  source 1..80: mol_type = other DNA
ctttatccaatttgccactctgtgtcttttaattggagcatttaacccatttacatttaacattaatattgttatgtgtg

SEQ ID NO: 31594 - DNA, 80 bp, synthetic construct
  source 1..80: mol_type = other DNA
gcaggtctggtggtgacaaaatctctcagcatttgcttgtgggtaaaggattttgtttctccttcacttatgaagcttag

SEQ ID NO: 31595 - DNA, 80 bp, synthetic construct
  source 1..80: mol_type = other DNA
cttaacattttttccttcatttcaactttggtgaatctgacaattatgtgtcttggagctgctcttctcgaggagtatct

SEQ ID NO: 31596 - DNA, 80 bp, synthetic construct; identical to SEQ ID NO: 11788
  source 1..80: mol_type = other DNA

SEQ ID NO: 31597 - DNA, 80 bp, synthetic construct
  source 1..80: mol_type = other DNA
cttttttcaaggttttttacttctttgccataggttcaaacttcctcctttagctcagactagtttgattgtctgaagac

SEQ ID NO: 31598 - DNA, 80 bp, synthetic construct
  source 1..80: mol_type = other DNA
atgatggtgacatacagatgggattttggtgtggatgtcctttctgtttgttagctttccttctaacagtcaggaccctc

SEQ ID NO: 31599 - DNA, 80 bp, synthetic construct
  source 1..80: mol_type = other DNA
aggtgtcagtctgcccctaatggggggtgcctcccagttaggctacaaggggatcagggacccacttgaggaggcagtct

SEQ ID NO: 31600 - DNA, 80 bp, synthetic construct; identical to SEQ ID NO: 11789
  source 1..80: mol_type = other DNA

SEQ ID NO: 31601 - DNA, 80 bp, synthetic construct
  source 1..80: mol_type = other DNA
gaccttattttccagatgccttctgtccttggctaagaaagggaattctctgaccccttgcacttcccaggtgaggtgat

SEQ ID NO: 31602 - DNA, 80 bp, synthetic construct
  source 1..80: mol_type = other DNA
cctattcagccatcttggctccaaatgttctcaacttttattttgaagtgcacgttcatgtgtcttacataggtatattg

SEQ ID NO: 31603 - DNA, 80 bp, synthetic construct
  source 1..80: mol_type = other DNA
ttgcctttatatctctctaccctctatagtaattccttgtgtattttttccatctttgtgtcccacttttatatgagaac

SEQ ID NO: 31604 - DNA, 80 bp, synthetic construct; identical to SEQ ID NO: 11790
  source 1..80: mol_type = other DNA

SEQ ID NO: 31605 - DNA, 80 bp, synthetic construct
  source 1..80: mol_type = other DNA
ttattttttggctttttaatcatatccattttgattggcatgagatgatatctcattgtggttttgatttgcatttctct

SEQ ID NO: 31606 - DNA, 80 bp, synthetic construct
  source 1..80: mol_type = other DNA
gttggattcacagtttgcaaatattttgtcccattctgtaggttgtctgtttattctgttgatagtttctcttgctgtgc

SEQ ID NO: 31607 - DNA, 80 bp, synthetic construct
  source 1..80: mol_type = other DNA
attaatccatttcgagttaattattgtatatggttcaaggaagtgtttcagtttcattctgcatatggctagtcagttat

SEQ ID NO: 31608 - DNA, 80 bp, synthetic construct; identical to SEQ ID NO: 11791
  source 1..80: mol_type = other DNA

SEQ ID NO: 31609 - DNA, 80 bp, synthetic construct
  source 1..80: mol_type = other DNA
aagcctgaactgtttttccatttgtttgtgtcatctatgattttgttcatcagtattttgtagctctccttgtagagacc

SEQ ID NO: 31610 - DNA, 80 bp, synthetic construct
  source 1..80: mol_type = other DNA
tatgtcagttccaggagtttttggaaagttctttagggttttctaggtctgaattgggtcttctaggtctgagatgggtc

SEQ ID NO: 31611 - DNA, 80 bp, synthetic construct
  source 1..80: mol_type = other DNA
ttctacttctactagtaggagatgggccttgcaatcttgaagacagtagaaggatgggtcttatttttaatccaacttcc

SEQ ID NO: 31612 - DNA, 80 bp, synthetic construct; identical to SEQ ID NO: 11792
  source 1..80: mol_type = other DNA

SEQ ID NO: 31613 - DNA, 80 bp, synthetic construct
  source 1..80: mol_type = other DNA
gtgatctgatttttttctctagctgcctttaaaattattttttagccttgactttggacagcctggtgagtaaatgcctt

SEQ ID NO: 31614 - DNA, 80 bp, synthetic construct
  source 1..80: mol_type = other DNA
ttcctaggtttactccttttaaataatcagatatttcttgaagactgttcatttattaaaattattttttctttattttt

SEQ ID NO: 31615 - DNA, 80 bp, synthetic construct
  source 1..80: mol_type = other DNA
cctggactgctttagtagtttgtttgcattaattttcaaccctgccttggatcactgagcttacttgcagtccatatttt

SEQ ID NO: 31616 - DNA, 80 bp, synthetic construct
  source 1..80: mol_type = other DNA
ctggtttcttcttatttggagaggctgccgcttctgatttttgaaattatttttgtgcagatagaattgtttttctctcc

SEQ ID NO: 31617 - DNA, 80 bp, synthetic construct; identical to SEQ ID NO: 11793
  source 1..80: mol_type = other DNA

SEQ ID NO: 31618 - DNA, 80 bp, synthetic construct
  source 1..80: mol_type = other DNA
aggcactagcaccagcactgagagacaactgatttttgcattgatcttgtaccctgaaattatgctgaaatcatttatta

SEQ ID NO: 31619 - DNA, 80 bp, synthetic construct
  source 1..80: mol_type = other DNA
taatagtagtaaaaatggacatccttgttttttttcttttctttctgattttaagttacaagttttagtctttcacaatt

SEQ ID NO: 31620 - DNA, 80 bp, synthetic construct
  source 1..80: mol_type = other DNA
tctgatatggtgtagtgcactgattgactttcttgttgaaccacttttgaatttctgggataaatctcacttgcttattg

SEQ ID NO: 31621 - DNA, 80 bp, synthetic construct; identical to SEQ ID NO: 11794
  source 1..80: mol_type = other DNA

SEQ ID NO: 31622 - DNA, 80 bp, synthetic construct
  source 1..80: mol_type = other DNA
aattcatattaataattccatgaaatgtgtccatagtaacacaagagcagaagatgggccttgtaaaggtggcccaccac

SEQ ID NO: 31623 - DNA, 80 bp, synthetic construct
  source 1..80: mol_type = other DNA
ccaaagagaagtgtccagagacgtggatgatgcgacaagaaatgttgtagaaccacacccccacctcaaatgataactct

SEQ ID NO: 31624 - DNA, 80 bp, synthetic construct
  source 1..80: mol_type = other DNA
catgtttttgcatgtgtcagatttttcttcctttctaagggtgaataatattccgttgtatgtataaaccaagtttgctt

SEQ ID NO: 31625 - DNA, 80 bp, synthetic construct
  source 1..80: mol_type = other DNA
tttttgtatctttagtagaaactgagtttcaccatgttggccaggctggtctcaaactcctgaccctgtgatccacccac

SEQ ID NO: 31626 - DNA, 80 bp, synthetic construct
  source 1..80: mol_type = other DNA
attttgttgaggattttcgcatggatgttcatcagggatattggcctgaaattttcttttttttgttttatgtctgccaa

SEQ ID NO: 31627 - DNA, 80 bp, synthetic construct; identical to SEQ ID NO: 11687
  source 1..80: mol_type = other DNA

SEQ ID NO: 31628 - DNA, 80 bp, synthetic construct; identical to SEQ ID NO: 11796
  source 1..80: mol_type = other DNA

SEQ ID NO: 31629 - DNA, 80 bp, synthetic construct
  source 1..80: mol_type = other DNA
ggacatttagtgctataattttccctctaaacactgctttagctgtgtcttagagattctggtacactgtgtccttgttc

SEQ ID NO: 31630 - DNA, 80 bp, synthetic construct
  source 1..80: mol_type = other DNA
gctttaatttctgttcttttgtatttgctgatgggtgttttacttccaattatgtggtcaattttagaataagtgtgaag

SEQ ID NO: 31631 - DNA, 80 bp, synthetic construct
  source 1..80: mol_type = other DNA
ccatctattattgtgtgggagcctaagcctctttgtaggtctttaagaacttgctttatgaatctgggtgctcctgtatt

SEQ ID NO: 31632 - DNA, 80 bp, synthetic construct
  source 1..80: mol_type = other DNA
aaatattcctccatccctttattttgagcctatgtgtgtcttttcacgtgagatgggtctcctgaatacagcacattgat

SEQ ID NO: 31633 - DNA, 80 bp, synthetic construct
  source 1..80: mol_type = other DNA
cggtctttacaaaatttggtatgtttttgcagtggctgttcccagttgatcctttccatatttagtgtttccttcaggag

SEQ ID NO: 31634 - DNA, 80 bp, synthetic construct
  source 1..80: mol_type = other DNA
agtatcattgtgggtgttttctgtatttcctgaatttgaatgttggtctgtcttgctagattgtggaagttctcctggat

SEQ ID NO: 31635 - DNA, 80 bp, synthetic construct
  source 1..80: mol_type = other DNA
atttcattaagttgaccttgaatctctgatatcctttcttctgctttatcaatttggctattgatatttatttatgcttc

SEQ ID NO: 31636 - DNA, 80 bp, synthetic construct
  source 1..80: mol_type = other DNA
gcctacttctgtcaattcatcaaattctttctctgtccagttttgtccccttgctggcaaggagttgtgattctttggag

SEQ ID NO: 31637 - DNA, 80 bp, synthetic construct
  source 1..80: mol_type = other DNA
ctgtttgctagtttttttcctaacagtgaggcccttctgctgcaggtctgctggagtttgcttgaggtccactccaaacc

SEQ ID NO: 31638 - DNA, 80 bp, synthetic construct
  source 1..80: mol_type = other DNA
ctttagagccagcaggcaggaacatttaagtctgccgaagctgcacccactgccaccccttcttccaggttctcagtaca

SEQ ID NO: 31639 - DNA, 80 bp, synthetic construct
  source 1..80: mol_type = other DNA
gtttacactgtgaggggaaaaccacctactcaagcctcaacaatggcagactcccctcacccccccaccccccccaagct

SEQ ID NO: 31640 - DNA, 80 bp, synthetic construct; identical to SEQ ID NO: 11799
  source 1..80: mol_type = other DNA

SEQ ID NO: 31641 - DNA, 80 bp, synthetic construct
  source 1..80: mol_type = other DNA
aatcccttgggcttccaaggtgagacaacattcctccctgcttcagtttagcctccatgcactgcacctactgtctaaac

SEQ ID NO: 31642 - DNA, 80 bp, synthetic construct
  source 1..80: mol_type = other DNA
cttttttgaatatttgtggattttttttcattgaggtctgttatttgagagttattatgtccctttggtggtgccatatt

SEQ ID NO: 31643 - DNA, 80 bp, synthetic construct
  source 1..80: mol_type = other DNA
gatgcattgtgatagtatctgtgtagtttctctagctatggccaatatcagcaataattttgggtgcctcagtggcctag

SEQ ID NO: 31644 - DNA, 80 bp, synthetic construct; identical to SEQ ID NO: 11800
  source 1..80: mol_type = other DNA

SEQ ID NO: 31645 - DNA, 80 bp, synthetic construct; identical to SEQ ID NO: 11691
  source 1..80: mol_type = other DNA

SEQ ID NO: 31646 - DNA, 80 bp, synthetic construct
  source 1..80: mol_type = other DNA
gggagaggactgtctttgtctacacatgttgagagaatctagtctatttcagtggtgttgattacacaatattcaacatg

SEQ ID NO: 31647 - DNA, 80 bp, synthetic construct
  source 1..80: mol_type = other DNA
acacacatcacttggagactctaaaagcatcattaatttattgctgctggccttggggctggttaaaaagtaatacgttt

SEQ ID NO: 31648 - DNA, 80 bp, synthetic construct
  source 1..80: mol_type = other DNA
tcatcattgttctttctcttcactttgtatatttttgtttattcctgcactactgcaccctagaacaagttgtctgttgc

SEQ ID NO: 31649 - DNA, 80 bp, synthetic construct; identical to SEQ ID NO: 11801
  source 1..80: mol_type = other DNA

SEQ ID NO: 31650 - DNA, 80 bp, synthetic construct
  source 1..80: mol_type = other DNA
caaagcagcagagagtcaagtgccttcctttttcccactaaatttagtatacagaccttcattttgatgattaaatccca

SEQ ID NO: 31651 - DNA, 80 bp, synthetic construct
  source 1..80: mol_type = other DNA
aggcaagcatggaataagggagtaggaaataaagtttgggcaagttggtctacagcctctgctatacaagcagtattttt

SEQ ID NO: 31652 - DNA, 80 bp, synthetic construct; identical to SEQ ID NO: 11802
  source 1..80: mol_type = other DNA

SEQ ID NO: 31653 - DNA, 80 bp, synthetic construct
  source 1..80: mol_type = other DNA
tcattatttaaacttttgtgcttccagctgtaatctgtttcaaactaatggtgattacaatgggatatcttggcctggca

SEQ ID NO: 31654 - DNA, 80 bp, synthetic construct
  source 1..80: mol_type = other DNA
ctactcgaggggctgaggcactggaatcaattgaacccaggtggtggaggttgtagtgagccaagattttgccactatac

SEQ ID NO: 31655 - DNA, 80 bp, synthetic construct
  source 1..80: mol_type = other DNA
gtgtctggatttatggcaggaagagacaagataaattggcctgggattgcatgttggttttattatgagaaggccatttt

SEQ ID NO: 31656 - DNA, 80 bp, synthetic construct
  source 1..80: mol_type = other DNA
agtgatctgcctgagaaaattcctagtccaataagtactctaaaaagttagattcataagaaaggtgattctgtttacta

SEQ ID NO: 31657 - DNA, 80 bp, synthetic construct; identical to SEQ ID NO: 11803
  source 1..80: mol_type = other DNA

SEQ ID NO: 31658 - DNA, 80 bp, synthetic construct
  source 1..80: mol_type = other DNA
taaacatattacccaacagatggttcttcagcccacatctcttctctccctcccccatctagtgatcctcagtgtctatt

SEQ ID NO: 31659 - DNA, 80 bp, synthetic construct
  source 1..80: mol_type = other DNA
ggctgcataacattccattatgtatgtactagtctgttctcatgctgctaataaagacatacctgagacagggtaactca

SEQ ID NO: 31660 - DNA, 80 bp, synthetic construct; identical to SEQ ID NO: 11804
  source 1..80: mol_type = other DNA

SEQ ID NO: 31661 - DNA, 80 bp, synthetic construct
  source 1..80: mol_type = other DNA
tttccacagtggctgaactagtttgcatacccaccaacagtgtaaaagcatttccatttctctgcaacctcaccagcatc

SEQ ID NO: 31662 - DNA, 80 bp, synthetic construct
  source 1..80: mol_type = other DNA
gttcatgtcttttgcccaattttaattgattttttttgttttttttttttgcttgttgatttgtttaagttttttataga

SEQ ID NO: 31663 - DNA, 80 bp, synthetic construct
  source 1..80: mol_type = other DNA
caaaaggtcagaagagaaaaatttatcaaggatgaaaagttaatcagtgtcccttaaatcctcccaatattggtatttgg

SEQ ID NO: 31664 - DNA, 80 bp, synthetic construct; identical to SEQ ID NO: 11805
  source 1..80: mol_type = other DNA

SEQ ID NO: 31665 - DNA, 80 bp, synthetic construct
  source 1..80: mol_type = other DNA
actgctagatacagggttatggaatttcaggacatgagaattaaagggaaaatcacaaaaactttcagagctgtaccagg

SEQ ID NO: 31666 - DNA, 80 bp, synthetic construct
  source 1..80: mol_type = other DNA
ttctcagaaaaatactgaagaatgttcttcattcaaatgcctgaaaccttgttagagaaagtcctgagctccagcaatca

SEQ ID NO: 31667 - DNA, 80 bp, synthetic construct; identical to SEQ ID NO: 11700
  source 1..80: mol_type = other DNA

SEQ ID NO: 31668 - DNA, 80 bp, synthetic construct
  source 1..80: mol_type = other DNA
catctaaatatattctggaaaaagcagtgtggaaaagtgagtgtgtctatctgagggtgtgttcaaatatgaggggaaga

SEQ ID NO: 31669 - DNA, 80 bp, synthetic construct
  source 1..80: mol_type = other DNA
agagaataccattgtgatttgtgacccctcccacacacagatgcaccaatacagtcatatatatgcataaatctgatagt

SEQ ID NO: 31670 - DNA, 80 bp, synthetic construct
  source 1..80: mol_type = other DNA
tacatatcttttaattttttttaatttttatgggtacaaagtaggtatatatcaatatgtttgggggtacatgagatgtt

SEQ ID NO: 31671 - DNA, 80 bp, synthetic construct; identical to SEQ ID NO: 11807
  source 1..80: mol_type = other DNA

SEQ ID NO: 31672 - DNA, 80 bp, synthetic construct
  source 1..80: mol_type = other DNA
ctgaatagaactacattgcgtatatgtactacattttctttatacatttgtctgttgatgcatatttaggttgtttcaaa

SEQ ID NO: 31673 - DNA, 80 bp, synthetic construct
  source 1..80: mol_type = other DNA
agaggtcacactaatttgcattcccaccaacactgtacgagggtccacttatctccacatcctcactagcatttgttatt

SEQ ID NO: 31674 - DNA, 80 bp, synthetic construct
  source 1..80: mol_type = other DNA
gcccacttttggattggattattagattttttttctatagagttgcttgaatttcttatatattctgattactaatctct

SEQ ID NO: 31675 - DNA, 80 bp, synthetic construct; identical to SEQ ID NO: 11808
  source 1..80: mol_type = other DNA

SEQ ID NO: 31676 - DNA, 80 bp, synthetic construct
  source 1..80: mol_type = other DNA
cctctaataaagccatacacaagactgggtaatttataaaggaaagaagtttaatggactcacagttccacatggctgga

SEQ ID NO: 31677 - DNA, 80 bp, synthetic construct
  source 1..80: mol_type = other DNA
gattcaatgatccctacctggcctcccccttgacttgtggggattatttcaattcaagatgagatttggggtggggacac

SEQ ID NO: 31678 - DNA, 80 bp, synthetic construct
  source 1..80: mol_type = other DNA
ataatgtgattcctccagttttgttccttttgcttaggatagttttgactattctgggtcttttgtgggtccatatacat

SEQ ID NO: 31679 - DNA, 80 bp, synthetic construct
  source 1..80: mol_type = other DNA
aatttctttcctcagtgttttatagttttcattatagagatctttcaattctttggttaaattaatcctaggtatttaaa

SEQ ID NO: 31680 - DNA, 80 bp, synthetic construct
  source 1..80: mol_type = other DNA
agtttttcctactataaggttatatcatctgcacacaaggatattttgacttcttcctttccaattttgatagcctttat

SEQ ID NO: 31681 - DNA, 80 bp, synthetic construct
  source 1..80: mol_type = other DNA
ttatgttgaggtatgttccttctatctcaagttttttttatgaattttcatcaagaagggatgttaaattttatcaaata

SEQ ID NO: 31682 - DNA, 80 bp, synthetic construct
  source 1..80: mol_type = other DNA
ttggtttgctagtgttttgttgaagatttttgcattagtgttcatcaggtgtattggcctgtagtttttttttttttttt

SEQ ID NO: 31683 - DNA, 80 bp, synthetic construct
  source 1..80: mol_type = other DNA
ctagccagtcttgggattttctctactgggatgattttatttctcgtttgatctttgtgctggttattgcatgttcagat

SEQ ID NO: 31684 - DNA, 80 bp, synthetic construct; identical to SEQ ID NO: 11810
  source 1..80: mol_type = other DNA

SEQ ID NO: 31685 - DNA, 80 bp, synthetic construct
  source 1..80: mol_type = other DNA
caattttctccatttttgatataagctcttgtagctataaacttccctcttagtactggtcttgctgtaacccctaggtt

SEQ ID NO: 31686 - DNA, 80 bp, synthetic construct
  source 1..80: mol_type = other DNA
gtttccaaaattcctcttgttattggttgctggttttattacattgtggtcagagaagatgcttgatattatttcagttt

SEQ ID NO: 31687 - DNA, 80 bp, synthetic construct
  source 1..80: mol_type = other DNA
tgtttccttgttgattttctatctggatgacctgtccaatgctgaaagtggggtgttgaagtctccaggtattattatat

SEQ ID NO: 31688 - DNA, 80 bp, synthetic construct; identical to SEQ ID NO: 11811
  source 1..80: mol_type = other DNA

SEQ ID NO: 31689 - DNA, 80 bp, synthetic construct
  source 1..80: mol_type = other DNA
aaggacttacccatgcccctttgttatttgttttctggttgttttgtggacttctcttccttctttcatttcttcctgtc

SEQ ID NO: 31690 - DNA, 80 bp, synthetic construct
  source 1..80: mol_type = other DNA
cttcatgattcatatacccctgaattgctacaacaaatgtgccatttttctccttttccatcagtttttacttgtgtctt

SEQ ID NO: 31691 - DNA, 80 bp, synthetic construct
  source 1..80: mol_type = other DNA
gacattaaattcagaaactatctcattcccaaggtaagtttgtttctcctacactgcaactccatgttttcgaagtcccc

SEQ ID NO: 31692 - DNA, 80 bp, synthetic construct; identical to SEQ ID NO: 11812
  source 1..80: mol_type = other DNA

SEQ ID NO: 31693 - DNA, 80 bp, synthetic construct
  source 1..80: mol_type = other DNA
atttgtttggggtttcttttatttaaccaggaatgttgtgaatttgttgtcatggctttcgagtctttggttttccctag

SEQ ID NO: 31694 - DNA, 80 bp, synthetic construct
  source 1..80: mol_type = other DNA
tttcttattttccatttctcatgggcttaatgtctctttatcacattcattattgcattagctagaatttctaggagagc

SEQ ID NO: 31695 - DNA, 80 bp, synthetic construct
  source 1..80: mol_type = other DNA
tcataattgtgtgtaaaatcttgtcaaatcaacactctgcatctatttatataattgtgtgttagtccatttccattgct

SEQ ID NO: 31696 - DNA, 80 bp, synthetic construct; identical to SEQ ID NO: 11813
  source 1..80: mol_type = other DNA

SEQ ID NO: 31697 - DNA, 80 bp, synthetic construct
  source 1..80: mol_type = other DNA
agtatgcacatagagatgaactggccttcttcatattgtttaggacttcagtgtttacattcacaagagatttggtttat

SEQ ID NO: 31698 - DNA, 80 bp, synthetic construct; identical to SEQ ID NO: 11720
  source 1..80: mol_type = other DNA

SEQ ID NO: 31699 - DNA, 80 bp, synthetic construct
  source 1..80: mol_type = other DNA
tgaaaattgagtgtcagtgttagcttagctctctgaggttctcctacctttggaagcttgagaccaatttttgtcttgac

SEQ ID NO: 31700 - DNA, 80 bp, synthetic construct; identical to SEQ ID NO: 11814
  source 1..80: mol_type = other DNA

SEQ ID NO: 31701 - DNA, 80 bp, synthetic construct
  source 1..80: mol_type = other DNA
aaacttacttcttctcctataactaattaaatgagaaatatactgaagaatcaggcacgagttgccagtctccccagttc

SEQ ID NO: 31702 - DNA, 80 bp, synthetic construct
  source 1..80: mol_type = other DNA
tcttcgtggaatagcccagtgcagaaaaaagcagcactgtgtggccaattctaccctctttacaaatcagatacatgtgt

SEQ ID NO: 31703 - DNA, 80 bp, synthetic construct
  source 1..80: mol_type = other DNA
tttctgttgcaattcttgacatctgctattgtagcatgatagcagtcacaaacaatctgcaaatgaatgaggattgatat

SEQ ID NO: 31704 - DNA, 80 bp, synthetic construct; identical to SEQ ID NO: 11815
  source 1..80: mol_type = other DNA

SEQ ID NO: 31705 - DNA, 80 bp, synthetic construct
  source 1..80: mol_type = other DNA
agtaatagtggtcatgcttcaatgtctataaatttctacttattcaagtaacatttgttgaaataaatctgctttggtat

SEQ ID NO: 31706 - DNA, 80 bp, synthetic construct
  source 1..80: mol_type = other DNA
atatgtacatatggcagtgtgtatacatatctactctgatatctgtccatccatctatttacacctcaatacttcagtat

SEQ ID NO: 31707 - DNA, 80 bp, synthetic construct
  source 1..80: mol_type = other DNA
aagaaataagcacatagtttcagtatcctgttactttccatctcctgtaatcaagaagagtccatttcctctgtttcctt

SEQ ID NO: 31708 - DNA, 80 bp, synthetic construct; identical to SEQ ID NO: 11816
  source 1..80: mol_type = other DNA

SEQ ID NO: 31709 - DNA, 80 bp, synthetic construct
  source 1..80: mol_type = other DNA
tctatggcatggtacttcaaggcagaacaccctgtttcccaagtcacacatccaatagttttatctttcattaatgatcc

SEQ ID NO: 31710 - DNA, 80 bp, synthetic construct
  source 1..80: mol_type = other DNA
aaatgaagacaaacaaactgcatggcaatgacaagaactcaatagttttatccttgccactacacttgttaccatcccag

SEQ ID NO: 31711 - DNA, 80 bp, synthetic construct
  source 1..80: mol_type = other DNA
agccactagtttccaagcttgatgaaaaggaggacagattcagaaggttgcatccaagtatccaagtactcaggacttca

SEQ ID NO: 31712 - DNA, 80 bp, synthetic construct
  source 1..80: mol_type = other DNA
cttcaaccttcatggcttctttacagctcagttcatctatgtctcttgtttctagggcacaaccatattaatttccctga

SEQ ID NO: 31713 - DNA, 80 bp, synthetic construct
  source 1..80: mol_type = other DNA
acttttttgatccattggaacttacatgtgcctcctctgcagtggtacaattactctttgtacatgatcaagagcactgt

SEQ ID NO: 31714 - DNA, 80 bp, synthetic construct; identical to SEQ ID NO: 11817
  source 1..80: mol_type = other DNA

SEQ ID NO: 31715 - DNA, 80 bp, synthetic construct
  source 1..80: mol_type = other DNA
cacttctgagtttggaaagcagagtaaacagatcattgtagttcaataggactgaggctgtgatatggaaagaacaggct

SEQ ID NO: 31716 - DNA, 80 bp, synthetic construct
  source 1..80: mol_type = other DNA
taatgagccacaggagcaggacattggctctaaataaaggatattagaacctttgccaaatgaccatggatgggatgagg

SEQ ID NO: 31717 - DNA, 80 bp, synthetic construct
  source 1..80: mol_type = other DNA
tgtctgctttatatctgccactgtagataccaagacaacaagaaaagaaaccttccttcaagcattcacatttagcacat

SEQ ID NO: 31718 - DNA, 80 bp, synthetic construct; identical to SEQ ID NO: 11818
  source 1..80: mol_type = other DNA

SEQ ID NO: 31719 - DNA, 80 bp, synthetic construct
  source 1..80: mol_type = other DNA
ataaatcagtaattattattctaggtgatccatgctgtctgtttcttctgccataacaaaatatccaagactaggcaatt

SEQ ID NO: 31720 - DNA, 80 bp, synthetic construct
  source 1..80: mol_type = other DNA
cagagccctcctgacttattcacttcctaaaaggagccatctctttagtaatgttgcattgggattatgtgtcaacatat

SEQ ID NO: 31721 - DNA, 80 bp, synthetic construct
  source 1..80: mol_type = other DNA
gttcatcttggctaaaaggagcagcatgatataaaatttgaaacctcatggtgtgttggagactgatgatgagtggctat

SEQ ID NO: 31722 - DNA, 80 bp, synthetic construct; identical to SEQ ID NO: 11819
  source 1..80: mol_type = other DNA

SEQ ID NO: 31723 - DNA, 80 bp, synthetic construct
  source 1..80: mol_type = other DNA
gtgcctgttaagatctgatattaggtgaagagtaagtatgtccattcatttttcagttgcctatacatccatccattcat

SEQ ID NO: 31724 - DNA, 80 bp, synthetic construct
  source 1..80: mol_type = other DNA
agagacagtgtttgtcactgtcacagttacgcatgaggagtaactgctctctgtgtttgctattttcaggaaaacggatt

SEQ ID NO: 31725 - DNA, 80 bp, synthetic construct
  source 1..80: mol_type = other DNA
tcctgacctccattttacagaactttaacctgaaatctctggttgacccaaagaaccttgacaccactccagttgtcaat

SEQ ID NO: 31726 - DNA, 80 bp, synthetic construct; identical to SEQ ID NO: 11820
  source 1..80: mol_type = other DNA

SEQ ID NO: 31727 - DNA, 80 bp, synthetic construct
  source 1..80: mol_type = other DNA
tcaaaggcatttcttttctgcatgttctaaataaaaagcattattatttgctgagtcagtttattagaccttccttcttt

SEQ ID NO: 31728 - DNA, 80 bp, synthetic construct
  source 1..80: mol_type = other DNA
tgttagagttacttgaggattggatttgaaagtgagaaactgtgtccaggggcagctctaacctctagggaaatattcag

SEQ ID NO: 31729 - DNA, 80 bp, synthetic construct
  source 1..80: mol_type = other DNA
ttctcctgcctcagcctcctgagtagctgggattacaggtgcatgccaccacacctggctaattttttgtatttttagta

SEQ ID NO: 31730 - DNA, 80 bp, synthetic construct
  source 1..80: mol_type = other DNA
tactttgaagtgtcattactttatctctaaataaagaatcagattacttttattacttcatgtttccaacttagaatgat

SEQ ID NO: 31731 - DNA, 80 bp, synthetic construct; identical to SEQ ID NO: 11822
  source 1..80: mol_type = other DNA

SEQ ID NO: 31732 - DNA, 80 bp, synthetic construct
  source 1..80: mol_type = other DNA
cggcctgtggggaggggaggggcgtcagtgagcctggctcctgggtgatacccctgcaagactccacggaaggggacagg

SEQ ID NO: 31733 - DNA, 80 bp, synthetic construct
  source 1..80: mol_type = other DNA
aggagatgcagggtgagagtggggactggactctaggatgctgggacccctgccaccaaacacacgggggacacacactg

SEQ ID NO: 31734 - DNA, 80 bp, synthetic construct
  source 1..80: mol_type = other DNA
ccactagacgggggctctggatggacaggccagccctgcctatactctggaccccccacccaagtggggacagtcagtgt

SEQ ID NO: 31735 - DNA, 80 bp, synthetic construct; identical to SEQ ID NO: 11823
  source 1..80: mol_type = other DNA

SEQ ID NO: 31736 - DNA, 80 bp, synthetic construct
  source 1..80: mol_type = other DNA
tgcttggagccccgggtgtcccagcaaagttcatgggcccccgcctgtacccttcctccctcggcccctgcactgtttcc

SEQ ID NO: 31737 - DNA, 80 bp, synthetic construct
  source 1..80: mol_type = other DNA
agcatactcgggacagaacggggtagcccccaaatgacctccaattctgcacctgtcagcccagatgcggctcgccgggt

SEQ ID NO: 31738 - DNA, 80 bp, synthetic construct
  source 1..80: mol_type = other DNA
agttagcagctcatccagctgggtcaggaaagccttttggaagcgtaggaccttgccagccagcgctgggatatgcagga

SEQ ID NO: 31739 - DNA, 80 bp, synthetic construct; identical to SEQ ID NO: 11824
  source 1..80: mol_type = other DNA

SEQ ID NO: 31740 - DNA, 80 bp, synthetic construct
  source 1..80: mol_type = other DNA
gccctgcagagactcctcggtctctcgctccgcacctcgcgcagaaagcccgactcctccttcagtccctcctgagctag

SEQ ID NO: 31741 - DNA, 80 bp, synthetic construct
  source 1..80: mol_type = other DNA
gttcccgctttgtgcccttctgcccatcacccaccggagtggttggcgaaggcggcacaaaggcaggcggcctcctcggt

SEQ ID NO: 31742 - DNA, 80 bp, synthetic construct
  source 1..80: mol_type = other DNA
ctccaaccctatgctccccctggtctcccgcagtccctggctctgtccagctggtcacagggcccactctttgtgcatcc

SEQ ID NO: 31743 - DNA, 80 bp, synthetic construct; identical to SEQ ID NO: 11825
  source 1..80: mol_type = other DNA

SEQ ID NO: 31744 - DNA, 80 bp, synthetic construct
  source 1..80: mol_type = other DNA
ccaggatctgggtgatgggcacaggcgggcggtcggcggtgtcctcgccgtgggtcaccagcgcctcgcgcacggccgcc

SEQ ID NO: 31745 - DNA, 80 bp, synthetic construct
  source 1..80: mol_type = other DNA
agtgagcaggtggaaggaggagacccagcctcctgatcgtggggcgggggtgggggtcacaccttctgtgatggaggaac

SEQ ID NO: 31746 - DNA, 80 bp, synthetic construct
  source 1..80: mol_type = other DNA
atttcgtgatttaaacggcactcaggactaactcatcttccattcccaaggcctttccttctggtgtcagcagaagggac

SEQ ID NO: 31747 - DNA, 80 bp, synthetic construct; identical to SEQ ID NO: 11826
  source 1..80: mol_type = other DNA

SEQ ID NO: 31748 - DNA, 80 bp, synthetic construct
  source 1..80: mol_type = other DNA
cttctagccccatacctgcctcactaccaaatgggctcctctggacacacctggcacccccaccccaccaggcacagagg

SEQ ID NO: 31749 - DNA, 80 bp, synthetic construct
  source 1..80: mol_type = other DNA
acttccgggttgtttgctcccggagccataaccgcagctcagcgtgcgggcagagccggctgacaggagacaggacacag

SEQ ID NO: 31750 - DNA, 80 bp, synthetic construct
  source 1..80: mol_type = other DNA
ttttgtcaaggtcgttatttccagtgaagtatggcatcgaacatcagatagttgcccacacaaatgtctgttttaaggtt

SEQ ID NO: 31751 - DNA, 80 bp, synthetic construct; identical to SEQ ID NO: 11827
  source 1..80: mol_type = other DNA

SEQ ID NO: 31752 - DNA, 80 bp, synthetic construct
  source 1..80: mol_type = other DNA
gtcctgattttatgtggaagatgttgtgtgtctaggagcaggaatccatggaagacaagatatgatatagaagaaacagg

SEQ ID NO: 31753 - DNA, 80 bp, synthetic construct
  source 1..80: mol_type = other DNA
agtgtatattgcaagagaagtagagaagaacagtatgctaaggtcccttcttgtttagatcagaagatattgacaaatta

SEQ ID NO: 31754 - DNA, 80 bp, synthetic construct
  source 1..80: mol_type = other DNA
caaatcatcaagcaaaaagaacaaacaaaaaatgatcaatccgaacatagggaaaggaaacacacatacacacatacata

SEQ ID NO: 31755 - DNA, 80 bp, synthetic construct
  source 1..80: mol_type = other DNA
aatgtttacaggacacctatcaagaacaaaaataacataaagatactttaaatattatgatgagcagagatagaccaggg

SEQ ID NO: 31756 - DNA, 80 bp, synthetic construct; identical to SEQ ID NO: 11828
  source 1..80: mol_type = other DNA

SEQ ID NO: 31757 - DNA, 80 bp, synthetic construct
  source 1..80: mol_type = other DNA
gtagagagggggtttcaccgtgttagccaggatagtctcgatctcctgacctcatgatccgcccgccttggcatcccaaa

SEQ ID NO: 31758 - DNA, 80 bp, synthetic construct
  source 1..80: mol_type = other DNA
acatgggaaatcaaacaagagactgggaggaacttccaaaccatcaaacatgaaaacaactactatttatttgatagaca

SEQ ID NO: 31759 - DNA, 80 bp, synthetic construct
  source 1..80: mol_type = other DNA
tattgaccagagaaatgcaaattaaagtaatgacatatgaattttcagttatcggtgactggcagtatctagtgttggag

SEQ ID NO: 31760 - DNA, 80 bp, synthetic construct; identical to SEQ ID NO: 11829
  source 1..80: mol_type = other DNA

SEQ ID NO: 31761 - DNA, 80 bp, synthetic construct
  source 1..80: mol_type = other DNA
taatattttgacacattcacttaaaaggtctttccactttccagcccctcttgcacagaggagtggtgacattctaacca

SEQ ID NO: 31762 - DNA, 80 bp, synthetic construct
  source 1..80: mol_type = other DNA
aaaatgaatggagcctcagagacctttgggacatcatcaagggtatctaacaggtacaatgggaatcacagaaagagaga

SEQ ID NO: 31763 - DNA, 80 bp, synthetic construct
  source 1..80: mol_type = other DNA
attcatttattctcaaaatagaataaatgaaaggagagccatacctgcacacactgtagtcaaacaatcaaagggaaact

SEQ ID NO: 31764 - DNA, 80 bp, synthetic construct; identical to SEQ ID NO: 11830
  source 1..80: mol_type = other DNA

SEQ ID NO: 31765 - DNA, 80 bp, synthetic construct
  source 1..80: mol_type = other DNA
gtcagggcactgaagaaaaacactgctaaccaagaattctatatccagaaaacattcttccaaaaagagagaagtattac

SEQ ID NO: 31766 - DNA, 80 bp, synthetic construct
  source 1..80: mol_type = other DNA
gacattcttggataaacaacaccgagagaattcacaagcctgtcataagaaatactaaaggaagtctcttgggtcaaagt

SEQ ID NO: 31767 - DNA, 80 bp, synthetic construct; identical to SEQ ID NO: 11831
  source 1..80: mol_type = other DNA

SEQ ID NO: 31768 - DNA, 80 bp, synthetic construct
  source 1..80: mol_type = other DNA
ttctattaaaattttgaagcacagaaaattcccctacagtataaagtatccccagtcacagagaagacaggggttttgca

SEQ ID NO: 31769 - DNA, 80 bp, synthetic construct
  source 1..80: mol_type = other DNA
cttagggtgttaaaagagtatcactccatgaacgagttggttgtgatgtggaactatgaggtacttttatgatacaatat

SEQ ID NO: 31770 - DNA, 80 bp, synthetic construct
  source 1..80: mol_type = other DNA
aactctcatccctgataaacactgttagttatctagagaaagaagaaaattgtcccaatacagtcacctctttgccacac

SEQ ID NO: 31771 - DNA, 80 bp, synthetic construct
  source 1..80: mol_type = other DNA
aggcaccctgtcgtcctgattatttcaccttgtcacaggcacaggcaccctgtcgtcctgattatttcaccttgtcacag

SEQ ID NO: 31772 - DNA, 80 bp, synthetic construct; identical to SEQ ID NO: 11832
  source 1..80: mol_type = other DNA

SEQ ID NO: 31773 - DNA, 80 bp, synthetic construct
  source 1..80: mol_type = other DNA
cccaccaaagccaaggcttcaatttcagtctgtggggagctgactctgctgctctcaagcactagaagaaggaaccagta

SEQ ID NO: 31774 - DNA, 80 bp, synthetic construct
  source 1..80: mol_type = other DNA
ggcaggctaacccacccgtgagccagtcgagtctacattgtcagttctcacctcgaggggtgccaaaaaccagagggaag

SEQ ID NO: 31775 - DNA, 80 bp, synthetic construct; identical to SEQ ID NO: 11833
  source 1..80: mol_type = other DNA

SEQ ID NO: 31776 - DNA, 80 bp, synthetic construct
  source 1..80: mol_type = other DNA
tgtatgaagaaaataattaatacatgaaagaagaagctagtcaatgtggagctctattgtgtcccgggatcaacaaagac

SEQ ID NO: 31777 - DNA, 80 bp, synthetic construct
  source 1..80: mol_type = other DNA
cagagattaactttctcagaattggttgactcactctttccttttatttttcttccatggaattttccagttaacttgag

SEQ ID NO: 31778 - DNA, 80 bp, synthetic construct
  source 1..80: mol_type = other DNA
catggggttggagttgtattacataaaccctactccaaacaaatgcatggggatgtggctggagttccccgttgtctaac

SEQ ID NO: 31779 - DNA, 80 bp, synthetic construct; identical to SEQ ID NO: 11834
  source 1..80: mol_type = other DNA

SEQ ID NO: 31780 - DNA, 80 bp, synthetic construct
  source 1..80: mol_type = other DNA
agcaagagggcattggttggtgggtcaccctccttctcagaacacattataaaaaccttccgtttccacaggattgtctc

SEQ ID NO: 31781 - DNA, 80 bp, synthetic construct
  source 1..80: mol_type = other DNA
acctcttccagttggaattgaagaatattcccaagtccttcacccgggtaagagaaatagtgttgattttagggagaata

SEQ ID NO: 31782 - DNA, 80 bp, synthetic construct
  source 1..80: mol_type = other DNA
caggccccggaggcccccgccggtgccttgtcctggggctgatgatggggaggccggcgaggccgggctgctgcgacgcc

SEQ ID NO: 31783 - DNA, 80 bp, synthetic construct; identical to SEQ ID NO: 11835
  source 1..80: mol_type = other DNA

SEQ ID NO: 31784 - DNA, 80 bp, synthetic construct
  source 1..80: mol_type = other DNA
cggagtccaggcgggtggggagcagagcagctggaaccccccgagcgccctgcagacgcagcagcctcttgaggggaggg

SEQ ID NO: 31785 - DNA, 80 bp, synthetic construct
  source 1..80: mol_type = other DNA
ccagcgcttcgggccggtgttcacgctgtacgtgggctcgcagcgcatggtggtgatgcacggctacaaggcggtgaagg

SEQ ID NO: 31786 - DNA, 80 bp, synthetic construct
  source 1..80: mol_type = other DNA
aataataaactaacagtaatattatagtaacagcatccgaaggatgagatcaggattagggcgatggcccccgcgcgttg

SEQ ID NO: 31787 - DNA, 80 bp, synthetic construct
  source 1..80: mol_type = other DNA
cccctcctgttcaaccgccggggtacaggtggcttcgtccaccgaggtcccctcacccacgctgaggcgtcggaagctgc

SEQ ID NO: 31788 - DNA, 80 bp, synthetic construct; identical to SEQ ID NO: 11836
  source 1..80: mol_type = other DNA

SEQ ID NO: 31789 - DNA, 80 bp, synthetic construct
  source 1..80: mol_type = other DNA
attagaaataacagtgtcccacatggaagcctctacttcttcctgggtcaactttgatgacgaggctccagaaaaccttt

SEQ ID NO: 31790 - DNA, 80 bp, synthetic construct
  source 1..80: mol_type = other DNA
cttgccctatttatttgtccagcgtacatttctgaacattgtgaacgtcgaatgggccaacaaatctaaaaattaaatga

SEQ ID NO: 31791 - DNA, 80 bp, synthetic construct; identical to SEQ ID NO: 11837
  source 1..80: mol_type = other DNA

SEQ ID NO: 31792 - DNA, 80 bp, synthetic construct
  source 1..80: mol_type = other DNA
cggaattcacatcaacacagatggggctcaaggggactttgctgcctctgcctggagggtctaaagtttcattttcatat

SEQ ID NO: 31793 - DNA, 80 bp, synthetic construct
  source 1..80: mol_type = other DNA
agttcataaaacggagaaagtttggttcccaacctagatttttaacctgttgaactctgtctaaatgggtcatctcggga

SEQ ID NO: 31794 - DNA, 80 bp, synthetic construct
  source 1..80: mol_type = other DNA
tttctgagcaccctgcaggcgcctcccaggagtggtcagtggtcaatcagctaatgaagctgcataggacatgacccttg

SEQ ID NO: 31795 - DNA, 80 bp, synthetic construct; identical to SEQ ID NO: 11838
  source 1..80: mol_type = other DNA

SEQ ID NO: 31796 - DNA, 80 bp, synthetic construct
  source 1..80: mol_type = other DNA
ttttcccagctctgatgctttgcacagtcacttgtgtgacctgcaagattttagtgaagaaacttgctgtggagtcggaa

SEQ ID NO: 31797 - DNA, 80 bp, synthetic construct
  source 1..80: mol_type = other DNA
gaaaaagaaagaaggtaaattgacagcatgaagtagagcacccaggagaggctacatgtgatgaagaaaccacagtgcag

SEQ ID NO: 31798 - DNA, 80 bp, synthetic construct
  source 1..80: mol_type = other DNA
gcccatttctccccaaaatgggtatttagaataaccttctgctggcccctctgccttaggaatcatttttaataatggac

SEQ ID NO: 31799 - DNA, 80 bp, synthetic construct
  source 1..80: mol_type = other DNA
agacccaaggtgcgtatctgctgcctagcagggcccagtcctcttgcagaccagcggtgtggggagccctggctgggact

SEQ ID NO: 31800 - DNA, 80 bp, synthetic construct; identical to SEQ ID NO: 11839
  source 1..80: mol_type = other DNA

SEQ ID NO: 31801 - DNA, 80 bp, synthetic construct
  source 1..80: mol_type = other DNA
gcaacgtcatagccgacatcctcttccgcaagcattttgactacaatgatgagaagtttctaaggctgatgtatttgttt

SEQ ID NO: 31802 - DNA, 80 bp, synthetic construct
  source 1..80: mol_type = other DNA
tagacaggactgcaaaagccaaacaacatagcttcgaggggtgtttgattagacagcccaaatattcctcccagagacat

SEQ ID NO: 31803 - DNA, 80 bp, synthetic construct; identical to SEQ ID NO: 11840
  source 1..80: mol_type = other DNA

SEQ ID NO: 31804 - DNA, 80 bp, synthetic construct
  source 1..80: mol_type = other DNA
gcctgctcgtggaaatggagaaggtaggctcggccctcccatgatgtgggctctccggggtgggcagagaatgcacaatt

SEQ ID NO: 31805 - DNA, 80 bp, synthetic construct
  source 1..80: mol_type = other DNA
gacgcttagctctctccaggccctgctgctcaaccctttctagtctgcagactttgagaattgcattttgtctgaggaga

SEQ ID NO: 31806 - DNA, 80 bp, synthetic construct
  source 1..80: mol_type = other DNA
tatggcttgtggctcaagaacaaatgtggagcccacactgatttcccaggactgtctgagcatcttctccaccagtttgg

SEQ ID NO: 31807 - DNA, 80 bp, synthetic construct
  source 1..80: mol_type = other DNA
tctgggagcctcagtttccctggctgtgaggtggagatgactctgtctgtcacagctccaagtcacagttccactgggag

SEQ ID NO: 31808 - DNA, 80 bp, synthetic construct; identical to SEQ ID NO: 11841
  source 1..80: mol_type = other DNA

SEQ ID NO: 31809 - DNA, 80 bp, synthetic construct
  source 1..80: mol_type = other DNA
gggaggtgttatggtctgtgctgaacacctggtactcttgcacactggttggtccataccccactaagacacccctggtt

SEQ ID NO: 31810 - DNA, 80 bp, synthetic construct
  source 1..80: mol_type = other DNA
gagggtccttgctggggcgtcttcctcaaatgcggacgtgaggagggaagtccaggaagaagcagctacagctgccctgg

SEQ ID NO: 31811 - DNA, 80 bp, synthetic construct
  source 1..80: mol_type = other DNA
gcaaacaggccagtcagggttgggtccaagtaaaggggaggaaagggagctgcagcctggctggagagtgccggggggcc

SEQ ID NO: 31812 - DNA, 80 bp, synthetic construct; identical to SEQ ID NO: 11842
  source 1..80: mol_type = other DNA

SEQ ID NO: 31813 - DNA, 80 bp, synthetic construct
  source 1..80: mol_type = other DNA
ggtgcacaccaccacacccagctgattaaaaatttaaaaaaattattttggctgggcacagtggctcatacctgtaatcc

SEQ ID NO: 31814 - DNA, 80 bp, synthetic construct
  source 1..80: mol_type = other DNA
atcgcttcaacctcagaggcacagggtgcagtgatccgagattgcaccccactgcactctagcctgacaacagagcaaga

SEQ ID NO: 31815 - DNA, 80 bp, synthetic construct; identical to SEQ ID NO: 11843
  source 1..80: mol_type = other DNA

SEQ ID NO: 31816 - DNA, 80 bp, synthetic construct
  source 1..80: mol_type = other DNA
gccaaattgaacgtttattaacattttgcgatacttccatcagagctcttaaaaagaaaatgtgttacagagccagccaa

SEQ ID NO: 31817 - DNA, 80 bp, synthetic construct
  source 1..80: mol_type = other DNA
gtttaatattttacctgggtactgtacataacattttgcagcttggttttttcactcaacatatgatgatgttccatggg

SEQ ID NO: 31818 - DNA, 80 bp, synthetic construct
  source 1..80: mol_type = other DNA
ccttcatactcagaagcatgcaataaacaagcctggggtaattatcaatgcaaaggttaccctcccagaagaaatttcca

SEQ ID NO: 31819 - DNA, 80 bp, synthetic construct; identical to SEQ ID NO: 11844
  source 1..80: mol_type = other DNA

SEQ ID NO: 31820 - DNA, 80 bp, synthetic construct
  source 1..80: mol_type = other DNA
tggatgtatagatgggtggatgggtggatgcttggatggatgcgtgggtaggtggatggagggatggctggatggatggg

SEQ ID NO: 31821 - DNA, 80 bp, synthetic construct
  source 1..80: mol_type = other DNA
tggatggatgggtgggtgggtggatgggagggtggatggatgggtggttggatggatgggtgggtgggtggatgggaggg

SEQ ID NO: 31822 - DNA, 80 bp, synthetic construct
  source 1..80: mol_type = other DNA
gatgcccaactggccaggaaccaatccctgaaatttgtcccattcatatcttggcagagaagctccatgaagaaattgac

SEQ ID NO: 31823 - DNA, 80 bp, synthetic construct
  source 1..80: mol_type = other DNA
gaagcaacccgagacaccattttcagaggatacctcatccccaaggttaagcaatgagcctgcagcacacagcatgaaca

SEQ ID NO: 31824 - DNA, 80 bp, synthetic construct; identical to SEQ ID NO: 11845
  source 1..80: mol_type = other DNA

SEQ ID NO: 31825 - DNA, 80 bp, synthetic construct
  source 1..80: mol_type = other DNA
cctatatagcataatattcaaaactacattcttcactgggggtttccagatgaaagcccacattttgttaacatgactca

SEQ ID NO: 31826 - DNA, 80 bp, synthetic construct
  source 1..80: mol_type = other DNA
aaatggaaagttcaagtacagtgactatttcaagccattttccacaggtgagaaagatcagaggcagtaccttcccttga

SEQ ID NO: 31827 - DNA, 80 bp, synthetic construct
  source 1..80: mol_type = other DNA
caatcctgggaatgaagtgttgttgtaggtggattttttttttcccaaagactagacattttacatcattcattgctaaa

SEQ ID NO: 31828 - DNA, 80 bp, synthetic construct; identical to SEQ ID NO: 11846
  source 1..80: mol_type = other DNA

SEQ ID NO: 31829 - DNA, 80 bp, synthetic construct
  source 1..80: mol_type = other DNA
atgaagactggtccccgaattagtcagtgttgctggtatccttccactcaagtacattttgtgcttcttttaataggcag

SEQ ID NO: 31830 - DNA, 80 bp, synthetic construct
  source 1..80: mol_type = other DNA
ctggctcgcatggagttgtttcttttgttgtgtgccattttgcagcattttaatttgaagcctctcgttgacccaaagga

SEQ ID NO: 31831 - DNA, 80 bp, synthetic construct
  source 1..80: mol_type = other DNA
tttctttgcatatgagtatttgaaaataaatattttcccagaatataaataaatcatcacatgattattttaactatatg

SEQ ID NO: 31832 - DNA, 80 bp, synthetic construct
  source 1..80: mol_type = other DNA
gattctcctgcctcagcctcccgaatagctgggattacaggcacccaccaccatgccagctaattttttgtatttttagt

SEQ ID NO: 31833 - DNA, 80 bp, synthetic construct; identical to SEQ ID NO: 11847
  source 1..80: mol_type = other DNA

SEQ ID NO: 31834 - DNA, 80 bp, synthetic construct
  source 1..80: mol_type = other DNA
aaaaccctaacagtaatcctttcctaacgtcaggatgcgtatcgacctgtgtgtgcacatttgctgtgcagagtgtgcac

SEQ ID NO: 31835 - DNA, 80 bp, synthetic construct
  source 1..80: mol_type = other DNA
tcctcactattctggaaaggttgaatggactaatggtatcttgaagctaaaattagttaaaccaacagagtcaagtgttt

SEQ ID NO: 31836 - DNA, 80 bp, synthetic construct
  source 1..80: mol_type = other DNA
gacaatgcaaggccttgatgcattttacaaatgtacatttccaccagttgaagtaggctttctgtgaaccaccaattgag

SEQ ID NO: 31837 - DNA, 80 bp, synthetic construct; identical to SEQ ID NO: 11848
  source 1..80: mol_type = other DNA

SEQ ID NO: 31838 - DNA, 80 bp, synthetic construct
  source 1..80: mol_type = other DNA
tcaaaccaaacatcctctaagttctactgtgcagagtatagccactctcactaactgaagcaattgctgactatgtcatc

SEQ ID NO: 31839 - DNA, 80 bp, synthetic construct
  source 1..80: mol_type = other DNA
ttcttgattgtgaaaacatttggagagaactgattattataatcagagctaggaagattatcaaataatgttgctgctgc

SEQ ID NO: 31840 - DNA, 80 bp, synthetic construct; identical to SEQ ID NO: 11849
  source 1..80: mol_type = other DNA

SEQ ID NO: 31841 - DNA, 80 bp, synthetic construct
  source 1..80: mol_type = other DNA
cggttgtcccctgtctcagtagatggaatatacaatcgggctttacaccgagacattccattgcccagggacgagcagga

SEQ ID NO: 31842 - DNA, 80 bp, synthetic construct
  source 1..80: mol_type = other DNA
atgaggccatatttcagactatcacatggggagaaatcttggacaatacctggctttcctaggcagaggtccctgcggac

SEQ ID NO: 31843 - DNA, 80 bp, synthetic construct
  source 1..80: mol_type = other DNA
ggtagggttacagattaacagcatctcaaggcagaagaatttttcttagtacagaacaaaatggagtctcttatgtctac

SEQ ID NO: 31844 - DNA, 80 bp, synthetic construct; identical to SEQ ID NO: 11850
  source 1..80: mol_type = other DNA

SEQ ID NO: 31845 - DNA, 80 bp, synthetic construct
  source 1..80: mol_type = other DNA
tgaagtaactcaggaatggaaaatcaaacatcgtatgttcttactcatgagtaggagctaagctatgagaatgcaaaggc

SEQ ID NO: 31846 - DNA, 80 bp, synthetic construct
  source 1..80: mol_type = other DNA
atttatgatcaactagtttgacgttgggaagaagctacagaaccaaagggatagcctataattactactggttttctttc

SEQ ID NO: 31847 - DNA, 80 bp, synthetic construct
  source 1..80: mol_type = other DNA
gtttctttctttctttttctttctttctttctctttttttgagacggagtcttgttctttcaccaagctggagtgcagtg

SEQ ID NO: 31848 - DNA, 80 bp, synthetic construct
  source 1..80: mol_type = other DNA
cgatctcttgacctcgtgatccgcccacctcagtctcccaaagtgttgggattacaggcatgagccaccgcgcccggcct

SEQ ID NO: 31849 - DNA, 80 bp, synthetic construct; identical to SEQ ID NO: 11851
  source 1..80: mol_type = other DNA

SEQ ID NO: 31850 - DNA, 80 bp, synthetic construct
  source 1..80: mol_type = other DNA
atcgggaaacttaccatgctgttattaagagccatgtattccctgagcaaggtacttgttttcttgtttacattcctcta

SEQ ID NO: 31851 - DNA, 80 bp, synthetic construct
  source 1..80: mol_type = other DNA
gttccaaagccatttccacatgtttagatattatcacagcagtaccacattcctggtaacacaatttgtcttagtctact

SEQ ID NO: 31852 - DNA, 80 bp, synthetic construct
  source 1..80: mol_type = other DNA
gctctcttcctcgtctgcagatggttgcattcctatcatgtccttagattgcacttccttggttcatgcatgtgggtaag

SEQ ID NO: 31853 - DNA, 80 bp, synthetic construct; identical to SEQ ID NO: 11852
  source 1..80: mol_type = other DNA

SEQ ID NO: 31854 - DNA, 80 bp, synthetic construct
  source 1..80: mol_type = other DNA
gggtgtaggttgtggcagagagccaagccaggatcatgacacagttgtgtaatttgaaggtttcttacttagtctgttta

SEQ ID NO: 31855 - DNA, 80 bp, synthetic construct
  source 1..80: mol_type = other DNA
aggtgctgtgtgcagagatcacatggcaagagaggaagcaacagaaggggagggaggtgccaggttttgttttcttttaa

SEQ ID NO: 31856 - DNA, 80 bp, synthetic construct; identical to SEQ ID NO: 11853
  source 1..80: mol_type = other DNA

SEQ ID NO: 31857 - DNA, 80 bp, synthetic construct
  source 1..80: mol_type = other DNA
tgcaaataggttttaaatcatatggcctgatttgggcgtgtgttgttaataggctgtgaagttgtctgtcaattaaaaca

SEQ ID NO: 31858 - DNA, 80 bp, synthetic construct
  source 1..80: mol_type = other DNA
ttagcctctggcttgcaaaccaatgaaagcacccagaccaatatagtaaggagatcaatagtacacagaacagtgtgcag

SEQ ID NO: 31859 - DNA, 80 bp, synthetic construct
  source 1..80: mol_type = other DNA
agtccatactgattgtgggaatggccctgtagtactaatttgaaacttcttgaagggaatcagagggagatcctggatta

SEQ ID NO: 31860 - DNA, 80 bp, synthetic construct; identical to SEQ ID NO: 11854
  source 1..80: mol_type = other DNA

SEQ ID NO: 31861 - DNA, 80 bp, synthetic construct
  source 1..80: mol_type = other DNA
tgcctaagatgactgagtttccagggggaggagtggctgccatcactgtggctccatgtggccgttttaccctgcctgtg

SEQ ID NO: 31862 - DNA, 80 bp, synthetic construct
  source 1..80: mol_type = other DNA
atttgcagacagaactctgatctccctgggatggagcccctgtgggaaatggcagccatggtctccagttcagcagactt

SEQ ID NO: 31863 - DNA, 80 bp, synthetic construct
  source 1..80: mol_type = other DNA
ttgccagacacctcatacaggagagttctagccagcatcaggtttttgcccctctgggatggagctttcagaggaaggag

SEQ ID NO: 31864 - DNA, 80 bp, synthetic construct; identical to SEQ ID NO: 11855
  source 1..80: mol_type = other DNA

SEQ ID NO: 31865 - DNA, 80 bp, synthetic construct
  source 1..80: mol_type = other DNA
aacaaactttgctgagctaaaggagtatgttctaatccaatgcaaagttctctcagtggaaaccctacaagttagaagag

SEQ ID NO: 31866 - DNA, 80 bp, synthetic construct
  source 1..80: mol_type = other DNA
cctgaaggaagcactgaatatggaaaggaaaaactgttaccagtcactacaaaaacacacttaagtacacagactaatga

SEQ ID NO: 31867 - DNA, 80 bp, synthetic construct
  source 1..80: mol_type = other DNA
ggtgtgctgtattcaagagacccatctcatatgcaaagacatacataggcttaaaataaagggatagaggaaaatttgcc

SEQ ID NO: 31868 - DNA, 80 bp, synthetic construct; identical to SEQ ID NO: 11856
  source 1..80: mol_type = other DNA

SEQ ID NO: 31869 - DNA, 80 bp, synthetic construct
  source 1..80: mol_type = other DNA
gtgtcacttattttaaaattgatcacacaattggaaggaaaacactcttcagcaaatgcaaaagagctgaaatcataaca

SEQ ID NO: 31870 - DNA, 80 bp, synthetic construct
  source 1..80: mol_type = other DNA
caaagagacaatgtaccagaatctctgggatgcagctaaagcagtattaagaggaaaatttatagcactaaaatgaccac

SEQ ID NO: 31871 - DNA, 80 bp, synthetic construct
  source 1..80: mol_type = other DNA
ttgaggcagtaatagcagaccaaaaaaaaaaaaaaaaaaaaaagcccaggaccagagagatttatagctgaattctacca

SEQ ID NO: 31872 - DNA, 80 bp, synthetic construct; identical to SEQ ID NO: 11857
  source 1..80: mol_type = other DNA

SEQ ID NO: 31873 - DNA, 80 bp, synthetic construct
  source 1..80: mol_type = other DNA
actctcaaaaacctaggtataaaagggacatacctcaaaataataagagccatttatgacaaacccacagccaatatcat

SEQ ID NO: 31874 - DNA, 80 bp, synthetic construct
  source 1..80: mol_type = other DNA
aaattgtctttgtttgcaggtgacataatcctgtatctcaaaaaccccatgatctcagcccaaaagcttcttaagctgat

SEQ ID NO: 31875 - DNA, 80 bp, synthetic construct
  source 1..80: mol_type = other DNA
gaaagtgaaggacctcttcaaggagaactacaaatcagctcaaggaaatcagagaggacacaaaaaaaatggaaaaacat

SEQ ID NO: 31876 - DNA, 80 bp, synthetic construct
  source 1..80: mol_type = other DNA
atagccaagacaatcctaagcaaaaagaacaaagctggcagcatcaagttacctgacttcaaaccatactacaaggctac

SEQ ID NO: 31877 - DNA, 80 bp, synthetic construct; identical to SEQ ID NO: 11858
  source 1..80: mol_type = other DNA

SEQ ID NO: 31878 - DNA, 80 bp, synthetic construct
  source 1..80: mol_type = other DNA
ctgtgatcacaccactgcactccagcctggtgacagagcaagactctgtctcaaataaataaataaataaaattgtgctg

SEQ ID NO: 31879 - DNA, 80 bp, synthetic construct
  source 1..80: mol_type = other DNA
ggcaaaggtttcatgacaaaaatgtcaatagcagttacaacaaaagcaaaaatagacaaatgggatctaattaaagagct

SEQ ID NO: 31880 - DNA, 80 bp, synthetic construct; identical to SEQ ID NO: 11859
  source 1..80: mol_type = other DNA

SEQ ID NO: 31881 - DNA, 80 bp, synthetic construct
  source 1..80: mol_type = other DNA
aaattcctcaaagacctagaaccagaaataccatttgacccagcaatcccattactgggtatatacccaaaggaatataa

SEQ ID NO: 31882 - DNA, 80 bp, synthetic construct
  source 1..80: mol_type = other DNA
gagatcatgtcctttgcagggacatggatggagctggaagccattatcctcagcaaactaatgcaggaacagaaaacggt

SEQ ID NO: 31883 - DNA, 80 bp, synthetic construct
  source 1..80: mol_type = other DNA
taggtgcagcaaaccaccatggcacacgtttacctatgtcacaaacctgcacaccctgcacacataccctggaactttaa

SEQ ID NO: 31884 - DNA, 80 bp, synthetic construct; identical to SEQ ID NO: 11860
  source 1..80: mol_type = other DNA

SEQ ID NO: 31885 - DNA, 80 bp, synthetic construct
  source 1..80: mol_type = other DNA
acccttcaattaagagagtaaggtttgtgggaagacagagacctatttagggatccattaccgaattgaaatttgaaaag

SEQ ID NO: 31886 - DNA, 80 bp, synthetic construct
  source 1..80: mol_type = other DNA
ctcccctccagaaggaataatgaatgataagcatatatctgtatacacatttgcttgcagacaatgcttctgccattact

SEQ ID NO: 31887 - DNA, 80 bp, synthetic construct
  source 1..80: mol_type = other DNA
tggtttgacagactaatggagtggccttttgaagacccaaagtcctagctaggtggcaataccttgcagggatggaacaa

SEQ ID NO: 31888 - DNA, 80 bp, synthetic construct; identical to SEQ ID NO: 11861
  source 1..80: mol_type = other DNA

SEQ ID NO: 31889 - DNA, 80 bp, synthetic construct
  source 1..80: mol_type = other DNA
aaattataatggacttatacgtccttaggcaggaaggacatctttacagtaatgagtttccattaatggacatgaccttt

SEQ ID NO: 31890 - DNA, 80 bp, synthetic construct
  source 1..80: mol_type = other DNA
agtttagttttgctttttgtagctggctattagttctagcaggtatgcaatgggctgagctcttttgctggaatgagatg

SEQ ID NO: 31891 - DNA, 80 bp, synthetic construct
  source 1..80: mol_type = other DNA
tggtcccatctcatcaccattgctattggtagtagtaaaactgatgtttaaatagttcccacctggtcttggtgaaaaca

SEQ ID NO: 31892 - DNA, 80 bp, synthetic construct; identical to SEQ ID NO: 11862
  source 1..80: mol_type = other DNA

SEQ ID NO: 31893 - DNA, 80 bp, synthetic construct
  source 1..80: mol_type = other DNA
gttttgtgggtcctgtgccctagcattgagacataaaggtgattttaaaatattgacctgtatttagcaaacttttatac

SEQ ID NO: 31894 - DNA, 80 bp, synthetic construct
  source 1..80: mol_type = other DNA
tctcaccaataaatctaagggaagctgactatttattagtctttttttttcacatgaataggtgaactgtgtcaaaggcc

SEQ ID NO: 31895 - DNA, 80 bp, synthetic construct
  source 1..80: mol_type = other DNA
tgatttaaaagtcatgtttgatagtatattgccagtttgtttaagacaggtatgattaactgcatcttagagaactcgtc

SEQ ID NO: 31896 - DNA, 80 bp, synthetic construct; identical to SEQ ID NO: 11863
  source 1..80: mol_type = other DNA

SEQ ID NO: 31897 - DNA, 80 bp, synthetic construct
  source 1..80: mol_type = other DNA
tgattttgaaccccagctcactgatcctcatttttaattttttttttaatttcagggagtctgtgtagtccagacctgta

SEQ ID NO: 31898 - DNA, 80 bp, synthetic construct
  source 1..80: mol_type = other DNA
aggaggttaaggaagcatttattgaaaacctgtgatgtacctctggcccagaccaagaggcagagtcaagccaaggcttc

SEQ ID NO: 31899 - DNA, 80 bp, synthetic construct
  source 1..80: mol_type = other DNA
tgtgcagctccaggtctttctccttttaggggcttgggactggcctgcaggaggttagtgtccagggtgggaatttacac

SEQ ID NO: 31900 - DNA, 80 bp, synthetic construct; identical to SEQ ID NO: 11864
  source 1..80: mol_type = other DNA

SEQ ID NO: 31901 - DNA, 80 bp, synthetic construct
  source 1..80: mol_type = other DNA
ggggttgcggggacagggcctccacacgcacctctgccgcttctgctgctgttgttggcacttctgctgcagctgctggt

SEQ ID NO: 31902 - DNA, 80 bp, synthetic construct
  source 1..80: mol_type = other DNA
gagaaagagtccctcatcaagggtggaggggccctcagccccacacagggagcacagctgatgcttcacgtcttccagtg

SEQ ID NO: 31903 - DNA, 80 bp, synthetic construct
  source 1..80: mol_type = other DNA
atctgaggggcagaaaagaggcctgtccactcctcttggctttcccccatgcctcaaagaaggctatctggatcttgttt

SEQ ID NO: 31904 - DNA, 80 bp, synthetic construct; identical to SEQ ID NO: 11865
  source 1..80: mol_type = other DNA

SEQ ID NO: 31905 - DNA, 80 bp, synthetic construct
  source 1..80: mol_type = other DNA
tccacggacagtgatggaagacttgaccttggtctcatcagagatccccctgaccactgagcagcagggtcacaaggagg

SEQ ID NO: 31906 - DNA, 80 bp, synthetic construct
  source 1..80: mol_type = other DNA
tcccagaggtccttgtgctggcccatcagatcttccagctgttcctcgaatgccaacctgggaaccaaccacaggcatga

SEQ ID NO: 31907 - DNA, 80 bp, synthetic construct
  source 1..80: mol_type = other DNA
tttgacattatatcccaactactggccatccaaaccccctgcctcagatgctaaggtttacctcagctgtctctgtttgt

SEQ ID NO: 31908 - DNA, 80 bp, synthetic construct
  source 1..80: mol_type = other DNA
ttttttccctctacattaaggtccttctctgtaacatgtggtaagtagggagtgacatgaccatttgccccctggaagta

SEQ ID NO: 31909 - DNA, 80 bp, synthetic construct; identical to SEQ ID NO: 11866
  source 1..80: mol_type = other DNA

SEQ ID NO: 31910 - DNA, 80 bp, synthetic construct
  source 1..80: mol_type = other DNA
ggaaagacattctttggactctccattgtttagagggaaacaatgagagctgtgggtctcagattcatcttcctgcctct

SEQ ID NO: 31911 - DNA, 80 bp, synthetic construct
  source 1..80: mol_type = other DNA
gttttggcagggggaacacagccagatcatgtcaggtctgtggacacctgattgagctttaacatttactacatgtctgg

SEQ ID NO: 31912 - DNA, 80 bp, synthetic construct; identical to SEQ ID NO: 11867
  source 1..80: mol_type = other DNA

SEQ ID NO: 31913 - DNA, 80 bp, synthetic construct
  source 1..80: mol_type = other DNA
acatggggaggagagaaaaaataccaacacccacgaagtgggataagggctataaagaaacacatcaaataggatggggc

SEQ ID NO: 31914 - DNA, 80 bp, synthetic construct
  source 1..80: mol_type = other DNA
tgggaatgaggttggagggtgtttcctgaacactcccacaagcagagaggagagggggagattggcaggacatgaggcta

SEQ ID NO: 31915 - DNA, 80 bp, synthetic construct
  source 1..80: mol_type = other DNA
taggtctttattggctttcttttttgcttcaccaaagagcagaaaaacattgtgtgagtgcagcctctattctcttccca

SEQ ID NO: 31916 - DNA, 80 bp, synthetic construct; identical to SEQ ID NO: 11868
  source 1..80: mol_type = other DNA

SEQ ID NO: 31917 - DNA, 80 bp, synthetic construct
  source 1..80: mol_type = other DNA
gggcggttgccagccttgtgtctctgctgctttcacgcaacacagatctattgagtacctcctgcaagcaggtgctctgt

SEQ ID NO: 31918 - DNA, 80 bp, synthetic construct
  source 1..80: mol_type = other DNA
agcaaaggagtgggaagtgctcctgagatatgggaagggacctgagggccccaaatcaagtggtggggggcaggccctgc

SEQ ID NO: 31919 - DNA, 80 bp, synthetic construct
  source 1..80: mol_type = other DNA
cagatgggtgaccagcgagaggtttgggacagggttttgggaaaacattttgccttctatacccttttgcttctttaatt

SEQ ID NO: 31920 - DNA, 80 bp, synthetic construct
  source 1..80: mol_type = other DNA
acgacctttctgcagcttttgcaccatttccatcaagtcttcaattttctgtgaggacgtgtcctgccctgtggagacaa

SEQ ID NO: 31921 - DNA, 80 bp, synthetic construct; identical to SEQ ID NO: 11869
  source 1..80: mol_type = other DNA

SEQ ID NO: 31922 - DNA, 80 bp, synthetic construct
  source 1..80: mol_type = other DNA
aatgagggtataaaaaactggagcaaggagtcaaaaatcactgtaactggcagatgacataatctaggaagttcttagag

SEQ ID NO: 31923 - DNA, 80 bp, synthetic construct
  source 1..80: mol_type = other DNA
cctatttttaacactaaaattagtagatctaagaaattactatttatggcattaacattgtgaaaggaaaataaatcttt

SEQ ID NO: 31924 - DNA, 80 bp, synthetic construct; identical to SEQ ID NO: 11870
  source 1..80: mol_type = other DNA

SEQ ID NO: 31925 - DNA, 80 bp, synthetic construct
  source 1..80: mol_type = other DNA
tgccaccctgggcacaggtcatcaggacctcctgaggccgtgtcacaggcatgcatccctaactttggtaaaataaactt

SEQ ID NO: 31926 - DNA, 80 bp, synthetic construct
  source 1..80: mol_type = other DNA
ccacttaaagctcaccatttcttttgattcttacaagaactttctttatggaaggaaacattatcctcttttcatctcct

SEQ ID NO: 31927 - DNA, 80 bp, synthetic construct; identical to SEQ ID NO: 11871
  source 1..80: mol_type = other DNA

SEQ ID NO: 31928 - DNA, 80 bp, synthetic construct
  source 1..80: mol_type = other DNA
tcctgtaagacaaaatcaaaagacgggttatcttctcaggtggcatttgtgcctagcagagattgctatcctcaatcata

SEQ ID NO: 31929 - DNA, 80 bp, synthetic construct
  source 1..80: mol_type = other DNA
gcgtgggctgagctagaaaggggatgtttagcctaagagctttaaaaaaatcatttaacaaacgtgacaaaaaaagacaa

SEQ ID NO: 31930 - DNA, 80 bp, synthetic construct
  source 1..80: mol_type = other DNA
tgtattgcgactgctttggccttcctccttcagtggttcttcttatgcacagtggccctttccctttgcaggcatttctt

SEQ ID NO: 31931 - DNA, 80 bp, synthetic construct; identical to SEQ ID NO: 11872
  source 1..80: mol_type = other DNA

SEQ ID NO: 31932 - DNA, 80 bp, synthetic construct
  source 1..80: mol_type = other DNA
aatacaatttaaaagatgacctctaaagaaaatcttttgggtggtagcattactcaaacagctttctgtatattacaatt

SEQ ID NO: 31933 - DNA, 80 bp, synthetic construct
  source 1..80: mol_type = other DNA
aaagacattctccaacatagtcaaaatgcaaccatccaagccaggaaattaacactgatgcatgaccaacatcttcccga

SEQ ID NO: 31934 - DNA, 80 bp, synthetic construct
  source 1..80: mol_type = other DNA
ttttaaagattacagaccagttgttttgtaaatgcctctcatgcttcctcatgattggattcaggctgtggagttttcca

SEQ ID NO: 31935 - DNA, 80 bp, synthetic construct; identical to SEQ ID NO: 11873
  source 1..80: mol_type = other DNA

SEQ ID NO: 31936 - DNA, 80 bp, synthetic construct
  source 1..80: mol_type = other DNA
tattattaattgctgatggctaccaaatcgcgatttttaaaattctgtcatttcttccacatttattagttaacacttta

SEQ ID NO: 31937 - DNA, 80 bp, synthetic construct
  source 1..80: mol_type = other DNA
tctgatgctcaaaatattccagatttgaccattagatgcccaatcaagctgatatttcctgactttgggcacaacaatct

SEQ ID NO: 31938 - DNA, 80 bp, synthetic construct
  source 1..80: mol_type = other DNA
ctcattgctctccagatgttgttgcccctagcttatatcagtgggcagagctaagaaatatatgtatgtatataatgtgg

SEQ ID NO: 31939 - DNA, 80 bp, synthetic construct
  source 1..80: mol_type = other DNA
acatcagattccaatccaacatcacaaagttcgattttctccctttctttatttgcaacttcctctcattatcctcaata

SEQ ID NO: 31940 - DNA, 80 bp, synthetic construct; identical to SEQ ID NO: 11874
  source 1..80: mol_type = other DNA

SEQ ID NO: 31941 - DNA, 80 bp, synthetic construct
  source 1..80: mol_type = other DNA
ttgtccttgtggagattatctgtacatcataacagatattattccctatagtcaattctatttgctgcttttactgcttt

SEQ ID NO: 31942 - DNA, 80 bp, synthetic construct
  source 1..80: mol_type = other DNA
cctgttttcccaacagtgtgtgtctaattcatctcggttcccctcacctttatctctttatccatcacaaatagtacaat

SEQ ID NO: 31943 - DNA, 80 bp, synthetic construct
  source 1..80: mol_type = other DNA
tcattctcgcaaaactaaacttatctcatttgtcacatacatgaaataacttctctcctaaccatgttacacggctaggc

SEQ ID NO: 31944 - DNA, 80 bp, synthetic construct; identical to SEQ ID NO: 11875
  source 1..80: mol_type = other DNA

SEQ ID NO: 31945 - DNA, 80 bp, synthetic construct
  source 1..80: mol_type = other DNA
gtcttgattatgcacactttagaagctgttacatcttctaaagtgaggacttcggaagagtcctctagaagactctttac

SEQ ID NO: 31946 - DNA, 80 bp, synthetic construct
  source 1..80: mol_type = other DNA
ctgatccatttaaatggtcctcatcctatcacatctgctttgggacatcccagataaattttttgccttctatgaatttc

SEQ ID NO: 31947 - DNA, 80 bp, synthetic construct
  source 1..80: mol_type = other DNA
ttggaaaacataatgcaatggaagtgatggtgtgtcagttcccagtctggaccttaagaggcctgtgtgcttccattctc

SEQ ID NO: 31948 - DNA, 80 bp, synthetic construct; identical to SEQ ID NO: 11876
  source 1..80: mol_type = other DNA

SEQ ID NO: 31949 - DNA, 80 bp, synthetic construct
  source 1..80: mol_type = other DNA
agtaagctacattctagtcgtactagagagaacactagactagaagtataaaatcttgagtcttaggaccagttctgcaa

SEQ ID NO: 31950 - DNA, 80 bp, synthetic construct
  source 1..80: mol_type = other DNA
gggtgcaatacacctctcaatagcaaagcagcagtgagtcaccatgtatagtttttaaaaagactactgctaattcagat

SEQ ID NO: 31951 - DNA, 80 bp, synthetic construct; identical to SEQ ID NO: 11877
  source 1..80: mol_type = other DNA

SEQ ID NO: 31952 - DNA, 80 bp, synthetic construct
  source 1..80: mol_type = other DNA
tcatattctaagtgaattgtccagtgtgagcggaggtgacagaattagatgaagaaagacaaagacagcatcgatcatca

SEQ ID NO: 31953 - DNA, 80 bp, synthetic construct
  source 1..80: mol_type = other DNA
acaataagcaaactatcgtgcattccacagtgtgggtctgtgtagtatttagttattttcagtagatagtgttagcaaga

SEQ ID NO: 31954 - DNA, 80 bp, synthetic construct
  source 1..80: mol_type = other DNA
accatgggagcagttttgttttgttttggtttctgtttcactcattcattgtcatatcaccagggctgaatgcttgacac

SEQ ID NO: 31955 - DNA, 80 bp, synthetic construct
  source 1..80: mol_type = other DNA
caatgtcgtgagttaaaaatatatttttggacctggctatcttaaaaacaagagaaaaaaagagagttttcactgcctct

SEQ ID NO: 31956 - DNA, 80 bp, synthetic construct; identical to SEQ ID NO: 11878
  source 1..80: mol_type = other DNA

SEQ ID NO: 31957 - DNA, 80 bp, synthetic construct
  source 1..80: mol_type = other DNA
actaaacatacaaaaaattagcctggcatggtggtgcatgcctgtaatcccagctactagggaggctgaggcaggagaat

SEQ ID NO: 31958 - DNA, 80 bp, synthetic construct
  source 1..80: mol_type = other DNA
gttttccagaggacagaacacaggaaagctgaaatctctagcagaggcaatgaatggagggcttaggaagtaagggcagg

SEQ ID NO: 31959 - DNA, 80 bp, synthetic construct; identical to SEQ ID NO: 11879
  source 1..80: mol_type = other DNA

SEQ ID NO: 31960 - DNA, 80 bp, synthetic construct
  source 1..80: mol_type = other DNA
gtggtacacagtctcctgtgtcccccaacccaggacccttctctttgtctgggacagctttcaaattagattggatttcc

SEQ ID NO: 31961 - DNA, 80 bp, synthetic construct
  source 1..80: mol_type = other DNA
cagctgctcagtgaagctataacgatggcagctctacaaaggtaaaagacatctcattcatcttggtttcaccattctct

SEQ ID NO: 31962 - DNA, 80 bp, synthetic construct
  source 1..80: mol_type = other DNA
atcagtgagactggtcaattttactttcacctccattccatgtccaccaatgctcacttagtccagacttcttcctggct

SEQ ID NO: 31963 - DNA, 80 bp, synthetic construct; identical to SEQ ID NO: 11880
  source 1..80: mol_type = other DNA

SEQ ID NO: 31964 - DNA, 80 bp, synthetic construct
  source 1..80: mol_type = other DNA
gtttctaaatatgtacttgcatgattacttttctcagggttgttttgccagacctgagcatttcaggtatgtagtgtttg

SEQ ID NO: 31965 - DNA, 80 bp, synthetic construct
  source 1..80: mol_type = other DNA
tgggttcaagcaattctcctgcctcagcctcccaagtagctaggattacaggtgcccaccaccacgcctggctagttttt

SEQ ID NO: 31966 - DNA, 80 bp, synthetic construct
  source 1..80: mol_type = other DNA
cccggccaataattgctattttaagcactttctgtactaagtactgggttaaatgccctacatgcatgatctcattttac

SEQ ID NO: 31967 - DNA, 80 bp, synthetic construct
  source 1..80: mol_type = other DNA
gtgtaacacacaattatttcaacttgtcagttcccaagatgatttttaaagctgacaaaaatcagcagcagcagaagtca

SEQ ID NO: 31968 - DNA, 80 bp, synthetic construct; identical to SEQ ID NO: 11881
  source 1..80: mol_type = other DNA

SEQ ID NO: 31969 - DNA, 80 bp, synthetic construct
  source 1..80: mol_type = other DNA
gaaaatgaaatactgcatgttcttacttataatgggaggtaaacatcggatagacatcgacataaagataggaacaatag

SEQ ID NO: 31970 - DNA, 80 bp, synthetic construct
  source 1..80: mol_type = other DNA
acaaaagttgaaagaaaaagaaagagttccacttgtgagtacagggaatttaacttagaccaattgaaaaaataataggg

SEQ ID NO: 31971 - DNA, 80 bp, synthetic construct; identical to SEQ ID NO: 11882
  source 1..80: mol_type = other DNA

SEQ ID NO: 31972 - DNA, 80 bp, synthetic construct
  source 1..80: mol_type = other DNA
ggatcacgaggtcaagagatccagaccatcctggccaaccaacatggtgaaaccccgtctctactaaaaatacaaaaatt

SEQ ID NO: 31973 - DNA, 80 bp, synthetic construct
  source 1..80: mol_type = other DNA
acaccagcattaatatgatgttgtcccaggtggtcttaaatgtcctttcacattttagcattctagaaccccaggttcat

SEQ ID NO: 31974 - DNA, 80 bp, synthetic construct
  source 1..80: mol_type = other DNA
ctcacaatgcacattagcatagtaaaaacactgagaggccccacaggaaagaaaagccagtctttatctaaacatattta

SEQ ID NO: 31975 - DNA, 80 bp, synthetic construct; identical to SEQ ID NO: 11883
  source 1..80: mol_type = other DNA

SEQ ID NO: 31976 - DNA, 80 bp, synthetic construct
  source 1..80: mol_type = other DNA
atcactctgtcaatctcagcttgtactttttctggtaaagagggaagggttctattattttttaaacttttatgctttat

SEQ ID NO: 31977 - DNA, 80 bp, synthetic construct
  source 1..80: mol_type = other DNA
tgtaaatctccttgagcctggttaggctatgggatggaatgaccaggattaatatggctaaacttcattacatcagaccc

SEQ ID NO: 31978 - DNA, 80 bp, synthetic construct
  source 1..80: mol_type = other DNA
taaatttgggctggggtgggcccaagtattcaacccatagcagatctacagactctaatttctcaggtagatatgtaaga

SEQ ID NO: 31979 - DNA, 80 bp, synthetic construct; identical to SEQ ID NO: 11884
  source 1..80: mol_type = other DNA

SEQ ID NO: 31980 - DNA, 80 bp, synthetic construct
  source 1..80: mol_type = other DNA
catcctggctaacacggtgaaatcccatctctactaaaaatacaaaaaattagccgggcgtggtggcgggcgcctgtagt

SEQ ID NO: 31981 - DNA, 80 bp, synthetic construct
  source 1..80: mol_type = other DNA
tcaattctggctaatagaatgtaagcagaagtgatgtttaatccttggaacaggttcctaaagaaaggatatgcacttcc

SEQ ID NO: 31982 - DNA, 80 bp, synthetic construct
  source 1..80: mol_type = other DNA
gaaagcgaaataaattatcatttttgtaaaacatcttatttgggggtaaaatacccataacataaaatttactatgttag

SEQ ID NO: 31983 - DNA, 80 bp, synthetic construct; identical to SEQ ID NO: 11885
  source 1..80: mol_type = other DNA

SEQ ID NO: 31984 - DNA, 80 bp, synthetic construct
  source 1..80: mol_type = other DNA
gcctcattaataaacagttacccacaatttgaaaaactgtattgttaagagttcccacccccatatgttcaaacttttct

SEQ ID NO: 31985 - DNA, 80 bp, synthetic construct
  source 1..80: mol_type = other DNA
aacatcttagagaggtagtacttgaacagattcttcaagaagagctaggagtttactatgtaggaaaactgggcaagtag

SEQ ID NO: 31986 - DNA, 80 bp, synthetic construct
  source 1..80: mol_type = other DNA
attattctggaggaaattggaaggcatcacttaaaagaagggaaggacacaactagactttcacatcagaaagttaactg

SEQ ID NO: 31987 - DNA, 80 bp, synthetic construct
  source 1..80: mol_type = other DNA
aaaatatgaagaatgtgcagtttccaagtcctcatcactcatgactgttctgcctctcttttcatcctacaatgctatct

SEQ ID NO: 31988 - DNA, 80 bp, synthetic construct; identical to SEQ ID NO: 11886
  source 1..80: mol_type = other DNA

SEQ ID NO: 31989 - DNA, 80 bp, synthetic construct
  source 1..80: mol_type = other DNA
ctgccccaagtgctggacacctttggatggatgaaaatcaagacaattattttcttatgcctataattttggggaagctt

SEQ ID NO: 31990 - DNA, 80 bp, synthetic construct
  source 1..80: mol_type = other DNA
cctgttttatatactggaaataggagtgcacacctcttaagagggcattatgaattatatgaatgcaaggacgcagagca

SEQ ID NO: 31991 - DNA, 80 bp, synthetic construct
  source 1..80: mol_type = other DNA
cttctggaaacttcaatttgtccaatgttgctcttaatgttaatgatcccttccttacctgcacaacatatagcgagtct

SEQ ID NO: 31992 - DNA, 80 bp, synthetic construct; identical to SEQ ID NO: 11887
  source 1..80: mol_type = other DNA

SEQ ID NO: 31993 - DNA, 80 bp, synthetic construct
  source 1..80: mol_type = other DNA
taggcccaactaatgatagaacagagctttgaggattaactgctatgttccccctttgtgtatacctccaaataacagta

SEQ ID NO: 31994 - DNA, 80 bp, synthetic construct
  source 1..80: mol_type = other DNA
tacattttctgaaatattgcccctatttttactcctgtagcaggctgagtaatgacccgcaaagatatccattcacatcc

SEQ ID NO: 31995 - DNA, 80 bp, synthetic construct; identical to SEQ ID NO: 11888
  source 1..80: mol_type = other DNA

SEQ ID NO: 31996 - DNA, 80 bp, synthetic construct
  source 1..80: mol_type = other DNA
tgatttcatacttctgatatctagaactgtgagagaatcaatctgtgctattttaggcaccaagtttgtgatcatatttt

SEQ ID NO: 31997 - DNA, 80 bp, synthetic construct
  source 1..80: mol_type = other DNA
agaaacaaacaatttcagttttttccagttgctgaagagagtttggtggggtccaggcaggaatttcattatccatggaa

SEQ ID NO: 31998 - DNA, 80 bp, synthetic construct
  source 1..80: mol_type = other DNA
tctctagcaaaacagttcagctctctgtcaaaaatatatccagccttggaccatttctcaccaccgcaacagcttgccac

SEQ ID NO: 31999 - DNA, 80 bp, synthetic construct; identical to SEQ ID NO: 11889
  source 1..80: mol_type = other DNA

SEQ ID NO: 32000 - DNA, 80 bp, synthetic construct
  source 1..80: mol_type = other DNA
tcaagggcactctttctactgagaacaccaagaaaagatgaaaaagatacatgtgtaaacatttaagcacacatacatac

SEQ ID NO: 32001 - DNA, 80 bp, synthetic construct
  source 1..80: mol_type = other DNA
gagtttttgacaaagactcaaaggcttagagggacaaaaattgtggtgcagggcccaccaagggagaagtgagtttgaac

SEQ ID NO: 32002 - DNA, 80 bp, synthetic construct
  source 1..80: mol_type = other DNA
aatgttcatggcagctttattcatagcatccaaaacttggaaacaaatgtccgtcagtacagaacagattgacaaaaagt

SEQ ID NO: 32003 - DNA, 80 bp, synthetic construct; identical to SEQ ID NO: 11890
  source 1..80: mol_type = other DNA

SEQ ID NO: 32004 - DNA, 80 bp, synthetic construct
  source 1..80: mol_type = other DNA
taacttcaaaaacccaaaaaaaactaaaaggaaaaacccatctgtggctgacatcggccccaatttactgaacaaagata

SEQ ID NO: 32005 - DNA, 80 bp, synthetic construct
  source 1..80: mol_type = other DNA
aagatggatccttctgatggatttgtctccatttcctactgagagtctactttacatggcataagacatacctagtgcag

SEQ ID NO: 32006 - DNA, 80 bp, synthetic construct
  source 1..80: mol_type = other DNA
agagttgttcactgttctatcttccattcctagcacagtgctgggcatagaacaagcacttactcacttagtaagtatct

SEQ ID NO: 32007 - DNA, 80 bp, synthetic construct; identical to SEQ ID NO: 11891
  source 1..80: mol_type = other DNA

SEQ ID NO: 32008 - DNA, 80 bp, synthetic construct
  source 1..80: mol_type = other DNA
tatgcattttgttgtgcattatataatttagtactcatagaaactctctgggataggtacaattattaccaccccacaca

SEQ ID NO: 32009 - DNA, 80 bp, synthetic construct
  source 1..80: mol_type = other DNA
atgttatgctaaacactaggaatgcactaatggttaagacaatgcccatactcttaaagaggctaaggctaagaaaggct

SEQ ID NO: 32010 - DNA, 80 bp, synthetic construct
  source 1..80: mol_type = other DNA
tgtgtttgacagaccatcatttgttttataacacaggtaatgccatactcctttcaatttcttcaattccagagcactcc

SEQ ID NO: 32011 - DNA, 80 bp, synthetic construct
  source 1..80: mol_type = other DNA
ttctctgccagcaacttcctatatattttgctggttcatcttctattaaatcttgaaatggtggagttcttcaggaactt

SEQ ID NO: 32012 - DNA, 80 bp, synthetic construct; identical to SEQ ID NO: 11892
  source 1..80: mol_type = other DNA

SEQ ID NO: 32013 - DNA, 80 bp, synthetic construct
  source 1..80: mol_type = other DNA
tcctggatatctcaaatccaggtcttcactgctactatcttggactaacctactgttatttccctactgctattggacct

SEQ ID NO: 32014 - DNA, 80 bp, synthetic construct
  source 1..80: mol_type = other DNA
tcccttctctacttaaagccattcaagagcttccattaatgttaggataacaactagtgtccttaacaggaacctgcatg

SEQ ID NO: 32015 - DNA, 80 bp, synthetic construct
  source 1..80: mol_type = other DNA
ctttcatttcttcaagttccctgtccttttcatttcaggggcttttcattttctattctgtctgccagattgtttcacca

SEQ ID NO: 32016 - DNA, 80 bp, synthetic construct; identical to SEQ ID NO: 11893
  source 1..80: mol_type = other DNA

SEQ ID NO: 32017 - DNA, 80 bp, synthetic construct
  source 1..80: mol_type = other DNA
acttttccccaacctctttgccccaatctctttgccccaactttgagctcacaaaaacatatgttgtatggaatcaatgt

SEQ ID NO: 32018 - DNA, 80 bp, synthetic construct
  source 1..80: mol_type = other DNA
aaggtttctccccatgtgatagtctgaaatatggcctcatgggatgagaaagacctgaccgacccccagcctgacacccg

SEQ ID NO: 32019 - DNA, 80 bp, synthetic construct; identical to SEQ ID NO: 11894
  source 1..80: mol_type = other DNA

SEQ ID NO: 32020 - DNA, 80 bp, synthetic construct
  source 1..80: mol_type = other DNA
ataaatactgagggaagtcagagaccggtgccagtgcaggtccttggtatgctgagcgccagtcccctgggcccactttt

SEQ ID NO: 32021 - DNA, 80 bp, synthetic construct
  source 1..80: mol_type = other DNA
gtttcattatatttaatggtaattttaagtgttcatgccaatctgttcatgccaatctgttctatcatagaccagaaggc

SEQ ID NO: 32022 - DNA, 80 bp, synthetic construct
  source 1..80: mol_type = other DNA
ggaaaacagagagaacacgttcctctgctataaatgggtaacatggttacttcattataaaagcatccagagtaggtttg

SEQ ID NO: 32023 - DNA, 80 bp, synthetic construct
  source 1..80: mol_type = other DNA
caaggtgcctttaacagattataggactatcaacatcaaacactcacctttcgttggccaagaaacttaccatttttctt

SEQ ID NO: 32024 - DNA, 80 bp, synthetic construct; identical to SEQ ID NO: 11895
  source 1..80: mol_type = other DNA

SEQ ID NO: 32025 - DNA, 80 bp, synthetic construct
  source 1..80: mol_type = other DNA
aaatatctatttatgtattcaaccaacatgaactgagtgagcatctatcatgtgtccctagagcaaggcatgaggataaa

SEQ ID NO: 32026 - DNA, 80 bp, synthetic construct
  source 1..80: mol_type = other DNA
ctgggtatggtggtacatgcctgtggacccagctactcaggaggctgaggtgggaaggtcacttgagcctgagagtttga

SEQ ID NO: 32027 - DNA, 80 bp, synthetic construct
  source 1..80: mol_type = other DNA
ctaatcatgtctcagccacttaagaaggctgagacatgattagtgttaatctggtgtaccaagtatggacttcttagtaa

SEQ ID NO: 32028 - DNA, 80 bp, synthetic construct; identical to SEQ ID NO: 11896
  source 1..80: mol_type = other DNA

SEQ ID NO: 32029 - DNA, 80 bp, synthetic construct
  source 1..80: mol_type = other DNA
ataggcagccattgctaagcacctttcatattttatctcattaatctcacaaccaccttacagtagtaatagttcttatc

SEQ ID NO: 32030 - DNA, 80 bp, synthetic construct
  source 1..80: mol_type = other DNA
cagagtgaaagtaagaatgagtgagagtgagagagttggggtgggagagagggagaatggggatgtgtatgttcatgaat

SEQ ID NO: 32031 - DNA, 80 bp, synthetic construct; identical to SEQ ID NO: 11897
  source 1..80: mol_type = other DNA

SEQ ID NO: 32032 - DNA, 80 bp, synthetic construct
  source 1..80: mol_type = other DNA
gcatgtcctgtcttgctaggaaaagcagagctgagattcaatctcaagtcagtttgctcctaaagtaagcatctttgctt

SEQ ID NO: 32033 - DNA, 80 bp, synthetic construct
  source 1..80: mol_type = other DNA
taaaaatgacttctaactagcaaagtatacagcctagaatcttagcttgtacttgggagggattcagaactccattacta

SEQ ID NO: 32034 - DNA, 80 bp, synthetic construct
  source 1..80: mol_type = other DNA
tacgtgcaccctgtcagtcattttatccatttctttagaaagattaaatgacccagagggcctctgagaagactttgtaa

SEQ ID NO: 32035 - DNA, 80 bp, synthetic construct
  source 1..80: mol_type = other DNA
gaatctataaaagtcaaacaaaagcaataggagacaggaaatgtaatgctaggaataaaaattccaaatgtagcataagc

SEQ ID NO: 32036 - DNA, 80 bp, synthetic construct; identical to SEQ ID NO: 11898
  source 1..80: mol_type = other DNA

SEQ ID NO: 32037 - DNA, 80 bp, synthetic construct
  source 1..80: mol_type = other DNA
cgagagagagagagagatcctaagaggcacaaaaatgcatgctgtttctatatttctctgaggtttaacatctgtccctc

SEQ ID NO: 32038 - DNA, 80 bp, synthetic construct
  source 1..80: mol_type = other DNA
ttttattttcacttacatacaaatctggaaagatatccaccaaggtcctatagaggtaccgctgagtgtatgtgtgtgtg

SEQ ID NO: 32039 - DNA, 80 bp, synthetic construct
  source 1..80: mol_type = other DNA
aaaataaacaaggaaatgggaaataaagctttaaaacagtggttctttacttttttgagttatagaatcctttgaaaata

SEQ ID NO: 32040 - DNA, 80 bp, synthetic construct; identical to SEQ ID NO: 11899
  source 1..80: mol_type = other DNA

SEQ ID NO: 32041 - DNA, 80 bp, synthetic construct
  source 1..80: mol_type = other DNA
gagactgactgtgcagaaaaaaaatggaatgcacagcagatgacatgtgttattatgctgatagagagggacataaagct

SEQ ID NO: 32042 - DNA, 80 bp, synthetic construct
  source 1..80: mol_type = other DNA
gtagtaagaaatcaaaggcattctagatggtgagaacaccatatacagatgtaaaggggaaatgcagaaggtgtttggga

SEQ ID NO: 32043 - DNA, 80 bp, synthetic construct
  source 1..80: mol_type = other DNA
attatcattctttacaataaaatatttgatgggaggaagttaagaaccacataagaggaccagggttgaggaaggctcct

SEQ ID NO: 32044 - DNA, 80 bp, synthetic construct; identical to SEQ ID NO: 11900
  source 1..80: mol_type = other DNA

SEQ ID NO: 32045 - DNA, 80 bp, synthetic construct
  source 1..80: mol_type = other DNA
ccctttactccatttagccacttgccaaaaatcaaaatttcctttaaaatttagcccaatttcttccaacattctacaaa

SEQ ID NO: 32046 - DNA, 80 bp, synthetic construct
  source 1..80: mol_type = other DNA
catcaattgtcctctaaccatgtcatgaaaagtcaggcaacataaagtagataatgggtatatgtagggagaccccctga

SEQ ID NO: 32047 - DNA, 80 bp, synthetic construct
  source 1..80: mol_type = other DNA
cagggaggtttcacatcaccaagattcctatcccagaaaagcagatgatcatagctctgggaatggaatgcaacccttgt

SEQ ID NO: 32048 - DNA, 80 bp, synthetic construct; identical to SEQ ID NO: 11901
  source 1..80: mol_type = other DNA

SEQ ID NO: 32049 - DNA, 80 bp, synthetic construct
  source 1..80: mol_type = other DNA
atactgatgttaaagaattacttcatccccatgtgaccatctcacctcataatcaaacaaccctaaatccctcactaacc

SEQ ID NO: 32050 - DNA, 80 bp, synthetic construct
  source 1..80: mol_type = other DNA
aggtatacaaatcaaatagtctcgggctcaaatccttatttgttattatttagctgaataacccgggcagttcactgttc

SEQ ID NO: 32051 - DNA, 80 bp, synthetic construct
  source 1..80: mol_type = other DNA
ccagatcatacctaacttgtgtgcccatcatgaagatgaaatgaaaactgacataaaaatacttatgtaagatctattag

SEQ ID NO: 32052 - DNA, 80 bp, synthetic construct; identical to SEQ ID NO: 11902
  source 1..80: mol_type = other DNA

SEQ ID NO: 32053 - DNA, 80 bp, synthetic construct
  source 1..80: mol_type = other DNA
aacccaacaggacagaaaccatttagcctttttacttctttgttgtggaggcaaataccatgaaaaacatttgacccttc

SEQ ID NO: 32054 - DNA, 80 bp, synthetic construct
  source 1..80: mol_type = other DNA
attcctaagctgaagtaaagaaactccctgcaggagtcagagggcaaattaggctttccagccttcttctacagtaataa

SEQ ID NO: 32055 - DNA, 80 bp, synthetic construct
  source 1..80: mol_type = other DNA
gtgggtaataaaagtggagtagaccagaatagcactgcagaggctttataacctgcattgatatttgaactgccacccac

SEQ ID NO: 32056 - DNA, 80 bp, synthetic construct; identical to SEQ ID NO: 11903
  source 1..80: mol_type = other DNA

SEQ ID NO: 32057 - DNA, 80 bp, synthetic construct
  source 1..80: mol_type = other DNA
cagtaaaatagctcaatagcagaatggtaatgatagcagaatctgtgaatttgaagacagctcagaagaacatattcaaa

SEQ ID NO: 32058 - DNA, 80 bp, synthetic construct
  source 1..80: mol_type = other DNA
ttgtgccatcagtatccaagagtccaagaaagagaggaaaaagaatgtgtagttgaaaaatatttgaagaaagagtggca

SEQ ID NO: 32059 - DNA, 80 bp, synthetic construct
  source 1..80: mol_type = other DNA
gttcattacatatgggggataacaattcagatgacagtagatttcttaacagaaaccacagaggccaaaaagaagaagca

SEQ ID NO: 32060 - DNA, 80 bp, synthetic construct; identical to SEQ ID NO: 11904
  source 1..80: mol_type = other DNA

SEQ ID NO: 32061 - DNA, 80 bp, synthetic construct
  source 1..80: mol_type = other DNA
atgtagttctcaatgtatatagagataacacttacaacaattatgaagtagagagggtaaaggaacctaaatggttgcaa

SEQ ID NO: 32062 - DNA, 80 bp, synthetic construct
  source 1..80: mol_type = other DNA
tatgttcaagtaattcacaggaagataggaaaaggaaaacagaggcataaaaaacaggaaaaacaaaataaataataaaa

SEQ ID NO: 32063 - DNA, 80 bp, synthetic construct
  source 1..80: mol_type = other DNA
aaagaatagaaatgcatataccatgcacatactaatcagaaaaaaagttgtggctatattatatcagataaagtacagtt

SEQ ID NO: 32064 - DNA, 80 bp, synthetic construct
  source 1..80: mol_type = other DNA
aaggaaaaactactagaactgaatggagaaatagatactctcaactgtcctttgaaacttcaacattcttctttcagtaa

SEQ ID NO: 32065 - DNA, 80 bp, synthetic construct; identical to SEQ ID NO: 11905
  source 1..80: mol_type = other DNA

SEQ ID NO: 32066 - DNA, 80 bp, synthetic construct
  source 1..80: mol_type = other DNA
tttgggggcttagttttaacattctgtggctaattctgtcacttagtattaccaattgggtatttctcccataaagtgat

SEQ ID NO: 32067 - DNA, 80 bp, synthetic construct
  source 1..80: mol_type = other DNA
tgttgtctctcagcaagttacctgtgctgagtggcaggaaaaccagtattggtttcttgagatagggtttgatgtctgag

SEQ ID NO: 32068 - DNA, 80 bp, synthetic construct; identical to SEQ ID NO: 11906
  source 1..80: mol_type = other DNA

SEQ ID NO: 32069 - DNA, 80 bp, synthetic construct
  source 1..80: mol_type = other DNA
tgcaaatagtaaacatttaataatattccatccctagaaagtgcaggtggaatcatgccagttaatgggttaggaaatga

SEQ ID NO: 32070 - DNA, 80 bp, synthetic construct
  source 1..80: mol_type = other DNA
ccaggtgcgactgctcgaagtccacaaggaagaagttgccaaggaagggcaggcgccagggccccggcgggtagttcttt

SEQ ID NO: 32071 - DNA, 80 bp, synthetic construct
  source 1..80: mol_type = other DNA
aggcttattgctcaatcaattgaccaatcgactgttttttattaagtgttcattgcatcgagacagttgggtgttgagga

SEQ ID NO: 32072 - DNA, 80 bp, synthetic construct
  source 1..80: mol_type = other DNA
tggaatgcaagaggtgtagggaaacatgttttctgtctcccagaaatatgaaaggagatgggctgaaaacattaaatcaa

SEQ ID NO: 32073 - DNA, 80 bp, synthetic construct
  source 1..80: mol_type = other DNA
caccatgcctagctaatttgtgtatttttagtagagatggggtttcaaccatgtaggccaggcttgtcttgaactcctga

SEQ ID NO: 32074 - DNA, 80 bp, synthetic construct; identical to SEQ ID NO: 11907
  source 1..80: mol_type = other DNA

SEQ ID NO: 32075 - DNA, 80 bp, synthetic construct; identical to SEQ ID NO: 11908
  source 1..80: mol_type = other DNA

SEQ ID NO: 32076 - DNA, 80 bp, synthetic construct
  source 1..80: mol_type = other DNA
catttcagagttctattcacaaagtaatttgaggtctctggtgttctcaggcacagatttcttgaagagcaaagcagaag

SEQ ID NO: 32077 - DNA, 80 bp, synthetic construct
  source 1..80: mol_type = other DNA
aaacaagcatattgagaagcattaaataaacaaaagtagaaagtatagcatcaaagtgagtgagacactccttcagtgtt

SEQ ID NO: 32078 - DNA, 80 bp, synthetic construct
  source 1..80: mol_type = other DNA
tgagagcattcatcatctatcatttaacaaaatatttatggagtactattctgtgccaggcctgagacaaattcatggaa

SEQ ID NO: 32079 - DNA, 80 bp, synthetic construct
  source 1..80: mol_type = other DNA
attttaattatatggacagtcttcaacttccagagtccagtaattcctcccaattgaacccatccagtgtaaagatggga

SEQ ID NO: 32080 - DNA, 80 bp, synthetic construct
  source 1..80: mol_type = other DNA
agtgatattctgatctccatggagtaatgggcaagaaaattgccagggagatcaagaagtgccaggttgggagcttacca

SEQ ID NO: 32081 - DNA, 80 bp, synthetic construct; identical to SEQ ID NO: 11909
  source 1..80: mol_type = other DNA

SEQ ID NO: 32082 - DNA, 80 bp, synthetic construct
  source 1..80: mol_type = other DNA
acatgcatatgcacgaatggcatttgtttaaaggttcacattaaatagcttaatatatgtatgcaagccatcaactgcac

SEQ ID NO: 32083 - DNA, 80 bp, synthetic construct
  source 1..80: mol_type = other DNA
taatggcaaattgtcaaatttatgataatagcctccagtatccaataacagagcagagaagtaaatgggccctggactag

SEQ ID NO: 32084 - DNA, 80 bp, synthetic construct
  source 1..80: mol_type = other DNA
cgctccctggggttcatgccattctcctgcctcagcctccagagtagctgggactacaggtgcctgccacctctccaggg

SEQ ID NO: 32085 - DNA, 80 bp, synthetic construct; identical to SEQ ID NO: 11910
  source 1..80: mol_type = other DNA

SEQ ID NO: 32086 - DNA, 80 bp, synthetic construct
  source 1..80: mol_type = other DNA
tatcccagacatcatgaatttttaaagctccctggtgattccaatgtacagctagtggttgggagccactctcatgagaa

SEQ ID NO: 32087 - DNA, 80 bp, synthetic construct
  source 1..80: mol_type = other DNA
atgctaatctacatgggctttacatgatgtttttgatgctacagcttttgaactccagaactgaagcacccttaaagatc

SEQ ID NO: 32088 - DNA, 80 bp, synthetic construct
  source 1..80: mol_type = other DNA
gaaggagaagttctgaaggactctgattagagcaagtttcatgttcatgagagcaaacctcatgccaatgcagtttctgg

SEQ ID NO: 32089 - DNA, 80 bp, synthetic construct
  source 1..80: mol_type = other DNA
agtacacaggatacttttgtgggctggtcattgaaatcctgctatgcttattttgctatgagaattgtaagctacagatc

SEQ ID NO: 32090 - DNA, 80 bp, synthetic construct
  source 1..80: mol_type = other DNA
gtaggttcctgcctcaagtcacacttacattggtcatgaggaaggagaaggggaaattgtcttgtactatttcaaaattg

SEQ ID NO: 32091 - DNA, 80 bp, synthetic construct
  source 1..80: mol_type = other DNA
cacaggcatatgatgctactgtaccgatgtaatgcagtatcatcactgctttctttgtctatctgttccagtaagctata

SEQ ID NO: 32092 - DNA, 80 bp, synthetic construct; identical to SEQ ID NO: 11912
  source 1..80: mol_type = other DNA

SEQ ID NO: 32093 - DNA, 80 bp, synthetic construct
  source 1..80: mol_type = other DNA
cccctttgggaatgaacatcccattgatctcaacatcttttttgcagaccctctcaagtctcatagcaattgggaataat

SEQ ID NO: 32094 - DNA, 80 bp, synthetic construct
  source 1..80: mol_type = other DNA
gagactaactcatactggtaaaggatcgaagcatttataaagtgttttaataactgtcatgcccattgctgtgctcagtg

SEQ ID NO: 32095 - DNA, 80 bp, synthetic construct; identical to SEQ ID NO: 11913
  source 1..80: mol_type = other DNA

SEQ ID NO: 32096 - DNA, 80 bp, synthetic construct
  source 1..80: mol_type = other DNA
tctcttcataccacaaagaatcccaattttggcagaggtctgaaaacagtgtgggtgatatgcacctagtatttggtgtt

SEQ ID NO: 32097 - DNA, 80 bp, synthetic construct
  source 1..80: mol_type = other DNA
cgtcagactacagccagaccagagcaagtcctgccaatatcagcagagctcactatccaactatgatgtgtggaggagtt

SEQ ID NO: 32098 - DNA, 80 bp, synthetic construct
  source 1..80: mol_type = other DNA
aaaaaagtcacatgtctgtaaccaagaaaataaaaagagataaaaagagcaaattcctgtgtccatatgtggatacagct

SEQ ID NO: 32099 - DNA, 80 bp, synthetic construct; identical to SEQ ID NO: 11914
  source 1..80: mol_type = other DNA

SEQ ID NO: 32100 - DNA, 80 bp, synthetic construct
  source 1..80: mol_type = other DNA
gcatttttgctaaggtttcacctcctccctccttctccatgtaccatccactcaccttattgggtaaaactgcatcaatt

SEQ ID NO: 32101 - DNA, 80 bp, synthetic construct
  source 1..80: mol_type = other DNA
aggtaaatcagatcaatgtagggcatcacagtttagatgaagagaaatctaagtgaagccctcaaatccctaagggaaaa

SEQ ID NO: 32102 - DNA, 80 bp, synthetic construct
  source 1..80: mol_type = other DNA
ctgtgtaatttccagagagagcatttccgcataacatactcagtgttatgggtgtgttccttgaatgatcctaaaagtac

SEQ ID NO: 32103 - DNA, 80 bp, synthetic construct
  source 1..80: mol_type = other DNA
aagggaccaatattggtctacagaccacttcttggtattcaaagtgtggtccatgggtcagaagcatctgagagctcatt

SEQ ID NO: 32104 - DNA, 80 bp, synthetic construct; identical to SEQ ID NO: 11915
  source 1..80: mol_type = other DNA

SEQ ID NO: 32105 - DNA, 80 bp, synthetic construct
  source 1..80: mol_type = other DNA
aattcacaaccaaaaccaatatgaaaggagtgtgagaaaggtcgacagagctgtgatttaccagtgaagacttctgtgat

SEQ ID NO: 32106 - DNA, 80 bp, synthetic construct
  source 1..80: mol_type = other DNA
tgatttctatatgaaacagtaaaacaatagactatttcctttatcacagcaagttatattgggatagatagatgaatagt

SEQ ID NO: 32107 - DNA, 80 bp, synthetic construct; identical to SEQ ID NO: 11916
  source 1..80: mol_type = other DNA

SEQ ID NO: 32108 - DNA, 80 bp, synthetic construct
  source 1..80: mol_type = other DNA
ggttttccccacaagttactaatccattccaaagtggaaaataactttgcagtagattaacctggtgaacacactttcaa

SEQ ID NO: 32109 - DNA, 80 bp, synthetic construct
  source 1..80: mol_type = other DNA
cagcaacctaataaatttctaggcagaaatttttattcagtggatctgaaggaggctgagaattggcatttgatctgatg

SEQ ID NO: 32110 - DNA, 80 bp, synthetic construct
  source 1..80: mol_type = other DNA
acttataacattcaaacatgtgtcgttctgctatgtggcagaaattctcatcatcctggaatacttcctgcacattttca

SEQ ID NO: 32111 - DNA, 80 bp, synthetic construct; identical to SEQ ID NO: 11917
  source 1..80: mol_type = other DNA

SEQ ID NO: 32112 - DNA, 80 bp, synthetic construct
  source 1..80: mol_type = other DNA
acacttcagcaggtggcctgatagggactttcatttgagaatgtgtaaaataacaggtttgtacttgaaatgagtcttta

SEQ ID NO: 32113 - DNA, 80 bp, synthetic construct
  source 1..80: mol_type = other DNA
atgccgtggcatactaattgttgtgtctgatatcaaatttcatgtgctgtctctgactcattctcatatctccttcccca

SEQ ID NO: 32114 - DNA, 80 bp, synthetic construct
  source 1..80: mol_type = other DNA
aaaaaattatgaaaaactaaacatcctcctataactaccaccacattttaccttttgtgtatcttcgaggcgactttctt

SEQ ID NO: 32115 - DNA, 80 bp, synthetic construct
  source 1..80: mol_type = other DNA
tggagcaattctagttttctctaccaaccagaagagtaaaagacatcaaggttctcaactggaagccattccttctatga

SEQ ID NO: 32116 - DNA, 80 bp, synthetic construct; identical to SEQ ID NO: 11918
  source 1..80: mol_type = other DNA

SEQ ID NO: 32117 - DNA, 80 bp, synthetic construct
  source 1..80: mol_type = other DNA
gaggtgaacaaaaactaagatgtgatagaccacaatctcatgggatttagcaaaggaagtgctcagagggaaagttacag

SEQ ID NO: 32118 - DNA, 80 bp, synthetic construct
  source 1..80: mol_type = other DNA
cagtaatctatgttcatgccacaacatagtaaacgaagaagggcaaactaagcctgaagccagcagaagaaagaaaatga

SEQ ID NO: 32119 - DNA, 80 bp, synthetic construct
  source 1..80: mol_type = other DNA
atatgatgacagggtttgtgacagggggctgatagctaaaaatgtatgaggtctctagattgacaaaaaaagttttaaag

SEQ ID NO: 32120 - DNA, 80 bp, synthetic construct; identical to SEQ ID NO: 11919
  source 1..80: mol_type = other DNA

SEQ ID NO: 32121 - DNA, 80 bp, synthetic construct
  source 1..80: mol_type = other DNA
tggaaaattaaaatcagcacctttttaccatccttcctctatgcatgcaacaggaaacccacatgtccagtcaagacaga

SEQ ID NO: 32122 - DNA, 80 bp, synthetic construct
  source 1..80: mol_type = other DNA
agacagagacccactatcagacaactacagtagcatgtattgattgtggatgatacaagatgggtaagcactgtgcttca

SEQ ID NO: 32123 - DNA, 80 bp, synthetic construct; identical to SEQ ID NO: 11983
  source 1..80: mol_type = other DNA

SEQ ID NO: 32124 - DNA, 80 bp, synthetic construct; identical to SEQ ID NO: 11920
  source 1..80: mol_type = other DNA

SEQ ID NO: 32125 - DNA, 80 bp, synthetic construct
  source 1..80: mol_type = other DNA
actgccaaccaacagataccaagtgccttccccttccaccatcccatacactccatgcttaaaactttggtacaatcaca

SEQ ID NO: 32126 - DNA, 80 bp, synthetic construct
  source 1..80: mol_type = other DNA
gttgcattaccacagccctccttttgtctggtcactggaataacccaacagcaggaatatcagctccatggcaggcagct

SEQ ID NO: 32127 - DNA, 80 bp, synthetic construct
  source 1..80: mol_type = other DNA
ccatagttaaatgtgcagactctagtcccagaaggacatggctttccccagcatggagcagtaagtgacattttataatg

SEQ ID NO: 32128 - DNA, 80 bp, synthetic construct
  source 1..80: mol_type = other DNA
acctccttgagttttccactggtgaaggttggagacagcaatgatcgtaatctcttccattcttcatcctcagctataga

SEQ ID NO: 32129 - DNA, 80 bp, synthetic construct; identical to SEQ ID NO: 11921
  source 1..80: mol_type = other DNA

SEQ ID NO: 32130 - DNA, 80 bp, synthetic construct
  source 1..80: mol_type = other DNA
agacctagcacttctgcagtgtagagacggagtggagacagacaagcaggtgactttggtggattgtatgttgcctcaga

SEQ ID NO: 32131 - DNA, 80 bp, synthetic construct
  source 1..80: mol_type = other DNA
ttcatggatagaaagaaaaaagagataattatttttgccaacttggaactggcctatcaagccaacatgcttgaaacttt

SEQ ID NO: 32132 - DNA, 80 bp, synthetic construct; identical to SEQ ID NO: 11922
  source 1..80: mol_type = other DNA

SEQ ID NO: 32133 - DNA, 80 bp, synthetic construct
  source 1..80: mol_type = other DNA
tctagaactactatgtcagttctgcaaggttctaggataccagatcaacacacaaaatcaaagcacatttctatgtaaca

SEQ ID NO: 32134 - DNA, 80 bp, synthetic construct
  source 1..80: mol_type = other DNA
agaggcatactatgttcatgaattgaaagatcaaacagtaaagatacacattttccataaactggtctatatatttaatt

SEQ ID NO: 32135 - DNA, 80 bp, synthetic construct
  source 1..80: mol_type = other DNA
tacagctactagggtcaacacagtgtggtattggtggaataataaacacagtgatcaatgggacacagtagtacgtgaga

SEQ ID NO: 32136 - DNA, 80 bp, synthetic construct
  source 1..80: mol_type = other DNA
tttagtaaagcattaaactttatgacttttagaaaaaaacagcaatataggaaggagggctaggcaaagaactttcaaac

SEQ ID NO: 32137 - DNA, 80 bp, synthetic construct; identical to SEQ ID NO: 11923
  source 1..80: mol_type = other DNA

SEQ ID NO: 32138 - DNA, 80 bp, synthetic construct
  source 1..80: mol_type = other DNA
atatagtaacatgaatatactgtatttatagttatgcaagattgcaagatgttaccattcgggggggacaggatgaagtg

SEQ ID NO: 32139 - DNA, 80 bp, synthetic construct
  source 1..80: mol_type = other DNA
tcatgtcaggatctgtgatagccagcacaggctgttgaccatcataaaagctgtgtgaaaaaaacagagttgattaaaca

SEQ ID NO: 32140 - DNA, 80 bp, synthetic construct; identical to SEQ ID NO: 11924
  source 1..80: mol_type = other DNA

SEQ ID NO: 32141 - DNA, 80 bp, synthetic construct
  source 1..80: mol_type = other DNA
ggatcaatacaacaggaagagctaaatatcctaaatatatatgcacccaaatacaggagcacccagattcataaagcaag

SEQ ID NO: 32142 - DNA, 80 bp, synthetic construct
  source 1..80: mol_type = other DNA
cagaaatctccaccccaaattaacagaatatacattcttctcagcaccacatcgcacttattctaaaattgaccacataa

SEQ ID NO: 32143 - DNA, 80 bp, synthetic construct
  source 1..80: mol_type = other DNA
ggtaaataaggaagtgaaggcagaaataaagatgttctatgaaaccaatgagaacaaaggcacaatgtaccagaatctct

SEQ ID NO: 32144 - DNA, 80 bp, synthetic construct
  source 1..80: mol_type = other DNA
taagatcagagcagaacagaaggagatagagacacaacaaacccttcaaaaaatcagtgaatccaggagctggttttttg

SEQ ID NO: 32145 - DNA, 80 bp, synthetic construct; identical to SEQ ID NO: 11925
  source 1..80: mol_type = other DNA

SEQ ID NO: 32146 - DNA, 80 bp, synthetic construct
  source 1..80: mol_type = other DNA
gaatcctccctaactcattttatgaggccagtatctcctgataccaaagcctgacagagacacaacaaaaaaagagaatt

SEQ ID NO: 32147 - DNA, 80 bp, synthetic construct
  source 1..80: mol_type = other DNA
ccatcacataaacagaaccaatgacaaaaaccacataattacctcaatagatgcagaaaaggcctttgacaaaattcaac

SEQ ID NO: 32148 - DNA, 80 bp, synthetic construct; identical to SEQ ID NO: 11926
  source 1..80: mol_type = other DNA

SEQ ID NO: 32149 - DNA, 80 bp, synthetic construct
  source 1..80: mol_type = other DNA
caataatagacaaacagagagccaaatcatgagtgaactcccattcacaattactacaaagagaataaaatatctaggaa

SEQ ID NO: 32150 - DNA, 80 bp, synthetic construct
  source 1..80: mol_type = other DNA
agattcaatgctatttccatcaagctaccactgactttcctcatagaattggaaaaaactactttaaagttcatatggaa

SEQ ID NO: 32151 - DNA, 80 bp, synthetic construct
  source 1..80: mol_type = other DNA
gcctcagaaataacaccatgcatctactaccatctgatgtttgacaaacctgacacacaaaagcaatggggaaaagattt

SEQ ID NO: 32152 - DNA, 80 bp, synthetic construct
  source 1..80: mol_type = other DNA
accattcaggacacaggcatgggcaaaggcttcataaatataacaccaaaagcaatggcaacaaaagccaaaattgacaa

SEQ ID NO: 32153 - DNA, 80 bp, synthetic construct; identical to SEQ ID NO: 11927
  source 1..80: mol_type = other DNA

SEQ ID NO: 32154 - DNA, 80 bp, synthetic construct
  source 1..80: mol_type = other DNA
ttggtgggagtgtaaattagttcaaccattgtggaagacagtgtggtgattcctcaaggatctagaactagaaataccat

SEQ ID NO: 32155 - DNA, 80 bp, synthetic construct
  source 1..80: mol_type = other DNA
ccacgtataccccatggaatactatgcagccataaaaaaacaatgagttcatgtcctttgcagggacaaggatgaagctg

SEQ ID NO: 32156 - DNA, 80 bp, synthetic construct
  source 1..80: mol_type = other DNA
attaggagaaatacctaatgtaggtgacaggttgatgggtgcagcaaaccaccatggcacgtgtatacctatgtaacaaa

SEQ ID NO: 32157 - DNA, 80 bp, synthetic construct; identical to SEQ ID NO: 11928
  source 1..80: mol_type = other DNA

SEQ ID NO: 32158 - DNA, 80 bp, synthetic construct
  source 1..80: mol_type = other DNA
gagcacatattagaagggtctgagacaacacatgtaataaaagggcacctaaggaaaaaaaaaaagaagaggggaatagg

SEQ ID NO: 32159 - DNA, 80 bp, synthetic construct
  source 1..80: mol_type = other DNA
tccttggtaggacaaccttcgaaaagttttacaataaccagtgtgaatgttgttagaaccaaaatgatgtcactagttgt

SEQ ID NO: 32160 - DNA, 80 bp, synthetic construct; identical to SEQ ID NO: 11929
  source 1..80: mol_type = other DNA

SEQ ID NO: 32161 - DNA, 80 bp, synthetic construct
  source 1..80: mol_type = other DNA
ttcttctttcagagaacttctctctgtttgtagttaggttgacaagagcttcatcccaagaggctttgggctgagactgt

SEQ ID NO: 32162 - DNA, 80 bp, synthetic construct
  source 1..80: mol_type = other DNA
aatgtacttaaccctgcctctaattgggatgaaaacagtcgaagccaatgaaatcagacttgctggcagttagaggaagc

SEQ ID NO: 32163 - DNA, 80 bp, synthetic construct
  source 1..80: mol_type = other DNA
tgctttttcatgtgttgtcttgaaaatctcatgaatccctgaatgatcacctccaggggcacatggggaaactgaggcca

SEQ ID NO: 32164 - DNA, 80 bp, synthetic construct; identical to SEQ ID NO: 11930
  source 1..80: mol_type = other DNA

SEQ ID NO: 32165 - DNA, 80 bp, synthetic construct
  source 1..80: mol_type = other DNA
catctactaaagagttgacctggaaaaggtggcggggaaattattgcttttgcacagggaaaaaatatgaaattcctgga

SEQ ID NO: 32166 - DNA, 80 bp, synthetic construct
  source 1..80: mol_type = other DNA
agcatcagactaggttaggcacaaaggctcggccaaagttcacggtccacgtggcacatattatattctattcagcaaaa

SEQ ID NO: 32167 - DNA, 80 bp, synthetic construct
  source 1..80: mol_type = other DNA
cagactcacccataaggtgcagcctttgaaggaaaagaaataaagcagaacccctttgttctgtctctcaaagctgcaaa

SEQ ID NO: 32168 - DNA, 80 bp, synthetic construct
  source 1..80: mol_type = other DNA
aataaattgagtttcaaagctgtccagaaggaagggaaaaaaggctactcaagagctcttgctacagagaggaaagtttg

SEQ ID NO: 32169 - DNA, 80 bp, synthetic construct; identical to SEQ ID NO: 11931
  source 1..80: mol_type = other DNA

SEQ ID NO: 32170 - DNA, 80 bp, synthetic construct
  source 1..80: mol_type = other DNA
catttttactgatggaactaagctgctcttggcaatcataagaagcaaaagagtgagctcaaaaacactcaccttatggt

SEQ ID NO: 32171 - DNA, 80 bp, synthetic construct
  source 1..80: mol_type = other DNA
aggaactggaatgctcaagagaacgaggtaacattaaggcaagaaataataacagtaactctgacggcaatgattatatt

SEQ ID NO: 32172 - DNA, 80 bp, synthetic construct; identical to SEQ ID NO: 11932
  source 1..80: mol_type = other DNA

SEQ ID NO: 32173 - DNA, 80 bp, synthetic construct
  source 1..80: mol_type = other DNA
tggttcttcttaaaccgtcattcacagagaggtcttggaggagtcacagagtccttatttctacagattgacaactgtgc

SEQ ID NO: 32174 - DNA, 80 bp, synthetic construct
  source 1..80: mol_type = other DNA
tccaggtcattcctcctcttgtggaatctagccttccaactggtgatattcatctgattagcacagtgccagtgatatgg

SEQ ID NO: 32175 - DNA, 80 bp, synthetic construct
  source 1..80: mol_type = other DNA
ctggtggtttgaatgtgtggcaccttctccccagcctctcttgcttctgctccagccatgtaagatctgtctgcttctcc

SEQ ID NO: 32176 - DNA, 80 bp, synthetic construct
  source 1..80: mol_type = other DNA
catagccagacatgctaatttttctcaaggtggtcaatcacaaagcagtcagtttattgcatctgcccatcaactatctc

SEQ ID NO: 32177 - DNA, 80 bp, synthetic construct; identical to SEQ ID NO: 11933
  source 1..80: mol_type = other DNA

SEQ ID NO: 32178 - DNA, 80 bp, synthetic construct
  source 1..80: mol_type = other DNA
gtgactgtgataatatgtggtaaaatacaactgagaaatggcgtggaggctcatgtttgggggacccagcagaagcagca

SEQ ID NO: 32179 - DNA, 80 bp, synthetic construct
  source 1..80: mol_type = other DNA
aactttctacaagttacatgacctctcaggccaggacaaactattgagttaatgtgtcagcagcattggtccccaaggaa

SEQ ID NO: 32180 - DNA, 80 bp, synthetic construct
  source 1..80: mol_type = other DNA
ttaattgtgttggcctaaggagggcattgtctgcactacagtttctgactcctgggctgcatcagcatcatctaaggcta

SEQ ID NO: 32181 - DNA, 80 bp, synthetic construct
  source 1..80: mol_type = other DNA
catgaatatctctttggagttctaccctgagggatgaggaatattttcttactccattttgatcctacctggatgctttt

SEQ ID NO: 32182 - DNA, 80 bp, synthetic construct; identical to SEQ ID NO: 11934
  source 1..80: mol_type = other DNA

SEQ ID NO: 32183 - DNA, 80 bp, synthetic construct
  source 1..80: mol_type = other DNA
aagccatatcaattagtgttaaaaggtcagaagatggaaaatatgttgccacaactcactgaatttctaacctttctgtg

SEQ ID NO: 32184 - DNA, 80 bp, synthetic construct
  source 1..80: mol_type = other DNA
ggatcccaccagtgagaggattcatcctcttctactgcaacataaaggggaaaatgtaaaatccaaattctagtttagta

SEQ ID NO: 32185 - DNA, 80 bp, synthetic construct; identical to SEQ ID NO: 11935
  source 1..80: mol_type = other DNA

SEQ ID NO: 32186 - DNA, 80 bp, synthetic construct
  source 1..80: mol_type = other DNA
tgcctcagcctcccaagtagctgggaatacaggcgtgcaccaccatgcccagctaatttttgtatttttagtagagacag

SEQ ID NO: 32187 - DNA, 80 bp, synthetic construct
  source 1..80: mol_type = other DNA
tttgatcttcaaaacagataagggaaagagaggcctgattagcaccccaagtccaaggaaacagagaagaggagcctgga

SEQ ID NO: 32188 - DNA, 80 bp, synthetic construct
  source 1..80: mol_type = other DNA
gagctttcctgccctgcacagcagtgattcagtgaggctgttggattgtttatatgctagagaaggaggcagggctggag

SEQ ID NO: 32189 - DNA, 80 bp, synthetic construct
  source 1..80: mol_type = other DNA
tacattagattaagcccatctttatttcaaggttttattgactaagttgaaatctctggtgttctggggcacagctttct

SEQ ID NO: 32190 - DNA, 80 bp, synthetic construct
  source 1..80: mol_type = other DNA
acttagggttccatctcttgaatccacctttagaacaatgggtttttctggttgaagaagtccttgcgtgtctaatttca

SEQ ID NO: 32191 - DNA, 80 bp, synthetic construct
  source 1..80: mol_type = other DNA
taagctgggtaaatactggatagtaaaagcactcaccatccatcgtttaacaaaatatttatggagcactgactctgtgc

SEQ ID NO: 32192 - DNA, 80 bp, synthetic construct
  source 1..80: mol_type = other DNA
caaggtaatcctgagtagctgttgtacagtttaattatgtgggcagttttcaacttccagagtctagtaacccttcccag

SEQ ID NO: 32193 - DNA, 80 bp, synthetic construct; identical to SEQ ID NO: 11936
  source 1..80: mol_type = other DNA

SEQ ID NO: 32194 - DNA, 80 bp, synthetic construct
  source 1..80: mol_type = other DNA
tctcagggctgagccccctgcctgaatacacacataggaaagctacacagctgccctgaagccatagataagatggcaac

SEQ ID NO: 32195 - DNA, 80 bp, synthetic construct; identical to SEQ ID NO: 11937
  source 1..80: mol_type = other DNA

SEQ ID NO: 32196 - DNA, 80 bp, synthetic construct
  source 1..80: mol_type = other DNA
atatacagctagtggttgagaaccactgtcatgagagagcttctgcaggttctggtgatggagaacaccatttaagtcac

SEQ ID NO: 32197 - DNA, 80 bp, synthetic construct
  source 1..80: mol_type = other DNA
gtggactttacatgatgttcttaatgctacaggttttgaagtccagaactgaagcatccttaatgatcaaagatggatcc

SEQ ID NO: 32198 - DNA, 80 bp, synthetic construct; identical to SEQ ID NO: 11911
  source 1..80: mol_type = other DNA

SEQ ID NO: 32199 - DNA, 80 bp, synthetic construct; identical to SEQ ID NO: 11938
  source 1..80: mol_type = other DNA

SEQ ID NO: 32200 - DNA, 80 bp, synthetic construct
  source 1..80: mol_type = other DNA
cacttgtgttggtcacatgctcattgagaaaggagaaggagaaaacgtcttgtgctatttcaagttgttatttttccctt

SEQ ID NO: 32201 - DNA, 80 bp, synthetic construct
  source 1..80: mol_type = other DNA
gtcacataagttacatgggcatatgatgctaccctactgtagtgtcatccctgctttccttgatctgttccattaagcta

SEQ ID NO: 32202 - DNA, 80 bp, synthetic construct; identical to SEQ ID NO: 11939
  source 1..80: mol_type = other DNA

SEQ ID NO: 32203 - DNA, 80 bp, synthetic construct
  source 1..80: mol_type = other DNA
atatggatttatggatttatataaatcatatgaatttctccctgcctagccaagttcctgacacatggcaagcactatct

SEQ ID NO: 32204 - DNA, 80 bp, synthetic construct
  source 1..80: mol_type = other DNA
aaacagagaacttggtcagctctgacttactctgtgaacaagtattatgtgcagactccatgctagcactagggacacca

SEQ ID NO: 32205 - DNA, 80 bp, synthetic construct
  source 1..80: mol_type = other DNA
ttaataatacagtaatgggaaaacaccaactatatccagagtgcgaactgtgcctaaggcctgaccttgtccctgaattc

SEQ ID NO: 32206 - DNA, 80 bp, synthetic construct; identical to SEQ ID NO: 11940
  source 1..80: mol_type = other DNA

SEQ ID NO: 32207 - DNA, 80 bp, synthetic construct
  source 1..80: mol_type = other DNA
tatgtatatttatagtaatataggtcagtggatagtttcctgttaaatcaagtaagcagcaattcaaaccaaataaaaag

SEQ ID NO: 32208 - DNA, 80 bp, synthetic construct
  source 1..80: mol_type = other DNA
aaaaagacttacaagcaaatgattgtacaaccacacgattgtcatgtagattaagagaggcagaatatgcttgaaccagc

SEQ ID NO: 32209 - DNA, 80 bp, synthetic construct
  source 1..80: mol_type = other DNA
cctttgggaatgaataccccattgatttcaacatctttcttgcaagtcctctcaagtctaatagcaactgggaataatct

SEQ ID NO: 32210 - DNA, 80 bp, synthetic construct
  source 1..80: mol_type = other DNA
tgagtccatgcagtactattgaagtattagaagctccagagaataactcatactggtaaatgatcatagtattcgtgaag

SEQ ID NO: 32211 - DNA, 80 bp, synthetic construct; identical to SEQ ID NO: 11941
  source 1..80: mol_type = other DNA

SEQ ID NO: 32212 - DNA, 80 bp, synthetic construct
  source 1..80: mol_type = other DNA
ggtggcgtgtgcctgtagttccagctactcaggagacagaggcgggaggatggcttgagcctgggaggcagagtttgcag

SEQ ID NO: 32213 - DNA, 80 bp, synthetic construct
  source 1..80: mol_type = other DNA
ggtacacaatttgagttctagttaaagttatgaagagaatagaaccccacactcagccccatcccctccttttggaatag

SEQ ID NO: 32214 - DNA, 80 bp, synthetic construct; identical to SEQ ID NO: 11942
  source 1..80: mol_type = other DNA

SEQ ID NO: 32215 - DNA, 80 bp, synthetic construct
  source 1..80: mol_type = other DNA
accagagtgagtccagtcagtatcagcagaactcactatccagtcttgtgagcaataaatgcttctcattagatgccact

SEQ ID NO: 32216 - DNA, 80 bp, synthetic construct
  source 1..80: mol_type = other DNA
gagtgagaacatacagtgtttggttttttgtccttgccatagtttgctgagaatgatggtttccagcttcatccatgtct

SEQ ID NO: 32217 - DNA, 80 bp, synthetic construct; identical to SEQ ID NO: 11943
  source 1..80: mol_type = other DNA

SEQ ID NO: 32218 - DNA, 80 bp, synthetic construct
  source 1..80: mol_type = other DNA
atctcattgtggttttgatttgcatttctttgatggccagtgatgatgaacattttttcatgtgtctattggctgcataa

SEQ ID NO: 32219 - DNA, 80 bp, synthetic construct
  source 1..80: mol_type = other DNA
ttcactctgatggtagtttcttttgctgtgcagaagctctttagtttcattagatcccatttgtcaattttggcttttgt

SEQ ID NO: 32220 - DNA, 80 bp, synthetic construct
  source 1..80: mol_type = other DNA
tccagtttcagctttctatatatggctagccagttttcccagcaccatttattaaatagggaatcctttccccactgctt

SEQ ID NO: 32221 - DNA, 80 bp, synthetic construct; identical to SEQ ID NO: 11944
  source 1..80: mol_type = other DNA

SEQ ID NO: 32222 - DNA, 80 bp, synthetic construct
  source 1..80: mol_type = other DNA
ttgagcagtggtttgtaattctccttgaagaggtccttcacatcccttgtaagttgaattcctaggtattttattgtctt

SEQ ID NO: 32223 - DNA, 80 bp, synthetic construct
  source 1..80: mol_type = other DNA
ttttctagatatacaatcatgtcatctgcaaacagggacaatttgacttcctcttttcctaattgaataccctttatttc

SEQ ID NO: 32224 - DNA, 80 bp, synthetic construct
  source 1..80: mol_type = other DNA
tattattttgagataggttccatcaatacctaatttattcagagtttttagcatgaagggctgttgaattttgttaaagg

SEQ ID NO: 32225 - DNA, 80 bp, synthetic construct; identical to SEQ ID NO: 11945
  source 1..80: mol_type = other DNA

SEQ ID NO: 32226 - DNA, 80 bp, synthetic construct
  source 1..80: mol_type = other DNA
actttttttggttggtaagctattaattattgcctcaatttcagaacctgttattggtctattcagagtttcaacttctt

SEQ ID NO: 32227 - DNA, 80 bp, synthetic construct
  source 1..80: mol_type = other DNA
atttgattcttctctcttttcttctttattagtcttgctagcattctatcaattttgttgatcttttcaaaaaaccagct

SEQ ID NO: 32228 - DNA, 80 bp, synthetic construct
  source 1..80: mol_type = other DNA
tttcctgctttctcttgtaggcatttagtgctataaatttccctctacacattgctttgaatgtggcccagagattctgg

SEQ ID NO: 32229 - DNA, 80 bp, synthetic construct
  source 1..80: mol_type = other DNA
tgtggtctgagagacagtttgttataatgtctgttcttttacatttgctgaggagtgctttacttccaactatgtggtta

SEQ ID NO: 32230 - DNA, 80 bp, synthetic construct; identical to SEQ ID NO: 11946
  source 1..80: mol_type = other DNA

SEQ ID NO: 32231 - DNA, 80 bp, synthetic construct
  source 1..80: mol_type = other DNA
ttttttgttgtccatttgcttggtagatcttcctccatccctttattttgagcctatgtgttactttgcacgtgagatgg

SEQ ID NO: 32232 - DNA, 80 bp, synthetic construct
  source 1..80: mol_type = other DNA
ttgatgcagtttctccttagcctcgatggtctttacaatttggcatgtttttgcagtggctggtaccagttgttcctttc

SEQ ID NO: 32233 - DNA, 80 bp, synthetic construct
  source 1..80: mol_type = other DNA
atgttgaatattggcccccactctctactggcttgtagagtttctgccgagagatccactgttagtctgatgggtttgtg

SEQ ID NO: 32234 - DNA, 80 bp, synthetic construct; identical to SEQ ID NO: 11947
  source 1..80: mol_type = other DNA

SEQ ID NO: 32235 - DNA, 80 bp, synthetic construct
  source 1..80: mol_type = other DNA
tggctactgaggcttgtgcattcatcacgtagttctcgtgccatggtcttcagctccatcaggtcctttaaggacttctc

SEQ ID NO: 32236 - DNA, 80 bp, synthetic construct
  source 1..80: mol_type = other DNA
gctggtgcggagctgcgttcctttggaggaggagaggtgctctgatttttagatttttcagtttttctgctgtttttccc

SEQ ID NO: 32237 - DNA, 80 bp, synthetic construct; identical to SEQ ID NO: 11948
  source 1..80: mol_type = other DNA

SEQ ID NO: 32238 - DNA, 80 bp, synthetic construct
  source 1..80: mol_type = other DNA
ttcaaagctgtcagacagggacatttaagtctgcagaggtttctgctgccttttggttggctatgctctgcccctagagg

SEQ ID NO: 32239 - DNA, 80 bp, synthetic construct
  source 1..80: mol_type = other DNA
agcaatgagcgaggctccatgggcgtaggaccctccgagccatgcgcgggatataatctcctggtgtgccgtttgctaag

SEQ ID NO: 32240 - DNA, 80 bp, synthetic construct
  source 1..80: mol_type = other DNA
gcacccactctccaacaatccccattgagatgcacccggtacctcagttggaaatgcagaaatcattcgtcttctgtgtt

SEQ ID NO: 32241 - DNA, 80 bp, synthetic construct
  source 1..80: mol_type = other DNA
cttctgccagtagcaaccgttctctatgtttctccctttgtttttctcctcagaggcttcctacattatgtcagtgaagg

SEQ ID NO: 32242 - DNA, 80 bp, synthetic construct; identical to SEQ ID NO: 11949
  source 1..80: mol_type = other DNA

SEQ ID NO: 32243 - DNA, 80 bp, synthetic construct
  source 1..80: mol_type = other DNA
ttttcattctgatatgtatcttatacagggccaggatgacgcaaaatcattttaatccaggttttcccaaggtctacatg

SEQ ID NO: 32244 - DNA, 80 bp, synthetic construct
  source 1..80: mol_type = other DNA
caataaaaatttgattttctacaatagagcttgacagactttgagagaattccaatatagcttgacaaactttgagagaa

SEQ ID NO: 32245 - DNA, 80 bp, synthetic construct; identical to SEQ ID NO: 11950
  source 1..80: mol_type = other DNA

SEQ ID NO: 32246 - DNA, 80 bp, synthetic construct
  source 1..80: mol_type = other DNA
agtctgatgaatggcattaaaatagcagaagttcttatgattacaggttggcctccctcttgatatttctcctgagagaa

SEQ ID NO: 32247 - DNA, 80 bp, synthetic construct
  source 1..80: mol_type = other DNA
ataaaatgagtgtgagaaaggtctacagagttctgatttatcagtgaatatttctgtatgctgctgtgggtaaattcaac

SEQ ID NO: 32248 - DNA, 80 bp, synthetic construct
  source 1..80: mol_type = other DNA
aaattgttcttcagtggcattggccacatgtccagtactcaatagccatatgtgtctagtgatttctatatgaaacagtg

SEQ ID NO: 32249 - DNA, 80 bp, synthetic construct
  source 1..80: mol_type = other DNA
cctgctctctagaaccaattgttaaatattcaaaaattttgtgagatggttgccaaatcttggtagcttgaaattgacca

SEQ ID NO: 32250 - DNA, 80 bp, synthetic construct; identical to SEQ ID NO: 11951
  source 1..80: mol_type = other DNA

SEQ ID NO: 32251 - DNA, 80 bp, synthetic construct
  source 1..80: mol_type = other DNA
atggctatacctgtgggcttctggaaagtgcctccagctaccatttataacatctaaatgtgtgttgttctgctatgtgg

SEQ ID NO: 32252 - DNA, 80 bp, synthetic construct
  source 1..80: mol_type = other DNA
tagtcggtgctagaagcaaaaggagagatttctttggcagaaagtgactcgtgaagtcagaagtaaatcaaaagtgcagt

SEQ ID NO: 32253 - DNA, 80 bp, synthetic construct; identical to SEQ ID NO: 11952
  source 1..80: mol_type = other DNA

SEQ ID NO: 32254 - DNA, 80 bp, synthetic construct
  source 1..80: mol_type = other DNA
agcattttcaaatattccaacattctcaaactctatataatcttcagtgacagctgggttacctggtcctgtctccctga

SEQ ID NO: 32255 - DNA, 80 bp, synthetic construct
  source 1..80: mol_type = other DNA
ttaccacacactacatgtcagcagtcggcaggtagcctcataggacctttaattgcagaatatgtaaaataagagtcttg

SEQ ID NO: 32256 - DNA, 80 bp, synthetic construct
  source 1..80: mol_type = other DNA
tgtgcctgatttcaagttttaaatgctatctctctgactcattctcatctccttccccaatctccttctttatttctacc

SEQ ID NO: 32257 - DNA, 80 bp, synthetic construct
  source 1..80: mol_type = other DNA
atcttttggaaacagagagacatttaatgcttcaaaaactggggtaaggaatggaaagagtactgtgggaaaaacaaaac

SEQ ID NO: 32258 - DNA, 80 bp, synthetic construct; identical to SEQ ID NO: 11953
  source 1..80: mol_type = other DNA

SEQ ID NO: 32259 - DNA, 80 bp, synthetic construct
  source 1..80: mol_type = other DNA
ataagggaaagaaatttgggaaactcatacatttgtggaagttaaacaatacagttttaagtgaccagtgagtcaaagca

SEQ ID NO: 32260 - DNA, 80 bp, synthetic construct
  source 1..80: mol_type = other DNA
tttaaaagaagaaaatatctcaaattgattataattatttacaccacaaaacactaaaagaagaagagcaaatgaaacct

SEQ ID NO: 32261 - DNA, 80 bp, synthetic construct; identical to SEQ ID NO: 11954
  source 1..80: mol_type = other DNA

SEQ ID NO: 32262 - DNA, 80 bp, synthetic construct
  source 1..80: mol_type = other DNA
tagcccacatacttattgagagaaataatggatctaagaaaccaaattttaggaacttcttagtgctctccacaaagggg

SEQ ID NO: 32263 - DNA, 80 bp, synthetic construct
  source 1..80: mol_type = other DNA
tatccagtcaagacacataaagagccacagactttcagaactatctgctgaatcatcttccatctactccctcagaaggt

SEQ ID NO: 32264 - DNA, 80 bp, synthetic construct
  source 1..80: mol_type = other DNA
gatatgtaagctctgtgcttcagcagaacaagagtagaataattaactcttcctagtggattcaagaaaggtggcgttgt

SEQ ID NO: 32265 - DNA, 80 bp, synthetic construct
  source 1..80: mol_type = other DNA
cgctgagagcagagtcatttttgtaagatgtgacaatcaagaatgttctggttaaaaaaaatagatctctccaacattga

SEQ ID NO: 32266 - DNA, 80 bp, synthetic construct; identical to SEQ ID NO: 11955
  source 1..80: mol_type = other DNA

SEQ ID NO: 32267 - DNA, 80 bp, synthetic construct
  source 1..80: mol_type = other DNA
tatttatggtgacaagttaacagataagtaaatcctggctcctgtgcacaggagagaaggcccttttcccttgctgactt

SEQ ID NO: 32268 - DNA, 80 bp, synthetic construct
  source 1..80: mol_type = other DNA
tacttactctttcaaggtgacaggcttgcctttctctgcttcccgcctcaagtttctcaccaatacatctccatactggg

SEQ ID NO: 32269 - DNA, 80 bp, synthetic construct
  source 1..80: mol_type = other DNA
attttgtgatgtcttttctgtacataaagataaaagaccatttttaggaagctcgaactcagtggactaccccttggaaa

SEQ ID NO: 32270 - DNA, 80 bp, synthetic construct; identical to SEQ ID NO: 11956
  source 1..80: mol_type = other DNA

SEQ ID NO: 32271 - DNA, 80 bp, synthetic construct
  source 1..80: mol_type = other DNA
acaaatatttattgactgtatatgatattatggcaagccatattcaagatgctcaatggagatcctagatgcctagcctc

SEQ ID NO: 32272 - DNA, 80 bp, synthetic construct
  source 1..80: mol_type = other DNA
aggagtgtgcagagtagaaaaggattggtgacagatgggcagactgtatgttgcctcagaccagctctgtctttaataca

SEQ ID NO: 32273 - DNA, 80 bp, synthetic construct; identical to SEQ ID NO: 11957
  source 1..80: mol_type = other DNA

SEQ ID NO: 32274 - DNA, 80 bp, synthetic construct
  source 1..80: mol_type = other DNA
tcacatttaatgatgaaggactgaatggtttttccaagatcaagaagaactaaaaaatgcccactctcaacattcttact

SEQ ID NO: 32275 - DNA, 80 bp, synthetic construct
  source 1..80: mol_type = other DNA
atgtcaaggaatatacaaaaaaatttctagaacgaataggtaagttctgcaaggctataggatacaagatcaacaaacaa

SEQ ID NO: 32276 - DNA, 80 bp, synthetic construct
  source 1..80: mol_type = other DNA
aataaaagctaaagaaatggagaggcatactatattcacgggatgaaaggctgaacatagtaaagatatagattataccc

SEQ ID NO: 32277 - DNA, 80 bp, synthetic construct; identical to SEQ ID NO: 11958
  source 1..80: mol_type = other DNA

SEQ ID NO: 32278 - DNA, 80 bp, synthetic construct
  source 1..80: mol_type = other DNA
agcaagaagaaattaaaagccattaaaattaactaacaaagagcgagaggacgctattgcagtgccacgtgaagtgaatt

SEQ ID NO: 32279 - DNA, 80 bp, synthetic construct
  source 1..80: mol_type = other DNA
tattaggtgtgtttgtggcaatttggcaagtaaaacccagcaattatcaataatatttcaacctacctttgtagatgata

SEQ ID NO: 32280 - DNA, 80 bp, synthetic construct
  source 1..80: mol_type = other DNA
aagattgttcaatgaaaagtggacaaatgactttttcttgttgaggcaaatagcgaagcactctgcttaatttccacgga

SEQ ID NO: 32281 - DNA, 80 bp, synthetic construct
  source 1..80: mol_type = other DNA
caatcgtaaggtaaaacctagttatgtggtagcaaatttaatagcaaaaaaatcaaaaccatttactgatggtgagttta

SEQ ID NO: 32282 - DNA, 80 bp, synthetic construct; identical to SEQ ID NO: 11959
  source 1..80: mol_type = other DNA

SEQ ID NO: 32283 - DNA, 80 bp, synthetic construct
  source 1..80: mol_type = other DNA
tgtgatatagctacagatgctgccctggcgatggtaggtaaaagagagggacttgtacaattaatagatgatgcagttgc

SEQ ID NO: 32284 - DNA, 80 bp, synthetic construct
  source 1..80: mol_type = other DNA
ggcccaggaattgaatcatcgctagtttcaggaattccttaaaagtatggatgctgactctagcaagtcattcacttttt

SEQ ID NO: 32285 - DNA, 80 bp, synthetic construct
  source 1..80: mol_type = other DNA
tgagttaaacctgtgtcttcaagttgaaaaccaacttaacaatacaatgtttcaaaccataacagcattccatatgaaac

SEQ ID NO: 32286 - DNA, 80 bp, synthetic construct; identical to SEQ ID NO: 11960
  source 1..80: mol_type = other DNA

SEQ ID NO: 32287 - DNA, 80 bp, synthetic construct
  source 1..80: mol_type = other DNA
aggatgaagaacacgaagagtaaaattagaaccaaaatatctgatgagcaccttgagaactcactgagaattgcaactac

SEQ ID NO: 32288 - DNA, 80 bp, synthetic construct
  source 1..80: mol_type = other DNA
gaacctgttcaatgattttgaaagaccctctgaatggggcagtgcataattaggattattatgcaaggacatttttgctt

SEQ ID NO: 32289 - DNA, 80 bp, synthetic construct
  source 1..80: mol_type = other DNA
tgctttaattcttatcaaaattatggcaggtttgtttgtagacacttacaagcttattctgaatttttatggaaaggcaa

SEQ ID NO: 32290 - DNA, 80 bp, synthetic construct; identical to SEQ ID NO: 11961
  source 1..80: mol_type = other DNA

SEQ ID NO: 32291 - DNA, 80 bp, synthetic construct
  source 1..80: mol_type = other DNA
ggaaatattaatacattggcctcctcaaataaataaaagtttgctctgatatagaacctgtcagagaaaaagacaaactc

SEQ ID NO: 32292 - DNA, 80 bp, synthetic construct
  source 1..80: mol_type = other DNA
aatctgaaaagctctgtaaactatatcaaagtcaatttcctgtactatagtattaggttggtgcaaaagttattgcagtt

SEQ ID NO: 32293 - DNA, 80 bp, synthetic construct
  source 1..80: mol_type = other DNA
ggcgcatgccaccacacgcagctaatttttgtatttttagtagagatggggtttcaccatgttggtcaggctgatctcga

SEQ ID NO: 32294 - DNA, 80 bp, synthetic construct; identical to SEQ ID NO: 11962
  source 1..80: mol_type = other DNA

SEQ ID NO: 32295 - DNA, 80 bp, synthetic construct
  source 1..80: mol_type = other DNA
tacgttctgtgtggggacaacggagctgattaaacttcactagcccgattctgcagctggagccacacccaggaagccag

SEQ ID NO: 32296 - DNA, 80 bp, synthetic construct
  source 1..80: mol_type = other DNA
tattgaaagacaaaagagctctttaaagagattatggttagaaatgacagtagagcattcgttaagctgggtggtacata

SEQ ID NO: 32297 - DNA, 80 bp, synthetic construct; identical to SEQ ID NO: 11963
  source 1..80: mol_type = other DNA

SEQ ID NO: 32298 - DNA, 80 bp, synthetic construct
  source 1..80: mol_type = other DNA
agaccaccttataaaatcacagtccatcagcccaccagggaacacaatggtttaataatattcagcatctcttcttcaaa

SEQ ID NO: 32299 - DNA, 80 bp, synthetic construct
  source 1..80: mol_type = other DNA
gtggagcataagtggtttcccaatctgtttctctattatctctcaacccttctttcaaaagcacatgttaaattcagtct

SEQ ID NO: 32300 - DNA, 80 bp, synthetic construct
  source 1..80: mol_type = other DNA
agaagggtctgagacaatgcatgtgataaaagggcacctaaggaagaaaaaaagaagaggggaataggcagacactggac

SEQ ID NO: 32301 - DNA, 80 bp, synthetic construct; identical to SEQ ID NO: 11964
  source 1..80: mol_type = other DNA

SEQ ID NO: 32302 - DNA, 80 bp, synthetic construct
  source 1..80: mol_type = other DNA
tctttgtagctaacaataattatctcaaaacagttatgagattcttctcatattttctatggagcatctttgtcttgttt

SEQ ID NO: 32303 - DNA, 80 bp, synthetic construct
  source 1..80: mol_type = other DNA
agtggggtaacctcctcacagtagcaggtctatccaatggaggttttcagaatactcacccccacatttttccatacttt

SEQ ID NO: 32304 - DNA, 80 bp, synthetic construct
  source 1..80: mol_type = other DNA
gctattcagagatgtcttaagggaaagacaagaaaacagagaatatatttgaagtggggaatttaaagtcactcttgaat

SEQ ID NO: 32305 - DNA, 80 bp, synthetic construct
  source 1..80: mol_type = other DNA
agtgtctgcagggaatgcacaattttttaatctcctccatcagtatccttttcatttatctcatgtgctctctctagaac

SEQ ID NO: 32306 - DNA, 80 bp, synthetic construct; identical to SEQ ID NO: 11965
  source 1..80: mol_type = other DNA

SEQ ID NO: 32307 - DNA, 80 bp, synthetic construct
  source 1..80: mol_type = other DNA
aattgtgtagaattctcagatagtaatcagacaacagaggcttcagttgtgagagttagaatctgagaaacaagctccag

SEQ ID NO: 32308 - DNA, 80 bp, synthetic construct
  source 1..80: mol_type = other DNA
ctcctctcctcccccctcccctcccctcccctcccctctccttcctctctctttctttctctctctctctttctttcttc

SEQ ID NO: 32309 - DNA, 80 bp, synthetic construct
  source 1..80: mol_type = other DNA
caggcatgggctaccatatcatgcacaggtaattttttctttctagagacaggtgtctcactgtgttgcccaggctgttc

SEQ ID NO: 32310 - DNA, 80 bp, synthetic construct; identical to SEQ ID NO: 11966
  source 1..80: mol_type = other DNA

SEQ ID NO: 32311 - DNA, 80 bp, synthetic construct
  source 1..80: mol_type = other DNA
tacacgataaataataacagcaactccaacatcagtaattgcattcactcatcaggtcctttcctgactattctgagacc

SEQ ID NO: 32312 - DNA, 80 bp, synthetic construct
  source 1..80: mol_type = other DNA
tcgctgatttggggactctcatcctaggtagaaagagtaagattttttttgtcttttgcactgatgatgagattttgcat

SEQ ID NO: 32313 - DNA, 80 bp, synthetic construct; identical to SEQ ID NO: 11967
  source 1..80: mol_type = other DNA

SEQ ID NO: 32314 - DNA, 80 bp, synthetic construct
  source 1..80: mol_type = other DNA
ctttttcaaggtggtcaaccagaaagcagtcagttcactgcctctgtacgtgaagtatctctgaggaaaaacccattaag

SEQ ID NO: 32315 - DNA, 80 bp, synthetic construct
  source 1..80: mol_type = other DNA
cagacactgattcagctgtgaagctgctagccccacacagttggctccagagaggcaaactacaaaaatgtggctgaaaa

SEQ ID NO: 32316 - DNA, 80 bp, synthetic construct
  source 1..80: mol_type = other DNA
accttgtttactcctctttagaggttagccttcaaggcagtataggttccaaacattttgtaaacatccagtgacttata

SEQ ID NO: 32317 - DNA, 80 bp, synthetic construct; identical to SEQ ID NO: 11968
  source 1..80: mol_type = other DNA

SEQ ID NO: 32318 - DNA, 80 bp, synthetic construct
  source 1..80: mol_type = other DNA
gtagagtaatgcagcctttgggtccagtgaagagactaacagaaaagccagtcatctattgcatgtaattgtgttggcct

SEQ ID NO: 32319 - DNA, 80 bp, synthetic construct
  source 1..80: mol_type = other DNA
cttgaagcagatgagatgccaacctgtttgccctttgagtgacctccacggtggggccaggacccatgaatatctctttg

SEQ ID NO: 32320 - DNA, 80 bp, synthetic construct
  source 1..80: mol_type = other DNA
aaatggccggacaggtatatttgaaaagacgtgcagtcttgtcttagaggtatacatttgtgcattagactcatattcct

SEQ ID NO: 32321 - DNA, 80 bp, synthetic construct; identical to SEQ ID NO: 11969
  source 1..80: mol_type = other DNA

SEQ ID NO: 32322 - DNA, 80 bp, synthetic construct
  source 1..80: mol_type = other DNA
tgccctcctgtactgtaacataaaggggaaaaatatgtaaaatccaaattggctttcatggctcctgccttttcaggctg

SEQ ID NO: 32323 - DNA, 80 bp, synthetic construct
  source 1..80: mol_type = other DNA
aaagaataaatcctcgaaacttcctccaggtctcctttgctctagaggttaatcattgcaagataaaccatcctgtgtat

SEQ ID NO: 32324 - DNA, 80 bp, synthetic construct
  source 1..80: mol_type = other DNA
gtctacaggggcaatacagctacacatcccttccagcagacacagaacccagaaagcgaattaatgagacaaaaatgcaa

SEQ ID NO: 32325 - DNA, 80 bp, synthetic construct; identical to SEQ ID NO: 11970
  source 1..80: mol_type = other DNA

SEQ ID NO: 32326 - DNA, 80 bp, synthetic construct
  source 1..80: mol_type = other DNA
gccaaatttgggatgaggtccatcgccactttccttcttcaactgtgttctgtgagtcttccttttagctgagtgctgct

SEQ ID NO: 32327 - DNA, 80 bp, synthetic construct
  source 1..80: mol_type = other DNA
atacttttgtaaagaggtttttattgatttgcttaatataaagcttactatagaatactacagatataacacatgatata

SEQ ID NO: 32328 - DNA, 80 bp, synthetic construct; identical to SEQ ID NO: 11971
  source 1..80: mol_type = other DNA

SEQ ID NO: 32329 - DNA, 80 bp, synthetic construct
  source 1..80: mol_type = other DNA
gtctcatcccttgactcagcctttagaacaatgggtttttctgttagaagaagtcctccaaagcgtaatttcagggggat

SEQ ID NO: 32330 - DNA, 80 bp, synthetic construct
  source 1..80: mol_type = other DNA
atgtgtgaagattggatagtgagaacattcatcatctatcatttaacaaaatattcatggagcacctattctgtgtgagg

SEQ ID NO: 32331 - DNA, 80 bp, synthetic construct
  source 1..80: mol_type = other DNA
gtaatcctgagtagctattgtacattttaattatgtggacagtcttcaacttccacagtccagtaattcctctcaattga

SEQ ID NO: 32332 - DNA, 80 bp, synthetic construct
  source 1..80: mol_type = other DNA
ttgactcaacttttcttattgagacactccttcagtgttgaggggacacaatagagtgatattctgatctccatggagtg

SEQ ID NO: 32333 - DNA, 80 bp, synthetic construct; identical to SEQ ID NO: 11972
  source 1..80: mol_type = other DNA

SEQ ID NO: 32334 - DNA, 80 bp, synthetic construct
  source 1..80: mol_type = other DNA
tattttccctgcagacagacatgcatgtgcacatgtgcaagcacacacacatgcaaatacatgaatgtcatttgctaaat

SEQ ID NO: 32335 - DNA, 80 bp, synthetic construct
  source 1..80: mol_type = other DNA
tgcttgagttagatgaggtcacttgcaaggcaccactgggatattttaaatggaataaaatgagaagatattgttaatgg

SEQ ID NO: 32336 - DNA, 80 bp, synthetic construct; identical to SEQ ID NO: 11973
  source 1..80: mol_type = other DNA

SEQ ID NO: 32337 - DNA, 80 bp, synthetic construct
  source 1..80: mol_type = other DNA
gccacactctgggcaaattagtttagaatttctgagatgttccaggcatcatgaatttttaaagctccctggtgattcca

SEQ ID NO: 32338 - DNA, 80 bp, synthetic construct
  source 1..80: mol_type = other DNA
ttgctcaagttcaaggagactgtagataatcatgtcatgctagtctacattgacattgcatgatgtttttaatgctacag

SEQ ID NO: 32339 - DNA, 80 bp, synthetic construct
  source 1..80: mol_type = other DNA
cagaaaattgactgacctgtgtttctttacaaggtttgaaggagaagttctgaaggactctgactagagcaagtttcatg

SEQ ID NO: 32340 - DNA, 80 bp, synthetic construct
  source 1..80: mol_type = other DNA
ttagggtttcttacttagggcccacccctctactagcagtacacaggatacttttgtgggctagtcactgaaatcctgct

SEQ ID NO: 32341 - DNA, 80 bp, synthetic construct; identical to SEQ ID NO: 11974
  source 1..80: mol_type = other DNA

SEQ ID NO: 32342 - DNA, 80 bp, synthetic construct
  source 1..80: mol_type = other DNA
tttctcccccacacctccatagaatagtttaagtcagataatttacacaggcatatgatgctactgtattgatggaaagc

SEQ ID NO: 32343 - DNA, 80 bp, synthetic construct
  source 1..80: mol_type = other DNA
tttttaaaagagtccttacattttggacacttatgacccataaggacataattgaggaccttcatcttaagttgctggga

SEQ ID NO: 32344 - DNA, 80 bp, synthetic construct; identical to SEQ ID NO: 11975
  source 1..80: mol_type = other DNA

SEQ ID NO: 32345 - DNA, 80 bp, synthetic construct
  source 1..80: mol_type = other DNA
tgcagaccctctcaagtctcatagcaactgggaataatctgagtgtttcattcaccaccatgtcaagatactccaactgt

SEQ ID NO: 32346 - DNA, 80 bp, synthetic construct
  source 1..80: mol_type = other DNA
gtattttaataactgtcatgccctttgatgtgctcaatggcccactaagatgtgtggaggagttatgaaagcaggagaca

SEQ ID NO: 32347 - DNA, 80 bp, synthetic construct
  source 1..80: mol_type = other DNA
gtaaccaaggaagtgaaaacagatagaaaaagcaaattctctgtgcgacaaggattattggccaaacttctggttcataa

SEQ ID NO: 32348 - DNA, 80 bp, synthetic construct; identical to SEQ ID NO: 11976
  source 1..80: mol_type = other DNA

SEQ ID NO: 32349 - DNA, 80 bp, synthetic construct
  source 1..80: mol_type = other DNA
tttggcagaggtctgaaaacagtgtggttgataggcacctagtacttagtgttatatttgaaaggcaatattatagagtt

SEQ ID NO: 32350 - DNA, 80 bp, synthetic construct
  source 1..80: mol_type = other DNA
tcctgccaatatcagcagagctcactatcaagacgtgtgagcaatatgcatattgttaaatgccagggaggtttttggat

SEQ ID NO: 32351 - DNA, 80 bp, synthetic construct
  source 1..80: mol_type = other DNA
ttatgctttttataaaaattctcctgggaagtggtgaggaagcatctttgctaaggcttcacctcctccctccttctcca

SEQ ID NO: 32352 - DNA, 80 bp, synthetic construct; identical to SEQ ID NO: 11977
  source 1..80: mol_type = other DNA

SEQ ID NO: 32353 - DNA, 80 bp, synthetic construct
  source 1..80: mol_type = other DNA
gctgggtaatttccagagagaacatttctgcataacatactcagtgtcatggtgtgctccttgaatgatcctaaaagtac

SEQ ID NO: 32354 - DNA, 80 bp, synthetic construct
  source 1..80: mol_type = other DNA
aattaaaggacctttcctttagatatgtttgagggaacttaagagaccaatattggaatacagaccacctcttgctactc

SEQ ID NO: 32355 - DNA, 80 bp, synthetic construct
  source 1..80: mol_type = other DNA
ccttctctactaaaaatacaaaattacccaggcatggtgacgcatgcctgtaatcccagctacttgggaggctgaggcag

SEQ ID NO: 32356 - DNA, 80 bp, synthetic construct
  source 1..80: mol_type = other DNA
aactactgattcaagtctgaatttcacaagatgtggtaatttgtgtgcatagcccaggttgagaagtatggattatatct

SEQ ID NO: 32357 - DNA, 80 bp, synthetic construct; identical to SEQ ID NO: 11978
  source 1..80: mol_type = other DNA

SEQ ID NO: 32358 - DNA, 80 bp, synthetic construct
  source 1..80: mol_type = other DNA
ttctgtgatgcagttgtgggtaaattcaactatctaataattgtattctgttaccatgaacctgatgatactgatgtgaa

SEQ ID NO: 32359 - DNA, 80 bp, synthetic construct
  source 1..80: mol_type = other DNA
tgtgtctagtgatttctagatgaaacactaaaacagtaggctatttcctttatcacagcaagttgtattgggatagatag

SEQ ID NO: 32360 - DNA, 80 bp, synthetic construct
  source 1..80: mol_type = other DNA
attcaggaattttgtgacatgattgccaaatcttggtggcttgaaactgaacatggccatcattttgccactcatagtaa

SEQ ID NO: 32361 - DNA, 80 bp, synthetic construct; identical to SEQ ID NO: 11979
  source 1..80: mol_type = other DNA

SEQ ID NO: 32362 - DNA, 80 bp, synthetic construct
  source 1..80: mol_type = other DNA
tcttcctggcatgccagttttccttagggttgccctttaagcttagaacatggctatctatgcctgcatgcctctagaag

SEQ ID NO: 32363 - DNA, 80 bp, synthetic construct
  source 1..80: mol_type = other DNA
ggtctcagagtcttttgaattctgagagtcaatcatcagctgaaggaaatccactcggtgctagaagcaaaaagagaaat

SEQ ID NO: 32364 - DNA, 80 bp, synthetic construct
  source 1..80: mol_type = other DNA
tgttttcctgaaacaaatctggctaaaatgttcaattgctttttggtcttttccctggtcctaactgcatacccatgaag

SEQ ID NO: 32365 - DNA, 80 bp, synthetic construct; identical to SEQ ID NO: 11980
  source 1..80: mol_type = other DNA

SEQ ID NO: 32366 - DNA, 80 bp, synthetic construct
  source 1..80: mol_type = other DNA
ctgtcagagggctcaaatgtaacacacactacacttcagcaggtggcctgataggaccttttgttggagaatgtgtaaaa

SEQ ID NO: 32367 - DNA, 80 bp, synthetic construct
  source 1..80: mol_type = other DNA
atactaattcttgtgcctgatatcaaattttaagtgctctctctgactcattctcatatctccttcctcaaactccactt

SEQ ID NO: 32368 - DNA, 80 bp, synthetic construct; identical to SEQ ID NO: 11981
  source 1..80: mol_type = other DNA

SEQ ID NO: 32369 - DNA, 80 bp, synthetic construct
  source 1..80: mol_type = other DNA
ttctctaccaatcagaagagtgaaatacatcagtgttctcaactggaagccattccttctatgacttttgcccctcttcc

SEQ ID NO: 32370 - DNA, 80 bp, synthetic construct
  source 1..80: mol_type = other DNA
tttgcctttatgtattgggctagggtctcttaggataacccaaatcataatttgctgcttaaattaatcatgctcttcaa

SEQ ID NO: 32371 - DNA, 80 bp, synthetic construct
  source 1..80: mol_type = other DNA
agaaactgttttgagctgagcaaaaattaagatgtgataggccagaatgtcatgttatttagcaaacaagtgcccagagg

SEQ ID NO: 32372 - DNA, 80 bp, synthetic construct
  source 1..80: mol_type = other DNA
cccacaaatcaataatctacattcatgccacaacacagtaaacggagaagggcaaactaagcctgaagccagcagaagaa

SEQ ID NO: 32373 - DNA, 80 bp, synthetic construct; identical to SEQ ID NO: 11982
  source 1..80: mol_type = other DNA

SEQ ID NO: 32374 - DNA, 80 bp, synthetic construct
  source 1..80: mol_type = other DNA
acttattgagagaacgaatggatctaatggattaaatcttaaaagcttcttggtgttttccacaaaggggtcttgtggat

SEQ ID NO: 32375 - DNA, 80 bp, synthetic construct
  source 1..80: mol_type = other DNA
aagacagacaaacagccacagactttcagaactatttactggagcatctcccatcacactccctcagaaggtgattatca

SEQ ID NO: 32376 - DNA, 80 bp, synthetic construct
  source 1..80: mol_type = other DNA
gcagtagcatgtgttaattgtggatgatacaagatgggtaagcactgtgcttcagcagaacaagagtagaaaaattcact

SEQ ID NO: 32377 - DNA, 80 bp, synthetic construct
  source 1..80: mol_type = other DNA
cactatccccagctgtggtgagctgaggttgccctgatggcagaattatttttgtaaaatataatgacaaatgatgtcct

SEQ ID NO: 32378 - DNA, 80 bp, synthetic construct
  source 1..80: mol_type = other DNA
ctctctttgagactggaggaaaaagaaatggtgggaatgtttaatatttagtattctactgataccctcagaaaaaaaac

SEQ ID NO: 32379 - DNA, 80 bp, synthetic construct
  source 1..80: mol_type = other DNA
tcctccagaatatccaaggtgacaatttaacagatatgtaaaccctgacctctgtgcacaggggagaagatccttttcct

SEQ ID NO: 32380 - DNA, 80 bp, synthetic construct
  source 1..80: mol_type = other DNA
catggctgtgctcctacttactgtttcaaggtgacaggcttgcctgtctctgcttcccgcctcagatttctcaccaacac

SEQ ID NO: 32381 - DNA, 80 bp, synthetic construct; identical to SEQ ID NO: 11984
  source 1..80: mol_type = other DNA

SEQ ID NO: 32382 - DNA, 80 bp, synthetic construct
  source 1..80: mol_type = other DNA
aaggctagagttcaaagcagaaagattttgtcctacatcagttgtggaggtctccatggttgtagaaaatgtgttaaaca

SEQ ID NO: 32383 - DNA, 80 bp, synthetic construct
  source 1..80: mol_type = other DNA
aacctgttcttccactggaatagacaggatcaacacctagcacgcgtgcagtgtagagagagagtggagacagagaggca

SEQ ID NO: 32384 - DNA, 80 bp, synthetic construct
  source 1..80: mol_type = other DNA
ctgttgtggggtggggagaggggggaaggatagcattaggagttatacctaatgttaaatgatgagttaatgagtacagc

SEQ ID NO: 32385 - DNA, 80 bp, synthetic construct; identical to SEQ ID NO: 11985
  source 1..80: mol_type = other DNA

SEQ ID NO: 32386 - DNA, 80 bp, synthetic construct
  source 1..80: mol_type = other DNA
tacaaaaaaacccacttcatctaaatcattcttgatgatgaaagaccaaatgcttccttcctaatattaggaacaattca

SEQ ID NO: 32387 - DNA, 80 bp, synthetic construct
  source 1..80: mol_type = other DNA
gctcggcaaggttctatgatacaagatcaacaaacaaaagccaagcatgtttctatgtaccaacaatcaatatctgaaaa

SEQ ID NO: 32388 - DNA, 80 bp, synthetic construct
  source 1..80: mol_type = other DNA
cagagaaaatctaaggaaatggagaggcatactatgttcatgaattgaaagaccaaacatagtgaagataaagactttcc

SEQ ID NO: 32389 - DNA, 80 bp, synthetic construct; identical to SEQ ID NO: 11986
  source 1..80: mol_type = other DNA

SEQ ID NO: 32390 - DNA, 80 bp, synthetic construct
  source 1..80: mol_type = other DNA
aaatagatagtagagttacatttagtaaagcattaaactttatgacttttagaaaaattggcaatataggaaggagggct

SEQ ID NO: 32391 - DNA, 80 bp, synthetic construct
  source 1..80: mol_type = other DNA
atgggtctgcatcttgatcatgctggtcattgcacaaatctacaaatgtgataaatttgcatagaactacccacacactc

SEQ ID NO: 32392 - DNA, 80 bp, synthetic construct
  source 1..80: mol_type = other DNA
gaaccctggaggtggaggttgcagtgagccaagaccacaccactgtactcccatttgggtgacagagtgtgactcagtcc

SEQ ID NO: 32393 - DNA, 80 bp, synthetic construct
  source 1..80: mol_type = other DNA
gtactgcagtaatgtgaatatactgtatttatagttatgcaagattgcaagatgttaccatgggggatgggcaggatgaa

SEQ ID NO: 32394 - DNA, 80 bp, synthetic construct; identical to SEQ ID NO: 11987
  source 1..80: mol_type = other DNA

SEQ ID NO: 32395 - DNA, 80 bp, synthetic construct
  source 1..80: mol_type = other DNA
agtcttcatacgatgaagggtaatgtgggccaaacagggaagagagattgaaagacaaaagagctcttcaaagagattgt

SEQ ID NO: 32396 - DNA, 80 bp, synthetic construct
  source 1..80: mol_type = other DNA
ccatggaaaattgaaggcaagtaaatcatcaaatgctcacaaggactaaatgtttcaagggcagttgctgtggggcccaa

SEQ ID NO: 32397 - DNA, 80 bp, synthetic construct; identical to SEQ ID NO: 11988
  source 1..80: mol_type = other DNA

SEQ ID NO: 32398 - DNA, 80 bp, synthetic construct
  source 1..80: mol_type = other DNA
gaggccaccttataaaatcacagtccatcagcccaccagggaacacaatggtttaagaatattcagcatctcttcaaatt

SEQ ID NO: 32399 - DNA, 80 bp, synthetic construct
  source 1..80: mol_type = other DNA
tctcaacccttctttcaaaagcatgttaaatccaaagttgaaatgaaagagttttggcttttaattgaaagtgaatcgat

SEQ ID NO: 32400 - DNA, 80 bp, synthetic construct
  source 1..80: mol_type = other DNA
agaaaagtggtaaccacaatggtctcagcctagtttagaccgaagacctcaacacctggtgacatatgggatccttggta

SEQ ID NO: 32401 - DNA, 80 bp, synthetic construct; identical to SEQ ID NO: 11989
  source 1..80: mol_type = other DNA

SEQ ID NO: 32402 - DNA, 80 bp, synthetic construct
  source 1..80: mol_type = other DNA
cctccctgaatttgcacatagcttataatggcacacagtttcccattctaatactcttctcccaaatacatatcttcttc

SEQ ID NO: 32403 - DNA, 80 bp, synthetic construct
  source 1..80: mol_type = other DNA
tttataacattccatgtcaaacgtccaatagccctgggaggagaaacaaaataatatttcattattattttaagtgtact

SEQ ID NO: 32404 - DNA, 80 bp, synthetic construct
  source 1..80: mol_type = other DNA
agtgttgtcgatactgaatgtcttatccttgtgtataaatactaagtaactccttgtctttctgatgtctctttgctttt

SEQ ID NO: 32405 - DNA, 80 bp, synthetic construct
  source 1..80: mol_type = other DNA
tagaattctagcagaattagaaagttacagacaccagggacctcttttagcctagcagatttagataagtgtgaggcatg

SEQ ID NO: 32406 - DNA, 80 bp, synthetic construct; identical to SEQ ID NO: 11990
  source 1..80: mol_type = other DNA

SEQ ID NO: 32407 - DNA, 80 bp, synthetic construct
  source 1..80: mol_type = other DNA
gacttgttactgccctgccccaactgatcgattgatcgacctcgtgacattcttcttctggacaatgagtcttatgatct

SEQ ID NO: 32408 - DNA, 80 bp, synthetic construct
  source 1..80: mol_type = other DNA
aaagctttattgctcacacaaagactgtttggtggtctcttcacatggacgcaaatgacatttggtgccaaagacctggg

SEQ ID NO: 32409 - DNA, 80 bp, synthetic construct
  source 1..80: mol_type = other DNA
tccctccacccttcaatctctcccttccttaatttcagtttctttccctttctggtagagacggaggagatacgttttat

SEQ ID NO: 32410 - DNA, 80 bp, synthetic construct; identical to SEQ ID NO: 11991
  source 1..80: mol_type = other DNA

SEQ ID NO: 32411 - DNA, 80 bp, synthetic construct
  source 1..80: mol_type = other DNA
taaaacctaaatgccttattttcttctgcaataccgcttggcctcaatacaaactggacaatggttccaaatagccagaa

SEQ ID NO: 32412 - DNA, 80 bp, synthetic construct
  source 1..80: mol_type = other DNA
ctcctgtctctttcttcagtctccaccctaagctctgagtcctttgaatcctccttttctatgaacccatctgacctctc

SEQ ID NO: 32413 - DNA, 80 bp, synthetic construct
  source 1..80: mol_type = other DNA
ttttctcttagtcaggtggctggagctgaaggcatagtcaaggtacatgtgcctttttctctatcgacctctcccagatc

SEQ ID NO: 32414 - DNA, 80 bp, synthetic construct; identical to SEQ ID NO: 11992
  source 1..80: mol_type = other DNA

SEQ ID NO: 32415 - DNA, 80 bp, synthetic construct
  source 1..80: mol_type = other DNA
caaggtaaagatgaaaacccagcccagttcatggcccacttagcacctaccattagatgcttcacagccctggacccaga

SEQ ID NO: 32416 - DNA, 80 bp, synthetic construct
  source 1..80: mol_type = other DNA
aagtgacaatgcatctctgaattatagctacttgcctccagtgtaagacaacccaagaccatgtctccagcatacaaaac

SEQ ID NO: 32417 - DNA, 80 bp, synthetic construct; identical to SEQ ID NO: 11993
  source 1..80: mol_type = other DNA

SEQ ID NO: 32418 - DNA, 80 bp, synthetic construct
  source 1..80: mol_type = other DNA
ttggtgccaaattgggcaacattcttttatgcactcctttttagttatccccacctgccagttcccttattaggctgaga

SEQ ID NO: 32419 - DNA, 80 bp, synthetic construct
  source 1..80: mol_type = other DNA
gatcacatgcccattactatcccattaaagcctaatcacccttacccagcttaacgccagtatcccatcccacaagaggc

SEQ ID NO: 32420 - DNA, 80 bp, synthetic construct
  source 1..80: mol_type = other DNA
tccaccctgtggtgcccaacccgtacactcttttgttctcaatatctccctccacaactcactattccattcttgatctt

SEQ ID NO: 32421 - DNA, 80 bp, synthetic construct; identical to SEQ ID NO: 11994
  source 1..80: mol_type = other DNA

SEQ ID NO: 32422 - DNA, 80 bp, synthetic construct
  source 1..80: mol_type = other DNA
tgatctctgaaaccccaaccccttctacaaaacaactcctttccttcctgggcatggttggatacttttgcctttggata

SEQ ID NO: 32423 - DNA, 80 bp, synthetic construct
  source 1..80: mol_type = other DNA
tttcattacacacagccaaagtgcagggctgtgcagctggaattcttacacaaggactgggaccgtgctctgtagccttt

SEQ ID NO: 32424 - DNA, 80 bp, synthetic construct; identical to SEQ ID NO: 11995
  source 1..80: mol_type = other DNA

SEQ ID NO: 32425 - DNA, 80 bp, synthetic construct
  source 1..80: mol_type = other DNA
ccaccaggcctaatcaccactcaccagcaaaggcaggctgtgctatattatcttccacatctatcattgaggctactgct

SEQ ID NO: 32426 - DNA, 80 bp, synthetic construct
  source 1..80: mol_type = other DNA
atgcaagtgtcctccatcattaatgcctctttaataaaaattcttctcaaggccactttacttccaaaaaaagctggagt

SEQ ID NO: 32427 - DNA, 80 bp, synthetic construct
  source 1..80: mol_type = other DNA
gtttccatctatcaatccctccccactcaaggaagatggttcttagaccaagaaaaatatctccttccagtctcacaggc

SEQ ID NO: 32428 - DNA, 80 bp, synthetic construct
  source 1..80: mol_type = other DNA
tcttgtttacttataccgaaccccatgaatagcaatgaaagtttggttgtagacactatgctctttctcatacccagttg

SEQ ID NO: 32429 - DNA, 80 bp, synthetic construct; identical to SEQ ID NO: 11996
  source 1..80: mol_type = other DNA

SEQ ID NO: 32430 - DNA, 80 bp, synthetic construct
  source 1..80: mol_type = other DNA
tagcctttctaatgacttttctgctagcattacagatacatcacaaactttatcagtccttcagacccaggttgacttct

SEQ ID NO: 32431 - DNA, 80 bp, synthetic construct
  source 1..80: mol_type = other DNA
ccagccaggcaaatacttattttggacccacctggacactttctaactgggtgtcttagctcctccctattcttagtcct

SEQ ID NO: 32432 - DNA, 80 bp, synthetic construct
  source 1..80: mol_type = other DNA
agcctaaattcctattccttgtaactcattataaaattttctttaaggtgtccacatggcccataatcccgcttgaagca

SEQ ID NO: 32433 - DNA, 80 bp, synthetic construct; identical to SEQ ID NO: 11997
  source 1..80: mol_type = other DNA

SEQ ID NO: 32434 - DNA, 80 bp, synthetic construct
  source 1..80: mol_type = other DNA
cacacggacgcatgtgaaagtagggaaattattgcttttgcagagggaaaaaatatgaaattcctgggcagtaattagac

SEQ ID NO: 32435 - DNA, 80 bp, synthetic construct; identical to SEQ ID NO: 11998
  source 1..80: mol_type = other DNA

SEQ ID NO: 32436 - DNA, 80 bp, synthetic construct
  source 1..80: mol_type = other DNA
catattgtgcttaaatatctgaggttaatagacaaccactatctcatctcagttacatccactccctgctcagactcacc

SEQ ID NO: 32437 - DNA, 80 bp, synthetic construct
  source 1..80: mol_type = other DNA
atgacccaatggtaaatacttgatctccctaataaactgagtttccaagctgtgcaggaggaagggaaaaaagcctattc

SEQ ID NO: 32438 - DNA, 80 bp, synthetic construct
  source 1..80: mol_type = other DNA
aaagtctgcacatcaagttgtgaacatcagattgctggatctacttgacatttgggctgtccaactgaggcaaacttgag

SEQ ID NO: 32439 - DNA, 80 bp, synthetic construct; identical to SEQ ID NO: 11999
  source 1..80: mol_type = other DNA

SEQ ID NO: 32440 - DNA, 80 bp, synthetic construct
  source 1..80: mol_type = other DNA
aatgatcaggcaaaggaggtaacattaaggcaataaaaaataacagtaactctgacggcaatgattatatttgttcatca

SEQ ID NO: 32441 - DNA, 80 bp, synthetic construct
  source 1..80: mol_type = other DNA
ttccctcatgtctttttagtaagtggactcttccctgattttgggattctcatcctaggtagaaagagtgacaatttttc

SEQ ID NO: 32442 - DNA, 80 bp, synthetic construct
  source 1..80: mol_type = other DNA
tcttaaactgtcattcacagagaggtcttggaggagtcacagagtccttatttctacagattgacaactgtgctccaggc

SEQ ID NO: 32443 - DNA, 80 bp, synthetic construct
  source 1..80: mol_type = other DNA
ctcttgtggaatctagccttccaactggtgatatccacctgataagcacagtgccagtgatatgatctgaatctgtgccc

SEQ ID NO: 32444 - DNA, 80 bp, synthetic construct; identical to SEQ ID NO: 12000
  source 1..80: mol_type = other DNA

SEQ ID NO: 32445 - DNA, 80 bp, synthetic construct
  source 1..80: mol_type = other DNA
gctcattttttttcaaggtgatcaattacaaagcagtcagtttattgcgtctgcacatcaactgtctctgtaggaaaacc

SEQ ID NO: 32446 - DNA, 80 bp, synthetic construct
  source 1..80: mol_type = other DNA
cacaagcttggccccagacaggcaaattaggaaaatgtggttcaaaagtacggtgtgtataaatggatccatatgcctca

SEQ ID NO: 32447 - DNA, 80 bp, synthetic construct; identical to SEQ ID NO: 12001
  source 1..80: mol_type = other DNA

SEQ ID NO: 32448 - DNA, 80 bp, synthetic construct
  source 1..80: mol_type = other DNA
aaatcaatggcactaatctctgcttctaaactttctacatgttacatgatctctcaggccaggacaaactattgagttaa

SEQ ID NO: 32449 - DNA, 80 bp, synthetic construct
  source 1..80: mol_type = other DNA
taacagaaaaatccatcatctattgcatgtaattgtataggcctaagaagggcatggtctacactatagcttctgaatcc

SEQ ID NO: 32450 - DNA, 80 bp, synthetic construct
  source 1..80: mol_type = other DNA
aagtgacctccactagggggccaggacccatgaatatctatttggagttctaccctgaggggtaaggaatattttctcac

SEQ ID NO: 32451 - DNA, 80 bp, synthetic construct; identical to SEQ ID NO: 12002
  source 1..80: mol_type = other DNA

SEQ ID NO: 32452 - DNA, 80 bp, synthetic construct
  source 1..80: mol_type = other DNA
atcactcagaaggaacatgctggaaatagtctatctccaaaaaaatctggctttaaaaaggatgaatttaagccacacca

SEQ ID NO: 32453 - DNA, 80 bp, synthetic construct
  source 1..80: mol_type = other DNA
ttactcttaataactgtgaaattgagttagaagtaaaatgtgacaggcgggaagcctccagtacacacagtagggagtga

SEQ ID NO: 32454 - DNA, 80 bp, synthetic construct
  source 1..80: mol_type = other DNA
aaccattgtctattagattatcctcaatcaatgctgtccctaaacccttctttccactaaagatgaatgggggagatgct

SEQ ID NO: 32455 - DNA, 80 bp, synthetic construct
  source 1..80: mol_type = other DNA
cagtggcatgatctcagttcactgcaacctccgcctcccaggttcaagcaattctcctgcctcagccacccaagtagctg

SEQ ID NO: 32456 - DNA, 80 bp, synthetic construct; identical to SEQ ID NO: 12003
  source 1..80: mol_type = other DNA

SEQ ID NO: 32457 - DNA, 80 bp, synthetic construct
  source 1..80: mol_type = other DNA
tctcctctgagtctttttttcagcagcgtgctgctgtttgctgggctgtgtgtgtggagctttcctgccctgcacagcag

SEQ ID NO: 32458 - DNA, 80 bp, synthetic construct
  source 1..80: mol_type = other DNA
taatgtttcctaagatgatttaatgtcatggaaagatgctcacagcatattattatatgaacaacctggacagaaaaaaa

SEQ ID NO: 32459 - DNA, 80 bp, synthetic construct
  source 1..80: mol_type = other DNA
caaagtgtccaattcaatagcatttagtgcactcacagtgtcgtgctaccttcgtcactatctaggtccggaacattttc

SEQ ID NO: 32460 - DNA, 80 bp, synthetic construct
  source 1..80: mol_type = other DNA
tttgcatctgacgtctttcattcagtatcatgcattcaaggttcatccacagtgtagtagggatcactgcttcattcctt

SEQ ID NO: 32461 - DNA, 80 bp, synthetic construct; identical to SEQ ID NO: 12004
  source 1..80: mol_type = other DNA

SEQ ID NO: 32462 - DNA, 80 bp, synthetic construct
  source 1..80: mol_type = other DNA
cgcggaagcgcagcagcgtgagcgccaggaccaccttcatctccgccatcgcgaacgtctgcccgatgcagttcctaggg

SEQ ID NO: 32463 - DNA, 80 bp, synthetic construct
  source 1..80: mol_type = other DNA
tcctgcaagcctagccgagctccaacccccagcctagaccaaggtggggtaggagggggctctgagcacaccacagaccc

SEQ ID NO: 32464 - DNA, 80 bp, synthetic construct; identical to SEQ ID NO: 12005
  source 1..80: mol_type = other DNA

SEQ ID NO: 32465 - DNA, 80 bp, synthetic construct
  source 1..80: mol_type = other DNA
cctcctctaggagccttggaatggacaaaaacagagagaggggccccgcacctcagggtccggccacacagctgggttgt

SEQ ID NO: 32466 - DNA, 80 bp, synthetic construct
  source 1..80: mol_type = other DNA
gtctgggagcacaatgtcctgggtgacatggcgggagatgaccgggactgggggatgcagccgcaggctctccttcatgc

SEQ ID NO: 32467 - DNA, 80 bp, synthetic construct; identical to SEQ ID NO: 12006
  source 1..80: mol_type = other DNA

SEQ ID NO: 32468 - DNA, 80 bp, synthetic construct
  source 1..80: mol_type = other DNA
caagatggtagtttttgcagataaaggatagtaatgaaaagtaccctccaaaagttgaaaggcaatattttgcaacccaa

SEQ ID NO: 32469 - DNA, 80 bp, synthetic construct
  source 1..80: mol_type = other DNA
ctaaaaatacaaaaacttagcggggtatggtggagggcacctgtagtcccagctactcgggaggctgaggcaagagaatg

SEQ ID NO: 32470 - DNA, 80 bp, synthetic construct
  source 1..80: mol_type = other DNA
gcaaaaaaataaaggaaccacttccataaaaagaaacaaacatcaacacgtgaaagagatgttcaacctcactcttattt

SEQ ID NO: 32471 - DNA, 80 bp, synthetic construct; identical to SEQ ID NO: 12007
  source 1..80: mol_type = other DNA

SEQ ID NO: 32472 - DNA, 80 bp, synthetic construct
  source 1..80: mol_type = other DNA
tctcatcacattctgcaggctggaaggtaaatcagtacagacactgtggaaggcaaattggaaatatctactataactga

SEQ ID NO: 32473 - DNA, 80 bp, synthetic construct
  source 1..80: mol_type = other DNA
tatttatgaaattaatgattcagagatagatgatagattgatagatgacagataataaataagagatatagagagataga

SEQ ID NO: 32474 - DNA, 80 bp, synthetic construct
  source 1..80: mol_type = other DNA
tggagaatgagaaaggattaggtggggtggcaggattgtcaaggaaaaagctagtcttatctgtaatatctcatttggtg

SEQ ID NO: 32475 - DNA, 80 bp, synthetic construct; identical to SEQ ID NO: 12008
  source 1..80: mol_type = other DNA

SEQ ID NO: 32476 - DNA, 80 bp, synthetic construct
  source 1..80: mol_type = other DNA
tgaaaccccgtctctaataaaaatacaaaaaaattagccaagcgtggttgcgggagcctgtaatcccagctactcaggag

SEQ ID NO: 32477 - DNA, 80 bp, synthetic construct
  source 1..80: mol_type = other DNA
aatgatggttaccagaggccagggctgagggagggatagagaagggtgagatgttggtcaaaggatagaagcttcagtta

SEQ ID NO: 32478 - DNA, 80 bp, synthetic construct
  source 1..80: mol_type = other DNA
caggttgtatacatacatcataacatcacattgtacctctaatatatatatgttctcaacataaaaatgataaatatatg

SEQ ID NO: 32479 - DNA, 80 bp, synthetic construct
  source 1..80: mol_type = other DNA
aagaaaaatagatctcagagataatgtccagaactgcgtctattttgtatagttttctttacaaagaaaaacacagtatg

SEQ ID NO: 32480 - DNA, 80 bp, synthetic construct; identical to SEQ ID NO: 12009
  source 1..80: mol_type = other DNA

SEQ ID NO: 32481 - DNA, 80 bp, synthetic construct
  source 1..80: mol_type = other DNA
agcgattaataaccagaatatattatataaggagctcaaataactcaataggggaaaaagaactcaaatcatcttattta

SEQ ID NO: 32482 - DNA, 80 bp, synthetic construct
  source 1..80: mol_type = other DNA
ttttatcaaaaagacaggcaacgatagacactggtgaggatatggagaaaggggaactctcacacactgttggcaggaat

SEQ ID NO: 32483 - DNA, 80 bp, synthetic construct; identical to SEQ ID NO: 12010
  source 1..80: mol_type = other DNA

SEQ ID NO: 32484 - DNA, 80 bp, synthetic construct
  source 1..80: mol_type = other DNA
gtggtgtgcacccatagtcccagctgcttgggaggctgaggcagaagaatagcttgaacccgggaggcagaggttgcagt

SEQ ID NO: 32485 - DNA, 80 bp, synthetic construct
  source 1..80: mol_type = other DNA
actatgcaccattaaaaacactggaattttgtcatttgtggcaacatggatggaactggaggtcactgtggtaagtaaat

SEQ ID NO: 32486 - DNA, 80 bp, synthetic construct
  source 1..80: mol_type = other DNA
acctagcacttgatagatcagtgggttcactatagtttacgatatgtactgtatattcctaaatagttagcttatgttag

SEQ ID NO: 32487 - DNA, 80 bp, synthetic construct; identical to SEQ ID NO: 12011
  source 1..80: mol_type = other DNA

SEQ ID NO: 32488 - DNA, 80 bp, synthetic construct
  source 1..80: mol_type = other DNA
aaaactgaagccattaacattttccccaaggcttccacagccagcccctgctaccatctccggttttatcatctcattac

SEQ ID NO: 32489 - DNA, 80 bp, synthetic construct
  source 1..80: mol_type = other DNA
gtacccaattatctactgatcattatttaggctctcaactgagacactttctataccccctagtcctgcttctcttactg

SEQ ID NO: 32490 - DNA, 80 bp, synthetic construct
  source 1..80: mol_type = other DNA
gaaaatgcagtgtgggagtgtttgctgaataaggatgggacggatgaacagtgcaagtgttccggacaagaatggatgaa

SEQ ID NO: 32491 - DNA, 80 bp, synthetic construct; identical to SEQ ID NO: 12012
  source 1..80: mol_type = other DNA

SEQ ID NO: 32492 - DNA, 80 bp, synthetic construct
  source 1..80: mol_type = other DNA
tgagaaggtctcaggaagaggccacaagcacctgcactcaccattcaatctctttaggctcacggtccttcagaagttct

SEQ ID NO: 32493 - DNA, 80 bp, synthetic construct
  source 1..80: mol_type = other DNA
attgagggcctcagggaggatgggggaagggggatgggaaggttgtgggggtctacccaccctgttcctggaagggagag

SEQ ID NO: 32494 - DNA, 80 bp, synthetic construct
  source 1..80: mol_type = other DNA
aagtcacactagctctaagggctcttgagtctaatctgagacagtctctgaagattcatcctttttccagaaatccaagt

SEQ ID NO: 32495 - DNA, 80 bp, synthetic construct
  source 1..80: mol_type = other DNA
cctgagttacaggagaattaaatggcaatttcccttggaaattagagattaagtattgcttcaaagatttgcccacattc

SEQ ID NO: 32496 - DNA, 80 bp, synthetic construct; identical to SEQ ID NO: 12013
  source 1..80: mol_type = other DNA

SEQ ID NO: 32497 - DNA, 80 bp, synthetic construct
  source 1..80: mol_type = other DNA
agacatgggctgctctgatctagaggtttaatgcatctgtcacaatagacctacacatagacaaagacatagacacagac

SEQ ID NO: 32498 - DNA, 80 bp, synthetic construct; identical to SEQ ID NO: 12014
  source 1..80: mol_type = other DNA

SEQ ID NO: 32499 - DNA, 80 bp, synthetic construct
  source 1..80: mol_type = other DNA
cacagacacacacacacatagactaagtcacagacttagaaacatggacacacaaatacacataaacatagacatagaca

SEQ ID NO: 32500 - DNA, 80 bp, synthetic construct
  source 1..80: mol_type = other DNA
cagacacacgcacacatagactaagtcacagacttagaaacacaggcacacaaatacacataaacctagacatagacaca

SEQ ID NO: 32501 - DNA, 80 bp, synthetic construct
  source 1..80: mol_type = other DNA
cacataaacacagacatagacacagacacaaacacacatagatgaagtcacagatttagaaacacagacacacaaataca

SEQ ID NO: 32502 - DNA, 80 bp, synthetic construct
  source 1..80: mol_type = other DNA
cagacacacacgcacatagacaaagtcacaaacttagaaacacagacacacaagtacacataaacatagacatagacaca

SEQ ID NO: 32503 - DNA, 80 bp, synthetic construct
  source 1..80: mol_type = other DNA
gacacagatatagacacagacgcacacatacatagactaagtcacagacttagaaacacagacacaaaaatacacataaa

SEQ ID NO: 32504 - DNA, 80 bp, synthetic construct; identical to SEQ ID NO: 12015
  source 1..80: mol_type = other DNA

SEQ ID NO: 32505 - DNA, 80 bp, synthetic construct
  source 1..80: mol_type = other DNA
tagtcacagtcatagagacacaaactcaaacagagacaaagatatagaaagacataggcaaaaacataaacatagaccag

SEQ ID NO: 32506 - DNA, 80 bp, synthetic construct; identical to SEQ ID NO: 12016
  source 1..80: mol_type = other DNA

SEQ ID NO: 32507 - DNA, 80 bp, synthetic construct
  source 1..80: mol_type = other DNA
gaaacgctgcccatcaggggtgagataatacaggaagtcaatatgcaggaggatctcatggtgtctttttgatacaaggg

SEQ ID NO: 32508 - DNA, 80 bp, synthetic construct
  source 1..80: mol_type = other DNA
ggaacagatgaccccacagatacagggtggggatcagcatgagattgattctccaagctctcttctctccctgcatccca

SEQ ID NO: 32509 - DNA, 80 bp, synthetic construct
  source 1..80: mol_type = other DNA
atggtctagctttcaccctagcctctttgcatcagtgttaactccatttagtgctacattagtcagtcccctacagagct

SEQ ID NO: 32510 - DNA, 80 bp, synthetic construct; identical to SEQ ID NO: 12017
  source 1..80: mol_type = other DNA

SEQ ID NO: 32511 - DNA, 80 bp, synthetic construct
  source 1..80: mol_type = other DNA
taagcctcttcatcttctccccagggacccctccccagggagcaccaggttatggtgcaaacaaaagctgttactattaa

SEQ ID NO: 32512 - DNA, 80 bp, synthetic construct
  source 1..80: mol_type = other DNA
tgtcaaatcttcagaaacagttaagatgatgtgctttggagccatataattcacattagaaactctgctccacctcgcca

SEQ ID NO: 32513 - DNA, 80 bp, synthetic construct
  source 1..80: mol_type = other DNA
tcatggaatgggcacatggcattgtttctggcatatggtatgtgatcaataaatgttggatttccccgtctgcattgtta

SEQ ID NO: 32514 - DNA, 80 bp, synthetic construct; identical to SEQ ID NO: 12018
  source 1..80: mol_type = other DNA

SEQ ID NO: 32515 - DNA, 80 bp, synthetic construct
  source 1..80: mol_type = other DNA
gacccaggagtctctcgtccttctggaagaatttatgaaacagtaacaagctaacttatcaatttgcaagttaaaaaaaa

SEQ ID NO: 32516 - DNA, 80 bp, synthetic construct
  source 1..80: mol_type = other DNA
atacaatgtggtgaaaatgatgagttaataactaacgaagctaagccttgtcttactccttggaaccctgcctgcattgt

SEQ ID NO: 32517 - DNA, 80 bp, synthetic construct
  source 1..80: mol_type = other DNA
gctcatgtaccatgagtggtcccttccatatacagaagaacctgccaactgtcccaaagacttattagcaaacataaaca

SEQ ID NO: 32518 - DNA, 80 bp, synthetic construct; identical to SEQ ID NO: 12019
  source 1..80: mol_type = other DNA

SEQ ID NO: 32519 - DNA, 80 bp, synthetic construct
  source 1..80: mol_type = other DNA
gcttcaaataactcacgtgcatgatgttcacactctcattgaaaatcttcatatagggcttcaggatgttgaaatggaag

SEQ ID NO: 32520 - DNA, 80 bp, synthetic construct
  source 1..80: mol_type = other DNA
actcacccagccagggctccaggaagctgtagaagaacttgtcctttggtgcaatggcagctgacataaatgaggacaat

SEQ ID NO: 32521 - DNA, 80 bp, synthetic construct
  source 1..80: mol_type = other DNA
cagaccaggctacagcagcacagtacagcaatgacactgcctaacatggcgtgtaggagctatgtcagggttccagcatg

SEQ ID NO: 32522 - DNA, 80 bp, synthetic construct
  source 1..80: mol_type = other DNA
ggacatgagacatgaccctgacatgtgttcacatgtcctgacatggccacaaaatacatgacaattcctaacatgagatg

SEQ ID NO: 32523 - DNA, 80 bp, synthetic construct; identical to SEQ ID NO: 12020
  source 1..80: mol_type = other DNA

SEQ ID NO: 32524 - DNA, 80 bp, synthetic construct
  source 1..80: mol_type = other DNA
cccaaacttgaccagctctacatgaccccagttggaattatataccagatgtaaccaggtataacatatttcaggtgtaa

SEQ ID NO: 32525 - DNA, 80 bp, synthetic construct
  source 1..80: mol_type = other DNA
ctgtctgcacatcggtcacgtgttcagctggaggcagcacagcaaccccagctgtgggcaaagcttggccagtgcgatgt

SEQ ID NO: 32526 - DNA, 80 bp, synthetic construct
  source 1..80: mol_type = other DNA
cttcttctgagctgtgaatctggagaaaaacacacaggacccaattcatgctctcctaggctgtgagagagaaggatctg

SEQ ID NO: 32527 - DNA, 80 bp, synthetic construct; identical to SEQ ID NO: 12021
  source 1..80: mol_type = other DNA

SEQ ID NO: 32528 - DNA, 80 bp, synthetic construct
  source 1..80: mol_type = other DNA
aggagaagtaaaccatgggccatttctgggaactctaggggaaaggtggcctttcccataagaactgagcttctgggact

SEQ ID NO: 32529 - DNA, 80 bp, synthetic construct
  source 1..80: mol_type = other DNA
caatagattatctttctttgcttagaccacaccaggttgggtttccaccactcacaactgaaagagacttcaataaccag

SEQ ID NO: 32530 - DNA, 80 bp, synthetic construct; identical to SEQ ID NO: 12022
  source 1..80: mol_type = other DNA

SEQ ID NO: 32531 - DNA, 80 bp, synthetic construct
  source 1..80: mol_type = other DNA
accctgcactctcctttcaaacattcctactcattgttccagacacagctccagtaactcctcctctaggaagccttcca

SEQ ID NO: 32532 - DNA, 80 bp, synthetic construct
  source 1..80: mol_type = other DNA
gtagatggcaatagagagaggagacgctgagatggaaattgatgaatacatgaaagaaagatgaagatagctgagaggga

SEQ ID NO: 32533 - DNA, 80 bp, synthetic construct
  source 1..80: mol_type = other DNA
agatgggtcccatccagaccttaaagccctgggggtaggtggccaccagctgagtcagaactctcatgccctcctctgtg

SEQ ID NO: 32534 - DNA, 80 bp, synthetic construct; identical to SEQ ID NO: 12023
  source 1..80: mol_type = other DNA

SEQ ID NO: 32535 - DNA, 80 bp, synthetic construct
  source 1..80: mol_type = other DNA
catgcatccatatgtcctattatttgtctatctatctatccatccatccatccatccatccatccatccatccatgctat

SEQ ID NO: 32536 - DNA, 80 bp, synthetic construct
  source 1..80: mol_type = other DNA
tatctatctatctacattcctcctgctctatctatctatctatccacattcctcctgctctatctctcttgggtccatct

SEQ ID NO: 32537 - DNA, 80 bp, synthetic construct
  source 1..80: mol_type = other DNA
agtatcgcctcaggacatgtccctaaggctggtccccacatgccttcatgtcctggctgatccacagaggctccagttcc

SEQ ID NO: 32538 - DNA, 80 bp, synthetic construct
  source 1..80: mol_type = other DNA
ttccactttatctgtggacacatccatcaatcctgccatttgcaaatgagcagactaagaccacattccccaaagaggag

SEQ ID NO: 32539 - DNA, 80 bp, synthetic construct; identical to SEQ ID NO: 12024
  source 1..80: mol_type = other DNA

SEQ ID NO: 32540 - DNA, 80 bp, synthetic construct
  source 1..80: mol_type = other DNA
agggactcgcctctctgtgcagccaaccctctgcccaggagccccgcagaggtgcattaatgtgggaagacaggcaggaa

SEQ ID NO: 32541 - DNA, 80 bp, synthetic construct
  source 1..80: mol_type = other DNA
tccctaagcctcgtacccctcaggaagtccatccatcctgagacctagacccatcctgctgccacactcaccatgccctg

SEQ ID NO: 32542 - DNA, 80 bp, synthetic construct
  source 1..80: mol_type = other DNA
tggccagaggcccagccaggacaggctcagctgggacatcctgcagggcagacgggatggacggtgagatcctgaggccc

SEQ ID NO: 32543 - DNA, 80 bp, synthetic construct; identical to SEQ ID NO: 12025
  source 1..80: mol_type = other DNA

SEQ ID NO: 32544 - DNA, 80 bp, synthetic construct
  source 1..80: mol_type = other DNA
ccccccccaggcctgccacccccagcctggcaccttctgtcaggagcagtctgtcccagacaacctcctctctctgtctg

SEQ ID NO: 32545 - DNA, 80 bp, synthetic construct
  source 1..80: mol_type = other DNA
tttaaaatgctttatgatattttatttgatattattcagtaatacaggttttgtggcaaatatgcatttctaaaagtgca

SEQ ID NO: 32546 - DNA, 80 bp, synthetic construct
  source 1..80: mol_type = other DNA
atacaaaaatattatctaataataacaaaaaatatatttcttttaaacataaacactaaaacagagagtagtcaaactga

SEQ ID NO: 32547 - DNA, 80 bp, synthetic construct; identical to SEQ ID NO: 12026
  source 1..80: mol_type = other DNA

SEQ ID NO: 32548 - DNA, 80 bp, synthetic construct
  source 1..80: mol_type = other DNA
tcaattttaggctttcttatcctgccatagcaaataattttttgactttcttcatttgtactttatggagctaactacat

SEQ ID NO: 32549 - DNA, 80 bp, synthetic construct
  source 1..80: mol_type = other DNA
tgtcacactaattgccacaaaaaagttaatttttcacataagacaactggcagtgaacatccaattaactgccacacagt

SEQ ID NO: 32550 - DNA, 80 bp, synthetic construct
  source 1..80: mol_type = other DNA
aaggatcatgattttaaaagatcagcatatgtaggtgacatgaaagttcacagcaactgtttcacaaatcaccttaacac

SEQ ID NO: 32551 - DNA, 80 bp, synthetic construct; identical to SEQ ID NO: 12027
  source 1..80: mol_type = other DNA

SEQ ID NO: 32552 - DNA, 80 bp, synthetic construct
  source 1..80: mol_type = other DNA
tcattgtgtgaggaaaatatgtcataacatagtcactctctagttttctttgttctgagcagagttcgggtctttccagt

SEQ ID NO: 32553 - DNA, 80 bp, synthetic construct
  source 1..80: mol_type = other DNA
tcttgacagtggaaaagtgttactgtcagattctgaggcaatgaatacatttgtttggatttcaaataatgcatgtagtt

SEQ ID NO: 32554 - DNA, 80 bp, synthetic construct
  source 1..80: mol_type = other DNA
agattaccacagccaggcctccagctctgaaacggcttaggattttgagaaattttacaattttccttcccccgtcttcc

SEQ ID NO: 32555 - DNA, 80 bp, synthetic construct; identical to SEQ ID NO: 12028
  source 1..80: mol_type = other DNA

SEQ ID NO: 32556 - DNA, 80 bp, synthetic construct
  source 1..80: mol_type = other DNA
cccttgaggccaggtctacaaatcttacattttcaaggaattgcattattttgatttttttcctgtctcataccaatgtt

SEQ ID NO: 32557 - DNA, 80 bp, synthetic construct
  source 1..80: mol_type = other DNA
aagtctgatctgtaaggaaataaacatatatttgaacaagaactatagctatagcaagtcatgagaatatctgtccacac

SEQ ID NO: 32558 - DNA, 80 bp, synthetic construct
  source 1..80: mol_type = other DNA
aagatataaaactttatgttcaattaaaaattttggctttctatttttatcttctgagacagaagaatcaaagaactttc

SEQ ID NO: 32559 - DNA, 80 bp, synthetic construct
  source 1..80: mol_type = other DNA
gagagctgatgctctgatagttataggacttcctgattgatctctgattggttaatttgaaagacgacatgaaagtaaat

SEQ ID NO: 32560 - DNA, 80 bp, synthetic construct; identical to SEQ ID NO: 12029
  source 1..80: mol_type = other DNA

SEQ ID NO: 32561 - DNA, 80 bp, synthetic construct
  source 1..80: mol_type = other DNA
agttttccaaaactttaaaatttgctttctccaaactctacttcttaagaaattctttaactttcacaataaatcaggct

SEQ ID NO: 32562 - DNA, 80 bp, synthetic construct
  source 1..80: mol_type = other DNA
gaaattcacagaatgtgttttcaagagaatagcccactagaaggagtcaaatccccaatttttctttctttttctttttc

SEQ ID NO: 32563 - DNA, 80 bp, synthetic construct; identical to SEQ ID NO: 12030
  source 1..80: mol_type = other DNA

SEQ ID NO: 32564 - DNA, 80 bp, synthetic construct
  source 1..80: mol_type = other DNA
aaggaatcatagcctttcagagtaatggccataaatggtagttctgttccctttcctctgtattaaagcataatgctttc

SEQ ID NO: 32565 - DNA, 80 bp, synthetic construct
  source 1..80: mol_type = other DNA
tgacaggacagaaagatgtactgttgcagaagagcaatatttggcaccactggtttaaatttcacacatagcaacagaaa

SEQ ID NO: 32566 - DNA, 80 bp, synthetic construct
  source 1..80: mol_type = other DNA
tttcttcatcaatcatagccacaacttgctctacgttgctcaattcaccaaatgttccaaggtactgcagtgcttttcct

SEQ ID NO: 32567 - DNA, 80 bp, synthetic construct
  source 1..80: mol_type = other DNA
tgataattatagcttagatgtttgtcttctgaaagatgggcaatatgcatgcctggcttagaaatacgagacctaattaa

SEQ ID NO: 32568 - DNA, 80 bp, synthetic construct; identical to SEQ ID NO: 12031
  source 1..80: mol_type = other DNA

SEQ ID NO: 32569 - DNA, 80 bp, synthetic construct
  source 1..80: mol_type = other DNA
ccattgaagatctttcatgtgattacacattgctttgttcttcatactaattgggagtgtgcctaatatgtgaagcacag

SEQ ID NO: 32570 - DNA, 80 bp, synthetic construct
  source 1..80: mol_type = other DNA
ctcttagttaaaatcatctttccatattctctttggtattgcattttctgctatttttataatcttgcttactcttcttt

SEQ ID NO: 32571 - DNA, 80 bp, synthetic construct
  source 1..80: mol_type = other DNA
aggtgggcacttgacatccaaatcaatatttccattttgaaatgctcccataaactcaagatctacatttatcagctgca

SEQ ID NO: 32572 - DNA, 80 bp, synthetic construct; identical to SEQ ID NO: 12032
  source 1..80: mol_type = other DNA

SEQ ID NO: 32573 - DNA, 80 bp, synthetic construct
  source 1..80: mol_type = other DNA
ctcactaccttattcaaaaatctgttgaattaggcacaggcttaccacgctggcatttaaggctttctgcaaacatgtct

SEQ ID NO: 32574 - DNA, 80 bp, synthetic construct
  source 1..80: mol_type = other DNA
aagacatctcgaatgccactacttcatgaagatttccttaatccttccttcttctttcctaaccaaatgtgaggacgtga

SEQ ID NO: 32575 - DNA, 80 bp, synthetic construct
  source 1..80: mol_type = other DNA
agtgccatatgttttacacattttctcacttaaacctcatgcatttaatagttgatgatgtgactgagatttaaagtacc

SEQ ID NO: 32576 - DNA, 80 bp, synthetic construct; identical to SEQ ID NO: 12033
  source 1..80: mol_type = other DNA

SEQ ID NO: 32577 - DNA, 80 bp, synthetic construct
  source 1..80: mol_type = other DNA
gaatatgtgtaatatttcccagtactattttaaaataataaattcaagaggtcactatctggctgtaaaagcccatttat

SEQ ID NO: 32578 - DNA, 80 bp, synthetic construct
  source 1..80: mol_type = other DNA
actctctaggcagtcaacaagtgtataagccttcttcaaaagaaacgttgtatatgccttagaaattttacgtggagcaa

SEQ ID NO: 32579 - DNA, 80 bp, synthetic construct
  source 1..80: mol_type = other DNA
ttaatgtgaagccaatgtggagcctctagaagttattagcacatggtgttaacaattcatcccttattaagtacaatttt

SEQ ID NO: 32580 - DNA, 80 bp, synthetic construct; identical to SEQ ID NO: 12034
  source 1..80: mol_type = other DNA

SEQ ID NO: 32581 - DNA, 80 bp, synthetic construct
  source 1..80: mol_type = other DNA
caatgttaaatcttttaaattatagatgataacacttaattttaatgtaggtgttcaaggaatggatgttgcaaagtact

SEQ ID NO: 32582 - DNA, 80 bp, synthetic construct
  source 1..80: mol_type = other DNA
tcctgggttcaagcgattctcctccctcagcctcccaagtagctggggctacaggcgcccgccaccacgcccggctaatt

SEQ ID NO: 32583 - DNA, 80 bp, synthetic construct
  source 1..80: mol_type = other DNA
atgtttctgtttgatataaagtttaaggccaaagagtgaggaactagacagccctgattccgtccctgatgtttcattct

SEQ ID NO: 32584 - DNA, 80 bp, synthetic construct
  source 1..80: mol_type = other DNA
tatggctctcgccctatcttaaagtaaaacaaaagtcataagatgaaccattgtaagtcacactgtcgtaaagtagaaag

SEQ ID NO: 32585 - DNA, 80 bp, synthetic construct; identical to SEQ ID NO: 12035
  source 1..80: mol_type = other DNA

SEQ ID NO: 32586 - DNA, 80 bp, synthetic construct
  source 1..80: mol_type = other DNA
tttttaacttcttcctttactaatgctcccaagtcaaaagctgaatgacgtttgtaggattcctttggggttagatctca

SEQ ID NO: 32587 - DNA, 80 bp, synthetic construct
  source 1..80: mol_type = other DNA
tatatatgccctctgagcagaaggcagacaggagtactgtacagtaagaaaaggacatcttaagtttaaatttggcagaa

SEQ ID NO: 32588 - DNA, 80 bp, synthetic construct
  source 1..80: mol_type = other DNA
ctctaataactaaggactcggcttgaatatgctgagagcagagggcagagacaaagtatgatccagaaaatgaagtatta

SEQ ID NO: 32589 - DNA, 80 bp, synthetic construct; identical to SEQ ID NO: 12036
  source 1..80: mol_type = other DNA

SEQ ID NO: 32590 - DNA, 80 bp, synthetic construct
  source 1..80: mol_type = other DNA
tgggattctagaaagataataggagtcaaacagttctctctaattataatttaacagtgtaccacctgctctaagtagtg

SEQ ID NO: 32591 - DNA, 80 bp, synthetic construct
  source 1..80: mol_type = other DNA
ttggtaatgtgatctgtcttttctcatataagcaccaaacactgagttatctaaatgcataacctttttcttacttctta

SEQ ID NO: 32592 - DNA, 80 bp, synthetic construct
  source 1..80: mol_type = other DNA
ctcagacttcctttcattggcctaataaactctaagttaacgtggaatggttactttccttcaagattcctttagctgcc

SEQ ID NO: 32593 - DNA, 80 bp, synthetic construct
  source 1..80: mol_type = other DNA
tttgcctttagtggagtgggatttccatctgaagtttgcaaaggctttcatcactcctctgtcttgcctgtccctattaa

SEQ ID NO: 32594 - DNA, 80 bp, synthetic construct; identical to SEQ ID NO: 12037
  source 1..80: mol_type = other DNA

SEQ ID NO: 32595 - DNA, 80 bp, synthetic construct
  source 1..80: mol_type = other DNA
tccactatttttctttctgttccctcctgtttatgctccatagtatccaatatggtcttgcagttttatctgagtactct

SEQ ID NO: 32596 - DNA, 80 bp, synthetic construct
  source 1..80: mol_type = other DNA
cattttcctacgcagaaattcaaagacgttagagatacattcccggcttcataaagagaatgagaattcattctcatata

SEQ ID NO: 32597 - DNA, 80 bp, synthetic construct
  source 1..80: mol_type = other DNA
cctgtaggaggcattgtctggtttcttttctctagcacaggtgaacctgtagaatatgtcaggagcttcttcagaaggtc

SEQ ID NO: 32598 - DNA, 80 bp, synthetic construct
  source 1..80: mol_type = other DNA
agcttcataatatgggccatacgcatggtaaatgctatgctattatgcattggaaatgaagatgtggtgttgataaaagg

SEQ ID NO: 32599 - DNA, 80 bp, synthetic construct; identical to SEQ ID NO: 12038
  source 1..80: mol_type = other DNA

SEQ ID NO: 32600 - DNA, 80 bp, synthetic construct
  source 1..80: mol_type = other DNA
atgagtttaccattttgatgtcactatctgcttgatccagggattatgtattggatttaaggtcccatggctgcaggtta

SEQ ID NO: 32601 - DNA, 80 bp, synthetic construct
  source 1..80: mol_type = other DNA
gatatcttcctagctgtgtgaccttaggaaagttatttaacctttctgtttatcaattgcttactccataatagcacaga

SEQ ID NO: 32602 - DNA, 80 bp, synthetic construct
  source 1..80: mol_type = other DNA
ccacaattacccaaggcagaactaatccctttcactcctctgttttcccagagcattttgtacatatttgattgaactgt

SEQ ID NO: 32603 - DNA, 80 bp, synthetic construct; identical to SEQ ID NO: 12039
  source 1..80: mol_type = other DNA

SEQ ID NO: 32604 - DNA, 80 bp, synthetic construct
  source 1..80: mol_type = other DNA
tctactgagcatagcttgcttagaaatattattgttgcattcccaaccagggaagatggggtagatcagaaacttgaatg

SEQ ID NO: 32605 - DNA, 80 bp, synthetic construct
  source 1..80: mol_type = other DNA
gtcatggagtttaaactatcgaacagaggaatctataaagaggccagcagagaggagggaagaaacaagctaaaataaac

SEQ ID NO: 32606 - DNA, 80 bp, synthetic construct; identical to SEQ ID NO: 12040
  source 1..80: mol_type = other DNA

SEQ ID NO: 32607 - DNA, 80 bp, synthetic construct
  source 1..80: mol_type = other DNA
gctcctagaatttgaatagagctgtgctgtgtataatactttcacacatatcttttcatttaaaacaatggagttgaggc

SEQ ID NO: 32608 - DNA, 80 bp, synthetic construct
  source 1..80: mol_type = other DNA
atcagtcttcctttctaaaagccttactggtttcctgccaaggactttgctatttcagggtctttgcactttctgttcat

SEQ ID NO: 32609 - DNA, 80 bp, synthetic construct
  source 1..80: mol_type = other DNA
accatctgacatattatgtattcatctgtttatttgtcattgtctgtttctccctactaaactgtgagctccatgagagc

SEQ ID NO: 32610 - DNA, 80 bp, synthetic construct
  source 1..80: mol_type = other DNA
aatgaaacaatacaaagtattggtaaaacaatcggtgctttctgaccttgtggaccactttcctattcttaagacttcct

SEQ ID NO: 32611 - DNA, 80 bp, synthetic construct; identical to SEQ ID NO: 12041
  source 1..80: mol_type = other DNA

SEQ ID NO: 32612 - DNA, 80 bp, synthetic construct
  source 1..80: mol_type = other DNA
gctggacatcttagtcttcttattatcagctctttactatacctatgcctaatataatgagaatcactgactcttggagg

SEQ ID NO: 32613 - DNA, 80 bp, synthetic construct
  source 1..80: mol_type = other DNA
atacctgaaatattctcagttccccattcccttctaatctctacttagtctacagggctccttaaatgtcacttcctcaa

SEQ ID NO: 32614 - DNA, 80 bp, synthetic construct; identical to SEQ ID NO: 12042
  source 1..80: mol_type = other DNA

SEQ ID NO: 32615 - DNA, 80 bp, synthetic construct
  source 1..80: mol_type = other DNA
tttcaaatattatagctaatagtaacatttatttaggacacatttggtgcaggcaccatgctaaaagcacttcacacatc

SEQ ID NO: 32616 - DNA, 80 bp, synthetic construct
  source 1..80: mol_type = other DNA
ctatgaaacggcaatgccatagtttgaacctaggcagtgtgacagagtagtcccatgcctaattcaggaaattctttcac

SEQ ID NO: 32617 - DNA, 80 bp, synthetic construct
  source 1..80: mol_type = other DNA
atgcaagatatcttaatatattgtttagactcctttccctctctgcttgccaaagatgtagtttccttaatcatgccctt

SEQ ID NO: 32618 - DNA, 80 bp, synthetic construct; identical to SEQ ID NO: 12043
  source 1..80: mol_type = other DNA

SEQ ID NO: 32619 - DNA, 80 bp, synthetic construct
  source 1..80: mol_type = other DNA
ataaggaggacaaaagaaagcaggacagttaatataatgttttagaattccaggaaagaatacgtaagcaacacactgag

SEQ ID NO: 32620 - DNA, 80 bp, synthetic construct
  source 1..80: mol_type = other DNA
ctcaggaggaagagcaggtttggaaggaatgggaatcagtttagttctaagtatgatggctactgggttccttggtcaga

SEQ ID NO: 32621 - DNA, 80 bp, synthetic construct
  source 1..80: mol_type = other DNA
accaacatcatgttctttcaatccttttctactttccccaacctgttcttcagcttccatcatatgagactacacgctgc

SEQ ID NO: 32622 - DNA, 80 bp, synthetic construct
  source 1..80: mol_type = other DNA
ttttaagtttggtattaattaaataaggagtttagaacccagaattttgaatttaattagaagttttcatttataaagat

SEQ ID NO: 32623 - DNA, 80 bp, synthetic construct; identical to SEQ ID NO: 12044
  source 1..80: mol_type = other DNA

SEQ ID NO: 32624 - DNA, 80 bp, synthetic construct
  source 1..80: mol_type = other DNA
ttaacctaagcaaacaaacggcaaaaatcacaaaatgagcctttgctagagatgattacacaaattaaagcttctgtgtg

SEQ ID NO: 32625 - DNA, 80 bp, synthetic construct
  source 1..80: mol_type = other DNA
attttctaaagagataactgcatttataaaaactgaaaatgcttgcttccccgaaaacctcgccactatcagctactatt

SEQ ID NO: 32626 - DNA, 80 bp, synthetic construct
  source 1..80: mol_type = other DNA
agctgcccattaagatgttgacactgataaggtctaagatgctggtaagatggtatctacaatgtcttgaggcttatgta

SEQ ID NO: 32627 - DNA, 80 bp, synthetic construct
  source 1..80: mol_type = other DNA
ttctgactttgatttttttttgattaatgatctacaggctttcatgcaaccacagattttttgtttgctctgttttgttt

SEQ ID NO: 32628 - DNA, 80 bp, synthetic construct; identical to SEQ ID NO: 12045
  source 1..80: mol_type = other DNA

SEQ ID NO: 32629 - DNA, 80 bp, synthetic construct
  source 1..80: mol_type = other DNA
aaaacgcacgaatcagcagggtcctaaaagtagccaatcacagggaggattgaaaaaagggcactctgataggacaaaaa

SEQ ID NO: 32630 - DNA, 80 bp, synthetic construct
  source 1..80: mol_type = other DNA
aagtcagcgagaccatgaacccctgggcaggaaccaattccagacacactatatctccaaatcatatagtagtcatagcc

SEQ ID NO: 32631 - DNA, 80 bp, synthetic construct
  source 1..80: mol_type = other DNA
gagacgatttggggcttttatgctgttaaaagtcccaaatgttcattttatttagaatgatggcattgaagtgctggcac

SEQ ID NO: 32632 - DNA, 80 bp, synthetic construct; identical to SEQ ID NO: 12046
  source 1..80: mol_type = other DNA

SEQ ID NO: 32633 - DNA, 80 bp, synthetic construct
  source 1..80: mol_type = other DNA
aatgccatccagtaacacctccatttttctcattatgactgcttggaaacaatactgtcttgagggtgacagaaaaaaag

SEQ ID NO: 32634 - DNA, 80 bp, synthetic construct
  source 1..80: mol_type = other DNA
ggattggtagattgtgtctgtgtcagtatgctggttgtgttatcatactatagttttgcaacatgcaaaacaggtgaaac

SEQ ID NO: 32635 - DNA, 80 bp, synthetic construct; identical to SEQ ID NO: 12047
  source 1..80: mol_type = other DNA

SEQ ID NO: 32636 - DNA, 80 bp, synthetic construct
  source 1..80: mol_type = other DNA
tgacatgcatgcttgccagtgttctaaaaagtataaaatatgcaaataaaaaaggttattttataatttaaatgcagttt

SEQ ID NO: 32637 - DNA, 80 bp, synthetic construct
  source 1..80: mol_type = other DNA
taggccttttggggataaaacagtttctcttaagtggtgaaaaagctacattttgttctttcagtctaatcttgttttct

SEQ ID NO: 32638 - DNA, 80 bp, synthetic construct
  source 1..80: mol_type = other DNA
ttcatgtatactgtaactaggtcttcactcattgttttggaccactagtcttctcggtatcaggttccgttaattattaa

SEQ ID NO: 32639 - DNA, 80 bp, synthetic construct; identical to SEQ ID NO: 12048
  source 1..80: mol_type = other DNA

SEQ ID NO: 32640 - DNA, 80 bp, synthetic construct
  source 1..80: mol_type = other DNA
tttctctgtacagaaaacaaattttattttgcatggaggcaaaaatagaaatgaaaaggagaggaaatattacagtgctt

SEQ ID NO: 32641 - DNA, 80 bp, synthetic construct
  source 1..80: mol_type = other DNA
gtttcaagttaacacgaaaatgccctcataccattcattatcccacaattattttctcttcactttgtccttcccctctt

SEQ ID NO: 32642 - DNA, 80 bp, synthetic construct
  source 1..80: mol_type = other DNA
aaaataccctctctctcctgcagaataaagtccatttatctagctgatggaggtttggaaaactacagcactcgaaggtc

SEQ ID NO: 32643 - DNA, 80 bp, synthetic construct; identical to SEQ ID NO: 12049
  source 1..80: mol_type = other DNA

SEQ ID NO: 32644 - DNA, 80 bp, synthetic construct
  source 1..80: mol_type = other DNA
tgctttcttaatttgtaatatttaattgttgcagtaatatgaaatgataggatggagggagatagtattttgtatccatt

SEQ ID NO: 32645 - DNA, 80 bp, synthetic construct
  source 1..80: mol_type = other DNA
ttggtgccaaaaaaatgcctttggggtcagataacaccacataaggtggcgagcacacgtccacatgatataaatcttca

SEQ ID NO: 32646 - DNA, 80 bp, synthetic construct
  source 1..80: mol_type = other DNA
ttttccctgttggggtttacatggttctctgtttggactttaccttactcaacatcatctaatttcacctaagagttttg

SEQ ID NO: 32647 - DNA, 80 bp, synthetic construct
  source 1..80: mol_type = other DNA
acaatggtaataagaacaataaatttttgaaaatcttttgatgctgaatataatacagcctgtgtaaatatccaacagcc

SEQ ID NO: 32648 - DNA, 80 bp, synthetic construct; identical to SEQ ID NO: 12050
  source 1..80: mol_type = other DNA

SEQ ID NO: 32649 - DNA, 80 bp, synthetic construct
  source 1..80: mol_type = other DNA
caccaagcatctccacatcaaattgggttcatttttgtttaattcctcactgctacatggagctctcagagactaaggta

SEQ ID NO: 32650 - DNA, 80 bp, synthetic construct
  source 1..80: mol_type = other DNA
aaacatcaattctctcccgcaacaaaggatcaaccgatcacctttacacatactacatttaggcatacatttgtgttttg

SEQ ID NO: 32651 - DNA, 80 bp, synthetic construct
  source 1..80: mol_type = other DNA
taaagcaagcaagcaagcaaaacaaagctaagaaagagtgaagatgaatgcatagttggccactgtgtgtgtgtgcaatc

SEQ ID NO: 32652 - DNA, 80 bp, synthetic construct; identical to SEQ ID NO: 12051
  source 1..80: mol_type = other DNA

SEQ ID NO: 32653 - DNA, 80 bp, synthetic construct
  source 1..80: mol_type = other DNA
aagataacagtatcttacactaaaactgtctctatccagatataaaaaaagcattacattgccgatagaaaagtgacaac

SEQ ID NO: 32654 - DNA, 80 bp, synthetic construct
  source 1..80: mol_type = other DNA
gtttaaactgcataatttttatgagaatggcagcaagttgcctaatagcactagtctgtagtactgtaatggatcaactt

SEQ ID NO: 32655 - DNA, 80 bp, synthetic construct
  source 1..80: mol_type = other DNA
atatatgtatcttattcagtataaacctgaaatctattatctatctatctatctatctatctatctatctatctccttta

SEQ ID NO: 32656 - DNA, 80 bp, synthetic construct; identical to SEQ ID NO: 12052
  source 1..80: mol_type = other DNA

SEQ ID NO: 32657 - DNA, 80 bp, synthetic construct
  source 1..80: mol_type = other DNA
gccagactccttggaaaactgtttgaactcaataaaatgaccaataattgcagagaaaaatgaagaaaataaatgttcaa

SEQ ID NO: 32658 - DNA, 80 bp, synthetic construct
  source 1..80: mol_type = other DNA
tccaggtaaagttcctaactcaccctaatttcaatctctgctcagcatgattcaaggtagcacaggagatagagatgaga

SEQ ID NO: 32659 - DNA, 80 bp, synthetic construct
  source 1..80: mol_type = other DNA
gtggcatgtaatgcttaatcaccgatataacagtaagcaatgtttcatgatattatcaaatttggacagtggaacacaat

SEQ ID NO: 32660 - DNA, 80 bp, synthetic construct
  source 1..80: mol_type = other DNA
atatgtgatatctaaattggtcaaaagcagagatagttcatgtttcatagtgaaagtagaaagtcaacattcacatagtg

SEQ ID NO: 32661 - DNA, 80 bp, synthetic construct; identical to SEQ ID NO: 12053
  source 1..80: mol_type = other DNA

SEQ ID NO: 32662 - DNA, 80 bp, synthetic construct
  source 1..80: mol_type = other DNA
gaatatcctgggcatattttaatctctgtgcctactgcactgccttatcatcattagcttatgtgtccatctgcccagct

SEQ ID NO: 32663 - DNA, 80 bp, synthetic construct
  source 1..80: mol_type = other DNA
ctttcagaaacaaattaaagtatataaataggttttcaaatatgacatgaagtaaaaaatcgtacttacagaaaagctgt

SEQ ID NO: 32664 - DNA, 80 bp, synthetic construct
  source 1..80: mol_type = other DNA
tatctaacgcaggctgaggggtcagagattttctagaagaggtgtcatccgagctaaactctgaaggataaggtgaaggt

SEQ ID NO: 32665 - DNA, 80 bp, synthetic construct; identical to SEQ ID NO: 12054
  source 1..80: mol_type = other DNA

SEQ ID NO: 32666 - DNA, 80 bp, synthetic construct
  source 1..80: mol_type = other DNA
ggaggctgttccttccaaaagcagtttatagccttatgaagaggattgagtcatattcaaaggaactcagataagaacat

SEQ ID NO: 32667 - DNA, 80 bp, synthetic construct
  source 1..80: mol_type = other DNA
ggtccaagcattatgcatggagaaatgtagaattttgaaggagagggggaatagaaaagagaggagagggtaaaaggaag

SEQ ID NO: 32668 - DNA, 80 bp, synthetic construct; identical to SEQ ID NO: 12055
  source 1..80: mol_type = other DNA

SEQ ID NO: 32669 - DNA, 80 bp, synthetic construct
  source 1..80: mol_type = other DNA
tacgtcattgtaaggagaaataagtagaggacgacatgcacaaacaatctgatgtaacccagatccaatgagcaattaat

SEQ ID NO: 32670 - DNA, 80 bp, synthetic construct
  source 1..80: mol_type = other DNA
tgaaggaactacaggatgagcttatccttatatggctaaaatatactaaatgtcagggagatagtgggggatgaagctgg

SEQ ID NO: 32671 - DNA, 80 bp, synthetic construct
  source 1..80: mol_type = other DNA
catccagaatgttggagatgggattctggtagtggtaggaaagtgaactagatgagttctaaggtcatcattattttcaa

SEQ ID NO: 32672 - DNA, 80 bp, synthetic construct; identical to SEQ ID NO: 12056
  source 1..80: mol_type = other DNA

SEQ ID NO: 32673 - DNA, 80 bp, synthetic construct
  source 1..80: mol_type = other DNA
atagcactcgcccagccatctcctccaccatctgctgcccccctcatctcccagtcctgaggcctgcagattcaggcata

SEQ ID NO: 32674 - DNA, 80 bp, synthetic construct
  source 1..80: mol_type = other DNA
catacctatatataaccaatgggttacatacagatataacctataacctgttggctataataatataaccaattggctgc

SEQ ID NO: 32675 - DNA, 80 bp, synthetic construct
  source 1..80: mol_type = other DNA
aaggctccaatattgatcttcactcccacactgcctgctgactgcctcaccctgactcacaatggcttctgccttgaaac

SEQ ID NO: 32676 - DNA, 80 bp, synthetic construct
  source 1..80: mol_type = other DNA
attacataggaactttgttaactggggcctgcatagtctatgagctgccaaagacttacttcttagtcaaaaggaacata

SEQ ID NO: 32677 - DNA, 80 bp, synthetic construct; identical to SEQ ID NO: 12057
  source 1..80: mol_type = other DNA

SEQ ID NO: 32678 - DNA, 80 bp, synthetic construct
  source 1..80: mol_type = other DNA
tctgcctgatagactctgtgctatcctgccactcatacttctttgtagtcctcacaaagttttgtataaggtaggtgttt

SEQ ID NO: 32679 - DNA, 80 bp, synthetic construct
  source 1..80: mol_type = other DNA
tgaattagtttggtcctgtttattactggcctcaagtttaatgagctcaagttaatacaggtgaaaggccagggtgttac

SEQ ID NO: 32680 - DNA, 80 bp, synthetic construct; identical to SEQ ID NO: 12058
  source 1..80: mol_type = other DNA

SEQ ID NO: 32681 - DNA, 80 bp, synthetic construct
  source 1..80: mol_type = other DNA
tatgaggtccctcccagtgatatgatctgttttgttttcaaattcacaattagaattccttagggtttatgcctaggtgg

SEQ ID NO: 32682 - DNA, 80 bp, synthetic construct
  source 1..80: mol_type = other DNA
gtttatcaaacttccaaggttggatgggttcataaactgttttagacttcattagtaaaaggtaaaactaaagatattgt

SEQ ID NO: 32683 - DNA, 80 bp, synthetic construct
  source 1..80: mol_type = other DNA
ctagttacaaactcatctgagacacactctatagaaaatcaaccacaaatattagaagtgaatataaatgataacaggca

SEQ ID NO: 32684 - DNA, 80 bp, synthetic construct; identical to SEQ ID NO: 12059
  source 1..80: mol_type = other DNA

SEQ ID NO: 32685 - DNA, 80 bp, synthetic construct
  source 1..80: mol_type = other DNA
aagatgtgagtgctctgaattataaaaatgtcacagagtattaacaatacataaagaaagattttctcagcaacagtcct

SEQ ID NO: 32686 - DNA, 80 bp, synthetic construct
  source 1..80: mol_type = other DNA
ggaaaacagaaaaatgaggtgatgaggaaaatgggactgctataaatatggagtaaaaaagcatacaggattcaggctat

SEQ ID NO: 32687 - DNA, 80 bp, synthetic construct
  source 1..80: mol_type = other DNA
agagcatactggaatgaaatgatcatcattttgaaagtcaatttttagtagttctatgctaagcagcagatttatattgg

SEQ ID NO: 32688 - DNA, 80 bp, synthetic construct; identical to SEQ ID NO: 12060
  source 1..80: mol_type = other DNA

SEQ ID NO: 32689 - DNA, 80 bp, synthetic construct
  source 1..80: mol_type = other DNA
ctagtacatgctatgcgctgaccattgaagacataatggagaataaaacagatatgatctccttcctcagggaatatgta

SEQ ID NO: 32690 - DNA, 80 bp, synthetic construct
  source 1..80: mol_type = other DNA
gactccacctcacgtaccctgtgatcatctgaaggaatttgcttctgtcatttttatctttgactattcaacaattcacc

SEQ ID NO: 32691 - DNA, 80 bp, synthetic construct
  source 1..80: mol_type = other DNA
tagtgtctgtcttcacaccttcacctcctattcactcctcaacatatccttttcaggaatttgtcctccattccaaacaa

SEQ ID NO: 32692 - DNA, 80 bp, synthetic construct
  source 1..80: mol_type = other DNA
actttatctctcagcatcattaaacttagttgacccttctttctttcttaaaacactatcctatggctgggcacagtgat

SEQ ID NO: 32693 - DNA, 80 bp, synthetic construct; identical to SEQ ID NO: 12061
  source 1..80: mol_type = other DNA

SEQ ID NO: 32694 - DNA, 80 bp, synthetic construct
  source 1..80: mol_type = other DNA
ttcattgctcttagaataaaattggaaaacatcaccatgactgtaggtttatctggcccctgcccacctcttcaatatat

SEQ ID NO: 32695 - DNA, 80 bp, synthetic construct
  source 1..80: mol_type = other DNA
ctcggaccacccaatctagagtaggcctttcaaatcacactcttcacatctcctttttaaaaatattcacatcgtttatt

SEQ ID NO: 32696 - DNA, 80 bp, synthetic construct
  source 1..80: mol_type = other DNA
atgaaggtactgggtaattgtacatttatacacagtacagtcttgaacttagcttggcttccaattctggctccattttt

SEQ ID NO: 32697 - DNA, 80 bp, synthetic construct; identical to SEQ ID NO: 12062
  source 1..80: mol_type = other DNA

SEQ ID NO: 32698 - DNA, 80 bp, synthetic construct
  source 1..80: mol_type = other DNA
tcccatcccttcagcaaaccatttctccagcatttataagggaagtcaatggattaagcatgttgtacgtgatggagaac

SEQ ID NO: 32699 - DNA, 80 bp, synthetic construct
  source 1..80: mol_type = other DNA
gacaagtaaatgtaaacactagtgcttaaagaatgaaagcaagaccattctgtagcctaaactagatgctgtcatctgtg

SEQ ID NO: 32700 - DNA, 80 bp, synthetic construct; identical to SEQ ID NO: 12063
  source 1..80: mol_type = other DNA

SEQ ID NO: 32701 - DNA, 80 bp, synthetic construct
  source 1..80: mol_type = other DNA
gaaaaagaaattaaaacattggcaggcactttgtctccagtttgttggacaagtaagaaaaggactttccatccattaat

SEQ ID NO: 32702 - DNA, 80 bp, synthetic construct
  source 1..80: mol_type = other DNA
ttcgcaaaccccaataacttttctcctcatctctgttaacccagaaagtaactttaacatgcacattcttgcttcttaag

SEQ ID NO: 32703 - DNA, 80 bp, synthetic construct
  source 1..80: mol_type = other DNA
ctatagaaagatttaaagctacagcgggctctctgttatctagggatggtttttccatttagggataatctgggcccttg

SEQ ID NO: 32704 - DNA, 80 bp, synthetic construct; identical to SEQ ID NO: 12064
  source 1..80: mol_type = other DNA

SEQ ID NO: 32705 - DNA, 80 bp, synthetic construct
  source 1..80: mol_type = other DNA
caaattaaaagcacagctctatatttcatcacatttaagatgctatcatacattgtttattaatacaataaacaagaaaa

SEQ ID NO: 32706 - DNA, 80 bp, synthetic construct
  source 1..80: mol_type = other DNA
tacttactggctcagttctaagtctccttctcatcattgttagtagccataatacagtaatggcatctcattactcctag

SEQ ID NO: 32707 - DNA, 80 bp, synthetic construct
  source 1..80: mol_type = other DNA
tcacaaagaaagagaggtgagggtggacattaccgtatgttcttgagtcgggttaagtccatacctgaaaacttctgaga

SEQ ID NO: 32708 - DNA, 80 bp, synthetic construct
  source 1..80: mol_type = other DNA
caatatttgttccttcaaagaaactcaggatgtcctaaccattttataagagaatgatttccctcttgtatttctccatg

SEQ ID NO: 32709 - DNA, 80 bp, synthetic construct; identical to SEQ ID NO: 12065
  source 1..80: mol_type = other DNA

SEQ ID NO: 32710 - DNA, 80 bp, synthetic construct
  source 1..80: mol_type = other DNA
gagccattgtaatccatctcttatgtcagatgaactgtgagacttatccttctgatcgcataggatttactgctttttgt

SEQ ID NO: 32711 - DNA, 80 bp, synthetic construct
  source 1..80: mol_type = other DNA
ccaaagaagtcattactgcttatacaatggtgtgggttctattacacagaggacaatatgaggaggctcactcttcactt

SEQ ID NO: 32712 - DNA, 80 bp, synthetic construct; identical to SEQ ID NO: 12066
  source 1..80: mol_type = other DNA

SEQ ID NO: 32713 - DNA, 80 bp, synthetic construct
  source 1..80: mol_type = other DNA
atcctaatatagtttttattatacttatgtattttcctaattttctacagtgagcacacactacttttataatgaggaaa

SEQ ID NO: 32714 - DNA, 80 bp, synthetic construct
  source 1..80: mol_type = other DNA
aaatgtatgctgtgggaggatgcatatgtaatgactacacagatggaaatatgataagtagacctgaggcccacttctaa

SEQ ID NO: 32715 - DNA, 80 bp, synthetic construct
  source 1..80: mol_type = other DNA
ctgtgatgctaactttccaagaattaaaactataatgttagcttttattagagtgagttcttttctatttgcagctctca

SEQ ID NO: 32716 - DNA, 80 bp, synthetic construct; identical to SEQ ID NO: 12067
  source 1..80: mol_type = other DNA

SEQ ID NO: 32717 - DNA, 80 bp, synthetic construct
  source 1..80: mol_type = other DNA
gcacctgtagttccagctactcggaaggctgaggtggaaggattgcttgagcccaggaggtcaaggctgcagggagccag

SEQ ID NO: 32718 - DNA, 80 bp, synthetic construct
  source 1..80: mol_type = other DNA
acaatctcctttctgcagtgttttatatacagataaatttgagttgtctttagatatctacctcagaaaatgctcaaaaa

SEQ ID NO: 32719 - DNA, 80 bp, synthetic construct
  source 1..80: mol_type = other DNA
gcatagtggtgtgtatctgtaatcccagctactcaggaggctgaggtaagagaatcgcttgaaccctggaggcagaggtt

SEQ ID NO: 32720 - DNA, 80 bp, synthetic construct; identical to SEQ ID NO: 12068
  source 1..80: mol_type = other DNA

SEQ ID NO: 32721 - DNA, 80 bp, synthetic construct
  source 1..80: mol_type = other DNA
tttcttatgtactaattcaacctatttcctaaggtttacccacattcattctataaagttaatacagagacaattaggag

SEQ ID NO: 32722 - DNA, 80 bp, synthetic construct
  source 1..80: mol_type = other DNA
ggatttagtattaaagttggtcaaggttcataaatttattagggagttttctgtacctttctataagttgtaattgttga

SEQ ID NO: 32723 - DNA, 80 bp, synthetic construct
  source 1..80: mol_type = other DNA
tcctctctctagattttctgaccaaataattatatataacaccttttcactatttaattctctcctgcgtttgaggtaac

SEQ ID NO: 32724 - DNA, 80 bp, synthetic construct; identical to SEQ ID NO: 12069
  source 1..80: mol_type = other DNA

SEQ ID NO: 32725 - DNA, 80 bp, synthetic construct
  source 1..80: mol_type = other DNA
ccctgtcgttaaccttctgcttaaactctctttccatttctctttctttttaacatttttttttctaagccagaaacttt

SEQ ID NO: 32726 - DNA, 80 bp, synthetic construct
  source 1..80: mol_type = other DNA
aaacagcagtgcccattgaagagtactgaacgtggaatcaatactcaataaggagattcaggttctagggctttgtttta

SEQ ID NO: 32727 - DNA, 80 bp, synthetic construct
  source 1..80: mol_type = other DNA
caaaaaacttgtttgtttgtctttaataactcacattttggtggtttagcgcatatcatctgaggattgatgttgaatga

SEQ ID NO: 32728 - DNA, 80 bp, synthetic construct
  source 1..80: mol_type = other DNA
aacaagcattcattagaaagcatactaagtgtgtgatttattgtgacttccagtgacataacagagctcaaacagaacaa

SEQ ID NO: 32729 - DNA, 80 bp, synthetic construct; identical to SEQ ID NO: 12070
  source 1..80: mol_type = other DNA

SEQ ID NO: 32730 - DNA, 80 bp, synthetic construct
  source 1..80: mol_type = other DNA
cgtgggtgaacatgggccctatcatagaaaatatgctttttgttaggattctcaatatctagaaggaggggcaacctttc

SEQ ID NO: 32731 - DNA, 80 bp, synthetic construct
  source 1..80: mol_type = other DNA
acaaaatcactcttgtcacttctagcctcctgtgcttttctgaaaacaaaaccctctaccacctgccatccattattcca

SEQ ID NO: 32732 - DNA, 80 bp, synthetic construct
  source 1..80: mol_type = other DNA
tgcttcaaacatctcttcatgcaaagcttaccagatgcagaaatgtggctaattctcatccacacaaaagctaaacgaag

SEQ ID NO: 32733 - DNA, 80 bp, synthetic construct; identical to SEQ ID NO: 12071
  source 1..80: mol_type = other DNA

SEQ ID NO: 32734 - DNA, 80 bp, synthetic construct
  source 1..80: mol_type = other DNA
gggccacctagacagctttccttgaagacaaagggtgtctgaaatggacaactttattttatataccagtctcttagcgg

SEQ ID NO: 32735 - DNA, 80 bp, synthetic construct
  source 1..80: mol_type = other DNA
agccaatttgtgtcaataggaaaatgtgaaaatgctctgagtctctcctctgcacccccaaccacgtttttagtagtatg

SEQ ID NO: 32736 - DNA, 80 bp, synthetic construct
  source 1..80: mol_type = other DNA
ataatctgggaccacagtgttagttagctttgctaaagatgtttgtgaaactactaaaatggaatgccaagtgtctaagt

SEQ ID NO: 32737 - DNA, 80 bp, synthetic construct; identical to SEQ ID NO: 12072
  source 1..80: mol_type = other DNA

SEQ ID NO: 32738 - DNA, 80 bp, synthetic construct
  source 1..80: mol_type = other DNA
tcacattctcagtgggaactttcctaatcatcccattgacattaaaattcttccctgcctcctgccactcattggccttc

SEQ ID NO: 32739 - DNA, 80 bp, synthetic construct
  source 1..80: mol_type = other DNA
ctaaataatcctcagggtatgggactgtttttaacatactgcaggtgctcaaaaacatgtttcccaaagaattatcatga

SEQ ID NO: 32740 - DNA, 80 bp, synthetic construct; identical to SEQ ID NO: 12073
  source 1..80: mol_type = other DNA

SEQ ID NO: 32741 - DNA, 80 bp, synthetic construct
  source 1..80: mol_type = other DNA
agggaagtttacatacatgtttcagtctagagcagggcatggaatgtattatcatgggaaatcaaggagggtttgtccaa

SEQ ID NO: 32742 - DNA, 80 bp, synthetic construct
  source 1..80: mol_type = other DNA
catgtagcctacttcctttgtagatgtttgctggagtacggatgaaaagagagataattctagaaagataggtgactatc

SEQ ID NO: 32743 - DNA, 80 bp, synthetic construct
  source 1..80: mol_type = other DNA
gtaaataagtatttagaagtactaggctataaagcttaagaactatggaatctatccaacttataactgtaaagcagtaa

SEQ ID NO: 32744 - DNA, 80 bp, synthetic construct; identical to SEQ ID NO: 12074
  source 1..80: mol_type = other DNA

SEQ ID NO: 32745 - DNA, 80 bp, synthetic construct
  source 1..80: mol_type = other DNA
cctgaatattgacaataaaactgtatgtggacctgagaagaatgtgactactggagagactagtggatgatcatttcttg

SEQ ID NO: 32746 - DNA, 80 bp, synthetic construct
  source 1..80: mol_type = other DNA
gtggccagggaatagtaaaacatgatgctgacacatttatttcagttttaaaggaaaaacctcagttttcagctgatgaa

SEQ ID NO: 32747 - DNA, 80 bp, synthetic construct
  source 1..80: mol_type = other DNA
ttatttttttctaataaactctgcttctaacattaaggttaaatttaactagttcattgagactttgttctttattgtcc

SEQ ID NO: 32748 - DNA, 80 bp, synthetic construct
  source 1..80: mol_type = other DNA
ggcatcacatttatacactagcttatttacaaaatttttctttattggtcctttgaatgtaagaaaatccacaatctaga

SEQ ID NO: 32749 - DNA, 80 bp, synthetic construct; identical to SEQ ID NO: 12075
  source 1..80: mol_type = other DNA

SEQ ID NO: 32750 - DNA, 80 bp, synthetic construct
  source 1..80: mol_type = other DNA
atctgggtccctgccaaatatggtctgccattgtgaagttctatctctctgcattttaaatcatgatggttttttgcatt

SEQ ID NO: 32751 - DNA, 80 bp, synthetic construct
  source 1..80: mol_type = other DNA
ttcctgattttaccaaagcaaatgccctccacccccgccctgctctaaatagcacagatttctggtattttaatgtgtca

SEQ ID NO: 32752 - DNA, 80 bp, synthetic construct
  source 1..80: mol_type = other DNA
aaaaacatggagagctacagttacccaaaaaaacagttcaaggaaacaaaaggactagatttattccaagcacaggttca

SEQ ID NO: 32753 - DNA, 80 bp, synthetic construct; identical to SEQ ID NO: 12076
  source 1..80: mol_type = other DNA

SEQ ID NO: 32754 - DNA, 80 bp, synthetic construct
  source 1..80: mol_type = other DNA
caagaggttcataaatattctctaaaaacctgtgggctctaacatgggaagttagagagtacgtacttttcctagtgggt

SEQ ID NO: 32755 - DNA, 80 bp, synthetic construct
  source 1..80: mol_type = other DNA
gaagaaataagccacttcttttgggaagttatcagtggtttcaggaccttgcagtggcaactggattttcagaaaagaag

SEQ ID NO: 32756 - DNA, 80 bp, synthetic construct
  source 1..80: mol_type = other DNA
actgtttgcttgtgaatggagactcaacatgtataacatgtctcctatttatgtggatgaatcttgttttcaaaagacta

SEQ ID NO: 32757 - DNA, 80 bp, synthetic construct; identical to SEQ ID NO: 12077
  source 1..80: mol_type = other DNA

SEQ ID NO: 32758 - DNA, 80 bp, synthetic construct
  source 1..80: mol_type = other DNA
ccttcataaaaaagatcttagaaagaccccttcctctttctaccatgtgaagttatagtgaaaagatggctgtttaggaa

SEQ ID NO: 32759 - DNA, 80 bp, synthetic construct
  source 1..80: mol_type = other DNA
aaaatggttaattcggtttagtttagaaataatttatatcattcctttcttttgagatcattactggctaagtacaaaaa

SEQ ID NO: 32760 - DNA, 80 bp, synthetic construct; identical to SEQ ID NO: 12078
  source 1..80: mol_type = other DNA

SEQ ID NO: 32761 - DNA, 80 bp, synthetic construct
  source 1..80: mol_type = other DNA
tccctggcccctttctccacttgttcacactcaagcttgtaccaaatcaaattccttgcaggcccctaatgttccattac

SEQ ID NO: 32762 - DNA, 80 bp, synthetic construct
  source 1..80: mol_type = other DNA
gaagcactccctgatgacactcacttctatcacatctgagattaactcattcttagtatttactacactatactgagtac

SEQ ID NO: 32763 - DNA, 80 bp, synthetic construct
  source 1..80: mol_type = other DNA
attttctctttagcgtgtcttttgcacatgatttccacatttcagtttttcttaaaattccctgggaacagcatcttgaa

SEQ ID NO: 32764 - DNA, 80 bp, synthetic construct
  source 1..80: mol_type = other DNA
acaaagggcttacagtctaattgaaaagggaagacaagtataaacgtagcaaatggcaagcttcatacaagggaagtgac

SEQ ID NO: 32765 - DNA, 80 bp, synthetic construct; identical to SEQ ID NO: 12079
  source 1..80: mol_type = other DNA

SEQ ID NO: 32766 - DNA, 80 bp, synthetic construct
  source 1..80: mol_type = other DNA
tacctaactcctttttctatgaagctacagaaacccctcgtatcccattccacctccttttcctattattttatgacatt

SEQ ID NO: 32767 - DNA, 80 bp, synthetic construct
  source 1..80: mol_type = other DNA
ctgcagtagtcccctactggcatctttccagtactaatttacttgctacagattatatatttttttagttattttgagac

SEQ ID NO: 32768 - DNA, 80 bp, synthetic construct; identical to SEQ ID NO: 12080
  source 1..80: mol_type = other DNA

SEQ ID NO: 32769 - DNA, 80 bp, synthetic construct
  source 1..80: mol_type = other DNA
ttcagaaaaaggatgcctgcagaaaaatcccaaggaattgcaaacaagatgcaatgcaataagttttctcaccccaaaat

SEQ ID NO: 32770 - DNA, 80 bp, synthetic construct
  source 1..80: mol_type = other DNA
taagcctgactcaaaggcttcatgtctttgaactaaacaagagttccgggtttttatgacttatacaaacaaacaagctg

SEQ ID NO: 32771 - DNA, 80 bp, synthetic construct
  source 1..80: mol_type = other DNA
ttacagcccttttccaatggcatatggtgtgtgttctgaagagaaacatgtttatgagctgaaagatgggaagaaaatgt

SEQ ID NO: 32772 - DNA, 80 bp, synthetic construct; identical to SEQ ID NO: 12081
  source 1..80: mol_type = other DNA

SEQ ID NO: 32773 - DNA, 80 bp, synthetic construct
  source 1..80: mol_type = other DNA
cctctcccactgaagcccacccaaactttgtccaagccggagcttgcaacattgttccttacagagcttatctgtagtta

SEQ ID NO: 32774 - DNA, 80 bp, synthetic construct
  source 1..80: mol_type = other DNA
ccttgcaagtagctgggactacaggcacgtgccaccacacccagctaattttttgtattttttagtatagacagggtttc

SEQ ID NO: 32775 - DNA, 80 bp, synthetic construct
  source 1..80: mol_type = other DNA
tcatatattccatcttggtcttccttgtcacgatcattgatatatagtaacacagctgcagagactagaaagcttcgtgt

SEQ ID NO: 32776 - DNA, 80 bp, synthetic construct
  source 1..80: mol_type = other DNA
tcagtctcttttaatgctaggcttcctcactcaaattaccctctaacatgccaccacaagatggttatttcttttagaaa

SEQ ID NO: 32777 - DNA, 80 bp, synthetic construct; identical to SEQ ID NO: 12082
  source 1..80: mol_type = other DNA

SEQ ID NO: 32778 - DNA, 80 bp, synthetic construct
  source 1..80: mol_type = other DNA
ccacttttctgaattctctaaattttatttctaggtgttctaaatttaagctagatctttagagatctggttagctggag

SEQ ID NO: 32779 - DNA, 80 bp, synthetic construct
  source 1..80: mol_type = other DNA
tgtatggacacatcagacatttcttgagggaatcctaccagaaggagatgctctttacctcttctattggtttatacctg

SEQ ID NO: 32780 - DNA, 80 bp, synthetic construct; identical to SEQ ID NO: 12083
  source 1..80: mol_type = other DNA

SEQ ID NO: 32781 - DNA, 80 bp, synthetic construct
  source 1..80: mol_type = other DNA
ttctttcttctttctccttccttccttccttccttccttccttccttccttccttccttccttctttcctccctccctcc

SEQ ID NO: 32782 - DNA, 80 bp, synthetic construct
  source 1..80: mol_type = other DNA
gtaaaggcagcactttacacatagaagatgctcaagaatttcctgattggattcccaaaatttcaaagcactaaaatata

SEQ ID NO: 32783 - DNA, 80 bp, synthetic construct
  source 1..80: mol_type = other DNA
aagtgaggtaatgtgtggtatttttccctgctataatcctcatacagaatatctgaaagagaatggtacttttcatgcat

SEQ ID NO: 32784 - DNA, 80 bp, synthetic construct; identical to SEQ ID NO: 12084
  source 1..80: mol_type = other DNA

SEQ ID NO: 32785 - DNA, 80 bp, synthetic construct
  source 1..80: mol_type = other DNA
ccgaagaatgaagagtgcaatacgccaaggcatccaggtcctaacaggaagaaaatccatgaacaaaaccagcaatgaag

SEQ ID NO: 32786 - DNA, 80 bp, synthetic construct
  source 1..80: mol_type = other DNA
agacaaatggttgccagggtgcctacaatttaaaatatgtctgaaaaggtttctgtggcagtcccaattactgagctatt

SEQ ID NO: 32787 - DNA, 80 bp, synthetic construct
  source 1..80: mol_type = other DNA
ttcctttatgatcctcatcagactttcctacatctcagcattctttaggtcagtcagtcaaatcatcgctaaagctttca

SEQ ID NO: 32788 - DNA, 80 bp, synthetic construct; identical to SEQ ID NO: 12085
  source 1..80: mol_type = other DNA

SEQ ID NO: 32789 - DNA, 80 bp, synthetic construct
  source 1..80: mol_type = other DNA
ccttcttccatctttttcatgtgcaaatcatcaagatgaaaaatgacttgcatatgtttgatcattttgcattttatcat

SEQ ID NO: 32790 - DNA, 80 bp, synthetic construct
  source 1..80: mol_type = other DNA
caaatactttaaagaatttcttttccaaagagctgaacctatttctaaagtcatcaatatttatgacatcaacagtttca

SEQ ID NO: 32791 - DNA, 80 bp, synthetic construct
  source 1..80: mol_type = other DNA
ttagcttagccttttataaaataaaagcattaattctgccacacttattatatttttcccgaaatctgttgctagccttt

SEQ ID NO: 32792 - DNA, 80 bp, synthetic construct; identical to SEQ ID NO: 12086
  source 1..80: mol_type = other DNA

SEQ ID NO: 32793 - DNA, 80 bp, synthetic construct
  source 1..80: mol_type = other DNA
caatttaaaaaatcctttcccattgttgtatgaaaacttctatgatacacattgacctattaggttacattttttattta

SEQ ID NO: 32794 - DNA, 80 bp, synthetic construct
  source 1..80: mol_type = other DNA
acggcatgcgcctgtagtcccagctactcaggaggctgaggtgggggaatcgctgaaacccgggaggtggaggttgcagt

SEQ ID NO: 32795 - DNA, 80 bp, synthetic construct
  source 1..80: mol_type = other DNA
agtgtgagcagcaataataagctgataataatgtctttatcttttaggtaaagacttatggccaagctagggttttatat

SEQ ID NO: 32796 - DNA, 80 bp, synthetic construct; identical to SEQ ID NO: 12087
  source 1..80: mol_type = other DNA

SEQ ID NO: 32797 - DNA, 80 bp, synthetic construct
  source 1..80: mol_type = other DNA
gaggaggaaacgtgtcaacaaaggcttccttaaagagggtgaccatttggttaaatcttaaaatatcagtagattttcac

SEQ ID NO: 32798 - DNA, 80 bp, synthetic construct
  source 1..80: mol_type = other DNA
aacgttgcctttgacacttaacctcctctcagtgaaaccaaggtatggatttgaaagtacctcagtgttgggagtttaaa

SEQ ID NO: 32799 - DNA, 80 bp, synthetic construct
  source 1..80: mol_type = other DNA
ccatttttctgagtttccctaagcattaagtttggtcaccaagaagcaacgttcttagattttattagcttaggttcact

SEQ ID NO: 32800 - DNA, 80 bp, synthetic construct; identical to SEQ ID NO: 12088
  source 1..80: mol_type = other DNA

SEQ ID NO: 32801 - DNA, 80 bp, synthetic construct
  source 1..80: mol_type = other DNA
attttattacctttaatgttttaaattggtaaactactttaaaagacatgtaggaacatgagtggaatagttgttgcctg

SEQ ID NO: 32802 - DNA, 80 bp, synthetic construct
  source 1..80: mol_type = other DNA
accccacatgggtactcaatagctaaattgattgattgatagctgtcttttaaaagcagatgtctagacaggatttttaa

SEQ ID NO: 32803 - DNA, 80 bp, synthetic construct
  source 1..80: mol_type = other DNA
aacacagccaggatcaccgttctttaaatcagaaaggactttgatagagtccagttccctcagttcaaatgaggaaacca

SEQ ID NO: 32804 - DNA, 80 bp, synthetic construct
  source 1..80: mol_type = other DNA
ctttctgcttccacacaagaatgacttgcataattttaaaggttggaaatccagcatgatcctaaatcagagtctccatt

SEQ ID NO: 32805 - DNA, 80 bp, synthetic construct; identical to SEQ ID NO: 12089
  source 1..80: mol_type = other DNA

SEQ ID NO: 32806 - DNA, 80 bp, synthetic construct
  source 1..80: mol_type = other DNA
ggtttttccctggaaacttcctgccatcaaagcaggaatgatatttagtgcttcagtattagaaggtcacaaattgtgct

SEQ ID NO: 32807 - DNA, 80 bp, synthetic construct
  source 1..80: mol_type = other DNA
aatcagctagatcttttttgtttttttcaatgccatccttgacactggtaaagagtagtcagctaggtatttgtcgacta

SEQ ID NO: 32808 - DNA, 80 bp, synthetic construct; identical to SEQ ID NO: 12090
  source 1..80: mol_type = other DNA

SEQ ID NO: 32809 - DNA, 80 bp, synthetic construct
  source 1..80: mol_type = other DNA
aatgctttcagcatattcagtcatctgcctcggagagactgaaaatattactattgatttggcttggtgtttaatgtggt

SEQ ID NO: 32810 - DNA, 80 bp, synthetic construct
  source 1..80: mol_type = other DNA
aactttccatgagctttctcataatggtattaacagggaaagacaatttctctcattgcgcttctctgcagacattctgt

SEQ ID NO: 32811 - DNA, 80 bp, synthetic construct
  source 1..80: mol_type = other DNA
aagatgcgctgcaagcaggcctaaagtatttatattgaaactacaatggcaaagcatgtaggatgatctacctctctgaa

SEQ ID NO: 32812 - DNA, 80 bp, synthetic construct; identical to SEQ ID NO: 12091
  source 1..80: mol_type = other DNA

SEQ ID NO: 32813 - DNA, 80 bp, synthetic construct
  source 1..80: mol_type = other DNA
tccaccaaccactttccattctggataaaggatgttagctaggtaagaggataagcacagttgtaatctggatattcaag

SEQ ID NO: 32814 - DNA, 80 bp, synthetic construct
  source 1..80: mol_type = other DNA
tccacagatttatcctggcattggtgaccaaggggagacaaacaatgttgttcaacaagcattctgaaagctaccatatg

SEQ ID NO: 32815 - DNA, 80 bp, synthetic construct
  source 1..80: mol_type = other DNA
aactgaaaacagcaggaaatataatccggtgagcttgcgagctggtgagcagttgtgttgtgggctgcttttaagattat

SEQ ID NO: 32816 - DNA, 80 bp, synthetic construct; identical to SEQ ID NO: 12092
  source 1..80: mol_type = other DNA

SEQ ID NO: 32817 - DNA, 80 bp, synthetic construct
  source 1..80: mol_type = other DNA
acaccaaggtaattccagttaactcttttcaggaattctaaaattttgtcattgagtttggtcctttcgaaaaagaagtc

SEQ ID NO: 32818 - DNA, 80 bp, synthetic construct
  source 1..80: mol_type = other DNA
tcatggtgcctcagattccttccatctcatttctgatgctgtagctggatttctctaattataattggatcacgccagtg

SEQ ID NO: 32819 - DNA, 80 bp, synthetic construct
  source 1..80: mol_type = other DNA
tgcaaaagaaaatgaaacagtattaaaccccaagactgggttctattcatggatttaaaaaatcttggacctgtctttac

SEQ ID NO: 32820 - DNA, 80 bp, synthetic construct
  source 1..80: mol_type = other DNA
caaaggcagcattattgtaataggatgtcataagatgtttctcagtcttagatgaggccccaactatgaaaggaatgttg

SEQ ID NO: 32821 - DNA, 80 bp, synthetic construct; identical to SEQ ID NO: 12093
  source 1..80: mol_type = other DNA

SEQ ID NO: 32822 - DNA, 80 bp, synthetic construct
  source 1..80: mol_type = other DNA
tttttttttttttttactctgggctacctatttgctacttggaaaaaatctgcctttatgggacacttgctgactgtagt

SEQ ID NO: 32823 - DNA, 80 bp, synthetic construct
  source 1..80: mol_type = other DNA
gtgtttgcttatgatgacagagacaggagttttttttggggacactctggaaagctgctgcaatataactacattgaaag

SEQ ID NO: 32824 - DNA, 80 bp, synthetic construct; identical to SEQ ID NO: 12094
  source 1..80: mol_type = other DNA

SEQ ID NO: 32825 - DNA, 80 bp, synthetic construct
  source 1..80: mol_type = other DNA
ggagagccacaagtttcctggctggactctttattatctgagggtgttctaatgtctggaagtgatcagaaaaactctgg

SEQ ID NO: 32826 - DNA, 80 bp, synthetic construct
  source 1..80: mol_type = other DNA
agtgtgagctgagtggatcatacgtctaatagatctgtaaacatgaggaggtagggaaagttcacttctgagtacatatc

SEQ ID NO: 32827 - DNA, 80 bp, synthetic construct
  source 1..80: mol_type = other DNA
ggaagaccaagcgaggcacgaggtgcatagaaggtgactaacaggttcttgaattagaagggaactaagttagagcatga

SEQ ID NO: 32828 - DNA, 80 bp, synthetic construct
  source 1..80: mol_type = other DNA
cacgaggcttatttctcatttccttcacattttgctcatatgagactttctctaaaaggtccatactcactgctgtctaa

SEQ ID NO: 32829 - DNA, 80 bp, synthetic construct; identical to SEQ ID NO: 12095
  source 1..80: mol_type = other DNA

SEQ ID NO: 32830 - DNA, 80 bp, synthetic construct
  source 1..80: mol_type = other DNA
cattctgggtattctagaaccacacacgaaaactgcttaggaactctcaaatcaagtagcaggtcaaagaactcctttga

SEQ ID NO: 32831 - DNA, 80 bp, synthetic construct
  source 1..80: mol_type = other DNA
ttcaagtcaacttgcactcaaagagtattgggccttttatggtgcaaataatcatattgtacattagggataagtaaatc

SEQ ID NO: 32832 - DNA, 80 bp, synthetic construct
  source 1..80: mol_type = other DNA
gtttccttcatatggttctactacacatatagaattataaatacatgcgaatctctctttttctcaaggaccaaagaaga

SEQ ID NO: 32833 - DNA, 80 bp, synthetic construct; identical to SEQ ID NO: 12096
  source 1..80: mol_type = other DNA

SEQ ID NO: 32834 - DNA, 80 bp, synthetic construct
  source 1..80: mol_type = other DNA
cagctctttatgcccttcctgactttcctgcttggcacttgaatagtcttgattcttttaaatttggttcttctaagatt

SEQ ID NO: 32835 - DNA, 80 bp, synthetic construct
  source 1..80: mol_type = other DNA
gaaagaaaaattaccaagaatttctgctttcagaaatgtctggtaatatatgggtattatcatagcttttttttcctgtc

SEQ ID NO: 32836 - DNA, 80 bp, synthetic construct; identical to SEQ ID NO: 12097
  source 1..80: mol_type = other DNA

SEQ ID NO: 32837 - DNA, 80 bp, synthetic construct
  source 1..80: mol_type = other DNA
ttgtccacaggtggaaagagcctccaagataagtgaatctagattcctgagtaaggaaatttagtattacccagtgactg

SEQ ID NO: 32838 - DNA, 80 bp, synthetic construct
  source 1..80: mol_type = other DNA
ggctacttagctatttattacctcacacttttagtgtctgaggtgagtcaactttaaacaaaaaagcattttgaaaatgg

SEQ ID NO: 32839 - DNA, 80 bp, synthetic construct
  source 1..80: mol_type = other DNA
tctgactctttatccccagttacagaccttccgaacaaggaaattattattcttgccatgattctctggtcatcaaaccc

SEQ ID NO: 32840 - DNA, 80 bp, synthetic construct; identical to SEQ ID NO: 12098
  source 1..80: mol_type = other DNA

SEQ ID NO: 32841 - DNA, 80 bp, synthetic construct
  source 1..80: mol_type = other DNA
tttgacatttcagttatattaacaatctgttcctgctttggtggtctggaaagaatgaacagcaatattcataatctcta

SEQ ID NO: 32842 - DNA, 80 bp, synthetic construct
  source 1..80: mol_type = other DNA
actccttctttatacacaggtcatctgagtcataatgaaacaccaactattcagagtcacatgctgtgctttgtgctttt

SEQ ID NO: 32843 - DNA, 80 bp, synthetic construct
  source 1..80: mol_type = other DNA
gcaaataaaacagtatacctttcaacgtggtggctgagattgtgtgatgtggagaaaaggaagatatgcagagatgttag

SEQ ID NO: 32844 - DNA, 80 bp, synthetic construct
  source 1..80: mol_type = other DNA
tgttcggttgtcattaatttaacagggagtgcacatgttctaatctaatggttgattttttttctccatgtgcagcatat

SEQ ID NO: 32845 - DNA, 80 bp, synthetic construct; identical to SEQ ID NO: 12099
  source 1..80: mol_type = other DNA

SEQ ID NO: 32846 - DNA, 80 bp, synthetic construct
  source 1..80: mol_type = other DNA
gttgtttttggacagggtattataataagcactaaaatatgcatcctattactctgcatctgccagtcaaagatcactgt

SEQ ID NO: 32847 - DNA, 80 bp, synthetic construct
  source 1..80: mol_type = other DNA
atggtgtccactgctagcagtgaatacacaggccctgctggtgccagggagttaacatgaatacattgcttttttaatag

SEQ ID NO: 32848 - DNA, 80 bp, synthetic construct
  source 1..80: mol_type = other DNA
gggaaaaaggaggagaaaaaaatatctctcccaatgatcctaagccttatgttttatccttttctacttcaaatggctta

SEQ ID NO: 32849 - DNA, 80 bp, synthetic construct; identical to SEQ ID NO: 12100
  source 1..80: mol_type = other DNA

SEQ ID NO: 32850 - DNA, 80 bp, synthetic construct
  source 1..80: mol_type = other DNA
ctcttgaattggcaaatgtaaaggaagcacaccatgtccaaaggccatacaatacatcctgttattctgggcagtctcta

SEQ ID NO: 32851 - DNA, 80 bp, synthetic construct
  source 1..80: mol_type = other DNA
tttttgtgtgtgtgatcaggaggcatgatgtgagacagagacatataaaagtatggtccatatggtatttataattgggg

SEQ ID NO: 32852 - DNA, 80 bp, synthetic construct; identical to SEQ ID NO: 12101
  source 1..80: mol_type = other DNA

SEQ ID NO: 32853 - DNA, 80 bp, synthetic construct
  source 1..80: mol_type = other DNA
atggagaccatcctggccaacatggtgaaacgctgtctcttctgaaactacaaaaattagctgggcatgggggcatgctc

SEQ ID NO: 32854 - DNA, 80 bp, synthetic construct
  source 1..80: mol_type = other DNA
aaaaactggcaaaataggttgcagggagatcacaaacagccttgaatgccagatgaaagaatcccttacatttgttggtc

SEQ ID NO: 32855 - DNA, 80 bp, synthetic construct
  source 1..80: mol_type = other DNA
agaagagtggtcctaaaagcctaaaccaggatattgatatttgagataaagataagactatccaaaatgctccttccttt

SEQ ID NO: 32856 - DNA, 80 bp, synthetic construct
  source 1..80: mol_type = other DNA
tcttttactgtactttgagaatgggtagaatcaagagggtgagtgcaatattggtttatacaacttggtatagcctaagt

SEQ ID NO: 32857 - DNA, 80 bp, synthetic construct; identical to SEQ ID NO: 12102
  source 1..80: mol_type = other DNA

SEQ ID NO: 32858 - DNA, 80 bp, synthetic construct
  source 1..80: mol_type = other DNA
tcaaactaggcttttccctgatgaaagttccatactatagagaaaacatccacatttgcttgcagtttgtgcagcttaaa

SEQ ID NO: 32859 - DNA, 80 bp, synthetic construct
  source 1..80: mol_type = other DNA
ttttaattatagatctatttcattctgcaggaaataaggagaggcattttgaagtttttttctttaaagacctcaataat

SEQ ID NO: 32860 - DNA, 80 bp, synthetic construct
  source 1..80: mol_type = other DNA
taataatgtcatcccacattctggtgtcacgacaaacatctttgaactcctgtgattaaataagcagaaacacttgataa

SEQ ID NO: 32861 - DNA, 80 bp, synthetic construct; identical to SEQ ID NO: 12103
  source 1..80: mol_type = other DNA

SEQ ID NO: 32862 - DNA, 80 bp, synthetic construct
  source 1..80: mol_type = other DNA
ttaggattgagtaaacaattaaaatgctctacttggaccaaattgaaagcccatattactggcaatctgatacagaatta

SEQ ID NO: 32863 - DNA, 80 bp, synthetic construct
  source 1..80: mol_type = other DNA
ctgggttcaagtggattctcctgcctcaacatcccaagtagctgggattacaggcatgcactgccacgcccagctaattt

SEQ ID NO: 32864 - DNA, 80 bp, synthetic construct; identical to SEQ ID NO: 12104
  source 1..80: mol_type = other DNA

SEQ ID NO: 32865 - DNA, 80 bp, synthetic construct
  source 1..80: mol_type = other DNA
tacccacaaagccaattctgctaaccacctcataatgatgtctgtaacttcattgcatcacatttcctatatattttcac

SEQ ID NO: 32866 - DNA, 80 bp, synthetic construct
  source 1..80: mol_type = other DNA
acttcctctttttttctctaacttgtgccacaaaggccgtccttcaggtttttgcacaccttcacaaatgctactctcac

SEQ ID NO: 32867 - DNA, 80 bp, synthetic construct
  source 1..80: mol_type = other DNA
tagcttgtaatctccaagagaacaaggaccagtctctcttcttcgctacagtatgacaatgtttagcacattgcctactt

SEQ ID NO: 32868 - DNA, 80 bp, synthetic construct; identical to SEQ ID NO: 12105
  source 1..80: mol_type = other DNA

SEQ ID NO: 32869 - DNA, 80 bp, synthetic construct
  source 1..80: mol_type = other DNA
actaaccatcctgttcttctttagcttcaaatagaactaaggctgtttataagaaactacacacaaatagaatatattgc

SEQ ID NO: 32870 - DNA, 80 bp, synthetic construct
  source 1..80: mol_type = other DNA
tatggcctcttgttataagataagcaaagctaagtcaatacccaataaaaattaatactgatatcaaatccagctatctt

SEQ ID NO: 32871 - DNA, 80 bp, synthetic construct
  source 1..80: mol_type = other DNA
tacatatatatgagctcttttgattctttacaacagtgctgtgaagtcaactgggaagactgaattatctccagtctcta

SEQ ID NO: 32872 - DNA, 80 bp, synthetic construct
  source 1..80: mol_type = other DNA
cgtctctactaaaaatacaaaaattagccaggcatggtggtgggcgcctgtaatcccagctactcggcaggctgaggcag

SEQ ID NO: 32873 - DNA, 80 bp, synthetic construct; identical to SEQ ID NO: 12106
  source 1..80: mol_type = other DNA

SEQ ID NO: 32874 - DNA, 80 bp, synthetic construct
  source 1..80: mol_type = other DNA
ttattcatggaacagttttgaagtagtatattatctgaatttgtctagtatattttattaagctctcttcagcctgtcct

SEQ ID NO: 32875 - DNA, 80 bp, synthetic construct
  source 1..80: mol_type = other DNA
gtcaaggccatttacactactattttcaggaatctccttctgctacctttgtaaagcatttacttcataggaagcatttc

SEQ ID NO: 32876 - DNA, 80 bp, synthetic construct; identical to SEQ ID NO: 12107
  source 1..80: mol_type = other DNA

SEQ ID NO: 32877 - DNA, 80 bp, synthetic construct
  source 1..80: mol_type = other DNA
tatttaataatttttaaaatataccatatatagtacttatatctattgtatataacatatatatgcaaggcacacatgta

SEQ ID NO: 32878 - DNA, 80 bp, synthetic construct
  source 1..80: mol_type = other DNA
atggttgcgttttcccactgataaagtagaattttaaatataacttgtcttatttttatctgtcctcaatttgagtgtgt

SEQ ID NO: 32879 - DNA, 80 bp, synthetic construct
  source 1..80: mol_type = other DNA
ttacttgtactttaagttctgattttcatctagtagaggcattctttggtcaaggcaaaactgcagtattctctgtagct

SEQ ID NO: 32880 - DNA, 80 bp, synthetic construct; identical to SEQ ID NO: 12108
  source 1..80: mol_type = other DNA

SEQ ID NO: 32881 - DNA, 80 bp, synthetic construct
  source 1..80: mol_type = other DNA
atggatcaaagacttaaatctaagacctgaagccatataagttctagaaggtgacattaaaaaaaaccttctagacattg

SEQ ID NO: 32882 - DNA, 80 bp, synthetic construct
  source 1..80: mol_type = other DNA
tatacatccaacgaaggactaatgtccagaagctacaaagaactgaaacaaatcatcaagaaaaaaataaacaatcccat

SEQ ID NO: 32883 - DNA, 80 bp, synthetic construct
  source 1..80: mol_type = other DNA
aaaaaaagatgttggcgtggatatcgtgatgtgatgaaaagggaacacttttgcactgttggtaggaatgtaaactagta

SEQ ID NO: 32884 - DNA, 80 bp, synthetic construct; identical to SEQ ID NO: 12109
  source 1..80: mol_type = other DNA

SEQ ID NO: 32885 - DNA, 80 bp, synthetic construct
  source 1..80: mol_type = other DNA
atgatacagtggggccaggcacagtggctcacgactgtaatcccagcactttgggaggttgaggtgggtacattactgga

SEQ ID NO: 32886 - DNA, 80 bp, synthetic construct
  source 1..80: mol_type = other DNA
tctcaaaaaaaaaaaaaaaagattgatataatgtgggcttaggggaaggggtgagaggggggtgagggataaatgactac

SEQ ID NO: 32887 - DNA, 80 bp, synthetic construct
  source 1..80: mol_type = other DNA
gtctaggtagcatacatgataggtgtactcaccctaagtaagttaatgtgttttacttgtgtcattgcaaaaatgaagca

SEQ ID NO: 32888 - DNA, 80 bp, synthetic construct; identical to SEQ ID NO: 12110
  source 1..80: mol_type = other DNA

SEQ ID NO: 32889 - DNA, 80 bp, synthetic construct
  source 1..80: mol_type = other DNA
atcaaatgttataacctgttgttccctggattctgtatgaaaccagagctcttctgcttttgtgtccaaatattctctct

SEQ ID NO: 32890 - DNA, 80 bp, synthetic construct
  source 1..80: mol_type = other DNA
ttttactataatttgttcttcactttcatcccagccctaggtctcctgataatactgctttctaaattgtgtctattaaa

SEQ ID NO: 32891 - DNA, 80 bp, synthetic construct
  source 1..80: mol_type = other DNA
gagaattgaaagtagttcccaaattatagccaactacaaatttccttagtgttcttttgatctcactttccaacggtctc

SEQ ID NO: 32892 - DNA, 80 bp, synthetic construct; identical to SEQ ID NO: 12111
  source 1..80: mol_type = other DNA

SEQ ID NO: 32893 - DNA, 80 bp, synthetic construct
  source 1..80: mol_type = other DNA
aaggagacaggagcttgattttcccttctttagcctccagggttccattctgatagaaaaatacaaactgcattctttaa

SEQ ID NO: 32894 - DNA, 80 bp, synthetic construct
  source 1..80: mol_type = other DNA
aacagacacttctcaaaagaagacatttatgcagccaaaaagcacatgaaaaaatgctcaccatcactggccatcggaga

SEQ ID NO: 32895 - DNA, 80 bp, synthetic construct
  source 1..80: mol_type = other DNA
ttggtgggactgtaaactagttcaaccactgtggaagtcagtgtggctattcctcagggacctagaactagaaataccat

SEQ ID NO: 32896 - DNA, 80 bp, synthetic construct
  source 1..80: mol_type = other DNA
gtggcacatatacaccatggaatactatgcagccataaaaaatgatgagttcatgtcctttgtagggacatggatgaaat

SEQ ID NO: 32897 - DNA, 80 bp, synthetic construct
  source 1..80: mol_type = other DNA
cattaggagatatacctaatgctaaatgacgagttaatgggtgcagcacaccagcatggcacatgtatacatatgtaact

SEQ ID NO: 32898 - DNA, 80 bp, synthetic construct
  source 1..80: mol_type = other DNA
acatcaccttttctgcccatgcacacagttttagagatcccttttcagtgtattaccatcatcttgcctttttcttattg

SEQ ID NO: 32899 - DNA, 80 bp, synthetic construct
  source 1..80: mol_type = other DNA
gactgaatggggaagcaatgattataaggcatcagccagaacatatgcgacagaaaaaaggaggcttgaaatttctctag

SEQ ID NO: 32900 - DNA, 80 bp, synthetic construct
  source 1..80: mol_type = other DNA
ttcacccttaatggtacatggagctaaaagtgatatattttccagatgtggcttgatttcaggtgatatatatctgcaac

SEQ ID NO: 32901 - DNA, 80 bp, synthetic construct
  source 1..80: mol_type = other DNA
tgaccctgaaaagtacactgatagcaagtagtattgcaccaattatacccttcactgcatttgattgtagggttttctct

SEQ ID NO: 32902 - DNA, 80 bp, synthetic construct; identical to SEQ ID NO: 12113
  source 1..80: mol_type = other DNA

SEQ ID NO: 32903 - DNA, 80 bp, synthetic construct
  source 1..80: mol_type = other DNA
ttttatttatgatagatgatttttgaagatttcaacttctggtaatggcagaatacctcctttgggcttctcctgcagat

SEQ ID NO: 32904 - DNA, 80 bp, synthetic construct
  source 1..80: mol_type = other DNA
acctggaagaagggaatgacactattctttttgcctgagaacaggctcagggggtggtaccaagcagggaggttaaaatt

SEQ ID NO: 32905 - DNA, 80 bp, synthetic construct
  source 1..80: mol_type = other DNA
atgtgcttggcagatgccaagcagcacagctaagattgaaataactgtacagatatttcagtcagttgctaactgcagaa

SEQ ID NO: 32906 - DNA, 80 bp, synthetic construct; identical to SEQ ID NO: 12114
  source 1..80: mol_type = other DNA

SEQ ID NO: 32907 - DNA, 80 bp, synthetic construct
  source 1..80: mol_type = other DNA
ggcttaacagcataatggagatggtatgagaggaaagactcagtgaacttgaacatggataaatagaaattgtccaatct

SEQ ID NO: 32908 - DNA, 80 bp, synthetic construct
  source 1..80: mol_type = other DNA
gggacttgtggaacaatctttgaagttctaatatatattcatttggagtctcagaaaagaggaagaaagaatgaaacaga

SEQ ID NO: 32909 - DNA, 80 bp, synthetic construct
  source 1..80: mol_type = other DNA
actattcagggggcaattttgagactgaatttgtggtatgtttgtagaaaactgtagctaaggagatatgaaaaaatggg

SEQ ID NO: 32910 - DNA, 80 bp, synthetic construct; identical to SEQ ID NO: 12115
  source 1..80: mol_type = other DNA

SEQ ID NO: 32911 - DNA, 80 bp, synthetic construct
  source 1..80: mol_type = other DNA
atatttacagtgttatatattcaactaattcaccaacaatttctatatagtgttgtggtgggccttccaagataatttta

SEQ ID NO: 32912 - DNA, 80 bp, synthetic construct
  source 1..80: mol_type = other DNA
agaatgggaagctacacttgaaatgcaagatggaatattttcccctaagctctccataatagaatgttggttataccatc

SEQ ID NO: 32913 - DNA, 80 bp, synthetic construct
  source 1..80: mol_type = other DNA
caagtaagggggtgttcgatgatgagagataagcaactctttgaatagaaggattgtaagagatttaccctctgctatta

SEQ ID NO: 32914 - DNA, 80 bp, synthetic construct; identical to SEQ ID NO: 12116
  source 1..80: mol_type = other DNA

SEQ ID NO: 32915 - DNA, 80 bp, synthetic construct
  source 1..80: mol_type = other DNA
cctgaaaagtgaattagcatgtttaaaacttggctaatcactccctcatccccaaccatagcaaagcctgcttaattttg

SEQ ID NO: 32916 - DNA, 80 bp, synthetic construct
  source 1..80: mol_type = other DNA
taatttcttcaaggatttttcccttaaataaagtgtcttacacagttacagggaatgtctcaaacagcctgactatatat

SEQ ID NO: 32917 - DNA, 80 bp, synthetic construct
  source 1..80: mol_type = other DNA
tctcaccgtctaaaagcatcagcaatcataacggagctgtgggtatttctaagccaatcaacaaacagccataaatatac

SEQ ID NO: 32918 - DNA, 80 bp, synthetic construct
  source 1..80: mol_type = other DNA
tgcacccattaacttgtcatttagcattaggtatatctcctaatgctatccctcccccctccccccaccccacaacagtc

SEQ ID NO: 32919 - DNA, 80 bp, synthetic construct; identical to SEQ ID NO: 12112
  source 1..80: mol_type = other DNA

SEQ ID NO: 32920 - DNA, 80 bp, synthetic construct
  source 1..80: mol_type = other DNA
ccacactgacttccacagtggttgaactagtttacagtcccaccaacagtgtaaaagtgttcctatttgtccacatcctc

SEQ ID NO: 32921 - DNA, 80 bp, synthetic construct
  source 1..80: mol_type = other DNA
gcttcaaagagaaaaaaatacctaggaatccaacttacaagggacgtgaaggacctcttcaaggagaactacaaaccact

SEQ ID NO: 32922 - DNA, 80 bp, synthetic construct; identical to SEQ ID NO: 12118
  source 1..80: mol_type = other DNA

SEQ ID NO: 32923 - DNA, 80 bp, synthetic construct
  source 1..80: mol_type = other DNA
aaaaacaagcaatggggaaaggattccctatttaataaatggtgctgggaaaactggctagccatatgtagaaagctgaa

SEQ ID NO: 32924 - DNA, 80 bp, synthetic construct
  source 1..80: mol_type = other DNA
atggcaacaaaagccaaaattgacaaatgggatctaattaaactaaagagcttctgcacagcaaaagaaactaccatcag

SEQ ID NO: 32925 - DNA, 80 bp, synthetic construct
  source 1..80: mol_type = other DNA
acatgaagtttaaactatatgtagttgaggtgcttttccaaatggaaagaaaacaatctactacccaaatcaacacatag

SEQ ID NO: 32926 - DNA, 80 bp, synthetic construct; identical to SEQ ID NO: 12119
  source 1..80: mol_type = other DNA

SEQ ID NO: 32927 - DNA, 80 bp, synthetic construct
  source 1..80: mol_type = other DNA
tcagttttacaggggatgtggtcattcaaaccacagcaccctcttttagaaacaagattgagagacaactttctggtatt

SEQ ID NO: 32928 - DNA, 80 bp, synthetic construct
  source 1..80: mol_type = other DNA
agaagttaattcaccatgaccaagtaggctttatccctggggtgcaaggttgtttcaacatatgtaaatcaataaatgtg

SEQ ID NO: 32929 - DNA, 80 bp, synthetic construct
  source 1..80: mol_type = other DNA
aacccacagccaatatcatactgaaagggcaaaagctgacagcattccccttgaaaaccagcacaagtcaaggatgcccc

SEQ ID NO: 32930 - DNA, 80 bp, synthetic construct; identical to SEQ ID NO: 12120
  source 1..80: mol_type = other DNA

SEQ ID NO: 32931 - DNA, 80 bp, synthetic construct
  source 1..80: mol_type = other DNA
aacaaacgggaaaacattccatgctcgtggacaggaggaatcaatgttattaaaatgaccaagtgcccaaaacaacgtac

SEQ ID NO: 32932 - DNA, 80 bp, synthetic construct
  source 1..80: mol_type = other DNA
aatgctattcctattaaattatcaatgatattcttcacagaactagagaaaactatttcaaagttcatatggaactgaaa

SEQ ID NO: 32933 - DNA, 80 bp, synthetic construct
  source 1..80: mol_type = other DNA
gaaataaggctgcacacctacaaccaactaatcatcaacaaagctgacaaaaacaagcaatggggaaaagactccctgtt

SEQ ID NO: 32934 - DNA, 80 bp, synthetic construct; identical to SEQ ID NO: 12121
  source 1..80: mol_type = other DNA

SEQ ID NO: 32935 - DNA, 80 bp, synthetic construct
  source 1..80: mol_type = other DNA
ttaataagtgggcaaaatacatgaacaaacacttcacaaaagaagacacacatgtggccaacaagtatatgaaaacaaag

SEQ ID NO: 32936 - DNA, 80 bp, synthetic construct
  source 1..80: mol_type = other DNA
tcaattagtttaaccattgtggaaagcaatgtggaaattcttcaaagggcttaaaaaagaactaccattcaacccagcaa

SEQ ID NO: 32937 - DNA, 80 bp, synthetic construct
  source 1..80: mol_type = other DNA
gtacatatacaccatggaatactatgtagccataacaaagaatgagatcatgtcctgtgcaggaacatggatggagctgg

SEQ ID NO: 32938 - DNA, 80 bp, synthetic construct; identical to SEQ ID NO: 12122
  source 1..80: mol_type = other DNA

SEQ ID NO: 32939 - DNA, 80 bp, synthetic construct
  source 1..80: mol_type = other DNA
gctgaccgacacagctacctattccttccacacttccccttctcttaattcagaggtataaatgcttttatgtgccagaa

SEQ ID NO: 32940 - DNA, 80 bp, synthetic construct
  source 1..80: mol_type = other DNA
ttattttattttcaatagtttgtattaccactaatgttgttaatcacttcagagagtatattaatgctaaattcagaaat

SEQ ID NO: 32941 - DNA, 80 bp, synthetic construct
  source 1..80: mol_type = other DNA
caaaagttttagtgtagtttaaaattattttggacataggaagagcacaatatatacttccatggaatagctacctcata

SEQ ID NO: 32942 - DNA, 80 bp, synthetic construct; identical to SEQ ID NO: 12123
  source 1..80: mol_type = other DNA

SEQ ID NO: 32943 - DNA, 80 bp, synthetic construct
  source 1..80: mol_type = other DNA
atttaaaacagcatattcattgttgattttcatgtgagttttgatagcgtacttgaaagctgttaattatcttaagtagg

SEQ ID NO: 32944 - DNA, 80 bp, synthetic construct
  source 1..80: mol_type = other DNA
caatcttgggaaaacttctagacctttctttcagaggtcaactactctcatttaatagtcataagtacattatttttaat

SEQ ID NO: 32945 - DNA, 80 bp, synthetic construct
  source 1..80: mol_type = other DNA
tctccaaacaagttaagcttttcttagggaaatcagaatattatgaggctttctagctctgtgatccaagtaacaatctt

SEQ ID NO: 32946 - DNA, 80 bp, synthetic construct; identical to SEQ ID NO: 12124
  source 1..80: mol_type = other DNA

SEQ ID NO: 32947 - DNA, 80 bp, synthetic construct
  source 1..80: mol_type = other DNA
aaaagaggacagtatgttcatctggtatgagttattctcattgaattttcattctccctatccctattcacatacattgc

SEQ ID NO: 32948 - DNA, 80 bp, synthetic construct
  source 1..80: mol_type = other DNA
gaattcacattttcaccctttgataaaaatgaatttaacgtgattaggcactacacctgactatgcttgctcatatagag

SEQ ID NO: 32949 - DNA, 80 bp, synthetic construct
  source 1..80: mol_type = other DNA
ttcaagcaattctcctgcctcagtctcttgggtagctgggattacaggcacccaccaccatgcccagttaatttttgtat

SEQ ID NO: 32950 - DNA, 80 bp, synthetic construct; identical to SEQ ID NO: 12125
  source 1..80: mol_type = other DNA

SEQ ID NO: 32951 - DNA, 80 bp, synthetic construct
  source 1..80: mol_type = other DNA
ttggcattctctttacattttgtcttagaaggagcatttctttccaaggcgaaatacttgagagaaaatgcccttagtag

SEQ ID NO: 32952 - DNA, 80 bp, synthetic construct
  source 1..80: mol_type = other DNA
caaaaatacttccacactttcctcttttaatagactctactagcaacctgtcacatttaatcactactgaactagccatg

SEQ ID NO: 32953 - DNA, 80 bp, synthetic construct
  source 1..80: mol_type = other DNA
taactcttgctgtatgcacacttatgctctgccttggattgttgacattctatgctcatgacactggaatcactcagaaa

SEQ ID NO: 32954 - DNA, 80 bp, synthetic construct; identical to SEQ ID NO: 12126
  source 1..80: mol_type = other DNA

SEQ ID NO: 32955 - DNA, 80 bp, synthetic construct
  source 1..80: mol_type = other DNA
atacattacaatgcttgagtaaggactgtatgaatggaaacttcacctgcagttgtgatgaggacactctaaggtccttg

SEQ ID NO: 32956 - DNA, 80 bp, synthetic construct
  source 1..80: mol_type = other DNA
cattcgagtactcagttactgcctagatagctgattttatatgaaattgacacgactgaagagacacagaaggcaatgtt

SEQ ID NO: 32957 - DNA, 80 bp, synthetic construct; identical to SEQ ID NO: 12127
  source 1..80: mol_type = other DNA

SEQ ID NO: 32958 - DNA, 80 bp, synthetic construct
  source 1..80: mol_type = other DNA
aagccaccacacccagttaatttttgtatttttagtagagatggggtttcaccatgttggtcaggctggttcgagctcct

SEQ ID NO: 32959 - DNA, 80 bp, synthetic construct
  source 1..80: mol_type = other DNA
atacatggagtcataacccaagttggatttgttgtagaaaagctaaaagtcaagtaatataacatacatgggcagaatag

SEQ ID NO: 32960 - DNA, 80 bp, synthetic construct
  source 1..80: mol_type = other DNA
caggtgagtaagtattgtattatttctactacaactgactgccacaggtcactgggaaagaggtaaaacgttcaacaatc

SEQ ID NO: 32961 - DNA, 80 bp, synthetic construct; identical to SEQ ID NO: 12128
  source 1..80: mol_type = other DNA

SEQ ID NO: 32962 - DNA, 80 bp, synthetic construct
  source 1..80: mol_type = other DNA
tcataaactgattctaacagttgtgtctgttttataggatgaacacatacatcattgcatggaaaaagcagaacttagcc

SEQ ID NO: 32963 - DNA, 80 bp, synthetic construct
  source 1..80: mol_type = other DNA
gtataaggacgcaaatgagcaaaaagaatttttgtgtttacgaccatgatacaaacagttaagaaatccaggtgaaagtg

SEQ ID NO: 32964 - DNA, 80 bp, synthetic construct
  source 1..80: mol_type = other DNA
gctctctggtctctagccagtggggagaaggagatttcgattttataaactccaggacacatacattaatgagtaaaaaa

SEQ ID NO: 32965 - DNA, 80 bp, synthetic construct
  source 1..80: mol_type = other DNA
gcccaaaaatgctaagaggagggaaagacatgatttgatacaaagtatagatctgatttctgtgtatgggaattcatatg

SEQ ID NO: 32966 - DNA, 80 bp, synthetic construct; identical to SEQ ID NO: 12129
  source 1..80: mol_type = other DNA

SEQ ID NO: 32967 - DNA, 80 bp, synthetic construct
  source 1..80: mol_type = other DNA
tgatcatttagccagagccagccattgcctatagaatggaattaatgaggacatttacataaaccttacagtgttttcat

SEQ ID NO: 32968 - DNA, 80 bp, synthetic construct
  source 1..80: mol_type = other DNA
agaattgggtttgcgtccggcttccactaataaatatctaaacctctttaacctcagttttcacctttgtaaaatgagta

SEQ ID NO: 32969 - DNA, 80 bp, synthetic construct
  source 1..80: mol_type = other DNA
catatatatgcacacatatatacacatatatgtgtatatatgcacacatatatgtacatatatacatatatgtgtgtata

SEQ ID NO: 32970 - DNA, 80 bp, synthetic construct
  source 1..80: mol_type = other DNA
agagtttattactattttttttttaacaattgatcatcaatgataaagagtttatcttattaatcactcaatctcaatta

SEQ ID NO: 32971 - DNA, 80 bp, synthetic construct
  source 1..80: mol_type = other DNA
agaaaagatgtgcgatacttgtttccagtcacaattttctaggagaggcatcctagataataggaagtacaaaggcagaa

SEQ ID NO: 32972 - DNA, 80 bp, synthetic construct
  source 1..80: mol_type = other DNA
actcttttccaatttgcaatactaatgccctacaaaatgcacaaagtgtacccagagtgaatggaaattcaacctcaagt

SEQ ID NO: 32973 - DNA, 80 bp, synthetic construct
  source 1..80: mol_type = other DNA
agacaaatttcccactgggtttgtttgtataagggtaggtaggacgttagggcaaaagagtccagccctgcatgtaatat

SEQ ID NO: 32974 - DNA, 80 bp, synthetic construct; identical to SEQ ID NO: 12130
  source 1..80: mol_type = other DNA

SEQ ID NO: 32975 - DNA, 80 bp, synthetic construct
  source 1..80: mol_type = other DNA
ctggtttccagccaagatttttatctaggtaccagctattcttttccagtggttaacttcataaggtttttagttcccaa

SEQ ID NO: 32976 - DNA, 80 bp, synthetic construct
  source 1..80: mol_type = other DNA
atgtaggatttataatatacacacattttaagtatacagttacactttagacaaatatacacattcacaaaactaccacc

SEQ ID NO: 32977 - DNA, 80 bp, synthetic construct
  source 1..80: mol_type = other DNA
aattacctcaaaaccttatggatatgtgctttcatttctcctggaaagatacctagaagtagaattgttgggtcttacaa

SEQ ID NO: 32978 - DNA, 80 bp, synthetic construct
  source 1..80: mol_type = other DNA
ttctactgtactttctaatctcacctaagcatttttctctcttttacctaggttgtcagttcttgttcagtgctttcctt

SEQ ID NO: 32979 - DNA, 80 bp, synthetic construct; identical to SEQ ID NO: 12131
  source 1..80: mol_type = other DNA

SEQ ID NO: 32980 - DNA, 80 bp, synthetic construct
  source 1..80: mol_type = other DNA
ttagctcctacctaaaccacctaatgcatacctcttagtccaaaaaatcatccttgaagctcattagaatcaagtgcatc

SEQ ID NO: 32981 - DNA, 80 bp, synthetic construct
  source 1..80: mol_type = other DNA
agaacatctgcagcagtctggaacacattttcccctgtacttgacttttagctcattatagctctcagatgttctctcgg

SEQ ID NO: 32982 - DNA, 80 bp, synthetic construct; identical to SEQ ID NO: 12132
  source 1..80: mol_type = other DNA

SEQ ID NO: 32983 - DNA, 80 bp, synthetic construct
  source 1..80: mol_type = other DNA
ttccaggctctaatcagctctcatccagatgctctcatgtttttagtaggtggggctgggagaccaaggtcagaaaagag

SEQ ID NO: 32984 - DNA, 80 bp, synthetic construct
  source 1..80: mol_type = other DNA
actgaactgggatgttgggtatcaaagtccaccagaaagctgaatataggaatgtgtagggtccacagggaggtctttgg

SEQ ID NO: 32985 - DNA, 80 bp, synthetic construct
  source 1..80: mol_type = other DNA
gggtgtcctaaaagattaactctaagaagtttctcttcacacacagaaatattgtttatctccaggcctttgccacgctt

SEQ ID NO: 32986 - DNA, 80 bp, synthetic construct
  source 1..80: mol_type = other DNA
cagtctgtgatccttttaagggcacaattatattactgttaatgtttgcatctataatgaccagcaaatactaggtacga

SEQ ID NO: 32987 - DNA, 80 bp, synthetic construct; identical to SEQ ID NO: 12133
  source 1..80: mol_type = other DNA

SEQ ID NO: 32988 - DNA, 80 bp, synthetic construct
  source 1..80: mol_type = other DNA
ggaaataggggctaagagaaagtatgtatattgtccaaggcttactgcttacaagacagaaaccatgagtaaggtgcaca

SEQ ID NO: 32989 - DNA, 80 bp, synthetic construct
  source 1..80: mol_type = other DNA
ggaagttcaagattgagacgctgggagatttggtatctgggggcggcctgcttccatacagatggcaacttctcactgta

SEQ ID NO: 32990 - DNA, 80 bp, synthetic construct; identical to SEQ ID NO: 12134
  source 1..80: mol_type = other DNA

SEQ ID NO: 32991 - DNA, 80 bp, synthetic construct
  source 1..80: mol_type = other DNA
tgcactacagcactagctacttgcagatgggaaggagtgcagaaaaggaagtgaagaacacaaaaaatgagtgtattagt

SEQ ID NO: 32992 - DNA, 80 bp, synthetic construct
  source 1..80: mol_type = other DNA
agagatgagtgaagagggaagagccccttatgaaactatcagatctcgtgagaactcactcattctcatgaggacagcac

SEQ ID NO: 32993 - DNA, 80 bp, synthetic construct
  source 1..80: mol_type = other DNA
aatgaacttttccatttcataatttttcacagggctaaagagccagctacccctttggaaacagttacaagttatctgga

SEQ ID NO: 32994 - DNA, 80 bp, synthetic construct
  source 1..80: mol_type = other DNA
gtgctaatacgtggtatctgaccatctaggccatccattttatgttgccactatctcagcatgagacttcagtgttcatc

SEQ ID NO: 32995 - DNA, 80 bp, synthetic construct
  source 1..80: mol_type = other DNA
agaggggacaaagaatagaaaatattagcgagcactagcaatatctaccacaaatgccaaaagcacgcaaagtcagatgg

SEQ ID NO: 32996 - DNA, 80 bp, synthetic construct; identical to SEQ ID NO: 12135
  source 1..80: mol_type = other DNA

SEQ ID NO: 32997 - DNA, 80 bp, synthetic construct
  source 1..80: mol_type = other DNA
ggaagacaaacgaaatgctttaaagatgtatggcaacaaatcttcaaaaggcatggtcttgacagtgaaacaatccacag

SEQ ID NO: 32998 - DNA, 80 bp, synthetic construct
  source 1..80: mol_type = other DNA
cacatttcgaggggtcacctgtgactatgaagcacagaactattatagggcatggatttgagctaccaataacattgctt

SEQ ID NO: 32999 - DNA, 80 bp, synthetic construct; identical to SEQ ID NO: 12136
  source 1..80: mol_type = other DNA

SEQ ID NO: 33000 - DNA, 80 bp, synthetic construct
  source 1..80: mol_type = other DNA
cttttattattccaaacagcagacatttcaattttttcccctgaaatcttagatgaggacaaattggcataaagctcaat

SEQ ID NO: 33001 - DNA, 80 bp, synthetic construct
  source 1..80: mol_type = other DNA
atcaggggcatagctcaaaattgcagagaggtattttctttactccataaaatgaggattgggaacaaagctaactggtt

SEQ ID NO: 33002 - DNA, 80 bp, synthetic construct
  source 1..80: mol_type = other DNA
tcctcaatctccacccagaacaagaacaatcctcattttttttcatggtttaaaagcaacatcagaattaatctggacaa

SEQ ID NO: 33003 - DNA, 80 bp, synthetic construct
  source 1..80: mol_type = other DNA
tgtagtaaggagaaatggggaatcataatctgtataagcacgatggacaagagaaaggaacttatgggagaatgacaaca

SEQ ID NO: 33004 - DNA, 80 bp, synthetic construct; identical to SEQ ID NO: 12137
  source 1..80: mol_type = other DNA

SEQ ID NO: 33005 - DNA, 80 bp, synthetic construct
  source 1..80: mol_type = other DNA
tacaggacttcacaaactactctggttacaagcaatgcaaaactacctcttcccataacttgagggactcttatcagccc

SEQ ID NO: 33006 - DNA, 80 bp, synthetic construct
  source 1..80: mol_type = other DNA
cacttctcaattatttagaagctttttgggataggaggtgcttcaaaagacaaagatgctagcttttgaccagatcaaac

SEQ ID NO: 33007 - DNA, 80 bp, synthetic construct
  source 1..80: mol_type = other DNA
gaaatggatatatcacatattcagtattatcccaaattgcctatctatctatgcctctccatgttacgaatagttataat

SEQ ID NO: 33008 - DNA, 80 bp, synthetic construct; identical to SEQ ID NO: 12138
  source 1..80: mol_type = other DNA

SEQ ID NO: 33009 - DNA, 80 bp, synthetic construct
  source 1..80: mol_type = other DNA
gatgagatgatcagaagctcagaacaagatggggctaacaaattttatccaacattttttgcttctaaggaggaataatc

SEQ ID NO: 33010 - DNA, 80 bp, synthetic construct
  source 1..80: mol_type = other DNA
tttatgcagtacattctgatctgataattttgaacctttgaactttcagggactggtgttttgttttttattttccttcc

SEQ ID NO: 33011 - DNA, 80 bp, synthetic construct; identical to SEQ ID NO: 12139
  source 1..80: mol_type = other DNA

SEQ ID NO: 33012 - DNA, 80 bp, synthetic construct
  source 1..80: mol_type = other DNA
gatggacaggagtaagctgcaagagcctaccagcaggtccttattatagattttccattttaagattctatatactcatc

SEQ ID NO: 33013 - DNA, 80 bp, synthetic construct
  source 1..80: mol_type = other DNA
ttaattgcgatgaagcataattcatctattttttcttgtatggttagtgtttttttggtatcctgtccaagacatttttc

SEQ ID NO: 33014 - DNA, 80 bp, synthetic construct
  source 1..80: mol_type = other DNA
gtcttatagtcttaccttactgtttacttttttatatcacatatttaaaattacttttttgtcctgtgtgaggtagacat

SEQ ID NO: 33015 - DNA, 80 bp, synthetic construct; identical to SEQ ID NO: 12140
  source 1..80: mol_type = other DNA

SEQ ID NO: 33016 - DNA, 80 bp, synthetic construct
  source 1..80: mol_type = other DNA
tagcttgccaacttctaaaaaacacatgttgggagtttgattgggattatgatgtatatacagatcaatccagggagaaa

SEQ ID NO: 33017 - DNA, 80 bp, synthetic construct
  source 1..80: mol_type = other DNA
gtgtcatgggggttcattatacaggttattttgtcactcaggtattaagcatagtgcccagtagttatttttttcctgat

SEQ ID NO: 33018 - DNA, 80 bp, synthetic construct
  source 1..80: mol_type = other DNA
cagctccatccatgtttccataaaagacacatctcgttcctttttatggttgcatagtattccatagtgtatatgtacca

SEQ ID NO: 33019 - DNA, 80 bp, synthetic construct
  source 1..80: mol_type = other DNA
aatagcagttcttttttttgctctttgaggaatcaacacactgctttccacaatggttgaactaatttgcacttccattg

SEQ ID NO: 33020 - DNA, 80 bp, synthetic construct; identical to SEQ ID NO: 12141
  source 1..80: mol_type = other DNA

SEQ ID NO: 33021 - DNA, 80 bp, synthetic construct
  source 1..80: mol_type = other DNA
aggttctttaggattttctatgcacacaatcttaccatctgcaaataaagacagtgcaagcccatttttttccaatgtaa

SEQ ID NO: 33022 - DNA, 80 bp, synthetic construct
  source 1..80: mol_type = other DNA
atcctttcaacattaagtatgatactaggtataggatttttgtagacgtttccttctattaatgaattgctgaaggccat

SEQ ID NO: 33023 - DNA, 80 bp, synthetic construct
  source 1..80: mol_type = other DNA
tagacagttcacagagtaagatacatggaaggccaataagaacataaagaagagttaacatcttcttattagggagaaga

SEQ ID NO: 33024 - DNA, 80 bp, synthetic construct; identical to SEQ ID NO: 12142
  source 1..80: mol_type = other DNA

SEQ ID NO: 33025 - DNA, 80 bp, synthetic construct
  source 1..80: mol_type = other DNA
tattatttaccaacaaaaatgaactaatacctacaataatatgaaaaaatctctgtaatattatagtgagtgaaagttgc

SEQ ID NO: 33026 - DNA, 80 bp, synthetic construct
  source 1..80: mol_type = other DNA
tgttggcaatgttgcatgctttggcagaggtgaggatttcacggatatatgtgtttgtcacaacttgtcaaatggttcat

SEQ ID NO: 33027 - DNA, 80 bp, synthetic construct; identical to SEQ ID NO: 12143
  source 1..80: mol_type = other DNA

SEQ ID NO: 33028 - DNA, 80 bp, synthetic construct
  source 1..80: mol_type = other DNA
ggggtacaagtgcagttttgttacatggatatattgcatagtggtgaagtttgagcttttagtgtaaccatcacacgagt

SEQ ID NO: 33029 - DNA, 80 bp, synthetic construct
  source 1..80: mol_type = other DNA
caagtgggaacatgcagtatttgactttctttttctgagttgtttcacttaaaataatggcctccagagggcacagtggc

SEQ ID NO: 33030 - DNA, 80 bp, synthetic construct
  source 1..80: mol_type = other DNA
ggaggctcagccatgagaatcgcttgaatctgagaggcagggttgcagtgagccgagaacgtgccactgcactccagcct

SEQ ID NO: 33031 - DNA, 80 bp, synthetic construct; identical to SEQ ID NO: 12144
  source 1..80: mol_type = other DNA

SEQ ID NO: 33032 - DNA, 80 bp, synthetic construct
  source 1..80: mol_type = other DNA
acatcctcacctacatctgttattttttgactttttagtaagagccattctgactggtataagataatatctcattgtgg

SEQ ID NO: 33033 - DNA, 80 bp, synthetic construct
  source 1..80: mol_type = other DNA
aaattctgggtgacagtccctgttggatacgtagtttgaatatattttctcctattctgtaggccttctgttatctcgat

SEQ ID NO: 33034 - DNA, 80 bp, synthetic construct
  source 1..80: mol_type = other DNA
gatcttacatttaagtctttgatgggttttgaggggatttttaaatatggttagaggtagaagtataattcaatttttat

SEQ ID NO: 33035 - DNA, 80 bp, synthetic construct; identical to SEQ ID NO: 12145
  source 1..80: mol_type = other DNA

SEQ ID NO: 33036 - DNA, 80 bp, synthetic construct
  source 1..80: mol_type = other DNA
tattatcaaaacaaatccttgttttcagagttgctgtacaaccaccatgacagaatttctgattttatcctaatgagagc

SEQ ID NO: 33037 - DNA, 80 bp, synthetic construct
  source 1..80: mol_type = other DNA
ctgctgttcttaaaaggatctagctggaattttaattatacattgactttcttttttcctcctaaataaggacacaacag

SEQ ID NO: 33038 - DNA, 80 bp, synthetic construct
  source 1..80: mol_type = other DNA
tagttgtaggaaccatgggctgtaataaaataaaaaggagtgatttgactttcttggaggccaaggaagagggtcataga

SEQ ID NO: 33039 - DNA, 80 bp, synthetic construct; identical to SEQ ID NO: 12146
  source 1..80: mol_type = other DNA

SEQ ID NO: 33040 - DNA, 80 bp, synthetic construct
  source 1..80: mol_type = other DNA
tcaacattcatttagtcatcagttcacttcttcagtcaacatttattaaggcattaccatgttcagtgcatgtctagaga

SEQ ID NO: 33041 - DNA, 80 bp, synthetic construct
  source 1..80: mol_type = other DNA
ctagtaaaggaagcagacttacaaaaatacaactgcgatgtgatactggttacagccaaggttcaaaaaggaaggagaca

SEQ ID NO: 33042 - DNA, 80 bp, synthetic construct
  source 1..80: mol_type = other DNA
tttggcctctactgtttttctttcatgactggtatttaggagtcctgttctcatcccaagcaccaaaaagtgaagacatt

SEQ ID NO: 33043 - DNA, 80 bp, synthetic construct
  source 1..80: mol_type = other DNA
cattgcctccaactctatagatgaatttctggatgaagttatatttgcaattatattttcattttggtaatcttcacaag

SEQ ID NO: 33044 - DNA, 80 bp, synthetic construct; identical to SEQ ID NO: 12147
  source 1..80: mol_type = other DNA

SEQ ID NO: 33045 - DNA, 80 bp, synthetic construct
  source 1..80: mol_type = other DNA
aagttgtctagctaacaaggaagcttcacataaatccagcagtcttactatttgctaataactgctgtcctacatgcagt

SEQ ID NO: 33046 - DNA, 80 bp, synthetic construct
  source 1..80: mol_type = other DNA
cttctcaatctctcactgttctattgctattctcttttttgtcccttttggcaatgcagatttttggatccctccatgag

SEQ ID NO: 33047 - DNA, 80 bp, synthetic construct; identical to SEQ ID NO: 12148
  source 1..80: mol_type = other DNA

SEQ ID NO: 33048 - DNA, 80 bp, synthetic construct
  source 1..80: mol_type = other DNA
tctctccattgtcaaacactgcactgtaatgggtttcttctaaatatctattctggtttattctagcctgacctatgagt

SEQ ID NO: 33049 - DNA, 80 bp, synthetic construct
  source 1..80: mol_type = other DNA
gacactgtgaggaccagcatactattctttggctaatgataggacaatgtgagttatatgcaaagacacacacacacata

SEQ ID NO: 33050 - DNA, 80 bp, synthetic construct
  source 1..80: mol_type = other DNA
ggaccaaaaaaaagaacgattaggaaatcacctgtaccctagatccagagtactttgattcactactggggatataaatc

SEQ ID NO: 33051 - DNA, 80 bp, synthetic construct
  source 1..80: mol_type = other DNA
gataatgctgaaaattacacttacgattttgatgaaagctgagcttaacaaaataaagtctgaatcttgattcaaactat

SEQ ID NO: 33052 - DNA, 80 bp, synthetic construct; identical to SEQ ID NO: 12149
  source 1..80: mol_type = other DNA

SEQ ID NO: 33053 - DNA, 80 bp, synthetic construct
  source 1..80: mol_type = other DNA
ctcactgtctaaatactgcagagtcagtttatgataatatgattagttacactaataatgctgcttaggcattatcttgc

SEQ ID NO: 33054 - DNA, 80 bp, synthetic construct
  source 1..80: mol_type = other DNA
tcttttttcattactggacttgcaaccatacacattactcttgaagaagggttttttttggctatctattaggagaggga

SEQ ID NO: 33055 - DNA, 80 bp, synthetic construct
  source 1..80: mol_type = other DNA
attattaaatgcttccttaaagaatctttttatactgcctctcttttttttaaagttaattattgatgtagtgacaagct

SEQ ID NO: 33056 - DNA, 80 bp, synthetic construct; identical to SEQ ID NO: 12150
  source 1..80: mol_type = other DNA

SEQ ID NO: 33057 - DNA, 80 bp, synthetic construct
  source 1..80: mol_type = other DNA
atgccagtcatcaccacagtaagcaagaatttggaggcactttacactgcaaacatcggtcttttccttttatataatct

SEQ ID NO: 33058 - DNA, 80 bp, synthetic construct
  source 1..80: mol_type = other DNA
agtgagaatgtgagatggtaaataagatctgaaatagaaaccaaggctgagttctcaagaataacacaggagatttaagc

SEQ ID NO: 33059 - DNA, 80 bp, synthetic construct; identical to SEQ ID NO: 12151
  source 1..80: mol_type = other DNA

SEQ ID NO: 33060 - DNA, 80 bp, synthetic construct
  source 1..80: mol_type = other DNA
cacaaggaaatttccagggacaatgaacatttttcataaacttgcaatggtaatggtgtcacaggtatatacatgttcca

SEQ ID NO: 33061 - DNA, 80 bp, synthetic construct
  source 1..80: mol_type = other DNA
taaaggacatttaaattctcattgtcactctattgggatgtgctgcctgcaggcagttctcacgtctgaaagtggtcaaa

SEQ ID NO: 33062 - DNA, 80 bp, synthetic construct
  source 1..80: mol_type = other DNA
cctttcttcctcaaaaaaaatgccatagtctttctttgccttaggatcttttcacaagaccttctcactggctagaaggc

SEQ ID NO: 33063 - DNA, 80 bp, synthetic construct
  source 1..80: mol_type = other DNA
acttcccaattagaccaaagtttcagaagggaagaactgcatttattttggtcactatattatctgcagtgactaggaca

SEQ ID NO: 33064 - DNA, 80 bp, synthetic construct; identical to SEQ ID NO: 12152
  source 1..80: mol_type = other DNA

SEQ ID NO: 33065 - DNA, 80 bp, synthetic construct
  source 1..80: mol_type = other DNA
atttatttatttatttatttatttttggagtctcaccctgtcaccaggctggagtgcagcagcgcgatctcggctcactg

SEQ ID NO: 33066 - DNA, 80 bp, synthetic construct
  source 1..80: mol_type = other DNA
tccacccgcctcagcctcccaaagtgctgggattacaggcgtgacccactgtgcccggcctcaggtatatctttattagc

SEQ ID NO: 33067 - DNA, 80 bp, synthetic construct
  source 1..80: mol_type = other DNA
aatgtggatttagatactgcttctaggttgcttatttccaaagatatccctccaattttgatatcacatgtagactccag

SEQ ID NO: 33068 - DNA, 80 bp, synthetic construct; identical to SEQ ID NO: 12153
  source 1..80: mol_type = other DNA

SEQ ID NO: 33069 - DNA, 80 bp, synthetic construct
  source 1..80: mol_type = other DNA
tgcctagcatgctacctgatacctcattgttgctaggttggttgagagaatttattgaaaacatactaggaggttccaga

SEQ ID NO: 33070 - DNA, 80 bp, synthetic construct
  source 1..80: mol_type = other DNA
cagcaagcagtggtagtgattccatgatgtgtacctaaaaaaatgccaggtgtgaaattctgggaatgctagcacttaaa

SEQ ID NO: 33071 - DNA, 80 bp, synthetic construct
  source 1..80: mol_type = other DNA
tcggcaatataccggataacatttgcctttataggagagatctgcaatggagtagatgccggtttttttggtaggttgag

SEQ ID NO: 33072 - DNA, 80 bp, synthetic construct; identical to SEQ ID NO: 12154
  source 1..80: mol_type = other DNA

SEQ ID NO: 33073 - DNA, 80 bp, synthetic construct
  source 1..80: mol_type = other DNA
gtaattgtttttggtatttatttatttatttttttatttattcttatagagatgaggttttgccatattgctcaaactcc

SEQ ID NO: 33074 - DNA, 80 bp, synthetic construct
  source 1..80: mol_type = other DNA
tgtgtatgagatttctgtcaaaattggctgaatgattatgcgatgagaataaaacaatgcaatatctaacatgatgcggg

SEQ ID NO: 33075 - DNA, 80 bp, synthetic construct; identical to SEQ ID NO: 12155
  source 1..80: mol_type = other DNA

SEQ ID NO: 33076 - DNA, 80 bp, synthetic construct
  source 1..80: mol_type = other DNA
tgtacagtatgagtaagaatagtaacaagccaaaaccaaaaagcagaaacaaaaaccccttcattttctattctgaagtg

SEQ ID NO: 33077 - DNA, 80 bp, synthetic construct
  source 1..80: mol_type = other DNA
catttcctccacaggggtattttttttcttttgactataaaagtcaactgatgctttacttaatcctctttgctcactct

SEQ ID NO: 33078 - DNA, 80 bp, synthetic construct
  source 1..80: mol_type = other DNA
atctagaaatacactgcaagggatgaacagtaaagtataatctaaatcatccctgatgtttccaggaagaagatacaaaa

SEQ ID NO: 33079 - DNA, 80 bp, synthetic construct; identical to SEQ ID NO: 12156
  source 1..80: mol_type = other DNA

SEQ ID NO: 33080 - DNA, 80 bp, synthetic construct
  source 1..80: mol_type = other DNA
gtagtttaatttttacttccaataagattaaacctactaattttcctgatagaatttttgatagtaggaactttgcacat

SEQ ID NO: 33081 - DNA, 80 bp, synthetic construct
  source 1..80: mol_type = other DNA
aacagcaaagtcttaagcactggcaggggtgaatctcatctcaactgaaatgctgactgcaaaaaaaaatttcttctaaa

SEQ ID NO: 33082 - DNA, 80 bp, synthetic construct
  source 1..80: mol_type = other DNA
gaaatggaattgcttagaaagatgccttgtccttgcctaacttatatactccattgagggccttatcgctatctcaaagg

SEQ ID NO: 33083 - DNA, 80 bp, synthetic construct; identical to SEQ ID NO: 12157
  source 1..80: mol_type = other DNA

SEQ ID NO: 33084 - DNA, 80 bp, synthetic construct
  source 1..80: mol_type = other DNA
gaatttttactttaggtgcagacgcatttaatagaggccgacctgtgcagaacaactgtacaaatacctggatggtaaca

SEQ ID NO: 33085 - DNA, 80 bp, synthetic construct
  source 1..80: mol_type = other DNA
ttctttcagtactcaaagctgacttagtcaggagagggagtaatattcttacttgtaaaatggaaagagcttggacttga

SEQ ID NO: 33086 - DNA, 80 bp, synthetic construct
  source 1..80: mol_type = other DNA
cacataggaaactaaaaggcaacatacttaagtgcttaaaatagtagcttatactcagctacattggcaccaaaattaaa

SEQ ID NO: 33087 - DNA, 80 bp, synthetic construct
  source 1..80: mol_type = other DNA
aataatgatctccaaaaaaaaaaagctttggttttgttgtcagaagactcaggtctgagacccaactcttgtcatctggc

SEQ ID NO: 33088 - DNA, 80 bp, synthetic construct; identical to SEQ ID NO: 12158
  source 1..80: mol_type = other DNA

SEQ ID NO: 33089 - DNA, 80 bp, synthetic construct
  source 1..80: mol_type = other DNA
atatttatcccaggtaaataatttggcagagaagagttctacaaaagcaggaacaccctgagactggcacatgcttttgt

SEQ ID NO: 33090 - DNA, 80 bp, synthetic construct
  source 1..80: mol_type = other DNA
tcttatcatacaggtggataaactacacttcaggacttagaagtatgtgcctccaggttatatgcaagtaaaatatatgc

SEQ ID NO: 33091 - DNA, 80 bp, synthetic construct
  source 1..80: mol_type = other DNA
aagaagcctcccatgaatgtggttcatatatgaaacactgaataagaagggttgttcatccaattcttaaagctttctca

SEQ ID NO: 33092 - DNA, 80 bp, synthetic construct; identical to SEQ ID NO: 12159
  source 1..80: mol_type = other DNA

SEQ ID NO: 33093 - DNA, 80 bp, synthetic construct
  source 1..80: mol_type = other DNA
tgaggaaattgaaaccaaacattgaatgcagtgcccaaaatcaagattagtaactgggagggccaacagtaagactcaga

SEQ ID NO: 33094 - DNA, 80 bp, synthetic construct
  source 1..80: mol_type = other DNA
tatgacagaaatccacagatttttaacatttaaggttttaatatttggatgacccacttaaaatttcttactttaactgg

SEQ ID NO: 33095 - DNA, 80 bp, synthetic construct
  source 1..80: mol_type = other DNA
tttctgaaggcatggaatcaataattactcacggaattgagttctgaccagtactaacaaacagatgtataaaactacat

SEQ ID NO: 33096 - DNA, 80 bp, synthetic construct; identical to SEQ ID NO: 12160
  source 1..80: mol_type = other DNA

SEQ ID NO: 33097 - DNA, 80 bp, synthetic construct
  source 1..80: mol_type = other DNA
tctgctctgtaactgtggcagtgcattgatttaaactccttctgagatctcaaatgcttttatattcttaggtctctcaa

SEQ ID NO: 33098 - DNA, 80 bp, synthetic construct
  source 1..80: mol_type = other DNA
ctggctttgagttcagttgtctatgttctgaccacagcaaataggattgggaaaaaaagaacaacaaacgaatagccccg

SEQ ID NO: 33099 - DNA, 80 bp, synthetic construct
  source 1..80: mol_type = other DNA
acattacttatcctctgaaacgataaattctctgataaattttaagtataaaaatttcccccttttcctccaattaggaa

SEQ ID NO: 33100 - DNA, 80 bp, synthetic construct; identical to SEQ ID NO: 12161
  source 1..80: mol_type = other DNA

SEQ ID NO: 33101 - DNA, 80 bp, synthetic construct
  source 1..80: mol_type = other DNA
caataatgactgcaaccaagaaataataataagaaccatacagagacacagcacctctgtctgccttttatgtgacacta

SEQ ID NO: 33102 - DNA, 80 bp, synthetic construct
  source 1..80: mol_type = other DNA
caaaagactgaggtaacaactggagtcttctacacaccaggatcctatgcagcccattctttggttaggaactgtggctg

SEQ ID NO: 33103 - DNA, 80 bp, synthetic construct; identical to SEQ ID NO: 12162
  source 1..80: mol_type = other DNA

SEQ ID NO: 33104 - DNA, 80 bp, synthetic construct
  source 1..80: mol_type = other DNA
ctctggggactgttgtggggtggggggaggtgggcgggatagcattgggagatatacctaatgctagatgacgagttagt

SEQ ID NO: 33105 - DNA, 80 bp, synthetic construct
  source 1..80: mol_type = other DNA
gggaaaattaacgcatggaatttttttctgaactctgaagatggatgaaagttatgtggtcactcaataactaagcagac

SEQ ID NO: 33106 - DNA, 80 bp, synthetic construct
  source 1..80: mol_type = other DNA
aacacaaatttgtgagagagtacaacttggctgttatcagtgagtcaacaattttgactgagttgccaatatattctggg

SEQ ID NO: 33107 - DNA, 80 bp, synthetic construct; identical to SEQ ID NO: 12163
  source 1..80: mol_type = other DNA

SEQ ID NO: 33108 - DNA, 80 bp, synthetic construct
  source 1..80: mol_type = other DNA
aacctaaaagtaaaatgcctggtcttcagctacaaaagatggatctactggaacatggttacagacaaacaaatgcaatg

SEQ ID NO: 33109 - DNA, 80 bp, synthetic construct
  source 1..80: mol_type = other DNA
actgtgacacttgagagtaaacaggaaactattagtgaaaataccaggaccagcagtataaactgggattgtcctgtacc

SEQ ID NO: 33110 - DNA, 80 bp, synthetic construct
  source 1..80: mol_type = other DNA
agcattaacattggatctaattcaccaggcttttattacttaggtggggatttggaatcctggagacctgacttgatcca

SEQ ID NO: 33111 - DNA, 80 bp, synthetic construct; identical to SEQ ID NO: 12164
  source 1..80: mol_type = other DNA

SEQ ID NO: 33112 - DNA, 80 bp, synthetic construct
  source 1..80: mol_type = other DNA
tgacaaatgtataatgacatgtattcatcattagagttttatacagaatagcttcactgccctaaaaatctactatgctg

SEQ ID NO: 33113 - DNA, 80 bp, synthetic construct
  source 1..80: mol_type = other DNA
aaggttgctccaggttgttctgtagcaacagaatccattcacctattgaaaaattatcacagtttttttcaactttagta

SEQ ID NO: 33114 - DNA, 80 bp, synthetic construct
  source 1..80: mol_type = other DNA
tatttttatagctagtttatccaagcctaggttcaatccaggactgcatgttgcatccagttgctctgtccttcaaggtt

SEQ ID NO: 33115 - DNA, 80 bp, synthetic construct; identical to SEQ ID NO: 12165
  source 1..80: mol_type = other DNA

SEQ ID NO: 33116 - DNA, 80 bp, synthetic construct
  source 1..80: mol_type = other DNA
tgagggaggggtacggagcttccatgtcttctccagacactcctccaagggtctttcagcctaaaaaaaaaactcaaagg

SEQ ID NO: 33117 - DNA, 80 bp, synthetic construct
  source 1..80: mol_type = other DNA
acttattatgttttaaaccctgttcaaaatatgtctacatgtagcaccacattgaaactcacaatagcaccttgggtaag

SEQ ID NO: 33118 - DNA, 80 bp, synthetic construct
  source 1..80: mol_type = other DNA
cacaggatcctttcttgtaaccacagtgcagtcctgctttctgttctgaccactactacgaaggcaactggctttcatgt

SEQ ID NO: 33119 - DNA, 80 bp, synthetic construct
  source 1..80: mol_type = other DNA
atgcatacacatacatatacacacaagcatctatatacacacaatattgtatgtatgatatacaatatatgtacatatat

SEQ ID NO: 33120 - DNA, 80 bp, synthetic construct; identical to SEQ ID NO: 12166
  source 1..80: mol_type = other DNA

SEQ ID NO: 33121 - DNA, 80 bp, synthetic construct
  source 1..80: mol_type = other DNA
acaagagaatacttttctctcaacttttgctgcactctatatcactcattgcatcatttatacattaatatctttgcatt

SEQ ID NO: 33122 - DNA, 80 bp, synthetic construct
  source 1..80: mol_type = other DNA
atgcctgagtcttatcagcaattgtcatttgattatgttttctcttatgatagtcccctttaacactaactgaaggaatg

SEQ ID NO: 33123 - DNA, 80 bp, synthetic construct
  source 1..80: mol_type = other DNA
gaaaaggtcttctatcttgttttgtgtctagactctcttatctaatttttttgggtttctgcatcacgcaccaatagagg

SEQ ID NO: 33124 - DNA, 80 bp, synthetic construct; identical to SEQ ID NO: 12167
  source 1..80: mol_type = other DNA

SEQ ID NO: 33125 - DNA, 80 bp, synthetic construct
  source 1..80: mol_type = other DNA
ctctgtttgctgggaatgtagccaggagtgtttaatagattattctgaatttttaccagaagagagcaattgtttttgtt

SEQ ID NO: 33126 - DNA, 80 bp, synthetic construct
  source 1..80: mol_type = other DNA
tttgacagggtctcactctgttgcctaggctgaatgcagtggcatgatcatagctcactgcagtctcaaactcctgggca

SEQ ID NO: 33127 - DNA, 80 bp, synthetic construct
  source 1..80: mol_type = other DNA
cccaaggattgggactataggtgtgacacactgcacttcgccaagggagctatattcaaactcatcatttcttcaaaaac

SEQ ID NO: 33128 - DNA, 80 bp, synthetic construct; identical to SEQ ID NO: 12168
  source 1..80: mol_type = other DNA

SEQ ID NO: 33129 - DNA, 80 bp, synthetic construct
  source 1..80: mol_type = other DNA
gaataattattcaagttctgaattttgtatctgaatgtgcaactggtgtcttctgaggtgtgtgtgtgtgtgttccatat

SEQ ID NO: 33130 - DNA, 80 bp, synthetic construct
  source 1..80: mol_type = other DNA
ggaaatgacctgactttcaattgttatgctttgagagtataaaccagaatcatattaccaccgcctacccataaatcaat

SEQ ID NO: 33131 - DNA, 80 bp, synthetic construct
  source 1..80: mol_type = other DNA
ataatcaacattacctaattaaataatgctcagacatgcaatagaattggctttttttaaactccctccagattactcac

SEQ ID NO: 33132 - DNA, 80 bp, synthetic construct; identical to SEQ ID NO: 12169
  source 1..80: mol_type = other DNA

SEQ ID NO: 33133 - DNA, 80 bp, synthetic construct
  source 1..80: mol_type = other DNA
cacatgaggaaatatgctaaatattataatatctgacaggtctatcactgtgggattaagccagctatctgaaacaaagg

SEQ ID NO: 33134 - DNA, 80 bp, synthetic construct
  source 1..80: mol_type = other DNA
aggtcctcctggttcatatctgccaaacgaagctaagagcaaacattgttctttcttctgattatgtggggcatgaccat

SEQ ID NO: 33135 - DNA, 80 bp, synthetic construct
  source 1..80: mol_type = other DNA
caaagaaggcaagttatagaattggatgagcatgtgtttaaagctaataaatgtagagcgtttttttccctcccccttgg

SEQ ID NO: 33136 - DNA, 80 bp, synthetic construct
  source 1..80: mol_type = other DNA
tgaactattcaaaacacagttgcttattgtccatttttaaacattcattggtcgagacttacagtaaggcattcctctct

SEQ ID NO: 33137 - DNA, 80 bp, synthetic construct; identical to SEQ ID NO: 12170
  source 1..80: mol_type = other DNA

SEQ ID NO: 33138 - DNA, 80 bp, synthetic construct
  source 1..80: mol_type = other DNA
ccattcaatctctcagcaaatcttgtagcactacttcaagtatatatcgtgaatctatttgttgccataaccacagcttc

SEQ ID NO: 33139 - DNA, 80 bp, synthetic construct
  source 1..80: mol_type = other DNA
attagatcataatttgccactgcataagaccaacaatgtcttgcctcactttgcaaaaatgggaacactttctacaaagt

SEQ ID NO: 33140 - DNA, 80 bp, synthetic construct; identical to SEQ ID NO: 12171
  source 1..80: mol_type = other DNA

SEQ ID NO: 33141 - DNA, 80 bp, synthetic construct
  source 1..80: mol_type = other DNA
ctgtttgataatatgaaccttatgactgagtttctcagcagatattagttattgacagcttcaaagccaatctctccttg

SEQ ID NO: 33142 - DNA, 80 bp, synthetic construct
  source 1..80: mol_type = other DNA
actttaatacatggaacacacttgagaaatatagaaatgcttcctacccaggatgccttaattaggcagacttatttaaa

SEQ ID NO: 33143 - DNA, 80 bp, synthetic construct
  source 1..80: mol_type = other DNA
gaaatagaactcctaagcatgagtgaaatcccccttacttgcctacagatttttctccactatgaatcgctcccaattca

SEQ ID NO: 33144 - DNA, 80 bp, synthetic construct
  source 1..80: mol_type = other DNA
ttgtgcagcatcaccacaacctggttttacgatattccaattacccaaaagttttcttgcatcctttagcagccactgtt

SEQ ID NO: 33145 - DNA, 80 bp, synthetic construct
  source 1..80: mol_type = other DNA
caccacctccccaagcttcaagaaactactgattcgttgtcctcataattttgtcacatccaatcatttcataaaaatgg

SEQ ID NO: 33146 - DNA, 80 bp, synthetic construct; identical to SEQ ID NO: 12172
  source 1..80: mol_type = other DNA

SEQ ID NO: 33147 - DNA, 80 bp, synthetic construct
  source 1..80: mol_type = other DNA
cagtttctccacatcctcaccgtcattaagtattatctgtcttttgatactagccattttagtgggcagaaatgtcaaca

SEQ ID NO: 33148 - DNA, 80 bp, synthetic construct; identical to SEQ ID NO: 12173
  source 1..80: mol_type = other DNA

SEQ ID NO: 33149 - DNA, 80 bp, synthetic construct
  source 1..80: mol_type = other DNA
tatcaaacctttgacttaccaaaggcctatctcttaatactaccagattggggttagtattccaacatatacattttggg

SEQ ID NO: 33150 - DNA, 80 bp, synthetic construct
  source 1..80: mol_type = other DNA
acaacatacttaacctggctgtggattatagttaggctttgggaagctgtttatgttctcttaatgatcgcttccttaca

SEQ ID NO: 33151 - DNA, 80 bp, synthetic construct
  source 1..80: mol_type = other DNA
ggtcagattgacctgccagactacttcagtcaaatacgggactttgaatgaatgattgaaccagtggtttattttactaa

SEQ ID NO: 33152 - DNA, 80 bp, synthetic construct; identical to SEQ ID NO: 12174
  source 1..80: mol_type = other DNA

SEQ ID NO: 33153 - DNA, 80 bp, synthetic construct
  source 1..80: mol_type = other DNA
ctttagaagatgttttgcatgcatgcttgccagtttttaaagcacattactgaaagcatttcagagcacttctcctgggt

SEQ ID NO: 33154 - DNA, 80 bp, synthetic construct
  source 1..80: mol_type = other DNA
gagaccatccaacttagccttctgtattgcatcctgggagtgacttgatttaggttatgatatggtaaaactattataaa

SEQ ID NO: 33155 - DNA, 80 bp, synthetic construct
  source 1..80: mol_type = other DNA
catggatagattctatctagttttaaaaagaagtaggccaatgaataaaagatatatgaaggcacatcctccaaaataag

SEQ ID NO: 33156 - DNA, 80 bp, synthetic construct; identical to SEQ ID NO: 12175
  source 1..80: mol_type = other DNA

SEQ ID NO: 33157 - DNA, 80 bp, synthetic construct
  source 1..80: mol_type = other DNA
atcttcttttactcttgctaccctagaattttatctcccaacaaaacattaacacttgaccctttccttgggttctgctt

SEQ ID NO: 33158 - DNA, 80 bp, synthetic construct
  source 1..80: mol_type = other DNA
tttgcttcagatactgtatgaggtgctttgcatatggttgtgaatcctcacaaccatactacgaggtaggtagtattatt

SEQ ID NO: 33159 - DNA, 80 bp, synthetic construct
  source 1..80: mol_type = other DNA
tcatttgggttgaagcattcatgaataaggtggagttctcagtgacttcctgttcttatttggtgattctgagactgata

SEQ ID NO: 33160 - DNA, 80 bp, synthetic construct
  source 1..80: mol_type = other DNA
aggcatctgattctctacctcccaggctattcaaattgtatgttcaaaaggaggcaatgaaaaacacacacttagttcaa

SEQ ID NO: 33161 - DNA, 80 bp, synthetic construct; identical to SEQ ID NO: 12176
  source 1..80: mol_type = other DNA

SEQ ID NO: 33162 - DNA, 80 bp, synthetic construct
  source 1..80: mol_type = other DNA
ctgcggtaattgcaaattaatgttctcctggtaatgcactaactacacactattgatctacaattgaatactagaggcta

SEQ ID NO: 33163 - DNA, 80 bp, synthetic construct
  source 1..80: mol_type = other DNA
tgtctctgtctcaaaagccttttagaaatctactgaactgtaactttgatgccataaaccacatatatgatgcacagata

SEQ ID NO: 33164 - DNA, 80 bp, synthetic construct; identical to SEQ ID NO: 12177
  source 1..80: mol_type = other DNA

SEQ ID NO: 33165 - DNA, 80 bp, synthetic construct
  source 1..80: mol_type = other DNA
tatctactaaaaatacaaaaattatagccagatgtggtggcgggcacctgtagtcccacctactcagaagactgaggcag

SEQ ID NO: 33166 - DNA, 80 bp, synthetic construct
  source 1..80: mol_type = other DNA
tcttcacagcatacttttgacaatgttaaattttctcatgtttgtgtcaaaaccttaattgaggatctggcaccgtggct

SEQ ID NO: 33167 - DNA, 80 bp, synthetic construct
  source 1..80: mol_type = other DNA
ctggacatggtggtgggtgcctgtaatcccaagtacttgggaggctgaggcaggagaatcgcttgaacacgggaggcgga

SEQ ID NO: 33168 - DNA, 80 bp, synthetic construct; identical to SEQ ID NO: 12178
  source 1..80: mol_type = other DNA

SEQ ID NO: 33169 - DNA, 80 bp, synthetic construct
  source 1..80: mol_type = other DNA
atttgcagctagtcacaattaaataccatcaaaataaatgtgtgcccaaattgtttgcttattttttattcctaagtcat

SEQ ID NO: 33170 - DNA, 80 bp, synthetic construct
  source 1..80: mol_type = other DNA
tattcattttacaagcagtcttagggctggaccagagtgctgatggctccctgatgtgccaatcattgttggataatgaa

SEQ ID NO: 33171 - DNA, 80 bp, synthetic construct
  source 1..80: mol_type = other DNA
aggtttatagaggttaaataattagcccaaatttatccagctagtaaatgttgagcaaagtattataaaacttcaaagct

SEQ ID NO: 33172 - DNA, 80 bp, synthetic construct
  source 1..80: mol_type = other DNA
taaaactaacaacagggttacattacaatatacattaaaagtccagagttcactatgaatccatgtaacaaaactgcact

SEQ ID NO: 33173 - DNA, 80 bp, synthetic construct; identical to SEQ ID NO: 12179
  source 1..80: mol_type = other DNA

SEQ ID NO: 33174 - DNA, 80 bp, synthetic construct
  source 1..80: mol_type = other DNA
tcttggacgatggttaggaatgggaccttttcaaatctactccataagcaataaactcagaagaaatcagaagtacatca

SEQ ID NO: 33175 - DNA, 80 bp, synthetic construct
  source 1..80: mol_type = other DNA
tatggtgaccaaacatgagactaattgtaaataggcctatataaacatgagtgtaggtgttaggaggataagagatttta

SEQ ID NO: 33176 - DNA, 80 bp, synthetic construct; identical to SEQ ID NO: 12180
  source 1..80: mol_type = other DNA

SEQ ID NO: 33177 - DNA, 80 bp, synthetic construct
  source 1..80: mol_type = other DNA
tcttagagaggtagatgcttttgagggaccaactgtgaaatgtatttttgtggtctgtattttcattttttgttgcaaga

SEQ ID NO: 33178 - DNA, 80 bp, synthetic construct
  source 1..80: mol_type = other DNA
tgatgtcctaccattaacagaacatgtgctttggagacacgtttcctctagaagtgatgaatttgagttgataaaggcac

SEQ ID NO: 33179 - DNA, 80 bp, synthetic construct
  source 1..80: mol_type = other DNA
atttttggggcctgtcacccttgagagtagtaaaaattatttataagcagctaaccaagggtgaaggaggcaaaaagtag

SEQ ID NO: 33180 - DNA, 80 bp, synthetic construct
  source 1..80: mol_type = other DNA
agaccttgccactctttggagacacttcactcctcaagtgcagaataacatctaaaatcgttatcatgacctgaagtact

SEQ ID NO: 33181 - DNA, 80 bp, synthetic construct; identical to SEQ ID NO: 12181
  source 1..80: mol_type = other DNA

SEQ ID NO: 33182 - DNA, 80 bp, synthetic construct
  source 1..80: mol_type = other DNA
ggattcatggctttatacgaagagaaagaaagacctgaactagcgcattagcaagcacaggcccctcatcatgtgatgtc

SEQ ID NO: 33183 - DNA, 80 bp, synthetic construct
  source 1..80: mol_type = other DNA
ggactaagacatcactcttgtgagggagcttctagcatgcaagcttcctgagggcaggtctcaggtgtctgagaatatcc

SEQ ID NO: 33184 - DNA, 80 bp, synthetic construct
  source 1..80: mol_type = other DNA
ttatcttactgtcaattatatccctctatggtttttccacaaaatcttctctttgccatggttgtctccacttcagatgt

SEQ ID NO: 33185 - DNA, 80 bp, synthetic construct; identical to SEQ ID NO: 12182
  source 1..80: mol_type = other DNA

SEQ ID NO: 33186 - DNA, 80 bp, synthetic construct
  source 1..80: mol_type = other DNA
tatatgattgggtataaacaaactactcacagatagagctcaagaactaagaagaatcagcaattaataagtgaaagagc

SEQ ID NO: 33187 - DNA, 80 bp, synthetic construct
  source 1..80: mol_type = other DNA
gggatgcagagacaaattatagaatagaaatcaggtaacatggttcctagtcctactggaaagtcaactgataaaatgaa

SEQ ID NO: 33188 - DNA, 80 bp, synthetic construct
  source 1..80: mol_type = other DNA
taatatattttgctatggtctaagagctctctaaattcccagtacagtccaggttttctagatctctaacttagtaccaa

SEQ ID NO: 33189 - DNA, 80 bp, synthetic construct
  source 1..80: mol_type = other DNA
taacagaaaaaagactcatgactttggatacctaattcactcaacaaccaactttgttcattcatcttggctctctttag

SEQ ID NO: 33190 - DNA, 80 bp, synthetic construct; identical to SEQ ID NO: 12183
  source 1..80: mol_type = other DNA

SEQ ID NO: 33191 - DNA, 80 bp, synthetic construct
  source 1..80: mol_type = other DNA
ggaacggacagtagaaaggatttgtcagggacaagaaaaaatttaggcaaggacatttatataaggtgaggaattttctg

SEQ ID NO: 33192 - DNA, 80 bp, synthetic construct
  source 1..80: mol_type = other DNA
tatcaagtggagaatgtgtagtcactcaaagacgtaataagtttccatttaatttattctctttgcttataaacaacatt

SEQ ID NO: 33193 - DNA, 80 bp, synthetic construct
  source 1..80: mol_type = other DNA
cttaaagttgtaagtgaaacattcattaaagccaggacacaagaaattgcataatggaaagaaaaaatatttctctttta

SEQ ID NO: 33194 - DNA, 80 bp, synthetic construct; identical to SEQ ID NO: 12184
  source 1..80: mol_type = other DNA

SEQ ID NO: 33195 - DNA, 80 bp, synthetic construct
  source 1..80: mol_type = other DNA
gctttgattattgttaaaaattgatttggttatctgagttcagcgagtggccgtcatgtgaccatgactttccacagcaa

SEQ ID NO: 33196 - DNA, 80 bp, synthetic construct
  source 1..80: mol_type = other DNA
acacacacatccatacaatctcaatgaaggcacaggtcataattgtttgtgaattaactgataagttttgactttctgaa

SEQ ID NO: 33197 - DNA, 80 bp, synthetic construct
  source 1..80: mol_type = other DNA
ctgactcagtctgagctttggttgtaatacaaatccctaaatagtttttcaacagaaattatagtctagtacttgaatac

SEQ ID NO: 33198 - DNA, 80 bp, synthetic construct; identical to SEQ ID NO: 12185
  source 1..80: mol_type = other DNA

SEQ ID NO: 33199 - DNA, 80 bp, synthetic construct
  source 1..80: mol_type = other DNA
cacttaaataaattagaagtcagttgggttgactgaagaacttataagagcatttacccaggaaggcaagcctgtaatcg

SEQ ID NO: 33200 - DNA, 80 bp, synthetic construct
  source 1..80: mol_type = other DNA
attttaaaattatacagatttaagtgtactgcatgatgttttgttatacatatacacactcaaatgatcactacagtcaa

SEQ ID NO: 33201 - DNA, 80 bp, synthetic construct; identical to SEQ ID NO: 12186
  source 1..80: mol_type = other DNA

SEQ ID NO: 33202 - DNA, 80 bp, synthetic construct
  source 1..80: mol_type = other DNA
tttgacacaaatggcaggatcttttttacagctgaacaaaactccattgcgtatatatgctgcaatttcttcatcattca

SEQ ID NO: 33203 - DNA, 80 bp, synthetic construct
  source 1..80: mol_type = other DNA
atcatctatctatatgtagtgctgatttcatttcctttggggatttacccagaagaaggatcgctaggtcacatcgtagt

SEQ ID NO: 33204 - DNA, 80 bp, synthetic construct
  source 1..80: mol_type = other DNA
gatcagtgatgttaagcatctattcaaatatctgtgccatttatgtctcctttggtccattatttactcaggttctttac

SEQ ID NO: 33205 - DNA, 80 bp, synthetic construct; identical to SEQ ID NO: 12187
  source 1..80: mol_type = other DNA

SEQ ID NO: 33206 - DNA, 80 bp, synthetic construct
  source 1..80: mol_type = other DNA
ctttaattcattttgagtttgagtttcagctgagcccagtattacgctgaagccaaacccagaaaagggtactataggaa

SEQ ID NO: 33207 - DNA, 80 bp, synthetic construct
  source 1..80: mol_type = other DNA
tagagatgtgagaatgattaaacctatgcaaaccaataaatataacaacacattaagagaatgaatcacaaaaaccatac

SEQ ID NO: 33208 - DNA, 80 bp, synthetic construct
  source 1..80: mol_type = other DNA
acagggaatgtacttcagtacagtaaaggccatatatcacaagcatgcagctaacatcacagtcaatagtgaaaagttga

SEQ ID NO: 33209 - DNA, 80 bp, synthetic construct; identical to SEQ ID NO: 12188
  source 1..80: mol_type = other DNA

SEQ ID NO: 33210 - DNA, 80 bp, synthetic construct
  source 1..80: mol_type = other DNA
catgaattaaagaaattgaagaaagcacaagtaagtgataagataccctatgttcaaggactggaagaatcaatagtgtt

SEQ ID NO: 33211 - DNA, 80 bp, synthetic construct
  source 1..80: mol_type = other DNA
ttaccattgaaatgttgacatcttgtcaaagcatgttacagaataagatcatagaaataaacagtgccacggagaaatga

SEQ ID NO: 33212 - DNA, 80 bp, synthetic construct
  source 1..80: mol_type = other DNA
gttgaaaccccgtctttacaaaaaatacaaaaattagctggatgtggtggcacgcacttgtaatcccagctctactcggg

SEQ ID NO: 33213 - DNA, 80 bp, synthetic construct; identical to SEQ ID NO: 12189
  source 1..80: mol_type = other DNA

SEQ ID NO: 33214 - DNA, 80 bp, synthetic construct
  source 1..80: mol_type = other DNA
taattagagataaatgcaatttggttttctcagcactgcttaaactagtagtgaagaagaacccatataatggattttat

SEQ ID NO: 33215 - DNA, 80 bp, synthetic construct
  source 1..80: mol_type = other DNA
tgtgaggtgatatacaatattttgtgaacttacatttaattcctcaattagcaaaaatttaagcaaatgatgctgtaacc

SEQ ID NO: 33216 - DNA, 80 bp, synthetic construct
  source 1..80: mol_type = other DNA
gctcacaagaatgtaagcccaataaggtaacagactttagttgtttttttttttaattcacagaaatactctaaatttct

SEQ ID NO: 33217 - DNA, 80 bp, synthetic construct
  source 1..80: mol_type = other DNA
attactcttcttaatgtcagtcatatggcttaatttacaaacatagattcatttggaacagattttgaaattactaattt

SEQ ID NO: 33218 - DNA, 80 bp, synthetic construct; identical to SEQ ID NO: 12190
  source 1..80: mol_type = other DNA

SEQ ID NO: 33219 - DNA, 80 bp, synthetic construct
  source 1..80: mol_type = other DNA
tatgagagaaatgggaggatgatgatcaagaggctaagggctttgagctgtatgaaaaagattcgaactaactgcaagaa

SEQ ID NO: 33220 - DNA, 80 bp, synthetic construct
  source 1..80: mol_type = other DNA
ctgtctctactaaaaatacacacacaaaaaaattagccgggcatggtggcgggcacctgtggtcccagctacttgggagg

SEQ ID NO: 33221 - DNA, 80 bp, synthetic construct; identical to SEQ ID NO: 12191
  source 1..80: mol_type = other DNA

SEQ ID NO: 33222 - DNA, 80 bp, synthetic construct
  source 1..80: mol_type = other DNA
agtggaatgaagtgaaattcagttagaatggaagaaagatggaaatatatattctctaccctccactgaactaccaaact

SEQ ID NO: 33223 - DNA, 80 bp, synthetic construct
  source 1..80: mol_type = other DNA
agctaatggcagagctgaaaaataatctttaaatttctacagattagattgccagctctctgggcaataaattctcctag

SEQ ID NO: 33224 - DNA, 80 bp, synthetic construct
  source 1..80: mol_type = other DNA
tctgggctattcccagctagagctaaagagataatgatttcttttataccatgtgaatccttgtatcccctcttcacaat

SEQ ID NO: 33225 - DNA, 80 bp, synthetic construct; identical to SEQ ID NO: 12192
  source 1..80: mol_type = other DNA

SEQ ID NO: 33226 - DNA, 80 bp, synthetic construct
  source 1..80: mol_type = other DNA
ataaaaaggaatgagatcatgtcatttgcagggacctggagggagctggaggccattatccttagcaaggtaatacagga

SEQ ID NO: 33227 - DNA, 80 bp, synthetic construct
  source 1..80: mol_type = other DNA
cttgggtgataaaataatctctataacaaaccacatgaaaaaagtttacctatgtagcaaacctgcacacgtaccctgaa

SEQ ID NO: 33228 - DNA, 80 bp, synthetic construct
  source 1..80: mol_type = other DNA
gagagaacaagagtggacagaaatttagtttcttctgaagaagaaatcacatggctcacaaaagagagatggcaaaggtc

SEQ ID NO: 33229 - DNA, 80 bp, synthetic construct; identical to SEQ ID NO: 12193
  source 1..80: mol_type = other DNA

SEQ ID NO: 33230 - DNA, 80 bp, synthetic construct
  source 1..80: mol_type = other DNA
aggcaatatgcccagttggaagagtatttgctttgtggctgtgaaactctagatgggaattctggctccattgctagtca

SEQ ID NO: 33231 - DNA, 80 bp, synthetic construct
  source 1..80: mol_type = other DNA
gcaggggaactcccctttataaaaccaccagatctagtgagacttactcactgtcaggaaagcacaggaaagacctgccc

SEQ ID NO: 33232 - DNA, 80 bp, synthetic construct
  source 1..80: mol_type = other DNA
atttcactctcaagtaggttgtggaaatactatatgtagcagcaattactaccagcacatggtagacagtcaataatctt

SEQ ID NO: 33233 - DNA, 80 bp, synthetic construct; identical to SEQ ID NO: 12194
  source 1..80: mol_type = other DNA

SEQ ID NO: 33234 - DNA, 80 bp, synthetic construct
  source 1..80: mol_type = other DNA
tgtcttgatttctggctcatttctgaaggatacaggattttgagctgacagttcttgttttagcatttgaaaaatgtccc

SEQ ID NO: 33235 - DNA, 80 bp, synthetic construct
  source 1..80: mol_type = other DNA
ttttcagaaatttgaatatgatggattttggtatggatttctttgaagctgccctctttggaagtctaccttgacctctt

SEQ ID NO: 33236 - DNA, 80 bp, synthetic construct
  source 1..80: mol_type = other DNA
ttatagtcccacagttccctgagggctgttttcattcttttcttcagtctttttttctctctgtttttcatattggccaa

SEQ ID NO: 33237 - DNA, 80 bp, synthetic construct
  source 1..80: mol_type = other DNA
ctttctgttgtttcatttgtttcaatcatacttgtagttgcttgttaatgcaattttataatggaggcttaaaatatctg

SEQ ID NO: 33238 - DNA, 80 bp, synthetic construct; identical to SEQ ID NO: 12195
  source 1..80: mol_type = other DNA

SEQ ID NO: 33239 - DNA, 80 bp, synthetic construct
  source 1..80: mol_type = other DNA
ctgacaccataagaaggaggaaaggagagtggccttattaccacacggtgatgatgaaggtcctgactctgcactagacc

SEQ ID NO: 33240 - DNA, 80 bp, synthetic construct
  source 1..80: mol_type = other DNA
tgtcctttgcttgcatggatgggtgtagggatggaatatttatccgtggtgttgggtggagcagggaagttatgtctaaa

SEQ ID NO: 33241 - DNA, 80 bp, synthetic construct; identical to SEQ ID NO: 12196
  source 1..80: mol_type = other DNA

SEQ ID NO: 33242 - DNA, 80 bp, synthetic construct
  source 1..80: mol_type = other DNA
ttagcaacatgaactatttacactctacccttttgccagagaatatgtgatgccaaactttctgctttccaattaccatc

SEQ ID NO: 33243 - DNA, 80 bp, synthetic construct
  source 1..80: mol_type = other DNA
cagagagttcacagttcacagtctagtcatataaaaagcttggtccctaggtcaattcagactacaaaacctgaatgaga

SEQ ID NO: 33244 - DNA, 80 bp, synthetic construct
  source 1..80: mol_type = other DNA
tacaattcactacatctcacagcatccctttaagaggacaagggaagaaagaagttccctcagctttgtaccacaagaag

SEQ ID NO: 33245 - DNA, 80 bp, synthetic construct
  source 1..80: mol_type = other DNA
cctcatgtattgtttttccaggaggacagtactcattttggtacctgatcttatttatttcaggatcacatgggtgaata

SEQ ID NO: 33246 - DNA, 80 bp, synthetic construct; identical to SEQ ID NO: 12197
  source 1..80: mol_type = other DNA

SEQ ID NO: 33247 - DNA, 80 bp, synthetic construct
  source 1..80: mol_type = other DNA
agcacactgaccacttgagtatactgtcttatattacttctattactatgatgtgatgacagcgtcactggacaaatttc

SEQ ID NO: 33248 - DNA, 80 bp, synthetic construct
  source 1..80: mol_type = other DNA
aatttagacatgttatacaagtaggtatagcaaacacagaattctctgtgcacacatattacatgcatattacaattgga

SEQ ID NO: 33249 - DNA, 80 bp, synthetic construct
  source 1..80: mol_type = other DNA
caaaaataaacattaaccaggcgtggtggcaggctcctgtaatcccagctacttgggaggctgaggcaggaaaactgctt

SEQ ID NO: 33250 - DNA, 80 bp, synthetic construct; identical to SEQ ID NO: 12198
  source 1..80: mol_type = other DNA

SEQ ID NO: 33251 - DNA, 80 bp, synthetic construct
  source 1..80: mol_type = other DNA
tttaattagccagacattaccagtatattattccctaatagtaataaaaattgtatggatagaaagaatactttggggct

SEQ ID NO: 33252 - DNA, 80 bp, synthetic construct
  source 1..80: mol_type = other DNA
gttcaacttatgcaagaatttgacactgccttaaaccagggcttcacaaacaacataaacaaataactggttcagcctca

SEQ ID NO: 33253 - DNA, 80 bp, synthetic construct
  source 1..80: mol_type = other DNA
aaataagaaaagaaacaaaaagttaaagggctttcaatttgaaaaggctagatagcatatgattccaactatatgacatt

SEQ ID NO: 33254 - DNA, 80 bp, synthetic construct; identical to SEQ ID NO: 12199
  source 1..80: mol_type = other DNA

SEQ ID NO: 33255 - DNA, 80 bp, synthetic construct
  source 1..80: mol_type = other DNA
aaactgctctaaaaaataaagtctaaaacagaggctgggagtggtggctcacgcctataatcctagcactttgggaggcc

SEQ ID NO: 33256 - DNA, 80 bp, synthetic construct
  source 1..80: mol_type = other DNA
aggcaggagaattgctggaacccaggaggtggaggctgcagtgagccgagattgcgccattgccctccagcctgggcaac

SEQ ID NO: 33257 - DNA, 80 bp, synthetic construct; identical to SEQ ID NO: 12200
  source 1..80: mol_type = other DNA

SEQ ID NO: 33258 - DNA, 80 bp, synthetic construct
  source 1..80: mol_type = other DNA
aaagaaatctacataacaaaagttaaaggaaagcattttttaaggaaagctgtaacaaactttttgatagacacacagct

SEQ ID NO: 33259 - DNA, 80 bp, synthetic construct
  source 1..80: mol_type = other DNA
ctacctccactgttagaagactatcattaacagtaaggggtaaaatttcaaagtggtatacagggatttggccacatatt

SEQ ID NO: 33260 - DNA, 80 bp, synthetic construct
  source 1..80: mol_type = other DNA
cttttcttcctttctaacgcttttataatgtacctaatgaacagaaaatcttttcaaaaaataagagtattttttcaagt

SEQ ID NO: 33261 - DNA, 80 bp, synthetic construct; identical to SEQ ID NO: 12201
  source 1..80: mol_type = other DNA

SEQ ID NO: 33262 - DNA, 80 bp, synthetic construct
  source 1..80: mol_type = other DNA
gacttcctgaattacaattatcgagataaaggtcttttaaaattttgtcactgctacagtgattaatgattttagaccaa

SEQ ID NO: 33263 - DNA, 80 bp, synthetic construct
  source 1..80: mol_type = other DNA
caggtaacatgcaatttaaattaagccctcatctacatggggtggccagatgaacctaatggggaattcagttacatcaa

SEQ ID NO: 33264 - DNA, 80 bp, synthetic construct
  source 1..80: mol_type = other DNA
tgcaacattgctaccaagaactttgctttgcattatgtggctcttgtggtggactagactgaactgtaacttttggtcaa

SEQ ID NO: 33265 - DNA, 80 bp, synthetic construct
  source 1..80: mol_type = other DNA
cattttagtaagccagagattttgaattaagttaatcaatctgattttgatgaaaagtatttttcttaagaaaatgaact

SEQ ID NO: 33266 - DNA, 80 bp, synthetic construct; identical to SEQ ID NO: 12202
  source 1..80: mol_type = other DNA

SEQ ID NO: 33267 - DNA, 80 bp, synthetic construct
  source 1..80: mol_type = other DNA
gttaccaacatcagagagacaactgggccaactgttgaggttcaaatcttagttccatttataagctgtgtgactttgtg

SEQ ID NO: 33268 - DNA, 80 bp, synthetic construct
  source 1..80: mol_type = other DNA
actgccctcaaggacaattgatttcagagtgagcatttatgtagtttactttgacattgccttctatgttcttgtgtgtt

SEQ ID NO: 33269 - DNA, 80 bp, synthetic construct
  source 1..80: mol_type = other DNA
ctaacagctgtcatttagcagtgtcataatgttgatgaagattactttgaccccaaaggaaaaaaagcctcaaaaggctg

SEQ ID NO: 33270 - DNA, 80 bp, synthetic construct; identical to SEQ ID NO: 12203
  source 1..80: mol_type = other DNA

SEQ ID NO: 33271 - DNA, 80 bp, synthetic construct
  source 1..80: mol_type = other DNA
ttagaaattgaaccttgactgtctaattgttaacagttttaacaccatccagaagaaaaaaaattagtaaatcaagaatt

SEQ ID NO: 33272 - DNA, 80 bp, synthetic construct
  source 1..80: mol_type = other DNA
ggattagggtcctctgagaatatttgcataattcaatcagaaactgaagtactaaaaggatctagggttatatgtagaga

SEQ ID NO: 33273 - DNA, 80 bp, synthetic construct
  source 1..80: mol_type = other DNA
tgcttcataatgcattcaatatgttcctagtggattcatattaaataactcagtacctagcatgtgtcaggcatttattt

SEQ ID NO: 33274 - DNA, 80 bp, synthetic construct
  source 1..80: mol_type = other DNA
gtaactctgaagctaggtgctgtcctctctattttgtacataaaggaagagaagctcaagctgaataaataacttatcca

SEQ ID NO: 33275 - DNA, 80 bp, synthetic construct; identical to SEQ ID NO: 12204
  source 1..80: mol_type = other DNA

SEQ ID NO: 33276 - DNA, 80 bp, synthetic construct
  source 1..80: mol_type = other DNA
gtttggatgtattagatgatacaactcatgggaaagacttggcacagtgcctagcttataatgtgtataagctaatatta

SEQ ID NO: 33277 - DNA, 80 bp, synthetic construct
  source 1..80: mol_type = other DNA
tgaatattcatagcttgagtctatggtagtaaatgtgtgtatctgtgtgaataaatctttattagatttttaagtgtaat

SEQ ID NO: 33278 - DNA, 80 bp, synthetic construct
  source 1..80: mol_type = other DNA
gaaaaaccgtagaaaacaatctaaaggatcatgagtagttactctattaaataaattatagttcaccaagatatgatatt

SEQ ID NO: 33279 - DNA, 80 bp, synthetic construct; identical to SEQ ID NO: 12205
  source 1..80: mol_type = other DNA

SEQ ID NO: 33280 - DNA, 80 bp, synthetic construct
  source 1..80: mol_type = other DNA
ggttctgtgtccaatattttagataaaagatctacaaacacaacagagtgaataggatgatctctcttgatctgtctttc

SEQ ID NO: 33281 - DNA, 80 bp, synthetic construct; identical to SEQ ID NO: 12206
  source 1..80: mol_type = other DNA

SEQ ID NO: 33282 - DNA, 80 bp, synthetic construct
  source 1..80: mol_type = other DNA
gttaaatataaatgctcctcttttgagtgctttctaattgacagatagtttcctatttatttttgcatacattgtgctgg

SEQ ID NO: 33283 - DNA, 80 bp, synthetic construct
  source 1..80: mol_type = other DNA
tgaatccaggcctacctgactcccaacaccatgctcttaaccacaatgctatgctgcttcctgattttaagtgtctggat

SEQ ID NO: 33284 - DNA, 80 bp, synthetic construct
  source 1..80: mol_type = other DNA
aattgtataactagagtaaccatatagcccagtttgcccaagagagtcccagtttattatacctgtatttatttgtaatt

SEQ ID NO: 33285 - DNA, 80 bp, synthetic construct
  source 1..80: mol_type = other DNA
ccaaatttatgaggagcttagaaactcactatactgtccaagactcaaaagatggcatgaagagctaaatgtctttaaat

SEQ ID NO: 33286 - DNA, 80 bp, synthetic construct; identical to SEQ ID NO: 12207
  source 1..80: mol_type = other DNA

SEQ ID NO: 33287 - DNA, 80 bp, synthetic construct
  source 1..80: mol_type = other DNA
acccgacaacacagcagtttaatgaaacagtacagtgagcacattcttcaatatggccagagaggacattcagatttaga

SEQ ID NO: 33288 - DNA, 80 bp, synthetic construct
  source 1..80: mol_type = other DNA
gtatcatatgtactctctttggaaacaagaaaggagagttttacaagttgatttatgtgataggctggtgtgaactataa

SEQ ID NO: 33289 - DNA, 80 bp, synthetic construct
  source 1..80: mol_type = other DNA
caaatggttttacatcgcagctagtatttatcatttaaaatagaccagagttctaactcagtttcttccttgctattcag

SEQ ID NO: 33290 - DNA, 80 bp, synthetic construct; identical to SEQ ID NO: 12208
  source 1..80: mol_type = other DNA

SEQ ID NO: 33291 - DNA, 80 bp, synthetic construct
  source 1..80: mol_type = other DNA
ctgccgggtttgaatgtgaggacttttctttatttccagattaacacatgcctcaatctctccaaataagagcttctggc

SEQ ID NO: 33292 - DNA, 80 bp, synthetic construct
  source 1..80: mol_type = other DNA
gaagtaatatttctcatgtgattttgcttaaggatgtccagagcaaatgttacacagcataaaaatctcaccattctatg

SEQ ID NO: 33293 - DNA, 80 bp, synthetic construct
  source 1..80: mol_type = other DNA
cattaggatcctattacttcttcctttggaaaatcacaatttcttttctctctgaaatcctgtgctctgtttactctgtg

SEQ ID NO: 33294 - DNA, 80 bp, synthetic construct; identical to SEQ ID NO: 12209
  source 1..80: mol_type = other DNA

SEQ ID NO: 33295 - DNA, 80 bp, synthetic construct
  source 1..80: mol_type = other DNA
ttcagtcaaaattatttcttgtacccagcaccatggctgttgctcaaaggcagcagaagagatgtctcttctcagcaagc

SEQ ID NO: 33296 - DNA, 80 bp, synthetic construct
  source 1..80: mol_type = other DNA
tcagttgggctcttgaaagataagtgggtaggtctggggctaaaaattaggatatttcaaactgtggcagagtttgggaa

SEQ ID NO: 33297 - DNA, 80 bp, synthetic construct
  source 1..80: mol_type = other DNA
ggatgttgcctcgtaggcaggaaaacagcctacccccagctctcgcagctaccaatatcaatttctatatggcattttac

SEQ ID NO: 33298 - DNA, 80 bp, synthetic construct; identical to SEQ ID NO: 12210
  source 1..80: mol_type = other DNA

SEQ ID NO: 33299 - DNA, 80 bp, synthetic construct
  source 1..80: mol_type = other DNA
gagcttatataatggaagagaacaagtgttccactccattcaaccattcagtaactattgccagtaatgtgaattatcat

SEQ ID NO: 33300 - DNA, 80 bp, synthetic construct
  source 1..80: mol_type = other DNA
atttcagacaagatctcctaaagtattacctaaaggaactgtaatactaccctagagcatgaggatatggagcaatctgg

SEQ ID NO: 33301 - DNA, 80 bp, synthetic construct; identical to SEQ ID NO: 12211
  source 1..80: mol_type = other DNA

SEQ ID NO: 33302 - DNA, 80 bp, synthetic construct
  source 1..80: mol_type = other DNA
tcaacagttgaagtgaaatgcacaaattccatgcaaaacacaactaaccaaaattgagacaacaaaaaacagaaagtcaa

SEQ ID NO: 33303 - DNA, 80 bp, synthetic construct
  source 1..80: mol_type = other DNA
taataccgatcttacacaaactcttgtagaagatagaggaagaatgagccaatctcaactcattttataaagccagtata

SEQ ID NO: 33304 - DNA, 80 bp, synthetic construct
  source 1..80: mol_type = other DNA
gatcaaatacagtttatcccaggaatatgaaggtaatttgatatggtttggctgtgtccccacccaaatctcatcttgaa

SEQ ID NO: 33305 - DNA, 80 bp, synthetic construct
  source 1..80: mol_type = other DNA
gccatccatgtaagatgtgattgctcctccttgccttccaccatgattgcaaggcctccccagccacatggaactgtgag

SEQ ID NO: 33306 - DNA, 80 bp, synthetic construct; identical to SEQ ID NO: 12212
  source 1..80: mol_type = other DNA

SEQ ID NO: 33307 - DNA, 80 bp, synthetic construct
  source 1..80: mol_type = other DNA
caattagaaagttaaaaaatagtattcacaatagcaccaaaaagcaacaataggagtacatttagaaaagatatgtaaga

SEQ ID NO: 33308 - DNA, 80 bp, synthetic construct
  source 1..80: mol_type = other DNA
tccaaaaaggtttctttgaagaaactgataagctgattcttaacattatttaaaaatacaaaggatgtagattagcaaaa

SEQ ID NO: 33309 - DNA, 80 bp, synthetic construct; identical to SEQ ID NO: 12213
  source 1..80: mol_type = other DNA

SEQ ID NO: 33310 - DNA, 80 bp, synthetic construct
  source 1..80: mol_type = other DNA
cataaagttcctagggagaagaaaaggagaatatttctgtaaccctgaattaggcaaaaatttcatggaaaggatgttaa

SEQ ID NO: 33311 - DNA, 80 bp, synthetic construct
  source 1..80: mol_type = other DNA
cgaactcatatgtaaaatacatgaagaactagaaaccaacagttaaaagattacaatagacaaaatacttgaacaatact

SEQ ID NO: 33312 - DNA, 80 bp, synthetic construct
  source 1..80: mol_type = other DNA
aagactgataacaccaaatgttgataacaatgtggaacaaaacgaactctcacatgctgctggaaggagtataaaatgat

SEQ ID NO: 33313 - DNA, 80 bp, synthetic construct
  source 1..80: mol_type = other DNA
gcctgtaatcccagctactcaggaagctgaggcaggagaatcgcgtgaacatgggagacggaggttgcagtgagccgaga

SEQ ID NO: 33314 - DNA, 80 bp, synthetic construct; identical to SEQ ID NO: 12214
  source 1..80: mol_type = other DNA

SEQ ID NO: 33315 - DNA, 80 bp, synthetic construct
  source 1..80: mol_type = other DNA
acaatattattttaaaaattatattgaacgtaaatgaggccagacatgtcccctactcacacacacatggaagtagcagg

SEQ ID NO: 33316 - DNA, 80 bp, synthetic construct
  source 1..80: mol_type = other DNA
actagcaagcaacccaagagaactttctggtgtgaaggaaatatcctctgtcttgtttcagattgtgttactacagatgt

SEQ ID NO: 33317 - DNA, 80 bp, synthetic construct
  source 1..80: mol_type = other DNA
ccatctcaaaagtgagcatctcctatatgaatccacttctaaaaaattcttttgatggtcagaatctttcaaatacttaa

SEQ ID NO: 33318 - DNA, 80 bp, synthetic construct; identical to SEQ ID NO: 12215
  source 1..80: mol_type = other DNA

SEQ ID NO: 33319 - DNA, 80 bp, synthetic construct
  source 1..80: mol_type = other DNA
gaatgggactgaagatcatcatctacagtacatcatgtaaggtaaatcaatgtcaacttagatgacccagtgagagcaat

SEQ ID NO: 33320 - DNA, 80 bp, synthetic construct
  source 1..80: mol_type = other DNA
aataaggacacatggagtacaaaatgatgagcatataaagacaggtattacggctagactatacctctaaatcgtaactc

SEQ ID NO: 33321 - DNA, 80 bp, synthetic construct
  source 1..80: mol_type = other DNA
taatgagaatgtctgtttctgcactttatgcccaaattggtatttgagtatatctttacctctccaaaacgagagaggag

SEQ ID NO: 33322 - DNA, 80 bp, synthetic construct; identical to SEQ ID NO: 12216
  source 1..80: mol_type = other DNA

SEQ ID NO: 33323 - DNA, 80 bp, synthetic construct
  source 1..80: mol_type = other DNA
tccacattcgtagatgctctttcttgtttttttccaatttatattgttgacataagtgtctcatcgtccaaatgcttaaa

SEQ ID NO: 33324 - DNA, 80 bp, synthetic construct
  source 1..80: mol_type = other DNA
agacatttttcagtaacctttgccaaaaccgctatatactgtttttctcaacagagctcagagactcattgtaattgtgt

SEQ ID NO: 33325 - DNA, 80 bp, synthetic construct
  source 1..80: mol_type = other DNA
ttttactctaggcaagtgttttcacaggtagtaactggtatgaaaaagatctgctttcactctagaagattatttattca

SEQ ID NO: 33326 - DNA, 80 bp, synthetic construct; identical to SEQ ID NO: 12217
  source 1..80: mol_type = other DNA

SEQ ID NO: 33327 - DNA, 80 bp, synthetic construct
  source 1..80: mol_type = other DNA
cctacaaggcgtgttcagaagtgaaataatttagaatttgaaatcaatagcatttatagacattggaaaatgtcaaatgg

SEQ ID NO: 33328 - DNA, 80 bp, synthetic construct
  source 1..80: mol_type = other DNA
tttatgtatggaaaaatgagaagtctttgtgagagctaaggttttgctaagtgtttccctttaatttcccttctcgtggc

SEQ ID NO: 33329 - DNA, 80 bp, synthetic construct; identical to SEQ ID NO: 12218
  source 1..80: mol_type = other DNA

SEQ ID NO: 33330 - DNA, 80 bp, synthetic construct
  source 1..80: mol_type = other DNA
aataattcttaaaaatataacattcatagctattttaattaattgccatttcctagcaaggaataatagcaataacaata

SEQ ID NO: 33331 - DNA, 80 bp, synthetic construct
  source 1..80: mol_type = other DNA
aaggtctcagattctacccaaatatgttgactcccaaactagggccgtttttcacaaacattttgccttccttcaataag

SEQ ID NO: 33332 - DNA, 80 bp, synthetic construct
  source 1..80: mol_type = other DNA
aacgaaaggaaaaatcctgacattttctagtaaaagctgttctagttacgaaagcatttaactgtcaactctggtctttg

SEQ ID NO: 33333 - DNA, 80 bp, synthetic construct; identical to SEQ ID NO: 12219
  source 1..80: mol_type = other DNA

SEQ ID NO: 33334 - DNA, 80 bp, synthetic construct
  source 1..80: mol_type = other DNA
tcataagccatttatttcaacactccctacttcagaagacttacccaaaacaagaagaaaagatctcacttgctaagtgt

SEQ ID NO: 33335 - DNA, 80 bp, synthetic construct
  source 1..80: mol_type = other DNA
ctgtggttgtggtaaactgttcatcatcaccacctacattggcttcatttagacatcacgtttatcttaagtcattctga

SEQ ID NO: 33336 - DNA, 80 bp, synthetic construct
  source 1..80: mol_type = other DNA
ttcataagcataagtgcatacacttatacagcacttcctatatgacaagctctagtgtaagtgttatacaaatattaagt

SEQ ID NO: 33337 - DNA, 80 bp, synthetic construct
  source 1..80: mol_type = other DNA
gagatctgatggttttataaagaggagttcccctgcacaagttctctctctttgcctgctgccattcatgtaagttgtga

SEQ ID NO: 33338 - DNA, 80 bp, synthetic construct; identical to SEQ ID NO: 12220
  source 1..80: mol_type = other DNA

SEQ ID NO: 33339 - DNA, 80 bp, synthetic construct
  source 1..80: mol_type = other DNA
tgagaagtcaagttcatcatttcattttcgggcagggctagcccaaatgggtgacaatttctctcctttataaacaagat

SEQ ID NO: 33340 - DNA, 80 bp, synthetic construct
  source 1..80: mol_type = other DNA
tttcagttttgcctattttaagactttatgttcctaccaaaagttgaaggcctatggttgaagtgggaacgtctgacagt

SEQ ID NO: 33341 - DNA, 80 bp, synthetic construct; identical to SEQ ID NO: 12221
  source 1..80: mol_type = other DNA

SEQ ID NO: 33342 - DNA, 80 bp, synthetic construct
  source 1..80: mol_type = other DNA
ggaggagtttccctgcataagctctctctttgcctgctgttatccacgttaagatgtgacttgctcctccttgccttcca

SEQ ID NO: 33343 - DNA, 80 bp, synthetic construct
  source 1..80: mol_type = other DNA
catctttaccttacctctcccctctcctcagacaccttagcactaagaacaaaattaagtgtggattgcttaaagtccct

SEQ ID NO: 33344 - DNA, 80 bp, synthetic construct
  source 1..80: mol_type = other DNA
ccaacaagttcctttggaaatcacaaagccaaaaattggtaaaaagaaatcagaagactcagtgcactgtgacatacaaa

SEQ ID NO: 33345 - DNA, 80 bp, synthetic construct
  source 1..80: mol_type = other DNA
tgaaaatatactatatactcacctatttataaaatctctatatttgatatcttgttattagaatccaaactactccaact

SEQ ID NO: 33346 - DNA, 80 bp, synthetic construct; identical to SEQ ID NO: 12222
  source 1..80: mol_type = other DNA

SEQ ID NO: 33347 - DNA, 80 bp, synthetic construct
  source 1..80: mol_type = other DNA
tttattgaatgccagctatgaagcagctattatgtttggagctggtgacataaataggagttagacattatccctgtctt

SEQ ID NO: 33348 - DNA, 80 bp, synthetic construct
  source 1..80: mol_type = other DNA
atgtcttaaaggataactagcattttgaatgcagagaaggaatggagggaatcacagataacggcatgagcaaaaggata

SEQ ID NO: 33349 - DNA, 80 bp, synthetic construct
  source 1..80: mol_type = other DNA
tcagttccatgtcagctctgactgaccccaagaaaacagagccccacttcatgctttgctaaacttctttgtaccccctg

SEQ ID NO: 33350 - DNA, 80 bp, synthetic construct; identical to SEQ ID NO: 12223
  source 1..80: mol_type = other DNA

SEQ ID NO: 33351 - DNA, 80 bp, synthetic construct
  source 1..80: mol_type = other DNA
ttacagaagtgagagggcctctgagaattttgagcaaggtagttaccagataagattgtattttggactttgtatatgat

SEQ ID NO: 33352 - DNA, 80 bp, synthetic construct
  source 1..80: mol_type = other DNA
aaaaccttgtgactaattagaaatgcagagtaaaagggtcaacagtgtcaagaggactcaggttaatgccatttactgtg

SEQ ID NO: 33353 - DNA, 80 bp, synthetic construct
  source 1..80: mol_type = other DNA
ggtttgccatgcatggtatctccagtactgtaaaactgggattctataaatgccttatttataaataggatcctagagct

SEQ ID NO: 33354 - DNA, 80 bp, synthetic construct
  source 1..80: mol_type = other DNA
gatcataaaaagcttggtatacattctcctttcctctcttaacagcaaccacaaactggaatttaccgattaaaaatatt

SEQ ID NO: 33355 - DNA, 80 bp, synthetic construct; identical to SEQ ID NO: 12224
  source 1..80: mol_type = other DNA

SEQ ID NO: 33356 - DNA, 80 bp, synthetic construct
  source 1..80: mol_type = other DNA
aattttcatccttcttctatatctgtacaagtcagactagccagactgaaattggaagatgatatgggcaatggttgaca

SEQ ID NO: 33357 - DNA, 80 bp, synthetic construct
  source 1..80: mol_type = other DNA
tttctttagcagtgattagttccagaaatataaggtatcatcacttctcaaaaagcgctgtaggttataagattgctctt

SEQ ID NO: 33358 - DNA, 80 bp, synthetic construct; identical to SEQ ID NO: 12225
  source 1..80: mol_type = other DNA

SEQ ID NO: 33359 - DNA, 80 bp, synthetic construct
  source 1..80: mol_type = other DNA
aaagacaatgaaagtattctggagaggtgtgatggctgtaggtcatttaatctgaagagtaacaaatttaaataattatt

SEQ ID NO: 33360 - DNA, 80 bp, synthetic construct
  source 1..80: mol_type = other DNA
aaaaaacactcaaatacaaaacaaaaggacacatggtgattttcattttccaaagcaaaacttcactctgtgtcaaataa

SEQ ID NO: 33361 - DNA, 80 bp, synthetic construct
  source 1..80: mol_type = other DNA
tggaggcagtaagcattttaagtacaaaatcagataaatggaccacaggcatatcaaacttcagaaatgttttcaaagaa

SEQ ID NO: 33362 - DNA, 80 bp, synthetic construct; identical to SEQ ID NO: 12226
  source 1..80: mol_type = other DNA

SEQ ID NO: 33363 - DNA, 80 bp, synthetic construct
  source 1..80: mol_type = other DNA
tgtagagatccaactgcacaaatatgagaaaattaagtatcaagtgacacttgctagtgtggatgaagttatgatgactt

SEQ ID NO: 33364 - DNA, 80 bp, synthetic construct
  source 1..80: mol_type = other DNA
ctaacttgccaagcaggaaaattcaaagggaaattgtgccaaatgactattttatttaaagaaaatagtttgagatggca

SEQ ID NO: 33365 - DNA, 80 bp, synthetic construct
  source 1..80: mol_type = other DNA
tcagttcacagtgaagttactgaggtcatcagctggtgagtgtgtttctgacattaaaactccgtaagtttttttcatca

SEQ ID NO: 33366 - DNA, 80 bp, synthetic construct; identical to SEQ ID NO: 12227
  source 1..80: mol_type = other DNA

SEQ ID NO: 33367 - DNA, 80 bp, synthetic construct
  source 1..80: mol_type = other DNA
agataagctccttaagttctttgagtcttggtttcctcatatatgaaatgaggccaatggaagtatctatctcatgtgag

SEQ ID NO: 33368 - DNA, 80 bp, synthetic construct
  source 1..80: mol_type = other DNA
ttttccactaaaacttgaagacaattaattttaactttttaaaattctaaagttttgagagtagtaatgaaaaataatct

SEQ ID NO: 33369 - DNA, 80 bp, synthetic construct
  source 1..80: mol_type = other DNA
tttctgatagagaagataatatcagacttaggtctacagcaggttcattctggatccatgctgggagagaaaacaatgaa

SEQ ID NO: 33370 - DNA, 80 bp, synthetic construct; identical to SEQ ID NO: 12228
  source 1..80: mol_type = other DNA

SEQ ID NO: 33371 - DNA, 80 bp, synthetic construct
  source 1..80: mol_type = other DNA
catactcctatggtaacaagaagagaagaaattgcatagaagaattgtaaatgctattattagagttccttgaaacccag

SEQ ID NO: 33372 - DNA, 80 bp, synthetic construct
  source 1..80: mol_type = other DNA
cacttagaatcttctgctacaaggatgctgtgaggttttgaagcttatatagccattattatttattatttaagggttga

SEQ ID NO: 33373 - DNA, 80 bp, synthetic construct
  source 1..80: mol_type = other DNA
gatatcaattaattggacatctacattctccttttcactgaacctgacaaaacattctatgagattgggtatggtgagat

SEQ ID NO: 33374 - DNA, 80 bp, synthetic construct; identical to SEQ ID NO: 12229
  source 1..80: mol_type = other DNA

SEQ ID NO: 33375 - DNA, 80 bp, synthetic construct
  source 1..80: mol_type = other DNA
agcgatcttcctgcctcaccctctcaaatagctgggattataggcacacgccaccatgcctggctagtatttttttgttt

SEQ ID NO: 33376 - DNA, 80 bp, synthetic construct
  source 1..80: mol_type = other DNA
gaattgaaaattccagtgatttgtcgaaacaataccgtttccattaatcatatttgttttactaagctaagacaaatgca

SEQ ID NO: 33377 - DNA, 80 bp, synthetic construct
  source 1..80: mol_type = other DNA
accacaaggcaaagctaatttatatttaaattgggactcgaacctgggtctgctgactacaacctttttgctgtctttat

SEQ ID NO: 33378 - DNA, 80 bp, synthetic construct; identical to SEQ ID NO: 12230
  source 1..80: mol_type = other DNA

SEQ ID NO: 33379 - DNA, 80 bp, synthetic construct
  source 1..80: mol_type = other DNA
catgaccttttccctcttcttggtgttctaaatccatattattgcatgattggcactgttcatacaagtcttagcccaaa

SEQ ID NO: 33380 - DNA, 80 bp, synthetic construct
  source 1..80: mol_type = other DNA
ttatgtattttttattctctcctccccacagcaatccctgcttcctgtctgctcaatgctctacgctcagaatttagaac

SEQ ID NO: 33381 - DNA, 80 bp, synthetic construct
  source 1..80: mol_type = other DNA
tgtctttatcagtcccacctgtgggagtttgaatgtggtagaatttgtgtcattgtgatgtacaaaaaatcttattatct

SEQ ID NO: 33382 - DNA, 80 bp, synthetic construct
  source 1..80: mol_type = other DNA
agttagaaaattttgatactctctacttagatgactaagtttctaagaaaaccccatcactctattttggtctaaatttg

SEQ ID NO: 33383 - DNA, 80 bp, synthetic construct
  source 1..80: mol_type = other DNA
atttagacaaatagtactacacaataaagttactgctgatcaccaggttttttagctaatagggacatctagaaataaat

SEQ ID NO: 33384 - DNA, 80 bp, synthetic construct; identical to SEQ ID NO: 12231
  source 1..80: mol_type = other DNA

SEQ ID NO: 33385 - DNA, 80 bp, synthetic construct
  source 1..80: mol_type = other DNA
ctaggagtgctatctaatatcaattaaacaaatcattgctgtgtcctgcagttcagggttctgcatctttggtgtcttaa

SEQ ID NO: 33386 - DNA, 80 bp, synthetic construct
  source 1..80: mol_type = other DNA
gcacccattaactcgtcatttacattaagtatttctcctaatgctatccctccccctgccccccacctcatgacaggccc

SEQ ID NO: 33387 - DNA, 80 bp, synthetic construct; identical to SEQ ID NO: 12232
  source 1..80: mol_type = other DNA

SEQ ID NO: 33388 - DNA, 80 bp, synthetic construct
  source 1..80: mol_type = other DNA
acactgtcttccacaatggttgaactagtttacactcccaccaacagtgtaaaagcgtttctatttctccacatcctctc

SEQ ID NO: 33389 - DNA, 80 bp, synthetic construct
  source 1..80: mol_type = other DNA
ctgttcatatcctttgcccactttttgatcaagtggaagaaagggtatcagtgattgaagatcagattcatttcttacag

SEQ ID NO: 33390 - DNA, 80 bp, synthetic construct
  source 1..80: mol_type = other DNA
cctcaagcgcttttataatgggcattaatccattcatgagggtggagctttatggcttatcacctctcaggaatcaccct

SEQ ID NO: 33391 - DNA, 80 bp, synthetic construct; identical to SEQ ID NO: 12233
  source 1..80: mol_type = other DNA

SEQ ID NO: 33392 - DNA, 80 bp, synthetic construct
  source 1..80: mol_type = other DNA
gaagggaacattaaattttaaagctagagaataatatgttttgactctatgtcccacctcctggacacactggggcaggg

SEQ ID NO: 33393 - DNA, 80 bp, synthetic construct
  source 1..80: mol_type = other DNA
atggctctactaagtaatgtcaaagtggggattccctgcagtagtctcactcctgcactctgctgtgcattgccctagta

SEQ ID NO: 33394 - DNA, 80 bp, synthetic construct
  source 1..80: mol_type = other DNA
attcttgaagaattagcactatgtggacactgtgaaggtttgcagcttataccttctggagtgatggatcaaggtgcccc

SEQ ID NO: 33395 - DNA, 80 bp, synthetic construct; identical to SEQ ID NO: 12234
  source 1..80: mol_type = other DNA

SEQ ID NO: 33396 - DNA, 80 bp, synthetic construct
  source 1..80: mol_type = other DNA
tccatctttaaaacatttctctctctcattttactgtaagctgccaccatatagcaccttgaatgctttgttgcttagat

SEQ ID NO: 33397 - DNA, 80 bp, synthetic construct
  source 1..80: mol_type = other DNA
ctcaagtctccaataccacattcgttatttccatctgaaatcttatcagaatgccccttaccatccacatttctacaaca

SEQ ID NO: 33398 - DNA, 80 bp, synthetic construct
  source 1..80: mol_type = other DNA
ttacccagttccaaagtcatttccacattttcagatatttgttatagcagcagtcacacttctcggtaccaatttcctgt

SEQ ID NO: 33399 - DNA, 80 bp, synthetic construct
  source 1..80: mol_type = other DNA
tgctttctcactgcgtcctcactcacatggtagagagagagctctgatatctcttcctcttcttataaagtcaccagccc

SEQ ID NO: 33400 - DNA, 80 bp, synthetic construct; identical to SEQ ID NO: 12235
  source 1..80: mol_type = other DNA

SEQ ID NO: 33401 - DNA, 80 bp, synthetic construct
  source 1..80: mol_type = other DNA
ttccagcagagtggcatatagaaagcactctatttgttaaaggaagagaggaggcaagaaaagtagtaaagaaagcaata

SEQ ID NO: 33402 - DNA, 80 bp, synthetic construct
  source 1..80: mol_type = other DNA
ccaatctgtgttcttgcaatatctcaaccaagtgctgatatttctcatattcaagctattcctttgtgttaaatctagaa

SEQ ID NO: 33403 - DNA, 80 bp, synthetic construct
  source 1..80: mol_type = other DNA
atataaacaattgctacataaggtagagtttgggagaaaaatgtttgtctcaaatgaagaaaggtgctgtgaacactggg

SEQ ID NO: 33404 - DNA, 80 bp, synthetic construct; identical to SEQ ID NO: 12236
  source 1..80: mol_type = other DNA

SEQ ID NO: 33405 - DNA, 80 bp, synthetic construct
  source 1..80: mol_type = other DNA
ttcagctaaagaattcatagagaaggtttgttggcacattgaaggaagctgggatttccccagacaagagataaggcacg

SEQ ID NO: 33406 - DNA, 80 bp, synthetic construct
  source 1..80: mol_type = other DNA
tgtagtgtagagaatggacagaagggagagaaataaaataaaatcaggaagaagttaattgcagtattcccagagataat

SEQ ID NO: 33407 - DNA, 80 bp, synthetic construct
  source 1..80: mol_type = other DNA
atggcaatacttatcaaagcctcacctgtcctcttagaagaggtaatgtgtactggaggaaaaattgtaataaagatcaa

SEQ ID NO: 33408 - DNA, 80 bp, synthetic construct; identical to SEQ ID NO: 12237
  source 1..80: mol_type = other DNA

SEQ ID NO: 33409 - DNA, 80 bp, synthetic construct
  source 1..80: mol_type = other DNA
cttcagttgcccttatatcacagtgttcctttttaagagcaaactgataccgtaagtaattgctagcctctttctgaaaa

SEQ ID NO: 33410 - DNA, 80 bp, synthetic construct
  source 1..80: mol_type = other DNA
acactcagccaagtcctaggaaaataaaactcacagtcttgtttactttttctctactttttctccaacttcctctatat

SEQ ID NO: 33411 - DNA, 80 bp, synthetic construct; identical to SEQ ID NO: 12238
  source 1..80: mol_type = other DNA

SEQ ID NO: 33412 - DNA, 80 bp, synthetic construct
  source 1..80: mol_type = other DNA
tcaatcataaaactttccatggtgctgaacacaattgaactttgaataagaacaagtacgttacacatcttggctgttta

SEQ ID NO: 33413 - DNA, 80 bp, synthetic construct
  source 1..80: mol_type = other DNA
ccctgaactttctattataaggtgtctctgagatcagataagtaggatgtggcctatcactggtctttattttcagttgt

SEQ ID NO: 33414 - DNA, 80 bp, synthetic construct
  source 1..80: mol_type = other DNA
gaatcagaaataagggcattttacgggtgttactataaaattaaagaggagacagaaatgtgggatgtttcctttcatta

SEQ ID NO: 33415 - DNA, 80 bp, synthetic construct
  source 1..80: mol_type = other DNA
aaatatagtttgccatgggcccaacaaggccaagggtgaaacgcaatattttctgatcctaaaatctttgcaaaaaagga

SEQ ID NO: 33416 - DNA, 80 bp, synthetic construct; identical to SEQ ID NO: 12239
  source 1..80: mol_type = other DNA

SEQ ID NO: 33417 - DNA, 80 bp, synthetic construct
  source 1..80: mol_type = other DNA
gttcacacatattaaaatgcaagtgtcttgcttgtctgatatgtcttttgcattatttgaaaccctgaagccccaatatt

SEQ ID NO: 33418 - DNA, 80 bp, synthetic construct
  source 1..80: mol_type = other DNA
gaaagaacaaaactctaaattattatcatcacagcctgtgaattattctttgatgcctattgtgctaaataggagatttt

SEQ ID NO: 33419 - DNA, 80 bp, synthetic construct; identical to SEQ ID NO: 12240
  source 1..80: mol_type = other DNA

SEQ ID NO: 33420 - DNA, 80 bp, synthetic construct
  source 1..80: mol_type = other DNA
tctgcagaacctggaaacaattaaacctcttttctttataaattacccagccttgggtattcctttatagcaaggcgaaa

SEQ ID NO: 33421 - DNA, 80 bp, synthetic construct
  source 1..80: mol_type = other DNA
ttctattacacaggaagttgctccaggttgtcaaaaagtgatcagtgctggttggtaaccattgtatcctagtgtgtggg

SEQ ID NO: 33422 - DNA, 80 bp, synthetic construct
  source 1..80: mol_type = other DNA
atcaggggtaagggcttctaaagtagtttggggagtgtaaggaaaatattggactgagaagctggttctaagggtagaaa

SEQ ID NO: 33423 - DNA, 80 bp, synthetic construct
  source 1..80: mol_type = other DNA
ggacaaaatcatccagagcatggaataccatgactaggtaacttttatcctggaatcatattctttcttcaagttttagt

SEQ ID NO: 33424 - DNA, 80 bp, synthetic construct; identical to SEQ ID NO: 12241
  source 1..80: mol_type = other DNA

SEQ ID NO: 33425 - DNA, 80 bp, synthetic construct
  source 1..80: mol_type = other DNA
aatatatgtcatctatttcctataagaatgcacacaccttaaagggagcaagatttagattctagaagaggtggataata

SEQ ID NO: 33426 - DNA, 80 bp, synthetic construct
  source 1..80: mol_type = other DNA
acatggcttatcatgccttctcctgatcttcttcctctcagcttcttttgctggatcttcttactcttcctgttcataaa

SEQ ID NO: 33427 - DNA, 80 bp, synthetic construct
  source 1..80: mol_type = other DNA
tcagttctttcttctccttgaacttcagggtcaaatatctaactagttaatctatatcttcatttggatgtctgataaga

SEQ ID NO: 33428 - DNA, 80 bp, synthetic construct; identical to SEQ ID NO: 12242
  source 1..80: mol_type = other DNA

SEQ ID NO: 33429 - DNA, 80 bp, synthetic construct
  source 1..80: mol_type = other DNA
caggcacttctcaaaagaagacatacaagtgggcaacaatgaaaaaatgaaaaaatgttcaacatcattaatcaccagag

SEQ ID NO: 33430 - DNA, 80 bp, synthetic construct
  source 1..80: mol_type = other DNA
acaacagatactggtgaggttgtggagaaaagggaatgcttatacactgttggtgagaatgtaaattagttcagccactg

SEQ ID NO: 33431 - DNA, 80 bp, synthetic construct
  source 1..80: mol_type = other DNA
cacggaaacaacccaggtgcccatcaatggtgaactgaataaagaaaatctggtacatacacaccatggaatactatgca

SEQ ID NO: 33432 - DNA, 80 bp, synthetic construct; identical to SEQ ID NO: 12243
  source 1..80: mol_type = other DNA

SEQ ID NO: 33433 - DNA, 80 bp, synthetic construct
  source 1..80: mol_type = other DNA
aaacaaaatgcccctcaaatcagaaatgaactattgatcctcctcccttactcttttgccataaagctgttctccagagt

SEQ ID NO: 33434 - DNA, 80 bp, synthetic construct
  source 1..80: mol_type = other DNA
ctaaaacatattctgaacacaacattctccctcctccaattcctccattgctactacactggtctaaaccacaactgtct

SEQ ID NO: 33435 - DNA, 80 bp, synthetic construct
  source 1..80: mol_type = other DNA
atataactaccttaacaattagaataaatcccaaaatccatgcagggcctacatgatctctggttagtcctccaatctca

SEQ ID NO: 33436 - DNA, 80 bp, synthetic construct; identical to SEQ ID NO: 12244
  source 1..80: mol_type = other DNA

SEQ ID NO: 33437 - DNA, 80 bp, synthetic construct
  source 1..80: mol_type = other DNA
ccagaaatgttagtgaaagtttgcctactcaggggcttcatctcataagaaagtaccagaaaagccaaaagtaatgcgcc

SEQ ID NO: 33438 - DNA, 80 bp, synthetic construct
  source 1..80: mol_type = other DNA
ggcacatgactaagctgtgatagttcaatgtttcttaatgttcttaactcaatgcctagatttaaaaagtcacagatcag

SEQ ID NO: 33439 - DNA, 80 bp, synthetic construct; identical to SEQ ID NO: 12245
  source 1..80: mol_type = other DNA

SEQ ID NO: 33440 - DNA, 80 bp, synthetic construct
  source 1..80: mol_type = other DNA
caatggtatttcgtaaaaattttttttttcccacagctctttgcagacactaaacttgagcttctgaatggcagaaattg

SEQ ID NO: 33441 - DNA, 80 bp, synthetic construct
  source 1..80: mol_type = other DNA
cattagattctgatattacaatttccaagggattgtttttgaaattacattaagcataccccatactttgtttaaacatg

SEQ ID NO: 33442 - DNA, 80 bp, synthetic construct
  source 1..80: mol_type = other DNA
agtgggtgaaatgtgaagactgtctgaagatggtatatagagccaattggaccccagtttccatcacaaccctgtgcaat

SEQ ID NO: 33443 - DNA, 80 bp, synthetic construct
  source 1..80: mol_type = other DNA
gcctcagcctccgagtagctgggacaacaggtgtgcatgaccatgcctggctaatttttgtatttttagtagagatgggg

SEQ ID NO: 33444 - DNA, 80 bp, synthetic construct; identical to SEQ ID NO: 12246
  source 1..80: mol_type = other DNA

SEQ ID NO: 33445 - DNA, 80 bp, synthetic construct
  source 1..80: mol_type = other DNA
agagcttaccactcaatctcctctgcaataaagctccctagctgttaaatttcactcacatactcaaggcttccaatcaa

SEQ ID NO: 33446 - DNA, 80 bp, synthetic construct
  source 1..80: mol_type = other DNA
gaagggaaactgtaagaaaaaaaccaaacatagctaacatcttcagagacagtacagaatgaactgcatccaaaagataa

SEQ ID NO: 33447 - DNA, 80 bp, synthetic construct
  source 1..80: mol_type = other DNA
gaatactattcagccataaaacagaatgaaatcctttcatttgtggcaacatggatgaacctgcagggtattacgttaag

SEQ ID NO: 33448 - DNA, 80 bp, synthetic construct; identical to SEQ ID NO: 12247
  source 1..80: mol_type = other DNA

SEQ ID NO: 33449 - DNA, 80 bp, synthetic construct
  source 1..80: mol_type = other DNA
atcactacacaccccataaaaatacaattattgttcgattataaatacaacattattttaaaaactatcaaaagcagaaa

SEQ ID NO: 33450 - DNA, 80 bp, synthetic construct
  source 1..80: mol_type = other DNA
gaggggagaatgactaaaagaaagaatggagaaaatgggaagaaaaaatgataaacagataacaccagagaatttccaga

SEQ ID NO: 33451 - DNA, 80 bp, synthetic construct
  source 1..80: mol_type = other DNA
gatgtgcatatatataatttaaatcaaagagcagataacagatgagatcagccctctctataactgatagaagaaactag

SEQ ID NO: 33452 - DNA, 80 bp, synthetic construct; identical to SEQ ID NO: 12248
  source 1..80: mol_type = other DNA

SEQ ID NO: 33453 - DNA, 80 bp, synthetic construct
  source 1..80: mol_type = other DNA
atttgatactcaaaaatagctcaccattgcttcactttgcatgtcttcgcaaactgagttttaagagtttttgcacataa

SEQ ID NO: 33454 - DNA, 80 bp, synthetic construct
  source 1..80: mol_type = other DNA
tactgtgttgactacaaagcttttgttgaggatacagctattttatgacatcatactctctgagtgagaagtcatagacc

SEQ ID NO: 33455 - DNA, 80 bp, synthetic construct; identical to SEQ ID NO: 12249
  source 1..80: mol_type = other DNA

SEQ ID NO: 33456 - DNA, 80 bp, synthetic construct
  source 1..80: mol_type = other DNA
agagaattttgtcacctagttaatcatcataggtagtttctatcctcaccctcctcctaacctcctctctcaaataggcc

SEQ ID NO: 33457 - DNA, 80 bp, synthetic construct
  source 1..80: mol_type = other DNA
catatgctgtgtagtattccatggtgtttatataccgcattttctttattcagtccactgctgatgggcatctaggctgg

SEQ ID NO: 33458 - DNA, 80 bp, synthetic construct
  source 1..80: mol_type = other DNA
tttgatacatagtatgaagaaaagttaatacttagacttttttctaaataaatagctaatttatccattgattatctgtt

SEQ ID NO: 33459 - DNA, 80 bp, synthetic construct; identical to SEQ ID NO: 12250
  source 1..80: mol_type = other DNA

SEQ ID NO: 33460 - DNA, 80 bp, synthetic construct
  source 1..80: mol_type = other DNA
ctcaatttgaaataaacgctgtatttactatgagtcttctactataagaacatattgtgttttgtcatatattcaaagct

SEQ ID NO: 33461 - DNA, 80 bp, synthetic construct
  source 1..80: mol_type = other DNA
agccttggaatcagtcagatctgacctcaagtaccaatggacctcaggccttggtattgtttttctcatttataaaatga

SEQ ID NO: 33462 - DNA, 80 bp, synthetic construct
  source 1..80: mol_type = other DNA
ttctttgtgaaagctgcctaactcagagcctggtacacaaaatctccttaataaaaggcagccgatataataccttaagc

SEQ ID NO: 33463 - DNA, 80 bp, synthetic construct
  source 1..80: mol_type = other DNA
ctttcacaacaatattaaataacaatgttcatggtatatatctttgtcttgacttttattttaatggaactatttttaat

SEQ ID NO: 33464 - DNA, 80 bp, synthetic construct; identical to SEQ ID NO: 12251
  source 1..80: mol_type = other DNA

SEQ ID NO: 33465 - DNA, 80 bp, synthetic construct
  source 1..80: mol_type = other DNA
ctcccccactcccatcctgctacttcatcatgaattcattttgggttgtctcattgtcaccttctctttcataattttga

SEQ ID NO: 33466 - DNA, 80 bp, synthetic construct
  source 1..80: mol_type = other DNA
cacgtattttcctatccattctgtatcttcttgtttcaacccagtgtgaattgccctgctttttctgtctgcttgtttgg

SEQ ID NO: 33467 - DNA, 80 bp, synthetic construct
  source 1..80: mol_type = other DNA
gttttaacttttcctccttgccttgacctctaacactctgtatagaagggatatatgtaaactacaaaattcacagtaaa

SEQ ID NO: 33468 - DNA, 80 bp, synthetic construct; identical to SEQ ID NO: 12252
  source 1..80: mol_type = other DNA

SEQ ID NO: 33469 - DNA, 80 bp, synthetic construct
  source 1..80: mol_type = other DNA
agtttaaatccatatgtgaagttcactaaatggaatatttgtgaaaatttcttggccattctgacaattggctgaaagtc

SEQ ID NO: 33470 - DNA, 80 bp, synthetic construct
  source 1..80: mol_type = other DNA
atgtcttcatatattttagtgagacttttggagagtccacccgagtgtccaatcacaaacctaaattccttttaactgga

SEQ ID NO: 33471 - DNA, 80 bp, synthetic construct; identical to SEQ ID NO: 12256
  source 1..80: mol_type = other DNA

SEQ ID NO: 33472 - DNA, 80 bp, synthetic construct
  source 1..80: mol_type = other DNA
caatcatgtcagaacgggaagcaaacatgtccttcttcacgtgttggcagcaaggagaagcgcagagtgaagtgggggaa

SEQ ID NO: 33473 - DNA, 80 bp, synthetic construct
  source 1..80: mol_type = other DNA
acatggccaaaccatatcacaagcctatataaaaagggtgaaactaaagaaaggtctttgagagtgatttcaaataatgt

SEQ ID NO: 33474 - DNA, 80 bp, synthetic construct
  source 1..80: mol_type = other DNA
ataagcttgctattaaaacaagggtttggggatctgggaacactagggtaaaaagatatttcaacaacacaaggcattgt

SEQ ID NO: 33475 - DNA, 80 bp, synthetic construct; identical to SEQ ID NO: 12257
  source 1..80: mol_type = other DNA

SEQ ID NO: 33476 - DNA, 80 bp, synthetic construct
  source 1..80: mol_type = other DNA
tcctacaatatgttaagacattacaaaagcttaatggaataaattaatacagaatgagcaatggagaaggggcagctgaa

SEQ ID NO: 33477 - DNA, 80 bp, synthetic construct
  source 1..80: mol_type = other DNA
aaaaagcaggcccctaattgtgcccacctgattggtttgttgtactgattaaatagcataacatgtgaaaagctcccagc

SEQ ID NO: 33478 - DNA, 80 bp, synthetic construct
  source 1..80: mol_type = other DNA
gggctgaggcagatggatcacctgaggtcaggagtttgagaccagactggccaacatggcaaaaccctatctctactaaa

SEQ ID NO: 33479 - DNA, 80 bp, synthetic construct
  source 1..80: mol_type = other DNA
gtcacaaacaaaaaaaaccagtccaatcactaaatgctcctgcttgtatgcaactgaatattaagaataaaatggggttt

SEQ ID NO: 33480 - DNA, 80 bp, synthetic construct; identical to SEQ ID NO: 12258
  source 1..80: mol_type = other DNA

SEQ ID NO: 33481 - DNA, 80 bp, synthetic construct
  source 1..80: mol_type = other DNA
gaaagagtgtgagctcctttttcacttcagaaaggacttagtataggttttttaaatctcaatttcttccctacctcacc

SEQ ID NO: 33482 - DNA, 80 bp, synthetic construct
  source 1..80: mol_type = other DNA
aacacaggtatttgtaacttactcaggattacaaagaagaaattaagaaggacatccaaagttgctcttggcatcacagt

SEQ ID NO: 33483 - DNA, 80 bp, synthetic construct
  source 1..80: mol_type = other DNA
tccctaatttacctatctgactcaattttccaagatagagactgagtgaaacaggtaatatcggcccataattttaacaa

SEQ ID NO: 33484 - DNA, 80 bp, synthetic construct; identical to SEQ ID NO: 12259
  source 1..80: mol_type = other DNA

SEQ ID NO: 33485 - DNA, 80 bp, synthetic construct
  source 1..80: mol_type = other DNA
ttgaatagccagtgctgctgaggaatgcagaaatgttgatcaattttctagcaatacaagtctgtcaacataaatttcca

SEQ ID NO: 33486 - DNA, 80 bp, synthetic construct
  source 1..80: mol_type = other DNA
acctcagcctcaggagtagctgggactacaggcgcatgtcaccatgccaggctaagttttgtgtttttggtagagacagg

SEQ ID NO: 33487 - DNA, 80 bp, synthetic construct
  source 1..80: mol_type = other DNA
atattaaaaggaaaaccaaggtattgcttagttgtcataaagttgtgtgaagattaagtgaaatatgttagtggttttct

SEQ ID NO: 33488 - DNA, 80 bp, synthetic construct; identical to SEQ ID NO: 12260
  source 1..80: mol_type = other DNA

SEQ ID NO: 33489 - DNA, 80 bp, synthetic construct
  source 1..80: mol_type = other DNA
agaaagagcaagtcatcaagttgcttaatcacttttggtgaagatcgctaactaattttaggcttacaatggagaaggtg

SEQ ID NO: 33490 - DNA, 80 bp, synthetic construct
  source 1..80: mol_type = other DNA
aaaagccatatgtttctcattaataaatgaatcttcaataaaattcacttttattttgaataattgtcaatatttatgat

SEQ ID NO: 33491 - DNA, 80 bp, synthetic construct
  source 1..80: mol_type = other DNA
tcaaattttaaaaaaaacataaaaataggataaaatttgatggagaaattgttttaaaatatgagtttaaggaggaaaaa

SEQ ID NO: 33492 - DNA, 80 bp, synthetic construct; identical to SEQ ID NO: 12261
  source 1..80: mol_type = other DNA

SEQ ID NO: 33493 - DNA, 80 bp, synthetic construct
  source 1..80: mol_type = other DNA
agctggcctgaccaaattcctttctcttctctattctgataacaactcttatcatcactcctgtataaccctggcagtct

SEQ ID NO: 33494 - DNA, 80 bp, synthetic construct
  source 1..80: mol_type = other DNA
agcagcttccaggattgatgaataatatcatgaacagtctataaagatgactttggaagagctcagtgcatagtgtaaca

SEQ ID NO: 33495 - DNA, 80 bp, synthetic construct
  source 1..80: mol_type = other DNA
tttaagggtttgagaacataactaggtaaatttgcatgtaagcactgtcctagaagagagctgttatttctcaatatgct

SEQ ID NO: 33496 - DNA, 80 bp, synthetic construct
  source 1..80: mol_type = other DNA
gtttccactcaacatttaatcttaaaagagtgaatgttattccctactctgagacctcaaagactgtgttccactttttc

SEQ ID NO: 33497 - DNA, 80 bp, synthetic construct; identical to SEQ ID NO: 12262
  source 1..80: mol_type = other DNA

SEQ ID NO: 33498 - DNA, 80 bp, synthetic construct
  source 1..80: mol_type = other DNA
accactgatctactggaatctcacctcaccaagaggatgttgatatgcaaaaattggctacagtttacaagttaaataaa

SEQ ID NO: 33499 - DNA, 80 bp, synthetic construct
  source 1..80: mol_type = other DNA
caggtttcaagatcttcaactacggagaggcaatgacattttgatagtcctctagatttaaggaataaatatgctggctg

SEQ ID NO: 33500 - DNA, 80 bp, synthetic construct
  source 1..80: mol_type = other DNA
attgatagcctaatccaatgactgtattacagctgcctcaactaggactcttttccttatcattagcagttagcctatgg

SEQ ID NO: 33501 - DNA, 80 bp, synthetic construct; identical to SEQ ID NO: 12263
  source 1..80: mol_type = other DNA

SEQ ID NO: 33502 - DNA, 80 bp, synthetic construct
  source 1..80: mol_type = other DNA
aaatttaataattcattaccactgctgcaaaggtaagttttcttaatatgcttgtcagagttctttggtttacaaagtct

SEQ ID NO: 33503 - DNA, 80 bp, synthetic construct
  source 1..80: mol_type = other DNA
cctaaggaaaggatgtagaccttgatctatgctttaaacctttgcccttgctccagtctgtccatgagctgtaagcatct

SEQ ID NO: 33504 - DNA, 80 bp, synthetic construct; identical to SEQ ID NO: 12264
  source 1..80: mol_type = other DNA

SEQ ID NO: 33505 - DNA, 80 bp, synthetic construct
  source 1..80: mol_type = other DNA
gctaaacagtgagatactgaggctctgagaaaggcaacataatgaaagaggggattctttgtcaatctgtacatgaatat

SEQ ID NO: 33506 - DNA, 80 bp, synthetic construct
  source 1..80: mol_type = other DNA
tttaatagtttgatcagttaaacttgtaataagctaagaatgtttttacataggtgaataacaggccagattttttgcat

SEQ ID NO: 33507 - DNA, 80 bp, synthetic construct
  source 1..80: mol_type = other DNA
aggttattttagatcttcaatgttaaagcctaagctcttatcgatcaagatgattacaatagatagcttaaatttgatga

SEQ ID NO: 33508 - DNA, 80 bp, synthetic construct
  source 1..80: mol_type = other DNA
ttatgatggaattgtaatgtgtggtgtaagaacttaaagcaatcctgccaaaatcttcagttgctggcatgcgtgaaaat

SEQ ID NO: 33509 - DNA, 80 bp, synthetic construct; identical to SEQ ID NO: 12265
  source 1..80: mol_type = other DNA

SEQ ID NO: 33510 - DNA, 80 bp, synthetic construct
  source 1..80: mol_type = other DNA
ttgtactcacttctggccctacactgacgcagatctacaaattactagctaaatttctaacttgtaccttcttttattag

SEQ ID NO: 33511 - DNA, 80 bp, synthetic construct
  source 1..80: mol_type = other DNA
tacacagtcatttactggattctgtaataacctctatgagaggagtaactttgagctgaaacagaaaatcttaaaagcca

SEQ ID NO: 33512 - DNA, 80 bp, synthetic construct
  source 1..80: mol_type = other DNA
aaaatagaacaaatttggcaaataaaataatttaaaataataagtttttcaagcttgtgggaagtaaattatattgagcc

SEQ ID NO: 33513 - DNA, 80 bp, synthetic construct; identical to SEQ ID NO: 12266
  source 1..80: mol_type = other DNA

SEQ ID NO: 33514 - DNA, 80 bp, synthetic construct
  source 1..80: mol_type = other DNA
agctggataacaccatttatataggtgatagtaatcactgatttgggggctatcttaagatgccctcattatttgggaat

SEQ ID NO: 33515 - DNA, 80 bp, synthetic construct
  source 1..80: mol_type = other DNA
cctctctccaaacccaataaactattcagctgtgtgatgatacatgaattaactgctgtttgatgcaacagaagttttct

SEQ ID NO: 33516 - DNA, 80 bp, synthetic construct
  source 1..80: mol_type = other DNA
ggataccaaacaagatttccttttatactgttctcactatgaaatcatctggtatataattcaactttttaatggagcaa

SEQ ID NO: 33517 - DNA, 80 bp, synthetic construct; identical to SEQ ID NO: 12267
  source 1..80: mol_type = other DNA

SEQ ID NO: 33518 - DNA, 80 bp, synthetic construct
  source 1..80: mol_type = other DNA
tatgcaaagcattctgacatttcttattctatttcattatttaaaatgttgattacagttcactaaacttgattgcatag

SEQ ID NO: 33519 - DNA, 80 bp, synthetic construct
  source 1..80: mol_type = other DNA
tcctgaaatgtgcccagttttctacagcaggtatactactccaggtgcctcactatttccgtatttaaacaaaacataat

SEQ ID NO: 33520 - DNA, 80 bp, synthetic construct
  source 1..80: mol_type = other DNA
tttttaaaaatctgtgattcatgcagcatctctgaaagcagacattgccatgctctgagacaacacttgagcagatatta

SEQ ID NO: 33521 - DNA, 80 bp, synthetic construct
  source 1..80: mol_type = other DNA
taagttttgctataactcatactgaaggtactctgttatagaacttgctctgtcctaaaatatattatcattgcctattt

SEQ ID NO: 33522 - DNA, 80 bp, synthetic construct; identical to SEQ ID NO: 12268
  source 1..80: mol_type = other DNA

SEQ ID NO: 33523 - DNA, 80 bp, synthetic construct
  source 1..80: mol_type = other DNA
gtagttttattagactgagttatagtatgggagaatattcagacattgcagcttaaatgagaaaacatgaatggtgttac

SEQ ID NO: 33524 - DNA, 80 bp, synthetic construct
  source 1..80: mol_type = other DNA
tgactctctttctgtggcacatgctaacgcggtccacgttattctgcattacaataatatttaaggccctgtttgatagc

SEQ ID NO: 33525 - DNA, 80 bp, synthetic construct
  source 1..80: mol_type = other DNA
tcagcatggatagagctttatttgtgtctgtccagcctcttccaaaagcacattttggtctgattcagcaatgcttttct

SEQ ID NO: 33526 - DNA, 80 bp, synthetic construct; identical to SEQ ID NO: 12269
  source 1..80: mol_type = other DNA

SEQ ID NO: 33527 - DNA, 80 bp, synthetic construct
  source 1..80: mol_type = other DNA
ttttctctcagagggccctcatattaacccttactagtaagtggcaaaagaactgagagacgatgagaaattcttaggaa

SEQ ID NO: 33528 - DNA, 80 bp, synthetic construct
  source 1..80: mol_type = other DNA
cagctatgagttataagaatttgggatcataaagggcacaaaactcttgcaacatgaccttctgatttttcagcaacctc

SEQ ID NO: 33529 - DNA, 80 bp, synthetic construct
  source 1..80: mol_type = other DNA
gcaagacacatcaacattttcatgcagctcttataagacacgatagttaaaacccattcaaaccctcacatcccagaaaa

SEQ ID NO: 33530 - DNA, 80 bp, synthetic construct; identical to SEQ ID NO: 12270
  source 1..80: mol_type = other DNA

SEQ ID NO: 33531 - DNA, 80 bp, synthetic construct
  source 1..80: mol_type = other DNA
acattatgaggtcatttattttggacgggtttgctgtgactgtgttttttgttcttataatgtgtgaaataagtgtttat

SEQ ID NO: 33532 - DNA, 80 bp, synthetic construct
  source 1..80: mol_type = other DNA
catacttgagtatggctacataatgtgggccaatatttacaatagcgggcaactgattcaagtcaagttcttaccttcct

SEQ ID NO: 33533 - DNA, 80 bp, synthetic construct; identical to SEQ ID NO: 12271
  source 1..80: mol_type = other DNA

SEQ ID NO: 33534 - DNA, 80 bp, synthetic construct
  source 1..80: mol_type = other DNA
aataaaatttcaaagaacaaaatggaagacagtgtttcccactttcagttaaatattatcaggaatgaaacacaaacttt

SEQ ID NO: 33535 - DNA, 80 bp, synthetic construct
  source 1..80: mol_type = other DNA
tgacttcatcatcaatctacatgtgatatatagtatatgcaaatatggaataattcagccttgtattatacatgagctga

SEQ ID NO: 33536 - DNA, 80 bp, synthetic construct
  source 1..80: mol_type = other DNA
tgtgattttccaggctcttattttctcatggggcaagtatcatttagagggcaaacacctatcctctccattgaataact

SEQ ID NO: 33537 - DNA, 80 bp, synthetic construct
  source 1..80: mol_type = other DNA
ctgacaggtactgataatgtgctttgataaattaccttaaagtatgcaatagcaattcattatcgaacttggtaatatta

SEQ ID NO: 33538 - DNA, 80 bp, synthetic construct; identical to SEQ ID NO: 12272
  source 1..80: mol_type = other DNA

SEQ ID NO: 33539 - DNA, 80 bp, synthetic construct
  source 1..80: mol_type = other DNA
aaaaaagtgctatatggaatgctctacagggcatagtgtgcattatgaatagtaaaatgtggagacttagctgtacaaat

SEQ ID NO: 33540 - DNA, 80 bp, synthetic construct
  source 1..80: mol_type = other DNA
atttccatgggacttagcctagaaatgacagtaactctagatgatatgaattgcatgtcctttgtggaagctctctttaa

SEQ ID NO: 33541 - DNA, 80 bp, synthetic construct
  source 1..80: mol_type = other DNA
cccccatgccataataatttactctgaacatctgtcagacatttttcctgattttcactaggtgactgctttaaatgact

SEQ ID NO: 33542 - DNA, 80 bp, synthetic construct; identical to SEQ ID NO: 12273
  source 1..80: mol_type = other DNA

SEQ ID NO: 33543 - DNA, 80 bp, synthetic construct
  source 1..80: mol_type = other DNA
tgaaatgaatctatatacttcagggaattcacgaatagactgtaactatttatattttcctggtttcttcaaaattttga

SEQ ID NO: 33544 - DNA, 80 bp, synthetic construct
  source 1..80: mol_type = other DNA
atcttcaggatctgaaatatacaaaagtactcttatctctcagacaaatcaagagtttaccattaccaatacatacaagg

SEQ ID NO: 33545 - DNA, 80 bp, synthetic construct
  source 1..80: mol_type = other DNA
ctatgtctagatttaagaaaaacccagctatattttatgacaatgtccaaaagcatgaaatgtaggaagactactttaca

SEQ ID NO: 33546 - DNA, 80 bp, synthetic construct; identical to SEQ ID NO: 12274
  source 1..80: mol_type = other DNA

SEQ ID NO: 33547 - DNA, 80 bp, synthetic construct
  source 1..80: mol_type = other DNA
atgagtgacagatctagggagcaaatggtggtcttgaggatactacataaagtgaaggtaccagagcagacttgtgaagt

SEQ ID NO: 33548 - DNA, 80 bp, synthetic construct
  source 1..80: mol_type = other DNA
gaggaatgcagattacttgctgcagtaatgtccattatgcaaaactggttgtttttaaagcttaatttctaatctgggac

SEQ ID NO: 33549 - DNA, 80 bp, synthetic construct
  source 1..80: mol_type = other DNA
ggtttcatgtcctctgcaaaggaataagcactacagaatgagactgagaatttcctgataagctaaattacaagtgaaat

SEQ ID NO: 33550 - DNA, 80 bp, synthetic construct; identical to SEQ ID NO: 12275
  source 1..80: mol_type = other DNA

SEQ ID NO: 33551 - DNA, 80 bp, synthetic construct
  source 1..80: mol_type = other DNA
gtagctgcaacataatgagcaaacgtgatgtattatccttctatgtcaataaaacaggacaggcagtcaactgttccagg

SEQ ID NO: 33552 - DNA, 80 bp, synthetic construct
  source 1..80: mol_type = other DNA
gtccaaccactttggaaattagttgtgcagtttcctaaaaaggtagacatggacttactaattaacccagaaattcaact

SEQ ID NO: 33553 - DNA, 80 bp, synthetic construct
  source 1..80: mol_type = other DNA
aataggcccaaatttgacataatgccaatattcatcaatatgtgagttgaataaacaaaattgctgcatatccacgcaat

SEQ ID NO: 33554 - DNA, 80 bp, synthetic construct; identical to SEQ ID NO: 12276
  source 1..80: mol_type = other DNA

SEQ ID NO: 33555 - DNA, 80 bp, synthetic construct
  source 1..80: mol_type = other DNA
gaaaattaatgagaaaaatgggcaaaactttaacatacttcgttcaacatagcatacttcattggatttcattcaagatg

SEQ ID NO: 33556 - DNA, 80 bp, synthetic construct
  source 1..80: mol_type = other DNA
atgtaaatcagtacaagagtctttgggaaacagtttcacatgatctaggttccactcttacgtatatgtccttttaaaga

SEQ ID NO: 33557 - DNA, 80 bp, synthetic construct
  source 1..80: mol_type = other DNA
atacaatggaataaacacactagagctatatacaatgataaggattaatctcataaggcttagcaaaagaaaccagtctc

SEQ ID NO: 33558 - DNA, 80 bp, synthetic construct; identical to SEQ ID NO: 12277
  source 1..80: mol_type = other DNA

SEQ ID NO: 33559 - DNA, 80 bp, synthetic construct
  source 1..80: mol_type = other DNA
gatcacctatcatgatttgccgaaaatgtaaagactgataatatccctctttgctgaggttgcaaagaaacaggcattct

SEQ ID NO: 33560 - DNA, 80 bp, synthetic construct
  source 1..80: mol_type = other DNA
ctgccattcactacagcattgtttgcagtagtggaaaaaaagaataaatgtcaatatgggaagatttgtgaaaagtacta

SEQ ID NO: 33561 - DNA, 80 bp, synthetic construct
  source 1..80: mol_type = other DNA
tatagaggtctgaaaaacagactatgcatttatgctgtaacctgttagcagtgattacctctgaaacgttccatattttg

SEQ ID NO: 33562 - DNA, 80 bp, synthetic construct; identical to SEQ ID NO: 12278
  source 1..80: mol_type = other DNA

SEQ ID NO: 33563 - DNA, 80 bp, synthetic construct
  source 1..80: mol_type = other DNA
tttcagcttatttcagagcatgtagcgcagaacctgacacatagtaggcattcaacagtattgttgaattgatagagcct

SEQ ID NO: 33564 - DNA, 80 bp, synthetic construct
  source 1..80: mol_type = other DNA
tacagatttagagatatgtaatatgctatccctgttctttaaaaacataaagcaaaatactttacaatctaggggagaca

SEQ ID NO: 33565 - DNA, 80 bp, synthetic construct
  source 1..80: mol_type = other DNA
cccaagcacatagccttctctattctgtttctcatttcaagttttttcttatttttctctttctacctggaatgcccttc

SEQ ID NO: 33566 - DNA, 80 bp, synthetic construct; identical to SEQ ID NO: 12279
  source 1..80: mol_type = other DNA

SEQ ID NO: 33567 - DNA, 80 bp, synthetic construct
  source 1..80: mol_type = other DNA
aatgaagaatttctaattgcataccagctttccatcatgaaccacaaaacatttgcatctcctcttccatggagccaaaa

SEQ ID NO: 33568 - DNA, 80 bp, synthetic construct
  source 1..80: mol_type = other DNA
gaccatgatcctttctgtctgaacctttaatatattgagggcttttccagagtttgtacctctgaccctgaccctgcctc

SEQ ID NO: 33569 - DNA, 80 bp, synthetic construct
  source 1..80: mol_type = other DNA
ctagtgtaccattcctctgacattcttagtgtcaatgctccccattccacttagtcgctaaagctttctttttttttttt

SEQ ID NO: 33570 - DNA, 80 bp, synthetic construct; identical to SEQ ID NO: 12280
  source 1..80: mol_type = other DNA

SEQ ID NO: 33571 - DNA, 80 bp, synthetic construct
  source 1..80: mol_type = other DNA
acagtttcatgtgctattctagacactgagcctctcaggggcactgtagcactgttgctattttaatatgtaaatacctt

SEQ ID NO: 33572 - DNA, 80 bp, synthetic construct
  source 1..80: mol_type = other DNA
ctaagttctgaaaacgtctaagaaaaatacatgcagaagcaggcaactgcaacagacacagacatgaaccactcggatct

SEQ ID NO: 33573 - DNA, 80 bp, synthetic construct; identical to SEQ ID NO: 12281
  source 1..80: mol_type = other DNA

SEQ ID NO: 33574 - DNA, 80 bp, synthetic construct
  source 1..80: mol_type = other DNA
tggaggactcaactgacacaacagttctctacttgtatgaagaattctccctgtaagaggattacgctatattctaggaa

SEQ ID NO: 33575 - DNA, 80 bp, synthetic construct
  source 1..80: mol_type = other DNA
aacgaatctctcaaatttcttctgaattctagttctacccttggcttgacagaacaaggtctcttggaatgtcctgaata

SEQ ID NO: 33576 - DNA, 80 bp, synthetic construct
  source 1..80: mol_type = other DNA
atggtaggagacaatgattgagtgacctctgcaaaaagacaactcagagacatccttaaagagtttggacacttacttga

SEQ ID NO: 33577 - DNA, 80 bp, synthetic construct; identical to SEQ ID NO: 12282
  source 1..80: mol_type = other DNA

SEQ ID NO: 33578 - DNA, 80 bp, synthetic construct
  source 1..80: mol_type = other DNA
acatacctgtaatcccagctactcaggaggctgaggaatgagaatcctttaaacccaggaggtggaggctgcagtgagcc

SEQ ID NO: 33579 - DNA, 80 bp, synthetic construct
  source 1..80: mol_type = other DNA
gttctgaactgtactccattctaatgtctgccttagctttcataatccattctgcttgtttgaagtctagttctcccttt

SEQ ID NO: 33580 - DNA, 80 bp, synthetic construct
  source 1..80: mol_type = other DNA
ttgatccatgacttgtctgtcacttaggggcagccattcctttctgccttataatgtttttctttacctatggtgtatat

SEQ ID NO: 33581 - DNA, 80 bp, synthetic construct; identical to SEQ ID NO: 12283
  source 1..80: mol_type = other DNA

SEQ ID NO: 33582 - DNA, 80 bp, synthetic construct
  source 1..80: mol_type = other DNA
tttatctaccatacaaaaagggtgtcatccatagtttgcttattaatgagggtatgcagcataatttggaagatcttaat

SEQ ID NO: 33583 - DNA, 80 bp, synthetic construct
  source 1..80: mol_type = other DNA
aaaaagacctcagtgggttatgaaatataggcagctgcttgccctactatgtatggattcattttggataagggcaagtg

SEQ ID NO: 33584 - DNA, 80 bp, synthetic construct
  source 1..80: mol_type = other DNA
tagaaaacaaccacaagcataaaacctcagtatttttataattccatattgaagtgaatgattaaccaacacagggagga

SEQ ID NO: 33585 - DNA, 80 bp, synthetic construct; identical to SEQ ID NO: 12284
  source 1..80: mol_type = other DNA

SEQ ID NO: 33586 - DNA, 80 bp, synthetic construct
  source 1..80: mol_type = other DNA
aggaattaggaagggaaaaaaaaatttcttcccactgctgctgtaggagctggaaagaaatatctaggccattttgtttg

SEQ ID NO: 33587 - DNA, 80 bp, synthetic construct
  source 1..80: mol_type = other DNA
ctttggtagaagtctttggtgataatgtgggatagagaaggctttaaacatgaccttttgtaagtgtagtattcacaaat

SEQ ID NO: 33588 - DNA, 80 bp, synthetic construct; identical to SEQ ID NO: 12289
  source 1..80: mol_type = other DNA

SEQ ID NO: 33589 - DNA, 80 bp, synthetic construct
  source 1..80: mol_type = other DNA
gcagctctaaagagcagctcctgttttcttgttgttactttaggaatgggtgtctattgttttaaggattaaaaactctg

SEQ ID NO: 33590 - DNA, 80 bp, synthetic construct
  source 1..80: mol_type = other DNA
ttatatatatatgcatatatatgtgtgtgtgtttatgtataggcatatatatgtgtaaatatatatgtatatatacatat

SEQ ID NO: 33591 - DNA, 80 bp, synthetic construct
  source 1..80: mol_type = other DNA
tacatgtgtatatgtacacgtatgtatacatgtgtatatgtacacgtatgtatacatatgtgtatatgtacacgtatata

SEQ ID NO: 33592 - DNA, 80 bp, synthetic construct
  source 1..80: mol_type = other DNA
atcatatatacatatatgtgtatatatacacgtatatatacatatcatatatacatatatgtgtatatatacacgtatat

SEQ ID NO: 33593 - DNA, 80 bp, synthetic construct; identical to SEQ ID NO: 12290
  source 1..80: mol_type = other DNA

SEQ ID NO: 33594 - DNA, 80 bp, synthetic construct
  source 1..80: mol_type = other DNA
atcccatgatggcagtagtggtggatatcaaccctggtagaggctgtattagctggacaactcttggtgttcattctctg

SEQ ID NO: 33595 - DNA, 80 bp, synthetic construct
  source 1..80: mol_type = other DNA
cactatccagtgtggagtgacattattgcctgggttatggcatcacacttcctgacaagttgctgacctctttttattta

SEQ ID NO: 33596 - DNA, 80 bp, synthetic construct
  source 1..80: mol_type = other DNA
ttctttagaaaggagctattggcctggccgagcaggtccttagtttcatggactatgtggaaattacaagagtaaggcat

SEQ ID NO: 33597 - DNA, 80 bp, synthetic construct
  source 1..80: mol_type = other DNA
cctcatataattcaggagacccttgcagaaagaagtgataaatatcacccagatccaggaaagctttatttgaaatgtat

SEQ ID NO: 33598 - DNA, 80 bp, synthetic construct; identical to SEQ ID NO: 12291
  source 1..80: mol_type = other DNA

SEQ ID NO: 33599 - DNA, 80 bp, synthetic construct
  source 1..80: mol_type = other DNA
gaactttgctggttatgtaattaacacctagaagcagcagcacctaattagatttttacatcatctgggcaaaggcagca

SEQ ID NO: 33600 - DNA, 80 bp, synthetic construct
  source 1..80: mol_type = other DNA
gaatctggaccaatgtccttaaatgagcacttgcaactatcctgcctctaaccatgaaagctttacagtcttcatggttt

SEQ ID NO: 33601 - DNA, 80 bp, synthetic construct; identical to SEQ ID NO: 12292
  source 1..80: mol_type = other DNA

SEQ ID NO: 33602 - DNA, 80 bp, synthetic construct
  source 1..80: mol_type = other DNA
catgttttagaaacataactcttatatatgtctatggggtgagagtataagagtccaagcaggagaccaatcagaaagag

SEQ ID NO: 33603 - DNA, 80 bp, synthetic construct
  source 1..80: mol_type = other DNA
gtaatgtattcaatcaagttaggaaacacaagagaagcaggttttggcaagggctggggaagggtgaatgaatttcagat

SEQ ID NO: 33604 - DNA, 80 bp, synthetic construct
  source 1..80: mol_type = other DNA
tgtgaatggatgagaagatggaaggaaaagggcttaagctttgggatcattaatactaaggtgcagaatccttataatgg

SEQ ID NO: 33605 - DNA, 80 bp, synthetic construct; identical to SEQ ID NO: 12293
  source 1..80: mol_type = other DNA

SEQ ID NO: 33606 - DNA, 80 bp, synthetic construct
  source 1..80: mol_type = other DNA
tagaactaatgacatgatgaaagagatcatctgttatgttacaaggcaataagtgtatgtaaagataaagagattataag

SEQ ID NO: 33607 - DNA, 80 bp, synthetic construct
  source 1..80: mol_type = other DNA
aggcctaaataggacctgaagaagttcccagacaatattaaaactaacatatataccacagttaatgattttccaagtcc

SEQ ID NO: 33608 - DNA, 80 bp, synthetic construct
  source 1..80: mol_type = other DNA
aatgaatatctttcttatcctgctacagattaaaatcatatctacttgtcttaccttgaatgagaaaagaaacaactatt

SEQ ID NO: 33609 - DNA, 80 bp, synthetic construct
  source 1..80: mol_type = other DNA
aaaggtctatttcctttgagtaagaaaattttactcctttattgagtaaatacactgtactcaaaatttaatgcttatca

SEQ ID NO: 33610 - DNA, 80 bp, synthetic construct; identical to SEQ ID NO: 12294
  source 1..80: mol_type = other DNA

SEQ ID NO: 33611 - DNA, 80 bp, synthetic construct
  source 1..80: mol_type = other DNA
cctggcacaagcaggaactttgatgctgtatgttaacacaagggcaactgatgaaggagatataagtgggtatttcagtt

SEQ ID NO: 33612 - DNA, 80 bp, synthetic construct
  source 1..80: mol_type = other DNA
taattcgatttgtccacaatgtataatctgagcctatgttattcataatagaattgcctaaaccttatacaccatagaga

SEQ ID NO: 33613 - DNA, 80 bp, synthetic construct; identical to SEQ ID NO: 12295
  source 1..80: mol_type = other DNA

SEQ ID NO: 33614 - DNA, 80 bp, synthetic construct
  source 1..80: mol_type = other DNA
aggtatccaaaagacacattagttagaaaagataacagaactatatcctactagaaaagggaaaaatggtcagattacat

SEQ ID NO: 33615 - DNA, 80 bp, synthetic construct
  source 1..80: mol_type = other DNA
tatgttgcaatcaattattacagaaaagttgtgaatattcaagttggacttatttgtatcagctctttacaccaaagggc

SEQ ID NO: 33616 - DNA, 80 bp, synthetic construct
  source 1..80: mol_type = other DNA
agatttttggacaatttggtaggatgaacttaagcctaaagcacctattaaacaagaaggaaaagaagaataatagtaaa

SEQ ID NO: 33617 - DNA, 80 bp, synthetic construct; identical to SEQ ID NO: 12296
  source 1..80: mol_type = other DNA

SEQ ID NO: 33618 - DNA, 80 bp, synthetic construct
  source 1..80: mol_type = other DNA
tcgagaccagcctggccaacatggcaaaacccggtatctactaaaaattaaaaaaacaaaattagctgggcatggtggtg

SEQ ID NO: 33619 - DNA, 80 bp, synthetic construct
  source 1..80: mol_type = other DNA
gagaccccatgcatgaatggcacactagataaatgtcttaccctatgtttgaacacagattcacaaaagaatgactatca

SEQ ID NO: 33620 - DNA, 80 bp, synthetic construct
  source 1..80: mol_type = other DNA
gtatttccatctcaaaaaaaattcaagtcctaacttgactacaactttcgttattatgtatatatgtatataatcctaat

SEQ ID NO: 33621 - DNA, 80 bp, synthetic construct
  source 1..80: mol_type = other DNA
aaagcagccctaaaaaattgaaaattgaaaagatgataagttcattctcttttatatcactccttgttgtggttcattgt

SEQ ID NO: 33622 - DNA, 80 bp, synthetic construct; identical to SEQ ID NO: 12297
  source 1..80: mol_type = other DNA

SEQ ID NO: 33623 - DNA, 80 bp, synthetic construct
  source 1..80: mol_type = other DNA
gtaagggtgtggtacactggggatgaattaccttggataaccttttgggaaagtcacagttaactccgtatattctataa

SEQ ID NO: 33624 - DNA, 80 bp, synthetic construct
  source 1..80: mol_type = other DNA
catcatgcaatatcatccacagggacaatcataatattggtacatgaaagacacagtagatatctttgttgactgaatat

SEQ ID NO: 33625 - DNA, 80 bp, synthetic construct
  source 1..80: mol_type = other DNA
tatataacacagtaagaggaaactgagatacaggtgtgagaaagcttctaagagttaggataactcttagccaagtcact

SEQ ID NO: 33626 - DNA, 80 bp, synthetic construct; identical to SEQ ID NO: 12298
  source 1..80: mol_type = other DNA

SEQ ID NO: 33627 - DNA, 80 bp, synthetic construct
  source 1..80: mol_type = other DNA
attgtgtattggtatattttatacgagtccattcaccaatagttgaaactgcaaatgtttgcactcatgttcatatgggt

SEQ ID NO: 33628 - DNA, 80 bp, synthetic construct
  source 1..80: mol_type = other DNA
gtagggcagcttaagaataaagaatagtgtttttgttgttgttcagacatggatacaggataatataaagaatgcttgtg

SEQ ID NO: 33629 - DNA, 80 bp, synthetic construct
  source 1..80: mol_type = other DNA
tgctttatttctctcgtattcaaggtttacatatccaggtcctatgaattccatctgagatgctattagttgatcattgt

SEQ ID NO: 33630 - DNA, 80 bp, synthetic construct; identical to SEQ ID NO: 12299
  source 1..80: mol_type = other DNA

SEQ ID NO: 33631 - DNA, 80 bp, synthetic construct
  source 1..80: mol_type = other DNA
gtaatattaaagtagaactaggaatagcattactataggcaaattattgaactaggaattctgagtttgaaggcttgatg

SEQ ID NO: 33632 - DNA, 80 bp, synthetic construct
  source 1..80: mol_type = other DNA
gtcatgtaatagaaaagatattgcacttttttgattcctgacatagtatgaatagtaatgtaaatcacaaactctggaaa

SEQ ID NO: 33633 - DNA, 80 bp, synthetic construct; identical to SEQ ID NO: 12300
  source 1..80: mol_type = other DNA

SEQ ID NO: 33634 - DNA, 80 bp, synthetic construct
  source 1..80: mol_type = other DNA
ttttttttttttttcagacagagtcttgctctgccaccaggctggagtgcagtgccatgatctgctcactgcaacctccg

SEQ ID NO: 33635 - DNA, 80 bp, synthetic construct
  source 1..80: mol_type = other DNA
caagtggtggtctgtagtcagagctgcttctttataatgatgcacattcggtctattcctgtagtctctgagctagttct

SEQ ID NO: 33636 - DNA, 80 bp, synthetic construct
  source 1..80: mol_type = other DNA
tggagtctcacactgtcgtacaggctggagtgcaatggcaagatctcagctcactgcaatctccgcctcccaggttcaag

SEQ ID NO: 33637 - DNA, 80 bp, synthetic construct; identical to SEQ ID NO: 12301
  source 1..80: mol_type = other DNA

SEQ ID NO: 33638 - DNA, 80 bp, synthetic construct
  source 1..80: mol_type = other DNA
tttcagttacactttactgcattttatgaggaaaattatatattataatgatacttggggatttgagaaggtcttgggac

SEQ ID NO: 33639 - DNA, 80 bp, synthetic construct
  source 1..80: mol_type = other DNA
ttgacagtaaaatgcctaaaaacttaagacttaagatgctagaggaactgcaactgctccagatgtacaagtgctagcat

SEQ ID NO: 33640 - DNA, 80 bp, synthetic construct
  source 1..80: mol_type = other DNA
caggctaggagcaaagacaaagtccgagtaatcaaagtattaatagaaggtggtatagagtagggactgcaacttgcaaa

SEQ ID NO: 33641 - DNA, 80 bp, synthetic construct
  source 1..80: mol_type = other DNA
tcattttggatatcagtgctcagcagaactatttaaatttgtccttggagaacaaatagacttgatgaggcagacattag

SEQ ID NO: 33642 - DNA, 80 bp, synthetic construct; identical to SEQ ID NO: 12302
  source 1..80: mol_type = other DNA

SEQ ID NO: 33643 - DNA, 80 bp, synthetic construct
  source 1..80: mol_type = other DNA
caaactaagctcatcaaattcctggcttagttgttcttcacgctggctatgcatcacaatcatttatggagttaagtaca

SEQ ID NO: 33644 - DNA, 80 bp, synthetic construct
  source 1..80: mol_type = other DNA
ttccaatattcagaaatgattgcaggagaactttgagctcatatcaccttccttagaaattttttaaaacagggtgtgaa

SEQ ID NO: 33645 - DNA, 80 bp, synthetic construct; identical to SEQ ID NO: 12303
  source 1..80: mol_type = other DNA

SEQ ID NO: 33646 - DNA, 80 bp, synthetic construct
  source 1..80: mol_type = other DNA
acctccttctccctttgactctcatgggcattttcctttgcccagtgtttcgtatccttgtccttcgtgtctttctctat

SEQ ID NO: 33647 - DNA, 80 bp, synthetic construct
  source 1..80: mol_type = other DNA
caatgtgacagtgtctccacctcacagaatgactcaataatagtgcataattcaaacaccatggcacaataatagaagag

SEQ ID NO: 33648 - DNA, 80 bp, synthetic construct
  source 1..80: mol_type = other DNA
aagaactaagtctagtaaaaccaccaggcatcaaacctgaggtgtcgatacctactaggttctcaataagtgtttgtaga

SEQ ID NO: 33649 - DNA, 80 bp, synthetic construct
  source 1..80: mol_type = other DNA
tactaaaaatacaaaaaattagcctggcacggtggcgtgtacctgtagtcccagctactcagaaggctgaggcaggagaa

SEQ ID NO: 33650 - DNA, 80 bp, synthetic construct; identical to SEQ ID NO: 12304
  source 1..80: mol_type = other DNA

SEQ ID NO: 33651 - DNA, 80 bp, synthetic construct
  source 1..80: mol_type = other DNA
aggagaaagcacagacagaaagagtttggagagtggaagcaaagaattttctgaatgaccagaaaggaaggaatgatgaa

SEQ ID NO: 33652 - DNA, 80 bp, synthetic construct
  source 1..80: mol_type = other DNA
agtagggaagtttgtctccgaaaggagaagttcttctatctgatactgagcttaaagtacaatgccgagcagaaacaaat

SEQ ID NO: 33653 - DNA, 80 bp, synthetic construct; identical to SEQ ID NO: 12305
  source 1..80: mol_type = other DNA

SEQ ID NO: 33654 - DNA, 80 bp, synthetic construct
  source 1..80: mol_type = other DNA
atgaaagcaatacagatctgagtggaatttttaaaaagctgtatttccagagacactttaagtctggcagaatggcatgg

SEQ ID NO: 33655 - DNA, 80 bp, synthetic construct
  source 1..80: mol_type = other DNA
agaacttgctttatttcatgggaagtgagttgccactaaatctcccaggcagaatgggctctgtacttagtaccattgac

SEQ ID NO: 33656 - DNA, 80 bp, synthetic construct
  source 1..80: mol_type = other DNA
caagacattatggtgtcattattttcacctgccactttaaccccacagctatttttactgagacattgggaaaattagat

SEQ ID NO: 33657 - DNA, 80 bp, synthetic construct
  source 1..80: mol_type = other DNA
actgaagccttgagtttcctggagaagagagcaagtgtgaggattcatttatcttggggaagggagaagaacagaggtcc

SEQ ID NO: 33658 - DNA, 80 bp, synthetic construct; identical to SEQ ID NO: 12306
  source 1..80: mol_type = other DNA

SEQ ID NO: 33659 - DNA, 80 bp, synthetic construct
  source 1..80: mol_type = other DNA
caaaatctacattacaaggaagtcaaagaaaaattgctacctatttcatgtactcttaaacttgtgggagggaggtcaag

SEQ ID NO: 33660 - DNA, 80 bp, synthetic construct
  source 1..80: mol_type = other DNA
aggaggtaaaaaaaaaagagagtagctactgctgagacctgaattaactgtctggatgaccaaaataaagggacaaagaa

SEQ ID NO: 33661 - DNA, 80 bp, synthetic construct; identical to SEQ ID NO: 12307
  source 1..80: mol_type = other DNA

SEQ ID NO: 33662 - DNA, 80 bp, synthetic construct
  source 1..80: mol_type = other DNA
gcgactatgttattaaaagaaaatgactgtcgcccaagaatctttataccagccaatcaatataataatcaaatgttaag

SEQ ID NO: 33663 - DNA, 80 bp, synthetic construct
  source 1..80: mol_type = other DNA
aagcaaatctcttctttacaagaagagcaaagcacaatgcagtgttaatacagtgaataaacagtgttaacttgttttag

SEQ ID NO: 33664 - DNA, 80 bp, synthetic construct
  source 1..80: mol_type = other DNA
aaggtagaaaggagtttaaaagtctctaaaaaggtacagggagtagagattcaggagtaaaatgggcaagtaggctgtct

SEQ ID NO: 33665 - DNA, 80 bp, synthetic construct
  source 1..80: mol_type = other DNA
cacccaacaaagtaaataaacagtaaacacaaaatattataataataagtaaataggtcatttaccactatatatgttaa

SEQ ID NO: 33666 - DNA, 80 bp, synthetic construct; identical to SEQ ID NO: 12308
  source 1..80: mol_type = other DNA

SEQ ID NO: 33667 - DNA, 80 bp, synthetic construct
  source 1..80: mol_type = other DNA
ggaggatcccttcagcccaggaagttgaggctgcagtgagctgtgagcacgccactgcactccagcttgagcaacagagt

SEQ ID NO: 33668 - DNA, 80 bp, synthetic construct
  source 1..80: mol_type = other DNA
aattatgtagcaacatacatagcacatgtatttttctcatatactcatgtgaattacttgacatacagttggccacaaga

SEQ ID NO: 33669 - DNA, 80 bp, synthetic construct
  source 1..80: mol_type = other DNA
tttgcaggaaagtgacagtaaaggctagttaccaagagaaattgaaggaggagtaccatgacattaggtccttgtctctg

SEQ ID NO: 33670 - DNA, 80 bp, synthetic construct
  source 1..80: mol_type = other DNA
ctcactacatatacatgcggacatgtatattgaattcatacaaataccttcaattacatcaagttgaattgcaaagcccc

SEQ ID NO: 33671 - DNA, 80 bp, synthetic construct; identical to SEQ ID NO: 12309
  source 1..80: mol_type = other DNA

SEQ ID NO: 33672 - DNA, 80 bp, synthetic construct
  source 1..80: mol_type = other DNA
ttatcactctgtttttctccttaaggaagattagcacatccttttctactgttagtgttctagtcatgctaacagtagct

SEQ ID NO: 33673 - DNA, 80 bp, synthetic construct
  source 1..80: mol_type = other DNA
ttcaggagaactgcttcactagcatagtagttgttttgttccaggtagctgatctgacgaagtttagaatctcatactct

SEQ ID NO: 33674 - DNA, 80 bp, synthetic construct
  source 1..80: mol_type = other DNA
aattgtaagctgagaaaaaatagtacttttgcttaaggcgacttaaatacatgatcttgtctactttcttccttttaatc

SEQ ID NO: 33675 - DNA, 80 bp, synthetic construct; identical to SEQ ID NO: 12310
  source 1..80: mol_type = other DNA

SEQ ID NO: 33676 - DNA, 80 bp, synthetic construct
  source 1..80: mol_type = other DNA
aaagtcaaaactgagcactgaaagtttagcactgatgaatgttcagaagtctaaaagatacatttgtgttgggagttgaa

SEQ ID NO: 33677 - DNA, 80 bp, synthetic construct
  source 1..80: mol_type = other DNA
ctccccctaccacttaccatcaccaccactttgagaagaacaattcaatttatttttatgatagagcacactttttgatc

SEQ ID NO: 33678 - DNA, 80 bp, synthetic construct; identical to SEQ ID NO: 12311
  source 1..80: mol_type = other DNA

SEQ ID NO: 33679 - DNA, 80 bp, synthetic construct
  source 1..80: mol_type = other DNA
gttgtttatctgaggcacaagtcagtatgagggtctctggtccctaggttgcatgtgtattatcattattttaaaaatat

SEQ ID NO: 33680 - DNA, 80 bp, synthetic construct
  source 1..80: mol_type = other DNA
aactgtaaaaagtggtatgtagcatgattaaacaatatttcaactctttagttcatgcagaggttaccagctagagggta

SEQ ID NO: 33681 - DNA, 80 bp, synthetic construct
  source 1..80: mol_type = other DNA
gctacaaatggctttcttttgtggtcaggtatgaaagaacaaagtccctttactacaataaataggtagaaaatagctag

SEQ ID NO: 33682 - DNA, 80 bp, synthetic construct
  source 1..80: mol_type = other DNA
aaacaagcatcttattttttaaaaaattacactaataattgcaattatattaatacataattattcaatatttacataga

SEQ ID NO: 33683 - DNA, 80 bp, synthetic construct; identical to SEQ ID NO: 12312
  source 1..80: mol_type = other DNA

SEQ ID NO: 33684 - DNA, 80 bp, synthetic construct
  source 1..80: mol_type = other DNA
agttctcctttcccagtaccagaggttctaaacactagtagtgttggtgtctattcttttcattctttaaaccctatgtt

SEQ ID NO: 33685 - DNA, 80 bp, synthetic construct
  source 1..80: mol_type = other DNA
catagagatctatctcactgttttttatagtgacagagtatcccattgtgtacatgccataagttactcaacgttcttta

SEQ ID NO: 33686 - DNA, 80 bp, synthetic construct
  source 1..80: mol_type = other DNA
actaaaagtatatgccatgaaatttacttagatgctgcaaaatgctttcccaaagggtggtactgtttcactttccacta

SEQ ID NO: 33687 - DNA, 80 bp, synthetic construct
  source 1..80: mol_type = other DNA
gaccagctgggttggatatcttttcacgtttaccggccattggtaattttgcttctttaaattgtctatccatttttaaa

SEQ ID NO: 33688 - DNA, 80 bp, synthetic construct; identical to SEQ ID NO: 12313
  source 1..80: mol_type = other DNA

SEQ ID NO: 33689 - DNA, 80 bp, synthetic construct
  source 1..80: mol_type = other DNA
ctcataactcatatcctagactggataacggtgactgtcgggatgcgagaaaatgctttttaattgacaggtagaaaaca

SEQ ID NO: 33690 - DNA, 80 bp, synthetic construct
  source 1..80: mol_type = other DNA
atagcatttgaattcagcaatccagttctgaaatatgtgctcttaatcactatgaaacctgcctaatagaagtacacaaa

SEQ ID NO: 33691 - DNA, 80 bp, synthetic construct
  source 1..80: mol_type = other DNA
tcattcctttgcttttaaaagttttaccatatacatttatatctccaaagaacatataatttagtattaaatgtttttat

SEQ ID NO: 33692 - DNA, 80 bp, synthetic construct; identical to SEQ ID NO: 12314
  source 1..80: mol_type = other DNA

SEQ ID NO: 33693 - DNA, 80 bp, synthetic construct
  source 1..80: mol_type = other DNA
aattttaacaaacttttatgatctctgtattttctgccttgtttaaagaatccttatagattataaggtccataaggcat

SEQ ID NO: 33694 - DNA, 80 bp, synthetic construct
  source 1..80: mol_type = other DNA
caagcttccatatctgtctgggtatctttacgagttctgtgttctgcgagtttgctcaatttatccaactgtgtgtcaaa

SEQ ID NO: 33695 - DNA, 80 bp, synthetic construct
  source 1..80: mol_type = other DNA
attattattattgaatgccttggtgatttggggccttttaaacatccatataaatatataaatcagtggattcttttgga

SEQ ID NO: 33696 - DNA, 80 bp, synthetic construct
  source 1..80: mol_type = other DNA
cccttgttttatttctgattttaaagacatgcttaccacatttcactattaagtttgatgtttgcagcagatattttgca

SEQ ID NO: 33697 - DNA, 80 bp, synthetic construct; identical to SEQ ID NO: 12315
  source 1..80: mol_type = other DNA

SEQ ID NO: 33698 - DNA, 80 bp, synthetic construct
  source 1..80: mol_type = other DNA
ggttgtaccgggctcataaattgagggagtattgtgtttttttattgactgattgttttttcaattgacagacaaaattg

SEQ ID NO: 33699 - DNA, 80 bp, synthetic construct
  source 1..80: mol_type = other DNA
ttttgctatagtctgtaatagcttaaaacctttcctcctgcatttctgactttctaaagcctgtttggaaggccagcttt

SEQ ID NO: 33700 - DNA, 80 bp, synthetic construct; identical to SEQ ID NO: 12316
  source 1..80: mol_type = other DNA

SEQ ID NO: 33701 - DNA, 80 bp, synthetic construct
  source 1..80: mol_type = other DNA
gggattgaatgctgtcgaatcgtaatttgaaataaaaacataagctctttgggaacacttatttaaaattctgcaaaacc

SEQ ID NO: 33702 - DNA, 80 bp, synthetic construct
  source 1..80: mol_type = other DNA
caatgaagttcttgcaaaacagaccactttgtctgcacctggcttacatggaaggaagaactattcctttttcctgaatt

SEQ ID NO: 33703 - DNA, 80 bp, synthetic construct
  source 1..80: mol_type = other DNA
agggaaatgaaaaagaatgtgataaagaccttgcccttagaaagtggccactctagtaacagagataagagctgtcatgt

SEQ ID NO: 33704 - DNA, 80 bp, synthetic construct
  source 1..80: mol_type = other DNA
gcttcagttctctgagctgtcatcagaattcatgataaggaaagacacagtgaggaaatcacttattctgacatcaagaa

SEQ ID NO: 33705 - DNA, 80 bp, synthetic construct; identical to SEQ ID NO: 12317
  source 1..80: mol_type = other DNA

SEQ ID NO: 33706 - DNA, 80 bp, synthetic construct
  source 1..80: mol_type = other DNA
tattaattttattattattatattttaagttttagggtacatgtgcacaacgtgcaggtttgttacatatgtatacatgt

SEQ ID NO: 33707 - DNA, 80 bp, synthetic construct
  source 1..80: mol_type = other DNA
gtgtccatgtgttctcattgttcaattcccacctatgagtgagaaaatgcggtgtttggttttttgtccttgtgatagtt

SEQ ID NO: 33708 - DNA, 80 bp, synthetic construct
  source 1..80: mol_type = other DNA
tgtgaatagtactgcaataaatatacgtgtgcatgtgtctttatagcagcatgatttataatcctttgggtatataccca

SEQ ID NO: 33709 - DNA, 80 bp, synthetic construct; identical to SEQ ID NO: 12318
  source 1..80: mol_type = other DNA

SEQ ID NO: 33710 - DNA, 80 bp, synthetic construct
  source 1..80: mol_type = other DNA
ggctgggatatagctggtaaggaggaacatattaaatactcaaaccataggcttttgtccaaaatgtcttatttaaacag

SEQ ID NO: 33711 - DNA, 80 bp, synthetic construct
  source 1..80: mol_type = other DNA
atataagactgaacttttgtaggcagccatcccatttgacaaatccaaggtgacctaaaagtttaggttacaggggtcag

SEQ ID NO: 33712 - DNA, 80 bp, synthetic construct
  source 1..80: mol_type = other DNA
gcagttgtgtttaaatatgacaggttttgtattaaaactggcactagttaagcacagccagaacagagtttcaattatta

SEQ ID NO: 33713 - DNA, 80 bp, synthetic construct; identical to SEQ ID NO: 12319
  source 1..80: mol_type = other DNA

SEQ ID NO: 33714 - DNA, 80 bp, synthetic construct
  source 1..80: mol_type = other DNA
gaactttgtatctcctattcagccactataaataatttccctgtgacatcctctaaggaagcaagtgtccccgttatcac

SEQ ID NO: 33715 - DNA, 80 bp, synthetic construct
  source 1..80: mol_type = other DNA
acagggcaactgacttattcttgcaggtgcttaaaatgaactatatgacaagttggagagtttactctgaaagcccaatt

SEQ ID NO: 33716 - DNA, 80 bp, synthetic construct
  source 1..80: mol_type = other DNA
gcaagaaaagaaaaaaataaatcatggaatgaaagaaacactgaactggaaatttagagatatgaggtcaaggggaaagg

SEQ ID NO: 33717 - DNA, 80 bp, synthetic construct; identical to SEQ ID NO: 12320
  source 1..80: mol_type = other DNA

SEQ ID NO: 33718 - DNA, 80 bp, synthetic construct
  source 1..80: mol_type = other DNA
tactgcaagtattacaaaaatttgtagccataccagaggtggagattactatttttatttcattttgagtgtgacacaaa

SEQ ID NO: 33719 - DNA, 80 bp, synthetic construct
  source 1..80: mol_type = other DNA
aagtggaggaggtcagacaacaagtgccaatgtggcgtgtccacacaaagaggaaagaaaaattgggaatgatggacata

SEQ ID NO: 33720 - DNA, 80 bp, synthetic construct
  source 1..80: mol_type = other DNA
ttcaggctgtactcatcagtgggaaacaatgaaagaatgagcagacagctggatttacaagaaatagtgtcaaaaatttg

SEQ ID NO: 33721 - DNA, 80 bp, synthetic construct; identical to SEQ ID NO: 12321
  source 1..80: mol_type = other DNA

SEQ ID NO: 33722 - DNA, 80 bp, synthetic construct
  source 1..80: mol_type = other DNA
gtgtttggggttcttggaaccaaaatgaatagtacatacagtaaagtgcacctttcgtgaagggaaaatgacaactacat

SEQ ID NO: 33723 - DNA, 80 bp, synthetic construct
  source 1..80: mol_type = other DNA
catgaaggcagaaacaaggtaacaaaaaggacaaaaccagcagtagaaaagaactgtcagacacaaaaccctcaaaacaa

SEQ ID NO: 33724 - DNA, 80 bp, synthetic construct
  source 1..80: mol_type = other DNA
gtgtcacagtctcacagagcagtgcataatttattatggtcactcgctgccaggctgctataaagggcagtagctatatg

SEQ ID NO: 33725 - DNA, 80 bp, synthetic construct; identical to SEQ ID NO: 12322
  source 1..80: mol_type = other DNA

SEQ ID NO: 33726 - DNA, 80 bp, synthetic construct
  source 1..80: mol_type = other DNA
tagaaatgaattttgggtgcagaaaaacttaaaagtctcaaaaaaaatagagaccatacaaatcattttcagcaatcatt

SEQ ID NO: 33727 - DNA, 80 bp, synthetic construct
  source 1..80: mol_type = other DNA
ataaagccagggattacttctttaaaattcttctttgagaggcagtcatgtctgagggacaggagcacaggctcttgagc

SEQ ID NO: 33728 - DNA, 80 bp, synthetic construct
  source 1..80: mol_type = other DNA
tagaattgctgtgagaattaaatgaattagcccttgggtgagagcctgctaaacaaaaagcacggcaggtgtcaggtgtt

SEQ ID NO: 33729 - DNA, 80 bp, synthetic construct; identical to SEQ ID NO: 12323
  source 1..80: mol_type = other DNA

SEQ ID NO: 33730 - DNA, 80 bp, synthetic construct
  source 1..80: mol_type = other DNA
atatgcatatataagtagtatgtaattctggacaaggacaaacatatttaggttggagaaatcagacatgtgaagcttaa

SEQ ID NO: 33731 - DNA, 80 bp, synthetic construct
  source 1..80: mol_type = other DNA
gggtcatactcaagaacaatccttctcaggatcttctcactgccaatgacacgaaaagacattttgtgtcaaaggtgaat

SEQ ID NO: 33732 - DNA, 80 bp, synthetic construct
  source 1..80: mol_type = other DNA
attctatcttccccctcaaagttgattgaggaatgaatgtgatcccatgtgtagaaataggcactttgcctagaatacaa

SEQ ID NO: 33733 - DNA, 80 bp, synthetic construct
  source 1..80: mol_type = other DNA
tattctaaatctatcatctctataggaataataggtatatgtttaatattcaaaatctttcatttttgaaattttatttt

SEQ ID NO: 33734 - DNA, 80 bp, synthetic construct; identical to SEQ ID NO: 12324
  source 1..80: mol_type = other DNA

SEQ ID NO: 33735 - DNA, 80 bp, synthetic construct
  source 1..80: mol_type = other DNA
gtaagagaatatgcaatatttgtctctctaggcctgccttccttcacgtaacatgttctctagttccagtcatattgttc

SEQ ID NO: 33736 - DNA, 80 bp, synthetic construct
  source 1..80: mol_type = other DNA
ttgtgaatagtactgcaaggaacatagataggcatgcagacatttctttgataagctgatttcaaatctattgcataaat

SEQ ID NO: 33737 - DNA, 80 bp, synthetic construct
  source 1..80: mol_type = other DNA
tctttttgataacagccattctgacaggtgtgagtgatatctcactgtggttttaatttgcatttacctagtgatcaccg

SEQ ID NO: 33738 - DNA, 80 bp, synthetic construct; identical to SEQ ID NO: 12325
  source 1..80: mol_type = other DNA

SEQ ID NO: 33739 - DNA, 80 bp, synthetic construct
  source 1..80: mol_type = other DNA
aaaatcattatctagaccaatattgtgcactttttctcctatattttcttctagtagttttacagtttaaggtcttacat

SEQ ID NO: 33740 - DNA, 80 bp, synthetic construct
  source 1..80: mol_type = other DNA
gactatatatgaataggttcactgctgagttttccattctgctccactggtcaattagtctatttttatgccaacatcat

SEQ ID NO: 33741 - DNA, 80 bp, synthetic construct
  source 1..80: mol_type = other DNA
taaattttcataggtattacactgattgtgtagattgctttgggagataatatgaacattttaacaaaccaattcttcta

SEQ ID NO: 33742 - DNA, 80 bp, synthetic construct
  source 1..80: mol_type = other DNA
tatatcaatttcttccatgttacccaaaacacaattacaggaaaaacaggagtgccaagcctgccatgttgtttacagtt

SEQ ID NO: 33743 - DNA, 80 bp, synthetic construct; identical to SEQ ID NO: 12327
  source 1..80: mol_type = other DNA

SEQ ID NO: 33744 - DNA, 80 bp, synthetic construct
  source 1..80: mol_type = other DNA
ttggagagtacatatattcattaagcatactgatacttaaagtgcttttggtgagagaacaaaaacaaagttaggtataa

SEQ ID NO: 33745 - DNA, 80 bp, synthetic construct
  source 1..80: mol_type = other DNA
tctcagagaatatggcttccccaatgatcatgacaaaagagccttcagtcttcagccaatactcctaagttgtaaaatgc

SEQ ID NO: 33746 - DNA, 80 bp, synthetic construct
  source 1..80: mol_type = other DNA
tttctctttgcggtagaagtaccttaattttaaggtctttgtgaaggtggtgcctctgataccttcgtttaatttgtctt

SEQ ID NO: 33747 - DNA, 80 bp, synthetic construct; identical to SEQ ID NO: 12328
  source 1..80: mol_type = other DNA

SEQ ID NO: 33748 - DNA, 80 bp, synthetic construct
  source 1..80: mol_type = other DNA
tcatccttatgctatagtcaacaaatacatagagaattctgctatatttctcaaactcactgtgatgtgaacaaatattt

SEQ ID NO: 33749 - DNA, 80 bp, synthetic construct
  source 1..80: mol_type = other DNA
ccgcaacctccgtctctcaggctcaagtgatcctcccacctcagtaccccaagtagctggaaacacaggtgcacaccacc

SEQ ID NO: 33750 - DNA, 80 bp, synthetic construct
  source 1..80: mol_type = other DNA
gttttttactgccacataatggttgggctacacaaaaacaacaatatttcctgacctagaactgataattcagttagatt

SEQ ID NO: 33751 - DNA, 80 bp, synthetic construct
  source 1..80: mol_type = other DNA
atattggcagttacataaatgtctcttacagatttcctgtagtttatctacttatgtaagcacccatgtctatcaaatgg

SEQ ID NO: 33752 - DNA, 80 bp, synthetic construct; identical to SEQ ID NO: 12329
  source 1..80: mol_type = other DNA

SEQ ID NO: 33753 - DNA, 80 bp, synthetic construct
  source 1..80: mol_type = other DNA
tccggcataactaaacatcacattcaggataattctccacatacatagctcatagaggcttaagtcacaaggaatgagaa

SEQ ID NO: 33754 - DNA, 80 bp, synthetic construct
  source 1..80: mol_type = other DNA
ggcttaagtttgttgtattttacaagtgctggggctcccacattcttttctctaacctttgggatttcttatattcccaa

SEQ ID NO: 33755 - DNA, 80 bp, synthetic construct; identical to SEQ ID NO: 12330
  source 1..80: mol_type = other DNA

SEQ ID NO: 33756 - DNA, 80 bp, synthetic construct
  source 1..80: mol_type = other DNA
cgtctgctttctggcaagggtaagagtaataatctgtggttaatgtctaatgaaaaaatgctggcatgttgaaacagaaa

SEQ ID NO: 33757 - DNA, 80 bp, synthetic construct
  source 1..80: mol_type = other DNA
cttttattcttgcttagctaaatcgtcatgaaagcaggacttcatacatctccctgatgacaaaactaatgtttggactg

SEQ ID NO: 33758 - DNA, 80 bp, synthetic construct
  source 1..80: mol_type = other DNA
ctttgttcaggtccttatttgcctgtaaagctacggcagtcttctctctgattatactatcatttttgaactttctatcc

SEQ ID NO: 33759 - DNA, 80 bp, synthetic construct
  source 1..80: mol_type = other DNA
aattctttgacagtgattcaagctctaggtcactacagattcaaatgtgagtatgcactgggtttctatctttaaaccct

SEQ ID NO: 33760 - DNA, 80 bp, synthetic construct; identical to SEQ ID NO: 12331
  source 1..80: mol_type = other DNA

SEQ ID NO: 33761 - DNA, 80 bp, synthetic construct
  source 1..80: mol_type = other DNA
ggaaaatctttaaggttcttctcagtcacaaaattctgtgctttactatgccccgtcatcaactcaaggaaaagaagtaa

SEQ ID NO: 33762 - DNA, 80 bp, synthetic construct
  source 1..80: mol_type = other DNA
gcaaggcctcttaccacatatctcactccatttatagctcctgggcaactatttttcttttgatagctgatggaaggtct

SEQ ID NO: 33763 - DNA, 80 bp, synthetic construct
  source 1..80: mol_type = other DNA
ttcttagtcaaatgtttgctactattcacatgcaccagaaacagtgtcagaggagcctagttaaggtctaccttgttatt

SEQ ID NO: 33764 - DNA, 80 bp, synthetic construct; identical to SEQ ID NO: 12332
  source 1..80: mol_type = other DNA

SEQ ID NO: 33765 - DNA, 80 bp, synthetic construct
  source 1..80: mol_type = other DNA
tggaattatataaattgcatgtagacaactttaaatttggatgctaatacaccagagaagcaccttgagtcgcaggagac

SEQ ID NO: 33766 - DNA, 80 bp, synthetic construct
  source 1..80: mol_type = other DNA
aactgttctagacaacttccctttattcaggctaatatcaaatcaaagtgcaggtctagaagccactgaccaaatctttg

SEQ ID NO: 33767 - DNA, 80 bp, synthetic construct; identical to SEQ ID NO: 12333
  source 1..80: mol_type = other DNA

SEQ ID NO: 33768 - DNA, 80 bp, synthetic construct
  source 1..80: mol_type = other DNA
ttagttagggtaagcattagtaaaaacaagaatcactaagtaaaatactgccttaatgcaggctaaagaaatgttagtgt

SEQ ID NO: 33769 - DNA, 80 bp, synthetic construct
  source 1..80: mol_type = other DNA
taggattgctgggtcaaatggtatttctggttctagatccttgaggaatcaccacactgtcttccacaatatacaccatg

SEQ ID NO: 33770 - DNA, 80 bp, synthetic construct
  source 1..80: mol_type = other DNA
ggagggaaacatcatcacacaccggggcctgttgggggttggggggtcagagggctgagagcattaggacaaatatctaa

SEQ ID NO: 33771 - DNA, 80 bp, synthetic construct
  source 1..80: mol_type = other DNA
ttctttgtttttgttttaacaatgctctttaaagttagtttaaaaataacagtagcctgctatttttaatgttaacatta

SEQ ID NO: 33772 - DNA, 80 bp, synthetic construct; identical to SEQ ID NO: 12334
  source 1..80: mol_type = other DNA

SEQ ID NO: 33773 - DNA, 80 bp, synthetic construct
  source 1..80: mol_type = other DNA
atataatgttgattacacacaggcaaattacttaggtacaaaggcagcatttttcactcattaaatatttgtgagaaaat

SEQ ID NO: 33774 - DNA, 80 bp, synthetic construct
  source 1..80: mol_type = other DNA
ttagcacatagtaagttttcaacagatgaaatgcaagatcacatagcaatggggaagagggactagaatgactcttcagt

SEQ ID NO: 33775 - DNA, 80 bp, synthetic construct
  source 1..80: mol_type = other DNA
tagaggaaaaggcaaataagcccaagtgtgtttgtgctcacttcagaaagtcagagtcacagaaaagcattttttaaaat

SEQ ID NO: 33776 - DNA, 80 bp, synthetic construct
  source 1..80: mol_type = other DNA
acttggctgatatgaagaattggtttcagttgtagagattataactaataagtgaaatggaaatgttcctaaattttttt

SEQ ID NO: 33777 - DNA, 80 bp, synthetic construct; identical to SEQ ID NO: 12335
  source 1..80: mol_type = other DNA

SEQ ID NO: 33778 - DNA, 80 bp, synthetic construct
  source 1..80: mol_type = other DNA
ctaaaaaatacttcggttctgagattcacagactgtgaaacaagtggagggacaatcttgacttgagatgggaaaagaat

SEQ ID NO: 33779 - DNA, 80 bp, synthetic construct
  source 1..80: mol_type = other DNA
tatcatagttactgatcttctgggcaacctgttgtgagtggaacagagaatatatttgaagaatatttgactagaccctc

SEQ ID NO: 33780 - DNA, 80 bp, synthetic construct; identical to SEQ ID NO: 12336
  source 1..80: mol_type = other DNA

SEQ ID NO: 33781 - DNA, 80 bp, synthetic construct
  source 1..80: mol_type = other DNA
ctccttaacatccaacatttaactagttacataaagatgcagtgttttctatatattaacatattatttcacattttgtt

SEQ ID NO: 33782 - DNA, 80 bp, synthetic construct
  source 1..80: mol_type = other DNA
acaaaatcactacgaacaatgcattttgtacagtatattgctccagggaaactggatcggcatcaggaatgaataaagaa

SEQ ID NO: 33783 - DNA, 80 bp, synthetic construct
  source 1..80: mol_type = other DNA
atttaaacaatgcagacctggaagtctctagccagtcatctgatccatgcatctccttgcctaaggtatagtaactatcc

SEQ ID NO: 33784 - DNA, 80 bp, synthetic construct; identical to SEQ ID NO: 12337
  source 1..80: mol_type = other DNA

SEQ ID NO: 33785 - DNA, 80 bp, synthetic construct
  source 1..80: mol_type = other DNA
tcataaggggccactcactgctctatatgttttatatttgttacctctaattctcataatctttgtattattatgctacc

SEQ ID NO: 33786 - DNA, 80 bp, synthetic construct
  source 1..80: mol_type = other DNA
aactgatgctgggattaggcatacaaacaaaaatgtagtaggctagctagaatgaataagcaaaatgtaaaatgttttta

SEQ ID NO: 33787 - DNA, 80 bp, synthetic construct
  source 1..80: mol_type = other DNA
aagtattcttggaatactttgagaatcttagaattcgtgggaagtcttctgtaaagaacatgaagaataaacaaaacact

SEQ ID NO: 33788 - DNA, 80 bp, synthetic construct
  source 1..80: mol_type = other DNA
gtggtgggcgcctgtagtcccagctactcaggaggctgaggcaggagaatggcgtgaacccaggaggcgcagcttgcagt

SEQ ID NO: 33789 - DNA, 80 bp, synthetic construct; identical to SEQ ID NO: 12338
  source 1..80: mol_type = other DNA

SEQ ID NO: 33790 - DNA, 80 bp, synthetic construct
  source 1..80: mol_type = other DNA
tttagagatggaggaataaactagctgattcaaattttatattcttttacctaacttctataatttttccagtgccgcgg

SEQ ID NO: 33791 - DNA, 80 bp, synthetic construct
  source 1..80: mol_type = other DNA
ttagggcaacagttgtttcttctttctctttccttcctaattgtttaagattttagcctattttttcctgctttgtgaat

SEQ ID NO: 33792 - DNA, 80 bp, synthetic construct
  source 1..80: mol_type = other DNA
ttgctttcctaatccgattttaaaggtcttcatgttatttgagagttgctgaaaaccatgctgctctttccttgatggtt

SEQ ID NO: 33793 - DNA, 80 bp, synthetic construct; identical to SEQ ID NO: 12339
  source 1..80: mol_type = other DNA

SEQ ID NO: 33794 - DNA, 80 bp, synthetic construct
  source 1..80: mol_type = other DNA
cattatgcatatttcatttcaaacttacacctagctaccatattacacaataatagcttacattaattgagcatttacaa

SEQ ID NO: 33795 - DNA, 80 bp, synthetic construct
  source 1..80: mol_type = other DNA
atagtagggtcttgaactcaagcattttgagtccaggacctgcatttatacccactattataatttactacaaatcactt

SEQ ID NO: 33796 - DNA, 80 bp, synthetic construct; identical to SEQ ID NO: 12340
  source 1..80: mol_type = other DNA

SEQ ID NO: 33797 - DNA, 80 bp, synthetic construct
  source 1..80: mol_type = other DNA
ttaactgaaattgggcatgcattctgattcttgttagtcacaagctttttagtttagtcacttacccagagtttattcca

SEQ ID NO: 33798 - DNA, 80 bp, synthetic construct
  source 1..80: mol_type = other DNA
ggtgtggactctgagccaaactataggtttgaatcccacttttactccatcctagctgtgtgaacttgaacacactcttt

SEQ ID NO: 33799 - DNA, 80 bp, synthetic construct
  source 1..80: mol_type = other DNA
tgatatttgcacagaagagttctagggagatgtatttttaaatgtttccaaggctaacacaggaaatgaaaggtgccaaa

SEQ ID NO: 33800 - DNA, 80 bp, synthetic construct; identical to SEQ ID NO: 12341
  source 1..80: mol_type = other DNA

SEQ ID NO: 33801 - DNA, 80 bp, synthetic construct
  source 1..80: mol_type = other DNA
catgcacaaagcatttctcctctcttctccttctttccttacctcttcctttctttcccttaccttcctgatcaatacag

SEQ ID NO: 33802 - DNA, 80 bp, synthetic construct
  source 1..80: mol_type = other DNA
agagctcaagtagggtgagaacagtgtactgtactggggcatgaaaggcacagttattggattccctcttaacttcttct

SEQ ID NO: 33803 - DNA, 80 bp, synthetic construct
  source 1..80: mol_type = other DNA
gtaaagtcagttactatctctcatctccagctgcgtgtctatctcctgtgattccattctgtcctgttactgtccctgtt

SEQ ID NO: 33804 - DNA, 80 bp, synthetic construct; identical to SEQ ID NO: 12342
  source 1..80: mol_type = other DNA

SEQ ID NO: 33805 - DNA, 80 bp, synthetic construct
  source 1..80: mol_type = other DNA
ccattcttcccatttattctgtaatggcttcctttttgtttgtcacatggcaatactcgaactgtatacttcttttttac

SEQ ID NO: 33806 - DNA, 80 bp, synthetic construct
  source 1..80: mol_type = other DNA
aactattagtagtggccaatgacacaactgttaatcaccactttattatatgctacagaggaaaaacacagacagaggta

SEQ ID NO: 33807 - DNA, 80 bp, synthetic construct
  source 1..80: mol_type = other DNA
agtaaatgccctgaagcttaagcttcattaactatctggtcaactggcctctgaagacagggtcttacagaataggacag

SEQ ID NO: 33808 - DNA, 80 bp, synthetic construct; identical to SEQ ID NO: 12343
  source 1..80: mol_type = other DNA

SEQ ID NO: 33809 - DNA, 80 bp, synthetic construct
  source 1..80: mol_type = other DNA
ttttgccactagttaaaggggagccccagtcccttttgctatcttcacatctcctatagtaactgtccgctctcacagac

SEQ ID NO: 33810 - DNA, 80 bp, synthetic construct
  source 1..80: mol_type = other DNA
tccctagcagctgccctgaaggggcaggacatgcaactcaaaagttcagaggaaaggagagccctacggagtgaaatggg

SEQ ID NO: 33811 - DNA, 80 bp, synthetic construct
  source 1..80: mol_type = other DNA
tgtggccagctctggaatgcaccatattgcacttgttttcccttcttcccatctcatttttcttttctcctcagtctttc

SEQ ID NO: 33812 - DNA, 80 bp, synthetic construct; identical to SEQ ID NO: 12344
  source 1..80: mol_type = other DNA

SEQ ID NO: 33813 - DNA, 80 bp, synthetic construct
  source 1..80: mol_type = other DNA
acatgacaaattcaaaccaggttgaagaatatagaacatgaaatgcatgtgcattctaaggctctactgctccatatgtg

SEQ ID NO: 33814 - DNA, 80 bp, synthetic construct
  source 1..80: mol_type = other DNA
atcatcatcacatcacagcattagctaaacttgaaacagttggcatgctagagtgttggtgtggtgtctctgatttctta

SEQ ID NO: 33815 - DNA, 80 bp, synthetic construct
  source 1..80: mol_type = other DNA
actgattctacaaaacgttattgggtgcctaccatatgagctgtgatgaaatcatgctgcttaatgctaccctcctagaa

SEQ ID NO: 33816 - DNA, 80 bp, synthetic construct; identical to SEQ ID NO: 12345
  source 1..80: mol_type = other DNA

SEQ ID NO: 33817 - DNA, 80 bp, synthetic construct
  source 1..80: mol_type = other DNA
tctatttaaaaattaatgtctaatattgaaaaaaataattttgaaaagtattttgttcttacagaaaggcagagaagcaa

SEQ ID NO: 33818 - DNA, 80 bp, synthetic construct
  source 1..80: mol_type = other DNA
atggaagatcacgaggccaattactgatcatgtttaatttcacccctctaagtcccagtagtaatttttcccttctcagt

SEQ ID NO: 33819 - DNA, 80 bp, synthetic construct
  source 1..80: mol_type = other DNA
actgagaggttttcaaggaaccccagctaagactctccagactattttccatgacagcatgatggacataagtgtataat

SEQ ID NO: 33820 - DNA, 80 bp, synthetic construct; identical to SEQ ID NO: 12346
  source 1..80: mol_type = other DNA

SEQ ID NO: 33821 - DNA, 80 bp, synthetic construct
  source 1..80: mol_type = other DNA
cagtttgcttaacatgcaaataaagagtgtatggattcagagaataaaggatttttaggtagtgtgtgaaatccaaggga

SEQ ID NO: 33822 - DNA, 80 bp, synthetic construct
  source 1..80: mol_type = other DNA
taaccattacctcagacttcttggcaagttccgtccagtcatttttattgtaactgcacataatgctagcaatcacaatc

SEQ ID NO: 33823 - DNA, 80 bp, synthetic construct
  source 1..80: mol_type = other DNA
aaaacactggatgacatttggggctttggaattacattaggagattttctcatttactatctgtgaacacttgggcaagt

SEQ ID NO: 33824 - DNA, 80 bp, synthetic construct
  source 1..80: mol_type = other DNA
caatgtaaatacatgcatgtacgtgaagggattgtctaattatacaatgccattaaaatgctgtttgtaattactggtac

SEQ ID NO: 33825 - DNA, 80 bp, synthetic construct; identical to SEQ ID NO: 12347
  source 1..80: mol_type = other DNA

SEQ ID NO: 33826 - DNA, 80 bp, synthetic construct
  source 1..80: mol_type = other DNA
ggtcaggagttcgagaccaacctggccaacattgtaaaaccccatctctactaaaaatacaaaaattagccaggtgtggt

SEQ ID NO: 33827 - DNA, 80 bp, synthetic construct
  source 1..80: mol_type = other DNA
aagaaaagaaaagtaataaaagaaattgctaagacttacatagctcttacagtgtgcttggcactgtttcaatggttttt

SEQ ID NO: 33828 - DNA, 80 bp, synthetic construct; identical to SEQ ID NO: 12348
  source 1..80: mol_type = other DNA

SEQ ID NO: 33829 - DNA, 80 bp, synthetic construct
  source 1..80: mol_type = other DNA
ttcatgaccaacctgggaaacagagcaataccttgcctccacaaaaaaatagaaaaattagctgggtgtggtgccctgcc

SEQ ID NO: 33830 - DNA, 80 bp, synthetic construct
  source 1..80: mol_type = other DNA
acacaaagagtttgtgccaagcttaaagttgcagagtctagtggtaagagtcctctaaaagccactgtgctctcactaca

SEQ ID NO: 33831 - DNA, 80 bp, synthetic construct
  source 1..80: mol_type = other DNA
tttctggatagactataaacaccatgaaagctggagctgctctgcattagtcatcatctatctacagtaactagcatggt

SEQ ID NO: 33832 - DNA, 80 bp, synthetic construct; identical to SEQ ID NO: 12349
  source 1..80: mol_type = other DNA

SEQ ID NO: 33833 - DNA, 80 bp, synthetic construct
  source 1..80: mol_type = other DNA
gaagcaaaagatctgagactctgaatcaaagccactgagaaattcgcagaccattagtcacaaaaaggttgaacaacgtt

SEQ ID NO: 33834 - DNA, 80 bp, synthetic construct
  source 1..80: mol_type = other DNA
aactacagcttttcagaattggggagaaaaatgtaagaatgcttgttccatggccttttccctaggggctaaaaaagtga

SEQ ID NO: 33835 - DNA, 80 bp, synthetic construct
  source 1..80: mol_type = other DNA
tattctccagttagaaaaaagatcagggagaactatcaaagagggcaccagatcttccaggactagacctaatacctctt

SEQ ID NO: 33836 - DNA, 80 bp, synthetic construct
  source 1..80: mol_type = other DNA
aggcttattgctagaacttcaagggcagagacagatacagagatacagactgaagaagaagaaaaaattagctattagat

SEQ ID NO: 33837 - DNA, 80 bp, synthetic construct; identical to SEQ ID NO: 12350
  source 1..80: mol_type = other DNA

SEQ ID NO: 33838 - DNA, 80 bp, synthetic construct
  source 1..80: mol_type = other DNA
tttagcagccttgacagtaggataagatatatcctctcaagtagggactaacactgtttctctcttttacatggcaattt

SEQ ID NO: 33839 - DNA, 80 bp, synthetic construct
  source 1..80: mol_type = other DNA
taaatatcatacagagagttgttcaggacattgcgagaatcatgccactgaatgctggtggggcagcctctgactgggga

SEQ ID NO: 33840 - DNA, 80 bp, synthetic construct
  source 1..80: mol_type = other DNA
cataggaattaggtactctgcttctatcaaaatccctcagtggaactgggaaagttaaaacttttttttttttctccttg

SEQ ID NO: 33841 - DNA, 80 bp, synthetic construct; identical to SEQ ID NO: 12351
  source 1..80: mol_type = other DNA

SEQ ID NO: 33842 - DNA, 80 bp, synthetic construct
  source 1..80: mol_type = other DNA
aggattctaaatatccttatctaaagccagaggatggtttgtgaaaatatgtggtagcattctatttctgagaaataaag

SEQ ID NO: 33843 - DNA, 80 bp, synthetic construct
  source 1..80: mol_type = other DNA
gaagcccttcagtattttgctgtactccgtttttaatcaagcaggagggaacagattttttttcctaagaaaaaaaacca

SEQ ID NO: 33844 - DNA, 80 bp, synthetic construct; identical to SEQ ID NO: 12352
  source 1..80: mol_type = other DNA

SEQ ID NO: 33845 - DNA, 80 bp, synthetic construct
  source 1..80: mol_type = other DNA
gtgtattcaacttctaaccaatatttcttgagctccactatatgccaacagctgttctaactcagaagtgatgaacaaga

SEQ ID NO: 33846 - DNA, 80 bp, synthetic construct
  source 1..80: mol_type = other DNA
agagaatcaccagaatacataaatgcatgtcagacacatggtcagtaaaaagctccctgagttgaaaactgagagatgag

SEQ ID NO: 33847 - DNA, 80 bp, synthetic construct
  source 1..80: mol_type = other DNA
ggcttttgtggttgtagattcatgagaggacaggaatagtatgaaagaaaatgagagaagcaggcaatagccagatctct

SEQ ID NO: 33848 - DNA, 80 bp, synthetic construct; identical to SEQ ID NO: 12353
  source 1..80: mol_type = other DNA

SEQ ID NO: 33849 - DNA, 80 bp, synthetic construct
  source 1..80: mol_type = other DNA
atttagtatgtctagtaagcatagcattagtgaagacatcaattgtgccactggatatatgagtggagaattcactaaag

SEQ ID NO: 33850 - DNA, 80 bp, synthetic construct
  source 1..80: mol_type = other DNA
gaaggaagtgttccaaaaagtaaggaacaatcaaccgtgatgaatgcttctgaaagtctgtgtcaaagagtagaaacgtg

SEQ ID NO: 33851 - DNA, 80 bp, synthetic construct
  source 1..80: mol_type = other DNA
aaaacaggggtttcagggaagtgacaggacaaaagtcaggctagaatgaattgagtgaatagaatatgaagaagtagagg

SEQ ID NO: 33852 - DNA, 80 bp, synthetic construct; identical to SEQ ID NO: 12354
  source 1..80: mol_type = other DNA

SEQ ID NO: 33853 - DNA, 80 bp, synthetic construct
  source 1..80: mol_type = other DNA
actagggtgtaaggtctcttactgagagtaaagagaactagttatgggtttgtgactatgaggaagagataaaatgtgaa

SEQ ID NO: 33854 - DNA, 80 bp, synthetic construct
  source 1..80: mol_type = other DNA
ggaaagcaaatttactagaacatggtatgattatgaggtcaaaaaggcagatatttaatcagtgttgataatatttatga

SEQ ID NO: 33855 - DNA, 80 bp, synthetic construct
  source 1..80: mol_type = other DNA
aaatttgatatgctcctgaaaagccattcttttagtgaattctgcttcgtagaaaatacttttaaattggagtatttaat

SEQ ID NO: 33856 - DNA, 80 bp, synthetic construct; identical to SEQ ID NO: 12355
  source 1..80: mol_type = other DNA

SEQ ID NO: 33857 - DNA, 80 bp, synthetic construct
  source 1..80: mol_type = other DNA
acataaaacttgcaatggcttacaataacatgcaggctgtcttgtcaaattcccattgacttcaggtctatgctttttaa

SEQ ID NO: 33858 - DNA, 80 bp, synthetic construct
  source 1..80: mol_type = other DNA
acgggggtgaacaactataaattacaagcagccaagttaggttttgtcaaacaattcaacaaaatcattcctaagactac

SEQ ID NO: 33859 - DNA, 80 bp, synthetic construct
  source 1..80: mol_type = other DNA
aatattcctgaaatatatacattgactataagacatttaaggtgaaataataagcttttctaattttatttgttcattgc

SEQ ID NO: 33860 - DNA, 80 bp, synthetic construct
  source 1..80: mol_type = other DNA
tctataaaaaatcagagatgttttccaacacaacaggaaacaaccactgtaccactctaggagctacagtaacttgcttt

SEQ ID NO: 33861 - DNA, 80 bp, synthetic construct; identical to SEQ ID NO: 12356
  source 1..80: mol_type = other DNA

SEQ ID NO: 33862 - DNA, 80 bp, synthetic construct
  source 1..80: mol_type = other DNA
tgatgctcccagagtccactcacagtcctcttttagtctcatttcacatgcattcactagacatcatattcgcaatgact

SEQ ID NO: 33863 - DNA, 80 bp, synthetic construct
  source 1..80: mol_type = other DNA
atttatccacactatatatgcttttgtttcactcttttgtcccagatcagaaaactaggaatacctatctttgtcgccca

SEQ ID NO: 33864 - DNA, 80 bp, synthetic construct; identical to SEQ ID NO: 12357
  source 1..80: mol_type = other DNA

SEQ ID NO: 33865 - DNA, 80 bp, synthetic construct
  source 1..80: mol_type = other DNA
aacttttgctttgaccacactgaattgctttgctttctgagtgtaatttgcatgctgaattctcttgatcatatgtctgt

SEQ ID NO: 33866 - DNA, 80 bp, synthetic construct
  source 1..80: mol_type = other DNA
ggaacacttggccaattatgaaatcacccatggacatttagaggtatacctcgaagatattgcaggtttgattccagatg

SEQ ID NO: 33867 - DNA, 80 bp, synthetic construct
  source 1..80: mol_type = other DNA
atcaggctggttattactgaaagctgtagcattttctttctcactcttttttttccttcttttttttttctagatagggt

SEQ ID NO: 33868 - DNA, 80 bp, synthetic construct
  source 1..80: mol_type = other DNA
gtttcatagcattttatccacagtagaacttctttcaatcctcttaaatctctaaaactcagttactgctttatcaaata

SEQ ID NO: 33869 - DNA, 80 bp, synthetic construct; identical to SEQ ID NO: 12358
  source 1..80: mol_type = other DNA

SEQ ID NO: 33870 - DNA, 80 bp, synthetic construct
  source 1..80: mol_type = other DNA
taccagcaataaggctgttttctttcttatcatttgtgtgttcactggagtaacatttctaatttccttcaaaaactctt

SEQ ID NO: 33871 - DNA, 80 bp, synthetic construct
  source 1..80: mol_type = other DNA
attgttgagttgttaaatagcctattttcttttttttttaaattattatactttaagttctagggtacatgttcacaacg

SEQ ID NO: 33872 - DNA, 80 bp, synthetic construct
  source 1..80: mol_type = other DNA
ctcattgttcagttcccacctatgagtgagaacatgcggtgtttggttttctgtccttgggatagtttgctcagaatgat

SEQ ID NO: 33873 - DNA, 80 bp, synthetic construct; identical to SEQ ID NO: 12359
  source 1..80: mol_type = other DNA

SEQ ID NO: 33874 - DNA, 80 bp, synthetic construct
  source 1..80: mol_type = other DNA
tctaactggtgtgagatggtatctcattgtggttttgatttgcatttctctgatggctggtgacgatgagcatcttttca

SEQ ID NO: 33875 - DNA, 80 bp, synthetic construct
  source 1..80: mol_type = other DNA
tttctcccattctgtaggttgcctgttcactctgacggtagtttcttttgctgtgcagaagctctttagtttaattagat

SEQ ID NO: 33876 - DNA, 80 bp, synthetic construct; identical to SEQ ID NO: 12360
  source 1..80: mol_type = other DNA

SEQ ID NO: 33877 - DNA, 80 bp, synthetic construct
  source 1..80: mol_type = other DNA
tgtctgtattggaaattgatttcaaaatccaaggaggtagagtactccaggtagagtgagcagcaagatcaaaagcaaag

SEQ ID NO: 33878 - DNA, 80 bp, synthetic construct
  source 1..80: mol_type = other DNA
ctaagcatttggatttgaattttcgatcattttctctagtaaattcgtgcttctcatgtagacattgccttctgggatgc

SEQ ID NO: 33879 - DNA, 80 bp, synthetic construct
  source 1..80: mol_type = other DNA
gagacagaataaggacacatagatggtaaaggtaaggggttctagatccttttataatttataaagtacattttatatca

SEQ ID NO: 33880 - DNA, 80 bp, synthetic construct; identical to SEQ ID NO: 12361
  source 1..80: mol_type = other DNA

SEQ ID NO: 33881 - DNA, 80 bp, synthetic construct
  source 1..80: mol_type = other DNA
gtgcgctgattttgtgacttgttttaatcagtagaacatggtagaggtgatgatgtaccagagttaaaccaaggcttgaa

SEQ ID NO: 33882 - DNA, 80 bp, synthetic construct
  source 1..80: mol_type = other DNA
gatggcataagaccaagtgaggccagaagaaccatgcagcatagcccagttaagcaaattgctaacatcctgaatcaaga

SEQ ID NO: 33883 - DNA, 80 bp, synthetic construct
  source 1..80: mol_type = other DNA
tttacagacaggaaaaaaaaaacttcaagaagttaaataactactcacagttgcatggctaataagagtagatacaaagc

SEQ ID NO: 33884 - DNA, 80 bp, synthetic construct; identical to SEQ ID NO: 12362
  source 1..80: mol_type = other DNA

SEQ ID NO: 33885 - DNA, 80 bp, synthetic construct
  source 1..80: mol_type = other DNA
tgaacctcttatatatactgcctaccgcatgccacatgtacttttagatgtccattcttttcctcatattggtccttctt

SEQ ID NO: 33886 - DNA, 80 bp, synthetic construct
  source 1..80: mol_type = other DNA
ttggactgtgtcagatagatgtttatttatatacttctcttctcttgtcccacttctcttacctcactcaatgtgagaac

SEQ ID NO: 33887 - DNA, 80 bp, synthetic construct
  source 1..80: mol_type = other DNA
aagcaaaagtgcatgcaggaaactaccatgactaatatatacgcatgtataaaagatcatgactactactgtgtagactg

SEQ ID NO: 33888 - DNA, 80 bp, synthetic construct
  source 1..80: mol_type = other DNA
tgggtttggacaatgtataatgacacgtatccattgttttagtatcatacagagtattttcactttcctaaaaattttct

SEQ ID NO: 33889 - DNA, 80 bp, synthetic construct; identical to SEQ ID NO: 12363
  source 1..80: mol_type = other DNA

SEQ ID NO: 33890 - DNA, 80 bp, synthetic construct
  source 1..80: mol_type = other DNA
tttgggttaataccaaggagtagagttgttggatcctatggtaagagtatttgtagttttacaagaaactgccacatgct

SEQ ID NO: 33891 - DNA, 80 bp, synthetic construct
  source 1..80: mol_type = other DNA
aaccccacaacaggccccggtgtgtgatgttccacaccctgtgtccaagtgttctcattgttcaattcccacctatgagt

SEQ ID NO: 33892 - DNA, 80 bp, synthetic construct
  source 1..80: mol_type = other DNA
tcattgttggacatttgggttggttccaagtctttgctattgtgaatagtgccacattaaacatatgtgtgcatgtgtct

SEQ ID NO: 33893 - DNA, 80 bp, synthetic construct; identical to SEQ ID NO: 12364
  source 1..80: mol_type = other DNA

SEQ ID NO: 33894 - DNA, 80 bp, synthetic construct
  source 1..80: mol_type = other DNA
ttctttgtagattctggatattagccctttgtcagatgagtagattgcaaaacttttctcccattctgtaggttgcctgt

SEQ ID NO: 33895 - DNA, 80 bp, synthetic construct
  source 1..80: mol_type = other DNA
ggtttttatggttttaggtctaacatgtaagtctttaatcggtcttgaattaatttttgtataaggtgtaaggaaggggt

SEQ ID NO: 33896 - DNA, 80 bp, synthetic construct
  source 1..80: mol_type = other DNA
tatatctcttttgtggtaccagtaccatgttgttttggttactgtagcctagtagtatagtttgaagtcaggtagcatga

SEQ ID NO: 33897 - DNA, 80 bp, synthetic construct; identical to SEQ ID NO: 12365
  source 1..80: mol_type = other DNA

SEQ ID NO: 33898 - DNA, 80 bp, synthetic construct
  source 1..80: mol_type = other DNA
tttgtacattgattttgtatcctgagactttgttgaagttgcttatcagcttaaggagattttgggctgagatgatggca

SEQ ID NO: 33899 - DNA, 80 bp, synthetic construct
  source 1..80: mol_type = other DNA
tgccagttttcaaagggaatgcttccagtttttgcccattcagtatgatattggctgtgggtttttcataagtagctctt

SEQ ID NO: 33900 - DNA, 80 bp, synthetic construct
  source 1..80: mol_type = other DNA
ttggttctgtttatatgctggattacgtttattcatttgcgtatgttgaaccagccttgcatcccagggatgaagctcac

SEQ ID NO: 33901 - DNA, 80 bp, synthetic construct; identical to SEQ ID NO: 12366
  source 1..80: mol_type = other DNA

SEQ ID NO: 33902 - DNA, 80 bp, synthetic construct
  source 1..80: mol_type = other DNA
tccatttcttctagattttctagtttatttgtgtagaggtgtttatagtattctctgatggtagtttgtatttctgtggg

SEQ ID NO: 33903 - DNA, 80 bp, synthetic construct
  source 1..80: mol_type = other DNA
gagctcctttgctccagatcctcatcagaatttggtgttgtcagtgttatgaattttggctattctaatagatgtgtagt

SEQ ID NO: 33904 - DNA, 80 bp, synthetic construct; identical to SEQ ID NO: 12367
  source 1..80: mol_type = other DNA

SEQ ID NO: 33905 - DNA, 80 bp, synthetic construct
  source 1..80: mol_type = other DNA
cctgtctcagcctcctgagtagctgggattccaggaggctaccatcatgtccagctaatttttgtatttttagtagagat

SEQ ID NO: 33906 - DNA, 80 bp, synthetic construct
  source 1..80: mol_type = other DNA
aatattgcctttggagttgtatttaaaaacacatgtgtcatcaacatattcaagatcatctaggttttcttctgtgttat

SEQ ID NO: 33907 - DNA, 80 bp, synthetic construct
  source 1..80: mol_type = other DNA
gcaccatttggtaaattactatgtattctccactgaagtgtcttactgctttgtcaaaaatcagttgatttaattatgtg

SEQ ID NO: 33908 - DNA, 80 bp, synthetic construct; identical to SEQ ID NO: 12368
  source 1..80: mol_type = other DNA

SEQ ID NO: 33909 - DNA, 80 bp, synthetic construct
  source 1..80: mol_type = other DNA
atagacttacacctaagtatttcatttgttttgattctaatgtaaataatattatgtttcttttaacttctactttttca

SEQ ID NO: 33910 - DNA, 80 bp, synthetic construct
  source 1..80: mol_type = other DNA
gataacttgtataccctgttcccacctttattttgtcttattagctagaagttccagtataattatgaaaagaaatggtg

SEQ ID NO: 33911 - DNA, 80 bp, synthetic construct
  source 1..80: mol_type = other DNA
tctgtattgttagtttactgagagatttgatcatgaatgggtgttgaattttgtcaaatgctttatctgcatctgttgat

SEQ ID NO: 33912 - DNA, 80 bp, synthetic construct
  source 1..80: mol_type = other DNA
ttgagcatttttgcatcttaagagatactggtctatagtttctagcatgtctttgtctggtttgctgtcagtgcaattat

SEQ ID NO: 33913 - DNA, 80 bp, synthetic construct; identical to SEQ ID NO: 12369
  source 1..80: mol_type = other DNA

SEQ ID NO: 33914 - DNA, 80 bp, synthetic construct
  source 1..80: mol_type = other DNA
tgagagaattggtaggaatttttcttaaatgctcagtagaattaaatagtgaacccatctgggtcttttgctttgttttg

SEQ ID NO: 33915 - DNA, 80 bp, synthetic construct
  source 1..80: mol_type = other DNA
cttttagtgtccctgggacccgtagtgatgtccaccctttcatttctgatattattaacttatgtcctctctttttattc

SEQ ID NO: 33916 - DNA, 80 bp, synthetic construct
  source 1..80: mol_type = other DNA
tttcctaaggtagaaacttaggtcattaattttaaatctttcttcttttttaatatatgcactcaatgatataaattgcc

SEQ ID NO: 33917 - DNA, 80 bp, synthetic construct; identical to SEQ ID NO: 12370
  source 1..80: mol_type = other DNA

SEQ ID NO: 33918 - DNA, 80 bp, synthetic construct
  source 1..80: mol_type = other DNA
gtgttgtagtctccaactatgctaatagatgcactacttgtctttgctgttctattggtttttccttggcatagtttgat

SEQ ID NO: 33919 - DNA, 80 bp, synthetic construct
  source 1..80: mol_type = other DNA
ttagtgttagcatgatacattttcttcatccatttacttataatctatgtgtttttgtattgaaagtgactttcttatac

SEQ ID NO: 33920 - DNA, 80 bp, synthetic construct
  source 1..80: mol_type = other DNA
ttaatgttttctatttttttctctgttcctattttgtcttctatactgtttccgtcttttgtggttgtatttcattattt

SEQ ID NO: 33921 - DNA, 80 bp, synthetic construct; identical to SEQ ID NO: 12371
  source 1..80: mol_type = other DNA

SEQ ID NO: 33922 - DNA, 80 bp, synthetic construct
  source 1..80: mol_type = other DNA
tccaagtttctggcctatatagttttccttctcttgaaaaacttccattaacatttcttgcaaggaggtttattctgaat

SEQ ID NO: 33923 - DNA, 80 bp, synthetic construct
  source 1..80: mol_type = other DNA
tttatttatttattcttttgtttgtttttttgagacagagtctcactctgttacctaggctggagtgcagttctgtgatc

SEQ ID NO: 33924 - DNA, 80 bp, synthetic construct
  source 1..80: mol_type = other DNA
acagggtttcaccatttggccaggctggtctcttaaactcttgacctcaagtgatccacccatcttggcctcccaaagct

SEQ ID NO: 33925 - DNA, 80 bp, synthetic construct; identical to SEQ ID NO: 12372
  source 1..80: mol_type = other DNA

SEQ ID NO: 33926 - DNA, 80 bp, synthetic construct
  source 1..80: mol_type = other DNA
tgtctatctctctaaccttggcgtagcagttttgccctaagtcctcccatctcttacaatctaagaagagctgttggttt

SEQ ID NO: 33927 - DNA, 80 bp, synthetic construct
  source 1..80: mol_type = other DNA
tttaagttctggggtatatgtgcagaatgtgcaggtttgttacataggtatacacatgccatggtggtttactgcaccca

SEQ ID NO: 33928 - DNA, 80 bp, synthetic construct; identical to SEQ ID NO: 12373
  source 1..80: mol_type = other DNA

SEQ ID NO: 33929 - DNA, 80 bp, synthetic construct
  source 1..80: mol_type = other DNA
ttttccacataaaatctgtgcatgatattttctttgcttttatttaaaaggtcatgatatagtacctgcaaggttatggt

SEQ ID NO: 33930 - DNA, 80 bp, synthetic construct
  source 1..80: mol_type = other DNA
tattaaaatgtaacataggaataaaaaagaggttaataataaaataatgaaaactcttaaaataattacatggaatgatg

SEQ ID NO: 33931 - DNA, 80 bp, synthetic construct
  source 1..80: mol_type = other DNA
ctctcattaactatgattgcatgtttaatgcatgttcaattagataatcctggcgtgtacattagtggtactgtgtctta

SEQ ID NO: 33932 - DNA, 80 bp, synthetic construct
  source 1..80: mol_type = other DNA
cagggctggggcaaagttctccagaaggctgtgtatgctctgaatcagcatccaatacacggtactcttcctcccatagt

SEQ ID NO: 33933 - DNA, 80 bp, synthetic construct; identical to SEQ ID NO: 12374
  source 1..80: mol_type = other DNA

SEQ ID NO: 33934 - DNA, 80 bp, synthetic construct
  source 1..80: mol_type = other DNA
gggaaactacaacaacccaatccaggctggactataaatggcccagactctttaggaatgaagatttgggtcactcaacc

SEQ ID NO: 33935 - DNA, 80 bp, synthetic construct
  source 1..80: mol_type = other DNA
aacatgtttgtgcatgtatacacttttactaggaaaatatcttcattttatttccttttttcctttatcatgtgatgtaa

SEQ ID NO: 33936 - DNA, 80 bp, synthetic construct; identical to SEQ ID NO: 12375
  source 1..80: mol_type = other DNA

SEQ ID NO: 33937 - DNA, 80 bp, synthetic construct
  source 1..80: mol_type = other DNA
ttccggccttcagtctcatgctggacacttcctgccctccaacatcagactccaaattcttcagcttttggactcttgga

SEQ ID NO: 33938 - DNA, 80 bp, synthetic construct
  source 1..80: mol_type = other DNA
gtcaataatcctttataaattccccttcatatttacatcagatatacatctatcctattagttctgtcctctagagaacg

SEQ ID NO: 33939 - DNA, 80 bp, synthetic construct
  source 1..80: mol_type = other DNA
ttaatgcatgttcaattagataatcctggtgggtacaagagtggtactgtgtcttaggcaatgtatggtaagctcctaga

SEQ ID NO: 33940 - DNA, 80 bp, synthetic construct
  source 1..80: mol_type = other DNA
caatgctttaaaaagtcaaggacttgtaaaaacacacaacttactcttttccaactatgtctatcctattacctcacaga

SEQ ID NO: 33941 - DNA, 80 bp, synthetic construct; identical to SEQ ID NO: 12376
  source 1..80: mol_type = other DNA

SEQ ID NO: 33942 - DNA, 80 bp, synthetic construct
  source 1..80: mol_type = other DNA
tggtgctcacctgtaatcccagctaaggcagaagaattgcttgaaccggggaggtgaaggttgcagtgagctgagatggc

SEQ ID NO: 33943 - DNA, 80 bp, synthetic construct
  source 1..80: mol_type = other DNA
tattgtctttctctctgcagctgaaatgtaagctccaataaagtgagaatctttgttttggatacagaatactgctgaca

SEQ ID NO: 33944 - DNA, 80 bp, synthetic construct
  source 1..80: mol_type = other DNA
cattaaatagttttcaataaattcaacgattattttgataactgaaagaataatgtcatattcagatttgccttttttct

SEQ ID NO: 33945 - DNA, 80 bp, synthetic construct; identical to SEQ ID NO: 12377
  source 1..80: mol_type = other DNA

SEQ ID NO: 33946 - DNA, 80 bp, synthetic construct
  source 1..80: mol_type = other DNA
aaatttttgtcctacttacacagaaaaagttcctagaactgtgagccccagacatgtgtgcctctctgatttgaaggacc

SEQ ID NO: 33947 - DNA, 80 bp, synthetic construct
  source 1..80: mol_type = other DNA
gctggatgattcttttccaatccaggctctacatgagacataaagattttcattgcacttatctgtctcctatgcacttc

SEQ ID NO: 33948 - DNA, 80 bp, synthetic construct
  source 1..80: mol_type = other DNA
ctttttttctgctctccttcctcccactttatcatattccatcctcactacaatttccctcatctctataagatctttct

SEQ ID NO: 33949 - DNA, 80 bp, synthetic construct
  source 1..80: mol_type = other DNA
taaaataataaaatattcatttatcattgaatactcataaatcattcctttgccttaatatgcagttgatgcttagggat

SEQ ID NO: 33950 - DNA, 80 bp, synthetic construct; identical to SEQ ID NO: 12378
  source 1..80: mol_type = other DNA

SEQ ID NO: 33951 - DNA, 80 bp, synthetic construct
  source 1..80: mol_type = other DNA
aatatttacaatgcatgcaaagggtatacacctcattaagcataccgggaggaaaattccccaatttcttcaattcaact

SEQ ID NO: 33952 - DNA, 80 bp, synthetic construct
  source 1..80: mol_type = other DNA
gcatttgcagttgtagtccaaagcaaactctgaaggacgttctcatagtctaaaacttgacgcattttgaagataataca

SEQ ID NO: 33953 - DNA, 80 bp, synthetic construct
  source 1..80: mol_type = other DNA
aataaggggtttgttttgcaatcttttttctcccttctcccacacataatcacatgatctttgaaacttacaaaacgaat

SEQ ID NO: 33954 - DNA, 80 bp, synthetic construct; identical to SEQ ID NO: 12379
  source 1..80: mol_type = other DNA

SEQ ID NO: 33955 - DNA, 80 bp, synthetic construct
  source 1..80: mol_type = other DNA
tgaattatttacaaccaactccacttggtctatcatttaatgaaagaacagaaaggtgtccttcccccacaccaccctaa

SEQ ID NO: 33956 - DNA, 80 bp, synthetic construct
  source 1..80: mol_type = other DNA
tcaactaccaagaacaaagagtaaatggtccctggccccatatttggaacaaaaagtatgaaagcaaaacaaaaacctct

SEQ ID NO: 33957 - DNA, 80 bp, synthetic construct; identical to SEQ ID NO: 12380
  source 1..80: mol_type = other DNA

SEQ ID NO: 33958 - DNA, 80 bp, synthetic construct
  source 1..80: mol_type = other DNA
aacttctgcctccctggctcaagggatcctcccacttcagcctcccaagtagctgggactacggacactacaggcccatg

SEQ ID NO: 33959 - DNA, 80 bp, synthetic construct
  source 1..80: mol_type = other DNA
gctactcgtaattatacccctagatcaggctaagcaatttcctatcctctttttttttcaacatattttcatgacttgga

SEQ ID NO: 33960 - DNA, 80 bp, synthetic construct
  source 1..80: mol_type = other DNA
tccttcaaccaactgccccagtgacttcactcagaaatagccacctatgagacaaaactactcaacaaaaagaaataaaa

SEQ ID NO: 33961 - DNA, 80 bp, synthetic construct
  source 1..80: mol_type = other DNA
attagtctatcagttggttatcagccttggttgagtagacaatttccattcaaggactcactgtatcaaaatactattta

SEQ ID NO: 33962 - DNA, 80 bp, synthetic construct; identical to SEQ ID NO: 12381
  source 1..80: mol_type = other DNA

SEQ ID NO: 33963 - DNA, 80 bp, synthetic construct
  source 1..80: mol_type = other DNA
tgcgaaatagggtcacagcctatatcttactaggcgtcctagcagtaagcagtactgaagcaataatattgcctggcatt

SEQ ID NO: 33964 - DNA, 80 bp, synthetic construct
  source 1..80: mol_type = other DNA
aatattttctttatcaaatgagtttctgtgtaagtagcatggctgtttttacttcctatgaagctacccttcctaaagct

SEQ ID NO: 33965 - DNA, 80 bp, synthetic construct
  source 1..80: mol_type = other DNA
tcagactttcttaatttaagcaactgttgtagcacagtcattgatcctatctaaatgaatcaggatctttttcacaatct

SEQ ID NO: 33966 - DNA, 80 bp, synthetic construct; identical to SEQ ID NO: 12382
  source 1..80: mol_type = other DNA

SEQ ID NO: 33967 - DNA, 80 bp, synthetic construct
  source 1..80: mol_type = other DNA
tccatgctttattactgataaattttttggacatttctgctgcatcatccattctctgtgataaagattgtggtacacta

SEQ ID NO: 33968 - DNA, 80 bp, synthetic construct
  source 1..80: mol_type = other DNA
ttttctcgtatataatgtcttatacatttatgagtcgtactcctgattagtagataaggtaactattcaataatacctgt

SEQ ID NO: 33969 - DNA, 80 bp, synthetic construct
  source 1..80: mol_type = other DNA
ctttataaaaagggcaatctaattccttatagctcggaaaggacttcaaactgtgtcattccatttgccaacaaggaata

SEQ ID NO: 33970 - DNA, 80 bp, synthetic construct; identical to SEQ ID NO: 12383
  source 1..80: mol_type = other DNA

SEQ ID NO: 33971 - DNA, 80 bp, synthetic construct
  source 1..80: mol_type = other DNA
ctcttgaagtatttctgtggtagtcagcagttggcattgcctgtggtagaaagcttcacattattcttggtgaaacagaa

SEQ ID NO: 33972 - DNA, 80 bp, synthetic construct
  source 1..80: mol_type = other DNA
cgaacccccttttaggtagaccttcgcttcatgtgcagccttaaggattagttgtcagcatttaccctcaaataaaatat

SEQ ID NO: 33973 - DNA, 80 bp, synthetic construct; identical to SEQ ID NO: 12384
  source 1..80: mol_type = other DNA

SEQ ID NO: 33974 - DNA, 80 bp, synthetic construct
  source 1..80: mol_type = other DNA
atatctctgtctctattgctatctctatctccattgcttcttttatatctgtattttaaagtgaaaacttaaaagcactc

SEQ ID NO: 33975 - DNA, 80 bp, synthetic construct
  source 1..80: mol_type = other DNA
atgctttttactgtttagtaaaattgagctgaaagattgaaggaaatgttcatttcttttcaacaaagctacacatagta

SEQ ID NO: 33976 - DNA, 80 bp, synthetic construct
  source 1..80: mol_type = other DNA
aaaaactacctagaacattgagtcccatacaataagagtgttaaccattgtaaaccctgtcatgtctctgggaagcagag

SEQ ID NO: 33977 - DNA, 80 bp, synthetic construct; identical to SEQ ID NO: 12385
  source 1..80: mol_type = other DNA

SEQ ID NO: 33978 - DNA, 80 bp, synthetic construct
  source 1..80: mol_type = other DNA
ggaaatacatataatgtatttatttccactacttgctttggcaagctttcttcaaaacacagcttacttttgttgttttg

SEQ ID NO: 33979 - DNA, 80 bp, synthetic construct
  source 1..80: mol_type = other DNA
ctctacctctcaggttcaagtgattctcctgcgtcagcctcccgagtaactaggattacaggtgcctgccaccacaccca

SEQ ID NO: 33980 - DNA, 80 bp, synthetic construct
  source 1..80: mol_type = other DNA
agtcactgcacccagcctaagatgatttcttatattaaaagtatcacacgttttcccatgagaaaatatgacaagaaaaa

SEQ ID NO: 33981 - DNA, 80 bp, synthetic construct
  source 1..80: mol_type = other DNA
ttgccagagtagactaaattgcattaatggacacaggtttcagccaaagcctagaagcaatgacacttaccctaaagact

SEQ ID NO: 33982 - DNA, 80 bp, synthetic construct; identical to SEQ ID NO: 12386
  source 1..80: mol_type = other DNA

SEQ ID NO: 33983 - DNA, 80 bp, synthetic construct
  source 1..80: mol_type = other DNA
caccatctctggtaattccaactcctataccactcaaaaactcatcacctcttccacttccattagtctgctgtagttcc

SEQ ID NO: 33984 - DNA, 80 bp, synthetic construct
  source 1..80: mol_type = other DNA
attgaaacagtttagaagaattgaatacgatgagacaaaatctacctataaccccaccctctgcctccaggccttttcca

SEQ ID NO: 33985 - DNA, 80 bp, synthetic construct
  source 1..80: mol_type = other DNA
tgggtttatacctatgttggcaattttatccactgagtgaaattttaattgagaaatttctaggtcaaagagtgcatgta

SEQ ID NO: 33986 - DNA, 80 bp, synthetic construct; identical to SEQ ID NO: 12387
  source 1..80: mol_type = other DNA

SEQ ID NO: 33987 - DNA, 80 bp, synthetic construct
  source 1..80: mol_type = other DNA
tcctcagtctctctgatctgtcctgactgagtccagctggaacctagagggcaaggtggccaactgaagtaggtccgtct

SEQ ID NO: 33988 - DNA, 80 bp, synthetic construct
  source 1..80: mol_type = other DNA
tcttattttttccttggctaactggttttgttgtctctatccttgctttcccttccatcaagtttctgcagagccactca

SEQ ID NO: 33989 - DNA, 80 bp, synthetic construct; identical to SEQ ID NO: 12388
  source 1..80: mol_type = other DNA

SEQ ID NO: 33990 - DNA, 80 bp, synthetic construct
  source 1..80: mol_type = other DNA
aactactatgtgacattgtgtgtttctcatctgcacatagttttctgaaactatttagttgctgccttcccccttgagat

SEQ ID NO: 33991 - DNA, 80 bp, synthetic construct
  source 1..80: mol_type = other DNA
tgccatgtgtacttggtaaagccccttaatttctccaagtttcctagctataaaatggatgcaatattagtgctaagggt

SEQ ID NO: 33992 - DNA, 80 bp, synthetic construct
  source 1..80: mol_type = other DNA
catgaaaaaccattagatttcccaagagaaacgtgaaaagttttggggcctcacactaagactcgtgaggttatcaagct

SEQ ID NO: 33993 - DNA, 80 bp, synthetic construct
  source 1..80: mol_type = other DNA
ctaatccagagaatacaagagtgcctatcccataacaggtgacaataaatatttgttggaagaatgtattgtatgtgctt

SEQ ID NO: 33994 - DNA, 80 bp, synthetic construct; identical to SEQ ID NO: 12389
  source 1..80: mol_type = other DNA

SEQ ID NO: 33995 - DNA, 80 bp, synthetic construct
  source 1..80: mol_type = other DNA
cctacaccttgtgttttacctcaggaaagcaagagatatggaattgttctcaccaatagttgaaagtgatattaggaatt

SEQ ID NO: 33996 - DNA, 80 bp, synthetic construct
  source 1..80: mol_type = other DNA
gcacttattagcgagagttttacaattaaagggaagacagcttgcacaatttaattgtttagtctttaacaagggaccat

SEQ ID NO: 33997 - DNA, 80 bp, synthetic construct
  source 1..80: mol_type = other DNA
taggagaagaccaagaatgtaccaaacaaaggagaggtaaagtagagtaaccttttttagaatgtatttttctggtctgg

SEQ ID NO: 33998 - DNA, 80 bp, synthetic construct; identical to SEQ ID NO: 12390
  source 1..80: mol_type = other DNA

SEQ ID NO: 33999 - DNA, 80 bp, synthetic construct
  source 1..80: mol_type = other DNA
ggcaatgtctccatgtagaagtgacatgaaaatggaaatttcacagatgagctggaatctgttttgggtgaacaatgact

SEQ ID NO: 34000 - DNA, 80 bp, synthetic construct
  source 1..80: mol_type = other DNA
ttggtcctagcaagagaaatcatattgtaatgattttactagggatgaggtagaaaatgctccagctctcctatgctgcc

SEQ ID NO: 34001 - DNA, 80 bp, synthetic construct
  source 1..80: mol_type = other DNA
aggtggaaggaaagcagcaacttcctttgttccttccctttcagacctgatattatcctaaagaagagagtacaaaatga

SEQ ID NO: 34002 - DNA, 80 bp, synthetic construct; identical to SEQ ID NO: 12391
  source 1..80: mol_type = other DNA

SEQ ID NO: 34003 - DNA, 80 bp, synthetic construct
  source 1..80: mol_type = other DNA
tctgcaatgtaacacagcactgtcacttcaggttccagcttaatgtaccctttactttctagtcctcttctctctttgga

SEQ ID NO: 34004 - DNA, 80 bp, synthetic construct
  source 1..80: mol_type = other DNA
tatgcagccaaaaatagacctagtcctcctgattctcagatttgcacctctttaacacaccgacactatgacacatctgt

SEQ ID NO: 34005 - DNA, 80 bp, synthetic construct
  source 1..80: mol_type = other DNA
ttaatattcttcagatcaaaggatatgtggaaaggatatgtgaaaacccattacacctatagtaatgggtgtttcgtggt

SEQ ID NO: 34006 - DNA, 80 bp, synthetic construct; identical to SEQ ID NO: 12392
  source 1..80: mol_type = other DNA

SEQ ID NO: 34007 - DNA, 80 bp, synthetic construct
  source 1..80: mol_type = other DNA
atagtttgggctcactaattcttataggataccttttgtcaccttcgtaagatcgatgtttctccagaaaccgatactag

SEQ ID NO: 34008 - DNA, 80 bp, synthetic construct
  source 1..80: mol_type = other DNA
ccacaacatataaacccaagcaattaaaagttcttaaactgaccattgtcagcttctcacattacctttattttagtatg

SEQ ID NO: 34009 - DNA, 80 bp, synthetic construct; identical to SEQ ID NO: 12393
  source 1..80: mol_type = other DNA

SEQ ID NO: 34010 - DNA, 80 bp, synthetic construct
  source 1..80: mol_type = other DNA
agaaaaacaaataaaaaatatctgccataggtctccctcttacaacaatataatataacagattatgaaagtgatctcca

SEQ ID NO: 34011 - DNA, 80 bp, synthetic construct
  source 1..80: mol_type = other DNA
aaagaagggaaacttagagatttcggctttcctgttatgactataacttttcaaaatgttagtctcctttactgacccag

SEQ ID NO: 34012 - DNA, 80 bp, synthetic construct
  source 1..80: mol_type = other DNA
caatcatgctatggcttcacctaaatcccccaactctggtcaattcccctgcataggattgtaaacaagttcacatttga

SEQ ID NO: 34013 - DNA, 80 bp, synthetic construct
  source 1..80: mol_type = other DNA
gcaaacattaaaaaaaaaaaacaacatttgtcagttctgagtggttctatgcaaaggtgttattacattattattctatg

SEQ ID NO: 34014 - DNA, 80 bp, synthetic construct; identical to SEQ ID NO: 12394
  source 1..80: mol_type = other DNA

SEQ ID NO: 34015 - DNA, 80 bp, synthetic construct
  source 1..80: mol_type = other DNA
gacaaagattaaaagtaatataccaaaggtctcatgaatatttgggggtaaggaggaagaagagaaagaaatgcagagca

SEQ ID NO: 34016 - DNA, 80 bp, synthetic construct
  source 1..80: mol_type = other DNA
gtggggtgggatgaagggtaggcagagacaatggaaactagtgacttctatttgagagatttttaaggaatactcctctt

SEQ ID NO: 34017 - DNA, 80 bp, synthetic construct; identical to SEQ ID NO: 12395
  source 1..80: mol_type = other DNA

SEQ ID NO: 34018 - DNA, 80 bp, synthetic construct
  source 1..80: mol_type = other DNA
tatagtatttcttagttaatcttcaaataagtcctttaagaaaattcatatctacaactactacctcgggatactatgac

SEQ ID NO: 34019 - DNA, 80 bp, synthetic construct
  source 1..80: mol_type = other DNA
tttttttctgattgttatctcaagagccaacataaacctactcttatttctgcctggccaaatgactgacatttgtgttt

SEQ ID NO: 34020 - DNA, 80 bp, synthetic construct
  source 1..80: mol_type = other DNA
aatttcacaggtgatttaaaactcttaccctaatcttcatgccccaagtgcaatgtgacctgtctagccaggaaactaac

SEQ ID NO: 34021 - DNA, 80 bp, synthetic construct
  source 1..80: mol_type = other DNA
aaaaaaatctctccctgaaaatgcacctccgtctcaaacattttttccagaaatagatattaatcctgcccctttgccca

SEQ ID NO: 34022 - DNA, 80 bp, synthetic construct; identical to SEQ ID NO: 12396
  source 1..80: mol_type = other DNA

SEQ ID NO: 34023 - DNA, 80 bp, synthetic construct
  source 1..80: mol_type = other DNA
gtgagaggtccatttaatcaaatcattgtcagaagtgtagtatctctaggagagtgaccttgcccaacctctttgtttat

SEQ ID NO: 34024 - DNA, 80 bp, synthetic construct
  source 1..80: mol_type = other DNA
ccataacatcaacaatcccacaaattacagatttcctaatacataagtcagttttttaaatctatttttggaaagaaagg

SEQ ID NO: 34025 - DNA, 80 bp, synthetic construct; identical to SEQ ID NO: 12397
  source 1..80: mol_type = other DNA

SEQ ID NO: 34026 - DNA, 80 bp, synthetic construct
  source 1..80: mol_type = other DNA
acatgttgtccaaaattcagcaagtccttaagttttcttttttttttgagcatgtgtaggtgtttttatgtttgctcatg

SEQ ID NO: 34027 - DNA, 80 bp, synthetic construct
  source 1..80: mol_type = other DNA
aatcaaaatatcagttcaggaaaatttaagagcttaagtagtaaaatagtgtgggcatttttagaaatgaacattagaca

SEQ ID NO: 34028 - DNA, 80 bp, synthetic construct
  source 1..80: mol_type = other DNA
ttactaaataggataatataattgtaccatatgtaggagtagaaatattggtatgctttctaagttgttttattttgcaa

SEQ ID NO: 34029 - DNA, 80 bp, synthetic construct; identical to SEQ ID NO: 12398
  source 1..80: mol_type = other DNA

SEQ ID NO: 34030 - DNA, 80 bp, synthetic construct
  source 1..80: mol_type = other DNA
aactggcacaaaaacaagtagcttctactaacgaatttagtcatcattaattatgataccctgactaatcaatattggca

SEQ ID NO: 34031 - DNA, 80 bp, synthetic construct
  source 1..80: mol_type = other DNA
aaatgtggacaaactgaacactagtttgcacaagtttggaaccaatctctttaacccttagtttttcccttggtaaacaa

SEQ ID NO: 34032 - DNA, 80 bp, synthetic construct
  source 1..80: mol_type = other DNA
ttttcctactatcattaagactgtcctgttccagtgatggctgggagtaaatctgaacataaatcagaaaatcgcaggag

SEQ ID NO: 34033 - DNA, 80 bp, synthetic construct
  source 1..80: mol_type = other DNA
tggtttctcagattccgcctaacaaggcctacgggacatggattctaaatgagaagaataatttctaaaaagtattttga

SEQ ID NO: 34034 - DNA, 80 bp, synthetic construct; identical to SEQ ID NO: 12399
  source 1..80: mol_type = other DNA

SEQ ID NO: 34035 - DNA, 80 bp, synthetic construct
  source 1..80: mol_type = other DNA
atttgtaaacattgcctatatgtgaaccaatcctactgagaatttagtagaagtggagcctgagttcagaaggaaaaaaa

SEQ ID NO: 34036 - DNA, 80 bp, synthetic construct
  source 1..80: mol_type = other DNA
aaatatttattgcgctccccttatgcaccagccattcttcaaggaggtacagattcaggggtaaatgagaaaacaaagaa

SEQ ID NO: 34037 - DNA, 80 bp, synthetic construct; identical to SEQ ID NO: 12400
  source 1..80: mol_type = other DNA

SEQ ID NO: 34038 - DNA, 80 bp, synthetic construct
  source 1..80: mol_type = other DNA
cagtttggggaatttctttcaataatttttatggttatataataattgtacatttttatggagtacctatgatattttga

SEQ ID NO: 34039 - DNA, 80 bp, synthetic construct
  source 1..80: mol_type = other DNA
ctgaacactagttcttattccttctatctaactatatttttgtaaccattaaccaatctctctttacccttccccttccc

SEQ ID NO: 34040 - DNA, 80 bp, synthetic construct
  source 1..80: mol_type = other DNA
gttgcaaatgatagaatttcattctttctacggctgaaaaatattccattgtgtatctataccactttttttagtccatt

SEQ ID NO: 34041 - DNA, 80 bp, synthetic construct; identical to SEQ ID NO: 12401
  source 1..80: mol_type = other DNA

SEQ ID NO: 34042 - DNA, 80 bp, synthetic construct
  source 1..80: mol_type = other DNA
tctcccactagattttttttttccacatttatcatggttattttacgtctctatctgataattccaattctatgtgtggg

SEQ ID NO: 34043 - DNA, 80 bp, synthetic construct
  source 1..80: mol_type = other DNA
ttacagaaataatagtcatccccagaaaagggcacaccacttctcttattaggctgctaattaggagactgagtggatta

SEQ ID NO: 34044 - DNA, 80 bp, synthetic construct
  source 1..80: mol_type = other DNA
agaaagactctagaatctctttacttattgttaatccagtaaccaactttctgaaccaagggatatctcttgctgcttta

SEQ ID NO: 34045 - DNA, 80 bp, synthetic construct
  source 1..80: mol_type = other DNA
gggggatttctctcaaggctttttccctgccttagccttcagcagacctcttttaactggaggaggccctgcttgcctta

SEQ ID NO: 34046 - DNA, 80 bp, synthetic construct; identical to SEQ ID NO: 12402
  source 1..80: mol_type = other DNA

SEQ ID NO: 34047 - DNA, 80 bp, synthetic construct
  source 1..80: mol_type = other DNA
gaagcagaagtcctgcctgaatttcaaagtcataagctaaccatatggtatctattatcctagcagtctgagtttgaatt

SEQ ID NO: 34048 - DNA, 80 bp, synthetic construct
  source 1..80: mol_type = other DNA
ggaaaggccttggaaggttttaagcagagattaggcaacaactgtgagtcataaaacatttcatacaactctgcagttga

SEQ ID NO: 34049 - DNA, 80 bp, synthetic construct; identical to SEQ ID NO: 12403
  source 1..80: mol_type = other DNA

SEQ ID NO: 34050 - DNA, 80 bp, synthetic construct
  source 1..80: mol_type = other DNA
aaattttgcatgactaaaatattacagaaaatttccttttggctgatcagtatatagatcagaaactccccaaagaagat

SEQ ID NO: 34051 - DNA, 80 bp, synthetic construct
  source 1..80: mol_type = other DNA
aatagccaactgtgaaattcacaaatactttccttggattgggtacaaatgctattcaggctaataccagggatgcataa

SEQ ID NO: 34052 - DNA, 80 bp, synthetic construct
  source 1..80: mol_type = other DNA
ggagctcattttccagtttgtgaattatctaggtctttgattcttctcttccctctggctgattacctttcccatttctc

SEQ ID NO: 34053 - DNA, 80 bp, synthetic construct; identical to SEQ ID NO: 12404
  source 1..80: mol_type = other DNA

SEQ ID NO: 34054 - DNA, 80 bp, synthetic construct
  source 1..80: mol_type = other DNA
aatttgtaaaacccctttgtcaattcttgtttcttctactttccttaagaatcagtttgttttggggaaaaggctcattg

SEQ ID NO: 34055 - DNA, 80 bp, synthetic construct
  source 1..80: mol_type = other DNA
tacatctttaccaacaaatttcattgactgattcttccctgcctcctattaaaatggataactactagttacctgtatta

SEQ ID NO: 34056 - DNA, 80 bp, synthetic construct
  source 1..80: mol_type = other DNA
tttaaggatgtctggtttgcctggtgattaagctagtagtcctgtgtctctcatgaacagtctctttttaattgatttac

SEQ ID NO: 34057 - DNA, 80 bp, synthetic construct; identical to SEQ ID NO: 12405
  source 1..80: mol_type = other DNA

SEQ ID NO: 34058 - DNA, 80 bp, synthetic construct
  source 1..80: mol_type = other DNA
acttgtagcatattctgctaaataaaaactttatattgcctcctacatttaagcctctcataaaacagttgtgcattttt

SEQ ID NO: 34059 - DNA, 80 bp, synthetic construct
  source 1..80: mol_type = other DNA
ttccccagccctttaagagaagattgcattagagttgagttctcaacactgattgttatgaaatagtaccaaattgatac

SEQ ID NO: 34060 - DNA, 80 bp, synthetic construct
  source 1..80: mol_type = other DNA
agcaatttataaattgtttccattgcctctctcatgagctagtttataccatgaaagactccacattcactgcatcattg

SEQ ID NO: 34061 - DNA, 80 bp, synthetic construct
  source 1..80: mol_type = other DNA
aaggcagcctgacaaattacaaaatgaaggggtatttgagaaagagtatgttgtagccagtaatgcttgtaaaatgactc

SEQ ID NO: 34062 - DNA, 80 bp, synthetic construct; identical to SEQ ID NO: 12406
  source 1..80: mol_type = other DNA

SEQ ID NO: 34063 - DNA, 80 bp, synthetic construct
  source 1..80: mol_type = other DNA
atggaagtatacttctatatatgttatataaagaataaaataataatttattaaagtatacaataaattatacatactta

SEQ ID NO: 34064 - DNA, 80 bp, synthetic construct
  source 1..80: mol_type = other DNA
cccactcataacccctctgtccataagacaaccattgatttactttgtgtcactacagatcagttcacattttctagttt

SEQ ID NO: 34065 - DNA, 80 bp, synthetic construct; identical to SEQ ID NO: 12407
  source 1..80: mol_type = other DNA

SEQ ID NO: 34066 - DNA, 80 bp, synthetic construct
  source 1..80: mol_type = other DNA
actattttctttcagtctgtcatctgtattttcatatttctttataaacgagtttgaagaggaaatgtttttaatttgta

SEQ ID NO: 34067 - DNA, 80 bp, synthetic construct
  source 1..80: mol_type = other DNA
tcatgtgagatctgaatcaaggcttactttcttgttgcataagaacacccaatttttccagcatatttgctgaaagacta

SEQ ID NO: 34068 - DNA, 80 bp, synthetic construct
  source 1..80: mol_type = other DNA
atgccaacaccagactatctcattactgtaattttaacatagctcggtatcagaaagttttagacttccaactttgttct

SEQ ID NO: 34069 - DNA, 80 bp, synthetic construct
  source 1..80: mol_type = other DNA
atgggaagacttggcatcttaacaatagtggctcctctgatctatgaatacagtatattcttccatttattaggttgtct

SEQ ID NO: 34070 - DNA, 80 bp, synthetic construct; identical to SEQ ID NO: 12408
  source 1..80: mol_type = other DNA

SEQ ID NO: 34071 - DNA, 80 bp, synthetic construct
  source 1..80: mol_type = other DNA
gctatctgactgttcctgtaaattaagtgatttttttggttggttgtttctttggtatattccatggattttctacacag

SEQ ID NO: 34072 - DNA, 80 bp, synthetic construct
  source 1..80: mol_type = other DNA
ctatttagtatgatattagttgtaggctttgttgtacatacccttcatcaagttaaggaattttcctactattaatttgc

SEQ ID NO: 34073 - DNA, 80 bp, synthetic construct; identical to SEQ ID NO: 12409
  source 1..80: mol_type = other DNA

SEQ ID NO: 34074 - DNA, 80 bp, synthetic construct
  source 1..80: mol_type = other DNA
tctgggcctgaagttttattttctctaatgttatctattgtctcttgaataagcttttatagtttgtgtccttcaaggaa

SEQ ID NO: 34075 - DNA, 80 bp, synthetic construct
  source 1..80: mol_type = other DNA
gctaaagtttggtcaatttttttcgtctccgcaaggaaccagctttaccttcattgatgttctctattttttttcttttt

SEQ ID NO: 34076 - DNA, 80 bp, synthetic construct
  source 1..80: mol_type = other DNA
ccatgaataatgttttatggcacaccacaaatattgacattctgtattttcatttccattcagttcaaggtactttctaa

SEQ ID NO: 34077 - DNA, 80 bp, synthetic construct
  source 1..80: mol_type = other DNA
ctgtctatactaaaactacaaaattagccaggcatggtgacgcatgcctgtaatcccaactactcgggaggctgaggcct

SEQ ID NO: 34078 - DNA, 80 bp, synthetic construct; identical to SEQ ID NO: 12410
  source 1..80: mol_type = other DNA

SEQ ID NO: 34079 - DNA, 80 bp, synthetic construct
  source 1..80: mol_type = other DNA
agtaatagaaaaatttacaaaaggtgttagaaccctagagcagtatacttccatctctttcctcccaactttcgtactat

SEQ ID NO: 34080 - DNA, 80 bp, synthetic construct
  source 1..80: mol_type = other DNA
agttacaattctggtggtctttattccattgtgtagaaccacagtttgacctggcatcatattccatctgcctaaaacag

SEQ ID NO: 34081 - DNA, 80 bp, synthetic construct; identical to SEQ ID NO: 12411
  source 1..80: mol_type = other DNA

SEQ ID NO: 34082 - DNA, 80 bp, synthetic construct
  source 1..80: mol_type = other DNA
aggggtgttttgggaggtttgtagttttaggcaaaactggaagctttgcactattatttcttgaaatttttttctgtatt

SEQ ID NO: 34083 - DNA, 80 bp, synthetic construct
  source 1..80: mol_type = other DNA
catttcttatgcaatgcctaaagtgctgttcatagcttccagttacctttcatcttattcattgtagttttaatttctgg

SEQ ID NO: 34084 - DNA, 80 bp, synthetic construct
  source 1..80: mol_type = other DNA
ttctacttatttacataacaggtaattttttattgaatgctggatattgtgaatcctaccttttttggtgctaggtattt

SEQ ID NO: 34085 - DNA, 80 bp, synthetic construct
  source 1..80: mol_type = other DNA
tatttatattctattcaatgcttgtggtcatagagttttccagtttggctggcaagaacagtcactattcccagatatat

SEQ ID NO: 34086 - DNA, 80 bp, synthetic construct; identical to SEQ ID NO: 12412
  source 1..80: mol_type = other DNA

SEQ ID NO: 34087 - DNA, 80 bp, synthetic construct
  source 1..80: mol_type = other DNA
tttaaagaactacgaatgtcctatgtcaagaaaatacttggctacatggagccgtaaactaatcacagaactgtgagcca

SEQ ID NO: 34088 - DNA, 80 bp, synthetic construct
  source 1..80: mol_type = other DNA
gggagtataataaataaaacattaaacaaggagtccaaaaacttacatgatataggacatataatgaactcaaattgaag

SEQ ID NO: 34089 - DNA, 80 bp, synthetic construct
  source 1..80: mol_type = other DNA
tgccaaatctccctttcacaacatacaaaaatattattttaaaagtagggataaaaaccaaatgcataaatattctatgc

SEQ ID NO: 34090 - DNA, 80 bp, synthetic construct; identical to SEQ ID NO: 12413
  source 1..80: mol_type = other DNA

SEQ ID NO: 34091 - DNA, 80 bp, synthetic construct
  source 1..80: mol_type = other DNA
gatgtaagtatatattgactctagaattcatgaatatcagaaaatcactacgtaagctctagcacaaaaaaactgaacgg

SEQ ID NO: 34092 - DNA, 80 bp, synthetic construct
  source 1..80: mol_type = other DNA
agagacttacatttctctttgtgaatatcctctttggggtacaaggcaaaagaactaaggtgatgttcatgctctcgacg

SEQ ID NO: 34093 - DNA, 80 bp, synthetic construct
  source 1..80: mol_type = other DNA
caaagaaatagaagcctacttttgcagaggtagtcttcgtggagatggcaagaagactgtacaagggctctggactaacg

SEQ ID NO: 34094 - DNA, 80 bp, synthetic construct; identical to SEQ ID NO: 12414
  source 1..80: mol_type = other DNA

SEQ ID NO: 34095 - DNA, 80 bp, synthetic construct
  source 1..80: mol_type = other DNA
cttcctggcctagtgctttcactcactagctgtgttacccaagacagtcaatgcaatatctctaaatgtcagtttcatca

SEQ ID NO: 34096 - DNA, 80 bp, synthetic construct
  source 1..80: mol_type = other DNA
aataatataggtcaagagccataaataacactggctgtgtatgtagtagaatcaattgatgaactttacaaaaaatacac

SEQ ID NO: 34097 - DNA, 80 bp, synthetic construct; identical to SEQ ID NO: 12415
  source 1..80: mol_type = other DNA

SEQ ID NO: 34098 - DNA, 80 bp, synthetic construct
  source 1..80: mol_type = other DNA
ctaacggcatgccaggcaaaggtaaaaacaagcacctctgcacttgaataaactgttctcagtgccacaaggatcctttt

SEQ ID NO: 34099 - DNA, 80 bp, synthetic construct
  source 1..80: mol_type = other DNA
tttgattggacaagagatggattttagcaactttctcctaataagggactacaaaccatcgactggttctgcccagttta

SEQ ID NO: 34100 - DNA, 80 bp, synthetic construct
  source 1..80: mol_type = other DNA
tgcatgtttgttcagcacacatgcattaagaccccttcatgcatattcatagcttctcctataacctaatatgtaactta

SEQ ID NO: 34101 - DNA, 80 bp, synthetic construct; identical to SEQ ID NO: 12416
  source 1..80: mol_type = other DNA

SEQ ID NO: 34102 - DNA, 80 bp, synthetic construct
  source 1..80: mol_type = other DNA
ttacaggcacctgccaccatgcctgactaattttttgtatttttagtagagacggggtttcaccatgttggtcaggctgg

SEQ ID NO: 34103 - DNA, 80 bp, synthetic construct
  source 1..80: mol_type = other DNA
agaaatcacagaaaatcacagtagagttgctgcagaaatctgaagtacttatactcaccacgacatcaaaatttgagtag

SEQ ID NO: 34104 - DNA, 80 bp, synthetic construct
  source 1..80: mol_type = other DNA
gagtgcctaaggagtccctggtacacataaaatgttaagaactcaatatttagaggctatttgtcagtaaagcaccttca

SEQ ID NO: 34105 - DNA, 80 bp, synthetic construct; identical to SEQ ID NO: 12417
  source 1..80: mol_type = other DNA

SEQ ID NO: 34106 - DNA, 80 bp, synthetic construct
  source 1..80: mol_type = other DNA
aattttccccggcccaaaatacatgattcataaggcgtttgcattgagaataaaaggattcactttaaactgacttctgc

SEQ ID NO: 34107 - DNA, 80 bp, synthetic construct
  source 1..80: mol_type = other DNA
agtgtgaatgtaggctttggtataactgtgacaattcagagatgagccctcacaatatatttcagaggtctctctgcctt

SEQ ID NO: 34108 - DNA, 80 bp, synthetic construct
  source 1..80: mol_type = other DNA
tctttttatcagaaaagttagcttttgcttagaagctgccacagtgggttgaattgtccagtccctgtcattaaaggtgg

SEQ ID NO: 34109 - DNA, 80 bp, synthetic construct
  source 1..80: mol_type = other DNA
ggtgcacacacattatttctatgggttcaaatgggaatgccattttaatggtatttaaaacgttatcttcgatatgagga

SEQ ID NO: 34110 - DNA, 80 bp, synthetic construct; identical to SEQ ID NO: 12418
  source 1..80: mol_type = other DNA

SEQ ID NO: 34111 - DNA, 80 bp, synthetic construct
  source 1..80: mol_type = other DNA
ggtaggagttattttccaggaaaattttttttttcagacacattagcttatctagatactattgaatcagtatttgggaa

SEQ ID NO: 34112 - DNA, 80 bp, synthetic construct
  source 1..80: mol_type = other DNA
aaaattaaacaattagccgggcatggtggcatgcacctgtaggccttaggaggcttaggcaggaggatcacttgaaccta

SEQ ID NO: 34113 - DNA, 80 bp, synthetic construct; identical to SEQ ID NO: 12419
  source 1..80: mol_type = other DNA

SEQ ID NO: 34114 - DNA, 80 bp, synthetic construct
  source 1..80: mol_type = other DNA
agtgctcataatatattataaccattattattatgttgcatgttcagtacctggcagagtatttaatactgtagatcagg

SEQ ID NO: 34115 - DNA, 80 bp, synthetic construct
  source 1..80: mol_type = other DNA
ttttcacatcaagctcaggaagagaaaaatttctaataagcagaaactatagattttagacgggtcacgatagttccctt

SEQ ID NO: 34116 - DNA, 80 bp, synthetic construct
  source 1..80: mol_type = other DNA
atttctatgtgcatgtattttatttcaaaattatcaagagataattttgaaataattagagctgtctaaaacagaaaaaa

SEQ ID NO: 34117 - DNA, 80 bp, synthetic construct
  source 1..80: mol_type = other DNA
taaaaaaatattttcgatgacataaacccacacattgcctcaaacctcaacctccattcactaacaattcattgaaagaa

SEQ ID NO: 34118 - DNA, 80 bp, synthetic construct; identical to SEQ ID NO: 12420
  source 1..80: mol_type = other DNA

SEQ ID NO: 34119 - DNA, 80 bp, synthetic construct
  source 1..80: mol_type = other DNA
tcataggaagatatgctgcttctgcctcaggtttatatttaaaatgatttatagtttacaatttcttcctaaggtcatca

SEQ ID NO: 34120 - DNA, 80 bp, synthetic construct
  source 1..80: mol_type = other DNA
gcttcacattgtgtgggtttttatgagttcttgagcttttctttcttttttatctttctatgcatcagcaaagcaactgg

SEQ ID NO: 34121 - DNA, 80 bp, synthetic construct; identical to SEQ ID NO: 12421
  source 1..80: mol_type = other DNA

SEQ ID NO: 34122 - DNA, 80 bp, synthetic construct
  source 1..80: mol_type = other DNA
acaatattttatgaggtcccttctcacatttttgcagaggaatttttaatatacattaaattagaattgaacataaacta

SEQ ID NO: 34123 - DNA, 80 bp, synthetic construct
  source 1..80: mol_type = other DNA
atgataggtaaaatgcaaaagtttatcatttctgtctatttaatctaggtatctccaatcatagtttaactccaataaga

SEQ ID NO: 34124 - DNA, 80 bp, synthetic construct
  source 1..80: mol_type = other DNA
tcactttaaatgagaagaaagtcactttctccaagactgaaatgagtatatcaataacttcctgatacctataaacagta

SEQ ID NO: 34125 - DNA, 80 bp, synthetic construct; identical to SEQ ID NO: 12422
  source 1..80: mol_type = other DNA

SEQ ID NO: 34126 - DNA, 80 bp, synthetic construct
  source 1..80: mol_type = other DNA
attaattagtgctgatctgcatatgtttgataaggcatacccttgccacaaaagattatttattcctgaatctgccaaat

SEQ ID NO: 34127 - DNA, 80 bp, synthetic construct
  source 1..80: mol_type = other DNA
tgccagttaattttttactaattaagccattccatttctattgtaattgtgtgcaacatcaccagccttgctttgatttg

SEQ ID NO: 34128 - DNA, 80 bp, synthetic construct
  source 1..80: mol_type = other DNA
ccggtgttttcatggtctgagaaggcaattcttgaaatatttcactcagatgaggctggttttcttctgtgttccaattt

SEQ ID NO: 34129 - DNA, 80 bp, synthetic construct; identical to SEQ ID NO: 12423
  source 1..80: mol_type = other DNA

SEQ ID NO: 34130 - DNA, 80 bp, synthetic construct
  source 1..80: mol_type = other DNA
ccaactccattgagtcttagtaacatgctctgactcatgccaccataacaatatataccttcctcaattggcattcttac

SEQ ID NO: 34131 - DNA, 80 bp, synthetic construct
  source 1..80: mol_type = other DNA
ctaaaaccataggcactagaataagtcttgtcctgaggtatgagaaccaaagacatttattgctggctgcattctgctgc

SEQ ID NO: 34132 - DNA, 80 bp, synthetic construct
  source 1..80: mol_type = other DNA
tggtactgtcctcatgataatgagtgagttcttgtaagatgtggccctttaaaagtgtgtagcatctctcccctctttct

SEQ ID NO: 34133 - DNA, 80 bp, synthetic construct
  source 1..80: mol_type = other DNA
ggctcaggtatgtctttatagcaaaaacgggcctttattcaaagttcaggatttattactatgcttagatcttttcctgc

SEQ ID NO: 34134 - DNA, 80 bp, synthetic construct; identical to SEQ ID NO: 12424
  source 1..80: mol_type = other DNA

SEQ ID NO: 34135 - DNA, 80 bp, synthetic construct
  source 1..80: mol_type = other DNA
ggtatttcctagctaatgagcctgtccaactacagttgtcttttatgtttgtcctgtatgctaagaacacatcttaacag

SEQ ID NO: 34136 - DNA, 80 bp, synthetic construct
  source 1..80: mol_type = other DNA
atcttcatggttcaggaattctaagctatatgctatatgctatttacagtaacctactaataaccacaaagccaacatct

SEQ ID NO: 34137 - DNA, 80 bp, synthetic construct
  source 1..80: mol_type = other DNA
aatgttggagctggtttatttttctcttctacgatgtggtgttaaactgtaaatatagcataggaaagttatgaatgatc

SEQ ID NO: 34138 - DNA, 80 bp, synthetic construct; identical to SEQ ID NO: 12425
  source 1..80: mol_type = other DNA

SEQ ID NO: 34139 - DNA, 80 bp, synthetic construct
  source 1..80: mol_type = other DNA
gaatttttaaattaagtgaaagatgaatgaaaacacatatataaccaattatctttggttatataactagagttagagtt

SEQ ID NO: 34140 - DNA, 80 bp, synthetic construct
  source 1..80: mol_type = other DNA
ttagagtagagaagagttcattctctataataaaaaagacaaactgccatagctctcatcttcagtgcattaacgatatt

SEQ ID NO: 34141 - DNA, 80 bp, synthetic construct
  source 1..80: mol_type = other DNA
ggtaagcggactgattatatttgtttaggttcatttacttgacctctcttattataaaaacttatgatgtttctatggtt

SEQ ID NO: 34142 - DNA, 80 bp, synthetic construct; identical to SEQ ID NO: 12426
  source 1..80: mol_type = other DNA

SEQ ID NO: 34143 - DNA, 80 bp, synthetic construct
  source 1..80: mol_type = other DNA
attggaaatggtagagcaaggagggctttctgaaagtactagtgatatataattataaagaagctttactcttgaactgc

SEQ ID NO: 34144 - DNA, 80 bp, synthetic construct
  source 1..80: mol_type = other DNA
aaatattttgtcaaaaatgttttaattatttggttttacaaactaggagttcaaaaattaaatgtacttcatgaccaact

SEQ ID NO: 34145 - DNA, 80 bp, synthetic construct
  source 1..80: mol_type = other DNA
ataccctgtgaatagctaaaagtgaaataaaattcaagagtggcccagtttctagaacaattgcgctactatgaaagaac

SEQ ID NO: 34146 - DNA, 80 bp, synthetic construct; identical to SEQ ID NO: 12427
  source 1..80: mol_type = other DNA

SEQ ID NO: 34147 - DNA, 80 bp, synthetic construct
  source 1..80: mol_type = other DNA
acctatatccatggttgcatatctagtaagcattcgagatgagactagaactcaggtgtgcttatgtgatatggataata

SEQ ID NO: 34148 - DNA, 80 bp, synthetic construct
  source 1..80: mol_type = other DNA
caaatatgcaactatacctcagctaggaatcattctgtgtctcctctctgcttctgttggcttatctcttcatttttctt

SEQ ID NO: 34149 - DNA, 80 bp, synthetic construct; identical to SEQ ID NO: 12428
  source 1..80: mol_type = other DNA

SEQ ID NO: 34150 - DNA, 80 bp, synthetic construct
  source 1..80: mol_type = other DNA
aataattatcatttagtgaaataaaaactctccatagtcttgaatcaaacatgatggtccatttcctattcctgtggccc

SEQ ID NO: 34151 - DNA, 80 bp, synthetic construct
  source 1..80: mol_type = other DNA
tggaatggatagatactctacgtaagcagggaagacagtggaagaagtaggtaaggaagaacaaagaagagcacattgtt

SEQ ID NO: 34152 - DNA, 80 bp, synthetic construct
  source 1..80: mol_type = other DNA
tccagtgctcacccaacaccaaatgttcctcacctcttggatagtgtgtcacatatataaagcatgtggtgtcttatacc

SEQ ID NO: 34153 - DNA, 80 bp, synthetic construct; identical to SEQ ID NO: 12429
  source 1..80: mol_type = other DNA

SEQ ID NO: 34154 - DNA, 80 bp, synthetic construct
  source 1..80: mol_type = other DNA
aaatagagttgggtcagattgcagagtcctgaatgactgttttaaggagttcaaactttttctgcaggctttgagaatcc

SEQ ID NO: 34155 - DNA, 80 bp, synthetic construct
  source 1..80: mol_type = other DNA
tgggttcactgttcagataagaggttttggatacactctgccaaacggtaattaacttagaaatttctgctggcctgctt

SEQ ID NO: 34156 - DNA, 80 bp, synthetic construct
  source 1..80: mol_type = other DNA
tttaagaaaacttgtgtaaatctctggctctactctacagtcgactgcaaatgaaatgactactatttaaaggagtatct

SEQ ID NO: 34157 - DNA, 80 bp, synthetic construct
  source 1..80: mol_type = other DNA
gatcagaaataagcacgaagcagagattcacaagggcaaactaactattgggtggtgtttaccctcaaggttttcgccca

SEQ ID NO: 34158 - DNA, 80 bp, synthetic construct; identical to SEQ ID NO: 12430
  source 1..80: mol_type = other DNA

SEQ ID NO: 34159 - DNA, 80 bp, synthetic construct
  source 1..80: mol_type = other DNA
aaaatcactaatgacatgagaaaaaagatatcataggtgggagccagtgcaaagaaaaagctacaaaatcagatctacca

SEQ ID NO: 34160 - DNA, 80 bp, synthetic construct
  source 1..80: mol_type = other DNA
ggaaaattaaaacctaatggtttggggatgatatgatgatatatctgggcaagttacctgaaagcaaacaaatgtgatgc

SEQ ID NO: 34161 - DNA, 80 bp, synthetic construct; identical to SEQ ID NO: 12431
  source 1..80: mol_type = other DNA

SEQ ID NO: 34162 - DNA, 80 bp, synthetic construct
  source 1..80: mol_type = other DNA
agggaagaattaaaaaataaccagaggaaaaaaagactactcacaaaaataaaaagcagattgagagctcacttcttggc

SEQ ID NO: 34163 - DNA, 80 bp, synthetic construct
  source 1..80: mol_type = other DNA
caaaaggaattgtgagcaaatagtatatggtagagaaaattaatgaactaatgctaattctgcaactaggattgatgtga

SEQ ID NO: 34164 - DNA, 80 bp, synthetic construct
  source 1..80: mol_type = other DNA
tcataaaatctaaaatagtcacctttcgagggaggagaaaggaatataattgaggaggcacaaacagaatcaaaggtaca

SEQ ID NO: 34165 - DNA, 80 bp, synthetic construct
  source 1..80: mol_type = other DNA
tgtttgataactctaagattgtatgttttgcctcagtattactgcctctgttgtcatatggttctgaatgatgttttaga

SEQ ID NO: 34166 - DNA, 80 bp, synthetic construct; identical to SEQ ID NO: 12432
  source 1..80: mol_type = other DNA

SEQ ID NO: 34167 - DNA, 80 bp, synthetic construct
  source 1..80: mol_type = other DNA
gggagaggccttctcagaagtttcttttatctgactaaaggaaattcttcctgaagaaatgtcattgtcctgaactcctt

SEQ ID NO: 34168 - DNA, 80 bp, synthetic construct
  source 1..80: mol_type = other DNA
accctgtctctactaaagtacaaaatcagccaggcatggtggcaggcccctgtaatcccagctactcgggaggctgaggc

SEQ ID NO: 34169 - DNA, 80 bp, synthetic construct; identical to SEQ ID NO: 12433
  source 1..80: mol_type = other DNA

SEQ ID NO: 34170 - DNA, 80 bp, synthetic construct
  source 1..80: mol_type = other DNA
ctttcaactttattctagagattccaatcataaaaactttggaaaacagagggaaagcataaaacttccctatagaggta

SEQ ID NO: 34171 - DNA, 80 bp, synthetic construct
  source 1..80: mol_type = other DNA
aaagtttgtttctgccaagaatctatgaaactattcagctaatgaaaaatcatttatttgagcatacatacaaagtcaaa

SEQ ID NO: 34172 - DNA, 80 bp, synthetic construct
  source 1..80: mol_type = other DNA
gtcctacagcacttagccttaacaaacaattactggatctcacattcaactgaatacaaaaagcaatctttatcacaagg

SEQ ID NO: 34173 - DNA, 80 bp, synthetic construct; identical to SEQ ID NO: 12434
  source 1..80: mol_type = other DNA

SEQ ID NO: 34174 - DNA, 80 bp, synthetic construct
  source 1..80: mol_type = other DNA
aataaatttgattcacggaggagggacctgaaagcaaatggatttgttagttagttcaaacccagaattctgagataata

SEQ ID NO: 34175 - DNA, 80 bp, synthetic construct
  source 1..80: mol_type = other DNA
aattctaagccccccaatcatatgaataggccccctcctctcagtcaagggcattgcaaagttaacctgaaaaactagtt

SEQ ID NO: 34176 - DNA, 80 bp, synthetic construct
  source 1..80: mol_type = other DNA
acagcatcacataacaggctctgaaaggaattgaagtattttaccctaaactatatttctttaacatattttgaaatggt

SEQ ID NO: 34177 - DNA, 80 bp, synthetic construct
  source 1..80: mol_type = other DNA
cctggaggcttcatctgcataataagaatcttggtctccataatcccttatcttaacccagaaactcccttctattgatt

SEQ ID NO: 34178 - DNA, 80 bp, synthetic construct; identical to SEQ ID NO: 12435
  source 1..80: mol_type = other DNA

SEQ ID NO: 34179 - DNA, 80 bp, synthetic construct
  source 1..80: mol_type = other DNA
gtgaggcctctctagccatgtgaaactgtaagtacattaaacctcattattttgtaaattgcccagtcttgggtgtgtat

SEQ ID NO: 34180 - DNA, 80 bp, synthetic construct
  source 1..80: mol_type = other DNA
ttggaactccctagtgacttgttgaatagctttgacaaaaatgctgataatgataagggcaatgaaattcaggctgagat

SEQ ID NO: 34181 - DNA, 80 bp, synthetic construct; identical to SEQ ID NO: 12436
  source 1..80: mol_type = other DNA

SEQ ID NO: 34182 - DNA, 80 bp, synthetic construct
  source 1..80: mol_type = other DNA
gtggtaggtgcctgtaatcacagctactcaggaggctgaggcaggagaatcacttgaacctgggaggcggaggttgcagt

SEQ ID NO: 34183 - DNA, 80 bp, synthetic construct
  source 1..80: mol_type = other DNA
gagaaattcaagctgactgcagaaatttgcataagtaacgaggagccaaatgctaatcccaaagacaactgaaaaaatgc

SEQ ID NO: 34184 - DNA, 80 bp, synthetic construct
  source 1..80: mol_type = other DNA
ctaaaatgggccaaggaacagctcaggctgttgcttcagagcgtggaagcctcaggccttggcagcttccacataatgtt

SEQ ID NO: 34185 - DNA, 80 bp, synthetic construct
  source 1..80: mol_type = other DNA
gtgacatcagtgccctagagtccctactagggcactgcctagtggagctgtgagaagagggccaccatcctccagacccc

SEQ ID NO: 34186 - DNA, 80 bp, synthetic construct; identical to SEQ ID NO: 12437
  source 1..80: mol_type = other DNA

SEQ ID NO: 34187 - DNA, 80 bp, synthetic construct
  source 1..80: mol_type = other DNA
tggactgtggaagtttgagttaatgctgaaatgagttaagattctgggggactgttgggaaggtatgattggttttgaaa

SEQ ID NO: 34188 - DNA, 80 bp, synthetic construct
  source 1..80: mol_type = other DNA
gtgaataaatctcatgagatctgatggttttataaaaggagtttttctgcacaagctctctctttctttgcctgctgtca

SEQ ID NO: 34189 - DNA, 80 bp, synthetic construct; identical to SEQ ID NO: 12438
  source 1..80: mol_type = other DNA

SEQ ID NO: 34190 - DNA, 80 bp, synthetic construct
  source 1..80: mol_type = other DNA
cctgggaggaagaggccgcagtaagctatgattgcaccactgcactccagcctggatgacatggagagaccctgttttta

SEQ ID NO: 34191 - DNA, 80 bp, synthetic construct
  source 1..80: mol_type = other DNA
tacaatcaaaatcttcctatcactttggttaaaatactgattgagaccctatcactagcttgctgaagtagctttgcaaa

SEQ ID NO: 34192 - DNA, 80 bp, synthetic construct
  source 1..80: mol_type = other DNA
atacattttaagtaacaatcgagtcagtcacttagatgcctgtctcggtgtcaagattgataaaagcatctccaaatgat

SEQ ID NO: 34193 - DNA, 80 bp, synthetic construct
  source 1..80: mol_type = other DNA
atttggggctaaatgggaagttatgtgaccacgctattttggggaaacaccaaagagacctccttctggtgattcacaag

SEQ ID NO: 34194 - DNA, 80 bp, synthetic construct; identical to SEQ ID NO: 12439
  source 1..80: mol_type = other DNA

SEQ ID NO: 34195 - DNA, 80 bp, synthetic construct
  source 1..80: mol_type = other DNA
aggatgtttcgttctctcatagaaactaacgataaaatatgtctctaagttgtttttcggaaatctgtacctccaccgaa

SEQ ID NO: 34196 - DNA, 80 bp, synthetic construct
  source 1..80: mol_type = other DNA
ttctcttccttaactgattgcaaatcagaaaacatctgaatctacctatgaactgtaagccccctgcttcatgatatcct

SEQ ID NO: 34197 - DNA, 80 bp, synthetic construct
  source 1..80: mol_type = other DNA
ttggtgccctgcaataaatgcttcactctctctcgctgctatcaggttgtcagtgtttgtccttgctgagccaggtgagc

SEQ ID NO: 34198 - DNA, 80 bp, synthetic construct; identical to SEQ ID NO: 12440
  source 1..80: mol_type = other DNA

SEQ ID NO: 34199 - DNA, 80 bp, synthetic construct
  source 1..80: mol_type = other DNA
ttcagctctgctattgtcacaggaaggtagtcatagacaacattactgagtgagtgtgtctatgttccaataaaaaatta

SEQ ID NO: 34200 - DNA, 80 bp, synthetic construct
  source 1..80: mol_type = other DNA
caaaattcatattttaaaatttaattatcaatgtgatagttttagaaggtgggcattttagaggtaattaggtcatgagg

SEQ ID NO: 34201 - DNA, 80 bp, synthetic construct
  source 1..80: mol_type = other DNA
acttctcaacctccagaactgtgagaaacaaatctgttgtttagaatctaacccatctatgacattttgttatagcagcc

SEQ ID NO: 34202 - DNA, 80 bp, synthetic construct; identical to SEQ ID NO: 12441
  source 1..80: mol_type = other DNA

SEQ ID NO: 34203 - DNA, 80 bp, synthetic construct
  source 1..80: mol_type = other DNA
ccaaaattatcagagctggctctgtgatcctaatggccctctgtagatagtcaccactaatgtttatcagcaggaattat

SEQ ID NO: 34204 - DNA, 80 bp, synthetic construct
  source 1..80: mol_type = other DNA
aaccaaaggctaaagaatgagtgatttatatacactgcagccttccagaattccaacttgttagctaaaatagctctaag

SEQ ID NO: 34205 - DNA, 80 bp, synthetic construct; identical to SEQ ID NO: 12442
  source 1..80: mol_type = other DNA

SEQ ID NO: 34206 - DNA, 80 bp, synthetic construct
  source 1..80: mol_type = other DNA
ctaatatacagagaaatgtgaaagattccaggtatctgaacaactggaagcaaagtatctgattgtttacttagataaca

SEQ ID NO: 34207 - DNA, 80 bp, synthetic construct
  source 1..80: mol_type = other DNA
ttgctaaatgtgttgatgttattgagaggaattaggaggtgctccaatggactgagggaccagattaagagatacaggta

SEQ ID NO: 34208 - DNA, 80 bp, synthetic construct
  source 1..80: mol_type = other DNA
gtaaacagcctctttctatttcactttcctcattagtaaaatgaagatagtcagagataacatctcaaaaattaattgac

SEQ ID NO: 34209 - DNA, 80 bp, synthetic construct; identical to SEQ ID NO: 12443
  source 1..80: mol_type = other DNA

SEQ ID NO: 34210 - DNA, 80 bp, synthetic construct
  source 1..80: mol_type = other DNA
atcccaacactttgggaggccaagacaggcagatcacctgaggtcaggagttcgagaccagcttggccaacatagcgaaa

SEQ ID NO: 34211 - DNA, 80 bp, synthetic construct
  source 1..80: mol_type = other DNA
ttcatctcaaaaaaaaaaaggtttctgaattagttatccacactgcttgatctggtaatgggaaaggatttgagctggag

SEQ ID NO: 34212 - DNA, 80 bp, synthetic construct
  source 1..80: mol_type = other DNA
gtctttaacttcaatatgttttaaaggggtcaatagggaaattataaaaacaaagatgggggtcccaggacagggaataa

SEQ ID NO: 34213 - DNA, 80 bp, synthetic construct; identical to SEQ ID NO: 12444
  source 1..80: mol_type = other DNA

SEQ ID NO: 34214 - DNA, 80 bp, synthetic construct
  source 1..80: mol_type = other DNA
actgtaacctcagcctgccgggtccaagcgattctcctgccacagcctcccgaggtagctgggattacaggcgcccacca

SEQ ID NO: 34215 - DNA, 80 bp, synthetic construct
  source 1..80: mol_type = other DNA
ttcagagatgtttgaagtagtgccttcagtttttggcaaactagaaaactttaagtggaaaatgtaaaaaaagagacagg

SEQ ID NO: 34216 - DNA, 80 bp, synthetic construct
  source 1..80: mol_type = other DNA
taatgtgcacaataattagaaactactcgaaagcatttcaattgtactttcaaacatccaaagctatttaaagaggcaat

SEQ ID NO: 34217 - DNA, 80 bp, synthetic construct
  source 1..80: mol_type = other DNA
atcacttttgataggttcagaggcaacaacctgagaaagagtccatacatggttccaatttttagtacactttcttcctt

SEQ ID NO: 34218 - DNA, 80 bp, synthetic construct; identical to SEQ ID NO: 12445
  source 1..80: mol_type = other DNA

SEQ ID NO: 34219 - DNA, 80 bp, synthetic construct
  source 1..80: mol_type = other DNA
ttttccagctttattgaggaataactggcaaaacttgtatatatttaagatatgcaatgtgatgacttcatatatcaaac

SEQ ID NO: 34220 - DNA, 80 bp, synthetic construct
  source 1..80: mol_type = other DNA
cagaacatattcatcttaaaattgtaagtgtgtaccctttaatcaacatcttccaatttccaacctgcttcccaaaatct

SEQ ID NO: 34221 - DNA, 80 bp, synthetic construct
  source 1..80: mol_type = other DNA
aggatttccttcttttatggcagaataatattccatgtgtaggcatacataccacattttctttttttattcattcatca

SEQ ID NO: 34222 - DNA, 80 bp, synthetic construct; identical to SEQ ID NO: 12446
  source 1..80: mol_type = other DNA

SEQ ID NO: 34223 - DNA, 80 bp, synthetic construct
  source 1..80: mol_type = other DNA
gattgcttgagcccagtagtttgagaccagcctgggcaacatggcaaaaccccatctctacaaaaaacatagaaaaaaac

SEQ ID NO: 34224 - DNA, 80 bp, synthetic construct
  source 1..80: mol_type = other DNA
ccagcaattttatttctgggtgtatatcaaaagagaatgaaatcatttactgaatttaaaaaagaagttaaatacttatg

SEQ ID NO: 34225 - DNA, 80 bp, synthetic construct; identical to SEQ ID NO: 12447
  source 1..80: mol_type = other DNA

SEQ ID NO: 34226 - DNA, 80 bp, synthetic construct
  source 1..80: mol_type = other DNA
taataacaacttaaggttcagtttttctgtcacagtttaagattaataaagaaacaaaaaataaatgataaacacagaag

SEQ ID NO: 34227 - DNA, 80 bp, synthetic construct
  source 1..80: mol_type = other DNA
atagaattctataattaataaaatgcaattcagacataaactcctatcattgacttttggaattatgaaaaaataattcc

SEQ ID NO: 34228 - DNA, 80 bp, synthetic construct; identical to SEQ ID NO: 12448
  source 1..80: mol_type = other DNA

SEQ ID NO: 34229 - DNA, 80 bp, synthetic construct
  source 1..80: mol_type = other DNA
ttaaaaacatatagataaaacagaagaagtagaagaaaacatatgttaacacatgcctcaactttaaatgttggaaaact

SEQ ID NO: 34230 - DNA, 80 bp, synthetic construct
  source 1..80: mol_type = other DNA
gctgagttgtggcctttcctctagccctggggtagccaaattttatttgtaaagagccatttagcaaatacttactcttt

SEQ ID NO: 34231 - DNA, 80 bp, synthetic construct
  source 1..80: mol_type = other DNA
agcctcagagatgtgaaagacttgacttttggcctaatcctccttggcctaatcctccttgcaacaataactcaaaaagt

SEQ ID NO: 34232 - DNA, 80 bp, synthetic construct; identical to SEQ ID NO: 12449
  source 1..80: mol_type = other DNA

SEQ ID NO: 34233 - DNA, 80 bp, synthetic construct
  source 1..80: mol_type = other DNA
cctttttaaagacaaataaacttgatgctacatttctgggttggactatcaatcaaaatccaaaaataactgctgctggg

SEQ ID NO: 34234 - DNA, 80 bp, synthetic construct
  source 1..80: mol_type = other DNA
gagataaaatgatccaattttatacttatcaagtcagaatttaatgataaaactatgcactggtagcagcataaagaaat

SEQ ID NO: 34235 - DNA, 80 bp, synthetic construct
  source 1..80: mol_type = other DNA
taccatgtttagcattatcgcaacaaaaatactaaaaaaaaaacagcttatatgtcaactacaggcacacctaggagatg

SEQ ID NO: 34236 - DNA, 80 bp, synthetic construct
  source 1..80: mol_type = other DNA
ttctttattgctaaaaactgctaatgatcatctgagccttctgagagtcaaaacctttctgctggtggaaagtctggctt

SEQ ID NO: 34237 - DNA, 80 bp, synthetic construct; identical to SEQ ID NO: 12450
  source 1..80: mol_type = other DNA

SEQ ID NO: 34238 - DNA, 80 bp, synthetic construct
  source 1..80: mol_type = other DNA
ttgctatttctaacatatcttcagttactccctccaccaaagttttgaacttcacttgaactcagtgagagatatgcaac

SEQ ID NO: 34239 - DNA, 80 bp, synthetic construct
  source 1..80: mol_type = other DNA
tttttttttaagacggagtctcgctctgtcgcccaggccggactgcggactgcagtggcgcaatctcggctcactgcaag

SEQ ID NO: 34240 - DNA, 80 bp, synthetic construct; identical to SEQ ID NO: 12451
  source 1..80: mol_type = other DNA

SEQ ID NO: 34241 - DNA, 80 bp, synthetic construct
  source 1..80: mol_type = other DNA
gattgtcaagaaggagtcagtaggtctcaaccttaggcttaaaatgttcagtaaaccatgctgtaaatagatgtgctgtc

SEQ ID NO: 34242 - DNA, 80 bp, synthetic construct
  source 1..80: mol_type = other DNA
gactatagccatgcatcaccatgcccagctattttttgtatttttagtagagacgggttttcaccatgttggccaggatg

SEQ ID NO: 34243 - DNA, 80 bp, synthetic construct
  source 1..80: mol_type = other DNA
tgcaatttgcccattacacgagagttagcatgtcttttgaagtcattcattcactcctcttgtttagctgtaaaagtcct

SEQ ID NO: 34244 - DNA, 80 bp, synthetic construct
  source 1..80: mol_type = other DNA
tcgaaaatctgttatctaatgtagttaccttcatcagttctcttagctggatcgggatagctcactgcagcttctacatc

SEQ ID NO: 34245 - DNA, 80 bp, synthetic construct; identical to SEQ ID NO: 12452
  source 1..80: mol_type = other DNA

SEQ ID NO: 34246 - DNA, 80 bp, synthetic construct
  source 1..80: mol_type = other DNA
tctagcttttgatttaaagtgagatgagttagtcttcctctcacttgaacacttagagaacactgttgtattattaattg

SEQ ID NO: 34247 - DNA, 80 bp, synthetic construct
  source 1..80: mol_type = other DNA
ttacaataacatcaaagatcattggtgtaacagatgaccctaacagacataatagtactaaaaaagtttgaaacattgca

SEQ ID NO: 34248 - DNA, 80 bp, synthetic construct; identical to SEQ ID NO: 12453
  source 1..80: mol_type = other DNA

SEQ ID NO: 34249 - DNA, 80 bp, synthetic construct
  source 1..80: mol_type = other DNA
ctcagtagcagcattaaatgctagaaagcaaggtgtaatgtgttgaaactttttaagaaaaataatttttttttactcta

SEQ ID NO: 34250 - DNA, 80 bp, synthetic construct
  source 1..80: mol_type = other DNA
gaagtacacttctggaatacgaaagacttgtctccagatgaccgatggaaactgacagaatctttggaattatgtgtaaa

SEQ ID NO: 34251 - DNA, 80 bp, synthetic construct
  source 1..80: mol_type = other DNA
gtatagcttaacaagatcaaggaagaagaatgtgaaaagacgaggcagggaattgctgaatttcatcaaaatatttttgg

SEQ ID NO: 34252 - DNA, 80 bp, synthetic construct
  source 1..80: mol_type = other DNA
ccagcctggccaacatggtgaaaccccgtctctactaataatacaaaattagccgagcatggtggcatgcacctgtaatc

SEQ ID NO: 34253 - DNA, 80 bp, synthetic construct; identical to SEQ ID NO: 12454
  source 1..80: mol_type = other DNA

SEQ ID NO: 34254 - DNA, 80 bp, synthetic construct
  source 1..80: mol_type = other DNA
tatgacaaaaattttaaaagactgataacatccagtgctagagatcggaggtagaggcagggagggatgctatcttatat

SEQ ID NO: 34255 - DNA, 80 bp, synthetic construct
  source 1..80: mol_type = other DNA
acaaaaattgtaaaacccaagtgttcatcaaaaaagtaatggttaagcaaataatactgtatataatccatactctgaga

SEQ ID NO: 34256 - DNA, 80 bp, synthetic construct
  source 1..80: mol_type = other DNA
aaaagtcatgattcctttggttataatgtttcataattgatagctgcattggcatggatttttgcctaacataaatattt

SEQ ID NO: 34257 - DNA, 80 bp, synthetic construct; identical to SEQ ID NO: 12455
  source 1..80: mol_type = other DNA

SEQ ID NO: 34258 - DNA, 80 bp, synthetic construct
  source 1..80: mol_type = other DNA
gtatccagttcttcccattgcattaaactgtcttattcctcctttaaagtggtgttatccatctgaacacatattcaatt

SEQ ID NO: 34259 - DNA, 80 bp, synthetic construct
  source 1..80: mol_type = other DNA
catgtgagtgctaacacagaaaatgtatacttaaattctaccttttttcttcaagtaagggctgaatcagattcaggtac

SEQ ID NO: 34260 - DNA, 80 bp, synthetic construct; identical to SEQ ID NO: 12456
  source 1..80: mol_type = other DNA

SEQ ID NO: 34261 - DNA, 80 bp, synthetic construct
  source 1..80: mol_type = other DNA
tgcccctaacttcctatgatggaagctaagatttcagctcttttatataacctctcaagcaaatttattctcctccaact

SEQ ID NO: 34262 - DNA, 80 bp, synthetic construct
  source 1..80: mol_type = other DNA
catttacttgacttttcccgaatcacaggctgtcttcccacataccatggtaacttcataaaatggctcataatctgact

SEQ ID NO: 34263 - DNA, 80 bp, synthetic construct
  source 1..80: mol_type = other DNA
tgcagtccagtgttcactttcttcatttatttactcgtttcagatgagcacgctctccagttgcttcctgagaaagggct

SEQ ID NO: 34264 - DNA, 80 bp, synthetic construct
  source 1..80: mol_type = other DNA
ggctggtggggagaacattagggaagatagttaacgcatgctgggcttaatacctaagtgatgggttgttaggtgcagca

SEQ ID NO: 34265 - DNA, 80 bp, synthetic construct; identical to SEQ ID NO: 12457
  source 1..80: mol_type = other DNA

SEQ ID NO: 34266 - DNA, 80 bp, synthetic construct
  source 1..80: mol_type = other DNA
agcacaaagtgaatgaactaagacatgacatctgactgatattttggttggtatagaattcaaaactaaaaataatttcc

SEQ ID NO: 34267 - DNA, 80 bp, synthetic construct
  source 1..80: mol_type = other DNA
taatcccagctactcaggaggctaagtaggagaatcgtttgaagccgggaggtggaggttgcagtgagcggagatagcac

SEQ ID NO: 34268 - DNA, 80 bp, synthetic construct; identical to SEQ ID NO: 12458
  source 1..80: mol_type = other DNA

SEQ ID NO: 34269 - DNA, 80 bp, synthetic construct
  source 1..80: mol_type = other DNA
gtcttttctttcctgttttcagttctgtcattttgttcttctttctgaaagatgttcacaactttcccttccaactctta

SEQ ID NO: 34270 - DNA, 80 bp, synthetic construct
  source 1..80: mol_type = other DNA
actgattatttttccgctcactgtattcactcaggtaactatgaattcatctcttatgttagactattgtggtctctgtc

SEQ ID NO: 34271 - DNA, 80 bp, synthetic construct
  source 1..80: mol_type = other DNA
tttattctgtttgagattcattgagcttcctcaatgtatacattaggtctttcaacatttctggacagtctcagctaact

SEQ ID NO: 34272 - DNA, 80 bp, synthetic construct; identical to SEQ ID NO: 12459
  source 1..80: mol_type = other DNA

SEQ ID NO: 34273 - DNA, 80 bp, synthetic construct
  source 1..80: mol_type = other DNA
tcatttaatattttattcatattttctatctcctttcttcagatcactatttttctcttcagctatttaatcaattcatt

SEQ ID NO: 34274 - DNA, 80 bp, synthetic construct
  source 1..80: mol_type = other DNA
ttcagatatctgcagttggctaagtaacttacaattagtacactcactttctgtcttctaatattttgttggtatccttt

SEQ ID NO: 34275 - DNA, 80 bp, synthetic construct
  source 1..80: mol_type = other DNA
aacaggaagttaatacaatgtattagttaaaggattttactactaatgcacaaccccaaatacccagattatgtgacaat

SEQ ID NO: 34276 - DNA, 80 bp, synthetic construct
  source 1..80: mol_type = other DNA
agtacattaataaattattttggccttccattttgcagtttttaagggctgaagagaacactcaatttttcatttgtact

SEQ ID NO: 34277 - DNA, 80 bp, synthetic construct; identical to SEQ ID NO: 12460
  source 1..80: mol_type = other DNA

SEQ ID NO: 34278 - DNA, 80 bp, synthetic construct
  source 1..80: mol_type = other DNA
actccaaaggcattgggatattttcattaatacctttagttttgttcttatttattatatgggtttataactcagttttt

SEQ ID NO: 34279 - DNA, 80 bp, synthetic construct
  source 1..80: mol_type = other DNA
tgagtaaaaaaagataaatcagaaatagccatgcaaatattaaaaataagatgttttggagattagtcatctttgaatca

SEQ ID NO: 34280 - DNA, 80 bp, synthetic construct; identical to SEQ ID NO: 12461
  source 1..80: mol_type = other DNA

SEQ ID NO: 34281 - DNA, 80 bp, synthetic construct
  source 1..80: mol_type = other DNA
cagcactttgggaggccaaggcgggcggatcacgaggtcaggagatcgacaccatcctggctaacacggtgaaaccccat

SEQ ID NO: 34282 - DNA, 80 bp, synthetic construct
  source 1..80: mol_type = other DNA
actctgtctcaaaaaacaaaacaaacaaacaagaaaaaacaatgagatatcataacatgcataagagaactgctaaaata

SEQ ID NO: 34283 - DNA, 80 bp, synthetic construct
  source 1..80: mol_type = other DNA
ccatcaattgcactcccttgtatttatcatagagaaatgacaacttatgtccaaacaaaaggagtacacaaattttcata

SEQ ID NO: 34284 - DNA, 80 bp, synthetic construct
  source 1..80: mol_type = other DNA
atatacatagcatggaatacaagtcagcaaaaaaaaaaggaactagctattgacataggcaaaatcttggatgcatctca

SEQ ID NO: 34285 - DNA, 80 bp, synthetic construct; identical to SEQ ID NO: 12462
  source 1..80: mol_type = other DNA

SEQ ID NO: 34286 - DNA, 80 bp, synthetic construct
  source 1..80: mol_type = other DNA
gtaagtttaatctgtacttcataagcttacctcaaattactgtgaacctacaagtgctaagtcagaagaatcatgcctat

SEQ ID NO: 34287 - DNA, 80 bp, synthetic construct
  source 1..80: mol_type = other DNA
cccaacaatccaggagttaccacccttttcttggaaatttcggcataatctgccacttaatttggatgtaatcaaaagtg

SEQ ID NO: 34288 - DNA, 80 bp, synthetic construct; identical to SEQ ID NO: 12463
  source 1..80: mol_type = other DNA

SEQ ID NO: 34289 - DNA, 80 bp, synthetic construct
  source 1..80: mol_type = other DNA
aaagctcaaatctaaagaatggatgaatttagcacaataaaggtaggaaaatgttgaccagccatgctcatctatacaca

SEQ ID NO: 34290 - DNA, 80 bp, synthetic construct
  source 1..80: mol_type = other DNA
acacttacaccaggacacaccacagccttgacctatggttattgtcctggttactcctgtcctattaaaataaggatgaa

SEQ ID NO: 34291 - DNA, 80 bp, synthetic construct
  source 1..80: mol_type = other DNA
aacaaacttagcattttaaataaaactggcacaaagtcccatagctaataaattgcagaggtgggattattcattagtta

SEQ ID NO: 34292 - DNA, 80 bp, synthetic construct; identical to SEQ ID NO: 12464
  source 1..80: mol_type = other DNA

SEQ ID NO: 34293 - DNA, 80 bp, synthetic construct
  source 1..80: mol_type = other DNA
gcctgccacataataaatgcaccataagctgtcattgtcatcatcaactcactgcatattgacaattccttatagtagaa

SEQ ID NO: 34294 - DNA, 80 bp, synthetic construct
  source 1..80: mol_type = other DNA
catatatattacatatattacaattatatattagtataacacactaataattgtataagtattatataacgtactaatta

SEQ ID NO: 34295 - DNA, 80 bp, synthetic construct
  source 1..80: mol_type = other DNA
aaatagaaacacaaattggtacatctgggcccccaccagaaggtgaacttaggtgtacagtttcaagaagcataacatga

SEQ ID NO: 34296 - DNA, 80 bp, synthetic construct; identical to SEQ ID NO: 12465
  source 1..80: mol_type = other DNA

SEQ ID NO: 34297 - DNA, 80 bp, synthetic construct
  source 1..80: mol_type = other DNA
aatatataatatattaacctaatgatatattatttcataatatagatactacataataaaatatacattattcgtagtat

SEQ ID NO: 34298 - DNA, 80 bp, synthetic construct
  source 1..80: mol_type = other DNA
gtgagttaattccttcatggtgcctgggatataagtgcacaggaatagttttaaatgagggaagcacctaatggaatgag

SEQ ID NO: 34299 - DNA, 80 bp, synthetic construct
  source 1..80: mol_type = other DNA
gttgtgtagcagaaaagcactggctctgcaattatacaaaccaaggaagaatgctggcttccttatttaacagctgaatg

SEQ ID NO: 34300 - DNA, 80 bp, synthetic construct
  source 1..80: mol_type = other DNA
aagggggttgctatacaaaaagatttgatcttacggttttgcaccatcatattaaacatgtttttccccaatagtagcaa

SEQ ID NO: 34301 - DNA, 80 bp, synthetic construct; identical to SEQ ID NO: 12466
  source 1..80: mol_type = other DNA

SEQ ID NO: 34302 - DNA, 80 bp, synthetic construct
  source 1..80: mol_type = other DNA
taagctcgatatagtcataaatttgtactccaagccctcattgacttcaatagggcttggacttgtggaatgattgcaga

SEQ ID NO: 34303 - DNA, 80 bp, synthetic construct
  source 1..80: mol_type = other DNA
gagagacttaaaatgactttaaggaaaatctctgtggtcacactctactccctattcacataacacaatttgaggaactt

SEQ ID NO: 34304 - DNA, 80 bp, synthetic construct; identical to SEQ ID NO: 12467
  source 1..80: mol_type = other DNA

SEQ ID NO: 34305 - DNA, 80 bp, synthetic construct
  source 1..80: mol_type = other DNA
aaatatacaggcttttgggtatcaaattacctttgaaaccccccacccagaagtatctctaacaaaatccatttgaaata

SEQ ID NO: 34306 - DNA, 80 bp, synthetic construct
  source 1..80: mol_type = other DNA
acttgctggtttgatctctttctccctcactcatctgtgacaagatgtcttttaaaatcaacaactttcatttcagtgtt

SEQ ID NO: 34307 - DNA, 80 bp, synthetic construct
  source 1..80: mol_type = other DNA
cttatttcagtgcaacctataatgttgggacacctttaaaatattgcagagagcactggagagaggataatcccctcgta

SEQ ID NO: 34308 - DNA, 80 bp, synthetic construct
  source 1..80: mol_type = other DNA
ttttgtctttaaagatttaagaagtaaaggtgtgagatcagggtcattgccttctccatagggctcctggctttgaattt

SEQ ID NO: 34309 - DNA, 80 bp, synthetic construct; identical to SEQ ID NO: 12468
  source 1..80: mol_type = other DNA

SEQ ID NO: 34310 - DNA, 80 bp, synthetic construct
  source 1..80: mol_type = other DNA
cacatcatttccatctggaagcaaaaaactctaacaagatagaagagggcaactcagtctttgttgagtatctgctgtgt

SEQ ID NO: 34311 - DNA, 80 bp, synthetic construct
  source 1..80: mol_type = other DNA
aaataatatatacacaataactacccaatgctagtttcacagaggaaaatggacctggtatacagataactctaaaaaaa

SEQ ID NO: 34312 - DNA, 80 bp, synthetic construct
  source 1..80: mol_type = other DNA
tgtgccaccatgctcagcttaaaaaaaagaatttaaatttagcatgatagaactgaaaagagctgatagctggttcacct

SEQ ID NO: 34313 - DNA, 80 bp, synthetic construct; identical to SEQ ID NO: 12469
  source 1..80: mol_type = other DNA

SEQ ID NO: 34314 - DNA, 80 bp, synthetic construct
  source 1..80: mol_type = other DNA
cacacacacacataattttaagataaaagaaagcttccagggtgggtcacatctaagccggctcctgaggatgaattgta

SEQ ID NO: 34315 - DNA, 80 bp, synthetic construct
  source 1..80: mol_type = other DNA
ttaccttgagtaatgagcggcctgcgcatccatgtgcacaatcatagtttgtggattgaataacaaaaacatcatgtgaa

SEQ ID NO: 34316 - DNA, 80 bp, synthetic construct; identical to SEQ ID NO: 12470
  source 1..80: mol_type = other DNA

SEQ ID NO: 34317 - DNA, 80 bp, synthetic construct
  source 1..80: mol_type = other DNA
tttaagagtttcaggcagtgtcctttctttgtgctccctcttcccttcattgaaagttaaaagtcaaaatgtaaatacag

SEQ ID NO: 34318 - DNA, 80 bp, synthetic construct
  source 1..80: mol_type = other DNA
gctgtaagacagtttgttaacaatttgtcatgacacctctgctgggtgggaggatgacacacatcattatcattattatt

SEQ ID NO: 34319 - DNA, 80 bp, synthetic construct
  source 1..80: mol_type = other DNA
ataattaaatagaatttgaaatttagaactctgcattagtacctatatcacatctgaaaaattattaacattttcagatc

SEQ ID NO: 34320 - DNA, 80 bp, synthetic construct
  source 1..80: mol_type = other DNA
atcttatgttcacttcctttgcaaaacaacaataaacagctggcaagtcagagataccagagtttttcctaacttctctc

SEQ ID NO: 34321 - DNA, 80 bp, synthetic construct; identical to SEQ ID NO: 12471
  source 1..80: mol_type = other DNA

SEQ ID NO: 34322 - DNA, 80 bp, synthetic construct
  source 1..80: mol_type = other DNA
ttcttattctcactacatcatccttccagtgaaagtaaacacccatttttacggggctttctttttctctctgactttgc

SEQ ID NO: 34323 - DNA, 80 bp, synthetic construct
  source 1..80: mol_type = other DNA
caatggcattccttgctctagcttggtttggtgcttcctctgtagttttatagctcttcgtttctaattctctcatagca

SEQ ID NO: 34324 - DNA, 80 bp, synthetic construct; identical to SEQ ID NO: 12472
  source 1..80: mol_type = other DNA

SEQ ID NO: 34325 - DNA, 80 bp, synthetic construct
  source 1..80: mol_type = other DNA
tcagactcctagagtaatgatctttctccttgctatctacagtatattaaatgctttccttttggcttctaattctgtat

SEQ ID NO: 34326 - DNA, 80 bp, synthetic construct
  source 1..80: mol_type = other DNA
aaactctatttttagatttgctattacaccatgtttctaacagaactgggtcaaattgcccctgatgaccacactttctg

SEQ ID NO: 34327 - DNA, 80 bp, synthetic construct
  source 1..80: mol_type = other DNA
gggaaacaacttcatacccactatgaagtttataacaaaaaagatgaacaacaaacaacaatgttggcgagtatgtgaag

SEQ ID NO: 34328 - DNA, 80 bp, synthetic construct
  source 1..80: mol_type = other DNA
cccctcaaaacttacatatgaatgaagaaatatttataataggtaaaagtagaaaaataccccatgaagggttatgaact

SEQ ID NO: 34329 - DNA, 80 bp, synthetic construct; identical to SEQ ID NO: 12473
  source 1..80: mol_type = other DNA

SEQ ID NO: 34330 - DNA, 80 bp, synthetic construct
  source 1..80: mol_type = other DNA
gaagttgatggttaagaacactaaatattatattttcgtattctgaattttttaaattacagggataaagctttccaagt

SEQ ID NO: 34331 - DNA, 80 bp, synthetic construct
  source 1..80: mol_type = other DNA
atatacagaattcactcttgtgatggctatatattaatggaagccagctacattttaaaaattattttacattttttata

SEQ ID NO: 34332 - DNA, 80 bp, synthetic construct
  source 1..80: mol_type = other DNA
ttattcttagtgataatgaacatacaatgtattgaaatagattaaaatttaatagaaaacaacattgaaatttatttgta

SEQ ID NO: 34333 - DNA, 80 bp, synthetic construct; identical to SEQ ID NO: 12474
  source 1..80: mol_type = other DNA

SEQ ID NO: 34334 - DNA, 80 bp, synthetic construct
  source 1..80: mol_type = other DNA
atgcttcaaatggaatgaatataatttttctacattcttgaaataaatatttttattttacatccatttttatgtctgag

SEQ ID NO: 34335 - DNA, 80 bp, synthetic construct
  source 1..80: mol_type = other DNA
caacttcaaattctccttggagaacagcgggaacaaaaaaacatccatatctatctaatcacatacagacttacttacaa

SEQ ID NO: 34336 - DNA, 80 bp, synthetic construct
  source 1..80: mol_type = other DNA
aatactgaaaagtttttcaagttttatttacacaatagtgtaagtcaatccaagggtcactgtgaacttgtggttctttg

SEQ ID NO: 34337 - DNA, 80 bp, synthetic construct
  source 1..80: mol_type = other DNA
ttctccaatggattcatttaatttatttgcagggtgaatttttatgttagtatttcagccataggtgacttattgaaatg

SEQ ID NO: 34338 - DNA, 80 bp, synthetic construct; identical to SEQ ID NO: 12475
  source 1..80: mol_type = other DNA

SEQ ID NO: 34339 - DNA, 80 bp, synthetic construct
  source 1..80: mol_type = other DNA
ttcaaatgtcttctaatcagtcattttgttatcttatattttcataaaagaggcattgttttagatgcatgggattatcg

SEQ ID NO: 34340 - DNA, 80 bp, synthetic construct
  source 1..80: mol_type = other DNA
gtaatttaggcttcagatgcatttctcaattgctcactgcagaatagctgcagaactgaaacaaaaccttcagtacaaaa

SEQ ID NO: 34341 - DNA, 80 bp, synthetic construct; identical to SEQ ID NO: 12476
  source 1..80: mol_type = other DNA

SEQ ID NO: 34342 - DNA, 80 bp, synthetic construct
  source 1..80: mol_type = other DNA
tgtacgacatagttctggacggagaagtgggtaatattatataacaaaggaaaaaatcaatatggagcctgtccaattac

SEQ ID NO: 34343 - DNA, 80 bp, synthetic construct
  source 1..80: mol_type = other DNA
ttggctctgcctatagtaacttgagtaaattttcaatcagtgtatcagagatctactcaattaaatccaattaatgtggc

SEQ ID NO: 34344 - DNA, 80 bp, synthetic construct
  source 1..80: mol_type = other DNA
aaaaccaaacagaaacacattagccaggtgtggtagtgcacgcctatagtcctagctacttgggaggctgagacaggagg

SEQ ID NO: 34345 - DNA, 80 bp, synthetic construct; identical to SEQ ID NO: 12477
  source 1..80: mol_type = other DNA

SEQ ID NO: 34346 - DNA, 80 bp, synthetic construct
  source 1..80: mol_type = other DNA
atagaaaagcatgtttacaaatgtattcctctgaggtcatgtatatgtcatataatacccactgctctttgtaatgcaat

SEQ ID NO: 34347 - DNA, 80 bp, synthetic construct
  source 1..80: mol_type = other DNA
cttctgttaaccaaaaagaacaggaggaaagaatttgtgaccactccttcatagtttaattggttaactgccacatacat

SEQ ID NO: 34348 - DNA, 80 bp, synthetic construct
  source 1..80: mol_type = other DNA
ggttggaggaatctagagaagtccattgtggccttattggtaccaggtaaagtagaatgagatgaggaccgagagacagg

SEQ ID NO: 34349 - DNA, 80 bp, synthetic construct; identical to SEQ ID NO: 12478
  source 1..80: mol_type = other DNA

SEQ ID NO: 34350 - DNA, 80 bp, synthetic construct
  source 1..80: mol_type = other DNA
tctaagcctcactagaatactgtaaaaaggcagagcaggtattatggtctattttgtaattcaacatgtggaagtttaga

SEQ ID NO: 34351 - DNA, 80 bp, synthetic construct
  source 1..80: mol_type = other DNA
aaaccataatttaaaacttaagagtatattgtgcctctctagccttctgcatgcaagcttgtttttctcttttcatatta

SEQ ID NO: 34352 - DNA, 80 bp, synthetic construct
  source 1..80: mol_type = other DNA
taccttatgctgagtattgtaaaagatccaaatatctttgtggcaatctcacgtaactccaactatcaggagtataactg

SEQ ID NO: 34353 - DNA, 80 bp, synthetic construct; identical to SEQ ID NO: 12479
  source 1..80: mol_type = other DNA

SEQ ID NO: 34354 - DNA, 80 bp, synthetic construct
  source 1..80: mol_type = other DNA
gacaaaatccagaaaaaaaaatctctatatgcaaatagttgtatgaaatgtaagggtttttaaataatgcattttcatat

SEQ ID NO: 34355 - DNA, 80 bp, synthetic construct
  source 1..80: mol_type = other DNA
gaactcttacacccttcactccaatatggaaacaaaatgttaacaaaaagttagggatggatgttggagattatgacatg

SEQ ID NO: 34356 - DNA, 80 bp, synthetic construct
  source 1..80: mol_type = other DNA
tgcttgatatatcgaaaaggtgtgagttgtctgttgctaaaagatgagctaaaagagatgcaactgtacagcaactagcc

SEQ ID NO: 34357 - DNA, 80 bp, synthetic construct; identical to SEQ ID NO: 12480
  source 1..80: mol_type = other DNA

SEQ ID NO: 34358 - DNA, 80 bp, synthetic construct
  source 1..80: mol_type = other DNA
aaattcattatattgctgaacaatgtattacattgcaaaataaaactggttgataagaggagggaggtagtcagtcagca

SEQ ID NO: 34359 - DNA, 80 bp, synthetic construct
  source 1..80: mol_type = other DNA
taaaattctataagagctcagacaatggagagaagataaccattgattaatgtagctccaggggacttgggtggtcattg

SEQ ID NO: 34360 - DNA, 80 bp, synthetic construct
  source 1..80: mol_type = other DNA
aaacctggtgataaaaccagttttgtcagaaaagagagtttgtatgaggagagaagtgaaagttattgttgaaatgataa

SEQ ID NO: 34361 - DNA, 80 bp, synthetic construct; identical to SEQ ID NO: 12481
  source 1..80: mol_type = other DNA

SEQ ID NO: 34362 - DNA, 80 bp, synthetic construct
  source 1..80: mol_type = other DNA
aagtcatcttacatcttttggtgtatatattttctgaactacagtttaagttgtctaaagtgaataccatacattacaca

SEQ ID NO: 34363 - DNA, 80 bp, synthetic construct
  source 1..80: mol_type = other DNA
caggatagaagtgagaaactgtttcagacacatgagatattgtagaaaaacatgcaaatgaggaaagcagggcaggatga

SEQ ID NO: 34364 - DNA, 80 bp, synthetic construct
  source 1..80: mol_type = other DNA
gaaatagtggtacttgaacattaagcacattgctagtcctttaggaaaaaggagcatacagcgaactgtaattttactaa

SEQ ID NO: 34365 - DNA, 80 bp, synthetic construct
  source 1..80: mol_type = other DNA
aggcaaggagaatattatggaattcaatccaactaatttcaaccaaagattgtatcatctaaacatacccaaaatatgga

SEQ ID NO: 34366 - DNA, 80 bp, synthetic construct; identical to SEQ ID NO: 12482
  source 1..80: mol_type = other DNA

SEQ ID NO: 34367 - DNA, 80 bp, synthetic construct
  source 1..80: mol_type = other DNA
tattggaaaattgattagtctgcttcatggttaaaaatattactttggctataattaaaagatttttacttaatattcga

SEQ ID NO: 34368 - DNA, 80 bp, synthetic construct
  source 1..80: mol_type = other DNA
tcaatattgaatgtgtacacacgagtgtgcaagcacacatacaggttcttttgttgatgaagaaatgagggttacgtcat

SEQ ID NO: 34369 - DNA, 80 bp, synthetic construct; identical to SEQ ID NO: 12483
  source 1..80: mol_type = other DNA

SEQ ID NO: 34370 - DNA, 80 bp, synthetic construct
  source 1..80: mol_type = other DNA
taatgcactggactattgttaatttattgtttcatagactttcatgatgaggtaatagataaactcttaataataaataa

SEQ ID NO: 34371 - DNA, 80 bp, synthetic construct
  source 1..80: mol_type = other DNA
tcaactttaaatattatctttagcatttacagtcctgacaatgttattcctcagttctcatctcgttgataggtgctggc

SEQ ID NO: 34372 - DNA, 80 bp, synthetic construct
  source 1..80: mol_type = other DNA
gaaaaagaaaaggcttatggataggacatgagagctgtctccaagtaactgaagagctgtcatgtggaattgtggttcaa

SEQ ID NO: 34373 - DNA, 80 bp, synthetic construct; identical to SEQ ID NO: 12484
  source 1..80: mol_type = other DNA

SEQ ID NO: 34374 - DNA, 80 bp, synthetic construct
  source 1..80: mol_type = other DNA
ttggagaactagaaagggggccagtgtggctggcaaaaaattggcttctgatgacagcagattcacagaagctgttaaat

SEQ ID NO: 34375 - DNA, 80 bp, synthetic construct
  source 1..80: mol_type = other DNA
aagtcctcagtgtaaatgctcaggctgaactctaagtctctgaagacatgagtgcagtcaaactgccttcattttagaca

SEQ ID NO: 34376 - DNA, 80 bp, synthetic construct
  source 1..80: mol_type = other DNA
cttgtgatgtgccctaaagaatggaacacaatgaaaattatattgtgcaacttccgagccttggcatcaagaggatttgc

SEQ ID NO: 34377 - DNA, 80 bp, synthetic construct
  source 1..80: mol_type = other DNA
caaacagtctgtcaactgattgcaaatccatgagtgagaagaactaatatcatgtgaagcaaaggcaagtcaacccagct

SEQ ID NO: 34378 - DNA, 80 bp, synthetic construct; identical to SEQ ID NO: 12485
  source 1..80: mol_type = other DNA

SEQ ID NO: 34379 - DNA, 80 bp, synthetic construct
  source 1..80: mol_type = other DNA
aatacatctctagaaagaacactgaacgtgttcagttgagtgtttctacccaagtgtgataaggtactaaaagagagaaa

SEQ ID NO: 34380 - DNA, 80 bp, synthetic construct
  source 1..80: mol_type = other DNA
atattgcagtaagacagtttgttaagactttagaaagacctaaggcaggtcctagtagattctctcagggcttctaacat

SEQ ID NO: 34381 - DNA, 80 bp, synthetic construct
  source 1..80: mol_type = other DNA
aaagaaacaattcaaaacaaagagaggaatagggtgctataactttatttgggcaggaacaggctgacaaaactactcag

SEQ ID NO: 34382 - DNA, 80 bp, synthetic construct; identical to SEQ ID NO: 12486
  source 1..80: mol_type = other DNA

SEQ ID NO: 34383 - DNA, 80 bp, synthetic construct
  source 1..80: mol_type = other DNA
accaaataatctcataggcatttggacttgatgaagatcataagataatgaaccttgagcctaatgccatgattagatga

SEQ ID NO: 34384 - DNA, 80 bp, synthetic construct
  source 1..80: mol_type = other DNA
ggactgtttgcaaagatggctgcaataatccttccctacttctatgcatgtccctttgtaatgtggttttgcacttcttt

SEQ ID NO: 34385 - DNA, 80 bp, synthetic construct
  source 1..80: mol_type = other DNA
tgtgaagtagccttatcaaacctaaaccagccaccttgataagacattgtgaggcaagagagattatgaagagatagaga

SEQ ID NO: 34386 - DNA, 80 bp, synthetic construct; identical to SEQ ID NO: 12487
  source 1..80: mol_type = other DNA

SEQ ID NO: 34387 - DNA, 80 bp, synthetic construct
  source 1..80: mol_type = other DNA
caactataacaatgacctataatattacacatgtccaagacagtgatttagaagcagctttggattaagaccagggcctc

SEQ ID NO: 34388 - DNA, 80 bp, synthetic construct
  source 1..80: mol_type = other DNA
agggcagaactatatataaaacatggatgaaatttatgagaagggtgatatggggtcaataaaaggaacatatttctaaa

SEQ ID NO: 34389 - DNA, 80 bp, synthetic construct; identical to SEQ ID NO: 12488
  source 1..80: mol_type = other DNA

SEQ ID NO: 34390 - DNA, 80 bp, synthetic construct
  source 1..80: mol_type = other DNA
cacgtatagatgcactatagaaaagcaacatagaatatgaaaattttttaattggccttttctccttcgattgagatcaa

SEQ ID NO: 34391 - DNA, 80 bp, synthetic construct
  source 1..80: mol_type = other DNA
aaacatttatcaagcctctcctatacattaagctttgtgctatggggtataaggttgtgttttacagaaacagctacata

SEQ ID NO: 34392 - DNA, 80 bp, synthetic construct
  source 1..80: mol_type = other DNA
aagttaatctatgtatagaaagggcttacaagtgaagtgaactgttgcttgggtttagatttgatttaggatagaaataa

SEQ ID NO: 34393 - DNA, 80 bp, synthetic construct; identical to SEQ ID NO: 12489
  source 1..80: mol_type = other DNA

SEQ ID NO: 34394 - DNA, 80 bp, synthetic construct
  source 1..80: mol_type = other DNA
ctcaagaaaagcaaccttgttattttgaaacattcttggaaagacagatttgaagaggaagaatatagttaataaaagcc

SEQ ID NO: 34395 - DNA, 80 bp, synthetic construct
  source 1..80: mol_type = other DNA
cactgtaagtcaatggtctatcggtgctacagcatattagacctcaatctggcatctacaaatgtcaagagtataaaata

SEQ ID NO: 34396 - DNA, 80 bp, synthetic construct
  source 1..80: mol_type = other DNA
caggataataaaatttctagcagatgttcagtcagggctctaattttcaccgaactcccttggtaagcatttaatttctt

SEQ ID NO: 34397 - DNA, 80 bp, synthetic construct
  source 1..80: mol_type = other DNA
tcttcaattgccataataaattataataaggctaatctaaattggtatactataatgtcaccgaaatgtatagtacatgt

SEQ ID NO: 34398 - DNA, 80 bp, synthetic construct; identical to SEQ ID NO: 12490
  source 1..80: mol_type = other DNA

SEQ ID NO: 34399 - DNA, 80 bp, synthetic construct
  source 1..80: mol_type = other DNA
atgtgccaaatttaatttccatttgttcataactccccttttgaaccagcatcacacacttctaaattgatagattaaat

SEQ ID NO: 34400 - DNA, 80 bp, synthetic construct
  source 1..80: mol_type = other DNA
ttattgcaagcgaagaaaacatcaaattcaaagcagcaaacacctctttttttcagctataattcttcacctgtgcccaa

SEQ ID NO: 34401 - DNA, 80 bp, synthetic construct
  source 1..80: mol_type = other DNA
tcaatattctacaaggttataaacaattgattcatggtattctaaagctgaatctagtatattctgttacgcttcacact

SEQ ID NO: 34402 - DNA, 80 bp, synthetic construct; identical to SEQ ID NO: 12491
  source 1..80: mol_type = other DNA

SEQ ID NO: 34403 - DNA, 80 bp, synthetic construct
  source 1..80: mol_type = other DNA
gttgttcttttctaattcaaaaccatataaggatgcaatcctcttgtataaagcatcttactttgaaaacatgcatttat

SEQ ID NO: 34404 - DNA, 80 bp, synthetic construct
  source 1..80: mol_type = other DNA
gaatctatcttatcaccaataccaataagttacactgagattcttttcaacataaattgaattccagaattttgtgcaaa

SEQ ID NO: 34405 - DNA, 80 bp, synthetic construct; identical to SEQ ID NO: 12492
  source 1..80: mol_type = other DNA

SEQ ID NO: 34406 - DNA, 80 bp, synthetic construct
  source 1..80: mol_type = other DNA
tcgaatcattgatgtgctggtggctggagttgcgctagcaagaccaaaaggatttataaacttcaatccggccatttcta

SEQ ID NO: 34407 - DNA, 80 bp, synthetic construct
  source 1..80: mol_type = other DNA
acagcatccgaattaatatagattacaacagtctgtttacaatgaaaaaaactggcaaaaagtcagtgagcagtgaactg

SEQ ID NO: 34408 - DNA, 80 bp, synthetic construct
  source 1..80: mol_type = other DNA
tttgtacttaagttatgaaaatacctttagtgctcagagatatgggcaacggcaagtcaggaggcctaaattcaatttcc

SEQ ID NO: 34409 - DNA, 80 bp, synthetic construct
  source 1..80: mol_type = other DNA
gaagactggaaaattcaggaaatcataagctgcagggagacatttaatttggaaagtgggtagtgttctcatgcattacg

SEQ ID NO: 34410 - DNA, 80 bp, synthetic construct; identical to SEQ ID NO: 12493
  source 1..80: mol_type = other DNA

SEQ ID NO: 34411 - DNA, 80 bp, synthetic construct
  source 1..80: mol_type = other DNA
ccaaagcagttactgaatggacagggctagttaattcaaaagtagaaatccattctcttgtgaatcatcactcaaaagaa

SEQ ID NO: 34412 - DNA, 80 bp, synthetic construct
  source 1..80: mol_type = other DNA
ttaatatgtaaaaaggcatcaaacttgtcaattgaaacactaatgtgtctctggtacatgcaaagagatgcctgatggga

SEQ ID NO: 34413 - DNA, 80 bp, synthetic construct
  source 1..80: mol_type = other DNA
tgtaaaatataggaaattggaggttaatttgaggtgtgtgtatgtatatctgtccacgcatggatgttaacaatgacaaa

SEQ ID NO: 34414 - DNA, 80 bp, synthetic construct; identical to SEQ ID NO: 12494
  source 1..80: mol_type = other DNA

SEQ ID NO: 34415 - DNA, 80 bp, synthetic construct
  source 1..80: mol_type = other DNA
atatggtcccatgtgtctgtactttacaaggtgaaataagtgaacttacaagtattcttctctttttatggctgtgtgtt

SEQ ID NO: 34416 - DNA, 80 bp, synthetic construct
  source 1..80: mol_type = other DNA
attcttacgaacattgctgccttaatacttagaaagaaaatgatttggacacattttgcaagattttccttaagcttcaa

SEQ ID NO: 34417 - DNA, 80 bp, synthetic construct
  source 1..80: mol_type = other DNA
tcttcacttgtcataggcagtcttttttcatactgtgcaacacagggctatttttagctttgtctttgtcgtgctatagc

SEQ ID NO: 34418 - DNA, 80 bp, synthetic construct; identical to SEQ ID NO: 12495
  source 1..80: mol_type = other DNA

SEQ ID NO: 34419 - DNA, 80 bp, synthetic construct
  source 1..80: mol_type = other DNA
gtgttgaacaatggggataggttccataatggctatattgtaaaaaggaatgctatgctagtatcagaaatgatacagaa

SEQ ID NO: 34420 - DNA, 80 bp, synthetic construct
  source 1..80: mol_type = other DNA
ctgtacgtttctgtttatccatcaatcacaaaagataaacatcaacatgctaggagaattacatctcagaatcagggttt

SEQ ID NO: 34421 - DNA, 80 bp, synthetic construct
  source 1..80: mol_type = other DNA
ctgggcaatttacaaaggaaagaggtttaactggacttacagttccacctggctggggaagcctcacaatcatggtggga

SEQ ID NO: 34422 - DNA, 80 bp, synthetic construct; identical to SEQ ID NO: 12496
  source 1..80: mol_type = other DNA

SEQ ID NO: 34423 - DNA, 80 bp, synthetic construct
  source 1..80: mol_type = other DNA
tgtcttgttggcttatgttcttaagccacccctcagaaataaaatgtttcaatcattgcttctccaaaatactttgtgcc

SEQ ID NO: 34424 - DNA, 80 bp, synthetic construct
  source 1..80: mol_type = other DNA
ttggttatatgtttaagtattaaaatgcattaacttccccatatttttcaggaaaccaacttaaaatttctttgcatggc

SEQ ID NO: 34425 - DNA, 80 bp, synthetic construct
  source 1..80: mol_type = other DNA
catttacttattcagcaggtatttgttaagaacttggggttaaaaagatgaacaaaacagacaaggtctctgacatttat

SEQ ID NO: 34426 - DNA, 80 bp, synthetic construct; identical to SEQ ID NO: 12497
  source 1..80: mol_type = other DNA

SEQ ID NO: 34427 - DNA, 80 bp, synthetic construct
  source 1..80: mol_type = other DNA
ctaaccccccactccccaacaggccccaatgtgtgatgttcccctccctgtgtccatgtgttctcattgttcaactacca

SEQ ID NO: 34428 - DNA, 80 bp, synthetic construct
  source 1..80: mol_type = other DNA
tctagtctatctctgatgggcatttgggttggtttcaagtctttgcaattgtgaatagtgcttcaataaacatgtgtgtg

SEQ ID NO: 34429 - DNA, 80 bp, synthetic construct; identical to SEQ ID NO: 12498
  source 1..80: mol_type = other DNA

SEQ ID NO: 34430 - DNA, 80 bp, synthetic construct
  source 1..80: mol_type = other DNA
atacaacttacaaggaatgtgaaggacttcttcaaggagaactacaaaccactgctcaaggaaataagagaggacacaaa

SEQ ID NO: 34431 - DNA, 80 bp, synthetic construct
  source 1..80: mol_type = other DNA
aagagcctgtataaccaacacaatcctaagcaaaaagaacaaagctggaggcatcactctatctaacttcaaactatact

SEQ ID NO: 34432 - DNA, 80 bp, synthetic construct
  source 1..80: mol_type = other DNA
taataaatggtgttggtaaaactggctagccatatgccgaaaactgaaactggaccccttccttacaccttatacaaaaa

SEQ ID NO: 34433 - DNA, 80 bp, synthetic construct
  source 1..80: mol_type = other DNA
aactaaactaaagagcttctgcacatcaaaagaaactatcatcagagtgaacaggcaacctacagaacaggagaagattt

SEQ ID NO: 34434 - DNA, 80 bp, synthetic construct; identical to SEQ ID NO: 12499
  source 1..80: mol_type = other DNA

SEQ ID NO: 34435 - DNA, 80 bp, synthetic construct
  source 1..80: mol_type = other DNA
ccccgtctctactaaaaatacaaaaaattagctgggcatagtggcgggcacctgtagtcccagctacttgggaggctgag

SEQ ID NO: 34436 - DNA, 80 bp, synthetic construct
  source 1..80: mol_type = other DNA
gatataaataaaatcaccttttcacatggcattcctcaagtatattttgcagaactaacatatacttcctacatctcctt

SEQ ID NO: 34437 - DNA, 80 bp, synthetic construct; identical to SEQ ID NO: 12500
  source 1..80: mol_type = other DNA

SEQ ID NO: 34438 - DNA, 80 bp, synthetic construct
  source 1..80: mol_type = other DNA
atgtttaaagactatttttttaaagtttgctttcttcacccttagaatttttggggggagactgagtaaaggttttattc

SEQ ID NO: 34439 - DNA, 80 bp, synthetic construct
  source 1..80: mol_type = other DNA
atataatcccaattgtgatctgggcccttctccctccccgccctttctaatctcatctcctatccctccttcaaaatatt

SEQ ID NO: 34440 - DNA, 80 bp, synthetic construct
  source 1..80: mol_type = other DNA
ctgttgtcctctccactaaaaatcctccttatgtgtaaaaaagggagacagagggggaaatgataaactatcatttaatg

SEQ ID NO: 34441 - DNA, 80 bp, synthetic construct
  source 1..80: mol_type = other DNA
aaaaaaaaagtctagtaagcctcttgacagaagataccgcaaaggtgtcatgaaggccaagggttgaagttttaaaacct

SEQ ID NO: 34442 - DNA, 80 bp, synthetic construct; identical to SEQ ID NO: 12501
  source 1..80: mol_type = other DNA

SEQ ID NO: 34443 - DNA, 80 bp, synthetic construct
  source 1..80: mol_type = other DNA
tttccacaaggggcttgtggtaaagtgtagaacaacgaactcagaaaaggcctattcaaaaatcagaactagtcatggtc

SEQ ID NO: 34444 - DNA, 80 bp, synthetic construct
  source 1..80: mol_type = other DNA
tatccatcatcaaacacccctaggatgttatccttcttgatggacacattacagtttattcaggatataatttacacccc

SEQ ID NO: 34445 - DNA, 80 bp, synthetic construct; identical to SEQ ID NO: 12502
  source 1..80: mol_type = other DNA

SEQ ID NO: 34446 - DNA, 80 bp, synthetic construct
  source 1..80: mol_type = other DNA
tctcagtctttcgcagcacaggaatcacagtaggctgatgattcctactcaacatttatggtgagtgattgtggtgatgg

SEQ ID NO: 34447 - DNA, 80 bp, synthetic construct
  source 1..80: mol_type = other DNA
atcgtactctgtacttatttgcttacatatatgctatctcccgcttgatttaatttcagcacctagcataagacttggca

SEQ ID NO: 34448 - DNA, 80 bp, synthetic construct
  source 1..80: mol_type = other DNA
atagagtggcattgaagctctggaagattgctgattttaggccagtctctccaagagccatctagtgggaagagtaagta

SEQ ID NO: 34449 - DNA, 80 bp, synthetic construct
  source 1..80: mol_type = other DNA
tgtgtgtgtgttttaggccagtctctccaagagctatctagtgggaagagtaagtaattgccctgggtaattaagagtgt

SEQ ID NO: 34450 - DNA, 80 bp, synthetic construct; identical to SEQ ID NO: 12503
  source 1..80: mol_type = other DNA

SEQ ID NO: 34451 - DNA, 80 bp, synthetic construct
  source 1..80: mol_type = other DNA
cagctactttattcttctccctcttccaattggctttctctacttctttatccagaatgattaatattgtgtaggtctag

SEQ ID NO: 34452 - DNA, 80 bp, synthetic construct
  source 1..80: mol_type = other DNA
acacagagcattcaaggatgaggtcacttctccagtaacatgagttcttttcctagttcctaattatcaagtaagagatt

SEQ ID NO: 34453 - DNA, 80 bp, synthetic construct; identical to SEQ ID NO: 12504
  source 1..80: mol_type = other DNA

SEQ ID NO: 34454 - DNA, 80 bp, synthetic construct
  source 1..80: mol_type = other DNA
tattctcctattgaagatgaggaaagtgaggcccaaagaaagtaaactgcttgtccaaagattaataagtggtagagcaa

SEQ ID NO: 34455 - DNA, 80 bp, synthetic construct
  source 1..80: mol_type = other DNA
attttcctgtctcagcctctcgagtagctgggaccacaggcgcctgccaccacgcccagctaatttttgtattttttgta

SEQ ID NO: 34456 - DNA, 80 bp, synthetic construct
  source 1..80: mol_type = other DNA
cctcaaaacaagaaactaacctaaaaagttattcatgatggtttgattgaacacacagagtacatatacacacacattga

SEQ ID NO: 34457 - DNA, 80 bp, synthetic construct; identical to SEQ ID NO: 12505
  source 1..80: mol_type = other DNA

SEQ ID NO: 34458 - DNA, 80 bp, synthetic construct
  source 1..80: mol_type = other DNA
aattcaaaataatcaaacagctttcacttagtcattttgtttatatttcattgtgatatgctacaacgggccctatcttg

SEQ ID NO: 34459 - DNA, 80 bp, synthetic construct
  source 1..80: mol_type = other DNA
gagggaaaaatcttacagggtaaaaattaatttggattagctgtttccatgatggaaaggcctagctccagtgattacaa

SEQ ID NO: 34460 - DNA, 80 bp, synthetic construct
  source 1..80: mol_type = other DNA
tccattttacgcatttctttaaaagactgtgttcacattcttctatacttgtaatctgagcataaaataagactagaaaa

SEQ ID NO: 34461 - DNA, 80 bp, synthetic construct; identical to SEQ ID NO: 12506
  source 1..80: mol_type = other DNA

SEQ ID NO: 34462 - DNA, 80 bp, synthetic construct
  source 1..80: mol_type = other DNA
cctactcaaatctgttctttactctgtaccagagtagggtttttaaaacagaaatttgattgtgttatgcacctgcttaa

SEQ ID NO: 34463 - DNA, 80 bp, synthetic construct
  source 1..80: mol_type = other DNA
gcctttaactggacatttacacttgctattttctctttctgatgtattctttttccatacttctatttccttgtaaactc

SEQ ID NO: 34464 - DNA, 80 bp, synthetic construct
  source 1..80: mol_type = other DNA
acggcaggcattctgtccaggtgctaggaacacaacagttaacagagtatcttttctttcttttttaaaaaaagtagtct

SEQ ID NO: 34465 - DNA, 80 bp, synthetic construct
  source 1..80: mol_type = other DNA
ctttggatatatgcatacactcatgttactatcactacaatccacgtcacaaacatatccatcacgttcaaaagtttact

SEQ ID NO: 34466 - DNA, 80 bp, synthetic construct; identical to SEQ ID NO: 12507
  source 1..80: mol_type = other DNA

SEQ ID NO: 34467 - DNA, 80 bp, synthetic construct
  source 1..80: mol_type = other DNA
atttctatacatttgactaccttagatgcctcatatagagggaatcatgcagtatgtgtccttctgtgatggccacttca

SEQ ID NO: 34468 - DNA, 80 bp, synthetic construct
  source 1..80: mol_type = other DNA
gctggagtgcagcggcacaatctcagctcactgcaaactctgcctcccaggttcacgccattctcctgcctcaacctccc

SEQ ID NO: 34469 - DNA, 80 bp, synthetic construct; identical to SEQ ID NO: 12508
  source 1..80: mol_type = other DNA

SEQ ID NO: 34470 - DNA, 80 bp, synthetic construct
  source 1..80: mol_type = other DNA
acagttgtataagggtttcaatttctccacaaacttgtcaaacttttgtttttctgataatagtcattgtatcaagtgtg

SEQ ID NO: 34471 - DNA, 80 bp, synthetic construct
  source 1..80: mol_type = other DNA
gaattttaaaagtttcttatattttttggaaattaactgctggttaattaatggtaaatatttcttcccattctaaaggc

SEQ ID NO: 34472 - DNA, 80 bp, synthetic construct
  source 1..80: mol_type = other DNA
tattgccaaaaccaatgtcatgaagcttttcccatatgcttccttctaaggagttttagagttgcaggtcttacatttta

SEQ ID NO: 34473 - DNA, 80 bp, synthetic construct; identical to SEQ ID NO: 12509
  source 1..80: mol_type = other DNA

SEQ ID NO: 34474 - DNA, 80 bp, synthetic construct
  source 1..80: mol_type = other DNA
ttcatacatattttaggattacattttctatttctgtaaaaatgtatttggaattttgataaggatttcattgaatctgt

SEQ ID NO: 34475 - DNA, 80 bp, synthetic construct
  source 1..80: mol_type = other DNA
ctttattctttctggtcttattgtaaatggatttttttcttaattttttggatagtttattgttggcatacagaaacaca

SEQ ID NO: 34476 - DNA, 80 bp, synthetic construct
  source 1..80: mol_type = other DNA
ccttttatttctttggtttggcatatggtttttgcccatcattctgttaatgcggtgttatcacatttattgatttgtgt

SEQ ID NO: 34477 - DNA, 80 bp, synthetic construct; identical to SEQ ID NO: 12510
  source 1..80: mol_type = other DNA

SEQ ID NO: 34478 - DNA, 80 bp, synthetic construct
  source 1..80: mol_type = other DNA
tatttcttcttaattctgtctttataggttgtatgtttttaggaatttatccacttcttctaggttgtcaaatttgttca

SEQ ID NO: 34479 - DNA, 80 bp, synthetic construct
  source 1..80: mol_type = other DNA
ttgttctattgtatttttattcattttatcatttattcctgctctaatctttattatttccatccttctgctaactttgg

SEQ ID NO: 34480 - DNA, 80 bp, synthetic construct
  source 1..80: mol_type = other DNA
tattagtcttttggtattttgtgtttttgttttagtttgtcctgagagatactctaatcctgcccccatgattcaatcac

SEQ ID NO: 34481 - DNA, 80 bp, synthetic construct
  source 1..80: mol_type = other DNA
attatagcctctactgcatacaaaccaaagagtctgttcaaagaataaaacagtaaattaacttcaagaaatgactttaa

SEQ ID NO: 34482 - DNA, 80 bp, synthetic construct; identical to SEQ ID NO: 12511
  source 1..80: mol_type = other DNA

SEQ ID NO: 34483 - DNA, 80 bp, synthetic construct
  source 1..80: mol_type = other DNA
attaacccttatatttctagaaggagaattctctgaaatagactaaggtgaggatagagtgtgaagagaaaaccagcgta

SEQ ID NO: 34484 - DNA, 80 bp, synthetic construct
  source 1..80: mol_type = other DNA
gtctaaggtagtatctatcaccactgagccatgtgaacttataaaatccatttcctaaactcggtgtcctcataatctaa

SEQ ID NO: 34485 - DNA, 80 bp, synthetic construct
  source 1..80: mol_type = other DNA
caggatgttgtctggtatacagtgactgttcaatatatgggaagtgatctaaaatgaaataaggtaaaattttgagtatt

SEQ ID NO: 34486 - DNA, 80 bp, synthetic construct; identical to SEQ ID NO: 12512
  source 1..80: mol_type = other DNA

SEQ ID NO: 34487 - DNA, 80 bp, synthetic construct
  source 1..80: mol_type = other DNA
cagttcctcagcttcctaactcatggccaactacatcttaaccaaatccagtatagttctccatttttttaaatgggaaa

SEQ ID NO: 34488 - DNA, 80 bp, synthetic construct
  source 1..80: mol_type = other DNA
aaaatgatgaggttcaagataacgtattggagattttaaaagttgttaagtccttgagctgggaattctacctctatgat

SEQ ID NO: 34489 - DNA, 80 bp, synthetic construct
  source 1..80: mol_type = other DNA
ctgagcaattagttcacaacttgaacccagactgcttgactttcaggatgccattataccatcctggatattttttgatc

SEQ ID NO: 34490 - DNA, 80 bp, synthetic construct; identical to SEQ ID NO: 12513
  source 1..80: mol_type = other DNA

SEQ ID NO: 34491 - DNA, 80 bp, synthetic construct
  source 1..80: mol_type = other DNA
cagttagtttttatttctgccattctaatcttcaattatctctgcctgaagtagcaatctattgctatatgggtaaggaa

SEQ ID NO: 34492 - DNA, 80 bp, synthetic construct
  source 1..80: mol_type = other DNA
catggtattttctttctctatcaccaactagacagttttgttttgatagctccattaggtacagcctcattgctcatttt

SEQ ID NO: 34493 - DNA, 80 bp, synthetic construct
  source 1..80: mol_type = other DNA
caatttaacctgaatgtactatcaaagaggaaaattatgtggagagtactatagggtttaatgtatgtttatttataagc

SEQ ID NO: 34494 - DNA, 80 bp, synthetic construct; identical to SEQ ID NO: 12514
  source 1..80: mol_type = other DNA

SEQ ID NO: 34495 - DNA, 80 bp, synthetic construct
  source 1..80: mol_type = other DNA
gtctcaagattttaatacagttgtcatttcaaaagcctacctcttctcagttggaaaggtttagagaagaagaagtcagc

SEQ ID NO: 34496 - DNA, 80 bp, synthetic construct
  source 1..80: mol_type = other DNA
taggagatttgcaactatactgatgctggtaaactaaacaccaaattatagccttttctcttgcctcacccagatttcac

SEQ ID NO: 34497 - DNA, 80 bp, synthetic construct; identical to SEQ ID NO: 12515
  source 1..80: mol_type = other DNA

SEQ ID NO: 34498 - DNA, 80 bp, synthetic construct
  source 1..80: mol_type = other DNA
aatgataacaagtgtcttttatttaaagttgggactgaaggtcttctaagtaacagggacttcaacacagagaagttctt

SEQ ID NO: 34499 - DNA, 80 bp, synthetic construct
  source 1..80: mol_type = other DNA
cataagcattattgaaggtagctttaaaattcttacaacccagcattgtggattcatttcaaaaattactgcccccaaca

SEQ ID NO: 34500 - DNA, 80 bp, synthetic construct
  source 1..80: mol_type = other DNA
gacaaaattcctcacataatctcaacccaaaaaagaatgtaaaaaatttcatttattgatatgaatgcacacaattcaat

SEQ ID NO: 34501 - DNA, 80 bp, synthetic construct; identical to SEQ ID NO: 12516
  source 1..80: mol_type = other DNA

SEQ ID NO: 34502 - DNA, 80 bp, synthetic construct
  source 1..80: mol_type = other DNA
cttgaacccgggaggcggaggttgcagtgagccaagatcgtgccattgcactccagcctgggcaacaatagtgaaactct

SEQ ID NO: 34503 - DNA, 80 bp, synthetic construct
  source 1..80: mol_type = other DNA
atggaatatctagcaatgactggacttctcatttctcttcaaaccaaaaccacagctaccatttgtactcactctactgc

SEQ ID NO: 34504 - DNA, 80 bp, synthetic construct
  source 1..80: mol_type = other DNA
ccaatcccctgagatacttagttccctcaaccactagtgattttttttgtgcctcagtcaagccagaagaaaatacacac

SEQ ID NO: 34505 - DNA, 80 bp, synthetic construct; identical to SEQ ID NO: 12517
  source 1..80: mol_type = other DNA

SEQ ID NO: 34506 - DNA, 80 bp, synthetic construct
  source 1..80: mol_type = other DNA
caaacaccttaacgtggacacttactataggaatacagcatattttaataaggataaagtttgctgaagaaaacagaaga

SEQ ID NO: 34507 - DNA, 80 bp, synthetic construct
  source 1..80: mol_type = other DNA
gacttcaaatgctggctgctaataaacaatattctataactattcaacggcaattattctgtacataactaagtaggcag

SEQ ID NO: 34508 - DNA, 80 bp, synthetic construct
  source 1..80: mol_type = other DNA
tttaaatttaatgccctgacgcctccttccttacactttgcattttcccctaaatgtttgattttcatggaatgaatccc

SEQ ID NO: 34509 - DNA, 80 bp, synthetic construct
  source 1..80: mol_type = other DNA
tctaccacaactgcttttgtagcagcaacatgtacatttagttgttcccttccactactggtaataaatactgtggcttt

SEQ ID NO: 34510 - DNA, 80 bp, synthetic construct
  source 1..80: mol_type = other DNA
aaagatcaacattatttgacaaaatgttccatgtttataagagctccttctcaggactaccatgactactgaagggacaa

SEQ ID NO: 34511 - DNA, 80 bp, synthetic construct; identical to SEQ ID NO: 12518
  source 1..80: mol_type = other DNA

SEQ ID NO: 34512 - DNA, 80 bp, synthetic construct
  source 1..80: mol_type = other DNA
agcaccagttcctacaggttgagagctcattccccaaaactgccccctaccacttcaaatgccaataacaagccccaggt

SEQ ID NO: 34513 - DNA, 80 bp, synthetic construct
  source 1..80: mol_type = other DNA
aaaacaaaacaaaaaccaaacttttactagtttattacaaagagtattttaaaggatacaaacacaacagtcagatgaag

SEQ ID NO: 34514 - DNA, 80 bp, synthetic construct; identical to SEQ ID NO: 12519
  source 1..80: mol_type = other DNA

SEQ ID NO: 34515 - DNA, 80 bp, synthetic construct
  source 1..80: mol_type = other DNA
tgaaagtcccaatcctagtcctgcctcagtccttctggtgactagcccctatcctgtagttacctatgggctgtcagcca

SEQ ID NO: 34516 - DNA, 80 bp, synthetic construct
  source 1..80: mol_type = other DNA
ctatttggtgcttttgtaatgaagaaactgaggtcctctacatgctctcttaaccaagttggttgcatctgacagattta

SEQ ID NO: 34517 - DNA, 80 bp, synthetic construct
  source 1..80: mol_type = other DNA
gtacccctgtatacctacgaaatttctgcttttattagttgagttgtctacttatcaagagtcagctgtatgtttctcgc

SEQ ID NO: 34518 - DNA, 80 bp, synthetic construct; identical to SEQ ID NO: 12520
  source 1..80: mol_type = other DNA

SEQ ID NO: 34519 - DNA, 80 bp, synthetic construct
  source 1..80: mol_type = other DNA
ctttggtcatgtgctgcttatgtaataaataataaaatgatgaggttaatgtatgtgtatatcctttttacagtttccca

SEQ ID NO: 34520 - DNA, 80 bp, synthetic construct
  source 1..80: mol_type = other DNA
agtaattcttattcatttggtagaagaaaataaatatgcctggactccactaatatcacattataaacaattaaggtgaa

SEQ ID NO: 34521 - DNA, 80 bp, synthetic construct
  source 1..80: mol_type = other DNA
accacattacctactccaaattgaaatcctagctaggcaatctcatcatgttctactcctggtataattactgaactttc

SEQ ID NO: 34522 - DNA, 80 bp, synthetic construct
  source 1..80: mol_type = other DNA
atagaagcagaacaacaaaaggttttattgtttgattagtggagcttggtctggatttcagccagcttgtaccctggtct

SEQ ID NO: 34523 - DNA, 80 bp, synthetic construct; identical to SEQ ID NO: 12521
  source 1..80: mol_type = other DNA

SEQ ID NO: 34524 - DNA, 80 bp, synthetic construct
  source 1..80: mol_type = other DNA
tggtgctatctattatatccactactttttaaaatgcatcttttgaatgaatgaattaattaatgcataaatgagattga

SEQ ID NO: 34525 - DNA, 80 bp, synthetic construct
  source 1..80: mol_type = other DNA
ggtgaatgatttctaataacccacaacaatggtatacacaacaaatattcacaaagcttagtctttaccaagagctttcc

SEQ ID NO: 34526 - DNA, 80 bp, synthetic construct; identical to SEQ ID NO: 12522
  source 1..80: mol_type = other DNA

SEQ ID NO: 34527 - DNA, 80 bp, synthetic construct
  source 1..80: mol_type = other DNA
aagctctcctcagagaaattgcctccactttctcccaacatggatgtcttcaaacaatcacatttatctgaaaatgcata

SEQ ID NO: 34528 - DNA, 80 bp, synthetic construct
  source 1..80: mol_type = other DNA
tcaatgttaccttttcccccaaaacaaactaatgtaaaatataagacaaaatgtcataagccttagttgtgaaacatact

SEQ ID NO: 34529 - DNA, 80 bp, synthetic construct
  source 1..80: mol_type = other DNA
gaatactttattttgagggtacagcaatacataaacatggttcctagcttgtgcagagacagaccagtaagcaggcttca

SEQ ID NO: 34530 - DNA, 80 bp, synthetic construct; identical to SEQ ID NO: 12523
  source 1..80: mol_type = other DNA

SEQ ID NO: 34531 - DNA, 80 bp, synthetic construct
  source 1..80: mol_type = other DNA
aatgtggagagagaaaaatcccactttgtctatatgtaccttgttagccttatcgctgcttagcactttgcatccaacac

SEQ ID NO: 34532 - DNA, 80 bp, synthetic construct
  source 1..80: mol_type = other DNA
tcaaacactatcattcctagcaatatgtgtttttaaagcacatgcatgttttcttcattatagctaaaggtctgtttctc

SEQ ID NO: 34533 - DNA, 80 bp, synthetic construct
  source 1..80: mol_type = other DNA
gaatgatattgtgaaacaccaccaaactacaatcataaatatatttaagcattgtttattcattttaatttaaaatctat

SEQ ID NO: 34534 - DNA, 80 bp, synthetic construct; identical to SEQ ID NO: 12524
  source 1..80: mol_type = other DNA

SEQ ID NO: 34535 - DNA, 80 bp, synthetic construct
  source 1..80: mol_type = other DNA
aattatgtgcatgttgtatatgtgcaccaatgtaaatcttttaactgtactttcttgagcgtatctcttattctgagact

SEQ ID NO: 34536 - DNA, 80 bp, synthetic construct
  source 1..80: mol_type = other DNA
gaggaccactaacttagtaggtttgaacctggaaataaaaaatgttaaatactggagttggagcaagttgggaagaaatg

SEQ ID NO: 34537 - DNA, 80 bp, synthetic construct
  source 1..80: mol_type = other DNA
aagagagtgccctgttggaggtacagattagagagttacacagcaggaggtaagattaaaaactgtgaaactaaaaactg

SEQ ID NO: 34538 - DNA, 80 bp, synthetic construct
  source 1..80: mol_type = other DNA
gtctccccttctgcagctcccttacattgaagaggacaatcttagacaggtttctaatcataagaagtataaaatttaaa

SEQ ID NO: 34539 - DNA, 80 bp, synthetic construct; identical to SEQ ID NO: 12525
  source 1..80: mol_type = other DNA

SEQ ID NO: 34540 - DNA, 80 bp, synthetic construct
  source 1..80: mol_type = other DNA
accacagtcaaagcaacagaaacaaaagctggcaaatggagttgttgggaatgaagctgcagtaaaggaagatgaagaag

SEQ ID NO: 34541 - DNA, 80 bp, synthetic construct
  source 1..80: mol_type = other DNA
gcaagaagagagcgctctattggaaaccaaatcaaaaataacacatcctgtgtatagcctttactttcctgaggaaaaac

SEQ ID NO: 34542 - DNA, 80 bp, synthetic construct; identical to SEQ ID NO: 12526
  source 1..80: mol_type = other DNA

SEQ ID NO: 34543 - DNA, 80 bp, synthetic construct
  source 1..80: mol_type = other DNA
gaagaggaagatgatgactaagcagtactctgaatggaccatagtgtttgcacatatttgcaattttttgctgttttgga

SEQ ID NO: 34544 - DNA, 80 bp, synthetic construct
  source 1..80: mol_type = other DNA
ataactaggcagtggcagtgccttggtacaacctgaaaaatgttaaggcttactgaaacctttcaagtatgggatggtgc

SEQ ID NO: 34545 - DNA, 80 bp, synthetic construct
  source 1..80: mol_type = other DNA
gagtggatagctgtcctttgctgcttcctctgtctgaggcaataaacacttggtaaagcatagtgctgctatctatcctt

SEQ ID NO: 34546 - DNA, 80 bp, synthetic construct; identical to SEQ ID NO: 12527
  source 1..80: mol_type = other DNA

SEQ ID NO: 34547 - DNA, 80 bp, synthetic construct
  source 1..80: mol_type = other DNA
caactcaagccccactactcaaagatgccaaggaggaggtggaagtaggcaggtgaatcaaacttttaaaagatgatact

SEQ ID NO: 34548 - DNA, 80 bp, synthetic construct
  source 1..80: mol_type = other DNA
caaacaagagaaccaaaacaagagtggtaaaaacaagagtggtaaaaaggcatagtgtgagcactcttccttgaatagga

SEQ ID NO: 34549 - DNA, 80 bp, synthetic construct
  source 1..80: mol_type = other DNA
cctcaagaccacagtcgttgtggcaaagtatgctcagcttcacatctcatcatttcacattctgtatcctaaattgttaa

SEQ ID NO: 34550 - DNA, 80 bp, synthetic construct; identical to SEQ ID NO: 12528
  source 1..80: mol_type = other DNA

SEQ ID NO: 34551 - DNA, 80 bp, synthetic construct
  source 1..80: mol_type = other DNA
aggtgcatagaatttggaaaacagacaggaccttatctggtccaaatgaacagatcaaaccatcttttggagtatgtaag

SEQ ID NO: 34552 - DNA, 80 bp, synthetic construct
  source 1..80: mol_type = other DNA
tctttcttattttttttttttgagacaaggtctctctctgttgtccaggttgaagtgcaagtggcacgatcatggcttac

SEQ ID NO: 34553 - DNA, 80 bp, synthetic construct
  source 1..80: mol_type = other DNA
cattaggtggcatgcccgcctggcccaatttttaatcaactcaacagttctactacctagtctacattttaaaatttgta

SEQ ID NO: 34554 - DNA, 80 bp, synthetic construct; identical to SEQ ID NO: 12529
  source 1..80: mol_type = other DNA

SEQ ID NO: 34555 - DNA, 80 bp, synthetic construct
  source 1..80: mol_type = other DNA
gcttcactagtttgcatagtttctggatctacttctgggagaccccatctgttaaattttatagggctcaaggcttcttt

SEQ ID NO: 34556 - DNA, 80 bp, synthetic construct
  source 1..80: mol_type = other DNA
ggagttaacaacacatttgaagggcactgacttaactttacacctcacatacaggaattaaagaccacagatttggtcaa

SEQ ID NO: 34557 - DNA, 80 bp, synthetic construct
  source 1..80: mol_type = other DNA
aatctgttactacttatattatccccaacttgttcatgtgtgtcacttttgaaagttacatcatgaattcaggtcaatgg

SEQ ID NO: 34558 - DNA, 80 bp, synthetic construct
  source 1..80: mol_type = other DNA
tttagccagcaatttctgctttgttttgttaaaagcaacaaatgcaaacattaccattaattccttgtggaaattgctct

SEQ ID NO: 34559 - DNA, 80 bp, synthetic construct; identical to SEQ ID NO: 12530
  source 1..80: mol_type = other DNA

SEQ ID NO: 34560 - DNA, 80 bp, synthetic construct
  source 1..80: mol_type = other DNA
gttgttgaatttatttatgaatcaagtataacacaaaatagccaaatacaaaaaatgttatttttgacacctaaaaccag

SEQ ID NO: 34561 - DNA, 80 bp, synthetic construct
  source 1..80: mol_type = other DNA
atttgtccacactgcttgcctgtgttccacagagcacactacagtttttggagcagaggacactcaattggattgatgga

SEQ ID NO: 34562 - DNA, 80 bp, synthetic construct
  source 1..80: mol_type = other DNA
taatgtttttaaaggtcacatgaaaagagatctttatcatttgttccctgttgcataacagatcatcactaccatctgtt

SEQ ID NO: 34563 - DNA, 80 bp, synthetic construct
  source 1..80: mol_type = other DNA
agtggcaaggggtaaaaatgaattctgttctatcagaaatgatcttatgtttccaaaactttggcctacaacagatctga

SEQ ID NO: 34564 - DNA, 80 bp, synthetic construct; identical to SEQ ID NO: 12531
  source 1..80: mol_type = other DNA

SEQ ID NO: 34565 - DNA, 80 bp, synthetic construct
  source 1..80: mol_type = other DNA
tatatacagcatatacattgtattagatataccataagtaatccaaagatgatttaaagtatatggaaggatatgtgtag

SEQ ID NO: 34566 - DNA, 80 bp, synthetic construct
  source 1..80: mol_type = other DNA
agttactgaagcttaagtagggtccctcacttgcatgggactctttcaaagccctgcgcctaatttcaaatctatgaatt

SEQ ID NO: 34567 - DNA, 80 bp, synthetic construct; identical to SEQ ID NO: 12532
  source 1..80: mol_type = other DNA

SEQ ID NO: 34568 - DNA, 80 bp, synthetic construct
  source 1..80: mol_type = other DNA
aatactcatgtatacttttaaaaataagctttctttccttaatatttgatttatttattctgtgaagtcttaaacctgaa

SEQ ID NO: 34569 - DNA, 80 bp, synthetic construct
  source 1..80: mol_type = other DNA
tgctcattttggagaccttcaagtttaacatgttcctaatttcattccagaaataaaaagaaaaagctgagagatcacac

SEQ ID NO: 34570 - DNA, 80 bp, synthetic construct
  source 1..80: mol_type = other DNA
atttctttcagtagccctaagcaccaagaatgactatcacaactggaatatcaaatggttaggatcatttccttgtacat

SEQ ID NO: 34571 - DNA, 80 bp, synthetic construct
  source 1..80: mol_type = other DNA
tcttaagcttagaactcaaatcaaggattcagtgaaaaaatccacgtgcatgttattcataatttctcagaaaggaattc

SEQ ID NO: 34572 - DNA, 80 bp, synthetic construct; identical to SEQ ID NO: 12533
  source 1..80: mol_type = other DNA

SEQ ID NO: 34573 - DNA, 80 bp, synthetic construct
  source 1..80: mol_type = other DNA
ttgatggagactgtggcatatgtcccaggagctccatagttgaacagaaaaagaacttgaaaaagaatcccaaaacatgc

SEQ ID NO: 34574 - DNA, 80 bp, synthetic construct
  source 1..80: mol_type = other DNA
aaatgagcttatttaaaaaacaaagacactctgaggtagctttataacaagaaacggttttgaaattggaacttttagtc

SEQ ID NO: 34575 - DNA, 80 bp, synthetic construct; identical to SEQ ID NO: 12534
  source 1..80: mol_type = other DNA

SEQ ID NO: 34576 - DNA, 80 bp, synthetic construct
  source 1..80: mol_type = other DNA
tggggggaataaaaactttcaacatttacaataaaatgataccttgaaaacatagatgaattcatctatgtccttgttgt

SEQ ID NO: 34577 - DNA, 80 bp, synthetic construct
  source 1..80: mol_type = other DNA
ttctaattacaaggccaggatatcagagttctgtttaaatagaataacctggggtaaggaagggccagaaccagagaatg

SEQ ID NO: 34578 - DNA, 80 bp, synthetic construct
  source 1..80: mol_type = other DNA
cctccaggtcctcaaacactgtctcttactcttttcagtatattgtatgtgtcattttctcctctcctctccaatttgaa

SEQ ID NO: 34579 - DNA, 80 bp, synthetic construct; identical to SEQ ID NO: 12535
  source 1..80: mol_type = other DNA

SEQ ID NO: 34580 - DNA, 80 bp, synthetic construct
  source 1..80: mol_type = other DNA
tcagctctcaaatattcagtccactgcactttctctgtcagaaatcatagtcatttagggccttcaatttcatctctata

SEQ ID NO: 34581 - DNA, 80 bp, synthetic construct
  source 1..80: mol_type = other DNA
tattggtgaccttactctttcatttcctccactcattgtgaacacgtcttacctttgcttcactcctcaaaacttctata

SEQ ID NO: 34582 - DNA, 80 bp, synthetic construct
  source 1..80: mol_type = other DNA
tactggatctataccttcgctctctctctcttcctttttaataccactaaggaactctccctactatcagaagccattct

SEQ ID NO: 34583 - DNA, 80 bp, synthetic construct; identical to SEQ ID NO: 12536
  source 1..80: mol_type = other DNA

SEQ ID NO: 34584 - DNA, 80 bp, synthetic construct
  source 1..80: mol_type = other DNA
ttgatttctcagcaaaattcaacagataaccacttcctcctcatgaaagtcttttagcctggcttctgtgacatcatact

SEQ ID NO: 34585 - DNA, 80 bp, synthetic construct
  source 1..80: mol_type = other DNA
tatacatgtgccatgctggtgtgctgcacccactaactcgtcatctagcattaggtatatctcccaatgctatccctccc

SEQ ID NO: 34586 - DNA, 80 bp, synthetic construct
  source 1..80: mol_type = other DNA
tgtccctacaaaagacatgaactcatcattttttatggctgcatagtattccatggtgtatatgtgccacattttcttaa

SEQ ID NO: 34587 - DNA, 80 bp, synthetic construct; identical to SEQ ID NO: 12537
  source 1..80: mol_type = other DNA

SEQ ID NO: 34588 - DNA, 80 bp, synthetic construct
  source 1..80: mol_type = other DNA
ataaatgtcttcttttgagaagtgtctgttcatgtccttcgcccactttttgatggggctgtttgtttttttcttgtaaa

SEQ ID NO: 34589 - DNA, 80 bp, synthetic construct
  source 1..80: mol_type = other DNA
ctgtaacctccacctactaggttcaagtgatcaagtgattctcgtgcttcagcctcccaagtagctgggattacaggcgc

SEQ ID NO: 34590 - DNA, 80 bp, synthetic construct
  source 1..80: mol_type = other DNA
cttcttcaaaactaaaaatagagcttacaaatcttagtataatccatgaatcttgtttccaaatatatcaacatccagtc

SEQ ID NO: 34591 - DNA, 80 bp, synthetic construct; identical to SEQ ID NO: 12538
  source 1..80: mol_type = other DNA

SEQ ID NO: 34592 - DNA, 80 bp, synthetic construct
  source 1..80: mol_type = other DNA
aatagactctccacagtctcataaaattcagcattggggatcatgggaataactaaagtgaagacaggaacagcaaagaa

SEQ ID NO: 34593 - DNA, 80 bp, synthetic construct
  source 1..80: mol_type = other DNA
agttcagataacttatttaagtcagctacttccccccagcatctagcatataattggcatataaggggaatctagtatat

SEQ ID NO: 34594 - DNA, 80 bp, synthetic construct
  source 1..80: mol_type = other DNA
gaatgggcacatagtgaatttcttttgatcaatttaaatatctgattttcctactgctatggttagataattttcagttt

SEQ ID NO: 34595 - DNA, 80 bp, synthetic construct; identical to SEQ ID NO: 12539
  source 1..80: mol_type = other DNA

SEQ ID NO: 34596 - DNA, 80 bp, synthetic construct
  source 1..80: mol_type = other DNA
tgcttatttatattcaatgataccatctctttaagactgcaaactgcttgaaggaatagatcatcctttaatctggtttg

SEQ ID NO: 34597 - DNA, 80 bp, synthetic construct
  source 1..80: mol_type = other DNA
ctgaaaggggttaagaaaaatgtttcatataaaattcccatttgctgcatttaacggaaaaataaaaacaaataggaaac

SEQ ID NO: 34598 - DNA, 80 bp, synthetic construct
  source 1..80: mol_type = other DNA
ccatgtaatgtgtgttcaatttgggcttatttaaatagcagaaatgctcattagctgcagtatatctgtgaagcttcagt

SEQ ID NO: 34599 - DNA, 80 bp, synthetic construct
  source 1..80: mol_type = other DNA
tttgatatccatcttacggcttttttttttccttgtcaatcgtcagtaggcacacttcaatgcaaacttaaaacacacag

SEQ ID NO: 34600 - DNA, 80 bp, synthetic construct; identical to SEQ ID NO: 12540
  source 1..80: mol_type = other DNA

SEQ ID NO: 34601 - DNA, 80 bp, synthetic construct
  source 1..80: mol_type = other DNA
tgaaggcactgcaacttgggatcaaataaatcacaaggctgggtaaagtttccaaagaaagagtgcaaaaacaggtgaca

SEQ ID NO: 34602 - DNA, 80 bp, synthetic construct
  source 1..80: mol_type = other DNA
gtaggtaaatagattgatgacgtggaggtcaatgaaccgtaaaaaggtgacacttgcagttaaatagtaaaggcaaaaaa

SEQ ID NO: 34603 - DNA, 80 bp, synthetic construct; identical to SEQ ID NO: 12541
  source 1..80: mol_type = other DNA

SEQ ID NO: 34604 - DNA, 80 bp, synthetic construct
  source 1..80: mol_type = other DNA
agagcgcctctttgatgagatgccatcagagctaaaacataaaggataagaatgaaccagtcacgtgatgacttagaggc

SEQ ID NO: 34605 - DNA, 80 bp, synthetic construct
  source 1..80: mol_type = other DNA
aagtctgagaaataggcaggggccaaaccaaggagtgtgttagaaactgtagtaagaagtttgttacaataaaataggac

SEQ ID NO: 34606 - DNA, 80 bp, synthetic construct
  source 1..80: mol_type = other DNA
ataatctctgtttagaagctcattctggtaggattatatggaagtgagagtagaagcaggatgaccagtcttaggaaacc

SEQ ID NO: 34607 - DNA, 80 bp, synthetic construct; identical to SEQ ID NO: 12542
  source 1..80: mol_type = other DNA

SEQ ID NO: 34608 - DNA, 80 bp, synthetic construct
  source 1..80: mol_type = other DNA
gtgcctctttagatttccagtaccacaattctggaataaaattcacatagttaaacactaaaaacatttcatgaattagc

SEQ ID NO: 34609 - DNA, 80 bp, synthetic construct
  source 1..80: mol_type = other DNA
ataaatgtcactgcctccacaaaaccttttaattcttgctgctgcaagtcatctctctaccctgtatgttacaccagaaa

SEQ ID NO: 34610 - DNA, 80 bp, synthetic construct
  source 1..80: mol_type = other DNA
acatataataaatacagaatgaaagaatgggaagtaacatcccacaagtatgtaggagggcagattagtaggatgtcaaa

SEQ ID NO: 34611 - DNA, 80 bp, synthetic construct
  source 1..80: mol_type = other DNA
tacagggagaaacactgggtcatgttaaaccaaatgaattgtaaatacactttgaggagggcttggaaaatcactggata

SEQ ID NO: 34612 - DNA, 80 bp, synthetic construct; identical to SEQ ID NO: 12543
  source 1..80: mol_type = other DNA

SEQ ID NO: 34613 - DNA, 80 bp, synthetic construct
  source 1..80: mol_type = other DNA
atcttggctcgctgcaacctctgcctcctgggttcaagtgattctcctgcctcagcccccccgagtagctgggattacag

SEQ ID NO: 34614 - DNA, 80 bp, synthetic construct
  source 1..80: mol_type = other DNA
atctaatttaaccagagtattttagatagggatgttgtcctatttatattgtgctttgagtcaagaacagaaacacaaag

SEQ ID NO: 34615 - DNA, 80 bp, synthetic construct
  source 1..80: mol_type = other DNA
gcggcttagttttagtttaacatttcaccagcatgttaggtttcagaataaccttttactatactataagctaactagtt

SEQ ID NO: 34616 - DNA, 80 bp, synthetic construct; identical to SEQ ID NO: 12544
  source 1..80: mol_type = other DNA

SEQ ID NO: 34617 - DNA, 80 bp, synthetic construct
  source 1..80: mol_type = other DNA
gcatatgatatcaaccagtagtgaaacctggaaaataaagataaggaaaggctctgagcagagctattcactggggaaac

SEQ ID NO: 34618 - DNA, 80 bp, synthetic construct
  source 1..80: mol_type = other DNA
aacactgttatcagtttgacctccatcctcatcacctccaccctttcaaaataattccaaagaaaacctgtgcaaggatt

SEQ ID NO: 34619 - DNA, 80 bp, synthetic construct
  source 1..80: mol_type = other DNA
cagtgtttcagttaggttcctgaaaattcttcttgcccaaaatataattaaaggcaaagcactgtacaaagaaggcaaaa

SEQ ID NO: 34620 - DNA, 80 bp, synthetic construct; identical to SEQ ID NO: 12545
  source 1..80: mol_type = other DNA

SEQ ID NO: 34621 - DNA, 80 bp, synthetic construct
  source 1..80: mol_type = other DNA
agctcctgctgtaggcattaaggtatagtagtgaaaagacaggaagatgatgtgtactaattcccaatgtctgttttcag

SEQ ID NO: 34622 - DNA, 80 bp, synthetic construct
  source 1..80: mol_type = other DNA
cacctgtttacctcccagctagctaccccacatccaatctctttatcaagcagataaccaaatcctgactattctactta

SEQ ID NO: 34623 - DNA, 80 bp, synthetic construct
  source 1..80: mol_type = other DNA
ttgccttccatgtaaagaaacaatcatttgtataacagtcagggtgtcgcattgtacctttctcgcctctctccaaaaca

SEQ ID NO: 34624 - DNA, 80 bp, synthetic construct; identical to SEQ ID NO: 12546
  source 1..80: mol_type = other DNA

SEQ ID NO: 34625 - DNA, 80 bp, synthetic construct
  source 1..80: mol_type = other DNA
gcagagagaaggaagctctaacacctgctagaattacctcattcaagacaaagagctcttccttatttaaacctcctcat

SEQ ID NO: 34626 - DNA, 80 bp, synthetic construct
  source 1..80: mol_type = other DNA
ctccccgttgtctgggcatatgaggtcattttgtcggcccatacttttgtatatgatgttctctgtaacaggaaaactcc

SEQ ID NO: 34627 - DNA, 80 bp, synthetic construct
  source 1..80: mol_type = other DNA
tttacttgtgtctgtattcctagtgcctgagtagtgcctggaacacagttgtgcatcaagaaatgttcattgcatggtga

SEQ ID NO: 34628 - DNA, 80 bp, synthetic construct; identical to SEQ ID NO: 12547
  source 1..80: mol_type = other DNA

SEQ ID NO: 34629 - DNA, 80 bp, synthetic construct
  source 1..80: mol_type = other DNA
aaaatgtgcattcttggaggcaaagtttgcatttctcttttcactactttatccctgaaacgtatctttaaaaagagtct

SEQ ID NO: 34630 - DNA, 80 bp, synthetic construct
  source 1..80: mol_type = other DNA
ttcttaatgttaggtaagaatgtcattcattcttacttatattaatccttaataagtcccttcctctaatgttttgccat

SEQ ID NO: 34631 - DNA, 80 bp, synthetic construct; identical to SEQ ID NO: 12548
  source 1..80: mol_type = other DNA

SEQ ID NO: 34632 - DNA, 80 bp, synthetic construct
  source 1..80: mol_type = other DNA
ggtcttttaaaacatagctaactaccatttttgaatacctaaataatataatgccaacattaaaacatttttcataggct

SEQ ID NO: 34633 - DNA, 80 bp, synthetic construct
  source 1..80: mol_type = other DNA
cttttctcagtatgggggcaagtgaatcaaagctacactcaaagctgctattgacagaatgtttgatttaccccatgagg

SEQ ID NO: 34634 - DNA, 80 bp, synthetic construct
  source 1..80: mol_type = other DNA
agctgatttctgagagttgcatttaagattcagaactatctaggttttgtgtttccttgttatctctagttcccagtgag

SEQ ID NO: 34635 - DNA, 80 bp, synthetic construct; identical to SEQ ID NO: 12549
  source 1..80: mol_type = other DNA

SEQ ID NO: 34636 - DNA, 80 bp, synthetic construct
  source 1..80: mol_type = other DNA
attttcaccatttctaagaggaagaacaaaagtcatttaaaaatatgtgctttttacatacctcatttgcagaaattcaa

SEQ ID NO: 34637 - DNA, 80 bp, synthetic construct
  source 1..80: mol_type = other DNA
tttggcaaaatggagatttctaacaactaaaaatagttgaaaaattgttttcgatggcatgaaaaacattagaattgata

SEQ ID NO: 34638 - DNA, 80 bp, synthetic construct
  source 1..80: mol_type = other DNA
cacttatttacaaagtcatgttgacagagcctccaaagttcctgatgaagtattgatattcaaatgactttattcccaaa

SEQ ID NO: 34639 - DNA, 80 bp, synthetic construct; identical to SEQ ID NO: 12550
  source 1..80: mol_type = other DNA

SEQ ID NO: 34640 - DNA, 80 bp, synthetic construct
  source 1..80: mol_type = other DNA
gcaatagaataatagaattatttttctaacttttacattttcgaagaaaaataaaccaagcagatcccatcataggagaa

SEQ ID NO: 34641 - DNA, 80 bp, synthetic construct
  source 1..80: mol_type = other DNA
tagtataaaggtgcactccttgctctccttggggtttataggataatttgaaaataaaatagattccggaagatcacaga

SEQ ID NO: 34642 - DNA, 80 bp, synthetic construct
  source 1..80: mol_type = other DNA
ggaatgtgaggacacaggcaaccttattgccttggttgtaaaaatgaagcagtgagattagtgaaagggtggaagaattc

SEQ ID NO: 34643 - DNA, 80 bp, synthetic construct
  source 1..80: mol_type = other DNA
tattgaaaatagtgtttagcagaagaggaaacatcctatattaggaaatatatatatttatatcatatatagaaatatat

SEQ ID NO: 34644 - DNA, 80 bp, synthetic construct; identical to SEQ ID NO: 12551
  source 1..80: mol_type = other DNA

SEQ ID NO: 34645 - DNA, 80 bp, synthetic construct
  source 1..80: mol_type = other DNA
tccatgcacatggatatggaatatgtagtcttttgttcctacttcccactccctggtacaatccaaaaagtgatggaaga

SEQ ID NO: 34646 - DNA, 80 bp, synthetic construct
  source 1..80: mol_type = other DNA
tatcttttctataagctgttgaggcacttatcattttatgatagggaatatttattacagatatattaggtgtataacac

SEQ ID NO: 34647 - DNA, 80 bp, synthetic construct
  source 1..80: mol_type = other DNA
aaaagtattttcatttacaatattattgcaaccagagacttctgagagtgtaatttatcactgtactttatatgtactct

SEQ ID NO: 34648 - DNA, 80 bp, synthetic construct; identical to SEQ ID NO: 12552
  source 1..80: mol_type = other DNA

SEQ ID NO: 34649 - DNA, 80 bp, synthetic construct
  source 1..80: mol_type = other DNA
ctctcttaatgtacacattcctcactttgtaataaaattaattgattacagatctgcctccaccctagtctatggaattt

SEQ ID NO: 34650 - DNA, 80 bp, synthetic construct
  source 1..80: mol_type = other DNA
gagtcatttttacacaaaaaggaaatagtgcctactgtaagtctagccactgtctggcacagagaagttcatttatatgt

SEQ ID NO: 34651 - DNA, 80 bp, synthetic construct
  source 1..80: mol_type = other DNA
aggaatagttaaaagaagcagcaaggtaatagagtgtcacaaacaagaatatgctctagttttgtttccaagtcttttac

SEQ ID NO: 34652 - DNA, 80 bp, synthetic construct; identical to SEQ ID NO: 12553
  source 1..80: mol_type = other DNA

SEQ ID NO: 34653 - DNA, 80 bp, synthetic construct
  source 1..80: mol_type = other DNA
ggatggggaagaatttatggtagaagaggattaacatgaatatcttctcttcttacccaaatggacatcttgcttccaat

SEQ ID NO: 34654 - DNA, 80 bp, synthetic construct
  source 1..80: mol_type = other DNA
aacagtactgaaaacatttagatgggagtccaggaatgaatgctatctcacactgcagctctgccagctcccctctcact

SEQ ID NO: 34655 - DNA, 80 bp, synthetic construct
  source 1..80: mol_type = other DNA
gaggtggcatatgtgaagtactagaagaaatatacacagtaaattctggaataaaatgcataaattctgaaatgacctag

SEQ ID NO: 34656 - DNA, 80 bp, synthetic construct
  source 1..80: mol_type = other DNA
tgagccaaatctgttcaggtttgtttaggaaaatataattattattaatattaggattgtcaattatggaacacaaattt

SEQ ID NO: 34657 - DNA, 80 bp, synthetic construct; identical to SEQ ID NO: 12554
  source 1..80: mol_type = other DNA

SEQ ID NO: 34658 - DNA, 80 bp, synthetic construct
  source 1..80: mol_type = other DNA
catgtatatatctcttccaacttcagacaaaaaatgtaattttagcatggatatagtaggaagtcataggaatcatcagg

SEQ ID NO: 34659 - DNA, 80 bp, synthetic construct
  source 1..80: mol_type = other DNA
aaaaggatttgtaaaatgaaagtacctagatacataagctttcatctacaatgacccacagaaacactgtatgtgggaaa

SEQ ID NO: 34660 - DNA, 80 bp, synthetic construct; identical to SEQ ID NO: 12555
  source 1..80: mol_type = other DNA

SEQ ID NO: 34661 - DNA, 80 bp, synthetic construct
  source 1..80: mol_type = other DNA
aaaaagccattcttctataagaaacaaggcaaatatcattatagagtagaatatgtgttttggttataagcttaaaagaa

SEQ ID NO: 34662 - DNA, 80 bp, synthetic construct
  source 1..80: mol_type = other DNA
ttacagcactaaaataacagacaattgcatcacacatttcagctcccagcactgtacctttaggatcactcagaactgaa

SEQ ID NO: 34663 - DNA, 80 bp, synthetic construct
  source 1..80: mol_type = other DNA
tttactataaccttccgtggggacaggaatggcagaaattcacacttttcttccttagcaagttccatctaaaacaaaac

SEQ ID NO: 34664 - DNA, 80 bp, synthetic construct; identical to SEQ ID NO: 12556
  source 1..80: mol_type = other DNA

SEQ ID NO: 34665 - DNA, 80 bp, synthetic construct
  source 1..80: mol_type = other DNA
atacttctgtttattaccaggttgcatacatccaagctggaaaaaagtcaataaagtgggtgagccaatctgtgcaagta

SEQ ID NO: 34666 - DNA, 80 bp, synthetic construct
  source 1..80: mol_type = other DNA
ttcttccccatttcctacgtaattcattttgccataaaatctggatacctcggtttctgtttgttttcatatgcataatg

SEQ ID NO: 34667 - DNA, 80 bp, synthetic construct
  source 1..80: mol_type = other DNA
tgttgtcttattattttccttcactctgaaagccaggtagattctcaataggctccctgggtaatgtttccactgaggtt

SEQ ID NO: 34668 - DNA, 80 bp, synthetic construct; identical to SEQ ID NO: 12557
  source 1..80: mol_type = other DNA

SEQ ID NO: 34669 - DNA, 80 bp, synthetic construct
  source 1..80: mol_type = other DNA
ggaatattgcccctagggagcaaaaattaattcttgggggaaagaaaaaaatcctcagatatcataatggtcttgtccct

SEQ ID NO: 34670 - DNA, 80 bp, synthetic construct
  source 1..80: mol_type = other DNA
tcaatctatgtcttatttaggatatttttaatattgtcattaaaggcttaaaaattggaaccacataaaaattattacac

SEQ ID NO: 34671 - DNA, 80 bp, synthetic construct
  source 1..80: mol_type = other DNA
ctctgctgcttatttgggatagtttccttatatataaaatggggagaacaccatctcattaatcggtatgtgtggtgtta

SEQ ID NO: 34672 - DNA, 80 bp, synthetic construct; identical to SEQ ID NO: 12558
  source 1..80: mol_type = other DNA

SEQ ID NO: 34673 - DNA, 80 bp, synthetic construct
  source 1..80: mol_type = other DNA
aatgtcaagtggtgctacattttaatgataatgccacacttgactgaataacaactccaaatgtttatggtttgaataaa

SEQ ID NO: 34674 - DNA, 80 bp, synthetic construct
  source 1..80: mol_type = other DNA
ggagggcagaaatgaaacactgaactatgctgtacctattgggaatatgtcttacagatcgatttaggatctgtttgatc

SEQ ID NO: 34675 - DNA, 80 bp, synthetic construct
  source 1..80: mol_type = other DNA
cactgaatgcctaagcatgttttagtaatgtttagtaatgttctcaccatggttttgatttttgaggaccttgtataacc

SEQ ID NO: 34676 - DNA, 80 bp, synthetic construct; identical to SEQ ID NO: 12559
  source 1..80: mol_type = other DNA

SEQ ID NO: 34677 - DNA, 80 bp, synthetic construct
  source 1..80: mol_type = other DNA
attgggagagtgagatcatgttaagatttatcttgggaaatagggaaatactaggacaatgaaaacacagggtaaacttg

SEQ ID NO: 34678 - DNA, 80 bp, synthetic construct
  source 1..80: mol_type = other DNA
ttcagtcacccttgacacacatagtttccaattctatactctacctccctgcagcacccccgtttctcagtgtggtggat

SEQ ID NO: 34679 - DNA, 80 bp, synthetic construct
  source 1..80: mol_type = other DNA
tgtgcctgcttgctttaaaccaaccagttaaaatttcccacgagaaacctgtttggataacgccctggacccataaataa

SEQ ID NO: 34680 - DNA, 80 bp, synthetic construct; identical to SEQ ID NO: 12560
  source 1..80: mol_type = other DNA

SEQ ID NO: 34681 - DNA, 80 bp, synthetic construct
  source 1..80: mol_type = other DNA
tttattttattttaattaattaattaattaatttgagacggagtttcgctctgttgccagttgcccaggctggagggtag

SEQ ID NO: 34682 - DNA, 80 bp, synthetic construct
  source 1..80: mol_type = other DNA
ctcaaactcctgacctcaagtgttccgcccacctcagcctcccaaagtactgggaatacaggcgtaagacaccacgccca

SEQ ID NO: 34683 - DNA, 80 bp, synthetic construct
  source 1..80: mol_type = other DNA
ttatgacacccatatatttgttacaaaaaaaaagtatttagcttcaaaccgactttgtctccgtgctgtggtgcaaaaag

SEQ ID NO: 34684 - DNA, 80 bp, synthetic construct
  source 1..80: mol_type = other DNA
taagggatgaaaaaacttatctgaaattaggatctggctgaaacgaaatcctatgtgatcttcattatgtccaagaataa

SEQ ID NO: 34685 - DNA, 80 bp, synthetic construct; identical to SEQ ID NO: 12561
  source 1..80: mol_type = other DNA

SEQ ID NO: 34686 - DNA, 80 bp, synthetic construct
  source 1..80: mol_type = other DNA
atttaaataagtttgttcgatagtaaactcgttctcaacactctttagaggaagaataccttatttaacattctatcctt

SEQ ID NO: 34687 - DNA, 80 bp, synthetic construct
  source 1..80: mol_type = other DNA
cagccctacctgtgtctatcaaaatgattggcacacagtagaccttgaatacagttttgtttagtagaatgaaggacaaa

SEQ ID NO: 34688 - DNA, 80 bp, synthetic construct; identical to SEQ ID NO: 12562
  source 1..80: mol_type = other DNA

SEQ ID NO: 34689 - DNA, 80 bp, synthetic construct
  source 1..80: mol_type = other DNA
gaatctggatatgaatgcttctcctcatggcacccatatatatttatttgtttgatggagcatgtctttatgagggacaa

SEQ ID NO: 34690 - DNA, 80 bp, synthetic construct
  source 1..80: mol_type = other DNA
tcacctccatattcaggaaagatatgtggctgatgctgagtgaaataaaaatagcatgctataaacttgcaataatgatc

SEQ ID NO: 34691 - DNA, 80 bp, synthetic construct
  source 1..80: mol_type = other DNA
aaagtataatgagcagagctcaaaaccagcatatattaaattctggaataacttctaataagccaaagtttgagaagcaa

SEQ ID NO: 34692 - DNA, 80 bp, synthetic construct; identical to SEQ ID NO: 12563
  source 1..80: mol_type = other DNA

SEQ ID NO: 34693 - DNA, 80 bp, synthetic construct
  source 1..80: mol_type = other DNA
ttatttgcttgacccaactttagtcaggtttctgaaccttttcctaagcccacttgtgtgcttttttgtaaaatccagat

SEQ ID NO: 34694 - DNA, 80 bp, synthetic construct
  source 1..80: mol_type = other DNA
ttatctactaacccgcaacctactccttggctattacttcctacctccgcattctgtatttggagtttaactcgcatttg

SEQ ID NO: 34695 - DNA, 80 bp, synthetic construct
  source 1..80: mol_type = other DNA
agaccatcctggctagcacggtgaaaccctgtctctattaaaaatgcaacaacaacaacaacaacaacaacaaaaattag

SEQ ID NO: 34696 - DNA, 80 bp, synthetic construct; identical to SEQ ID NO: 12564
  source 1..80: mol_type = other DNA

SEQ ID NO: 34697 - DNA, 80 bp, synthetic construct
  source 1..80: mol_type = other DNA
ttttttttaaaaaatttgccaggtatggtggcatctgcctgtagtcccagctacttggaaggctgaggtgggaggatctg

SEQ ID NO: 34698 - DNA, 80 bp, synthetic construct
  source 1..80: mol_type = other DNA
attaatcactggaaaggaattagttactaggaagttcttgtatggaatccattctctctctttgaagaagtgggtgtgga

SEQ ID NO: 34699 - DNA, 80 bp, synthetic construct
  source 1..80: mol_type = other DNA
accaatggaatgcttttggcatggcgtatctgttagtttaggattgctatagtaaacaaacctggaaacgtgaatttagg

SEQ ID NO: 34700 - DNA, 80 bp, synthetic construct
  source 1..80: mol_type = other DNA
aagatagaacctgaggaaatctgtgggcagtggtcctgcacttcttgtttacctgagtttgtttttaattgtatccttga

SEQ ID NO: 34701 - DNA, 80 bp, synthetic construct; identical to SEQ ID NO: 12565
  source 1..80: mol_type = other DNA

SEQ ID NO: 34702 - DNA, 80 bp, synthetic construct
  source 1..80: mol_type = other DNA
cttttaattaggcaaaaaaagtttgctgagaccacaaattgacattccttcttttagtacctggtatggtattacaggct

SEQ ID NO: 34703 - DNA, 80 bp, synthetic construct
  source 1..80: mol_type = other DNA
caaaacccagatatgcaatgtaaggaataatttagaggcttaaaatggcttgacacaactatcattaaatacatctcttt

SEQ ID NO: 34704 - DNA, 80 bp, synthetic construct
  source 1..80: mol_type = other DNA
ggactacaggcgcccgccaccacaccccgctaatttttttgtatttttagtagagacggggtttcactgtgttagccagg

SEQ ID NO: 34705 - DNA, 80 bp, synthetic construct; identical to SEQ ID NO: 12566
  source 1..80: mol_type = other DNA

SEQ ID NO: 34706 - DNA, 80 bp, synthetic construct
  source 1..80: mol_type = other DNA
tttttatatattgcttgctcgtatttcctttttttttttttttttagttctcaggtatcttttaagagactgaaaactag

SEQ ID NO: 34707 - DNA, 80 bp, synthetic construct
  source 1..80: mol_type = other DNA
gcaataaacatacatgtgcatgtgtcttcatagcaccatgatttataatcctttgggtatatacccagtaataggatggc

SEQ ID NO: 34708 - DNA, 80 bp, synthetic construct
  source 1..80: mol_type = other DNA
attctaactggtgtgagatggtatctcattgtggttttgatttgcatttctctgatggccagtgatgatgagcatttttt

SEQ ID NO: 34709 - DNA, 80 bp, synthetic construct
  source 1..80: mol_type = other DNA
tctcccattctgtaggttgcctgttcactctgatggtggtttcttttgctttgcagaagctctttagtttaattagatcc

SEQ ID NO: 34710 - DNA, 80 bp, synthetic construct
  source 1..80: mol_type = other DNA
ttgtggcacatatacaccatggaatactatgcagccataaaaaatgatgagttcatgtcctttgcagggacatggatgaa

SEQ ID NO: 34711 - DNA, 80 bp, synthetic construct
  source 1..80: mol_type = other DNA
tagcattaggtcatatacctaatgctaaatgacaagttaatgggtgcagcacaccaacatggcacatgtatacatatgta

SEQ ID NO: 34712 - DNA, 80 bp, synthetic construct
  source 1..80: mol_type = other DNA
atattaacttaaagtcttcctatgaagttttcaatgcttttaatatattggctaattcaacatgcctcactggtctgcca

SEQ ID NO: 34713 - DNA, 80 bp, synthetic construct; identical to SEQ ID NO: 12568
  source 1..80: mol_type = other DNA

SEQ ID NO: 34714 - DNA, 80 bp, synthetic construct
  source 1..80: mol_type = other DNA
agaatttagaattttagaaaaaaattttaaaattttttaaaaaatcacttttaaaacaatgacaattctttgtttttatg

SEQ ID NO: 34715 - DNA, 80 bp, synthetic construct
  source 1..80: mol_type = other DNA
tctaatgttcacctaaaaatgaatgaagtagagcatacagatctcttcccactttcaattattgccaggcagtggccaaa

SEQ ID NO: 34716 - DNA, 80 bp, synthetic construct
  source 1..80: mol_type = other DNA
aagtacaatgtttgatccatgcccatctgaaaggatgatgaagttcaggttgtgtgaggacactaaaaagttcagcaagt

SEQ ID NO: 34717 - DNA, 80 bp, synthetic construct; identical to SEQ ID NO: 12569
  source 1..80: mol_type = other DNA

SEQ ID NO: 34718 - DNA, 80 bp, synthetic construct
  source 1..80: mol_type = other DNA
ataaggcctgacagtgacacaccaggtaaaaaacgttcacttttaatgaatctgtgggcttatctgtgaaaatacataca

SEQ ID NO: 34719 - DNA, 80 bp, synthetic construct
  source 1..80: mol_type = other DNA
cagaattttgaaaatagttatgcttttaaaatatgtaatcttaaatgggcacaagcttttgttggctcctggcctatttg

SEQ ID NO: 34720 - DNA, 80 bp, synthetic construct
  source 1..80: mol_type = other DNA
atatttatacacatttctaaaattttcagtatagagctgtcactctgtgaagaaatagagccttcctgtccagattccac

SEQ ID NO: 34721 - DNA, 80 bp, synthetic construct; identical to SEQ ID NO: 12570
  source 1..80: mol_type = other DNA

SEQ ID NO: 34722 - DNA, 80 bp, synthetic construct
  source 1..80: mol_type = other DNA
tttttgtgcctagagaagattttgtgtgagtgttcgttttcagctaccttcagagagcaaatcatgtcaacatgtctctg

SEQ ID NO: 34723 - DNA, 80 bp, synthetic construct
  source 1..80: mol_type = other DNA
taaaaatagtcccaggttcatatttgttgtaattaaattaaaactagaaaacatcagttatctgtagaaaatacatgttt

SEQ ID NO: 34724 - DNA, 80 bp, synthetic construct
  source 1..80: mol_type = other DNA
tgtagtcccagctactcaggaggctgcaggagaatggcgtgaacccgggaggcagagcctgcagtgagtcgagatcgcgc

SEQ ID NO: 34725 - DNA, 80 bp, synthetic construct; identical to SEQ ID NO: 12571
  source 1..80: mol_type = other DNA

SEQ ID NO: 34726 - DNA, 80 bp, synthetic construct
  source 1..80: mol_type = other DNA
gacataccaaagttaaatcagttaccattttgacaaacaaacaaagggaagctaaggcgtaccaggggtagcatgcaggc

SEQ ID NO: 34727 - DNA, 80 bp, synthetic construct
  source 1..80: mol_type = other DNA
tataaagtccttctctaaccttatcctttaaatttatcaactctagcaggtctgttgagttctgaccttcatgcctcctt

SEQ ID NO: 34728 - DNA, 80 bp, synthetic construct
  source 1..80: mol_type = other DNA
ttgcagaaagtactggagggaattattaacagattttccctcatcttcttagaggatagtgtcgagtgattggctggttt

SEQ ID NO: 34729 - DNA, 80 bp, synthetic construct; identical to SEQ ID NO: 12572
  source 1..80: mol_type = other DNA

SEQ ID NO: 34730 - DNA, 80 bp, synthetic construct
  source 1..80: mol_type = other DNA
tgcaccctaaagtttgaaaacctctacattagagaaatgggatgtgtttgtcactacagagtctattggatgatgtctcc

SEQ ID NO: 34731 - DNA, 80 bp, synthetic construct
  source 1..80: mol_type = other DNA
gttcttggttactaaccacataatatacatggtctcaaacaattccatgtgtatggttaagctttgtgcccccactcaat

SEQ ID NO: 34732 - DNA, 80 bp, synthetic construct
  source 1..80: mol_type = other DNA
ccttgtgaagaaggtgccttgctttcctccatgatcgttaagtttcctgaggcctccccagtcatgctgaactgtgagtc

SEQ ID NO: 34733 - DNA, 80 bp, synthetic construct; identical to SEQ ID NO: 12573
  source 1..80: mol_type = other DNA

SEQ ID NO: 34734 - DNA, 80 bp, synthetic construct
  source 1..80: mol_type = other DNA
ctgaagtttttactaggggagacagtgtaggagaaagaagacaattactcaagaaattagggccaatattaaattcttca

SEQ ID NO: 34735 - DNA, 80 bp, synthetic construct
  source 1..80: mol_type = other DNA
cataaaggattaacactgaaacttctatgaatgccaaaagttcccagtccttacatggtattacccctggtaagagaatc

SEQ ID NO: 34736 - DNA, 80 bp, synthetic construct
  source 1..80: mol_type = other DNA
tgctgattccctccagtaaatattcattccacaattattggttgaatcttttataggtagcacccaaggtgctaaacagg

SEQ ID NO: 34737 - DNA, 80 bp, synthetic construct; identical to SEQ ID NO: 12574
  source 1..80: mol_type = other DNA

SEQ ID NO: 34738 - DNA, 80 bp, synthetic construct
  source 1..80: mol_type = other DNA
ttctcagcagagtagccattttaaaatttaaatcagagcttggcacttctctgttcaaagcagcccagtgatttttctct

SEQ ID NO: 34739 - DNA, 80 bp, synthetic construct
  source 1..80: mol_type = other DNA
ccatggaatgtttatctcctggatgcctactttccctcaacttcctcatctctttgttcaaaaatcatctcatcggagag

SEQ ID NO: 34740 - DNA, 80 bp, synthetic construct; identical to SEQ ID NO: 12575
  source 1..80: mol_type = other DNA

SEQ ID NO: 34741 - DNA, 80 bp, synthetic construct
  source 1..80: mol_type = other DNA
tgtcttagttctacctaagacagaagaaataaccaccattcatttccagtgacccttgcaaatggaagatgactatgata

SEQ ID NO: 34742 - DNA, 80 bp, synthetic construct
  source 1..80: mol_type = other DNA
tatgtgccaggtcctgtgctatgcacaggaatacaaagatcaaaatgtttctttctatgtgtaaaaaaaaaccatgatta

SEQ ID NO: 34743 - DNA, 80 bp, synthetic construct
  source 1..80: mol_type = other DNA
ggtgaccctgatattttggtaagattaatttgtaatgtgggtaatctacatatgacaaattacctattgactacagctat

SEQ ID NO: 34744 - DNA, 80 bp, synthetic construct; identical to SEQ ID NO: 12576
  source 1..80: mol_type = other DNA

SEQ ID NO: 34745 - DNA, 80 bp, synthetic construct
  source 1..80: mol_type = other DNA
attacaggcgcccaccaccacgcccggctaatttttttgtatttttagtagagacggggtttcaccgtgttagtcaggat

SEQ ID NO: 34746 - DNA, 80 bp, synthetic construct
  source 1..80: mol_type = other DNA
gacacccttttctttctatttgcttcacaaataatgaactgactgaaagtatgaccaaggtatacatcttagaatgcagt

SEQ ID NO: 34747 - DNA, 80 bp, synthetic construct
  source 1..80: mol_type = other DNA
acaagaagcccttgagtattgacaaagattaaatttctcattttacccaaatcagtattacaaattttcttttacttgga

SEQ ID NO: 34748 - DNA, 80 bp, synthetic construct; identical to SEQ ID NO: 12577
  source 1..80: mol_type = other DNA

SEQ ID NO: 34749 - DNA, 80 bp, synthetic construct
  source 1..80: mol_type = other DNA
tcaaagcagtgtaaaattgcatcttgcagttttccaggatgaagtgtcactatcaaattattctgcttcattgaaagaca

SEQ ID NO: 34750 - DNA, 80 bp, synthetic construct
  source 1..80: mol_type = other DNA
tctatctttaactcagcataattttccttttgctagaagaaaaaagtgatccttatgatctgtgttaacggtttgcaata

SEQ ID NO: 34751 - DNA, 80 bp, synthetic construct
  source 1..80: mol_type = other DNA
tttctccctttcactgctttcctctggttttgtttgtgaaactgggcagtaaaagaaatatgactttctaagcatccatt

SEQ ID NO: 34752 - DNA, 80 bp, synthetic construct; identical to SEQ ID NO: 12578
  source 1..80: mol_type = other DNA

SEQ ID NO: 34753 - DNA, 80 bp, synthetic construct
  source 1..80: mol_type = other DNA
gtaggaatagctgtggctcagacctctttaaaaatatacatttgaaggatttagattatctgactttggataaaatatta

SEQ ID NO: 34754 - DNA, 80 bp, synthetic construct
  source 1..80: mol_type = other DNA
gcctgtgtagatacaaatcatataagatatgtgacgattcatgccatttctttgaaaaacatcttccaatgtttgttaag

SEQ ID NO: 34755 - DNA, 80 bp, synthetic construct
  source 1..80: mol_type = other DNA
tatacccggcctttttttttttaattttacatttgggtcttaggcaaggttgggtgtgagagctgaacaatgtgctgctg

SEQ ID NO: 34756 - DNA, 80 bp, synthetic construct; identical to SEQ ID NO: 12579
  source 1..80: mol_type = other DNA

SEQ ID NO: 34757 - DNA, 80 bp, synthetic construct
  source 1..80: mol_type = other DNA
tatatacacacataaacatatataacattacagggaaaatcaggttatattcttgcctcatatcataaataagtcagttt

SEQ ID NO: 34758 - DNA, 80 bp, synthetic construct
  source 1..80: mol_type = other DNA
aatataaatgaattaaaacgaaaattattaaccaagaagatgttttaataattaaatgtctttactgtataaattctcca

SEQ ID NO: 34759 - DNA, 80 bp, synthetic construct
  source 1..80: mol_type = other DNA
gaaaaatatttaagaaaattaaactatacaccaagggtagacatggaacttgtcatactctttcagtggaaatatacatt

SEQ ID NO: 34760 - DNA, 80 bp, synthetic construct; identical to SEQ ID NO: 12580
  source 1..80: mol_type = other DNA

SEQ ID NO: 34761 - DNA, 80 bp, synthetic construct
  source 1..80: mol_type = other DNA
aactataaattagtaaattcttaccaaaactttgaaaggaaaataaatggcagactaaattttttccaaagtgtaaatga

SEQ ID NO: 34762 - DNA, 80 bp, synthetic construct
  source 1..80: mol_type = other DNA
aagggcaatggacatttgctggtagatacagagtaataagcatagccgaaggatgacttttgtcatatgagataaggtgg

SEQ ID NO: 34763 - DNA, 80 bp, synthetic construct
  source 1..80: mol_type = other DNA
aacttttgctttcaaaatgatttccattatgtagtagcatagttaggggagccacctcacctgcctttgcctcagcttct

SEQ ID NO: 34764 - DNA, 80 bp, synthetic construct
  source 1..80: mol_type = other DNA
gaaggctctctaatgacaaaatgatttcttctgaaacctgttaaaagaagactgaagttaggtctacatttgactattca

SEQ ID NO: 34765 - DNA, 80 bp, synthetic construct; identical to SEQ ID NO: 12581
  source 1..80: mol_type = other DNA

SEQ ID NO: 34766 - DNA, 80 bp, synthetic construct
  source 1..80: mol_type = other DNA
caaacactaaggtaggtattgctgggaaagccttttgttgatgtgattaatatctacaaccacttgactttaaggagatt

SEQ ID NO: 34767 - DNA, 80 bp, synthetic construct
  source 1..80: mol_type = other DNA
taccagctcccacaattaaatagcccaattccctaaaataagtcatctctatctacccatctgtccatcctactaattat

SEQ ID NO: 34768 - DNA, 80 bp, synthetic construct
  source 1..80: mol_type = other DNA
atgaaaatattaaaaatatatccatatggataaaccatatatataattgagagctggcacatcgtgaatactcattaaac

SEQ ID NO: 34769 - DNA, 80 bp, synthetic construct; identical to SEQ ID NO: 12582
  source 1..80: mol_type = other DNA

SEQ ID NO: 34770 - DNA, 80 bp, synthetic construct
  source 1..80: mol_type = other DNA
gacaaacaaaacagttcagcgtagtagatatgtatagtctttgtctttcaaggaggccggatagtttgtttctttagaat

SEQ ID NO: 34771 - DNA, 80 bp, synthetic construct
  source 1..80: mol_type = other DNA
cttatgttacagaaaatttaaattaacttttattgactacagacactactctaaatgcctggcccccaggtgattattat

SEQ ID NO: 34772 - DNA, 80 bp, synthetic construct; identical to SEQ ID NO: 12583
  source 1..80: mol_type = other DNA

SEQ ID NO: 34773 - DNA, 80 bp, synthetic construct
  source 1..80: mol_type = other DNA
gaaaggactggctgcttctcttgtcagcatttttgttttgtgattattttctccagtacaatccctttctgaaatgtttt

SEQ ID NO: 34774 - DNA, 80 bp, synthetic construct
  source 1..80: mol_type = other DNA
cataaagttttgcacaacttcagttaacatgaacaagatattagatgttctgttacatattaaaatctaggaagtaataa

SEQ ID NO: 34775 - DNA, 80 bp, synthetic construct
  source 1..80: mol_type = other DNA
aaaggattcatctgaatgacagctaagccatcatgagaaagacagtcatctttggagatagactcacaaatcccaggtgt

SEQ ID NO: 34776 - DNA, 80 bp, synthetic construct
  source 1..80: mol_type = other DNA
agatcagcctgaccaacatgacaaaaacccatctccacaaaaaaaaaaaaaaaaaaaaaaaaaaaaaaaaaaaattagcc

SEQ ID NO: 34777 - DNA, 80 bp, synthetic construct; identical to SEQ ID NO: 12584
  source 1..80: mol_type = other DNA

SEQ ID NO: 34778 - DNA, 80 bp, synthetic construct
  source 1..80: mol_type = other DNA
cttttgtatgtgagatctcacatgttatgttactcagtccttattttctaatgctggcttgggaaatggtgctgcattag

SEQ ID NO: 34779 - DNA, 80 bp, synthetic construct
  source 1..80: mol_type = other DNA
ataattatttgtaaacagtatactggataggactgaaaactctgaagtcagacttcctgcattaaaattctagttctagc

SEQ ID NO: 34780 - DNA, 80 bp, synthetic construct
  source 1..80: mol_type = other DNA
tgtgaaataaatgtttcctttaattttctttgcttccttaaagcctttgtttgacttaatgaaatgatacgtttgagtac

SEQ ID NO: 34781 - DNA, 80 bp, synthetic construct; identical to SEQ ID NO: 12585
  source 1..80: mol_type = other DNA

SEQ ID NO: 34782 - DNA, 80 bp, synthetic construct
  source 1..80: mol_type = other DNA
tttagaatgcagacaaccctgcttactatacagggttctttggaaaattaggtagaaaagtgcacataaagcatgctggt

SEQ ID NO: 34783 - DNA, 80 bp, synthetic construct
  source 1..80: mol_type = other DNA
gatattgcaaactaatcataagccatttgggtggctgtatacaggatgtgtaaaagtaggtagaaaatcataaatatatg

SEQ ID NO: 34784 - DNA, 80 bp, synthetic construct; identical to SEQ ID NO: 12586
  source 1..80: mol_type = other DNA

SEQ ID NO: 34785 - DNA, 80 bp, synthetic construct
  source 1..80: mol_type = other DNA
gaatgcagaaaaaaatggagtgattcaatataacacatatgaaattagatcaccatgcatcacaataatattcatttcat

SEQ ID NO: 34786 - DNA, 80 bp, synthetic construct
  source 1..80: mol_type = other DNA
gtatttttttccattacacaagattctttttgtacaccagcacataacaataagtccagaaccaagtggattactgagta

SEQ ID NO: 34787 - DNA, 80 bp, synthetic construct
  source 1..80: mol_type = other DNA
agttatagtatttcaattggcttctatacttcatgtagaaaacacacaaattctatcgtgccaatgtaattacttcacct

SEQ ID NO: 34788 - DNA, 80 bp, synthetic construct
  source 1..80: mol_type = other DNA
tttttatctgtaataaatgtccagtgatttaatacaaacacaatgagaatatgggttcaccatgcatttttggtctcata

SEQ ID NO: 34789 - DNA, 80 bp, synthetic construct; identical to SEQ ID NO: 12587
  source 1..80: mol_type = other DNA

SEQ ID NO: 34790 - DNA, 80 bp, synthetic construct
  source 1..80: mol_type = other DNA
ttcagccataaatttatcctcattactctgctttatggtattatttattaaagtatactttgtctcttgagccttttctc

SEQ ID NO: 34791 - DNA, 80 bp, synthetic construct
  source 1..80: mol_type = other DNA
taaattttaatccccgcattgtgaagtaagggtaagcaaaaatctcaaacaatacgcctcaggcaaagattttttttctt

SEQ ID NO: 34792 - DNA, 80 bp, synthetic construct
  source 1..80: mol_type = other DNA
aaataaatcttccaggcttacaaagaaaacaaatttgcaacagccacctgctgtggagatgaggcagtaatctcaacagc

SEQ ID NO: 34793 - DNA, 80 bp, synthetic construct; identical to SEQ ID NO: 12588
  source 1..80: mol_type = other DNA

SEQ ID NO: 34794 - DNA, 80 bp, synthetic construct
  source 1..80: mol_type = other DNA
attttttactcaagtaaattcttaaacacaggcactgataacccctttatcagtaattgttctagcaaattatacaatca

SEQ ID NO: 34795 - DNA, 80 bp, synthetic construct
  source 1..80: mol_type = other DNA
ggtcatggattaaaacggaaatgaaagctaagaatcgttctgaattactcatgtatgctctggccttcagagctctgcaa

SEQ ID NO: 34796 - DNA, 80 bp, synthetic construct; identical to SEQ ID NO: 12589
  source 1..80: mol_type = other DNA

SEQ ID NO: 34797 - DNA, 80 bp, synthetic construct
  source 1..80: mol_type = other DNA
ccgcatctccttatagaactgttatgtggacaagtaagcataaaatagctctgtcatactgaaataattttataggtaga

SEQ ID NO: 34798 - DNA, 80 bp, synthetic construct
  source 1..80: mol_type = other DNA
acttctgtgcaaatttattttattttactctaagtcattactgtaatttcataagttttccaaaaaaattactgttctca

SEQ ID NO: 34799 - DNA, 80 bp, synthetic construct
  source 1..80: mol_type = other DNA
tttctaggaattcagaaaattccacaagaaaatcaccttctaaagggcattcttgatggatgcgcttggtcaacaattcc

SEQ ID NO: 34800 - DNA, 80 bp, synthetic construct; identical to SEQ ID NO: 12590
  source 1..80: mol_type = other DNA

SEQ ID NO: 34801 - DNA, 80 bp, synthetic construct
  source 1..80: mol_type = other DNA
gtccagtgtaagcggaagcaacagtttttaatatcagacatccttatgttcatatcgatatgtgatatggtttgactgta

SEQ ID NO: 34802 - DNA, 80 bp, synthetic construct
  source 1..80: mol_type = other DNA
ataagcatctgtgatttcccctgctggcactcactccgtcctgctaccctgtgagtaaggtgcttgcttctcctttgcct

SEQ ID NO: 34803 - DNA, 80 bp, synthetic construct
  source 1..80: mol_type = other DNA
ttgcataatcacagttatttaaattttaagtctcagtctcaactataaaatctgctctgctgggatattaaatgagataa

SEQ ID NO: 34804 - DNA, 80 bp, synthetic construct
  source 1..80: mol_type = other DNA
tatataaaacaccataaaaacaactttaacaacaatgaaaactatggacactttaaaacattcagtcccaattgaaattt

SEQ ID NO: 34805 - DNA, 80 bp, synthetic construct; identical to SEQ ID NO: 12591
  source 1..80: mol_type = other DNA

SEQ ID NO: 34806 - DNA, 80 bp, synthetic construct
  source 1..80: mol_type = other DNA
taataaaaaaatttagaatagagcaagacacctgctatgagagaaggatgcataggttaccacaggagcagttacaaagg

SEQ ID NO: 34807 - DNA, 80 bp, synthetic construct
  source 1..80: mol_type = other DNA
aggagacaggaagaagcaaaatgcgaaatttgacaaataggcagggtccaaactatgaggggtcattcaagtcacaccag

SEQ ID NO: 34808 - DNA, 80 bp, synthetic construct; identical to SEQ ID NO: 12592
  source 1..80: mol_type = other DNA

SEQ ID NO: 34809 - DNA, 80 bp, synthetic construct
  source 1..80: mol_type = other DNA
tcaaaactgtgcctccagattccctagaggtatgttttcattctcttctcctattacagtaacttaaatgagaaaaaata

SEQ ID NO: 34810 - DNA, 80 bp, synthetic construct
  source 1..80: mol_type = other DNA
ccttctctcatagcacatgtcttgctccattctaatttttttttattacatgtccttcttctactgcactgtgattcagt

SEQ ID NO: 34811 - DNA, 80 bp, synthetic construct
  source 1..80: mol_type = other DNA
gctaatgagcattaatccagggagagcgtatacaataatcagaagagaaggccaagaggggagcataagataacacacat

SEQ ID NO: 34812 - DNA, 80 bp, synthetic construct
  source 1..80: mol_type = other DNA
tttaaaacattatacagcgcataacactatgtacactgtaaagcacaaacagtgttcaaaagaacacttttgattttagg

SEQ ID NO: 34813 - DNA, 80 bp, synthetic construct; identical to SEQ ID NO: 12593
  source 1..80: mol_type = other DNA

SEQ ID NO: 34814 - DNA, 80 bp, synthetic construct
  source 1..80: mol_type = other DNA
gaaatcccaggaatcagtacaatggagaatatattcgcactggagcactttctcaagaagtaaaaattaagtcagtaatg

SEQ ID NO: 34815 - DNA, 80 bp, synthetic construct
  source 1..80: mol_type = other DNA
ttctactagtgggtttggaaatcccacagaagggtacattcacgtctggttcaccctaccacagattttctgacctctga

SEQ ID NO: 34816 - DNA, 80 bp, synthetic construct
  source 1..80: mol_type = other DNA
agtgcttcctcacctgacctaagtgctcttgaattatgaagcatgtagacagatatgagaaatttaataataatgaaaat

SEQ ID NO: 34817 - DNA, 80 bp, synthetic construct; identical to SEQ ID NO: 12594
  source 1..80: mol_type = other DNA

SEQ ID NO: 34818 - DNA, 80 bp, synthetic construct
  source 1..80: mol_type = other DNA
cattccaaatgcctttggtttaataaactgagcagtctgctttgatactttcttttcagtttctgaataggtaatttcta

SEQ ID NO: 34819 - DNA, 80 bp, synthetic construct
  source 1..80: mol_type = other DNA
ttccagccacaatctagactcttttgaaaccctaacttgctgttttgtcaatgtattctacagaagataaagaaaaagag

SEQ ID NO: 34820 - DNA, 80 bp, synthetic construct; identical to SEQ ID NO: 12595
  source 1..80: mol_type = other DNA

SEQ ID NO: 34821 - DNA, 80 bp, synthetic construct
  source 1..80: mol_type = other DNA
agggcagcatttaatctttattgttagagagagaaaaaggaagcttaacctagtctgaaaatttggcatacaatgctatg

SEQ ID NO: 34822 - DNA, 80 bp, synthetic construct
  source 1..80: mol_type = other DNA
gtaagccacacccacttaaacttaaatggcgtcttgtaaaagtatcttctaagcactactcatttgtttaaagcacagat

SEQ ID NO: 34823 - DNA, 80 bp, synthetic construct
  source 1..80: mol_type = other DNA
cttcatttgacaaatttaaactataactgtcccagatgttatcaggcctcatagttcttatcccttaaaaacagcaaaat

SEQ ID NO: 34824 - DNA, 80 bp, synthetic construct
  source 1..80: mol_type = other DNA
atcaattttaatctcctgaccaagaataaaagagtgcagactcctgattctggattcatcttgaaaggagattatagatt

SEQ ID NO: 34825 - DNA, 80 bp, synthetic construct; identical to SEQ ID NO: 12596
  source 1..80: mol_type = other DNA

SEQ ID NO: 34826 - DNA, 80 bp, synthetic construct
  source 1..80: mol_type = other DNA
catctggggagctttaaaatgcaaagtaaccgtgatgtcagaaagaggaaagacattaccagttttagtttcatatctct

SEQ ID NO: 34827 - DNA, 80 bp, synthetic construct
  source 1..80: mol_type = other DNA
aagagacttattggacttatagtaccatgtggctgggaaggcctcacaatcatgccagaaggcaaggaggagcaagtcac

SEQ ID NO: 34828 - DNA, 80 bp, synthetic construct; identical to SEQ ID NO: 12597
  source 1..80: mol_type = other DNA

SEQ ID NO: 34829 - DNA, 80 bp, synthetic construct
  source 1..80: mol_type = other DNA
ctatacatcagataacatttccaattccacatcatcacagcagttttcaaacattcacaatgcatcacgtactgtgctag

SEQ ID NO: 34830 - DNA, 80 bp, synthetic construct
  source 1..80: mol_type = other DNA
taagcaaacctagaagtagtgctcgtggtacttaatagttactacacaggtgttagttgtagtaaaacgtattctgattc

SEQ ID NO: 34831 - DNA, 80 bp, synthetic construct
  source 1..80: mol_type = other DNA
atttaggatgtatcctatttccacagatccccttatgccctgtattgatattaagtggtattaaaagtagagagggcaaa

SEQ ID NO: 34832 - DNA, 80 bp, synthetic construct; identical to SEQ ID NO: 12598
  source 1..80: mol_type = other DNA

SEQ ID NO: 34833 - DNA, 80 bp, synthetic construct
  source 1..80: mol_type = other DNA
tatagaaacattattatctctgcagttaatatgcacctcactgaaaatctcatggatgcaacaattaaggaaggcaccat

SEQ ID NO: 34834 - DNA, 80 bp, synthetic construct
  source 1..80: mol_type = other DNA
tcaggacaaattataccatagcagttgggcttgtttcttcaatccctcatcctctatgctgcccccagtgctgagcaaga

SEQ ID NO: 34835 - DNA, 80 bp, synthetic construct
  source 1..80: mol_type = other DNA
gaatgaatgttatccatcacatttttattactaccctaaaatgctaaatagtagcataaaaatattgaaaccaagttggg

SEQ ID NO: 34836 - DNA, 80 bp, synthetic construct
  source 1..80: mol_type = other DNA
tgaatgtaaagtctatttgtacagtcaaaagataattttggtggttaatagtcaattgagtttaagtctgggaaccctct

SEQ ID NO: 34837 - DNA, 80 bp, synthetic construct; identical to SEQ ID NO: 12599
  source 1..80: mol_type = other DNA

SEQ ID NO: 34838 - DNA, 80 bp, synthetic construct
  source 1..80: mol_type = other DNA
atttttaggcacaaaggacatgacagaaataagataaatagacaacaatgggtatgattatgtattagcaaacatcaata

SEQ ID NO: 34839 - DNA, 80 bp, synthetic construct
  source 1..80: mol_type = other DNA
ttgaatttcctttactagctcatccttttatctaattatctggctcacgaagagccagggggagggatggatcttacttg

SEQ ID NO: 34840 - DNA, 80 bp, synthetic construct; identical to SEQ ID NO: 12600
  source 1..80: mol_type = other DNA

SEQ ID NO: 34841 - DNA, 80 bp, synthetic construct
  source 1..80: mol_type = other DNA
atattatgtgaatgatatttataagactgagttgatttcccccacaagtttgacaggataaaatcacacataaatacttt

SEQ ID NO: 34842 - DNA, 80 bp, synthetic construct
  source 1..80: mol_type = other DNA
gagggaagcatcacgactactcactaatataaatcaactatacatcctccccacccatcaagatgcacacttttcaatat

SEQ ID NO: 34843 - DNA, 80 bp, synthetic construct
  source 1..80: mol_type = other DNA
aagttaaggcttacagatcttctaattcaaaaatcaatgctctttccacaatcaaagccgcctcttttctctgccttatt

SEQ ID NO: 34844 - DNA, 80 bp, synthetic construct
  source 1..80: mol_type = other DNA
attaaagttagcacacatttggaaacttgcataacactgctaaggtctctaaccatgagtaagacacaattcttgtttac

SEQ ID NO: 34845 - DNA, 80 bp, synthetic construct; identical to SEQ ID NO: 12601
  source 1..80: mol_type = other DNA

SEQ ID NO: 34846 - DNA, 80 bp, synthetic construct
  source 1..80: mol_type = other DNA
ctatgcagattaccaagtaacaaacagaaccatcctacacaactccctctccatcaaacttcatttctacaatcaccaaa

SEQ ID NO: 34847 - DNA, 80 bp, synthetic construct
  source 1..80: mol_type = other DNA
gcagataagtttttctaaaatgaaaaattcgagggactccccagtgtttcactccttagcaaggaatataaggcccttca

SEQ ID NO: 34848 - DNA, 80 bp, synthetic construct; identical to SEQ ID NO: 12602
  source 1..80: mol_type = other DNA

SEQ ID NO: 34849 - DNA, 80 bp, synthetic construct
  source 1..80: mol_type = other DNA
ttgttcttctcggcattctttctgcctaggacatactaggtattcaattaatgttagtctaatgaaggaatggtaaattc

SEQ ID NO: 34850 - DNA, 80 bp, synthetic construct
  source 1..80: mol_type = other DNA
ataaaattcttattcaaaatattatctttttgagacagataggattacattaaaagaccagagagaccacacggagatgc

SEQ ID NO: 34851 - DNA, 80 bp, synthetic construct
  source 1..80: mol_type = other DNA
ctctaaccatgtagctcaaattacttaagtgcttagataaccgtgataacacaaaaaatagagacctagttcatacaaaa

SEQ ID NO: 34852 - DNA, 80 bp, synthetic construct; identical to SEQ ID NO: 12603
  source 1..80: mol_type = other DNA

SEQ ID NO: 34853 - DNA, 80 bp, synthetic construct
  source 1..80: mol_type = other DNA
ctctttctttcttttgtaaatgatccaaggatctaattcccacatattcagatggggcataagtatgaagaaaacacaca

SEQ ID NO: 34854 - DNA, 80 bp, synthetic construct
  source 1..80: mol_type = other DNA
ggcaaatatatttttacaagagttacaaaacactaagcaacagtggctgtgtcagactagtcagcctgtcctactcatat

SEQ ID NO: 34855 - DNA, 80 bp, synthetic construct
  source 1..80: mol_type = other DNA
acaccaacattgagagtaagttcagggtgaggataaaacatctcctatgaactagggatacctacaaaatatttgcaggg

SEQ ID NO: 34856 - DNA, 80 bp, synthetic construct; identical to SEQ ID NO: 12604
  source 1..80: mol_type = other DNA

SEQ ID NO: 34857 - DNA, 80 bp, synthetic construct
  source 1..80: mol_type = other DNA
aaaagaaggaaaaagtctcaagctgccttctcttttaaaactctctcagtttgccacttgggtccccaaaatgtaagtca

SEQ ID NO: 34858 - DNA, 80 bp, synthetic construct
  source 1..80: mol_type = other DNA
atgataaggacattaaagctttgccttagtactgttctagatcagtgtttctcagactctccatggcaagggactagtct

SEQ ID NO: 34859 - DNA, 80 bp, synthetic construct
  source 1..80: mol_type = other DNA
ttttttttttctagatggagtctggctctgtcacacatgctggagtgcagtggcatgatctcggttcactgcaacctccg

SEQ ID NO: 34860 - DNA, 80 bp, synthetic construct
  source 1..80: mol_type = other DNA
accagttcagagtccggcgccagtctatggctacacaaccagcagcattgctatagatgacacagaatttgaatttaggt

SEQ ID NO: 34861 - DNA, 80 bp, synthetic construct; identical to SEQ ID NO: 12605
  source 1..80: mol_type = other DNA

SEQ ID NO: 34862 - DNA, 80 bp, synthetic construct
  source 1..80: mol_type = other DNA
taatatatcacacaaccaggttgttataaggattatatactttggtaaaattttgttgttttatttcatacagattggta

SEQ ID NO: 34863 - DNA, 80 bp, synthetic construct
  source 1..80: mol_type = other DNA
cttatttatatcaacctgacaactactagcttatgatcaaaatggaatgctggttgacaggacaaaataccatgttctgt

SEQ ID NO: 34864 - DNA, 80 bp, synthetic construct; identical to SEQ ID NO: 12606
  source 1..80: mol_type = other DNA

SEQ ID NO: 34865 - DNA, 80 bp, synthetic construct
  source 1..80: mol_type = other DNA
atggatatatttaatatgaaaacattattttctgggcttaaggccttaaagtattgccagtggcatttgtgcctatactg

SEQ ID NO: 34866 - DNA, 80 bp, synthetic construct
  source 1..80: mol_type = other DNA
ctcccagtataagtgaaaaaaaaaaaaaacataggcactttggaattattagcctgggttacactcagattccagtgaga

SEQ ID NO: 34867 - DNA, 80 bp, synthetic construct
  source 1..80: mol_type = other DNA
agtgcagtggcatgatcgtagcacacactataacctcaaattcctgagcttaagcaatcctccagcctcagcctccctcc

SEQ ID NO: 34868 - DNA, 80 bp, synthetic construct; identical to SEQ ID NO: 12607
  source 1..80: mol_type = other DNA

SEQ ID NO: 34869 - DNA, 80 bp, synthetic construct
  source 1..80: mol_type = other DNA
aagtccaatcttcttagccttccttcatacttctgcccctatctaatcattcttttagcaacttctggttccattttgat

SEQ ID NO: 34870 - DNA, 80 bp, synthetic construct
  source 1..80: mol_type = other DNA
atatttgtacatatactgtacaagcctgtctaattttataatgatggccatgtcagcactgcaagaggctgtaatgcctt

SEQ ID NO: 34871 - DNA, 80 bp, synthetic construct
  source 1..80: mol_type = other DNA
actattttggagactcatcaatagcatataggacctactataaattcatctttattctaggtcctttcagtagtacagaa

SEQ ID NO: 34872 - DNA, 80 bp, synthetic construct; identical to SEQ ID NO: 12608
  source 1..80: mol_type = other DNA

SEQ ID NO: 34873 - DNA, 80 bp, synthetic construct
  source 1..80: mol_type = other DNA
aattttgtactgatgtccacatacatgtatatgcataggttagtatacacatatatattcccttacccatcagctgggag

SEQ ID NO: 34874 - DNA, 80 bp, synthetic construct
  source 1..80: mol_type = other DNA
gacttaggaaggaaatatacaagataagcctagatcatcttgtagggccagaaattaagtgctaaaacacaaacacacac

SEQ ID NO: 34875 - DNA, 80 bp, synthetic construct
  source 1..80: mol_type = other DNA
gagtccatcatacttatataaataaatgactgaataaataaatgggcagaatagacaaattcccatgcagatgaatccca

SEQ ID NO: 34876 - DNA, 80 bp, synthetic construct
  source 1..80: mol_type = other DNA
tcatgaaatcaaggttaacattaatcatgacaaagcttattgatagtatataaaataaggtgatttaaataaccctttac

SEQ ID NO: 34877 - DNA, 80 bp, synthetic construct; identical to SEQ ID NO: 12609
  source 1..80: mol_type = other DNA

SEQ ID NO: 34878 - DNA, 80 bp, synthetic construct
  source 1..80: mol_type = other DNA
aaacatactatactaatgtaaggtgctaacaagagaggaaactgaatgtggactccagcgattctgtattgtctctaaag

SEQ ID NO: 34879 - DNA, 80 bp, synthetic construct
  source 1..80: mol_type = other DNA
aaggcaggcaaacaagatctgaaggaatcaggaaatagtttcatgaaaagaatggcgtttacacagaatcaggagagcta

SEQ ID NO: 34880 - DNA, 80 bp, synthetic construct; identical to SEQ ID NO: 12610
  source 1..80: mol_type = other DNA

SEQ ID NO: 34881 - DNA, 80 bp, synthetic construct
  source 1..80: mol_type = other DNA
gctagagcaggctgttaaatgttctcttatggaaagtaaaaaggatgttcagtcttcagcaaacataattcactgcagaa

SEQ ID NO: 34882 - DNA, 80 bp, synthetic construct
  source 1..80: mol_type = other DNA
ccatgaaaattccaactttaattttcatagaaatagagaaaacattaccaaaacacatatggaaccattgaaaaaccctg

SEQ ID NO: 34883 - DNA, 80 bp, synthetic construct
  source 1..80: mol_type = other DNA
aacccatgcatatatgatcaactgatttttgacaaaggtgccaagaataagcaatgggtaaaggatagtctcattgaaaa

SEQ ID NO: 34884 - DNA, 80 bp, synthetic construct
  source 1..80: mol_type = other DNA
tgggaaatgatgttttggatttgatcccaaaagcacaggcaacaaaagcaaaaatagagaaatgggatttgatcaaacta

SEQ ID NO: 34885 - DNA, 80 bp, synthetic construct; identical to SEQ ID NO: 12611
  source 1..80: mol_type = other DNA

SEQ ID NO: 34886 - DNA, 80 bp, synthetic construct
  source 1..80: mol_type = other DNA
gaaagcagaaaggcagttcctcgaaaaactggaaatacaattaccatgtgatccagaaatcccacttctgggtatttacc

SEQ ID NO: 34887 - DNA, 80 bp, synthetic construct
  source 1..80: mol_type = other DNA
aaaaaagggaaattttattatttgtaacaacatgggtggaattggagaacattacactaagtgaaacaagtcaagcatag

SEQ ID NO: 34888 - DNA, 80 bp, synthetic construct; identical to SEQ ID NO: 12612
  source 1..80: mol_type = other DNA

SEQ ID NO: 34889 - DNA, 80 bp, synthetic construct
  source 1..80: mol_type = other DNA
actatttgcaatattataacatcatcttatgcctcataaatgtatacaattataactgtcaatttataataaacttttat

SEQ ID NO: 34890 - DNA, 80 bp, synthetic construct
  source 1..80: mol_type = other DNA
tgacagaatgactatagatgatatatcaatgggtaactgttgtgaactgagtagtatcccctcaaattgatatgctgaag

SEQ ID NO: 34891 - DNA, 80 bp, synthetic construct
  source 1..80: mol_type = other DNA
gcatgtaaacacacagggaggagatggtcatctacaatgccaaggagagacacctcagaggaaaaaccaactctgctgcc

SEQ ID NO: 34892 - DNA, 80 bp, synthetic construct; identical to SEQ ID NO: 12613
  source 1..80: mol_type = other DNA

SEQ ID NO: 34893 - DNA, 80 bp, synthetic construct
  source 1..80: mol_type = other DNA
atttgttaaatgaataaactcgtatttcccacggtgccaagtccagagtctcttgcattttgtcagcgtttcattaatgt

SEQ ID NO: 34894 - DNA, 80 bp, synthetic construct
  source 1..80: mol_type = other DNA
caacataaaaaaacatacaatgacttcccatttcctccaaaaggaggcaagctcctctgcctaactgaaaattggttcac

SEQ ID NO: 34895 - DNA, 80 bp, synthetic construct
  source 1..80: mol_type = other DNA
aggtgggaaagataaagtcttagtatgtcttccttccgcattagcctgaccattataaaaataaacgacatagtaaggaa

SEQ ID NO: 34896 - DNA, 80 bp, synthetic construct; identical to SEQ ID NO: 12614
  source 1..80: mol_type = other DNA

SEQ ID NO: 34897 - DNA, 80 bp, synthetic construct
  source 1..80: mol_type = other DNA
cacctcctaataccattacaacaagggttgggatttcaacatacacatttagggagacataaacagtccataacacaagg

SEQ ID NO: 34898 - DNA, 80 bp, synthetic construct
  source 1..80: mol_type = other DNA
aagaaacattatttctagaaacagaaaagttttcaattatctcttccaagtaagaactgatgctaccgcctaatccccag

SEQ ID NO: 34899 - DNA, 80 bp, synthetic construct
  source 1..80: mol_type = other DNA
acactgtattaggatgcctttatcttacccacttatgctatcatctgccatagggctagcaacttgtaaaattcctcaat

SEQ ID NO: 34900 - DNA, 80 bp, synthetic construct
  source 1..80: mol_type = other DNA
tatccagcctagatgacctagaggagttgaacatcattagcagattatcatctgatataacattactaatagtattatat

SEQ ID NO: 34901 - DNA, 80 bp, synthetic construct; identical to SEQ ID NO: 12615
  source 1..80: mol_type = other DNA

SEQ ID NO: 34902 - DNA, 80 bp, synthetic construct
  source 1..80: mol_type = other DNA
ttctagggaccagatggactttttgctgtaaggacctatttctaaattcttcccatgtgtcctcatcattcctccctata

SEQ ID NO: 34903 - DNA, 80 bp, synthetic construct
  source 1..80: mol_type = other DNA
agatgcctttggcatcatatatattttgcctgctgttttaggtcctgccatcaagcatgtagtaatattttcaaacaatt

SEQ ID NO: 34904 - DNA, 80 bp, synthetic construct
  source 1..80: mol_type = other DNA
agccaagtccaacttagacttacaaaatactttatatatgcatacatgcaaaaaaaaagtggctagaagaaaaattcagc

SEQ ID NO: 34905 - DNA, 80 bp, synthetic construct; identical to SEQ ID NO: 12616
  source 1..80: mol_type = other DNA

SEQ ID NO: 34906 - DNA, 80 bp, synthetic construct
  source 1..80: mol_type = other DNA
ctaatctatcagtaaatcctatcggtctcacttctaaatggcatgcggattctgatgaattcttaccacttacattgtta

SEQ ID NO: 34907 - DNA, 80 bp, synthetic construct
  source 1..80: mol_type = other DNA
aacaaaataaagcatgtgttaaaaagtcatgctaaaaattctaggagccaatgtaggacacacacctcaaagctatccta

SEQ ID NO: 34908 - DNA, 80 bp, synthetic construct; identical to SEQ ID NO: 12617
  source 1..80: mol_type = other DNA

SEQ ID NO: 34909 - DNA, 80 bp, synthetic construct
  source 1..80: mol_type = other DNA
attcacctatgtaatgggggtaatgaaatttatactgggggctgtgagaattgaataaaataatacaaataaccactaac

SEQ ID NO: 34910 - DNA, 80 bp, synthetic construct
  source 1..80: mol_type = other DNA
cattagtcagtgaagaacgtctatgctgtttatagtttttggctattacggataaagccactatatacagtcaaaaaaaa

SEQ ID NO: 34911 - DNA, 80 bp, synthetic construct
  source 1..80: mol_type = other DNA
taagtactttatgtgcctcatcatctctcagtgtttaatttggtgttgctctatttctccatgccttctctctaatgctg

SEQ ID NO: 34912 - DNA, 80 bp, synthetic construct; identical to SEQ ID NO: 12618
  source 1..80: mol_type = other DNA

SEQ ID NO: 34913 - DNA, 80 bp, synthetic construct
  source 1..80: mol_type = other DNA
taggaagggataagccttccactttggtacaactcttattttgctactattttttgatagggagcaaagtaaagaattat

SEQ ID NO: 34914 - DNA, 80 bp, synthetic construct
  source 1..80: mol_type = other DNA
ggtagttgaaacaacaaaaacataagcacgtaacaggcttctgagagcaagcttactgattttcatttgctggaaccacg

SEQ ID NO: 34915 - DNA, 80 bp, synthetic construct
  source 1..80: mol_type = other DNA
actctctctgactagcaaaattgaaagcccagccagccacaatcaggctggcttaaagcatagtttattttctcttgtca

SEQ ID NO: 34916 - DNA, 80 bp, synthetic construct; identical to SEQ ID NO: 12619
  source 1..80: mol_type = other DNA

SEQ ID NO: 34917 - DNA, 80 bp, synthetic construct
  source 1..80: mol_type = other DNA
tgaaaatagagtcttcttgaaacatatttaggaatttgaacaaatgtctgttctttaaagttacgggagtgggtagagct

SEQ ID NO: 34918 - DNA, 80 bp, synthetic construct
  source 1..80: mol_type = other DNA
ataaatatagccacaggacttctaaaattctataccaccgttcgattgtaatctaaaagggatgccaaaagtgcataagc

SEQ ID NO: 34919 - DNA, 80 bp, synthetic construct
  source 1..80: mol_type = other DNA
taggctaaatgtattctggctggctgccatactaaatgttcaatgaaacatccttaaggctctctacaagttcagctgaa

SEQ ID NO: 34920 - DNA, 80 bp, synthetic construct
  source 1..80: mol_type = other DNA
tgataaatacatgtagagataattagtcatactactactgatatacaaatgtacttctaaacttgctgaaacctggacat

SEQ ID NO: 34921 - DNA, 80 bp, synthetic construct; identical to SEQ ID NO: 12620
  source 1..80: mol_type = other DNA

SEQ ID NO: 34922 - DNA, 80 bp, synthetic construct
  source 1..80: mol_type = other DNA
tagatcactcaacatttttacaattgctggtcaatcttagattggtctttagagcctaaagatagagccaacattcacat

SEQ ID NO: 34923 - DNA, 80 bp, synthetic construct
  source 1..80: mol_type = other DNA
ttcaaactgtatcaaatttgcccaggccacatggctttctttagttttcctgctaatcacatgctattgattaaaagcca

SEQ ID NO: 34924 - DNA, 80 bp, synthetic construct
  source 1..80: mol_type = other DNA
cacgaaatgagacagaaatataaagtagcaagcaatcttaaggcccctataatgtaaagggaactaaaagcgtcatgggg

SEQ ID NO: 34925 - DNA, 80 bp, synthetic construct; identical to SEQ ID NO: 12621
  source 1..80: mol_type = other DNA

SEQ ID NO: 34926 - DNA, 80 bp, synthetic construct
  source 1..80: mol_type = other DNA
aggaattcacagaaaacaagtgaaattcaagtggttagattcaggggcttatatgccttttaaaagggggcattaggctt

SEQ ID NO: 34927 - DNA, 80 bp, synthetic construct
  source 1..80: mol_type = other DNA
tttattcgtgcaaactcgtttcagcgttgactccccatttgcagtgataagagttgttcttcctttcttggtgccaggct

SEQ ID NO: 34928 - DNA, 80 bp, synthetic construct; identical to SEQ ID NO: 12622
  source 1..80: mol_type = other DNA

SEQ ID NO: 34929 - DNA, 80 bp, synthetic construct
  source 1..80: mol_type = other DNA
taaggaacaccaacaaaaactttgaaataagtatgtcaatgcttaaaatggaaactgacacactggcttttatcaaaatg

SEQ ID NO: 34930 - DNA, 80 bp, synthetic construct
  source 1..80: mol_type = other DNA
gatgataccaagaaattcatccacaaggtagaggaaaaagccatgaataagtaggtggaagatacaaaatataacaacag

SEQ ID NO: 34931 - DNA, 80 bp, synthetic construct
  source 1..80: mol_type = other DNA
gatatagtaaaactgacaatatcaggagttttagggacaaagagaagcccctcaggaccaaatctaatcttatccatcta

SEQ ID NO: 34932 - DNA, 80 bp, synthetic construct
  source 1..80: mol_type = other DNA
ttacttaaatggagtgttgaaaacagtgaggagacacagaggtgccattgagagtgatgcctctgaagagaaacgctgga

SEQ ID NO: 34933 - DNA, 80 bp, synthetic construct; identical to SEQ ID NO: 12623
  source 1..80: mol_type = other DNA

SEQ ID NO: 34934 - DNA, 80 bp, synthetic construct
  source 1..80: mol_type = other DNA
gtgttaacgatgtaattggcacccacagtttaagaccaccagtgtggttcttgcctaaataatgaatttacttacaaatt

SEQ ID NO: 34935 - DNA, 80 bp, synthetic construct
  source 1..80: mol_type = other DNA
atttaaaaggaaagatactgacattctcattaactcaactcattatgtctaaagttgaagaaattgtcccgtcccaaaaa

SEQ ID NO: 34936 - DNA, 80 bp, synthetic construct
  source 1..80: mol_type = other DNA
ttgagttcctaggcccaagcaatcttcccacctcagcctccccagtacctgggactataggcatgcatcaccatgcccag

SEQ ID NO: 34937 - DNA, 80 bp, synthetic construct; identical to SEQ ID NO: 12624
  source 1..80: mol_type = other DNA

SEQ ID NO: 34938 - DNA, 80 bp, synthetic construct
  source 1..80: mol_type = other DNA
tttttcccactttcatttccatttcaactggccccacctttctctaggtctctatttcttactcctagattacaatcatc

SEQ ID NO: 34939 - DNA, 80 bp, synthetic construct
  source 1..80: mol_type = other DNA
cacttttaggattacttgcatttgccatttttatatgaaagaggacatgggcaaatgaagacatataatatgtgaattat

SEQ ID NO: 34940 - DNA, 80 bp, synthetic construct
  source 1..80: mol_type = other DNA
ttcttattcatattatcttaacactagaaatgagaagttcactcagtgaatgagggcattgtctctcccatgaaatgcct

SEQ ID NO: 34941 - DNA, 80 bp, synthetic construct; identical to SEQ ID NO: 12625
  source 1..80: mol_type = other DNA

SEQ ID NO: 34942 - DNA, 80 bp, synthetic construct
  source 1..80: mol_type = other DNA
gcatgaagaagaaggaaaaaccacacacacctcataaatgaacattatcacaaactttatctcccatttgttctcctcaa

SEQ ID NO: 34943 - DNA, 80 bp, synthetic construct
  source 1..80: mol_type = other DNA
cttctgataatatcttttggcagtttattttatagaccccccagacactgaacataagagagtacaggaaaagttttccc

SEQ ID NO: 34944 - DNA, 80 bp, synthetic construct
  source 1..80: mol_type = other DNA
aagaagtgagaaaagagaaagggcagaaagaagacaacaaaggaaataggtgagatgtaatttcacgaagggaacaagtg

SEQ ID NO: 34945 - DNA, 80 bp, synthetic construct; identical to SEQ ID NO: 12626
  source 1..80: mol_type = other DNA

SEQ ID NO: 34946 - DNA, 80 bp, synthetic construct
  source 1..80: mol_type = other DNA
tccaatttgttgagaccaaggaagagaacaagttttcatctggaaggcagaaggttttacagatgagaatcacatgcata

SEQ ID NO: 34947 - DNA, 80 bp, synthetic construct
  source 1..80: mol_type = other DNA
tgcctgacagaataagacacagatgtttttgcacatgtgggtacttgtggcaaatcattatgtcacctaggagaagctac

SEQ ID NO: 34948 - DNA, 80 bp, synthetic construct
  source 1..80: mol_type = other DNA
ttcatattggatgacttagtccattttgcattgctataaaggagtacctgagactgtgtaatttataaagaaaagaagtt

SEQ ID NO: 34949 - DNA, 80 bp, synthetic construct; identical to SEQ ID NO: 12627
  source 1..80: mol_type = other DNA

SEQ ID NO: 34950 - DNA, 80 bp, synthetic construct
  source 1..80: mol_type = other DNA
ggtttcaatatatatttttgaagctttaaaaacatatttttagccacagaacagtcctgcattgttacccatcagcagtg

SEQ ID NO: 34951 - DNA, 80 bp, synthetic construct
  source 1..80: mol_type = other DNA
catttgctaactgtaaggcacacagttttaaataatcttggtgtctctatatacaaaacagaaataagactattctcagg

SEQ ID NO: 34952 - DNA, 80 bp, synthetic construct
  source 1..80: mol_type = other DNA
tccatggctcagacactgaaaaaaattattgtactctattcactattaactgttattttgtgtgtgtattttcagttgct

SEQ ID NO: 34953 - DNA, 80 bp, synthetic construct; identical to SEQ ID NO: 12628
  source 1..80: mol_type = other DNA

SEQ ID NO: 34954 - DNA, 80 bp, synthetic construct
  source 1..80: mol_type = other DNA
gtatgaacagatgacgcagaacatgcctattcaagacaacatggtttctgagtgacactgattaacaatcttgtgaaagc

SEQ ID NO: 34955 - DNA, 80 bp, synthetic construct
  source 1..80: mol_type = other DNA
atggtttctgagtgacactgattaacaatcttgtgaaagctggcctttattctactcaacttaactgaaacaatggggca

SEQ ID NO: 34956 - DNA, 80 bp, synthetic construct
  source 1..80: mol_type = other DNA
gtgacttacagatttaaagggtacaaattcttcgatttgtttttaagaaaaaacttctaagaaaatggcattttccaaat

SEQ ID NO: 34957 - DNA, 80 bp, synthetic construct; identical to SEQ ID NO: 12629
  source 1..80: mol_type = other DNA

SEQ ID NO: 34958 - DNA, 80 bp, synthetic construct
  source 1..80: mol_type = other DNA
tgttagattattagagtctgtaattgtaagttatgtaaccacaccatgaattaacaggcttgagggctttccctgaaaga

SEQ ID NO: 34959 - DNA, 80 bp, synthetic construct
  source 1..80: mol_type = other DNA
caatagaaaagtcacagaggccaaaacagtgatagaagaaaagcatgactcatacttggccctgttgcttgaggcaccaa

SEQ ID NO: 34960 - DNA, 80 bp, synthetic construct
  source 1..80: mol_type = other DNA
ataggctcccagtttttcttagatgaaggatatgactacctgtctggcacatggatggagtgtaaaagctatatggcact

SEQ ID NO: 34961 - DNA, 80 bp, synthetic construct; identical to SEQ ID NO: 12630
  source 1..80: mol_type = other DNA

SEQ ID NO: 34962 - DNA, 80 bp, synthetic construct
  source 1..80: mol_type = other DNA
tgattatctcaatagatgcagaaagggctttcgataaaattcaacaccacttcatgctaaaaactctcaataacctaggt

SEQ ID NO: 34963 - DNA, 80 bp, synthetic construct
  source 1..80: mol_type = other DNA
tggccagggcaatcaggcaagagaaagaaataaagggtattcaattaggaaaagaggaagtcaaattgtccctgtttgca

SEQ ID NO: 34964 - DNA, 80 bp, synthetic construct
  source 1..80: mol_type = other DNA
agtgaactctcattcacaactgctacaaagagaataaaatacctaggaatacaaattacaaggggtgtgaaggacctcct

SEQ ID NO: 34965 - DNA, 80 bp, synthetic construct; identical to SEQ ID NO: 12631
  source 1..80: mol_type = other DNA

SEQ ID NO: 34966 - DNA, 80 bp, synthetic construct
  source 1..80: mol_type = other DNA
acaaacctgacaaaaacaagaaatggggaaaggattccttatttaataaatgttgttgggaaaactggctagccatatgc

SEQ ID NO: 34967 - DNA, 80 bp, synthetic construct
  source 1..80: mol_type = other DNA
ggggaacatcacactctggggactgttgtggggtggggggaggggggagggatagctttaggagatatacctaatgctaa

SEQ ID NO: 34968 - DNA, 80 bp, synthetic construct
  source 1..80: mol_type = other DNA
gattaaagaccgaaatataaaatctaaaaccataaaaaccctagaagaaaacctaggcaataccattcaggacataggca

SEQ ID NO: 34969 - DNA, 80 bp, synthetic construct; identical to SEQ ID NO: 12632
  source 1..80: mol_type = other DNA

SEQ ID NO: 34970 - DNA, 80 bp, synthetic construct
  source 1..80: mol_type = other DNA
agtcaggaaacaacagattctggagaggatgtggagaaataggaacacttttacactgttggtgggaatgtaaattagtt

SEQ ID NO: 34971 - DNA, 80 bp, synthetic construct
  source 1..80: mol_type = other DNA
gcaaagacttgaaaccaacccaaatggccatcaatgatagactggataaagaaaatgtggcacatatacaccatggaata

SEQ ID NO: 34972 - DNA, 80 bp, synthetic construct
  source 1..80: mol_type = other DNA
gaggggaacatcacacaccagggcctgtcaggggttggggggctaggggagggatagcattaggagaaatacctaatgta

SEQ ID NO: 34973 - DNA, 80 bp, synthetic construct; identical to SEQ ID NO: 12633
  source 1..80: mol_type = other DNA

SEQ ID NO: 34974 - DNA, 80 bp, synthetic construct
  source 1..80: mol_type = other DNA
tatatacatcagatggtaatacattataaagtgaattttccatttttgtttgtttgtttgttttgagacagagtctccat

SEQ ID NO: 34975 - DNA, 80 bp, synthetic construct
  source 1..80: mol_type = other DNA
tttttttttgtatttttagtagaaacagggtatcaccacattggccaggctggtctcaaactcctgacctcatgatctgc

SEQ ID NO: 34976 - DNA, 80 bp, synthetic construct
  source 1..80: mol_type = other DNA
gacccttcactgttgtctcctctatcttaagttttcttgggtagccttgtgtctataattttttaatgcatacacaagaa

SEQ ID NO: 34977 - DNA, 80 bp, synthetic construct
  source 1..80: mol_type = other DNA
acttacagtattctattgcatgaatacgctgtaacttatttatcagttactacctagtttttcttgatggacatttaggt

SEQ ID NO: 34978 - DNA, 80 bp, synthetic construct; identical to SEQ ID NO: 12634
  source 1..80: mol_type = other DNA

SEQ ID NO: 34979 - DNA, 80 bp, synthetic construct
  source 1..80: mol_type = other DNA
atcccagttatatcaatgccatgtaagaaataacttgtcttttctacactgatttcaaatgctactttttaaatattcta

SEQ ID NO: 34980 - DNA, 80 bp, synthetic construct
  source 1..80: mol_type = other DNA
tttccttactacatcttctgatgggttactgtttgcatatataaaagctgttgatctgtgtacaataattttgagcccca

SEQ ID NO: 34981 - DNA, 80 bp, synthetic construct
  source 1..80: mol_type = other DNA
agtttggtttcagtgttttctgttacagaatgatgctgtgaggagtgtaaagccagtctaatattttctcttcagtatga

SEQ ID NO: 34982 - DNA, 80 bp, synthetic construct; identical to SEQ ID NO: 12635
  source 1..80: mol_type = other DNA

SEQ ID NO: 34983 - DNA, 80 bp, synthetic construct
  source 1..80: mol_type = other DNA
tccatatcagatgtcctctacagggctttgctatctttattcattcttatgctcctcccattgtgtctttattttagtga

SEQ ID NO: 34984 - DNA, 80 bp, synthetic construct
  source 1..80: mol_type = other DNA
ttgttattttctttatgttccattgcaattttttttggaaagtatgcttatctcttggtaaattaattgcctcttttcca

SEQ ID NO: 34985 - DNA, 80 bp, synthetic construct
  source 1..80: mol_type = other DNA
gacactacttgcaaatatggcttatttgtactggattacttgagtagtttcacctactctgtttttctgaacaaaatcaa

SEQ ID NO: 34986 - DNA, 80 bp, synthetic construct; identical to SEQ ID NO: 12636
  source 1..80: mol_type = other DNA

SEQ ID NO: 34987 - DNA, 80 bp, synthetic construct
  source 1..80: mol_type = other DNA
agtaatcttatatttggtggcccaaagtgatggggagatgagtacagagccaaatgtctatctgattagaaatgaaagat

SEQ ID NO: 34988 - DNA, 80 bp, synthetic construct
  source 1..80: mol_type = other DNA
tttataatttctctgaatgagctaaaaagattatctctaattactgacttgttatcaaaccatattatatctgcatagta

SEQ ID NO: 34989 - DNA, 80 bp, synthetic construct; identical to SEQ ID NO: 12637
  source 1..80: mol_type = other DNA

SEQ ID NO: 34990 - DNA, 80 bp, synthetic construct
  source 1..80: mol_type = other DNA
aagcattattaggtgatagtttgagtcaattgtcatagttttggtctggcaatcagaaaaccatactgatagcctcacta

SEQ ID NO: 34991 - DNA, 80 bp, synthetic construct
  source 1..80: mol_type = other DNA
aaaagtggacccagtcaggtagaccgtgttacttacaggcaatttggtgtttgtggatcatctcaatagatactatgtca

SEQ ID NO: 34992 - DNA, 80 bp, synthetic construct
  source 1..80: mol_type = other DNA
ctaggaaagacactgatttctcctataaagacacgcagttttattcactattgaaaggtaagaatacattataataatag

SEQ ID NO: 34993 - DNA, 80 bp, synthetic construct; identical to SEQ ID NO: 12638
  source 1..80: mol_type = other DNA

SEQ ID NO: 34994 - DNA, 80 bp, synthetic construct
  source 1..80: mol_type = other DNA
gcatgttaggctacattaatatttaacatctaagcaaggagctctaaaaaactcctaaatcaagaaggtttatattttcc

SEQ ID NO: 34995 - DNA, 80 bp, synthetic construct
  source 1..80: mol_type = other DNA
agctacataaggagctctcaaggtgatcatgactatttccatttaaaaactggatttatctgatagcacaaaagatgagt

SEQ ID NO: 34996 - DNA, 80 bp, synthetic construct
  source 1..80: mol_type = other DNA
cttgaatgattttgtggttggaaataacaattagtttgcttaaatctgctcatactacaattaatcatgtatttctcttt

SEQ ID NO: 34997 - DNA, 80 bp, synthetic construct; identical to SEQ ID NO: 12639
  source 1..80: mol_type = other DNA

SEQ ID NO: 34998 - DNA, 80 bp, synthetic construct
  source 1..80: mol_type = other DNA
agtaattctttttccaaatgcaaatctgatcatttcacttcccaacctagctatctaccatctcctgccactgcttcttt

SEQ ID NO: 34999 - DNA, 80 bp, synthetic construct
  source 1..80: mol_type = other DNA
atgtgttgtactgaatgtctgtctcccaaaggctaggagctcctctagaacaaggactctatcctctttactgtcatatt

SEQ ID NO: 35000 - DNA, 80 bp, synthetic construct
  source 1..80: mol_type = other DNA
aaaacatttagtgaagatttagttttatgctaagacctaaggcaacaatggtcaaaagagatacctaaaccttgctccaa

SEQ ID NO: 35001 - DNA, 80 bp, synthetic construct; identical to SEQ ID NO: 12640
  source 1..80: mol_type = other DNA

SEQ ID NO: 35002 - DNA, 80 bp, synthetic construct
  source 1..80: mol_type = other DNA
tacttgttccttgaaaaaaatttaaatcttatctgtttccacagtgaataattcaaggtgtgtatacacacacacacaca

SEQ ID NO: 35003 - DNA, 80 bp, synthetic construct
  source 1..80: mol_type = other DNA
ttcaaatgtctagccacaatagctgcagtgaaaagccttagctctgagtatttgatgagtgttcaattaagacctcaaac

SEQ ID NO: 35004 - DNA, 80 bp, synthetic construct
  source 1..80: mol_type = other DNA
tagatgcaagaattccaactgaggcgattttatgaaccagctaaatgatttgtattcagaacagcattaaaaatccccat

SEQ ID NO: 35005 - DNA, 80 bp, synthetic construct; identical to SEQ ID NO: 12641
  source 1..80: mol_type = other DNA

SEQ ID NO: 35006 - DNA, 80 bp, synthetic construct
  source 1..80: mol_type = other DNA
tgaattcaatatgctttatcaggagctaaatcaaaccagattttaaaaatgccaaataaatgcagtcataataggcattt

SEQ ID NO: 35007 - DNA, 80 bp, synthetic construct
  source 1..80: mol_type = other DNA
tttatctacctactataatttttaagcccacaaaaagaaaatggaacaaagtgagagacaactgtaaaatctttctcatt

SEQ ID NO: 35008 - DNA, 80 bp, synthetic construct
  source 1..80: mol_type = other DNA
taaaaacagctcaagagtacagatgctgcaaaagagaattttagaaatcactttcattttctcttaaaaaattctcatgt

SEQ ID NO: 35009 - DNA, 80 bp, synthetic construct; identical to SEQ ID NO: 12642
  source 1..80: mol_type = other DNA

SEQ ID NO: 35010 - DNA, 80 bp, synthetic construct
  source 1..80: mol_type = other DNA
aggtctcaacaaaacccacataattttaatttgagggcggaagggtgagggacatttctattgcagtattttatatggtg

SEQ ID NO: 35011 - DNA, 80 bp, synthetic construct
  source 1..80: mol_type = other DNA
tgacccataattgtttatttgtctcctaccctcatgtcctatctactgttatttactctctgcctccctcagcatgcttc

SEQ ID NO: 35012 - DNA, 80 bp, synthetic construct; identical to SEQ ID NO: 12643
  source 1..80: mol_type = other DNA

SEQ ID NO: 35013 - DNA, 80 bp, synthetic construct
  source 1..80: mol_type = other DNA
tctgacaaatcattaaatgaaagaatggaatcaggtaaaagtggcctttcatagtcagaatttcagtttgtttctttctc

SEQ ID NO: 35014 - DNA, 80 bp, synthetic construct
  source 1..80: mol_type = other DNA
tccagctcatttttgtatttttagtagagacagggtttcaccatgttggccaggatggtctctgtctcctgacctcgtga

SEQ ID NO: 35015 - DNA, 80 bp, synthetic construct
  source 1..80: mol_type = other DNA
ttccttctcttctattctccctaccttctcctctcacctttttatagggaagggtctgcaatatttttgtactaagtgtt

SEQ ID NO: 35016 - DNA, 80 bp, synthetic construct; identical to SEQ ID NO: 12644
  source 1..80: mol_type = other DNA

SEQ ID NO: 35017 - DNA, 80 bp, synthetic construct
  source 1..80: mol_type = other DNA
cttccataacgcatttgaaataatctaatatgatggatagataattacaatgattgagcactgaaattaaccctgagatt

SEQ ID NO: 35018 - DNA, 80 bp, synthetic construct
  source 1..80: mol_type = other DNA
ttttatagtgatttcacaaaagatacaagatttcattatgggaccctttaatattcataaaagttcagggagttataata

SEQ ID NO: 35019 - DNA, 80 bp, synthetic construct
  source 1..80: mol_type = other DNA
aaagaataatttgatcactacattgttctatttgtcagaaatgtcctttataaaaataaagacatactattaaatggtaa

SEQ ID NO: 35020 - DNA, 80 bp, synthetic construct; identical to SEQ ID NO: 12645
  source 1..80: mol_type = other DNA

SEQ ID NO: 35021 - DNA, 80 bp, synthetic construct
  source 1..80: mol_type = other DNA
cagccaaaccatatcagctaccacaacagaaatagttttctaactgttgtgacctacttgaatatacacaagcatacttg

SEQ ID NO: 35022 - DNA, 80 bp, synthetic construct
  source 1..80: mol_type = other DNA
ctgcacagctcacacaaaagtatgtacatctttttccttagaggctaagacatggtctcttgaagcttagctctcctact

SEQ ID NO: 35023 - DNA, 80 bp, synthetic construct
  source 1..80: mol_type = other DNA
actgctgcctgctgaaatacatccagcttcccagatccaaagtaatagaagtaatttcctatggagttaaatttgttttg

SEQ ID NO: 35024 - DNA, 80 bp, synthetic construct; identical to SEQ ID NO: 12646
  source 1..80: mol_type = other DNA

SEQ ID NO: 35025 - DNA, 80 bp, synthetic construct
  source 1..80: mol_type = other DNA
agctttcactgttttgggagaaatcaggatgaaaagggttagcatgcctaggaaactaaaaagaaggacacactttactt

SEQ ID NO: 35026 - DNA, 80 bp, synthetic construct
  source 1..80: mol_type = other DNA
agtaactagcaatcttataattcacaacaacacatcttatgcaacaaataaccaagccaaactgtcatattctacctacg

SEQ ID NO: 35027 - DNA, 80 bp, synthetic construct
  source 1..80: mol_type = other DNA
ctagacattgggtttatcctctttactgaacaacagaattctcaagctactcaagatgaatgagggaatcaaggggtcta

SEQ ID NO: 35028 - DNA, 80 bp, synthetic construct; identical to SEQ ID NO: 12647
  source 1..80: mol_type = other DNA

SEQ ID NO: 35029 - DNA, 80 bp, synthetic construct
  source 1..80: mol_type = other DNA
gctttcatttttgtgacaatccaggacaggatatagagatacacttgcatttggtctgccatttttaaatgaaatcctca

SEQ ID NO: 35030 - DNA, 80 bp, synthetic construct
  source 1..80: mol_type = other DNA
tccaggtgtgactttgcttactataaatggtcaatattccaagaatgaacttgggcttgattcaaaactcaactgcaatt

SEQ ID NO: 35031 - DNA, 80 bp, synthetic construct
  source 1..80: mol_type = other DNA
gttcaagcgattctcctgccttagcctccacagtagctgggattacaggtgcaagccactgcacccagctaatattttgt

SEQ ID NO: 35032 - DNA, 80 bp, synthetic construct
  source 1..80: mol_type = other DNA
ccagcctgtattctttaggaccttcactgttcaattagcctgccagtaagcaaggattagggaaaacaaaatgagttatg

SEQ ID NO: 35033 - DNA, 80 bp, synthetic construct
  source 1..80: mol_type = other DNA
aacatgcagtcttgcccatcagctgcctcactcttatgacttataaagttgtcaatattttttatgggcaaatgtaatat

SEQ ID NO: 35034 - DNA, 80 bp, synthetic construct; identical to SEQ ID NO: 12648
  source 1..80: mol_type = other DNA

SEQ ID NO: 35035 - DNA, 80 bp, synthetic construct
  source 1..80: mol_type = other DNA
ggtagtttctgaaattcttctcagagaccatgcactagaaacaatggaaccacagatttgctaattagaattattcctga

SEQ ID NO: 35036 - DNA, 80 bp, synthetic construct
  source 1..80: mol_type = other DNA
tattcagttgcttgtttctgttcatgagtactagttttattctacagatagtacctacagtttgcagcaaataagccaaa

SEQ ID NO: 35037 - DNA, 80 bp, synthetic construct
  source 1..80: mol_type = other DNA
atgagaaaatgctttgaaaccaattataggaataatcttacataatctgcaaatgctgatcaaaatacatcatttctaca

SEQ ID NO: 35038 - DNA, 80 bp, synthetic construct; identical to SEQ ID NO: 12649
  source 1..80: mol_type = other DNA

SEQ ID NO: 35039 - DNA, 80 bp, synthetic construct
  source 1..80: mol_type = other DNA
atcatctacccagaaagcctacactgcataaaaccttttcatcacttttcgtattcagtagaataaatgcccaacttttc

SEQ ID NO: 35040 - DNA, 80 bp, synthetic construct
  source 1..80: mol_type = other DNA
aaccttctccctctaacttctcttttcctgttaactcctaatcatctttgcaactcagtaaagacaccacttcttctagg

SEQ ID NO: 35041 - DNA, 80 bp, synthetic construct; identical to SEQ ID NO: 12650
  source 1..80: mol_type = other DNA

SEQ ID NO: 35042 - DNA, 80 bp, synthetic construct
  source 1..80: mol_type = other DNA
atcagctcaacatattcagtgatggatattatttgattatctgtattgctctgaacagttacagtttaaaaatatcaatc

SEQ ID NO: 35043 - DNA, 80 bp, synthetic construct
  source 1..80: mol_type = other DNA
aatttttcaacttgctattttattcatgtaatgctgtgaagtttacctgaaatttttaaaagtgcacatagtataagaac

SEQ ID NO: 35044 - DNA, 80 bp, synthetic construct
  source 1..80: mol_type = other DNA
taaacccagtgcacatagcataatatgcttacaggtgaattcatcttcaactttcaactcagaaaatgccctatattctt

SEQ ID NO: 35045 - DNA, 80 bp, synthetic construct
  source 1..80: mol_type = other DNA
aatgacctgataggattaacttcttttcaaagcaattaattacaacctgagtattatttatagctggataaaactggctc

SEQ ID NO: 35046 - DNA, 80 bp, synthetic construct; identical to SEQ ID NO: 12651
  source 1..80: mol_type = other DNA

SEQ ID NO: 35047 - DNA, 80 bp, synthetic construct
  source 1..80: mol_type = other DNA
ctctcttcacccctccccaccaacctttagattctagtaaagccttcctactcaaaggagtaaataaaaccttactactt

SEQ ID NO: 35048 - DNA, 80 bp, synthetic construct
  source 1..80: mol_type = other DNA
gcgaacatttctgcctatgttcttcttttctggtctcttcctgttttgctcactccccgcttaaatttaattatcatctc

SEQ ID NO: 35049 - DNA, 80 bp, synthetic construct
  source 1..80: mol_type = other DNA
gaagtttgagaaaaccacaggtttgggtttctggttctgtcctattacatattagaggagaaataatttagcataatgcc

SEQ ID NO: 35050 - DNA, 80 bp, synthetic construct; identical to SEQ ID NO: 12652
  source 1..80: mol_type = other DNA

SEQ ID NO: 35051 - DNA, 80 bp, synthetic construct
  source 1..80: mol_type = other DNA
atgtgttaagacatatactacgctttgataaaataaaaaaaatatatagaaatccaggaacaaagctctatggaagaagc

SEQ ID NO: 35052 - DNA, 80 bp, synthetic construct
  source 1..80: mol_type = other DNA
ttaattaatgttaaggaaatttgctttttaaaactccccaatctaatatttttaagtaaaagattttcttctcccattca

SEQ ID NO: 35053 - DNA, 80 bp, synthetic construct; identical to SEQ ID NO: 12653
  source 1..80: mol_type = other DNA

SEQ ID NO: 35054 - DNA, 80 bp, synthetic construct
  source 1..80: mol_type = other DNA
caagtcaactctttagcaggctcaatagtattcatgaataccagctgtgtacatcaaacagctgatattaaaacacagtg

SEQ ID NO: 35055 - DNA, 80 bp, synthetic construct
  source 1..80: mol_type = other DNA
cgtgcctgtaatcccagctattcgggaagctgaggcaggagaatggctggaatccaggaggcagagtttgcagtgagctg

SEQ ID NO: 35056 - DNA, 80 bp, synthetic construct
  source 1..80: mol_type = other DNA
ctattatcatgaaaatccctctagccacacagattcatctaatatatgatctggtgaaaataaggatggggcaatggcaa

SEQ ID NO: 35057 - DNA, 80 bp, synthetic construct
  source 1..80: mol_type = other DNA
actgggctataattttttctcgttctgcatagggtggttatgaaaactaaatatgtaatctcgtcaatgccatggcatct

SEQ ID NO: 35058 - DNA, 80 bp, synthetic construct; identical to SEQ ID NO: 12654
  source 1..80: mol_type = other DNA

SEQ ID NO: 35059 - DNA, 80 bp, synthetic construct
  source 1..80: mol_type = other DNA
tttaccctgccttctccttctgactcctgtccttcactaacagtatctaatcagtaaccaagactcattcattgtatttc

SEQ ID NO: 35060 - DNA, 80 bp, synthetic construct
  source 1..80: mol_type = other DNA
ccaaaccattttcacagtgcgaccaaacctatctcactaatctcttacctctcacatcaaaatccttcattttccacagc

SEQ ID NO: 35061 - DNA, 80 bp, synthetic construct
  source 1..80: mol_type = other DNA
aaaactctagcaagaatatagagctgttacatatgacattccctgtatctgggtgcactcctaatccctgccccagcatg

SEQ ID NO: 35062 - DNA, 80 bp, synthetic construct; identical to SEQ ID NO: 12655
  source 1..80: mol_type = other DNA

SEQ ID NO: 35063 - DNA, 80 bp, synthetic construct
  source 1..80: mol_type = other DNA
aatgataaagttggattctaaggaaacttataaatattagatttttcaaataggattttaaggtcatgagggcatatata

SEQ ID NO: 35064 - DNA, 80 bp, synthetic construct
  source 1..80: mol_type = other DNA
agtactttaaactatagcttaaagtactatttcaaatagtattttaaggttgtgagggcataattaagtaaaacacacac

SEQ ID NO: 35065 - DNA, 80 bp, synthetic construct; identical to SEQ ID NO: 12656
  source 1..80: mol_type = other DNA

SEQ ID NO: 35066 - DNA, 80 bp, synthetic construct
  source 1..80: mol_type = other DNA
tgcacgcacacacacatacacaggggaaaagagagcatacttaaatatagtggaaagcagttgcagaaaaacataagatt

SEQ ID NO: 35067 - DNA, 80 bp, synthetic construct
  source 1..80: mol_type = other DNA
gctaccaaaaccacattagaatgggaaaaaaggcacaaacataacattgattcaacttgccctagagtactccattaacc

SEQ ID NO: 35068 - DNA, 80 bp, synthetic construct
  source 1..80: mol_type = other DNA
ataagtgatcatgcctcccataaaataacaatagtatttttcattatcaatcttttttcacattgttgtttttatttttg

SEQ ID NO: 35069 - DNA, 80 bp, synthetic construct
  source 1..80: mol_type = other DNA
atgcatttctacctaatcacattatcttctaaatgaagaaaaatcacaaattctattcaatatccaggtatttttcttat

SEQ ID NO: 35070 - DNA, 80 bp, synthetic construct; identical to SEQ ID NO: 12657
  source 1..80: mol_type = other DNA

SEQ ID NO: 35071 - DNA, 80 bp, synthetic construct
  source 1..80: mol_type = other DNA
tgtgaaaaataaaaccattcattaatagtgtttaagatatactttcagaaccatcagtcacttcacagaaactaatttca

SEQ ID NO: 35072 - DNA, 80 bp, synthetic construct
  source 1..80: mol_type = other DNA
ggtacatcccactctgcatggcgaattttttctttttgtagagataaggtcttgctatgttgcccaggctggtctggaac

SEQ ID NO: 35073 - DNA, 80 bp, synthetic construct
  source 1..80: mol_type = other DNA
gtactttaaaaggacaaaacactacactttagaaataaaaacagcagcttgtgttagtaatatttaaaaaaaataacaca

SEQ ID NO: 35074 - DNA, 80 bp, synthetic construct; identical to SEQ ID NO: 12658
  source 1..80: mol_type = other DNA

SEQ ID NO: 35075 - DNA, 80 bp, synthetic construct
  source 1..80: mol_type = other DNA
ttattggcacatagccatattcatttgtttacatatactctaagactgctttcatactacaaatgtaaagagctgaatat

SEQ ID NO: 35076 - DNA, 80 bp, synthetic construct
  source 1..80: mol_type = other DNA
tctcttaatagtcctctctataatttgccaattcaaaactggtcttcatgctgaatttggccctctatcttcatcccttt

SEQ ID NO: 35077 - DNA, 80 bp, synthetic construct
  source 1..80: mol_type = other DNA
ttggtaacaagcaggctgcaaatgaaaagcaaatgaaaaatcattatatactacttacatccattaggatagctactatc

SEQ ID NO: 35078 - DNA, 80 bp, synthetic construct; identical to SEQ ID NO: 12659
  source 1..80: mol_type = other DNA

SEQ ID NO: 35079 - DNA, 80 bp, synthetic construct
  source 1..80: mol_type = other DNA
aataagccattcacacacaaaatatataatgtatgattccacccatactaggtacatagaatagtcaaattcatagattt

SEQ ID NO: 35080 - DNA, 80 bp, synthetic construct
  source 1..80: mol_type = other DNA
taaaaaagaattaatttaaaatattttttaagaaagcataaataaattttaaaaaatgattaaattctgccaacttaatg

SEQ ID NO: 35081 - DNA, 80 bp, synthetic construct
  source 1..80: mol_type = other DNA
tgactttgcacagaactcaataaatgtagctattctatttattatatttatatgcacaaagttcttatttttaaaatgca

SEQ ID NO: 35082 - DNA, 80 bp, synthetic construct; identical to SEQ ID NO: 12660
  source 1..80: mol_type = other DNA

SEQ ID NO: 35083 - DNA, 80 bp, synthetic construct
  source 1..80: mol_type = other DNA
attttccaattaaatattactttattctcataatggatgtattaatataatctttgactgattaacccaaataccaatat

SEQ ID NO: 35084 - DNA, 80 bp, synthetic construct
  source 1..80: mol_type = other DNA
cacaccaggtggcactgcatggttaatcagaagatgacaacacacatcaagattccttacatattttgagataggaaagt

SEQ ID NO: 35085 - DNA, 80 bp, synthetic construct
  source 1..80: mol_type = other DNA
ctaagtaatatgagtttaagaaatagaaaagtaatataaccaaactagattgtatttgggaaggtgggaacaatatgact

SEQ ID NO: 35086 - DNA, 80 bp, synthetic construct
  source 1..80: mol_type = other DNA
aagctttggtcttgctttagagtatacaggtgttaagcacttaaagtcaaaaaagctgtttaaatgacagagaaagagat

SEQ ID NO: 35087 - DNA, 80 bp, synthetic construct; identical to SEQ ID NO: 12661
  source 1..80: mol_type = other DNA

SEQ ID NO: 35088 - DNA, 80 bp, synthetic construct
  source 1..80: mol_type = other DNA
accactgtgtactgtgcacatgaatacaatgtagtcttgaattctccacatttagcttcattgaattacagtgggcggag

SEQ ID NO: 35089 - DNA, 80 bp, synthetic construct
  source 1..80: mol_type = other DNA
acaaaacaaaacatcatgatgatcctaaggacaaatgtcatatgctgaagccctaatctcaaacatgatggtacttggag

SEQ ID NO: 35090 - DNA, 80 bp, synthetic construct
  source 1..80: mol_type = other DNA
aagaagaaacgtcagaggtctttctctttccatgcggataaaccaaggaaaggccataggaacacacagggagaaggcag

SEQ ID NO: 35091 - DNA, 80 bp, synthetic construct; identical to SEQ ID NO: 12662
  source 1..80: mol_type = other DNA

SEQ ID NO: 35092 - DNA, 80 bp, synthetic construct
  source 1..80: mol_type = other DNA
ttaggtaactaccataagtaaaatatgtctttattccatgaaacatatatagaaaaatataataaaaattcctccatgtc

SEQ ID NO: 35093 - DNA, 80 bp, synthetic construct
  source 1..80: mol_type = other DNA
ccttttttacaataatacggaagacatcatgagttaatagggttaattagagttaataattaatcaatacttcaacagat

SEQ ID NO: 35094 - DNA, 80 bp, synthetic construct; identical to SEQ ID NO: 12663
  source 1..80: mol_type = other DNA

SEQ ID NO: 35095 - DNA, 80 bp, synthetic construct
  source 1..80: mol_type = other DNA
ttgtttcttttttttctttttccaattacttaacttcaaaaaactttattgatgttgtattatgtgttaagaaatgtgct

SEQ ID NO: 35096 - DNA, 80 bp, synthetic construct
  source 1..80: mol_type = other DNA
acagaataaacttttcttttcttttcttttgtcttctttttttgtcttttctttttatttatttatttacgtatttatct

SEQ ID NO: 35097 - DNA, 80 bp, synthetic construct
  source 1..80: mol_type = other DNA
caagaagattcagaggtctctaaaatagacttctctgtctatcttacgacctgggctcaaagaactcccggtccattgat

SEQ ID NO: 35098 - DNA, 80 bp, synthetic construct; identical to SEQ ID NO: 12664
  source 1..80: mol_type = other DNA

SEQ ID NO: 35099 - DNA, 80 bp, synthetic construct
  source 1..80: mol_type = other DNA
atctattcatagttgtggatagtgactaaacaatttacatttttatctggggacagaagtaaagcaaatggtctaaaaac

SEQ ID NO: 35100 - DNA, 80 bp, synthetic construct
  source 1..80: mol_type = other DNA
gcatgagagatttaactaaaggccactctgtagcaaatttaataccacaatctctcgatggattttttaaattataatta

SEQ ID NO: 35101 - DNA, 80 bp, synthetic construct
  source 1..80: mol_type = other DNA
atcttaagtgagatgctgaaatgtagacagagtcatgttggctttgagtcacaattgaagtatggatatttgcacttgtt

SEQ ID NO: 35102 - DNA, 80 bp, synthetic construct
  source 1..80: mol_type = other DNA
ttaagaattgagcctggaatattattcactgttactgctattattaccaatatcaccactgctaatatcactattcctac

SEQ ID NO: 35103 - DNA, 80 bp, synthetic construct; identical to SEQ ID NO: 12665
  source 1..80: mol_type = other DNA

SEQ ID NO: 35104 - DNA, 80 bp, synthetic construct
  source 1..80: mol_type = other DNA
gagcaggaacacagagtttgtgtggggtggggggtgaggaagatgattcattaatccaggctaaagtatgaaggtaggga

SEQ ID NO: 35105 - DNA, 80 bp, synthetic construct
  source 1..80: mol_type = other DNA
cacataatttaataggagaagtgactagagacatagctgtgaccaaatcaagaagagccttgaaaaccttcgtggggact

SEQ ID NO: 35106 - DNA, 80 bp, synthetic construct; identical to SEQ ID NO: 12666
  source 1..80: mol_type = other DNA

SEQ ID NO: 35107 - DNA, 80 bp, synthetic construct
  source 1..80: mol_type = other DNA
tgatcagttacctaaatgtgtcttactggatgttctttcccttgcatgcttgtttaacctttttggcactatcatgtttt

SEQ ID NO: 35108 - DNA, 80 bp, synthetic construct
  source 1..80: mol_type = other DNA
aaaaaaaaaggaactatacccatgtccagcccgtctaccacactacgtcccactcctgaaattgtgcaatatggttgttc

SEQ ID NO: 35109 - DNA, 80 bp, synthetic construct
  source 1..80: mol_type = other DNA
tgttgagtatactatgggaaaaaggtgtttagtccatcagagcccttacattgtatagcattggctatcaaactttaact

SEQ ID NO: 35110 - DNA, 80 bp, synthetic construct; identical to SEQ ID NO: 12667
  source 1..80: mol_type = other DNA

SEQ ID NO: 35111 - DNA, 80 bp, synthetic construct
  source 1..80: mol_type = other DNA
ttctacgtctcaatattttcagtaacatgctgtccaggtgctctgatttcagtaaaaccaccaaaactttagagtcttta

SEQ ID NO: 35112 - DNA, 80 bp, synthetic construct
  source 1..80: mol_type = other DNA
acaatgatgtacattcaatgagataatttccttggactgtggtagtattagagaaaactctaaaaatgagagacttttca

SEQ ID NO: 35113 - DNA, 80 bp, synthetic construct
  source 1..80: mol_type = other DNA
acacaatctaacgtagaataagatagtagttataaacacataagattaataactatggcatttccaactacagaaagaga

SEQ ID NO: 35114 - DNA, 80 bp, synthetic construct
  source 1..80: mol_type = other DNA
cacacccagctaatttttgtatttttagtagagacggggtttcaccatgttggccaggatggtctcgatctcttgacctc

SEQ ID NO: 35115 - DNA, 80 bp, synthetic construct; identical to SEQ ID NO: 12668
  source 1..80: mol_type = other DNA

SEQ ID NO: 35116 - DNA, 80 bp, synthetic construct
  source 1..80: mol_type = other DNA
aattgatttgtgtaacttccggctcataaatataagactgaaggagctgcttccctctttcccacttctattagcatgaa

SEQ ID NO: 35117 - DNA, 80 bp, synthetic construct
  source 1..80: mol_type = other DNA
tgcccaaatgtatatcctaaataatatggaattcctattctacatttcctcctacaaaatcagtgagaaagggtagataa

SEQ ID NO: 35118 - DNA, 80 bp, synthetic construct
  source 1..80: mol_type = other DNA
aaatcgacactcatgagtgtcaaataaacatttcctagagaatacggctacttgtcttccacagactgaagcttttcttt

SEQ ID NO: 35119 - DNA, 80 bp, synthetic construct; identical to SEQ ID NO: 12669
  source 1..80: mol_type = other DNA

SEQ ID NO: 35120 - DNA, 80 bp, synthetic construct
  source 1..80: mol_type = other DNA
gaataatttgcttatgtaattaatttggatatttcaatgtattggttattttattggtccatattccttcagtacaaaga

SEQ ID NO: 35121 - DNA, 80 bp, synthetic construct
  source 1..80: mol_type = other DNA
ttattactgaccaagcatttttgatcatgtgtttattgagagtaattggaacttacagacacctgcccaatttctttaca

SEQ ID NO: 35122 - DNA, 80 bp, synthetic construct
  source 1..80: mol_type = other DNA
taatgacaatggcacccaaaattttctgaaaggaaggaggttcagttgagacatttaggagctagaagacagtgtaaatt

SEQ ID NO: 35123 - DNA, 80 bp, synthetic construct
  source 1..80: mol_type = other DNA
cagtgtgtgatcacttaaagagatattatttcgaacttcatattctgagtgtgaactgccgaagagacagacaaagtaaa

SEQ ID NO: 35124 - DNA, 80 bp, synthetic construct; identical to SEQ ID NO: 12670
  source 1..80: mol_type = other DNA

SEQ ID NO: 35125 - DNA, 80 bp, synthetic construct
  source 1..80: mol_type = other DNA
ccccgatttaacatactccatttatatgccgtaattgcccatagtacaaatcatatcagagaatgaatatgacattcatg

SEQ ID NO: 35126 - DNA, 80 bp, synthetic construct
  source 1..80: mol_type = other DNA
cagtatacagtgagtgcctcaggagtaatacactgtctatgggactttcagaacactgatgaaacatttaaaaaattcaa

SEQ ID NO: 35127 - DNA, 80 bp, synthetic construct; identical to SEQ ID NO: 12671
  source 1..80: mol_type = other DNA

SEQ ID NO: 35128 - DNA, 80 bp, synthetic construct
  source 1..80: mol_type = other DNA
atgaaagcagctttgtagcctttttctttcaaagtgctaagagtcatttcattcactgaaaggcttttaccgcaaattat

SEQ ID NO: 35129 - DNA, 80 bp, synthetic construct
  source 1..80: mol_type = other DNA
aaaatagtatataaatagaacaggaacatgttctattaagggctaaatgcagaagaaaagccagtgtcattaaaaccatc

SEQ ID NO: 35130 - DNA, 80 bp, synthetic construct
  source 1..80: mol_type = other DNA
acacaaataaatgtaacataaaacaagctatgatcaccacatgtgtatgagagttcagaggctggggagattcattttag

SEQ ID NO: 35131 - DNA, 80 bp, synthetic construct
  source 1..80: mol_type = other DNA
ggtagtcacccctagtaaaagtcacaatgcttggtcagttcccagacatgagataattttcacttctggaacctgctgac

SEQ ID NO: 35132 - DNA, 80 bp, synthetic construct; identical to SEQ ID NO: 12672
  source 1..80: mol_type = other DNA

SEQ ID NO: 35133 - DNA, 80 bp, synthetic construct
  source 1..80: mol_type = other DNA
ttgggaaggccacatgaaaatatctgaaaatccagccaagagactaaatcaaagataatatcctatcctgggtgcaatgg

SEQ ID NO: 35134 - DNA, 80 bp, synthetic construct
  source 1..80: mol_type = other DNA
tagtcctgattgcagtttctgttacagatgtggtattattgctagagaagttttataaggccacacatagactgcatgtg

SEQ ID NO: 35135 - DNA, 80 bp, synthetic construct
  source 1..80: mol_type = other DNA
caactcttttcagtaataatatatgtaatctgaagcgatctggacatcccacagaacgtcacagtgattcattaccttga

SEQ ID NO: 35136 - DNA, 80 bp, synthetic construct; identical to SEQ ID NO: 12673
  source 1..80: mol_type = other DNA

SEQ ID NO: 35137 - DNA, 80 bp, synthetic construct
  source 1..80: mol_type = other DNA
atccccacagcagccccatgaagtgttatcagtattttcattttacagataatgatactaaaggacaagagagcttacat

SEQ ID NO: 35138 - DNA, 80 bp, synthetic construct
  source 1..80: mol_type = other DNA
agaatataaagtgcaaagcaagcaatggagcaagaagttggagaggagaatatgactggaactggatcatagagggcaat

SEQ ID NO: 35139 - DNA, 80 bp, synthetic construct
  source 1..80: mol_type = other DNA
tattattcaaagcattttatagtaagtaatagtattactattagaattagtagaattcgatgctattaaaatcatctaat

SEQ ID NO: 35140 - DNA, 80 bp, synthetic construct; identical to SEQ ID NO: 12674
  source 1..80: mol_type = other DNA

SEQ ID NO: 35141 - DNA, 80 bp, synthetic construct
  source 1..80: mol_type = other DNA
agtttaatagtagctttttgtgatttatcaaagaggaataaagacatcccaattcttccaccacagcagagtgaaaatgt

SEQ ID NO: 35142 - DNA, 80 bp, synthetic construct
  source 1..80: mol_type = other DNA
ggaaagctgcaaagatgagtatcttgatcttggtgtgaatctactgggatggagaccagcaagacttgactttaccatga

SEQ ID NO: 35143 - DNA, 80 bp, synthetic construct
  source 1..80: mol_type = other DNA
tttgtgaatgggaacctattcaaatttccctttcctaaaagcctgaggccccaaatatttgccatgcaagaaataatcta

SEQ ID NO: 35144 - DNA, 80 bp, synthetic construct
  source 1..80: mol_type = other DNA
tctcaatgttatttgttaaatatatatgatgctagaaaaatcatattacgggcattttgtttggtgtttttgtttcttta

SEQ ID NO: 35145 - DNA, 80 bp, synthetic construct; identical to SEQ ID NO: 12675
  source 1..80: mol_type = other DNA

SEQ ID NO: 35146 - DNA, 80 bp, synthetic construct
  source 1..80: mol_type = other DNA
tagaaaatttggttaaatagaccaaatatttccagatgctctaagatagaaaataaaatgaagaaattttgaaagtattt

SEQ ID NO: 35147 - DNA, 80 bp, synthetic construct
  source 1..80: mol_type = other DNA
ttattaagaaaaaggtaatacctctattagatatttcatctaaaactacgaagcagaagaaatgtatagaaattacaaat

SEQ ID NO: 35148 - DNA, 80 bp, synthetic construct; identical to SEQ ID NO: 12676
  source 1..80: mol_type = other DNA

SEQ ID NO: 35149 - DNA, 80 bp, synthetic construct
  source 1..80: mol_type = other DNA
agcaaatgaaaatactatcctacataactgttgtctacacgggggaaaaaaacctactttctgaagaaaaataaaaataa

SEQ ID NO: 35150 - DNA, 80 bp, synthetic construct
  source 1..80: mol_type = other DNA
ttgtcttctgctagctttgtggatatttttctcttgcttgtctagttcttttagttgttatggtagggtgtcaatgtgag

SEQ ID NO: 35151 - DNA, 80 bp, synthetic construct
  source 1..80: mol_type = other DNA
tacaggagcaagttgttcaatttccaattgcgtggttctgagtgagtttcttaatcttgagttctaatttgattgtgctg

SEQ ID NO: 35152 - DNA, 80 bp, synthetic construct; identical to SEQ ID NO: 12677
  source 1..80: mol_type = other DNA

SEQ ID NO: 35153 - DNA, 80 bp, synthetic construct
  source 1..80: mol_type = other DNA
aggctgaacaaggaagaagttgaatccctgaatagaccaataacaagttctgaaattgaagcagtaataaatagcctacc

SEQ ID NO: 35154 - DNA, 80 bp, synthetic construct
  source 1..80: mol_type = other DNA
cctggcagagatacaacaaaaagagaaaacttcaggccaatatccctgatgaacattgatgcaaaaatcctcaataaaat

SEQ ID NO: 35155 - DNA, 80 bp, synthetic construct
  source 1..80: mol_type = other DNA
gcagaaaagtcctttgataaaattcaatatcctttcctgttaaaaaattctcaataaactaggtattgatgaacatacct

SEQ ID NO: 35156 - DNA, 80 bp, synthetic construct; identical to SEQ ID NO: 12678
  source 1..80: mol_type = other DNA

SEQ ID NO: 35157 - DNA, 80 bp, synthetic construct
  source 1..80: mol_type = other DNA
agagaataaaatacctagaaatacaactaacaaggaaagtgaaaaacctcttcaagaagaactacaaatcactgctcaaa

SEQ ID NO: 35158 - DNA, 80 bp, synthetic construct
  source 1..80: mol_type = other DNA
taaaattcatatggaaccaaaaaagagcccatatagccaagacaatcctaagccaaaagaacaaaactggaggcatcatg

SEQ ID NO: 35159 - DNA, 80 bp, synthetic construct
  source 1..80: mol_type = other DNA
tggggaaaggattccctatttaataaatggtgctgggaaagctggctagccatatgcagaaaattgaaactagacccctt

SEQ ID NO: 35160 - DNA, 80 bp, synthetic construct
  source 1..80: mol_type = other DNA
cgtctctactaaaaatacaaaaaaattagccgggcgtggtagcgggagcctgtagtcccagctactcgggaggctgaggc

SEQ ID NO: 35161 - DNA, 80 bp, synthetic construct; identical to SEQ ID NO: 12679
  source 1..80: mol_type = other DNA

SEQ ID NO: 35162 - DNA, 80 bp, synthetic construct
  source 1..80: mol_type = other DNA
aaatttacaagaaaaaaaccaaccccattaaaaagtggacaaaggaggccaggcacggtggctcatgtctgtaatcccag

SEQ ID NO: 35163 - DNA, 80 bp, synthetic construct
  source 1..80: mol_type = other DNA
acagcttgaacccaggaggtagaggttgaagtgagccaagatagtgccactgcactccagcctgggtaacagagctagac

SEQ ID NO: 35164 - DNA, 80 bp, synthetic construct
  source 1..80: mol_type = other DNA
atgagataccatttcacaccagtcagaatggtgattattaaaaagtcaagaaacaacagatgctggcgaggctgtggaga

SEQ ID NO: 35165 - DNA, 80 bp, synthetic construct; identical to SEQ ID NO: 12680
  source 1..80: mol_type = other DNA

SEQ ID NO: 35166 - DNA, 80 bp, synthetic construct
  source 1..80: mol_type = other DNA
cttacaagtggaagctgaacaatgagaatacatggacacagggaggggaacaacacacactggggccagttgagtggggc

SEQ ID NO: 35167 - DNA, 80 bp, synthetic construct
  source 1..80: mol_type = other DNA
aaaactaaatttaaaaaagagactaacaaataagaatagcaggggaaagcattaataaatatatagtcagcaattaatga

SEQ ID NO: 35168 - DNA, 80 bp, synthetic construct; identical to SEQ ID NO: 12681
  source 1..80: mol_type = other DNA

SEQ ID NO: 35169 - DNA, 80 bp, synthetic construct
  source 1..80: mol_type = other DNA
aatataactctattatcaaaaattcacaaaacaacaaataaaaataaagcaaaacaaaacaaaaagtctttgcacattta

SEQ ID NO: 35170 - DNA, 80 bp, synthetic construct
  source 1..80: mol_type = other DNA
aaattttagaaattcaatgattagtataattcaacatataaactcaacgtaagtatttacaaaggggaattgaaaaattt

SEQ ID NO: 35171 - DNA, 80 bp, synthetic construct
  source 1..80: mol_type = other DNA
ggaagaaaaatatgaataatgtacaaataacaaacaaaattatctttattctcttgtaacatgatatttgactttaaaaa

SEQ ID NO: 35172 - DNA, 80 bp, synthetic construct; identical to SEQ ID NO: 12682
  source 1..80: mol_type = other DNA

SEQ ID NO: 35173 - DNA, 80 bp, synthetic construct
  source 1..80: mol_type = other DNA
acatacatatataagagaactcttacatcatatgctacacgggagtcaaacagtatgaacccacaaaaatagttcatttc

SEQ ID NO: 35174 - DNA, 80 bp, synthetic construct
  source 1..80: mol_type = other DNA
tcataaaagctgcaagagtatctcatcaaaggatacaaatcctcaaagtgaaaaggaatctcactgctatctttcctcag

SEQ ID NO: 35175 - DNA, 80 bp, synthetic construct
  source 1..80: mol_type = other DNA
aattcaaatgtacaaaatgttgaaaaaattgtcccacaccttctcaaaggcaatctgttctatcagattcttatatcttt

SEQ ID NO: 35176 - DNA, 80 bp, synthetic construct; identical to SEQ ID NO: 12683
  source 1..80: mol_type = other DNA

SEQ ID NO: 35177 - DNA, 80 bp, synthetic construct
  source 1..80: mol_type = other DNA
ccatgtctttgtgttgggaacattcatcttcaattcagaataccgaatctaatagttggaaatttcaataatcatttcca

SEQ ID NO: 35178 - DNA, 80 bp, synthetic construct
  source 1..80: mol_type = other DNA
gtttttattcccagacatcttgtttagtcattatgtgtgaatgtttcatcacccggccactgtcaattaaaacgtaatta

SEQ ID NO: 35179 - DNA, 80 bp, synthetic construct
  source 1..80: mol_type = other DNA
catatacttacagcatgtattatgtaaatcacagtacattattaatctattgtgttatatctattatgaaaaattaacat

SEQ ID NO: 35180 - DNA, 80 bp, synthetic construct
  source 1..80: mol_type = other DNA
taaaaaatacgaagctgttgctttctatcccactgatttactgcttgtgttgagaaaggattatcacattcacactactg

SEQ ID NO: 35181 - DNA, 80 bp, synthetic construct; identical to SEQ ID NO: 12684
  source 1..80: mol_type = other DNA

SEQ ID NO: 35182 - DNA, 80 bp, synthetic construct
  source 1..80: mol_type = other DNA
tttttttcatttacctttacaccaaggtccttcattagctcaatctcaaaattcactacatcatacggcagccggaactg

SEQ ID NO: 35183 - DNA, 80 bp, synthetic construct
  source 1..80: mol_type = other DNA
catgaggacatctacattcttattgatataaacatgttacgtggagtgaagatacagtagaaactgatataaaaataact

SEQ ID NO: 35184 - DNA, 80 bp, synthetic construct
  source 1..80: mol_type = other DNA
aaaatcttaaaatctattaataaagctagatggagatatagattttaatatatgtatacacatatatatatacactaaca

SEQ ID NO: 35185 - DNA, 80 bp, synthetic construct; identical to SEQ ID NO: 12685
  source 1..80: mol_type = other DNA

SEQ ID NO: 35186 - DNA, 80 bp, synthetic construct
  source 1..80: mol_type = other DNA
ttcattcacctactcattaaaagtgaatagtgccaggcacagtgtttacgaagtgccagctaagtgtaagctgcaatgat

SEQ ID NO: 35187 - DNA, 80 bp, synthetic construct
  source 1..80: mol_type = other DNA
ctttttctgatcagggaaggatacacaaaagataattacatttagaatgtggtacgcacaatgagagaagtatatccatt

SEQ ID NO: 35188 - DNA, 80 bp, synthetic construct
  source 1..80: mol_type = other DNA
tgattatgcaattaatttttatatatcaatcagcaagacatcatgctcaatgctatagaaaatgcaaggtatccgcggtg

SEQ ID NO: 35189 - DNA, 80 bp, synthetic construct
  source 1..80: mol_type = other DNA
tggaaggctgaggcaggagaatagtgtgaacccgggaggtggagcttgcagtgagccaagatcatgccactgcactccag

SEQ ID NO: 35190 - DNA, 80 bp, synthetic construct; identical to SEQ ID NO: 12686
  source 1..80: mol_type = other DNA

SEQ ID NO: 35191 - DNA, 80 bp, synthetic construct
  source 1..80: mol_type = other DNA
agatcctcaaaaggttgaacaggaaagcaaaagcaatggactatgaacaaagaattccagccaaataaaccaactacaac

SEQ ID NO: 35192 - DNA, 80 bp, synthetic construct
  source 1..80: mol_type = other DNA
aaaactctgaaaggcatgttataaaaagcagggacaacttttctgttggtcagaaaaaaataaaggaaggaacacctaac

SEQ ID NO: 35193 - DNA, 80 bp, synthetic construct; identical to SEQ ID NO: 12687
  source 1..80: mol_type = other DNA

SEQ ID NO: 35194 - DNA, 80 bp, synthetic construct
  source 1..80: mol_type = other DNA
taaaatactaaatgtgaacaagtgtttcaaaggagggaaggcttattgtgggatgagataagtgggtaggggaaatgtct

SEQ ID NO: 35195 - DNA, 80 bp, synthetic construct
  source 1..80: mol_type = other DNA
ctttggttcttgcatcccaacactggtcctcagacaaccccattttatgagttgctcaggacctaaactccatcatcaca

SEQ ID NO: 35196 - DNA, 80 bp, synthetic construct
  source 1..80: mol_type = other DNA
tcctaaacaatgtcctctgccaaaataaaaaaaattctctggtgagtctaaattctaaacaatagccatagttgctattg

SEQ ID NO: 35197 - DNA, 80 bp, synthetic construct; identical to SEQ ID NO: 12688
  source 1..80: mol_type = other DNA

SEQ ID NO: 35198 - DNA, 80 bp, synthetic construct
  source 1..80: mol_type = other DNA
gttattgtgtgattcttattcaatcttattgtatagaccagaggatagcatgttaaaaaaatctattctgagtatctagt

SEQ ID NO: 35199 - DNA, 80 bp, synthetic construct
  source 1..80: mol_type = other DNA
tatagggcccatgagaaggcactttgccttgtttacttttatgctctaaatagagccagaaataatgaccagcacatagt

SEQ ID NO: 35200 - DNA, 80 bp, synthetic construct
  source 1..80: mol_type = other DNA
atagaatcagatttgaaactaaaggaagaatgaatttgaaaaaacaaatcaggaagccaagataactgcttggaagctac

SEQ ID NO: 35201 - DNA, 80 bp, synthetic construct
  source 1..80: mol_type = other DNA
agccaggcatggtggtgcatgcctgtagtcccagctacttgggaggcggaggcagaagaatcacttgaatcccggaggtg

SEQ ID NO: 35202 - DNA, 80 bp, synthetic construct; identical to SEQ ID NO: 12689
  source 1..80: mol_type = other DNA

SEQ ID NO: 35203 - DNA, 80 bp, synthetic construct
  source 1..80: mol_type = other DNA
gagattattctgaagactgcatggtgagaaaggagataaaaggacagaagacagaatttaataggaatgattattttcca

SEQ ID NO: 35204 - DNA, 80 bp, synthetic construct
  source 1..80: mol_type = other DNA
tttcatgtgatgaaatatatctataacaactttccgttctttttaaagcacaattctcatactctgacagaggtatgctt

SEQ ID NO: 35205 - DNA, 80 bp, synthetic construct; identical to SEQ ID NO: 12690
  source 1..80: mol_type = other DNA

SEQ ID NO: 35206 - DNA, 80 bp, synthetic construct
  source 1..80: mol_type = other DNA
ttgttgcaacattaaaaataattgatgtgttcaatgcaatggagattaaatcctagatatttttcactgactccagtgat

SEQ ID NO: 35207 - DNA, 80 bp, synthetic construct
  source 1..80: mol_type = other DNA
atgagaggcagccgtaagtagaaaataaagtaacaggaaagttttgtggctataattccggctaaattccagcatcagtt

SEQ ID NO: 35208 - DNA, 80 bp, synthetic construct
  source 1..80: mol_type = other DNA
taacaactttaaaagaaaaaccaccatgtttggtctggatccagagaactctgtctcactaaaaaaatgttcagcaaata

SEQ ID NO: 35209 - DNA, 80 bp, synthetic construct; identical to SEQ ID NO: 12691
  source 1..80: mol_type = other DNA

SEQ ID NO: 35210 - DNA, 80 bp, synthetic construct
  source 1..80: mol_type = other DNA
taaagctgtggtaaataccattaaaatgatattctaaatctttccagagaaataatatataggacattttactttccaga

SEQ ID NO: 35211 - DNA, 80 bp, synthetic construct
  source 1..80: mol_type = other DNA
ataagattatattaatgatagcttatacatcaatatttatgttaataaatatatcaacatatttatatcaatgatacaaa

SEQ ID NO: 35212 - DNA, 80 bp, synthetic construct
  source 1..80: mol_type = other DNA
attattgggtatgattaatttatttgttacacatagggcagtagccacaacaaatttaaatgttaagcatagaaacagat

SEQ ID NO: 35213 - DNA, 80 bp, synthetic construct
  source 1..80: mol_type = other DNA
tctttatgataatgaaatatgtgtcccgtatagagttctgtttattttcaatatatattcccatttccatgtataaattt

SEQ ID NO: 35214 - DNA, 80 bp, synthetic construct; identical to SEQ ID NO: 12692
  source 1..80: mol_type = other DNA

SEQ ID NO: 35215 - DNA, 80 bp, synthetic construct
  source 1..80: mol_type = other DNA
ggaaaaagaacatttaaaataccatctgtgagcctgaagttcctatatgattatgaaccaacaatattcataattgtttt

SEQ ID NO: 35216 - DNA, 80 bp, synthetic construct
  source 1..80: mol_type = other DNA
tctttgcagaataggcttcagacattttttctgggggaggcagcgaaggatttctgatctgtgggatactcattgctttg

SEQ ID NO: 35217 - DNA, 80 bp, synthetic construct; identical to SEQ ID NO: 12693
  source 1..80: mol_type = other DNA

SEQ ID NO: 35218 - DNA, 80 bp, synthetic construct
  source 1..80: mol_type = other DNA
gttagttccctgaatcagaaaacatgtcacatgtaaacacattacccttgcattataggagttagcattgcgatggcaca

SEQ ID NO: 35219 - DNA, 80 bp, synthetic construct
  source 1..80: mol_type = other DNA
aaatagttgaaacattcaagaactactgacgcaggcatcttggaagggctaacatctcagaggaaagtaagaacaaagtt

SEQ ID NO: 35220 - DNA, 80 bp, synthetic construct
  source 1..80: mol_type = other DNA
agagagacacagagttttggaaatgtaggaggccattaacctagagcaaaataaagtacagaagagtgagattaattctt

SEQ ID NO: 35221 - DNA, 80 bp, synthetic construct; identical to SEQ ID NO: 12694
  source 1..80: mol_type = other DNA

SEQ ID NO: 35222 - DNA, 80 bp, synthetic construct
  source 1..80: mol_type = other DNA
atcaaaaataaattttagaataactatgattgatatgttcaaaaatatgtaagaagaatgtaaacttcattaaaagctgg

SEQ ID NO: 35223 - DNA, 80 bp, synthetic construct
  source 1..80: mol_type = other DNA
gaaacaaagaaacaaatggtaagatggtaaatataaatgtcaacatgagaaattatattaaatgtaaatggactaaaatt

SEQ ID NO: 35224 - DNA, 80 bp, synthetic construct
  source 1..80: mol_type = other DNA
taccaatattagaaatattacactttaaggcaagatgcattactaaacttaaagaacatttcatagcaaggaaatggtca

SEQ ID NO: 35225 - DNA, 80 bp, synthetic construct; identical to SEQ ID NO: 12695
  source 1..80: mol_type = other DNA

SEQ ID NO: 35226 - DNA, 80 bp, synthetic construct
  source 1..80: mol_type = other DNA
aaattgaagagggtattatcaacaagtattatagggtcaatttctaagcatgagatgaaaggtcctcataaatggtctca

SEQ ID NO: 35227 - DNA, 80 bp, synthetic construct
  source 1..80: mol_type = other DNA
atgagtttaaattggtaataaaataatttcttattcccagctacaatttgtataatttacaaattattaatatgtgttcc

SEQ ID NO: 35228 - DNA, 80 bp, synthetic construct
  source 1..80: mol_type = other DNA
ttatatttccccaaagaaaggtttcacatacttttcataaatatatattttattagatcattaattaaaatatagttaaa

SEQ ID NO: 35229 - DNA, 80 bp, synthetic construct
  source 1..80: mol_type = other DNA
ttgaataattttagctttgtgaactaataattaaatatttaactttcccatgttaaaatctgctaacatttacaaataac

SEQ ID NO: 35230 - DNA, 80 bp, synthetic construct; identical to SEQ ID NO: 12696
  source 1..80: mol_type = other DNA

SEQ ID NO: 35231 - DNA, 80 bp, synthetic construct
  source 1..80: mol_type = other DNA
ttaagtacccaacacagagttaaagactcttaaaaagtgtttgaagaaatgaaagcaagcacactcctcagtacacatag

SEQ ID NO: 35232 - DNA, 80 bp, synthetic construct
  source 1..80: mol_type = other DNA
aattggtatccctttgcctgctctgttctggaattttttctttacaactttttattgcactaggttttccccgagtttaa

SEQ ID NO: 35233 - DNA, 80 bp, synthetic construct
  source 1..80: mol_type = other DNA
tggggttgagtcttgacttccatcattctcatgatgtatagaattgaacaagtcctttaacatttctatgcctcagtctc

SEQ ID NO: 35234 - DNA, 80 bp, synthetic construct; identical to SEQ ID NO: 12697
  source 1..80: mol_type = other DNA

SEQ ID NO: 35235 - DNA, 80 bp, synthetic construct
  source 1..80: mol_type = other DNA
aatgcaatagatataaataatctcatgagcatagttaatgggaaataaataatttagaggcagtgagtttgtagtatttg

SEQ ID NO: 35236 - DNA, 80 bp, synthetic construct
  source 1..80: mol_type = other DNA
gtcctggctggcttcagcacactattgcacctcggcaatacatgagggctcattcaatgtttttttagccactaatattc

SEQ ID NO: 35237 - DNA, 80 bp, synthetic construct
  source 1..80: mol_type = other DNA
cttccatgaatgtagcctgattatgacaaaatgagggcaaatggataaaaagccaaataaatagctccaaaaatattttg

SEQ ID NO: 35238 - DNA, 80 bp, synthetic construct
  source 1..80: mol_type = other DNA
taacactttaaactgccaatgaatagattgtgtaagttaaaaaaaagagggttaacttaattttgttaaatttaaaaata

SEQ ID NO: 35239 - DNA, 80 bp, synthetic construct; identical to SEQ ID NO: 12698
  source 1..80: mol_type = other DNA

SEQ ID NO: 35240 - DNA, 80 bp, synthetic construct
  source 1..80: mol_type = other DNA
gaagggtcaactgccgaaacaatgtaataaatgaaataaacttgttaatatcagaagagagtgactgaagtatttaaaga

SEQ ID NO: 35241 - DNA, 80 bp, synthetic construct
  source 1..80: mol_type = other DNA
gaaacctgtggtcaggttcacatacaaaagattttatcttaaggctacttgactccaaagcctgaactcttttttttttt

SEQ ID NO: 35242 - DNA, 80 bp, synthetic construct
  source 1..80: mol_type = other DNA
ccccggtgtgtggtgttccccttcctgtgtccatgtgttctcattgttcaattcccacctatgagtgagaacatgcagtg

SEQ ID NO: 35243 - DNA, 80 bp, synthetic construct
  source 1..80: mol_type = other DNA
tttgggttggttccaagtctttgctattgtgaatagtgccgcaataaacatacgtgtgcatgtgtctttatagcagcatg

SEQ ID NO: 35244 - DNA, 80 bp, synthetic construct; identical to SEQ ID NO: 12699
  source 1..80: mol_type = other DNA

SEQ ID NO: 35245 - DNA, 80 bp, synthetic construct
  source 1..80: mol_type = other DNA
taatcgctaaaaaattcactatatttctctaatttttcaataagaaatgtataactgaaaaaattatatgaatttgtcat

SEQ ID NO: 35246 - DNA, 80 bp, synthetic construct
  source 1..80: mol_type = other DNA
aaaaacactgaactacatcatctggtttcccaccatgctatcctgccacccgagaactaaggtagttggtgcattaagag

SEQ ID NO: 35247 - DNA, 80 bp, synthetic construct; identical to SEQ ID NO: 12700
  source 1..80: mol_type = other DNA

SEQ ID NO: 35248 - DNA, 80 bp, synthetic construct
  source 1..80: mol_type = other DNA
aaattttggtgattatgaataaagctgctataaatatccatgtgcaggtttgcatgttaacgtaagttttcaactctttg

SEQ ID NO: 35249 - DNA, 80 bp, synthetic construct
  source 1..80: mol_type = other DNA
attttggctgtttggtctcctctgaatgtttgtgtctacgcccccatttcattcaattcgtatgttgaaaactaaccaca

SEQ ID NO: 35250 - DNA, 80 bp, synthetic construct
  source 1..80: mol_type = other DNA
ttgcccctgtcacatgtaagacaggcacagtaaaaagcctttacctatgaccagaaagcagcttatgagcatatattttt

SEQ ID NO: 35251 - DNA, 80 bp, synthetic construct
  source 1..80: mol_type = other DNA
tccccagagtgtgatattccccttcctgtgtccatgtgatctcattgttcaattcccacctatgagtgagaatatgcggt

SEQ ID NO: 35252 - DNA, 80 bp, synthetic construct
  source 1..80: mol_type = other DNA
ctaatagtatagtggtatcccgttgttgtttcatgttgcatttccctgatgatacatatgaggcatctattcagatgctt

SEQ ID NO: 35253 - DNA, 80 bp, synthetic construct
  source 1..80: mol_type = other DNA
ctgtggcttgtcttttcattttctttcaagacagtttcctgcagagtagaagttttaattttgtttctgtgtttgttttg

SEQ ID NO: 35254 - DNA, 80 bp, synthetic construct
  source 1..80: mol_type = other DNA
tataaatcttgcctttgattttgtacctaaaaagtcattgtctaaccgaaggtcatctacatggtctcccatgttatctt

SEQ ID NO: 35255 - DNA, 80 bp, synthetic construct
  source 1..80: mol_type = other DNA
ttctagattcacttttttacatatggaagtagggtggtataaatatcattcgttgaaaggactatcccttctccattata

SEQ ID NO: 35256 - DNA, 80 bp, synthetic construct; identical to SEQ ID NO: 12702
  source 1..80: mol_type = other DNA

SEQ ID NO: 35257 - DNA, 80 bp, synthetic construct
  source 1..80: mol_type = other DNA
ctatttatttagctttttttatttatttcatcacagtttcatagtttttctcatatacatattatacctatttcattaga

SEQ ID NO: 35258 - DNA, 80 bp, synthetic construct
  source 1..80: mol_type = other DNA
tttctgttgattctttggaattttctacatagacaattctgccacctgctaacaaagacagttttatttcttccttctct

SEQ ID NO: 35259 - DNA, 80 bp, synthetic construct; identical to SEQ ID NO: 12703
  source 1..80: mol_type = other DNA

SEQ ID NO: 35260 - DNA, 80 bp, synthetic construct
  source 1..80: mol_type = other DNA
ttctcatctttcattcatctagaaagtgcatgtatttcaccactccaaattgactttaccagcattttctccataatttt

SEQ ID NO: 35261 - DNA, 80 bp, synthetic construct
  source 1..80: mol_type = other DNA
agacaaagcattgtaaataaaagtatatttaccaattcaaatttgagggtaactcttgcttgttttaacccttcttgcta

SEQ ID NO: 35262 - DNA, 80 bp, synthetic construct
  source 1..80: mol_type = other DNA
ggatgaattgtaacagtatgattgtattctacatacctcacaagaggattatactcttgcaagtgtttaccttgatttca

SEQ ID NO: 35263 - DNA, 80 bp, synthetic construct; identical to SEQ ID NO: 12704
  source 1..80: mol_type = other DNA

SEQ ID NO: 35264 - DNA, 80 bp, synthetic construct
  source 1..80: mol_type = other DNA
gttttcttcataacaattagaccaggaacaccaaaagtgagtactgtgtttcaaatgtattaaaaatgataaaaacttca

SEQ ID NO: 35265 - DNA, 80 bp, synthetic construct
  source 1..80: mol_type = other DNA
tccttttcaatttggtaggtattgtttaggtacctcctatgtcctagacaccagtatgaaaaaaaacatagactctccag

SEQ ID NO: 35266 - DNA, 80 bp, synthetic construct
  source 1..80: mol_type = other DNA
acagggttaattttcacaaacgttgctctcagagtatttgagaaggtaaacccacctgaaagagaaattgacacctaagc

SEQ ID NO: 35267 - DNA, 80 bp, synthetic construct
  source 1..80: mol_type = other DNA
cttacaaggcactctctggggaacttaatatttatatctccaatcctaaaaatcttcgactttaggtatgattgttcatt

SEQ ID NO: 35268 - DNA, 80 bp, synthetic construct; identical to SEQ ID NO: 12705
  source 1..80: mol_type = other DNA

SEQ ID NO: 35269 - DNA, 80 bp, synthetic construct
  source 1..80: mol_type = other DNA
ataagtcactgttttttagtacatggtcagttttgataaatgttctgcaagtgcatgaaaatgatgcattcgttctatgt

SEQ ID NO: 35270 - DNA, 80 bp, synthetic construct
  source 1..80: mol_type = other DNA
tccttgtcaatattataaaacttttttttacatctttatttttaaaactcaaaataagttataattactctgggatcaat

SEQ ID NO: 35271 - DNA, 80 bp, synthetic construct; identical to SEQ ID NO: 12706
  source 1..80: mol_type = other DNA

SEQ ID NO: 35272 - DNA, 80 bp, synthetic construct
  source 1..80: mol_type = other DNA
ttgtgctctggttgaatactcagatcatatttttactttttatttctttagttctgcaatttatgcctctatccagccca

SEQ ID NO: 35273 - DNA, 80 bp, synthetic construct
  source 1..80: mol_type = other DNA
attaggataaagtcaggtaccatcaggtaagtctttaaattatcactaatagattatctttcctaacatagtttctacct

SEQ ID NO: 35274 - DNA, 80 bp, synthetic construct
  source 1..80: mol_type = other DNA
attagaggcatcacagaaccaaatcactgtaccatagacacatgcccacaatacctgctgtacagctttctctacttttt

SEQ ID NO: 35275 - DNA, 80 bp, synthetic construct; identical to SEQ ID NO: 12707
  source 1..80: mol_type = other DNA

SEQ ID NO: 35276 - DNA, 80 bp, synthetic construct
  source 1..80: mol_type = other DNA
tactaccctatattatgagtcatcaaatatttttatgaaagtatatacatttttaagttgttgaagcttaaaccaacgaa

SEQ ID NO: 35277 - DNA, 80 bp, synthetic construct
  source 1..80: mol_type = other DNA
tattgcccccaaatcacggtagcttatttttaagtcctagatattaagatacagttttaaaacaaactaaaatattgtaa

SEQ ID NO: 35278 - DNA, 80 bp, synthetic construct
  source 1..80: mol_type = other DNA
agagtaaaaggagagacacaaatcaaatcttcaaagatgttacttgtatttgcattccagacagacacattttaccaggg

SEQ ID NO: 35279 - DNA, 80 bp, synthetic construct
  source 1..80: mol_type = other DNA
ttgaatagtactattttaaatagaagtagtatagagaaatcccatttaaagtgataaaactttgggataatagggcaagt

SEQ ID NO: 35280 - DNA, 80 bp, synthetic construct; identical to SEQ ID NO: 12708
  source 1..80: mol_type = other DNA

SEQ ID NO: 35281 - DNA, 80 bp, synthetic construct
  source 1..80: mol_type = other DNA
tccaggttcaagtgattctcctgcctcagcctcttgagtagctgggactaaaggtgcacaccaccacagctggctaattt

SEQ ID NO: 35282 - DNA, 80 bp, synthetic construct
  source 1..80: mol_type = other DNA
ctggcccatatagaccccttctaaggccttgtatttaaatttttcagtagtgctgtaatgtaatttctaaagaaggaacc

SEQ ID NO: 35283 - DNA, 80 bp, synthetic construct
  source 1..80: mol_type = other DNA
caacctatttcaatgtagtagcttcatatctaacagaaaaacaaggacttgtgaggtatggtgaccaagtatatttggct

SEQ ID NO: 35284 - DNA, 80 bp, synthetic construct; identical to SEQ ID NO: 12709
  source 1..80: mol_type = other DNA

SEQ ID NO: 35285 - DNA, 80 bp, synthetic construct
  source 1..80: mol_type = other DNA
ccttatgtccaaaatgggaaaaaaattacctggtttgcatgccctcaagcgttgtttatcagcatttttgagtgagatat

SEQ ID NO: 35286 - DNA, 80 bp, synthetic construct
  source 1..80: mol_type = other DNA
ctgcattttctccttgcctgatacttttctttgcactaaggtctaatcacctccaaaaccatgtgacaaaaattaatgaa

SEQ ID NO: 35287 - DNA, 80 bp, synthetic construct; identical to SEQ ID NO: 12710
  source 1..80: mol_type = other DNA

SEQ ID NO: 35288 - DNA, 80 bp, synthetic construct
  source 1..80: mol_type = other DNA
agctagagtatttccaacctcacttttcagtttatgcacaaatactcatctttttgatgactgtttttaatacggggctt

SEQ ID NO: 35289 - DNA, 80 bp, synthetic construct
  source 1..80: mol_type = other DNA
cagtgactgccataaccaaggtgaagatatggtagaagtaatatttgctctattaaaacaatcatatactaatttgagtg

SEQ ID NO: 35290 - DNA, 80 bp, synthetic construct
  source 1..80: mol_type = other DNA
atttaactcaaactgtgtctacccttgataaaatatagaaataaatgtttacagtcccttggaatatatagtatattctt

SEQ ID NO: 35291 - DNA, 80 bp, synthetic construct
  source 1..80: mol_type = other DNA
tagcaattaatacattttgtgtcagtgaatggatgcataaatagaccaatgtaaaaaaaatagagctccaaaccctgcca

SEQ ID NO: 35292 - DNA, 80 bp, synthetic construct; identical to SEQ ID NO: 12711
  source 1..80: mol_type = other DNA

SEQ ID NO: 35293 - DNA, 80 bp, synthetic construct
  source 1..80: mol_type = other DNA
tagaccatattcatcaatgaatcagagtgcttgacttgggaagggaatatcatggcctttagcattttatctataatata

SEQ ID NO: 35294 - DNA, 80 bp, synthetic construct
  source 1..80: mol_type = other DNA
catgtgatgttttgatagatgcatacaatgtgtaatgatcaagtcagggtaacttgagatatccaacacttcaagcattt

SEQ ID NO: 35295 - DNA, 80 bp, synthetic construct
  source 1..80: mol_type = other DNA
aatagtatatgctgatacgacaaggattgagtaaagtcaaatgagaggtgatagtttagaaacctgctgagagacaaaaa

SEQ ID NO: 35296 - DNA, 80 bp, synthetic construct
  source 1..80: mol_type = other DNA
tctacagatacctcttttctgaatgagtcacctgatttcatctacaattgcttgtcagttccattctcttttttggctta

SEQ ID NO: 35297 - DNA, 80 bp, synthetic construct; identical to SEQ ID NO: 12712
  source 1..80: mol_type = other DNA

SEQ ID NO: 35298 - DNA, 80 bp, synthetic construct
  source 1..80: mol_type = other DNA
ttttatggctgagtagtattccatggtgtgtgtgtgcatgtgtgtgtgtgtgtgtttgtatcacattttcattatccaac

SEQ ID NO: 35299 - DNA, 80 bp, synthetic construct
  source 1..80: mol_type = other DNA
tagtgctttaagaaatttccacactgttttccatagtggttgtactagtttacttcccaccagcaatgtgaaagtattcc

SEQ ID NO: 35300 - DNA, 80 bp, synthetic construct
  source 1..80: mol_type = other DNA
tcttattttgagaattgtctatttgtgtccttagcctactttttgatgggattttttttttctcgctgatttgtttgagt

SEQ ID NO: 35301 - DNA, 80 bp, synthetic construct; identical to SEQ ID NO: 12713
  source 1..80: mol_type = other DNA

SEQ ID NO: 35302 - DNA, 80 bp, synthetic construct
  source 1..80: mol_type = other DNA
atttccttctgcttttccaacaattcattaattaaatttcagaggcaatgagagtctaggtggtctattaaatgtaaata

SEQ ID NO: 35303 - DNA, 80 bp, synthetic construct
  source 1..80: mol_type = other DNA
taggattaaaatattactagggaaaaaaagtgcctcctagagtgagtcacaatcaccccggtagcctgtttactacatga

SEQ ID NO: 35304 - DNA, 80 bp, synthetic construct; identical to SEQ ID NO: 12714
  source 1..80: mol_type = other DNA

SEQ ID NO: 35305 - DNA, 80 bp, synthetic construct
  source 1..80: mol_type = other DNA
ttggttgaaaaaatagatttgtatttctttaaaggtcaaaaaacaatcattgttttatcaaacaatcaaaatataaaatt

SEQ ID NO: 35306 - DNA, 80 bp, synthetic construct
  source 1..80: mol_type = other DNA
tttaagtaaaccacacactgacctagggaatacaggactttctaaaatcaggcaccctaatcggccaacccaaaaaaaag

SEQ ID NO: 35307 - DNA, 80 bp, synthetic construct
  source 1..80: mol_type = other DNA
ttccttgattcacttaaaatgcatctactgcagtcctaatctatgcataactcttcattaggtgatacttatggcaagac

SEQ ID NO: 35308 - DNA, 80 bp, synthetic construct; identical to SEQ ID NO: 12715
  source 1..80: mol_type = other DNA

SEQ ID NO: 35309 - DNA, 80 bp, synthetic construct
  source 1..80: mol_type = other DNA
ttagttgatatacatactatgtgacctttcacttactgcatctgtgaaagcttgccctggtttaatgaagaggcaatggg

SEQ ID NO: 35310 - DNA, 80 bp, synthetic construct
  source 1..80: mol_type = other DNA
cacaacctcgaattgtttttattttcttattcccaggagctcttctttagaattaacctgtcagaaagcaggaagggaat

SEQ ID NO: 35311 - DNA, 80 bp, synthetic construct
  source 1..80: mol_type = other DNA
actaaaaatctaggttgacgggcacttaatttgaccttctagccaactagtctccaaagattataaaatcttactatacc

SEQ ID NO: 35312 - DNA, 80 bp, synthetic construct
  source 1..80: mol_type = other DNA
taaagagaaagccaggatcaaagtctatgggataaacagaaaaaaaagtgctctcattttatttccttatacatttttta

SEQ ID NO: 35313 - DNA, 80 bp, synthetic construct; identical to SEQ ID NO: 12716
  source 1..80: mol_type = other DNA

SEQ ID NO: 35314 - DNA, 80 bp, synthetic construct
  source 1..80: mol_type = other DNA
acatacttgagctgtgtgtcacactaaaaatgttgggtatcaacagagcaccaaggattaaagttattttaagatatttg

SEQ ID NO: 35315 - DNA, 80 bp, synthetic construct
  source 1..80: mol_type = other DNA
acacaaagatcagaggttggacataccattccacaagtcagaccaagtgggttgtcagaaaatatcatcttagcagctcc

SEQ ID NO: 35316 - DNA, 80 bp, synthetic construct; identical to SEQ ID NO: 12717
  source 1..80: mol_type = other DNA

SEQ ID NO: 35317 - DNA, 80 bp, synthetic construct
  source 1..80: mol_type = other DNA
ggcattgtttgaacaaactcaaaacctaaactttaaaacaacaaaaaatggttatactcaggttatcctccatttaacta

SEQ ID NO: 35318 - DNA, 80 bp, synthetic construct
  source 1..80: mol_type = other DNA
tgaccagtactcctgaaaacaatcaagtacatcaaaaacaagaaaagtctggcaaattttaacagacaagagaagcctaa

SEQ ID NO: 35319 - DNA, 80 bp, synthetic construct
  source 1..80: mol_type = other DNA
ggtgttaataataggggtaattatgagtgcatatggaaactctctgtactactgtcacaatttttccataaatctaaaac

SEQ ID NO: 35320 - DNA, 80 bp, synthetic construct; identical to SEQ ID NO: 12718
  source 1..80: mol_type = other DNA

SEQ ID NO: 35321 - DNA, 80 bp, synthetic construct
  source 1..80: mol_type = other DNA
caaacgcctgataataataagaaaacaataaataaaataagcaaactcctaggtaatcaagaaatttaagtcagaataaa

SEQ ID NO: 35322 - DNA, 80 bp, synthetic construct
  source 1..80: mol_type = other DNA
cacagcattcgtggtggtttaacagtatttgtcttgttcagtgtcccttcagcaatgaaagttatgtctgccatgtaaga

SEQ ID NO: 35323 - DNA, 80 bp, synthetic construct
  source 1..80: mol_type = other DNA
ggctcaatagattacagaatctagttacagtgatcttattcagctatggtccatatgttgatgtaaacacacacacacac

SEQ ID NO: 35324 - DNA, 80 bp, synthetic construct
  source 1..80: mol_type = other DNA
tctgtttcttttaatcaagagattaggatctgtttattcccccaaattggatcagatttaccactgtgtttgtcagagtc

SEQ ID NO: 35325 - DNA, 80 bp, synthetic construct; identical to SEQ ID NO: 12719
  source 1..80: mol_type = other DNA

SEQ ID NO: 35326 - DNA, 80 bp, synthetic construct
  source 1..80: mol_type = other DNA
agaaaaggcacttgacaaattcaacatccctcatgacaaaagctatcaacaaactgcaaatagaaagaaacttcaacacc

SEQ ID NO: 35327 - DNA, 80 bp, synthetic construct
  source 1..80: mol_type = other DNA
aaaagaatgttcactgcattagtcaaggagtcaaaagttctccagagacacagaaagaataggatgtatgtggggggggg

SEQ ID NO: 35328 - DNA, 80 bp, synthetic construct; identical to SEQ ID NO: 12720
  source 1..80: mol_type = other DNA

SEQ ID NO: 35329 - DNA, 80 bp, synthetic construct
  source 1..80: mol_type = other DNA
aagccaatgtttcatttcaaaggtagtcagacaggaagaattatgtgtttttcagggtagagctagcattttgttttatt

SEQ ID NO: 35330 - DNA, 80 bp, synthetic construct
  source 1..80: mol_type = other DNA
tcggacacataaaatcagccatcacactaacttttacaacttctattcaccatagcacttgaaattcttgctagataatt

SEQ ID NO: 35331 - DNA, 80 bp, synthetic construct
  source 1..80: mol_type = other DNA
tttccatgtaaaatgatcttgtatatacaaaccctaactaatccactaaaatactatgagaagtaataaaagtacagcaa

SEQ ID NO: 35332 - DNA, 80 bp, synthetic construct
  source 1..80: mol_type = other DNA
tttatactctgaaaactatagaaaactgttgaaaggaactaaataatacctaaataaatgaaaatacatcccatgatcat

SEQ ID NO: 35333 - DNA, 80 bp, synthetic construct; identical to SEQ ID NO: 12721
  source 1..80: mol_type = other DNA

SEQ ID NO: 35334 - DNA, 80 bp, synthetic construct
  source 1..80: mol_type = other DNA
atgcaaaagaatgaagtttgaccctatctcacaccaaacaaaaaaatgaactaaaagtaaatcatagatctgggggtctg

SEQ ID NO: 35335 - DNA, 80 bp, synthetic construct
  source 1..80: mol_type = other DNA
tcaacttcacttacatgaacaaatacatgggaagtgaatacatctcataaaagctgttatgttttaaagcatgcatttaa

SEQ ID NO: 35336 - DNA, 80 bp, synthetic construct
  source 1..80: mol_type = other DNA
tagttaacatgtacattcataggttgaatttttaagaataaatacagaagtgagccaatggttctttctcctagaaaact

SEQ ID NO: 35337 - DNA, 80 bp, synthetic construct; identical to SEQ ID NO: 12722
  source 1..80: mol_type = other DNA

SEQ ID NO: 35338 - DNA, 80 bp, synthetic construct
  source 1..80: mol_type = other DNA
aaaaatgtgatctgcaattggtagaccacttttaaggatacttggggtaaggaagcacagaaaaaaaaaacataatccaa

SEQ ID NO: 35339 - DNA, 80 bp, synthetic construct
  source 1..80: mol_type = other DNA
tttctatagctgtcaaactatgagtgtctgatctactactgccatgaaattgtctaataattcttaacactctcatgact

SEQ ID NO: 35340 - DNA, 80 bp, synthetic construct; identical to SEQ ID NO: 12723
  source 1..80: mol_type = other DNA

SEQ ID NO: 35341 - DNA, 80 bp, synthetic construct
  source 1..80: mol_type = other DNA
tatgcatgaaccaaattatggaggattctgactggcaagctgagggattactatttaattaaagctttttaatagaaggg

SEQ ID NO: 35342 - DNA, 80 bp, synthetic construct
  source 1..80: mol_type = other DNA
agcccaagagaggttacacaatgatgcctagaaagaggaaagcataggcatgtttcacagaataaagaagcatgattttg

SEQ ID NO: 35343 - DNA, 80 bp, synthetic construct
  source 1..80: mol_type = other DNA
tcaattcttcccacagataatgtcaagatcagtatcaatttattctctcatagcaagtgggaagatttcttgagtcctcc

SEQ ID NO: 35344 - DNA, 80 bp, synthetic construct
  source 1..80: mol_type = other DNA
acaaacatttcagtgttccatcatgtgaggaaaaaatgtacagagctatgtcaggagggatacaaaatacatatctgatt

SEQ ID NO: 35345 - DNA, 80 bp, synthetic construct; identical to SEQ ID NO: 12724
  source 1..80: mol_type = other DNA

SEQ ID NO: 35346 - DNA, 80 bp, synthetic construct
  source 1..80: mol_type = other DNA
ctcacaagccgctaccctgtcatatggtataactaatttaacaaatagtcctatcatattcaagtcttcatatcactaca

SEQ ID NO: 35347 - DNA, 80 bp, synthetic construct
  source 1..80: mol_type = other DNA
ttgggctaaacttcaagaagtttgcatgtgtgagaagggtgaattaacattacttttatttctggctcaagctgtaatgg

SEQ ID NO: 35348 - DNA, 80 bp, synthetic construct
  source 1..80: mol_type = other DNA
tgaacagaacacatgaaaattcctgccctcatcgtactcatactctcagaaaaaaaaaatggagatagaagaataggttt

SEQ ID NO: 35349 - DNA, 80 bp, synthetic construct; identical to SEQ ID NO: 12725
  source 1..80: mol_type = other DNA

SEQ ID NO: 35350 - DNA, 80 bp, synthetic construct
  source 1..80: mol_type = other DNA
ttttaactgtgcatggataagatgcctattccattatgtactatacaatagattcagtgaacttaggttcccactctacc

SEQ ID NO: 35351 - DNA, 80 bp, synthetic construct
  source 1..80: mol_type = other DNA
tacagaaagaaagaagcaaaatgtatgtacagaaaatcactaatctaccaaaccataaaatatcaatgacatgggggcat

SEQ ID NO: 35352 - DNA, 80 bp, synthetic construct; identical to SEQ ID NO: 12726
  source 1..80: mol_type = other DNA

SEQ ID NO: 35353 - DNA, 80 bp, synthetic construct
  source 1..80: mol_type = other DNA
cataatgccagaaagcactttgtacaacagccttttgatgattgtgtttgttaatatatatttgcggtagtcttatattt

SEQ ID NO: 35354 - DNA, 80 bp, synthetic construct
  source 1..80: mol_type = other DNA
ccaggctggagtgcagtggcgatatcttggctcactgcaacctccacctcccaggtttaagcaattctgctgcctcagtc

SEQ ID NO: 35355 - DNA, 80 bp, synthetic construct
  source 1..80: mol_type = other DNA
cgttagtctctgcacctggcctacttatcctttaatattgaaaatgaaaatctctataaaaggcaaaaataagaaagtgc

SEQ ID NO: 35356 - DNA, 80 bp, synthetic construct; identical to SEQ ID NO: 12727
  source 1..80: mol_type = other DNA

SEQ ID NO: 35357 - DNA, 80 bp, synthetic construct
  source 1..80: mol_type = other DNA
cttgcaagcaaatgagaatctttaagtttgagaaattattgaaaggtgaagattattaatcaaagaatctcatattaatg

SEQ ID NO: 35358 - DNA, 80 bp, synthetic construct
  source 1..80: mol_type = other DNA
tattttgtgcgagtttgctctttattgacgagaatatgagcaattccttaattgacagactgttgtgatgcatagtacag

SEQ ID NO: 35359 - DNA, 80 bp, synthetic construct
  source 1..80: mol_type = other DNA
ctaaactcaagtttctttaacatgaagtctattacattatactttttactcaacattcaagacgttaatagcacttacaa

SEQ ID NO: 35360 - DNA, 80 bp, synthetic construct; identical to SEQ ID NO: 12728
  source 1..80: mol_type = other DNA

SEQ ID NO: 35361 - DNA, 80 bp, synthetic construct
  source 1..80: mol_type = other DNA
tttaaattttatcaaatatttacaaaagcatatgtttaaatttgtctatactatacacaaccacaaacaatatgatgtta

SEQ ID NO: 35362 - DNA, 80 bp, synthetic construct
  source 1..80: mol_type = other DNA
aagcaaaagtgaataaaatcagtgactattacacattgtatcagctgtgattaaaagtaaaaatgagccgggagctgtaa

SEQ ID NO: 35363 - DNA, 80 bp, synthetic construct
  source 1..80: mol_type = other DNA
gagaatggcttgaacccgggaggaggaggtttcagtgagccgagattgtgccactgcactccagtctggcaacagagcaa

SEQ ID NO: 35364 - DNA, 80 bp, synthetic construct; identical to SEQ ID NO: 12729
  source 1..80: mol_type = other DNA

SEQ ID NO: 35365 - DNA, 80 bp, synthetic construct
  source 1..80: mol_type = other DNA
gctcaatatttattctgtagaactctttcagtttacaaagctagttttacacgcagaaaaaagctaggatactttgaaaa

SEQ ID NO: 35366 - DNA, 80 bp, synthetic construct
  source 1..80: mol_type = other DNA
attagtatactagagtaattattcaaaaaacatatttggaactattttagcaatctgggaggaaaatcttggtatttttc

SEQ ID NO: 35367 - DNA, 80 bp, synthetic construct
  source 1..80: mol_type = other DNA
ataaggaaaatgttagaaacctaacttcaccctacactaacctcaatcaaatgaagaaactaaattacatcctccccttt

SEQ ID NO: 35368 - DNA, 80 bp, synthetic construct
  source 1..80: mol_type = other DNA
aattttaagaattgcttcttaaccttccataatataaatatagcctaatagattgagctgatactaaagtattcacccgt

SEQ ID NO: 35369 - DNA, 80 bp, synthetic construct; identical to SEQ ID NO: 12730
  source 1..80: mol_type = other DNA

SEQ ID NO: 35370 - DNA, 80 bp, synthetic construct
  source 1..80: mol_type = other DNA
tccttctcatataaattttcaggagctctttgagtaacaaagatgttaacacttggactgaaacatgcatggcaaataat

SEQ ID NO: 35371 - DNA, 80 bp, synthetic construct
  source 1..80: mol_type = other DNA
gtacttttaatatctaggttagtccacctgaaaagaattctaggagataacctatgaaagattctaaaagtaaagtcaaa

SEQ ID NO: 35372 - DNA, 80 bp, synthetic construct
  source 1..80: mol_type = other DNA
tacagtagctttgtagtatcagtatctgatataataaatcttttttgtcttcattttttaaagtttctttcttccatata

SEQ ID NO: 35373 - DNA, 80 bp, synthetic construct; identical to SEQ ID NO: 12731
  source 1..80: mol_type = other DNA

SEQ ID NO: 35374 - DNA, 80 bp, synthetic construct
  source 1..80: mol_type = other DNA
gactcaatcataaaactaggattgtgtaagtccacatcaccagaaagagaaattaaaattaaccccacctaggtcccacc

SEQ ID NO: 35375 - DNA, 80 bp, synthetic construct
  source 1..80: mol_type = other DNA
gactcgaaaaaaaacattaagtgaggaatttagtttaaggtggtcccagaggactggcggtaaagccactgcctgaggga

SEQ ID NO: 35376 - DNA, 80 bp, synthetic construct
  source 1..80: mol_type = other DNA
tacaagggaacacaaagcactcagtggaggcaacagatagcacagacagtatcatcagactcgcagagacttttaatagt

SEQ ID NO: 35377 - DNA, 80 bp, synthetic construct
  source 1..80: mol_type = other DNA
tgcctctaataaaaatacaaaaaaaaaaaaaaaaaattagccgggcgtggtggcgggtgcctgtagtcccaggtactctg

SEQ ID NO: 35378 - DNA, 80 bp, synthetic construct; identical to SEQ ID NO: 12732
  source 1..80: mol_type = other DNA

SEQ ID NO: 35379 - DNA, 80 bp, synthetic construct
  source 1..80: mol_type = other DNA
aagatttaacatgtatctaataagagcttcataaagaaagagagacagtgagatatttcccaacatgatgaaagaaatca

SEQ ID NO: 35380 - DNA, 80 bp, synthetic construct
  source 1..80: mol_type = other DNA
caaaggcatattaacctcaaatgaacaataattagacttccattcatttttcaatagtagcattgtatgataaaaggccc

SEQ ID NO: 35381 - DNA, 80 bp, synthetic construct
  source 1..80: mol_type = other DNA
tgaataaaattttatttattccaagtagaacggcttccacatggaaattgcaacactgaaaaaattgacaaaaatatgaa

SEQ ID NO: 35382 - DNA, 80 bp, synthetic construct; identical to SEQ ID NO: 12733
  source 1..80: mol_type = other DNA

SEQ ID NO: 35383 - DNA, 80 bp, synthetic construct
  source 1..80: mol_type = other DNA
ttatttaaatcacatggcatactcaactcagcaactctgcaggattatggcttgtgtaccctctaggaatataacagaga

SEQ ID NO: 35384 - DNA, 80 bp, synthetic construct
  source 1..80: mol_type = other DNA
ctagtagtcattacccacttttataaaatactcctcacctatttttgcccaactctccaaaccgagtcccaggaaatcac

SEQ ID NO: 35385 - DNA, 80 bp, synthetic construct
  source 1..80: mol_type = other DNA
ttttgttttaaagctttgttctcttgagcactgtcttatggcagatagataagtcaatactctttaaatggatagagggg

SEQ ID NO: 35386 - DNA, 80 bp, synthetic construct
  source 1..80: mol_type = other DNA
tgggttataaattacggactttccaacattttttcttccacttacttctttaatataatagtgggagaaaccccaatcaa

SEQ ID NO: 35387 - DNA, 80 bp, synthetic construct; identical to SEQ ID NO: 12734
  source 1..80: mol_type = other DNA

SEQ ID NO: 35388 - DNA, 80 bp, synthetic construct
  source 1..80: mol_type = other DNA
gattttgttgtttctttaacttccagttacttttaataaggatctatcacaaagaaaaacttttcttttacatcgtgtaa

SEQ ID NO: 35389 - DNA, 80 bp, synthetic construct
  source 1..80: mol_type = other DNA
aaatacaggatcacgaaatcaaggaacactgtttaaaacagccatttatttcactatatttatagactgatctcatgcat

SEQ ID NO: 35390 - DNA, 80 bp, synthetic construct
  source 1..80: mol_type = other DNA
atagaattgagtgtacctttcaaaactagagctgtaatccagtttgtaagaaaataaagaatggaagtattggcctaaac

SEQ ID NO: 35391 - DNA, 80 bp, synthetic construct; identical to SEQ ID NO: 12735
  source 1..80: mol_type = other DNA

SEQ ID NO: 35392 - DNA, 80 bp, synthetic construct
  source 1..80: mol_type = other DNA
aattaatgaaacagaaagtggatttccaaaaatagagatgactgtgatcttgcttagacattttgtaaacctaagaatcc

SEQ ID NO: 35393 - DNA, 80 bp, synthetic construct
  source 1..80: mol_type = other DNA
aagagtgttaacttagatatatttttagcgaaaatactttagacttcaatctttggattctccttttctgatgagatctt

SEQ ID NO: 35394 - DNA, 80 bp, synthetic construct; identical to SEQ ID NO: 12736
  source 1..80: mol_type = other DNA

SEQ ID NO: 35395 - DNA, 80 bp, synthetic construct
  source 1..80: mol_type = other DNA
tgaaatattaagaaataaactttatacgtaaaaaggcacctggttgttgaagaacgaggagttaaggtatctttacagca

SEQ ID NO: 35396 - DNA, 80 bp, synthetic construct
  source 1..80: mol_type = other DNA
cacaaaaacaataggtactatcaattattcaatcaatcaaccattcacttagtgaatgaaaactgggcttagacttacat

SEQ ID NO: 35397 - DNA, 80 bp, synthetic construct
  source 1..80: mol_type = other DNA
aaagtctattaccttgatatatctatgtgctagacttactatcaaagcacactttcatagatatttcacaaatcataaat

SEQ ID NO: 35398 - DNA, 80 bp, synthetic construct
  source 1..80: mol_type = other DNA
acttggaagtgcttaattaataaatgtgccacatttttaaatgcctatagaagtcatatttaatggtttaactggatttg

SEQ ID NO: 35399 - DNA, 80 bp, synthetic construct; identical to SEQ ID NO: 12737
  source 1..80: mol_type = other DNA

SEQ ID NO: 35400 - DNA, 80 bp, synthetic construct
  source 1..80: mol_type = other DNA
atacaaagtttctgtgtttcatctttggcactcctcttgggatgcataaatgagaatcatgctggctagtaactgtccct

SEQ ID NO: 35401 - DNA, 80 bp, synthetic construct
  source 1..80: mol_type = other DNA
caaatgcaaagattaaaggtaaagtcttattttaccacttgaaatatcctttcttccactcttccttcctcccagcttcc

SEQ ID NO: 35402 - DNA, 80 bp, synthetic construct
  source 1..80: mol_type = other DNA
tcagcctccatcccattcacaggacaattgagttctgtaacagatgcctcaaagcatagcccagatccatacccttcagg

SEQ ID NO: 35403 - DNA, 80 bp, synthetic construct; identical to SEQ ID NO: 12738
  source 1..80: mol_type = other DNA

SEQ ID NO: 35404 - DNA, 80 bp, synthetic construct
  source 1..80: mol_type = other DNA
ccgcattttgaaaagggcctctgaagtgattctagtgttcatagttggaagcacattgttagaacaacattctataatta

SEQ ID NO: 35405 - DNA, 80 bp, synthetic construct
  source 1..80: mol_type = other DNA
gcagaccctgggatatgagaatataaaagtgttggaaaaagatcaccatggtcctgccatcatagaacatgcagtttgaa

SEQ ID NO: 35406 - DNA, 80 bp, synthetic construct
  source 1..80: mol_type = other DNA
gaagaacgagtggacattaggaaagcaaatgacagtgggattctgagtgcagggtcactcaggataattacccaagaata

SEQ ID NO: 35407 - DNA, 80 bp, synthetic construct; identical to SEQ ID NO: 12739
  source 1..80: mol_type = other DNA

SEQ ID NO: 35408 - DNA, 80 bp, synthetic construct
  source 1..80: mol_type = other DNA
gcccttagccttctctctaaattaaattttacacaatgagtaccaaaggcttttcataatcaattgtcctctctgaaatg

SEQ ID NO: 35409 - DNA, 80 bp, synthetic construct
  source 1..80: mol_type = other DNA
attgcaaacaatacaaaaagctccataatgtatggcctatttggtccttgatgttaaaatgaggtgatatttatatgtgt

SEQ ID NO: 35410 - DNA, 80 bp, synthetic construct
  source 1..80: mol_type = other DNA
tcacacaaaagtaagcgcacacacacacatatatggcacatcatatggattctggttatctctatgaagtcacaagtttt

SEQ ID NO: 35411 - DNA, 80 bp, synthetic construct
  source 1..80: mol_type = other DNA
ttgacaatgtaaggatttttagttgtggttattaagcctctttaccaaataattctccttttattattgagctagttcac

SEQ ID NO: 35412 - DNA, 80 bp, synthetic construct; identical to SEQ ID NO: 12740
  source 1..80: mol_type = other DNA

SEQ ID NO: 35413 - DNA, 80 bp, synthetic construct
  source 1..80: mol_type = other DNA
actgcaccaaatcagaaaggtactgcattacaatgatataggcaaatggtgtaaataaaatagcagaaatgcatgtcaga

SEQ ID NO: 35414 - DNA, 80 bp, synthetic construct
  source 1..80: mol_type = other DNA
attccccttttacctttcaaagttactctgttatagtgcagtttatttttaaatgcataagcagcaaaaattaattcaga

SEQ ID NO: 35415 - DNA, 80 bp, synthetic construct
  source 1..80: mol_type = other DNA
ttcatatttaatacaaagcataacaatgaatttgtcgaagagcaaaatatagaatacttaatcaatgttaattttttata

SEQ ID NO: 35416 - DNA, 80 bp, synthetic construct; identical to SEQ ID NO: 12741
  source 1..80: mol_type = other DNA

SEQ ID NO: 35417 - DNA, 80 bp, synthetic construct
  source 1..80: mol_type = other DNA
attgcattgtcttagctttgctagagtttggtttaattgagtcagcatggtttcatcaggctatgtaaatatacgttaat

SEQ ID NO: 35418 - DNA, 80 bp, synthetic construct
  source 1..80: mol_type = other DNA
taccctataagcaccagtgtaggaaaatacataatttaatatcttcctcagtggtgcaacatgtctactgaaaactgagc

SEQ ID NO: 35419 - DNA, 80 bp, synthetic construct
  source 1..80: mol_type = other DNA
actccatgttctgatccattaagcagtcaaaacagtcaaaagccatcctcagcttccaataattatctgcctatttatac

SEQ ID NO: 35420 - DNA, 80 bp, synthetic construct; identical to SEQ ID NO: 12742
  source 1..80: mol_type = other DNA

SEQ ID NO: 35421 - DNA, 80 bp, synthetic construct
  source 1..80: mol_type = other DNA
gagaagcaaatttagaacagaacacaattcacacaactgatgctcaaaattatttgttggatgataataaccaggaagct

SEQ ID NO: 35422 - DNA, 80 bp, synthetic construct
  source 1..80: mol_type = other DNA
tttatcttcatccataacagattcctaaaaatttataagactacctctatctccacctcatagatgaggctccagtcatc

SEQ ID NO: 35423 - DNA, 80 bp, synthetic construct
  source 1..80: mol_type = other DNA
ccttgccagagtaatttgaagactgagaaaaaagcagttaagaagtcacagctagaaaaagactacagtattatctctcc

SEQ ID NO: 35424 - DNA, 80 bp, synthetic construct; identical to SEQ ID NO: 12743
  source 1..80: mol_type = other DNA

SEQ ID NO: 35425 - DNA, 80 bp, synthetic construct
  source 1..80: mol_type = other DNA
aaaccacaaccccaatcaagtactttgtgctgtctcacaagcaaataaaatatcttcataaaaacttagtacatatcacc

SEQ ID NO: 35426 - DNA, 80 bp, synthetic construct
  source 1..80: mol_type = other DNA
tacagtggtggaatacgaaagacgtgatggaaattgtatacattaataactgcaaaggagtcattggaagaaaatacaca

SEQ ID NO: 35427 - DNA, 80 bp, synthetic construct
  source 1..80: mol_type = other DNA
aaagagaacagagcccatatgaagaaagtagcgtcagtacttaataatttctgaatctactggggctctcacttattgga

SEQ ID NO: 35428 - DNA, 80 bp, synthetic construct; identical to SEQ ID NO: 12744
  source 1..80: mol_type = other DNA

SEQ ID NO: 35429 - DNA, 80 bp, synthetic construct
  source 1..80: mol_type = other DNA
gaataccagaaaaaaatacgtaaaagcattcattaaatgttttcctgcccagtagatatgttggcactaaaatagctgat

SEQ ID NO: 35430 - DNA, 80 bp, synthetic construct
  source 1..80: mol_type = other DNA
gggattgagagtatgtacttaaagggattgaggaagatggcaagattcaagaagatcagagtttcctctgtcttgtagta

SEQ ID NO: 35431 - DNA, 80 bp, synthetic construct
  source 1..80: mol_type = other DNA
aagtgctcaaatgtgcttgctcatccaaggcctttaagtgtattaactcagaaagcgtagcattgaggttaagagtacaa

SEQ ID NO: 35432 - DNA, 80 bp, synthetic construct
  source 1..80: mol_type = other DNA
tatatgcatttctttagtaacttaacaggtattctctacaatcttcaatatattctgaaacttatatattgctttctctt

SEQ ID NO: 35433 - DNA, 80 bp, synthetic construct; identical to SEQ ID NO: 12745
  source 1..80: mol_type = other DNA

SEQ ID NO: 35434 - DNA, 80 bp, synthetic construct
  source 1..80: mol_type = other DNA
acggtgaaaccccatctctactaaaaattcaaaaaaattagccaggcgtggtggcacgcacctgtaatcccagctactcg

SEQ ID NO: 35435 - DNA, 80 bp, synthetic construct
  source 1..80: mol_type = other DNA
cctattagcgggcacatatataagtgctcatacgcgtttaagaaacatttctcagtcactgtacttcaggaaatcaaaca

SEQ ID NO: 35436 - DNA, 80 bp, synthetic construct
  source 1..80: mol_type = other DNA
aacacaatgtactgtgaagcttctacttttgaaaatggctacattctagctaaaaatgtaattgatccttattatggttg

SEQ ID NO: 35437 - DNA, 80 bp, synthetic construct; identical to SEQ ID NO: 12746
  source 1..80: mol_type = other DNA

SEQ ID NO: 35438 - DNA, 80 bp, synthetic construct
  source 1..80: mol_type = other DNA
ttacattttgcactggtcatatgaattgactaggcaaaagcaaaccaacgatactcccatatatgaatttcctttctcaa

SEQ ID NO: 35439 - DNA, 80 bp, synthetic construct
  source 1..80: mol_type = other DNA
tagttatgcatttagttaacacgtagccatattctgaagcccaaggttcagagtattttttacagtccaatcattttata

SEQ ID NO: 35440 - DNA, 80 bp, synthetic construct; identical to SEQ ID NO: 12747
  source 1..80: mol_type = other DNA

SEQ ID NO: 35441 - DNA, 80 bp, synthetic construct
  source 1..80: mol_type = other DNA
aaaaactaatatatatttttcatagatgccctagaagtaaacctctcagcaaacttcaaaacagagaaagctctatattt

SEQ ID NO: 35442 - DNA, 80 bp, synthetic construct
  source 1..80: mol_type = other DNA
gttatttgttcctatacaattcctagatgtacggaatatgtttgttatgaaaaaaacagtatgtagacaaatatgtaaac

SEQ ID NO: 35443 - DNA, 80 bp, synthetic construct
  source 1..80: mol_type = other DNA
cactggtcatatgaattgaccaggcaaaagcaaaccaatgatactcccatatatgaaattcctttctcaaaatccctcca

SEQ ID NO: 35444 - DNA, 80 bp, synthetic construct
  source 1..80: mol_type = other DNA
accataatggatattcaatttacacaggtttgaactgctgggctcaagtatacatgggcttttgttttcaaccaaacaag

SEQ ID NO: 35445 - DNA, 80 bp, synthetic construct; identical to SEQ ID NO: 12748
  source 1..80: mol_type = other DNA

SEQ ID NO: 35446 - DNA, 80 bp, synthetic construct
  source 1..80: mol_type = other DNA
aagttctgtgctggcaaaagggaggagttactggaacctacttagaagaggatgacttaatatactggacacatacttca

SEQ ID NO: 35447 - DNA, 80 bp, synthetic construct
  source 1..80: mol_type = other DNA
tgtatacgtgtgtgtgtgtgtgtgtgtgtgtgtgtgtgtatatatatatatatatatatatatatatatatatggcaggg

SEQ ID NO: 35448 - DNA, 80 bp, synthetic construct
  source 1..80: mol_type = other DNA
gtaggctgaggtaggaagattgcttgagcccagaaggtcaaggctgcagtgagctatgatcataccactgcattccagcc

SEQ ID NO: 35449 - DNA, 80 bp, synthetic construct; identical to SEQ ID NO: 12749
  source 1..80: mol_type = other DNA

SEQ ID NO: 35450 - DNA, 80 bp, synthetic construct
  source 1..80: mol_type = other DNA
atttggaaagcaatgtccatatatgaattgtcttcctcttagaactgttgagtttcatgtgtgacatccatacaagttta

SEQ ID NO: 35451 - DNA, 80 bp, synthetic construct
  source 1..80: mol_type = other DNA
agctaaatctatgttgattacgccaagtgaaaggataatttattcagcacgaatttttttctaaagttttaatgcaatcc

SEQ ID NO: 35452 - DNA, 80 bp, synthetic construct; identical to SEQ ID NO: 12750
  source 1..80: mol_type = other DNA

SEQ ID NO: 35453 - DNA, 80 bp, synthetic construct
  source 1..80: mol_type = other DNA
ggttgggttcctctgtctttgaggttagtctacttggaaatagattaatttgaattcagatgaaaaagccagaattttgg

SEQ ID NO: 35454 - DNA, 80 bp, synthetic construct
  source 1..80: mol_type = other DNA
gtgtgttttataaatgttaactcatttaattttcataatcactcaatgaggtagatataaatattaactcctatgtttat

SEQ ID NO: 35455 - DNA, 80 bp, synthetic construct
  source 1..80: mol_type = other DNA
taattctggttatctctgccatttcctcagaacagagtatggtgacatcaaggcttgtctcacagtttgtgaaaggcaga

SEQ ID NO: 35456 - DNA, 80 bp, synthetic construct; identical to SEQ ID NO: 12751
  source 1..80: mol_type = other DNA

SEQ ID NO: 35457 - DNA, 80 bp, synthetic construct
  source 1..80: mol_type = other DNA
atgtaaattacctatagaaatcagtaagaccaatctttccagtagaaatactagacaaaataaaagcaattagaaacaac

SEQ ID NO: 35458 - DNA, 80 bp, synthetic construct
  source 1..80: mol_type = other DNA
aacaaaattgtccccattaaaactattgtgtgggaccactataacctcatgcaagcttttgtatgaaatggcttaagaca

SEQ ID NO: 35459 - DNA, 80 bp, synthetic construct
  source 1..80: mol_type = other DNA
gttttcgggcaatggcactgcttagaaagtgaactaatatgaagatgacctattcattaagagaagattttttgagaaaa

SEQ ID NO: 35460 - DNA, 80 bp, synthetic construct; identical to SEQ ID NO: 12752
  source 1..80: mol_type = other DNA

SEQ ID NO: 35461 - DNA, 80 bp, synthetic construct
  source 1..80: mol_type = other DNA
aagtgctggagatagcaggatgaataagttataggttcagccctcaagaatcttcacagtggtggagtcagataaataaa

SEQ ID NO: 35462 - DNA, 80 bp, synthetic construct
  source 1..80: mol_type = other DNA
aatgttcatttgttgattaaatgaatgaggtatttatttgtttcttcgggacgaataagagggagagagagtcttgtgga

SEQ ID NO: 35463 - DNA, 80 bp, synthetic construct
  source 1..80: mol_type = other DNA
acaactatagcatgtgctgtaaatgcagcatcttgagctaagaagggacaaggtagaacagatcaagctctgctctagtc

SEQ ID NO: 35464 - DNA, 80 bp, synthetic construct
  source 1..80: mol_type = other DNA
ccattagtgataccatccatgcctgggcaactctcctaaaccttggaagactggcccacaatgggtcttaggctcctgtt

SEQ ID NO: 35465 - DNA, 80 bp, synthetic construct; identical to SEQ ID NO: 12753
  source 1..80: mol_type = other DNA

SEQ ID NO: 35466 - DNA, 80 bp, synthetic construct
  source 1..80: mol_type = other DNA
aaatcctttgtgtcccagtttcctcatctaaattgctaattatagtctagacatcataccattatagggaggattaaata

SEQ ID NO: 35467 - DNA, 80 bp, synthetic construct
  source 1..80: mol_type = other DNA
gtaaaacagggactaccacatcagttactgtgaaaataaatgaggtaattatgacaagcaccaacatcatatttatagta

SEQ ID NO: 35468 - DNA, 80 bp, synthetic construct; identical to SEQ ID NO: 12754
  source 1..80: mol_type = other DNA

SEQ ID NO: 35469 - DNA, 80 bp, synthetic construct
  source 1..80: mol_type = other DNA
tgtcaagggaagatctctgatggaagtttgatttttgcctcgtttattcctcacatctaaaatggatatttttccaaaac

SEQ ID NO: 35470 - DNA, 80 bp, synthetic construct
  source 1..80: mol_type = other DNA
ttaagctgtgaaatttctcacctgctccctacttggtatttttttaaggtgaacttttcagaacaaccccacagagagga

SEQ ID NO: 35471 - DNA, 80 bp, synthetic construct
  source 1..80: mol_type = other DNA
tatgctatattctttcaattttcctgcctttacttttgcttttccctcaatagaaatgcgtgctgctcattcccactccc

SEQ ID NO: 35472 - DNA, 80 bp, synthetic construct; identical to SEQ ID NO: 12755
  source 1..80: mol_type = other DNA

SEQ ID NO: 35473 - DNA, 80 bp, synthetic construct
  source 1..80: mol_type = other DNA
aaaaagaagcaggagttagccagggtgaggagacagtggaagaggcagaagagatgtgcaaataccatcagatgcaggag

SEQ ID NO: 35474 - DNA, 80 bp, synthetic construct
  source 1..80: mol_type = other DNA
atactaacaaagataacgatgccattgtttggcttttgaggatatgcgttcctatcttgaaaaaactgaaattgttagaa

SEQ ID NO: 35475 - DNA, 80 bp, synthetic construct
  source 1..80: mol_type = other DNA
atacatcagcttccaagacaagtattcacaatatgtaggaagttccactgtggatccaaggggatgtagatggtacaatc

SEQ ID NO: 35476 - DNA, 80 bp, synthetic construct; identical to SEQ ID NO: 12756
  source 1..80: mol_type = other DNA

SEQ ID NO: 35477 - DNA, 80 bp, synthetic construct
  source 1..80: mol_type = other DNA
ctgctaagtgaaacctcatttttagctatgagcaatgggtgtatgattaggtggtctttaaagtgccttccaacacacaa

SEQ ID NO: 35478 - DNA, 80 bp, synthetic construct
  source 1..80: mol_type = other DNA
acatagttgaggcctctcctaaaatttcattagcagtgaaacccttattttaaaaagaatgtgaataacttgaatgaaat

SEQ ID NO: 35479 - DNA, 80 bp, synthetic construct
  source 1..80: mol_type = other DNA
agttatttaagttcaattttgagaatcaggcactgaccttcactacagtcagcaatttcccatttatttctatccctatc

SEQ ID NO: 35480 - DNA, 80 bp, synthetic construct
  source 1..80: mol_type = other DNA
aacattctccatttgggaaatgagacaatatttaccttagaatcatgagaatccaataaagtacacaaagtgttggggca

SEQ ID NO: 35481 - DNA, 80 bp, synthetic construct; identical to SEQ ID NO: 12757
  source 1..80: mol_type = other DNA

SEQ ID NO: 35482 - DNA, 80 bp, synthetic construct
  source 1..80: mol_type = other DNA
aacaaatttatccatatggctgcttctgacctcacaaccatctttgatatttctttttcctgctagccatcaagttacac

SEQ ID NO: 35483 - DNA, 80 bp, synthetic construct
  source 1..80: mol_type = other DNA
attgtattgccaccttctacaatcttttatgtattttttgttgtcctaaattgatatactgttactaaaggcatgattct

SEQ ID NO: 35484 - DNA, 80 bp, synthetic construct
  source 1..80: mol_type = other DNA
tccatttatggatatatgggacgtgataaactaaaagcatgcgcaaaagactctaaaaacacgcagaaaggaatgggaag

SEQ ID NO: 35485 - DNA, 80 bp, synthetic construct; identical to SEQ ID NO: 12758
  source 1..80: mol_type = other DNA

SEQ ID NO: 35486 - DNA, 80 bp, synthetic construct
  source 1..80: mol_type = other DNA
atcctcccgtatcagtgggtttcacatctgcagatccaacaaactgtaaagcaaaatattcaaaaataaatttcaaaaaa

SEQ ID NO: 35487 - DNA, 80 bp, synthetic construct
  source 1..80: mol_type = other DNA
atgtcaaagtacagagggcacctaaagaacaactgagatacttcagggatcagagaagaaacaaagacacagggtagcaa

SEQ ID NO: 35488 - DNA, 80 bp, synthetic construct; identical to SEQ ID NO: 12759
  source 1..80: mol_type = other DNA

SEQ ID NO: 35489 - DNA, 80 bp, synthetic construct
  source 1..80: mol_type = other DNA
tgttgaggcaatcacagagttgttagttcatcaagataaaaacaaataaacacaacaatcaccgtagatgcacaaattca

SEQ ID NO: 35490 - DNA, 80 bp, synthetic construct
  source 1..80: mol_type = other DNA
tcccttaatgacaaaacgagaatatatgaaacaaaatgagcagaaattaaagagaaatggagggtactaaaataagccaa

SEQ ID NO: 35491 - DNA, 80 bp, synthetic construct
  source 1..80: mol_type = other DNA
gtaactgaaaaccaaactactgttcaatcaagcaatcttattactaggtacataaatcattctaccataaagacacaact

SEQ ID NO: 35492 - DNA, 80 bp, synthetic construct; identical to SEQ ID NO: 12760
  source 1..80: mol_type = other DNA

SEQ ID NO: 35493 - DNA, 80 bp, synthetic construct
  source 1..80: mol_type = other DNA
gtttcacacaatttacctaaacaacaaacctgcacatggactcttgaatctaaaataaaagttaaaaaaagaaaaatctg

SEQ ID NO: 35494 - DNA, 80 bp, synthetic construct
  source 1..80: mol_type = other DNA
tattgtacagataaaggagagccattaaggttattattcagaggatgctgtagaaactcaattctggtgtcagtataagg

SEQ ID NO: 35495 - DNA, 80 bp, synthetic construct
  source 1..80: mol_type = other DNA
aaacttgattagtcattctctaaatcctctccttcttaaccttagattctctctccacatttattcctgtcttcatcctt

SEQ ID NO: 35496 - DNA, 80 bp, synthetic construct; identical to SEQ ID NO: 12761
  source 1..80: mol_type = other DNA

SEQ ID NO: 35497 - DNA, 80 bp, synthetic construct
  source 1..80: mol_type = other DNA
gcataaaaagctccttcttcctagagttattatgaggaacaaaggagattaagtctctacagagtctagcaaagtgtttg

SEQ ID NO: 35498 - DNA, 80 bp, synthetic construct
  source 1..80: mol_type = other DNA
atctccccctactaaattgtaaaatcatttcagagcagggcccatattgtattcctttctgtatcattatatttctagca

SEQ ID NO: 35499 - DNA, 80 bp, synthetic construct
  source 1..80: mol_type = other DNA
ttttttctgtttctctcattccctttagttttcttcttctggcaaaagcacacccaatctaccttcattgtgtccatcaa

SEQ ID NO: 35500 - DNA, 80 bp, synthetic construct
  source 1..80: mol_type = other DNA
caaatttgttgaactcacctgaataatcttgcctattgattaaaatagttcttgcataggggtaaaatgcaccatataaa

SEQ ID NO: 35501 - DNA, 80 bp, synthetic construct; identical to SEQ ID NO: 12762
  source 1..80: mol_type = other DNA

SEQ ID NO: 35502 - DNA, 80 bp, synthetic construct
  source 1..80: mol_type = other DNA
ggatggcatgagacgggaggaaagacaaagttgataaagaggaaacaagggtcaaagcaaactgaataggaaataaaacc

SEQ ID NO: 35503 - DNA, 80 bp, synthetic construct
  source 1..80: mol_type = other DNA
atagtataaggtaaaatgactgtcttcccaacacagagatttttaatattttcccattccctactcagaaattcttgtat

SEQ ID NO: 35504 - DNA, 80 bp, synthetic construct
  source 1..80: mol_type = other DNA
actttatcactttacacaaagttaattgtccaattttcagttcccatattttatgtgaaaagaagtaaactagttctatt

SEQ ID NO: 35505 - DNA, 80 bp, synthetic construct; identical to SEQ ID NO: 12763
  source 1..80: mol_type = other DNA

SEQ ID NO: 35506 - DNA, 80 bp, synthetic construct
  source 1..80: mol_type = other DNA
gtattgcccatttcctaaacattaagaggaccaactctttctaaagcttaaaaatataaatgccttgacctttttcagtc

SEQ ID NO: 35507 - DNA, 80 bp, synthetic construct
  source 1..80: mol_type = other DNA
aagtattttcagaaatttgtgtttaatatatttctttggtctaaggctatatagagaggctactagagcactgtgcccat

SEQ ID NO: 35508 - DNA, 80 bp, synthetic construct
  source 1..80: mol_type = other DNA
atattccatttttacttaacagctcacacctcccaggtgggtttaggaaatgaacagaatagtttgacagccttactcct

SEQ ID NO: 35509 - DNA, 80 bp, synthetic construct; identical to SEQ ID NO: 12764
  source 1..80: mol_type = other DNA

SEQ ID NO: 35510 - DNA, 80 bp, synthetic construct
  source 1..80: mol_type = other DNA
cgataagtgaactattatcaaaggctgaataatgaaatgatcatgtgtgctggaagaatggtgacctgtgttatgcagca

SEQ ID NO: 35511 - DNA, 80 bp, synthetic construct
  source 1..80: mol_type = other DNA
tggtgacacatgcctgtaatcccagctactcaggagactgaggcaggagaattgcttgaacccaggagatggaggttatg

SEQ ID NO: 35512 - DNA, 80 bp, synthetic construct
  source 1..80: mol_type = other DNA
attcagaatgtcagttggttttattgcatgtgataaggtatattgataaggagagaatcaaaacagcactcacccatttg

SEQ ID NO: 35513 - DNA, 80 bp, synthetic construct; identical to SEQ ID NO: 12765
  source 1..80: mol_type = other DNA

SEQ ID NO: 35514 - DNA, 80 bp, synthetic construct
  source 1..80: mol_type = other DNA
cagcagagagtagagtataaccagacttaaagaaaacacacaaagttttacagtaagtttcataggtaaaatagccatca

SEQ ID NO: 35515 - DNA, 80 bp, synthetic construct
  source 1..80: mol_type = other DNA
agggtagagcaaaagggtaccatgtgaaaaaataaacagggaagttactcccaaggagcaaaggcaggatttaagaaaca

SEQ ID NO: 35516 - DNA, 80 bp, synthetic construct; identical to SEQ ID NO: 12766
  source 1..80: mol_type = other DNA

SEQ ID NO: 35517 - DNA, 80 bp, synthetic construct
  source 1..80: mol_type = other DNA
tttccctactctgtgaatttaaactgagacaaactgctttgaccaagagaatgtggcagaaataatggtatgctcattct

SEQ ID NO: 35518 - DNA, 80 bp, synthetic construct
  source 1..80: mol_type = other DNA
aatcccaaatgtgtgaaagagttcagtcaagataagcagaacaacctacacaattcagccctgacaggatgcataagtat

SEQ ID NO: 35519 - DNA, 80 bp, synthetic construct
  source 1..80: mol_type = other DNA
tcagcaatcctctctttaaatagagccaaaactagataatcattttaggttctttcaacttgactgtgtttttcctgcca

SEQ ID NO: 35520 - DNA, 80 bp, synthetic construct
  source 1..80: mol_type = other DNA
ttttgggaatctgagtagtattctcataaatatgtacatgtatctcttcctaattatgaaatatcttgagcaagcagccc

SEQ ID NO: 35521 - DNA, 80 bp, synthetic construct; identical to SEQ ID NO: 12767
  source 1..80: mol_type = other DNA

SEQ ID NO: 35522 - DNA, 80 bp, synthetic construct
  source 1..80: mol_type = other DNA
ggaataattcaattataaaagctaaatttctgctacaagatgcataaatgctccacattttttgctgtggctaaaaactg

SEQ ID NO: 35523 - DNA, 80 bp, synthetic construct
  source 1..80: mol_type = other DNA
gatacaataaatatttgtcatattttggcaataaaataaatgggaaataaaattatatttataatattaaccacgatata

SEQ ID NO: 35524 - DNA, 80 bp, synthetic construct; identical to SEQ ID NO: 12768
  source 1..80: mol_type = other DNA

SEQ ID NO: 35525 - DNA, 80 bp, synthetic construct
  source 1..80: mol_type = other DNA
aagtaatagtcaacaaggtggtaacaggcttcttctttaccttgaaaaaacactatttttaacatttttcaaccagagaa

SEQ ID NO: 35526 - DNA, 80 bp, synthetic construct
  source 1..80: mol_type = other DNA
acattttcaaagagtaggacaagatctcagaactagccctcaaaatatttggtggaaaatatttcaaagtgaaatgtgaa

SEQ ID NO: 35527 - DNA, 80 bp, synthetic construct
  source 1..80: mol_type = other DNA
tataggaaacatttaaaagaagttatctttccacttcggaagtaccatttagggtgggaatataaggtggtgaggacatg

SEQ ID NO: 35528 - DNA, 80 bp, synthetic construct; identical to SEQ ID NO: 12769
  source 1..80: mol_type = other DNA

SEQ ID NO: 35529 - DNA, 80 bp, synthetic construct
  source 1..80: mol_type = other DNA
ttggccactttacaggggtatgatatatgacagcacatactgattttagctgttagaaacaaataagatgttatgattta

SEQ ID NO: 35530 - DNA, 80 bp, synthetic construct
  source 1..80: mol_type = other DNA
catgtaaaggagaaaaactgtttggaatgtaaagatattaataactgtagtgactaacactgtacatgagaacaaactgt

SEQ ID NO: 35531 - DNA, 80 bp, synthetic construct
  source 1..80: mol_type = other DNA
acttcataatcctcttgcaaataaaaaatttcattgtaacaatttatttgctgcacacgtctctttcaaatattttattt

SEQ ID NO: 35532 - DNA, 80 bp, synthetic construct
  source 1..80: mol_type = other DNA
catatgaaaaaatgtgtaatctagttattaaggaaattaaatcaaaatgtacgttttctagcatgaaatttgctaacatt

SEQ ID NO: 35533 - DNA, 80 bp, synthetic construct; identical to SEQ ID NO: 12770
  source 1..80: mol_type = other DNA

SEQ ID NO: 35534 - DNA, 80 bp, synthetic construct
  source 1..80: mol_type = other DNA
cctatagagacatgcatatatgtgcacaaaaagacatgcatacagatttatttcaaataaatgaaggagatgaaattaac

SEQ ID NO: 35535 - DNA, 80 bp, synthetic construct
  source 1..80: mol_type = other DNA
tttaaaactaattatataacccatatttggggattaagaatgtttctgacttcatctgtcaatatgatagacagtacgtt

SEQ ID NO: 35536 - DNA, 80 bp, synthetic construct
  source 1..80: mol_type = other DNA
tatctgctacatggtcttttcttatgctcaacttatttccatttcttaataaaaggaaaaggctataaaatttagtaagt

SEQ ID NO: 35537 - DNA, 80 bp, synthetic construct
  source 1..80: mol_type = other DNA
cattctcatcagggaatacaaggaaaatggagaaaataagacaagactctcaattttgccactcagcatcctctgtattc

SEQ ID NO: 35538 - DNA, 80 bp, synthetic construct; identical to SEQ ID NO: 12771
  source 1..80: mol_type = other DNA

SEQ ID NO: 35539 - DNA, 80 bp, synthetic construct
  source 1..80: mol_type = other DNA
gtagaatgataactagggagaacaggaaaattgagccaaagcatattcagtatagaagaatctcatacatgcttacaaat

SEQ ID NO: 35540 - DNA, 80 bp, synthetic construct
  source 1..80: mol_type = other DNA
aaagttgaaaagctgagaggccagatttctgaagaggatggatggtctctgatagagctctatacagatgattttccatg

SEQ ID NO: 35541 - DNA, 80 bp, synthetic construct
  source 1..80: mol_type = other DNA
gctctgaaataaacactgagttcttacaatgcctataccccgctaattttcaatagggtaacttatgtattcttacatca

SEQ ID NO: 35542 - DNA, 80 bp, synthetic construct; identical to SEQ ID NO: 12772
  source 1..80: mol_type = other DNA

SEQ ID NO: 35543 - DNA, 80 bp, synthetic construct
  source 1..80: mol_type = other DNA
agacacaggcagctggacattgagtggaacacaccagcagaaaaacacactgacagacactgtgtttgccatcgatggca

SEQ ID NO: 35544 - DNA, 80 bp, synthetic construct
  source 1..80: mol_type = other DNA
atcccccttctagctccccatccatctgctgacagttacttccaccactcaataaaaaactttgcacccatcttccaagc

SEQ ID NO: 35545 - DNA, 80 bp, synthetic construct
  source 1..80: mol_type = other DNA
ggacacctaagctgaaagcacactgtaacacacgttcactggagctttgggagccgtaaacacccaaccctagatgctgc

SEQ ID NO: 35546 - DNA, 80 bp, synthetic construct; identical to SEQ ID NO: 12773
  source 1..80: mol_type = other DNA

SEQ ID NO: 35547 - DNA, 80 bp, synthetic construct
  source 1..80: mol_type = other DNA
aagagttttgctagaggctgtggcaatgttactaggtaaaatgagcatttcactcagctgccaaaggtgcaaatcagacc

SEQ ID NO: 35548 - DNA, 80 bp, synthetic construct
  source 1..80: mol_type = other DNA
ttttaaggaacacatgaaatcacattctactgagagtttcaagtgtgaaatacgcaataaaaagtatcttctggagagca

SEQ ID NO: 35549 - DNA, 80 bp, synthetic construct; identical to SEQ ID NO: 12774
  source 1..80: mol_type = other DNA

SEQ ID NO: 35550 - DNA, 80 bp, synthetic construct
  source 1..80: mol_type = other DNA
tccattcaagtgtaaaatattttccaggtttttttcctaataggttagataaatggtatattttctgaacccctgaatgt

SEQ ID NO: 35551 - DNA, 80 bp, synthetic construct
  source 1..80: mol_type = other DNA
tatggaagtgaataggtgaagccacctaaatttccccccctgctcttggtaacctatctgtcccttttgcctacatattt

SEQ ID NO: 35552 - DNA, 80 bp, synthetic construct
  source 1..80: mol_type = other DNA
atacctatttctgcctccctactctcgattcttaactctgctctgtttttactcaacatgttatcatctcccaacatatt

SEQ ID NO: 35553 - DNA, 80 bp, synthetic construct; identical to SEQ ID NO: 12775
  source 1..80: mol_type = other DNA

SEQ ID NO: 35554 - DNA, 80 bp, synthetic construct
  source 1..80: mol_type = other DNA
caaaaacatagaatgaataagatctagcatttgatagtacaacagagtgtctcacataattttaagctttatcattttca

SEQ ID NO: 35555 - DNA, 80 bp, synthetic construct
  source 1..80: mol_type = other DNA
attttgctcctttttcaaagaagtcatgctttcatgaactgtgctgaagtcctaaaattacgccaaggtgtgtccatatc

SEQ ID NO: 35556 - DNA, 80 bp, synthetic construct
  source 1..80: mol_type = other DNA
attattttcccaagacgttctctctagtttttctatgcttttcaacatctgcctgcatgtagaagaagaagtagtggaga

SEQ ID NO: 35557 - DNA, 80 bp, synthetic construct; identical to SEQ ID NO: 12776
  source 1..80: mol_type = other DNA

SEQ ID NO: 35558 - DNA, 80 bp, synthetic construct
  source 1..80: mol_type = other DNA
gtgaaattatctaaaaatactataggaagtgtggatatcatttaccatgatggaactactaataactgcaacaattattt

SEQ ID NO: 35559 - DNA, 80 bp, synthetic construct
  source 1..80: mol_type = other DNA
tttcacttaccatagagacaagattatttagtcatgaaaatgactatccattcacttatgagcaactacaaagctgtttc

SEQ ID NO: 35560 - DNA, 80 bp, synthetic construct
  source 1..80: mol_type = other DNA
tgtacaaatgagagactggaaccacagaacttttgacacctattcaagatttcaaagccagctaaccctagaacacaggt

SEQ ID NO: 35561 - DNA, 80 bp, synthetic construct; identical to SEQ ID NO: 12777
  source 1..80: mol_type = other DNA

SEQ ID NO: 35562 - DNA, 80 bp, synthetic construct
  source 1..80: mol_type = other DNA
aggtcaggagtttgagaccagcctggccaacatggtgcaaccccatctctactaaaaatacaaaaattagccaggcatgg

SEQ ID NO: 35563 - DNA, 80 bp, synthetic construct
  source 1..80: mol_type = other DNA
gtaagaccctgtcaaaaaaaaaaaaaaaaaagaaagaaagaaagaaagagagagagagagagagagagagagagagaggg

SEQ ID NO: 35564 - DNA, 80 bp, synthetic construct
  source 1..80: mol_type = other DNA
attaacaagaaaaaaaatccagagcccaagtaactagctcaagtttgcaaagctaatgagtgagaaggtaagaaattaaa

SEQ ID NO: 35565 - DNA, 80 bp, synthetic construct
  source 1..80: mol_type = other DNA
ttaaaacatgtaaactcacttactacttaaatgtatcaatgaccataacaaaaggcatttattttcattgctgtatcaat

SEQ ID NO: 35566 - DNA, 80 bp, synthetic construct; identical to SEQ ID NO: 12778
  source 1..80: mol_type = other DNA

SEQ ID NO: 35567 - DNA, 80 bp, synthetic construct
  source 1..80: mol_type = other DNA
acatttaaaagggtatttttagatttggaacaaaataataattttgacatggtttcacaaggatttttaaatccaagaat

SEQ ID NO: 35568 - DNA, 80 bp, synthetic construct
  source 1..80: mol_type = other DNA
tgcaatagcttagatttgaagaaagtacagggaaaataaagactaaaattgaaaaaagactgtaaacataaatacactag

SEQ ID NO: 35569 - DNA, 80 bp, synthetic construct; identical to SEQ ID NO: 12779
  source 1..80: mol_type = other DNA

SEQ ID NO: 35570 - DNA, 80 bp, synthetic construct
  source 1..80: mol_type = other DNA
aagaatttagaagttgaacaactagaaccaactctaacttttactagctgtagggccatgatcagttacttcatctctag

SEQ ID NO: 35571 - DNA, 80 bp, synthetic construct
  source 1..80: mol_type = other DNA
tacatttaatgcagttgtgttctcccacaaaagcaatttttaaatcagtgatgtcttggaattgaggaaaaagagtatta

SEQ ID NO: 35572 - DNA, 80 bp, synthetic construct
  source 1..80: mol_type = other DNA
gaaactgatgaacaaataaaggctatgattaagacttcgacattgttgttttgagaaaaaagttgacaattcagtaaact

SEQ ID NO: 35573 - DNA, 80 bp, synthetic construct
  source 1..80: mol_type = other DNA
ttgctgtttgcccaaagttttaatcaagagagttcttacatgtggataacaatgatgacatctgtaaaagctagtgccac

SEQ ID NO: 35574 - DNA, 80 bp, synthetic construct; identical to SEQ ID NO: 12780
  source 1..80: mol_type = other DNA

SEQ ID NO: 35575 - DNA, 80 bp, synthetic construct
  source 1..80: mol_type = other DNA
agaatacagcaaggtaaagacaatgaaaatatgaacgtatctttaacataacagcagaacaaataactaacaggcattat

SEQ ID NO: 35576 - DNA, 80 bp, synthetic construct
  source 1..80: mol_type = other DNA
tacagcagtcttagctacactgctatggttggctaaacctccacctgtatcttcattatagagttctatttccatccact

SEQ ID NO: 35577 - DNA, 80 bp, synthetic construct; identical to SEQ ID NO: 12781
  source 1..80: mol_type = other DNA

SEQ ID NO: 35578 - DNA, 80 bp, synthetic construct
  source 1..80: mol_type = other DNA
atcaacctgaatcacatcctaaatgtatatgtgatcctaatgatgtgataaagatcactgagttcctgagagtatccatg

SEQ ID NO: 35579 - DNA, 80 bp, synthetic construct
  source 1..80: mol_type = other DNA
tcagcactaaataatatttcaaatgcttataaatttagatacagcttagctcaataaccacaccatgcatgtccacagag

SEQ ID NO: 35580 - DNA, 80 bp, synthetic construct
  source 1..80: mol_type = other DNA
ctttggtaaatctcttagaccgaaaagtgcaacactggaaggtattagtacaaggtaaccatgtagggacagaaagataa

SEQ ID NO: 35581 - DNA, 80 bp, synthetic construct; identical to SEQ ID NO: 12782
  source 1..80: mol_type = other DNA

SEQ ID NO: 35582 - DNA, 80 bp, synthetic construct
  source 1..80: mol_type = other DNA
gaggactaagaattatacatttgctgggggcactgccatgtatactcactttacttcccattttactaaactgtattcta

SEQ ID NO: 35583 - DNA, 80 bp, synthetic construct
  source 1..80: mol_type = other DNA
ctttgatacctttgacagaataaatggtcaaactcctttgttacttttgtctgtaggagtcaggactgagaaagtattct

SEQ ID NO: 35584 - DNA, 80 bp, synthetic construct
  source 1..80: mol_type = other DNA
agcaccaaatgctagctgttataatccctgtgttactcatctctcaaatgtcccctttctatttcttacagagccaacgc

SEQ ID NO: 35585 - DNA, 80 bp, synthetic construct; identical to SEQ ID NO: 12783
  source 1..80: mol_type = other DNA

SEQ ID NO: 35586 - DNA, 80 bp, synthetic construct
  source 1..80: mol_type = other DNA
tctcacctcagccttctgagtagctgggattacaggcatccaccaccacacccagctaattattgtgttttagagatggg

SEQ ID NO: 35587 - DNA, 80 bp, synthetic construct
  source 1..80: mol_type = other DNA
tgaaactggaaaagacaaaaaaagttgcagattcggaagacaactcattcagagaaaggctacacctttcttatggtcag

SEQ ID NO: 35588 - DNA, 80 bp, synthetic construct
  source 1..80: mol_type = other DNA
ggcttaataagcagggaggaaactacactggcagtattatcctctcactttctttttgctgttagtaatagaagtaatag

SEQ ID NO: 35589 - DNA, 80 bp, synthetic construct; identical to SEQ ID NO: 12784
  source 1..80: mol_type = other DNA

SEQ ID NO: 35590 - DNA, 80 bp, synthetic construct
  source 1..80: mol_type = other DNA
ctctaggggatatatgaagtagatctctagatgaagaggacataaagaacaagagaacacacttaagtctctaagtgttt

SEQ ID NO: 35591 - DNA, 80 bp, synthetic construct
  source 1..80: mol_type = other DNA
tggaagcactctctctcataaatgatctgtgttcaaatctacctacctctctcctatttccttttcagacagtctcttct

SEQ ID NO: 35592 - DNA, 80 bp, synthetic construct
  source 1..80: mol_type = other DNA
acctacctctctcctatttccttttcagacagtctcttctaactactgtgaaaaacatgtgagggatgcatattaccaga

SEQ ID NO: 35593 - DNA, 80 bp, synthetic construct
  source 1..80: mol_type = other DNA
agatgctaggaaaacaattcctgccctggttacttttgtgtgaggatataatgtgcttaaaagcaagaaagacaataagc

SEQ ID NO: 35594 - DNA, 80 bp, synthetic construct; identical to SEQ ID NO: 12785
  source 1..80: mol_type = other DNA

SEQ ID NO: 35595 - DNA, 80 bp, synthetic construct
  source 1..80: mol_type = other DNA
ttctatctgtgtgttcttcatactgtcatacaaatcagtttggatcactgttttatgttatgcatattattcaatttgaa

SEQ ID NO: 35596 - DNA, 80 bp, synthetic construct
  source 1..80: mol_type = other DNA
gcagtgagtttcaagcacatcacacaccctgtgtttattaatagatctttatgctggccacaagagagattatctttttt

SEQ ID NO: 35597 - DNA, 80 bp, synthetic construct
  source 1..80: mol_type = other DNA
gctgggactacaggtgctggccaccacgcccagctaattttttgtattttgtagtagagatggggtttcactgtgttagc

SEQ ID NO: 35598 - DNA, 80 bp, synthetic construct
  source 1..80: mol_type = other DNA
tcagccaaattaaaaaaaaaaaaaagaaagaaaagggattcaacttctctcccaaaatacgcaatttaagacaatcagaa

SEQ ID NO: 35599 - DNA, 80 bp, synthetic construct; identical to SEQ ID NO: 12786
  source 1..80: mol_type = other DNA

SEQ ID NO: 35600 - DNA, 80 bp, synthetic construct
  source 1..80: mol_type = other DNA
atcttattttataccaaaggaccatccattcaatatttatccttctcatcctggaaatgtgctcacacacaagatgaggg

SEQ ID NO: 35601 - DNA, 80 bp, synthetic construct
  source 1..80: mol_type = other DNA
tctgaaggccaatattaaattacacattctgaaggcaatgagttaacttatgttatcttggcaacaaggagttattactt

SEQ ID NO: 35602 - DNA, 80 bp, synthetic construct; identical to SEQ ID NO: 12787
  source 1..80: mol_type = other DNA

SEQ ID NO: 35603 - DNA, 80 bp, synthetic construct
  source 1..80: mol_type = other DNA
cctctcatcttgtttcacagatttcccagtaggatacttgatattggcagtgaaaatatttgaaagcataacttaataag

SEQ ID NO: 35604 - DNA, 80 bp, synthetic construct
  source 1..80: mol_type = other DNA
ttagaataatggcagtcatccatggcaaagttcccctgctagtctgtaatacgtgaagaagaagaaagaggtctatttac

SEQ ID NO: 35605 - DNA, 80 bp, synthetic construct
  source 1..80: mol_type = other DNA
ttaagggaaattctgaacaaacagaagttccgtcgaacaaggctataacaataatagagcacttttgaaaactaagttaa

SEQ ID NO: 35606 - DNA, 80 bp, synthetic construct; identical to SEQ ID NO: 12788
  source 1..80: mol_type = other DNA

SEQ ID NO: 35607 - DNA, 80 bp, synthetic construct
  source 1..80: mol_type = other DNA
tggggaagaaacaaagctacagaggaggcacattaacagagacttgggaccttcattcccttcccttgaatctggactac

SEQ ID NO: 35608 - DNA, 80 bp, synthetic construct
  source 1..80: mol_type = other DNA
atatgagagagaagaaagatgccagataccttagctgacgatcagtaccaactgtcaactacatgagagaccatcttggt

SEQ ID NO: 35609 - DNA, 80 bp, synthetic construct
  source 1..80: mol_type = other DNA
agcaattgataactaacatgaagtgagaaaaaagtgatcaaggagtacataggcctatagaatccaacctgattttccca

SEQ ID NO: 35610 - DNA, 80 bp, synthetic construct
  source 1..80: mol_type = other DNA
tgttgtttgtttccaagcaaactctggctctatggcccaggcaccatctcggctcactgcaacctccgcctcccaggttc

SEQ ID NO: 35611 - DNA, 80 bp, synthetic construct; identical to SEQ ID NO: 12789
  source 1..80: mol_type = other DNA

SEQ ID NO: 35612 - DNA, 80 bp, synthetic construct
  source 1..80: mol_type = other DNA
aatataactaatcacatgagctgaccctccctcagaaatgctttatatgagacacagtttaatgatatggcttctgacta

SEQ ID NO: 35613 - DNA, 80 bp, synthetic construct
  source 1..80: mol_type = other DNA
ggctttcaccctcagaaaataagtcatattatttattgtagatgataaggaaaattttaaatagccttgttttttctgtg

SEQ ID NO: 35614 - DNA, 80 bp, synthetic construct; identical to SEQ ID NO: 12790
  source 1..80: mol_type = other DNA

SEQ ID NO: 35615 - DNA, 80 bp, synthetic construct
  source 1..80: mol_type = other DNA
caaaaaacgaagcccttcaagattgcaagggagaaatatcaagttaaagaacagagaaaaaccgcaaagcatcacttgag

SEQ ID NO: 35616 - DNA, 80 bp, synthetic construct
  source 1..80: mol_type = other DNA
tctggtattggagaaaaatgatcaattctgtcttaaagttggcctaggttcaaaacgaatactcttcatggacccagctg

SEQ ID NO: 35617 - DNA, 80 bp, synthetic construct
  source 1..80: mol_type = other DNA
attgaaaaggatgatacaaagcccagaaggattctacaccagacgaccctagagagaactgattttctacagaatttaca

SEQ ID NO: 35618 - DNA, 80 bp, synthetic construct; identical to SEQ ID NO: 12791
  source 1..80: mol_type = other DNA

SEQ ID NO: 35619 - DNA, 80 bp, synthetic construct
  source 1..80: mol_type = other DNA
attttaatcaaatttgtaagcatgattaaagattatctacaattttcacgtccttatttgctttagtataagctgctatc

SEQ ID NO: 35620 - DNA, 80 bp, synthetic construct
  source 1..80: mol_type = other DNA
ataatgtacataaacacagatttttctcataagacatcaggattacccacagttctcaagtggcatgattcacattttta

SEQ ID NO: 35621 - DNA, 80 bp, synthetic construct
  source 1..80: mol_type = other DNA
caaatgtccatacatttccaaatgtcctccaaaagacaggaacacccagtcccccagttaagaactactagactcacaat

SEQ ID NO: 35622 - DNA, 80 bp, synthetic construct; identical to SEQ ID NO: 12792
  source 1..80: mol_type = other DNA

SEQ ID NO: 35623 - DNA, 80 bp, synthetic construct
  source 1..80: mol_type = other DNA
taatttatcctattcagtttcccacactgaggacagagaaaaaacaagcattttatacacctgtctaaagctattctgat

SEQ ID NO: 35624 - DNA, 80 bp, synthetic construct
  source 1..80: mol_type = other DNA
tgcgaagcagagtgctcataatattttgagtttgagaaaccaattacaaaaaaaaactatatttttaaatgctttagctg

SEQ ID NO: 35625 - DNA, 80 bp, synthetic construct
  source 1..80: mol_type = other DNA
ttaatcatagatactcctgacgccaaactagtcatatggccttgcccatctcccaaagagaaaaatactgctactgagct

SEQ ID NO: 35626 - DNA, 80 bp, synthetic construct
  source 1..80: mol_type = other DNA
attttttagtagagacggggtttcaccatgttggtcaggccgatcttgaactattgacctcaggtgatctgtccacctca

SEQ ID NO: 35627 - DNA, 80 bp, synthetic construct; identical to SEQ ID NO: 12793
  source 1..80: mol_type = other DNA

SEQ ID NO: 35628 - DNA, 80 bp, synthetic construct
  source 1..80: mol_type = other DNA
aacagggtaagttggacaaactgccacagccaagagaagcctcagaagacataacacgtaaatataatttggtatcctgg

SEQ ID NO: 35629 - DNA, 80 bp, synthetic construct
  source 1..80: mol_type = other DNA
tataagatgttaaagataaaggaaactgacttggtgtaggtgggaaatctctatatagtgtactgtctctgctatttttc

SEQ ID NO: 35630 - DNA, 80 bp, synthetic construct; identical to SEQ ID NO: 12794
  source 1..80: mol_type = other DNA

SEQ ID NO: 35631 - DNA, 80 bp, synthetic construct
  source 1..80: mol_type = other DNA
aaaagatcaatgccacagaatacaaagtccagaaagagacccacaaatatactgacaactggttttcataaaagtgcaaa

SEQ ID NO: 35632 - DNA, 80 bp, synthetic construct
  source 1..80: mol_type = other DNA
aacacaaaactacacaacttctagaggaaaacatggcagaaaatatttgcaaccctagggtagacaaagatttttttaga

SEQ ID NO: 35633 - DNA, 80 bp, synthetic construct
  source 1..80: mol_type = other DNA
gtttgtttgtttgagacagggtgtcactccagtcgcccaagctagagtgctgtggtgcaatcatggctcactgcagcctc

SEQ ID NO: 35634 - DNA, 80 bp, synthetic construct; identical to SEQ ID NO: 12795
  source 1..80: mol_type = other DNA

SEQ ID NO: 35635 - DNA, 80 bp, synthetic construct
  source 1..80: mol_type = other DNA
ataaacaaatgtcctaaacagacacattaccaaataagacatacagatggcataaaacacatgaaaagatattcagcatc

SEQ ID NO: 35636 - DNA, 80 bp, synthetic construct
  source 1..80: mol_type = other DNA
actaccattgatatcaatcttgattgcctggctagttagtatttttcaggcttctcttctgtaaagttactcttttccaa

SEQ ID NO: 35637 - DNA, 80 bp, synthetic construct
  source 1..80: mol_type = other DNA
aatttttatgctatcttaaatggtattgctttaagttttaatttttaattgtttgttgttagtgattagaatatatttga

SEQ ID NO: 35638 - DNA, 80 bp, synthetic construct; identical to SEQ ID NO: 12796
  source 1..80: mol_type = other DNA

SEQ ID NO: 35639 - DNA, 80 bp, synthetic construct
  source 1..80: mol_type = other DNA
catgtatcaattttctaactgctaaaagtgtataatttatagtgttagaatgataaataaatacataattaactactcaa

SEQ ID NO: 35640 - DNA, 80 bp, synthetic construct
  source 1..80: mol_type = other DNA
attttacctttgtcttagcaacttcactttttgacatagtgaacaactcatatttcacatgtactcaccattgtagcttt

SEQ ID NO: 35641 - DNA, 80 bp, synthetic construct
  source 1..80: mol_type = other DNA
acatctcattttgttgtgccctaggtataatgaaacactctttttattataataaaatgcaataaaaagtgttcttccct

SEQ ID NO: 35642 - DNA, 80 bp, synthetic construct
  source 1..80: mol_type = other DNA
tacagctgaaaattcatttgtacacatatctcttttcatccacataccaattctgttaggtgaatatacttaaccccatt

SEQ ID NO: 35643 - DNA, 80 bp, synthetic construct; identical to SEQ ID NO: 12797
  source 1..80: mol_type = other DNA

SEQ ID NO: 35644 - DNA, 80 bp, synthetic construct
  source 1..80: mol_type = other DNA
tacatatatgagatgccttcaccccacttcaataaaactctttcttaatgccaatataaaaaatactctacattaattgg

SEQ ID NO: 35645 - DNA, 80 bp, synthetic construct
  source 1..80: mol_type = other DNA
attacactaactctgtgggaacaatggtaatttcacagtagctcacgttactgttatcaccttatatcctgataactgtg

SEQ ID NO: 35646 - DNA, 80 bp, synthetic construct; identical to SEQ ID NO: 12798
  source 1..80: mol_type = other DNA

SEQ ID NO: 35647 - DNA, 80 bp, synthetic construct
  source 1..80: mol_type = other DNA
caggcatgcagctgacagctcggcaaccctgaggtataaacaaagataccagacatattttttgaaataattttgctcaa

SEQ ID NO: 35648 - DNA, 80 bp, synthetic construct
  source 1..80: mol_type = other DNA
agaacataactacatgacatcataagaagtcctgaattagaagcgtatatttgaaaggtcatgcatcctgagctgccaac

SEQ ID NO: 35649 - DNA, 80 bp, synthetic construct
  source 1..80: mol_type = other DNA
tatattagtatgtatgttcctgtactaaaccaagcatcatgaggccagcactattttgccatttttcagaaaaaaaatat

SEQ ID NO: 35650 - DNA, 80 bp, synthetic construct; identical to SEQ ID NO: 12799
  source 1..80: mol_type = other DNA

SEQ ID NO: 35651 - DNA, 80 bp, synthetic construct
  source 1..80: mol_type = other DNA
cctaacctatatgtagagtcctttgctgtgtcatctatttcttcagaattattctcctaattcatatgtctggatagtct

SEQ ID NO: 35652 - DNA, 80 bp, synthetic construct
  source 1..80: mol_type = other DNA
aatttatcacttactcagtgtatgaccatgggcaaatatcttcacctcaatcctgtgaggcaggtactattattctaccc

SEQ ID NO: 35653 - DNA, 80 bp, synthetic construct
  source 1..80: mol_type = other DNA
taagaataaataagataatccatacaaagtatttaacacattattgaaaaattaaatgatcaaaataaagcttgttgtta

SEQ ID NO: 35654 - DNA, 80 bp, synthetic construct
  source 1..80: mol_type = other DNA
tgtaccagataataaaggtggtattgaaaaaagaataggcattgtaacaggcagacaggagtataaagtccagccttgcc

SEQ ID NO: 35655 - DNA, 80 bp, synthetic construct; identical to SEQ ID NO: 12800
  source 1..80: mol_type = other DNA

SEQ ID NO: 35656 - DNA, 80 bp, synthetic construct
  source 1..80: mol_type = other DNA
atgaagtttatttattggagtggcttcagtatttcttgagaaacacaaatgatgaccctgatttgtatgatcaatcagca

SEQ ID NO: 35657 - DNA, 80 bp, synthetic construct
  source 1..80: mol_type = other DNA
acctgaaataaacatatgttgctactctgtgatttggtctttatcccagtctgacccatttcttgagactgttacctcaa

SEQ ID NO: 35658 - DNA, 80 bp, synthetic construct
  source 1..80: mol_type = other DNA
tgaaaaagataatcttcaataaatgcaggtaaagtattttatacctgcagcattgaattgttccactggagggtagcagg

SEQ ID NO: 35659 - DNA, 80 bp, synthetic construct; identical to SEQ ID NO: 12801
  source 1..80: mol_type = other DNA

SEQ ID NO: 35660 - DNA, 80 bp, synthetic construct
  source 1..80: mol_type = other DNA
atacctacttcataggagtgtcacaagaattgagtaaatatatgtaaaatatttagaaaagttgtttgcacatagtaggt

SEQ ID NO: 35661 - DNA, 80 bp, synthetic construct
  source 1..80: mol_type = other DNA
cccccttgcagttcttccatcatgcctttcttagaatatcctaagtctagatgaaaatatccatgtccacggtgaaaacc

SEQ ID NO: 35662 - DNA, 80 bp, synthetic construct
  source 1..80: mol_type = other DNA
cctattccattccttcttcctcaccagataacctttctttctacttctgtgacaaaacaaagttttcaagtggcactccc

SEQ ID NO: 35663 - DNA, 80 bp, synthetic construct; identical to SEQ ID NO: 12802
  source 1..80: mol_type = other DNA

SEQ ID NO: 35664 - DNA, 80 bp, synthetic construct
  source 1..80: mol_type = other DNA
atctccatttcctttctttgcattcatccatccattcattctacaacctattccaattgttatggactgaatgtctgtgc

SEQ ID NO: 35665 - DNA, 80 bp, synthetic construct
  source 1..80: mol_type = other DNA
gacaatactctgaaagtcagaaagagggccttcaccaagaacctctactggctccttgatctgaaactcctaacctttag

SEQ ID NO: 35666 - DNA, 80 bp, synthetic construct; identical to SEQ ID NO: 12803
  source 1..80: mol_type = other DNA

SEQ ID NO: 35667 - DNA, 80 bp, synthetic construct
  source 1..80: mol_type = other DNA
aattccaattttatatggtagccaaaaaaggcgaacctgagaaggtaacatttgaggaaagaactgaaggatgagaggaa

SEQ ID NO: 35668 - DNA, 80 bp, synthetic construct
  source 1..80: mol_type = other DNA
ctctcccttattgaaatttcaaccatgtgcagtaactattcactgcttagcatgtttttttccaatttctgtagttcttg

SEQ ID NO: 35669 - DNA, 80 bp, synthetic construct
  source 1..80: mol_type = other DNA
aattgagcttttactttgtaaagggcactatgtctaacagaaaaaatgatgcaaagaagccagattgtagtgggttgagg

SEQ ID NO: 35670 - DNA, 80 bp, synthetic construct; identical to SEQ ID NO: 12804
  source 1..80: mol_type = other DNA

SEQ ID NO: 35671 - DNA, 80 bp, synthetic construct
  source 1..80: mol_type = other DNA
taggaactttggacttacacaataagaaatatataaggaaccacagagtcagaagcagcttgtactactcaaagcacaat

SEQ ID NO: 35672 - DNA, 80 bp, synthetic construct
  source 1..80: mol_type = other DNA
tatagaagtcccagttctcccacttatccttcttgccttggttgaactttctaaaacctagatctcttgccattaaaagt

SEQ ID NO: 35673 - DNA, 80 bp, synthetic construct
  source 1..80: mol_type = other DNA
cctcaaactaaactgaactggcaagaaacagataccagcaaaaaactgatacaggcaaagtttaaatgattcaaagttta

SEQ ID NO: 35674 - DNA, 80 bp, synthetic construct; identical to SEQ ID NO: 12805
  source 1..80: mol_type = other DNA

SEQ ID NO: 35675 - DNA, 80 bp, synthetic construct
  source 1..80: mol_type = other DNA
atattcctgaattatcatttgtcatgggtaaaaatagtatgacagaaaaaaattgagacattaatcaaaaaggtgtttta

SEQ ID NO: 35676 - DNA, 80 bp, synthetic construct
  source 1..80: mol_type = other DNA
ttttaagaaaaagattaacagcatatatttcattattaaaagactacaaagttccccttctgattattaaatgaaatatg

SEQ ID NO: 35677 - DNA, 80 bp, synthetic construct
  source 1..80: mol_type = other DNA
ttgatgaatttaaagtgttaattcagaaaatacttggcaactccacctcatatgtacctggacttaaaatatcaagacca

SEQ ID NO: 35678 - DNA, 80 bp, synthetic construct
  source 1..80: mol_type = other DNA
aaacaaaatttgttgttatattaaacgttatttttcttgacccttattctcatttgttatgaatatctctgagggaaaaa

SEQ ID NO: 35679 - DNA, 80 bp, synthetic construct; identical to SEQ ID NO: 12806
  source 1..80: mol_type = other DNA

SEQ ID NO: 35680 - DNA, 80 bp, synthetic construct
  source 1..80: mol_type = other DNA
agtcaaagtcatttgattgtgttcacccaagtatagcatactcaatgatacagaactctctccagagaaaagagggaatt

SEQ ID NO: 35681 - DNA, 80 bp, synthetic construct
  source 1..80: mol_type = other DNA
aggatttgtaaacctattcttttgagcattgaactgagttgacaggacaaagttatccttaattattatttaactagacc

SEQ ID NO: 35682 - DNA, 80 bp, synthetic construct
  source 1..80: mol_type = other DNA
tgaaatataaattgaaaagtaaggatcacagagattcagaggcttactaaaaattacagtcagtcccactgacagagcca

SEQ ID NO: 35683 - DNA, 80 bp, synthetic construct; identical to SEQ ID NO: 12807
  source 1..80: mol_type = other DNA

SEQ ID NO: 35684 - DNA, 80 bp, synthetic construct
  source 1..80: mol_type = other DNA
tcaatcaatccatgactttgattaccaaaacaatgtgctgaggtagacacagaaaggaatttcaccttctaggcataatg

SEQ ID NO: 35685 - DNA, 80 bp, synthetic construct
  source 1..80: mol_type = other DNA
gctaaggagaaatcagcaaaacgtttaatgatcaccggcacaggcggaggggtgttataattggaaaattaagagaacaa

SEQ ID NO: 35686 - DNA, 80 bp, synthetic construct; identical to SEQ ID NO: 12808
  source 1..80: mol_type = other DNA

SEQ ID NO: 35687 - DNA, 80 bp, synthetic construct
  source 1..80: mol_type = other DNA
gtcaagttcacacaaaacattcaccaagaatagaccacatgcagggacaaaaatcaagtttcaaaatataatcttacaca

SEQ ID NO: 35688 - DNA, 80 bp, synthetic construct
  source 1..80: mol_type = other DNA
ttcaccaaaatttgggttttgccagtgttcttaatattcatcatacaagtgggtataaaatagtatgttactgtcgtttt

SEQ ID NO: 35689 - DNA, 80 bp, synthetic construct
  source 1..80: mol_type = other DNA
attcaaaggaatgcagagttcccatatttctgctacccccacacaagcaaaaactccctcaccatcaacattctgaatca

SEQ ID NO: 35690 - DNA, 80 bp, synthetic construct; identical to SEQ ID NO: 12809
  source 1..80: mol_type = other DNA

SEQ ID NO: 35691 - DNA, 80 bp, synthetic construct
  source 1..80: mol_type = other DNA
tttgtctggatgtaccacaatttatttaggctttcatcttctaaagaacatattggttagttcaaagtctaacaattatg

SEQ ID NO: 35692 - DNA, 80 bp, synthetic construct
  source 1..80: mol_type = other DNA
ttttgcattcccagcaaaaatgaatgacagtcccttttgctccacattctcatcaacatttggttgtgtcagtgttctgg

SEQ ID NO: 35693 - DNA, 80 bp, synthetic construct
  source 1..80: mol_type = other DNA
ggattttagtgcttctttttatatttttatgtcatttatttatctgttatgtttctttcataaaatttttaaccagtctg

SEQ ID NO: 35694 - DNA, 80 bp, synthetic construct
  source 1..80: mol_type = other DNA
tgttatcaccaaatccaataacatctatattttctatgttatcttctcagaatatagtaggcatgtgttttctatttagt

SEQ ID NO: 35695 - DNA, 80 bp, synthetic construct; identical to SEQ ID NO: 12810
  source 1..80: mol_type = other DNA

SEQ ID NO: 35696 - DNA, 80 bp, synthetic construct
  source 1..80: mol_type = other DNA
atctgtggaacaatttggaaagaaccaacatcttgagaattgtgagtattcctgtccagaaacacaaaagatgtttccat

SEQ ID NO: 35697 - DNA, 80 bp, synthetic construct
  source 1..80: mol_type = other DNA
tatcttttaaatttcaaattcttattgtgcattgctgacatatatgaaaacaattaacttttgtatattaatcttgtatc

SEQ ID NO: 35698 - DNA, 80 bp, synthetic construct; identical to SEQ ID NO: 12811
  source 1..80: mol_type = other DNA

SEQ ID NO: 35699 - DNA, 80 bp, synthetic construct
  source 1..80: mol_type = other DNA
gccaaactgtcttccaaagaggccataaactttaagtgactctttcactgcatttgaaaagttttcatgtttaatttcat

SEQ ID NO: 35700 - DNA, 80 bp, synthetic construct
  source 1..80: mol_type = other DNA
tctaaaatataaagtcatggaggcagtagaggggatcaggatcacatagggcattgtcagaattttgactttaagtgcag

SEQ ID NO: 35701 - DNA, 80 bp, synthetic construct
  source 1..80: mol_type = other DNA
accatgactgcattctgaaattatctgcaatgggatgcttcaaaaacactgatgctaactgctacctctccaacacatac

SEQ ID NO: 35702 - DNA, 80 bp, synthetic construct
  source 1..80: mol_type = other DNA
tacaatagccagcaattacggtggcttggactgaagtggtagtcttagaggctgtcagtcttttaatattttggatatat

SEQ ID NO: 35703 - DNA, 80 bp, synthetic construct; identical to SEQ ID NO: 12812
  source 1..80: mol_type = other DNA

SEQ ID NO: 35704 - DNA, 80 bp, synthetic construct
  source 1..80: mol_type = other DNA
ttaacaaagaatcaggacaaaagttggacaaagcgagcccagagacaaactttataaagaatgaggagtgtgaccaaagg

SEQ ID NO: 35705 - DNA, 80 bp, synthetic construct
  source 1..80: mol_type = other DNA
gatcacgaggtcaggagatcaagaccatcctggctaacatggtgaaaccccgtctctactaaaaatacaaaaaaattagc

SEQ ID NO: 35706 - DNA, 80 bp, synthetic construct; identical to SEQ ID NO: 12813
  source 1..80: mol_type = other DNA

SEQ ID NO: 35707 - DNA, 80 bp, synthetic construct
  source 1..80: mol_type = other DNA
ttgtcaaataaacctgcaaagaaacattctactaatgtacactctcaccaatacagttccctatccatccagttacacca

SEQ ID NO: 35708 - DNA, 80 bp, synthetic construct
  source 1..80: mol_type = other DNA
accaaaaccagtatgacaggctcccatgcagactctctgtattcattttagatccttctgaacctttttatttcagccag

SEQ ID NO: 35709 - DNA, 80 bp, synthetic construct
  source 1..80: mol_type = other DNA
ggttggcccctacctatagcttcaacctcatctcccacaatgtaactccgtaccctctgcgtttttcatattggtcttca

SEQ ID NO: 35710 - DNA, 80 bp, synthetic construct
  source 1..80: mol_type = other DNA
gttgaagactcccctgtcaaatcttcctataatttacactcttagcaacacttcttcctctttgtagaattatcttagtt

SEQ ID NO: 35711 - DNA, 80 bp, synthetic construct; identical to SEQ ID NO: 12814
  source 1..80: mol_type = other DNA

SEQ ID NO: 35712 - DNA, 80 bp, synthetic construct
  source 1..80: mol_type = other DNA
ttagatctcagccccttgcacataaaaaataactttgtttcgaaacttcagttttacaatcaatcagtattcttaattcc

SEQ ID NO: 35713 - DNA, 80 bp, synthetic construct
  source 1..80: mol_type = other DNA
atagtgcactgtaactcttagctataaatagttcttataaagcctaataccctttaattatcaatcacagataaagagtc

SEQ ID NO: 35714 - DNA, 80 bp, synthetic construct; identical to SEQ ID NO: 12815
  source 1..80: mol_type = other DNA

SEQ ID NO: 35715 - DNA, 80 bp, synthetic construct
  source 1..80: mol_type = other DNA
tagcacccagccttgtgcctggtatttgacaggcctcataaattaactgaatttaatgatcaagaacagaaaaagatttg

SEQ ID NO: 35716 - DNA, 80 bp, synthetic construct
  source 1..80: mol_type = other DNA
agtacatttttaagactgagtaccctaacagtaacacaataatctagatttagtcaagtcaaatttatctactatgctat

SEQ ID NO: 35717 - DNA, 80 bp, synthetic construct
  source 1..80: mol_type = other DNA
ttaattataggtttcaaagagtatacgttagtattgatatagtcaagaaacccttctgcaataactatgtcatctatgga

SEQ ID NO: 35718 - DNA, 80 bp, synthetic construct; identical to SEQ ID NO: 12816
  source 1..80: mol_type = other DNA

SEQ ID NO: 35719 - DNA, 80 bp, synthetic construct
  source 1..80: mol_type = other DNA
agctttttcatccaagctgtttaaatttcaacccaattcttacctctgggtgagaaatgtctcaagcaatattccctccc

SEQ ID NO: 35720 - DNA, 80 bp, synthetic construct
  source 1..80: mol_type = other DNA
ctgaaagatagagaaagatgctagcaagataattggtttgtaaacatagcacagatatcaactaagagtattacctctgt

SEQ ID NO: 35721 - DNA, 80 bp, synthetic construct
  source 1..80: mol_type = other DNA
tttcctagaccccttgggaaacattaggaagactgatctttaaatatctgtatataatttcatgatatctattattttat

SEQ ID NO: 35722 - DNA, 80 bp, synthetic construct
  source 1..80: mol_type = other DNA
ttctgcaagaggaatgagtctgggttcaaattctggctccttcaattttgtgccatatgcccaaattactttacctcttt

SEQ ID NO: 35723 - DNA, 80 bp, synthetic construct; identical to SEQ ID NO: 12817
  source 1..80: mol_type = other DNA

SEQ ID NO: 35724 - DNA, 80 bp, synthetic construct
  source 1..80: mol_type = other DNA
agaggtaaggagggtagcaggggagaaacaaaactggacagattccaaggatatagctttaacaggaatttttatacaac

SEQ ID NO: 35725 - DNA, 80 bp, synthetic construct
  source 1..80: mol_type = other DNA
tctccagcctggccaacatggtgaaaccccgtatccactaaaaatacaaaaactatccaggtgtggtggtacatgcctgt

SEQ ID NO: 35726 - DNA, 80 bp, synthetic construct
  source 1..80: mol_type = other DNA
aagaaagaaagaaaggagagaaagaaagaaagacaaagagagaaaggaaaggaaaagggaaagggaaaaggaaaaggaaa

SEQ ID NO: 35727 - DNA, 80 bp, synthetic construct; identical to SEQ ID NO: 12818
  source 1..80: mol_type = other DNA

SEQ ID NO: 35728 - DNA, 80 bp, synthetic construct
  source 1..80: mol_type = other DNA
aatatttagacattgaaaagaggaggacatagctgccaaggagagttaaaaggagtggccaatgaagcaggggaagaata

SEQ ID NO: 35729 - DNA, 80 bp, synthetic construct
  source 1..80: mol_type = other DNA
cactgaacagacagcaagagatgtccaggtggagtggattaaggtgagaccaggagattagaaaatgaaaaacctttatt

SEQ ID NO: 35730 - DNA, 80 bp, synthetic construct; identical to SEQ ID NO: 12819
  source 1..80: mol_type = other DNA

SEQ ID NO: 35731 - DNA, 80 bp, synthetic construct
  source 1..80: mol_type = other DNA
atttttttttttttaggagatggattctcactacattgcctaggctagagtgcaatggctattcacaggtgtggacactg

SEQ ID NO: 35732 - DNA, 80 bp, synthetic construct
  source 1..80: mol_type = other DNA
acaaaaacaaaaaaccctctttgtagactacaagaaaagtattcaagattcactaatttattaaatatgcattgactaaa

SEQ ID NO: 35733 - DNA, 80 bp, synthetic construct
  source 1..80: mol_type = other DNA
aaactaacacaatgttgtccttttataagtaccatactatacaaagctaattgtccaactaagagcaacattatactgtt

SEQ ID NO: 35734 - DNA, 80 bp, synthetic construct
  source 1..80: mol_type = other DNA
tggtgatttcacaagctagattgtctgtttaattcctaatcacactaattacttgaaagagtaatccaggaaatgtgact

SEQ ID NO: 35735 - DNA, 80 bp, synthetic construct; identical to SEQ ID NO: 12820
  source 1..80: mol_type = other DNA

SEQ ID NO: 35736 - DNA, 80 bp, synthetic construct
  source 1..80: mol_type = other DNA
ctatctggccttttacaataaaatgtttccttacttctactcgattttcaaaagaggcaacacattttttaaaaacaact

SEQ ID NO: 35737 - DNA, 80 bp, synthetic construct
  source 1..80: mol_type = other DNA
attataactaaatgtcaatgtctatcttccagaagagatgacttacaaaaaaacatagggccagctattttattatagta

SEQ ID NO: 35738 - DNA, 80 bp, synthetic construct
  source 1..80: mol_type = other DNA
tttccacttgtaaaagcctgattcaaaaagcaatttactttaaggtttacttaagctttgcaactacattaaaatatgat

SEQ ID NO: 35739 - DNA, 80 bp, synthetic construct; identical to SEQ ID NO: 12821
  source 1..80: mol_type = other DNA

SEQ ID NO: 35740 - DNA, 80 bp, synthetic construct
  source 1..80: mol_type = other DNA
ttgatattttctgcaaatactatgtttgaacaaatgtcacctagtacctactaggcaccaggtggaacaaaccaatgctt

SEQ ID NO: 35741 - DNA, 80 bp, synthetic construct
  source 1..80: mol_type = other DNA
taatcaatatttctcacctttgaattctaattcaagtttaaagtgaaggaaaagattctaaattgaaagaattctgtatt

SEQ ID NO: 35742 - DNA, 80 bp, synthetic construct; identical to SEQ ID NO: 12822
  source 1..80: mol_type = other DNA

SEQ ID NO: 35743 - DNA, 80 bp, synthetic construct
  source 1..80: mol_type = other DNA
catgtgtgtgcctgtgtatataggtgtataaagacatatacatacattcatattactcaaggtacacgaaattaatcaca

SEQ ID NO: 35744 - DNA, 80 bp, synthetic construct
  source 1..80: mol_type = other DNA
gtgttaggtggcataaaccaaatcaaagaacctgctctggacatggtgaaatatgtgtttttctgtaatagaaatgataa

SEQ ID NO: 35745 - DNA, 80 bp, synthetic construct
  source 1..80: mol_type = other DNA
ttgaaacattgcttctgaatccaatctcactgctcaaacttttcaagtagttaaaatatacccttatacatgggcatttc

SEQ ID NO: 35746 - DNA, 80 bp, synthetic construct
  source 1..80: mol_type = other DNA
gtattttgttaatactttctcattttatttattttatattcttcttcaatgccactttgatttttccctcatagctttat

SEQ ID NO: 35747 - DNA, 80 bp, synthetic construct; identical to SEQ ID NO: 12823
  source 1..80: mol_type = other DNA

SEQ ID NO: 35748 - DNA, 80 bp, synthetic construct
  source 1..80: mol_type = other DNA
acagcttcctcggagtcatggttcatgtagaagtatcagttaaagtatcagtgtaattcaaccattatatttagcaacag

SEQ ID NO: 35749 - DNA, 80 bp, synthetic construct
  source 1..80: mol_type = other DNA
gacatacctgaaaagctgaaaaactacctcttttaaatgtcttggtatctcttttcggacctcagcctttcaataaaaag

SEQ ID NO: 35750 - DNA, 80 bp, synthetic construct
  source 1..80: mol_type = other DNA
atttaactctgtataaatggctgtttatgatgcacctacaaatagtatacacacaccagtaaaaaagccagcacagataa

SEQ ID NO: 35751 - DNA, 80 bp, synthetic construct
  source 1..80: mol_type = other DNA
aaatataacagatctcactgaatagacttcgctctgcaaataaaacaatgcctaatggcaatgttggcactccaaaaata

SEQ ID NO: 35752 - DNA, 80 bp, synthetic construct; identical to SEQ ID NO: 12824
  source 1..80: mol_type = other DNA

SEQ ID NO: 35753 - DNA, 80 bp, synthetic construct
  source 1..80: mol_type = other DNA
tagccaggcatggtggcacatgcctgtaatcccagctacttgggaggctgaggcaggagaatctcttcaacctgggaggc

SEQ ID NO: 35754 - DNA, 80 bp, synthetic construct
  source 1..80: mol_type = other DNA
ccctttactgttcaggatttatcacaggggctaaaataggtacagaatatgatagtaaagaaatcaaatccctttggcat

SEQ ID NO: 35755 - DNA, 80 bp, synthetic construct; identical to SEQ ID NO: 12825
  source 1..80: mol_type = other DNA

SEQ ID NO: 35756 - DNA, 80 bp, synthetic construct
  source 1..80: mol_type = other DNA
cattctctcctctatatcctagttcctcatataaatcctaggagattttaaatcccattttacaaaaaagtaagagtaaa

SEQ ID NO: 35757 - DNA, 80 bp, synthetic construct
  source 1..80: mol_type = other DNA
atacgcctcaaaaaattatctttacgccaaccagccagatgtaatagccacatttcattcctattttttctctgcatttt

SEQ ID NO: 35758 - DNA, 80 bp, synthetic construct
  source 1..80: mol_type = other DNA
ataaatatattatatatctgtatatatacacagattttatatactttataaatttataaatattgtaaaattctaaatat

SEQ ID NO: 35759 - DNA, 80 bp, synthetic construct
  source 1..80: mol_type = other DNA
tcagggttatattccataatttgagtatcacattcatattatgcataatttctatggcttctgcataatatattcctaga

SEQ ID NO: 35760 - DNA, 80 bp, synthetic construct; identical to SEQ ID NO: 12826
  source 1..80: mol_type = other DNA

SEQ ID NO: 35761 - DNA, 80 bp, synthetic construct
  source 1..80: mol_type = other DNA
cataagttttttaaaataagtttgtttttaattggcacataatagttgcacatatttattggatacagtgtgatgtttca

SEQ ID NO: 35762 - DNA, 80 bp, synthetic construct
  source 1..80: mol_type = other DNA
ctgctgacttcaagctccacctccccggttcatgccattctcctgcctcagcctccaaaatagctgggactacaggcccc

SEQ ID NO: 35763 - DNA, 80 bp, synthetic construct
  source 1..80: mol_type = other DNA
atagaacaccaacctctccccatttccactccacactactctcccaagcttctggtaaccactattctactctctacttc

SEQ ID NO: 35764 - DNA, 80 bp, synthetic construct; identical to SEQ ID NO: 12827
  source 1..80: mol_type = other DNA

SEQ ID NO: 35765 - DNA, 80 bp, synthetic construct
  source 1..80: mol_type = other DNA
catttactgggtgattgaacatgtcctgaactacttggggtacttcatcatataataacttcatcagatctttatagtat

SEQ ID NO: 35766 - DNA, 80 bp, synthetic construct
  source 1..80: mol_type = other DNA
taaaataagagctaccttgtctcctctatatcaaattatactttttagttttggttttacatctattaccaggttatgga

SEQ ID NO: 35767 - DNA, 80 bp, synthetic construct
  source 1..80: mol_type = other DNA
caagtgtcatattagcaacacaaaaacttccctttagggcagcacagaacaaaccacagccactaaccacatataagtat

SEQ ID NO: 35768 - DNA, 80 bp, synthetic construct; identical to SEQ ID NO: 12828
  source 1..80: mol_type = other DNA

SEQ ID NO: 35769 - DNA, 80 bp, synthetic construct
  source 1..80: mol_type = other DNA
atgccttcccttggctacaacaagtatcaaaatactaacaagtctcaaatgcgcacatcaactctcagtcttttccttga

SEQ ID NO: 35770 - DNA, 80 bp, synthetic construct
  source 1..80: mol_type = other DNA
caattaatgtatttatttaacgttttatttagctagcatattccagagaaggttgtaacccctcgtcctttttacacacc

SEQ ID NO: 35771 - DNA, 80 bp, synthetic construct; identical to SEQ ID NO: 12829
  source 1..80: mol_type = other DNA

SEQ ID NO: 35772 - DNA, 80 bp, synthetic construct
  source 1..80: mol_type = other DNA
ttctcacccacaggtgggaattgaacaatgagaacacttggacacaggaaggggaacatcacacaccagggcctgtcatg

SEQ ID NO: 35773 - DNA, 80 bp, synthetic construct
  source 1..80: mol_type = other DNA
aaagaaagaaaaacggatggtcccatagccaagctatgccaggccaatggactaacagagaagctaccatgaaatattct

SEQ ID NO: 35774 - DNA, 80 bp, synthetic construct
  source 1..80: mol_type = other DNA
gggccagggaaaagactgaaatactcagtctctgggtcttcacctcaagcatattccgaacacattttaaaaagcacctg

SEQ ID NO: 35775 - DNA, 80 bp, synthetic construct; identical to SEQ ID NO: 12830
  source 1..80: mol_type = other DNA

SEQ ID NO: 35776 - DNA, 80 bp, synthetic construct
  source 1..80: mol_type = other DNA
attacatatcctttccttgttccttgtattttcctcattcacatcatttttcattcacattgcctcttttcagttctttc

SEQ ID NO: 35777 - DNA, 80 bp, synthetic construct
  source 1..80: mol_type = other DNA
aaacttatcataataagcatttacaaaaaatgttaaatttatagcagtggtaattttaggataaaccactatgtatggtg

SEQ ID NO: 35778 - DNA, 80 bp, synthetic construct
  source 1..80: mol_type = other DNA
atttttccctcttttttttattagtaaagacattaacaataaaataggctcacttgctccagctggtaatttctcatact

SEQ ID NO: 35779 - DNA, 80 bp, synthetic construct; identical to SEQ ID NO: 12831
  source 1..80: mol_type = other DNA

SEQ ID NO: 35780 - DNA, 80 bp, synthetic construct
  source 1..80: mol_type = other DNA
aggaagctcttaggtttatcctttctctcattttaatctctttagccttaacatccttgaaaaatgagcattaagataga

SEQ ID NO: 35781 - DNA, 80 bp, synthetic construct
  source 1..80: mol_type = other DNA
tttatttcccacaaattttcaatgtctaataaaaagcctttcttgattctgatcaaatagatttgaaaaatgcttcacta

SEQ ID NO: 35782 - DNA, 80 bp, synthetic construct
  source 1..80: mol_type = other DNA
cactaaaaatactataatataatataatcctataaaatgttatagaagatgaaaatgtaagtacctctctttaaattaaa

SEQ ID NO: 35783 - DNA, 80 bp, synthetic construct; identical to SEQ ID NO: 12832
  source 1..80: mol_type = other DNA

SEQ ID NO: 35784 - DNA, 80 bp, synthetic construct
  source 1..80: mol_type = other DNA
accaagagtcgtgtgcttgatgtcatcaaaattattctccagcttctcacaattctgcaacatatttaaaaattgcatta

SEQ ID NO: 35785 - DNA, 80 bp, synthetic construct
  source 1..80: mol_type = other DNA
tatgatacagctgtcacagaagtctcattatcaatttttcaaagtggagtttcgttatcaatttttcaaagtggataaac

SEQ ID NO: 35786 - DNA, 80 bp, synthetic construct
  source 1..80: mol_type = other DNA
gtttttgatcaccataaacagtatacaataaataccaagttctaaataagctagcattgactaagatgaagggatagagc

SEQ ID NO: 35787 - DNA, 80 bp, synthetic construct
  source 1..80: mol_type = other DNA
aggttcttagaagaattttaagattgagtaaatatgacataagcagtttaaatttcataagtgtttctactttttggtaa

SEQ ID NO: 35788 - DNA, 80 bp, synthetic construct; identical to SEQ ID NO: 12833
  source 1..80: mol_type = other DNA

SEQ ID NO: 35789 - DNA, 80 bp, synthetic construct
  source 1..80: mol_type = other DNA
ataagaatgaattgatttgaaatatattggtatataaaccactatttttaaccttgatattttttaaaactaagtcaaat

SEQ ID NO: 35790 - DNA, 80 bp, synthetic construct
  source 1..80: mol_type = other DNA
gggtatatacattaaaagtatcctcttctgtcttatcttcccacatttttagaagtgtctttcaataaagagaactgctt

SEQ ID NO: 35791 - DNA, 80 bp, synthetic construct; identical to SEQ ID NO: 12834
  source 1..80: mol_type = other DNA

SEQ ID NO: 35792 - DNA, 80 bp, synthetic construct
  source 1..80: mol_type = other DNA
cccacccccagacaggctccagtgtgggatgttccccaccctgtgtccatgtgttctcattggtcaattctcacctatga

SEQ ID NO: 35793 - DNA, 80 bp, synthetic construct
  source 1..80: mol_type = other DNA
attccatggtgtatatgggccacattttcttaatccagtttatcattgatggacatttgggctggttccaagtctttgcc

SEQ ID NO: 35794 - DNA, 80 bp, synthetic construct
  source 1..80: mol_type = other DNA
gcagggttggaagattacttgactatctagtttttctagccacagagacaggagataaacacattcttggattaaaataa

SEQ ID NO: 35795 - DNA, 80 bp, synthetic construct
  source 1..80: mol_type = other DNA
tctactaaaaatacaaaaattagctgggcatggtgggtgcacctgtagtcccagctactcaggaggctgaggcaggagaa

SEQ ID NO: 35796 - DNA, 80 bp, synthetic construct; identical to SEQ ID NO: 12835
  source 1..80: mol_type = other DNA

SEQ ID NO: 35797 - DNA, 80 bp, synthetic construct
  source 1..80: mol_type = other DNA
gaagtttattatacccaacagaacaacaaaggaaataagtaagcactgtagcatttaaacagttaactattaccttgact

SEQ ID NO: 35798 - DNA, 80 bp, synthetic construct
  source 1..80: mol_type = other DNA
tatctgctcaaacttctcataaataaaagtaagcattaaatatccactgagtaaagggcaaacagattcactgtcacgtt

SEQ ID NO: 35799 - DNA, 80 bp, synthetic construct; identical to SEQ ID NO: 12836
  source 1..80: mol_type = other DNA

SEQ ID NO: 35800 - DNA, 80 bp, synthetic construct
  source 1..80: mol_type = other DNA
aagaaaggaaaaggcaacagataaaaagagaaaaggggacagagagaatgaatgaacaaactactcctgagaacagcaag

SEQ ID NO: 35801 - DNA, 80 bp, synthetic construct
  source 1..80: mol_type = other DNA
ggtactaaatttaatgccgaccagacatgccatgtaatataacaggcacaggttagctctaattaattggtagaaaactg

SEQ ID NO: 35802 - DNA, 80 bp, synthetic construct
  source 1..80: mol_type = other DNA
accagttaacattgagtagtgactctgggttaggtactttttctaggaagtctaaccatttaatctgcatgacaaccata

SEQ ID NO: 35803 - DNA, 80 bp, synthetic construct; identical to SEQ ID NO: 12837
  source 1..80: mol_type = other DNA

SEQ ID NO: 35804 - DNA, 80 bp, synthetic construct
  source 1..80: mol_type = other DNA
aaaatagtttactagcagagtcaaatgtagcagaagctcttgcaggattctgtctacatctgtctggaagtgctatactt

SEQ ID NO: 35805 - DNA, 80 bp, synthetic construct
  source 1..80: mol_type = other DNA
agtagaaactggaaactaagcatcaaaaagaactggttttggtggcctcctgccaaatgaatccccatgggttgagggaa

SEQ ID NO: 35806 - DNA, 80 bp, synthetic construct
  source 1..80: mol_type = other DNA
cactgagttatctttgctcaaattataccaaaaaaaatcacaaaattcaaccaaacacctactgattctggatggaggtg

SEQ ID NO: 35807 - DNA, 80 bp, synthetic construct
  source 1..80: mol_type = other DNA
caaacctaaattgaataaattaggaaaccaattttaacaaatgaaaagtcacaaagagttaatggcatagctactggagt

SEQ ID NO: 35808 - DNA, 80 bp, synthetic construct
  source 1..80: mol_type = other DNA
gaatacagaggagagaaaggaaataattctcttggaacaagagatgactatgagtttgttacttccaaacctgtctttga

SEQ ID NO: 35809 - DNA, 80 bp, synthetic construct; identical to SEQ ID NO: 12838
  source 1..80: mol_type = other DNA

SEQ ID NO: 35810 - DNA, 80 bp, synthetic construct
  source 1..80: mol_type = other DNA
aagaggaaagaataaacagaagaagagtatccatgaaccccaactcaatcctaatggatcagattttatatggtgaaata

SEQ ID NO: 35811 - DNA, 80 bp, synthetic construct
  source 1..80: mol_type = other DNA
aagtacatatgcacaagtacacaatatgctatgctatatacaatttcagtgggccaatacagctcctgaagcccatctat

SEQ ID NO: 35812 - DNA, 80 bp, synthetic construct
  source 1..80: mol_type = other DNA
ggggtccaaaagttggcaaatttctattgctgtttgacaataaagcatcttaagttcaaacatcaaatttctaatttaaa

SEQ ID NO: 35813 - DNA, 80 bp, synthetic construct; identical to SEQ ID NO: 12839
  source 1..80: mol_type = other DNA

SEQ ID NO: 35814 - DNA, 80 bp, synthetic construct
  source 1..80: mol_type = other DNA
aaaatatgaggaatatttaaataaaatggcacactccaacatgtactgctacaattctaaggcagttcaatgttggttac

SEQ ID NO: 35815 - DNA, 80 bp, synthetic construct
  source 1..80: mol_type = other DNA
attaggtgaacttactctttctggaaaatgttgtatcttaatttttgcactcaacaagaagtctcaaaactagccctgct

SEQ ID NO: 35816 - DNA, 80 bp, synthetic construct
  source 1..80: mol_type = other DNA
atcctttcagggaacattaagaggtaatcatatttagctaatgtcatttcactaattgtggccagcttacaatcaggccc

SEQ ID NO: 35817 - DNA, 80 bp, synthetic construct; identical to SEQ ID NO: 12840
  source 1..80: mol_type = other DNA

SEQ ID NO: 35818 - DNA, 80 bp, synthetic construct
  source 1..80: mol_type = other DNA
attttaagatttcatctctcatacacagtaagaattaagtaatattttagtacttttttgagataaattaaaagtttagc

SEQ ID NO: 35819 - DNA, 80 bp, synthetic construct
  source 1..80: mol_type = other DNA
acatgataatcaaatgaaacacagtatcattatttcaatatatattgtggagttctatgtcccatgtactgccaaccaca

SEQ ID NO: 35820 - DNA, 80 bp, synthetic construct
  source 1..80: mol_type = other DNA
tgacccatctccactaaattaattaccaccacagggaaaccacagctacacaactgctctctaggatattatccctataa

SEQ ID NO: 35821 - DNA, 80 bp, synthetic construct
  source 1..80: mol_type = other DNA
tcaaataaatccactgttactacttgaacatcagtggtgttcctctgtctcaattttggatggttaattttttcatctat

SEQ ID NO: 35822 - DNA, 80 bp, synthetic construct; identical to SEQ ID NO: 12841
  source 1..80: mol_type = other DNA

SEQ ID NO: 35823 - DNA, 80 bp, synthetic construct
  source 1..80: mol_type = other DNA
gctacctcaattctctgattggaaaaaaaaaccttgagatcacaatggagtgggtcagttcaaacagaaacaaggaattt

SEQ ID NO: 35824 - DNA, 80 bp, synthetic construct
  source 1..80: mol_type = other DNA
taaactgatttttgtttacaaagaaaaaatatgcctaagatttccatatactgtacacagttatggaatggttggtacta

SEQ ID NO: 35825 - DNA, 80 bp, synthetic construct
  source 1..80: mol_type = other DNA
taaaattcagagaagcaatcatttttaagtcacaaaagataaagccttccaatatccttctggttttggaggaataaagg

SEQ ID NO: 35826 - DNA, 80 bp, synthetic construct; identical to SEQ ID NO: 12842
  source 1..80: mol_type = other DNA

SEQ ID NO: 35827 - DNA, 80 bp, synthetic construct
  source 1..80: mol_type = other DNA
tgaagataattatgtcacagtccttggactccatctctgattgtgtgcataaatcagaaaatgtcagctgtgttttccct

SEQ ID NO: 35828 - DNA, 80 bp, synthetic construct
  source 1..80: mol_type = other DNA
tattagcaataaatagatcaatatggaaaagataaactctgttttcataaactctccatcctgaaaaaccaaatgcttga

SEQ ID NO: 35829 - DNA, 80 bp, synthetic construct; identical to SEQ ID NO: 12843
  source 1..80: mol_type = other DNA

SEQ ID NO: 35830 - DNA, 80 bp, synthetic construct
  source 1..80: mol_type = other DNA
attagaccagaaatataatttttatgcaagctcagtaatcatgttaaaaacaagtctcagacagcagtctttataataaa

SEQ ID NO: 35831 - DNA, 80 bp, synthetic construct
  source 1..80: mol_type = other DNA
gtggctcagagttgtgggtattcaaagacaagtgaaaaacagaatatattttcctagaacattaggttcacggaaactat

SEQ ID NO: 35832 - DNA, 80 bp, synthetic construct
  source 1..80: mol_type = other DNA
caacagagtcagatttttcaagttactcaatattgtgttctttccaattgtgtgtttcctcggagtagaaacagtcatgt

SEQ ID NO: 35833 - DNA, 80 bp, synthetic construct
  source 1..80: mol_type = other DNA
gtgaaaccccgtctctactaaaaatacaaaaaattagccgggcgcggtggcgggcgcctgtagtcccaggtacttgggag

SEQ ID NO: 35834 - DNA, 80 bp, synthetic construct; identical to SEQ ID NO: 12844
  source 1..80: mol_type = other DNA

SEQ ID NO: 35835 - DNA, 80 bp, synthetic construct
  source 1..80: mol_type = other DNA
acaaacatactattaaccttccttcctttcacagtatactccccaatatataaagcatgttgaaaattacgcatattgta

SEQ ID NO: 35836 - DNA, 80 bp, synthetic construct
  source 1..80: mol_type = other DNA
gttttccatgctcacacaacacgttttatgttgcagctttttgtgtggggtatgtgtgtgtacttcttgtttctcagtgg

SEQ ID NO: 35837 - DNA, 80 bp, synthetic construct
  source 1..80: mol_type = other DNA
tcatagttttatttccctagaattttgctgttaggaataatgctataatatatccttgtacatgtgtgatggtgacttct

SEQ ID NO: 35838 - DNA, 80 bp, synthetic construct; identical to SEQ ID NO: 12845
  source 1..80: mol_type = other DNA

SEQ ID NO: 35839 - DNA, 80 bp, synthetic construct
  source 1..80: mol_type = other DNA
aatatattctcaataattttcccttcacttgtgtagagtaactttggccacacaatagtttgttgtttctctttaaagga

SEQ ID NO: 35840 - DNA, 80 bp, synthetic construct
  source 1..80: mol_type = other DNA
accctctcccttaatcaacgaaataggagtaattttttaagcccagtgctgtaatattttggttgaatctgctttgggcc

SEQ ID NO: 35841 - DNA, 80 bp, synthetic construct
  source 1..80: mol_type = other DNA
ctgaataactggttgaaaatggaggttaactagatactgtatttttctgggattaaaggatgaatatcaacaatattcct

SEQ ID NO: 35842 - DNA, 80 bp, synthetic construct; identical to SEQ ID NO: 12846
  source 1..80: mol_type = other DNA

SEQ ID NO: 35843 - DNA, 80 bp, synthetic construct
  source 1..80: mol_type = other DNA
catgaatgtggacagtttgctcttctgaccttcactggaagaaagtgtaggtgtaagaatttttctccatgaagaaaaaa

SEQ ID NO: 35844 - DNA, 80 bp, synthetic construct
  source 1..80: mol_type = other DNA
ttaagttaattgttcaccctaacacagacatttgcacatttggcccattaaagtattcttacaactttgggcatgattca

SEQ ID NO: 35845 - DNA, 80 bp, synthetic construct
  source 1..80: mol_type = other DNA
atggcattatcactcatcattattccctgaactgatccttttatgagattatcacagagacaagagaagattgaccaaaa

SEQ ID NO: 35846 - DNA, 80 bp, synthetic construct; identical to SEQ ID NO: 12847
  source 1..80: mol_type = other DNA

SEQ ID NO: 35847 - DNA, 80 bp, synthetic construct
  source 1..80: mol_type = other DNA
atcatagaaacagtatcccaccaatttacctaaagggagtagcaggggaaaaaaaaaatgtttgttcccagatatggaaa

SEQ ID NO: 35848 - DNA, 80 bp, synthetic construct
  source 1..80: mol_type = other DNA
aggagacaagaaattttcctgtatttcattcactactgtatctgaagggcttaaacagagtctgacccattctagaagtt

SEQ ID NO: 35849 - DNA, 80 bp, synthetic construct
  source 1..80: mol_type = other DNA
aaaatttgatatgtagtcccttgttgataaaattcttaaaaactgacttgctacacagggaaagatgttaagcatatttt

SEQ ID NO: 35850 - DNA, 80 bp, synthetic construct; identical to SEQ ID NO: 12848
  source 1..80: mol_type = other DNA

SEQ ID NO: 35851 - DNA, 80 bp, synthetic construct
  source 1..80: mol_type = other DNA
acatcacgattattattttaaacagcttaaatgttgactagttctacaaagttatcagccctctattcactgacacattg

SEQ ID NO: 35852 - DNA, 80 bp, synthetic construct
  source 1..80: mol_type = other DNA
catcttagtacattttttagttctcatctaaagcacttatacttcccatcctcttgttctgcacttggtggagatgttca

SEQ ID NO: 35853 - DNA, 80 bp, synthetic construct; identical to SEQ ID NO: 12849
  source 1..80: mol_type = other DNA

SEQ ID NO: 35854 - DNA, 80 bp, synthetic construct
  source 1..80: mol_type = other DNA
agaacattcagatttagtagaagaggctattttacctcatagcaaataatatgtttctcttcagtataggcaacaggatt

SEQ ID NO: 35855 - DNA, 80 bp, synthetic construct
  source 1..80: mol_type = other DNA
atttatagcattcaatcagactgaccttgtttgatggaatacctaaaggatactcatgtttctttccataagaagtcaaa

SEQ ID NO: 35856 - DNA, 80 bp, synthetic construct
  source 1..80: mol_type = other DNA
ttattctaaatatttattctaaatattctaggcatctgccctcataagcttacattttaatgaataggggagagatgata

SEQ ID NO: 35857 - DNA, 80 bp, synthetic construct
  source 1..80: mol_type = other DNA
agatctattacaaacagaatggtcagggaagacattttcaagatcttaacaaagggaaaggaactgcaaagaccctaaaa

SEQ ID NO: 35858 - DNA, 80 bp, synthetic construct; identical to SEQ ID NO: 12850
  source 1..80: mol_type = other DNA

SEQ ID NO: 35859 - DNA, 80 bp, synthetic construct
  source 1..80: mol_type = other DNA
tgaccaataatttgatcaatcatgcctacataatgtaacccttataaaaacaaaagaaaggggctcacagagctttgggt

SEQ ID NO: 35860 - DNA, 80 bp, synthetic construct
  source 1..80: mol_type = other DNA
cacacttctgagttggcagggtgggagccttgccctcttgggtgcggctgcagccacccagctgtggctccagacctggg

SEQ ID NO: 35861 - DNA, 80 bp, synthetic construct
  source 1..80: mol_type = other DNA
cacacatttgcagcagtgctgacaggccagctgtctctcaccttgtgcccctctggactttgggtaccgatgaacaacag

SEQ ID NO: 35862 - DNA, 80 bp, synthetic construct; identical to SEQ ID NO: 12851
  source 1..80: mol_type = other DNA

SEQ ID NO: 35863 - DNA, 80 bp, synthetic construct
  source 1..80: mol_type = other DNA
tacagaaagaagctacccactccaggtctcctttctgctgagagctggacactcattaggacgacctgcctgtggaaagc

SEQ ID NO: 35864 - DNA, 80 bp, synthetic construct
  source 1..80: mol_type = other DNA
tagggctgaaacagaatcctcctactgctcgccaggttgtgggagacatgaaggagaggagagctgtggcccttcaggga

SEQ ID NO: 35865 - DNA, 80 bp, synthetic construct
  source 1..80: mol_type = other DNA
ctcacatggagccgggacctgtaccagtgcctggagctgcccaccctgctgcagcagcaagcatccctggctgtgtgcaa

SEQ ID NO: 35866 - DNA, 80 bp, synthetic construct; identical to SEQ ID NO: 12852
  source 1..80: mol_type = other DNA

SEQ ID NO: 35867 - DNA, 80 bp, synthetic construct
  source 1..80: mol_type = other DNA
attgaacctaaggagggtgctcttgcaacatctgatttatagatagttgttcagagacacaagagacagcctggacttgt

SEQ ID NO: 35868 - DNA, 80 bp, synthetic construct
  source 1..80: mol_type = other DNA
gagaactggagaattacttggggtgggaaaaccccacacatctggtattagaagtgaagtactgagattggtatgaatat

SEQ ID NO: 35869 - DNA, 80 bp, synthetic construct
  source 1..80: mol_type = other DNA
tatttgttcacctatgtttaacttctcaaaatgtacaactaataaaacattagttcatcgtatgttttcataacagaaat

SEQ ID NO: 35870 - DNA, 80 bp, synthetic construct; identical to SEQ ID NO: 12853
  source 1..80: mol_type = other DNA

SEQ ID NO: 35871 - DNA, 80 bp, synthetic construct
  source 1..80: mol_type = other DNA
ttactcaaacaaaaactctctccatttacataatttcttaaatagaaggaatatgtaacatacaaactgaaaataaatga

SEQ ID NO: 35872 - DNA, 80 bp, synthetic construct
  source 1..80: mol_type = other DNA
acagaaggtattgtcaggcagggaataaaggcatgctaattttatctgcttaaatgaagggactcaatggagcctgactc

SEQ ID NO: 35873 - DNA, 80 bp, synthetic construct; identical to SEQ ID NO: 12854
  source 1..80: mol_type = other DNA

SEQ ID NO: 35874 - DNA, 80 bp, synthetic construct
  source 1..80: mol_type = other DNA
gaatgcaaagcacatgattgttttatattcataaatggtgaaacccacaaagaacatacaataataggaaactaaggtga

SEQ ID NO: 35875 - DNA, 80 bp, synthetic construct
  source 1..80: mol_type = other DNA
cgcctcccgggttcatgccattctcctgcctcagcctccctagtacctccaactataggcgcctgccaccacggccggct

SEQ ID NO: 35876 - DNA, 80 bp, synthetic construct
  source 1..80: mol_type = other DNA
gactattttccaaaaatgtcatattgagtgaagtgaagtaaattcagttcatcttttaagaggatgtgaaagtgttactt

SEQ ID NO: 35877 - DNA, 80 bp, synthetic construct; identical to SEQ ID NO: 12855
  source 1..80: mol_type = other DNA

SEQ ID NO: 35878 - DNA, 80 bp, synthetic construct
  source 1..80: mol_type = other DNA
tctccaaacatttgaaattggatcaatttaagcttgtctgagttgtaagtaatgactgaaatctaaatattagaaagaaa

SEQ ID NO: 35879 - DNA, 80 bp, synthetic construct
  source 1..80: mol_type = other DNA
taccatattattgtgatactgaagtcacttaaataatgtgtagtataatacaagattatgcaaaacatttgcatattatt

SEQ ID NO: 35880 - DNA, 80 bp, synthetic construct
  source 1..80: mol_type = other DNA
gtatatgtatttcctgaattctgtacactaaaaatcctttagtagttaactcttactgagttcttactctatatatggca

SEQ ID NO: 35881 - DNA, 80 bp, synthetic construct; identical to SEQ ID NO: 12856
  source 1..80: mol_type = other DNA

SEQ ID NO: 35882 - DNA, 80 bp, synthetic construct
  source 1..80: mol_type = other DNA
tggccaatattcctcagcagtgtttgaatagagcttttcctgaagacatgagtgtcttctaaacttttaattttgtgact

SEQ ID NO: 35883 - DNA, 80 bp, synthetic construct
  source 1..80: mol_type = other DNA
agcaaatgcattcagcagagaatggtgataaaaaataatggacagctcattctccacagctaaaattgcacaagctgagc

SEQ ID NO: 35884 - DNA, 80 bp, synthetic construct
  source 1..80: mol_type = other DNA
tcttgcaaatggtaaaatgtaggttaaatctctaattttctctgttacttaacttctaaagtaggtattaattaaagaaa

SEQ ID NO: 35885 - DNA, 80 bp, synthetic construct; identical to SEQ ID NO: 12857
  source 1..80: mol_type = other DNA

SEQ ID NO: 35886 - DNA, 80 bp, synthetic construct
  source 1..80: mol_type = other DNA
agtgtcatctatagaattcggtcacctattttttccaacttaatttgatcgagcaaattgcctacaaaaaaaccatccag

SEQ ID NO: 35887 - DNA, 80 bp, synthetic construct
  source 1..80: mol_type = other DNA
cagaaaaaaatgaattgtcctctggtttcttaaattgtctatgtaataaaacacagtaacacatactatgaaaagctgag

SEQ ID NO: 35888 - DNA, 80 bp, synthetic construct
  source 1..80: mol_type = other DNA
ttatacactatgataagtttctaacaatttataattttggaacataaattatcattgtctaattaccatatatatatata

SEQ ID NO: 35889 - DNA, 80 bp, synthetic construct
  source 1..80: mol_type = other DNA
ctcctagatgcacatagtgcatgtaaggtcaaggtcaaataaaggtaaaacacatgaatggcatacagcatcacggaaat

SEQ ID NO: 35890 - DNA, 80 bp, synthetic construct; identical to SEQ ID NO: 12858
  source 1..80: mol_type = other DNA

SEQ ID NO: 35891 - DNA, 80 bp, synthetic construct
  source 1..80: mol_type = other DNA
ttgtgtttgtgtttaattcaggaaaaccaggactgtaaaaaagaaaatgcttaaagcttgcatctttgaaccaggcagaa

SEQ ID NO: 35892 - DNA, 80 bp, synthetic construct
  source 1..80: mol_type = other DNA
ctacctgatgcctgaaggaaaccaaatgaaagaatgtggaaattaagccattcaagcattcaaggaccagcactaggaaa

SEQ ID NO: 35893 - DNA, 80 bp, synthetic construct
  source 1..80: mol_type = other DNA
actttctattttctcttaggtgggataatcatacctgattagtgctattataacataacagtgcttattatgtgccagac

SEQ ID NO: 35894 - DNA, 80 bp, synthetic construct; identical to SEQ ID NO: 12859
  source 1..80: mol_type = other DNA

SEQ ID NO: 35895 - DNA, 80 bp, synthetic construct
  source 1..80: mol_type = other DNA
tataatgccaactatttttcgtcttactcaaattcaactgatctgatgctcatatagcaactttctgaatacaatttgac

SEQ ID NO: 35896 - DNA, 80 bp, synthetic construct
  source 1..80: mol_type = other DNA
aagctggcacactggaagctactttagcaagacttattcagatgtatttccctcagggatacttcaccaatttattattg

SEQ ID NO: 35897 - DNA, 80 bp, synthetic construct; identical to SEQ ID NO: 12860
  source 1..80: mol_type = other DNA

SEQ ID NO: 35898 - DNA, 80 bp, synthetic construct
  source 1..80: mol_type = other DNA
ctatgctgttagttcagttatgcacagtcttaagcatatcttcattcaataaactctctgggtattgtcatactaagttt

SEQ ID NO: 35899 - DNA, 80 bp, synthetic construct
  source 1..80: mol_type = other DNA
tatgatattgctgagcacaaccttaaggctgattttgttcctaaccaagtgtgatacatattacactacatgtggcctag

SEQ ID NO: 35900 - DNA, 80 bp, synthetic construct
  source 1..80: mol_type = other DNA
gacatgaaggacatgatcagataacaagagatcatcagataatgcacagaagtcaagtgacttgtctaagattgcgtagt

SEQ ID NO: 35901 - DNA, 80 bp, synthetic construct
  source 1..80: mol_type = other DNA
aaaaaaaatgaaaagacatttcttataggaacagaattaaaatattgctttgtctcatcttcctgtctgttgctcacaca

SEQ ID NO: 35902 - DNA, 80 bp, synthetic construct; identical to SEQ ID NO: 12861
  source 1..80: mol_type = other DNA

SEQ ID NO: 35903 - DNA, 80 bp, synthetic construct
  source 1..80: mol_type = other DNA
ggttatagttcaaagagccatccactacactgggaagaagctcaggtgccccaacactcctaccatgggagcagagagag

SEQ ID NO: 35904 - DNA, 80 bp, synthetic construct
  source 1..80: mol_type = other DNA
ttctcttccttagttttgaaagctggtattagtgaagtaagttgaaactcttggttcagccttccaaaccactcccatac

SEQ ID NO: 35905 - DNA, 80 bp, synthetic construct; identical to SEQ ID NO: 12862
  source 1..80: mol_type = other DNA

SEQ ID NO: 35906 - DNA, 80 bp, synthetic construct
  source 1..80: mol_type = other DNA
cctccactgaggtctgtcctcattgccaggcacttgttcggttcagagaagaattgtatacgtgtgttctcgaaagttca

SEQ ID NO: 35907 - DNA, 80 bp, synthetic construct
  source 1..80: mol_type = other DNA
tccctgcagatttctggatgcaagtagggacaaagaacagactactggagtttttgtcactttagaagaaaaaacatatt

SEQ ID NO: 35908 - DNA, 80 bp, synthetic construct
  source 1..80: mol_type = other DNA
attcacaaactggaaatctttaataaagcactagaaagccccaactctttacttgggcttatattaaagactctcagaaa

SEQ ID NO: 35909 - DNA, 80 bp, synthetic construct; identical to SEQ ID NO: 12863
  source 1..80: mol_type = other DNA

SEQ ID NO: 35910 - DNA, 80 bp, synthetic construct
  source 1..80: mol_type = other DNA
gagagactgggctactgttcttggagacgacgacatggatgctaagaacttggatataaaaatgcaacagaaacggagac

SEQ ID NO: 35911 - DNA, 80 bp, synthetic construct
  source 1..80: mol_type = other DNA
caaactaacaggaaaacgcacacagaaaggagaggcaaaattgctggtggaaatttcaagtccttcttgaactgaatcaa

SEQ ID NO: 35912 - DNA, 80 bp, synthetic construct
  source 1..80: mol_type = other DNA
cattggcctattatcaaagccagattattttcaatgagcaaaatactcaaataacaggttgacagttctgttgtgtgagt

SEQ ID NO: 35913 - DNA, 80 bp, synthetic construct
  source 1..80: mol_type = other DNA
ctgatgaaggaggagtatcaagttgtgaaggtgtgcaaatgcaaggcctcatgcgtgatatggaccggatgccacccact

SEQ ID NO: 35914 - DNA, 80 bp, synthetic construct; identical to SEQ ID NO: 12864
  source 1..80: mol_type = other DNA

SEQ ID NO: 35915 - DNA, 80 bp, synthetic construct
  source 1..80: mol_type = other DNA
gaccccatagcctgaaaaatagaagtgagtcaatttcctagctatcatggagtatatgtcttaaaagacatacactgaaa

SEQ ID NO: 35916 - DNA, 80 bp, synthetic construct
  source 1..80: mol_type = other DNA
caaaaagaccaagccatgattaaaggattggaactttgagccccatcccccaacttccaaggatgggaaaaggagctgaa

SEQ ID NO: 35917 - DNA, 80 bp, synthetic construct
  source 1..80: mol_type = other DNA
ccttcttccgtagctcaccctatgcatctcttcatctgtatcctttgtaatatcatttacaagaaacaggcaagtgtaaa

SEQ ID NO: 35918 - DNA, 80 bp, synthetic construct; identical to SEQ ID NO: 12865
  source 1..80: mol_type = other DNA

SEQ ID NO: 35919 - DNA, 80 bp, synthetic construct
  source 1..80: mol_type = other DNA
cttttctcgtctctttacttaaggaattttaacttcttcccttttatttcttctgctattaagtgattatacagtggctc

SEQ ID NO: 35920 - DNA, 80 bp, synthetic construct
  source 1..80: mol_type = other DNA
tcaagtgtttttgttaagtctgctaaaataatccagaaacacaacaagtgtcttcaaaattatgattttttgttttattg

SEQ ID NO: 35921 - DNA, 80 bp, synthetic construct; identical to SEQ ID NO: 12866
  source 1..80: mol_type = other DNA

SEQ ID NO: 35922 - DNA, 80 bp, synthetic construct
  source 1..80: mol_type = other DNA
attactacctagtacttcattcaattaagtattatcaaatctttgctactgtcaaaacaattttaatagtagtcataata

SEQ ID NO: 35923 - DNA, 80 bp, synthetic construct
  source 1..80: mol_type = other DNA
ttttactcggttttcaaatttttactcaactttttctcctctgttatttctagtggtaatttttgataatttccctcctt

SEQ ID NO: 35924 - DNA, 80 bp, synthetic construct
  source 1..80: mol_type = other DNA
tatggtatgattgtgttgtctagcaacaccattcaccacccttttcaataaagagcagcgtatggcagatgcatctgaaa

SEQ ID NO: 35925 - DNA, 80 bp, synthetic construct
  source 1..80: mol_type = other DNA
tacaggggatcaaggccctttgtttcgggttaaaagttgtcagatggaggatgctaaggggagaacgctaagtgaaaatg

SEQ ID NO: 35926 - DNA, 80 bp, synthetic construct; identical to SEQ ID NO: 12867
  source 1..80: mol_type = other DNA

SEQ ID NO: 35927 - DNA, 80 bp, synthetic construct
  source 1..80: mol_type = other DNA
ttgtaacaatttaataatttttcctcagattttcataaatatgggagatagaaattctaaatattaggctgggtgtggtg

SEQ ID NO: 35928 - DNA, 80 bp, synthetic construct
  source 1..80: mol_type = other DNA
gaggccaaggcaggccgatcacttgagtccaagagtttgagaacagtctgggcagcataacgaaaccctgtctctactaa

SEQ ID NO: 35929 - DNA, 80 bp, synthetic construct
  source 1..80: mol_type = other DNA
cttactacgggaaaacaattacaaagagatgcaaaccatatttgtactaaaaagtataaaagagaaaaacataaaattag

SEQ ID NO: 35930 - DNA, 80 bp, synthetic construct; identical to SEQ ID NO: 12868
  source 1..80: mol_type = other DNA

SEQ ID NO: 35931 - DNA, 80 bp, synthetic construct
  source 1..80: mol_type = other DNA
gatatttaatacacaaagaaaatgttttgtcctctcaaacgataaaaagctacagggtaaaaaaaaaggagggacttaaa

SEQ ID NO: 35932 - DNA, 80 bp, synthetic construct
  source 1..80: mol_type = other DNA
acataaatcctttgtaagcattagaaaatagaactgacgttacagacagaaagacaatttactagtatcacagatcaatt

SEQ ID NO: 35933 - DNA, 80 bp, synthetic construct; identical to SEQ ID NO: 12869
  source 1..80: mol_type = other DNA

SEQ ID NO: 35934 - DNA, 80 bp, synthetic construct
  source 1..80: mol_type = other DNA
aaattcaaccaaattaaaaataagaacatttattcatcaaaatttaaaaagagtgaaaagatatgccacaaactgaggga

SEQ ID NO: 35935 - DNA, 80 bp, synthetic construct
  source 1..80: mol_type = other DNA
cacacaagagaaacatgcaaagccctaagcataaaacgatgttcaaactcattagattcatcccttactagtaatttggg

SEQ ID NO: 35936 - DNA, 80 bp, synthetic construct
  source 1..80: mol_type = other DNA
ttctgctacaatgttctacatttgcagcctctatgaccccctacactctaaagactcttttccacatatgtaccaggaga

SEQ ID NO: 35937 - DNA, 80 bp, synthetic construct
  source 1..80: mol_type = other DNA
ttaaagataaccactattattttttaaaggggaattttcctcctaaatcactacagaagacaataaaatataccagagta

SEQ ID NO: 35938 - DNA, 80 bp, synthetic construct; identical to SEQ ID NO: 12870
  source 1..80: mol_type = other DNA

SEQ ID NO: 35939 - DNA, 80 bp, synthetic construct
  source 1..80: mol_type = other DNA
ttctttattgttcatcttccttatctacactgtgcacactgtgtgatatgacttgttcaaacagagacctgacagtattg

SEQ ID NO: 35940 - DNA, 80 bp, synthetic construct
  source 1..80: mol_type = other DNA
aggcaattattctatactttctcactaccatgtaagtgaatgagaaaatgataacaaatatagcaacaggaaaaacatgc

SEQ ID NO: 35941 - DNA, 80 bp, synthetic construct
  source 1..80: mol_type = other DNA
taggcaaaactgtaatacgaaaaatacttttcaaaaaataaaatgagaaaatgtttatacccaagacctatccaagctgt

SEQ ID NO: 35942 - DNA, 80 bp, synthetic construct; identical to SEQ ID NO: 12871
  source 1..80: mol_type = other DNA

SEQ ID NO: 35943 - DNA, 80 bp, synthetic construct
  source 1..80: mol_type = other DNA
tagagaaccatgcagatatatacataagaagatatatacagagaggtttacggtcacatgatttgcaatggtaaagactc

SEQ ID NO: 35944 - DNA, 80 bp, synthetic construct
  source 1..80: mol_type = other DNA
gttaaattctgccttgtatgtaacaactagcagaagacttttctagaagtctttatacgatgaacaattcattataacgc

SEQ ID NO: 35945 - DNA, 80 bp, synthetic construct; identical to SEQ ID NO: 12872
  source 1..80: mol_type = other DNA

SEQ ID NO: 35946 - DNA, 80 bp, synthetic construct
  source 1..80: mol_type = other DNA
atttataagtgtctgttgtctgtctttccgtgactagaatgagagtcccatgaagcaaaacttttggtctgttttgttat

SEQ ID NO: 35947 - DNA, 80 bp, synthetic construct
  source 1..80: mol_type = other DNA
ggtatgaaatcttagttgaagcctgaaggtcaagattggattcagtaaacatatttgaatggtgattgttttcaggcctg

SEQ ID NO: 35948 - DNA, 80 bp, synthetic construct
  source 1..80: mol_type = other DNA
taagacagatgttagataaaaactgaggccaaggaagagatgggcagaaggaatactgaatagtgaggatggcgactcga

SEQ ID NO: 35949 - DNA, 80 bp, synthetic construct; identical to SEQ ID NO: 12873
  source 1..80: mol_type = other DNA

SEQ ID NO: 35950 - DNA, 80 bp, synthetic construct
  source 1..80: mol_type = other DNA
gtttgtagaggaggaaatattgctgcagaaggagagggaaaaaatgtctactgccttgtatgtgtctgcttcttccatag

SEQ ID NO: 35951 - DNA, 80 bp, synthetic construct
  source 1..80: mol_type = other DNA
atatgagatgcatttaatttttctcaccacaggtgttctcaagcttctatatactctgtgcttgtggttgttctaagata

SEQ ID NO: 35952 - DNA, 80 bp, synthetic construct
  source 1..80: mol_type = other DNA
ttattgcatcttgttctgttccttcaagccatcctccttcaccctctgattaaccacacagttccattcttctcacaata

SEQ ID NO: 35953 - DNA, 80 bp, synthetic construct; identical to SEQ ID NO: 12874
  source 1..80: mol_type = other DNA

SEQ ID NO: 35954 - DNA, 80 bp, synthetic construct
  source 1..80: mol_type = other DNA
atattgtgaggttttctctaatttgataatagaagagatggaaatgcatgcagttacatggccacagacagataacttcc

SEQ ID NO: 35955 - DNA, 80 bp, synthetic construct
  source 1..80: mol_type = other DNA
attactcatgtggtggctaagcatggcttccacaagacagcttctttactggccttctgttaatgagttagaggtatgac

SEQ ID NO: 35956 - DNA, 80 bp, synthetic construct
  source 1..80: mol_type = other DNA
tagtagcatagtttagtctctggaatctttgtttcattcatttaagtagccacgaggtgccaggtattgttgtagaccct

SEQ ID NO: 35957 - DNA, 80 bp, synthetic construct; identical to SEQ ID NO: 12875
  source 1..80: mol_type = other DNA

SEQ ID NO: 35958 - DNA, 80 bp, synthetic construct
  source 1..80: mol_type = other DNA
ataggggcttgtaggctataataggaccaggttttattctgagtgacacaggaagacaatggaaaacataatctatttta

SEQ ID NO: 35959 - DNA, 80 bp, synthetic construct
  source 1..80: mol_type = other DNA
taaatttattaaacgagtgcctgcttctgtcagtctgatattggtattaagagctcacgtagttctaaactctgtcctaa

SEQ ID NO: 35960 - DNA, 80 bp, synthetic construct
  source 1..80: mol_type = other DNA
tgagttgtagaagcctttaggtaaatgaaaaagcaaaattaactactcaacaaaacactaacaaaccaaactcaacagca

SEQ ID NO: 35961 - DNA, 80 bp, synthetic construct
  source 1..80: mol_type = other DNA
aactgaatatcctttcattatacaaatactgtaatcattaggtgtagaaaaaatgtacgtgaacacaataaaagccatgt

SEQ ID NO: 35962 - DNA, 80 bp, synthetic construct; identical to SEQ ID NO: 12876
  source 1..80: mol_type = other DNA

SEQ ID NO: 35963 - DNA, 80 bp, synthetic construct
  source 1..80: mol_type = other DNA
attaagaacaaatgtttccaaggagttaaactatttatatcatgaaaaccataaatctttgaagaaaacaattgaagaag

SEQ ID NO: 35964 - DNA, 80 bp, synthetic construct
  source 1..80: mol_type = other DNA
tcaacggcattaaataccttgacaaatggggccacagtaggccataaaggaagggttctcacatacactcttgataacat

SEQ ID NO: 35965 - DNA, 80 bp, synthetic construct
  source 1..80: mol_type = other DNA
aataataaaaagtactacttagtgagcatttaccatgtgctaaactttgtattatacccttttaaaattcctcagttcat

SEQ ID NO: 35966 - DNA, 80 bp, synthetic construct; identical to SEQ ID NO: 12877
  source 1..80: mol_type = other DNA

SEQ ID NO: 35967 - DNA, 80 bp, synthetic construct
  source 1..80: mol_type = other DNA
gtttaagccaataaaaagagtctatccaagagtatctcacaaaacacaaagttgcaaaactctccctacacaaagccatg

SEQ ID NO: 35968 - DNA, 80 bp, synthetic construct
  source 1..80: mol_type = other DNA
tcattttattcctgctcaaacagcccagaatgaaaaagaatctcttgtcatagatatctaggagagaatctgatttcccc

SEQ ID NO: 35969 - DNA, 80 bp, synthetic construct
  source 1..80: mol_type = other DNA
gtctatgccaataaacttgtggatttgtgtggtaggtaccttcagaagtatacatcacagtcaaatttatccagaatttg

SEQ ID NO: 35970 - DNA, 80 bp, synthetic construct; identical to SEQ ID NO: 12878
  source 1..80: mol_type = other DNA

SEQ ID NO: 35971 - DNA, 80 bp, synthetic construct
  source 1..80: mol_type = other DNA
ccctagaatcccaaaccccttttcctttgtgttatcacttctgcacgatttatctccctttattaaaatggtatgtaagc

SEQ ID NO: 35972 - DNA, 80 bp, synthetic construct
  source 1..80: mol_type = other DNA
gaggttaaaggaaaaggtttttcttcccctacatacattacacataaatgtagtatatacagttattgatatttggagct

SEQ ID NO: 35973 - DNA, 80 bp, synthetic construct
  source 1..80: mol_type = other DNA
atattccattctgtctcactaatgactactgaatcaaagcatgaccatgcaaatagggtataacacattttttttgtaat

SEQ ID NO: 35974 - DNA, 80 bp, synthetic construct
  source 1..80: mol_type = other DNA
tccacatttttgttcatattcattttaagtgcatgactgcaggaaggcgtttctcatgctatttctctgtggtccctgat

SEQ ID NO: 35975 - DNA, 80 bp, synthetic construct; identical to SEQ ID NO: 12879
  source 1..80: mol_type = other DNA

SEQ ID NO: 35976 - DNA, 80 bp, synthetic construct
  source 1..80: mol_type = other DNA
tgaataggggaacgattagaaagacagctgccattgtatgcccattcgggaaaacagcaaaactcacatatttatttgct

SEQ ID NO: 35977 - DNA, 80 bp, synthetic construct
  source 1..80: mol_type = other DNA
gcaaatacagtaatatgcttcattaatatcttttaaaatatacatattttgttttcatagaaatagtcttaacacacatc

SEQ ID NO: 35978 - DNA, 80 bp, synthetic construct
  source 1..80: mol_type = other DNA
gatcccttctcaatattcttggactaatacgtagtctataagaacaacttcttctcccaagagaaatttccttgtcagac

SEQ ID NO: 35979 - DNA, 80 bp, synthetic construct; identical to SEQ ID NO: 12880
  source 1..80: mol_type = other DNA

SEQ ID NO: 35980 - DNA, 80 bp, synthetic construct
  source 1..80: mol_type = other DNA
gtcttccattaccatcctcagtatcttgctgctcagtacttctccatggtttttccatatacattgttctctatccacta

SEQ ID NO: 35981 - DNA, 80 bp, synthetic construct
  source 1..80: mol_type = other DNA
tactatgcacattgactcatttactctatcaggtagatattattctcttaatttagagatgaggaaatggagacagtaat

SEQ ID NO: 35982 - DNA, 80 bp, synthetic construct; identical to SEQ ID NO: 12881
  source 1..80: mol_type = other DNA

SEQ ID NO: 35983 - DNA, 80 bp, synthetic construct
  source 1..80: mol_type = other DNA
ataaaagtaacaaggctgatggctgacaattacaaacgagtttaatttgtgtgtcacatggatgtggagaaagttgcaat

SEQ ID NO: 35984 - DNA, 80 bp, synthetic construct
  source 1..80: mol_type = other DNA
aatctctgacaacactggtccatgtgtggaatgaagcactaggaaaaaacatacttttaaagagggatactaatatatat

SEQ ID NO: 35985 - DNA, 80 bp, synthetic construct
  source 1..80: mol_type = other DNA
ctcttggtacttttcttcatgctccagtctacgacttcagccatgcagtactgacaccgtttcaatcccttaacttcaat

SEQ ID NO: 35986 - DNA, 80 bp, synthetic construct; identical to SEQ ID NO: 12882
  source 1..80: mol_type = other DNA

SEQ ID NO: 35987 - DNA, 80 bp, synthetic construct
  source 1..80: mol_type = other DNA
gtggtgttacagaaatactgaaaagtgtgatgcaataaattaattctttaagggggttcattactccagaaggtaactta

SEQ ID NO: 35988 - DNA, 80 bp, synthetic construct
  source 1..80: mol_type = other DNA
cggaaaccaatcaatagcttcatattttacttgctgtttcagggtatactttgtattcttacagaaatctaggtgtatgt

SEQ ID NO: 35989 - DNA, 80 bp, synthetic construct
  source 1..80: mol_type = other DNA
tctcatccaccagaatataagttttggaagagtaaagtacacagttgtattctcagcaccaaaagcagtgtttaacacac

SEQ ID NO: 35990 - DNA, 80 bp, synthetic construct
  source 1..80: mol_type = other DNA
cgtggggagaaaatgactaaacaaccaaacaagtaaaatatgaaaaatagtatgttagatggcaatatgttctatgaaga

SEQ ID NO: 35991 - DNA, 80 bp, synthetic construct; identical to SEQ ID NO: 12883
  source 1..80: mol_type = other DNA

SEQ ID NO: 35992 - DNA, 80 bp, synthetic construct
  source 1..80: mol_type = other DNA
ttacaaatcatgaacatttatgccacttatgtttacataatttacttgcagaactaggtgcatacagggtttttctcaaa

SEQ ID NO: 35993 - DNA, 80 bp, synthetic construct
  source 1..80: mol_type = other DNA
actcagaggaattgctttttattctggaaatacaagacaaaattatcctaaactaagttgaactgcaatcttgcagttac

SEQ ID NO: 35994 - DNA, 80 bp, synthetic construct; identical to SEQ ID NO: 12884
  source 1..80: mol_type = other DNA

SEQ ID NO: 35995 - DNA, 80 bp, synthetic construct
  source 1..80: mol_type = other DNA
tgaatcttaattccagagatgtgaaactgtgataaaatatgcatcagagaattgatcaaatatggcaagtaccacaatga

SEQ ID NO: 35996 - DNA, 80 bp, synthetic construct
  source 1..80: mol_type = other DNA
ttgcctagatgacaaagtgattatttttgctaccaacatagcaaaagaaaagccaggcaggaataggcatgaataattcg

SEQ ID NO: 35997 - DNA, 80 bp, synthetic construct
  source 1..80: mol_type = other DNA
agaggcataattgagattttccactgttcccatcttgaaatctacaactagactctaaactttctacccaaaatgccttt

SEQ ID NO: 35998 - DNA, 80 bp, synthetic construct
  source 1..80: mol_type = other DNA
atttttccctctctaatttttttccctctgctgaaattttaagctcgcattttctttaaagtgttattttctttaatttt

SEQ ID NO: 35999 - DNA, 80 bp, synthetic construct; identical to SEQ ID NO: 12885
  source 1..80: mol_type = other DNA

SEQ ID NO: 36000 - DNA, 80 bp, synthetic construct
  source 1..80: mol_type = other DNA
atgcgtcatgactggtagtgcaattcagaagttaatgtaatgaccaggaaatcccacagagtgagccagcaagtacttct

SEQ ID NO: 36001 - DNA, 80 bp, synthetic construct
  source 1..80: mol_type = other DNA
ggcactgaggcactacatttaagttggcactcagttttaggatcacgcaagtaatgtcccagcttcccaacatggggttc

SEQ ID NO: 36002 - DNA, 80 bp, synthetic construct; identical to SEQ ID NO: 12886
  source 1..80: mol_type = other DNA

SEQ ID NO: 36003 - DNA, 80 bp, synthetic construct
  source 1..80: mol_type = other DNA
taaaagtaacttttttcctccactcccatccttcccacccagtctatataaatatttaatggacagagagacaaaatgag

SEQ ID NO: 36004 - DNA, 80 bp, synthetic construct
  source 1..80: mol_type = other DNA
tagattgaaccatgaacttctctgaaccccagtgttgagtggaacatcagaatgactgtcatcttttcaagaatggcttc

SEQ ID NO: 36005 - DNA, 80 bp, synthetic construct
  source 1..80: mol_type = other DNA
atgaaaatgaaagatgactccaaagtccccatgatggtgaccagtgggaagatggcatgaaaaatcagctgggcttacct

SEQ ID NO: 36006 - DNA, 80 bp, synthetic construct; identical to SEQ ID NO: 12887
  source 1..80: mol_type = other DNA

SEQ ID NO: 36007 - DNA, 80 bp, synthetic construct
  source 1..80: mol_type = other DNA
gagaaagtattttcaaatatcatataacaggaggcaagggtagaacaggtattgctttcttactgggtatctggtgaaaa

SEQ ID NO: 36008 - DNA, 80 bp, synthetic construct
  source 1..80: mol_type = other DNA
aaatttaacagatcccagtagctggctatccatgaaagcgtgaatgagattgactgctagttgtactaattaagtggatt

SEQ ID NO: 36009 - DNA, 80 bp, synthetic construct
  source 1..80: mol_type = other DNA
ttagaaaaacatattaatctatccttcctccatggaagtcccctactatgctcttgtggttctcatctcacctctcatag

SEQ ID NO: 36010 - DNA, 80 bp, synthetic construct
  source 1..80: mol_type = other DNA
attattgtttttctagattactgagtctttgttagccccttatattttgaacctcaggccagtgcctcacttgcctcact

SEQ ID NO: 36011 - DNA, 80 bp, synthetic construct
  source 1..80: mol_type = other DNA
ttctttatctccatcccagaccctttactaatcttcaacttttgcagtgatccacaggcacaagacctcaaataatccaa

SEQ ID NO: 36012 - DNA, 80 bp, synthetic construct; identical to SEQ ID NO: 12888
  source 1..80: mol_type = other DNA

SEQ ID NO: 36013 - DNA, 80 bp, synthetic construct
  source 1..80: mol_type = other DNA
tcacataaatttcaatgtggcaagtggcacagacaataaatgtgaaacaaacgagtgactgagattgtgaagctcatgca

SEQ ID NO: 36014 - DNA, 80 bp, synthetic construct
  source 1..80: mol_type = other DNA
tgtggaactgtgaataggtttcttatgcttccatgtgcctcaattccctcatctatgaatggatgataaaatataatgta

SEQ ID NO: 36015 - DNA, 80 bp, synthetic construct
  source 1..80: mol_type = other DNA
aagtctaataattggctaattggctgtctttaactgcctttccttttaattttcacctagcataagttttctgatttgta

SEQ ID NO: 36016 - DNA, 80 bp, synthetic construct; identical to SEQ ID NO: 12889
  source 1..80: mol_type = other DNA

SEQ ID NO: 36017 - DNA, 80 bp, synthetic construct
  source 1..80: mol_type = other DNA
attcacctctgagtagcattcaatacagtgcctgaaataagatgcttcgagcaccaaagaaatagaaaaaaggaagaaga

SEQ ID NO: 36018 - DNA, 80 bp, synthetic construct
  source 1..80: mol_type = other DNA
tatatagatagagagacagtaatgcaggctagaaatataaaggaatcttcaatctaaagatagtattaaaagtaaggaga

SEQ ID NO: 36019 - DNA, 80 bp, synthetic construct; identical to SEQ ID NO: 12890
  source 1..80: mol_type = other DNA

SEQ ID NO: 36020 - DNA, 80 bp, synthetic construct
  source 1..80: mol_type = other DNA
catatttcacttttgggaataaaccttactgctctgagaaattcatgaatgtcacagagagtcttcaaactaacagacat

SEQ ID NO: 36021 - DNA, 80 bp, synthetic construct
  source 1..80: mol_type = other DNA
gtgcatatatatataaaggtatggttatgtgtaagtgtacacaatcactattgaatacagtgatgttaaatcctttttcc

SEQ ID NO: 36022 - DNA, 80 bp, synthetic construct
  source 1..80: mol_type = other DNA
gcctaagataatcctctttgtgcttaattctttatctatattcctaattctttccttcagatatgttattagaaaataaa

SEQ ID NO: 36023 - DNA, 80 bp, synthetic construct; identical to SEQ ID NO: 12891
  source 1..80: mol_type = other DNA

SEQ ID NO: 36024 - DNA, 80 bp, synthetic construct
  source 1..80: mol_type = other DNA
cttgtagcatccgtaggtataaatagcatccctaggtatagcatcacaggtccaaatgaatattgtcaaagatattgtca

SEQ ID NO: 36025 - DNA, 80 bp, synthetic construct
  source 1..80: mol_type = other DNA
caaaataaagaaagtctccatttcgaaataaagtcctgaccataaatactttgaaaacttataaatgcgagacattaggg

SEQ ID NO: 36026 - DNA, 80 bp, synthetic construct
  source 1..80: mol_type = other DNA
tgctaaatgacgagttaatgggtgcagcacaccagcacatggcacatgtatacatatgtaactaacctgcacattgtgca

SEQ ID NO: 36027 - DNA, 80 bp, synthetic construct; identical to SEQ ID NO: 12892
  source 1..80: mol_type = other DNA

SEQ ID NO: 36028 - DNA, 80 bp, synthetic construct
  source 1..80: mol_type = other DNA
ttcaaaaaaaattgcccagtggctggtgatagaaaaacttaaaattagataaatacaagcacacatgagcacacaccctc

SEQ ID NO: 36029 - DNA, 80 bp, synthetic construct
  source 1..80: mol_type = other DNA
tactgtctcactcattaatttgggaatgttaatttggggtaatctggggaaatcagataaaaagacatttctttcaaaat

SEQ ID NO: 36030 - DNA, 80 bp, synthetic construct
  source 1..80: mol_type = other DNA
ttctagcaataatctcagagaaatgctgttttgctcctacacctcacctggaaatattaggtgttcatagaacatctaat

SEQ ID NO: 36031 - DNA, 80 bp, synthetic construct
  source 1..80: mol_type = other DNA
aaattttggcaccaaactaaatttacaggttgcatatcccttatcaaaaatgcttgacaacagatttgtttcagatttgg

SEQ ID NO: 36032 - DNA, 80 bp, synthetic construct
  source 1..80: mol_type = other DNA
ctaagtgtatgtaaaatcttgccttacaatgtgtggagtgaggtaattttcagcatgaaatagtgtatcagtggtactta

SEQ ID NO: 36033 - DNA, 80 bp, synthetic construct; identical to SEQ ID NO: 12893
  source 1..80: mol_type = other DNA

SEQ ID NO: 36034 - DNA, 80 bp, synthetic construct
  source 1..80: mol_type = other DNA
ctcaggcgatcctcccaccttagtctcccaagtagctcggactacaggcgtacgctaccacacctggctaatttttatat

SEQ ID NO: 36035 - DNA, 80 bp, synthetic construct
  source 1..80: mol_type = other DNA
cttacaggcccctaaagaaagggttagccaggaaagaaaacttaggaatcacaaaaaaaaaaagatacatgtaaatcaga

SEQ ID NO: 36036 - DNA, 80 bp, synthetic construct
  source 1..80: mol_type = other DNA
tgttatcattgatataatgacatcattatatcaatgtatatcattatacattgacaaaaagctaaaatatatgtttaaaa

SEQ ID NO: 36037 - DNA, 80 bp, synthetic construct; identical to SEQ ID NO: 12894
  source 1..80: mol_type = other DNA

SEQ ID NO: 36038 - DNA, 80 bp, synthetic construct
  source 1..80: mol_type = other DNA
ggaaattaatggaggaagatttggattcagatataaattaaaaagtggcagctgagattgtattagaaatcattccagct

SEQ ID NO: 36039 - DNA, 80 bp, synthetic construct
  source 1..80: mol_type = other DNA
tttcagtctaaacagtaactgctgctttaagaattttcttcccttctaaactgtgaatgtgttgagttgcgggattcctg

SEQ ID NO: 36040 - DNA, 80 bp, synthetic construct
  source 1..80: mol_type = other DNA
ctttgagtaaaccattgatctttttgatctttgatttcctcacatgcaaaatagggcaacacctgaatcagaagtaaaga

SEQ ID NO: 36041 - DNA, 80 bp, synthetic construct; identical to SEQ ID NO: 12895
  source 1..80: mol_type = other DNA

SEQ ID NO: 36042 - DNA, 80 bp, synthetic construct
  source 1..80: mol_type = other DNA
tcaacatatctaaagtaatcattttctaggtgatatcttagctgattttataagagtatcacatgctaatatgaagaatt

SEQ ID NO: 36043 - DNA, 80 bp, synthetic construct
  source 1..80: mol_type = other DNA
ttcacatccattatgtaacttaacttacaaacagctactactctctcaatacttaggatgagcaaataaattgagggtga

SEQ ID NO: 36044 - DNA, 80 bp, synthetic construct
  source 1..80: mol_type = other DNA
atgtttaaataatatcaatttgcacctgagtagctcaatgaaaaattaatttcaaaccctgtcttgagcaagccagtaaa

SEQ ID NO: 36045 - DNA, 80 bp, synthetic construct; identical to SEQ ID NO: 12896
  source 1..80: mol_type = other DNA

SEQ ID NO: 36046 - DNA, 80 bp, synthetic construct
  source 1..80: mol_type = other DNA
gtatctcccagagaggggtaagatgccagcatttctcattttctctctcccccatgctacacagagacaaaactgcaact

SEQ ID NO: 36047 - DNA, 80 bp, synthetic construct
  source 1..80: mol_type = other DNA
cacaaggaagagcaagctgagaggactagaggctattgcctatacctagtactttgctcataaagcagaaatttaactct

SEQ ID NO: 36048 - DNA, 80 bp, synthetic construct
  source 1..80: mol_type = other DNA
aacagagaggtccccccaaaggaactgactttatttgaacctgtatgcagggaagttcaaacctaagagtactcttataa

SEQ ID NO: 36049 - DNA, 80 bp, synthetic construct
  source 1..80: mol_type = other DNA
ttctcctggagttacaaaaaacctcaaggactcacctcaaaaactaccactgaaaaaaggcccaaatttaactgaatcac

SEQ ID NO: 36050 - DNA, 80 bp, synthetic construct; identical to SEQ ID NO: 12897
  source 1..80: mol_type = other DNA

SEQ ID NO: 36051 - DNA, 80 bp, synthetic construct
  source 1..80: mol_type = other DNA
gcctgtggtctcagctactcagaaggctgaagcaggaggatcgcttgagcctgggaggtcaaggatgcagtgagctgtga

SEQ ID NO: 36052 - DNA, 80 bp, synthetic construct
  source 1..80: mol_type = other DNA
tcttcaatttaaaaaagtatgagccatgcaaagaaacagaattgtgtgatccatacagacacacaaaaaaaggagacaac

SEQ ID NO: 36053 - DNA, 80 bp, synthetic construct
  source 1..80: mol_type = other DNA
cccatgctgctgttctcatgatagtgagtgagttctcacgatatgtgatggttttataagtgacttttccgtctttgcta

SEQ ID NO: 36054 - DNA, 80 bp, synthetic construct; identical to SEQ ID NO: 12898
  source 1..80: mol_type = other DNA

SEQ ID NO: 36055 - DNA, 80 bp, synthetic construct
  source 1..80: mol_type = other DNA
aattaacagagcctcaatgatatgtgatacaccactgagcaaaccaaaatactgtaatgggattacctgaaaaagaaaag

SEQ ID NO: 36056 - DNA, 80 bp, synthetic construct
  source 1..80: mol_type = other DNA
tatattacactataccttcaggaagctcaatgaatgtgaagtatgctaaatgtaaagagatccacacaaagaacatcagt

SEQ ID NO: 36057 - DNA, 80 bp, synthetic construct
  source 1..80: mol_type = other DNA
accagagagaagtgggataagacatacaaagtattaaaagaaaaaaaaatgtgaaccatgactcctatacccaacaaaac

SEQ ID NO: 36058 - DNA, 80 bp, synthetic construct
  source 1..80: mol_type = other DNA
ggtcaggagttcaagaccagcctggccaacatggtgaaaccctgtctctactaaaaatacaaaaattagccaggcatggt

SEQ ID NO: 36059 - DNA, 80 bp, synthetic construct; identical to SEQ ID NO: 12899
  source 1..80: mol_type = other DNA

SEQ ID NO: 36060 - DNA, 80 bp, synthetic construct
  source 1..80: mol_type = other DNA
aatgacatatcatgcaaatagcagcagcatgaaagctgcagtgcccatactaatatcagaacaacaaacttttaaagaaa

SEQ ID NO: 36061 - DNA, 80 bp, synthetic construct
  source 1..80: mol_type = other DNA
atttgaaaggaaacaaatctttaaacaatactaattaaagacttcaatactccacattaaacagtggatagaacaactag

SEQ ID NO: 36062 - DNA, 80 bp, synthetic construct
  source 1..80: mol_type = other DNA
cttctactaacttaaaaatattaaatcatacaaaatagttctccctcttcaatggaatagaattagatatcaataacaga

SEQ ID NO: 36063 - DNA, 80 bp, synthetic construct; identical to SEQ ID NO: 12900
  source 1..80: mol_type = other DNA

SEQ ID NO: 36064 - DNA, 80 bp, synthetic construct
  source 1..80: mol_type = other DNA
taaattctacattcagtcgatttagccatatactttattcactgtaataccactaaaacttcctttattagctcaatata

SEQ ID NO: 36065 - DNA, 80 bp, synthetic construct
  source 1..80: mol_type = other DNA
gtggtgtattccttatgatgaaataatactaacaggacctattttacaaagccagtattagaagattcaagtaatctcat

SEQ ID NO: 36066 - DNA, 80 bp, synthetic construct
  source 1..80: mol_type = other DNA
ccaggtaacatgcaagaaagatggctgcatttattttagtttttatttccataatccatattgtgataaatgatcatgtt

SEQ ID NO: 36067 - DNA, 80 bp, synthetic construct; identical to SEQ ID NO: 12901
  source 1..80: mol_type = other DNA

SEQ ID NO: 36068 - DNA, 80 bp, synthetic construct
  source 1..80: mol_type = other DNA
tggatgaattgagcactttaagaagcccattaaccctttcagatacagggtacattacttatacagggagatttttctct

SEQ ID NO: 36069 - DNA, 80 bp, synthetic construct
  source 1..80: mol_type = other DNA
aaatgaaatcaaataagagttatatattgtcaccgtttggtctgttaacactattctgtgaagcagtggaatgcggaaac

SEQ ID NO: 36070 - DNA, 80 bp, synthetic construct; identical to SEQ ID NO: 12902
  source 1..80: mol_type = other DNA

SEQ ID NO: 36071 - DNA, 80 bp, synthetic construct
  source 1..80: mol_type = other DNA
tggtaattacttgctataattctgagccattaaaatgatacacatgttgctgacattttgtacttacatgcttaagatga

SEQ ID NO: 36072 - DNA, 80 bp, synthetic construct
  source 1..80: mol_type = other DNA
aaacatgtttttcccatttctttcataattggacagaaatactttgatttcaatataacattgtgctgtggtgccaattt

SEQ ID NO: 36073 - DNA, 80 bp, synthetic construct
  source 1..80: mol_type = other DNA
aaatttttcagtttatttgcttaacagtctcttgtttaaaagccccagtctcagccagttatcccacgcttctccatgtc

SEQ ID NO: 36074 - DNA, 80 bp, synthetic construct; identical to SEQ ID NO: 12903
  source 1..80: mol_type = other DNA

SEQ ID NO: 36075 - DNA, 80 bp, synthetic construct
  source 1..80: mol_type = other DNA
aaggccaattttccctttatgcacagtgggtaactcactgcagttgattaaaaatttatgaaggaaagaatctctgatag

SEQ ID NO: 36076 - DNA, 80 bp, synthetic construct
  source 1..80: mol_type = other DNA
aatgcaaaagatgtttagagtggtgcatgcagtaagtgcttaccacatgttatctatgtatgtaatagaactaggtttta

SEQ ID NO: 36077 - DNA, 80 bp, synthetic construct
  source 1..80: mol_type = other DNA
agaggaaaccaaatcactgactgagtcatgggtctctgaacttatcattgccctaagccctgcaatttcaaaggcagact

SEQ ID NO: 36078 - DNA, 80 bp, synthetic construct; identical to SEQ ID NO: 12904
  source 1..80: mol_type = other DNA

SEQ ID NO: 36079 - DNA, 80 bp, synthetic construct
  source 1..80: mol_type = other DNA
aaatagtttacacattttaaaatatcatgtctattatgtcactctcacactcaacaaggtaaggtgagccagaggaagct

SEQ ID NO: 36080 - DNA, 80 bp, synthetic construct
  source 1..80: mol_type = other DNA
attaacctcacaattcttaatacagaacagagcatgccaaaggtagtgactaattctgacatagacaatttagtctgttc

SEQ ID NO: 36081 - DNA, 80 bp, synthetic construct
  source 1..80: mol_type = other DNA
gcagtgtgatcatgttgcagagagagaggatgagaatgagagaaagctctctgtagtcttttcttataagaagcactaat

SEQ ID NO: 36082 - DNA, 80 bp, synthetic construct; identical to SEQ ID NO: 12905
  source 1..80: mol_type = other DNA

SEQ ID NO: 36083 - DNA, 80 bp, synthetic construct
  source 1..80: mol_type = other DNA
aaaacattaataacatatatactttatatatactgtttgtatatttttattataggaattgagaaataaagtgtcaaatg

SEQ ID NO: 36084 - DNA, 80 bp, synthetic construct
  source 1..80: mol_type = other DNA
aaatgtgtaactatgaaaatacacgttggaatatcttgcatttgcaaaaagttgaacatatgtataaatttatacaaaat

SEQ ID NO: 36085 - DNA, 80 bp, synthetic construct
  source 1..80: mol_type = other DNA
tgcctggctcctatgtaaaattggccttagagggcctttttcaagtagtatgaaaagtattatgatttacctttaatcta

SEQ ID NO: 36086 - DNA, 80 bp, synthetic construct
  source 1..80: mol_type = other DNA
atgaaagcaggacctgggctaactgagtttaaatgttttacaaattaagtaaatagaggaagtagcatgattttcaggtt

SEQ ID NO: 36087 - DNA, 80 bp, synthetic construct; identical to SEQ ID NO: 12906
  source 1..80: mol_type = other DNA

SEQ ID NO: 36088 - DNA, 80 bp, synthetic construct
  source 1..80: mol_type = other DNA
atgcctagagagaatgctttccatttaaacagtagtattagctgtatatgcagtatggagtcacatcaagatatcccaat

SEQ ID NO: 36089 - DNA, 80 bp, synthetic construct
  source 1..80: mol_type = other DNA
tacatactatttgacctaatctagcttctttccagggattaataaaattaacttggcatcttttttgggtccctaggatt

SEQ ID NO: 36090 - DNA, 80 bp, synthetic construct
  source 1..80: mol_type = other DNA
aacaggaaaatattatcagataagctggaaaagggcatgaacagatcacagaagaatgcatacatatctccaatttaaag

SEQ ID NO: 36091 - DNA, 80 bp, synthetic construct; identical to SEQ ID NO: 12907
  source 1..80: mol_type = other DNA

SEQ ID NO: 36092 - DNA, 80 bp, synthetic construct
  source 1..80: mol_type = other DNA
acatatccctgccaaaaacatgtacccattatcagtcacttccagttttccccaaacctccagatttaagcaccattaat

SEQ ID NO: 36093 - DNA, 80 bp, synthetic construct
  source 1..80: mol_type = other DNA
atatagcattttacttgtatatgtgttataaaccccatactttactgtttaatttaaatgaccaattctcttaatgaggt

SEQ ID NO: 36094 - DNA, 80 bp, synthetic construct
  source 1..80: mol_type = other DNA
tttcctttaatatttcttgtaatgcgggtctgctgcttataaatgtttgcaacttttgtatgcctgaaaaagtctctact

SEQ ID NO: 36095 - DNA, 80 bp, synthetic construct; identical to SEQ ID NO: 12908
  source 1..80: mol_type = other DNA

SEQ ID NO: 36096 - DNA, 80 bp, synthetic construct
  source 1..80: mol_type = other DNA
catgtatatgaggccactcgaagttgttccacagctcactgatagtcttttcatttttttctctctctgtgtttcatttt

SEQ ID NO: 36097 - DNA, 80 bp, synthetic construct
  source 1..80: mol_type = other DNA
ttgaacatatagaatacagttataatgacagttttaatgttcttctctgctaatttaacatctgtgtcggctttggattt

SEQ ID NO: 36098 - DNA, 80 bp, synthetic construct
  source 1..80: mol_type = other DNA
cataattgaattatttgaaaatgatttgatcctctcaggtcttggttttaagctttgtgaggagggaatcaagcagcatt

SEQ ID NO: 36099 - DNA, 80 bp, synthetic construct; identical to SEQ ID NO: 12909
  source 1..80: mol_type = other DNA

SEQ ID NO: 36100 - DNA, 80 bp, synthetic construct
  source 1..80: mol_type = other DNA
tctccaattgaaggattccaccaggctttgtgtggtttcccccttctgatctgcagcctataaactctctcaagaggata

SEQ ID NO: 36101 - DNA, 80 bp, synthetic construct
  source 1..80: mol_type = other DNA
tgtttcaggtggaaatgtgtacaggaaagaacctgataggcctgagttgctcaaatcctgagcaatatggtttgactgtg

SEQ ID NO: 36102 - DNA, 80 bp, synthetic construct
  source 1..80: mol_type = other DNA
tcatgagatctgatggttttctacatggtggttcctctgcataagctttcttgcctgccaccatgtaagatgtgcctttg

SEQ ID NO: 36103 - DNA, 80 bp, synthetic construct
  source 1..80: mol_type = other DNA
agaacagactaatacactaagcattcccaagaaaggcttgttttcagaagaagtggccctcagctcactcctaggaacca

SEQ ID NO: 36104 - DNA, 80 bp, synthetic construct; identical to SEQ ID NO: 12910
  source 1..80: mol_type = other DNA

SEQ ID NO: 36105 - DNA, 80 bp, synthetic construct
  source 1..80: mol_type = other DNA
ggacaactgaaagcttgtgggtgacttcctctgaactttgacaaatgcgccttttccctttgtttcttttaatttattct

SEQ ID NO: 36106 - DNA, 80 bp, synthetic construct
  source 1..80: mol_type = other DNA
agtatcatactctagtggccactccttcacatggcttaattttatagagcacctggacaaacaatacagaaaaattttca

SEQ ID NO: 36107 - DNA, 80 bp, synthetic construct
  source 1..80: mol_type = other DNA
tttccctacacatctatcaattatacatggataggccttgggaatcaatcagtttaacaaatgtctgtggcagactttgc

SEQ ID NO: 36108 - DNA, 80 bp, synthetic construct; identical to SEQ ID NO: 12911
  source 1..80: mol_type = other DNA

SEQ ID NO: 36109 - DNA, 80 bp, synthetic construct
  source 1..80: mol_type = other DNA
atgttataccccaacacctggtttttacagtgcccaaggtgattctggtggtcaactaggtatgggaaggactgatagtc

SEQ ID NO: 36110 - DNA, 80 bp, synthetic construct
  source 1..80: mol_type = other DNA
ttcaaagaatgatcaatggaaattttattgtgccagcacaaaaaaagtaattcattttcatctccattcattgactgcta

SEQ ID NO: 36111 - DNA, 80 bp, synthetic construct; identical to SEQ ID NO: 12912
  source 1..80: mol_type = other DNA

SEQ ID NO: 36112 - DNA, 80 bp, synthetic construct
  source 1..80: mol_type = other DNA
ctatttggtaatacctgatgttgaatgagagcttacagtatgccaggcaccccttcaagtgtttttcaagtacagatgag

SEQ ID NO: 36113 - DNA, 80 bp, synthetic construct
  source 1..80: mol_type = other DNA
gctgcatattcactgtaaatactgaaatcaattttgcgctggtgcagctacagaaacaagacctgaaataagtcagatta

SEQ ID NO: 36114 - DNA, 80 bp, synthetic construct
  source 1..80: mol_type = other DNA
gaagctctagcaggacttgataacaatgagtataggttgtaaagagacagaaaagtaaatacacctcccatattaacaat

SEQ ID NO: 36115 - DNA, 80 bp, synthetic construct
  source 1..80: mol_type = other DNA
atacagcatgtctccagtgcctttcaattaattgttggatttgaattaagttcacacatcttgtctaaaaagctaagatt

SEQ ID NO: 36116 - DNA, 80 bp, synthetic construct; identical to SEQ ID NO: 12913
  source 1..80: mol_type = other DNA

SEQ ID NO: 36117 - DNA, 80 bp, synthetic construct
  source 1..80: mol_type = other DNA
tatttacagatgcgcctagtgaagtaaaagaacaatccatattaaagactgagtcaagattagaaccaagtctcctaact

SEQ ID NO: 36118 - DNA, 80 bp, synthetic construct
  source 1..80: mol_type = other DNA
gaccagagaggcataagaggtcagaagttcagtgttttggatttactgggtaaaactggttttctttaatttccatagga

SEQ ID NO: 36119 - DNA, 80 bp, synthetic construct
  source 1..80: mol_type = other DNA
ctacactttctctgtcattttaaagattaagactgaaaataaattaaaagcaggggtatgttgctatataataagaggta

SEQ ID NO: 36120 - DNA, 80 bp, synthetic construct; identical to SEQ ID NO: 12914
  source 1..80: mol_type = other DNA

SEQ ID NO: 36121 - DNA, 80 bp, synthetic construct
  source 1..80: mol_type = other DNA
aaacagtgtgggttgtgagcaacattcatactatttacacacttgttaagatttaagtaagaaaaggcttgataatacat

SEQ ID NO: 36122 - DNA, 80 bp, synthetic construct
  source 1..80: mol_type = other DNA
gataaccccctaaaatgcaggttatagagctggatgaagcatgtgaaaatttttagaaacgtatgtaaatggtgtttctc

SEQ ID NO: 36123 - DNA, 80 bp, synthetic construct
  source 1..80: mol_type = other DNA
ataagtatgtttaatatcaacagtatctttttaaaactattccttagaaaatctttcttgatactgtcttacaattcatc

SEQ ID NO: 36124 - DNA, 80 bp, synthetic construct; identical to SEQ ID NO: 12915
  source 1..80: mol_type = other DNA

SEQ ID NO: 36125 - DNA, 80 bp, synthetic construct
  source 1..80: mol_type = other DNA
agaggatagctaacatctatttccaactccctattcttagggagggcttaaaatcagcaacagaggctgtatttacccca

SEQ ID NO: 36126 - DNA, 80 bp, synthetic construct
  source 1..80: mol_type = other DNA
tcatgatggaaatcaaacacatttaaagatgtcattattaaaacaatggaataattcagaaatgattatacaggatccac

SEQ ID NO: 36127 - DNA, 80 bp, synthetic construct
  source 1..80: mol_type = other DNA
aagcagtagatagatttacaaagaaaatggtatcctgcccacctctctaccaaaaagaaaaaaggttaaccaccaaagac

SEQ ID NO: 36128 - DNA, 80 bp, synthetic construct; identical to SEQ ID NO: 12916
  source 1..80: mol_type = other DNA

SEQ ID NO: 36129 - DNA, 80 bp, synthetic construct
  source 1..80: mol_type = other DNA
agggcacctgcatagtcaatgtaatctaatttctccaggaaagttgacttacacaattaaagttaccaaacctaaaatta

SEQ ID NO: 36130 - DNA, 80 bp, synthetic construct
  source 1..80: mol_type = other DNA
cccaatatgcacctctaactatttgctcctgtagcataattaattcaaaattatacaggactaaagatgcaaagggagca

SEQ ID NO: 36131 - DNA, 80 bp, synthetic construct
  source 1..80: mol_type = other DNA
tttataacacatctaaatgtatacagactttaaagaaaagaaaacacgatatagaatcccaaaaccaattccagtccggt

SEQ ID NO: 36132 - DNA, 80 bp, synthetic construct; identical to SEQ ID NO: 12917
  source 1..80: mol_type = other DNA

SEQ ID NO: 36133 - DNA, 80 bp, synthetic construct
  source 1..80: mol_type = other DNA
ttccagttcactactgactttaatcaaaccatttaacctttctatgtccttggtttcaccatttctgaaacggatacatc

SEQ ID NO: 36134 - DNA, 80 bp, synthetic construct
  source 1..80: mol_type = other DNA
ctgtccttggaaaatgatcacctaattcattttctggcccctaaattactggatattgaggtgaaggtgaagggaaactg

SEQ ID NO: 36135 - DNA, 80 bp, synthetic construct
  source 1..80: mol_type = other DNA
cataattctgaaccatcatccccaagtacttatgactttctgtcttgatatataattattggtgaaattgcctcatcttc

SEQ ID NO: 36136 - DNA, 80 bp, synthetic construct
  source 1..80: mol_type = other DNA
ctatggaataatatgttttgttggtaacttaagctttcgaaaaatgtatacaggagtccaccctaatccacggggatatg

SEQ ID NO: 36137 - DNA, 80 bp, synthetic construct; identical to SEQ ID NO: 12918
  source 1..80: mol_type = other DNA

SEQ ID NO: 36138 - DNA, 80 bp, synthetic construct
  source 1..80: mol_type = other DNA
tctagagccattattaagtaaaatatgcgtttcttgaatacaaaggactccaatattgccacagtcatctgagaactagc

SEQ ID NO: 36139 - DNA, 80 bp, synthetic construct
  source 1..80: mol_type = other DNA
ctggaatttcacatttaatattttcagacctaaaactacaaaaagcaaaaattggatgaaggggaactgctgtgtttaat

SEQ ID NO: 36140 - DNA, 80 bp, synthetic construct
  source 1..80: mol_type = other DNA
acaacaacattataagataagcagaacaaggatcacgatctcgattttatagatggggaaattagcttaagttcacaaag

SEQ ID NO: 36141 - DNA, 80 bp, synthetic construct; identical to SEQ ID NO: 12919
  source 1..80: mol_type = other DNA

SEQ ID NO: 36142 - DNA, 80 bp, synthetic construct
  source 1..80: mol_type = other DNA
tcactcattctcaagtctagaagtctaaagtaaaggtgtcaaccttgtcatattccctctgaaatctgtaggggagaatt

SEQ ID NO: 36143 - DNA, 80 bp, synthetic construct
  source 1..80: mol_type = other DNA
tggtgtaatcatggcttactgcagcttccatctctcaggctcaagcaatcctcccgcctcagcctcccaagtagctagga

SEQ ID NO: 36144 - DNA, 80 bp, synthetic construct; identical to SEQ ID NO: 12920
  source 1..80: mol_type = other DNA

SEQ ID NO: 36145 - DNA, 80 bp, synthetic construct
  source 1..80: mol_type = other DNA
tccactcaattttttacaccagtcttagtgacttcaacagactcttggctcatttagcatctgcctctttttactcacca

SEQ ID NO: 36146 - DNA, 80 bp, synthetic construct
  source 1..80: mol_type = other DNA
tccaatctttacctctgacaacattccactttccaagaattatctgaccttcctgaaaccatcaatccatggagcgtatc

SEQ ID NO: 36147 - DNA, 80 bp, synthetic construct
  source 1..80: mol_type = other DNA
ctttacatcttatttgcctgaacccaagcagttaaaagtggatggagaacaatccactattatgttcactgctctcatgt

SEQ ID NO: 36148 - DNA, 80 bp, synthetic construct; identical to SEQ ID NO: 12921
  source 1..80: mol_type = other DNA

SEQ ID NO: 36149 - DNA, 80 bp, synthetic construct
  source 1..80: mol_type = other DNA
taattatcctgtctatgtctttcaactctagtttccccactgcaactcttcccttaatatatgtacctgctctgttatcc

SEQ ID NO: 36150 - DNA, 80 bp, synthetic construct
  source 1..80: mol_type = other DNA
aatgttactaagttaaaagaaatctttatgccctcaactaccctcccaacagcagacaagaaagttgactatatacacat

SEQ ID NO: 36151 - DNA, 80 bp, synthetic construct
  source 1..80: mol_type = other DNA
acggcttctttacagacatccaaaagtttactttcagctgcctacgtggtatctttactgtgctatctaatagtgatttc

SEQ ID NO: 36152 - DNA, 80 bp, synthetic construct; identical to SEQ ID NO: 12922
  source 1..80: mol_type = other DNA

SEQ ID NO: 36153 - DNA, 80 bp, synthetic construct
  source 1..80: mol_type = other DNA
aaaattaatattttagatttaaaaaaagagagtaaattcctgtgttttaaagaagactaaaataacatattgtcaaagag

SEQ ID NO: 36154 - DNA, 80 bp, synthetic construct
  source 1..80: mol_type = other DNA
ccccacttttacaatgagaaaactgaaacaaaaaatgtttaagttatttgccaaggtcaaaactagtaagtggcagagct

SEQ ID NO: 36155 - DNA, 80 bp, synthetic construct
  source 1..80: mol_type = other DNA
ttatctgaggtttggggagattttatgtttccaagataacattcattttgttgtgatctcatgatacattagcatctagt

SEQ ID NO: 36156 - DNA, 80 bp, synthetic construct
  source 1..80: mol_type = other DNA
acaaatacaaattaaacgaatcacacaaaagtttcacctaattgtttatttaaaaaataatttttattaacacttgaaag

SEQ ID NO: 36157 - DNA, 80 bp, synthetic construct; identical to SEQ ID NO: 12923
  source 1..80: mol_type = other DNA

SEQ ID NO: 36158 - DNA, 80 bp, synthetic construct
  source 1..80: mol_type = other DNA
catttaatttgtatgtgggagaaaaatgtgttgagtcaaaagtagttacactcacggaccctttcttctctgagtaccag

SEQ ID NO: 36159 - DNA, 80 bp, synthetic construct
  source 1..80: mol_type = other DNA
ctgccagagtggtttgttcttggggtgagggtgagaaggctgggataatataaaagtttccatcacataatgagacagct

SEQ ID NO: 36160 - DNA, 80 bp, synthetic construct
  source 1..80: mol_type = other DNA
gctgtcaagccattctccagaaagaaacgctattatcagcactgagttaaaaggaagtcacatccacatcaaagggaact

SEQ ID NO: 36161 - DNA, 80 bp, synthetic construct; identical to SEQ ID NO: 12924
  source 1..80: mol_type = other DNA

SEQ ID NO: 36162 - DNA, 80 bp, synthetic construct
  source 1..80: mol_type = other DNA
atgataataagagagaggcttgaatacattttgatatctccactcacaaggaatgttacgccgtgacttaaaactgaagt

SEQ ID NO: 36163 - DNA, 80 bp, synthetic construct
  source 1..80: mol_type = other DNA
agattacctcgtgcacaggaaagaaatgtactacatcaatattacgtggatgacttgagtgggatgactatgtatctttg

SEQ ID NO: 36164 - DNA, 80 bp, synthetic construct
  source 1..80: mol_type = other DNA
taaggttacactaaaagttaacaggaatgaacattttgtggtgaacggtaacacacgttacccctagagatctgtaaggg

SEQ ID NO: 36165 - DNA, 80 bp, synthetic construct
  source 1..80: mol_type = other DNA
gtacaaggagtcagattagtatagcttgaattctggggaccccattgcttatgccatggttttcacctacaatcatcaat

SEQ ID NO: 36166 - DNA, 80 bp, synthetic construct
  source 1..80: mol_type = other DNA
cagatcacccttacacagaactccagccatatatagtacgattgaacttttcttgtattctcaggcgaaatttagattta

SEQ ID NO: 36167 - DNA, 80 bp, synthetic construct; identical to SEQ ID NO: 12925
  source 1..80: mol_type = other DNA

SEQ ID NO: 36168 - DNA, 80 bp, synthetic construct
  source 1..80: mol_type = other DNA
ggctgaatgattcccacaaggtcagagagcaagggatctatggcatagagcaaaattatccccaggcttatcctgtatct

SEQ ID NO: 36169 - DNA, 80 bp, synthetic construct
  source 1..80: mol_type = other DNA
gatctaccgggtgagtcaattctgtgtaggtacactgagttgtaagttggaggataaagttttgggagagaagtaaaagt

SEQ ID NO: 36170 - DNA, 80 bp, synthetic construct; identical to SEQ ID NO: 12926
  source 1..80: mol_type = other DNA

SEQ ID NO: 36171 - DNA, 80 bp, synthetic construct
  source 1..80: mol_type = other DNA
gtaatatatgagtcatctctcagtaagatcacactttaccttttcctggtgcaaaataggttatctccaaccaactgttt

SEQ ID NO: 36172 - DNA, 80 bp, synthetic construct
  source 1..80: mol_type = other DNA
aggaatttcttttcagaaaaaaattaatgtcaaatgccttctacatttctatgagaatgccaaaaaataattttcaccta

SEQ ID NO: 36173 - DNA, 80 bp, synthetic construct
  source 1..80: mol_type = other DNA
tatacttcctttgtaccatctgaaacttacaccagtgggctcgcagtacaacaggtactaaaaacatatttttagacaga

SEQ ID NO: 36174 - DNA, 80 bp, synthetic construct; identical to SEQ ID NO: 12927
  source 1..80: mol_type = other DNA

SEQ ID NO: 36175 - DNA, 80 bp, synthetic construct
  source 1..80: mol_type = other DNA
aaattcaattcacagaagaagaaatggcagtccaagaaagaagctgaccacagtcacacaaataaaataaaatagtgcca

SEQ ID NO: 36176 - DNA, 80 bp, synthetic construct
  source 1..80: mol_type = other DNA
acatataaatatatatgtattcatggtgaactggctaaaagttatatgttgagtttgaatgcagatgtttcatatgtact

SEQ ID NO: 36177 - DNA, 80 bp, synthetic construct
  source 1..80: mol_type = other DNA
acatgactgatatttgaggccaaaaacaccttctgtcttgatatggaggattatgagcaaatgaagtccagaaggtaaat

SEQ ID NO: 36178 - DNA, 80 bp, synthetic construct; identical to SEQ ID NO: 12928
  source 1..80: mol_type = other DNA

SEQ ID NO: 36179 - DNA, 80 bp, synthetic construct
  source 1..80: mol_type = other DNA
tttcagcccttgtgttgttgccagtttatacagagtttggtaagatgctgtattcaaatagttaaagaaaggtatgattg

SEQ ID NO: 36180 - DNA, 80 bp, synthetic construct
  source 1..80: mol_type = other DNA
ccatgttggtgtgctgcacccagtaactcgtcatttaacattaggtatatctccaaatgctatccctcctcccgacccca

SEQ ID NO: 36181 - DNA, 80 bp, synthetic construct
  source 1..80: mol_type = other DNA
atgaactcataatctttttaaaagtgaatttttcttctagaatgtaacaaaggaggctaccaaattccagcacactttac

SEQ ID NO: 36182 - DNA, 80 bp, synthetic construct
  source 1..80: mol_type = other DNA
aaaactattcatctgaattcatatgcaaaggatagaatttttctttaaactgcccacaactttggtgggccaagctgaaa

SEQ ID NO: 36183 - DNA, 80 bp, synthetic construct; identical to SEQ ID NO: 12929
  source 1..80: mol_type = other DNA

SEQ ID NO: 36184 - DNA, 80 bp, synthetic construct
  source 1..80: mol_type = other DNA
agatctgcagtgcccagtcaataaaaggaaggagaaaagaaatgactgatgcttacacattcagtaaaaatatatccatt

SEQ ID NO: 36185 - DNA, 80 bp, synthetic construct
  source 1..80: mol_type = other DNA
ttgtttcaaaatttgtaaagtccactttctccaagtctttcccattatgcttctattttccaaattcgctatttttaatc

SEQ ID NO: 36186 - DNA, 80 bp, synthetic construct
  source 1..80: mol_type = other DNA
attaagtttataaccctttaacattcactaactgatcattcaaggaatgggccttgtgattgtgactgtggtagcagtac

SEQ ID NO: 36187 - DNA, 80 bp, synthetic construct; identical to SEQ ID NO: 12930
  source 1..80: mol_type = other DNA

SEQ ID NO: 36188 - DNA, 80 bp, synthetic construct
  source 1..80: mol_type = other DNA
atcccaggagagtttgtattaaagtcatcgttgacaaaattcagactgtatccaaacagtacactcacaaagcaaaataa

SEQ ID NO: 36189 - DNA, 80 bp, synthetic construct
  source 1..80: mol_type = other DNA
attatccttagcagattttccatgtgcaattcagagaggctaacttgcccaaacacacagcttaaagttagacctcaatc

SEQ ID NO: 36190 - DNA, 80 bp, synthetic construct; identical to SEQ ID NO: 12931
  source 1..80: mol_type = other DNA

SEQ ID NO: 36191 - DNA, 80 bp, synthetic construct
  source 1..80: mol_type = other DNA
taggttgttatcatcaccttctgttcttttaacaattgtcaagtacttttcacatttatcaatgtgttcttatcacattc

SEQ ID NO: 36192 - DNA, 80 bp, synthetic construct
  source 1..80: mol_type = other DNA
ctaattcttcaacacaaaaatgaactttggtaaatcaataggatcaactgaggcatttatgcttgaatgtgctcccctaa

SEQ ID NO: 36193 - DNA, 80 bp, synthetic construct
  source 1..80: mol_type = other DNA
cataagagctgaaggtgtttgaacaccagcaatctagattaaaagtaatattaggcaaactggccatatagactaaggtt

SEQ ID NO: 36194 - DNA, 80 bp, synthetic construct; identical to SEQ ID NO: 12932
  source 1..80: mol_type = other DNA

SEQ ID NO: 36195 - DNA, 80 bp, synthetic construct
  source 1..80: mol_type = other DNA
taaatatatcatattgctcaatatcaaaaagtcaactctccaaaacagaaaccaaaagtaaactaaccagagatgtccac

SEQ ID NO: 36196 - DNA, 80 bp, synthetic construct
  source 1..80: mol_type = other DNA
gcaaaagcagctattttgcaaacaggtggtttgcaaaacttttacttaagccgccaaaaggactgacgaaaggaaaattt

SEQ ID NO: 36197 - DNA, 80 bp, synthetic construct
  source 1..80: mol_type = other DNA
aaatccttttcatcgcatatattaagatactagagagaaaggaaatgccatgtcgtttcaggtaggaccttatttacata

SEQ ID NO: 36198 - DNA, 80 bp, synthetic construct; identical to SEQ ID NO: 12933
  source 1..80: mol_type = other DNA

SEQ ID NO: 36199 - DNA, 80 bp, synthetic construct
  source 1..80: mol_type = other DNA
tcagtcactgacattcagaggaggacaagacaggcttcctgaaatctcttccgaagtaaacaggtcccgacgcaaagggc

SEQ ID NO: 36200 - DNA, 80 bp, synthetic construct
  source 1..80: mol_type = other DNA
ctacccgcagagcactccccaccaccccgccaccaccgacgagccggcgcgaagtccgtacctcgatgtccgccgagtcc

SEQ ID NO: 36201 - DNA, 80 bp, synthetic construct
  source 1..80: mol_type = other DNA
cgcggggcggcaacgcccccggggcggggctgcgctctcggtcctgcggctcccgcgccaggcacggcagccgcagcccg

SEQ ID NO: 36202 - DNA, 80 bp, synthetic construct; identical to SEQ ID NO: 12934
  source 1..80: mol_type = other DNA

SEQ ID NO: 36203 - DNA, 80 bp, synthetic construct
  source 1..80: mol_type = other DNA
aaaacatccacagcccgcagcagcatacaggaagtgctgcaggtggtacataatcaaggttgtctttttgcaggaaagtc

SEQ ID NO: 36204 - DNA, 80 bp, synthetic construct
  source 1..80: mol_type = other DNA
aacgtgaaactcttttgaaaagttgctcttcgtttttgctctagagcttgctgaggagaagggagagatttcctgtagag

SEQ ID NO: 36205 - DNA, 80 bp, synthetic construct
  source 1..80: mol_type = other DNA
ttcatgcacttggctaggtagtgacaccttggagtcaagtatttctcccttattattttttcattagtccattcatcgtt

SEQ ID NO: 36206 - DNA, 80 bp, synthetic construct; identical to SEQ ID NO: 12935
  source 1..80: mol_type = other DNA

SEQ ID NO: 36207 - DNA, 80 bp, synthetic construct
  source 1..80: mol_type = other DNA
ccttagaatcatctttgactcctttatccttattgcctcatttaatctatgcccaaactctcagaagtcaacctcctaaa

SEQ ID NO: 36208 - DNA, 80 bp, synthetic construct
  source 1..80: mol_type = other DNA
ccatggtataaatccttcaatggtccattgcagtcagaatataatacaaactccctagtaaccgctgaataacctgctct

SEQ ID NO: 36209 - DNA, 80 bp, synthetic construct
  source 1..80: mol_type = other DNA
cttctactcatcatttaggtctcactgaagcctttatgatctaaccccatcaccaacaaaattacacccactctgtcttt

SEQ ID NO: 36210 - DNA, 80 bp, synthetic construct; identical to SEQ ID NO: 12936
  source 1..80: mol_type = other DNA

SEQ ID NO: 36211 - DNA, 80 bp, synthetic construct
  source 1..80: mol_type = other DNA
tacaaccacaccttacccacttactctagatcctcttggagatatagagagatagataaatctatctatatctatttttc

SEQ ID NO: 36212 - DNA, 80 bp, synthetic construct
  source 1..80: mol_type = other DNA
atcagtcaggttcaatgttcaatttcctaacttacagggatacaggcttattgctctttcaggttacactttaacataca

SEQ ID NO: 36213 - DNA, 80 bp, synthetic construct
  source 1..80: mol_type = other DNA
ctatttaccatcccccccaacttcatcaaacagatgtatcctgttctgacatattaattaaggcatctaatcacattgct

SEQ ID NO: 36214 - DNA, 80 bp, synthetic construct; identical to SEQ ID NO: 12937
  source 1..80: mol_type = other DNA

SEQ ID NO: 36215 - DNA, 80 bp, synthetic construct
  source 1..80: mol_type = other DNA
ccatatgcctttattttccctttgcagtgtagcattaagagattttttttggtgggggacatttctttgaaaatgatttc

SEQ ID NO: 36216 - DNA, 80 bp, synthetic construct
  source 1..80: mol_type = other DNA
gcccaaatatttccagcattcctgttaaaaagaccaaaaggaatacgttggttcatatttcatggaacaaacagtataat

SEQ ID NO: 36217 - DNA, 80 bp, synthetic construct
  source 1..80: mol_type = other DNA
tgtcataagcattagtgacatctcagtggacaatagagacattgtctctgttaccacaaacctttagccactaaatgaaa

SEQ ID NO: 36218 - DNA, 80 bp, synthetic construct; identical to SEQ ID NO: 12938
  source 1..80: mol_type = other DNA

SEQ ID NO: 36219 - DNA, 80 bp, synthetic construct
  source 1..80: mol_type = other DNA
ttcttgttttattgctggaattttattgttttataatttctagttcatttacatttgagcaagttcttcatatccttgcc

SEQ ID NO: 36220 - DNA, 80 bp, synthetic construct
  source 1..80: mol_type = other DNA
aattgcccctggctaagagagacatctcactggaagttcaagccctttcctggggtagcagatatccaatgacagttgat

SEQ ID NO: 36221 - DNA, 80 bp, synthetic construct
  source 1..80: mol_type = other DNA
ctgggcctcatacagacagcactgaataatgaatatacttcctgcacacacatttctattgcaaagtctgcttcctagtg

SEQ ID NO: 36222 - DNA, 80 bp, synthetic construct; identical to SEQ ID NO: 12939
  source 1..80: mol_type = other DNA

SEQ ID NO: 36223 - DNA, 80 bp, synthetic construct
  source 1..80: mol_type = other DNA
cttgaggtaatggccttactgctgagacctaaaggacaacgtaagagttaaaaaggcaaaaggaggttattaaaagactt

SEQ ID NO: 36224 - DNA, 80 bp, synthetic construct
  source 1..80: mol_type = other DNA
aagcaactagtgggagagtgacccagggtgaagctgcaagataagcatgccatgttttatttagtctttgtttagggttt

SEQ ID NO: 36225 - DNA, 80 bp, synthetic construct
  source 1..80: mol_type = other DNA
atatactcacttggttgaatgtgtgaaaatcaaccaaggcaagtgatttctggagatgggctcagtcatttcctgtgcat

SEQ ID NO: 36226 - DNA, 80 bp, synthetic construct
  source 1..80: mol_type = other DNA
agcatgttgtggcacttaaaaggcagatctctgtttttaatcagaggccagaaagaaaaacctacactccagaaggattt

SEQ ID NO: 36227 - DNA, 80 bp, synthetic construct; identical to SEQ ID NO: 12940
  source 1..80: mol_type = other DNA

SEQ ID NO: 36228 - DNA, 80 bp, synthetic construct
  source 1..80: mol_type = other DNA
acaaatagataaagggcatcaatggccaactcacaaaaaagggaatacaagcagttaatgaaaatgtgaaaattgagtca

SEQ ID NO: 36229 - DNA, 80 bp, synthetic construct
  source 1..80: mol_type = other DNA
gcagttgagcaatacatagctttcttagtctatttggctgccataactaaataccatgaagtggttagcttataaacaga

SEQ ID NO: 36230 - DNA, 80 bp, synthetic construct
  source 1..80: mol_type = other DNA
agggcactaatcccatttatgaaagttctgccctcatgatctaatcacccctcaaagggcccacctcataatatcctcac

SEQ ID NO: 36231 - DNA, 80 bp, synthetic construct; identical to SEQ ID NO: 12941
  source 1..80: mol_type = other DNA

SEQ ID NO: 36232 - DNA, 80 bp, synthetic construct
  source 1..80: mol_type = other DNA
tgtctctactaaaaatacaaaaattagctgggcgtggtgctgcgtgcctgtagtctcagctactcaggaggctgaggcag

SEQ ID NO: 36233 - DNA, 80 bp, synthetic construct
  source 1..80: mol_type = other DNA
atctggtgaattcataattcaactttatgcaggcattagaaatgatgttgtagaagaatattaacagaaaaaaacatggg

SEQ ID NO: 36234 - DNA, 80 bp, synthetic construct
  source 1..80: mol_type = other DNA
gaccaatacaaaaaccttttataaatgtgtatgtttgtgcatgcagggtaaaaacctcattactcccacccttgatacat

SEQ ID NO: 36235 - DNA, 80 bp, synthetic construct
  source 1..80: mol_type = other DNA
ttaagctttaactaggcaaaataatctaaatatgtggagaatgtcctattataagatagttgtttgaatgttttgattta

SEQ ID NO: 36236 - DNA, 80 bp, synthetic construct; identical to SEQ ID NO: 12942
  source 1..80: mol_type = other DNA

SEQ ID NO: 36237 - DNA, 80 bp, synthetic construct
  source 1..80: mol_type = other DNA
tatttgttttagtgatgcgtgcgctcattgcctgccttctcctaatagaatgtaagttccctgaggctgttttgttcact

SEQ ID NO: 36238 - DNA, 80 bp, synthetic construct
  source 1..80: mol_type = other DNA
cagaactgttcaaaggcaaggactacaccttactaatctttgaatcactcagtttagacagtgtctggatttaagtagat

SEQ ID NO: 36239 - DNA, 80 bp, synthetic construct; identical to SEQ ID NO: 12943
  source 1..80: mol_type = other DNA

SEQ ID NO: 36240 - DNA, 80 bp, synthetic construct
  source 1..80: mol_type = other DNA
aacagaataaccattctgaaagtattttgacaatcttttggaagaaccgatatattacgtgcttatgccattgtatgtgt

SEQ ID NO: 36241 - DNA, 80 bp, synthetic construct
  source 1..80: mol_type = other DNA
ttatttatttttcttttctgggggttggtgttgcgggtgctgattactatcactcttccaagtagcacaaatacatttca

SEQ ID NO: 36242 - DNA, 80 bp, synthetic construct
  source 1..80: mol_type = other DNA
cagccatctgtgtcacacacacgtttgtttcttaaaggctttatacattttttaatttttttgcccatcttccaacccag

SEQ ID NO: 36243 - DNA, 80 bp, synthetic construct
  source 1..80: mol_type = other DNA
ttctatttaaaggccaccaaatgtttctttctgggagattgtattgagtggttaggatcttggcatccactattgttcta

SEQ ID NO: 36244 - DNA, 80 bp, synthetic construct; identical to SEQ ID NO: 12944
  source 1..80: mol_type = other DNA

SEQ ID NO: 36245 - DNA, 80 bp, synthetic construct
  source 1..80: mol_type = other DNA
attgtattggagtttcagatacctaatttctttcttgggggtggtaggtaggagttattgaaacaccaccacaatatcgt

SEQ ID NO: 36246 - DNA, 80 bp, synthetic construct
  source 1..80: mol_type = other DNA
tataattaagaaaatcgaggcttcacaatgttaatgctgtatcttcacaagactaatgggtggcagatcttggattcttg

SEQ ID NO: 36247 - DNA, 80 bp, synthetic construct
  source 1..80: mol_type = other DNA
tgccttgaaatagagtaatgtgttccctcacagaattttcctattttgctgttctattctagtctaatctgtgacctatg

SEQ ID NO: 36248 - DNA, 80 bp, synthetic construct; identical to SEQ ID NO: 12945
  source 1..80: mol_type = other DNA

SEQ ID NO: 36249 - DNA, 80 bp, synthetic construct
  source 1..80: mol_type = other DNA
gattctttagcttagagaagacaaagctggctaagcttgaataaattattgtattcaaatagtttttatcagaatagtga

SEQ ID NO: 36250 - DNA, 80 bp, synthetic construct
  source 1..80: mol_type = other DNA
acataaacagccatttatcccagctgcaaaaagcaacctgatggacaatgtgatccttaatagtcttttctaatgttttg

SEQ ID NO: 36251 - DNA, 80 bp, synthetic construct
  source 1..80: mol_type = other DNA
taagtgaaaatggtaatgtattagccagttcttcaggaaaaatgcagatttcaaggtaggtcacatttctattatatccc

SEQ ID NO: 36252 - DNA, 80 bp, synthetic construct; identical to SEQ ID NO: 12946
  source 1..80: mol_type = other DNA

SEQ ID NO: 36253 - DNA, 80 bp, synthetic construct
  source 1..80: mol_type = other DNA
ttccatcattttcccctgaatatgaatgggtacatatacacatcaatgcccatcagtttctcccgatcgttttctttatt

SEQ ID NO: 36254 - DNA, 80 bp, synthetic construct
  source 1..80: mol_type = other DNA
tattgtcagtttcttcttctctaccatgagtattgtgtgttctttgctgtgttgcctacacctagaatggtgcctggcac

SEQ ID NO: 36255 - DNA, 80 bp, synthetic construct
  source 1..80: mol_type = other DNA
tgtcatcatggaaagagagccgtagtctaaaggtgaagtgggaagtacaatttgcaaaaatcattaccattcctttctaa

SEQ ID NO: 36256 - DNA, 80 bp, synthetic construct
  source 1..80: mol_type = other DNA
atttgcatgttgcctggaatacaaattgtactgagtaatcaatcattgtttaattgccgctcaagtaaacccttgtaatc

SEQ ID NO: 36257 - DNA, 80 bp, synthetic construct
  source 1..80: mol_type = other DNA
agacttgctataaaaatgttaaggtgtgcaaaaagcataaggtggcattttcccctccttcttattatgcctgtgtaact

SEQ ID NO: 36258 - DNA, 80 bp, synthetic construct; identical to SEQ ID NO: 12947
  source 1..80: mol_type = other DNA

SEQ ID NO: 36259 - DNA, 80 bp, synthetic construct
  source 1..80: mol_type = other DNA
agcttgcaattcccttggctggaaagtttctccagaattgatttgaactaacatcagttaaaacactctgaaatatggta

SEQ ID NO: 36260 - DNA, 80 bp, synthetic construct
  source 1..80: mol_type = other DNA
cagttggttcgctacactgtctgaagatggttgtttgtagcatatgttaactgtgccagtgcttgcaaattcatttcata

SEQ ID NO: 36261 - DNA, 80 bp, synthetic construct
  source 1..80: mol_type = other DNA
tttctcatgctgttgccctcactcacctagattctctccatttttttttctctatacttaatctagtcctttaaattatc

SEQ ID NO: 36262 - DNA, 80 bp, synthetic construct; identical to SEQ ID NO: 12948
  source 1..80: mol_type = other DNA

SEQ ID NO: 36263 - DNA, 80 bp, synthetic construct
  source 1..80: mol_type = other DNA
taacttgctggactagcaccctatgccaagaagggtacaaaaaacgtatacggaagtaagtcctacccacatgagacaat

SEQ ID NO: 36264 - DNA, 80 bp, synthetic construct
  source 1..80: mol_type = other DNA
tgggaggattgtccaggaattcaagaccagctgggacaacatagtgagacctgtctctactaaaaattagaaaaaataaa

SEQ ID NO: 36265 - DNA, 80 bp, synthetic construct
  source 1..80: mol_type = other DNA
caaaacacctaggtgttaagtgtgcattctggttggaaaataattaaatagcgattacctttcacaaccaatttcctaca

SEQ ID NO: 36266 - DNA, 80 bp, synthetic construct; identical to SEQ ID NO: 12949
  source 1..80: mol_type = other DNA

SEQ ID NO: 36267 - DNA, 80 bp, synthetic construct
  source 1..80: mol_type = other DNA
gacccaagacactacctagttaggcacattaaagacctagcctgagattctgtcacaatacatcaaatttgctgcaagaa

SEQ ID NO: 36268 - DNA, 80 bp, synthetic construct
  source 1..80: mol_type = other DNA
ttttgagtgtaatattccagtaattgatatatgcacttcttgttcgtccttgacatcgcatgacacctcatggtacactg

SEQ ID NO: 36269 - DNA, 80 bp, synthetic construct; identical to SEQ ID NO: 12950
  source 1..80: mol_type = other DNA

SEQ ID NO: 36270 - DNA, 80 bp, synthetic construct
  source 1..80: mol_type = other DNA
aaatactcataattgtactatcaacatttgaatttatatcaatttatggaaattttgatttgttatcttttttacttaac

SEQ ID NO: 36271 - DNA, 80 bp, synthetic construct
  source 1..80: mol_type = other DNA
catgtgggctggtagaaagcttctgctctatacagatacacagggacttgagctgccagaggttgcaatttcttttgatt

SEQ ID NO: 36272 - DNA, 80 bp, synthetic construct
  source 1..80: mol_type = other DNA
gtgtgcagactgtaaaggaacacatgggatattttatgtaattaaccctcctcaatttctttcttaaatagatgtccctc

SEQ ID NO: 36273 - DNA, 80 bp, synthetic construct
  source 1..80: mol_type = other DNA
tctattttgaatcctcaatcagccaagtggcaaaacaaaatctcagccaatctaatacttcttctcccattcacctagag

SEQ ID NO: 36274 - DNA, 80 bp, synthetic construct; identical to SEQ ID NO: 12951
  source 1..80: mol_type = other DNA

SEQ ID NO: 36275 - DNA, 80 bp, synthetic construct
  source 1..80: mol_type = other DNA
tagtttttttcccttgatagggaggataggaagtgtagaaattggctgattgcatattctcccaaatcttacaatgtacc

SEQ ID NO: 36276 - DNA, 80 bp, synthetic construct
  source 1..80: mol_type = other DNA
tttctaaaacttgtcttctgttttaataactctcagctgaagctataatcccgctgactgagtagaggcaaaaatgagga

SEQ ID NO: 36277 - DNA, 80 bp, synthetic construct
  source 1..80: mol_type = other DNA
gctgcctaccaaactaataagtcctttcttggagaaattgccaaacctgctgactaactactcaggtttcctgtgggtaa

SEQ ID NO: 36278 - DNA, 80 bp, synthetic construct
  source 1..80: mol_type = other DNA
acttagtattttacctggaggcttaggtgttcccagaaatacatttttaaaatgtattttagaggtggtggtgatgggat

SEQ ID NO: 36279 - DNA, 80 bp, synthetic construct; identical to SEQ ID NO: 12952
  source 1..80: mol_type = other DNA

SEQ ID NO: 36280 - DNA, 80 bp, synthetic construct
  source 1..80: mol_type = other DNA
cctgattgggaaatgggaaggagaggaaaagaaaaaggaagtacaagttccacagagtagaggccccctgaatatgtagg

SEQ ID NO: 36281 - DNA, 80 bp, synthetic construct
  source 1..80: mol_type = other DNA
ccagtgaatgagtggaaaatgcagtggaagagtaaagtttaatagtgacagtgtataatccctagacgatccctctactt

SEQ ID NO: 36282 - DNA, 80 bp, synthetic construct; identical to SEQ ID NO: 12953
  source 1..80: mol_type = other DNA

SEQ ID NO: 36283 - DNA, 80 bp, synthetic construct
  source 1..80: mol_type = other DNA
taaagatttttaggatgaagacttcagaaggaaacttccatttttatcccatcataatacaagtgtgtgctagcaatatg

SEQ ID NO: 36284 - DNA, 80 bp, synthetic construct
  source 1..80: mol_type = other DNA
tcttctatttcttttcatagtgtattttttagaatgaagtcccttatgagaagaccacatataatcattagaaataagaa

SEQ ID NO: 36285 - DNA, 80 bp, synthetic construct
  source 1..80: mol_type = other DNA
gtgcctgtaatcccagctactcgggaggctgaggcaggagaatcacctgaacccaggaggtggaggttgcagtgagccaa

SEQ ID NO: 36286 - DNA, 80 bp, synthetic construct
  source 1..80: mol_type = other DNA
gggtttggataggtagtagggacagaggatgggaagttatgctccccctccttatagccaagtacctacatagattattt

SEQ ID NO: 36287 - DNA, 80 bp, synthetic construct; identical to SEQ ID NO: 12954
  source 1..80: mol_type = other DNA

SEQ ID NO: 36288 - DNA, 80 bp, synthetic construct
  source 1..80: mol_type = other DNA
ggtcttctcagctgacagagcaaaaacaaatttatgtatactaacccttgtatgcacatttatctgtaaatatttccgta

SEQ ID NO: 36289 - DNA, 80 bp, synthetic construct
  source 1..80: mol_type = other DNA
tccatttacttaattcttcagttccagtgtatatgtatggtagtgtcagaattgttaagccataaccctgcgggaaacaa

SEQ ID NO: 36290 - DNA, 80 bp, synthetic construct; identical to SEQ ID NO: 12955
  source 1..80: mol_type = other DNA

SEQ ID NO: 36291 - DNA, 80 bp, synthetic construct
  source 1..80: mol_type = other DNA
accattataatagcatacagaaaagtttcttgcccaaaatatccgctgtattttttctatttaaacctgccctctcctgg

SEQ ID NO: 36292 - DNA, 80 bp, synthetic construct
  source 1..80: mol_type = other DNA
ccttccttcttatcactaaagagtattctattgtttggatagacaacagtttgtttaacctttcacctaccaaaagacat

SEQ ID NO: 36293 - DNA, 80 bp, synthetic construct
  source 1..80: mol_type = other DNA
tctaattcaagaatattttcagcacccaaaaccatgtacccaacaattatttcccattctcccttgcctccgacccacta

SEQ ID NO: 36294 - DNA, 80 bp, synthetic construct
  source 1..80: mol_type = other DNA
atattattccattatatggatataccacacttcatcttttcgtcagttgttggacatttgaattgtttccacttttggct

SEQ ID NO: 36295 - DNA, 80 bp, synthetic construct; identical to SEQ ID NO: 12956
  source 1..80: mol_type = other DNA

SEQ ID NO: 36296 - DNA, 80 bp, synthetic construct
  source 1..80: mol_type = other DNA
catgtgcttcacatgcaggtttctgtatgttcataagttttcaaatcagtttggtaagcacctagaagcactattactgg

SEQ ID NO: 36297 - DNA, 80 bp, synthetic construct
  source 1..80: mol_type = other DNA
gccagagaggaaacagaaaactcatgttgttctatgttattcttccctgagtgcaaatgattattgcaccttctagggga

SEQ ID NO: 36298 - DNA, 80 bp, synthetic construct
  source 1..80: mol_type = other DNA
catgtgtgccacaagcatttagtgtctgaggatgaatcaatattgtgcagtgtgtgaaagagtcttgcacaattaagaaa

SEQ ID NO: 36299 - DNA, 80 bp, synthetic construct
  source 1..80: mol_type = other DNA
caagtatggaaaggaaatagtggttaactgacaactttctgggactgataagatctgcttcctagaaatattttgagact

SEQ ID NO: 36300 - DNA, 80 bp, synthetic construct; identical to SEQ ID NO: 12957
  source 1..80: mol_type = other DNA

SEQ ID NO: 36301 - DNA, 80 bp, synthetic construct
  source 1..80: mol_type = other DNA
cataaaatcaaatatttggttaggagaaagtagcaagtgctttgcatccttattccaagtatgtgggatagtattctaaa

SEQ ID NO: 36302 - DNA, 80 bp, synthetic construct
  source 1..80: mol_type = other DNA
gtgtttaatttccatttagttgatttttgcatgttaccaaaatgctaaattcattttcccccaacaattaaagaatagaa

SEQ ID NO: 36303 - DNA, 80 bp, synthetic construct
  source 1..80: mol_type = other DNA
caaaagaacatgtcagagtgccagttccaggaccaagctttaaaaggtctggaagttttcacttttgcactcataggagc

SEQ ID NO: 36304 - DNA, 80 bp, synthetic construct; identical to SEQ ID NO: 12958
  source 1..80: mol_type = other DNA

SEQ ID NO: 36305 - DNA, 80 bp, synthetic construct
  source 1..80: mol_type = other DNA
tgaaggagtgatgaacgtttgacttccagttgttgagctggattatggtgtactacatcttttctttttttctttctttc

SEQ ID NO: 36306 - DNA, 80 bp, synthetic construct
  source 1..80: mol_type = other DNA
ttgtgggttttttcttttttctttttttttagtagagacggtgggggggtccatgatgttggctaggatggtctctatct

SEQ ID NO: 36307 - DNA, 80 bp, synthetic construct
  source 1..80: mol_type = other DNA
ttttttaggcaaatgaattcttcaacttccaacaagtaacttatcaatgaactttgggaacatattaatttactgggtgt

SEQ ID NO: 36308 - DNA, 80 bp, synthetic construct; identical to SEQ ID NO: 12959
  source 1..80: mol_type = other DNA

SEQ ID NO: 36309 - DNA, 80 bp, synthetic construct
  source 1..80: mol_type = other DNA
ctttctccagtattcaaaagagattttttttagttcacattttatattttcaagtgtaaaataatgaaataaatggcagt

SEQ ID NO: 36310 - DNA, 80 bp, synthetic construct
  source 1..80: mol_type = other DNA
catgacctttgatatcctgaagaacattttataacgactttccttagcaatatttttgtgaatgtatatgtttatatgtg

SEQ ID NO: 36311 - DNA, 80 bp, synthetic construct
  source 1..80: mol_type = other DNA
aggatgaaaaagaaaatgaaaaaatcctccccaattcttattttagccctaaatttcttttagagtatcttatgtcaatg

SEQ ID NO: 36312 - DNA, 80 bp, synthetic construct; identical to SEQ ID NO: 12960
  source 1..80: mol_type = other DNA

SEQ ID NO: 36313 - DNA, 80 bp, synthetic construct
  source 1..80: mol_type = other DNA
ttcaggcattttctatggccagaattgatgttgtatgtgcttctgtgatttgtagtgttatgtcatatcactggattaca

SEQ ID NO: 36314 - DNA, 80 bp, synthetic construct
  source 1..80: mol_type = other DNA
aaaaaaaaaaattagccgggcatggtggcgcgtacctggggtcccagctactccggagtctgaggcgcaagaatcacttg

SEQ ID NO: 36315 - DNA, 80 bp, synthetic construct; identical to SEQ ID NO: 12961
  source 1..80: mol_type = other DNA

SEQ ID NO: 36316 - DNA, 80 bp, synthetic construct
  source 1..80: mol_type = other DNA
aggtttaaagtatagtttgtgataaaatattaaaggtagtttttgatttgaaatatttaaattagagctgtctatagatt

SEQ ID NO: 36317 - DNA, 80 bp, synthetic construct
  source 1..80: mol_type = other DNA
aaacggtgtactaatgaacttataattccttggtgcatatgttgggggggcctttttcaaagcatatctgaaagtataaa

SEQ ID NO: 36318 - DNA, 80 bp, synthetic construct
  source 1..80: mol_type = other DNA
gttggaaactctccaattggatatttatttggaaacagggacaacttaattgttctgaggttgagagacaaattactgat

SEQ ID NO: 36319 - DNA, 80 bp, synthetic construct
  source 1..80: mol_type = other DNA
ttttgtctattgggcatgctgcttatttgaacttggtgaaaattatggattctagtttttctattttatgaattagacac

SEQ ID NO: 36320 - DNA, 80 bp, synthetic construct
  source 1..80: mol_type = other DNA
ctcaacatttctatttctagtgtacaaattatatctgattcctgggaagtattaagggtaatttgttgtatatcgaatgt

SEQ ID NO: 36321 - DNA, 80 bp, synthetic construct; identical to SEQ ID NO: 12962
  source 1..80: mol_type = other DNA

SEQ ID NO: 36322 - DNA, 80 bp, synthetic construct
  source 1..80: mol_type = other DNA
aggacattcttccactgtatggaagaagcatgcttatgcaagcctggagtcgggaagggaaaaataggatcaaggatcac

SEQ ID NO: 36323 - DNA, 80 bp, synthetic construct
  source 1..80: mol_type = other DNA
gtggtttcagtttaaaaggtgctgctaaatagagacagaaacaagctcaaatattcccaaatgatgcttgcatctgaaag

SEQ ID NO: 36324 - DNA, 80 bp, synthetic construct; identical to SEQ ID NO: 12963
  source 1..80: mol_type = other DNA

SEQ ID NO: 36325 - DNA, 80 bp, synthetic construct
  source 1..80: mol_type = other DNA
aggcactaatattagaaagatggagtaagatgagggagtttccacaactgagcatacaacagtatagtgatgtagtttca

SEQ ID NO: 36326 - DNA, 80 bp, synthetic construct
  source 1..80: mol_type = other DNA
ggagacaagttggaaagttttaataatccagatgattgttataagactgaaataggacaagaacagaatgaatggaaagc

SEQ ID NO: 36327 - DNA, 80 bp, synthetic construct
  source 1..80: mol_type = other DNA
tgtcttgtctggtataggtgcgggataatgccagcctaatactgagtttaaatgtctttctatctcatctgtttcctgca

SEQ ID NO: 36328 - DNA, 80 bp, synthetic construct; identical to SEQ ID NO: 12964
  source 1..80: mol_type = other DNA

SEQ ID NO: 36329 - DNA, 80 bp, synthetic construct
  source 1..80: mol_type = other DNA
agtttggcaagaagtttattaattttatggatctcatcaaataattagctttcagtttcactgattttcctctattggtt

SEQ ID NO: 36330 - DNA, 80 bp, synthetic construct
  source 1..80: mol_type = other DNA
atttcctttttttttttttttttttttttttgtgacggagtctcactctgttgcccaggctggagtgcagtggcgcgatc

SEQ ID NO: 36331 - DNA, 80 bp, synthetic construct
  source 1..80: mol_type = other DNA
ctgacctcgtgattcgcccgcctcggcctcccaaagtgctgggattacaggcgtgagctactgcgcccgacctaatttcc

SEQ ID NO: 36332 - DNA, 80 bp, synthetic construct; identical to SEQ ID NO: 12965
  source 1..80: mol_type = other DNA

SEQ ID NO: 36333 - DNA, 80 bp, synthetic construct
  source 1..80: mol_type = other DNA
attgatgtgagaaataaaagggctgtctggataaatgctcataccttgaaacatcatgaaatctgctcttagagactatt

SEQ ID NO: 36334 - DNA, 80 bp, synthetic construct
  source 1..80: mol_type = other DNA
ggcacagtggttttcagatatataaaatctatgagtatgtcctaacagaaagttgtagaacccagaaaacctctgctcag

SEQ ID NO: 36335 - DNA, 80 bp, synthetic construct
  source 1..80: mol_type = other DNA
ctccctgtcaaatttacgtctgaaaaggttttccagaatcactgttggaaaatgtgctgggacaagacggtttgctcacc

SEQ ID NO: 36336 - DNA, 80 bp, synthetic construct; identical to SEQ ID NO: 12966
  source 1..80: mol_type = other DNA

SEQ ID NO: 36337 - DNA, 80 bp, synthetic construct
  source 1..80: mol_type = other DNA
aaaaagcctaataataacgtacaggctgaacttggagatcaaccagaaacagaagaaaagaatattaaaacagtagaaga

SEQ ID NO: 36338 - DNA, 80 bp, synthetic construct
  source 1..80: mol_type = other DNA
atcaatttccaaggatttaaagaacttctaaatggcattcatgtatcccatgttaggtgaaaaattcccaatatgcagcg

SEQ ID NO: 36339 - DNA, 80 bp, synthetic construct
  source 1..80: mol_type = other DNA
cagattccattacttcattacttttcagaacctcttataggcaatgtctcaatatatagctctttcaaaatgtgcttact

SEQ ID NO: 36340 - DNA, 80 bp, synthetic construct; identical to SEQ ID NO: 12967
  source 1..80: mol_type = other DNA

SEQ ID NO: 36341 - DNA, 80 bp, synthetic construct
  source 1..80: mol_type = other DNA
ggaactatttacaaaacctgatcatctatgaggtaacctaagatgtctcaatatattccaggcagacttcgtacattata

SEQ ID NO: 36342 - DNA, 80 bp, synthetic construct
  source 1..80: mol_type = other DNA
tcatgaacaattattttataaacatagggcagctccttggtgtcaggcacccaggcttcttctattaatacttgcttatt

SEQ ID NO: 36343 - DNA, 80 bp, synthetic construct
  source 1..80: mol_type = other DNA
aagagtttgcaccgtttcatcattccatcactttcactcatatctcctcatggaatttagttacatggcaaacccagcta

SEQ ID NO: 36344 - DNA, 80 bp, synthetic construct; identical to SEQ ID NO: 12968
  source 1..80: mol_type = other DNA

SEQ ID NO: 36345 - DNA, 80 bp, synthetic construct
  source 1..80: mol_type = other DNA
aaatttgaacatgggctcttcaaaagaccattaaaagagataaactgcagaaaatacaaatcaataaaaaagaagatgca

SEQ ID NO: 36346 - DNA, 80 bp, synthetic construct
  source 1..80: mol_type = other DNA
aaactctggcctacaaaactcttgcctataatatagaaatctattacaataacaaaatcagcttaagaaaatcttgagat

SEQ ID NO: 36347 - DNA, 80 bp, synthetic construct
  source 1..80: mol_type = other DNA
attcagtctcagacagtaaatgattgaattggtgtctgtactagtctgcctaatctgaatgttggtgttctttcctctgc

SEQ ID NO: 36348 - DNA, 80 bp, synthetic construct; identical to SEQ ID NO: 12969
  source 1..80: mol_type = other DNA

SEQ ID NO: 36349 - DNA, 80 bp, synthetic construct
  source 1..80: mol_type = other DNA
ccctataacacaatatcccatgtatgttttttgtgctaatattagctctgattttattttccccctacatgttttatttg

SEQ ID NO: 36350 - DNA, 80 bp, synthetic construct
  source 1..80: mol_type = other DNA
aacgtagtttactagtttgctttggcactagcaatgtttgaaactgccagttttaccactgacacatttatggtggatac

SEQ ID NO: 36351 - DNA, 80 bp, synthetic construct
  source 1..80: mol_type = other DNA
agaatagtggtgagcaaaccaaatcatggtcgaaaaggatatggcaaactcaggcttgatttgttctgagaatatcaaag

SEQ ID NO: 36352 - DNA, 80 bp, synthetic construct; identical to SEQ ID NO: 12970
  source 1..80: mol_type = other DNA

SEQ ID NO: 36353 - DNA, 80 bp, synthetic construct
  source 1..80: mol_type = other DNA
tgagatattaatgttttattagcttctatgacctctttgtatagatatatacaatatccatatatagatattcacccttt

SEQ ID NO: 36354 - DNA, 80 bp, synthetic construct
  source 1..80: mol_type = other DNA
tgccttgcaatggaccaacattcctgttgagaacaaaaaacggtgatttttttaagtgcatatgaactctgtattttctg

SEQ ID NO: 36355 - DNA, 80 bp, synthetic construct
  source 1..80: mol_type = other DNA
actacccttatcaaatagacccacgggaggtccttctttctttccaccacgtgaagacatagtgaaaagacactgtctat

SEQ ID NO: 36356 - DNA, 80 bp, synthetic construct; identical to SEQ ID NO: 12971
  source 1..80: mol_type = other DNA

SEQ ID NO: 36357 - DNA, 80 bp, synthetic construct
  source 1..80: mol_type = other DNA
gacacttgacaaattttcctcaccagatatttgccattttctgaagctacacaggtgacagccaagaagctgaacagctt

SEQ ID NO: 36358 - DNA, 80 bp, synthetic construct
  source 1..80: mol_type = other DNA
ccagaagtagaaaaaaaaatcatatcaaagctgtaactgatcctaacttagctcagcccctgattaaatcaagccatcac

SEQ ID NO: 36359 - DNA, 80 bp, synthetic construct
  source 1..80: mol_type = other DNA
gaattttaaaaataagattaaaaactgaaagaaagaataacagatgataaatacattagaaattaacaggcaggaacgtc

SEQ ID NO: 36360 - DNA, 80 bp, synthetic construct; identical to SEQ ID NO: 12972
  source 1..80: mol_type = other DNA

SEQ ID NO: 36361 - DNA, 80 bp, synthetic construct
  source 1..80: mol_type = other DNA
caacagttgagttcagaagttctgatagacctgagaaggttagatataatagtaaagctgcttcatataagaacaaaaat

SEQ ID NO: 36362 - DNA, 80 bp, synthetic construct
  source 1..80: mol_type = other DNA
taaaaattttcacataaacaaatggtgagagaatttgttcctagctgaactaaactaaaaaaaaaaaatccgatagaaga

SEQ ID NO: 36363 - DNA, 80 bp, synthetic construct
  source 1..80: mol_type = other DNA
ggcagaagtggaataaattgagtcaaactattccaagatccttacatcgtctgggcagtgagaaagtaataacttatatt

SEQ ID NO: 36364 - DNA, 80 bp, synthetic construct
  source 1..80: mol_type = other DNA
aagaaaagacacaaaaaaatataaaacaggtagattatatagaaaacaaatagtatgctaatacctatcaaagccccatc

SEQ ID NO: 36365 - DNA, 80 bp, synthetic construct; identical to SEQ ID NO: 12973
  source 1..80: mol_type = other DNA

SEQ ID NO: 36366 - DNA, 80 bp, synthetic construct
  source 1..80: mol_type = other DNA
gacagatagatagagaaaagttggcagaagaaaaaagagaaacaattccaaaatcactggaaagaatttaattcaccaat

SEQ ID NO: 36367 - DNA, 80 bp, synthetic construct
  source 1..80: mol_type = other DNA
gttaactaactgaataattcagagaatatacacttggccactactgaattaaattgtaaaataatagcataaataactat

SEQ ID NO: 36368 - DNA, 80 bp, synthetic construct
  source 1..80: mol_type = other DNA
tacagccttaaattcttacattaaaaaatgaaaagagctgataatcaatatctaagattctatctcaagaagcaaaagaa

SEQ ID NO: 36369 - DNA, 80 bp, synthetic construct; identical to SEQ ID NO: 12974
  source 1..80: mol_type = other DNA

SEQ ID NO: 36370 - DNA, 80 bp, synthetic construct
  source 1..80: mol_type = other DNA
ccagagggttaaaaaacaggggaaacactttccgttctttttatgaggccaatataaccttggtatcaaaatctggcaaa

SEQ ID NO: 36371 - DNA, 80 bp, synthetic construct
  source 1..80: mol_type = other DNA
attgcatgaattgtaatggtgttttaccaataaaaaatagattaatataatcgacatgaacagaaaagatgaataataca

SEQ ID NO: 36372 - DNA, 80 bp, synthetic construct; identical to SEQ ID NO: 12975
  source 1..80: mol_type = other DNA

SEQ ID NO: 36373 - DNA, 80 bp, synthetic construct
  source 1..80: mol_type = other DNA
attgagattcacaagtgactataacaaggtcacaaaatacaaggccaatacaccaaaatcaattgcttatccatatcgta

SEQ ID NO: 36374 - DNA, 80 bp, synthetic construct
  source 1..80: mol_type = other DNA
catacaacatgctcaagagttgtaagaaataacagtgtataagatggtcattctccacagaatgatctatagattcaatg

SEQ ID NO: 36375 - DNA, 80 bp, synthetic construct
  source 1..80: mol_type = other DNA
agcagaaggactttcattaccagttatcatgtcttattgtcagactgcagtaaatatgacagtgtgatattggcaaaaaa

SEQ ID NO: 36376 - DNA, 80 bp, synthetic construct; identical to SEQ ID NO: 12976
  source 1..80: mol_type = other DNA

SEQ ID NO: 36377 - DNA, 80 bp, synthetic construct
  source 1..80: mol_type = other DNA
gaatcaaaaccaagacacagtggtaaaaaatatttacacacatagacacacgtaaaacaaaagacttatatagaataaac

SEQ ID NO: 36378 - DNA, 80 bp, synthetic construct
  source 1..80: mol_type = other DNA
agattgacatgcctactaacccactcatataaaatgaaaaatacagataattctagtgttggtgaggatgtggtgcaacc

SEQ ID NO: 36379 - DNA, 80 bp, synthetic construct
  source 1..80: mol_type = other DNA
acaatggttaaacagtatcttctgaagctgcatatatgcattaccaacaattccactccttggtatatccaacagaaatg

SEQ ID NO: 36380 - DNA, 80 bp, synthetic construct
  source 1..80: mol_type = other DNA
ttatgaaaataaacaaactattgctacctgcaccaacatggataatacccaaagacataatgttgactaaaagaaaccag

SEQ ID NO: 36381 - DNA, 80 bp, synthetic construct; identical to SEQ ID NO: 12977
  source 1..80: mol_type = other DNA

SEQ ID NO: 36382 - DNA, 80 bp, synthetic construct
  source 1..80: mol_type = other DNA
ttctttgtgtactatgtgaatttaaactgatgttatataactgctaagtagctatccgtacagcacttatcataaatctt

SEQ ID NO: 36383 - DNA, 80 bp, synthetic construct
  source 1..80: mol_type = other DNA
cgattttaaaatagacaactttcagagtactccttcatcagtcttcatgatttgcttatattctctcgtgtttatttttt

SEQ ID NO: 36384 - DNA, 80 bp, synthetic construct
  source 1..80: mol_type = other DNA
cacattttaatattgaagacaatatgtgactagcacatgagatgagcccaagagtaggaggaataaagagtggtaaaaca

SEQ ID NO: 36385 - DNA, 80 bp, synthetic construct; identical to SEQ ID NO: 12978
  source 1..80: mol_type = other DNA

SEQ ID NO: 36386 - DNA, 80 bp, synthetic construct
  source 1..80: mol_type = other DNA
agccaggcgtggtggcacataccagtagtcccagctacttgggaggctgaggcaggagaatctcttgaacctgggaggcg

SEQ ID NO: 36387 - DNA, 80 bp, synthetic construct
  source 1..80: mol_type = other DNA
agtgggatgaactcagctcactgcagcctgaaactccctgggctcaggtgatcctctcacctcagcctcgcaagttgctg

SEQ ID NO: 36388 - DNA, 80 bp, synthetic construct
  source 1..80: mol_type = other DNA
ccctggctaagctcttttcttattttagatttgagagctattagcatgcatggataagaaaaaccattgaaattactttt

SEQ ID NO: 36389 - DNA, 80 bp, synthetic construct; identical to SEQ ID NO: 12979
  source 1..80: mol_type = other DNA

SEQ ID NO: 36390 - DNA, 80 bp, synthetic construct
  source 1..80: mol_type = other DNA
gtccgtgaagcagacagaaaaccagcaatcagagaagaaccccactggttaaatgggcactgcttttctaattgttctaa

SEQ ID NO: 36391 - DNA, 80 bp, synthetic construct
  source 1..80: mol_type = other DNA
ggaagttctgactgttgaaattcctgtttaacactatgctttgacttcgtgatagtcttgtaatgtttatcagaatagtg

SEQ ID NO: 36392 - DNA, 80 bp, synthetic construct; identical to SEQ ID NO: 12980
  source 1..80: mol_type = other DNA

SEQ ID NO: 36393 - DNA, 80 bp, synthetic construct
  source 1..80: mol_type = other DNA
ttcctttcctttattttttacattttttacagtagcttcatttcacaccccttcagagtagaactgtgagaaacttcatt

SEQ ID NO: 36394 - DNA, 80 bp, synthetic construct
  source 1..80: mol_type = other DNA
ataataaggagaaaatgtttgacatctggttagtgggaggggggatgaaaataagaaaaaaactagagatgatataactt

SEQ ID NO: 36395 - DNA, 80 bp, synthetic construct
  source 1..80: mol_type = other DNA
ctctaagtttcttggtttgctgcaactggctacctcctaaaaaagattggacttgcacctcagctctcagataaaaagta

SEQ ID NO: 36396 - DNA, 80 bp, synthetic construct
  source 1..80: mol_type = other DNA
agtgaagactcacaccttccacagctgtgatgtcctggatactgccactggtactgccacctccatcatcacagatttag

SEQ ID NO: 36397 - DNA, 80 bp, synthetic construct; identical to SEQ ID NO: 12981
  source 1..80: mol_type = other DNA

SEQ ID NO: 36398 - DNA, 80 bp, synthetic construct
  source 1..80: mol_type = other DNA
aattctatcctcaagaaagttgtaacacatgaacttttgcctcaaggtctgttttccagatggtccagatggaccttcca

SEQ ID NO: 36399 - DNA, 80 bp, synthetic construct
  source 1..80: mol_type = other DNA
atgaaaatatatatagcaggcaaatagtaaatttttaaaactactgtagttctattaaatagagataaaatagattttaa

SEQ ID NO: 36400 - DNA, 80 bp, synthetic construct
  source 1..80: mol_type = other DNA
aaaaatgactgaaacaccactaacaaagtgacaaattctcaatcacagggagagacttcaatttacttcttttaattgtt

SEQ ID NO: 36401 - DNA, 80 bp, synthetic construct; identical to SEQ ID NO: 12982
  source 1..80: mol_type = other DNA

SEQ ID NO: 36402 - DNA, 80 bp, synthetic construct
  source 1..80: mol_type = other DNA
agatacagcctcagtgatattcgtaatatctacctcataagctggttggagggttagtgaccattttattttcatgcttc

SEQ ID NO: 36403 - DNA, 80 bp, synthetic construct
  source 1..80: mol_type = other DNA
accaattttgttaccaagctttacttacaacagatcttgaatttggtctaagatcgtactgcactgagtttcctagattc

SEQ ID NO: 36404 - DNA, 80 bp, synthetic construct
  source 1..80: mol_type = other DNA
ttctttcaatatggaagggctttatggtaatgtccagggaaattcggcatgttttatttaattgtggtcagaaatgtaac

SEQ ID NO: 36405 - DNA, 80 bp, synthetic construct; identical to SEQ ID NO: 12983
  source 1..80: mol_type = other DNA

SEQ ID NO: 36406 - DNA, 80 bp, synthetic construct
  source 1..80: mol_type = other DNA
tcccaacagacttggatttattcacttattagctgtgggaccatggcagttttattattgctctgacatattttctgcat

SEQ ID NO: 36407 - DNA, 80 bp, synthetic construct
  source 1..80: mol_type = other DNA
ctcacatccatgaccagcttctagctcaaaagaaacactgttggtctgttatttttcctaagactttggactagccagac

SEQ ID NO: 36408 - DNA, 80 bp, synthetic construct
  source 1..80: mol_type = other DNA
gtggtatggggttcgttattcagaagctcatgaatttcaccaaaaacctgggctgtttctatctttattttctgctatcc

SEQ ID NO: 36409 - DNA, 80 bp, synthetic construct; identical to SEQ ID NO: 12984
  source 1..80: mol_type = other DNA

SEQ ID NO: 36410 - DNA, 80 bp, synthetic construct
  source 1..80: mol_type = other DNA
aatgaagatggcaatatgcagttgagaaaaataaatgataatttttatgaaaaagcaaaaataccagcagggacataaaa

SEQ ID NO: 36411 - DNA, 80 bp, synthetic construct
  source 1..80: mol_type = other DNA
ggaaataacactcattttattttcagtattagcataccacatggcttagaatttttttttttctggttgttacctggaca

SEQ ID NO: 36412 - DNA, 80 bp, synthetic construct; identical to SEQ ID NO: 12985
  source 1..80: mol_type = other DNA

SEQ ID NO: 36413 - DNA, 80 bp, synthetic construct
  source 1..80: mol_type = other DNA
acagtggtgttttctgctgaagacatcatgtttttaaaggctctgaactcataaaaattttaaagctaatagcaacctta

SEQ ID NO: 36414 - DNA, 80 bp, synthetic construct
  source 1..80: mol_type = other DNA
ttagttggttaggtgtttgctaggactggcttcccctctttgcagcctgcatttggacctttttcacaggatttttctat

SEQ ID NO: 36415 - DNA, 80 bp, synthetic construct
  source 1..80: mol_type = other DNA
gaattttttttcaagtcagttgtactctaatacctgtgaagagcatttccttcatagctgggaactctaaataccagtgc

SEQ ID NO: 36416 - DNA, 80 bp, synthetic construct; identical to SEQ ID NO: 12986
  source 1..80: mol_type = other DNA

SEQ ID NO: 36417 - DNA, 80 bp, synthetic construct
  source 1..80: mol_type = other DNA
gattcattccttcgacaactatttgttgaacacctcttgtattcctggcatcctaataagctctggggatattttggtga

SEQ ID NO: 36418 - DNA, 80 bp, synthetic construct
  source 1..80: mol_type = other DNA
agcacataacagtgacacctaatacaacttccagaggaagttacttttaaattggatactgaaggctgagtagggagttc

SEQ ID NO: 36419 - DNA, 80 bp, synthetic construct
  source 1..80: mol_type = other DNA
ctgcatttccttgaactgaatcttaatatctgaattcaatttctgctgtggctgtggtttctcaaagaagggtcactatc

SEQ ID NO: 36420 - DNA, 80 bp, synthetic construct
  source 1..80: mol_type = other DNA
ccgcctctactgaaaacacaaaaaattagcctggcgtggtggcaagcacctgtagtcccagctgctcaggaggctgaggc

SEQ ID NO: 36421 - DNA, 80 bp, synthetic construct; identical to SEQ ID NO: 12987
  source 1..80: mol_type = other DNA

SEQ ID NO: 36422 - DNA, 80 bp, synthetic construct
  source 1..80: mol_type = other DNA
atctgtggctgtccagatgccaaaaactcaccttgattattttcccattacattaccctaaggcagtatgttggtataca

SEQ ID NO: 36423 - DNA, 80 bp, synthetic construct
  source 1..80: mol_type = other DNA
actgtaagtaacaagcctccgaccaactcagaaaattggggcagagtttatcaaagtaccctagagtttttgacccaaga

SEQ ID NO: 36424 - DNA, 80 bp, synthetic construct; identical to SEQ ID NO: 12988
  source 1..80: mol_type = other DNA

SEQ ID NO: 36425 - DNA, 80 bp, synthetic construct
  source 1..80: mol_type = other DNA
tgattgccattcatactctagaagtgaaaacctagtcttgtggtcacacataattgacatagaagctcagaaatgtattc

SEQ ID NO: 36426 - DNA, 80 bp, synthetic construct
  source 1..80: mol_type = other DNA
gggggagggtgggtacggcttgtatttttttatgagcataaaaattaattcatttaataaaaaatgggacatattccctt

SEQ ID NO: 36427 - DNA, 80 bp, synthetic construct
  source 1..80: mol_type = other DNA
aagaccatcctggctaacacagtgaaaccccgtctctactaaaaatacagaaaaattagccgggcgtggtggctggcgcc

SEQ ID NO: 36428 - DNA, 80 bp, synthetic construct
  source 1..80: mol_type = other DNA
ttattgcggcattattcacaatagcaaagacttggaaccaacccaaatgtccaacaacgatagactggattaagaaaatg

SEQ ID NO: 36429 - DNA, 80 bp, synthetic construct; identical to SEQ ID NO: 12989
  source 1..80: mol_type = other DNA

SEQ ID NO: 36430 - DNA, 80 bp, synthetic construct
  source 1..80: mol_type = other DNA
aaacccaaccaaccaaccaaacaagcaaacaaaaaacaggaatcagcaaacatattctgtaaaggggaagaagtaaatat

SEQ ID NO: 36431 - DNA, 80 bp, synthetic construct
  source 1..80: mol_type = other DNA
ctcatgagtctgtgggtgataaattggtactccatttagcaaacaggtcatacagggctgaatggtctacagtgaccttg

SEQ ID NO: 36432 - DNA, 80 bp, synthetic construct
  source 1..80: mol_type = other DNA
gctctcatcaggtttgctagtgtcatattggccaaagcaagtcagctggcaaagccagattgaagggggagagaaataaa

SEQ ID NO: 36433 - DNA, 80 bp, synthetic construct; identical to SEQ ID NO: 12990
  source 1..80: mol_type = other DNA

SEQ ID NO: 36434 - DNA, 80 bp, synthetic construct
  source 1..80: mol_type = other DNA
tcatattgaagactacctggatgagagtttttaagtaggcaactaagcagggttatctctagactgtttaatctttcctt

SEQ ID NO: 36435 - DNA, 80 bp, synthetic construct
  source 1..80: mol_type = other DNA
gttttgaagaactgaagccatgaatttaatctaattcaggggagtgggttaaaacttcaagaagtgcccttgagcttcta

SEQ ID NO: 36436 - DNA, 80 bp, synthetic construct
  source 1..80: mol_type = other DNA
ctataaaatcagtaaagtcatttttacaagtcctcctctcctggaattttgatgaactatttgaaacgctttctaggatg

SEQ ID NO: 36437 - DNA, 80 bp, synthetic construct; identical to SEQ ID NO: 12991
  source 1..80: mol_type = other DNA

SEQ ID NO: 36438 - DNA, 80 bp, synthetic construct
  source 1..80: mol_type = other DNA
tggctctgacacatgactgccaagatcacagatataataggaagtaggagagccaggatttgagctaccagttgtctaca

SEQ ID NO: 36439 - DNA, 80 bp, synthetic construct
  source 1..80: mol_type = other DNA
cagaattatacaagttatatgttagacgtcaaggaaaagttttatgcttctttcattccattatcctctttttttcctta

SEQ ID NO: 36440 - DNA, 80 bp, synthetic construct; identical to SEQ ID NO: 12992
  source 1..80: mol_type = other DNA

SEQ ID NO: 36441 - DNA, 80 bp, synthetic construct
  source 1..80: mol_type = other DNA
aagaaacacatatggaagccctgagatagggatgataccttgagaatgcataagatccaaaattatttgatgcagataca

SEQ ID NO: 36442 - DNA, 80 bp, synthetic construct
  source 1..80: mol_type = other DNA
taataaaggtactcaaaaataccatttaacattatcatggattgaaagaatgataaatgagaaaatctatttttcccaaa

SEQ ID NO: 36443 - DNA, 80 bp, synthetic construct
  source 1..80: mol_type = other DNA
ctcatcggaattttcataatttcttcaaatgtttgaattgaagtgagtagatacccagcaaatttttctcatatgcttct

SEQ ID NO: 36444 - DNA, 80 bp, synthetic construct
  source 1..80: mol_type = other DNA
tgtctgatgtgtcatttttataaatccatggcaaaatcgagtggcatcttgattttctgttgaaattactacttttatta

SEQ ID NO: 36445 - DNA, 80 bp, synthetic construct; identical to SEQ ID NO: 12993
  source 1..80: mol_type = other DNA

SEQ ID NO: 36446 - DNA, 80 bp, synthetic construct
  source 1..80: mol_type = other DNA
ggtgttgttctatgagaagccattttgtatgacaaacagaagatagtttaagactatagtaatgttaggggctagaaagg

SEQ ID NO: 36447 - DNA, 80 bp, synthetic construct
  source 1..80: mol_type = other DNA
tattccaatggctttacttgttaatttcatcgctcagcagacagaaagtgcaccttggaaataacattatcatattggct

SEQ ID NO: 36448 - DNA, 80 bp, synthetic construct; identical to SEQ ID NO: 12994
  source 1..80: mol_type = other DNA

SEQ ID NO: 36449 - DNA, 80 bp, synthetic construct
  source 1..80: mol_type = other DNA
agaagtcaggattagtcacaaagtgaaaatgaaagctctaataatgacaaggttgtgaacaaaacatttaaagaaaatgc

SEQ ID NO: 36450 - DNA, 80 bp, synthetic construct
  source 1..80: mol_type = other DNA
tccttaatataacctctatattgtcaagatgttatatttaatagttctaatccttcaatgaagactactataattcccca

SEQ ID NO: 36451 - DNA, 80 bp, synthetic construct
  source 1..80: mol_type = other DNA
taaataaacacattaattgccttgtcatacttttatctgacagatgggtccccaggcatagagcctaaccttttattttg

SEQ ID NO: 36452 - DNA, 80 bp, synthetic construct; identical to SEQ ID NO: 12995
  source 1..80: mol_type = other DNA

SEQ ID NO: 36453 - DNA, 80 bp, synthetic construct
  source 1..80: mol_type = other DNA
tatgctattttaatatagctaaggagttaaaatctatctgaacattttcctttttaaaaaaaaagaagcatcaagcaata

SEQ ID NO: 36454 - DNA, 80 bp, synthetic construct
  source 1..80: mol_type = other DNA
tgcaaatcggagaacatacagcgggcagatgaattgtgggagctcatccattattgagataatttggtataaattttaag

SEQ ID NO: 36455 - DNA, 80 bp, synthetic construct
  source 1..80: mol_type = other DNA
ttagtagcaaacagaagatagttccaccagatcaacacagtttggtttacaatctcattgctgagatgtggatgccaata

SEQ ID NO: 36456 - DNA, 80 bp, synthetic construct; identical to SEQ ID NO: 12996
  source 1..80: mol_type = other DNA

SEQ ID NO: 36457 - DNA, 80 bp, synthetic construct
  source 1..80: mol_type = other DNA
tagctgggataggcgtgcgcctacatgcccagttaacttttgtatttttagtagagatggggtttcaccatgttggccag

SEQ ID NO: 36458 - DNA, 80 bp, synthetic construct
  source 1..80: mol_type = other DNA
ctgccccaatccagctttcacggattactcaaagtttctgctcgttcacattttaaccatgtcccaaaccttggaatttc

SEQ ID NO: 36459 - DNA, 80 bp, synthetic construct
  source 1..80: mol_type = other DNA
ttgggttgggttagcgttagggttagatcctgtgtgagtaaacatagcaatttagatggcagatgttctggatgaggatg

SEQ ID NO: 36460 - DNA, 80 bp, synthetic construct; identical to SEQ ID NO: 12997
  source 1..80: mol_type = other DNA

SEQ ID NO: 36461 - DNA, 80 bp, synthetic construct
  source 1..80: mol_type = other DNA
aataaacaaggactatcatggcagtcactcacctttccaagttatcagtcatgagaagacacaggagaatgaattttgaa

SEQ ID NO: 36462 - DNA, 80 bp, synthetic construct
  source 1..80: mol_type = other DNA
aatgtaagatgtgggcagtgtgggttttattgcttgtttctgttgtatttactagtttttacagaaggcaattagagagc

SEQ ID NO: 36463 - DNA, 80 bp, synthetic construct
  source 1..80: mol_type = other DNA
atccagaggaaggagagaggattcaatgctactgtggccagagaagcataggcaggatttatacaatgttttgaagaatg

SEQ ID NO: 36464 - DNA, 80 bp, synthetic construct
  source 1..80: mol_type = other DNA
gataagatttagaaagatggaaaggatgaatggggttattctgggtagaacaaaattttcaagcaaaagtcagaacatct

SEQ ID NO: 36465 - DNA, 80 bp, synthetic construct
  source 1..80: mol_type = other DNA
aagttattaaaactgggctccttgaaataaaattccttttgtatatatatatatttatatatataaaatttactgtcata

SEQ ID NO: 36466 - DNA, 80 bp, synthetic construct
  source 1..80: mol_type = other DNA
gacatttcaatctaatgcaaagacactaactaaataacaggaattgcttcttctgatgggcaactatatgaccttagcaa

SEQ ID NO: 36467 - DNA, 80 bp, synthetic construct
  source 1..80: mol_type = other DNA
agtgatttcaatacaggctttcagtatttcagcattcaataatgtcatattaatttgaagtccaaagtactggtaatttt

SEQ ID NO: 36468 - DNA, 80 bp, synthetic construct
  source 1..80: mol_type = other DNA
gcctactctgatggcacatgtgttaagacagtgttgatagggagagcggtaactctgcataggtatttccaagtacacaa

SEQ ID NO: 36469 - DNA, 80 bp, synthetic construct; identical to SEQ ID NO: 12998
  source 1..80: mol_type = other DNA

SEQ ID NO: 36470 - DNA, 80 bp, synthetic construct
  source 1..80: mol_type = other DNA
attgactctgaataatttatactggaatgatgtttaatattcccatactatgtactataattttacatttttgctttttg

SEQ ID NO: 36471 - DNA, 80 bp, synthetic construct
  source 1..80: mol_type = other DNA
acataggtatacacgtgccattgtggtttgcttcacccatcaacccatcatctatgtttggtatttctcctaatgctatc

SEQ ID NO: 36472 - DNA, 80 bp, synthetic construct
  source 1..80: mol_type = other DNA
cgttcctgtgaaatatttagttagctttttttcattgcttcttgataatattcatataaactaccagaataaatacttac

SEQ ID NO: 36473 - DNA, 80 bp, synthetic construct; identical to SEQ ID NO: 12999
  source 1..80: mol_type = other DNA

SEQ ID NO: 36474 - DNA, 80 bp, synthetic construct
  source 1..80: mol_type = other DNA
gagagaagagagaagcttttggatgtgttgcttttgtggtgatggtgagatatcaggttggccttatttttttcttgtat

SEQ ID NO: 36475 - DNA, 80 bp, synthetic construct
  source 1..80: mol_type = other DNA
tgactaaggtagcttttactgaccatgtctttatccctgaaattctgacatcctagagtaggggatcttaagatcaatgc

SEQ ID NO: 36476 - DNA, 80 bp, synthetic construct
  source 1..80: mol_type = other DNA
agacaatttgaagtacacccaaagttaaaaacttttgagctacagagtaagtgtaggctggggaaacttgaatttttaat

SEQ ID NO: 36477 - DNA, 80 bp, synthetic construct
  source 1..80: mol_type = other DNA
gtatgtaattatctgagattagaatattcaaaaagaatatgttgcaggaccagaaagcaaaccatcataatttatgcctg

SEQ ID NO: 36478 - DNA, 80 bp, synthetic construct; identical to SEQ ID NO: 13000
  source 1..80: mol_type = other DNA

SEQ ID NO: 36479 - DNA, 80 bp, synthetic construct
  source 1..80: mol_type = other DNA
aaacagccaatcaatattaactaatccttcttgttttagaaagtaattgaatggttttaatatcaaatttgttgactcag

SEQ ID NO: 36480 - DNA, 80 bp, synthetic construct
  source 1..80: mol_type = other DNA
ctatacgtaaatatttgagagggcagttccttaaaatctaaacgtgtaccactctcctacccccgcccaggcttgctgag

SEQ ID NO: 36481 - DNA, 80 bp, synthetic construct
  source 1..80: mol_type = other DNA
ttccgggttcacgccatgttctctgtctttagaaacatacaagggatggagtaaagtgagccacgacaaagaggaaatca

SEQ ID NO: 36482 - DNA, 80 bp, synthetic construct; identical to SEQ ID NO: 13001
  source 1..80: mol_type = other DNA

SEQ ID NO: 36483 - DNA, 80 bp, synthetic construct
  source 1..80: mol_type = other DNA
taagatcctgcctcatccttattccctcctaccactttgattattcttcaaactcagcttgtgcaagaccactgtcttta

SEQ ID NO: 36484 - DNA, 80 bp, synthetic construct
  source 1..80: mol_type = other DNA
ctcagttcctttagatggaccttacacttggatggctgactaggcttttgatttggcatatttcttctcagtttttcatt

SEQ ID NO: 36485 - DNA, 80 bp, synthetic construct
  source 1..80: mol_type = other DNA
taaaggatcaaggaccctctggttttcttattccccacattcacccaatctccttttcctccatgatttcaacattcata

SEQ ID NO: 36486 - DNA, 80 bp, synthetic construct; identical to SEQ ID NO: 13002
  source 1..80: mol_type = other DNA

SEQ ID NO: 36487 - DNA, 80 bp, synthetic construct
  source 1..80: mol_type = other DNA
tctccaaaagtttgtttatgtgagtattaagggtactagcatgtgctgagcaattagtacccagcacttagaaagtgctt

SEQ ID NO: 36488 - DNA, 80 bp, synthetic construct
  source 1..80: mol_type = other DNA
tgggaccacaggcgcatgccaccatgcctggctaattttttgtatttttcgtagagaatgggttttgcaatgtttcccag

SEQ ID NO: 36489 - DNA, 80 bp, synthetic construct; identical to SEQ ID NO: 13003
  source 1..80: mol_type = other DNA

SEQ ID NO: 36490 - DNA, 80 bp, synthetic construct
  source 1..80: mol_type = other DNA
atcaattaacctcagacatggattttccccatattttcccagccttatatcttatccatcttccttctgctcaccgttac

SEQ ID NO: 36491 - DNA, 80 bp, synthetic construct
  source 1..80: mol_type = other DNA
taggaagacaaacacattaacaaacaattgaatacaatgtggcgagggcttacaaaacatacgccagtgtattaaaggaa

SEQ ID NO: 36492 - DNA, 80 bp, synthetic construct
  source 1..80: mol_type = other DNA
aaagtagtgactgctaagacagagggaggcacagcatgttctcagaatgcaatcaagatatttgtagtttaggaataaga

SEQ ID NO: 36493 - DNA, 80 bp, synthetic construct
  source 1..80: mol_type = other DNA
ctgtccaccccaccccaccctcagcattttgtctctctttgaccactgatctgtgagagcaaatgtaacttattttctca

SEQ ID NO: 36494 - DNA, 80 bp, synthetic construct; identical to SEQ ID NO: 13004
  source 1..80: mol_type = other DNA

SEQ ID NO: 36495 - DNA, 80 bp, synthetic construct
  source 1..80: mol_type = other DNA
ttgcagaggctgcctttgtgctgtgtttccacatgacgcgcgcgtgtgcgcgcgcacacacacacacacacacacacacg

SEQ ID NO: 36496 - DNA, 80 bp, synthetic construct
  source 1..80: mol_type = other DNA
aggtaagggcttcaacacagaatctgagcaggggatgggaggacagttcagtccagagcattccacccaagacatcaccc

SEQ ID NO: 36497 - DNA, 80 bp, synthetic construct; identical to SEQ ID NO: 13005
  source 1..80: mol_type = other DNA

SEQ ID NO: 36498 - DNA, 80 bp, synthetic construct
  source 1..80: mol_type = other DNA
tcccatcttcatccccttcagttcaaactggcagaatttctgctcacataatctcataaactcttatcaaatggttgtcc

SEQ ID NO: 36499 - DNA, 80 bp, synthetic construct
  source 1..80: mol_type = other DNA
aacttatctttttttttttcatttcagcagaaatggtcaggaggaaaccagctgctccttcatcatattgcttagaaatg

SEQ ID NO: 36500 - DNA, 80 bp, synthetic construct
  source 1..80: mol_type = other DNA
actgtttgttcatatgtttaggatgcacctgaaaattcttgagcctctactcactatccaattccaaagtcatttcccca

SEQ ID NO: 36501 - DNA, 80 bp, synthetic construct; identical to SEQ ID NO: 13006
  source 1..80: mol_type = other DNA

SEQ ID NO: 36502 - DNA, 80 bp, synthetic construct
  source 1..80: mol_type = other DNA
tttgattttggggggacacgattcagtccaaagcaggtgcccttcctcaagacagtttatgtccatctgtaggcaatttg

SEQ ID NO: 36503 - DNA, 80 bp, synthetic construct
  source 1..80: mol_type = other DNA
aagcaacctgaacaattattcaccgtagtccaggttaatccttccttgtcctcaactgacaatttttatgtatggtaagg

SEQ ID NO: 36504 - DNA, 80 bp, synthetic construct
  source 1..80: mol_type = other DNA
ttcaatttgacaagacacaatagtgtgtgactaaaaaactgggctataaatagagctttttgctaagtttgagtacagta

SEQ ID NO: 36505 - DNA, 80 bp, synthetic construct
  source 1..80: mol_type = other DNA
acctgtcagattcaaaatcacaaggttgaaattgactaaataggtccatatgtttgtaatcctgtttccagaaaggacct

SEQ ID NO: 36506 - DNA, 80 bp, synthetic construct; identical to SEQ ID NO: 13007
  source 1..80: mol_type = other DNA

SEQ ID NO: 36507 - DNA, 80 bp, synthetic construct
  source 1..80: mol_type = other DNA
ctgcagacatgcaagatttaacaagaaagtagtaacaatgtaaatagcattgctttcaaatctacagaaaatggctttct

SEQ ID NO: 36508 - DNA, 80 bp, synthetic construct
  source 1..80: mol_type = other DNA
aaaaaagttgggaatgcctagatttaataatttgaggaaattttttaaaaagaaaatgagcagtgccttttcatcaccat

SEQ ID NO: 36509 - DNA, 80 bp, synthetic construct
  source 1..80: mol_type = other DNA
tttcctttgtcatagattattttagatatattagagaacttaatgtgtttggattacttcaagaataattgtacattggc

SEQ ID NO: 36510 - DNA, 80 bp, synthetic construct; identical to SEQ ID NO: 13008
  source 1..80: mol_type = other DNA

SEQ ID NO: 36511 - DNA, 80 bp, synthetic construct
  source 1..80: mol_type = other DNA
aggctattatccttagcaaacaaactcaggaacagaaaaccaaaagccacatgttctctcttataagtgggagctaaatg

SEQ ID NO: 36512 - DNA, 80 bp, synthetic construct
  source 1..80: mol_type = other DNA
acctatgcaaaacaaacctgtacttgtacccctgaacttaaaataaaagttaaaaaaagaaatatgataattttcttaat

SEQ ID NO: 36513 - DNA, 80 bp, synthetic construct
  source 1..80: mol_type = other DNA
ttaagtgaatcaaacaacttttttttttttcctgattgcatgaactgaccaggtgtttgatgacttttagcagatgttga

SEQ ID NO: 36514 - DNA, 80 bp, synthetic construct
  source 1..80: mol_type = other DNA
gcctcccgggttcacgccattctcctacctcagcctcccgagtagctgggactacaggtgcccaccaccacgcccagcta

SEQ ID NO: 36515 - DNA, 80 bp, synthetic construct; identical to SEQ ID NO: 13009
  source 1..80: mol_type = other DNA

SEQ ID NO: 36516 - DNA, 80 bp, synthetic construct
  source 1..80: mol_type = other DNA
ttcagggaaaaacccatcaatctaagcagtgaaaaaatggaaagactccatgatgttttttaagtatagctacaacataa

SEQ ID NO: 36517 - DNA, 80 bp, synthetic construct
  source 1..80: mol_type = other DNA
acttggaaaacgaggcatacaaggttaggatgtctctgataaacaaaaaagcttttaagatggggccttcattgtttgtg

SEQ ID NO: 36518 - DNA, 80 bp, synthetic construct; identical to SEQ ID NO: 13010
  source 1..80: mol_type = other DNA

SEQ ID NO: 36519 - DNA, 80 bp, synthetic construct
  source 1..80: mol_type = other DNA
tagtacaaatgtcatttatatcccaaaatttacttagatttaaaaatattttttaccgatttatttgctgtttcttcctg

SEQ ID NO: 36520 - DNA, 80 bp, synthetic construct
  source 1..80: mol_type = other DNA
gtcagcacattgaagttactccttcattctcttttggtctttcctaatgctgatgaggtcttctatccacctgattgttc

SEQ ID NO: 36521 - DNA, 80 bp, synthetic construct
  source 1..80: mol_type = other DNA
gtttcagccatcatttcaaatatttcctcttccctatcaataatattatttgttactggaattattagacatatgccagg

SEQ ID NO: 36522 - DNA, 80 bp, synthetic construct
  source 1..80: mol_type = other DNA
attatttgtgattttatttgactgaaatctctttttggcttacactagtgggagcagggaacacaggattctatagtgtt

SEQ ID NO: 36523 - DNA, 80 bp, synthetic construct; identical to SEQ ID NO: 13011
  source 1..80: mol_type = other DNA

SEQ ID NO: 36524 - DNA, 80 bp, synthetic construct
  source 1..80: mol_type = other DNA
cctccggagaacactaaagtgtagatccataggtcccaccatagagtttctgattaattaggtctgagatctaaatatcc

SEQ ID NO: 36525 - DNA, 80 bp, synthetic construct
  source 1..80: mol_type = other DNA
ggacaggaagagactgacaggaaggaaaagctatggaatgaaggagcaaaagttaaataataggagggaagtttgagaag

SEQ ID NO: 36526 - DNA, 80 bp, synthetic construct
  source 1..80: mol_type = other DNA
ttttttaacttcttcacatgggttcttttactaattaaagctaattggaaataggtagaaaaggttaatattgggtctgt

SEQ ID NO: 36527 - DNA, 80 bp, synthetic construct; identical to SEQ ID NO: 13012
  source 1..80: mol_type = other DNA

SEQ ID NO: 36528 - DNA, 80 bp, synthetic construct
  source 1..80: mol_type = other DNA
tgtatcagagccttaacatcgagatgaataggcttttgtttctgggataccacctttctgactcttgtgtttcttaggat

SEQ ID NO: 36529 - DNA, 80 bp, synthetic construct
  source 1..80: mol_type = other DNA
caggctgcagaataattagattcacaattctctcttaaaaaaatctcaacaaactaaggtggttttatgttcataaggca

SEQ ID NO: 36530 - DNA, 80 bp, synthetic construct
  source 1..80: mol_type = other DNA
caggcgtgcaacaccatgccctgctaatgtttgtagttttttgtagagacagggtttcaccacattgcccaggctgaact

SEQ ID NO: 36531 - DNA, 80 bp, synthetic construct; identical to SEQ ID NO: 13013
  source 1..80: mol_type = other DNA

SEQ ID NO: 36532 - DNA, 80 bp, synthetic construct
  source 1..80: mol_type = other DNA
ccaagccagttacctggtttgagtggaggcaaagcgtaagcttttttcacaacatcagagtttttacagtcagaacacat

SEQ ID NO: 36533 - DNA, 80 bp, synthetic construct; identical to SEQ ID NO: 13014
  source 1..80: mol_type = other DNA

SEQ ID NO: 36534 - DNA, 80 bp, synthetic construct
  source 1..80: mol_type = other DNA
ttgcgtcagagtgtggcagaggcagtccctcaaagaacctctgatgtcccctagcccaggcccagatagagttccagggc

SEQ ID NO: 36535 - DNA, 80 bp, synthetic construct
  source 1..80: mol_type = other DNA
tggaaaccacttggggagctgtaacggggtgaggtgggtccggactagcctggaaagtagaggtccacatcggggtgcgg

SEQ ID NO: 36536 - DNA, 80 bp, synthetic construct
  source 1..80: mol_type = other DNA
gcctgctccacgccaagccccacaaagagaaaactcagcctctgggccctgactcaggctccagcaaccctagagcccca

SEQ ID NO: 36537 - DNA, 80 bp, synthetic construct
  source 1..80: mol_type = other DNA
cgggcagtgaggagcatggagccaagcgaacactgcagggcctgccggggtgaagaggaggccgatccacccaggccttc

SEQ ID NO: 36538 - DNA, 80 bp, synthetic construct; identical to SEQ ID NO: 13015
  source 1..80: mol_type = other DNA

SEQ ID NO: 36539 - DNA, 80 bp, synthetic construct
  source 1..80: mol_type = other DNA
gaggagtccaggtcttggatcctagacctgcctctgacacccatttgcagtgaagtatcccttcagctccttcagcctca

SEQ ID NO: 36540 - DNA, 80 bp, synthetic construct
  source 1..80: mol_type = other DNA
cttatagcatcctcataaggtacataagaaaaacactcacaacagctctgcaatatacccaaggtcattcactcttgagc

SEQ ID NO: 36541 - DNA, 80 bp, synthetic construct
  source 1..80: mol_type = other DNA
aactcaggtgcactttttccaggacctcctgcacaggtgtgatatttatcctggaagcaatgtgtacatggaatgcccta

SEQ ID NO: 36542 - DNA, 80 bp, synthetic construct
  source 1..80: mol_type = other DNA
cccatgatcgtgagtagtcccatgggatcaagtgctctcattcataaaagaagggaggtaacagctgccccactcacgcc

SEQ ID NO: 36543 - DNA, 80 bp, synthetic construct; identical to SEQ ID NO: 13016
  source 1..80: mol_type = other DNA

SEQ ID NO: 36544 - DNA, 80 bp, synthetic construct
  source 1..80: mol_type = other DNA
atggatagtgctttgtagtttagaaaatgctttcaccaactgattgccatgacagccctgagaagtaacctactctacag

SEQ ID NO: 36545 - DNA, 80 bp, synthetic construct
  source 1..80: mol_type = other DNA
tctgtttgcccatctgtaaagtgagcacaattacagaatctacctaatagggctgtctgtatgtcaatgggcttggcctg

SEQ ID NO: 36546 - DNA, 80 bp, synthetic construct; identical to SEQ ID NO: 13017
  source 1..80: mol_type = other DNA

SEQ ID NO: 36547 - DNA, 80 bp, synthetic construct
  source 1..80: mol_type = other DNA
tgcaccagaggcagagggctctgggtaaagccggacaagttcccaggcatcagccacccatctcactggcccctcccttt

SEQ ID NO: 36548 - DNA, 80 bp, synthetic construct
  source 1..80: mol_type = other DNA
tctgccagggctgaataccagggacttgtctctcatggcctgagcaacacttactgttagcaaagtgccaggtgccacag

SEQ ID NO: 36549 - DNA, 80 bp, synthetic construct
  source 1..80: mol_type = other DNA
ttctcctggatagactaatctaggtgccaaaaggctgacccctggggccccacatcttccctgctggggtgacctagaga

SEQ ID NO: 36550 - DNA, 80 bp, synthetic construct; identical to SEQ ID NO: 13018
  source 1..80: mol_type = other DNA

SEQ ID NO: 36551 - DNA, 80 bp, synthetic construct
  source 1..80: mol_type = other DNA
ccatccataaggcagctcatgtcagtggaaagaacacaggtgtggatttcagagtcacacaggtctgggcttagtgtcac

SEQ ID NO: 36552 - DNA, 80 bp, synthetic construct
  source 1..80: mol_type = other DNA
ttattatcatttttattacgttggtatggccaaccattttctcgtacacatccatgccttgcagaaccgaggtgtctcac

SEQ ID NO: 36553 - DNA, 80 bp, synthetic construct
  source 1..80: mol_type = other DNA
gagcacttaccactctccgcctgttcactgggaaactcccattagacttcatgataacggtgcagagtttcatgtcctcg

SEQ ID NO: 36554 - DNA, 80 bp, synthetic construct; identical to SEQ ID NO: 13019
  source 1..80: mol_type = other DNA

SEQ ID NO: 36555 - DNA, 80 bp, synthetic construct
  source 1..80: mol_type = other DNA
tgtcagtgacaggatctgaacctgatgcgtctagcccaagagctcttgttccttctgtgcccacacactgtcttccttgt

SEQ ID NO: 36556 - DNA, 80 bp, synthetic construct
  source 1..80: mol_type = other DNA
agagtacggaaggtaaaggaaagaggatggaggagtcagagggagctaaagtgagacagagaaaccagaaaagaggaaga

SEQ ID NO: 36557 - DNA, 80 bp, synthetic construct
  source 1..80: mol_type = other DNA
ttgctccactgaggtccatgccttcaaaatctgcccttgcccggctcctgggaattcctttagcctagacctaacccttg

SEQ ID NO: 36558 - DNA, 80 bp, synthetic construct
  source 1..80: mol_type = other DNA
cggcgtctgcggaggacaatgtagatcttgatgtagaccagcagggtgacaatgaagggcacgtagaaggagacgatgga

SEQ ID NO: 36559 - DNA, 80 bp, synthetic construct; identical to SEQ ID NO: 13020
  source 1..80: mol_type = other DNA

SEQ ID NO: 36560 - DNA, 80 bp, synthetic construct
  source 1..80: mol_type = other DNA
ccatctttttagtctgacctgtgtattgggagaggttggccaccttttaatgtttgcagcaagataacttggctctgtct

SEQ ID NO: 36561 - DNA, 80 bp, synthetic construct
  source 1..80: mol_type = other DNA
acacattttcaaggcttcactgtatcttttgttgttacgatctccagaggtgcacacctgccatcgctcttgcctccctg

SEQ ID NO: 36562 - DNA, 80 bp, synthetic construct; identical to SEQ ID NO: 13021
  source 1..80: mol_type = other DNA

SEQ ID NO: 36563 - DNA, 80 bp, synthetic construct
  source 1..80: mol_type = other DNA
acaactcttgagtggggcttggcccaggacacgtagcctggactcagtccagggtagtgataggcctccattgggcctcc

SEQ ID NO: 36564 - DNA, 80 bp, synthetic construct
  source 1..80: mol_type = other DNA
gagatcatgacggtgacccggcgcttggagctgtagcgcgtattgtacagcatgggcatggccacagctgtgtacctgca

SEQ ID NO: 36565 - DNA, 80 bp, synthetic construct
  source 1..80: mol_type = other DNA
cagatggcgaggacagttggcaaagcccaaacacttaatcactggtgagctattgtttactcttagctcatatctattat

SEQ ID NO: 36566 - DNA, 80 bp, synthetic construct
  source 1..80: mol_type = other DNA
aattgttagccaggcccctcagagcaagatttaagccttagttagcaggaaataacaatggcaattgtctacaatccttc

SEQ ID NO: 36567 - DNA, 80 bp, synthetic construct; identical to SEQ ID NO: 13022
  source 1..80: mol_type = other DNA

SEQ ID NO: 36568 - DNA, 80 bp, synthetic construct
  source 1..80: mol_type = other DNA
tgtgtgctctcctagccaaacatacacacatgcacacccatacacacaaacacatggacccccatgcacacagccagctg

SEQ ID NO: 36569 - DNA, 80 bp, synthetic construct
  source 1..80: mol_type = other DNA
gagtgacgaagatgtcacagtgaatcctgctgaatttccactcacctaccacctggggacaaagcaacataatggatgga

SEQ ID NO: 36570 - DNA, 80 bp, synthetic construct; identical to SEQ ID NO: 13023
  source 1..80: mol_type = other DNA

SEQ ID NO: 36571 - DNA, 80 bp, synthetic construct
  source 1..80: mol_type = other DNA
gagagacttactgtcccagagctagttaattcctgaagacagaaaatgactgacttggaaggatgcctctcaaatgcaag

SEQ ID NO: 36572 - DNA, 80 bp, synthetic construct
  source 1..80: mol_type = other DNA
tgttgagactagccaaccctaggttgcttaatctgccctgccttgcacttcctgtgggagccccaacagggctgtagcct

SEQ ID NO: 36573 - DNA, 80 bp, synthetic construct
  source 1..80: mol_type = other DNA
tctgtaaattagattccaggtaaaattttagaatgcccgtgaggaaactgagaaccaatgaggaaaccaagcctccaaaa

SEQ ID NO: 36574 - DNA, 80 bp, synthetic construct; identical to SEQ ID NO: 13024
  source 1..80: mol_type = other DNA

SEQ ID NO: 36575 - DNA, 80 bp, synthetic construct
  source 1..80: mol_type = other DNA
cctcccccctccccacgtaacacccattcacacacaggcacacactcatggcagattacgcaggcacacactcacggcag

SEQ ID NO: 36576 - DNA, 80 bp, synthetic construct
  source 1..80: mol_type = other DNA
ttggcagcagggctaattataaccttgctcattctgatcactgccctctcttctgctcctaggcatccaaccaaatgctg

SEQ ID NO: 36577 - DNA, 80 bp, synthetic construct
  source 1..80: mol_type = other DNA
tgcgctgaccagtttggcaggagctaacagctggatgcccattttgcgggtggaggcaggagggtacgtaaagggctttc

SEQ ID NO: 36578 - DNA, 80 bp, synthetic construct
  source 1..80: mol_type = other DNA
ttccctcctttctgccatcccttctttcctacaaacacttattgagcaaattactgtgttccagcctctatcctaggctc

SEQ ID NO: 36579 - DNA, 80 bp, synthetic construct; identical to SEQ ID NO: 13025
  source 1..80: mol_type = other DNA

SEQ ID NO: 36580 - DNA, 80 bp, synthetic construct
  source 1..80: mol_type = other DNA
ccatctagcttatcaagagaggagataattaggtgacaagtacttggtaagcatgaaatgtgaaaaggaaagatgattat

SEQ ID NO: 36581 - DNA, 80 bp, synthetic construct
  source 1..80: mol_type = other DNA
tgctcacataaagctgagacctgcagtacaggccctgagctggctcagctaagtcctaataactgtaataatactaagga

SEQ ID NO: 36582 - DNA, 80 bp, synthetic construct
  source 1..80: mol_type = other DNA
tctccctgctgggtggctttcttgagaatgcaagtgtctccctccctctcctgcataatttttccgaaagcatcatttct

SEQ ID NO: 36583 - DNA, 80 bp, synthetic construct; identical to SEQ ID NO: 13026
  source 1..80: mol_type = other DNA

SEQ ID NO: 36584 - DNA, 80 bp, synthetic construct
  source 1..80: mol_type = other DNA
cttttcatacacttagcaagataaataacgcacacttagtcctaagccagacagatgttggcatggcattgctggaaatg

SEQ ID NO: 36585 - DNA, 80 bp, synthetic construct
  source 1..80: mol_type = other DNA
gggacaacaaatcgctgagataatgtccattaaacaaggctcagtgcccagctctagtttgatgagatgctgtggggaag

SEQ ID NO: 36586 - DNA, 80 bp, synthetic construct
  source 1..80: mol_type = other DNA
ccaagtgcctgggtagggacagggggtctggaagctaacagaagccatgcccagagccctgggtagaacacacgttcctc

SEQ ID NO: 36587 - DNA, 80 bp, synthetic construct; identical to SEQ ID NO: 13027
  source 1..80: mol_type = other DNA

SEQ ID NO: 36588 - DNA, 80 bp, synthetic construct
  source 1..80: mol_type = other DNA
gggaattggactcctggcctgtgtcaactgaatatttttatgtggttttgtatttgtgtttccttttggttcttccttaa

SEQ ID NO: 36589 - DNA, 80 bp, synthetic construct
  source 1..80: mol_type = other DNA
accagtctcgcctcctcacctgagcgtcctcatctagatttctcccctgtttaaacctacaaagctttctcattttcttt

SEQ ID NO: 36590 - DNA, 80 bp, synthetic construct
  source 1..80: mol_type = other DNA
atcccatgccttcccatgcacctagactcccagattgcttgagtcctggacatgccatcctagaaagctgggcagagaaa

SEQ ID NO: 36591 - DNA, 80 bp, synthetic construct; identical to SEQ ID NO: 13028
  source 1..80: mol_type = other DNA

SEQ ID NO: 36592 - DNA, 80 bp, synthetic construct
  source 1..80: mol_type = other DNA
gttgcatttttagtagagatggggtttcaccatgttggccaggctggtcttgaactcctggcctcgtgatctgcctgcct

SEQ ID NO: 36593 - DNA, 80 bp, synthetic construct
  source 1..80: mol_type = other DNA
ctactccccattttgaggtgcagagctgggccaagaaatgagtgactacacaattcttcctaacaaaagggctacagcac

SEQ ID NO: 36594 - DNA, 80 bp, synthetic construct
  source 1..80: mol_type = other DNA
tggggatccttgccggttactcctatttccaatatgacctaaggaactaactctgaggccagaattccagcttggacttg

SEQ ID NO: 36595 - DNA, 80 bp, synthetic construct; identical to SEQ ID NO: 13029
  source 1..80: mol_type = other DNA

SEQ ID NO: 36596 - DNA, 80 bp, synthetic construct
  source 1..80: mol_type = other DNA
cacaccagcacgttgccgaagacgatgacagcgatgagcagggtgagcagtgtggcatagtagttgtagtggggtctgtc

SEQ ID NO: 36597 - DNA, 80 bp, synthetic construct; identical to SEQ ID NO: 13030
  source 1..80: mol_type = other DNA

SEQ ID NO: 36598 - DNA, 80 bp, synthetic construct
  source 1..80: mol_type = other DNA
cttcttaagcacgacccatgcaccacacacttcagttaaccaggcttgctaccttctagtcatcgaaacagaaatgggta

SEQ ID NO: 36599 - DNA, 80 bp, synthetic construct
  source 1..80: mol_type = other DNA
aaatggaacagggagagagatacataacctagttcaggtattcagggaaggctttctagaggaagtgatgttcaacagac

SEQ ID NO: 36600 - DNA, 80 bp, synthetic construct
  source 1..80: mol_type = other DNA
gcaagggttgagtctggggaggttgcaataggcaagatcatagagggccttaaaagtcatgctaggagtttatacatgat

SEQ ID NO: 36601 - DNA, 80 bp, synthetic construct
  source 1..80: mol_type = other DNA
agcaggaatccaggtaagagatgatgaggtttggcaggatgcagggagtgaaagccctgcagaatgggcatctcatccca

SEQ ID NO: 36602 - DNA, 80 bp, synthetic construct; identical to SEQ ID NO: 13031
  source 1..80: mol_type = other DNA

SEQ ID NO: 36603 - DNA, 80 bp, synthetic construct
  source 1..80: mol_type = other DNA
tctgaacgaagatagtggaaacgaggatggagagacctgttcagaattaggagctaaactgcaagtcaatttcatggtcc

SEQ ID NO: 36604 - DNA, 80 bp, synthetic construct
  source 1..80: mol_type = other DNA
catcaggagttgatgaacttgacagccggagttttggttgtgactgaagcataatgcatggataatatagttggcttttc

SEQ ID NO: 36605 - DNA, 80 bp, synthetic construct; identical to SEQ ID NO: 13032
  source 1..80: mol_type = other DNA

SEQ ID NO: 36606 - DNA, 80 bp, synthetic construct
  source 1..80: mol_type = other DNA
aaagcaaagtgcctaattccatgtggggtgacatggaatgccaccacgcagcaaatcttcctgttctaaggtaatgaagc

SEQ ID NO: 36607 - DNA, 80 bp, synthetic construct
  source 1..80: mol_type = other DNA
cactgtgcaaagcagtgtcaggggcctgaggcgtgtgaggcacacttactgcccccatcctgaccatcgctctcttcttc

SEQ ID NO: 36608 - DNA, 80 bp, synthetic construct
  source 1..80: mol_type = other DNA
gatcttgtctaattattatccctactttaataagaaagggatttggaaaactcttctgttcacttcccttccctctgctt

SEQ ID NO: 36609 - DNA, 80 bp, synthetic construct; identical to SEQ ID NO: 13033
  source 1..80: mol_type = other DNA

SEQ ID NO: 36610 - DNA, 80 bp, synthetic construct
  source 1..80: mol_type = other DNA
attaacaagtgatgaaaaagtaaggcaccccaagggtgccataggtgctgcatgttgggtcctgttacagtctgcactat

SEQ ID NO: 36611 - DNA, 80 bp, synthetic construct
  source 1..80: mol_type = other DNA
gagctttggacataaaaagagacatcagggatgcgcgcacagaggagagaccaagtgggaatgcagcaagaaggcggcca

SEQ ID NO: 36612 - DNA, 80 bp, synthetic construct
  source 1..80: mol_type = other DNA
tggaattttgtcatagcagccagagcagactaatacaggtccctagaagtagactctgaagaggaaatcagcctgcagga

SEQ ID NO: 36613 - DNA, 80 bp, synthetic construct
  source 1..80: mol_type = other DNA
ctaaatgagggcaacagggtagggcctttaatcccctctcatagatgtcacagcttctggctgtcccagggaaagcagcg

SEQ ID NO: 36614 - DNA, 80 bp, synthetic construct; identical to SEQ ID NO: 13034
  source 1..80: mol_type = other DNA

SEQ ID NO: 36615 - DNA, 80 bp, synthetic construct
  source 1..80: mol_type = other DNA
aggcatgtgccaccatgcctggctaatttttaaaaatgttttgtagagatgggggtctcactatgttgcccaggctggtc

SEQ ID NO: 36616 - DNA, 80 bp, synthetic construct
  source 1..80: mol_type = other DNA
ctggttacttctgcagggtaagggagagtccctgtacccaagttctgagaaaggcctcacacatttgattttctaatcta

SEQ ID NO: 36617 - DNA, 80 bp, synthetic construct; identical to SEQ ID NO: 13035
  source 1..80: mol_type = other DNA

SEQ ID NO: 36618 - DNA, 80 bp, synthetic construct
  source 1..80: mol_type = other DNA
cagctaatttttttgtatttttagtagagacggggtttcaccgtgttagtcaggatggtctcgatctcctgacctcatta

SEQ ID NO: 36619 - DNA, 80 bp, synthetic construct
  source 1..80: mol_type = other DNA
gcctagctggctctcaccatgtaaacatcaagctgagcaggaattcagacatcagcaaatccactgccacagagaaggta

SEQ ID NO: 36620 - DNA, 80 bp, synthetic construct
  source 1..80: mol_type = other DNA
tgagtattaagtaagatgactcatggccatgtgccaggcacaggtaagcccttgagaatgtcaactttaaaaatcaaacc

SEQ ID NO: 36621 - DNA, 80 bp, synthetic construct
  source 1..80: mol_type = other DNA
ggagatggatttcaagatgcagccaccaactccttgggaggaagtaaaggaaggaaaagacaaagcctgtccctgggccc

SEQ ID NO: 36622 - DNA, 80 bp, synthetic construct; identical to SEQ ID NO: 13036
  source 1..80: mol_type = other DNA

SEQ ID NO: 36623 - DNA, 80 bp, synthetic construct
  source 1..80: mol_type = other DNA
ttttgtccttctgtctccgggctgcacagattgttgggctccaaggggcatcccaaaagaatacacaagtgagtagcttc

SEQ ID NO: 36624 - DNA, 80 bp, synthetic construct
  source 1..80: mol_type = other DNA
gcaccttgtatttgccatgatggtcccaatttcttgttctttttttaaaatggagattggctaaatatataacccaaggt

SEQ ID NO: 36625 - DNA, 80 bp, synthetic construct; identical to SEQ ID NO: 13037
  source 1..80: mol_type = other DNA

SEQ ID NO: 36626 - DNA, 80 bp, synthetic construct
  source 1..80: mol_type = other DNA
tgctgctcctcattccaccctcaccatgcagatgcttgcagacaaggttccatgggtcctctgaggcctcctaggctttt

SEQ ID NO: 36627 - DNA, 80 bp, synthetic construct
  source 1..80: mol_type = other DNA
tttcagagtcatccattctagtgctcaggacccctgcctgtcaagttcttcctaacatctagcctaactccagccttcta

SEQ ID NO: 36628 - DNA, 80 bp, synthetic construct
  source 1..80: mol_type = other DNA
agcagcttctgctattcaccctatatgccttacaaatgctactattttctgtgcgtgccctaatttggaaattagctagc

SEQ ID NO: 36629 - DNA, 80 bp, synthetic construct
  source 1..80: mol_type = other DNA
ggtatggaaggggctgctttcccagtcacgccccaaaactggcaggcgccccaacctataaagtgtattggaagggaaaa

SEQ ID NO: 36630 - DNA, 80 bp, synthetic construct; identical to SEQ ID NO: 13038
  source 1..80: mol_type = other DNA

SEQ ID NO: 36631 - DNA, 80 bp, synthetic construct
  source 1..80: mol_type = other DNA
ctcagcttaagtcttggtgctgccttccctgaaagttcggcacttgaaggaatcaaattgtctaattaaaatttaacaat

SEQ ID NO: 36632 - DNA, 80 bp, synthetic construct
  source 1..80: mol_type = other DNA
tttgcatctcaaaagcagcctactggagtgacttgagttggataggaattgggagtgagtgggtaagaggttcctttcca

SEQ ID NO: 36633 - DNA, 80 bp, synthetic construct; identical to SEQ ID NO: 13039
  source 1..80: mol_type = other DNA

SEQ ID NO: 36634 - DNA, 80 bp, synthetic construct
  source 1..80: mol_type = other DNA
gggaggagaaacagaaaggactgtggggacaaagaggaacctggagcaatggacgatggcaacctcctgggctcactggg

SEQ ID NO: 36635 - DNA, 80 bp, synthetic construct
  source 1..80: mol_type = other DNA
ccacaaaccacagcctcagcactactgtgggggaacaggtctggactagagacctaggctgggggatacccgttagtgga

SEQ ID NO: 36636 - DNA, 80 bp, synthetic construct
  source 1..80: mol_type = other DNA
aacattgtctaggtttctttagaaggcgtggaacagcctggatgaatctctccactggtggtctctggctgtgtctggcc

SEQ ID NO: 36637 - DNA, 80 bp, synthetic construct; identical to SEQ ID NO: 13040
  source 1..80: mol_type = other DNA

SEQ ID NO: 36638 - DNA, 80 bp, synthetic construct
  source 1..80: mol_type = other DNA
ctcacttaatgctttcacaacacgtgtgctcctcggtgacacccagcacaggtgtaatgaagtcagtatttgtctagaga

SEQ ID NO: 36639 - DNA, 80 bp, synthetic construct
  source 1..80: mol_type = other DNA
agacgtccatggagatagcatctcattcaagggtgaaggggccagtccctaggtcttttcctaccctgcagtcatttctc

SEQ ID NO: 36640 - DNA, 80 bp, synthetic construct
  source 1..80: mol_type = other DNA
gtttcccaggtgggcatcactgtggcacaaaggtgttataaggcattggaaaaagaagaagaggcacacagatgaaagtg

SEQ ID NO: 36641 - DNA, 80 bp, synthetic construct; identical to SEQ ID NO: 13041
  source 1..80: mol_type = other DNA

SEQ ID NO: 36642 - DNA, 80 bp, synthetic construct
  source 1..80: mol_type = other DNA
agggctctcatcccagacaaccccgctctctgcttcttcccaaggtggccaggtggccctgggcctgctcaggtgtccct

SEQ ID NO: 36643 - DNA, 80 bp, synthetic construct
  source 1..80: mol_type = other DNA
gattttgatggctccgtaaaaatgtctcctcataaactgtcaaagtgtcacaaattaattaactgttagctagagtgact

SEQ ID NO: 36644 - DNA, 80 bp, synthetic construct
  source 1..80: mol_type = other DNA
agactggtgggtgggaggcaggtggaggtgtggggctggggccccctccctgagaagggaacacagtggggagaatgaag

SEQ ID NO: 36645 - DNA, 80 bp, synthetic construct
  source 1..80: mol_type = other DNA
ctgggaagttgagcttggtttgccccaggggctacacagggtcacctgagccaaggacatacttagctaccaaactcctg

SEQ ID NO: 36646 - DNA, 80 bp, synthetic construct; identical to SEQ ID NO: 13042
  source 1..80: mol_type = other DNA

SEQ ID NO: 36647 - DNA, 80 bp, synthetic construct
  source 1..80: mol_type = other DNA
acttgaggactcccacacaaatactgttttggtgtcaagacctcaaagacgaattgaaggtaaaatttcaccacaggaat

SEQ ID NO: 36648 - DNA, 80 bp, synthetic construct
  source 1..80: mol_type = other DNA
aactttaaagccatcttcaccaattgcaatgtgtgggccttagttggatgctgattcaaagaaaccaattttttaaaatc

SEQ ID NO: 36649 - DNA, 80 bp, synthetic construct
  source 1..80: mol_type = other DNA
atatgaaaatagcataggggtagaagcatagatggaagaaaattggccataatttgatcgtggttaaaggtgggtgatag

SEQ ID NO: 36650 - DNA, 80 bp, synthetic construct; identical to SEQ ID NO: 13043
  source 1..80: mol_type = other DNA

SEQ ID NO: 36651 - DNA, 80 bp, synthetic construct
  source 1..80: mol_type = other DNA
ccctggcaaccctttctatggcctgggatcctttctcatgacataacagctttggcctaataagtcatgtcctctctttc

SEQ ID NO: 36652 - DNA, 80 bp, synthetic construct
  source 1..80: mol_type = other DNA
tagatatgatccccatgctacagacaaagaaacaggcagtgggttgtgaacatcagtggatctgcctgcagaacccagac

SEQ ID NO: 36653 - DNA, 80 bp, synthetic construct; identical to SEQ ID NO: 13044
  source 1..80: mol_type = other DNA

SEQ ID NO: 36654 - DNA, 80 bp, synthetic construct
  source 1..80: mol_type = other DNA
agtctgggtggagccgaggagtgtgggcaagagctggggtccctcatcctctctcagctcctggggctgcctctgggtcc

SEQ ID NO: 36655 - DNA, 80 bp, synthetic construct
  source 1..80: mol_type = other DNA
agaggcagtctcctcatcccgacaacagactggggggtgcagaggagcccccagctgcctctcccagttgatggaagcag

SEQ ID NO: 36656 - DNA, 80 bp, synthetic construct
  source 1..80: mol_type = other DNA
aaggtgtgtcaatgcgtcctatttttattgttttttttttaatcagacagacaacagctagatctgggttccagtcccac

SEQ ID NO: 36657 - DNA, 80 bp, synthetic construct
  source 1..80: mol_type = other DNA
gctaatgtcattacaaggttgcaacagctgccggaaaggagctgagctgtgtgagggtcacaggcaaaagactcaagctg

SEQ ID NO: 36658 - DNA, 80 bp, synthetic construct; identical to SEQ ID NO: 13045
  source 1..80: mol_type = other DNA

SEQ ID NO: 36659 - DNA, 80 bp, synthetic construct
  source 1..80: mol_type = other DNA
gtgtggatgtctgacatgcagaaggaaaatccagttcccttggatgagccacttctctaattctcaacttaatagttaat

SEQ ID NO: 36660 - DNA, 80 bp, synthetic construct
  source 1..80: mol_type = other DNA
gcatctgtcctttctgtctgatgcatctgtgagccttaatgggcagagtttgtcttaaacctatgtgtatctttagcatc

SEQ ID NO: 36661 - DNA, 80 bp, synthetic construct; identical to SEQ ID NO: 13046
  source 1..80: mol_type = other DNA

SEQ ID NO: 36662 - DNA, 80 bp, synthetic construct
  source 1..80: mol_type = other DNA
gcctggccaacatggtgaagccccatctctactaaaaatacaaaaattagcctgggtggaggtgggcacctgtaatccca

SEQ ID NO: 36663 - DNA, 80 bp, synthetic construct
  source 1..80: mol_type = other DNA
agaccaggaaagtgaaatgactcacccaggttcatagagcctattgctttcagaaccaggattgcaattaaggtctctag

SEQ ID NO: 36664 - DNA, 80 bp, synthetic construct
  source 1..80: mol_type = other DNA
taggatcatcatcatctgcatcttcaaggaaatgaacttaaggagagtaattctggagcctccatgagtgcctctcctga

SEQ ID NO: 36665 - DNA, 80 bp, synthetic construct; identical to SEQ ID NO: 13047
  source 1..80: mol_type = other DNA

SEQ ID NO: 36666 - DNA, 80 bp, synthetic construct
  source 1..80: mol_type = other DNA
cttgaaactatttctttgggaggttttctgtcccattctgtcccaggagcctgggaaaaaggctgcgcctttggatgttt

SEQ ID NO: 36667 - DNA, 80 bp, synthetic construct
  source 1..80: mol_type = other DNA
ccagtacctctttggataagaaatcgagatattttactccagagatccacttatgagggggcagaaaggagagaaatgga

SEQ ID NO: 36668 - DNA, 80 bp, synthetic construct
  source 1..80: mol_type = other DNA
ttgctaatcaaacttcctgtgcgcccacccaatttgataaatcagccttttgatgcactaagtgaagatgaattagcagt

SEQ ID NO: 36669 - DNA, 80 bp, synthetic construct; identical to SEQ ID NO: 13048
  source 1..80: mol_type = other DNA

SEQ ID NO: 36670 - DNA, 80 bp, synthetic construct
  source 1..80: mol_type = other DNA
ccacatttagcttgcatacaggatttgttgggctcacatagcattgttgaaaaactggcattttattgccaatatttaca

SEQ ID NO: 36671 - DNA, 80 bp, synthetic construct
  source 1..80: mol_type = other DNA
gtcccctttatacaaggcacacaccgattgaagaaagcagaggacagcccggctcatgaggaatggactgtctccacact

SEQ ID NO: 36672 - DNA, 80 bp, synthetic construct
  source 1..80: mol_type = other DNA
ggctgaggcaagataatcacttgaaccagggcggtggaggttgcagtgagctgagatcgcaccactgcactccaggctgg

SEQ ID NO: 36673 - DNA, 80 bp, synthetic construct
  source 1..80: mol_type = other DNA
atatgaaaacagcatgggtgtaggggcatagatgaaagaaaattggccataattgccttagcttggaagtggccagaccc

SEQ ID NO: 36674 - DNA, 80 bp, synthetic construct; identical to SEQ ID NO: 13049
  source 1..80: mol_type = other DNA

SEQ ID NO: 36675 - DNA, 80 bp, synthetic construct
  source 1..80: mol_type = other DNA
gccctgtgtctggaggcccctgtttcttcagaaacacagctcctttaggttccttttcttccctgctgatattccatggg

SEQ ID NO: 36676 - DNA, 80 bp, synthetic construct
  source 1..80: mol_type = other DNA
gtcacagattgaaacaaaacattccatcttcctggcatgaggcaaatcgaggtctggactctaccgcatgcatcagcttg

SEQ ID NO: 36677 - DNA, 80 bp, synthetic construct
  source 1..80: mol_type = other DNA
tgtaagcctaacaaatatgctagggtttgcgtgatgggggagaggaggattctggtccccttcacgaccaatgctgatga

SEQ ID NO: 36678 - DNA, 80 bp, synthetic construct; identical to SEQ ID NO: 13050
  source 1..80: mol_type = other DNA

SEQ ID NO: 36679 - DNA, 80 bp, synthetic construct
  source 1..80: mol_type = other DNA
aactaacttgagaggaaagatacatattagaagctctctagtgacctccaagttttgggcagattggattaaccatcgct

SEQ ID NO: 36680 - DNA, 80 bp, synthetic construct
  source 1..80: mol_type = other DNA
ggcagttagtcctctgccaaacctgtgtacaccagttcttgtcattgtcattagtttagctcactatttcataaacaatg

SEQ ID NO: 36681 - DNA, 80 bp, synthetic construct; identical to SEQ ID NO: 13051
  source 1..80: mol_type = other DNA

SEQ ID NO: 36682 - DNA, 80 bp, synthetic construct
  source 1..80: mol_type = other DNA
gagtgcagtggcacaatttcggctgactgcaacctccgcctcccgggttcaagcgattctactgcctcagcctccagaat

SEQ ID NO: 36683 - DNA, 80 bp, synthetic construct
  source 1..80: mol_type = other DNA
cacccagctggtgtatttgtactcaaagaaatgacccaagatatgaacagaacgtttggtaaatgaatgtacatgaatgc

SEQ ID NO: 36684 - DNA, 80 bp, synthetic construct
  source 1..80: mol_type = other DNA
gcatatcagctttttctatctatgttcagtctctaacggggctgtatgttccttgaggaaattacatggcttacacatcc

SEQ ID NO: 36685 - DNA, 80 bp, synthetic construct
  source 1..80: mol_type = other DNA
ttagggactaagggtacaacgttgaacaagagaggcaagctccattgtcctcacggaggccaccatctggatagaggtac

SEQ ID NO: 36686 - DNA, 80 bp, synthetic construct; identical to SEQ ID NO: 13052
  source 1..80: mol_type = other DNA

SEQ ID NO: 36687 - DNA, 80 bp, synthetic construct
  source 1..80: mol_type = other DNA
agattacaggagactcagatgtgacaaccaaaccatgtgggatcctggattcgatcctgggccaggaaaaggacattagt

SEQ ID NO: 36688 - DNA, 80 bp, synthetic construct
  source 1..80: mol_type = other DNA
actcttctgcaagtctaaaattatctcgaatggaaaacaggcattcacacaggcacctccgatacccaggtatctgtgtg

SEQ ID NO: 36689 - DNA, 80 bp, synthetic construct; identical to SEQ ID NO: 13053
  source 1..80: mol_type = other DNA

SEQ ID NO: 36690 - DNA, 80 bp, synthetic construct
  source 1..80: mol_type = other DNA
aagctcagcctgtctccagagccactgctggctacagagatgctgggggtggcctggccttggaggcattttccagcctg

SEQ ID NO: 36691 - DNA, 80 bp, synthetic construct
  source 1..80: mol_type = other DNA
ttcatgcatgggaagtacatggagggtcttcagctcccccttcccactcgcccctttccagaagccctgatgacagatct

SEQ ID NO: 36692 - DNA, 80 bp, synthetic construct
  source 1..80: mol_type = other DNA
agtaacggtagctcctgtttattgactgttcaccgtatactggacactgtcttgcacactgtacacacctttgtcctaat

SEQ ID NO: 36693 - DNA, 80 bp, synthetic construct; identical to SEQ ID NO: 13054
  source 1..80: mol_type = other DNA

SEQ ID NO: 36694 - DNA, 80 bp, synthetic construct
  source 1..80: mol_type = other DNA
tgaggccaacactgacagtaaggcatattccctgtgtttccaaagtgggaggggtcttcaaggaaccatcacaccattgc

SEQ ID NO: 36695 - DNA, 80 bp, synthetic construct
  source 1..80: mol_type = other DNA
aaactcagatctgtgtagatgccctcagggaacttgggatcctctagcatgtcatagcccttgcaagtccaaacctgccc

SEQ ID NO: 36696 - DNA, 80 bp, synthetic construct
  source 1..80: mol_type = other DNA
ctttaaatcataaaatcctctccccgctcctgtgcctttcctgggggagctctctcgggcttttaattgaatttgcagtt

SEQ ID NO: 36697 - DNA, 80 bp, synthetic construct; identical to SEQ ID NO: 13055
  source 1..80: mol_type = other DNA

SEQ ID NO: 36698 - DNA, 80 bp, synthetic construct
  source 1..80: mol_type = other DNA
aagcaagtggcttccctcttctggccctggatgtccttttgtaacaaacatgtgtggccacatcagaggacacacaaggc

SEQ ID NO: 36699 - DNA, 80 bp, synthetic construct
  source 1..80: mol_type = other DNA
aggccatgatgaaggtaagatcccacaaagggatactgagggggctctagatggtgtctggcagcagagaatgtagtcag

SEQ ID NO: 36700 - DNA, 80 bp, synthetic construct
  source 1..80: mol_type = other DNA
agagcacccaagcccagagcaatgggtaagggggtctgacttcaacctggggcagccgctccttggaaggaaccaggcag

SEQ ID NO: 36701 - DNA, 80 bp, synthetic construct; identical to SEQ ID NO: 13056
  source 1..80: mol_type = other DNA

SEQ ID NO: 36702 - DNA, 80 bp, synthetic construct
  source 1..80: mol_type = other DNA
cattcgggttccctagagtggaaaggattggtaaggagctgggtagctctccttggccacctctaaaggagctgcaccac

SEQ ID NO: 36703 - DNA, 80 bp, synthetic construct
  source 1..80: mol_type = other DNA
ccatggcttcaggctcatgtcaccgcctcgctcaaaatatcttctatgactcccctgaagggaaaagtccagattcttta

SEQ ID NO: 36704 - DNA, 80 bp, synthetic construct
  source 1..80: mol_type = other DNA
gtccaaatccttccaactcttcaaagggaaaagcccacctcctagaatagccttccctgaaccctctgagctcatcaaga

SEQ ID NO: 36705 - DNA, 80 bp, synthetic construct
  source 1..80: mol_type = other DNA
tggacatgtcaagcacctgtgctacacaagtgagttgggaactgtaggcgtccttccaacatgagcagatcatgtgagcc

SEQ ID NO: 36706 - DNA, 80 bp, synthetic construct; identical to SEQ ID NO: 13057
  source 1..80: mol_type = other DNA

SEQ ID NO: 36707 - DNA, 80 bp, synthetic construct
  source 1..80: mol_type = other DNA
ctgagctaccgttcagattagcaccagccctgctgttccacttgtctcgctgtgcagttcatatctcttccattttgtat

SEQ ID NO: 36708 - DNA, 80 bp, synthetic construct
  source 1..80: mol_type = other DNA
ttggaacttttatttgaaatctccctatcatgaaatcccggcaactaactcatcacactagctgagccaaagcacttcca

SEQ ID NO: 36709 - DNA, 80 bp, synthetic construct; identical to SEQ ID NO: 13058
  source 1..80: mol_type = other DNA

SEQ ID NO: 36710 - DNA, 80 bp, synthetic construct
  source 1..80: mol_type = other DNA
ctttaagtagaagagttctatatcaagtgatcagaagtctaactttcttcaccaaaacagagagttatggcccctgatta

SEQ ID NO: 36711 - DNA, 80 bp, synthetic construct
  source 1..80: mol_type = other DNA
ataaaatagacttttggaggattactagattaggtgagggctctgaccaggctctaatgacactaattcctggagaccca

SEQ ID NO: 36712 - DNA, 80 bp, synthetic construct
  source 1..80: mol_type = other DNA
cagcaacttgcagaatcgccactgcacaggactggctagattcttttaagctgttaagaatatgtatccaaaacttgtta

SEQ ID NO: 36713 - DNA, 80 bp, synthetic construct; identical to SEQ ID NO: 13059
  source 1..80: mol_type = other DNA

SEQ ID NO: 36714 - DNA, 80 bp, synthetic construct
  source 1..80: mol_type = other DNA
cactgctacctctgcttccgggttcaagtgattctcctgcctcagcctcccaagtaactgggattacaggcacctgctac

SEQ ID NO: 36715 - DNA, 80 bp, synthetic construct
  source 1..80: mol_type = other DNA
taggcctgtatcctctcttaaacccagctttgtcattctgctagttgtctcattcatgagttaaatgaatctttgacatg

SEQ ID NO: 36716 - DNA, 80 bp, synthetic construct
  source 1..80: mol_type = other DNA
cctccagcccaacacattcaactcacaccccagcctgcctgccagcagcccaagaggcctgcaggaaagcctgcacgctt

SEQ ID NO: 36717 - DNA, 80 bp, synthetic construct; identical to SEQ ID NO: 13060
  source 1..80: mol_type = other DNA

SEQ ID NO: 36718 - DNA, 80 bp, synthetic construct
  source 1..80: mol_type = other DNA
cgcacattgggggacaggaaatgagacactgctgattcagatccaccctcacctccccagggtcctactcaaaccacaca

SEQ ID NO: 36719 - DNA, 80 bp, synthetic construct
  source 1..80: mol_type = other DNA
gctacctcctcctcctgggttcaagcaattctcctgcctcagcctcttgagtagctgggatcacaggtttctgccaccat

SEQ ID NO: 36720 - DNA, 80 bp, synthetic construct
  source 1..80: mol_type = other DNA
gcctatagtacttcacaccatactttactttatgctctttattttattaggagttagcaggcctgtattttagtcctggg

SEQ ID NO: 36721 - DNA, 80 bp, synthetic construct
  source 1..80: mol_type = other DNA
tccatggggcagtaaacatcaagtcctaggttcacatcctggctccatgcatacaatatcaacaacaaaaaatactgaaa

SEQ ID NO: 36722 - DNA, 80 bp, synthetic construct; identical to SEQ ID NO: 13061
  source 1..80: mol_type = other DNA

SEQ ID NO: 36723 - DNA, 80 bp, synthetic construct
  source 1..80: mol_type = other DNA
gcaatgtagataacaaaataagcaagatagagtcattatcttccaggagaccacagtgcagggagagaaacaagtccaca

SEQ ID NO: 36724 - DNA, 80 bp, synthetic construct
  source 1..80: mol_type = other DNA
ctgggtcacatgattttttaaaagtcccctccttattcctctgcaccttttactctactcctaggacagagctttgtatg

SEQ ID NO: 36725 - DNA, 80 bp, synthetic construct; identical to SEQ ID NO: 13062
  source 1..80: mol_type = other DNA

SEQ ID NO: 36726 - DNA, 80 bp, synthetic construct
  source 1..80: mol_type = other DNA
gcattattatttttggagagctagttgttaaaatatttaccagcggacactatatggtcctcttgcaataatctagttac

SEQ ID NO: 36727 - DNA, 80 bp, synthetic construct
  source 1..80: mol_type = other DNA
gaggttgagtaatttgctccaggtcacacagatcatagaaggcagacttgggacttaaactcatctgattccaaagccct

SEQ ID NO: 36728 - DNA, 80 bp, synthetic construct
  source 1..80: mol_type = other DNA
tctgtacttcgtcctggctgaagggcagaacagaaaagcttcactctctactcagtctccttgtaaaagtcagagctccc

SEQ ID NO: 36729 - DNA, 80 bp, synthetic construct; identical to SEQ ID NO: 13063
  source 1..80: mol_type = other DNA

SEQ ID NO: 36730 - DNA, 80 bp, synthetic construct
  source 1..80: mol_type = other DNA
atgcatgtaatctcagcactttgggaggccgaagtggatggatcacgaggtcaggagttcgagaccatcttggccaacat

SEQ ID NO: 36731 - DNA, 80 bp, synthetic construct
  source 1..80: mol_type = other DNA
gcactccagcctgggtgacagagcaagactccatctcaaaaaaataataataaataaaaaagatgtcgatttggcaatta

SEQ ID NO: 36732 - DNA, 80 bp, synthetic construct
  source 1..80: mol_type = other DNA
aggaactcaaactactcaataccaagacaaaaaataaccctgtttaagaatgtgcaaaggacctgaataggcatttgtca

SEQ ID NO: 36733 - DNA, 80 bp, synthetic construct; identical to SEQ ID NO: 13064
  source 1..80: mol_type = other DNA

SEQ ID NO: 36734 - DNA, 80 bp, synthetic construct
  source 1..80: mol_type = other DNA
atcaacagataaagattgaaaaaaacaacgtgatctatatatccacaatggaatacaatccagcctttacaaagaatgaa

SEQ ID NO: 36735 - DNA, 80 bp, synthetic construct
  source 1..80: mol_type = other DNA
gcagaatgagggttgactaagttttaattaggcaacaggaataagttttggtgatccattgcattgcaacatgactatag

SEQ ID NO: 36736 - DNA, 80 bp, synthetic construct
  source 1..80: mol_type = other DNA
tataaacacattcaattattatttttcaataaaaatacaattttttttaaaaaaagaagaaaatcctgtcacatgctaca

SEQ ID NO: 36737 - DNA, 80 bp, synthetic construct; identical to SEQ ID NO: 13065
  source 1..80: mol_type = other DNA

SEQ ID NO: 36738 - DNA, 80 bp, synthetic construct
  source 1..80: mol_type = other DNA
cgtgggcctccatgtgcagcatttgagaggcagccaccaccataggagccaccaggctgggagactgacaccaggagacc

SEQ ID NO: 36739 - DNA, 80 bp, synthetic construct
  source 1..80: mol_type = other DNA
tgggtctgggtagttaaagaacatatgcctagtacagatgtcactttactcagtaaatatccactcatccaattacagaa

SEQ ID NO: 36740 - DNA, 80 bp, synthetic construct
  source 1..80: mol_type = other DNA
ctgtacagttctatttctgggcagggccctcaaggatgaatctacaaagtttatagtacttctgcttccaccgagttgaa

SEQ ID NO: 36741 - DNA, 80 bp, synthetic construct; identical to SEQ ID NO: 13066
  source 1..80: mol_type = other DNA

SEQ ID NO: 36742 - DNA, 80 bp, synthetic construct
  source 1..80: mol_type = other DNA
agccctggaagctgaacctaacagcagcctcttgttccaagggctgttccccagtgggtgggacacagcaggccagcagc

SEQ ID NO: 36743 - DNA, 80 bp, synthetic construct
  source 1..80: mol_type = other DNA
actgcctgaggcaacagctctgctggttaaatggtgcctaacctgggtatttagcaatttttatatataaacacacacat

SEQ ID NO: 36744 - DNA, 80 bp, synthetic construct
  source 1..80: mol_type = other DNA
attgcatatgtaatctctgacccacatgggtgatatgggatgccaggtgtgggcctacaaatatcaccagaaaaaaaaaa

SEQ ID NO: 36745 - DNA, 80 bp, synthetic construct
  source 1..80: mol_type = other DNA
ccagttttgatctgggggaaaaaatgctggtccaccacaacttatgctgtgtgtatatcatcacaaacaagctttgatta

SEQ ID NO: 36746 - DNA, 80 bp, synthetic construct; identical to SEQ ID NO: 13067
  source 1..80: mol_type = other DNA

SEQ ID NO: 36747 - DNA, 80 bp, synthetic construct
  source 1..80: mol_type = other DNA
tcaaataacagcttcagttctcaccacctgtgtggccttgattaacactttactttctatctctgagtctccgtttcctc

SEQ ID NO: 36748 - DNA, 80 bp, synthetic construct
  source 1..80: mol_type = other DNA
aatgaacaccttaatagaatatgtgttttaaagcaaggtttgtcacccccaatgcagctctggatggacaaaggcagaaa

SEQ ID NO: 36749 - DNA, 80 bp, synthetic construct; identical to SEQ ID NO: 13068
  source 1..80: mol_type = other DNA

SEQ ID NO: 36750 - DNA, 80 bp, synthetic construct
  source 1..80: mol_type = other DNA
aatagatagaagagaagattggaatattctcaacataaaggaaagataaatgtttgaggtgacagatatcccagtttccc

SEQ ID NO: 36751 - DNA, 80 bp, synthetic construct
  source 1..80: mol_type = other DNA
gggaagaaagaaatctatgggattccagctctactttgcatttctttgctttttgtgtccattctattacattttcctgg

SEQ ID NO: 36752 - DNA, 80 bp, synthetic construct
  source 1..80: mol_type = other DNA
gcattggtgccctgccctccccagtcacccccagccccagcagcacttgtgtgctgccacaggctgatggaacagggact

SEQ ID NO: 36753 - DNA, 80 bp, synthetic construct; identical to SEQ ID NO: 13069
  source 1..80: mol_type = other DNA

SEQ ID NO: 36754 - DNA, 80 bp, synthetic construct
  source 1..80: mol_type = other DNA
accgtggagacagggtgtggggagatgctgcagagggcagggagctgcccagggatgaagacgagatgaaagccagagaa

SEQ ID NO: 36755 - DNA, 80 bp, synthetic construct
  source 1..80: mol_type = other DNA
cagtgaaggagttaactttttctccagacttactcaagtcattcaacaagtaattactaagctatggaccgggtcatcag

SEQ ID NO: 36756 - DNA, 80 bp, synthetic construct
  source 1..80: mol_type = other DNA
acaccttgctagcaccatcagcatcccctatgtccttacagactggccagctgggcaaacttaatgatggggctcccagt

SEQ ID NO: 36757 - DNA, 80 bp, synthetic construct; identical to SEQ ID NO: 13070
  source 1..80: mol_type = other DNA

SEQ ID NO: 36758 - DNA, 80 bp, synthetic construct
  source 1..80: mol_type = other DNA
catctgtgaaattagagcattagtctgagatcctggtgtataggaggcatttaataaatgcttgtagaatgaacattgag

SEQ ID NO: 36759 - DNA, 80 bp, synthetic construct
  source 1..80: mol_type = other DNA
attcctgagtttcttatgactataaaaggcatttaacatgcacgcccaatcaccaccctcacagggcctgtgcccaagtg

SEQ ID NO: 36760 - DNA, 80 bp, synthetic construct
  source 1..80: mol_type = other DNA
ctaattgctttctttcttgtcctcatttgccttctaactcaggagatgaggcttcaattagataagtgggcagctattcc

SEQ ID NO: 36761 - DNA, 80 bp, synthetic construct; identical to SEQ ID NO: 13071
  source 1..80: mol_type = other DNA

SEQ ID NO: 36762 - DNA, 80 bp, synthetic construct
  source 1..80: mol_type = other DNA
agacagtatcctcccctgcaggctttagaggaagcatggccatgcaggaacaggtatcatgctccatgcaggagcagtgt

SEQ ID NO: 36763 - DNA, 80 bp, synthetic construct
  source 1..80: mol_type = other DNA
tgcttctgagcaaatctcagcctgctctgcaagaggaaaatattcactcattcactccttcatctatgcaacaagtattt

SEQ ID NO: 36764 - DNA, 80 bp, synthetic construct
  source 1..80: mol_type = other DNA
tggaccttaggtggttagtattattaaagacaatagcacagcattcaaggagcatatgcacgtcacgtgatacgctgagc

SEQ ID NO: 36765 - DNA, 80 bp, synthetic construct
  source 1..80: mol_type = other DNA
taaggctcaccaaatcagcaattttgaacccagaaatgagaagaaaggacaagaggatgatttttggagctggttaaatt

SEQ ID NO: 36766 - DNA, 80 bp, synthetic construct; identical to SEQ ID NO: 13072
  source 1..80: mol_type = other DNA

SEQ ID NO: 36767 - DNA, 80 bp, synthetic construct
  source 1..80: mol_type = other DNA
tccattccagcctttgaggaatttaccatctagggaaggaaacagaccagtaaataagcaatgacaacataactcaatac

SEQ ID NO: 36768 - DNA, 80 bp, synthetic construct
  source 1..80: mol_type = other DNA
gtaggagttaaccttataagttaagggctggagcattctggcagagaaaacaacacaacatgttagaaggttacaggtgg

SEQ ID NO: 36769 - DNA, 80 bp, synthetic construct
  source 1..80: mol_type = other DNA
cacctttcttctgtttttcttccattctctgtagctatggagaggaatgggttccatgagccacggagggagcggaagag

SEQ ID NO: 36770 - DNA, 80 bp, synthetic construct; identical to SEQ ID NO: 13073
  source 1..80: mol_type = other DNA

SEQ ID NO: 36771 - DNA, 80 bp, synthetic construct
  source 1..80: mol_type = other DNA
ctgctcctatgagtgcattctgagcactgacatcgccaggggtgttcctctctgaggttacaaatttagttactccactg

SEQ ID NO: 36772 - DNA, 80 bp, synthetic construct
  source 1..80: mol_type = other DNA
tcaatccagcttaggtttctggcccaatatgcatacacttttaccgatatccttaattcccttgcttcattgttcttaaa

SEQ ID NO: 36773 - DNA, 80 bp, synthetic construct; identical to SEQ ID NO: 13074
  source 1..80: mol_type = other DNA

SEQ ID NO: 36774 - DNA, 80 bp, synthetic construct
  source 1..80: mol_type = other DNA
tgtgagccaccacatccggctaagttttgtagtagagatgagcttttgccatgttggccaggctagtctcaaactcctgg

SEQ ID NO: 36775 - DNA, 80 bp, synthetic construct
  source 1..80: mol_type = other DNA
aacccaatccttcaagttggcttcttttttccctcaggatggaatccagtctcctacataagacttcaaggttcatagtc

SEQ ID NO: 36776 - DNA, 80 bp, synthetic construct
  source 1..80: mol_type = other DNA
ctgctgtgtaacattgggttctttcaagtataacactctatgccaattcatacctggtctaatgtcttcatctgcaatgg

SEQ ID NO: 36777 - DNA, 80 bp, synthetic construct
  source 1..80: mol_type = other DNA
tgtgcgtgactcatttcctttgcacaaaacccaatcaggtaagtatatagtcatcctgttttatgaagggataaagaact

SEQ ID NO: 36778 - DNA, 80 bp, synthetic construct; identical to SEQ ID NO: 13075
  source 1..80: mol_type = other DNA

SEQ ID NO: 36779 - DNA, 80 bp, synthetic construct
  source 1..80: mol_type = other DNA
catgagtgtgtctgattgaagtaggttccaaccattcaatattccccaacttccatgccctgtgacaactgcgaaaaatt

SEQ ID NO: 36780 - DNA, 80 bp, synthetic construct
  source 1..80: mol_type = other DNA
cagacactgccactcttgttaagctgcaagtaaagtagagggagagtgtcgctatggggaagtaagctgtctctcaccta

SEQ ID NO: 36781 - DNA, 80 bp, synthetic construct
  source 1..80: mol_type = other DNA
agagattagcattaagcattaagttggctcctcacagaagacaggccacaagggagattttgtgtcattagtcacaatgt

SEQ ID NO: 36782 - DNA, 80 bp, synthetic construct; identical to SEQ ID NO: 13076
  source 1..80: mol_type = other DNA

SEQ ID NO: 36783 - DNA, 80 bp, synthetic construct
  source 1..80: mol_type = other DNA
tgcacatcaattacaagagagtcctccccaagaagggattcatagaccaagaaaaaggccaacaagagggattatcttta

SEQ ID NO: 36784 - DNA, 80 bp, synthetic construct
  source 1..80: mol_type = other DNA
gaagttctttggccctttcaatctgggaaaagaaaaaaagtcaccttgtccttgtacaccagtacattctccttgttttt

SEQ ID NO: 36785 - DNA, 80 bp, synthetic construct; identical to SEQ ID NO: 13077
  source 1..80: mol_type = other DNA

SEQ ID NO: 36786 - DNA, 80 bp, synthetic construct
  source 1..80: mol_type = other DNA
atccttgaattttgtgaacgttttagaaacatgatttcagaaatgtaaaatcaggtgctgaattactgcaaaaggacaac

SEQ ID NO: 36787 - DNA, 80 bp, synthetic construct
  source 1..80: mol_type = other DNA
cttaattaattactgtgacccaattatgttggtattaacatccacttacaggtgagaacccccaggtgatagaggttaat

SEQ ID NO: 36788 - DNA, 80 bp, synthetic construct
  source 1..80: mol_type = other DNA
gtgaggctcaacaacagaggagtcttctcacttattatgaggtgaacacgattattacagtcccttatttgtgcctgaaa

SEQ ID NO: 36789 - DNA, 80 bp, synthetic construct
  source 1..80: mol_type = other DNA
tggcacgatactggctcactgcaacctctacctcccaggttcaagcaattttcctgcctcagcctcctgagtagctgaga

SEQ ID NO: 36790 - DNA, 80 bp, synthetic construct; identical to SEQ ID NO: 13078
  source 1..80: mol_type = other DNA

SEQ ID NO: 36791 - DNA, 80 bp, synthetic construct
  source 1..80: mol_type = other DNA
agttcagttcacctcaaagagatgtgggacagaaggtaatgtcatcacagttccagaagagcttgacaaaacatccgtct

SEQ ID NO: 36792 - DNA, 80 bp, synthetic construct
  source 1..80: mol_type = other DNA
tggttctcaaatttaagaatcccaaggagttattttattcatccttctccatctgctgtctccctcttcactttcctggt

SEQ ID NO: 36793 - DNA, 80 bp, synthetic construct; identical to SEQ ID NO: 13079
  source 1..80: mol_type = other DNA

SEQ ID NO: 36794 - DNA, 80 bp, synthetic construct
  source 1..80: mol_type = other DNA
aaaaaattagttgggcatgctggcatgcacctgtactcccagctgctcgggtggctgaagcaggaggatcacttgagccc

SEQ ID NO: 36795 - DNA, 80 bp, synthetic construct
  source 1..80: mol_type = other DNA
aaatgtaaaaacaagggttcctatttcacagagttgttgcaggattgggagtttaaatgaagaacctatgtcaagtgctg

SEQ ID NO: 36796 - DNA, 80 bp, synthetic construct
  source 1..80: mol_type = other DNA
tggtgctgcctggggtagcaggtaggagaggaggcaatgatgtagcatgtaacaaaaataatttcatttctaatgtcttt

SEQ ID NO: 36797 - DNA, 80 bp, synthetic construct
  source 1..80: mol_type = other DNA
gcagttctgtgctgagcgacagcttcctggaaggcaggactgcccaggctaactgcaggcctattgatggagctcctggg

SEQ ID NO: 36798 - DNA, 80 bp, synthetic construct; identical to SEQ ID NO: 13080
  source 1..80: mol_type = other DNA

SEQ ID NO: 36799 - DNA, 80 bp, synthetic construct
  source 1..80: mol_type = other DNA
ccccagtgtgtcatctctgactcctccctatacactagagccaccagggtccttggcccctctgcagtgaaacactctca

SEQ ID NO: 36800 - DNA, 80 bp, synthetic construct
  source 1..80: mol_type = other DNA
aaaaccaagtggctgagtcttatagttttattactcctccatccccatgtgctgacactataatcaagctattttccagg

SEQ ID NO: 36801 - DNA, 80 bp, synthetic construct; identical to SEQ ID NO: 13081
  source 1..80: mol_type = other DNA

SEQ ID NO: 36802 - DNA, 80 bp, synthetic construct
  source 1..80: mol_type = other DNA
tttctgctgcccatggtttccgagtgtttcctatatgcaggatgctcctctgctaagcagagtacctggtaggatggaga

SEQ ID NO: 36803 - DNA, 80 bp, synthetic construct
  source 1..80: mol_type = other DNA
tgaggagcccaagaagataacctaagaatctaaagtcctataaactatatcccaggaaaatgcaaatgactgggctgctg

SEQ ID NO: 36804 - DNA, 80 bp, synthetic construct
  source 1..80: mol_type = other DNA
atatgacttagggttctggcattataaaacctcaacttgattcttctctcttcctaggtgttgaggcaccttcactgttg

SEQ ID NO: 36805 - DNA, 80 bp, synthetic construct; identical to SEQ ID NO: 13082
  source 1..80: mol_type = other DNA

SEQ ID NO: 36806 - DNA, 80 bp, synthetic construct
  source 1..80: mol_type = other DNA
agaagcgtttgtctcaatttcagattctcctatatcattctcaagataattgcattttctagacagaaataatccacctt

SEQ ID NO: 36807 - DNA, 80 bp, synthetic construct
  source 1..80: mol_type = other DNA
tgctactaggctgaactaatcactccttggcatttcaggagcacttaggttaacagatcacagcacatgcataatgaaag

SEQ ID NO: 36808 - DNA, 80 bp, synthetic construct
  source 1..80: mol_type = other DNA
agaggagattggattgcatccttaatttcagcaaagatttaatcagggggatggtctttctaccaagagtctcacacttg

SEQ ID NO: 36809 - DNA, 80 bp, synthetic construct
  source 1..80: mol_type = other DNA
caagggattttctcagatagaatacctgctaccaattttatgtaaaataaacttgatttccattttcaaaataaaataaa

SEQ ID NO: 36810 - DNA, 80 bp, synthetic construct; identical to SEQ ID NO: 13083
  source 1..80: mol_type = other DNA

SEQ ID NO: 36811 - DNA, 80 bp, synthetic construct
  source 1..80: mol_type = other DNA
cacttccttgtcagatgtctgcattcagagatggcatcaaaaccccctgcaacaaataatccaggaattttgaacactaa

SEQ ID NO: 36812 - DNA, 80 bp, synthetic construct
  source 1..80: mol_type = other DNA
gctgcaggatgaatcagagataagcatgcatatttgcatttgaagcagggtgggagtggggagaatcgttgaacatctag

SEQ ID NO: 36813 - DNA, 80 bp, synthetic construct; identical to SEQ ID NO: 13084
  source 1..80: mol_type = other DNA

SEQ ID NO: 36814 - DNA, 80 bp, synthetic construct
  source 1..80: mol_type = other DNA
cataccaccctagaggggctctcggtccatcatagagccgggccgagagccgggcggtcaccctccgctactgccgccac

SEQ ID NO: 36815 - DNA, 80 bp, synthetic construct
  source 1..80: mol_type = other DNA
tccttagcttctgccttagaaactgaaaagggtcaggtcgcaccaacacagagttgccaaaaacagcccttcttcctccg

SEQ ID NO: 36816 - DNA, 80 bp, synthetic construct
  source 1..80: mol_type = other DNA
gcccgctcgtgctcggggagaggattcccttctaagtggcgaggaggctactgagaaggagggagaggggatagcagccg

SEQ ID NO: 36817 - DNA, 80 bp, synthetic construct; identical to SEQ ID NO: 13085
  source 1..80: mol_type = other DNA

SEQ ID NO: 36818 - DNA, 80 bp, synthetic construct
  source 1..80: mol_type = other DNA
ggccgcggcggggcggggcggggcggggccgggcgcggggcgggcgggcaggagggagcgcggggacggggcggaggcgg

SEQ ID NO: 36819 - DNA, 80 bp, synthetic construct
  source 1..80: mol_type = other DNA
ggcctgaacgggtaggaggggttgggggattccgccatcccttgttttgaggcgggaacgcaaccctcgaccgcccactg

SEQ ID NO: 36820 - DNA, 80 bp, synthetic construct
  source 1..80: mol_type = other DNA
agacgtccgggcagcccccggcgcagcgcggccgcagcagcctccgccccccgcacggtgtgagcgcccgacgcggccga

SEQ ID NO: 36821 - DNA, 80 bp, synthetic construct
  source 1..80: mol_type = other DNA
cgagctcttcggggagcagcgatgcgaccctccgggacggccggggcagcgctcctggcgctgctggctgcgctctgccc

SEQ ID NO: 36822 - DNA, 80 bp, synthetic construct
  source 1..80: mol_type = other DNA
tcagctgcgccgccgaccgggaccgcgggaggaacgggacgtttcgttcttcggccgggagagtctggggcgggcggagg

SEQ ID NO: 36823 - DNA, 80 bp, synthetic construct
  source 1..80: mol_type = other DNA
ccggggtcccgcacgtgcgccccgcgctgtcttcccagggcgcgacggggtcctggcgcgcacccgaggggcgggcgctg

SEQ ID NO: 36824 - DNA, 80 bp, synthetic construct; identical to SEQ ID NO: 13086
  source 1..80: mol_type = other DNA

SEQ ID NO: 36825 - DNA, 80 bp, synthetic construct
  source 1..80: mol_type = other DNA
cctcccggggaccccagctccctcctgggcgcccgcgccgaaagccccaggctctccttcgatggccgcctcgcggagac

SEQ ID NO: 36826 - DNA, 80 bp, synthetic construct; identical to SEQ ID NO: 13087
  source 1..80: mol_type = other DNA

SEQ ID NO: 36827 - DNA, 80 bp, synthetic construct
  source 1..80: mol_type = other DNA
gccttggaaggtttaattgcacaattccaaccttgagctgcgcgggttccaagagccaggcccgtacttgctgttgatgt

SEQ ID NO: 36828 - DNA, 80 bp, synthetic construct
  source 1..80: mol_type = other DNA
attctgatttaattggcatggggcaagacctggacttgggattttttttaatgctcttcatgtgatctgttgggcagcca

SEQ ID NO: 36829 - DNA, 80 bp, synthetic construct
  source 1..80: mol_type = other DNA
gggaaaaggtagagtgtgattccaataataaaggattccgcttttcattgaaggaactggtggaaaggtttcttctctgc

SEQ ID NO: 36830 - DNA, 80 bp, synthetic construct; identical to SEQ ID NO: 13088
  source 1..80: mol_type = other DNA

SEQ ID NO: 36831 - DNA, 80 bp, synthetic construct
  source 1..80: mol_type = other DNA
agatgagctcttttaacagaaatttgtttaaggcctgtgtctatcaaattcagtggattttattcaagatgcactttgtt

SEQ ID NO: 36832 - DNA, 80 bp, synthetic construct
  source 1..80: mol_type = other DNA
aagtgactttcccacagctggtgggaggcagacgggaaattcacaccaggggcttccaactccagatccctctctcaact

SEQ ID NO: 36833 - DNA, 80 bp, synthetic construct
  source 1..80: mol_type = other DNA
attcctgccgagttcctcagccctctgttgggtcaccttccatagaggcagcttagtcctcagttcagtgagcatggagt

SEQ ID NO: 36834 - DNA, 80 bp, synthetic construct
  source 1..80: mol_type = other DNA
ttcagtaggtccgagctgtcttaaagagaaaccaaagtggggatattaatggtatccaaagtgagatctaccccaccctc

SEQ ID NO: 36835 - DNA, 80 bp, synthetic construct; identical to SEQ ID NO: 13089
  source 1..80: mol_type = other DNA

SEQ ID NO: 36836 - DNA, 80 bp, synthetic construct
  source 1..80: mol_type = other DNA
agacaccgattgccgaaagtccattgtgctgcataattacacttggtccacgtgacagcactaacatgttctgaaatgtt

SEQ ID NO: 36837 - DNA, 80 bp, synthetic construct
  source 1..80: mol_type = other DNA
tatgggcactgaagggaaggtaaccccaggctggtgccccggaatagggatgggtcacaatgttgaggacatttcgcctg

SEQ ID NO: 36838 - DNA, 80 bp, synthetic construct; identical to SEQ ID NO: 13090
  source 1..80: mol_type = other DNA

SEQ ID NO: 36839 - DNA, 80 bp, synthetic construct
  source 1..80: mol_type = other DNA
gctactcaggaggctgaggcaggagaattgcttgaacccaggaggcagaggttgcagtgagccaagatcgcaccattgca

SEQ ID NO: 36840 - DNA, 80 bp, synthetic construct
  source 1..80: mol_type = other DNA
tattcttgaaccactaatccatagagaatagagtgtaaatcttaacttgttcctgtaggccatccccattaaacatcata

SEQ ID NO: 36841 - DNA, 80 bp, synthetic construct
  source 1..80: mol_type = other DNA
aagctggccagtttgaatttgggcaagaatccaggcattggaacttattcaaataactagtttgcctgtaattttcactt

SEQ ID NO: 36842 - DNA, 80 bp, synthetic construct; identical to SEQ ID NO: 13091
  source 1..80: mol_type = other DNA

SEQ ID NO: 36843 - DNA, 80 bp, synthetic construct
  source 1..80: mol_type = other DNA
tgggttttcaaggagagactcggagtccaagtgtcctttctgaatatatctggaacttctcattaacaaaagactcaagt

SEQ ID NO: 36844 - DNA, 80 bp, synthetic construct
  source 1..80: mol_type = other DNA
aagtattggtacctgttacaacttaggcttttttttctttatgtttgagccatgatgagtgatttacactgttgcatcca

SEQ ID NO: 36845 - DNA, 80 bp, synthetic construct
  source 1..80: mol_type = other DNA
gcctttaattctacatggggaggagagcacgtttagccacaaatggaagggattactcatttgagctatttggttatatg

SEQ ID NO: 36846 - DNA, 80 bp, synthetic construct; identical to SEQ ID NO: 13092
  source 1..80: mol_type = other DNA

SEQ ID NO: 36847 - DNA, 80 bp, synthetic construct
  source 1..80: mol_type = other DNA
aagaaagaatcccagattgacacccaggcttctcacttggaagcctggatagatactgaatgcaatcacaaaggctggga

SEQ ID NO: 36848 - DNA, 80 bp, synthetic construct
  source 1..80: mol_type = other DNA
atgtggcttgagttgtcatttgctcacatatttccgtgtcagttacttgtcttagatcacagaacaagttctcctctcac

SEQ ID NO: 36849 - DNA, 80 bp, synthetic construct
  source 1..80: mol_type = other DNA
gtgtaccagaagtcatgtttatatattgctgcaaatactcggaatggggatctcttgttccctgcttaagaccacatcac

SEQ ID NO: 36850 - DNA, 80 bp, synthetic construct; identical to SEQ ID NO: 13093
  source 1..80: mol_type = other DNA

SEQ ID NO: 36851 - DNA, 80 bp, synthetic construct
  source 1..80: mol_type = other DNA
tttcctgcagtgaggaaatagccagaaagaacactccacccctcctcctttttataactatagggtctggctcgacagag

SEQ ID NO: 36852 - DNA, 80 bp, synthetic construct
  source 1..80: mol_type = other DNA
gagacatgctagtcccgagataacccccctccagcagggaagatgccagtctcgggataacctctctctggccggaaaga

SEQ ID NO: 36853 - DNA, 80 bp, synthetic construct
  source 1..80: mol_type = other DNA
caccaggagtgcctcccaggttttaactaaagaaaacctctctttaactgccaaaaaaaaaaagggaaaaaaaaaagctt

SEQ ID NO: 36854 - DNA, 80 bp, synthetic construct; identical to SEQ ID NO: 13094
  source 1..80: mol_type = other DNA

SEQ ID NO: 36855 - DNA, 80 bp, synthetic construct
  source 1..80: mol_type = other DNA
agggacaggaatgaggaaatacttgtaggccctgtgctccttcagcaaaaccctcagtttcttgttatttttataaatgc

SEQ ID NO: 36856 - DNA, 80 bp, synthetic construct
  source 1..80: mol_type = other DNA
tggactggagtccaggttatagttgatagctttaactttctccccaacagcaacagcacaattttccctaaaatgtgtta

SEQ ID NO: 36857 - DNA, 80 bp, synthetic construct
  source 1..80: mol_type = other DNA
gaattagaagagacatctatgttctgatccactgttgaaagctgtacaatgttacctatttatttgcagacatcctttgg

SEQ ID NO: 36858 - DNA, 80 bp, synthetic construct; identical to SEQ ID NO: 13095
  source 1..80: mol_type = other DNA

SEQ ID NO: 36859 - DNA, 80 bp, synthetic construct
  source 1..80: mol_type = other DNA
tttagtgtctctgctgatactcaaattatccattattttagtgctggaataaaaacaaaccacttagtgaatttgtgcag

SEQ ID NO: 36860 - DNA, 80 bp, synthetic construct
  source 1..80: mol_type = other DNA
tggtttctattcacttacaaaattatctcctagttcattctcatacactgtaagccattgtaaatgcttcaaattgtgcc

SEQ ID NO: 36861 - DNA, 80 bp, synthetic construct
  source 1..80: mol_type = other DNA
tgtcagatgtcatccacttttgattaagtccaaacatatgacagataaacaaaagatggttggctgggctcagtggctca

SEQ ID NO: 36862 - DNA, 80 bp, synthetic construct
  source 1..80: mol_type = other DNA
gctgaggcaggagaatcacttaaacctggaaggcaggggttgcagtgagctgagatcacaccactacactccagcctagg

SEQ ID NO: 36863 - DNA, 80 bp, synthetic construct; identical to SEQ ID NO: 13096
  source 1..80: mol_type = other DNA

SEQ ID NO: 36864 - DNA, 80 bp, synthetic construct
  source 1..80: mol_type = other DNA
aggactgcagatgaaaaactttgtcaaatgactgtaaaaatatactatataattttcaaaagttagaaagtaccaaacac

SEQ ID NO: 36865 - DNA, 80 bp, synthetic construct
  source 1..80: mol_type = other DNA
agttataatggggagagaaaacaggttagagtctcccctctcagtttcaccttccataaaacagctaaactagacgatcg

SEQ ID NO: 36866 - DNA, 80 bp, synthetic construct; identical to SEQ ID NO: 13097
  source 1..80: mol_type = other DNA

SEQ ID NO: 36867 - DNA, 80 bp, synthetic construct
  source 1..80: mol_type = other DNA
tagctatggatgccccatcacttttagttctatttgtgaatcaaaggctaaataaagtattcctcaaaatttgttatact

SEQ ID NO: 36868 - DNA, 80 bp, synthetic construct
  source 1..80: mol_type = other DNA
gcagtgaatttgtgagccttgaaaatatttactttagaaatgagaagtatgacttttcaacgttgtgtcatcaacttctg

SEQ ID NO: 36869 - DNA, 80 bp, synthetic construct
  source 1..80: mol_type = other DNA
ttaacctctttagggtgtgaaacagcttttacaaaaagagacaaacttaagaaacagtgtggccctccaagagtgttcat

SEQ ID NO: 36870 - DNA, 80 bp, synthetic construct
  source 1..80: mol_type = other DNA
agtgacggtgatgtgcctctcccagaagaaatttcaaaatgcagtgttcattttcctccacaagaaaggaagaaactgtt

SEQ ID NO: 36871 - DNA, 80 bp, synthetic construct; identical to SEQ ID NO: 13098
  source 1..80: mol_type = other DNA

SEQ ID NO: 36872 - DNA, 80 bp, synthetic construct
  source 1..80: mol_type = other DNA
ggacaacatgaagaatcaggtgagttgcctactttttcacttcactttccacctttagagattcttgtttagatgcagag

SEQ ID NO: 36873 - DNA, 80 bp, synthetic construct
  source 1..80: mol_type = other DNA
gctaggaattctaggcttttagattctttgggcaatggctactaaatgttcataatgttgctcagttgcaaaaacaagac

SEQ ID NO: 36874 - DNA, 80 bp, synthetic construct; identical to SEQ ID NO: 13099
  source 1..80: mol_type = other DNA

SEQ ID NO: 36875 - DNA, 80 bp, synthetic construct
  source 1..80: mol_type = other DNA
cgtaatgttattaacagtagtactgatctcacaatcgccctatgtcccattcacaagatgttctgccaagccataaaagg

SEQ ID NO: 36876 - DNA, 80 bp, synthetic construct
  source 1..80: mol_type = other DNA
cagcttagcacagcatggtggaggctaaatgggccttaagggaaaaaatgatatctgaagatgcaatttatttcaaaaag

SEQ ID NO: 36877 - DNA, 80 bp, synthetic construct
  source 1..80: mol_type = other DNA
agatcagggacagctagctttgctggctggttaagttgatgattccatctttgcctggttctctgactgtctcatgcttt

SEQ ID NO: 36878 - DNA, 80 bp, synthetic construct
  source 1..80: mol_type = other DNA
tcaatcatatatgcatcctggatggcatagagttgattctcctaacaaatcagtgtccctttgtatttttttctggccat

SEQ ID NO: 36879 - DNA, 80 bp, synthetic construct; identical to SEQ ID NO: 13100
  source 1..80: mol_type = other DNA

SEQ ID NO: 36880 - DNA, 80 bp, synthetic construct
  source 1..80: mol_type = other DNA
tttactctctattttgagggtaaattctctgtaagtagaaaaagcaaaatgtggacatgggactaacatatgaatataca

SEQ ID NO: 36881 - DNA, 80 bp, synthetic construct
  source 1..80: mol_type = other DNA
tcagggccccctggggactgcaggggatgctggccatgctgagcaatgcctgtgggtgtcagtttcctcatctgcagaat

SEQ ID NO: 36882 - DNA, 80 bp, synthetic construct
  source 1..80: mol_type = other DNA
actttgccccagacgtccttcccgtggtctggaccctgggaagtcgccaagagccagacaggagaaaggctccacttggc

SEQ ID NO: 36883 - DNA, 80 bp, synthetic construct; identical to SEQ ID NO: 13101
  source 1..80: mol_type = other DNA

SEQ ID NO: 36884 - DNA, 80 bp, synthetic construct
  source 1..80: mol_type = other DNA
tggagcacttggccctttcggcaatgttttggcttcctcaagtgagaaaagaatggatttgtattccccctctgcattat

SEQ ID NO: 36885 - DNA, 80 bp, synthetic construct; identical to SEQ ID NO: 13102
  source 1..80: mol_type = other DNA

SEQ ID NO: 36886 - DNA, 80 bp, synthetic construct
  source 1..80: mol_type = other DNA
ttcctctttatctgattacttatcattgttctctaagttgcaagttaatagactgatcataaattaatgcatgctggaga

SEQ ID NO: 36887 - DNA, 80 bp, synthetic construct
  source 1..80: mol_type = other DNA
ctttaaacagtgagaggatttaatagatatttgatttgcaagtgggatgaagggtggtctaacctttgtcctgtgtttac

SEQ ID NO: 36888 - DNA, 80 bp, synthetic construct
  source 1..80: mol_type = other DNA
actttaggataagcatttttttaggtgttaggaacagggaaaactgtgtggttaggaaggaagaaagaagaaagttaact

SEQ ID NO: 36889 - DNA, 80 bp, synthetic construct; identical to SEQ ID NO: 13103
  source 1..80: mol_type = other DNA

SEQ ID NO: 36890 - DNA, 80 bp, synthetic construct
  source 1..80: mol_type = other DNA
agaggttgcagtgagcagagattgcaccactgcacttcagcctgggtgacagagcaagactctgtctcggaaaaaaaaaa

SEQ ID NO: 36891 - DNA, 80 bp, synthetic construct
  source 1..80: mol_type = other DNA
ctatcccccttcccccaacctcctccagtagtaacatcttagtagcaaagttttgtatatttattttgatatcattatct

SEQ ID NO: 36892 - DNA, 80 bp, synthetic construct
  source 1..80: mol_type = other DNA
aagtgaaatgtttttggtctttaaggtttggaggccatggaggcatgaggagaaatgggatgagggagagagagctaaga

SEQ ID NO: 36893 - DNA, 80 bp, synthetic construct
  source 1..80: mol_type = other DNA
tgtaccactctacccatcctatatttattgtcctgtatttggtctgttctgccttctttattttcaggataggtgtccta

SEQ ID NO: 36894 - DNA, 80 bp, synthetic construct; identical to SEQ ID NO: 13104
  source 1..80: mol_type = other DNA

SEQ ID NO: 36895 - DNA, 80 bp, synthetic construct
  source 1..80: mol_type = other DNA
agcgacaaagtaacatacctctgctccattacacagataaaacctctaaggaacacctcctctcttaacaggcattaacc

SEQ ID NO: 36896 - DNA, 80 bp, synthetic construct
  source 1..80: mol_type = other DNA
agagaaaatcaaccccttggtgaaggaaagctcccaattcacagagcaaacatgggtactcttgtttgtgggagctccca

SEQ ID NO: 36897 - DNA, 80 bp, synthetic construct
  source 1..80: mol_type = other DNA
ggcagaatcttatctgcatgtttcatcttggatttttagctcaattcaactcaataggcatgtgtcaaatgtctactgca

SEQ ID NO: 36898 - DNA, 80 bp, synthetic construct; identical to SEQ ID NO: 13105
  source 1..80: mol_type = other DNA

SEQ ID NO: 36899 - DNA, 80 bp, synthetic construct
  source 1..80: mol_type = other DNA
tcatggagtgatgcagtagacagcaagcctcacacttctatgctcacggaagaccaaatttgccttgaaaaatctttata

SEQ ID NO: 36900 - DNA, 80 bp, synthetic construct
  source 1..80: mol_type = other DNA
tttttctgattaaaaaacttaacaccttcctcaggagatctatctcagttctgaatgctgattctaactaagaaggatat

SEQ ID NO: 36901 - DNA, 80 bp, synthetic construct; identical to SEQ ID NO: 13106
  source 1..80: mol_type = other DNA

SEQ ID NO: 36902 - DNA, 80 bp, synthetic construct
  source 1..80: mol_type = other DNA
gtttgaaggctgctaacttgattctgaggacaccagtgaggtggtagtgtgcaaatgatgtgtgaggaaactttggagga

SEQ ID NO: 36903 - DNA, 80 bp, synthetic construct
  source 1..80: mol_type = other DNA
gcaggggtggaacagttatgaaactgctctaaagtcattttctcaaactgggagtgacaaatgtatccacttggaaaaga

SEQ ID NO: 36904 - DNA, 80 bp, synthetic construct
  source 1..80: mol_type = other DNA
caatattattattttaaatagccacttgcatcttaaggaaattaagaggacaaaagaaaagctgctgttttgtatgtatc

SEQ ID NO: 36905 - DNA, 80 bp, synthetic construct
  source 1..80: mol_type = other DNA
gtggaagtctgtggatgaaatttgtataacatggaacgttagttccacagttaatgctactcaattggaacccatggaaa

SEQ ID NO: 36906 - DNA, 80 bp, synthetic construct; identical to SEQ ID NO: 13107
  source 1..80: mol_type = other DNA

SEQ ID NO: 36907 - DNA, 80 bp, synthetic construct
  source 1..80: mol_type = other DNA
acccagtgggaagaccaggacctttaacgcccatatctgctgctcaagactggcagagagaagagggtttgtgatgagaa

SEQ ID NO: 36908 - DNA, 80 bp, synthetic construct
  source 1..80: mol_type = other DNA
tgtgggtttgtgattagagtgaggttcttttataaagggagtgagaagagaaggtctgtggatacttgagtgtatcggta

SEQ ID NO: 36909 - DNA, 80 bp, synthetic construct; identical to SEQ ID NO: 13108
  source 1..80: mol_type = other DNA

SEQ ID NO: 36910 - DNA, 80 bp, synthetic construct
  source 1..80: mol_type = other DNA
ttgagtcttgttccaacaaggaaagttgcttattggaaagttttgctgcagggagccttgagttctgcatcaggcttgga

SEQ ID NO: 36911 - DNA, 80 bp, synthetic construct
  source 1..80: mol_type = other DNA
ctgcagctaaagtcaagtagaatttagggataattaataggaggaaggtggggttggaagatctgcatgattatagtcct

SEQ ID NO: 36912 - DNA, 80 bp, synthetic construct
  source 1..80: mol_type = other DNA
ttactctgcattttatcattgggttatgaaatgactggggaaagacttttcttgcttttatttctcagtgtctacttata

SEQ ID NO: 36913 - DNA, 80 bp, synthetic construct
  source 1..80: mol_type = other DNA
gtcattgaaacatttagaattccactctacatttcaataattatcaggtgaaagctactgcatctacatcagaagatgtt

SEQ ID NO: 36914 - DNA, 80 bp, synthetic construct; identical to SEQ ID NO: 13109
  source 1..80: mol_type = other DNA

SEQ ID NO: 36915 - DNA, 80 bp, synthetic construct
  source 1..80: mol_type = other DNA
acaaaaattagctggatgatggcacatgcctgtaatcccagctattcgggaggcggaggcaggagaatctcttgaacctg

SEQ ID NO: 36916 - DNA, 80 bp, synthetic construct
  source 1..80: mol_type = other DNA
tacagagtggacaccagataaatacattgactgcatgccacaaacatatatatgtaggcaccgttgcattcaaatacaca

SEQ ID NO: 36917 - DNA, 80 bp, synthetic construct; identical to SEQ ID NO: 13110
  source 1..80: mol_type = other DNA

SEQ ID NO: 36918 - DNA, 80 bp, synthetic construct
  source 1..80: mol_type = other DNA
caccaaaaagctcagagacatatatttctttctctgtatatgtattttaaattcaagttagtataaattgacaggcaggt

SEQ ID NO: 36919 - DNA, 80 bp, synthetic construct
  source 1..80: mol_type = other DNA
cttggaaacagctattaactggtaacctcaagaaacaccatgaagagtcagtttgctccacacatgtcttgtaaaagtca

SEQ ID NO: 36920 - DNA, 80 bp, synthetic construct
  source 1..80: mol_type = other DNA
taaagaaagaaaatggaatttcacggacaagaaaatccatgtccatttggttctgtgacccacatcctttgtatcctatg

SEQ ID NO: 36921 - DNA, 80 bp, synthetic construct; identical to SEQ ID NO: 13111
  source 1..80: mol_type = other DNA

SEQ ID NO: 36922 - DNA, 80 bp, synthetic construct
  source 1..80: mol_type = other DNA
aatgatgctttctcagtttacctctggaaatggaaattagcattgcaaatgacttcatgaggaggtagaagctatctgtg

SEQ ID NO: 36923 - DNA, 80 bp, synthetic construct
  source 1..80: mol_type = other DNA
tttcaaatcggatggtacctatccttcaaactgctatttaatgactgtctgctatgttcaaggcactgctctcaatgtta

SEQ ID NO: 36924 - DNA, 80 bp, synthetic construct
  source 1..80: mol_type = other DNA
ctaaaccagtagctcttaactgagacaatcctgtcctcatctcacctgggagacatctggcaatgtttggagaacctttt

SEQ ID NO: 36925 - DNA, 80 bp, synthetic construct
  source 1..80: mol_type = other DNA
caagcaattcttatgcctcagcctcccaagtagtagctgggattacaggtgtgcaccactacactcagctaatttttgca

SEQ ID NO: 36926 - DNA, 80 bp, synthetic construct; identical to SEQ ID NO: 13112
  source 1..80: mol_type = other DNA

SEQ ID NO: 36927 - DNA, 80 bp, synthetic construct
  source 1..80: mol_type = other DNA
attcctgaccagttgcacttggcctagcattccaacctcacctgcctcagcttgttcaacctgaaaacctaccaagtgaa

SEQ ID NO: 36928 - DNA, 80 bp, synthetic construct
  source 1..80: mol_type = other DNA
ttttcctgtcttggcaatgcaaggatgccattaggtaaagaaatccttcaccacactaatcctgcagagccagaagagaa

SEQ ID NO: 36929 - DNA, 80 bp, synthetic construct; identical to SEQ ID NO: 13113
  source 1..80: mol_type = other DNA

SEQ ID NO: 36930 - DNA, 80 bp, synthetic construct
  source 1..80: mol_type = other DNA
tggaacagagcagcacacctgcggggtgtccccttggcatttgggcagggcaggtgaccaagggtcttgttggaactgaa

SEQ ID NO: 36931 - DNA, 80 bp, synthetic construct
  source 1..80: mol_type = other DNA
gttaagtgaatgaattctttcagaactagatgggatcttagtccaactctcttatttaacgaggtccacagaggttctgc

SEQ ID NO: 36932 - DNA, 80 bp, synthetic construct
  source 1..80: mol_type = other DNA
aaagagcttccaaaactgcttaagctttgactgcacaaaacctgcatcacctccagttgagaaactcaagagaataagta

SEQ ID NO: 36933 - DNA, 80 bp, synthetic construct
  source 1..80: mol_type = other DNA
gctctctctttatgtctgtaatgcagttgctcctctctgtataaattaataagttttagagatccaaaatgagaatttta

SEQ ID NO: 36934 - DNA, 80 bp, synthetic construct; identical to SEQ ID NO: 13114
  source 1..80: mol_type = other DNA

SEQ ID NO: 36935 - DNA, 80 bp, synthetic construct
  source 1..80: mol_type = other DNA
gtgtcaacatgatggcacctaaagctgttgagacttcagaaaggtaatgtgtgaaaagtgaaaagtgcctggcatccagg

SEQ ID NO: 36936 - DNA, 80 bp, synthetic construct
  source 1..80: mol_type = other DNA
catatggttagtccaaactaagatgtgttgtgagtctcaaatacacactggattgtgaagacttaggacaaggaaaacaa

SEQ ID NO: 36937 - DNA, 80 bp, synthetic construct; identical to SEQ ID NO: 13115
  source 1..80: mol_type = other DNA

SEQ ID NO: 36938 - DNA, 80 bp, synthetic construct
  source 1..80: mol_type = other DNA
cacataaacctacttccaaaataatgaagtgaggcctaattccttactcttcagagagcccactgtggaagtgtcactga

SEQ ID NO: 36939 - DNA, 80 bp, synthetic construct
  source 1..80: mol_type = other DNA
tcaaacatgctcagaaagcttggaatctgcactacgcttctcgtacacatttcatattaaagattttggaaagtcctgca

SEQ ID NO: 36940 - DNA, 80 bp, synthetic construct
  source 1..80: mol_type = other DNA
cagcaggggaaagcagggtacttgctgctttgcaagtgtgtccacatctaattaatagtacagttcttactcttggtgtg

SEQ ID NO: 36941 - DNA, 80 bp, synthetic construct; identical to SEQ ID NO: 13116
  source 1..80: mol_type = other DNA

SEQ ID NO: 36942 - DNA, 80 bp, synthetic construct
  source 1..80: mol_type = other DNA
atttcagtttagaggacgaagcattactggagtattgttatgcaggaaaactttttcctaaaaatgccctgaaaagagag

SEQ ID NO: 36943 - DNA, 80 bp, synthetic construct
  source 1..80: mol_type = other DNA
gtcaagagttggagaccagcctgaccaagatggtgaaaccccatgcctactaaaaatgcaaaaagttagccaggcttggt

SEQ ID NO: 36944 - DNA, 80 bp, synthetic construct
  source 1..80: mol_type = other DNA
cactggggccaaagaactctgtgtgctgtatcacctaaccacatttcatgacacggctagagaagaatcatgcaaataaa

SEQ ID NO: 36945 - DNA, 80 bp, synthetic construct
  source 1..80: mol_type = other DNA
ctcaccactttctacatcttttgtgaatattttatagtgctcaaatatattagtgcactagtatatgtacattacattaa

SEQ ID NO: 36946 - DNA, 80 bp, synthetic construct; identical to SEQ ID NO: 13117
  source 1..80: mol_type = other DNA

SEQ ID NO: 36947 - DNA, 80 bp, synthetic construct
  source 1..80: mol_type = other DNA
ctttggacatcactgaactttacccttagagatgcatacctgcatcttttttaccctgatagggccttccatgatgcttt

SEQ ID NO: 36948 - DNA, 80 bp, synthetic construct
  source 1..80: mol_type = other DNA
agtagccaattgaatatattggttaaatgcatctctttatacacagactggattcaaactgaggttgtgtctctccctgg

SEQ ID NO: 36949 - DNA, 80 bp, synthetic construct
  source 1..80: mol_type = other DNA
gtgttcattgctcttgtatggtactgtctgtggcacggctagataaaatacagtagccactgattcaaatttcaactgag

SEQ ID NO: 36950 - DNA, 80 bp, synthetic construct; identical to SEQ ID NO: 13118
  source 1..80: mol_type = other DNA

SEQ ID NO: 36951 - DNA, 80 bp, synthetic construct
  source 1..80: mol_type = other DNA
taacgaccactggtatctgcccagaaagctctaccgcctgtttataagctcctgcaggagacacaaaaagaagagaattt

SEQ ID NO: 36952 - DNA, 80 bp, synthetic construct
  source 1..80: mol_type = other DNA
aaacagaccagtgcttgtatcagcccttaaacatctctggagaaggaaatgggatccttctttggtaattcatttttgac

SEQ ID NO: 36953 - DNA, 80 bp, synthetic construct
  source 1..80: mol_type = other DNA
caatgaggggctggctgtgctcttttatttataaaattataaactcaagcaaaatctagactatgtgtccccaagatcag

SEQ ID NO: 36954 - DNA, 80 bp, synthetic construct; identical to SEQ ID NO: 13119
  source 1..80: mol_type = other DNA

SEQ ID NO: 36955 - DNA, 80 bp, synthetic construct
  source 1..80: mol_type = other DNA
tttgaaaatatttttaattgtggcaaaatatacacaacataaaatttaccatcttaatcatgtataaaagtggagttcag

SEQ ID NO: 36956 - DNA, 80 bp, synthetic construct
  source 1..80: mol_type = other DNA
tgagtttgattactctaagcacctcttataagtggatcatacaatgtatctgtctttttgtgactggcttgtttcacttt

SEQ ID NO: 36957 - DNA, 80 bp, synthetic construct
  source 1..80: mol_type = other DNA
taacgctgctatgaacatagctgtatgcctttgtcttttaaagcccaaatctgatcaagtcactccccagcttaaaacct

SEQ ID NO: 36958 - DNA, 80 bp, synthetic construct; identical to SEQ ID NO: 13120
  source 1..80: mol_type = other DNA

SEQ ID NO: 36959 - DNA, 80 bp, synthetic construct
  source 1..80: mol_type = other DNA
agggtgggcacagcatccattcattctgggaatcctggtcggcaccatgctagaacttctgcaagtgagtgcctttggtg

SEQ ID NO: 36960 - DNA, 80 bp, synthetic construct
  source 1..80: mol_type = other DNA
ggcccagggaggctttttcataaagaagaggttgaatctttggggctgtggtttgaatatgtccctcaagcttatgtgtt

SEQ ID NO: 36961 - DNA, 80 bp, synthetic construct
  source 1..80: mol_type = other DNA
tgtgagagtgggcttgttagaaaattgagtgcagccccctcttgcttgctggctaccatgctctcttgcttttctgcctt

SEQ ID NO: 36962 - DNA, 80 bp, synthetic construct; identical to SEQ ID NO: 13121
  source 1..80: mol_type = other DNA

SEQ ID NO: 36963 - DNA, 80 bp, synthetic construct
  source 1..80: mol_type = other DNA
tagttgtaggttccttctcatcttgcagaattattagtttgctcttcaaatagtctctccagctagactatcaactccag

SEQ ID NO: 36964 - DNA, 80 bp, synthetic construct
  source 1..80: mol_type = other DNA
tattcttcctgggctttagttttcccttatctaaaatatgagaaaagttcccctctcctgggtattctgggagactcatg

SEQ ID NO: 36965 - DNA, 80 bp, synthetic construct
  source 1..80: mol_type = other DNA
tatgcctctgtctttgatgtccctgcctgagtcgcccactttagagcccttctgttcttcagaaaccagacttttctttc

SEQ ID NO: 36966 - DNA, 80 bp, synthetic construct
  source 1..80: mol_type = other DNA
agaagcctcaggaagcttgcgaagctcaggtgcatggatgcctggtggaatgaggaagggatgcagccaggtagagaaat

SEQ ID NO: 36967 - DNA, 80 bp, synthetic construct; identical to SEQ ID NO: 13122
  source 1..80: mol_type = other DNA

SEQ ID NO: 36968 - DNA, 80 bp, synthetic construct
  source 1..80: mol_type = other DNA
agggatccagatttgatgaagagatgttattttggcttttagattcttaggagagatttgtctttctcaggtcaggaaga

SEQ ID NO: 36969 - DNA, 80 bp, synthetic construct
  source 1..80: mol_type = other DNA
acctctggaaaggagggtgcatctctagaaataaggctaagtatgccactgacactgtctgcataaacgtgtgtgatctc

SEQ ID NO: 36970 - DNA, 80 bp, synthetic construct
  source 1..80: mol_type = other DNA
tctactcccagagttcctccaagaaattgcggagcaatgcctgtttcatgagagctgagtttgctgtgtcttccacttag

SEQ ID NO: 36971 - DNA, 80 bp, synthetic construct; identical to SEQ ID NO: 13123
  source 1..80: mol_type = other DNA

SEQ ID NO: 36972 - DNA, 80 bp, synthetic construct
  source 1..80: mol_type = other DNA
ccgtagaatattttccatgtgtgttaacaatggctgagcgtggtagatgccaggaatttctgtcaaccctcaaagaggaa

SEQ ID NO: 36973 - DNA, 80 bp, synthetic construct; identical to SEQ ID NO: 13124
  source 1..80: mol_type = other DNA

SEQ ID NO: 36974 - DNA, 80 bp, synthetic construct
  source 1..80: mol_type = other DNA
gtcagcaaacatggaattcagaatgttcattaaacactggctgtgtcttttgtgttcaaaagcaagacactctctctgaa

SEQ ID NO: 36975 - DNA, 80 bp, synthetic construct
  source 1..80: mol_type = other DNA
tccctcagatgctctttcccatgtttgtggctacaggtccccgtgacctgcagaggcagagcactcaccagcagcccagc

SEQ ID NO: 36976 - DNA, 80 bp, synthetic construct
  source 1..80: mol_type = other DNA
tgtgagaagggctttaactgccttcccaccccctgctcatcttagagtctctctatagtgctgctgaaagaatctctaaa

SEQ ID NO: 36977 - DNA, 80 bp, synthetic construct; identical to SEQ ID NO: 13125
  source 1..80: mol_type = other DNA

SEQ ID NO: 36978 - DNA, 80 bp, synthetic construct
  source 1..80: mol_type = other DNA
gcataggttattgttttcttcaaaatatatgagatgtgagtccttctacgaactgactcacactgattgcccaacttcct

SEQ ID NO: 36979 - DNA, 80 bp, synthetic construct
  source 1..80: mol_type = other DNA
tcatcttgaactccttcgagtgtgagtcattactcctttgtgcacctctgctttctcttctcaagatgttcacctgcttg

SEQ ID NO: 36980 - DNA, 80 bp, synthetic construct; identical to SEQ ID NO: 13126
  source 1..80: mol_type = other DNA

SEQ ID NO: 36981 - DNA, 80 bp, synthetic construct
  source 1..80: mol_type = other DNA
tggaattgaagtaaaatggatagtgagcctctgtgtatgtgaaggcccgcatctggaacatgaaagaacctgtctgatgt

SEQ ID NO: 36982 - DNA, 80 bp, synthetic construct
  source 1..80: mol_type = other DNA
acatgatagaattttactcatttgccaactgcggttcccatttcacatattgttagaattctgcatggtggctttgccct

SEQ ID NO: 36983 - DNA, 80 bp, synthetic construct
  source 1..80: mol_type = other DNA
ttgaaggcaatatttgttgagtgactgacggaatgaaaaacgccagttgcgtaagtgtgaaaaagatctgggtgttttca

SEQ ID NO: 36984 - DNA, 80 bp, synthetic construct
  source 1..80: mol_type = other DNA
gtgtgtgcagtgcagtatgtaacccagggcacatttcaggggcccacagggagctgcagcttgtaaggtggagtgcagcc

SEQ ID NO: 36985 - DNA, 80 bp, synthetic construct; identical to SEQ ID NO: 13127
  source 1..80: mol_type = other DNA

SEQ ID NO: 36986 - DNA, 80 bp, synthetic construct
  source 1..80: mol_type = other DNA
gcatctcataagtgaacaaaacccagcccttcaaagaagtcactttatttatgtgtgggtctgcagcttggatttcttga

SEQ ID NO: 36987 - DNA, 80 bp, synthetic construct
  source 1..80: mol_type = other DNA
tgcaaaatgcagttttaccagcctctttccttgttttggtcacataatttaacttaacattctcggtacttgattttcta

SEQ ID NO: 36988 - DNA, 80 bp, synthetic construct; identical to SEQ ID NO: 13128
  source 1..80: mol_type = other DNA

SEQ ID NO: 36989 - DNA, 80 bp, synthetic construct
  source 1..80: mol_type = other DNA
tctcattactggatatatacccaaaggaatagaaatcattctattataaaaacacatggctgggcacagtggctcacgcc

SEQ ID NO: 36990 - DNA, 80 bp, synthetic construct
  source 1..80: mol_type = other DNA
ggcaggaaaattgcttgaacgcgggaggcggagtttgcagtgaacagagatgaagccactgcactttagcctaggtgaca

SEQ ID NO: 36991 - DNA, 80 bp, synthetic construct
  source 1..80: mol_type = other DNA
tacatatataccacgaaatactatgcagccataaaaaagaacaagatcatgtcctttgcggggacatggatggaactgca

SEQ ID NO: 36992 - DNA, 80 bp, synthetic construct
  source 1..80: mol_type = other DNA
taggcttagtaccagggtgacaaaataatctgtacaacaaactactatgacacaagtttacctgtttaacatacctgcac

SEQ ID NO: 36993 - DNA, 80 bp, synthetic construct; identical to SEQ ID NO: 13129
  source 1..80: mol_type = other DNA

SEQ ID NO: 36994 - DNA, 80 bp, synthetic construct
  source 1..80: mol_type = other DNA
cttggcaccagctggtattcatcctcaatgctagctagagttgaaataaagagtgaaagaactttctcttttattactta

SEQ ID NO: 36995 - DNA, 80 bp, synthetic construct
  source 1..80: mol_type = other DNA
caatattgatacattattcactaaagcccacaggttgcgttaggggtcattcttggtggtgtacgttcttcaggtctgga

SEQ ID NO: 36996 - DNA, 80 bp, synthetic construct
  source 1..80: mol_type = other DNA
cctgctcactcctccttcccaccctccccaaactgtggcaaccatttaacttttgactgaatggatttattcttattctg

SEQ ID NO: 36997 - DNA, 80 bp, synthetic construct; identical to SEQ ID NO: 13130
  source 1..80: mol_type = other DNA

SEQ ID NO: 36998 - DNA, 80 bp, synthetic construct
  source 1..80: mol_type = other DNA
ggacaccctctgcccctaaaagaacaatttaactctaatttatttctgtcactctgcattttctgacctttcccaagtgt

SEQ ID NO: 36999 - DNA, 80 bp, synthetic construct
  source 1..80: mol_type = other DNA
acgtttcccttctggattatttccttagtatctagttcaagaagtgaaatcgctggattcttgtggtaaatttttgaatt

SEQ ID NO: 37000 - DNA, 80 bp, synthetic construct; identical to SEQ ID NO: 13131
  source 1..80: mol_type = other DNA

SEQ ID NO: 37001 - DNA, 80 bp, synthetic construct
  source 1..80: mol_type = other DNA
gagcgtcaaaaatcatggacgtgctctggttaacactgagtgggagctcaacaaattattatttttaattgttacttgga

SEQ ID NO: 37002 - DNA, 80 bp, synthetic construct
  source 1..80: mol_type = other DNA
atttgtattggcaaatcacatgccccagtgggaactacttaaggggaattcaatggatttcattccttttatgtaattgg

SEQ ID NO: 37003 - DNA, 80 bp, synthetic construct
  source 1..80: mol_type = other DNA
ggtagcttttcttcccactgttgtcagctgcttccaattagcccccatatacataatcccagtttgtgtctgtatcagta

SEQ ID NO: 37004 - DNA, 80 bp, synthetic construct; identical to SEQ ID NO: 13132
  source 1..80: mol_type = other DNA

SEQ ID NO: 37005 - DNA, 80 bp, synthetic construct
  source 1..80: mol_type = other DNA
tggaacttagctaaaagatgggaaaggtagactgactctgacttaatctacttaacctaccaggcaatttataacttgat

SEQ ID NO: 37006 - DNA, 80 bp, synthetic construct
  source 1..80: mol_type = other DNA
ggccatttaactgctcaaggccatggaactctactgtcagtttcagggaaatttgggaccctggagcacaaaccaaaact

SEQ ID NO: 37007 - DNA, 80 bp, synthetic construct
  source 1..80: mol_type = other DNA
tctagagaaggaaacttcatttctgaattaaaattagtcttcaatgacatggcagggatttcggcacactctcttgcgtc

SEQ ID NO: 37008 - DNA, 80 bp, synthetic construct
  source 1..80: mol_type = other DNA
gaaatagcttgcaaaataattaactactgatcatttataccttagtgcttctgtgagcatgttttctctttcattgctgc

SEQ ID NO: 37009 - DNA, 80 bp, synthetic construct; identical to SEQ ID NO: 13133
  source 1..80: mol_type = other DNA

SEQ ID NO: 37010 - DNA, 80 bp, synthetic construct
  source 1..80: mol_type = other DNA
ccaggcactgtgctctaagcccattggtttatttcagtgcttgaaattggctttcgagagaggcaccacggttccctttt

SEQ ID NO: 37011 - DNA, 80 bp, synthetic construct
  source 1..80: mol_type = other DNA
cacatgggggtcaagtttcagaaaataagagaaatgaagaaatatgtgcccggaagcaagaacgaccgacctcattaaac

SEQ ID NO: 37012 - DNA, 80 bp, synthetic construct; identical to SEQ ID NO: 13134
  source 1..80: mol_type = other DNA

SEQ ID NO: 37013 - DNA, 80 bp, synthetic construct
  source 1..80: mol_type = other DNA
atcttgaatccaacagacaacacacagcatcagccagactaacacaaaggacgtcatgggcatggacgtaaatactggtg

SEQ ID NO: 37014 - DNA, 80 bp, synthetic construct
  source 1..80: mol_type = other DNA
gattactcacttgatactgtgtatgtctcttcttggcttctcatctccacacaaaaccctcaggtggtaaaaatctaatt

SEQ ID NO: 37015 - DNA, 80 bp, synthetic construct
  source 1..80: mol_type = other DNA
tactagaattttaattaaaaaatacctgcagtttatatgcaaagttatagattaatgcttaaaaataggttgtatgtagt

SEQ ID NO: 37016 - DNA, 80 bp, synthetic construct; identical to SEQ ID NO: 13135
  source 1..80: mol_type = other DNA

SEQ ID NO: 37017 - DNA, 80 bp, synthetic construct
  source 1..80: mol_type = other DNA
atacggtttaaacctaattagaaaccagaagctcttgtatttccacaaaggattatgacagccccaagaaaagatagtga

SEQ ID NO: 37018 - DNA, 80 bp, synthetic construct
  source 1..80: mol_type = other DNA
tcatttctgttttagcaaataacctgccacatataccaatagcccaagagatgggcatgtccctgcatttcctggtcaag

SEQ ID NO: 37019 - DNA, 80 bp, synthetic construct
  source 1..80: mol_type = other DNA
tctgaaaagtgacacttttgatgattgctcgcttaatactgggagagccagatgaagattcctccccacttcctcagatg

SEQ ID NO: 37020 - DNA, 80 bp, synthetic construct; identical to SEQ ID NO: 13136
  source 1..80: mol_type = other DNA

SEQ ID NO: 37021 - DNA, 80 bp, synthetic construct
  source 1..80: mol_type = other DNA
cagtttcccattttcaagagtatttattaaaaggttctggttgcagaaggaataagaaatggcttgagatcatgacacag

SEQ ID NO: 37022 - DNA, 80 bp, synthetic construct
  source 1..80: mol_type = other DNA
cattttactttccctcttcactaacatgcttttgacatgcatggcagagctgaaggcaaggggaaggggacaacatagta

SEQ ID NO: 37023 - DNA, 80 bp, synthetic construct
  source 1..80: mol_type = other DNA
ctgacaaagataaacttttccaaaaagctgcatgttgtttctagcacagtttttcctcgcagtgactacgtgatgaaagt

SEQ ID NO: 37024 - DNA, 80 bp, synthetic construct
  source 1..80: mol_type = other DNA
tcagcagggggtgttctggcagttgacatttctgaaaactacagcctacatttttaaaaaatccagtaagtgaaaactaa

SEQ ID NO: 37025 - DNA, 80 bp, synthetic construct
  source 1..80: mol_type = other DNA
ttacagtccttttttaaatacaaagaaatatttggtgtgaaatgttccccgggagctggtgcaagcagaggcgacagggc

SEQ ID NO: 37026 - DNA, 80 bp, synthetic construct; identical to SEQ ID NO: 13137
  source 1..80: mol_type = other DNA

SEQ ID NO: 37027 - DNA, 80 bp, synthetic construct
  source 1..80: mol_type = other DNA
cagctgcctagcttctcctcctctgagatagacgggaacaaagtctttgatgtgtgcatttctcaagcttgacaatgata

SEQ ID NO: 37028 - DNA, 80 bp, synthetic construct
  source 1..80: mol_type = other DNA
tccttgccattggtttatgcctcagccccaccatgcagtggctggccaggtgacctaggccagtcctgcatcctcggctc

SEQ ID NO: 37029 - DNA, 80 bp, synthetic construct; identical to SEQ ID NO: 13138
  source 1..80: mol_type = other DNA

SEQ ID NO: 37030 - DNA, 80 bp, synthetic construct
  source 1..80: mol_type = other DNA
ggtgagaagcttaaagtgagaaccccattgctgcctctttttcactttaaaaacatttaagttttgaattatggtaaaat

SEQ ID NO: 37031 - DNA, 80 bp, synthetic construct
  source 1..80: mol_type = other DNA
tgtgtatattcaaggtgtagaacatgatttcatatgcacgtacattgtatactcattaccacaatcaaagaaattaacac

SEQ ID NO: 37032 - DNA, 80 bp, synthetic construct
  source 1..80: mol_type = other DNA
tgtatgcatgtatatgggtatgtgtgtacgtgtgtacgtgtgtgtgcatgtgtgtatatgtgtgtctgtgggcacaggtg

SEQ ID NO: 37033 - DNA, 80 bp, synthetic construct
  source 1..80: mol_type = other DNA
gttgttttggtttggctcttctgttttaaaatatcagaacaataataatttcccacagacaaaatcctcaatcctcacca

SEQ ID NO: 37034 - DNA, 80 bp, synthetic construct; identical to SEQ ID NO: 13139
  source 1..80: mol_type = other DNA

SEQ ID NO: 37035 - DNA, 80 bp, synthetic construct
  source 1..80: mol_type = other DNA
tctgcagcccttactgaagccgttaccaactggcacaattcaattcctactgtacccatcatgcacagatggctgaagta

SEQ ID NO: 37036 - DNA, 80 bp, synthetic construct
  source 1..80: mol_type = other DNA
gagagagagaatgcatggttagtaggttatcaaactcctatgacttttcacaggaaaagccctcatccacaccaacttta

SEQ ID NO: 37037 - DNA, 80 bp, synthetic construct; identical to SEQ ID NO: 13140
  source 1..80: mol_type = other DNA

SEQ ID NO: 37038 - DNA, 80 bp, synthetic construct
  source 1..80: mol_type = other DNA
ggtggcccttgagtgccaaacagcctgtcctcagctgcaaaatgagtcgttgatgatcctccagcaagggatacttttta

SEQ ID NO: 37039 - DNA, 80 bp, synthetic construct
  source 1..80: mol_type = other DNA
tggtgaccaagcacatcagacctggttcttgctcagtcctgggagccacagaacccagcacgtactttacccccaagacc

SEQ ID NO: 37040 - DNA, 80 bp, synthetic construct
  source 1..80: mol_type = other DNA
gtagatgcagtgaactcaggaagatgcctgcatagactctagtgttaaagacagaatccttacaaggaacccccatagtt

SEQ ID NO: 37041 - DNA, 80 bp, synthetic construct
  source 1..80: mol_type = other DNA
tcagagagtctactttcagaaaagccttcaggaatacatcatgtacaaaactgagaaattacctgaagtatctttaaatt

SEQ ID NO: 37042 - DNA, 80 bp, synthetic construct; identical to SEQ ID NO: 13141
  source 1..80: mol_type = other DNA

SEQ ID NO: 37043 - DNA, 80 bp, synthetic construct
  source 1..80: mol_type = other DNA
tcggacaaattgccccaactacggtgggaaaagaaccaatgtgttggactatttatctaatttttgtttagttcggggat

SEQ ID NO: 37044 - DNA, 80 bp, synthetic construct
  source 1..80: mol_type = other DNA
tgcaaacggccctgagtcccccagtttatgtcttaattcgcagccagggctgattgtagaagcaaatttgcaaacatgtg

SEQ ID NO: 37045 - DNA, 80 bp, synthetic construct; identical to SEQ ID NO: 13142
  source 1..80: mol_type = other DNA

SEQ ID NO: 37046 - DNA, 80 bp, synthetic construct
  source 1..80: mol_type = other DNA
ttggtgttactgttcaagagctggaaggcttctgcccccattcccattccattaattgcgtgaggtagagaactcataga

SEQ ID NO: 37047 - DNA, 80 bp, synthetic construct
  source 1..80: mol_type = other DNA
accttcaagaaataaattaagttctctcaaaaatgtgttttttgaaaagaggactaaaacagatggcctggctgtgttaa

SEQ ID NO: 37048 - DNA, 80 bp, synthetic construct
  source 1..80: mol_type = other DNA
gcacacgcacagctcccaaggactctaaaaaaagatatttttctgcttatatactaataatatgttagagatttatgttt

SEQ ID NO: 37049 - DNA, 80 bp, synthetic construct
  source 1..80: mol_type = other DNA
gcaaggcaaggcaaaatattcagtaacttagcaacaccaacagaagacagccaatattgcagcacatttttctcttggat

SEQ ID NO: 37050 - DNA, 80 bp, synthetic construct; identical to SEQ ID NO: 13143
  source 1..80: mol_type = other DNA

SEQ ID NO: 37051 - DNA, 80 bp, synthetic construct
  source 1..80: mol_type = other DNA
tagagctctatttgtggcattatatcacggacaaaagcacgttcatcagagtcagaggaatgtggtgcaaatcccagctg

SEQ ID NO: 37052 - DNA, 80 bp, synthetic construct
  source 1..80: mol_type = other DNA
tggtgatgctgatgccgttcccttttttagggaagtgattttcccttacaaagttaccaacagtttcatgttggcccatt

SEQ ID NO: 37053 - DNA, 80 bp, synthetic construct
  source 1..80: mol_type = other DNA
acagtctgctgttttgtctccttttgaggtccttaaagtaatccttaaaaagatagtgcagatggaaagatgtctggagt

SEQ ID NO: 37054 - DNA, 80 bp, synthetic construct; identical to SEQ ID NO: 13144
  source 1..80: mol_type = other DNA

SEQ ID NO: 37055 - DNA, 80 bp, synthetic construct
  source 1..80: mol_type = other DNA
ttggatattgcagacagcatagtgcaattgtgaagagtgtctgcttaccagccacgctgccttgcacaagttatcaagcc

SEQ ID NO: 37056 - DNA, 80 bp, synthetic construct
  source 1..80: mol_type = other DNA
tcagtgtgtacatcccataatacagacacgttaccagaaactccctagccaggactttgattgcagctcacattttgtat

SEQ ID NO: 37057 - DNA, 80 bp, synthetic construct; identical to SEQ ID NO: 13145
  source 1..80: mol_type = other DNA

SEQ ID NO: 37058 - DNA, 80 bp, synthetic construct
  source 1..80: mol_type = other DNA
acatctcttcacctttagaatttaaagaatgatcatttcttagattgcatctcagacacacccttcccctagtctggaga

SEQ ID NO: 37059 - DNA, 80 bp, synthetic construct
  source 1..80: mol_type = other DNA
ctcattctaaggtacacgctattaaccttgtgagaaaacaaagaggccagccccacccttcctgctcactctgagtcacg

SEQ ID NO: 37060 - DNA, 80 bp, synthetic construct
  source 1..80: mol_type = other DNA
ttagaactgaaagttatgacaatgtaatcaaaatagaatgtgggtttacagctggccccctggcctggtttgtgaacata

SEQ ID NO: 37061 - DNA, 80 bp, synthetic construct
  source 1..80: mol_type = other DNA
ttttaaatatcgtcttgcttgctccccaaatacctactgttttcaacttggatatacgacatgattaaagaatatctaat

SEQ ID NO: 37062 - DNA, 80 bp, synthetic construct; identical to SEQ ID NO: 13146
  source 1..80: mol_type = other DNA

SEQ ID NO: 37063 - DNA, 80 bp, synthetic construct
  source 1..80: mol_type = other DNA
tcactttgtcatcttcttaagacttttaaagagcatttgtaagtaactgaatagaaggccaaagggtgtgtaggtagccc

SEQ ID NO: 37064 - DNA, 80 bp, synthetic construct
  source 1..80: mol_type = other DNA
ggcctaacttatctgtgaaggcctccagcttcctccacaccggtggccacttttcattcactctgaacccttctttgtat

SEQ ID NO: 37065 - DNA, 80 bp, synthetic construct; identical to SEQ ID NO: 13147
  source 1..80: mol_type = other DNA

SEQ ID NO: 37066 - DNA, 80 bp, synthetic construct
  source 1..80: mol_type = other DNA
tcagagctacacagtgtactctgggattggaactctttatttttttttcagttgatttgtaaataagattgcacaaaaat

SEQ ID NO: 37067 - DNA, 80 bp, synthetic construct
  source 1..80: mol_type = other DNA
agagacaagcaagcacatcgcgtggaaatttccattcaactggaaatgtccaagcctgtttacctcaattaattgtcctt

SEQ ID NO: 37068 - DNA, 80 bp, synthetic construct
  source 1..80: mol_type = other DNA
tacaagcttgagatgtattaatacgaaatccaagctgcatgagggctttatttttcaagcctacaccttgctgaaattct

SEQ ID NO: 37069 - DNA, 80 bp, synthetic construct
  source 1..80: mol_type = other DNA
caagggcaccagtaaaatctagtttcattggttggaaaaaaaatcctgataagcactgttaggcatattaactttaatga

SEQ ID NO: 37070 - DNA, 80 bp, synthetic construct; identical to SEQ ID NO: 13148
  source 1..80: mol_type = other DNA

SEQ ID NO: 37071 - DNA, 80 bp, synthetic construct
  source 1..80: mol_type = other DNA
ttagctgttgtcatgtaggctatcaataaatatatgacaaataaaacagttagggaatgagggaaattgactagcagcca

SEQ ID NO: 37072 - DNA, 80 bp, synthetic construct
  source 1..80: mol_type = other DNA
ttcaatgtcttcatgaggtcaattacagattattatttagaccccaaagattccaaagatggtatttcggtcagatcttc

SEQ ID NO: 37073 - DNA, 80 bp, synthetic construct
  source 1..80: mol_type = other DNA
tcatcttaaggctgtgaaattatcttcctgtgtggctaaaatagtgaataaaattcagcgcaatataaatcatagtacaa

SEQ ID NO: 37074 - DNA, 80 bp, synthetic construct; identical to SEQ ID NO: 13149
  source 1..80: mol_type = other DNA

SEQ ID NO: 37075 - DNA, 80 bp, synthetic construct
  source 1..80: mol_type = other DNA
ggttaaatgctcttaaaaaagaaacctgggagaggtagtttccagatgcaggcccgtcttttcttttaaacagaggcagc

SEQ ID NO: 37076 - DNA, 80 bp, synthetic construct
  source 1..80: mol_type = other DNA
cctcttggggtaaggtacgcccaggaacagtttagaataacgtgcgcgagtcaaagggaagaagaagctcctgcagacct

SEQ ID NO: 37077 - DNA, 80 bp, synthetic construct
  source 1..80: mol_type = other DNA
caagccccgcgtcccgcgtcctcactgtcctgggacaccccccaccccaccccaccgccacagcccagagcggtgccagg

SEQ ID NO: 37078 - DNA, 80 bp, synthetic construct; identical to SEQ ID NO: 13150
  source 1..80: mol_type = other DNA

SEQ ID NO: 37079 - DNA, 80 bp, synthetic construct
  source 1..80: mol_type = other DNA
aggacagagaggggacatcctgagatggtttgggcagcccgcggatcctgtgcatgtccccagagcgtccactttctcca

SEQ ID NO: 37080 - DNA, 80 bp, synthetic construct
  source 1..80: mol_type = other DNA
acttctattccgtttggcttcagaagggaaaagagaacgtaagttcagggagttctcgtccattcctctcccgtgggccg

SEQ ID NO: 37081 - DNA, 80 bp, synthetic construct
  source 1..80: mol_type = other DNA
aaacttaccaccaggggactcgagatggggaaggaaaggtcagaagaggagaggccaggcacggggtgtgggcggcctgc

SEQ ID NO: 37082 - DNA, 80 bp, synthetic construct; identical to SEQ ID NO: 13151
  source 1..80: mol_type = other DNA

SEQ ID NO: 37083 - DNA, 80 bp, synthetic construct
  source 1..80: mol_type = other DNA
atactgcacggtttatcgtgaagacagggtcctttgctgccgtcttaagttttgggcccaagaacgtgccccaccctagg

SEQ ID NO: 37084 - DNA, 80 bp, synthetic construct
  source 1..80: mol_type = other DNA
ctgcagcagagctgaacacacgtaggctcttgccaggaggggcatttgtatgtgctgagcattccttatattctcaatat

SEQ ID NO: 37085 - DNA, 80 bp, synthetic construct; identical to SEQ ID NO: 13152
  source 1..80: mol_type = other DNA

SEQ ID NO: 37086 - DNA, 80 bp, synthetic construct
  source 1..80: mol_type = other DNA
tggctctggcaccatttgttgaaaacatgatagccaatgtcaagacttaatagttataataatcaggagcttttgtttct

SEQ ID NO: 37087 - DNA, 80 bp, synthetic construct
  source 1..80: mol_type = other DNA
ttgcatgatctcactccttcatggaatctaaaaaattgtattcagagaagcagagagtggaatggtggttaccaggggct

SEQ ID NO: 37088 - DNA, 80 bp, synthetic construct
  source 1..80: mol_type = other DNA
caccacaccaaaaaaaggtatgtgcagtaatacagtcattaattagcttgatgtagccattccacaatggatacatatat

SEQ ID NO: 37089 - DNA, 80 bp, synthetic construct
  source 1..80: mol_type = other DNA
gccatttatcaggacgtatgggtgccagtcaggatgataaagcttccttttggccactatactacttagaaatgccctgc

SEQ ID NO: 37090 - DNA, 80 bp, synthetic construct; identical to SEQ ID NO: 13153
  source 1..80: mol_type = other DNA

SEQ ID NO: 37091 - DNA, 80 bp, synthetic construct
  source 1..80: mol_type = other DNA
ggctttcttcttcgcaatgagtgttgcagactcccgacaaaggccaggtggtaaagtgtggtgtctgtgagcgagagcct

SEQ ID NO: 37092 - DNA, 80 bp, synthetic construct
  source 1..80: mol_type = other DNA
gaggaggggccatcactgcacaattcatcagtgtctgtgacaggaagagattgttttagactggtttttttttttttatt

SEQ ID NO: 37093 - DNA, 80 bp, synthetic construct
  source 1..80: mol_type = other DNA
taagaaatacattttaatatcatggcacacatacagctgtatctaaactttcataatactgcctttacgatatcactctg

SEQ ID NO: 37094 - DNA, 80 bp, synthetic construct; identical to SEQ ID NO: 13154
  source 1..80: mol_type = other DNA

SEQ ID NO: 37095 - DNA, 80 bp, synthetic construct
  source 1..80: mol_type = other DNA
ggtgttttggcttgtttgtttcccttgtctcctacctgtgactttatagccttttggagactcacagcaatagttgtatt

SEQ ID NO: 37096 - DNA, 80 bp, synthetic construct
  source 1..80: mol_type = other DNA
gattattacccagggttttcatttttttcatttcatggttcattttcgctccagtgtagacatacaatagaccactcgtc

SEQ ID NO: 37097 - DNA, 80 bp, synthetic construct
  source 1..80: mol_type = other DNA
agtccaaaatcaaggtgtcagtagagtctctctctctgaaacctgctgaggatgatgcccctggcctctccccagcctct

SEQ ID NO: 37098 - DNA, 80 bp, synthetic construct; identical to SEQ ID NO: 13155
  source 1..80: mol_type = other DNA

SEQ ID NO: 37099 - DNA, 80 bp, synthetic construct
  source 1..80: mol_type = other DNA
gtattctttagacaataactcagccttgaactccagtaaagggtttccctgggattttcttcttgactcactccactgtg

SEQ ID NO: 37100 - DNA, 80 bp, synthetic construct
  source 1..80: mol_type = other DNA
cgaggcacactgtgcgcatgtgtgtacaattaatatcatggttttaaattattttcaggccaaggggagatctttgctgc

SEQ ID NO: 37101 - DNA, 80 bp, synthetic construct; identical to SEQ ID NO: 13156
  source 1..80: mol_type = other DNA

SEQ ID NO: 37102 - DNA, 80 bp, synthetic construct
  source 1..80: mol_type = other DNA
gcccctatgaaagatagagattggcttaccatgatgagatgtaagcccaagttatgaggttggcacacaaaaccacaaat

SEQ ID NO: 37103 - DNA, 80 bp, synthetic construct
  source 1..80: mol_type = other DNA
gaggtcctggctcctagaggccaccctctccataagcagttcttagcatggccgcctgcttctccaggcccagtgggaaa

SEQ ID NO: 37104 - DNA, 80 bp, synthetic construct
  source 1..80: mol_type = other DNA
ggactgatatttatcatgcatttgggtcaagttgcattaagagatataataaagctggacaagcttctgttgattagaag

SEQ ID NO: 37105 - DNA, 80 bp, synthetic construct; identical to SEQ ID NO: 13157
  source 1..80: mol_type = other DNA

SEQ ID NO: 37106 - DNA, 80 bp, synthetic construct
  source 1..80: mol_type = other DNA
tacggaatggtacgctcaaatgcaaattctccttcccttccccagtccttgtccttcagatggtaatttaggagctgaag

SEQ ID NO: 37107 - DNA, 80 bp, synthetic construct
  source 1..80: mol_type = other DNA
ggtatcagagttgacattgggttgccccttctctgaggcattcatgtaaatccttttaagtttataaaacctccatgtgg

SEQ ID NO: 37108 - DNA, 80 bp, synthetic construct
  source 1..80: mol_type = other DNA
taacaatgtagaaagactaaagcacatgggtggtgcttcataaatagtatttctcccactttctgaaaactcctgctgaa

SEQ ID NO: 37109 - DNA, 80 bp, synthetic construct; identical to SEQ ID NO: 13158
  source 1..80: mol_type = other DNA

SEQ ID NO: 37110 - DNA, 80 bp, synthetic construct
  source 1..80: mol_type = other DNA
agtttgaaaccactattaactaccttatgagagccactgtttgtgaagtgctgactatgtgccaggtcccgtgccgtgca

SEQ ID NO: 37111 - DNA, 80 bp, synthetic construct
  source 1..80: mol_type = other DNA
cactacactgtcagctggtatctcaaccagccattacaggctgtaaaaaaattatataagatagtctatggtaatgcaga

SEQ ID NO: 37112 - DNA, 80 bp, synthetic construct
  source 1..80: mol_type = other DNA
tttaatttgagctgcagggtgactttttttcttctatgctttcatctctctgtggcttcttttgcctcgttaatttcatg

SEQ ID NO: 37113 - DNA, 80 bp, synthetic construct
  source 1..80: mol_type = other DNA
agctggcagccccatgggaaagatgtgtgaagtgtggggtttgacgacccatgggagaacagactttcttcctcttcttg

SEQ ID NO: 37114 - DNA, 80 bp, synthetic construct; identical to SEQ ID NO: 13159
  source 1..80: mol_type = other DNA

SEQ ID NO: 37115 - DNA, 80 bp, synthetic construct
  source 1..80: mol_type = other DNA
cactgagaacacaaggctggcaaagcttgtctgctgcccagcaagcacttcaggctcacaccattttaggttcactttaa

SEQ ID NO: 37116 - DNA, 80 bp, synthetic construct
  source 1..80: mol_type = other DNA
actgagttagaatattagagagcaggtctcagaaacattctatccggcagtcttattctatgcacccgaagggataagag

SEQ ID NO: 37117 - DNA, 80 bp, synthetic construct; identical to SEQ ID NO: 13160
  source 1..80: mol_type = other DNA

SEQ ID NO: 37118 - DNA, 80 bp, synthetic construct
  source 1..80: mol_type = other DNA
tcctctcctcttctccttttggagttgcaggccacagaaaggaagtgacatgagtcactttgggccttcttaattccttc

SEQ ID NO: 37119 - DNA, 80 bp, synthetic construct
  source 1..80: mol_type = other DNA
tctaccacacctgccccagtgcccatttctctcccacctgaataaaaagcccccacaaagcctgaggtacatggaaagga

SEQ ID NO: 37120 - DNA, 80 bp, synthetic construct
  source 1..80: mol_type = other DNA
gccccatgaaagagtgcacagtccagtctataaaacagacgcagaaaatgtgtgtaggacttcttcctgaaaaagagcgt

SEQ ID NO: 37121 - DNA, 80 bp, synthetic construct; identical to SEQ ID NO: 13161
  source 1..80: mol_type = other DNA

SEQ ID NO: 37122 - DNA, 80 bp, synthetic construct
  source 1..80: mol_type = other DNA
tggaatgaaaggccttcgcaattgaaaccaaaatgttatccaactcagtcctgtccctttgacgatgaaaacatcaagtt

SEQ ID NO: 37123 - DNA, 80 bp, synthetic construct
  source 1..80: mol_type = other DNA
caagaaccatgctttcactccactgtcaagagttgtggaagaatccttccagcattttttctgtgtattttacatacata

SEQ ID NO: 37124 - DNA, 80 bp, synthetic construct
  source 1..80: mol_type = other DNA
ctatgcatgtaatggctccctcatcttctgtgaggctgtcactaaaaaggggatttagcttgttctgggctttgcagccc

SEQ ID NO: 37125 - DNA, 80 bp, synthetic construct
  source 1..80: mol_type = other DNA
catcaagtttgttttcttccacatctgtccttccatttctgaactattttaaggccagtcatgtctcatccaagaaatcc

SEQ ID NO: 37126 - DNA, 80 bp, synthetic construct; identical to SEQ ID NO: 13162
  source 1..80: mol_type = other DNA

SEQ ID NO: 37127 - DNA, 80 bp, synthetic construct
  source 1..80: mol_type = other DNA
tatttattttgagatggagtctcactctgttgcccaggctggagttcagtggcataatctgggctcactgcaagctctgc

SEQ ID NO: 37128 - DNA, 80 bp, synthetic construct
  source 1..80: mol_type = other DNA
tcggcttcccaaagtgcttcatgttttcaggagctgtacgtgcatttttagttttgatgaccaggtcctttttctgtttt

SEQ ID NO: 37129 - DNA, 80 bp, synthetic construct
  source 1..80: mol_type = other DNA
cccagaccctgggtcttttgctgccacatgaatcttcttcaaggtcctatgtgtagattttcttgacttggccatattat

SEQ ID NO: 37130 - DNA, 80 bp, synthetic construct; identical to SEQ ID NO: 13163
  source 1..80: mol_type = other DNA

SEQ ID NO: 37131 - DNA, 80 bp, synthetic construct
  source 1..80: mol_type = other DNA
aaagtgaaatactcctacttgtggaagaaatcctcattttaaccatgaagaactgaaaaatgcattctgatgttgatgga

SEQ ID NO: 37132 - DNA, 80 bp, synthetic construct
  source 1..80: mol_type = other DNA
ccctgagaggtaccagtgtgcaagatcgctgagttggcaagtgatagtgacaatattttcaccccaatttctaatttaaa

SEQ ID NO: 37133 - DNA, 80 bp, synthetic construct
  source 1..80: mol_type = other DNA
atctgtaattatctactatggggtaaaaagtgatgaaaactaccatcttgaaaggttctggtgatagtggttcctaatgc

SEQ ID NO: 37134 - DNA, 80 bp, synthetic construct; identical to SEQ ID NO: 13164
  source 1..80: mol_type = other DNA

SEQ ID NO: 37135 - DNA, 80 bp, synthetic construct
  source 1..80: mol_type = other DNA
ctcacactcagaggatttcaaagcagagggcatctcgtagagcaacttatccaaaccctgacccactgtaaacacacaca

SEQ ID NO: 37136 - DNA, 80 bp, synthetic construct
  source 1..80: mol_type = other DNA
ctccttaaaaaaaaattctggttgcagcccactaacttgattgtacagctgcttaatggatagcaggctgtaattttcag

SEQ ID NO: 37137 - DNA, 80 bp, synthetic construct; identical to SEQ ID NO: 13165
  source 1..80: mol_type = other DNA

SEQ ID NO: 37138 - DNA, 80 bp, synthetic construct
  source 1..80: mol_type = other DNA
agtggccacattcaggctccaatttcctggtgatttcatagtgtagggcacttgcaatcaaaactaggcttaaagcccaa

SEQ ID NO: 37139 - DNA, 80 bp, synthetic construct
  source 1..80: mol_type = other DNA
atcttctccgccagatcaaaacaagctcgtagtattagatgtcaccgagcaccatgacaggcagatgaacatcatccctg

SEQ ID NO: 37140 - DNA, 80 bp, synthetic construct
  source 1..80: mol_type = other DNA
atgttactaaagatctgtccctttcaagattggattagacattaggaatttggagggctttttattgctagcatttttaa

SEQ ID NO: 37141 - DNA, 80 bp, synthetic construct; identical to SEQ ID NO: 13166
  source 1..80: mol_type = other DNA

SEQ ID NO: 37142 - DNA, 80 bp, synthetic construct
  source 1..80: mol_type = other DNA
ttgcttttgtgttgggaattgtgctgttcatttttactctacctcgttttggaatcactaatgtggccaatttatagcca

SEQ ID NO: 37143 - DNA, 80 bp, synthetic construct
  source 1..80: mol_type = other DNA
ccttctcccgaccgtgatgcgcctcagccctacttcccttgtcctttcctatcataaaatcttctttcatagaaatggtc

SEQ ID NO: 37144 - DNA, 80 bp, synthetic construct
  source 1..80: mol_type = other DNA
tcttagttttgcaaggagttatcttaatttagggagatgaaactagtctgtgatccgaggtctcacttccatacatttct

SEQ ID NO: 37145 - DNA, 80 bp, synthetic construct
  source 1..80: mol_type = other DNA
gctgcaggcgagatgggaagtgcagccactgagaactcacagtagagcgtgtgtaacgtaaaaagatgaaacccattgta

SEQ ID NO: 37146 - DNA, 80 bp, synthetic construct; identical to SEQ ID NO: 13167
  source 1..80: mol_type = other DNA

SEQ ID NO: 37147 - DNA, 80 bp, synthetic construct
  source 1..80: mol_type = other DNA
tggcctatcctgtcaggagacgcagttgcccagacgttttcaagggcctaagatgtaggcagttgatccacagatttttg

SEQ ID NO: 37148 - DNA, 80 bp, synthetic construct
  source 1..80: mol_type = other DNA
ccagcaacttcctttctaacttctcctttcacatatgctggatactccaagactttgcatttacatggacatcacagatc

SEQ ID NO: 37149 - DNA, 80 bp, synthetic construct; identical to SEQ ID NO: 13168
  source 1..80: mol_type = other DNA

SEQ ID NO: 37150 - DNA, 80 bp, synthetic construct
  source 1..80: mol_type = other DNA
cttttaaagaaagcaaggacacagaggtggattctccctgacgctagcacagctcatgcccaagccactcctgcagggct

SEQ ID NO: 37151 - DNA, 80 bp, synthetic construct
  source 1..80: mol_type = other DNA
ttctgtacagtggggaagatactggactgttgtgaggattaagtgaggagagtggcccaatgaggttgacagttattact

SEQ ID NO: 37152 - DNA, 80 bp, synthetic construct
  source 1..80: mol_type = other DNA
cgcctttagaaccacaattctctgatatgtgcaatgagagaattaattatagactcaaaggattgcatgcagacacacac

SEQ ID NO: 37153 - DNA, 80 bp, synthetic construct
  source 1..80: mol_type = other DNA
ctcacagagacacacagatacacacaggcacacacacagagagacatacacacagcccacagggatacacacagacacac

SEQ ID NO: 37154 - DNA, 80 bp, synthetic construct; identical to SEQ ID NO: 13169
  source 1..80: mol_type = other DNA

SEQ ID NO: 37155 - DNA, 80 bp, synthetic construct
  source 1..80: mol_type = other DNA
ctcaggcacactgatacacatacctcagatttttaattctccggttgtgttcaccaggtgcttggtcatgattaagaatt

SEQ ID NO: 37156 - DNA, 80 bp, synthetic construct
  source 1..80: mol_type = other DNA
cattttacttctaggaagacaggaagtgtcaggatctcagggatctaggaagccaaaatgtttttccactctgaaataaa

SEQ ID NO: 37157 - DNA, 80 bp, synthetic construct; identical to SEQ ID NO: 13170
  source 1..80: mol_type = other DNA

SEQ ID NO: 37158 - DNA, 80 bp, synthetic construct
  source 1..80: mol_type = other DNA
cctgtgctctttctgaagcccaagtcactggctctagaattctaacctgtgaggaagccactgaggatgtttgtcaaaat

SEQ ID NO: 37159 - DNA, 80 bp, synthetic construct
  source 1..80: mol_type = other DNA
tgctctcagatctacaggggaagggaaggtcacacagtcatcgcaatagtaacctcagctgataaatcctcccccataaa

SEQ ID NO: 37160 - DNA, 80 bp, synthetic construct
  source 1..80: mol_type = other DNA
gccaataatactgaagccccttccaaggccctgggagtcctaacagtgcactggcagtgtctataatttatattatgaaa

SEQ ID NO: 37161 - DNA, 80 bp, synthetic construct; identical to SEQ ID NO: 13171
  source 1..80: mol_type = other DNA

SEQ ID NO: 37162 - DNA, 80 bp, synthetic construct
  source 1..80: mol_type = other DNA
tactcttgatctttccccaaatttttaaaaacatgacactcattcccttatttttcctacttagaaaagtgtagatggtt

SEQ ID NO: 37163 - DNA, 80 bp, synthetic construct
  source 1..80: mol_type = other DNA
tatccttagcctccatctggttgcagaccataaagacagggaaaaaatgagggtgttggtagcttcgttagaaactgaaa

SEQ ID NO: 37164 - DNA, 80 bp, synthetic construct
  source 1..80: mol_type = other DNA
agtcaggaactgctcagagacgtgatggcaactccatagaatgaaatactcttcagccagtaaaatgtatttttggataa

SEQ ID NO: 37165 - DNA, 80 bp, synthetic construct
  source 1..80: mol_type = other DNA
ttgttgttaagtattttttctgtttgcttatctataattctaattttgcttcaaagaacaagttactccggcaatataaa

SEQ ID NO: 37166 - DNA, 80 bp, synthetic construct; identical to SEQ ID NO: 13172
  source 1..80: mol_type = other DNA

SEQ ID NO: 37167 - DNA, 80 bp, synthetic construct
  source 1..80: mol_type = other DNA
taaacgtccatgttttccctctactctctcactcttttcccagggcctcaaacagaagatgaaaatcaatttctaaaaca

SEQ ID NO: 37168 - DNA, 80 bp, synthetic construct
  source 1..80: mol_type = other DNA
acacagaagtttcagattatgtaacagatgctgtgctgggttaggcagagccatctgacttgttttgctttattttagac

SEQ ID NO: 37169 - DNA, 80 bp, synthetic construct
  source 1..80: mol_type = other DNA
caggacatgcagtcccagatggaggggggaattcgggagctggttggaaaagagtatttggcactttgcagccttgagag

SEQ ID NO: 37170 - DNA, 80 bp, synthetic construct; identical to SEQ ID NO: 13173
  source 1..80: mol_type = other DNA

SEQ ID NO: 37171 - DNA, 80 bp, synthetic construct
  source 1..80: mol_type = other DNA
atcttatggtttcaatccttttttaaatttttgttctgagagacccagccagcagactgccgccagtcttgtcagagatg

SEQ ID NO: 37172 - DNA, 80 bp, synthetic construct
  source 1..80: mol_type = other DNA
tcacctaaaccaccctgggtcacctgacctagttttcctcccaattttaattatgtcaggcacttcacaaaggcctcctt

SEQ ID NO: 37173 - DNA, 80 bp, synthetic construct; identical to SEQ ID NO: 13174
  source 1..80: mol_type = other DNA

SEQ ID NO: 37174 - DNA, 80 bp, synthetic construct
  source 1..80: mol_type = other DNA
gggtgggccactcctgggacacgcagacaggaagccggccacctgagccactcggaggctctatccagagtcagctgcca

SEQ ID NO: 37175 - DNA, 80 bp, synthetic construct
  source 1..80: mol_type = other DNA
gttccaacaatttttctttaaactgtcataaaaaattgctgctgtgaataccagtgtcggcgtccctgcctcacctttac

SEQ ID NO: 37176 - DNA, 80 bp, synthetic construct
  source 1..80: mol_type = other DNA
aaggggcccgggcagaaggtatccaggaagactggaaactcgaggaagcctgccctgtcctgtccaccagactttacgct

SEQ ID NO: 37177 - DNA, 80 bp, synthetic construct; identical to SEQ ID NO: 13175
  source 1..80: mol_type = other DNA

SEQ ID NO: 37178 - DNA, 80 bp, synthetic construct
  source 1..80: mol_type = other DNA
ctgacctgtccgctttgtagtactgcccagctatgaaacaggttagccacacatgacctgcatttaggagtaacaagtct

SEQ ID NO: 37179 - DNA, 80 bp, synthetic construct
  source 1..80: mol_type = other DNA
ctttcccattttgaaacttagaacaagtttgcctgtcaacagttctccacagcatactgtgtattctaggattttctaag

SEQ ID NO: 37180 - DNA, 80 bp, synthetic construct
  source 1..80: mol_type = other DNA
atcgaagctcggctcagatcatgacattctcttgactaaaaccctcagtttccatcaaacttgtcactctggcattaaag

SEQ ID NO: 37181 - DNA, 80 bp, synthetic construct
  source 1..80: mol_type = other DNA
ctactggaaagattcccacctgcccctcaagattaatctccaaggacatttccaaattcctctccccatctctcagccag

SEQ ID NO: 37182 - DNA, 80 bp, synthetic construct; identical to SEQ ID NO: 13176
  source 1..80: mol_type = other DNA

SEQ ID NO: 37183 - DNA, 80 bp, synthetic construct
  source 1..80: mol_type = other DNA
tggttttcccctgatgtttgcgtcaaaatgctttttggaaaaaacatttttcaactctttagggtcagaattaagcaatg

SEQ ID NO: 37184 - DNA, 80 bp, synthetic construct
  source 1..80: mol_type = other DNA
ctatgtaactgttggttgatatacctagctagatggtgaaatcagattttgtttaaagcatggaggagagggaaaaatta

SEQ ID NO: 37185 - DNA, 80 bp, synthetic construct
  source 1..80: mol_type = other DNA
ttcctttgaagaagtttggggagtttgggaagatggagaaagatataagaatagactccccatatgggtcatgaattatc

SEQ ID NO: 37186 - DNA, 80 bp, synthetic construct; identical to SEQ ID NO: 13177
  source 1..80: mol_type = other DNA

SEQ ID NO: 37187 - DNA, 80 bp, synthetic construct
  source 1..80: mol_type = other DNA
gcattgcattcagagactaagtgaaaagctggcagattttcatttaaagcacaagctaaggaagaaagctggtctagaag

SEQ ID NO: 37188 - DNA, 80 bp, synthetic construct
  source 1..80: mol_type = other DNA
aagactcttaaatattctggaaactgtttcttccttgtcacatccttatatatacttgaacctatgcctaccagacatga

SEQ ID NO: 37189 - DNA, 80 bp, synthetic construct; identical to SEQ ID NO: 13178
  source 1..80: mol_type = other DNA

SEQ ID NO: 37190 - DNA, 80 bp, synthetic construct
  source 1..80: mol_type = other DNA
caaaaggcattgcaggcaattcagtgaggagaccgaggcatggagagcaagtgccatggaattccctaaggccgtgcagg

SEQ ID NO: 37191 - DNA, 80 bp, synthetic construct
  source 1..80: mol_type = other DNA
atctctcaattaagaaaacctagagcctatctgtgggggttatctgaaggattccagggatgcatatggcactgtctacc

SEQ ID NO: 37192 - DNA, 80 bp, synthetic construct
  source 1..80: mol_type = other DNA
tgcctcagtaactctgaggggcattgactcttttcatccaaaaattcatgttactgccccacattttttctgttgtttta

SEQ ID NO: 37193 - DNA, 80 bp, synthetic construct; identical to SEQ ID NO: 13179
  source 1..80: mol_type = other DNA

SEQ ID NO: 37194 - DNA, 80 bp, synthetic construct
  source 1..80: mol_type = other DNA
catttataatgtggctccttcagaaatataccacataccttttggtgtggtttgtggctgagaagagtggggaatgcaca

SEQ ID NO: 37195 - DNA, 80 bp, synthetic construct
  source 1..80: mol_type = other DNA
attactttctgataaaacagagtctttcatgatcaaagagaaccaggctctagtagttccagtatcctaacgtggacact

SEQ ID NO: 37196 - DNA, 80 bp, synthetic construct
  source 1..80: mol_type = other DNA
cacatctgactctacagggtttgacaacatccagggtgaatcacaaaacatcagtctaatcagggcttatatagaaagag

SEQ ID NO: 37197 - DNA, 80 bp, synthetic construct; identical to SEQ ID NO: 13180
  source 1..80: mol_type = other DNA

SEQ ID NO: 37198 - DNA, 80 bp, synthetic construct
  source 1..80: mol_type = other DNA
gtgcagggcagtgctgatagtacagtgcctgcaatcctggagtggatttggatgtgtcaggtacgcacacgctcactgct

SEQ ID NO: 37199 - DNA, 80 bp, synthetic construct
  source 1..80: mol_type = other DNA
cttcattctgtggcaatatgccttcatttcctaatcagttttgccctgctcattcaatgcaaaatggatctgctttcctt

SEQ ID NO: 37200 - DNA, 80 bp, synthetic construct
  source 1..80: mol_type = other DNA
taattatttcatgcaaaaggctagtcctgactctaattctaagacatgtctcctaaactctggaagtctgatgtatccta

SEQ ID NO: 37201 - DNA, 80 bp, synthetic construct
  source 1..80: mol_type = other DNA
ggtaaaaatctatcaagtcaagacattaccttattacccatggaattgtcttcaactcttacagttcaaatattcctgaa

SEQ ID NO: 37202 - DNA, 80 bp, synthetic construct; identical to SEQ ID NO: 13181
  source 1..80: mol_type = other DNA

SEQ ID NO: 37203 - DNA, 80 bp, synthetic construct
  source 1..80: mol_type = other DNA
gtgtgtacttttttcctatttccattggcaagccacatgacaagcaaaacgatcactcgaagaatattgttccctcaatc

SEQ ID NO: 37204 - DNA, 80 bp, synthetic construct
  source 1..80: mol_type = other DNA
atactggcagtataaccccaaatagaggaaatttgtgaagagtggatgctgcagggcatgagacatctgcacagagttca

SEQ ID NO: 37205 - DNA, 80 bp, synthetic construct; identical to SEQ ID NO: 13182
  source 1..80: mol_type = other DNA

SEQ ID NO: 37206 - DNA, 80 bp, synthetic construct
  source 1..80: mol_type = other DNA
cagctcatgaacacctccactgctgtataaaagaaccatcttttttctggctcctattggatgccttagaaaaatctgta

SEQ ID NO: 37207 - DNA, 80 bp, synthetic construct
  source 1..80: mol_type = other DNA
ctagaaaagccctgagtgataagaaatggccataggccattcccacagaattttcaacaaaaatagaatcatgcttatgt

SEQ ID NO: 37208 - DNA, 80 bp, synthetic construct
  source 1..80: mol_type = other DNA
aaatggctgccatgagcatccttgttcacacatttttaggtacttgagtgagtgtctgtggaataattttgggaagtgaa

SEQ ID NO: 37209 - DNA, 80 bp, synthetic construct
  source 1..80: mol_type = other DNA
ggtaggagggccatcttcaaattctcaaagtatagtcactccaaaccaaaattcgatttaatctgtaggactccattctc

SEQ ID NO: 37210 - DNA, 80 bp, synthetic construct; identical to SEQ ID NO: 13183
  source 1..80: mol_type = other DNA

SEQ ID NO: 37211 - DNA, 80 bp, synthetic construct
  source 1..80: mol_type = other DNA
cagtcccataggaagaagaatttattgcctccttaggcaaataaattcccaaaccttgaacatcagaaaggaaatagatt

SEQ ID NO: 37212 - DNA, 80 bp, synthetic construct
  source 1..80: mol_type = other DNA
tggaaaattttaaggactatctacagcaatggaagaatcgggtgttgggatgtgttcccaggtaataatgactgcaggct

SEQ ID NO: 37213 - DNA, 80 bp, synthetic construct; identical to SEQ ID NO: 13184
  source 1..80: mol_type = other DNA

SEQ ID NO: 37214 - DNA, 80 bp, synthetic construct
  source 1..80: mol_type = other DNA
ggtgtttcagcaaatgaaaacaaaaatataaagcccatctccttttgaatgagctctaaaacagttctccactggacttc

SEQ ID NO: 37215 - DNA, 80 bp, synthetic construct
  source 1..80: mol_type = other DNA
cacagtgtatgttgttatgaggcatcacatgatgagatactgctggggagggaagaagtgaggagattcctaggaatctt

SEQ ID NO: 37216 - DNA, 80 bp, synthetic construct
  source 1..80: mol_type = other DNA
atttatgtattctgtgccagtaggaatgtagccaaaaagagagaaaaggggtctctgcagacatggatgtctctgtgact

SEQ ID NO: 37217 - DNA, 80 bp, synthetic construct
  source 1..80: mol_type = other DNA
gttggcactgaccccgatgatttataggcctttgtttcccatgttaaatgtcttacgatcattaaattatttatagctca

SEQ ID NO: 37218 - DNA, 80 bp, synthetic construct; identical to SEQ ID NO: 13185
  source 1..80: mol_type = other DNA

SEQ ID NO: 37219 - DNA, 80 bp, synthetic construct
  source 1..80: mol_type = other DNA
aaaagcttccttccagcgaatggagttttgggggttttccagacttgcaactgcttttattcttggaagcatcattgttg

SEQ ID NO: 37220 - DNA, 80 bp, synthetic construct
  source 1..80: mol_type = other DNA
ccgctgagtcctctaactctaatggattccttcttacaccaaagtgcactagaactaaagtgttttgcttcattctttag

SEQ ID NO: 37221 - DNA, 80 bp, synthetic construct
  source 1..80: mol_type = other DNA
ttttttctaaacctcacaccttttatttattagacttggattccagtttcctgagcctgtttgtgccactgattagacag

SEQ ID NO: 37222 - DNA, 80 bp, synthetic construct; identical to SEQ ID NO: 13186
  source 1..80: mol_type = other DNA

SEQ ID NO: 37223 - DNA, 80 bp, synthetic construct
  source 1..80: mol_type = other DNA
acgtgtaaataccacatttaggagggcttatgatgatgccaattaatggagacctttttgaaacaggaaggaggtgaaac

SEQ ID NO: 37224 - DNA, 80 bp, synthetic construct
  source 1..80: mol_type = other DNA
ctggaactcctggcgtgactgaggcagacacctgggctacccagcctcacccacgacgccctcactaagtgacccacagg

SEQ ID NO: 37225 - DNA, 80 bp, synthetic construct
  source 1..80: mol_type = other DNA
tttgatagccacacgatttaagggtggttcagtagtgatttgatgagtgctgtggctcagggtcattcccctgcccaagc

SEQ ID NO: 37226 - DNA, 80 bp, synthetic construct; identical to SEQ ID NO: 13187
  source 1..80: mol_type = other DNA

SEQ ID NO: 37227 - DNA, 80 bp, synthetic construct
  source 1..80: mol_type = other DNA
atcagtatgggaatgcacaagtaggaaacgctggatgggaatccctctgccctgtgataccaaggcagtgagtttgtaga

SEQ ID NO: 37228 - DNA, 80 bp, synthetic construct
  source 1..80: mol_type = other DNA
ccaggttccagcctttgtcttttataatgggaatcaaccttatcttgacgatccagagatagtcatcaaggaagattaaa

SEQ ID NO: 37229 - DNA, 80 bp, synthetic construct; identical to SEQ ID NO: 13188
  source 1..80: mol_type = other DNA

SEQ ID NO: 37230 - DNA, 80 bp, synthetic construct
  source 1..80: mol_type = other DNA
tgagtgcctgctacacagtacgctttcagtaaacatggtattgcctcgataatcccacaaaaatgtcctattcaaatcac

SEQ ID NO: 37231 - DNA, 80 bp, synthetic construct
  source 1..80: mol_type = other DNA
gatgtgtacaagtgtgatgttttccccccacagacaagtaaaccacattctcttcacattcccaatgttttgtcaatgta

SEQ ID NO: 37232 - DNA, 80 bp, synthetic construct
  source 1..80: mol_type = other DNA
ttagctttgacagagattccaaggtgatttgataagaagcagggctgtgtttgggctctgggagtttttgatatggtttc

SEQ ID NO: 37233 - DNA, 80 bp, synthetic construct; identical to SEQ ID NO: 13189
  source 1..80: mol_type = other DNA

SEQ ID NO: 37234 - DNA, 80 bp, synthetic construct
  source 1..80: mol_type = other DNA
taatatattagtgtgtgtttttgctcattaacagtatatcctgagatatttcctataccatttaatattttaaaagatgt

SEQ ID NO: 37235 - DNA, 80 bp, synthetic construct
  source 1..80: mol_type = other DNA
tcaaggctgcagtgagctataattgcaccattgcactccagcctaggtgacacagtgagaccctgtttctaaaataaata

SEQ ID NO: 37236 - DNA, 80 bp, synthetic construct
  source 1..80: mol_type = other DNA
aacaaggaacctttggctttgagatgactggggaatccattctttcctatagtatccatgtccaatggacttaaagtatt

SEQ ID NO: 37237 - DNA, 80 bp, synthetic construct
  source 1..80: mol_type = other DNA
tttgagatggagtctcgccctgtcacccaggctggagtgcaatggtgcgatctctgctcactgcaagctccgcctcccag

SEQ ID NO: 37238 - DNA, 80 bp, synthetic construct; identical to SEQ ID NO: 13190
  source 1..80: mol_type = other DNA

SEQ ID NO: 37239 - DNA, 80 bp, synthetic construct
  source 1..80: mol_type = other DNA
aacgccaagcacattgcctacacaaactaaatattcagtcaatggctgctattttcatgagttcgttttaacatatattt

SEQ ID NO: 37240 - DNA, 80 bp, synthetic construct
  source 1..80: mol_type = other DNA
tgaaatttcagcttcacattcccatccatgagctccctgcaaatatcccggtctgctctcaggacccagtgacttaccta

SEQ ID NO: 37241 - DNA, 80 bp, synthetic construct
  source 1..80: mol_type = other DNA
catcaggacaacatggtttgccataactttaagttttaagcgaccgcagattatgcggagagagatgcatgcccacagcc

SEQ ID NO: 37242 - DNA, 80 bp, synthetic construct; identical to SEQ ID NO: 13191
  source 1..80: mol_type = other DNA

SEQ ID NO: 37243 - DNA, 80 bp, synthetic construct
  source 1..80: mol_type = other DNA
aaatccagttgcaccaagcaccccactttttgcacctctcatttatgtactcctaagagcctcaccacaactcccttcta

SEQ ID NO: 37244 - DNA, 80 bp, synthetic construct
  source 1..80: mol_type = other DNA
ggccaatatcacaaaccaattagccctttgtaagtggcacccagatcaggacagctgaccataccagcaccctagaagca

SEQ ID NO: 37245 - DNA, 80 bp, synthetic construct; identical to SEQ ID NO: 13192
  source 1..80: mol_type = other DNA

SEQ ID NO: 37246 - DNA, 80 bp, synthetic construct
  source 1..80: mol_type = other DNA
aagatattgccaaaacattttccagcgcagttatagcaaattatacaccaccagcagtagaaaacatctcctaattgctc

SEQ ID NO: 37247 - DNA, 80 bp, synthetic construct
  source 1..80: mol_type = other DNA
aaagtttgttgaatgcaggcaagaaaagatgagaaataatggtacccaatgaaagacatagcagtctacaaggaggggca

SEQ ID NO: 37248 - DNA, 80 bp, synthetic construct
  source 1..80: mol_type = other DNA
ctggaggaaaccacctggaatgatgggagaactcctccagggaacatggccctttaatagatctctgttataaaaaataa

SEQ ID NO: 37249 - DNA, 80 bp, synthetic construct; identical to SEQ ID NO: 13193
  source 1..80: mol_type = other DNA

SEQ ID NO: 37250 - DNA, 80 bp, synthetic construct
  source 1..80: mol_type = other DNA
cagaccagagtagggcctgacaccactcagactcggcgtgtctataaattagaattgcgttacaattacactttgacatt

SEQ ID NO: 37251 - DNA, 80 bp, synthetic construct
  source 1..80: mol_type = other DNA
acccttttgagcattttgccagtgcttctgaaattaatggggacctcctgttggaggacacagtctgttgcaataggtga

SEQ ID NO: 37252 - DNA, 80 bp, synthetic construct
  source 1..80: mol_type = other DNA
ggtaatctcaaatactttaaaagattactagagtaagataggctcagtaggtacctgaaggcaccatcccaaagaccaga

SEQ ID NO: 37253 - DNA, 80 bp, synthetic construct
  source 1..80: mol_type = other DNA
caccatttctgccctccagaaatgtcatgtccactggcacatgacaagtcactaagtcattcagagccatgggtgacagc

SEQ ID NO: 37254 - DNA, 80 bp, synthetic construct; identical to SEQ ID NO: 13194
  source 1..80: mol_type = other DNA

SEQ ID NO: 37255 - DNA, 80 bp, synthetic construct
  source 1..80: mol_type = other DNA
tcaagtgccattcaatttatcctggcaagaagaggaaggcatcatcaagaccttaattttctaatacatctgatctgaga

SEQ ID NO: 37256 - DNA, 80 bp, synthetic construct
  source 1..80: mol_type = other DNA
ccttttcccatgaggtgtaacagagagagattacagccttggaactggatgtcagactctcctggtttaagacaataagc

SEQ ID NO: 37257 - DNA, 80 bp, synthetic construct; identical to SEQ ID NO: 13195
  source 1..80: mol_type = other DNA

SEQ ID NO: 37258 - DNA, 80 bp, synthetic construct
  source 1..80: mol_type = other DNA
ccctggttcacctctcctcttgacccatccttatcagtgtcttgaaaggtccttctattggaggacacattctgttgcag

SEQ ID NO: 37259 - DNA, 80 bp, synthetic construct
  source 1..80: mol_type = other DNA
gtactggtctcatgagttcctgacatacaaatagtgctgaggccagtatgctgactgggtagccagatacaagtgaaaac

SEQ ID NO: 37260 - DNA, 80 bp, synthetic construct; identical to SEQ ID NO: 13196
  source 1..80: mol_type = other DNA

SEQ ID NO: 37261 - DNA, 80 bp, synthetic construct
  source 1..80: mol_type = other DNA
atgaaccatctgcaaagcatcccccattttccttttaaatcagccaatgggtggtggtgggagaaatattcaccagagta

SEQ ID NO: 37262 - DNA, 80 bp, synthetic construct
  source 1..80: mol_type = other DNA
ataacactggtttggagtggagggcattcatcgggctgcatattcctatttttaattgtattctccactggttacagcac

SEQ ID NO: 37263 - DNA, 80 bp, synthetic construct
  source 1..80: mol_type = other DNA
actggccaggtgtcatttttgagagattagataactgttttccggtagagtgaattgcctgtttgttgcaagttgggact

SEQ ID NO: 37264 - DNA, 80 bp, synthetic construct
  source 1..80: mol_type = other DNA
atgaaaacaagagctcctcacactgtcctcttcagaaagcccatacaatccaaacttctgaatgcttagctgcttacaac

SEQ ID NO: 37265 - DNA, 80 bp, synthetic construct; identical to SEQ ID NO: 13197
  source 1..80: mol_type = other DNA

SEQ ID NO: 37266 - DNA, 80 bp, synthetic construct
  source 1..80: mol_type = other DNA
ctcctggttcagagaattaccataaaaaacagacccctagacatacaacactctatcacataatggtgactttgtcttct

SEQ ID NO: 37267 - DNA, 80 bp, synthetic construct
  source 1..80: mol_type = other DNA
aattcagtcatttaacaaatatatatggcctctgtgcgacagtgaccttgactgggaatgaagctgtcccatgtggggcc

SEQ ID NO: 37268 - DNA, 80 bp, synthetic construct; identical to SEQ ID NO: 13198
  source 1..80: mol_type = other DNA

SEQ ID NO: 37269 - DNA, 80 bp, synthetic construct
  source 1..80: mol_type = other DNA
tttgtccagtctgcatgacacagcctcacatcgttagtgttccctcactcccctcttactgcccaacctgcaaagtccat

SEQ ID NO: 37270 - DNA, 80 bp, synthetic construct
  source 1..80: mol_type = other DNA
ttttggcagcagccgttccaacctgcatgggatcttcactctctcacagatgtgctgactcctcctgctgcctcccctct

SEQ ID NO: 37271 - DNA, 80 bp, synthetic construct
  source 1..80: mol_type = other DNA
aaatcagcagctgcctcaacttcttttccagcatgtctcatgagtattgccacaacagcatctgtcacaatgtggggtag

SEQ ID NO: 37272 - DNA, 80 bp, synthetic construct
  source 1..80: mol_type = other DNA
agcacagtgcaaccttcaatgcaaagatctcatcaaaataattcacatggtgggatattttagaaggatgaccaggctag

SEQ ID NO: 37273 - DNA, 80 bp, synthetic construct; identical to SEQ ID NO: 13199
  source 1..80: mol_type = other DNA

SEQ ID NO: 37274 - DNA, 80 bp, synthetic construct
  source 1..80: mol_type = other DNA
agaaaggatatatttttctcctttctggtcttcctttttggtgtagcatctgtaggaaatgcatttcttcatagctaagt

SEQ ID NO: 37275 - DNA, 80 bp, synthetic construct
  source 1..80: mol_type = other DNA
aggtctagagctacaatatctcatggatatgaatgtcaattcaaatcccagtggcagtttatgagggggaaagcctagaa

SEQ ID NO: 37276 - DNA, 80 bp, synthetic construct; identical to SEQ ID NO: 13200
  source 1..80: mol_type = other DNA

SEQ ID NO: 37277 - DNA, 80 bp, synthetic construct
  source 1..80: mol_type = other DNA
cttttctccctatcagtcatggttttaaaatgttcagacttgatatgtttcccagtgctattgtcagaaaatgtccctat

SEQ ID NO: 37278 - DNA, 80 bp, synthetic construct
  source 1..80: mol_type = other DNA
ccaggtttttggagaggtattttggccataaaattgactaaattattcaaaataaaaaatgaataagcctgggccaaggc

SEQ ID NO: 37279 - DNA, 80 bp, synthetic construct
  source 1..80: mol_type = other DNA
agagggctttatgctaagagttgtggatcttaggattttcatgaaatctgcattatcatcatctgcaagtttagatgggg

SEQ ID NO: 37280 - DNA, 80 bp, synthetic construct
  source 1..80: mol_type = other DNA
gccccacatgccttgctccacaccaaattcacagtctataaacctgagcctccagtgctcctactaccatactcactcga

SEQ ID NO: 37281 - DNA, 80 bp, synthetic construct; identical to SEQ ID NO: 13201
  source 1..80: mol_type = other DNA

SEQ ID NO: 37282 - DNA, 80 bp, synthetic construct
  source 1..80: mol_type = other DNA
tggaggcctaatgggcccttctccacatggcagtaagatctgtttttgtgtttgtgtttcaagttgggagaaggagatta

SEQ ID NO: 37283 - DNA, 80 bp, synthetic construct
  source 1..80: mol_type = other DNA
ttacaagctattatggctaactccatttatctcagttagagaagaagagtcacctgtcaccagggcactgccagaagcca

SEQ ID NO: 37284 - DNA, 80 bp, synthetic construct
  source 1..80: mol_type = other DNA
gtagattcacacatactagctgtaagaaatgatgcggataaatccagcgtaccagctttccccacggagacgtcttgcag

SEQ ID NO: 37285 - DNA, 80 bp, synthetic construct; identical to SEQ ID NO: 13202
  source 1..80: mol_type = other DNA

SEQ ID NO: 37286 - DNA, 80 bp, synthetic construct
  source 1..80: mol_type = other DNA
ctctcagaccaggtcaggtttctgcactcttagatcatccccatggcataatcacagttgtgatgttgtgatgattcagt

SEQ ID NO: 37287 - DNA, 80 bp, synthetic construct
  source 1..80: mol_type = other DNA
gttgtgcaaatattaacaatttaatccttgcaacaatccacgagggaggcattcttctactcccacttaacagacaagga

SEQ ID NO: 37288 - DNA, 80 bp, synthetic construct; identical to SEQ ID NO: 13203
  source 1..80: mol_type = other DNA

SEQ ID NO: 37289 - DNA, 80 bp, synthetic construct
  source 1..80: mol_type = other DNA
aaaagtagtgtggattttgaggtagaaggtttactaaggatcataccgtagtatgaaatagccacaaacattcagtgaaa

SEQ ID NO: 37290 - DNA, 80 bp, synthetic construct
  source 1..80: mol_type = other DNA
atcccaatggtgatgtgacattttgggttttgtatttcttttgcaaattgagctagcatttttgatgagtggcagggctc

SEQ ID NO: 37291 - DNA, 80 bp, synthetic construct
  source 1..80: mol_type = other DNA
ccatctaaatgttttagtaattctaaaaattgatgcgctttttccacgaaaggaagtgttaccacattttccaagtggga

SEQ ID NO: 37292 - DNA, 80 bp, synthetic construct; identical to SEQ ID NO: 13204
  source 1..80: mol_type = other DNA

SEQ ID NO: 37293 - DNA, 80 bp, synthetic construct
  source 1..80: mol_type = other DNA
aaagcttgcttcagattacagattgcagacttcttataatatgtccatttcaccaggccccgctctcagccccgggaaag

SEQ ID NO: 37294 - DNA, 80 bp, synthetic construct
  source 1..80: mol_type = other DNA
gcctggattggtgcttagacctataatgggtgcaagcagcgttcattcatagtggctttctagacccagggacttggccc

SEQ ID NO: 37295 - DNA, 80 bp, synthetic construct
  source 1..80: mol_type = other DNA
tttattactgagagttaaagaaatccactgaaatattctttggtctaaaattactgtcatggcggagcagcttcacctta

SEQ ID NO: 37296 - DNA, 80 bp, synthetic construct; identical to SEQ ID NO: 13205
  source 1..80: mol_type = other DNA

SEQ ID NO: 37297 - DNA, 80 bp, synthetic construct
  source 1..80: mol_type = other DNA
tgtgataggaaactaaaacctaggggagaccaaagcaaggaaaaatacttcctcatccaaacttgagagcaatttaccgt

SEQ ID NO: 37298 - DNA, 80 bp, synthetic construct
  source 1..80: mol_type = other DNA
caaaatgtttgtgctgttctcagatgacatgttatctctttaaaggacaaaatgtgctgtgaaataatagaatgctttca

SEQ ID NO: 37299 - DNA, 80 bp, synthetic construct
  source 1..80: mol_type = other DNA
caggaaagcactggggtgagaaacgtgatgagaaacaattattgtcttaaaatatctgcagggctgtaaggtagagaagc

SEQ ID NO: 37300 - DNA, 80 bp, synthetic construct
  source 1..80: mol_type = other DNA
ttggtagagtatgggaaggcaggggccctgggtgggagtggtgagggtagggagtgagtatcccaatctagaagtaaatt

SEQ ID NO: 37301 - DNA, 80 bp, synthetic construct; identical to SEQ ID NO: 13206
  source 1..80: mol_type = other DNA

SEQ ID NO: 37302 - DNA, 80 bp, synthetic construct
  source 1..80: mol_type = other DNA
atgactatatgtatttgcttacagtctgtggctgcgttcacactatcccagcagagttgaataattgggacagggaccat

SEQ ID NO: 37303 - DNA, 80 bp, synthetic construct
  source 1..80: mol_type = other DNA
tcattttttcaggcaggggagccatctaatgtcaagtgcctacgtgcaggaactggtctgttaattagcagctctcctca

SEQ ID NO: 37304 - DNA, 80 bp, synthetic construct; identical to SEQ ID NO: 13207
  source 1..80: mol_type = other DNA

SEQ ID NO: 37305 - DNA, 80 bp, synthetic construct
  source 1..80: mol_type = other DNA
ctcattttaaaacaagcgttaaatgaaaacccacacacactcagagcacacaaatccaaccacgcttacaaaaccatcac

SEQ ID NO: 37306 - DNA, 80 bp, synthetic construct
  source 1..80: mol_type = other DNA
catccctgtgtccaggcgggctggtcagctgcggtcagcaccagcttccccgctccatggtgaggtcatcacaacatgtg

SEQ ID NO: 37307 - DNA, 80 bp, synthetic construct
  source 1..80: mol_type = other DNA
catgagtccttgttttacaaatgaagaaaacagacccaacatgattaagatgttgccttcataggggtggcaccaggatt

SEQ ID NO: 37308 - DNA, 80 bp, synthetic construct; identical to SEQ ID NO: 13208
  source 1..80: mol_type = other DNA

SEQ ID NO: 37309 - DNA, 80 bp, synthetic construct
  source 1..80: mol_type = other DNA
ccatgcgagcttagaccttagggtcggcttagaaaccacaggcggggcggcttgggcccctcggacactccctctcgaag

SEQ ID NO: 37310 - DNA, 80 bp, synthetic construct
  source 1..80: mol_type = other DNA
tgctgctgaccccttgcgctgtcagcattcagagacattcacacagcacagcctcccaggctaacagctgtcatggaaca

SEQ ID NO: 37311 - DNA, 80 bp, synthetic construct
  source 1..80: mol_type = other DNA
acctgctcctggtgtctttgtgattgctcttttctttcgatttttggttgtctttttttttttgaaagaggggcttttat

SEQ ID NO: 37312 - DNA, 80 bp, synthetic construct; identical to SEQ ID NO: 13209
  source 1..80: mol_type = other DNA

SEQ ID NO: 37313 - DNA, 80 bp, synthetic construct
  source 1..80: mol_type = other DNA
gatgtgtttcttacagataactatgaacaaaccaggaaggataataacttgtatcccccaattcgaatccagaggatggg

SEQ ID NO: 37314 - DNA, 80 bp, synthetic construct
  source 1..80: mol_type = other DNA
tctaatctgaatgtgaagtattatgttttcatttgcttggtaatgaggaatattggtgctttcgtcccagttctcgagct

SEQ ID NO: 37315 - DNA, 80 bp, synthetic construct
  source 1..80: mol_type = other DNA
agggcagtgagtacttctgattcatccttagcagctaccttcgcgctactttactagatatgttgtagttgaattaatga

SEQ ID NO: 37316 - DNA, 80 bp, synthetic construct; identical to SEQ ID NO: 13210
  source 1..80: mol_type = other DNA

SEQ ID NO: 37317 - DNA, 80 bp, synthetic construct
  source 1..80: mol_type = other DNA
ggcctgtctaggaagagaagagttgcaccctggcaggcagcactgagctgtctcatgcaaagctgaggaagaaagagtga

SEQ ID NO: 37318 - DNA, 80 bp, synthetic construct
  source 1..80: mol_type = other DNA
tcttgactttgaacaaagagctggcttcctgaagtcagctggccgggttttgaagccgattttccagcagtgatctttga

SEQ ID NO: 37319 - DNA, 80 bp, synthetic construct
  source 1..80: mol_type = other DNA
ccaggaagggagaggccagctctgctggggctcctgccgccctggctctgcactgcccttctctggcaggtctgaggcgc

SEQ ID NO: 37320 - DNA, 80 bp, synthetic construct; identical to SEQ ID NO: 13211
  source 1..80: mol_type = other DNA

SEQ ID NO: 37321 - DNA, 80 bp, synthetic construct
  source 1..80: mol_type = other DNA
ctcagaactcagcgaggcccaccccagccacatgcaggtccagttccaggattcaggacacagtgaggcccacccgagcc

SEQ ID NO: 37322 - DNA, 80 bp, synthetic construct
  source 1..80: mol_type = other DNA
ggttcagttccaggtaaatcatctgccttcctccgtccaaaagccttgtttcctgtgtgtccttgtgtttaaaatggaaa

SEQ ID NO: 37323 - DNA, 80 bp, synthetic construct
  source 1..80: mol_type = other DNA
ggcacacagtagggactcaaaatgaaactattgtattgaatacataacagatcaacgggtattgctttctgaaatctttt

SEQ ID NO: 37324 - DNA, 80 bp, synthetic construct; identical to SEQ ID NO: 13212
  source 1..80: mol_type = other DNA

SEQ ID NO: 37325 - DNA, 80 bp, synthetic construct
  source 1..80: mol_type = other DNA
tttgatgatgtcactggaagcatattccacagtcccttgtgaactggccttcctgtgatcagaagcatcagtgaactccc

SEQ ID NO: 37326 - DNA, 80 bp, synthetic construct
  source 1..80: mol_type = other DNA
gttattttcaagtcttctgcttgttaacttaattagagatacatgagtttgcagctgtgctgggcatgccgcagcttggc

SEQ ID NO: 37327 - DNA, 80 bp, synthetic construct
  source 1..80: mol_type = other DNA
ttgtggaataaaatagggtaaaataaggaacaactgaggaaaaaacataaaatttgctttgtgaataaaagttgtcttca

SEQ ID NO: 37328 - DNA, 80 bp, synthetic construct
  source 1..80: mol_type = other DNA
ttcatagactagtctagttctatagtcacaatttataaaatttttttatgtggtaaattgagtgtcttcatagatgtaca

SEQ ID NO: 37329 - DNA, 80 bp, synthetic construct; identical to SEQ ID NO: 13213
  source 1..80: mol_type = other DNA

SEQ ID NO: 37330 - DNA, 80 bp, synthetic construct
  source 1..80: mol_type = other DNA
tgaactatccattcatcttatttgagattttcttaaatctttcagcaagaaagcgggaaaaaaatcctcctctggccttt

SEQ ID NO: 37331 - DNA, 80 bp, synthetic construct
  source 1..80: mol_type = other DNA
gactttggtcacatggccatccattgctttcacaacaaaaatataaatccaacatgtgtgtgtgcatttcataccagtag

SEQ ID NO: 37332 - DNA, 80 bp, synthetic construct; identical to SEQ ID NO: 13214
  source 1..80: mol_type = other DNA

SEQ ID NO: 37333 - DNA, 80 bp, synthetic construct
  source 1..80: mol_type = other DNA
cataaccctatggaaagttgaggaccatctgtatatctggtagggaaagatggataacaaattcataggcaaataataat

SEQ ID NO: 37334 - DNA, 80 bp, synthetic construct
  source 1..80: mol_type = other DNA
aacaggcttttctagagggtaggcctttaagcgtacctcgaagatgcaaaggaagcaaagatgcgaagatctgggctggg

SEQ ID NO: 37335 - DNA, 80 bp, synthetic construct
  source 1..80: mol_type = other DNA
agaaacttgttctaatactgtgtcttaataagtaatatagatttgcccaggcttgtgggcagagtggtatacaccccata

SEQ ID NO: 37336 - DNA, 80 bp, synthetic construct
  source 1..80: mol_type = other DNA
cacagataacttcgtatatccactttcctgaacctgcccctgacagccaagtggagcacaacaacagagatgaacctcaa

SEQ ID NO: 37337 - DNA, 80 bp, synthetic construct; identical to SEQ ID NO: 13215
  source 1..80: mol_type = other DNA

SEQ ID NO: 37338 - DNA, 80 bp, synthetic construct
  source 1..80: mol_type = other DNA
tactttaaaatgcatccaaaggcagactagaggaccatatctgacagacagaaaaatagatatgtgataaggtgaatgta

SEQ ID NO: 37339 - DNA, 80 bp, synthetic construct
  source 1..80: mol_type = other DNA
aagggtaaggcaaaccactagcattttgtatggaacttgatgcaaatacttttaattgtctggttttcaaatgtatagac

SEQ ID NO: 37340 - DNA, 80 bp, synthetic construct; identical to SEQ ID NO: 13216
  source 1..80: mol_type = other DNA

SEQ ID NO: 37341 - DNA, 80 bp, synthetic construct
  source 1..80: mol_type = other DNA
cttatatattttttcaatcttcaaaacatttctgggaggttgtcttagttaattttatgttgctatacccatatcacaga

SEQ ID NO: 37342 - DNA, 80 bp, synthetic construct
  source 1..80: mol_type = other DNA
ggaagagaaaaagcgggtttaactcatccttttatcagggactcactcccgtgatagctaacccattcttacatgaatgg

SEQ ID NO: 37343 - DNA, 80 bp, synthetic construct
  source 1..80: mol_type = other DNA
ttcatatttgaggaaagcatggcacagagagcttggagaagtacttcaaggtcacccaatgaggaagtggctaaacaaaa

SEQ ID NO: 37344 - DNA, 80 bp, synthetic construct
  source 1..80: mol_type = other DNA
gatggaaccaagatcataccttgttttaattagaaaacctagaccaagtcattgtgatcctcatcctagatttcagttaa

SEQ ID NO: 37345 - DNA, 80 bp, synthetic construct; identical to SEQ ID NO: 13217
  source 1..80: mol_type = other DNA

SEQ ID NO: 37346 - DNA, 80 bp, synthetic construct
  source 1..80: mol_type = other DNA
ctgcataaggtctgtttcctcagaatacgtttcccaaagtggaatcatcatgacgtagaatttaagcatacttacttgtt

SEQ ID NO: 37347 - DNA, 80 bp, synthetic construct
  source 1..80: mol_type = other DNA
aatgaagtgcttctaatacttgtgcttttattcatttattcaaaaagtgctaaataagccctgaaggggcttttgggggg

SEQ ID NO: 37348 - DNA, 80 bp, synthetic construct
  source 1..80: mol_type = other DNA
tttggttcagctgagagaaacttgcaagctgacgtccttgattatttaaaatgaaagcagctgcctgttttcatctctct

SEQ ID NO: 37349 - DNA, 80 bp, synthetic construct; identical to SEQ ID NO: 13218
  source 1..80: mol_type = other DNA

SEQ ID NO: 37350 - DNA, 80 bp, synthetic construct
  source 1..80: mol_type = other DNA
aggagagagggactccatcttgtcaactgtcatggttcccatgtgaaagctatcattatcactgaaattgaatgagaaca

SEQ ID NO: 37351 - DNA, 80 bp, synthetic construct
  source 1..80: mol_type = other DNA
tagaatcattcccatggggaaggaacaaagaagcctgtaaaatagaaatgcacatgtaaaaagcattgaagaaagtgcca

SEQ ID NO: 37352 - DNA, 80 bp, synthetic construct
  source 1..80: mol_type = other DNA
tatttcttcactcttaagataatttgggttcaaattatagtccctttacacactctctgcctcaaaaggcccaagactct

SEQ ID NO: 37353 - DNA, 80 bp, synthetic construct
  source 1..80: mol_type = other DNA
tgccttgaaacattaggaactcaagcatacaagattgtatgctggtggtgagggaagtaactgtgcctccgcctgtgctg

SEQ ID NO: 37354 - DNA, 80 bp, synthetic construct; identical to SEQ ID NO: 13219
  source 1..80: mol_type = other DNA

SEQ ID NO: 37355 - DNA, 80 bp, synthetic construct
  source 1..80: mol_type = other DNA
ttgtgaaatttattttttgcctactggagctcttacaggttaatcctgtcttcaagattttcatagaattttcatctacc

SEQ ID NO: 37356 - DNA, 80 bp, synthetic construct
  source 1..80: mol_type = other DNA
tcacaaatttctttgctgtgtcctttagtgagaatttgtattatcagtcactaaagctcactaagttagtaagctttgcg

SEQ ID NO: 37357 - DNA, 80 bp, synthetic construct; identical to SEQ ID NO: 13220
  source 1..80: mol_type = other DNA

SEQ ID NO: 37358 - DNA, 80 bp, synthetic construct
  source 1..80: mol_type = other DNA
cctgggcagaattccacttgaagtgtgtttatttttgctatggcaatgacaagtcttacagagctacaaacgagagtttt

SEQ ID NO: 37359 - DNA, 80 bp, synthetic construct
  source 1..80: mol_type = other DNA
tttttaaaagccctgctttgcaccatttgcctattcccttagtgtaaatactcctactatagctgatttcaaggtaccaa

SEQ ID NO: 37360 - DNA, 80 bp, synthetic construct
  source 1..80: mol_type = other DNA
gcaagacagatacaaagtaattctttttaatttccattttcactggagagtgttgaaccccgtgaggcatgagagcacag

SEQ ID NO: 37361 - DNA, 80 bp, synthetic construct
  source 1..80: mol_type = other DNA
cgtcctagggctccctggacccattttagaccttgagttcttgagttcctcaaaagagaaatcacgcatttatgttttct

SEQ ID NO: 37362 - DNA, 80 bp, synthetic construct; identical to SEQ ID NO: 13221
  source 1..80: mol_type = other DNA

SEQ ID NO: 37363 - DNA, 80 bp, synthetic construct
  source 1..80: mol_type = other DNA
agaagatggcagatactggaatgggaagatttaagcggggtaccagtgtttacatggacatgaaaaaatactgagagata

SEQ ID NO: 37364 - DNA, 80 bp, synthetic construct
  source 1..80: mol_type = other DNA
cagtgaataaactgccagtcttattacctggacctcaaggataaaagacatacagtaaaaatcaacccacattgaggaca

SEQ ID NO: 37365 - DNA, 80 bp, synthetic construct
  source 1..80: mol_type = other DNA
tgaaggatgatagaaaagaagggaaattgattttaaaaaactggagatagcagtgattgtgcctcactgtgcagtgggtt

SEQ ID NO: 37366 - DNA, 80 bp, synthetic construct; identical to SEQ ID NO: 13222
  source 1..80: mol_type = other DNA

SEQ ID NO: 37367 - DNA, 80 bp, synthetic construct
  source 1..80: mol_type = other DNA
gcagttctgacagggaggcagtgctggtaggaaaggggtgtgatgaaaggggtgcccagcagagggagtcatatccggag

SEQ ID NO: 37368 - DNA, 80 bp, synthetic construct
  source 1..80: mol_type = other DNA
gcctggtacaccggttcctacagtgcgcctcacacgctgtctcggagggaggcagcctgtgcgggtgcctggacctccga

SEQ ID NO: 37369 - DNA, 80 bp, synthetic construct; identical to SEQ ID NO: 13223
  source 1..80: mol_type = other DNA

SEQ ID NO: 37370 - DNA, 80 bp, synthetic construct
  source 1..80: mol_type = other DNA
ctctgactgtgcctctgtgctctcctcgccccgccccctgctctctctcaggtctttggtctgttgtccgagctgccaca

SEQ ID NO: 37371 - DNA, 80 bp, synthetic construct
  source 1..80: mol_type = other DNA
cttcctcagttccttgcttctgtgcatccactgaagaagcctgttccactgtttccctgcactgggtctcctgtctgcag

SEQ ID NO: 37372 - DNA, 80 bp, synthetic construct
  source 1..80: mol_type = other DNA
gctgggcattgcttcatgaatcagaggtcaattttttctctattaaagtcacagatgctcattgcaccattgtgagaatg

SEQ ID NO: 37373 - DNA, 80 bp, synthetic construct; identical to SEQ ID NO: 13224
  source 1..80: mol_type = other DNA

SEQ ID NO: 37374 - DNA, 80 bp, synthetic construct
  source 1..80: mol_type = other DNA
attcagattcttcttgtttcgtgtcactctcatatccttttctctaatgaaaagctccgcctgggcatgcaaggtggagc

SEQ ID NO: 37375 - DNA, 80 bp, synthetic construct
  source 1..80: mol_type = other DNA
cagcttaccacatgcatatcatttatgctgtgaccactgactaaaccattctcttccttcctccccatatttctaaattt

SEQ ID NO: 37376 - DNA, 80 bp, synthetic construct
  source 1..80: mol_type = other DNA
gcaccatggcatctctttagcagaacataaatgcgaagagcacatgcatccttcatgggaatttaaaggagctggaaaga

SEQ ID NO: 37377 - DNA, 80 bp, synthetic construct; identical to SEQ ID NO: 13225
  source 1..80: mol_type = other DNA

SEQ ID NO: 37378 - DNA, 80 bp, synthetic construct
  source 1..80: mol_type = other DNA
cccagctggttggcagtgcaggccaccggaggcagatcccctgcagggacagcagagcacttgtgtcctgagaagagctg

SEQ ID NO: 37379 - DNA, 80 bp, synthetic construct
  source 1..80: mol_type = other DNA
tcacacacacagctgggcactgccatggagaggaagtctgtccatgtttccttgaatactggtggcctggtccctgtccc

SEQ ID NO: 37380 - DNA, 80 bp, synthetic construct
  source 1..80: mol_type = other DNA
ctgttctttagagtaagaagtgatcaccatttcctgcttctttgtttctccacaactgtgcagtggatgcctgtttgttt

SEQ ID NO: 37381 - DNA, 80 bp, synthetic construct; identical to SEQ ID NO: 13226
  source 1..80: mol_type = other DNA

SEQ ID NO: 37382 - DNA, 80 bp, synthetic construct
  source 1..80: mol_type = other DNA
catgctgtagcacgtgttaagaatgtccttcctcttcatggctgaataatattccattgtatgttgacactacattttgt

SEQ ID NO: 37383 - DNA, 80 bp, synthetic construct
  source 1..80: mol_type = other DNA
ctttattttacattgcaaaatttcatattatgagatcaaggttagcatttcctcagctgtctggtggacaatggggaggt

SEQ ID NO: 37384 - DNA, 80 bp, synthetic construct
  source 1..80: mol_type = other DNA
gggtaggttcatgcagtaaaaagattcaaatactacagggcattgaactataggccaatatagcattgctttaagaataa

SEQ ID NO: 37385 - DNA, 80 bp, synthetic construct; identical to SEQ ID NO: 13227
  source 1..80: mol_type = other DNA

SEQ ID NO: 37386 - DNA, 80 bp, synthetic construct
  source 1..80: mol_type = other DNA
tggacaagatgtctaaaactcagaaaaatttcacagtgtgcctagcttttatgtttatgttgaagttgggcattagaagt

SEQ ID NO: 37387 - DNA, 80 bp, synthetic construct
  source 1..80: mol_type = other DNA
ctgattgccatgaagagggttaatatccttgctatatcactctgtgaagtcatctttaaaagactaagaaaaagatgaat

SEQ ID NO: 37388 - DNA, 80 bp, synthetic construct; identical to SEQ ID NO: 13228
  source 1..80: mol_type = other DNA

SEQ ID NO: 37389 - DNA, 80 bp, synthetic construct
  source 1..80: mol_type = other DNA
tgaaaatcataagagatgtagaaacatattcttatacaagaattccttgcagccttatttataataaattttgtgaacaa

SEQ ID NO: 37390 - DNA, 80 bp, synthetic construct
  source 1..80: mol_type = other DNA
ctgtatatacatagacttatatgtctatattgattaactctggatgagtctcatgtcttctttttgctttcttctattat

SEQ ID NO: 37391 - DNA, 80 bp, synthetic construct
  source 1..80: mol_type = other DNA
aatagaaatttgaaaattatatgtgagtacagggtaaaaagttgaaagaatgggattgcacgctacagatctagctgctt

SEQ ID NO: 37392 - DNA, 80 bp, synthetic construct; identical to SEQ ID NO: 13229
  source 1..80: mol_type = other DNA

SEQ ID NO: 37393 - DNA, 80 bp, synthetic construct
  source 1..80: mol_type = other DNA
agcacttcgaccttcagacttctcaatactgataaaaagaaaacacgacagatgacaggaaaacctttgcagctataatt

SEQ ID NO: 37394 - DNA, 80 bp, synthetic construct
  source 1..80: mol_type = other DNA
tggtttggagtctagaaggttttatttacaggctatgacttaacaatcccagaacggctgacacatgcagtcactcaaga

SEQ ID NO: 37395 - DNA, 80 bp, synthetic construct
  source 1..80: mol_type = other DNA
caaattcatgaaaaattcttgcttatgtggcccatgtcagtaattactctctgcctcagtttccgcagctgacatgtaaa

SEQ ID NO: 37396 - DNA, 80 bp, synthetic construct
  source 1..80: mol_type = other DNA
aactcaggcccgggaaagggcgtcatcagtttctcatcatttcactgagatatgcatctattacttttacatttcaggcc

SEQ ID NO: 37397 - DNA, 80 bp, synthetic construct; identical to SEQ ID NO: 13230
  source 1..80: mol_type = other DNA

SEQ ID NO: 37398 - DNA, 80 bp, synthetic construct
  source 1..80: mol_type = other DNA
acctcgtctctactaaaaatacaaaaaattagccgggcgtggtggcgggcgcctgtagtcccagctactcgggaggctga

SEQ ID NO: 37399 - DNA, 80 bp, synthetic construct
  source 1..80: mol_type = other DNA
ctgaacacagcacactttcccaggaatggaagacttgctcctgttgacagcagtcaccagacttcttgtttcctctccct

SEQ ID NO: 37400 - DNA, 80 bp, synthetic construct
  source 1..80: mol_type = other DNA
caaaaacggacactatgtccttaagctgaattgtgggggggctgttaggcccttctaaacactacttcccagcaggtatt

SEQ ID NO: 37401 - DNA, 80 bp, synthetic construct; identical to SEQ ID NO: 13231
  source 1..80: mol_type = other DNA

SEQ ID NO: 37402 - DNA, 80 bp, synthetic construct
  source 1..80: mol_type = other DNA
actgcctggtaagatgcccctccagcagcctccctggagcaggctggggctgcacccgccccacccacaccaggacagaa

SEQ ID NO: 37403 - DNA, 80 bp, synthetic construct
  source 1..80: mol_type = other DNA
atgcataacaaagtctctcccagttgaatgcttaaatgatgagatgcctgtgatgtccgtcattaggacctgggcacaga

SEQ ID NO: 37404 - DNA, 80 bp, synthetic construct
  source 1..80: mol_type = other DNA
ctgggttagggcctcctgacacggatccctcggctcctccaccactgctcaggcacctcctgagctgcaccctgccctca

SEQ ID NO: 37405 - DNA, 80 bp, synthetic construct; identical to SEQ ID NO: 13232
  source 1..80: mol_type = other DNA

SEQ ID NO: 37406 - DNA, 80 bp, synthetic construct
  source 1..80: mol_type = other DNA
cctttacacggcattgttctagcaaggctttctgccattcagcaatacattataaaatataccctcaattgtactttata

SEQ ID NO: 37407 - DNA, 80 bp, synthetic construct
  source 1..80: mol_type = other DNA
ataaattatgataggtgggacagtgcacctaagaaaaaaatggactttttagagaagggtctttctgactctgcagaggg

SEQ ID NO: 37408 - DNA, 80 bp, synthetic construct; identical to SEQ ID NO: 13233
  source 1..80: mol_type = other DNA

SEQ ID NO: 37409 - DNA, 80 bp, synthetic construct
  source 1..80: mol_type = other DNA
gtgtttgccttgcttggaggaggcgaccctgtgcccgtccaggcacacaggcgaggggaggggctggcttgctaccgagg

SEQ ID NO: 37410 - DNA, 80 bp, synthetic construct
  source 1..80: mol_type = other DNA
gccgtgggcatgccactgtttagtgcttgtgccaagcaggtatttaatacaccgaaatcagagagtctatcagaagacct

SEQ ID NO: 37411 - DNA, 80 bp, synthetic construct
  source 1..80: mol_type = other DNA
tgtgacataaaataattcctgacagagaaagcaaaactttgtctaatgaaagagttttagaagccactcttgatctctag

SEQ ID NO: 37412 - DNA, 80 bp, synthetic construct; identical to SEQ ID NO: 13234
  source 1..80: mol_type = other DNA

SEQ ID NO: 37413 - DNA, 80 bp, synthetic construct
  source 1..80: mol_type = other DNA
ggattgtctgaggtcaggagtttgggaccagcctggccaacagggtgaaacctcgtctctactaaaaatacaaaaattag

SEQ ID NO: 37414 - DNA, 80 bp, synthetic construct
  source 1..80: mol_type = other DNA
gaagacatagagctcctaaaaataacgcagaagtctgctattaatacaaatgaattactttaaaggtgagagcaggtgga

SEQ ID NO: 37415 - DNA, 80 bp, synthetic construct
  source 1..80: mol_type = other DNA
ttgaacgggattccttctctatttgcaacctttcattctttgtccttaaagtaaataaagccaaaggaggatggagcctt

SEQ ID NO: 37416 - DNA, 80 bp, synthetic construct
  source 1..80: mol_type = other DNA
cgtgcgtccgagcctgtggggccgacagctatgagatggaggaagacggcgtccgcaagtgtaagaagtgcgaagggcct

SEQ ID NO: 37417 - DNA, 80 bp, synthetic construct; identical to SEQ ID NO: 13235
  source 1..80: mol_type = other DNA

SEQ ID NO: 37418 - DNA, 80 bp, synthetic construct
  source 1..80: mol_type = other DNA
gggaaataatgaggagaacgcaaggtcagtgtgaggtgacagggatggcatctcctacaccgccgtagccccaaagtgta

SEQ ID NO: 37419 - DNA, 80 bp, synthetic construct
  source 1..80: mol_type = other DNA
atgtgaacggaatacacgtctctcttatctctgcagtgtgtaacggaataggtattggtgaatttaaagactcactctcc

SEQ ID NO: 37420 - DNA, 80 bp, synthetic construct; identical to SEQ ID NO: 13236
  source 1..80: mol_type = other DNA

SEQ ID NO: 37421 - DNA, 80 bp, synthetic construct
  source 1..80: mol_type = other DNA
aaattttaccgttaatggctgatgttttgatatttttcaaaagtgcagtttctcctgcaggcaaaaggggacacgttaag

SEQ ID NO: 37422 - DNA, 80 bp, synthetic construct
  source 1..80: mol_type = other DNA
cgcctgagctccgcttccttcctctctaaaatgggaagattagaccaaaataacaagactgttttaaggttggaatcaaa

SEQ ID NO: 37423 - DNA, 80 bp, synthetic construct
  source 1..80: mol_type = other DNA
cctgcgcatgtacactcagagaagatgataatgaaaaagaaagcaaatccaattttcccacttactgttcatataataca

SEQ ID NO: 37424 - DNA, 80 bp, synthetic construct; identical to SEQ ID NO: 13237
  source 1..80: mol_type = other DNA

SEQ ID NO: 37425 - DNA, 80 bp, synthetic construct
  source 1..80: mol_type = other DNA
cttctgtgtccactccagatcccacattgcacttagttgtcaaatcttttcagtccatttctaacctatattagctcctg

SEQ ID NO: 37426 - DNA, 80 bp, synthetic construct
  source 1..80: mol_type = other DNA
catcttatcacagggaccagagagactttttagcaccactcttcaagaatttccactttttcagctttgacagtggaata

SEQ ID NO: 37427 - DNA, 80 bp, synthetic construct; identical to SEQ ID NO: 13238
  source 1..80: mol_type = other DNA

SEQ ID NO: 37428 - DNA, 80 bp, synthetic construct
  source 1..80: mol_type = other DNA
caagataagggttacttacttttcacatttaatgagaagtctggtgattccagctcctactgagacagggtggccacacg

SEQ ID NO: 37429 - DNA, 80 bp, synthetic construct
  source 1..80: mol_type = other DNA
aaagatgggggaaagaagagcagcagggagaggagaagcctctggatgatactctaaccccctgccatccaacacctgaa

SEQ ID NO: 37430 - DNA, 80 bp, synthetic construct
  source 1..80: mol_type = other DNA
gctagaggttctcacacccatcgtggtctggcagaggctggtggttctcacacccatcgtggtccggcaggggcttagtg

SEQ ID NO: 37431 - DNA, 80 bp, synthetic construct; identical to SEQ ID NO: 13239
  source 1..80: mol_type = other DNA

SEQ ID NO: 37432 - DNA, 80 bp, synthetic construct
  source 1..80: mol_type = other DNA
accagatcaagcgtcctggagaggaggaaacatatttaacctgcacagaatttgggacagagaacctctagtgtttgttc

SEQ ID NO: 37433 - DNA, 80 bp, synthetic construct
  source 1..80: mol_type = other DNA
catcctccccatctgccactgggttaaagatactaaataaacaaggaactatcttttgcctggaggaactttaaaaacac

SEQ ID NO: 37434 - DNA, 80 bp, synthetic construct
  source 1..80: mol_type = other DNA
ttataatttttcaccacatgatttttcttctctccaatgtagtggtcagttttctcttgcagtcgtcagcctgaacataa

SEQ ID NO: 37435 - DNA, 80 bp, synthetic construct
  source 1..80: mol_type = other DNA
cagtaagtcaccgctttctgtttagtttatggagttggttctaatgggtcctttatttgtatttagaatattgaagggct

SEQ ID NO: 37436 - DNA, 80 bp, synthetic construct; identical to SEQ ID NO: 13240
  source 1..80: mol_type = other DNA

SEQ ID NO: 37437 - DNA, 80 bp, synthetic construct
  source 1..80: mol_type = other DNA
tgtttaggctttggcttcctcatccatagaatggagatatgaatgattcctacgccgtagtgctttgagagaattcagtg

SEQ ID NO: 37438 - DNA, 80 bp, synthetic construct; identical to SEQ ID NO: 13241
  source 1..80: mol_type = other DNA

SEQ ID NO: 37439 - DNA, 80 bp, synthetic construct
  source 1..80: mol_type = other DNA
cagcatgtctgtgtcacccaaggtcatggagcacagggcccctcccgggaaggtgccgtctcctccggcccctcgggtcc

SEQ ID NO: 37440 - DNA, 80 bp, synthetic construct
  source 1..80: mol_type = other DNA
caaccttctggaggggtaggaggttatttctttaatccccttgcgttgatcaaaaataaggctccaggttgttgttatag

SEQ ID NO: 37441 - DNA, 80 bp, synthetic construct
  source 1..80: mol_type = other DNA
tttgcccttggcttttggaggttttgggttttctgtggggagacgggaagttgtttgattgcgttatttttggcaaattt

SEQ ID NO: 37442 - DNA, 80 bp, synthetic construct
  source 1..80: mol_type = other DNA
tgggcttttctttgtagtgcccgattcctggtgtgtgaaaataaattaacacaaattatattgccaagttaatatctgtt

SEQ ID NO: 37443 - DNA, 80 bp, synthetic construct; identical to SEQ ID NO: 13242
  source 1..80: mol_type = other DNA

SEQ ID NO: 37444 - DNA, 80 bp, synthetic construct
  source 1..80: mol_type = other DNA
ataggctcagaacaaatcacataattgatagtgctgcttcaacttcaagtaaggaatattgatgcaatccttacagctac

SEQ ID NO: 37445 - DNA, 80 bp, synthetic construct
  source 1..80: mol_type = other DNA
ggcagtgacccagagaagaagcacagaagacacaaccctgtatcacattttgtttaatggtgccattgaccaaaggggag

SEQ ID NO: 37446 - DNA, 80 bp, synthetic construct
  source 1..80: mol_type = other DNA
tgcaccaccatgtccagctaattttttgtagttttagtagagacggggtttcaccacgttggccaggctggtctcaaact

SEQ ID NO: 37447 - DNA, 80 bp, synthetic construct; identical to SEQ ID NO: 13243
  source 1..80: mol_type = other DNA

SEQ ID NO: 37448 - DNA, 80 bp, synthetic construct
  source 1..80: mol_type = other DNA
ggtattagaggcagggaacacctcctcaggactatcttttcttttatcatttggcttgcttacccaatatgcaaaaacta

SEQ ID NO: 37449 - DNA, 80 bp, synthetic construct
  source 1..80: mol_type = other DNA
ggagtcccaactccttgaccattacctcaagttatttggaattttgaagaggtgatttgtgttcctgcaataatgtctca

SEQ ID NO: 37450 - DNA, 80 bp, synthetic construct
  source 1..80: mol_type = other DNA
catgggaagggccttcacagaagccgaacagtgatgatggcccagggcatcctgtgtgggcaggacggccatcagagcca

SEQ ID NO: 37451 - DNA, 80 bp, synthetic construct; identical to SEQ ID NO: 13244
  source 1..80: mol_type = other DNA

SEQ ID NO: 37452 - DNA, 80 bp, synthetic construct
  source 1..80: mol_type = other DNA
tatgagtgagaattcgggcccctctcacaccaaatgtcctgatgttgttaattctcaatgttattatatagggagctctg

SEQ ID NO: 37453 - DNA, 80 bp, synthetic construct
  source 1..80: mol_type = other DNA
tgttgggttaaatttctgtcattaaaataattggcgatattgacatagtcatctaattatgctggctctgggcacacaca

SEQ ID NO: 37454 - DNA, 80 bp, synthetic construct; identical to SEQ ID NO: 13245
  source 1..80: mol_type = other DNA

SEQ ID NO: 37455 - DNA, 80 bp, synthetic construct
  source 1..80: mol_type = other DNA
atggttttgccaaggaaagatgcccacaatggttaagcagaatgcaataatgtagagaatatcatttctttcatgctggt

SEQ ID NO: 37456 - DNA, 80 bp, synthetic construct
  source 1..80: mol_type = other DNA
acttccattttgaaagagaaaagaaagagacatgcatgaacatttttctccaccttggtgcagggaccagacaactgtat

SEQ ID NO: 37457 - DNA, 80 bp, synthetic construct
  source 1..80: mol_type = other DNA
gaacagaacatttcctctcttgcaaattcagagatcaaaaatgtctcccaagttttccggcaacaaattgccgaggtttg

SEQ ID NO: 37458 - DNA, 80 bp, synthetic construct; identical to SEQ ID NO: 13246
  source 1..80: mol_type = other DNA

SEQ ID NO: 37459 - DNA, 80 bp, synthetic construct
  source 1..80: mol_type = other DNA
agaccaggctggccaacatggtgaaaccccacctctactaaaaatacacctgtagtcccagctactcaggaggctgaggc

SEQ ID NO: 37460 - DNA, 80 bp, synthetic construct
  source 1..80: mol_type = other DNA
atcccactcaacaatcagaaagagaagttgagctgtcatatagtagttcacacttacttctgtttctcaaaatcctcagc

SEQ ID NO: 37461 - DNA, 80 bp, synthetic construct
  source 1..80: mol_type = other DNA
atgtcatatacttaaaatggtgcctggaaaatggtgaatactgagtcaatgatagcatcattgatggtgggatggtgatg

SEQ ID NO: 37462 - DNA, 80 bp, synthetic construct; identical to SEQ ID NO: 13247
  source 1..80: mol_type = other DNA

SEQ ID NO: 37463 - DNA, 80 bp, synthetic construct
  source 1..80: mol_type = other DNA
gggtggtgatgatgatgaggaggtgggagtcacaatggtgtcagtgttgatggtccgatggtgatgaggaggtgggagtc

SEQ ID NO: 37464 - DNA, 80 bp, synthetic construct
  source 1..80: mol_type = other DNA
cggtggtgatggtggtgaggaggtgggagtcacaatggtggtggtggtgatggtggtgatggtggtgaggaggtgggagt

SEQ ID NO: 37465 - DNA, 80 bp, synthetic construct
  source 1..80: mol_type = other DNA
gtggtgatgatggtgttactggtggtgacgaggtgggagtcacaatggtggtggtggtgatggtggtgaggaggtgggag

SEQ ID NO: 37466 - DNA, 80 bp, synthetic construct; identical to SEQ ID NO: 13248
  source 1..80: mol_type = other DNA

SEQ ID NO: 37467 - DNA, 80 bp, synthetic construct
  source 1..80: mol_type = other DNA
tttccagaataatatcagacataatgacagtggacatcagagcttggcatctaaaggtaatgggaatagctctaatgtct

SEQ ID NO: 37468 - DNA, 80 bp, synthetic construct
  source 1..80: mol_type = other DNA
aaatatttccctgggaacaatgtaagattcttcatattttcgcctttgggtataccaacatgccagctctgttggccact

SEQ ID NO: 37469 - DNA, 80 bp, synthetic construct
  source 1..80: mol_type = other DNA
tgcatcagtatctctgcatcaatatctctatatcagtatctctgtgtcagtgagcatatgttgctgggcttaggggaggt

SEQ ID NO: 37470 - DNA, 80 bp, synthetic construct; identical to SEQ ID NO: 13249
  source 1..80: mol_type = other DNA

SEQ ID NO: 37471 - DNA, 80 bp, synthetic construct
  source 1..80: mol_type = other DNA
cacctgtgtcttctcccaaagccattaattatataggaattacacgatagaaatgggtttaatttttaaaatacggccaa

SEQ ID NO: 37472 - DNA, 80 bp, synthetic construct
  source 1..80: mol_type = other DNA
tattgttaaagaaacacttacaggggtttctttaacaacttgtgaacagcagcatcagagcccagactacagcataagca

SEQ ID NO: 37473 - DNA, 80 bp, synthetic construct
  source 1..80: mol_type = other DNA
tgcaacctccacctcccaggttcaagcaattctcctgcttcagcctcccgagtagctgggattacagacacctgccacca

SEQ ID NO: 37474 - DNA, 80 bp, synthetic construct
  source 1..80: mol_type = other DNA
ggaactgtgttttcatagtacacggtgaggagaaagttgctttgaaatctttatcctaataaaccaaataatatgaaaat

SEQ ID NO: 37475 - DNA, 80 bp, synthetic construct; identical to SEQ ID NO: 13250
  source 1..80: mol_type = other DNA

SEQ ID NO: 37476 - DNA, 80 bp, synthetic construct
  source 1..80: mol_type = other DNA
acagcttcttgttagcaatccctatggttgcccaaaagcattttcagagcctgcataagactgcatcttgtagaaaattt

SEQ ID NO: 37477 - DNA, 80 bp, synthetic construct
  source 1..80: mol_type = other DNA
gtatattccacccctacgaagcctgtgtgtttggtttatgaactaagctcaaaagcaccacaggggtaagactgcagtac

SEQ ID NO: 37478 - DNA, 80 bp, synthetic construct; identical to SEQ ID NO: 13251
  source 1..80: mol_type = other DNA

SEQ ID NO: 37479 - DNA, 80 bp, synthetic construct
  source 1..80: mol_type = other DNA
gcctggccttctgcatctgtgatcatcacggcctcctcctgccactgagcctcatgccttcacgtgtctgttccccccgc

SEQ ID NO: 37480 - DNA, 80 bp, synthetic construct
  source 1..80: mol_type = other DNA
ccaggactgacctcttcctcctcgctgccagatgattgttcaaagcacagaatttgtcagaaacctgcagggactccatg

SEQ ID NO: 37481 - DNA, 80 bp, synthetic construct
  source 1..80: mol_type = other DNA
atgtgaaaacatctcaataacaaactggctgctttgttcaatgctagaacaacgcctgtcacagagtagaaactcaaaaa

SEQ ID NO: 37482 - DNA, 80 bp, synthetic construct; identical to SEQ ID NO: 13252
  source 1..80: mol_type = other DNA

SEQ ID NO: 37483 - DNA, 80 bp, synthetic construct
  source 1..80: mol_type = other DNA
ctggttccacgtggctccacgtgccaactttgtcctcagtggagggaaagttggacacacagtgctggggctgctccctg

SEQ ID NO: 37484 - DNA, 80 bp, synthetic construct
  source 1..80: mol_type = other DNA
tccagcataggggagtgtttctccttgctttctttcccagacacactgcccagcaaaggcaaaagggcttccttcaacat

SEQ ID NO: 37485 - DNA, 80 bp, synthetic construct
  source 1..80: mol_type = other DNA
acatgaaccaaacttccaggcccctctgccatctctggtaacatttacaaagtcccttcctcaccactgcccttccttca

SEQ ID NO: 37486 - DNA, 80 bp, synthetic construct; identical to SEQ ID NO: 13253
  source 1..80: mol_type = other DNA

SEQ ID NO: 37487 - DNA, 80 bp, synthetic construct
  source 1..80: mol_type = other DNA
cagtctgaggctgcatgatgacatcactcatcacaatgatgctttctatgtctgaatcctattcctttataacccctttc

SEQ ID NO: 37488 - DNA, 80 bp, synthetic construct
  source 1..80: mol_type = other DNA
tccatgtgtatggactatggcacttcaattgcatggaaatactcttggaatgaacaaaataccaatccatgaaaaagcat

SEQ ID NO: 37489 - DNA, 80 bp, synthetic construct
  source 1..80: mol_type = other DNA
ccttagaagcctgttttttctccttttagaagctacatagtgtctcactttccaagatcattctacaagatgtcagtgca

SEQ ID NO: 37490 - DNA, 80 bp, synthetic construct
  source 1..80: mol_type = other DNA
ggggccctcctcttgctgctggtggtggccctggggatcggcctcttcatgcgaaggcgccacatcgttcggaagcgcac

SEQ ID NO: 37491 - DNA, 80 bp, synthetic construct; identical to SEQ ID NO: 13254
  source 1..80: mol_type = other DNA

SEQ ID NO: 37492 - DNA, 80 bp, synthetic construct
  source 1..80: mol_type = other DNA
gctttggaaaacaccattgtccacacagtggctttgtccatgatggacttcgccacagcccagtcctgtgctggaagcca

SEQ ID NO: 37493 - DNA, 80 bp, synthetic construct
  source 1..80: mol_type = other DNA
cagttaaagaacacctgtatcagagcctgtgtttctaccaacttctgtcaagctctgtagagaaggcgtacatttgtcct

SEQ ID NO: 37494 - DNA, 80 bp, synthetic construct
  source 1..80: mol_type = other DNA
cacccagtggagaagctcccaaccaagctctcttgaggatcttgaaggaaactgaattcaaaaagatcaaagtgctgggc

SEQ ID NO: 37495 - DNA, 80 bp, synthetic construct; identical to SEQ ID NO: 13255
  source 1..80: mol_type = other DNA

SEQ ID NO: 37496 - DNA, 80 bp, synthetic construct
  source 1..80: mol_type = other DNA
ttcagttaggcctagacgcagcatcattaaattctggatgaaatgatccacacggactttataacaggctttacaagctt

SEQ ID NO: 37497 - DNA, 80 bp, synthetic construct
  source 1..80: mol_type = other DNA
actgggcagcatgtggcaccatctcacaattgccagttaacgtcttccttctctctctgtcatagggactctggatccca

SEQ ID NO: 37498 - DNA, 80 bp, synthetic construct; identical to SEQ ID NO: 13256
  source 1..80: mol_type = other DNA

SEQ ID NO: 37499 - DNA, 80 bp, synthetic construct
  source 1..80: mol_type = other DNA
ttttttggatgaagaaatggaggcataaagaaattggctgacccttatatggctgggatagggtttaagccccttgttat

SEQ ID NO: 37500 - DNA, 80 bp, synthetic construct
  source 1..80: mol_type = other DNA
tgttgattgttactttgtggaataagttcttggaaaattccacaagattattgttatcttcttactaccaattctattga

SEQ ID NO: 37501 - DNA, 80 bp, synthetic construct
  source 1..80: mol_type = other DNA
tcaggcagcggactagggaagcagaatcgaggaaaaggaaaaatggctgacttattacctcaaaactctagagaatttag

SEQ ID NO: 37502 - DNA, 80 bp, synthetic construct
  source 1..80: mol_type = other DNA
gggcagcttttcttccttttattatagtaggggaaatcccatgttgatatacttctaaatgaaagatgatgaattgatat

SEQ ID NO: 37503 - DNA, 80 bp, synthetic construct; identical to SEQ ID NO: 13257
  source 1..80: mol_type = other DNA

SEQ ID NO: 37504 - DNA, 80 bp, synthetic construct
  source 1..80: mol_type = other DNA
taattggaggaaatatgcttctgtggagttggaaatggggtagaagatagataaggtcaaggcttaaaagttaagtgcac

SEQ ID NO: 37505 - DNA, 80 bp, synthetic construct
  source 1..80: mol_type = other DNA
tactgagacccagtctctacaaaaaataaaaaattagctgggtgtggtgtctcatgcctgtagtcccagccactcaggag

SEQ ID NO: 37506 - DNA, 80 bp, synthetic construct
  source 1..80: mol_type = other DNA
aatatagatacctatatatatctgaatatagatatctatatatactctgtatatagttatttagatatataaatatatat

SEQ ID NO: 37507 - DNA, 80 bp, synthetic construct; identical to SEQ ID NO: 13258
  source 1..80: mol_type = other DNA

SEQ ID NO: 37508 - DNA, 80 bp, synthetic construct
  source 1..80: mol_type = other DNA
caatcctggcgggcagggcaccacactgggatggagagggggaagctggaggaggcactttctggtaaagaaagcaaaag

SEQ ID NO: 37509 - DNA, 80 bp, synthetic construct
  source 1..80: mol_type = other DNA
cacagccggcacacacactgcagccccagttccatgttgctagcagtggcttagtgaatgagtaaagttcttaaaatgca

SEQ ID NO: 37510 - DNA, 80 bp, synthetic construct
  source 1..80: mol_type = other DNA
tacggtagagccattcacagatgagagagacaagccagaaggaaggaaccaaaagtcatgtcagcagttaggacaaaata

SEQ ID NO: 37511 - DNA, 80 bp, synthetic construct
  source 1..80: mol_type = other DNA
tgcacgtttactacttccaagacaaacagccgagaacaaagctcgctttagcttctgcgtacaccgaacgggacacacga

SEQ ID NO: 37512 - DNA, 80 bp, synthetic construct; identical to SEQ ID NO: 13259
  source 1..80: mol_type = other DNA

SEQ ID NO: 37513 - DNA, 80 bp, synthetic construct
  source 1..80: mol_type = other DNA
tagggtaggcaatggaagggaacgcaaaacagatttctaggtgtactgtgtgtgtgtctcccacgtctaaagtctgttaa

SEQ ID NO: 37514 - DNA, 80 bp, synthetic construct
  source 1..80: mol_type = other DNA
tcagacaaaatacgcttcctggccctgtccagttctgactttttataaacaagcacttatccaagttaaagggatatttt

SEQ ID NO: 37515 - DNA, 80 bp, synthetic construct; identical to SEQ ID NO: 13260
  source 1..80: mol_type = other DNA

SEQ ID NO: 37516 - DNA, 80 bp, synthetic construct
  source 1..80: mol_type = other DNA
tgaccaagccgttctttcctcaaaaacttggtggggagggtatttttaaaatcacacaaatatttaagtacagattatga

SEQ ID NO: 37517 - DNA, 80 bp, synthetic construct
  source 1..80: mol_type = other DNA
gctgctttctgaaggaaaaactgcaagataccaggagagtttcatttagattgaagagtcgaggaaggctcctctgagaa

SEQ ID NO: 37518 - DNA, 80 bp, synthetic construct
  source 1..80: mol_type = other DNA
gggcagggtttagggcaaggaaagcgtgtgagcatatttgtattttagtaaatatttacagtttgccctccatgtctgca

SEQ ID NO: 37519 - DNA, 80 bp, synthetic construct; identical to SEQ ID NO: 13261
  source 1..80: mol_type = other DNA

SEQ ID NO: 37520 - DNA, 80 bp, synthetic construct
  source 1..80: mol_type = other DNA
cacttctgcagagaaactaacttgcccaagtccacactcaaaacataggcattgctgagatgtgaaaagcagctgtggat

SEQ ID NO: 37521 - DNA, 80 bp, synthetic construct
  source 1..80: mol_type = other DNA
atttagcttcctcagcccaagaatagcagaagggttaaaataaagtctgtatttatggctctgtcaaaggaaggcccctg

SEQ ID NO: 37522 - DNA, 80 bp, synthetic construct
  source 1..80: mol_type = other DNA
ctgtccatttcaaaacctgggactggtctattgaaagagcttatccagctactctttgcagaggtgctgtgggcagggtc

SEQ ID NO: 37523 - DNA, 80 bp, synthetic construct; identical to SEQ ID NO: 13262
  source 1..80: mol_type = other DNA

SEQ ID NO: 37524 - DNA, 80 bp, synthetic construct
  source 1..80: mol_type = other DNA
ctgtgctaggtcttttgcaggcacagcttttcctccatgagtacgtattttgaaactcaagatcgcattcatgcgtcttc

SEQ ID NO: 37525 - DNA, 80 bp, synthetic construct
  source 1..80: mol_type = other DNA
acgcagctcatgcccttcggctgcctcctggactatgtccgggaacacaaagacaatattggctcccagtacctgctcaa

SEQ ID NO: 37526 - DNA, 80 bp, synthetic construct
  source 1..80: mol_type = other DNA
tgtgtgtgcgtgcatgcagcacacacacattcctttattttggattcaatcaagttgatcttcttgtgcacaaatcagtg

SEQ ID NO: 37527 - DNA, 80 bp, synthetic construct; identical to SEQ ID NO: 13263
  source 1..80: mol_type = other DNA

SEQ ID NO: 37528 - DNA, 80 bp, synthetic construct
  source 1..80: mol_type = other DNA
gctaagtgtccccctttccacaggctcgctccagagccagggcggggctgagagagcagagtggtcaggtagccctgcct

SEQ ID NO: 37529 - DNA, 80 bp, synthetic construct
  source 1..80: mol_type = other DNA
ggtatacatttcatcccattgactttaaaggatttgcaggcaggccctgtctctgagaatacgccgttgcccgtcatctc

SEQ ID NO: 37530 - DNA, 80 bp, synthetic construct
  source 1..80: mol_type = other DNA
caggcagatgtaaaaggtgacctacaagaagacaaacaaaaacatctggagcgctcttatgccagcatctgcccttgaca

SEQ ID NO: 37531 - DNA, 80 bp, synthetic construct
  source 1..80: mol_type = other DNA
atatctcagctgcagccacaggcggcccccagcaccccaggaagtggggagcgctcatgcttctctgagcacaaaaatca

SEQ ID NO: 37532 - DNA, 80 bp, synthetic construct; identical to SEQ ID NO: 13264
  source 1..80: mol_type = other DNA

SEQ ID NO: 37533 - DNA, 80 bp, synthetic construct
  source 1..80: mol_type = other DNA
caggcccctctcctttctcttaataaagataccagtcattgagtttgaaaattgctaagagagtctgttgtaaatcttct

SEQ ID NO: 37534 - DNA, 80 bp, synthetic construct
  source 1..80: mol_type = other DNA
ccaggatgatttcatttcaagacttttaactagatttgcaaaaccccatttccaaataaggtcacattctgcagttttgg

SEQ ID NO: 37535 - DNA, 80 bp, synthetic construct; identical to SEQ ID NO: 13265
  source 1..80: mol_type = other DNA

SEQ ID NO: 37536 - DNA, 80 bp, synthetic construct
  source 1..80: mol_type = other DNA
gttttccttaaggggcacgtagtcttggcaggtttcgctcaatataggatgagctcaggactccagtggactgtggattc

SEQ ID NO: 37537 - DNA, 80 bp, synthetic construct
  source 1..80: mol_type = other DNA
gctgatccccactgagtgttcttttcctcctttgatcccctttggctgacctaggttggagcagccactaaaatataccc

SEQ ID NO: 37538 - DNA, 80 bp, synthetic construct
  source 1..80: mol_type = other DNA
ggtttatttgaccccaaaaattagccttctacaaacgaatataatagtgtccattacagagaataaacttagtgcgtgtc

SEQ ID NO: 37539 - DNA, 80 bp, synthetic construct; identical to SEQ ID NO: 13266
  source 1..80: mol_type = other DNA

SEQ ID NO: 37540 - DNA, 80 bp, synthetic construct
  source 1..80: mol_type = other DNA
cacttagtggctgaccagaaactaaactcctggcatcctcaaaatgggatttattggcttataaatgtcctgtgttgact

SEQ ID NO: 37541 - DNA, 80 bp, synthetic construct
  source 1..80: mol_type = other DNA
aactagacaaaaggaaaaaggaaaaaaaacagaggtgtcttgggaggaatccatatgagaccagtagaccatgagagaga

SEQ ID NO: 37542 - DNA, 80 bp, synthetic construct
  source 1..80: mol_type = other DNA
ttagacttaagaaagcctgtctactcttcctgggatttacaagccagctagtaaatcccagaataaatcacacggcacag

SEQ ID NO: 37543 - DNA, 80 bp, synthetic construct; identical to SEQ ID NO: 13267
  source 1..80: mol_type = other DNA

SEQ ID NO: 37544 - DNA, 80 bp, synthetic construct
  source 1..80: mol_type = other DNA
gaacatcaaagaaaacgtcaaaggctcctttttacaagtacgtgggctacttaatttggtccaagtccattttaaaaagc

SEQ ID NO: 37545 - DNA, 80 bp, synthetic construct
  source 1..80: mol_type = other DNA
cactcaggcctattcctaggtgccaggtcacgaaaaccacgctgacagatcgtgctgtgtgcgtgtcatagcacacaagc

SEQ ID NO: 37546 - DNA, 80 bp, synthetic construct
  source 1..80: mol_type = other DNA
ccaggtttgctccctcccctcatggctttcccatcctcagatgaggactcggcagagcctacccctgctgactaactgtg

SEQ ID NO: 37547 - DNA, 80 bp, synthetic construct; identical to SEQ ID NO: 13268
  source 1..80: mol_type = other DNA

SEQ ID NO: 37548 - DNA, 80 bp, synthetic construct
  source 1..80: mol_type = other DNA
agagcaggaggcgcagctatagtgaggccaccatgcaaggcacagggagggtgagctccaagtttgaatggaatgggtct

SEQ ID NO: 37549 - DNA, 80 bp, synthetic construct
  source 1..80: mol_type = other DNA
gcacttgagggtggggaagtgactctgactgggagatgctgaggacagggaggaaaccaccagataagggacactgggga

SEQ ID NO: 37550 - DNA, 80 bp, synthetic construct
  source 1..80: mol_type = other DNA
gggtgctatctctacataaactcattccaccctctgattaatccattctacatatggggaaacaaaggcatgcggtgttt

SEQ ID NO: 37551 - DNA, 80 bp, synthetic construct; identical to SEQ ID NO: 13269
  source 1..80: mol_type = other DNA

SEQ ID NO: 37552 - DNA, 80 bp, synthetic construct
  source 1..80: mol_type = other DNA
catcccttacctctaccagttgcaggtgggtctctggggtggggctgccctccccaccagcaccccaagggctaaaaggt

SEQ ID NO: 37553 - DNA, 80 bp, synthetic construct
  source 1..80: mol_type = other DNA
cccaggggaagggtgatggtggtcttggtctcagcatggttctggtagaggtgggttattttgaagatgatgaaccttaa

SEQ ID NO: 37554 - DNA, 80 bp, synthetic construct
  source 1..80: mol_type = other DNA
acttccttcctaagtcactgctccatgagctcttccacaggagatttacaaaatagaacacaaacaatccagttcccgcc

SEQ ID NO: 37555 - DNA, 80 bp, synthetic construct
  source 1..80: mol_type = other DNA
agttccaggctggcttttcaaatccccttttaacctcagtgctgtatttcaaaattcattccagttttcctgtagtaatt

SEQ ID NO: 37556 - DNA, 80 bp, synthetic construct; identical to SEQ ID NO: 13270
  source 1..80: mol_type = other DNA

SEQ ID NO: 37557 - DNA, 80 bp, synthetic construct
  source 1..80: mol_type = other DNA
gtcaagtctcctctaagttcacatgggattctctccttgtcccaaagctgtctctgacttaaaaccctccaactgattac

SEQ ID NO: 37558 - DNA, 80 bp, synthetic construct
  source 1..80: mol_type = other DNA
tagattgacagagtgacgcggacttccccagaggcacgggaccaaggtgcatgctcacgctgtctcatgctctcacacat

SEQ ID NO: 37559 - DNA, 80 bp, synthetic construct
  source 1..80: mol_type = other DNA
ggcaattaaagccatggtcccagtagtggtcttggggtctcagggtatttggtctgtgcagccacatgcttcagtctctg

SEQ ID NO: 37560 - DNA, 80 bp, synthetic construct; identical to SEQ ID NO: 13271
  source 1..80: mol_type = other DNA

SEQ ID NO: 37561 - DNA, 80 bp, synthetic construct
  source 1..80: mol_type = other DNA
gctcaacagctaccacagaggacgccttcaacaaatgtgaagaacgaacaaaaggtacaaatgtgaagaacgaacagggt

SEQ ID NO: 37562 - DNA, 80 bp, synthetic construct
  source 1..80: mol_type = other DNA
gctgagcctaactctccctttcgaatgggcaggagttcatgatatttaataaacagaggccttgctctgtaagagacagg

SEQ ID NO: 37563 - DNA, 80 bp, synthetic construct
  source 1..80: mol_type = other DNA
tctccctttccacccaccatcctgacataatacttcctaatctggaagtgttgtccagagaagaacctgctcatttcctc

SEQ ID NO: 37564 - DNA, 80 bp, synthetic construct; identical to SEQ ID NO: 13272
  source 1..80: mol_type = other DNA

SEQ ID NO: 37565 - DNA, 80 bp, synthetic construct
  source 1..80: mol_type = other DNA
aaaacttgggaatccatccacatctacagcttttccctgcagtcacactacagtgggatccctccatacaggagcggcag

SEQ ID NO: 37566 - DNA, 80 bp, synthetic construct
  source 1..80: mol_type = other DNA
aaacaataataagaagtctgcagaacttgacccctcccagcctctcccacctgccagcctggcccttgcagagagatgca

SEQ ID NO: 37567 - DNA, 80 bp, synthetic construct
  source 1..80: mol_type = other DNA
tcagggtagcatttctaggaattcactctgttgggcgctgtgctggctgcttctcacatattattcctttcttactctca

SEQ ID NO: 37568 - DNA, 80 bp, synthetic construct
  source 1..80: mol_type = other DNA
gtgaaaagtaaaacaggacaaaaatcttcataggcagtgaaccatatcagagagtccaagaaagcacaatgagagtgtgg

SEQ ID NO: 37569 - DNA, 80 bp, synthetic construct; identical to SEQ ID NO: 13273
  source 1..80: mol_type = other DNA

SEQ ID NO: 37570 - DNA, 80 bp, synthetic construct
  source 1..80: mol_type = other DNA
agcagggtcttctctgtttcagggcatgaactacttggaggaccgtcgcttggtgcaccgcgacctggcagccaggaacg

SEQ ID NO: 37571 - DNA, 80 bp, synthetic construct
  source 1..80: mol_type = other DNA
actagctgtattgtttaacacatgcaggggaggatgctctccagacattctgggtgagctcgcagcagctgctgctggca

SEQ ID NO: 37572 - DNA, 80 bp, synthetic construct; identical to SEQ ID NO: 13274
  source 1..80: mol_type = other DNA

SEQ ID NO: 37573 - DNA, 80 bp, synthetic construct
  source 1..80: mol_type = other DNA
ggtttcactctggcctgcttggctcctagcagccaccaacccatgatgctgggccctgaaaacacacgcagacctggatg

SEQ ID NO: 37574 - DNA, 80 bp, synthetic construct
  source 1..80: mol_type = other DNA
tctggctcgtctgtgtgtgtcactcgtaattaggtccagagtgagttaactttttccaacagagggaaactaatagttgt

SEQ ID NO: 37575 - DNA, 80 bp, synthetic construct
  source 1..80: mol_type = other DNA
gatgctaatgagtttgtactgaggccaagctggcttttattgttagttaatttacattatatcctctgacatgcaagtat

SEQ ID NO: 37576 - DNA, 80 bp, synthetic construct; identical to SEQ ID NO: 13275
  source 1..80: mol_type = other DNA

SEQ ID NO: 37577 - DNA, 80 bp, synthetic construct
  source 1..80: mol_type = other DNA
ttgcttctcgctctcgggaggaccatctggtccggccctggggattctctgtttcctcttctgaatcccagtgttgccca

SEQ ID NO: 37578 - DNA, 80 bp, synthetic construct
  source 1..80: mol_type = other DNA
ggtccttgaatttcacccagcaacttactgaaaggctggaacccatgaacctaccccttcactgaggaaaataagttacc

SEQ ID NO: 37579 - DNA, 80 bp, synthetic construct
  source 1..80: mol_type = other DNA
ttctttttcctatagcattattaactttctgattttccaaatacatacacatttttaaatttcctgagtctttatctctt

SEQ ID NO: 37580 - DNA, 80 bp, synthetic construct; identical to SEQ ID NO: 13276
  source 1..80: mol_type = other DNA

SEQ ID NO: 37581 - DNA, 80 bp, synthetic construct
  source 1..80: mol_type = other DNA
tgccctgtcacccaggctggagtgcagtggtgcagtctcggctcactgcaacctccacctcccgggttcaagtgattctc

SEQ ID NO: 37582 - DNA, 80 bp, synthetic construct
  source 1..80: mol_type = other DNA
tttttaactttatcagacttttcattctctgctcaacatctttctttggtcctccaggtatgttcagataaaacctgagc

SEQ ID NO: 37583 - DNA, 80 bp, synthetic construct
  source 1..80: mol_type = other DNA
gccttgatgtggtcacacccattctcaggaagtccgttcccactgaaaacattgtgtgttttcaacatcattgaggctgc

SEQ ID NO: 37584 - DNA, 80 bp, synthetic construct; identical to SEQ ID NO: 13277
  source 1..80: mol_type = other DNA

SEQ ID NO: 37585 - DNA, 80 bp, synthetic construct
  source 1..80: mol_type = other DNA
agttaaactgactgcatagatctggaaatgagacagtctttcttttacaaatccatatagactatgagttgggggcaggg

SEQ ID NO: 37586 - DNA, 80 bp, synthetic construct
  source 1..80: mol_type = other DNA
ggttctaaaattatcactgctttcacttgtttttaaccatcatagttgtttgattttgaaggaaaaacatgagggttttt

SEQ ID NO: 37587 - DNA, 80 bp, synthetic construct
  source 1..80: mol_type = other DNA
cagggattaagcctagtacccattagttatttttcctgatcctctccctcctcccatcctccaccgtcctatagacccca

SEQ ID NO: 37588 - DNA, 80 bp, synthetic construct
  source 1..80: mol_type = other DNA
tcttttgtggctgcctagtgttccatggtgtatatgtaccacattttctttatccagtctgtcattgatgggcatttagg

SEQ ID NO: 37589 - DNA, 80 bp, synthetic construct; identical to SEQ ID NO: 13278
  source 1..80: mol_type = other DNA

SEQ ID NO: 37590 - DNA, 80 bp, synthetic construct
  source 1..80: mol_type = other DNA
tcatgtcctttgcccactttttaatgggattgtttaattttttcttgtgaatttacttaagttccttatagatgctggtt

SEQ ID NO: 37591 - DNA, 80 bp, synthetic construct
  source 1..80: mol_type = other DNA
atcatgaaatcttagcccattcctatatccagaatggtattacctaggttgtcttccagggtttttatagtttggggttt

SEQ ID NO: 37592 - DNA, 80 bp, synthetic construct
  source 1..80: mol_type = other DNA
tggttgtaggtgtgcagccttatttctgggctctctattctgtttcattggtctgtatgtctgtttctgtactagtacca

SEQ ID NO: 37593 - DNA, 80 bp, synthetic construct; identical to SEQ ID NO: 13279
  source 1..80: mol_type = other DNA

SEQ ID NO: 37594 - DNA, 80 bp, synthetic construct
  source 1..80: mol_type = other DNA
ttggttctcagcttgactgttgttggcatattggaatgctaattatttttgtacattgattttgtacaactgagtcttca

SEQ ID NO: 37595 - DNA, 80 bp, synthetic construct
  source 1..80: mol_type = other DNA
aatactatgttaaataggagtgttgagagagggaatccttgtcttgtgtcaattttcaaggggaatgttttcaacttttg

SEQ ID NO: 37596 - DNA, 80 bp, synthetic construct
  source 1..80: mol_type = other DNA
tctgtttgtgtggtgaatcacatttattgatttgcatatgttgaaccaatcttgcatcccagggatgaagccgacttgat

SEQ ID NO: 37597 - DNA, 80 bp, synthetic construct; identical to SEQ ID NO: 13280
  source 1..80: mol_type = other DNA

SEQ ID NO: 37598 - DNA, 80 bp, synthetic construct
  source 1..80: mol_type = other DNA
ttccaatttttttatgatctaaaaatgtgcagtttacagccctgttcagaatctgcatcttcctcattctgcagatacag

SEQ ID NO: 37599 - DNA, 80 bp, synthetic construct
  source 1..80: mol_type = other DNA
ttgctgggcattgcactaagcatttcagttgtattatcttgttgggtccttacagcaatcctgtgaaacagatactgcta

SEQ ID NO: 37600 - DNA, 80 bp, synthetic construct
  source 1..80: mol_type = other DNA
ttcttgcttcatcctctcaggggtgactgtttgggagttgatgacctttggatccaagccatatgacggaatccctgcca

SEQ ID NO: 37601 - DNA, 80 bp, synthetic construct; identical to SEQ ID NO: 13281
  source 1..80: mol_type = other DNA

SEQ ID NO: 37602 - DNA, 80 bp, synthetic construct
  source 1..80: mol_type = other DNA
cgctgagttactcaatgaaataccgagttgccctatattttgaagcctgttaccagagagactgaatgtttttaaatgca

SEQ ID NO: 37603 - DNA, 80 bp, synthetic construct
  source 1..80: mol_type = other DNA
ttcacgagtgcagtgggctctggaggtagcattacatgcatgggatgagcatttgcaaaagaaagttgtatagggaatat

SEQ ID NO: 37604 - DNA, 80 bp, synthetic construct; identical to SEQ ID NO: 13282
  source 1..80: mol_type = other DNA

SEQ ID NO: 37605 - DNA, 80 bp, synthetic construct
  source 1..80: mol_type = other DNA
ccgggggtaggggcccagtcccaaccccaaattctttaaagcctatttttctaagttgcatctggtttcctacctgaagg

SEQ ID NO: 37606 - DNA, 80 bp, synthetic construct
  source 1..80: mol_type = other DNA
attattgttattctgattcaaatgtacagtgctggcatggtctttaaacagtaaccagtactagctggccaagacagaaa

SEQ ID NO: 37607 - DNA, 80 bp, synthetic construct
  source 1..80: mol_type = other DNA
tttctcattccttccccaggctggatgatagacgcagatagtcgcccaaagttccgtgagttgatcatcgaattctccaa

SEQ ID NO: 37608 - DNA, 80 bp, synthetic construct
  source 1..80: mol_type = other DNA
gcgcattagagcaagcctcagtaaggcgcaggccacatcgtgaactaagcagcatccgtgagtggggcccacccaactcc

SEQ ID NO: 37609 - DNA, 80 bp, synthetic construct; identical to SEQ ID NO: 13283
  source 1..80: mol_type = other DNA

SEQ ID NO: 37610 - DNA, 80 bp, synthetic construct
  source 1..80: mol_type = other DNA
ttcctcagaagctatttgaatctcatgtaggggctttcaagcatcaaaggatggttcatgttttattttaaggcacccac

SEQ ID NO: 37611 - DNA, 80 bp, synthetic construct
  source 1..80: mol_type = other DNA
ggaatagcatctctacgggccattctaatagcctcaaaatctctgcaccagggggatgaaagaatgcatttgccaagtcc

SEQ ID NO: 37612 - DNA, 80 bp, synthetic construct
  source 1..80: mol_type = other DNA
ctctctctcaagctgtgtctactcatttgaacaaattgaattttagggaaaataaccatctagtgaaactcacatggata

SEQ ID NO: 37613 - DNA, 80 bp, synthetic construct; identical to SEQ ID NO: 13284
  source 1..80: mol_type = other DNA

SEQ ID NO: 37614 - DNA, 80 bp, synthetic construct
  source 1..80: mol_type = other DNA
acctaaataattttaacccagataatcttgagttttcttcctgtgtgggtttttccctgcacggctgtcacgcctcacag

SEQ ID NO: 37615 - DNA, 80 bp, synthetic construct
  source 1..80: mol_type = other DNA
gttgaagtgtgaggccgtggtctagaccgcactgtgccatgcagaaaccactagccacatgtggctacttcaacttaaat

SEQ ID NO: 37616 - DNA, 80 bp, synthetic construct; identical to SEQ ID NO: 13285
  source 1..80: mol_type = other DNA

SEQ ID NO: 37617 - DNA, 80 bp, synthetic construct
  source 1..80: mol_type = other DNA
cagtgcctggtgagtggcttgtctggaaacagtcctgctcctcaacctcctcgacccactcagcagcagccagtctccag

SEQ ID NO: 37618 - DNA, 80 bp, synthetic construct
  source 1..80: mol_type = other DNA
tctgcaaaatttctagcttatgaagcaaatcacggacatacacatctgtgtgtgtgagtgttcatgatgtgtgtacatct

SEQ ID NO: 37619 - DNA, 80 bp, synthetic construct
  source 1..80: mol_type = other DNA
acacacatatacacacacatacacatacacacatatacacacaccacacacatacacagacaccacacacataccataca

SEQ ID NO: 37620 - DNA, 80 bp, synthetic construct; identical to SEQ ID NO: 13286
  source 1..80: mol_type = other DNA

SEQ ID NO: 37621 - DNA, 80 bp, synthetic construct
  source 1..80: mol_type = other DNA
cgccacacacacaccacaaaaaccgcacacacatacaaacatatacacactacaccacacatacacacacacaccacaca

SEQ ID NO: 37622 - DNA, 80 bp, synthetic construct
  source 1..80: mol_type = other DNA
gatttagatatatataaaacatatgttatatatatgttgatgtaatatctaatatctatatatctaatatgtagtttatt

SEQ ID NO: 37623 - DNA, 80 bp, synthetic construct
  source 1..80: mol_type = other DNA
taatataatataaacagattatcaatattataagctattagaaaaatgcaagttaaggcagatgatatacctctttacac

SEQ ID NO: 37624 - DNA, 80 bp, synthetic construct; identical to SEQ ID NO: 13287
  source 1..80: mol_type = other DNA

SEQ ID NO: 37625 - DNA, 80 bp, synthetic construct
  source 1..80: mol_type = other DNA
cacacacaccacacatacacacacgtacacacaccacacacacaccacagacacacaccacacatacatacacatacaca

SEQ ID NO: 37626 - DNA, 80 bp, synthetic construct
  source 1..80: mol_type = other DNA
atacacacacgtacacacacaccacacacacccacatgcacacaccacacacacatacaaatatacaccacacacacata

SEQ ID NO: 37627 - DNA, 80 bp, synthetic construct
  source 1..80: mol_type = other DNA
caaggcagtttatcctctgagaactttaaatttacaaaagacacatatgtccattactttgagaaggacaggaaagaacc

SEQ ID NO: 37628 - DNA, 80 bp, synthetic construct
  source 1..80: mol_type = other DNA
atacataaaccagtccgttcccaaaaggcccgctggctctgtgcagaatcctgtctatcacaatcagcctctgaaccccg

SEQ ID NO: 37629 - DNA, 80 bp, synthetic construct; identical to SEQ ID NO: 13288
  source 1..80: mol_type = other DNA

SEQ ID NO: 37630 - DNA, 80 bp, synthetic construct
  source 1..80: mol_type = other DNA
tttgcaacgtttacaccgactagccaggaagtacttccacctcgggcacattttgggaagttgcattcctttgtcttcaa

SEQ ID NO: 37631 - DNA, 80 bp, synthetic construct
  source 1..80: mol_type = other DNA
ggggatcttggagtttttcattgtcgctattgatttttacttcaatgggctcttccaacaaggaagaagcttgctggtag

SEQ ID NO: 37632 - DNA, 80 bp, synthetic construct
  source 1..80: mol_type = other DNA
tactgtatcaagtcatggcaggtacagtaggataagccactctgtcccttcctgggcaaagaagaaacggaggggatgga

SEQ ID NO: 37633 - DNA, 80 bp, synthetic construct; identical to SEQ ID NO: 13289
  source 1..80: mol_type = other DNA

SEQ ID NO: 37634 - DNA, 80 bp, synthetic construct
  source 1..80: mol_type = other DNA
aaaaatgaagctgctctgaaatctcctttagccatcaccccaaccccccaaaattagtttgtgttacttatggaagatag

SEQ ID NO: 37635 - DNA, 80 bp, synthetic construct
  source 1..80: mol_type = other DNA
tcatctattcaagcacttacagctctggccacaacagggcattttacaggtgcgaatgacagtagcattatgagtagtgt

SEQ ID NO: 37636 - DNA, 80 bp, synthetic construct; identical to SEQ ID NO: 13290
  source 1..80: mol_type = other DNA

SEQ ID NO: 37637 - DNA, 80 bp, synthetic construct
  source 1..80: mol_type = other DNA
atgttccttttgcttttaaagtaatttttgactcccagatcagtcagagcccctacagcattgttaagaaagtatttgat

SEQ ID NO: 37638 - DNA, 80 bp, synthetic construct
  source 1..80: mol_type = other DNA
ccctgattctaagaaattcacaatttagcaaaggaaatggactcatagatgctaaccttaaaacaacgtgacaaatgcca

SEQ ID NO: 37639 - DNA, 80 bp, synthetic construct
  source 1..80: mol_type = other DNA
agctgccagaggcctccactgctaaagtccacataaggctgaggtcagtcaccctaaacaacctgctccctctaagccag

SEQ ID NO: 37640 - DNA, 80 bp, synthetic construct; identical to SEQ ID NO: 13291
  source 1..80: mol_type = other DNA

SEQ ID NO: 37641 - DNA, 80 bp, synthetic construct
  source 1..80: mol_type = other DNA
ctattaattttaagattgtgcttcccaaaatagttctcacttcatctgtccagggaggcacagttctgtctggtagaagc

SEQ ID NO: 37642 - DNA, 80 bp, synthetic construct
  source 1..80: mol_type = other DNA
taataccctacagaaagcctgtccattggctgtttcttcctcagtcagttcctggaagaccttaccccatgaccccagct

SEQ ID NO: 37643 - DNA, 80 bp, synthetic construct
  source 1..80: mol_type = other DNA
agtcttctaaactctatattcgctgtgagtccaggttgtaagggggagcactgtggatgcatcctattgcactccagctg

SEQ ID NO: 37644 - DNA, 80 bp, synthetic construct
  source 1..80: mol_type = other DNA
agactgtggcttgattttctcaggtgcagcccagccgtagggccttttcagagcaccccctggttattgcaacattcatc

SEQ ID NO: 37645 - DNA, 80 bp, synthetic construct; identical to SEQ ID NO: 13292
  source 1..80: mol_type = other DNA

SEQ ID NO: 37646 - DNA, 80 bp, synthetic construct
  source 1..80: mol_type = other DNA
gattcccatgtgcagtggagagaacaatctgcagtcactgataagcctgagacttggctcatttcaaaagcgttcaattc

SEQ ID NO: 37647 - DNA, 80 bp, synthetic construct
  source 1..80: mol_type = other DNA
gccctcaatgtctactctgcatttctttcttgtgataagcacacacttttattgcaacataatgatctgctcacatttcc

SEQ ID NO: 37648 - DNA, 80 bp, synthetic construct
  source 1..80: mol_type = other DNA
tatgtagcactgaactttgtacaatatatttttagaaactcatttttctactaaaacaaacacagtttactttagagaga

SEQ ID NO: 37649 - DNA, 80 bp, synthetic construct; identical to SEQ ID NO: 13293
  source 1..80: mol_type = other DNA

SEQ ID NO: 37650 - DNA, 80 bp, synthetic construct
  source 1..80: mol_type = other DNA
atatgcatttaccagtataaactagacatgtctggagagcctaataatgttcagcacactttggttagttcaccaacagt

SEQ ID NO: 37651 - DNA, 80 bp, synthetic construct
  source 1..80: mol_type = other DNA
tctctggggctgaaacccaagcattcgtagtttttaaagctcctgaggtcattccaatgtgcggccaaagttgagaacta

SEQ ID NO: 37652 - DNA, 80 bp, synthetic construct; identical to SEQ ID NO: 13294
  source 1..80: mol_type = other DNA

SEQ ID NO: 37653 - DNA, 80 bp, synthetic construct
  source 1..80: mol_type = other DNA
ctatcagttacattacaaaaggcagatttcaagaggattgagtaagtagttggatggctttcataaaaacaagaattcaa

SEQ ID NO: 37654 - DNA, 80 bp, synthetic construct
  source 1..80: mol_type = other DNA
gcagaagcactaagaagctccaccctatcacctagcagataaaactatggggaaaacttaaatctgtgcatacatttctg

SEQ ID NO: 37655 - DNA, 80 bp, synthetic construct
  source 1..80: mol_type = other DNA
tctcttggaaattaagagatcctatggatttgatgactggtattagaggtgacaatgtaaccgattaacaacagacagca

SEQ ID NO: 37656 - DNA, 80 bp, synthetic construct
  source 1..80: mol_type = other DNA
tgcattgagtattaaaaaattagatgtatattattcattgttctttactcctgagtaccttataataataataatgtatt

SEQ ID NO: 37657 - DNA, 80 bp, synthetic construct
  source 1..80: mol_type = other DNA
agccgctcgccagcgccgctgccccagctagcaggaccaaccgcgccgccaggccggccatcctttctccctggctcgcc

SEQ ID NO: 37658 - DNA, 80 bp, synthetic construct
  source 1..80: mol_type = other DNA
tatatcgaggcgatagggttaagggaaggcggacgcctgatgggttaatgagcaaactgaagtgttttccatgatctttt

SEQ ID NO: 37659 - DNA, 80 bp, synthetic construct
  source 1..80: mol_type = other DNA
gcctctacttttgcctcttccaacctgcgctccattttgaaaaattaaaatttgcccatatcactttttttttcttaaaa

SEQ ID NO: 37660 - DNA, 80 bp, synthetic construct
  source 1..80: mol_type = other DNA
tccctcaagcttcctgactgcctggcctggtctgaatcactcactcttcttttttcttctagtcgcaattgaagtaccac

SEQ ID NO: 37661 - DNA, 80 bp, synthetic construct; identical to SEQ ID NO: 13295
  source 1..80: mol_type = other DNA

SEQ ID NO: 37662 - DNA, 80 bp, synthetic construct
  source 1..80: mol_type = other DNA
tgggggttggaatgagtaagaagtagcctgggattccattcactcacttaacaaacatttctgagtccttagctctagca

SEQ ID NO: 37663 - DNA, 80 bp, synthetic construct; identical to SEQ ID NO: 13296
  source 1..80: mol_type = other DNA

SEQ ID NO: 37664 - DNA, 80 bp, synthetic construct
  source 1..80: mol_type = other DNA
acatttaggattaaagaggatgaaatcctgacaaaatagggagtctcccctttagaaaattcctaagtaaggctgggggt

SEQ ID NO: 37665 - DNA, 80 bp, synthetic construct
  source 1..80: mol_type = other DNA
ggcggacggatcacctgaggttaggagtttgagaccagcctgaccaacatggagaaaccccatctctactaaaaatacaa

SEQ ID NO: 37666 - DNA, 80 bp, synthetic construct; identical to SEQ ID NO: 13297
  source 1..80: mol_type = other DNA

SEQ ID NO: 37667 - DNA, 80 bp, synthetic construct
  source 1..80: mol_type = other DNA
ctcactctttcacctagactgaagtgcagtggcatgatcacgactcactgcaacctcaacctcccagactcaagtgatcc

SEQ ID NO: 37668 - DNA, 80 bp, synthetic construct
  source 1..80: mol_type = other DNA
gggattacgggcgtgagccatgccacacggccataaaatattaattttcgcagctttcttatattttagaactaacaatg

SEQ ID NO: 37669 - DNA, 80 bp, synthetic construct
  source 1..80: mol_type = other DNA
tgagaatttccctgccagcacagccccagataacaatctctagatggcgattacctggcctctcttcccaactttctagc

SEQ ID NO: 37670 - DNA, 80 bp, synthetic construct; identical to SEQ ID NO: 13298
  source 1..80: mol_type = other DNA

SEQ ID NO: 37671 - DNA, 80 bp, synthetic construct
  source 1..80: mol_type = other DNA
ttcaaaaaaaaaaaaaaaagtatagtgtgctaaaggctcaacggcaagctgaccatgttcttagatcaaaattggtagag

SEQ ID NO: 37672 - DNA, 80 bp, synthetic construct
  source 1..80: mol_type = other DNA
tggctcacatctgtaatcccagcactgtgggaggccaaggcaggcggatcatgagatcaggagatcgagaccatcctagc

SEQ ID NO: 37673 - DNA, 80 bp, synthetic construct
  source 1..80: mol_type = other DNA
agcctggtgacagagcgagactccatctacattaaaaaaaaaaatatatatatatatatatacacacacacacacacaca

SEQ ID NO: 37674 - DNA, 80 bp, synthetic construct; identical to SEQ ID NO: 13299
  source 1..80: mol_type = other DNA

SEQ ID NO: 37675 - DNA, 80 bp, synthetic construct
  source 1..80: mol_type = other DNA
caggtgtgtgccaccacatccggctaatttttgtattttttagtagagacagggcttcaccatgttggtaaggctgtctt

SEQ ID NO: 37676 - DNA, 80 bp, synthetic construct
  source 1..80: mol_type = other DNA
cttatatacagtaccccatgtgaagaaaaataagggtacgtgttatgcgcgtagtattatggttgttatttttgagaata

SEQ ID NO: 37677 - DNA, 80 bp, synthetic construct
  source 1..80: mol_type = other DNA
tagctcactgcaacctctgcctcccaggttcaagcgattctgctgcctcagcctcctgagtagctgggattataggcatg

SEQ ID NO: 37678 - DNA, 80 bp, synthetic construct; identical to SEQ ID NO: 13300
  source 1..80: mol_type = other DNA

SEQ ID NO: 37679 - DNA, 80 bp, synthetic construct
  source 1..80: mol_type = other DNA
tgggaggctgaggtgggagacttgcttgaacctaggaggcagagattgcagtgagccaagactgtaccactgcactccag

SEQ ID NO: 37680 - DNA, 80 bp, synthetic construct
  source 1..80: mol_type = other DNA
cacctctgccacccccaaaatagcaagaccaaccccatctcttttcctttctcttccccctcctcagcctactcaatgtg

SEQ ID NO: 37681 - DNA, 80 bp, synthetic construct
  source 1..80: mol_type = other DNA
gtaaatggactgtttgctattgataagtattctggtaaacagtagactattagttttttttgttttgtgacaaggtctcc

SEQ ID NO: 37682 - DNA, 80 bp, synthetic construct
  source 1..80: mol_type = other DNA
tgtaatcccagctactcaggaggctgaggcaggagaattgcttgaacccgggaggcagaggttgcagtgagctgagattg

SEQ ID NO: 37683 - DNA, 80 bp, synthetic construct; identical to SEQ ID NO: 13301
  source 1..80: mol_type = other DNA

SEQ ID NO: 37684 - DNA, 80 bp, synthetic construct
  source 1..80: mol_type = other DNA
aatccgggacacggaggttgcagtgagccgacatcatgccactgcgctccagcctgggtgacagtgagactctgtctcag

SEQ ID NO: 37685 - DNA, 80 bp, synthetic construct
  source 1..80: mol_type = other DNA
aataataataaaacatttactttggctgctgttgctgcggggagaattgcagggtgtcaaaagtagcactggtggagggg

SEQ ID NO: 37686 - DNA, 80 bp, synthetic construct; identical to SEQ ID NO: 13302
  source 1..80: mol_type = other DNA

SEQ ID NO: 37687 - DNA, 80 bp, synthetic construct
  source 1..80: mol_type = other DNA
ctcaaaggttcctcgtctcctcttccttggaccaaaagtcagaggcaagaatgccctcattcataccccagtggtctata

SEQ ID NO: 37688 - DNA, 80 bp, synthetic construct
  source 1..80: mol_type = other DNA
aggggtcactgtccctataccaaatccgaaaatattgtgaccaggaaccattctgtccaactcttctatttcaggtggca

SEQ ID NO: 37689 - DNA, 80 bp, synthetic construct
  source 1..80: mol_type = other DNA
tactgttgtggacatgcacaaaagtgaggtgagtcgcaggacagaagagtgctttttgtttcagcagagcagcctgggga

SEQ ID NO: 37690 - DNA, 80 bp, synthetic construct; identical to SEQ ID NO: 13303
  source 1..80: mol_type = other DNA

SEQ ID NO: 37691 - DNA, 80 bp, synthetic construct
  source 1..80: mol_type = other DNA
tttgttttcagtcctctgaccccaagctggctggtgaagtaggtagagggaggagactttggtgcatgcatacacacaca

SEQ ID NO: 37692 - DNA, 80 bp, synthetic construct
  source 1..80: mol_type = other DNA
gcctgttgacttagaggtcaccctcggaagctagagccctgtcctgcctcttcagtgtcagtggtcactccactgcccac

SEQ ID NO: 37693 - DNA, 80 bp, synthetic construct
  source 1..80: mol_type = other DNA
tgtctttgtccctcagacatcctctttcctgggctctcctgccaggccctgctggagggacagttaaggaggaaatcgaa

SEQ ID NO: 37694 - DNA, 80 bp, synthetic construct
  source 1..80: mol_type = other DNA
cccccatccccactccagccccctctccagcttgctccaccctctctaccgcccaccgggactgggcattgtctgccagt

SEQ ID NO: 37695 - DNA, 80 bp, synthetic construct; identical to SEQ ID NO: 13304
  source 1..80: mol_type = other DNA

SEQ ID NO: 37696 - DNA, 80 bp, synthetic construct
  source 1..80: mol_type = other DNA
tcctgactggactaacctttccggacacaacagcagggcaggggtggggcctggggagaaaggacacctctaaccctgat

SEQ ID NO: 37697 - DNA, 80 bp, synthetic construct
  source 1..80: mol_type = other DNA
tgggctggatgatggggtgagagtaaggggtcagttttgatacatgcccaacttttctctctagccctaagacatcctgg

SEQ ID NO: 37698 - DNA, 80 bp, synthetic construct; identical to SEQ ID NO: 13305
  source 1..80: mol_type = other DNA

SEQ ID NO: 37699 - DNA, 80 bp, synthetic construct
  source 1..80: mol_type = other DNA
gccttcccgagtagctgggattacaggcatgcgccaccatgcccggctaattttgtgtttttagtagagacagggtttct

SEQ ID NO: 37700 - DNA, 80 bp, synthetic construct
  source 1..80: mol_type = other DNA
aatggagtcttactctgtcacccaggctggagtgcagtggcaagatctcagctcactgcaacctctgccctctgagttca

SEQ ID NO: 37701 - DNA, 80 bp, synthetic construct
  source 1..80: mol_type = other DNA
agtgctgggattacaggcatgagccgccatactcggccaactttgtattactttcttaaagagagtttcccaaattatat

SEQ ID NO: 37702 - DNA, 80 bp, synthetic construct; identical to SEQ ID NO: 13306
  source 1..80: mol_type = other DNA

SEQ ID NO: 37703 - DNA, 80 bp, synthetic construct
  source 1..80: mol_type = other DNA
ggactacaggcacccgccaccacacctggctaattttttgtatttttagcagagacagggtttcaccgtgttagccagga

SEQ ID NO: 37704 - DNA, 80 bp, synthetic construct
  source 1..80: mol_type = other DNA
cctgtcccacaagaggtgcctgctttaagtgtgctcagcacatggaagcaagtttagaaatgcaagtgtatacctgtaaa

SEQ ID NO: 37705 - DNA, 80 bp, synthetic construct
  source 1..80: mol_type = other DNA
gatcccttcttgaccagtatagctgcattcttggctggggcattccaactagaactgccaaatttagcacataaaaataa

SEQ ID NO: 37706 - DNA, 80 bp, synthetic construct; identical to SEQ ID NO: 13307
  source 1..80: mol_type = other DNA

SEQ ID NO: 37707 - DNA, 80 bp, synthetic construct
  source 1..80: mol_type = other DNA
aggatcacctgaggttgggagttcaagaccagcctcaccaacgtggagaaaccctgtctttactaaaaatacaaaaaatt

SEQ ID NO: 37708 - DNA, 80 bp, synthetic construct
  source 1..80: mol_type = other DNA
agtcctttcgatgtgactgtctcctcccaaatttgtagaccctcttaagatcatgcttttcagatacttcaaagattcca

SEQ ID NO: 37709 - DNA, 80 bp, synthetic construct
  source 1..80: mol_type = other DNA
atgtggtgggaaaaccattatttgatattaaaacaaataggcttgggatggagtaggatgcaagctccccaggaaagttt

SEQ ID NO: 37710 - DNA, 80 bp, synthetic construct; identical to SEQ ID NO: 13308
  source 1..80: mol_type = other DNA

SEQ ID NO: 37711 - DNA, 80 bp, synthetic construct
  source 1..80: mol_type = other DNA
gccccttcccacggggccctttactgcgccgcgcgcccggcccccacccctcgcagcaccccgcgccccgcgccctccca

SEQ ID NO: 37712 - DNA, 80 bp, synthetic construct
  source 1..80: mol_type = other DNA
tgccctgtggatgccccgccgaggtcccgcggccggcggggccagaggggcccggacgagctctcctatcccgaagttgt

SEQ ID NO: 37713 - DNA, 80 bp, synthetic construct
  source 1..80: mol_type = other DNA
ctccgggaacttgtcaaagaagttctctgaaattgttcagaaagttttcccgcaaagggtgtattgcgtagagcgcgcgc

SEQ ID NO: 37714 - DNA, 80 bp, synthetic construct
  source 1..80: mol_type = other DNA
gttgctcctgcttctggcggggtcgggtgtgtgtgtgtgtggtggagtggagggtggcatagcaacctgtcccaaccaga

SEQ ID NO: 37715 - DNA, 80 bp, synthetic construct; identical to SEQ ID NO: 13309
  source 1..80: mol_type = other DNA

SEQ ID NO: 37716 - DNA, 80 bp, synthetic construct
  source 1..80: mol_type = other DNA
tatactctgccaggaactgtttgtggtgttttgcatgcattctcctttaatcctagaacacccctatagtggaagttctg

SEQ ID NO: 37717 - DNA, 80 bp, synthetic construct
  source 1..80: mol_type = other DNA
agtgcacctggagcaatgagggacactgctccctgagtcactgggctgcaggggagacaaaatgaaagtgttctgggagt

SEQ ID NO: 37718 - DNA, 80 bp, synthetic construct; identical to SEQ ID NO: 13310
  source 1..80: mol_type = other DNA

SEQ ID NO: 37719 - DNA, 80 bp, synthetic construct
  source 1..80: mol_type = other DNA
gtgaggccatactgagctgtcaggctgagctgctgcccttcctcaccttgggctgggagttgatcagggaatggcagttg

SEQ ID NO: 37720 - DNA, 80 bp, synthetic construct
  source 1..80: mol_type = other DNA
gttggatgtgattacacgtgcctgtagtcccagctactccggaggctgaggcaggaggatcacctgagcccaggaagttg

SEQ ID NO: 37721 - DNA, 80 bp, synthetic construct
  source 1..80: mol_type = other DNA
gggagccccagaggggtcaggatttttctgaaatcctttcttagaggtatgggttttacaaattgcagcaaatacatcct

SEQ ID NO: 37722 - DNA, 80 bp, synthetic construct
  source 1..80: mol_type = other DNA
caaagtcaaacacaaagcatgtttaattttctcgtggtttgggattacccatattcctgctgtatgaacctgtcttgtct

SEQ ID NO: 37723 - DNA, 80 bp, synthetic construct; identical to SEQ ID NO: 13311
  source 1..80: mol_type = other DNA

SEQ ID NO: 37724 - DNA, 80 bp, synthetic construct
  source 1..80: mol_type = other DNA
cagccaatgcctgtcttccttttgggccctaccagcatgacagggggctgcgggcaggaggggacagaggccacgttgac

SEQ ID NO: 37725 - DNA, 80 bp, synthetic construct
  source 1..80: mol_type = other DNA
gaagcccctctagagtgacatctccatcttatgtttggccacccatcctccccctgggaagagagccgaggtggggtaag

SEQ ID NO: 37726 - DNA, 80 bp, synthetic construct; identical to SEQ ID NO: 13312
  source 1..80: mol_type = other DNA

SEQ ID NO: 37727 - DNA, 80 bp, synthetic construct
  source 1..80: mol_type = other DNA
gtctgggagagctgagctttggggacacaggtcattttactgtagtattcatggaaaccaagggaagtattggcttttct

SEQ ID NO: 37728 - DNA, 80 bp, synthetic construct
  source 1..80: mol_type = other DNA
tgtgaccagctctgagcagagagatggattccatgacctcaactggtcccttttgttcggagactcgtgactggacttca

SEQ ID NO: 37729 - DNA, 80 bp, synthetic construct
  source 1..80: mol_type = other DNA
tcctggagacaaggacactcctgggtagaattaggacctaccccccaggaaatcaacggggaccaggtgccgtggctcac

SEQ ID NO: 37730 - DNA, 80 bp, synthetic construct
  source 1..80: mol_type = other DNA
gaggcaggagaattgcttgaacccgggaggcagaggttgcagtgagccgagattgcgccactgcactccagcctggcgac

SEQ ID NO: 37731 - DNA, 80 bp, synthetic construct; identical to SEQ ID NO: 13313
  source 1..80: mol_type = other DNA

SEQ ID NO: 37732 - DNA, 80 bp, synthetic construct
  source 1..80: mol_type = other DNA
ttagtgtgtatttatgttggcgtggggtgtggggtggatttgtgtgtgtgcagttaggcctagtggaaggaatgtgggat

SEQ ID NO: 37733 - DNA, 80 bp, synthetic construct
  source 1..80: mol_type = other DNA
ggcacacagtaggtgctcagctcagttactgtggcggcccccactccccattgttgttgttttcctattgcctggcggcc

SEQ ID NO: 37734 - DNA, 80 bp, synthetic construct; identical to SEQ ID NO: 13314
  source 1..80: mol_type = other DNA

SEQ ID NO: 37735 - DNA, 80 bp, synthetic construct
  source 1..80: mol_type = other DNA
ccaccagtttgtggccactggccactggcccaggcagggaacctgggggcttgccctaccagcctctcccagcaatctga

SEQ ID NO: 37736 - DNA, 80 bp, synthetic construct
  source 1..80: mol_type = other DNA
ggcagctcaggcacctgtgggcctgagggtgccctctgcccccacccttccgatctcctgggcaagacacgccaggtgat

SEQ ID NO: 37737 - DNA, 80 bp, synthetic construct
  source 1..80: mol_type = other DNA
ggctggggtccaagtgggccaggtgtggcagttcagccctatgccccatggctgatggctcgcgctgggcaggtatgcag

SEQ ID NO: 37738 - DNA, 80 bp, synthetic construct
  source 1..80: mol_type = other DNA
cccacaactggaatctgacgctccttttctcttcatgggggactcccagaggtctctgcaatgaccagagccccggttgt

SEQ ID NO: 37739 - DNA, 80 bp, synthetic construct; identical to SEQ ID NO: 13315
  source 1..80: mol_type = other DNA

SEQ ID NO: 37740 - DNA, 80 bp, synthetic construct
  source 1..80: mol_type = other DNA
aaacctgcagtgtgcaagggacatgggcggaggggtccttcagtcaggcttctccctgtctgaggtggcatgacttggag

SEQ ID NO: 37741 - DNA, 80 bp, synthetic construct
  source 1..80: mol_type = other DNA
gccaggtggtgcagggaaacctggaactcacctacctgcccaccaatgccagcctgtccttcctgcaggtgaggcccgtg

SEQ ID NO: 37742 - DNA, 80 bp, synthetic construct
  source 1..80: mol_type = other DNA
agttgactctctctataacgtggctggccgaggtcatgtctggatgggatgcgtctgtgtttccgctaaatcttgtgctc

SEQ ID NO: 37743 - DNA, 80 bp, synthetic construct; identical to SEQ ID NO: 13316
  source 1..80: mol_type = other DNA

SEQ ID NO: 37744 - DNA, 80 bp, synthetic construct
  source 1..80: mol_type = other DNA
ttcgagaccagcctgaccaacatggagaaaccccgtctctactgaaaatacaaaattagccaggcatggtggcacatgcc

SEQ ID NO: 37745 - DNA, 80 bp, synthetic construct
  source 1..80: mol_type = other DNA
cgtctcaaaaaaaaaaaatttgcagacgccatcccatccaggcctttgctttcactgatgaagaaactgagatacagaga

SEQ ID NO: 37746 - DNA, 80 bp, synthetic construct; identical to SEQ ID NO: 13317
  source 1..80: mol_type = other DNA

SEQ ID NO: 37747 - DNA, 80 bp, synthetic construct
  source 1..80: mol_type = other DNA
acccctgtcacaggggcctccccaggaggcctgcgggagctgcagcttcgaagcctcacaggtggccttcaccgtcattg

SEQ ID NO: 37748 - DNA, 80 bp, synthetic construct
  source 1..80: mol_type = other DNA
gtagcttgcgtcagcacatataattcaatcgtgagaatgcaggctgggtttttgcccccacttggctgagtgaagtgtac

SEQ ID NO: 37749 - DNA, 80 bp, synthetic construct
  source 1..80: mol_type = other DNA
tgcagatataagggccaaaagttacacagctagtgagtgatggggctgagtttcagactccacagtctcttaaccaccaa

SEQ ID NO: 37750 - DNA, 80 bp, synthetic construct
  source 1..80: mol_type = other DNA
gtggtggtgggactcaaagacggtaaagatagctttctctcctccctggggaatctgggggttgtttaaaaggcctgctc

SEQ ID NO: 37751 - DNA, 80 bp, synthetic construct; identical to SEQ ID NO: 13318
  source 1..80: mol_type = other DNA

SEQ ID NO: 37752 - DNA, 80 bp, synthetic construct
  source 1..80: mol_type = other DNA
atctccctgtgcctcttcatctctggggttctctgtcttgtctccctctgcttataggttgtgcctctggtttgggggcc

SEQ ID NO: 37753 - DNA, 80 bp, synthetic construct
  source 1..80: mol_type = other DNA
tctctggttctgtcctcaggccacccctgttctccgatgtgtaagggctcccgctgctggggagagagttctgaggattg

SEQ ID NO: 37754 - DNA, 80 bp, synthetic construct
  source 1..80: mol_type = other DNA
ggtctggtgcccagggcgccactcagccctcatcctgccctttgcccaacagtgacgcgcactgtctgtgccggtggctg

SEQ ID NO: 37755 - DNA, 80 bp, synthetic construct; identical to SEQ ID NO: 13319
  source 1..80: mol_type = other DNA

SEQ ID NO: 37756 - DNA, 80 bp, synthetic construct
  source 1..80: mol_type = other DNA
tttggtggggaggtttgtttctgtaaatgggagcatatggggagcactgtctgcatcttgctttgagagctggtcatgac

SEQ ID NO: 37757 - DNA, 80 bp, synthetic construct
  source 1..80: mol_type = other DNA
catcagtaaaatgggggcaagaatagtcccaactgcataagatggttataacatttgaaagagttaatatttgtaaagct

SEQ ID NO: 37758 - DNA, 80 bp, synthetic construct
  source 1..80: mol_type = other DNA
ggttcgtgctattctcgtgtctcagcctcctgagtagctgggattacaggcgcccaccaccatgcctcgctaaattttgt

SEQ ID NO: 37759 - DNA, 80 bp, synthetic construct; identical to SEQ ID NO: 13320
  source 1..80: mol_type = other DNA

SEQ ID NO: 37760 - DNA, 80 bp, synthetic construct
  source 1..80: mol_type = other DNA
gagccatcgtgcctggcctagctcagttttatttaacagatcacctatttactgatgggcgtttatggactgggctcaga

SEQ ID NO: 37761 - DNA, 80 bp, synthetic construct
  source 1..80: mol_type = other DNA
ccactcactagcacaatgaccttgaataatttacagaactctctgctttggtctccctttttgcaaaatgggaatctcac

SEQ ID NO: 37762 - DNA, 80 bp, synthetic construct; identical to SEQ ID NO: 13321
  source 1..80: mol_type = other DNA

SEQ ID NO: 37763 - DNA, 80 bp, synthetic construct
  source 1..80: mol_type = other DNA
agtctctgccttctactctctacccctggcccccctcagccctacaagtgtccctatatcccctgtcagtgtggggaggg

SEQ ID NO: 37764 - DNA, 80 bp, synthetic construct
  source 1..80: mol_type = other DNA
ctggctgcaagaagatctttgggagcctggcatttctgccggagagctttgatgggtaagagtgggcacgatgacctgag

SEQ ID NO: 37765 - DNA, 80 bp, synthetic construct
  source 1..80: mol_type = other DNA
catgctatccgtgaacaaggacttgtatggaggtcagaccatctagataaagtaaaattccctttgagttcatagcagct

SEQ ID NO: 37766 - DNA, 80 bp, synthetic construct; identical to SEQ ID NO: 13322
  source 1..80: mol_type = other DNA

SEQ ID NO: 37767 - DNA, 80 bp, synthetic construct
  source 1..80: mol_type = other DNA
ctgtgcattttatttatttcattttattttttgagatagagtctcactctgtcagcaggctggagtgcagtggtacgatc

SEQ ID NO: 37768 - DNA, 80 bp, synthetic construct
  source 1..80: mol_type = other DNA
tgacgtcgtgatccgcccacctcagcctcccaaagtgctgggattacaggcatgagccaccacacccggtgcattttatt

SEQ ID NO: 37769 - DNA, 80 bp, synthetic construct
  source 1..80: mol_type = other DNA
atataaaaaattagccaggcttcctggcatgcgcctatcatcccagctacttgggaggctgaggcaggagaattgcatga

SEQ ID NO: 37770 - DNA, 80 bp, synthetic construct
  source 1..80: mol_type = other DNA
ttgcttgagcccaggaattcaagaacagcgtgggcaacatagtgagatcccatctctacaaaaaaacacaaaaaattagc

SEQ ID NO: 37771 - DNA, 80 bp, synthetic construct; identical to SEQ ID NO: 13323
  source 1..80: mol_type = other DNA

SEQ ID NO: 37772 - DNA, 80 bp, synthetic construct
  source 1..80: mol_type = other DNA
tgggaacatatagggagcactgtctgcaccttgctttgagagccggtcatgacagttcccattgaactgccttgttcttt

SEQ ID NO: 37773 - DNA, 80 bp, synthetic construct
  source 1..80: mol_type = other DNA
cccaacttcataagatggttataccaccatgcctggccagatgattataaagtttgaatgagttaatatttgtaaagctc

SEQ ID NO: 37774 - DNA, 80 bp, synthetic construct
  source 1..80: mol_type = other DNA
tggtttttattatgtggctgggtggctcggggttttatttaacagctcccctatttactaatagacatttagatcatgtt

SEQ ID NO: 37775 - DNA, 80 bp, synthetic construct
  source 1..80: mol_type = other DNA
atctcggctcactgcaacctctgcctcccgggttcaagtgattctcctgcctcagcctctcgagtaactgggactatagg

SEQ ID NO: 37776 - DNA, 80 bp, synthetic construct; identical to SEQ ID NO: 13324
  source 1..80: mol_type = other DNA

SEQ ID NO: 37777 - DNA, 80 bp, synthetic construct
  source 1..80: mol_type = other DNA
cagccagagcagctccaagtgtttgagactctggaagagatcacaggtgggctctgtctctgcatcctgttctgcagggg

SEQ ID NO: 37778 - DNA, 80 bp, synthetic construct
  source 1..80: mol_type = other DNA
gggggcctgatggggaggagtcccagggaggagtccctgtgggaagctttgggcctgagggagtactcctgtagcagtaa

SEQ ID NO: 37779 - DNA, 80 bp, synthetic construct
  source 1..80: mol_type = other DNA
ctcactgagggaactgggcagtggactggccctcatccaccataacacccacctctgcttcgtgcacacggtgccctggg

SEQ ID NO: 37780 - DNA, 80 bp, synthetic construct; identical to SEQ ID NO: 13325
  source 1..80: mol_type = other DNA

SEQ ID NO: 37781 - DNA, 80 bp, synthetic construct
  source 1..80: mol_type = other DNA
cctgcggtcccttcctcctcactgcagtgggcgagggcctggcctgccaccagctgtgcgcccgagggcactgctggggt

SEQ ID NO: 37782 - DNA, 80 bp, synthetic construct
  source 1..80: mol_type = other DNA
ggctccccagggagtatgtgaatgccaggcactgtttgccgtgccaccctgagtgtcagccccagaatggctcagtgacc

SEQ ID NO: 37783 - DNA, 80 bp, synthetic construct
  source 1..80: mol_type = other DNA
agtggcagaaaaggggcctgggggacactggggcccttcagactatgaaaaggttctaaggaggtctgtgttggtggctg

SEQ ID NO: 37784 - DNA, 80 bp, synthetic construct; identical to SEQ ID NO: 13326
  source 1..80: mol_type = other DNA

SEQ ID NO: 37785 - DNA, 80 bp, synthetic construct
  source 1..80: mol_type = other DNA
acaaaggggacccaactaagggcctgatcctactgccctgggggtgtcagtgccagccccccacaaatcttttctgcccc

SEQ ID NO: 37786 - DNA, 80 bp, synthetic construct
  source 1..80: mol_type = other DNA
cccactcgtgagtccaacggtcttttctgcagaaaggaggactttcctttcaggggtctttctggggctcttactataaa

SEQ ID NO: 37787 - DNA, 80 bp, synthetic construct
  source 1..80: mol_type = other DNA
tgcacattctaatatgtatatataagttaacatatattaatattattctccagttatttttatctgtgcacattttaaca

SEQ ID NO: 37788 - DNA, 80 bp, synthetic construct; identical to SEQ ID NO: 13327
  source 1..80: mol_type = other DNA

SEQ ID NO: 37789 - DNA, 80 bp, synthetic construct
  source 1..80: mol_type = other DNA
tgtttgcaaattgctttttctcactttccagaaccttgaaatgtttttccatgttctaacatggtgatctaccttattct

SEQ ID NO: 37790 - DNA, 80 bp, synthetic construct
  source 1..80: mol_type = other DNA
ccgcattgacttgtgtgttcacccttccaggctcttttctgcacacttatatagacatactacatttatattaggtcgag

SEQ ID NO: 37791 - DNA, 80 bp, synthetic construct
  source 1..80: mol_type = other DNA
tgcactttgctttccccccgacttgaggtatcctttcttgtgagtacagacggatctaccacctttattttttttttaat

SEQ ID NO: 37792 - DNA, 80 bp, synthetic construct; identical to SEQ ID NO: 13328
  source 1..80: mol_type = other DNA

SEQ ID NO: 37793 - DNA, 80 bp, synthetic construct
  source 1..80: mol_type = other DNA
agccaggcgtggtggtgggcgcctgtaatcccagctatttgagaggttgagacaggagaattgcttgaacctgggcagcg

SEQ ID NO: 37794 - DNA, 80 bp, synthetic construct
  source 1..80: mol_type = other DNA
gattctgctaagtgaaaaaagcatttgcaaacagtatgtacagtctatattcagaggaggaactgctgggtcatagatga

SEQ ID NO: 37795 - DNA, 80 bp, synthetic construct
  source 1..80: mol_type = other DNA
ggttccttggctggagaaggagtctccttgtgaggtggtagaaggagcactgacggccttgagcccagtttctgcctttg

SEQ ID NO: 37796 - DNA, 80 bp, synthetic construct
  source 1..80: mol_type = other DNA
ggttggcctggaccccaggatgtacccttcattgcccttcactcccccactggatgctgggtggtcactgctgtagggag

SEQ ID NO: 37797 - DNA, 80 bp, synthetic construct; identical to SEQ ID NO: 13329
  source 1..80: mol_type = other DNA

SEQ ID NO: 37798 - DNA, 80 bp, synthetic construct
  source 1..80: mol_type = other DNA
ggagcaggtattgcacttgcatttaggtagaaagcattggggtgcaaggtgacactggagggggaggcatcaggaaatcc

SEQ ID NO: 37799 - DNA, 80 bp, synthetic construct
  source 1..80: mol_type = other DNA
tttggggagaaaaacagactggagtctgtcttaggcgatcatcggtccgtgaaatgagcatgtgttacaggcttggtatg

SEQ ID NO: 37800 - DNA, 80 bp, synthetic construct
  source 1..80: mol_type = other DNA
atctcggttcactgcaacctctgcctcctgggttcaagcgcttcttgtgcctcagcctcccaagtagctgggattacagg

SEQ ID NO: 37801 - DNA, 80 bp, synthetic construct; identical to SEQ ID NO: 13330
  source 1..80: mol_type = other DNA

SEQ ID NO: 37802 - DNA, 80 bp, synthetic construct
  source 1..80: mol_type = other DNA
ccagttttggcctcccaaaatgttgggatcacaggagtgagccaccactcctggcgatgagccaagtctttttttttttt

SEQ ID NO: 37803 - DNA, 80 bp, synthetic construct
  source 1..80: mol_type = other DNA
cggctaatttttgtatttttagtagagatgaggttttgccatgttggccaggctggtcttgaactgctgacctcaggtga

SEQ ID NO: 37804 - DNA, 80 bp, synthetic construct; identical to SEQ ID NO: 13331
  source 1..80: mol_type = other DNA

SEQ ID NO: 37805 - DNA, 80 bp, synthetic construct
  source 1..80: mol_type = other DNA
ttatttatttattatttattttgagatgtcattttgctgttgttacccaggctggagtgcaatggcgcagtcttggctca

SEQ ID NO: 37806 - DNA, 80 bp, synthetic construct
  source 1..80: mol_type = other DNA
gtgatctgcccatctcagcctcaagccaccatgcccagccctactttcagtattcaataaattacatagccaggcaccgt

SEQ ID NO: 37807 - DNA, 80 bp, synthetic construct
  source 1..80: mol_type = other DNA
ttgggcagctgaggtggaaagactgcttgagcccagaggtcagggctgcagtgggccatgatctcaccactgcactcagc

SEQ ID NO: 37808 - DNA, 80 bp, synthetic construct; identical to SEQ ID NO: 13332
  source 1..80: mol_type = other DNA

SEQ ID NO: 37809 - DNA, 80 bp, synthetic construct
  source 1..80: mol_type = other DNA
cccagctaatttttgtgtgtgtgtatttttagtagagacgggggtttcactatgttggccaggctggtctcgaactcctg

SEQ ID NO: 37810 - DNA, 80 bp, synthetic construct
  source 1..80: mol_type = other DNA
tgattgcctacaaggagtttggactttattgtggaggcagcggggagccaaggcaggttttagagtaggagagggtccaa

SEQ ID NO: 37811 - DNA, 80 bp, synthetic construct
  source 1..80: mol_type = other DNA
ttctgctggtcgtggtcttgggggtggtctttgggatcctcatcaagcgacggcagcagaagatccggaagtacacgatg

SEQ ID NO: 37812 - DNA, 80 bp, synthetic construct
  source 1..80: mol_type = other DNA
cctgaaagagacggagctgaggaaggtgaaggtgcttggatctggcgcttttggcacagtctacaaggtcagggccaggt

SEQ ID NO: 37813 - DNA, 80 bp, synthetic construct; identical to SEQ ID NO: 13333
  source 1..80: mol_type = other DNA

SEQ ID NO: 37814 - DNA, 80 bp, synthetic construct
  source 1..80: mol_type = other DNA
ctaggaggacaggaaggaccccatggctgcaggtctgggctctggtctctcttcattggggtttggggagatatgactcc

SEQ ID NO: 37815 - DNA, 80 bp, synthetic construct
  source 1..80: mol_type = other DNA
tttttttttttttttgagacagagtctcgctctgtcacccaggctagagtgaaatggtgcggtctcagctcagcctccca

SEQ ID NO: 37816 - DNA, 80 bp, synthetic construct
  source 1..80: mol_type = other DNA
tcccaaagtgctgggattacaggtgtgagccaccgtgcccggcctaatctttgtatttttagtagagacagggtttcacc

SEQ ID NO: 37817 - DNA, 80 bp, synthetic construct; identical to SEQ ID NO: 13334
  source 1..80: mol_type = other DNA

SEQ ID NO: 37818 - DNA, 80 bp, synthetic construct
  source 1..80: mol_type = other DNA
atgtggccaggcccaggccctcccagaaggtctacatgggtgcttcccattccaggggatgagctacctggaggatgtgc

SEQ ID NO: 37819 - DNA, 80 bp, synthetic construct
  source 1..80: mol_type = other DNA
gctgggtggagtggtgtctagcccatgggagaactctgagtggccacctccccacaacacacagttggaggacttcctct

SEQ ID NO: 37820 - DNA, 80 bp, synthetic construct
  source 1..80: mol_type = other DNA
ggagaattacggggccacctcagcatgtgaagggagggaaggggctgcctgtgccccaccttgcagggtctgtgcacttc

SEQ ID NO: 37821 - DNA, 80 bp, synthetic construct; identical to SEQ ID NO: 13335
  source 1..80: mol_type = other DNA

SEQ ID NO: 37822 - DNA, 80 bp, synthetic construct
  source 1..80: mol_type = other DNA
caggagccctagtatgttaggagcctcaaaaccttcttgtatcccttttacagtcaaagtccaaagccactcttgaggaa

SEQ ID NO: 37823 - DNA, 80 bp, synthetic construct
  source 1..80: mol_type = other DNA
tgagatcctatctctacaaaaaataaaaaaattatctgggtgtggtggtgtgtgccagtagtcccagctactcaggagag

SEQ ID NO: 37824 - DNA, 80 bp, synthetic construct; identical to SEQ ID NO: 13336
  source 1..80: mol_type = other DNA

SEQ ID NO: 37825 - DNA, 80 bp, synthetic construct
  source 1..80: mol_type = other DNA
ttccgggagttggtgtctgaattctcccgcatggccagggacccccagcgctttgtggtcatccaggtactgggcctctg

SEQ ID NO: 37826 - DNA, 80 bp, synthetic construct
  source 1..80: mol_type = other DNA
ccagtcccttggacagcaccttctaccgctcactgctggaggacgatgacatgggggacctggtggatgctgaggagtat

SEQ ID NO: 37827 - DNA, 80 bp, synthetic construct
  source 1..80: mol_type = other DNA
tctctgatgttccctcaactgtcacctctcaaggaaaccccattatccctacaaaaaattcttactgccttccaacccct

SEQ ID NO: 37828 - DNA, 80 bp, synthetic construct; identical to SEQ ID NO: 13337
  source 1..80: mol_type = other DNA

SEQ ID NO: 37829 - DNA, 80 bp, synthetic construct
  source 1..80: mol_type = other DNA
ggcagagacaccggggttccttcccctaatgggtcaccttctcttgacctttcagaatatgtgaaccagccagatgttcg

SEQ ID NO: 37830 - DNA, 80 bp, synthetic construct
  source 1..80: mol_type = other DNA
cagggaggagctgcccctcagccccaccctcctcctgccttcagcccagccttcgacaacctctattactgggaccagga

SEQ ID NO: 37831 - DNA, 80 bp, synthetic construct
  source 1..80: mol_type = other DNA
catcaagaggtgggagggccctccgaccacttccaggggaacctgccatgccaggaacctgtcctaaggaaccttccttc

SEQ ID NO: 37832 - DNA, 80 bp, synthetic construct; identical to SEQ ID NO: 13338
  source 1..80: mol_type = other DNA

SEQ ID NO: 37833 - DNA, 80 bp, synthetic construct
  source 1..80: mol_type = other DNA
aggcaagtgtggggggtccttctccacacccactttgtccatttgcaaatatattttggaaaacagctaggcaccggcct

SEQ ID NO: 37834 - DNA, 80 bp, synthetic construct
  source 1..80: mol_type = other DNA
gatctgagagccctttgacgaccagatcattcttatttagaacgaactaattcctaaggccactcaccagaatggggtta

SEQ ID NO: 37835 - DNA, 80 bp, synthetic construct; identical to SEQ ID NO: 13339
  source 1..80: mol_type = other DNA

SEQ ID NO: 37836 - DNA, 80 bp, synthetic construct
  source 1..80: mol_type = other DNA
ccacggaatcttctattccttctttgtacccaaagggcaaagtggaggccagggtctctttgctaaggagctaagtaggg

SEQ ID NO: 37837 - DNA, 80 bp, synthetic construct
  source 1..80: mol_type = other DNA
ggcctcaatgagctagaggagtggaatgacaggatgatgcactgttggggtagggtgaccaagaggtcctcccaacgctg

SEQ ID NO: 37838 - DNA, 80 bp, synthetic construct
  source 1..80: mol_type = other DNA
ccccgccttcaagtcccccatcaatcccactggagacccatttgtagctccttaagcaattccccaaccctgggtcaact

SEQ ID NO: 37839 - DNA, 80 bp, synthetic construct; identical to SEQ ID NO: 13340
  source 1..80: mol_type = other DNA

SEQ ID NO: 37840 - DNA, 80 bp, synthetic construct
  source 1..80: mol_type = other DNA
tgggctggggattcgggggtggggcctcccgtggacccacctccgtccggcccgcgggaccagggtgcgggtcctccagc

SEQ ID NO: 37841 - DNA, 80 bp, synthetic construct
  source 1..80: mol_type = other DNA
aggacagacaattcctcagtgacccaggagctgacacactatggcgcacgtccgaggcttgcagctgcctggctgcctgg

SEQ ID NO: 37842 - DNA, 80 bp, synthetic construct; identical to SEQ ID NO: 13341
  source 1..80: mol_type = other DNA

SEQ ID NO: 37843 - DNA, 80 bp, synthetic construct
  source 1..80: mol_type = other DNA
cctgttcctgaggccgctgtcccatgacccccccaccgccttacagtgttcctggctcctcagcaagcacggtcgctgct

SEQ ID NO: 37844 - DNA, 80 bp, synthetic construct
  source 1..80: mol_type = other DNA
tgccggggcctcagaccgggcccaactctagacacttccacagagaagcaagcgaggaacgccacagccccttcgctgct

SEQ ID NO: 37845 - DNA, 80 bp, synthetic construct
  source 1..80: mol_type = other DNA
acatggggaggcctccacagtcttcagacatccacctgccctggagctctgtgtccacatggcctcctcagcggcagact

SEQ ID NO: 37846 - DNA, 80 bp, synthetic construct; identical to SEQ ID NO: 13342
  source 1..80: mol_type = other DNA

SEQ ID NO: 37847 - DNA, 80 bp, synthetic construct
  source 1..80: mol_type = other DNA
ataacatttactaaaacaacacaaaacaggagctgccgtagcctcactcccagcccttgtttttcaggatgtgttctggg

SEQ ID NO: 37848 - DNA, 80 bp, synthetic construct
  source 1..80: mol_type = other DNA
tgttcatccatctttctgtttctcaccaacatcccatccaccctgactccagctcatcctggccataccccaatcccaaa

SEQ ID NO: 37849 - DNA, 80 bp, synthetic construct
  source 1..80: mol_type = other DNA
agcatctgacattgctcccattcctggggtcaagatgtctctttgtacctggctctgtgtctggcatgcgaacgaatgaa

SEQ ID NO: 37850 - DNA, 80 bp, synthetic construct
  source 1..80: mol_type = other DNA
tgggattacaggtgctcgccaccacgcctggctaatttttgtatttttagtagagacggggtttcaccatgttggccagg

SEQ ID NO: 37851 - DNA, 80 bp, synthetic construct; identical to SEQ ID NO: 13343
  source 1..80: mol_type = other DNA

SEQ ID NO: 37852 - DNA, 80 bp, synthetic construct
  source 1..80: mol_type = other DNA
gggagcaccctccctcctgcactgtgttctgaaggcacctttagcacgacaaaaatggaactctttgtttatttataaga

SEQ ID NO: 37853 - DNA, 80 bp, synthetic construct
  source 1..80: mol_type = other DNA
gatctcggctcgctgcaacctccgcctagcggattcaagtgattctcctgccttagcctcctgagtagctgggattacag

SEQ ID NO: 37854 - DNA, 80 bp, synthetic construct; identical to SEQ ID NO: 13344
  source 1..80: mol_type = other DNA

SEQ ID NO: 37855 - DNA, 80 bp, synthetic construct
  source 1..80: mol_type = other DNA
ggggtttgagaccatcctggccaacatagtgaaacccccaacctctactaaaaatacaaaaattagctggggtgtggtgg

SEQ ID NO: 37856 - DNA, 80 bp, synthetic construct
  source 1..80: mol_type = other DNA
aaataattcaataaagtgattgcaagaaaagttctgttcaaggcaccaagagaccacaggaaaatgagtgtctggtttgc

SEQ ID NO: 37857 - DNA, 80 bp, synthetic construct
  source 1..80: mol_type = other DNA
tagaccagggccagttgaaaaggaccttcatcactttttcatcctgctggccaagagaagccacagaatggaagctccat

SEQ ID NO: 37858 - DNA, 80 bp, synthetic construct; identical to SEQ ID NO: 13345
  source 1..80: mol_type = other DNA

SEQ ID NO: 37859 - DNA, 80 bp, synthetic construct
  source 1..80: mol_type = other DNA
ggccggccttcccaccatgggctgagaacagggagcaagcgtacctcaagcccaacagcctcctgttgggcaatttcctg

SEQ ID NO: 37860 - DNA, 80 bp, synthetic construct
  source 1..80: mol_type = other DNA
gggggcagtggggcggcccatggccaaggcccgggggcttcatggggcctggcagcctgggatgggaaccaagaatactg

SEQ ID NO: 37861 - DNA, 80 bp, synthetic construct
  source 1..80: mol_type = other DNA
caaaaattgccaggcgtggtggtgggcgcctgtaatcccaactactctggaggctgaggcacgagaatcgcttgaacccg

SEQ ID NO: 37862 - DNA, 80 bp, synthetic construct
  source 1..80: mol_type = other DNA
gtaaagtcagggaatcaggggatctgagtggggggatctgccagcctcctcctccccctccccactcttgacttccttat

SEQ ID NO: 37863 - DNA, 80 bp, synthetic construct; identical to SEQ ID NO: 13346
  source 1..80: mol_type = other DNA

SEQ ID NO: 37864 - DNA, 80 bp, synthetic construct
  source 1..80: mol_type = other DNA
ctgaaagaaggtacctgggaaaactcttcttatgctgatgacagacacagaaaacaatgaacagaaaagcgtcttctgtc

SEQ ID NO: 37865 - DNA, 80 bp, synthetic construct
  source 1..80: mol_type = other DNA
gaatttgtgccgattaccagtccacaaacatgggttagtgtttgttctctaggcatccctgtcgggcccattgctcattc

SEQ ID NO: 37866 - DNA, 80 bp, synthetic construct
  source 1..80: mol_type = other DNA
gtgtgccaccactcctggctaatttttttttatgttagtagagacggggtttcaccatgttggccaggctgatctcaaac

SEQ ID NO: 37867 - DNA, 80 bp, synthetic construct
  source 1..80: mol_type = other DNA
tgcaacctccacctcctgggttcaggcgattctctgcctcagcctctcatatagctgggattacaggcacacgccaccac

SEQ ID NO: 37868 - DNA, 80 bp, synthetic construct; identical to SEQ ID NO: 13347
  source 1..80: mol_type = other DNA

SEQ ID NO: 37869 - DNA, 80 bp, synthetic construct
  source 1..80: mol_type = other DNA
gcctaggaggccaaacctggttactatctctggtttattatgtgccagacacttatgctgtatattttgtttaatcctct

SEQ ID NO: 37870 - DNA, 80 bp, synthetic construct
  source 1..80: mol_type = other DNA
tgtctgttccggtccatgtgtggtctcactcactctgctgcctccttgcccctcacccaccaggccaggatcaagtcact

SEQ ID NO: 37871 - DNA, 80 bp, synthetic construct; identical to SEQ ID NO: 13348
  source 1..80: mol_type = other DNA

SEQ ID NO: 37872 - DNA, 80 bp, synthetic construct
  source 1..80: mol_type = other DNA
ttacctcattgagtgcgctcattacagccttacagtaaccaggtggggggtaaggtcctgtgcccatttcacagataagt

SEQ ID NO: 37873 - DNA, 80 bp, synthetic construct
  source 1..80: mol_type = other DNA
gggtcccaacagaggaggccgtggaggaggagacaggagatgggctggatgaggactcagacagggccatcgaagggcgt

SEQ ID NO: 37874 - DNA, 80 bp, synthetic construct
  source 1..80: mol_type = other DNA
gggctgcgacctctgttcgagaagaagtcgctggaggacaaaaccgaaagagagctcctggaatcctacatcgacgggcg

SEQ ID NO: 37875 - DNA, 80 bp, synthetic construct; identical to SEQ ID NO: 13349
  source 1..80: mol_type = other DNA

SEQ ID NO: 37876 - DNA, 80 bp, synthetic construct
  source 1..80: mol_type = other DNA
cacacccggctaatttttgtattttaagtagagacagggtttcaccatgttggccaggctggtcttgaactcctgacctc

SEQ ID NO: 37877 - DNA, 80 bp, synthetic construct
  source 1..80: mol_type = other DNA
aatccagttcttctgattccagagctgtgctacgctatgtgaactctggactggaaggacctagttagggggtgcaaaaa

SEQ ID NO: 37878 - DNA, 80 bp, synthetic construct
  source 1..80: mol_type = other DNA
ggtgtagcagcatgtccctgtagtcccagctactaaggaggctgaggcgggaggatcgcctgagcccaggaggctgaggc

SEQ ID NO: 37879 - DNA, 80 bp, synthetic construct; identical to SEQ ID NO: 13350
  source 1..80: mol_type = other DNA

SEQ ID NO: 37880 - DNA, 80 bp, synthetic construct
  source 1..80: mol_type = other DNA
acaagaacttcaccgagaatgaccttctggtgcgcattggcaagcactcccgcaccaggtacagaactggtggcccgtgg

SEQ ID NO: 37881 - DNA, 80 bp, synthetic construct
  source 1..80: mol_type = other DNA
gagaaatccgtctgtctcctggtccctccaacactaggatatagcccatgtgggagtctctgaaaatagagtctgtctgg

SEQ ID NO: 37882 - DNA, 80 bp, synthetic construct; identical to SEQ ID NO: 13351
  source 1..80: mol_type = other DNA

SEQ ID NO: 37883 - DNA, 80 bp, synthetic construct
  source 1..80: mol_type = other DNA
gtgtgtctgcccgacagggagacggcagccaggtgggccaccagatgcttgttagctgaggggcagaagccaagttctgg

SEQ ID NO: 37884 - DNA, 80 bp, synthetic construct
  source 1..80: mol_type = other DNA
tcccaggctggagtgtagttgtgcgatcttggctcactgcaaccccacctcctgggttcaagcgactctcctgcctcagt

SEQ ID NO: 37885 - DNA, 80 bp, synthetic construct
  source 1..80: mol_type = other DNA
gtctgtgcccagccagctctggcgttttagattctggtctctaagaaatggcgttggggccaggcggctcctgtgggggt

SEQ ID NO: 37886 - DNA, 80 bp, synthetic construct
  source 1..80: mol_type = other DNA
ttgtggagcggccggtctgcaaggactccacccggatccgcatcactgacaacatgttctgtgctggcaagtctgtgcag

SEQ ID NO: 37887 - DNA, 80 bp, synthetic construct; identical to SEQ ID NO: 13352
  source 1..80: mol_type = other DNA

SEQ ID NO: 37888 - DNA, 80 bp, synthetic construct
  source 1..80: mol_type = other DNA
atccataaacagatctaaaacagcaatccctgaccagtgctgtgaagaaaaatgaagcacagggagagagaacggctgat

SEQ ID NO: 37889 - DNA, 80 bp, synthetic construct
  source 1..80: mol_type = other DNA
gctactcaggaggctgaggcaggagaattgcttgagccagggaggcggaggttgcagtgagctgagatcgggcatcattg

SEQ ID NO: 37890 - DNA, 80 bp, synthetic construct; identical to SEQ ID NO: 13353
  source 1..80: mol_type = other DNA

SEQ ID NO: 37891 - DNA, 80 bp, synthetic construct
  source 1..80: mol_type = other DNA
tgatgtgactgactttaaaagtaaaaaataaaaaaatttagtgtaatttcagactcacagaaaagttgtaaaaataatac

SEQ ID NO: 37892 - DNA, 80 bp, synthetic construct
  source 1..80: mol_type = other DNA
atgttctcttatgcaaccacaatacaaatattaaaacccggaaatttttttttgacatagcttcgctgtcacccaggctt

SEQ ID NO: 37893 - DNA, 80 bp, synthetic construct
  source 1..80: mol_type = other DNA
catgttggccaggctggtcttgaactcctgacctcaggtgatccacctgcctcggcctcccaaagtgctgggattacagg

SEQ ID NO: 37894 - DNA, 80 bp, synthetic construct
  source 1..80: mol_type = other DNA
atttttagtatttttagtagtgatggggtttcaccatgttggccaggctggtcttgaactcctgacctcgggtaatccac

SEQ ID NO: 37895 - DNA, 80 bp, synthetic construct; identical to SEQ ID NO: 13354
  source 1..80: mol_type = other DNA

SEQ ID NO: 37896 - DNA, 80 bp, synthetic construct
  source 1..80: mol_type = other DNA
gacctcttgaggaaggcaatgtctgccaagtttcttgctgtaacttctgtttttccctttgtaattaataagaatctggt

SEQ ID NO: 37897 - DNA, 80 bp, synthetic construct
  source 1..80: mol_type = other DNA
gcagggattacaggcatgtgccaccacacccagctaatttttgtatttttagtagagatggggtttcaccatgttggcca

SEQ ID NO: 37898 - DNA, 80 bp, synthetic construct; identical to SEQ ID NO: 13355
  source 1..80: mol_type = other DNA

SEQ ID NO: 37899 - DNA, 80 bp, synthetic construct
  source 1..80: mol_type = other DNA
gcctcctgagtagctgggattacaggcatgtgccaccacgcctggctaattttttgtatttttagtagagacagggtttc

SEQ ID NO: 37900 - DNA, 80 bp, synthetic construct
  source 1..80: mol_type = other DNA
aagtttggcctgtggaagtcccttcaagctggcttctgtgacttggggagatgttctgtcattctttgagtactttcttt

SEQ ID NO: 37901 - DNA, 80 bp, synthetic construct
  source 1..80: mol_type = other DNA
agtgggatgtcattacttctaggctctcttagtggacagaaccagaaaaaaattatatgatgcatataccaatatctcta

SEQ ID NO: 37902 - DNA, 80 bp, synthetic construct; identical to SEQ ID NO: 13356
  source 1..80: mol_type = other DNA

SEQ ID NO: 37903 - DNA, 80 bp, synthetic construct
  source 1..80: mol_type = other DNA
agccaccatgcctggcctctcctagtaaatttttagaagtggtgttgttaggtcaaaaggcaaacatgtatgtcattttt

SEQ ID NO: 37904 - DNA, 80 bp, synthetic construct
  source 1..80: mol_type = other DNA
agtatcttgaaattgttttaacggacatctttcaaattgaaaatgaggttgaacatcgtatcatatgattaaggaccttt

SEQ ID NO: 37905 - DNA, 80 bp, synthetic construct
  source 1..80: mol_type = other DNA
gcccgctaatttttgtatttttagtagagacagggttttaccagattggccaggctggtctcgaactccttaccttgtga

SEQ ID NO: 37906 - DNA, 80 bp, synthetic construct; identical to SEQ ID NO: 13357
  source 1..80: mol_type = other DNA

SEQ ID NO: 37907 - DNA, 80 bp, synthetic construct
  source 1..80: mol_type = other DNA
agtcaaatttatcaatcatttattttattaaatctggattttgaatcagagataaacttttcctggccaggtgtggtgtc

SEQ ID NO: 37908 - DNA, 80 bp, synthetic construct
  source 1..80: mol_type = other DNA
gggaggcggaggttgcagtgagcagagatcgtgccgctgcactccagcctgggtgacagagcaagactctgtctcaaaaa

SEQ ID NO: 37909 - DNA, 80 bp, synthetic construct; identical to SEQ ID NO: 13358
  source 1..80: mol_type = other DNA

SEQ ID NO: 37910 - DNA, 80 bp, synthetic construct
  source 1..80: mol_type = other DNA
tggatcatgaggtcaggagatagagaccatcctggccaacatggtgaaaccctcgtctctactaaaatacaaaaaattag

SEQ ID NO: 37911 - DNA, 80 bp, synthetic construct
  source 1..80: mol_type = other DNA
agaaaatattttaaaaattagctgggcatggtggcatgtgccttgtagtctcagctacttgagaggctgagttaggagga

SEQ ID NO: 37912 - DNA, 80 bp, synthetic construct
  source 1..80: mol_type = other DNA
gcggatcacctgaggtcaggagttcaagaccagcctgaccaacatggaaaaaccctgtctctgctaaaaatacaaaatta

SEQ ID NO: 37913 - DNA, 80 bp, synthetic construct
  source 1..80: mol_type = other DNA
ggctcacacctgtaatcccagcactttgggaggccgaggtgggtggatcacaaggtcaggagtttgagacaagcctggcc

SEQ ID NO: 37914 - DNA, 80 bp, synthetic construct; identical to SEQ ID NO: 13359
  source 1..80: mol_type = other DNA

SEQ ID NO: 37915 - DNA, 80 bp, synthetic construct
  source 1..80: mol_type = other DNA
cctgacctaggttttattttttagttttattttttcctgcatccagctaatttgatttgatttgtagagacggggtcttg

SEQ ID NO: 37916 - DNA, 80 bp, synthetic construct
  source 1..80: mol_type = other DNA
tagatttctatggatagagtatgcttaaggatgagtatgtttctggatgttcgactcggctttcctggtctgttgtctgt

SEQ ID NO: 37917 - DNA, 80 bp, synthetic construct
  source 1..80: mol_type = other DNA
caacatgcctaggtctataaaaaagcttggtggtaattttattgggattatgacacttcaacaaattaactgggagaatg

SEQ ID NO: 37918 - DNA, 80 bp, synthetic construct; identical to SEQ ID NO: 13360
  source 1..80: mol_type = other DNA

SEQ ID NO: 37919 - DNA, 80 bp, synthetic construct
  source 1..80: mol_type = other DNA
catgcccggctaatttttttatatttttagtagagacggggtttcaccatgttagccaggctggtctcgaactcctgacc

SEQ ID NO: 37920 - DNA, 80 bp, synthetic construct
  source 1..80: mol_type = other DNA
cacctcccgggttcacgccatcctcctgcctcagcctcccgagtagctgggactacaggtgtacactgccacgcccagct

SEQ ID NO: 37921 - DNA, 80 bp, synthetic construct
  source 1..80: mol_type = other DNA
ttgtggttcattaatttctgcttttttctcttaaaaagtttgcttacgtttttgtctggtttactttgctgttctcttgc

SEQ ID NO: 37922 - DNA, 80 bp, synthetic construct; identical to SEQ ID NO: 13361
  source 1..80: mol_type = other DNA

SEQ ID NO: 37923 - DNA, 80 bp, synthetic construct
  source 1..80: mol_type = other DNA
ggtgtgagccacagcacctagtgaaggtgtggtttttttgtgtaggttttactgttgttagtgttgttctgtattgtttg

SEQ ID NO: 37924 - DNA, 80 bp, synthetic construct
  source 1..80: mol_type = other DNA
caggctggagtgtggtgacatgatcacggctcactgcagccttaacctcccaggcgcaagtgatcctcctctcttagcct

SEQ ID NO: 37925 - DNA, 80 bp, synthetic construct
  source 1..80: mol_type = other DNA
ccaactttttaaaagcattattctgcctgttgggtggagaatagactgtaggtgggcaaagaatgaaggaaactagtggg

SEQ ID NO: 37926 - DNA, 80 bp, synthetic construct; identical to SEQ ID NO: 13362
  source 1..80: mol_type = other DNA

SEQ ID NO: 37927 - DNA, 80 bp, synthetic construct
  source 1..80: mol_type = other DNA
atgtgaccttgaacttgactctattggaaacctcatctttcttcttcagagcccctttaacaaccgctggtatcaaatgg

SEQ ID NO: 37928 - DNA, 80 bp, synthetic construct
  source 1..80: mol_type = other DNA
gggctcctggaaccaatcccgtgaaagaattatttttgtgtttctaaaactatggttcccaataaaagtgactctcagcg

SEQ ID NO: 37929 - DNA, 80 bp, synthetic construct
  source 1..80: mol_type = other DNA
ataaaaagtgggtatcttttttatttcaaaataacaggggttttaatatttctacacagcattagataatagcccaaaca

SEQ ID NO: 37930 - DNA, 80 bp, synthetic construct
  source 1..80: mol_type = other DNA
aaagcagactaaaagtctagggatatgatcatttggtttctggtttcagttctgacactaacaagcaatatccttgggca

SEQ ID NO: 37931 - DNA, 80 bp, synthetic construct; identical to SEQ ID NO: 13363
  source 1..80: mol_type = other DNA

SEQ ID NO: 37932 - DNA, 80 bp, synthetic construct
  source 1..80: mol_type = other DNA
tgctcttaacggaatggaaatcttagaaatgttgatgggacaatgacatgaatcatgaaaagaaaggaatagtgggaata

SEQ ID NO: 37933 - DNA, 80 bp, synthetic construct
  source 1..80: mol_type = other DNA
acactgaatcgagactggcctgtaatttgtgttcacaacgaatagaatgcagcaaaagcaaagccctgtctcctagagat

SEQ ID NO: 37934 - DNA, 80 bp, synthetic construct
  source 1..80: mol_type = other DNA
ggtttcgagtgagtttcttagtcctcagttctaatttgatttctctgtggtctgagagattgttatgaatttcgttgata

SEQ ID NO: 37935 - DNA, 80 bp, synthetic construct
  source 1..80: mol_type = other DNA
gactgtctatctcatgtgattttaaggatgtctaaaggttccccagttgtgcaatatctacaggatcactgaatgccaag

SEQ ID NO: 37936 - DNA, 80 bp, synthetic construct; identical to SEQ ID NO: 13364
  source 1..80: mol_type = other DNA

SEQ ID NO: 37937 - DNA, 80 bp, synthetic construct
  source 1..80: mol_type = other DNA
caatttcaatggggctactggaaagatgcttggctgtttttttactcatggaaagtcagaaaaatcattgttatatggga

SEQ ID NO: 37938 - DNA, 80 bp, synthetic construct
  source 1..80: mol_type = other DNA
agttataatgaagcattttaactacataaatattacttcatagcattttcaatcattaagaaagataagcccttttcttg

SEQ ID NO: 37939 - DNA, 80 bp, synthetic construct; identical to SEQ ID NO: 13365
  source 1..80: mol_type = other DNA

SEQ ID NO: 37940 - DNA, 80 bp, synthetic construct
  source 1..80: mol_type = other DNA
cctttggtattagtatttccttcaaaaatctgaaagccaaataagagaaaatctttaatgacaacataaatggctaaggt

SEQ ID NO: 37941 - DNA, 80 bp, synthetic construct
  source 1..80: mol_type = other DNA
aacccagaaaattttttatcctattagctcaaaatgagcatatcaaagaacacatagaacactctcacagagatgatcct

SEQ ID NO: 37942 - DNA, 80 bp, synthetic construct
  source 1..80: mol_type = other DNA
ttcagcccgtctgtattagctgtatgactgaacaagttacttattctctgattcttcatttcctcattggcaaaataagg

SEQ ID NO: 37943 - DNA, 80 bp, synthetic construct; identical to SEQ ID NO: 13366
  source 1..80: mol_type = other DNA

SEQ ID NO: 37944 - DNA, 80 bp, synthetic construct
  source 1..80: mol_type = other DNA
atgtcactgcatatttgtcaaatgcaaaatactgttattctcattatagcacagtcttcagattgctttctctttgccca

SEQ ID NO: 37945 - DNA, 80 bp, synthetic construct
  source 1..80: mol_type = other DNA
tagatcaatttctagccactgcttattgttgtttgcctatgaaaatgacaaaaacacatagataaggaagatgttaaaac

SEQ ID NO: 37946 - DNA, 80 bp, synthetic construct
  source 1..80: mol_type = other DNA
ttgtactataattgtttccttcttagcattccttactgcttaagggtagaggcttatttcattttgtttcctggtactca

SEQ ID NO: 37947 - DNA, 80 bp, synthetic construct; identical to SEQ ID NO: 13367
  source 1..80: mol_type = other DNA

SEQ ID NO: 37948 - DNA, 80 bp, synthetic construct
  source 1..80: mol_type = other DNA
tttggagaaagatcagaaggtctaaactgagttttagagtcatctaagataaatttttacctttgggagatttatcgtct

SEQ ID NO: 37949 - DNA, 80 bp, synthetic construct
  source 1..80: mol_type = other DNA
ctctagtgacatctgggtggtatcttagtgtgtcttcatatcaaggttgtaccagtgatgcagagtataaccagctagag

SEQ ID NO: 37950 - DNA, 80 bp, synthetic construct
  source 1..80: mol_type = other DNA
ctgatcccgaattctaactttgaaatgacaccattaaaaattagcattttatctttgaggcccttgttatatcacaaaga

SEQ ID NO: 37951 - DNA, 80 bp, synthetic construct
  source 1..80: mol_type = other DNA
tgtaatataacactatttttattattttaacttctctgggtgtcagctttgccctctgcaaaattgcaaaatgaggtatt

SEQ ID NO: 37952 - DNA, 80 bp, synthetic construct; identical to SEQ ID NO: 13368
  source 1..80: mol_type = other DNA

SEQ ID NO: 37953 - DNA, 80 bp, synthetic construct
  source 1..80: mol_type = other DNA
gagatatgaggatagaaattagggaatttggatttagttggctgaagggatcatcaagttattcatgccattctgatatc

SEQ ID NO: 37954 - DNA, 80 bp, synthetic construct
  source 1..80: mol_type = other DNA
acattttactatgcttctagttgcctcaaggaatatcacaaagctcttaaaataaggagggcggggaagagaacaaaaaa

SEQ ID NO: 37955 - DNA, 80 bp, synthetic construct
  source 1..80: mol_type = other DNA
ctgcctgttttttgtaaacaaagttttattagaacacagccagctcattcatttacatattgtttatggctactttactg

SEQ ID NO: 37956 - DNA, 80 bp, synthetic construct; identical to SEQ ID NO: 13369
  source 1..80: mol_type = other DNA

SEQ ID NO: 37957 - DNA, 80 bp, synthetic construct
  source 1..80: mol_type = other DNA
agtaatctccccaccaagatttcttaaacgaagaagctgtgatttgcttgttttctatctttccattttccatacccagg

SEQ ID NO: 37958 - DNA, 80 bp, synthetic construct
  source 1..80: mol_type = other DNA
ggtgtggaacatcctatcaaaagaaaagtaacgtgattaattacacaccaatattccctgcatggcttcatgcactgcag

SEQ ID NO: 37959 - DNA, 80 bp, synthetic construct
  source 1..80: mol_type = other DNA
ttgtctaaggtaacacagccacaagaatcagaaactgaattgagttcagacaatctgataccaaataccatgttctaaac

SEQ ID NO: 37960 - DNA, 80 bp, synthetic construct; identical to SEQ ID NO: 13370
  source 1..80: mol_type = other DNA

SEQ ID NO: 37961 - DNA, 80 bp, synthetic construct
  source 1..80: mol_type = other DNA
acccactgctaataattacctaagtatcaagaaaatgaataagaagaaaataatgcttcttgtataaaaaatagatgttt

SEQ ID NO: 37962 - DNA, 80 bp, synthetic construct
  source 1..80: mol_type = other DNA
ttttagactactgctatctggacattggcaaaatacccatatccatccaagggtatactgtgccattatctgcttcaaca

SEQ ID NO: 37963 - DNA, 80 bp, synthetic construct; identical to SEQ ID NO: 13371
  source 1..80: mol_type = other DNA

SEQ ID NO: 37964 - DNA, 80 bp, synthetic construct
  source 1..80: mol_type = other DNA
acctggatttatttataccacaggtcacattacagcccctgagaaatagcagctaacatagaaaagacttgagtacctac

SEQ ID NO: 37965 - DNA, 80 bp, synthetic construct
  source 1..80: mol_type = other DNA
catgacattgaagtttgagtgacctgaggactttggaagagtcaggcctagtttgaatctcaggtaggtcttattgaaaa

SEQ ID NO: 37966 - DNA, 80 bp, synthetic construct
  source 1..80: mol_type = other DNA
tggtctagatcacactgagagtttacctgagtagaacctctgtttcacaaaggttttcctaggagcctaagtcactgaaa

SEQ ID NO: 37967 - DNA, 80 bp, synthetic construct; identical to SEQ ID NO: 13372
  source 1..80: mol_type = other DNA

SEQ ID NO: 37968 - DNA, 80 bp, synthetic construct
  source 1..80: mol_type = other DNA
tataaaatatacttggggataattccagttccaggaagattgtatatatgtactttgccctattcctcctgctaagtaca

SEQ ID NO: 37969 - DNA, 80 bp, synthetic construct
  source 1..80: mol_type = other DNA
aacctggaaacaccaatgagtacagactgaaaaagcccaaataaaatctgctttctctaaccaaagtaccagtaaagggc

SEQ ID NO: 37970 - DNA, 80 bp, synthetic construct
  source 1..80: mol_type = other DNA
gacttctatgctcctgaggctaaagaggcaccctacaccctcactggggttgtgtcagaaaaggccatgtagggatttag

SEQ ID NO: 37971 - DNA, 80 bp, synthetic construct; identical to SEQ ID NO: 13373
  source 1..80: mol_type = other DNA

SEQ ID NO: 37972 - DNA, 80 bp, synthetic construct
  source 1..80: mol_type = other DNA
tccggattcaagcgatactcctgcctcagcctcccaagtagctgggattacaagtgcacgccaccctgcctaattttttt

SEQ ID NO: 37973 - DNA, 80 bp, synthetic construct
  source 1..80: mol_type = other DNA
gcccggccaagaagatttttttaaaatcgacaaatctctagcaagattcacacaaaaaagaaaggaggggcagatgacaa

SEQ ID NO: 37974 - DNA, 80 bp, synthetic construct
  source 1..80: mol_type = other DNA
aatagccctgtaactatttagaacataggatctgtaatttaaaaactgcccaaaaagaaatctgcaggcccagatggttt

SEQ ID NO: 37975 - DNA, 80 bp, synthetic construct
  source 1..80: mol_type = other DNA
tatcctctcatgaacatagacgacaaaatctttatgctatggactcaactgcaatctgtgttttctctcataatactgat

SEQ ID NO: 37976 - DNA, 80 bp, synthetic construct; identical to SEQ ID NO: 13374
  source 1..80: mol_type = other DNA

SEQ ID NO: 37977 - DNA, 80 bp, synthetic construct
  source 1..80: mol_type = other DNA
caatagtaaaatcaaaagtcttggtagccaatttttagcatgagctccttgaggcgcaagaccagatgttctactctgcc

SEQ ID NO: 37978 - DNA, 80 bp, synthetic construct
  source 1..80: mol_type = other DNA
agtttcagtaaccctgcttctctctttaatttgtaagacacagacctatcatattactgcttttctccatatgaccctta

SEQ ID NO: 37979 - DNA, 80 bp, synthetic construct; identical to SEQ ID NO: 13375
  source 1..80: mol_type = other DNA

SEQ ID NO: 37980 - DNA, 80 bp, synthetic construct
  source 1..80: mol_type = other DNA
ctttcttcagaactaaagagctagcacataagatcttagcaaactgatacaatgactacatgcaattcatatttgggcac

SEQ ID NO: 37981 - DNA, 80 bp, synthetic construct
  source 1..80: mol_type = other DNA
acagtgcctcacacttagtacttgctatttcccctaacaacattgcaagaacaataacaaggaattactaaatcactttc

SEQ ID NO: 37982 - DNA, 80 bp, synthetic construct
  source 1..80: mol_type = other DNA
tcaagggaagaaaaagatttattctgaattttttaaaaacccagcaatttctcaagtgagtttaatccagtggaaaacca

SEQ ID NO: 37983 - DNA, 80 bp, synthetic construct
  source 1..80: mol_type = other DNA
gttgtgtttatattcctaatgctgaatgtgcctgcctaacaggaagacatggaagggtatatgggagcctcatcatcctc

SEQ ID NO: 37984 - DNA, 80 bp, synthetic construct; identical to SEQ ID NO: 13376
  source 1..80: mol_type = other DNA

SEQ ID NO: 37985 - DNA, 80 bp, synthetic construct
  source 1..80: mol_type = other DNA
acactaacaggcctttagctcctaccatagtgttccttcctttaccatatatgtaccccaaatggagctgcttcactaca

SEQ ID NO: 37986 - DNA, 80 bp, synthetic construct
  source 1..80: mol_type = other DNA
tatgataccagtgcttagtcccattggcatcctacagtctatgaaaaacagaaaaaaaatgaataatttttgcttagaaa

SEQ ID NO: 37987 - DNA, 80 bp, synthetic construct; identical to SEQ ID NO: 13377
  source 1..80: mol_type = other DNA

SEQ ID NO: 37988 - DNA, 80 bp, synthetic construct
  source 1..80: mol_type = other DNA
gttgacctcaaagttacaaggttatttatatcttgatcaaggaagggataccagccactgtgctacctggatgttggcac

SEQ ID NO: 37989 - DNA, 80 bp, synthetic construct
  source 1..80: mol_type = other DNA
ttcctgtgaccttttccctcctcaactcttggaagctggaaaatttcttatatgcacttgtccatggatcacaagtcatg

SEQ ID NO: 37990 - DNA, 80 bp, synthetic construct
  source 1..80: mol_type = other DNA
taaaagttggtaatattctagtaataggcactctcctgccaaaccaaatatcacatggctcttgtgatacctctgtccat

SEQ ID NO: 37991 - DNA, 80 bp, synthetic construct
  source 1..80: mol_type = other DNA
ggttgatagttctctaagaatcctaaaattcctgcttcacaagaggctttcaaatagaatttaaccatttttctttaggt

SEQ ID NO: 37992 - DNA, 80 bp, synthetic construct; identical to SEQ ID NO: 13378
  source 1..80: mol_type = other DNA

SEQ ID NO: 37993 - DNA, 80 bp, synthetic construct
  source 1..80: mol_type = other DNA
ctgaaagaatgagatttctaaaacctctggctatccattctggtatttaacattaccccctggcagttaatatttaaatt

SEQ ID NO: 37994 - DNA, 80 bp, synthetic construct
  source 1..80: mol_type = other DNA
agtctgtctgcaggctgataggaaggatgactgatcttctaatacttgatgaaaagatgagtaaatttgactgaatctct

SEQ ID NO: 37995 - DNA, 80 bp, synthetic construct; identical to SEQ ID NO: 13379
  source 1..80: mol_type = other DNA

SEQ ID NO: 37996 - DNA, 80 bp, synthetic construct
  source 1..80: mol_type = other DNA
tggaattctgcccaaaatctactttaaagtctctgagaacaaaatccctctgccttcacatctgcattttaactgacttc

SEQ ID NO: 37997 - DNA, 80 bp, synthetic construct
  source 1..80: mol_type = other DNA
tattttttaaaaatgttttcctcttcaaacagtctataagtcagtttaagaatgtgattcctggagtcacttgcccaaag

SEQ ID NO: 37998 - DNA, 80 bp, synthetic construct
  source 1..80: mol_type = other DNA
tatgttgcaactgagttgggtcacacatttagcctgtgtggtgctgcaaatagttcataaattaggtgacatttttgtac

SEQ ID NO: 37999 - DNA, 80 bp, synthetic construct
  source 1..80: mol_type = other DNA
ctgtatttcttagcagggacctcttcccattacccaatctttaccaggcagaaggggccagacccctaactggtgctgtt

SEQ ID NO: 38000 - DNA, 80 bp, synthetic construct; identical to SEQ ID NO: 13380
  source 1..80: mol_type = other DNA

SEQ ID NO: 38001 - DNA, 80 bp, synthetic construct
  source 1..80: mol_type = other DNA
ctcttttcctcagcttttacagttccgtgctttacccgtgtatactttccattaacagtcttaattttccttaactacaa

SEQ ID NO: 38002 - DNA, 80 bp, synthetic construct
  source 1..80: mol_type = other DNA
tccagcaaccatagcaagtcatgtttattctcttattggtatgacaactcctctgcccacttctcagattagataactag

SEQ ID NO: 38003 - DNA, 80 bp, synthetic construct
  source 1..80: mol_type = other DNA
tttcctccttcttaagttagaggaactgctgtgaaatttcagaaaccaggcaggtgaatttttggagagggacgggttga

SEQ ID NO: 38004 - DNA, 80 bp, synthetic construct; identical to SEQ ID NO: 13381
  source 1..80: mol_type = other DNA

SEQ ID NO: 38005 - DNA, 80 bp, synthetic construct
  source 1..80: mol_type = other DNA
cttttcaatgtatgttaccagctgaagcacactggctttttgttgttgtggttttctgttggtttgttttgcagcagctt

SEQ ID NO: 38006 - DNA, 80 bp, synthetic construct
  source 1..80: mol_type = other DNA
gcatctcatgtctaatcttgtgaatatctaagggcagaaatcactgtgacccagtgtgatttaattaggagattagatca

SEQ ID NO: 38007 - DNA, 80 bp, synthetic construct; identical to SEQ ID NO: 13382
  source 1..80: mol_type = other DNA

SEQ ID NO: 38008 - DNA, 80 bp, synthetic construct
  source 1..80: mol_type = other DNA
tcataatcctccttcctctgattgatctttatcccagtaacaatgatgataataataaattgataatataagggatacta

SEQ ID NO: 38009 - DNA, 80 bp, synthetic construct
  source 1..80: mol_type = other DNA
accaggctaagagaggtcaaggaatttcctaggattatgcattgacagggtaaaaatttaaatctgagtctgtgctcttt

SEQ ID NO: 38010 - DNA, 80 bp, synthetic construct
  source 1..80: mol_type = other DNA
aacatagctaatacttgttcaagaaaatttcaaataaatgccatcttctgtaaatgtaggcattctaattcatggccaat

SEQ ID NO: 38011 - DNA, 80 bp, synthetic construct; identical to SEQ ID NO: 13383
  source 1..80: mol_type = other DNA

SEQ ID NO: 38012 - DNA, 80 bp, synthetic construct
  source 1..80: mol_type = other DNA
tgatgatttttcataggaaagtccatgggcatgtagagaatacggtctggatgctaaatttttaaaacgaacctaggaaa

SEQ ID NO: 38013 - DNA, 80 bp, synthetic construct
  source 1..80: mol_type = other DNA
gatatggcccaagtagttttctccagaaataccaaaagatatttgttcttaggctcaaggctaaagtactgacattatct

SEQ ID NO: 38014 - DNA, 80 bp, synthetic construct
  source 1..80: mol_type = other DNA
gttcagatgacaatgccctggaggaacaatttggttgaatatttaggagtggttggaagaattaaggtaagtttcttaga

SEQ ID NO: 38015 - DNA, 80 bp, synthetic construct; identical to SEQ ID NO: 13384
  source 1..80: mol_type = other DNA

SEQ ID NO: 38016 - DNA, 80 bp, synthetic construct
  source 1..80: mol_type = other DNA
ggccaatatctctgatgtacatagacacaaaaatcttcaacaaaatattggcaaaccaaatccagcagcaaattaaaaat

SEQ ID NO: 38017 - DNA, 80 bp, synthetic construct
  source 1..80: mol_type = other DNA
ttcatgataaaaaccctcaacaaactaggcattgaaggaacatacttcaaactaataggagccatctatgacaaacctac

SEQ ID NO: 38018 - DNA, 80 bp, synthetic construct
  source 1..80: mol_type = other DNA
aaagaagttaaagtatctctcttcattggcaatatgattctgtacctagaaaaccctaaagactccatgaaaaggctcca

SEQ ID NO: 38019 - DNA, 80 bp, synthetic construct; identical to SEQ ID NO: 13385
  source 1..80: mol_type = other DNA

SEQ ID NO: 38020 - DNA, 80 bp, synthetic construct
  source 1..80: mol_type = other DNA
ttttaacaactactggaatcattttcctcaggattagacaaagctattctaaaattcatatggaatcaaaaaagagcctg

SEQ ID NO: 38021 - DNA, 80 bp, synthetic construct
  source 1..80: mol_type = other DNA
ccacacacttacaaccacctgaactttgacaaagtcaacaacaacagcaacaacaacaacaaaaaacaaggggaaaagga

SEQ ID NO: 38022 - DNA, 80 bp, synthetic construct
  source 1..80: mol_type = other DNA
gaagaaaaacctaggaaacaccattctggatatcagccttgggaaagaatttatgactaattcctcaaaagcatttcaac

SEQ ID NO: 38023 - DNA, 80 bp, synthetic construct
  source 1..80: mol_type = other DNA
gaaatacaaataaccccattaaaaagtgggcaaaagacatgaacagatacttatcaaaagaagacatacaaatagccaac

SEQ ID NO: 38024 - DNA, 80 bp, synthetic construct; identical to SEQ ID NO: 13386
  source 1..80: mol_type = other DNA

SEQ ID NO: 38025 - DNA, 80 bp, synthetic construct
  source 1..80: mol_type = other DNA
tctatagattacagacattgtatagaaaagcactgtgaaaatccctgtcctgttctgttctgttctaattactggtgcat

SEQ ID NO: 38026 - DNA, 80 bp, synthetic construct
  source 1..80: mol_type = other DNA
cccttccttctttaacttggtgtctgaggggtttttgtctgtggcttgtcctgctacaatttgacctagcaattctatta

SEQ ID NO: 38027 - DNA, 80 bp, synthetic construct
  source 1..80: mol_type = other DNA
tacaaaaattagctgggcatggtggtgggtgcctgtaatcccagctactcgggaggctgaggcaggagaattgcttgaac

SEQ ID NO: 38028 - DNA, 80 bp, synthetic construct; identical to SEQ ID NO: 13387
  source 1..80: mol_type = other DNA

SEQ ID NO: 38029 - DNA, 80 bp, synthetic construct
  source 1..80: mol_type = other DNA
tgaacataaagatggcaataaacactggggacttctagaagggggaaggaaggagatgagcaagggatgaaaaactattg

SEQ ID NO: 38030 - DNA, 80 bp, synthetic construct
  source 1..80: mol_type = other DNA
aaatccagggctaaaacaaagattcagtatttgatttttttccttttgcctaaggctccagtatgtctcaatgcaacatt

SEQ ID NO: 38031 - DNA, 80 bp, synthetic construct
  source 1..80: mol_type = other DNA
tggttacatggatgaattgtatagtggtgaagtctaggattttagtgtacctgtcacctgagtagtgtaccctgtaccca

SEQ ID NO: 38032 - DNA, 80 bp, synthetic construct; identical to SEQ ID NO: 13388
  source 1..80: mol_type = other DNA

SEQ ID NO: 38033 - DNA, 80 bp, synthetic construct
  source 1..80: mol_type = other DNA
gtttttgaatgtgagcggttagcaaaaatggcggaagtaaactttgttataaaagcaagttataatcgtgggtctggaca

SEQ ID NO: 38034 - DNA, 80 bp, synthetic construct
  source 1..80: mol_type = other DNA
ctactagcactgctactgccaccaccaccaccactgctatgaaacccaattcaattgctcttgaatatattaattttctg

SEQ ID NO: 38035 - DNA, 80 bp, synthetic construct; identical to SEQ ID NO: 13389
  source 1..80: mol_type = other DNA

SEQ ID NO: 38036 - DNA, 80 bp, synthetic construct
  source 1..80: mol_type = other DNA
gtaaaagtgctgtcgaggtactttcgaaaaactactttcttatatgtggtatcttctggaatatcatcagagtcttcaat

SEQ ID NO: 38037 - DNA, 80 bp, synthetic construct
  source 1..80: mol_type = other DNA
aaacaaaagccagtaaatatctttcaattcctaactcaaatattattttataggtaagtcttcctatgaccttttagact

SEQ ID NO: 38038 - DNA, 80 bp, synthetic construct
  source 1..80: mol_type = other DNA
tttgtgagattatctattaatatctgtctctcactgggtataagtgccatgaggtcagccattgtgcctagtttgctcat

SEQ ID NO: 38039 - DNA, 80 bp, synthetic construct; identical to SEQ ID NO: 13390
  source 1..80: mol_type = other DNA

SEQ ID NO: 38040 - DNA, 80 bp, synthetic construct
  source 1..80: mol_type = other DNA
ccctaaaagtagccactcttctcacatttgttttttgctaatgtccattattcttaagcttcttgacattggtgtggaca

SEQ ID NO: 38041 - DNA, 80 bp, synthetic construct
  source 1..80: mol_type = other DNA
taagaatattaatattaaaaatataaggaactcaattcagcaaaaaacccaaatagcctgattaaaaaatgagcaaaaga

SEQ ID NO: 38042 - DNA, 80 bp, synthetic construct
  source 1..80: mol_type = other DNA
gttggcatggatgtgaagaaaagggaactcttgtatactcttggtgagagtgtaaattagtacagccattatggaaaaca

SEQ ID NO: 38043 - DNA, 80 bp, synthetic construct
  source 1..80: mol_type = other DNA
caacccaaatgtctataaacaaatgaatggatttcttaaatgtgatctacataaacaatgaaatactatttagcatttaa

SEQ ID NO: 38044 - DNA, 80 bp, synthetic construct; identical to SEQ ID NO: 13391
  source 1..80: mol_type = other DNA

SEQ ID NO: 38045 - DNA, 80 bp, synthetic construct
  source 1..80: mol_type = other DNA
acaacaaaaaaactggggtacacccatataatggaatacatgcaataaccagatgaatctccagagaattatactgagtg

SEQ ID NO: 38046 - DNA, 80 bp, synthetic construct
  source 1..80: mol_type = other DNA
agagggatttttatggtgatggtgaacattctgtgtcttgacagtatcaacatcagtgtgctggttgtgatatagtatta

SEQ ID NO: 38047 - DNA, 80 bp, synthetic construct; identical to SEQ ID NO: 13392
  source 1..80: mol_type = other DNA

SEQ ID NO: 38048 - DNA, 80 bp, synthetic construct
  source 1..80: mol_type = other DNA
tctttccagactctgagcataacatgcaaactcacagaacacaagggagtgggtaaagcaactccgaatgccataaaagt

SEQ ID NO: 38049 - DNA, 80 bp, synthetic construct
  source 1..80: mol_type = other DNA
cataggaaaaggtgttttaaacagagttctaatgtggagatgtcaggcatcagattaatgaactcatatgcataagtcac

SEQ ID NO: 38050 - DNA, 80 bp, synthetic construct
  source 1..80: mol_type = other DNA
cctgagaatttgtagttgactaagccttgctcctttcctcctctctcttctctttctgtatcttcatcccagaacaaaga

SEQ ID NO: 38051 - DNA, 80 bp, synthetic construct
  source 1..80: mol_type = other DNA
taaatcatattgattagcatatagctatggataggttgggctctgcctggagcaataagagtcagtagaaacatgggtag

SEQ ID NO: 38052 - DNA, 80 bp, synthetic construct; identical to SEQ ID NO: 13393
  source 1..80: mol_type = other DNA

SEQ ID NO: 38053 - DNA, 80 bp, synthetic construct
  source 1..80: mol_type = other DNA
tgttgtcaggatctctggaggagttgatgtttgtcctaacatcagttttgtaggggtcatcatagggcacataatcaatt

SEQ ID NO: 38054 - DNA, 80 bp, synthetic construct
  source 1..80: mol_type = other DNA
tcattgagagtaggagatgaaggagatggcatctgaccaaggtctggataaggaaaagactcattaaattcttgaagaag

SEQ ID NO: 38055 - DNA, 80 bp, synthetic construct; identical to SEQ ID NO: 13394
  source 1..80: mol_type = other DNA

SEQ ID NO: 38056 - DNA, 80 bp, synthetic construct
  source 1..80: mol_type = other DNA
gagaggtttgtctggctgaagtctagagaaagggttgtatggctgaggtctggagaaatgggcatctgaccgagggctgg

SEQ ID NO: 38057 - DNA, 80 bp, synthetic construct
  source 1..80: mol_type = other DNA
ggagagaggtttgtctggctgaggtctaaagaaagggttgtatggctgaggtctggagaaagggttgtatggctgaggtc

SEQ ID NO: 38058 - DNA, 80 bp, synthetic construct
  source 1..80: mol_type = other DNA
tcatgttctgaggaaggggacatttgacttatatctgtggggaaggacttgtgacttcggtcatactcaagcatttcact

SEQ ID NO: 38059 - DNA, 80 bp, synthetic construct
  source 1..80: mol_type = other DNA
tggtcaggaagtgaggctatccagccaaaatccatagagggcaatgtctgattgaggtctgtgggaagagatgtttcatt

SEQ ID NO: 38060 - DNA, 80 bp, synthetic construct; identical to SEQ ID NO: 13395
  source 1..80: mol_type = other DNA

SEQ ID NO: 38061 - DNA, 80 bp, synthetic construct
  source 1..80: mol_type = other DNA
tttctcagaagccaaatgccatctcccaaccaaaatcttagatgagttactttgttttaagagtaacagatcactaggag

SEQ ID NO: 38062 - DNA, 80 bp, synthetic construct
  source 1..80: mol_type = other DNA
atctctttctaccttgggtcccttatgcttagcatgttcttgacttttgaattctccagcaccaagtgaaagtagacgta

SEQ ID NO: 38063 - DNA, 80 bp, synthetic construct
  source 1..80: mol_type = other DNA
cagctgtggtggcttgttggtgagaaggggctttctgaggttctgcaaggttattgacagtgaacttactaatattactt

SEQ ID NO: 38064 - DNA, 80 bp, synthetic construct; identical to SEQ ID NO: 13396
  source 1..80: mol_type = other DNA

SEQ ID NO: 38065 - DNA, 80 bp, synthetic construct
  source 1..80: mol_type = other DNA
gtctgggaaaagacatgaaaacacaataatccattgtggcaggtaatttctaataaactttcgtcaggaatattcaagta

SEQ ID NO: 38066 - DNA, 80 bp, synthetic construct
  source 1..80: mol_type = other DNA
taacagaataaaaaacaaaagtgttgcttagtggagattagaggggaaaaaaggtctttcagcacagatagttgctcact

SEQ ID NO: 38067 - DNA, 80 bp, synthetic construct
  source 1..80: mol_type = other DNA
aggacaattttgaatctctgaaatggcatgcattgctggaacatcaaagatttcttggtgagtctccaatagttaccatt

SEQ ID NO: 38068 - DNA, 80 bp, synthetic construct; identical to SEQ ID NO: 13397
  source 1..80: mol_type = other DNA

SEQ ID NO: 38069 - DNA, 80 bp, synthetic construct
  source 1..80: mol_type = other DNA
agaactggatccatttaagtcattaatttctcaaagagaaatcatgagaaacattgaaagaaaagcctgcagggggtcag

SEQ ID NO: 38070 - DNA, 80 bp, synthetic construct
  source 1..80: mol_type = other DNA
ggtgtcctcatgcctctttccatagatgaatgagtgcccagtgaagtggatggtcaaaatttcattctgggtccccacac

SEQ ID NO: 38071 - DNA, 80 bp, synthetic construct; identical to SEQ ID NO: 13398
  source 1..80: mol_type = other DNA

SEQ ID NO: 38072 - DNA, 80 bp, synthetic construct
  source 1..80: mol_type = other DNA
acttggaggaaaagcataatataagaaattcatctttttgatatattagtcattgggtaagaagtaatgtccctaaaaat

SEQ ID NO: 38073 - DNA, 80 bp, synthetic construct
  source 1..80: mol_type = other DNA
aaaccaaaggtatgatttctacaagggcagggctcatgtctacctcgattaccactcttagccttagtaccagtataatg

SEQ ID NO: 38074 - DNA, 80 bp, synthetic construct
  source 1..80: mol_type = other DNA
agcacttgaaatatgggtagactggactgagatatgctgtgagtataaaatatacattgaatttcaaagacttagtaata

SEQ ID NO: 38075 - DNA, 80 bp, synthetic construct; identical to SEQ ID NO: 13399
  source 1..80: mol_type = other DNA

SEQ ID NO: 38076 - DNA, 80 bp, synthetic construct
  source 1..80: mol_type = other DNA
tactagagaaggtgattaccatgactctagactctgaggatcagtagggggaccctggctgttgtggagaagtttgcttc

SEQ ID NO: 38077 - DNA, 80 bp, synthetic construct
  source 1..80: mol_type = other DNA
ctcttgggtccctatactcattttgctctactttgatgtgtcaatccatctttggattacttgccttctttctgtcctag

SEQ ID NO: 38078 - DNA, 80 bp, synthetic construct
  source 1..80: mol_type = other DNA
catttctaaggatgtgagcctttgacctcttgcttaaaaatgttgctatgatgtcacccacggatttcatcaccaagtct

SEQ ID NO: 38079 - DNA, 80 bp, synthetic construct
  source 1..80: mol_type = other DNA
gggtcatcacgtttcacctcatcaggattttcacaaaacttgttgatgttgtcctcaaggtaccagcttttgttctcatc

SEQ ID NO: 38080 - DNA, 80 bp, synthetic construct; identical to SEQ ID NO: 13400
  source 1..80: mol_type = other DNA

SEQ ID NO: 38081 - DNA, 80 bp, synthetic construct
  source 1..80: mol_type = other DNA
aaaacccgtctctactaaaaaaaaaaaaaaaaagaaaagaaaagaaaagaaaagaaaattagccaggcatcgtggcttat

SEQ ID NO: 38082 - DNA, 80 bp, synthetic construct
  source 1..80: mol_type = other DNA
aaaacaacaacaacacacttaaacgtaaaaccccaaactacaaaaaccctggaagacaacctaggcaatattatttggga

SEQ ID NO: 38083 - DNA, 80 bp, synthetic construct
  source 1..80: mol_type = other DNA
gcaaactatgcatctggcaaaggtctaatatggagcatttataaggaacttaaatttacaagaaaaaaacaaacagcccc

SEQ ID NO: 38084 - DNA, 80 bp, synthetic construct; identical to SEQ ID NO: 13401
  source 1..80: mol_type = other DNA

SEQ ID NO: 38085 - DNA, 80 bp, synthetic construct
  source 1..80: mol_type = other DNA
ttcacaatagcaaagacatgaaatcaacccaaatgcccatcaatgacagactggatgaagaaaatatggtacatatacac

SEQ ID NO: 38086 - DNA, 80 bp, synthetic construct
  source 1..80: mol_type = other DNA
ggacacatagaagggaacaatacatactggggcctatcagaggatggagggtggaaagagggagaggatcagaaaaaata

SEQ ID NO: 38087 - DNA, 80 bp, synthetic construct; identical to SEQ ID NO: 13402
  source 1..80: mol_type = other DNA

SEQ ID NO: 38088 - DNA, 80 bp, synthetic construct
  source 1..80: mol_type = other DNA
ttgttagagctaaaggtaatatgcaaaagcaaacagaacagataagaaaattcagagattaaaatatcccaaaagagccg

SEQ ID NO: 38089 - DNA, 80 bp, synthetic construct
  source 1..80: mol_type = other DNA
cccagctactcaagagactgaggcaggagaatcacttgaacccaggaggcagaggttgcagtgatctaaaatggtgccac

SEQ ID NO: 38090 - DNA, 80 bp, synthetic construct
  source 1..80: mol_type = other DNA
tgaataagtgcaaaggatgaaagagaaggttgcaatagaaaagccttatgcttctactacctgtttcctttcctagctca

SEQ ID NO: 38091 - DNA, 80 bp, synthetic construct; identical to SEQ ID NO: 13403
  source 1..80: mol_type = other DNA

SEQ ID NO: 38092 - DNA, 80 bp, synthetic construct
  source 1..80: mol_type = other DNA
agggttattacccatttgataaaaggaagaaattaggaaaggctaatcaacttgctcaacacatccaataccaacagacc

SEQ ID NO: 38093 - DNA, 80 bp, synthetic construct
  source 1..80: mol_type = other DNA
aatgccccattatttagccaggagacctaacatgttctagccagaagaaattctcagaatttctgaaaggttacttcaag

SEQ ID NO: 38094 - DNA, 80 bp, synthetic construct
  source 1..80: mol_type = other DNA
gatgttccacttataagtataggtttcccctggttgaactgctctgatcatggtgttgttcctgcctgaaagaaaatata

SEQ ID NO: 38095 - DNA, 80 bp, synthetic construct
  source 1..80: mol_type = other DNA
tacatatgtatacatgtgtcatgttggtgtgctgcacccattaacttgtcattaacattaggtatatctcctaatgctat

SEQ ID NO: 38096 - DNA, 80 bp, synthetic construct; identical to SEQ ID NO: 13404
  source 1..80: mol_type = other DNA

SEQ ID NO: 38097 - DNA, 80 bp, synthetic construct
  source 1..80: mol_type = other DNA
ataaggcgagaaggtcactccatgagggtaaatgctataggggcggctggccatatttttgaacacgatctacaaagtta

SEQ ID NO: 38098 - DNA, 80 bp, synthetic construct
  source 1..80: mol_type = other DNA
aggagcattggagagagtgtttcactcacacattaaggtggaaaatggaaagagaagtctgactttagaggataggttag

SEQ ID NO: 38099 - DNA, 80 bp, synthetic construct; identical to SEQ ID NO: 13405
  source 1..80: mol_type = other DNA

SEQ ID NO: 38100 - DNA, 80 bp, synthetic construct
  source 1..80: mol_type = other DNA
gaggtgcgagaatcgcctgagcccaggaagtggaggttgcagtgagccatgatcacaccactgcactccagcctgggtga

SEQ ID NO: 38101 - DNA, 80 bp, synthetic construct
  source 1..80: mol_type = other DNA
cttttgtcctttggctattttaaatgaacagaatagaccttgtcaggtgcataaaacacacaggagtcctagttaggctc

SEQ ID NO: 38102 - DNA, 80 bp, synthetic construct
  source 1..80: mol_type = other DNA
gacatgacatttaaggagaattgtctgaggaaaactccgtgctcttgatacatggagtttaccttcatcagagtccaacc

SEQ ID NO: 38103 - DNA, 80 bp, synthetic construct
  source 1..80: mol_type = other DNA
attttatcaaggatgccatctactgtatcactcagcactctcttttgtagaactcattaaagaagttcctcttagatctt

SEQ ID NO: 38104 - DNA, 80 bp, synthetic construct; identical to SEQ ID NO: 13406
  source 1..80: mol_type = other DNA

SEQ ID NO: 38105 - DNA, 80 bp, synthetic construct
  source 1..80: mol_type = other DNA
acttactttgagtgtgtctctgacctgggctctgataataggacccaaaatcccatcttctttcatattgggattcactg

SEQ ID NO: 38106 - DNA, 80 bp, synthetic construct
  source 1..80: mol_type = other DNA
aaaaaattaaaccactttctcaaatagagatctcggtaggatggggaaacccttgtgcttaaacattctgctcttagatt

SEQ ID NO: 38107 - DNA, 80 bp, synthetic construct
  source 1..80: mol_type = other DNA
tcttattgctacagcagacatttgatatctctgggaaaaggcctatactggctgaaaagatactaggaatttttctaaag

SEQ ID NO: 38108 - DNA, 80 bp, synthetic construct; identical to SEQ ID NO: 13407
  source 1..80: mol_type = other DNA

SEQ ID NO: 38109 - DNA, 80 bp, synthetic construct
  source 1..80: mol_type = other DNA
ggccgaggcgggcaaatcacgaggtcaggagatcgagaccatcctggctaacacggtgaaaccccatctctactaaaaat

SEQ ID NO: 38110 - DNA, 80 bp, synthetic construct
  source 1..80: mol_type = other DNA
gactccgtctcaaaaaaagaaagaaaaacgcaatgagatgccctctcatgccagtcagaatggcgatgattgaaaagtca

SEQ ID NO: 38111 - DNA, 80 bp, synthetic construct; identical to SEQ ID NO: 13408
  source 1..80: mol_type = other DNA

SEQ ID NO: 38112 - DNA, 80 bp, synthetic construct
  source 1..80: mol_type = other DNA
tctcaaaatgacctccctaccctccctgaattttctaggtagccatatattaatttcatgcgtgtaattccagaatacct

SEQ ID NO: 38113 - DNA, 80 bp, synthetic construct
  source 1..80: mol_type = other DNA
aatttattaaactagttttctactgatggacattttgggttgtttccagtcttactactactaacgttgcaacagtgaat

SEQ ID NO: 38114 - DNA, 80 bp, synthetic construct
  source 1..80: mol_type = other DNA
atatatgatagttcttttttctcacagccttgtcaacagatgatgtcatctggacttgtgaatgtgatagataaaagtag

SEQ ID NO: 38115 - DNA, 80 bp, synthetic construct
  source 1..80: mol_type = other DNA
tataaaaagaaataagagcagtatctagtttgtagagttgaagcgaagctctcagaaagggacaatacagtgcttggcaa

SEQ ID NO: 38116 - DNA, 80 bp, synthetic construct; identical to SEQ ID NO: 13409
  source 1..80: mol_type = other DNA

SEQ ID NO: 38117 - DNA, 80 bp, synthetic construct
  source 1..80: mol_type = other DNA
gggcagtttttaatgtcaatgtaagcctgcatcccagctgagttaggacagaaagacaatgaaataactcaagagaagaa

SEQ ID NO: 38118 - DNA, 80 bp, synthetic construct
  source 1..80: mol_type = other DNA
gaggaggggttagggaaaaaatttggaaagattccctttatttcttcttgagcaggcaaatttctaataatttttaactt

SEQ ID NO: 38119 - DNA, 80 bp, synthetic construct
  source 1..80: mol_type = other DNA
gttacattgttgttttaatattattgggaactctatcttccacggatatcatgatggttttattacttcaaatataattt

SEQ ID NO: 38120 - DNA, 80 bp, synthetic construct; identical to SEQ ID NO: 13410
  source 1..80: mol_type = other DNA

SEQ ID NO: 38121 - DNA, 80 bp, synthetic construct
  source 1..80: mol_type = other DNA
tgcttctgtaaatttgcagtttgtcttgtgctagcatctaggtcttttttgcatatgaagtaacccgaagaaagaatatc

SEQ ID NO: 38122 - DNA, 80 bp, synthetic construct
  source 1..80: mol_type = other DNA
cccaaagagcaagttataaatctaagagcaaaatatctaagtttggttgttaggaactgaggaaagtttgtctgcggtgc

SEQ ID NO: 38123 - DNA, 80 bp, synthetic construct
  source 1..80: mol_type = other DNA
aggagagtttcttgccttgcaaatgttttggggtgagagaagatatgatccactttccctctgggcccacagtcatattt

SEQ ID NO: 38124 - DNA, 80 bp, synthetic construct; identical to SEQ ID NO: 13411
  source 1..80: mol_type = other DNA

SEQ ID NO: 38125 - DNA, 80 bp, synthetic construct
  source 1..80: mol_type = other DNA
atggtggatgtgaactcaaaaacacagggattgctaaaggattaggccaagaagggaaccaagaaggtaaccgactgttc

SEQ ID NO: 38126 - DNA, 80 bp, synthetic construct
  source 1..80: mol_type = other DNA
agctctctagctgtagtggtcgaagctctgcctaagggaagaagatgtgaagatgatatgaggattttcaattgttattt
